United States Patent Application Publication US 2008/0113351 A1 - sequence listing, part 12

SEQ ID NO: 277632 - DNA, 19 bp, Homo sapiens
  siRNA target sequence for C1orf2 (NM_006589.2,2117-2135).
ctgacttcagggaccttta

SEQ ID NO: 277633 - DNA, 19 bp, Homo sapiens
  siRNA target sequence for C1orf24 (NM_022083.1,998-1016).
ccctggttcagcatcaagt

SEQ ID NO: 277634 - DNA, 19 bp, Homo sapiens
  siRNA target sequence for C1orf24 (NM_022083.1,1088-1106).
ctgacatggatcagattgt

SEQ ID NO: 277635 - DNA, 19 bp, Homo sapiens
  siRNA target sequence for C1orf24 (NM_022083.1,1096-1114).
gatcagattgtgaactcaa

SEQ ID NO: 277636 - DNA, 19 bp, Homo sapiens
  siRNA target sequence for C1orf24 (NM_022083.1,1233-1251).
ctcgggattcagtgaagta

SEQ ID NO: 277637 - DNA, 19 bp, Homo sapiens
  siRNA target sequence for C1orf24 (NM_022083.1,1244-1262).
gtgaagtacgtgtactctt

SEQ ID NO: 277638 - DNA, 19 bp, Homo sapiens
  siRNA target sequence for C1orf24 (NM_022083.1,1330-1348).
catctagaccggcttatga

SEQ ID NO: 277639 - DNA, 19 bp, Homo sapiens
  siRNA target sequence for C1orf24 (NM_022083.1,1371-1389).
gatggaaccttgttatact

SEQ ID NO: 277640 - DNA, 19 bp, Homo sapiens
  siRNA target sequence for C1orf24 (NM_022083.1,1374-1392).
ggaaccttgttatactaaa

SEQ ID NO: 277641 - DNA, 19 bp, Homo sapiens
  siRNA target sequence for C1orf24 (NM_022083.1,1423-1441).
ctcaagagccgcttcagat

SEQ ID NO: 277642 - DNA, 19 bp, Homo sapiens
  siRNA target sequence for C1orf24 (NM_022083.1,1437-1455).
cagattcccccacattgat

SEQ ID NO: 277643 - DNA, 19 bp, Homo sapiens
  siRNA target sequence for C1orf24 (NM_022083.1,1439-1457).
gattcccccacattgatct

SEQ ID NO: 277644 - DNA, 19 bp, Homo sapiens
  siRNA target sequence for C1orf24 (NM_022083.1,1500-1518).
gaatgcagtgttcactttt

SEQ ID NO: 277645 - DNA, 19 bp, Homo sapiens
  siRNA target sequence for C1orf24 (NM_022083.1,1581-1599).
ggttaaactccgagtctta

SEQ ID NO: 277646 - DNA, 19 bp, Homo sapiens
  siRNA target sequence for C1orf24 (NM_022083.1,1582-1600).
gttaaactccgagtcttaa

SEQ ID NO: 277647 - DNA, 19 bp, Homo sapiens
  siRNA target sequence for C1orf24 (NM_022083.1,1590-1608).
ccgagtcttaaagcaatat

SEQ ID NO: 277648 - DNA, 19 bp, Homo sapiens
  siRNA target sequence for C1orf24 (NM_022083.1,1594-1612).
gtcttaaagcaatatgatt

SEQ ID NO: 277649 - DNA, 19 bp, Homo sapiens
  siRNA target sequence for C1orf24 (NM_022083.1,1623-1641).
caccatccgaaagaagata

SEQ ID NO: 277650 - DNA, 19 bp, Homo sapiens
  siRNA target sequence for C1orf24 (NM_022083.1,1625-1643).
ccatccgaaagaagatatt

SEQ ID NO: 277651 - DNA, 19 bp, Homo sapiens
  siRNA target sequence for C1orf24 (NM_022083.1,1645-1663).
caagaggcactagttcaaa

SEQ ID NO: 277652 - DNA, 19 bp, Homo sapiens
  siRNA target sequence for C1orf24 (NM_022083.1,1648-1666).
gaggcactagttcaaatca

SEQ ID NO: 277653 - DNA, 19 bp, Homo sapiens
  siRNA target sequence for C1orf24 (NM_022083.1,1709-1727).
cagagcttcagaaatacga

SEQ ID NO: 277654 - DNA, 19 bp, Homo sapiens
  siRNA target sequence for C1orf24 (NM_022083.1,1795-1813).
cagatcctgcttgatgaaa

SEQ ID NO: 277655 - DNA, 19 bp, Homo sapiens
  siRNA target sequence for C1orf24 (NM_022083.1,1837-1855).
gctatcttgaagaaacaca

SEQ ID NO: 277656 - DNA, 19 bp, Homo sapiens
  siRNA target sequence for C1orf24 (NM_022083.1,1888-1906).
gaaagtgtgtccagcttaa

SEQ ID NO: 277657 - DNA, 19 bp, Homo sapiens
  siRNA target sequence for C1orf24 (NM_022083.1,1892-1910).
gtgtgtccagcttaacaga

SEQ ID NO: 277658 - DNA, 19 bp, Homo sapiens
  siRNA target sequence for C1orf24 (NM_022083.1,1896-1914).
gtccagcttaacagatcta

SEQ ID NO: 277659 - DNA, 19 bp, Homo sapiens
  siRNA target sequence for C1orf24 (NM_022083.1,1985-2003).
gtagtgagaccctcagtaa

SEQ ID NO: 277660 - DNA, 19 bp, Homo sapiens
  siRNA target sequence for C1orf24 (NM_022083.1,2108-2126).
ggactgagcaggtgattat

SEQ ID NO: 277661 - DNA, 19 bp, Homo sapiens
  siRNA target sequence for C1orf24 (NM_022083.1,2109-2127).
gactgagcaggtgattatt

SEQ ID NO: 277662 - DNA, 19 bp, Homo sapiens
  siRNA target sequence for C1orf24 (NM_022083.1,2113-2131).
gagcaggtgattatttcaa

SEQ ID NO: 277663 - DNA, 19 bp, Homo sapiens
  siRNA target sequence for C1orf24 (NM_022083.1,2369-2387).
gccacgttccccaagaaaa

SEQ ID NO: 277664 - DNA, 19 bp, Homo sapiens
  siRNA target sequence for C1orf24 (NM_022083.1,2370-2388).
ccacgttccccaagaaaat

SEQ ID NO: 277665 - DNA, 19 bp, Homo sapiens
  siRNA target sequence for C1orf24 (NM_022083.1,2680-2698).
gagggctgcaccttaggtt

SEQ ID NO: 277666 - DNA, 19 bp, Homo sapiens
  siRNA target sequence for C1orf24 (NM_022083.1,2805-2823).
caaggtagcccgtattcat

SEQ ID NO: 277667 - DNA, 19 bp, Homo sapiens
  siRNA target sequence for C1orf24 (NM_022083.1,2865-2883).
cctgctgtcacacaaagat

SEQ ID NO: 277668 - DNA, 19 bp, Homo sapiens
  siRNA target sequence for C1orf24 (NM_052966.1,323-341).
cgtgcgcactgaagtagaa

SEQ ID NO: 277669 - DNA, 19 bp, Homo sapiens
  siRNA target sequence for C1orf24 (NM_052966.1,449-467).
gtggaaggagagatacgtt

SEQ ID NO: 277670 - DNA, 19 bp, Homo sapiens
  siRNA target sequence for C1orf24 (NM_052966.1,460-478).
gatacgttgtagttaaaaa

SEQ ID NO: 277671 - DNA, 19 bp, Homo sapiens
  siRNA target sequence for C1orf24 (NM_052966.1,464-482).
cgttgtagttaaaaatgat

SEQ ID NO: 277672 - DNA, 19 bp, Homo sapiens
  siRNA target sequence for C1orf24 (NM_052966.1,491-509).
ggagagctatgagaataaa

SEQ ID NO: 277673 - DNA, 19 bp, Homo sapiens
  siRNA target sequence for C1orf24 (NM_052966.1,532-550).
ctcctaaatgtcgaattct

SEQ ID NO: 277674 - DNA, 19 bp, Homo sapiens
  siRNA target sequence for C1orf24 (NM_052966.1,555-573).
gccggtggcaaggtgttaa

SEQ ID NO: 277675 - DNA, 19 bp, Homo sapiens
  siRNA target sequence for C1orf24 (NM_052966.1,558-576).
ggtggcaaggtgttaacct

SEQ ID NO: 277676 - DNA, 19 bp, Homo sapiens
  siRNA target sequence for C1orf24 (NM_052966.1,566-584).
ggtgttaacctcagaagat

SEQ ID NO: 277677 - DNA, 19 bp, Homo sapiens
  siRNA target sequence for C1orf24 (NM_052966.1,569-587).
gttaacctcagaagatgaa

SEQ ID NO: 277678 - DNA, 19 bp, Homo sapiens
  siRNA target sequence for C1orf24 (NM_052966.1,690-708).
ctgtggcagcccttcttca

SEQ ID NO: 277679 - DNA, 19 bp, Homo sapiens
  siRNA target sequence for C1orf24 (NM_052966.1,738-756).
gctgaccagaagaggttta

SEQ ID NO: 277680 - DNA, 19 bp, Homo sapiens
  siRNA target sequence for C1orf24 (NM_052966.1,773-791).
ctgcgtcaggcatctcaat

SEQ ID NO: 277681 - DNA, 19 bp, Homo sapiens
  siRNA target sequence for C1orf24 (NM_052966.1,775-793).
gcgtcaggcatctcaatca

SEQ ID NO: 277682 - DNA, 19 bp, Homo sapiens
  siRNA target sequence for C1orf24 (NM_052966.1,776-794).
cgtcaggcatctcaatcat

SEQ ID NO: 277683 - DNA, 19 bp, Homo sapiens
  siRNA target sequence for C1orf24 (NM_052966.1,783-801).
catctcaatcatgattaca

SEQ ID NO: 277684 - DNA, 19 bp, Homo sapiens
  siRNA target sequence for C1orf24 (NM_052966.1,786-804).
ctcaatcatgattacatga

SEQ ID NO: 277685 - DNA, 19 bp, Homo sapiens
  siRNA target sequence for C20orf10 (NM_014477.2,193-211).
cgtctgagaacggtgttaa

SEQ ID NO: 277686 - DNA, 19 bp, Homo sapiens
  siRNA target sequence for C20orf10 (NM_014477.2,194-212).
gtctgagaacggtgttaaa

SEQ ID NO: 277687 - DNA, 19 bp, Homo sapiens
  siRNA target sequence for C20orf10 (NM_014477.2,221-239).
cgctcttgaagctactcaa

SEQ ID NO: 277688 - DNA, 19 bp, Homo sapiens
  siRNA target sequence for C20orf10 (NM_014477.2,254-272).
ggatccaagaactgcataa

SEQ ID NO: 277689 - DNA, 19 bp, Homo sapiens
  siRNA target sequence for C20orf10 (NM_014477.2,268-286).
cataagctggccaaaaggt

SEQ ID NO: 277690 - DNA, 19 bp, Homo sapiens
  siRNA target sequence for C20orf10 (NM_014477.2,439-457).
gaccctaagaaaaaagagt

SEQ ID NO: 277691 - DNA, 19 bp, Homo sapiens
  siRNA target sequence for C20orf10 (NM_014477.2,520-538).
gcaatgccacggaaagaaa

SEQ ID NO: 277692 - DNA, 19 bp, Homo sapiens
  siRNA target sequence for C20orf10 (NM_014477.2,527-545).
cacggaaagaaaagcatat

SEQ ID NO: 277693 - DNA, 19 bp, Homo sapiens
  siRNA target sequence for C20orf10 (NM_014477.2,566-584).
catcgagggatgatagctt

SEQ ID NO: 277694 - DNA, 19 bp, Homo sapiens
  siRNA target sequence for C20orf10 (NM_014477.2,626-644).
cccgagtcatcttcattaa

SEQ ID NO: 277695 - DNA, 19 bp, Homo sapiens
  siRNA target sequence for C20orf10 (NM_014477.2,645-663).
gccctaccgcaatagaact

SEQ ID NO: 277696 - DNA, 19 bp, Homo sapiens
  siRNA target sequence for C20orf10 (NM_014477.2,804-822).
cttctgctccgcatcactt

SEQ ID NO: 277697 - DNA, 19 bp, Homo sapiens
  siRNA target sequence for C20orf10 (NM_014477.2,807-825).
ctgctccgcatcacttgaa

SEQ ID NO: 277698 - DNA, 19 bp, Homo sapiens
  siRNA target sequence for C20orf10 (NM_014477.2,809-827).
gctccgcatcacttgaaat

SEQ ID NO: 277699 - DNA, 19 bp, Homo sapiens
  siRNA target sequence for C20orf10 (NM_014477.2,830-848).
ctatgtggcatccatacaa

SEQ ID NO: 277700 - DNA, 19 bp, Homo sapiens
  siRNA target sequence for C20orf10 (NM_014477.2,921-939).
gaatgggtggcgaaattca

SEQ ID NO: 277701 - DNA, 19 bp, Homo sapiens
  siRNA target sequence for C20orf10 (NM_014477.2,932-950).
gaaattcacgagtctacaa

SEQ ID NO: 277702 - DNA, 19 bp, Homo sapiens
  siRNA target sequence for C21orf33 (NM_004649.4,382-400).
ggcgagagcaggaatgttt

SEQ ID NO: 277703 - DNA, 19 bp, Homo sapiens
  siRNA target sequence for C21orf33 (NM_004649.4,385-403).
gagagcaggaatgttttga

SEQ ID NO: 277704 - DNA, 19 bp, Homo sapiens
  siRNA target sequence for C21orf33 (NM_004649.4,416-434).
ggatcgcccgtggcaaaat

SEQ ID NO: 277705 - DNA, 19 bp, Homo sapiens
  siRNA target sequence for C21orf33 (NM_004649.4,420-438).
cgcccgtggcaaaatcaca

SEQ ID NO: 277706 - DNA, 19 bp, Homo sapiens
  siRNA target sequence for C21orf33 (NM_004649.4,490-508).
ggctttggagcggctaaaa

SEQ ID NO: 277707 - DNA, 19 bp, Homo sapiens
  siRNA target sequence for C21orf33 (NM_004649.4,491-509).
gctttggagcggctaaaaa

SEQ ID NO: 277708 - DNA, 19 bp, Homo sapiens
  siRNA target sequence for C21orf33 (NM_004649.4,523-541).
gccgtggacgggaaagatt

SEQ ID NO: 277709 - DNA, 19 bp, Homo sapiens
  siRNA target sequence for C21orf33 (NM_004649.4,766-784).
gctcacgtggaccagaaaa

SEQ ID NO: 277710 - DNA, 19 bp, Homo sapiens
  siRNA target sequence for C21orf45 (NM_018944.1,386-404).
ggaacagaagctatccaaa

SEQ ID NO: 277711 - DNA, 19 bp, Homo sapiens
  siRNA target sequence for C21orf45 (NM_018944.1,421-439).
gttgcgtccttgagacttt

SEQ ID NO: 277712 - DNA, 19 bp, Homo sapiens
  siRNA target sequence for C21orf45 (NM_018944.1,449-467).
ggggtgctcactcaatctt

SEQ ID NO: 277713 - DNA, 19 bp, Homo sapiens
  siRNA target sequence for C21orf45 (NM_018944.1,465-483).
cttggctacgtgtacagat

SEQ ID NO: 277714 - DNA, 19 bp, Homo sapiens
  siRNA target sequence for C21orf45 (NM_018944.1,481-499).
gatgcacgcccaagaatct

SEQ ID NO: 277715 - DNA, 19 bp, Homo sapiens
  siRNA target sequence for C21orf45 (NM_018944.1,484-502).
gcacgcccaagaatcttga

SEQ ID NO: 277716 - DNA, 19 bp, Homo sapiens
  siRNA target sequence for C21orf45 (NM_018944.1,485-503).
cacgcccaagaatcttgat

SEQ ID NO: 277717 - DNA, 19 bp, Homo sapiens
  siRNA target sequence for C21orf45 (NM_018944.1,572-590).
gcaaattgtgtcagaagat

SEQ ID NO: 277718 - DNA, 19 bp, Homo sapiens
  siRNA target sequence for C21orf45 (NM_018944.1,680-698).
gtgggaggccgaatccaaa

SEQ ID NO: 277719 - DNA, 19 bp, Homo sapiens
  siRNA target sequence for C21orf5 (NM_005128.1,132-150).
gctactcttcagtgattga

SEQ ID NO: 277720 - DNA, 19 bp, Homo sapiens
  siRNA target sequence for C21orf5 (NM_005128.1,180-198).
gtgaatgggcggatctcat

SEQ ID NO: 277721 - DNA, 19 bp, Homo sapiens
  siRNA target sequence for C21orf5 (NM_005128.1,263-281).
cggctcctcatcagcaaaa

SEQ ID NO: 277722 - DNA, 19 bp, Homo sapiens
  siRNA target sequence for C21orf5 (NM_005128.1,271-289).
catcagcaaaagattagct

SEQ ID NO: 277723 - DNA, 19 bp, Homo sapiens
  siRNA target sequence for C21orf5 (NM_005128.1,313-331).
cagtggtgtccacttaaaa

SEQ ID NO: 277724 - DNA, 19 bp, Homo sapiens
  siRNA target sequence for C21orf5 (NM_005128.1,338-356).
gaaacctacgagattatct

SEQ ID NO: 277725 - DNA, 19 bp, Homo sapiens
  siRNA target sequence for C21orf5 (NM_005128.1,400-418).
gtacagctgcgggttattt

SEQ ID NO: 277726 - DNA, 19 bp, Homo sapiens
  siRNA target sequence for C21orf5 (NM_005128.1,465-483).
ccctgtacgagaagtactt

SEQ ID NO: 277727 - DNA, 19 bp, Homo sapiens
  siRNA target sequence for C21orf5 (NM_005128.1,758-776).
caactcacggtgaagtctt

SEQ ID NO: 277728 - DNA, 19 bp, Homo sapiens
  siRNA target sequence for C21orf5 (NM_005128.1,784-802).
ctccctgttggactcaaat

SEQ ID NO: 277729 - DNA, 19 bp, Homo sapiens
  siRNA target sequence for C21orf5 (NM_005128.1,982-1000).
gttactaggctcagacata

SEQ ID NO: 277730 - DNA, 19 bp, Homo sapiens
  siRNA target sequence for C21orf5 (NM_005128.1,1012-1030).
cgttgtgccagaatctgaa

SEQ ID NO: 277731 - DNA, 19 bp, Homo sapiens
  siRNA target sequence for C21orf5 (NM_005128.1,1026-1044).
ctgaaatctcaaattctta

SEQ ID NO: 277732 - DNA, 19 bp, Homo sapiens
  siRNA target sequence for C21orf5 (NM_005128.1,1054-1072).
gtcgtcttatttttttgaa

SEQ ID NO: 277733 - DNA, 19 bp, Homo sapiens
  siRNA target sequence for C21orf5 (NM_005128.1,1080-1098).
ccaaggatcttttagttga

SEQ ID NO: 277734 - DNA, 19 bp, Homo sapiens
  siRNA target sequence for C21orf5 (NM_005128.1,1249-1267).
catcagggccttttattct

SEQ ID NO: 277735 - DNA, 19 bp, Homo sapiens
  siRNA target sequence for C21orf5 (NM_005128.1,1326-1344).
cgctgataagtgcaatcaa

SEQ ID NO: 277736 - DNA, 19 bp, Homo sapiens
  siRNA target sequence for C21orf5 (NM_005128.1,1366-1384).
gattgtcaaaacggtaaat

SEQ ID NO: 277737 - DNA, 19 bp, Homo sapiens
  siRNA target sequence for C21orf5 (NM_005128.1,1379-1397).
gtaaatttgctgataactt

SEQ ID NO: 277738 - DNA, 19 bp, Homo sapiens
  siRNA target sequence for C21orf5 (NM_005128.1,1434-1452).
ggtgttttgaggaatgctt

SEQ ID NO: 277739 - DNA, 19 bp, Homo sapiens
  siRNA target sequence for C21orf5 (NM_005128.1,1543-1561).
ggatgtcattcctttggaa

SEQ ID NO: 277740 - DNA, 19 bp, Homo sapiens
  siRNA target sequence for C21orf5 (NM_005128.1,1631-1649).
gacatggaggccttaagtt

SEQ ID NO: 277741 - DNA, 19 bp, Homo sapiens
  siRNA target sequence for C21orf5 (NM_005128.1,1636-1654).
ggaggccttaagtttacct

SEQ ID NO: 277742 - DNA, 19 bp, Homo sapiens
  siRNA target sequence for C21orf5 (NM_005128.1,1658-1676).
ctcacgcatgccttgaaga

SEQ ID NO: 277743 - DNA, 19 bp, Homo sapiens
  siRNA target sequence for C21orf5 (NM_005128.1,1667-1685).
gccttgaagacgtgtttca

SEQ ID NO: 277744 - DNA, 19 bp, Homo sapiens
  siRNA target sequence for C21orf5 (NM_005128.1,1743-1761).
gaacctcgagtccagtaaa

SEQ ID NO: 277745 - DNA, 19 bp, Homo sapiens
  siRNA target sequence for C21orf5 (NM_005128.1,1747-1765).
ctcgagtccagtaaaaggt

SEQ ID NO: 277746 - DNA, 19 bp, Homo sapiens
  siRNA target sequence for C21orf5 (NM_005128.1,1763-1781).
ggtgaaaacggcaaaataa

SEQ ID NO: 277747 - DNA, 19 bp, Homo sapiens
  siRNA target sequence for C21orf5 (NM_005128.1,1764-1782).
gtgaaaacggcaaaataat

SEQ ID NO: 277748 - DNA, 19 bp, Homo sapiens
  siRNA target sequence for C21orf5 (NM_005128.1,1766-1784).
gaaaacggcaaaataattt

SEQ ID NO: 277749 - DNA, 19 bp, Homo sapiens
  siRNA target sequence for C21orf5 (NM_005128.1,1899-1917).
gggttcctcgagtttctct

SEQ ID NO: 277750 - DNA, 19 bp, Homo sapiens
  siRNA target sequence for C21orf5 (NM_005128.1,2026-2044).
gacagcgtcaggagaagaa

SEQ ID NO: 277751 - DNA, 19 bp, Homo sapiens
  siRNA target sequence for C21orf5 (NM_005128.1,2092-2110).
gagcctggcagccaatgat

SEQ ID NO: 277752 - DNA, 19 bp, Homo sapiens
  siRNA target sequence for C21orf5 (NM_005128.1,2190-2208).
cacgagggtctccattcaa

SEQ ID NO: 277753 - DNA, 19 bp, Homo sapiens
  siRNA target sequence for C21orf5 (NM_005128.1,2192-2210).
cgagggtctccattcaaga

SEQ ID NO: 277754 - DNA, 19 bp, Homo sapiens
  siRNA target sequence for C21orf5 (NM_005128.1,2195-2213).
gggtctccattcaagacaa

SEQ ID NO: 277755 - DNA, 19 bp, Homo sapiens
  siRNA target sequence for C21orf5 (NM_005128.1,2196-2214).
ggtctccattcaagacaaa

SEQ ID NO: 277756 - DNA, 19 bp, Homo sapiens
  siRNA target sequence for C21orf5 (NM_005128.1,2268-2286).
gagaatgggatgttgagaa

SEQ ID NO: 277757 - DNA, 19 bp, Homo sapiens
  siRNA target sequence for C21orf5 (NM_005128.1,2440-2458).
cggtgattccagttttcca

SEQ ID NO: 277758 - DNA, 19 bp, Homo sapiens
  siRNA target sequence for C21orf5 (NM_005128.1,2467-2485).
gaagtccctcatgactatt

SEQ ID NO: 277759 - DNA, 19 bp, Homo sapiens
  siRNA target sequence for C21orf5 (NM_005128.1,2530-2548).
cactctgctggaagtgata

SEQ ID NO: 277760 - DNA, 19 bp, Homo sapiens
  siRNA target sequence for C21orf5 (NM_005128.1,2536-2554).
gctggaagtgataaaccat

SEQ ID NO: 277761 - DNA, 19 bp, Homo sapiens
  siRNA target sequence for C21orf5 (NM_005128.1,2563-2581).
cctggcgcttgtcattgaa

SEQ ID NO: 277762 - DNA, 19 bp, Homo sapiens
  siRNA target sequence for C21orf5 (NM_005128.1,2655-2673).
ccattgctccagggatatt

SEQ ID NO: 277763 - DNA, 19 bp, Homo sapiens
  siRNA target sequence for C21orf5 (NM_005128.1,2664-2682).
cagggatattgaaagtcat

SEQ ID NO: 277764 - DNA, 19 bp, Homo sapiens
  siRNA target sequence for C21orf5 (NM_005128.1,2759-2777).
cacgtcacctgcgtagaat

SEQ ID NO: 277765 - DNA, 19 bp, Homo sapiens
  siRNA target sequence for C21orf5 (NM_005128.1,2766-2784).
cctgcgtagaattgttcta

SEQ ID NO: 277766 - DNA, 19 bp, Homo sapiens
  siRNA target sequence for C21orf5 (NM_005128.1,2801-2819).
gcccctacggccaacatct

SEQ ID NO: 277767 - DNA, 19 bp, Homo sapiens
  siRNA target sequence for C21orf5 (NM_005128.1,2870-2888).
ctggaagctctgtttagat

SEQ ID NO: 277768 - DNA, 19 bp, Homo sapiens
  siRNA target sequence for C21orf5 (NM_005128.1,2873-2891).
gaagctctgtttagatttt

SEQ ID NO: 277769 - DNA, 19 bp, Homo sapiens
  siRNA target sequence for C21orf5 (NM_005128.1,2920-2938).
ccaaggcagtcgagtaaca

SEQ ID NO: 277770 - DNA, 19 bp, Homo sapiens
  siRNA target sequence for C21orf5 (NM_005128.1,2921-2939).
caaggcagtcgagtaacat

SEQ ID NO: 277771 - DNA, 19 bp, Homo sapiens
  siRNA target sequence for C21orf5 (NM_005128.1,2942-2960).
cacaatcgctcctttgata

SEQ ID NO: 277772 - DNA, 19 bp, Homo sapiens
  siRNA target sequence for C21orf5 (NM_005128.1,3155-3173).
gacttgcaccgttggttta

SEQ ID NO: 277773 - DNA, 19 bp, Homo sapiens
  siRNA target sequence for C21orf5 (NM_005128.1,3412-3430).
caccgagtctgcagataca

SEQ ID NO: 277774 - DNA, 19 bp, Homo sapiens
  siRNA target sequence for C21orf5 (NM_005128.1,3595-3613).
caaggctggggccaagtta

SEQ ID NO: 277775 - DNA, 19 bp, Homo sapiens
  siRNA target sequence for C21orf5 (NM_005128.1,3702-3720).
ccacatccaggctgctaaa

SEQ ID NO: 277776 - DNA, 19 bp, Homo sapiens
  siRNA target sequence for C21orf5 (NM_005128.1,4057-4075).
ctcctactacccttgctat

SEQ ID NO: 277777 - DNA, 19 bp, Homo sapiens
  siRNA target sequence for C21orf5 (NM_005128.1,4059-4077).
cctactacccttgctattt

SEQ ID NO: 277778 - DNA, 19 bp, Homo sapiens
  siRNA target sequence for C21orf5 (NM_005128.1,4081-4099).
ggtctcgcaccgagacatt

SEQ ID NO: 277779 - DNA, 19 bp, Homo sapiens
  siRNA target sequence for C21orf5 (NM_005128.1,4163-4181).
gtctcagtggccaagtctt

SEQ ID NO: 277780 - DNA, 19 bp, Homo sapiens
  siRNA target sequence for C21orf5 (NM_005128.1,4256-4274).
ctgtcggcgtccatgtaca

SEQ ID NO: 277781 - DNA, 19 bp, Homo sapiens
  siRNA target sequence for C21orf5 (NM_005128.1,4343-4361).
gaggagagtctcattaact

SEQ ID NO: 277782 - DNA, 19 bp, Homo sapiens
  siRNA target sequence for C21orf5 (NM_005128.1,4500-4518).
ggcagagagccctgaactt

SEQ ID NO: 277783 - DNA, 19 bp, Homo sapiens
  siRNA target sequence for C21orf5 (NM_005128.1,4693-4711).
gacggtgacaccctttgtt

SEQ ID NO: 277784 - DNA, 19 bp, Homo sapiens
  siRNA target sequence for C21orf5 (NM_005128.1,4695-4713).
cggtgacaccctttgttgt

SEQ ID NO: 277785 - DNA, 19 bp, Homo sapiens
  siRNA target sequence for C21orf5 (NM_005128.1,4703-4721).
ccctttgttgtccagattt

SEQ ID NO: 277786 - DNA, 19 bp, Homo sapiens
  siRNA target sequence for C21orf5 (NM_005128.1,4712-4730).
gtccagatttgcaaaaact

SEQ ID NO: 277787 - DNA, 19 bp, Homo sapiens
  siRNA target sequence for C21orf5 (NM_005128.1,4788-4806).
cctccaagagggaaaacat

SEQ ID NO: 277788 - DNA, 19 bp, Homo sapiens
  siRNA target sequence for C21orf5 (NM_005128.1,4835-4853).
gaaggtctaacgaccatta

SEQ ID NO: 277789 - DNA, 19 bp, Homo sapiens
  siRNA target sequence for C21orf5 (NM_005128.1,4839-4857).
gtctaacgaccattagtca

SEQ ID NO: 277790 - DNA, 19 bp, Homo sapiens
  siRNA target sequence for C21orf5 (NM_005128.1,4841-4859).
ctaacgaccattagtcatt

SEQ ID NO: 277791 - DNA, 19 bp, Homo sapiens
  siRNA target sequence for C21orf5 (NM_005128.1,4952-4970).
gagctgcctcgaactgtta

SEQ ID NO: 277792 - DNA, 19 bp, Homo sapiens
  siRNA target sequence for C21orf5 (NM_005128.1,4980-4998).
cccttctctggaatgttct

SEQ ID NO: 277793 - DNA, 19 bp, Homo sapiens
  siRNA target sequence for C21orf5 (NM_005128.1,5051-5069).
ggatcctcttccgtttact

SEQ ID NO: 277794 - DNA, 19 bp, Homo sapiens
  siRNA target sequence for C21orf5 (NM_005128.1,5052-5070).
gatcctcttccgtttactt

SEQ ID NO: 277795 - DNA, 19 bp, Homo sapiens
  siRNA target sequence for C21orf5 (NM_005128.1,5056-5074).
ctcttccgtttactttaaa

SEQ ID NO: 277796 - DNA, 19 bp, Homo sapiens
  siRNA target sequence for C21orf5 (NM_005128.1,5127-5145).
cccatcttggggttcagtt

SEQ ID NO: 277797 - DNA, 19 bp, Homo sapiens
  siRNA target sequence for C21orf5 (NM_005128.1,5183-5201).
gcccagcgtcacagtaaga

SEQ ID NO: 277798 - DNA, 19 bp, Homo sapiens
  siRNA target sequence for C21orf5 (NM_005128.1,5184-5202).
cccagcgtcacagtaagat

SEQ ID NO: 277799 - DNA, 19 bp, Homo sapiens
  siRNA target sequence for C21orf5 (NM_005128.1,5186-5204).
cagcgtcacagtaagatga

SEQ ID NO: 277800 - DNA, 19 bp, Homo sapiens
  siRNA target sequence for C21orf5 (NM_005128.1,5189-5207).
cgtcacagtaagatgaaga

SEQ ID NO: 277801 - DNA, 19 bp, Homo sapiens
  siRNA target sequence for C21orf5 (NM_005128.1,5314-5332).
gaggccaccccaagtcaaa

SEQ ID NO: 277802 - DNA, 19 bp, Homo sapiens
  siRNA target sequence for C21orf5 (NM_005128.1,5366-5384).
cctgtgttgcagttttgct

SEQ ID NO: 277803 - DNA, 19 bp, Homo sapiens
  siRNA target sequence for C21orf5 (NM_005128.1,5367-5385).
ctgtgttgcagttttgcta

SEQ ID NO: 277804 - DNA, 19 bp, Homo sapiens
  siRNA target sequence for C21orf5 (NM_005128.1,5512-5530).
gaatgactttgtaacaaga

SEQ ID NO: 277805 - DNA, 19 bp, Homo sapiens
  siRNA target sequence for C21orf5 (NM_005128.1,5529-5547).
gaactcccaacctggaaaa

SEQ ID NO: 277806 - DNA, 19 bp, Homo sapiens
  siRNA target sequence for C21orf5 (NM_005128.1,5677-5695).
ggcctctctagaagaatct

SEQ ID NO: 277807 - DNA, 19 bp, Homo sapiens
  siRNA target sequence for C21orf5 (NM_005128.1,5809-5827).
cctcctggacatggtttat

SEQ ID NO: 277808 - DNA, 19 bp, Homo sapiens
  siRNA target sequence for C21orf5 (NM_005128.1,5818-5836).
catggtttatcgaagtgat

SEQ ID NO: 277809 - DNA, 19 bp, Homo sapiens
  siRNA target sequence for C21orf5 (NM_005128.1,5867-5885).
cgtctgctttactatgttt

SEQ ID NO: 277810 - DNA, 19 bp, Homo sapiens
  siRNA target sequence for C21orf5 (NM_005128.1,5899-5917).
caaccacagtgcctacaat

SEQ ID NO: 277811 - DNA, 19 bp, Homo sapiens
  siRNA target sequence for C21orf5 (NM_005128.1,6017-6035).
gaccccgctttctttcaga

SEQ ID NO: 277812 - DNA, 19 bp, Homo sapiens
  siRNA target sequence for C21orf5 (NM_005128.1,6050-6068).
gttcattggaagtccatta

SEQ ID NO: 277813 - DNA, 19 bp, Homo sapiens
  siRNA target sequence for C21orf5 (NM_005128.1,6063-6081).
ccattattgaccatctttt

SEQ ID NO: 277814 - DNA, 19 bp, Homo sapiens
  siRNA target sequence for C21orf5 (NM_005128.1,6199-6217).
cagtggagaacttgatcaa

SEQ ID NO: 277815 - DNA, 19 bp, Homo sapiens
  siRNA target sequence for C21orf5 (NM_005128.1,6248-6266).
cgcctgacagacaatctca

SEQ ID NO: 277816 - DNA, 19 bp, Homo sapiens
  siRNA target sequence for C21orf5 (NM_005128.1,6354-6372).
cattgtggccaataatggt

SEQ ID NO: 277817 - DNA, 19 bp, Homo sapiens
  siRNA target sequence for C21orf5 (NM_005128.1,6363-6381).
caataatggtctctgaatt

SEQ ID NO: 277818 - DNA, 19 bp, Homo sapiens
  siRNA target sequence for C21orf5 (NM_005128.1,6377-6395).
gaattgattcagacattca

SEQ ID NO: 277819 - DNA, 19 bp, Homo sapiens
  siRNA target sequence for C21orf5 (NM_005128.1,6390-6408).
cattcacacagcttgaaga

SEQ ID NO: 277820 - DNA, 19 bp, Homo sapiens
  siRNA target sequence for C21orf5 (NM_005128.1,6452-6470).
gtaaacagaacgaaagttt

SEQ ID NO: 277821 - DNA, 19 bp, Homo sapiens
  siRNA target sequence for C21orf5 (NM_005128.1,6514-6532).
gagtgaactcatcttgtat

SEQ ID NO: 277822 - DNA, 19 bp, Homo sapiens
  siRNA target sequence for C21orf5 (NM_005128.1,6516-6534).
gtgaactcatcttgtattt

SEQ ID NO: 277823 - DNA, 19 bp, Homo sapiens
  siRNA target sequence for C21orf5 (NM_005128.1,6575-6593).
cctgacaagatgccattat

SEQ ID NO: 277824 - DNA, 19 bp, Homo sapiens
  siRNA target sequence for C21orf5 (NM_005128.1,6576-6594).
ctgacaagatgccattatt

SEQ ID NO: 277825 - DNA, 19 bp, Homo sapiens
  siRNA target sequence for C21orf5 (NM_005128.1,6645-6663).
ccttcctgtcggatgtaga

SEQ ID NO: 277826 - DNA, 19 bp, Homo sapiens
  siRNA target sequence for C21orf5 (NM_005128.1,6779-6797).
ctgcgccaacattctgttt

SEQ ID NO: 277827 - DNA, 19 bp, Homo sapiens
  siRNA target sequence for C21orf5 (NM_005128.1,6798-6816).
ccagcatcaggcagttgat

SEQ ID NO: 277828 - DNA, 19 bp, Homo sapiens
  siRNA target sequence for C21orf5 (NM_005128.1,6829-6847).
gactctaaatggtgcattt

SEQ ID NO: 277829 - DNA, 19 bp, Homo sapiens
  siRNA target sequence for C21orf5 (NM_005128.1,6911-6929).
gatagcccaaggatcttaa

SEQ ID NO: 277830 - DNA, 19 bp, Homo sapiens
  siRNA target sequence for C21orf5 (NM_005128.1,6935-6953).
ctggaagaatgcatcgaat

SEQ ID NO: 277831 - DNA, 19 bp, Homo sapiens
  siRNA target sequence for C21orf5 (NM_005128.1,6937-6955).
ggaagaatgcatcgaatat

SEQ ID NO: 277832 - DNA, 19 bp, Homo sapiens
  siRNA target sequence for C21orf5 (NM_005128.1,6941-6959).
gaatgcatcgaatatgatt

SEQ ID NO: 277833 - DNA, 19 bp, Homo sapiens
  siRNA target sequence for C21orf51 (NM_058182.2,230-248).
ggggtgaaaatgtatcaaa

SEQ ID NO: 277834 - DNA, 19 bp, Homo sapiens
  siRNA target sequence for C21orf62 (NM_019596.1,220-238).
ggcactgtcttcttctgat

SEQ ID NO: 277835 - DNA, 19 bp, Homo sapiens
  siRNA target sequence for C21orf62 (NM_019596.1,343-361).
cggacatccgggattgtga

SEQ ID NO: 277836 - DNA, 19 bp, Homo sapiens
  siRNA target sequence for C21orf62 (NM_019596.1,351-369).
cgggattgtgactacagtt

SEQ ID NO: 277837 - DNA, 19 bp, Homo sapiens
  siRNA target sequence for C21orf62 (NM_019596.1,352-370).
gggattgtgactacagttt

SEQ ID NO: 277838 - DNA, 19 bp, Homo sapiens
  siRNA target sequence for C21orf62 (NM_019596.1,378-396).
ctgatgtgcaactgtaaaa

SEQ ID NO: 277839 - DNA, 19 bp, Homo sapiens
  siRNA target sequence for C21orf62 (NM_019596.1,609-627).
ccagagcagagcttactca

SEQ ID NO: 277840 - DNA, 19 bp, Homo sapiens
  siRNA target sequence for C21orf62 (NM_019596.1,615-633).
cagagcttactcatccata

SEQ ID NO: 277841 - DNA, 19 bp, Homo sapiens
  siRNA target sequence for C21orf62 (NM_019596.1,662-680).
gcccatgtggttacacaaa

SEQ ID NO: 277842 - DNA, 19 bp, Homo sapiens
  siRNA target sequence for C21orf62 (NM_019596.1,682-700).
gctggcagccatgtatgta

SEQ ID NO: 277843 - DNA, 19 bp, Homo sapiens
  siRNA target sequence for C21orf62 (NM_019596.1,685-703).
ggcagccatgtatgtatat

SEQ ID NO: 277844 - DNA, 19 bp, Homo sapiens
  siRNA target sequence for C21orf62 (NM_019596.1,690-708).
ccatgtatgtatatctcat

SEQ ID NO: 277845 - DNA, 19 bp, Homo sapiens
  siRNA target sequence for C21orf62 (NM_019596.1,731-749).
cagggactcagccttaaat

SEQ ID NO: 277846 - DNA, 19 bp, Homo sapiens
  siRNA target sequence for C21orf62 (NM_019596.1,735-753).
gactcagccttaaatcata

SEQ ID NO: 277847 - DNA, 19 bp, Homo sapiens
  siRNA target sequence for C21orf62 (NM_019596.1,739-757).
cagccttaaatcatatagt

SEQ ID NO: 277848 - DNA, 19 bp, Homo sapiens
  siRNA target sequence for C21orf62 (NM_019596.1,750-768).
catatagtattgaaaacgt

SEQ ID NO: 277849 - DNA, 19 bp, Homo sapiens
  siRNA target sequence for C21orf62 (NM_019596.1,837-855).
gctatgttgtcacatttat

SEQ ID NO: 277850 - DNA, 19 bp, Homo sapiens
  siRNA target sequence for C21orf62 (NM_019596.1,838-856).
ctatgttgtcacatttatt

SEQ ID NO: 277851 - DNA, 19 bp, Homo sapiens
  siRNA target sequence for C21orf62 (NM_019596.1,895-913).
ggcaaatgatgaataattt

SEQ ID NO: 277852 - DNA, 19 bp, Homo sapiens
  siRNA target sequence for C22orf23 (NM_032561.2,473-491).
gtcttaccttccaagcaaa

SEQ ID NO: 277853 - DNA, 19 bp, Homo sapiens
  siRNA target sequence for C22orf23 (NM_032561.2,664-682).
catggaggaacggaaaaga

SEQ ID NO: 277854 - DNA, 19 bp, Homo sapiens
  siRNA target sequence for C22orf23 (NM_032561.2,717-735).
ctgagctagaccgatttga

SEQ ID NO: 277855 - DNA, 19 bp, Homo sapiens
  siRNA target sequence for C22orf23 (NM_032561.2,841-859).
gaaactccgggaaatggaa

SEQ ID NO: 277856 - DNA, 19 bp, Homo sapiens
  siRNA target sequence for C2F (NM_006331.3,164-182).
gactaggggcaggaaacaa

SEQ ID NO: 277857 - DNA, 19 bp, Homo sapiens
  siRNA target sequence for C2F (NM_006331.3,166-184).
ctaggggcaggaaacaaga

SEQ ID NO: 277858 - DNA, 19 bp, Homo sapiens
  siRNA target sequence for C2F (NM_006331.3,235-253).
gtcaaggtagggaagacat

SEQ ID NO: 277859 - DNA, 19 bp, Homo sapiens
  siRNA target sequence for C2F (NM_006331.3,237-255).
caaggtagggaagacatat

SEQ ID NO: 277860 - DNA, 19 bp, Homo sapiens
  siRNA target sequence for C2F (NM_006331.3,271-289).
gacaagcacaagtctatat

SEQ ID NO: 277861 - DNA, 19 bp, Homo sapiens
  siRNA target sequence for C2F (NM_006331.3,277-295).
cacaagtctatattgttga

SEQ ID NO: 277862 - DNA, 19 bp, Homo sapiens
  siRNA target sequence for C2F (NM_006331.3,383-401).
gcttgctacaggtttatat

SEQ ID NO: 277863 - DNA, 19 bp, Homo sapiens
  siRNA target sequence for C2F (NM_006331.3,444-462).
ccgaattcccagaaccttt

SEQ ID NO: 277864 - DNA, 19 bp, Homo sapiens
  siRNA target sequence for C2F (NM_006331.3,476-494).
gcctcatggttcaactttt

SEQ ID NO: 277865 - DNA, 19 bp, Homo sapiens
  siRNA target sequence for C2F (NM_006331.3,644-662).
ccagcagtgatcctattgt

SEQ ID NO: 277866 - DNA, 19 bp, Homo sapiens
  siRNA target sequence for C2F (NM_006331.3,752-770).
ccctcacctgtgcaaaact

SEQ ID NO: 277867 - DNA, 19 bp, Homo sapiens
  siRNA target sequence for C40 (NM_017546.3,256-274).
gagcctgctgagcatcata

SEQ ID NO: 277868 - DNA, 19 bp, Homo sapiens
  siRNA target sequence for C40 (NM_017546.3,552-570).
ctccgctctcaggattttt

SEQ ID NO: 277869 - DNA, 19 bp, Homo sapiens
  siRNA target sequence for C40 (NM_017546.3,556-574).
gctctcaggatttttacct

SEQ ID NO: 277870 - DNA, 19 bp, Homo sapiens
  siRNA target sequence for C40 (NM_017546.3,563-581).
ggatttttacctcctataa

SEQ ID NO: 277871 - DNA, 19 bp, Homo sapiens
  siRNA target sequence for C40 (NM_017546.3,621-639).
cacccccacgggaactctt

SEQ ID NO: 277872 - DNA, 19 bp, Homo sapiens
  siRNA target sequence for C40 (NM_017546.3,624-642).
ccccacgggaactcttcaa

SEQ ID NO: 277873 - DNA, 19 bp, Homo sapiens
  siRNA target sequence for C40 (NM_017546.3,688-706).
ccagtctgtggacattagt

SEQ ID NO: 277874 - DNA, 19 bp, Homo sapiens
  siRNA target sequence for C40 (NM_017546.3,724-742).
ggccgaacgccaatctgaa

SEQ ID NO: 277875 - DNA, 19 bp, Homo sapiens
  siRNA target sequence for C40 (NM_017546.3,725-743).
gccgaacgccaatctgaat

SEQ ID NO: 277876 - DNA, 19 bp, Homo sapiens
  siRNA target sequence for C40 (NM_017546.3,726-744).
ccgaacgccaatctgaatt

SEQ ID NO: 277877 - DNA, 19 bp, Homo sapiens
  siRNA target sequence for C40 (NM_017546.3,762-780).
cgagcttccccagtattct

SEQ ID NO: 277878 - DNA, 19 bp, Homo sapiens
  siRNA target sequence for C40 (NM_017546.3,785-803).
gacccagacccggattctt

SEQ ID NO: 277879 - DNA, 19 bp, Homo sapiens
  siRNA target sequence for C40 (NM_017546.3,788-806).
ccagacccggattcttcta

SEQ ID NO: 277880 - DNA, 19 bp, Homo sapiens
  siRNA target sequence for C40 (NM_017546.3,789-807).
cagacccggattcttctaa

SEQ ID NO: 277881 - DNA, 19 bp, Homo sapiens
  siRNA target sequence for C40 (NM_017546.3,791-809).
gacccggattcttctaatt

SEQ ID NO: 277882 - DNA, 19 bp, Homo sapiens
  siRNA target sequence for C40 (NM_017546.3,793-811).
cccggattcttctaattct

SEQ ID NO: 277883 - DNA, 19 bp, Homo sapiens
  siRNA target sequence for C40 (NM_017546.3,859-877).
cggaccaaagccacctatt

SEQ ID NO: 277884 - DNA, 19 bp, Homo sapiens
  siRNA target sequence for C40 (NM_017546.3,915-933).
ctccactccacatttgtga

SEQ ID NO: 277885 - DNA, 19 bp, Homo sapiens
  siRNA target sequence for C40 (NM_017546.3,973-991).
cgcgatccagtgggataaa

SEQ ID NO: 277886 - DNA, 19 bp, Homo sapiens
  siRNA target sequence for C40 (NM_017546.3,974-992).
gcgatccagtgggataaat

SEQ ID NO: 277887 - DNA, 19 bp, Homo sapiens
  siRNA target sequence for C40 (NM_017546.3,986-1004).
gataaatcgatgtgtgtta

SEQ ID NO: 277888 - DNA, 19 bp, Homo sapiens
  siRNA target sequence for C40 (NM_017546.3,1016-1034).
ggtgtggagatcaaacgaa

SEQ ID NO: 277889 - DNA, 19 bp, Homo sapiens
  siRNA target sequence for C40 (NM_017546.3,1017-1035).
gtgtggagatcaaacgaat

SEQ ID NO: 277890 - DNA, 19 bp, Homo sapiens
  siRNA target sequence for C40 (NM_017546.3,1110-1128).
ccaaacttgtctaccatat

SEQ ID NO: 277891 - DNA, 19 bp, Homo sapiens
  siRNA target sequence for C40 (NM_017546.3,1132-1150).
cctcaccccagccaaactt

SEQ ID NO: 277892 - DNA, 19 bp, Homo sapiens
  siRNA target sequence for C40 (NM_017546.3,1171-1189).
ccctttagtcgctatagaa

SEQ ID NO: 277893 - DNA, 19 bp, Homo sapiens
  siRNA target sequence for C40 (NM_017546.3,1172-1190).
cctttagtcgctatagaaa

SEQ ID NO: 277894 - DNA, 19 bp, Homo sapiens
  siRNA target sequence for C40 (NM_017546.3,1173-1191).
ctttagtcgctatagaaat

SEQ ID NO: 277895 - DNA, 19 bp, Homo sapiens
  siRNA target sequence for C40 (NM_017546.3,1244-1262).
gtcaatatggacatgtctt

SEQ ID NO: 277896 - DNA, 19 bp, Homo sapiens
  siRNA target sequence for C40 (NM_017546.3,1277-1295).
gttgtaaatcgactaacta

SEQ ID NO: 277897 - DNA, 19 bp, Homo sapiens
  siRNA target sequence for C40 (NM_017546.3,1304-1322).
gatctacctcctgaattta

SEQ ID NO: 277898 - DNA, 19 bp, Homo sapiens
  siRNA target sequence for C40 (NM_017546.3,1314-1332).
ctgaatttattcaccttta

SEQ ID NO: 277899 - DNA, 19 bp, Homo sapiens
  siRNA target sequence for C40 (NM_017546.3,1316-1334).
gaatttattcacctttata

SEQ ID NO: 277900 - DNA, 19 bp, Homo sapiens
  siRNA target sequence for C40 (NM_017546.3,1328-1346).
ctttatatatcaaattgca

SEQ ID NO: 277901 - DNA, 19 bp, Homo sapiens
  siRNA target sequence for C40 (NM_017546.3,1348-1366).
ctctacttgtgaacagatt

SEQ ID NO: 277902 - DNA, 19 bp, Homo sapiens
  siRNA target sequence for C40 (NM_017546.3,1350-1368).
ctacttgtgaacagattaa

SEQ ID NO: 277903 - DNA, 19 bp, Homo sapiens
  siRNA target sequence for C40 (NM_017546.3,1422-1440).
ccttgatccgtaacaaaat

SEQ ID NO: 277904 - DNA, 19 bp, Homo sapiens
  siRNA target sequence for C40 (NM_017546.3,1423-1441).
cttgatccgtaacaaaatt

SEQ ID NO: 277905 - DNA, 19 bp, Homo sapiens
  siRNA target sequence for C40 (NM_017546.3,1426-1444).
gatccgtaacaaaattatt

SEQ ID NO: 277906 - DNA, 19 bp, Homo sapiens
  siRNA target sequence for C40 (NM_017546.3,1471-1489).
gcaggcattctgtattgaa

SEQ ID NO: 277907 - DNA, 19 bp, Homo sapiens
  siRNA target sequence for C40 (NM_017546.3,1475-1493).
gcattctgtattgaattca

SEQ ID NO: 277908 - DNA, 19 bp, Homo sapiens
  siRNA target sequence for C40 (NM_017546.3,1515-1533).
gtcttttccggttgttgaa

SEQ ID NO: 277909 - DNA, 19 bp, Homo sapiens
  siRNA target sequence for C40 (NM_017546.3,1517-1535).
cttttccggttgttgaaga

SEQ ID NO: 277910 - DNA, 19 bp, Homo sapiens
  siRNA target sequence for C6.1A (NM_024332.1,236-254).
catcttacgacgttctgat

SEQ ID NO: 277911 - DNA, 19 bp, Homo sapiens
  siRNA target sequence for C6.1A (NM_024332.1,775-793).
cagtaaccaagatccataa

SEQ ID NO: 277912 - DNA, 19 bp, Homo sapiens
  siRNA target sequence for C6orf11 (NM_005452.4,171-189).
gggcctcctcgtaacaaga

SEQ ID NO: 277913 - DNA, 19 bp, Homo sapiens
  siRNA target sequence for C6orf11 (NM_005452.4,172-190).
ggcctcctcgtaacaagaa

SEQ ID NO: 277914 - DNA, 19 bp, Homo sapiens
  siRNA target sequence for C6orf11 (NM_005452.4,175-193).
ctcctcgtaacaagaagaa

SEQ ID NO: 277915 - DNA, 19 bp, Homo sapiens
  siRNA target sequence for C6orf11 (NM_005452.4,203-221).
ccgtcctcagagaccaaaa

SEQ ID NO: 277916 - DNA, 19 bp, Homo sapiens
  siRNA target sequence for C6orf11 (NM_005452.4,204-222).
cgtcctcagagaccaaaaa

SEQ ID NO: 277917 - DNA, 19 bp, Homo sapiens
  siRNA target sequence for C6orf11 (NM_005452.4,260-278).
gcctcaggtcccgaagaaa

SEQ ID NO: 277918 - DNA, 19 bp, Homo sapiens
  siRNA target sequence for C6orf11 (NM_005452.4,377-395).
gttctgtcgcattgacaaa

SEQ ID NO: 277919 - DNA, 19 bp, Homo sapiens
  siRNA target sequence for C6orf11 (NM_005452.4,398-416).
ccgaaagctaccacattct

SEQ ID NO: 277920 - DNA, 19 bp, Homo sapiens
  siRNA target sequence for C6orf11 (NM_005452.4,399-417).
cgaaagctaccacattcta

SEQ ID NO: 277921 - DNA, 19 bp, Homo sapiens
  siRNA target sequence for C6orf11 (NM_005452.4,400-418).
gaaagctaccacattctaa

SEQ ID NO: 277922 - DNA, 19 bp, Homo sapiens
  siRNA target sequence for C6orf11 (NM_005452.4,554-572).
gatatgccaggctgacatt

SEQ ID NO: 277923 - DNA, 19 bp, Homo sapiens
  siRNA target sequence for C6orf11 (NM_005452.4,602-620).
caagcactttgacttgaat

SEQ ID NO: 277924 - DNA, 19 bp, Homo sapiens
  siRNA target sequence for C6orf11 (NM_005452.4,634-652).
gaccctacagactaaacta

SEQ ID NO: 277925 - DNA, 19 bp, Homo sapiens
  siRNA target sequence for C6orf11 (NM_005452.4,636-654).
ccctacagactaaactact

SEQ ID NO: 277926 - DNA, 19 bp, Homo sapiens
  siRNA target sequence for C6orf11 (NM_005452.4,705-723).
gcccttgattgggtaacaa

SEQ ID NO: 277927 - DNA, 19 bp, Homo sapiens
  siRNA target sequence for C6orf11 (NM_005452.4,706-724).
cccttgattgggtaacaaa

SEQ ID NO: 277928 - DNA, 19 bp, Homo sapiens
  siRNA target sequence for C6orf11 (NM_005452.4,841-859).
gcattgagctccactgtat

SEQ ID NO: 277929 - DNA, 19 bp, Homo sapiens
  siRNA target sequence for C6orf11 (NM_005452.4,863-881).
ccgctgtgaccgagtaaca

SEQ ID NO: 277930 - DNA, 19 bp, Homo sapiens
  siRNA target sequence for C6orf11 (NM_005452.4,874-892).
gagtaacacggcttgagtt

SEQ ID NO: 277931 - DNA, 19 bp, Homo sapiens
  siRNA target sequence for C6orf11 (NM_005452.4,1054-1072).
gcaatggtactgtgtcttt

SEQ ID NO: 277932 - DNA, 19 bp, Homo sapiens
  siRNA target sequence for C6orf11 (NM_005452.4,1055-1073).
caatggtactgtgtcttta

SEQ ID NO: 277933 - DNA, 19 bp, Homo sapiens
  siRNA target sequence for C6orf11 (NM_005452.4,1130-1148).
ccgggctgtggcagtagat

SEQ ID NO: 277934 - DNA, 19 bp, Homo sapiens
  siRNA target sequence for C6orf11 (NM_005452.4,1131-1149).
cgggctgtggcagtagatt

SEQ ID NO: 277935 - DNA, 19 bp, Homo sapiens
  siRNA target sequence for C6orf11 (NM_005452.4,1134-1152).
gctgtggcagtagattcta

SEQ ID NO: 277936 - DNA, 19 bp, Homo sapiens
  siRNA target sequence for C6orf11 (NM_005452.4,1297-1315).
gaatgggtgacgttgtcaa

SEQ ID NO: 277937 - DNA, 19 bp, Homo sapiens
  siRNA target sequence for C6orf11 (NM_005452.4,1390-1408).
ctgtgcatggccttcagtt

SEQ ID NO: 277938 - DNA, 19 bp, Homo sapiens
  siRNA target sequence for C6orf11 (NM_005452.4,1493-1511).
cgatggcctggagagtaat

SEQ ID NO: 277939 - DNA, 19 bp, Homo sapiens
  siRNA target sequence for C6orf11 (NM_005452.4,1497-1515).
ggcctggagagtaatccat

SEQ ID NO: 277940 - DNA, 19 bp, Homo sapiens
  siRNA target sequence for C6orf15 (NM_014070.1,162-180).
cccctctaactctgaacat

SEQ ID NO: 277941 - DNA, 19 bp, Homo sapiens
  siRNA target sequence for C6orf15 (NM_014070.1,196-214).
gaccctaggtctaatgact

SEQ ID NO: 277942 - DNA, 19 bp, Homo sapiens
  siRNA target sequence for C6orf15 (NM_014070.1,527-545).
gacgactgccccgttctaa

SEQ ID NO: 277943 - DNA, 19 bp, Homo sapiens
  siRNA target sequence for C6orf15 (NM_014070.1,529-547).
cgactgccccgttctaatt

SEQ ID NO: 277944 - DNA, 19 bp, Homo sapiens
  siRNA target sequence for C6orf15 (NM_014070.1,709-727).
ggaatctggggtatcaata

SEQ ID NO: 277945 - DNA, 19 bp, Homo sapiens
  siRNA target sequence for C6orf15 (NM_014070.1,710-728).
gaatctggggtatcaataa

SEQ ID NO: 277946 - DNA, 19 bp, Homo sapiens
  siRNA target sequence for C6orf15 (NM_014070.1,714-732).
ctggggtatcaataatcaa

SEQ ID NO: 277947 - DNA, 19 bp, Homo sapiens
  siRNA target sequence for C6orf4 (NM_147200.1,263-281).
gaaaccaatcccagaatat

SEQ ID NO: 277948 - DNA, 19 bp, Homo sapiens
  siRNA target sequence for C6orf4 (NM_147200.1,351-369).
cccacaatgcttcacaatt

SEQ ID NO: 277949 - DNA, 19 bp, Homo sapiens
  siRNA target sequence for C6orf4 (NM_147200.1,365-383).
caattcctccggagacttt

SEQ ID NO: 277950 - DNA, 19 bp, Homo sapiens
  siRNA target sequence for C6orf4 (NM_147200.1,371-389).
ctccggagacttttctcaa

SEQ ID NO: 277951 - DNA, 19 bp, Homo sapiens
  siRNA target sequence for C6orf4 (NM_147200.1,397-415).
caaccctgaaacttgcaaa

SEQ ID NO: 277952 - DNA, 19 bp, Homo sapiens
  siRNA target sequence for C6orf4 (NM_147200.1,446-464).
ctgcctgcgcactcaagtt

SEQ ID NO: 277953 - DNA, 19 bp, Homo sapiens
  siRNA target sequence for C6orf4 (NM_147200.1,578-596).
ccctgcagagcatcagttt

SEQ ID NO: 277954 - DNA, 19 bp, Homo sapiens
  siRNA target sequence for C6orf4 (NM_147200.1,660-678).
ggccatgactcagacaaat

SEQ ID NO: 277955 - DNA, 19 bp, Homo sapiens
  siRNA target sequence for C6orf4 (NM_147200.1,662-680).
ccatgactcagacaaatca

SEQ ID NO: 277956 - DNA, 19 bp, Homo sapiens
  siRNA target sequence for C6orf4 (NM_147200.1,674-692).
caaatcagaccaaagttta

SEQ ID NO: 277957 - DNA, 19 bp, Homo sapiens
  siRNA target sequence for C6orf4 (NM_147200.1,770-788).
cctggatctgccaaccata

SEQ ID NO: 277958 - DNA, 19 bp, Homo sapiens
  siRNA target sequence for C6orf4 (NM_147200.1,774-792).
gatctgccaaccatagaca

SEQ ID NO: 277959 - DNA, 19 bp, Homo sapiens
  siRNA target sequence for C6orf4 (NM_147200.1,784-802).
ccatagacacgggatatga

SEQ ID NO: 277960 - DNA, 19 bp, Homo sapiens
  siRNA target sequence for C6orf4 (NM_147200.1,785-803).
catagacacgggatatgat

SEQ ID NO: 277961 - DNA, 19 bp, Homo sapiens
  siRNA target sequence for C6orf4 (NM_147200.1,853-871).
ccctcacctccgtgtgtta

SEQ ID NO: 277962 - DNA, 19 bp, Homo sapiens
  siRNA target sequence for C6orf4 (NM_147200.1,979-997).
ctccatggaactatcatta

SEQ ID NO: 277963 - DNA, 19 bp, Homo sapiens
  siRNA target sequence for C6orf4 (NM_147200.1,1129-1147).
ctgtgcagaaggttatcct

SEQ ID NO: 277964 - DNA, 19 bp, Homo sapiens
  siRNA target sequence for C6orf4 (NM_147200.1,1236-1254).
catcaccagccacctaata

SEQ ID NO: 277965 - DNA, 19 bp, Homo sapiens
  siRNA target sequence for C6orf4 (NM_147200.1,1362-1380).
gccagaggaactctaaaaa

SEQ ID NO: 277966 - DNA, 19 bp, Homo sapiens
  siRNA target sequence for C6orf4 (NM_147200.1,1372-1390).
ctctaaaaacaagcaattt

SEQ ID NO: 277967 - DNA, 19 bp, Homo sapiens
  siRNA target sequence for C6orf4 (NM_147200.1,1403-1421).
gcggaaagtctttatcact

SEQ ID NO: 277968 - DNA, 19 bp, Homo sapiens
  siRNA target sequence for C6orf4 (NM_147200.1,1410-1428).
gtctttatcacttattcga

SEQ ID NO: 277969 - DNA, 19 bp, Homo sapiens
  siRNA target sequence for C6orf4 (NM_147200.1,1448-1466).
ggtgaaattcgtgaacttt

SEQ ID NO: 277970 - DNA, 19 bp, Homo sapiens
  siRNA target sequence for C6orf4 (NM_147200.1,1497-1515).
gacatatttgaggatagaa

SEQ ID NO: 277971 - DNA, 19 bp, Homo sapiens
  siRNA target sequence for C6orf4 (NM_147200.1,1513-1531).
gaatccgaggcattgatat

SEQ ID NO: 277972 - DNA, 19 bp, Homo sapiens
  siRNA target sequence for C6orf4 (NM_147200.1,1517-1535).
ccgaggcattgatatcatt

SEQ ID NO: 277973 - DNA, 19 bp, Homo sapiens
  siRNA target sequence for C6orf4 (NM_147200.1,1518-1536).
cgaggcattgatatcatta

SEQ ID NO: 277974 - DNA, 19 bp, Homo sapiens
  siRNA target sequence for C6orf4 (NM_147200.1,1548-1566).
cgctaccttagggataaga

SEQ ID NO: 277975 - DNA, 19 bp, Homo sapiens
  siRNA target sequence for C6orf4 (NM_147200.1,1558-1576).
gggataagaccgtgatgat

SEQ ID NO: 277976 - DNA, 19 bp, Homo sapiens
  siRNA target sequence for C6orf4 (NM_147200.1,1559-1577).
ggataagaccgtgatgata

SEQ ID NO: 277977 - DNA, 19 bp, Homo sapiens
  siRNA target sequence for C6orf4 (NM_147200.1,1560-1578).
gataagaccgtgatgataa

SEQ ID NO: 277978 - DNA, 19 bp, Homo sapiens
  siRNA target sequence for C6orf4 (NM_147200.1,1565-1583).
gaccgtgatgataatcgta

SEQ ID NO: 277979 - DNA, 19 bp, Homo sapiens
  siRNA target sequence for C6orf4 (NM_147200.1,1584-1602).
gcaatcagccccaaataca

SEQ ID NO: 277980 - DNA, 19 bp, Homo sapiens
  siRNA target sequence for C6orf4 (NM_147200.1,1640-1658).
ggatgagcatggcttacat

SEQ ID NO: 277981 - DNA, 19 bp, Homo sapiens
  siRNA target sequence for C6orf4 (NM_147200.1,1641-1659).
gatgagcatggcttacata

SEQ ID NO: 277982 - DNA, 19 bp, Homo sapiens
  siRNA target sequence for C6orf4 (NM_147200.1,1650-1668).
ggcttacatactaagtaca

SEQ ID NO: 277983 - DNA, 19 bp, Homo sapiens
  siRNA target sequence for C6orf4 (NM_147200.1,1652-1670).
cttacatactaagtacatt

SEQ ID NO: 277984 - DNA, 19 bp, Homo sapiens
  siRNA target sequence for C6orf4 (NM_147200.1,1660-1678).
ctaagtacattcatcgaat

SEQ ID NO: 277985 - DNA, 19 bp, Homo sapiens
  siRNA target sequence for C6orf4 (NM_147200.1,1674-1692).
cgaatgatgcagattgagt

SEQ ID NO: 277986 - DNA, 19 bp, Homo sapiens
  siRNA target sequence for C6orf4 (NM_147200.1,1731-1749).
gtgctcttcccaaatgcta

SEQ ID NO: 277987 - DNA, 19 bp, Homo sapiens
  siRNA target sequence for C6orf53 (NM_016462.2,370-388).
ggttttcctagctacatct

SEQ ID NO: 277988 - DNA, 19 bp, Homo sapiens
  siRNA target sequence for C6orf53 (NM_016462.2,390-408).
gtaccttggctggcattat

SEQ ID NO: 277989 - DNA, 19 bp, Homo sapiens
  siRNA target sequence for C6orf54 (NM_014354.1,1019-1037).
cggctgtacgcgtcatgat

SEQ ID NO: 277990 - DNA, 19 bp, Homo sapiens
  siRNA target sequence for C6orf54 (NM_014354.1,1020-1038).
ggctgtacgcgtcatgata

SEQ ID NO: 277991 - DNA, 19 bp, Homo sapiens
  siRNA target sequence for C6orf67 (NM_018247.1,289-307).
ggcacggtgctacctattt

SEQ ID NO: 277992 - DNA, 19 bp, Homo sapiens
  siRNA target sequence for C6orf67 (NM_018247.1,293-311).
cggtgctacctattttctt

SEQ ID NO: 277993 - DNA, 19 bp, Homo sapiens
  siRNA target sequence for C6orf67 (NM_018247.1,372-390).
ccgcgagatcgagattgat

SEQ ID NO: 277994 - DNA, 19 bp, Homo sapiens
  siRNA target sequence for C6orf67 (NM_018247.1,373-391).
cgcgagatcgagattgatt

SEQ ID NO: 277995 - DNA, 19 bp, Homo sapiens
  siRNA target sequence for C6orf67 (NM_018247.1,374-392).
gcgagatcgagattgatta

SEQ ID NO: 277996 - DNA, 19 bp, Homo sapiens
  siRNA target sequence for C6orf67 (NM_018247.1,375-393).
cgagatcgagattgattat

SEQ ID NO: 277997 - DNA, 19 bp, Homo sapiens
  siRNA target sequence for C6orf67 (NM_018247.1,376-394).
gagatcgagattgattata

SEQ ID NO: 277998 - DNA, 19 bp, Homo sapiens
  siRNA target sequence for C6orf67 (NM_018247.1,405-423).
gccttccagtccctgtaat

SEQ ID NO: 277999 - DNA, 19 bp, Homo sapiens
  siRNA target sequence for C6orf67 (NM_018247.1,406-424).
ccttccagtccctgtaata

SEQ ID NO: 278000 - DNA, 19 bp, Homo sapiens
  siRNA target sequence for C6orf67 (NM_018247.1,407-425).
cttccagtccctgtaataa

SEQ ID NO: 278001 - DNA, 19 bp, Homo sapiens
  siRNA target sequence for C6orf67 (NM_018247.1,438-456).
ggatgtgacaccttgcttt

SEQ ID NO: 278002 - DNA, 19 bp, Homo sapiens
  siRNA target sequence for C6orf67 (NM_018247.1,439-457).
gatgtgacaccttgctttt

SEQ ID NO: 278003 - DNA, 19 bp, Homo sapiens
  siRNA target sequence for C6orf67 (NM_018247.1,442-460).
gtgacaccttgcttttgta

SEQ ID NO: 278004 - DNA, 19 bp, Homo sapiens
  siRNA target sequence for C6orf67 (NM_018247.1,452-470).
gcttttgtaccattaactt

SEQ ID NO: 278005 - DNA, 19 bp, Homo sapiens
  siRNA target sequence for C6orf67 (NM_018247.1,468-486).
cttcacactggaaaagtca

SEQ ID NO: 278006 - DNA, 19 bp, Homo sapiens
  siRNA target sequence for C6orf67 (NM_018247.1,490-508).
gagggcaacgtgtttatgt

SEQ ID NO: 278007 - DNA, 19 bp, Homo sapiens
  siRNA target sequence for C6orf67 (NM_018247.1,492-510).
gggcaacgtgtttatgtat

SEQ ID NO: 278008 - DNA, 19 bp, Homo sapiens
  siRNA target sequence for C6orf67 (NM_018247.1,493-511).
ggcaacgtgtttatgtatt

SEQ ID NO: 278009 - DNA, 19 bp, Homo sapiens
  siRNA target sequence for C6orf67 (NM_018247.1,494-512).
gcaacgtgtttatgtatta

SEQ ID NO: 278010 - DNA, 19 bp, Homo sapiens
  siRNA target sequence for C6orf67 (NM_018247.1,495-513).
caacgtgtttatgtattat

SEQ ID NO: 278011 - DNA, 19 bp, Homo sapiens
  siRNA target sequence for C6orf67 (NM_018247.1,498-516).
cgtgtttatgtattatgga

SEQ ID NO: 278012 - DNA, 19 bp, Homo sapiens
  siRNA target sequence for C6orf67 (NM_018247.1,538-556).
catcgtcgttacgtgaaat

SEQ ID NO: 278013 - DNA, 19 bp, Homo sapiens
  siRNA target sequence for C6orf67 (NM_018247.1,549-567).
cgtgaaatctcgagatgat

SEQ ID NO: 278014 - DNA, 19 bp, Homo sapiens
  siRNA target sequence for C6orf67 (NM_018247.1,550-568).
gtgaaatctcgagatgata

SEQ ID NO: 278015 - DNA, 19 bp, Homo sapiens
  siRNA target sequence for C6orf67 (NM_018247.1,552-570).
gaaatctcgagatgatagt

SEQ ID NO: 278016 - DNA, 19 bp, Homo sapiens
  siRNA target sequence for C6orf67 (NM_018247.1,612-630).
ggaatgtgaaccttatcga

SEQ ID NO: 278017 - DNA, 19 bp, Homo sapiens
  siRNA target sequence for C6orf67 (NM_018247.1,613-631).
gaatgtgaaccttatcgaa

SEQ ID NO: 278018 - DNA, 19 bp, Homo sapiens
  siRNA target sequence for C6orf67 (NM_018247.1,675-693).
cagcatgtttaatgataca

SEQ ID NO: 278019 - DNA, 19 bp, Homo sapiens
  siRNA target sequence for C6orf67 (NM_018247.1,678-696).
catgtttaatgatacatta

SEQ ID NO: 278020 - DNA, 19 bp, Homo sapiens
  siRNA target sequence for C6orf67 (NM_018247.1,712-730).
ggcaatgattcttatccta

SEQ ID NO: 278021 - DNA, 19 bp, Homo sapiens
  siRNA target sequence for C6orf67 (NM_018247.1,728-746).
ctatacctatcgctttgaa

SEQ ID NO: 278022 - DNA, 19 bp, Homo sapiens
  siRNA target sequence for C6orf67 (NM_018247.1,760-778).
gcttggtggacagataaaa

SEQ ID NO: 278023 - DNA, 19 bp, Homo sapiens
  siRNA target sequence for C6orf67 (NM_018247.1,764-782).
ggtggacagataaaaatgt

SEQ ID NO: 278024 - DNA, 19 bp, Homo sapiens
  siRNA target sequence for C6orf67 (NM_018247.1,816-834).
ggaagaacgatttaaaggt

SEQ ID NO: 278025 - DNA, 19 bp, Homo sapiens
  siRNA target sequence for C6orf67 (NM_018247.1,823-841).
cgatttaaaggtacaacaa

SEQ ID NO: 278026 - DNA, 19 bp, Homo sapiens
  siRNA target sequence for C6orf67 (NM_018247.1,877-895).
gattctgacccagataata

SEQ ID NO: 278027 - DNA, 19 bp, Homo sapiens
  siRNA target sequence for C6orf67 (NM_018247.1,931-949).
cgtactgcagcattaccta

SEQ ID NO: 278028 - DNA, 19 bp, Homo sapiens
  siRNA target sequence for C6orf67 (NM_018247.1,946-964).
cctacttttcgcaagttgt

SEQ ID NO: 278029 - DNA, 19 bp, Homo sapiens
  siRNA target sequence for C6orf67 (NM_018247.1,947-965).
ctacttttcgcaagttgta

SEQ ID NO: 278030 - DNA, 19 bp, Homo sapiens
  siRNA target sequence for C6orf67 (NM_018247.1,960-978).
gttgtatcgtcttatagaa

SEQ ID NO: 278031 - DNA, 19 bp, Homo sapiens
  siRNA target sequence for C6orf67 (NM_018247.1,967-985).
cgtcttatagaaaggaaaa

SEQ ID NO: 278032 - DNA, 19 bp, Homo sapiens
  siRNA target sequence for C6orf67 (NM_018247.1,1007-1025).
cagctggccgatactcttt

SEQ ID NO: 278033 - DNA, 19 bp, Homo sapiens
  siRNA target sequence for C6orf67 (NM_018247.1,1009-1027).
gctggccgatactctttga

SEQ ID NO: 278034 - DNA, 19 bp, Homo sapiens
  siRNA target sequence for C6orf67 (NM_018247.1,1010-1028).
ctggccgatactctttgaa

SEQ ID NO: 278035 - DNA, 19 bp, Homo sapiens
  siRNA target sequence for C6orf67 (NM_018247.1,1013-1031).
gccgatactctttgaatgt

SEQ ID NO: 278036 - DNA, 19 bp, Homo sapiens
  siRNA target sequence for C6orf67 (NM_018247.1,1015-1033).
cgatactctttgaatgtca

SEQ ID NO: 278037 - DNA, 19 bp, Homo sapiens
  siRNA target sequence for C6orf67 (NM_018247.1,1063-1081).
ggacgaaaacggatgatct

SEQ ID NO: 278038 - DNA, 19 bp, Homo sapiens
  siRNA target sequence for C6orf67 (NM_018247.1,1064-1082).
gacgaaaacggatgatctt

SEQ ID NO: 278039 - DNA, 19 bp, Homo sapiens
  siRNA target sequence for C6orf67 (NM_018247.1,1066-1084).
cgaaaacggatgatcttga

SEQ ID NO: 278040 - DNA, 19 bp, Homo sapiens
  siRNA target sequence for C6orf67 (NM_018247.1,1114-1132).
ccatttttggggattgctt

SEQ ID NO: 278041 - DNA, 19 bp, Homo sapiens
  siRNA target sequence for C6orf67 (NM_018247.1,1115-1133).
catttttggggattgctta

SEQ ID NO: 278042 - DNA, 19 bp, Homo sapiens
  siRNA target sequence for C6orf67 (NM_018247.1,1174-1192).
ctgctagtaattaatcata

SEQ ID NO: 278043 - DNA, 19 bp, Homo sapiens
  siRNA target sequence for C6orf67 (NM_018247.1,1177-1195).
ctagtaattaatcataaat

SEQ ID NO: 278044 - DNA, 19 bp, Homo sapiens
  siRNA target sequence for C7orf30 (NM_138446.1,58-76).
ggctgctcgccccactaat

SEQ ID NO: 278045 - DNA, 19 bp, Homo sapiens
  siRNA target sequence for C7orf30 (NM_138446.1,278-296).
ggacgcggcagatcatact

SEQ ID NO: 278046 - DNA, 19 bp, Homo sapiens
  siRNA target sequence for C7orf30 (NM_138446.1,309-327).
gacatcgatatgatggttt

SEQ ID NO: 278047 - DNA, 19 bp, Homo sapiens
  siRNA target sequence for C7orf30 (NM_138446.1,421-439).
cttctacccgacacttaca

SEQ ID NO: 278048 - DNA, 19 bp, Homo sapiens
  siRNA target sequence for C7orf30 (NM_138446.1,446-464).
ggccttctacgttgtgaaa

SEQ ID NO: 278049 - DNA, 19 bp, Homo sapiens
  siRNA target sequence for C7orf30 (NM_138446.1,447-465).
gccttctacgttgtgaaaa

SEQ ID NO: 278050 - DNA, 19 bp, Homo sapiens
  siRNA target sequence for C7orf30 (NM_138446.1,448-466).
ccttctacgttgtgaaaat

SEQ ID NO: 278051 - DNA, 19 bp, Homo sapiens
  siRNA target sequence for C7orf30 (NM_138446.1,489-507).
cgtgaccctcatgttaaga

SEQ ID NO: 278052 - DNA, 19 bp, Homo sapiens
  siRNA target sequence for C7orf30 (NM_138446.1,494-512).
ccctcatgttaagatagaa

SEQ ID NO: 278053 - DNA, 19 bp, Homo sapiens
  siRNA target sequence for C7orf30 (NM_138446.1,549-567).
ggcagcatggtgattcatt

SEQ ID NO: 278054 - DNA, 19 bp, Homo sapiens
  siRNA target sequence for C7orf30 (NM_138446.1,550-568).
gcagcatggtgattcattt

SEQ ID NO: 278055 - DNA, 19 bp, Homo sapiens
  siRNA target sequence for C7orf30 (NM_138446.1,553-571).
gcatggtgattcatttgat

SEQ ID NO: 278056 - DNA, 19 bp, Homo sapiens
  siRNA target sequence for C7orf30 (NM_138446.1,613-631).
ggaccctacgttcttatga

SEQ ID NO: 278057 - DNA, 19 bp, Homo sapiens
  siRNA target sequence for C7orf30 (NM_138446.1,614-632).
gaccctacgttcttatgat

SEQ ID NO: 278058 - DNA, 19 bp, Homo sapiens
  siRNA target sequence for C7orf30 (NM_138446.1,616-634).
ccctacgttcttatgatga

SEQ ID NO: 278059 - DNA, 19 bp, Homo sapiens
  siRNA target sequence for C7orf30 (NM_138446.1,681-699).
cttggaatagaagatgata

SEQ ID NO: 278060 - DNA, 19 bp, Homo sapiens
  siRNA target sequence for C7orf30 (NM_138446.1,708-726).
gtgactccagtggagttaa

SEQ ID NO: 278061 - DNA, 19 bp, Homo sapiens
  siRNA target sequence for C7orf30 (NM_138446.1,715-733).
cagtggagttaaaatgtga

SEQ ID NO: 278062 - DNA, 19 bp, Homo sapiens
  siRNA target sequence for C8orf1 (NM_004337.1,349-367).
ccattagttgaagaaactt

SEQ ID NO: 278063 - DNA, 19 bp, Homo sapiens
  siRNA target sequence for C8orf1 (NM_004337.1,435-453).
cctttcttatatgttatca

SEQ ID NO: 278064 - DNA, 19 bp, Homo sapiens
  siRNA target sequence for C8orf1 (NM_004337.1,454-472).
ggctacagaccgtatttat

SEQ ID NO: 278065 - DNA, 19 bp, Homo sapiens
  siRNA target sequence for C8orf1 (NM_004337.1,459-477).
cagaccgtatttatcatca

SEQ ID NO: 278066 - DNA, 19 bp, Homo sapiens
  siRNA target sequence for C8orf1 (NM_004337.1,487-505).
cacccaaatacaatcttaa

SEQ ID NO: 278067 - DNA, 19 bp, Homo sapiens
  siRNA target sequence for C8orf1 (NM_004337.1,591-609).
caatccagttgcagtactt

SEQ ID NO: 278068 - DNA, 19 bp, Homo sapiens
  siRNA target sequence for C8orf1 (NM_004337.1,596-614).
cagttgcagtacttttcga

SEQ ID NO: 278069 - DNA, 19 bp, Homo sapiens
  siRNA target sequence for C8orf1 (NM_004337.1,598-616).
gttgcagtacttttcgata

SEQ ID NO: 278070 - DNA, 19 bp, Homo sapiens
  siRNA target sequence for C8orf1 (NM_004337.1,602-620).
cagtacttttcgatacact

SEQ ID NO: 278071 - DNA, 19 bp, Homo sapiens
  siRNA target sequence for C8orf1 (NM_004337.1,656-674).
catccgttttgcattggaa

SEQ ID NO: 278072 - DNA, 19 bp, Homo sapiens
  siRNA target sequence for C8orf1 (NM_004337.1,659-677).
ccgttttgcattggaaatt

SEQ ID NO: 278073 - DNA, 19 bp, Homo sapiens
  siRNA target sequence for C8orf1 (NM_004337.1,702-720).
cgtagttcttggtaaaggt

SEQ ID NO: 278074 - DNA, 19 bp, Homo sapiens
  siRNA target sequence for C8orf1 (NM_004337.1,727-745).
ggtggggcttggcataata

SEQ ID NO: 278075 - DNA, 19 bp, Homo sapiens
  siRNA target sequence for C8orf1 (NM_004337.1,748-766).
gaaggctccatgttgacaa

SEQ ID NO: 278076 - DNA, 19 bp, Homo sapiens
  siRNA target sequence for C8orf1 (NM_004337.1,751-769).
ggctccatgttgacaatca

SEQ ID NO: 278077 - DNA, 19 bp, Homo sapiens
  siRNA target sequence for C8orf1 (NM_004337.1,787-805).
gaactacctggacttaaat

SEQ ID NO: 278078 - DNA, 19 bp, Homo sapiens
  siRNA target sequence for C8orf1 (NM_004337.1,790-808).
ctacctggacttaaattta

SEQ ID NO: 278079 - DNA, 19 bp, Homo sapiens
  siRNA target sequence for C8orf1 (NM_004337.1,794-812).
ctggacttaaatttaagga

SEQ ID NO: 278080 - DNA, 19 bp, Homo sapiens
  siRNA target sequence for C8orf1 (NM_004337.1,810-828).
ggactgggtatcaagtaaa

SEQ ID NO: 278081 - DNA, 19 bp, Homo sapiens
  siRNA target sequence for C8orf1 (NM_004337.1,813-831).
ctgggtatcaagtaaacga

SEQ ID NO: 278082 - DNA, 19 bp, Homo sapiens
  siRNA target sequence for C8orf1 (NM_004337.1,864-882).
ggaaatagctcgctactat

SEQ ID NO: 278083 - DNA, 19 bp, Homo sapiens
  siRNA target sequence for C8orf1 (NM_004337.1,865-883).
gaaatagctcgctactata

SEQ ID NO: 278084 - DNA, 19 bp, Homo sapiens
  siRNA target sequence for C8orf1 (NM_004337.1,871-889).
gctcgctactataaacatt

SEQ ID NO: 278085 - DNA, 19 bp, Homo sapiens
  siRNA target sequence for C8orf1 (NM_004337.1,872-890).
ctcgctactataaacatta

SEQ ID NO: 278086 - DNA, 19 bp, Homo sapiens
  siRNA target sequence for C8orf1 (NM_004337.1,936-954).
cataacttccgtatcaaga

SEQ ID NO: 278087 - DNA, 19 bp, Homo sapiens
  siRNA target sequence for C8orf1 (NM_004337.1,994-1012).
gatatttcaacaaagcatt

SEQ ID NO: 278088 - DNA, 19 bp, Homo sapiens
  siRNA target sequence for C8orf1 (NM_004337.1,1059-1077).
gggttatcagcgaatagct

SEQ ID NO: 278089 - DNA, 19 bp, Homo sapiens
  siRNA target sequence for C8orf1 (NM_004337.1,1213-1231).
gctgctataaacaaaggaa

SEQ ID NO: 278090 - DNA, 19 bp, Homo sapiens
  siRNA target sequence for C8orf1 (NM_004337.1,1292-1310).
cagtactgtgtgcttacaa

SEQ ID NO: 278091 - DNA, 19 bp, Homo sapiens
  siRNA target sequence for C8orf1 (NM_004337.1,1294-1312).
gtactgtgtgcttacaaca

SEQ ID NO: 278092 - DNA, 19 bp, Homo sapiens
  siRNA target sequence for C8orf1 (NM_004337.1,1299-1317).
gtgtgcttacaacagtaat

SEQ ID NO: 278093 - DNA, 19 bp, Homo sapiens
  siRNA target sequence for C8orf1 (NM_004337.1,1335-1353).
gtttcgcagacgagtaact

SEQ ID NO: 278094 - DNA, 19 bp, Homo sapiens
  siRNA target sequence for C8orf1 (NM_004337.1,1389-1407).
gctgtatcctgaatatcat

SEQ ID NO: 278095 - DNA, 19 bp, Homo sapiens
  siRNA target sequence for C8orf1 (NM_004337.1,1390-1408).
ctgtatcctgaatatcata

SEQ ID NO: 278096 - DNA, 19 bp, Homo sapiens
  siRNA target sequence for C8orf1 (NM_004337.1,1396-1414).
cctgaatatcataaagtct

SEQ ID NO: 278097 - DNA, 19 bp, Homo sapiens
  siRNA target sequence for C8orf1 (NM_004337.1,1397-1415).
ctgaatatcataaagtcta

SEQ ID NO: 278098 - DNA, 19 bp, Homo sapiens
  siRNA target sequence for C8orf1 (NM_004337.1,1422-1440).
gatgtgtactcagtcatat

SEQ ID NO: 278099 - DNA, 19 bp, Homo sapiens
  siRNA target sequence for C8orf1 (NM_004337.1,1425-1443).
gtgtactcagtcatattct

SEQ ID NO: 278100 - DNA, 19 bp, Homo sapiens
  siRNA target sequence for C8orf1 (NM_004337.1,1427-1445).
gtactcagtcatattctgt

SEQ ID NO: 278101 - DNA, 19 bp, Homo sapiens
  siRNA target sequence for C8orf1 (NM_004337.1,1442-1460).
ctgtagactcaaatctttt

SEQ ID NO: 278102 - DNA, 19 bp, Homo sapiens
  siRNA target sequence for C8orf1 (NM_004337.1,1485-1503).
gcaccgtgtgctttccttt

SEQ ID NO: 278103 - DNA, 19 bp, Homo sapiens
  siRNA target sequence for C8orf1 (NM_004337.1,1499-1517).
cctttaagtcggacatgaa

SEQ ID NO: 278104 - DNA, 19 bp, Homo sapiens
  siRNA target sequence for C8orf1 (NM_004337.1,1500-1518).
ctttaagtcggacatgaaa

SEQ ID NO: 278105 - DNA, 19 bp, Homo sapiens
  siRNA target sequence for C8orf1 (NM_004337.1,1560-1578).
gctgtctgcagcagtagta

SEQ ID NO: 278106 - DNA, 19 bp, Homo sapiens
  siRNA target sequence for C8orf1 (NM_004337.1,1561-1579).
ctgtctgcagcagtagtat

SEQ ID NO: 278107 - DNA, 19 bp, Homo sapiens
  siRNA target sequence for C8orf1 (NM_004337.1,1570-1588).
gcagtagtattgataggtt

SEQ ID NO: 278108 - DNA, 19 bp, Homo sapiens
  siRNA target sequence for C8orf1 (NM_004337.1,1614-1632).
ggatcaagggtgttaccta

SEQ ID NO: 278109 - DNA, 19 bp, Homo sapiens
  siRNA target sequence for C8orf1 (NM_004337.1,1646-1664).
gccagccaatcacatgtaa

SEQ ID NO: 278110 - DNA, 19 bp, Homo sapiens
  siRNA target sequence for C8orf1 (NM_004337.1,1665-1683).
gggtaatcctgtggaaata

SEQ ID NO: 278111 - DNA, 19 bp, Homo sapiens
  siRNA target sequence for C8orf1 (NM_004337.1,1667-1685).
gtaatcctgtggaaataga

SEQ ID NO: 278112 - DNA, 19 bp, Homo sapiens
  siRNA target sequence for C8orf1 (NM_004337.1,1678-1696).
gaaatagatacatatacct

SEQ ID NO: 278113 - DNA, 19 bp, Homo sapiens
  siRNA target sequence for C8orf1 (NM_004337.1,1684-1702).
gatacatatacctatgagt

SEQ ID NO: 278114 - DNA, 19 bp, Homo sapiens
  siRNA target sequence for C8orf1 (NM_004337.1,1695-1713).
ctatgagtgtattaaagaa

SEQ ID NO: 278115 - DNA, 19 bp, Homo sapiens
  siRNA target sequence for C8orf1 (NM_004337.1,1711-1729).
gaagccaacctttttgcat

SEQ ID NO: 278116 - DNA, 19 bp, Homo sapiens
  siRNA target sequence for C8orf1 (NM_004337.1,1735-1753).
cctttggttggagacaatt

SEQ ID NO: 278117 - DNA, 19 bp, Homo sapiens
  siRNA target sequence for C8orf1 (NM_004337.1,1740-1758).
ggttggagacaattttgtt

SEQ ID NO: 278118 - DNA, 19 bp, Homo sapiens
  siRNA target sequence for C8orf1 (NM_004337.1,1782-1800).
gggtgttacacgctgttta

SEQ ID NO: 278119 - DNA, 19 bp, Homo sapiens
  siRNA target sequence for C8orf1 (NM_004337.1,1786-1804).
gttacacgctgtttagcta

SEQ ID NO: 278120 - DNA, 19 bp, Homo sapiens
  siRNA target sequence for C8orf2 (NM_007175.4,166-184).
ctgtgcacaagatagaaga

SEQ ID NO: 278121 - DNA, 19 bp, Homo sapiens
  siRNA target sequence for C8orf2 (NM_007175.4,176-194).
gatagaagagggacatatt

SEQ ID NO: 278122 - DNA, 19 bp, Homo sapiens
  siRNA target sequence for C8orf2 (NM_007175.4,185-203).
gggacatattggggtatat

SEQ ID NO: 278123 - DNA, 19 bp, Homo sapiens
  siRNA target sequence for C8orf2 (NM_007175.4,186-204).
ggacatattggggtatatt

SEQ ID NO: 278124 - DNA, 19 bp, Homo sapiens
  siRNA target sequence for C8orf2 (NM_007175.4,187-205).
gacatattggggtatatta

SEQ ID NO: 278125 - DNA, 19 bp, Homo sapiens
  siRNA target sequence for C8orf2 (NM_007175.4,238-256).
gccctggtttccatctcat

SEQ ID NO: 278126 - DNA, 19 bp, Homo sapiens
  siRNA target sequence for C8orf2 (NM_007175.4,258-276).
ctccctttcatcacatcat

SEQ ID NO: 278127 - DNA, 19 bp, Homo sapiens
  siRNA target sequence for C8orf2 (NM_007175.4,266-284).
catcacatcatataagtct

SEQ ID NO: 278128 - DNA, 19 bp, Homo sapiens
  siRNA target sequence for C8orf2 (NM_007175.4,343-361).
gtgtgatgatctactttga

SEQ ID NO: 278129 - DNA, 19 bp, Homo sapiens
  siRNA target sequence for C8orf2 (NM_007175.4,364-382).
gaattgaagtggtgaactt

SEQ ID NO: 278130 - DNA, 19 bp, Homo sapiens
  siRNA target sequence for C8orf2 (NM_007175.4,389-407).
cccgaacgcagtgtatgat

SEQ ID NO: 278131 - DNA, 19 bp, Homo sapiens
  siRNA target sequence for C8orf2 (NM_007175.4,390-408).
ccgaacgcagtgtatgata

SEQ ID NO: 278132 - DNA, 19 bp, Homo sapiens
  siRNA target sequence for C8orf2 (NM_007175.4,391-409).
cgaacgcagtgtatgatat

SEQ ID NO: 278133 - DNA, 19 bp, Homo sapiens
  siRNA target sequence for C8orf2 (NM_007175.4,392-410).
gaacgcagtgtatgatata

SEQ ID NO: 278134 - DNA, 19 bp, Homo sapiens
  siRNA target sequence for C8orf2 (NM_007175.4,496-514).
cgcttcaagaggtctacat

SEQ ID NO: 278135 - DNA, 19 bp, Homo sapiens
  siRNA target sequence for C8orf2 (NM_007175.4,509-527).
ctacattgagctgtttgat

SEQ ID NO: 278136 - DNA, 19 bp, Homo sapiens
  siRNA target sequence for C8orf2 (NM_007175.4,597-615).
caagctgtgcgggtaacaa

SEQ ID NO: 278137 - DNA, 19 bp, Homo sapiens
  siRNA target sequence for C8orf2 (NM_007175.4,630-648).
gaggcaatccgcagaaact

SEQ ID NO: 278138 - DNA, 19 bp, Homo sapiens
  siRNA target sequence for C8orf2 (NM_007175.4,640-658).
gcagaaactacgagttgat

SEQ ID NO: 278139 - DNA, 19 bp, Homo sapiens
  siRNA target sequence for C8orf2 (NM_007175.4,742-760).
cgctcattgaggcagaaaa

SEQ ID NO: 278140 - DNA, 19 bp, Homo sapiens
  siRNA target sequence for C8orf2 (NM_007175.4,887-905).
ctacactgctatgaaaata

SEQ ID NO: 278141 - DNA, 19 bp, Homo sapiens
  siRNA target sequence for C8orf2 (NM_007175.4,970-988).
cttccaacagcaagattta

SEQ ID NO: 278142 - DNA, 19 bp, Homo sapiens
  siRNA target sequence for C8orf2 (NM_007175.4,973-991).
ccaacagcaagatttactt

SEQ ID NO: 278143 - DNA, 19 bp, Homo sapiens
  siRNA target sequence for C8orf2 (NM_007175.4,1053-1071).
gggctagctgacaagctaa

SEQ ID NO: 278144 - DNA, 19 bp, Homo sapiens
  siRNA target sequence for C8orf2 (NM_007175.4,1067-1085).
gctaagctttggcttagaa

SEQ ID NO: 278145 - DNA, 19 bp, Homo sapiens
  siRNA target sequence for C9orf16 (NM_024112.2,131-149).
gaatacgctgccatcaact

SEQ ID NO: 278146 - DNA, 19 bp, Homo sapiens
  siRNA target sequence for C9orf27 (NM_021208.1,216-234).
gtactcctcaaagaaagat

SEQ ID NO: 278147 - DNA, 19 bp, Homo sapiens
  siRNA target sequence for C9orf27 (NM_021208.1,335-353).
gggatgtgacctatgtaat

SEQ ID NO: 278148 - DNA, 19 bp, Homo sapiens
  siRNA target sequence for C9orf27 (NM_021208.1,349-367).
gtaatgaacttgctactta

SEQ ID NO: 278149 - DNA, 19 bp, Homo sapiens
  siRNA target sequence for C9orf5 (NM_032012.1,166-184).
gcttcgacaagcccattaa

SEQ ID NO: 278150 - DNA, 19 bp, Homo sapiens
  siRNA target sequence for C9orf5 (NM_032012.1,630-648).
ggctatgtgttgactgttt

SEQ ID NO: 278151 - DNA, 19 bp, Homo sapiens
  siRNA target sequence for C9orf5 (NM_032012.1,700-718).
ctgtctggattatattgct

SEQ ID NO: 278152 - DNA, 19 bp, Homo sapiens
  siRNA target sequence for C9orf5 (NM_032012.1,706-724).
ggattatattgctttttca

SEQ ID NO: 278153 - DNA, 19 bp, Homo sapiens
  siRNA target sequence for C9orf5 (NM_032012.1,787-805).
ctgtgggtaccctctatga

SEQ ID NO: 278154 - DNA, 19 bp, Homo sapiens
  siRNA target sequence for C9orf5 (NM_032012.1,880-898).
caaacttggccatctctat

SEQ ID NO: 278155 - DNA, 19 bp, Homo sapiens
  siRNA target sequence for C9orf5 (NM_032012.1,893-911).
ctctatcacagggtatgaa

SEQ ID NO: 278156 - DNA, 19 bp, Homo sapiens
  siRNA target sequence for C9orf5 (NM_032012.1,1044-1062).
cgaaggcctgaaataggaa

SEQ ID NO: 278157 - DNA, 19 bp, Homo sapiens
  siRNA target sequence for C9orf5 (NM_032012.1,1053-1071).
gaaataggaacgtttctta

SEQ ID NO: 278158 - DNA, 19 bp, Homo sapiens
  siRNA target sequence for C9orf5 (NM_032012.1,1059-1077).
ggaacgtttcttagaaaga

SEQ ID NO: 278159 - DNA, 19 bp, Homo sapiens
  siRNA target sequence for C9orf5 (NM_032012.1,1060-1078).
gaacgtttcttagaaagaa

SEQ ID NO: 278160 - DNA, 19 bp, Homo sapiens
  siRNA target sequence for C9orf5 (NM_032012.1,1255-1273).
ggggcattatagaaagctt

SEQ ID NO: 278161 - DNA, 19 bp, Homo sapiens
  siRNA target sequence for C9orf5 (NM_032012.1,1309-1327).
ccattgtcgggcttggaaa

SEQ ID NO: 278162 - DNA, 19 bp, Homo sapiens
  siRNA target sequence for C9orf5 (NM_032012.1,1310-1328).
cattgtcgggcttggaaaa

SEQ ID NO: 278163 - DNA, 19 bp, Homo sapiens
  siRNA target sequence for C9orf5 (NM_032012.1,1363-1381).
ggctaaataagaagatgat

SEQ ID NO: 278164 - DNA, 19 bp, Homo sapiens
  siRNA target sequence for C9orf5 (NM_032012.1,1388-1406).
gttggagaagatgttagat

SEQ ID NO: 278165 - DNA, 19 bp, Homo sapiens
  siRNA target sequence for C9orf5 (NM_032012.1,1427-1445).
catatttttgttagtgata

SEQ ID NO: 278166 - DNA, 19 bp, Homo sapiens
  siRNA target sequence for C9orf5 (NM_032012.1,1472-1490).
gactgcaaaggtacatcaa

SEQ ID NO: 278167 - DNA, 19 bp, Homo sapiens
  siRNA target sequence for C9orf5 (NM_032012.1,1505-1523).
gattgaagtcacaagtaat

SEQ ID NO: 278168 - DNA, 19 bp, Homo sapiens
  siRNA target sequence for C9orf5 (NM_032012.1,1548-1566).
caccctgagtgggcaaatt

SEQ ID NO: 278169 - DNA, 19 bp, Homo sapiens
  siRNA target sequence for C9orf5 (NM_032012.1,1587-1605).
gtccaaagagccctgaatt

SEQ ID NO: 278170 - DNA, 19 bp, Homo sapiens
  siRNA target sequence for C9orf5 (NM_032012.1,1609-1627).
cggctaacaacgtgtatca

SEQ ID NO: 278171 - DNA, 19 bp, Homo sapiens
  siRNA target sequence for C9orf5 (NM_032012.1,1611-1629).
gctaacaacgtgtatcagt

SEQ ID NO: 278172 - DNA, 19 bp, Homo sapiens
  siRNA target sequence for C9orf5 (NM_032012.1,1628-1646).
gtatggacgagaatggata

SEQ ID NO: 278173 - DNA, 19 bp, Homo sapiens
  siRNA target sequence for C9orf5 (NM_032012.1,1633-1651).
gacgagaatggataactca

SEQ ID NO: 278174 - DNA, 19 bp, Homo sapiens
  siRNA target sequence for C9orf5 (NM_032012.1,1733-1751).
gtatcactcttggtttgta

SEQ ID NO: 278175 - DNA, 19 bp, Homo sapiens
  siRNA target sequence for C9orf5 (NM_032012.1,1774-1792).
ggcacaaaggacagaagtt

SEQ ID NO: 278176 - DNA, 19 bp, Homo sapiens
  siRNA target sequence for C9orf5 (NM_032012.1,1793-1811).
gcatgtcagtcgtcagaat

SEQ ID NO: 278177 - DNA, 19 bp, Homo sapiens
  siRNA target sequence for C9orf5 (NM_032012.1,1797-1815).
gtcagtcgtcagaatagct

SEQ ID NO: 278178 - DNA, 19 bp, Homo sapiens
  siRNA target sequence for C9orf5 (NM_032012.1,1832-1850).
ggactggcaggatattgtt

SEQ ID NO: 278179 - DNA, 19 bp, Homo sapiens
  siRNA target sequence for C9orf5 (NM_032012.1,1857-1875).
gttcacgagaacattgaga

SEQ ID NO: 278180 - DNA, 19 bp, Homo sapiens
  siRNA target sequence for C9orf5 (NM_032012.1,1862-1880).
cgagaacattgagacattt

SEQ ID NO: 278181 - DNA, 19 bp, Homo sapiens
  siRNA target sequence for C9orf5 (NM_032012.1,1893-1911).
gagtctctgtggatcgtta

SEQ ID NO: 278182 - DNA, 19 bp, Homo sapiens
  siRNA target sequence for C9orf5 (NM_032012.1,1908-1926).
gttatgagccggaatgtga

SEQ ID NO: 278183 - DNA, 19 bp, Homo sapiens
  siRNA target sequence for C9orf5 (NM_032012.1,1976-1994).
cgggacagcccttctcaat

SEQ ID NO: 278184 - DNA, 19 bp, Homo sapiens
  siRNA target sequence for C9orf5 (NM_032012.1,1977-1995).
gggacagcccttctcaatt

SEQ ID NO: 278185 - DNA, 19 bp, Homo sapiens
  siRNA target sequence for C9orf5 (NM_032012.1,1978-1996).
ggacagcccttctcaattt

SEQ ID NO: 278186 - DNA, 19 bp, Homo sapiens
  siRNA target sequence for C9orf5 (NM_032012.1,1979-1997).
gacagcccttctcaatttt

SEQ ID NO: 278187 - DNA, 19 bp, Homo sapiens
  siRNA target sequence for C9orf5 (NM_032012.1,2021-2039).
gaccacactattttatcta

SEQ ID NO: 278188 - DNA, 19 bp, Homo sapiens
  siRNA target sequence for C9orf5 (NM_032012.1,2044-2062).
gttccagtgatgagtacta

SEQ ID NO: 278189 - DNA, 19 bp, Homo sapiens
  siRNA target sequence for C9orf5 (NM_032012.1,2103-2121).
cagccaggtccttcttcta

SEQ ID NO: 278190 - DNA, 19 bp, Homo sapiens
  siRNA target sequence for C9orf5 (NM_032012.1,2105-2123).
gccaggtccttcttctaat

SEQ ID NO: 278191 - DNA, 19 bp, Homo sapiens
  siRNA target sequence for C9orf5 (NM_032012.1,2106-2124).
ccaggtccttcttctaata

SEQ ID NO: 278192 - DNA, 19 bp, Homo sapiens
  siRNA target sequence for C9orf5 (NM_032012.1,2149-2167).
ctatcagaggggtgtttga

SEQ ID NO: 278193 - DNA, 19 bp, Homo sapiens
  siRNA target sequence for C9orf5 (NM_032012.1,2206-2224).
cctggctgactcatactat

SEQ ID NO: 278194 - DNA, 19 bp, Homo sapiens
  siRNA target sequence for C9orf5 (NM_032012.1,2209-2227).
ggctgactcatactatgtt

SEQ ID NO: 278195 - DNA, 19 bp, Homo sapiens
  siRNA target sequence for C9orf5 (NM_032012.1,2210-2228).
gctgactcatactatgttt

SEQ ID NO: 278196 - DNA, 19 bp, Homo sapiens
  siRNA target sequence for C9orf5 (NM_032012.1,2230-2248).
gcatcaatattgtcttcat

SEQ ID NO: 278197 - DNA, 19 bp, Homo sapiens
  siRNA target sequence for C9orf5 (NM_032012.1,2246-2264).
cataccatcagcattagca

SEQ ID NO: 278198 - DNA, 19 bp, Homo sapiens
  siRNA target sequence for C9orf5 (NM_032012.1,2334-2352).
ctgacacaagggttaggat

SEQ ID NO: 278199 - DNA, 19 bp, Homo sapiens
  siRNA target sequence for C9orf5 (NM_032012.1,2379-2397).
catctcttgccaacatact

SEQ ID NO: 278200 - DNA, 19 bp, Homo sapiens
  siRNA target sequence for C9orf5 (NM_032012.1,2384-2402).
cttgccaacatactttgta

SEQ ID NO: 278201 - DNA, 19 bp, Homo sapiens
  siRNA target sequence for C9orf5 (NM_032012.1,2400-2418).
gtagatactgcaatctact

SEQ ID NO: 278202 - DNA, 19 bp, Homo sapiens
  siRNA target sequence for C9orf5 (NM_032012.1,2409-2427).
gcaatctactctgacatat

SEQ ID NO: 278203 - DNA, 19 bp, Homo sapiens
  siRNA target sequence for C9orf5 (NM_032012.1,2488-2506).
gcctggaaggagcaatcat

SEQ ID NO: 278204 - DNA, 19 bp, Homo sapiens
  siRNA target sequence for C9orf5 (NM_032012.1,2500-2518).
caatcatcggtcctattct

SEQ ID NO: 278205 - DNA, 19 bp, Homo sapiens
  siRNA target sequence for C9orf5 (NM_032012.1,2529-2547).
cttgtggttgcttccaata

SEQ ID NO: 278206 - DNA, 19 bp, Homo sapiens
  siRNA target sequence for C9orf5 (NM_032012.1,2532-2550).
gtggttgcttccaatatct

SEQ ID NO: 278207 - DNA, 19 bp, Homo sapiens
  siRNA target sequence for C9orf5 (NM_032012.1,2562-2580).
ctagtgagtcccacgaatt

SEQ ID NO: 278208 - DNA, 19 bp, Homo sapiens
  siRNA target sequence for C9orf5 (NM_032012.1,2567-2585).
gagtcccacgaattcagtt

SEQ ID NO: 278209 - DNA, 19 bp, Homo sapiens
  siRNA target sequence for C9orf5 (NM_032012.1,2684-2702).
ctctgcagtgatttttcta

SEQ ID NO: 278210 - DNA, 19 bp, Homo sapiens
  siRNA target sequence for CDCA1 (NM_031423.2,164-182).
gtctttccccagatataat

SEQ ID NO: 278211 - DNA, 19 bp, Homo sapiens
  siRNA target sequence for CDCA1 (NM_031423.2,166-184).
ctttccccagatataatgt

SEQ ID NO: 278212 - DNA, 19 bp, Homo sapiens
  siRNA target sequence for CDCA1 (NM_031423.2,245-263).
caccaagaatgatctttat

SEQ ID NO: 278213 - DNA, 19 bp, Homo sapiens
  siRNA target sequence for CDCA1 (NM_031423.2,277-295).
ctgaagtcttgcacatgat

SEQ ID NO: 278214 - DNA, 19 bp, Homo sapiens
  siRNA target sequence for CDCA1 (NM_031423.2,299-317).
catgagagccttacaaata

SEQ ID NO: 278215 - DNA, 19 bp, Homo sapiens
  siRNA target sequence for CDCA1 (NM_031423.2,302-320).
gagagccttacaaatagta

SEQ ID NO: 278216 - DNA, 19 bp, Homo sapiens
  siRNA target sequence for CDCA1 (NM_031423.2,304-322).
gagccttacaaatagtata

SEQ ID NO: 278217 - DNA, 19 bp, Homo sapiens
  siRNA target sequence for CDCA1 (NM_031423.2,324-342).
ggaattcgactggaacatt

SEQ ID NO: 278218 - DNA, 19 bp, Homo sapiens
  siRNA target sequence for CDCA1 (NM_031423.2,325-343).
gaattcgactggaacattt

SEQ ID NO: 278219 - DNA, 19 bp, Homo sapiens
  siRNA target sequence for CDCA1 (NM_031423.2,369-387).
gtcatgtatccacatttaa

SEQ ID NO: 278220 - DNA, 19 bp, Homo sapiens
  siRNA target sequence for CDCA1 (NM_031423.2,442-460).
ctatctgccgggtgaatga

SEQ ID NO: 278221 - DNA, 19 bp, Homo sapiens
  siRNA target sequence for CDCA1 (NM_031423.2,446-464).
ctgccgggtgaatgacttt

SEQ ID NO: 278222 - DNA, 19 bp, Homo sapiens
  siRNA target sequence for CDCA1 (NM_031423.2,450-468).
cgggtgaatgactttgaga

SEQ ID NO: 278223 - DNA, 19 bp, Homo sapiens
  siRNA target sequence for CDCA1 (NM_031423.2,498-516).
cggacaagtcggtttttaa

SEQ ID NO: 278224 - DNA, 19 bp, Homo sapiens
  siRNA target sequence for CDCA1 (NM_031423.2,508-526).
ggtttttaagtggcattat

SEQ ID NO: 278225 - DNA, 19 bp, Homo sapiens
  siRNA target sequence for CDCA1 (NM_031423.2,517-535).
gtggcattatcaactttat

SEQ ID NO: 278226 - DNA, 19 bp, Homo sapiens
  siRNA target sequence for CDCA1 (NM_031423.2,549-567).
gcatgccgtgaaacgtata

SEQ ID NO: 278227 - DNA, 19 bp, Homo sapiens
  siRNA target sequence for CDCA1 (NM_031423.2,550-568).
catgccgtgaaacgtatat

SEQ ID NO: 278228 - DNA, 19 bp, Homo sapiens
  siRNA target sequence for CDCA1 (NM_031423.2,553-571).
gccgtgaaacgtatatgga

SEQ ID NO: 278229 - DNA, 19 bp, Homo sapiens
  siRNA target sequence for CDCA1 (NM_031423.2,555-573).
cgtgaaacgtatatggaat

SEQ ID NO: 278230 - DNA, 19 bp, Homo sapiens
  siRNA target sequence for CDCA1 (NM_031423.2,556-574).
gtgaaacgtatatggaatt

SEQ ID NO: 278231 - DNA, 19 bp, Homo sapiens
  siRNA target sequence for CDCA1 (NM_031423.2,592-610).
cctctgcggacaaaatgca

SEQ ID NO: 278232 - DNA, 19 bp, Homo sapiens
  siRNA target sequence for CDCA1 (NM_031423.2,624-642).
gcacaccaggaggcattaa

SEQ ID NO: 278233 - DNA, 19 bp, Homo sapiens
  siRNA target sequence for CDCA1 (NM_031423.2,625-643).
cacaccaggaggcattaat

SEQ ID NO: 278234 - DNA, 19 bp, Homo sapiens
  siRNA target sequence for CDCA1 (NM_031423.2,716-734).
ggagctacaacaatcacta

SEQ ID NO: 278235 - DNA, 19 bp, Homo sapiens
  siRNA target sequence for CDCA1 (NM_031423.2,815-833).
gcgtttgaatgaactaaaa

SEQ ID NO: 278236 - DNA, 19 bp, Homo sapiens
  siRNA target sequence for CDCA1 (NM_031423.2,816-834).
cgtttgaatgaactaaaat

SEQ ID NO: 278237 - DNA, 19 bp, Homo sapiens
  siRNA target sequence for CDCA1 (NM_031423.2,855-873).
gaaatacaagagagtttga

SEQ ID NO: 278238 - DNA, 19 bp, Homo sapiens
  siRNA target sequence for CDCA1 (NM_031423.2,888-906).
gattctccagagaagttaa

SEQ ID NO: 278239 - DNA, 19 bp, Homo sapiens
  siRNA target sequence for CDCA1 (NM_031423.2,930-948).
gatacggtccagaagctta

SEQ ID NO: 278240 - DNA, 19 bp, Homo sapiens
  siRNA target sequence for CDCA1 (NM_031423.2,934-952).
cggtccagaagcttaaaaa

SEQ ID NO: 278241 - DNA, 19 bp, Homo sapiens
  siRNA target sequence for CDCA1 (NM_031423.2,1020-1038).
cagttggaagtgcagttat

SEQ ID NO: 278242 - DNA, 19 bp, Homo sapiens
  siRNA target sequence for CDCA1 (NM_031423.2,1022-1040).
gttggaagtgcagttatat

SEQ ID NO: 278243 - DNA, 19 bp, Homo sapiens
  siRNA target sequence for CDCA1 (NM_031423.2,1025-1043).
ggaagtgcagttatatcaa

SEQ ID NO: 278244 - DNA, 19 bp, Homo sapiens
  siRNA target sequence for CDCA1 (NM_031423.2,1026-1044).
gaagtgcagttatatcaaa

SEQ ID NO: 278245 - DNA, 19 bp, Homo sapiens
  siRNA target sequence for CDCA1 (NM_031423.2,1171-1189).
cgttcaaaagactgatgat

SEQ ID NO: 278246 - DNA, 19 bp, Homo sapiens
  siRNA target sequence for CDCA1 (NM_031423.2,1172-1190).
gttcaaaagactgatgatt

SEQ ID NO: 278247 - DNA, 19 bp, Homo sapiens
  siRNA target sequence for CDCA1 (NM_031423.2,1215-1233).
gcacaattcaaaataaata

SEQ ID NO: 278248 - DNA, 19 bp, Homo sapiens
  siRNA target sequence for CDCA1 (NM_031423.2,1242-1260).
gaagatgttaagcaataca

SEQ ID NO: 278249 - DNA, 19 bp, Homo sapiens
  siRNA target sequence for CDCA1 (NM_031423.2,1269-1287).
gtaattgaggattgcaata

SEQ ID NO: 278250 - DNA, 19 bp, Homo sapiens
  siRNA target sequence for CDCA1 (NM_031423.2,1277-1295).
ggattgcaataaagttcaa

SEQ ID NO: 278251 - DNA, 19 bp, Homo sapiens
  siRNA target sequence for CDCA1 (NM_031423.2,1317-1335).
gaacgagtaaccacaatta

SEQ ID NO: 278252 - DNA, 19 bp, Homo sapiens
  siRNA target sequence for CDCA1 (NM_031423.2,1321-1339).
gagtaaccacaattaatca

SEQ ID NO: 278253 - DNA, 19 bp, Homo sapiens
  siRNA target sequence for CDCA1 (NM_031423.2,1478-1496).
ggactcctatgctaagata

SEQ ID NO: 278254 - DNA, 19 bp, Homo sapiens
  siRNA target sequence for CDCA1 (NM_031423.2,1483-1501).
cctatgctaagatagatga

SEQ ID NO: 278255 - DNA, 19 bp, Homo sapiens
  siRNA target sequence for CDCA1 (NM_145697.1,855-873).
gaattcaggagctacaaca

SEQ ID NO: 278256 - DNA, 19 bp, Homo sapiens
  siRNA target sequence for CDCA3 (NM_031299.3,297-315).
gctctcctactcttggtat

SEQ ID NO: 278257 - DNA, 19 bp, Homo sapiens
  siRNA target sequence for CDCA3 (NM_031299.3,317-335).
gcacggacacctatgaaga

SEQ ID NO: 278258 - DNA, 19 bp, Homo sapiens
  siRNA target sequence for CDCA3 (NM_031299.3,367-385).
gaaacagctgagtgaagta

SEQ ID NO: 278259 - DNA, 19 bp, Homo sapiens
  siRNA target sequence for CDCA3 (NM_031299.3,434-452).
cccccagaggcacctttat

SEQ ID NO: 278260 - DNA, 19 bp, Homo sapiens
  siRNA target sequence for CDCA3 (NM_031299.3,444-462).
cacctttatcttctgaatt

SEQ ID NO: 278261 - DNA, 19 bp, Homo sapiens
  siRNA target sequence for CDCA3 (NM_031299.3,470-488).
cctctgggtacccagttat

SEQ ID NO: 278262 - DNA, 19 bp, Homo sapiens
  siRNA target sequence for CDCA3 (NM_031299.3,530-548).
ccctccaaacaggtgtttt

SEQ ID NO: 278263 - DNA, 19 bp, Homo sapiens
  siRNA target sequence for CDCA3 (NM_031299.3,641-659).
ggttctatgcgcaatagat

SEQ ID NO: 278264 - DNA, 19 bp, Homo sapiens
  siRNA target sequence for CDCA3 (NM_031299.3,756-774).
ggccttcacccctaagtga

SEQ ID NO: 278265 - DNA, 19 bp, Homo sapiens
  siRNA target sequence for CDCA3 (NM_031299.3,764-782).
cccctaagtgaaaatgtta

SEQ ID NO: 278266 - DNA, 19 bp, Homo sapiens
  siRNA target sequence for CDCA3 (NM_031299.3,810-828).
gaactggacgacttctgaa

SEQ ID NO: 278267 - DNA, 19 bp, Homo sapiens
  siRNA target sequence for CDKAL1 (NM_017774.1,153-171).
cgtgtctcaggaagattca

SEQ ID NO: 278268 - DNA, 19 bp, Homo sapiens
  siRNA target sequence for CDKAL1 (NM_017774.1,176-194).
cacaagataggcattttgt

SEQ ID NO: 278269 - DNA, 19 bp, Homo sapiens
  siRNA target sequence for CDKAL1 (NM_017774.1,181-199).
gataggcattttgtaagaa

SEQ ID NO: 278270 - DNA, 19 bp, Homo sapiens
  siRNA target sequence for CDKAL1 (NM_017774.1,290-308).
gcatacagaaaatttggat

SEQ ID NO: 278271 - DNA, 19 bp, Homo sapiens
  siRNA target sequence for CDKAL1 (NM_017774.1,314-332).
catggggttgttctcataa

SEQ ID NO: 278272 - DNA, 19 bp, Homo sapiens
  siRNA target sequence for CDKAL1 (NM_017774.1,317-335).
ggggttgttctcataataa

SEQ ID NO: 278273 - DNA, 19 bp, Homo sapiens
  siRNA target sequence for CDKAL1 (NM_017774.1,318-336).
gggttgttctcataataat

SEQ ID NO: 278274 - DNA, 19 bp, Homo sapiens
  siRNA target sequence for CDKAL1 (NM_017774.1,319-337).
ggttgttctcataataatt

SEQ ID NO: 278275 - DNA, 19 bp, Homo sapiens
  siRNA target sequence for CDKAL1 (NM_017774.1,323-341).
gttctcataataattcaga

SEQ ID NO: 278276 - DNA, 19 bp, Homo sapiens
  siRNA target sequence for CDKAL1 (NM_017774.1,397-415).
gcatccgatgcagatttat

SEQ ID NO: 278277 - DNA, 19 bp, Homo sapiens
  siRNA target sequence for CDKAL1 (NM_017774.1,421-439).
ctgaacagttgcactgtaa

SEQ ID NO: 278278 - DNA, 19 bp, Homo sapiens
  siRNA target sequence for CDKAL1 (NM_017774.1,423-441).
gaacagttgcactgtaaaa

SEQ ID NO: 278279 - DNA, 19 bp, Homo sapiens
  siRNA target sequence for CDKAL1 (NM_017774.1,454-472).
gaccactttagaaactcaa

SEQ ID NO: 278280 - DNA, 19 bp, Homo sapiens
  siRNA target sequence for CDKAL1 (NM_017774.1,601-619).
gttgtggaggagacaatta

SEQ ID NO: 278281 - DNA, 19 bp, Homo sapiens
  siRNA target sequence for CDKAL1 (NM_017774.1,642-660).
gggtcagaaaaaggataat

SEQ ID NO: 278282 - DNA, 19 bp, Homo sapiens
  siRNA target sequence for CDKAL1 (NM_017774.1,673-691).
gggggagcacgattggatt

SEQ ID NO: 278283 - DNA, 19 bp, Homo sapiens
  siRNA target sequence for CDKAL1 (NM_017774.1,674-692).
ggggagcacgattggattt

SEQ ID NO: 278284 - DNA, 19 bp, Homo sapiens
  siRNA target sequence for CDKAL1 (NM_017774.1,693-711).
gccgaagattaggaagaat

SEQ ID NO: 278285 - DNA, 19 bp, Homo sapiens
  siRNA target sequence for CDKAL1 (NM_017774.1,704-722).
ggaagaatccactgataga

SEQ ID NO: 278286 - DNA, 19 bp, Homo sapiens
  siRNA target sequence for CDKAL1 (NM_017774.1,705-723).
gaagaatccactgatagaa

SEQ ID NO: 278287 - DNA, 19 bp, Homo sapiens
  siRNA target sequence for CDKAL1 (NM_017774.1,797-815).
ccagttatccaattgatga

SEQ ID NO: 278288 - DNA, 19 bp, Homo sapiens
  siRNA target sequence for CDKAL1 (NM_017774.1,798-816).
cagttatccaattgatgaa

SEQ ID NO: 278289 - DNA, 19 bp, Homo sapiens
  siRNA target sequence for CDKAL1 (NM_017774.1,820-838).
gtagatagagccaaacaat

SEQ ID NO: 278290 - DNA, 19 bp, Homo sapiens
  siRNA target sequence for CDKAL1 (NM_017774.1,823-841).
gatagagccaaacaatctt

SEQ ID NO: 278291 - DNA, 19 bp, Homo sapiens
  siRNA target sequence for CDKAL1 (NM_017774.1,827-845).
gagccaaacaatcttttca

SEQ ID NO: 278292 - DNA, 19 bp, Homo sapiens
  siRNA target sequence for CDKAL1 (NM_017774.1,850-868).
ggtgtttgtgagatatggt

SEQ ID NO: 278293 - DNA, 19 bp, Homo sapiens
  siRNA target sequence for CDKAL1 (NM_017774.1,851-869).
gtgtttgtgagatatggtt

SEQ ID NO: 278294 - DNA, 19 bp, Homo sapiens
  siRNA target sequence for CDKAL1 (NM_017774.1,888-906).
ggcttatggcagagatatt

SEQ ID NO: 278295 - DNA, 19 bp, Homo sapiens
  siRNA target sequence for CDKAL1 (NM_017774.1,967-985).
ctgaggcttggcatgacaa

SEQ ID NO: 278296 - DNA, 19 bp, Homo sapiens
  siRNA target sequence for CDKAL1 (NM_017774.1,969-987).
gaggcttggcatgacaaat

SEQ ID NO: 278297 - DNA, 19 bp, Homo sapiens
  siRNA target sequence for CDKAL1 (NM_017774.1,981-999).
gacaaatccgccctatatt

SEQ ID NO: 278298 - DNA, 19 bp, Homo sapiens
  siRNA target sequence for CDKAL1 (NM_017774.1,983-1001).
caaatccgccctatatttt

SEQ ID NO: 278299 - DNA, 19 bp, Homo sapiens
  siRNA target sequence for CDKAL1 (NM_017774.1,1079-1097).
cctccgacagcgtactcat

SEQ ID NO: 278300 - DNA, 19 bp, Homo sapiens
  siRNA target sequence for CDKAL1 (NM_017774.1,1084-1102).
gacagcgtactcatggaaa

SEQ ID NO: 278301 - DNA, 19 bp, Homo sapiens
  siRNA target sequence for CDKAL1 (NM_017774.1,1088-1106).
gcgtactcatggaaatgaa

SEQ ID NO: 278302 - DNA, 19 bp, Homo sapiens
  siRNA target sequence for CDKAL1 (NM_017774.1,1131-1149).
caaaagagtagtggatttt

SEQ ID NO: 278303 - DNA, 19 bp, Homo sapiens
  siRNA target sequence for CDKAL1 (NM_017774.1,1367-1385).
ctcgggtgtttcattctta

SEQ ID NO: 278304 - DNA, 19 bp, Homo sapiens
  siRNA target sequence for CDKAL1 (NM_017774.1,1388-1406).
gtccatatgatcacaagat

SEQ ID NO: 278305 - DNA, 19 bp, Homo sapiens
  siRNA target sequence for CDKAL1 (NM_017774.1,1409-1427).
gtgaaagacaacaagtgtt

SEQ ID NO: 278306 - DNA, 19 bp, Homo sapiens
  siRNA target sequence for CDKAL1 (NM_017774.1,1462-1480).
gttgcacacaatcaattct

SEQ ID NO: 278307 - DNA, 19 bp, Homo sapiens
  siRNA target sequence for CDKAL1 (NM_017774.1,1798-1816).
gctctgctgggtcttcttt

SEQ ID NO: 278308 - DNA, 19 bp, Homo sapiens
  siRNA target sequence for CENPH (NM_022909.3,234-252).
gacaaaacaacaactctta

SEQ ID NO: 278309 - DNA, 19 bp, Homo sapiens
  siRNA target sequence for CENPH (NM_022909.3,290-308).
ctccagaacaaattatgca

SEQ ID NO: 278310 - DNA, 19 bp, Homo sapiens
  siRNA target sequence for CENPH (NM_022909.3,397-415).
gacaggatgagactttcaa

SEQ ID NO: 278311 - DNA, 19 bp, Homo sapiens
  siRNA target sequence for CENPH (NM_022909.3,407-425).
gactttcaactgcacttaa

SEQ ID NO: 278312 - DNA, 19 bp, Homo sapiens
  siRNA target sequence for CENPH (NM_022909.3,455-473).
ctagtgtgctcatggataa

SEQ ID NO: 278313 - DNA, 19 bp, Homo sapiens
  siRNA target sequence for CENPH (NM_022909.3,458-476).
gtgtgctcatggataacat

SEQ ID NO: 278314 - DNA, 19 bp, Homo sapiens
  siRNA target sequence for CENPH (NM_022909.3,481-499).
cacctattagagctaaata

SEQ ID NO: 278315 - DNA, 19 bp, Homo sapiens
  siRNA target sequence for CENPH (NM_022909.3,483-501).
cctattagagctaaataaa

SEQ ID NO: 278316 - DNA, 19 bp, Homo sapiens
  siRNA target sequence for CENPH (NM_022909.3,484-502).
ctattagagctaaataaat

SEQ ID NO: 278317 - DNA, 19 bp, Homo sapiens
  siRNA target sequence for CENPH (NM_022909.3,675-693).
gatcatacgacaaaaccta

SEQ ID NO: 278318 - DNA, 19 bp, Homo sapiens
  siRNA target sequence for CENPH (NM_022909.3,713-731).
ctactgttattcaacatgt

SEQ ID NO: 278319 - DNA, 19 bp, Homo sapiens
  siRNA target sequence for CENPH (NM_022909.3,801-819).
gcagcttgagaagaatgtt

SEQ ID NO: 278320 - DNA, 19 bp, Homo sapiens
  siRNA target sequence for CENPJ (NM_018451.2,222-240).
gccaacctcttcagagtta

SEQ ID NO: 278321 - DNA, 19 bp, Homo sapiens
  siRNA target sequence for CENPJ (NM_018451.2,228-246).
ctcttcagagttaaacagt

SEQ ID NO: 278322 - DNA, 19 bp, Homo sapiens
  siRNA target sequence for CENPJ (NM_018451.2,286-304).
cgggctggggtcatattaa

SEQ ID NO: 278323 - DNA, 19 bp, Homo sapiens
  siRNA target sequence for CENPJ (NM_018451.2,287-305).
gggctggggtcatattaaa

SEQ ID NO: 278324 - DNA, 19 bp, Homo sapiens
  siRNA target sequence for CENPJ (NM_018451.2,297-315).
catattaaatcgtggattt

SEQ ID NO: 278325 - DNA, 19 bp, Homo sapiens
  siRNA target sequence for CENPJ (NM_018451.2,343-361).
cgagcagctgtggacattt

SEQ ID NO: 278326 - DNA, 19 bp, Homo sapiens
  siRNA target sequence for CENPJ (NM_018451.2,362-380).
ctaccagctttcctattaa

SEQ ID NO: 278327 - DNA, 19 bp, Homo sapiens
  siRNA target sequence for CENPJ (NM_018451.2,453-471).
gtcaaacaacccttacaaa

SEQ ID NO: 278328 - DNA, 19 bp, Homo sapiens
  siRNA target sequence for CENPJ (NM_018451.2,468-486).
caaaccacagtcagataaa

SEQ ID NO: 278329 - DNA, 19 bp, Homo sapiens
  siRNA target sequence for CENPJ (NM_018451.2,473-491).
cacagtcagataaatctga

SEQ ID NO: 278330 - DNA, 19 bp, Homo sapiens
  siRNA target sequence for CENPJ (NM_018451.2,768-786).
cacacttccaggtttgagt

SEQ ID NO: 278331 - DNA, 19 bp, Homo sapiens
  siRNA target sequence for CENPJ (NM_018451.2,902-920).
catacccgtccaacatttt

SEQ ID NO: 278332 - DNA, 19 bp, Homo sapiens
  siRNA target sequence for CENPJ (NM_018451.2,1069-1087).
cctacaggagaaagtatct

SEQ ID NO: 278333 - DNA, 19 bp, Homo sapiens
  siRNA target sequence for CENPJ (NM_018451.2,1134-1152).
gaacttacaaaaacatgat

SEQ ID NO: 278334 - DNA, 19 bp, Homo sapiens
  siRNA target sequence for CENPJ (NM_018451.2,1185-1203).
gcccattaaagctgctatt

SEQ ID NO: 278335 - DNA, 19 bp, Homo sapiens
  siRNA target sequence for CENPJ (NM_018451.2,1216-1234).
cagacctttgaagattact

SEQ ID NO: 278336 - DNA, 19 bp, Homo sapiens
  siRNA target sequence for CENPJ (NM_018451.2,1300-1318).
ccattgccaatcaaagcaa

SEQ ID NO: 278337 - DNA, 19 bp, Homo sapiens
  siRNA target sequence for CENPJ (NM_018451.2,1342-1360).
cgaggagaaggtttagcta

SEQ ID NO: 278338 - DNA, 19 bp, Homo sapiens
  siRNA target sequence for CENPJ (NM_018451.2,1346-1364).
gagaaggtttagctagatt

SEQ ID NO: 278339 - DNA, 19 bp, Homo sapiens
  siRNA target sequence for CENPJ (NM_018451.2,1351-1369).
ggtttagctagatttacta

SEQ ID NO: 278340 - DNA, 19 bp, Homo sapiens
  siRNA target sequence for CENPJ (NM_018451.2,1367-1385).
ctaatgccaaatctaagtt

SEQ ID NO: 278341 - DNA, 19 bp, Homo sapiens
  siRNA target sequence for CENPJ (NM_018451.2,1440-1458).
gccgctgtttaaaatggat

SEQ ID NO: 278342 - DNA, 19 bp, Homo sapiens
  siRNA target sequence for CENPJ (NM_018451.2,1441-1459).
ccgctgtttaaaatggata

SEQ ID NO: 278343 - DNA, 19 bp, Homo sapiens
  siRNA target sequence for CENPJ (NM_018451.2,1473-1491).
gcggaaaaccgctcttaaa

SEQ ID NO: 278344 - DNA, 19 bp, Homo sapiens
  siRNA target sequence for CENPJ (NM_018451.2,1474-1492).
cggaaaaccgctcttaaaa

SEQ ID NO: 278345 - DNA, 19 bp, Homo sapiens
  siRNA target sequence for CENPJ (NM_018451.2,1507-1525).
gcagacaaccctatcctta

SEQ ID NO: 278346 - DNA, 19 bp, Homo sapiens
  siRNA target sequence for CENPJ (NM_018451.2,1616-1634).
ctccgtcaggattgaaaat

SEQ ID NO: 278347 - DNA, 19 bp, Homo sapiens
  siRNA target sequence for CENPJ (NM_018451.2,1638-1656).
gacggggaagaaatgtgat

SEQ ID NO: 278348 - DNA, 19 bp, Homo sapiens
  siRNA target sequence for CENPJ (NM_018451.2,1845-1863).
catgaaagagtctgaatct

SEQ ID NO: 278349 - DNA, 19 bp, Homo sapiens
  siRNA target sequence for CENPJ (NM_018451.2,2090-2108).
cggcagatcccattagtca

SEQ ID NO: 278350 - DNA, 19 bp, Homo sapiens
  siRNA target sequence for CENPJ (NM_018451.2,2091-2109).
ggcagatcccattagtcat

SEQ ID NO: 278351 - DNA, 19 bp, Homo sapiens
  siRNA target sequence for CENPJ (NM_018451.2,2092-2110).
gcagatcccattagtcatt

SEQ ID NO: 278352 - DNA, 19 bp, Homo sapiens
  siRNA target sequence for CENPJ (NM_018451.2,2095-2113).
gatcccattagtcattgta

SEQ ID NO: 278353 - DNA, 19 bp, Homo sapiens
  siRNA target sequence for CENPJ (NM_018451.2,2111-2129).
gtaaccgcagtgaggattt

SEQ ID NO: 278354 - DNA, 19 bp, Homo sapiens
  siRNA target sequence for CENPJ (NM_018451.2,2211-2229).
gagggaacagccttgtaaa

SEQ ID NO: 278355 - DNA, 19 bp, Homo sapiens
  siRNA target sequence for CENPJ (NM_018451.2,2244-2262).
ccaaaagagcacttctgaa

SEQ ID NO: 278356 - DNA, 19 bp, Homo sapiens
  siRNA target sequence for CENPJ (NM_018451.2,2335-2353).
cagcttgatgttaccataa

SEQ ID NO: 278357 - DNA, 19 bp, Homo sapiens
  siRNA target sequence for CENPJ (NM_018451.2,2404-2422).
ccacaagtctgtgatgata

SEQ ID NO: 278358 - DNA, 19 bp, Homo sapiens
  siRNA target sequence for CENPJ (NM_018451.2,2416-2434).
gatgataaggggcctttta

SEQ ID NO: 278359 - DNA, 19 bp, Homo sapiens
  siRNA target sequence for CENPJ (NM_018451.2,2484-2502).
gtctgataaagattacagt

SEQ ID NO: 278360 - DNA, 19 bp, Homo sapiens
  siRNA target sequence for CENPJ (NM_018451.2,2501-2519).
gtagcgatgagtctatcat

SEQ ID NO: 278361 - DNA, 19 bp, Homo sapiens
  siRNA target sequence for CENPJ (NM_018451.2,2511-2529).
gtctatcatggaaagcata

SEQ ID NO: 278362 - DNA, 19 bp, Homo sapiens
  siRNA target sequence for CENPJ (NM_018451.2,2609-2627).
ctgaccttgaagagaattt

SEQ ID NO: 278363 - DNA, 19 bp, Homo sapiens
  siRNA target sequence for CENPJ (NM_018451.2,2677-2695).
cagacatgctaccctaata

SEQ ID NO: 278364 - DNA, 19 bp, Homo sapiens
  siRNA target sequence for CENPJ (NM_018451.2,2679-2697).
gacatgctaccctaataat

SEQ ID NO: 278365 - DNA, 19 bp, Homo sapiens
  siRNA target sequence for CENPJ (NM_018451.2,2681-2699).
catgctaccctaataatga

SEQ ID NO: 278366 - DNA, 19 bp, Homo sapiens
  siRNA target sequence for CENPJ (NM_018451.2,2688-2706).
ccctaataatgaaataggt

SEQ ID NO: 278367 - DNA, 19 bp, Homo sapiens
  siRNA target sequence for CENPJ (NM_018451.2,2690-2708).
ctaataatgaaataggtat

SEQ ID NO: 278368 - DNA, 19 bp, Homo sapiens
  siRNA target sequence for CENPJ (NM_018451.2,2704-2722).
ggtatcctggacaaaacaa

SEQ ID NO: 278369 - DNA, 19 bp, Homo sapiens
  siRNA target sequence for CENPJ (NM_018451.2,2792-2810).
ctacatcggagctgatgat

SEQ ID NO: 278370 - DNA, 19 bp, Homo sapiens
  siRNA target sequence for CENPJ (NM_018451.2,2977-2995).
gagaacgcatctttagcta

SEQ ID NO: 278371 - DNA, 19 bp, Homo sapiens
  siRNA target sequence for CENPJ (NM_018451.2,2979-2997).
gaacgcatctttagctaaa

SEQ ID NO: 278372 - DNA, 19 bp, Homo sapiens
  siRNA target sequence for CENPJ (NM_018451.2,3047-3065).
cagacttcgaacaacagaa

SEQ ID NO: 278373 - DNA, 19 bp, Homo sapiens
  siRNA target sequence for CENPJ (NM_018451.2,3079-3097).
gctcgaatagaagagttta

SEQ ID NO: 278374 - DNA, 19 bp, Homo sapiens
  siRNA target sequence for CENPJ (NM_018451.2,3126-3144).
ggaacgtaaagtttttgaa

SEQ ID NO: 278375 - DNA, 19 bp, Homo sapiens
  siRNA target sequence for CENPJ (NM_018451.2,3220-3238).
gcagatttacgggaagatt

SEQ ID NO: 278376 - DNA, 19 bp, Homo sapiens
  siRNA target sequence for CENPJ (NM_018451.2,3278-3296).
gtctcagaagccagataca

SEQ ID NO: 278377 - DNA, 19 bp, Homo sapiens
  siRNA target sequence for CENPJ (NM_018451.2,3287-3305).
gccagatacaaatgttagt

SEQ ID NO: 278378 - DNA, 19 bp, Homo sapiens
  siRNA target sequence for CENPJ (NM_018451.2,3420-3438).
gcttgcgaacacatctgtt

SEQ ID NO: 278379 - DNA, 19 bp, Homo sapiens
  siRNA target sequence for CENPJ (NM_018451.2,3425-3443).
cgaacacatctgttcgatt

SEQ ID NO: 278380 - DNA, 19 bp, Homo sapiens
  siRNA target sequence for CENPJ (NM_018451.2,3429-3447).
cacatctgttcgatttcaa

SEQ ID NO: 278381 - DNA, 19 bp, Homo sapiens
  siRNA target sequence for CENPJ (NM_018451.2,3431-3449).
catctgttcgatttcaaaa

SEQ ID NO: 278382 - DNA, 19 bp, Homo sapiens
  siRNA target sequence for CENPJ (NM_018451.2,3545-3563).
ctcgtgatttaggcaattt

SEQ ID NO: 278383 - DNA, 19 bp, Homo sapiens
  siRNA target sequence for CENPJ (NM_018451.2,3639-3657).
ggaggaagaccaagacata

SEQ ID NO: 278384 - DNA, 19 bp, Homo sapiens
  siRNA target sequence for CENPJ (NM_018451.2,3705-3723).
gaatgggtgccgtgttata

SEQ ID NO: 278385 - DNA, 19 bp, Homo sapiens
  siRNA target sequence for CENPJ (NM_018451.2,3709-3727).
gggtgccgtgttatactgt

SEQ ID NO: 278386 - DNA, 19 bp, Homo sapiens
  siRNA target sequence for CENPJ (NM_018451.2,3710-3728).
ggtgccgtgttatactgtt

SEQ ID NO: 278387 - DNA, 19 bp, Homo sapiens
  siRNA target sequence for CENPJ (NM_018451.2,3732-3750).
caatggaactcgaaaggaa

SEQ ID NO: 278388 - DNA, 19 bp, Homo sapiens
  siRNA target sequence for CENPJ (NM_018451.2,3952-3970).
cctgaccagactgttaaaa

SEQ ID NO: 278389 - DNA, 19 bp, Homo sapiens
  siRNA target sequence for CENPJ (NM_018451.2,3958-3976).
cagactgttaaaaacttat

SEQ ID NO: 278390 - DNA, 19 bp, Homo sapiens
  siRNA target sequence for CENPJ (NM_018451.2,4006-4024).
ccagatggtacaattgtca

SEQ ID NO: 278391 - DNA, 19 bp, Homo sapiens
  siRNA target sequence for CENPJ (NM_018451.2,4066-4084).
ggccaaagagaactacata

SEQ ID NO: 278392 - DNA, 19 bp, Homo sapiens
  siRNA target sequence for CENPJ (NM_018451.2,4068-4086).
ccaaagagaactacatact

SEQ ID NO: 278393 - DNA, 19 bp, Homo sapiens
  siRNA target sequence for CENPJ (NM_018451.2,4081-4099).
catactgcccagttcaaga

SEQ ID NO: 278394 - DNA, 19 bp, Homo sapiens
  siRNA target sequence for CENPJ (NM_018451.2,4164-4182).
cagatccggtcggataaga

SEQ ID NO: 278395 - DNA, 19 bp, Homo sapiens
  siRNA target sequence for CENPJ (NM_018451.2,4166-4184).
gatccggtcggataagagt

SEQ ID NO: 278396 - DNA, 19 bp, Homo sapiens
  siRNA target sequence for CENPJ (NM_018451.2,4169-4187).
ccggtcggataagagttaa

SEQ ID NO: 278397 - DNA, 19 bp, Homo sapiens
  siRNA target sequence for CENPJ (NM_018451.2,4172-4190).
gtcggataagagttaagga

SEQ ID NO: 278398 - DNA, 19 bp, Homo sapiens
  siRNA target sequence for CER1 (NM_005454.1,333-351).
cctcatccagccgatagat

SEQ ID NO: 278399 - DNA, 19 bp, Homo sapiens
  siRNA target sequence for CER1 (NM_005454.1,342-360).
gccgatagatggaatgaaa

SEQ ID NO: 278400 - DNA, 19 bp, Homo sapiens
  siRNA target sequence for CER1 (NM_005454.1,403-421).
caccacttcatgttcagaa

SEQ ID NO: 278401 - DNA, 19 bp, Homo sapiens
  siRNA target sequence for CER1 (NM_005454.1,495-513).
gcccttcagccagactata

SEQ ID NO: 278402 - DNA, 19 bp, Homo sapiens
  siRNA target sequence for CER1 (NM_005454.1,496-514).
cccttcagccagactataa

SEQ ID NO: 278403 - DNA, 19 bp, Homo sapiens
  siRNA target sequence for CER1 (NM_005454.1,524-542).
gctgtgaaaaagtagttgt

SEQ ID NO: 278404 - DNA, 19 bp, Homo sapiens
  siRNA target sequence for CER1 (NM_005454.1,527-545).
gtgaaaaagtagttgttca

SEQ ID NO: 278405 - DNA, 19 bp, Homo sapiens
  siRNA target sequence for CER1 (NM_005454.1,564-582).
gaaatgcgggtctgttcat

SEQ ID NO: 278406 - DNA, 19 bp, Homo sapiens
  siRNA target sequence for CER1 (NM_005454.1,570-588).
cgggtctgttcattttcct

SEQ ID NO: 278407 - DNA, 19 bp, Homo sapiens
  siRNA target sequence for CFDP1 (NM_006324.1,166-184).
gccgtcgggtggagagtat

SEQ ID NO: 278408 - DNA, 19 bp, Homo sapiens
  siRNA target sequence for CFDP1 (NM_006324.1,169-187).
gtcgggtggagagtatagt

SEQ ID NO: 278409 - DNA, 19 bp, Homo sapiens
  siRNA target sequence for CFDP1 (NM_006324.1,171-189).
cgggtggagagtatagtga

SEQ ID NO: 278410 - DNA, 19 bp, Homo sapiens
  siRNA target sequence for CFDP1 (NM_006324.1,172-190).
gggtggagagtatagtgaa

SEQ ID NO: 278411 - DNA, 19 bp, Homo sapiens
  siRNA target sequence for CFDP1 (NM_006324.1,300-318).
gacaaggtggcctctcatt

SEQ ID NO: 278412 - DNA, 19 bp, Homo sapiens
  siRNA target sequence for CFDP1 (NM_006324.1,334-352).
ggaggatgccaattcagaa

SEQ ID NO: 278413 - DNA, 19 bp, Homo sapiens
  siRNA target sequence for CFDP1 (NM_006324.1,335-353).
gaggatgccaattcagaat

SEQ ID NO: 278414 - DNA, 19 bp, Homo sapiens
  siRNA target sequence for CFDP1 (NM_006324.1,453-471).
ccagcttcctcaatgatgt

SEQ ID NO: 278415 - DNA, 19 bp, Homo sapiens
  siRNA target sequence for CFDP1 (NM_006324.1,490-508).
gcccccaagtacacaagtt

SEQ ID NO: 278416 - DNA, 19 bp, Homo sapiens
  siRNA target sequence for CFDP1 (NM_006324.1,495-513).
caagtacacaagttaagaa

SEQ ID NO: 278417 - DNA, 19 bp, Homo sapiens
  siRNA target sequence for CFDP1 (NM_006324.1,523-541).
gactgaagagacaagttca

SEQ ID NO: 278418 - DNA, 19 bp, Homo sapiens
  siRNA target sequence for CFDP1 (NM_006324.1,530-548).
gagacaagttcaagtaaat

SEQ ID NO: 278419 - DNA, 19 bp, Homo sapiens
  siRNA target sequence for CFDP1 (NM_006324.1,534-552).
caagttcaagtaaattgtt

SEQ ID NO: 278420 - DNA, 19 bp, Homo sapiens
  siRNA target sequence for CFDP1 (NM_006324.1,629-647).
gaagaagtaagggtaacta

SEQ ID NO: 278421 - DNA, 19 bp, Homo sapiens
  siRNA target sequence for CFDP1 (NM_006324.1,749-767).
gccgggtcagggttaaaaa

SEQ ID NO: 278422 - DNA, 19 bp, Homo sapiens
  siRNA target sequence for CFDP1 (NM_006324.1,980-998).
gatctcaggctgagcaaaa

SEQ ID NO: 278423 - DNA, 19 bp, Homo sapiens
  siRNA target sequence for CFDP1 (NM_006324.1,989-1007).
ctgagcaaaatgaaacctt

SEQ ID NO: 278424 - DNA, 19 bp, Homo sapiens
  siRNA target sequence for CG005 (NM_014887.1,219-237).
gagtgagccacgctgtaaa

SEQ ID NO: 278425 - DNA, 19 bp, Homo sapiens
  siRNA target sequence for CG005 (NM_014887.1,229-247).
cgctgtaaaaaattgaagt

SEQ ID NO: 278426 - DNA, 19 bp, Homo sapiens
  siRNA target sequence for CG005 (NM_014887.1,252-270).
cacagagtcgtatgttttt

SEQ ID NO: 278427 - DNA, 19 bp, Homo sapiens
  siRNA target sequence for CG005 (NM_014887.1,254-272).
cagagtcgtatgtttttca

SEQ ID NO: 278428 - DNA, 19 bp, Homo sapiens
  siRNA target sequence for CG005 (NM_014887.1,256-274).
gagtcgtatgtttttcaca

SEQ ID NO: 278429 - DNA, 19 bp, Homo sapiens
  siRNA target sequence for CG005 (NM_014887.1,260-278).
cgtatgtttttcacaatca

SEQ ID NO: 278430 - DNA, 19 bp, Homo sapiens
  siRNA target sequence for CG005 (NM_014887.1,349-367).
gtcagaggacatagttatt

SEQ ID NO: 278431 - DNA, 19 bp, Homo sapiens
  siRNA target sequence for CG005 (NM_014887.1,362-380).
gttatttgcaggagaacaa

SEQ ID NO: 278432 - DNA, 19 bp, Homo sapiens
  siRNA target sequence for CG005 (NM_014887.1,404-422).
gacctttgcatgatgagat

SEQ ID NO: 278433 - DNA, 19 bp, Homo sapiens
  siRNA target sequence for CG005 (NM_014887.1,415-433).
gatgagatgcctggtaata

SEQ ID NO: 278434 - DNA, 19 bp, Homo sapiens
  siRNA target sequence for CG005 (NM_014887.1,428-446).
gtaatagaccagatgttat

SEQ ID NO: 278435 - DNA, 19 bp, Homo sapiens
  siRNA target sequence for CG005 (NM_014887.1,452-470).
ccattgattcacaggtttt

SEQ ID NO: 278436 - DNA, 19 bp, Homo sapiens
  siRNA target sequence for CG005 (NM_014887.1,478-496).
gcacgtcctccattagtat

SEQ ID NO: 278437 - DNA, 19 bp, Homo sapiens
  siRNA target sequence for CG005 (NM_014887.1,497-515).
ccgcagacgatgagatata

SEQ ID NO: 278438 - DNA, 19 bp, Homo sapiens
  siRNA target sequence for CG005 (NM_014887.1,498-516).
cgcagacgatgagatatat

SEQ ID NO: 278439 - DNA, 19 bp, Homo sapiens
  siRNA target sequence for CG005 (NM_014887.1,499-517).
gcagacgatgagatatata

SEQ ID NO: 278440 - DNA, 19 bp, Homo sapiens
  siRNA target sequence for CG005 (NM_014887.1,502-520).
gacgatgagatatatagca

SEQ ID NO: 278441 - DNA, 19 bp, Homo sapiens
  siRNA target sequence for CG005 (NM_014887.1,530-548).
catttataggacccattta

SEQ ID NO: 278442 - DNA, 19 bp, Homo sapiens
  siRNA target sequence for CG005 (NM_014887.1,582-600).
gaggaatgaggcacatgtt

SEQ ID NO: 278443 - DNA, 19 bp, Homo sapiens
  siRNA target sequence for CG005 (NM_014887.1,727-745).
ggttttgagaacagttgta

SEQ ID NO: 278444 - DNA, 19 bp, Homo sapiens
  siRNA target sequence for CG005 (NM_014887.1,728-746).
gttttgagaacagttgtaa

SEQ ID NO: 278445 - DNA, 19 bp, Homo sapiens
  siRNA target sequence for CG005 (NM_014887.1,733-751).
gagaacagttgtaaagaat

SEQ ID NO: 278446 - DNA, 19 bp, Homo sapiens
  siRNA target sequence for CG005 (NM_014887.1,735-753).
gaacagttgtaaagaatct

SEQ ID NO: 278447 - DNA, 19 bp, Homo sapiens
  siRNA target sequence for CG005 (NM_014887.1,832-850).
gatcttagtaataaagcta

SEQ ID NO: 278448 - DNA, 19 bp, Homo sapiens
  siRNA target sequence for CG005 (NM_014887.1,848-866).
ctatgccatcacattgtga

SEQ ID NO: 278449 - DNA, 19 bp, Homo sapiens
  siRNA target sequence for CG005 (NM_014887.1,863-881).
gtgattatcagcagaactt

SEQ ID NO: 278450 - DNA, 19 bp, Homo sapiens
  siRNA target sequence for CG005 (NM_014887.1,883-901).
gggaatgagccagacaaat

SEQ ID NO: 278451 - DNA, 19 bp, Homo sapiens
  siRNA target sequence for CG005 (NM_014887.1,906-924).
ctgtaatggacaagtaata

SEQ ID NO: 278452 - DNA, 19 bp, Homo sapiens
  siRNA target sequence for CG005 (NM_014887.1,937-955).
gacacttcatttacttctt

SEQ ID NO: 278453 - DNA, 19 bp, Homo sapiens
  siRNA target sequence for CG005 (NM_014887.1,969-987).
gcagtcagtatatcctttt

SEQ ID NO: 278454 - DNA, 19 bp, Homo sapiens
  siRNA target sequence for CG005 (NM_014887.1,1012-1030).
cccagtttgaactatcatt

SEQ ID NO: 278455 - DNA, 19 bp, Homo sapiens
  siRNA target sequence for CG005 (NM_014887.1,1014-1032).
cagtttgaactatcattta

SEQ ID NO: 278456 - DNA, 19 bp, Homo sapiens
  siRNA target sequence for CG005 (NM_014887.1,1020-1038).
gaactatcatttaaacatt

SEQ ID NO: 278457 - DNA, 19 bp, Homo sapiens
  siRNA target sequence for CG005 (NM_014887.1,1047-1065).
cagtggtccaccaaatcca

SEQ ID NO: 278458 - DNA, 19 bp, Homo sapiens
  siRNA target sequence for CG005 (NM_014887.1,1058-1076).
caaatccaccatcaaatat

SEQ ID NO: 278459 - DNA, 19 bp, Homo sapiens
  siRNA target sequence for CG005 (NM_014887.1,1095-1113).
ctctcagatacaaaatgga

SEQ ID NO: 278460 - DNA, 19 bp, Homo sapiens
  siRNA target sequence for CG005 (NM_014887.1,1152-1170).
gacttttgatcagaacaat

SEQ ID NO: 278461 - DNA, 19 bp, Homo sapiens
  siRNA target sequence for CG005 (NM_014887.1,1180-1198).
gactgtagtgagaatagga

SEQ ID NO: 278462 - DNA, 19 bp, Homo sapiens
  siRNA target sequence for CG005 (NM_014887.1,1191-1209).
gaataggagtagtgttcat

SEQ ID NO: 278463 - DNA, 19 bp, Homo sapiens
  siRNA target sequence for CG005 (NM_014887.1,1240-1258).
cgatatgtgagtaatggtt

SEQ ID NO: 278464 - DNA, 19 bp, Homo sapiens
  siRNA target sequence for CG005 (NM_014887.1,1458-1476).
gttcagcactgatgactat

SEQ ID NO: 278465 - DNA, 19 bp, Homo sapiens
  siRNA target sequence for CG005 (NM_014887.1,1463-1481).
gcactgatgactattttca

SEQ ID NO: 278466 - DNA, 19 bp, Homo sapiens
  siRNA target sequence for CG005 (NM_014887.1,1499-1517).
ggtataatgttaatcaact

SEQ ID NO: 278467 - DNA, 19 bp, Homo sapiens
  siRNA target sequence for CG005 (NM_014887.1,1500-1518).
gtataatgttaatcaactt

SEQ ID NO: 278468 - DNA, 19 bp, Homo sapiens
  siRNA target sequence for CG005 (NM_014887.1,1536-1554).
gaaccagaacagagcaaaa

SEQ ID NO: 278469 - DNA, 19 bp, Homo sapiens
  siRNA target sequence for CG005 (NM_014887.1,1870-1888).
ggctctcttggctcacata

SEQ ID NO: 278470 - DNA, 19 bp, Homo sapiens
  siRNA target sequence for CG005 (NM_014887.1,1891-1909).
cgtgtctgtgtcacaaata

SEQ ID NO: 278471 - DNA, 19 bp, Homo sapiens
  siRNA target sequence for CG005 (NM_014887.1,1892-1910).
gtgtctgtgtcacaaataa

SEQ ID NO: 278472 - DNA, 19 bp, Homo sapiens
  siRNA target sequence for CGI-51 (NM_015380.3,292-310).
ggttgttcaacatgttcat

SEQ ID NO: 278473 - DNA, 19 bp, Homo sapiens
  siRNA target sequence for CGI-51 (NM_015380.3,327-345).
ggactaaagatgatatcat

SEQ ID NO: 278474 - DNA, 19 bp, Homo sapiens
  siRNA target sequence for CGI-51 (NM_015380.3,391-409).
ggtaatgcggaaatctcat

SEQ ID NO: 278475 - DNA, 19 bp, Homo sapiens
  siRNA target sequence for CGI-51 (NM_015380.3,405-423).
ctcatgaagcccgtgaaaa

SEQ ID NO: 278476 - DNA, 19 bp, Homo sapiens
  siRNA target sequence for CGI-51 (NM_015380.3,407-425).
catgaagcccgtgaaaaat

SEQ ID NO: 278477 - DNA, 19 bp, Homo sapiens
  siRNA target sequence for CGI-51 (NM_015380.3,428-446).
ctccgtcttggaattttta

SEQ ID NO: 278478 - DNA, 19 bp, Homo sapiens
  siRNA target sequence for CGI-51 (NM_015380.3,430-448).
ccgtcttggaatttttaga

SEQ ID NO: 278479 - DNA, 19 bp, Homo sapiens
  siRNA target sequence for CGI-51 (NM_015380.3,432-450).
gtcttggaatttttagaca

SEQ ID NO: 278480 - DNA, 19 bp, Homo sapiens
  siRNA target sequence for CGI-51 (NM_015380.3,447-465).
gacaagtggatgttttgat

SEQ ID NO: 278481 - DNA, 19 bp, Homo sapiens
  siRNA target sequence for CGI-51 (NM_015380.3,452-470).
gtggatgttttgattgaca

SEQ ID NO: 278482 - DNA, 19 bp, Homo sapiens
  siRNA target sequence for CGI-51 (NM_015380.3,480-498).
gtgatgacgcacttccaaa

SEQ ID NO: 278483 - DNA, 19 bp, Homo sapiens
  siRNA target sequence for CGI-51 (NM_015380.3,506-524).
gacgttacctttgaagtaa

SEQ ID NO: 278484 - DNA, 19 bp, Homo sapiens
  siRNA target sequence for CGI-51 (NM_015380.3,508-526).
cgttacctttgaagtaact

SEQ ID NO: 278485 - DNA, 19 bp, Homo sapiens
  siRNA target sequence for CGI-51 (NM_015380.3,535-553).
gagattaacgggcagttat

SEQ ID NO: 278486 - DNA, 19 bp, Homo sapiens
  siRNA target sequence for CGI-51 (NM_015380.3,537-555).
gattaacgggcagttataa

SEQ ID NO: 278487 - DNA, 19 bp, Homo sapiens
  siRNA target sequence for CGI-51 (NM_015380.3,571-589).
caatgaaggcagtatggta

SEQ ID NO: 278488 - DNA, 19 bp, Homo sapiens
  siRNA target sequence for CGI-51 (NM_015380.3,594-612).
gcctcaagcttcctaatct

SEQ ID NO: 278489 - DNA, 19 bp, Homo sapiens
  siRNA target sequence for CGI-51 (NM_015380.3,700-718).
cggaaacttcgaaagaaat

SEQ ID NO: 278490 - DNA, 19 bp, Homo sapiens
  siRNA target sequence for CGI-51 (NM_015380.3,702-720).
gaaacttcgaaagaaattt

SEQ ID NO: 278491 - DNA, 19 bp, Homo sapiens
  siRNA target sequence for CGI-51 (NM_015380.3,775-793).
gacggacagaggaatgtca

SEQ ID NO: 278492 - DNA, 19 bp, Homo sapiens
  siRNA target sequence for CGI-51 (NM_015380.3,790-808).
gtcagctgagtacagtttt

SEQ ID NO: 278493 - DNA, 19 bp, Homo sapiens
  siRNA target sequence for CGI-51 (NM_015380.3,871-889).
ctcaaggacggcgtcattt

SEQ ID NO: 278494 - DNA, 19 bp, Homo sapiens
  siRNA target sequence for CGI-51 (NM_015380.3,882-900).
cgtcatttgctgttcgaaa

SEQ ID NO: 278495 - DNA, 19 bp, Homo sapiens
  siRNA target sequence for CGI-51 (NM_015380.3,907-925).
cggacattcactgaaatca

SEQ ID NO: 278496 - DNA, 19 bp, Homo sapiens
  siRNA target sequence for CGI-51 (NM_015380.3,908-926).
ggacattcactgaaatcat

SEQ ID NO: 278497 - DNA, 19 bp, Homo sapiens
  siRNA target sequence for CGI-51 (NM_015380.3,935-953).
cacgccatggtcatcgatt

SEQ ID NO: 278498 - DNA, 19 bp, Homo sapiens
  siRNA target sequence for CGI-51 (NM_015380.3,946-964).
catcgattctcggaattct

SEQ ID NO: 278499 - DNA, 19 bp, Homo sapiens
  siRNA target sequence for CGI-51 (NM_015380.3,983-1001).
ggtgctttgctgaaagtta

SEQ ID NO: 278500 - DNA, 19 bp, Homo sapiens
  siRNA target sequence for CGI-51 (NM_015380.3,1036-1054).
gagcttcatcaaagaagat

SEQ ID NO: 278501 - DNA, 19 bp, Homo sapiens
  siRNA target sequence for CGI-51 (NM_015380.3,1079-1097).
ctcatatttgattcagttt

SEQ ID NO: 278502 - DNA, 19 bp, Homo sapiens
  siRNA target sequence for CGI-51 (NM_015380.3,1276-1294).
cctctacaccccattacct

SEQ ID NO: 278503 - DNA, 19 bp, Homo sapiens
  siRNA target sequence for CGI-51 (NM_015380.3,1277-1295).
ctctacaccccattacctt

SEQ ID NO: 278504 - DNA, 19 bp, Homo sapiens
  siRNA target sequence for CGI-51 (NM_015380.3,1331-1349).
cgaacacacttctttctca

SEQ ID NO: 278505 - DNA, 19 bp, Homo sapiens
  siRNA target sequence for CGI-51 (NM_015380.3,1387-1405).
ccccaaagctcatattcgt

SEQ ID NO: 278506 - DNA, 19 bp, Homo sapiens
  siRNA target sequence for CGI-51 (NM_015380.3,1388-1406).
cccaaagctcatattcgta

SEQ ID NO: 278507 - DNA, 19 bp, Homo sapiens
  siRNA target sequence for CGI-51 (NM_015380.3,1468-1486).
cgctcggttggaacttaat

SEQ ID NO: 278508 - DNA, 19 bp, Homo sapiens
  siRNA target sequence for CGI-51 (NM_015380.3,1469-1487).
gctcggttggaacttaatt

SEQ ID NO: 278509 - DNA, 19 bp, Homo sapiens
  siRNA target sequence for CGI-51 (NM_015380.3,1470-1488).
ctcggttggaacttaatta

SEQ ID NO: 278510 - DNA, 19 bp, Homo sapiens
  siRNA target sequence for CGI-51 (NM_015380.3,1472-1490).
cggttggaacttaattact

SEQ ID NO: 278511 - DNA, 19 bp, Homo sapiens
  siRNA target sequence for CGI-51 (NM_015380.3,1508-1526).
cagacaggcgacaggatat

SEQ ID NO: 278512 - DNA, 19 bp, Homo sapiens
  siRNA target sequence for CGI-51 (NM_015380.3,1510-1528).
gacaggcgacaggatatgt

SEQ ID NO: 278513 - DNA, 19 bp, Homo sapiens
  siRNA target sequence for ch-TOG (NM_014756.1,47-65).
gttgaaactgccagttgat

SEQ ID NO: 278514 - DNA, 19 bp, Homo sapiens
  siRNA target sequence for ch-TOG (NM_014756.1,54-72).
ctgccagttgatcagaaat

SEQ ID NO: 278515 - DNA, 19 bp, Homo sapiens
  siRNA target sequence for ch-TOG (NM_014756.1,154-172).
gcccagagtggtccaaatt

SEQ ID NO: 278516 - DNA, 19 bp, Homo sapiens
  siRNA target sequence for ch-TOG (NM_014756.1,155-173).
cccagagtggtccaaattt

SEQ ID NO: 278517 - DNA, 19 bp, Homo sapiens
  siRNA target sequence for ch-TOG (NM_014756.1,163-181).
ggtccaaatttttaggatt

SEQ ID NO: 278518 - DNA, 19 bp, Homo sapiens
  siRNA target sequence for ch-TOG (NM_014756.1,213-231).
gtggttcaattgaaaggat

SEQ ID NO: 278519 - DNA, 19 bp, Homo sapiens
  siRNA target sequence for ch-TOG (NM_014756.1,215-233).
ggttcaattgaaaggatta

SEQ ID NO: 278520 - DNA, 19 bp, Homo sapiens
  siRNA target sequence for ch-TOG (NM_014756.1,294-312).
gtgtcaggtgttgtaagta

SEQ ID NO: 278521 - DNA, 19 bp, Homo sapiens
  siRNA target sequence for ch-TOG (NM_014756.1,317-335).
gttcaatcaacctaaagct

SEQ ID NO: 278522 - DNA, 19 bp, Homo sapiens
  siRNA target sequence for ch-TOG (NM_014756.1,320-338).
caatcaacctaaagctaaa

SEQ ID NO: 278523 - DNA, 19 bp, Homo sapiens
  siRNA target sequence for ch-TOG (NM_014756.1,357-375).
gagatctgtcttatgtaca

SEQ ID NO: 278524 - DNA, 19 bp, Homo sapiens
  siRNA target sequence for ch-TOG (NM_014756.1,359-377).
gatctgtcttatgtacata

SEQ ID NO: 278525 - DNA, 19 bp, Homo sapiens
  siRNA target sequence for ch-TOG (NM_014756.1,593-611).
ggagatttacagatggatt

SEQ ID NO: 278526 - DNA, 19 bp, Homo sapiens
  siRNA target sequence for ch-TOG (NM_014756.1,623-641).
gagacccccattacaaaat

SEQ ID NO: 278527 - DNA, 19 bp, Homo sapiens
  siRNA target sequence for ch-TOG (NM_014756.1,649-667).
ctgttcagttgaaagaact

SEQ ID NO: 278528 - DNA, 19 bp, Homo sapiens
  siRNA target sequence for ch-TOG (NM_014756.1,680-698).
ggtcaaactgccaacaagt

SEQ ID NO: 278529 - DNA, 19 bp, Homo sapiens
  siRNA target sequence for ch-TOG (NM_014756.1,703-721).
ctagacctactcgatttct

SEQ ID NO: 278530 - DNA, 19 bp, Homo sapiens
  siRNA target sequence for ch-TOG (NM_014756.1,724-742).
gttcccaacaagaactaga

SEQ ID NO: 278531 - DNA, 19 bp, Homo sapiens
  siRNA target sequence for ch-TOG (NM_014756.1,745-763).
ctaaattggaacaacaaca

SEQ ID NO: 278532 - DNA, 19 bp, Homo sapiens
  siRNA target sequence for ch-TOG (NM_014756.1,812-830).
gccacaaatagatgcttat

SEQ ID NO: 278533 - DNA, 19 bp, Homo sapiens
  siRNA target sequence for ch-TOG (NM_014756.1,923-941).
cctggagtctgtagaagta

SEQ ID NO: 278534 - DNA, 19 bp, Homo sapiens
  siRNA target sequence for ch-TOG (NM_014756.1,926-944).
ggagtctgtagaagtacta

SEQ ID NO: 278535 - DNA, 19 bp, Homo sapiens
  siRNA target sequence for ch-TOG (NM_014756.1,927-945).
gagtctgtagaagtactaa

SEQ ID NO: 278536 - DNA, 19 bp, Homo sapiens
  siRNA target sequence for ch-TOG (NM_014756.1,929-947).
gtctgtagaagtactaata

SEQ ID NO: 278537 - DNA, 19 bp, Homo sapiens
  siRNA target sequence for ch-TOG (NM_014756.1,967-985).
ctggcgattatgcagattt

SEQ ID NO: 278538 - DNA, 19 bp, Homo sapiens
  siRNA target sequence for ch-TOG (NM_014756.1,970-988).
gcgattatgcagatttagt

SEQ ID NO: 278539 - DNA, 19 bp, Homo sapiens
  siRNA target sequence for ch-TOG (NM_014756.1,971-989).
cgattatgcagatttagta

SEQ ID NO: 278540 - DNA, 19 bp, Homo sapiens
  siRNA target sequence for ch-TOG (NM_014756.1,1012-1030).
gaaaggacaccaatgtcat

SEQ ID NO: 278541 - DNA, 19 bp, Homo sapiens
  siRNA target sequence for ch-TOG (NM_014756.1,1037-1055).
ggctttggcagcaaaatgt

SEQ ID NO: 278542 - DNA, 19 bp, Homo sapiens
  siRNA target sequence for ch-TOG (NM_014756.1,1039-1057).
ctttggcagcaaaatgtct

SEQ ID NO: 278543 - DNA, 19 bp, Homo sapiens
  siRNA target sequence for ch-TOG (NM_014756.1,1182-1200).
gatgcaatcttccttacta

SEQ ID NO: 278544 - DNA, 19 bp, Homo sapiens
  siRNA target sequence for ch-TOG (NM_014756.1,1227-1245).
gttttagcagtaatggata

SEQ ID NO: 278545 - DNA, 19 bp, Homo sapiens
  siRNA target sequence for ch-TOG (NM_014756.1,1348-1366).
gtgctgcactacttaagca

SEQ ID NO: 278546 - DNA, 19 bp, Homo sapiens
  siRNA target sequence for ch-TOG (NM_014756.1,1354-1372).
cactacttaagcacatcaa

SEQ ID NO: 278547 - DNA, 19 bp, Homo sapiens
  siRNA target sequence for ch-TOG (NM_014756.1,1479-1497).
ctcaagcttgataagatca

SEQ ID NO: 278548 - DNA, 19 bp, Homo sapiens
  siRNA target sequence for ch-TOG (NM_014756.1,1504-1522).
gttcagaaaaggtagaact

SEQ ID NO: 278549 - DNA, 19 bp, Homo sapiens
  siRNA target sequence for ch-TOG (NM_014756.1,1540-1558).
ctggactagctgctgataa

SEQ ID NO: 278550 - DNA, 19 bp, Homo sapiens
  siRNA target sequence for ch-TOG (NM_014756.1,1548-1566).
gctgctgataagaaggaat

SEQ ID NO: 278551 - DNA, 19 bp, Homo sapiens
  siRNA target sequence for ch-TOG (NM_014756.1,1778-1796).
gcctgagctctcgatagaa

SEQ ID NO: 278552 - DNA, 19 bp, Homo sapiens
  siRNA target sequence for ch-TOG (NM_014756.1,1780-1798).
ctgagctctcgatagaagt

SEQ ID NO: 278553 - DNA, 19 bp, Homo sapiens
  siRNA target sequence for ch-TOG (NM_014756.1,1782-1800).
gagctctcgatagaagtat

SEQ ID NO: 278554 - DNA, 19 bp, Homo sapiens
  siRNA target sequence for ch-TOG (NM_014756.1,1834-1852).
cctgtatacagcttcttga

SEQ ID NO: 278555 - DNA, 19 bp, Homo sapiens
  siRNA target sequence for ch-TOG (NM_014756.1,1845-1863).
cttcttgacagcagtaact

SEQ ID NO: 278556 - DNA, 19 bp, Homo sapiens
  siRNA target sequence for ch-TOG (NM_014756.1,1932-1950).
ccatgccaggcattagtga

SEQ ID NO: 278557 - DNA, 19 bp, Homo sapiens
  siRNA target sequence for ch-TOG (NM_014756.1,1949-1967).
gaggatgctagccaagaaa

SEQ ID NO: 278558 - DNA, 19 bp, Homo sapiens
  siRNA target sequence for ch-TOG (NM_014756.1,2040-2058).
ggaaatttttccaaaacgt

SEQ ID NO: 278559 - DNA, 19 bp, Homo sapiens
  siRNA target sequence for ch-TOG (NM_014756.1,2056-2074).
cgtcagctcaggttgtatt

SEQ ID NO: 278560 - DNA, 19 bp, Homo sapiens
  siRNA target sequence for ch-TOG (NM_014756.1,2057-2075).
gtcagctcaggttgtatta

SEQ ID NO: 278561 - DNA, 19 bp, Homo sapiens
  siRNA target sequence for ch-TOG (NM_014756.1,2148-2166).
gaagcctgtatgttaccat

SEQ ID NO: 278562 - DNA, 19 bp, Homo sapiens
  siRNA target sequence for ch-TOG (NM_014756.1,2173-2191).
ctgaacaggttgtgtcaat

SEQ ID NO: 278563 - DNA, 19 bp, Homo sapiens
  siRNA target sequence for ch-TOG (NM_014756.1,2230-2248).
ctctgaattggctatcaaa

SEQ ID NO: 278564 - DNA, 19 bp, Homo sapiens
  siRNA target sequence for ch-TOG (NM_014756.1,2275-2293).
ggttgaatgtcaaagcttt

SEQ ID NO: 278565 - DNA, 19 bp, Homo sapiens
  siRNA target sequence for ch-TOG (NM_014756.1,2361-2379).
cttggcgtgatgtatctgt

SEQ ID NO: 278566 - DNA, 19 bp, Homo sapiens
  siRNA target sequence for ch-TOG (NM_014756.1,2365-2383).
gcgtgatgtatctgtatgt

SEQ ID NO: 278567 - DNA, 19 bp, Homo sapiens
  siRNA target sequence for ch-TOG (NM_014756.1,2366-2384).
cgtgatgtatctgtatgtt

SEQ ID NO: 278568 - DNA, 19 bp, Homo sapiens
  siRNA target sequence for ch-TOG (NM_014756.1,2386-2404).
gtccctctttgcgaatgtt

SEQ ID NO: 278569 - DNA, 19 bp, Homo sapiens
  siRNA target sequence for ch-TOG (NM_014756.1,2388-2406).
ccctctttgcgaatgttct

SEQ ID NO: 278570 - DNA, 19 bp, Homo sapiens
  siRNA target sequence for ch-TOG (NM_014756.1,2389-2407).
cctctttgcgaatgttctt

SEQ ID NO: 278571 - DNA, 19 bp, Homo sapiens
  siRNA target sequence for ch-TOG (NM_014756.1,2390-2408).
ctctttgcgaatgttcttt

SEQ ID NO: 278572 - DNA, 19 bp, Homo sapiens
  siRNA target sequence for ch-TOG (NM_014756.1,2425-2443).
ccctcctatcccagataga

SEQ ID NO: 278573 - DNA, 19 bp, Homo sapiens
  siRNA target sequence for ch-TOG (NM_014756.1,2434-2452).
cccagatagatgcagaatt

SEQ ID NO: 278574 - DNA, 19 bp, Homo sapiens
  siRNA target sequence for ch-TOG (NM_014756.1,2435-2453).
ccagatagatgcagaattt

SEQ ID NO: 278575 - DNA, 19 bp, Homo sapiens
  siRNA target sequence for ch-TOG (NM_014756.1,2484-2502).
ccaaccagaggaatttcca

SEQ ID NO: 278576 - DNA, 19 bp, Homo sapiens
  siRNA target sequence for ch-TOG (NM_014756.1,2485-2503).
caaccagaggaatttccaa

SEQ ID NO: 278577 - DNA, 19 bp, Homo sapiens
  siRNA target sequence for ch-TOG (NM_014756.1,2561-2579).
caatgatgtcgttgatctt

SEQ ID NO: 278578 - DNA, 19 bp, Homo sapiens
  siRNA target sequence for ch-TOG (NM_014756.1,2587-2605).
ggacggagatcagtgataa

SEQ ID NO: 278579 - DNA, 19 bp, Homo sapiens
  siRNA target sequence for ch-TOG (NM_014756.1,2588-2606).
gacggagatcagtgataaa

SEQ ID NO: 278580 - DNA, 19 bp, Homo sapiens
  siRNA target sequence for ch-TOG (NM_014756.1,2590-2608).
cggagatcagtgataaaat

SEQ ID NO: 278581 - DNA, 19 bp, Homo sapiens
  siRNA target sequence for ch-TOG (NM_014756.1,2594-2612).
gatcagtgataaaatcact

SEQ ID NO: 278582 - DNA, 19 bp, Homo sapiens
  siRNA target sequence for ch-TOG (NM_014756.1,2611-2629).
cttcagagttggtatctaa

SEQ ID NO: 278583 - DNA, 19 bp, Homo sapiens
  siRNA target sequence for ch-TOG (NM_014756.1,2670-2688).
gatgaagtggcaggtatta

SEQ ID NO: 278584 - DNA, 19 bp, Homo sapiens
  siRNA target sequence for ch-TOG (NM_014756.1,2738-2756).
cttgaagggtcgactcaat

SEQ ID NO: 278585 - DNA, 19 bp, Homo sapiens
  siRNA target sequence for ch-TOG (NM_014756.1,2741-2759).
gaagggtcgactcaatgat

SEQ ID NO: 278586 - DNA, 19 bp, Homo sapiens
  siRNA target sequence for ch-TOG (NM_014756.1,2744-2762).
gggtcgactcaatgattca

SEQ ID NO: 278587 - DNA, 19 bp, Homo sapiens
  siRNA target sequence for ch-TOG (NM_014756.1,2745-2763).
ggtcgactcaatgattcaa

SEQ ID NO: 278588 - DNA, 19 bp, Homo sapiens
  siRNA target sequence for ch-TOG (NM_014756.1,2746-2764).
gtcgactcaatgattcaaa

SEQ ID NO: 278589 - DNA, 19 bp, Homo sapiens
  siRNA target sequence for ch-TOG (NM_014756.1,2748-2766).
cgactcaatgattcaaata

SEQ ID NO: 278590 - DNA, 19 bp, Homo sapiens
  siRNA target sequence for ch-TOG (NM_014756.1,2749-2767).
gactcaatgattcaaataa

SEQ ID NO: 278591 - DNA, 19 bp, Homo sapiens
  siRNA target sequence for ch-TOG (NM_014756.1,2814-2832).
gccatgggcccaaatatta

SEQ ID NO: 278592 - DNA, 19 bp, Homo sapiens
  siRNA target sequence for ch-TOG (NM_014756.1,2815-2833).
ccatgggcccaaatattaa

SEQ ID NO: 278593 - DNA, 19 bp, Homo sapiens
  siRNA target sequence for ch-TOG (NM_014756.1,2819-2837).
gggcccaaatattaagcaa

SEQ ID NO: 278594 - DNA, 19 bp, Homo sapiens
  siRNA target sequence for ch-TOG (NM_014756.1,2910-2928).
ctagcgactgtgaatgctt

SEQ ID NO: 278595 - DNA, 19 bp, Homo sapiens
  siRNA target sequence for ch-TOG (NM_014756.1,3062-3080).
ccctacagaccttatcctt

SEQ ID NO: 278596 - DNA, 19 bp, Homo sapiens
  siRNA target sequence for ch-TOG (NM_014756.1,3067-3085).
cagaccttatcctttgtgt

SEQ ID NO: 278597 - DNA, 19 bp, Homo sapiens
  siRNA target sequence for ch-TOG (NM_014756.1,3100-3118).
cctgcctagaagatcgaaa

SEQ ID NO: 278598 - DNA, 19 bp, Homo sapiens
  siRNA target sequence for ch-TOG (NM_014756.1,3101-3119).
ctgcctagaagatcgaaat

SEQ ID NO: 278599 - DNA, 19 bp, Homo sapiens
  siRNA target sequence for ch-TOG (NM_014756.1,3144-3162).
gatgccttgccattcttca

SEQ ID NO: 278600 - DNA, 19 bp, Homo sapiens
  siRNA target sequence for ch-TOG (NM_014756.1,3285-3303).
cccactaaagcaacttcta

SEQ ID NO: 278601 - DNA, 19 bp, Homo sapiens
  siRNA target sequence for ch-TOG (NM_014756.1,3286-3304).
ccactaaagcaacttctaa

SEQ ID NO: 278602 - DNA, 19 bp, Homo sapiens
  siRNA target sequence for ch-TOG (NM_014756.1,3287-3305).
cactaaagcaacttctaaa

SEQ ID NO: 278603 - DNA, 19 bp, Homo sapiens
  siRNA target sequence for ch-TOG (NM_014756.1,3316-3334).
ggtccgctccagccaaatt

SEQ ID NO: 278604 - DNA, 19 bp, Homo sapiens
  siRNA target sequence for ch-TOG (NM_014756.1,3348-3366).
gcacctgctgaagattgta

SEQ ID NO: 278605 - DNA, 19 bp, Homo sapiens
  siRNA target sequence for ch-TOG (NM_014756.1,3351-3369).
cctgctgaagattgtattt

SEQ ID NO: 278606 - DNA, 19 bp, Homo sapiens
  siRNA target sequence for ch-TOG (NM_014756.1,3418-3436).
gattatcctctaaagcaaa

SEQ ID NO: 278607 - DNA, 19 bp, Homo sapiens
  siRNA target sequence for ch-TOG (NM_014756.1,3463-3481).
gcaaaaccagcttaaagga

SEQ ID NO: 278608 - DNA, 19 bp, Homo sapiens
  siRNA target sequence for ch-TOG (NM_014756.1,3555-3573).
ggattgaaggtgctaaagt

SEQ ID NO: 278609 - DNA, 19 bp, Homo sapiens
  siRNA target sequence for ch-TOG (NM_014756.1,3566-3584).
gctaaagtggaattttact

SEQ ID NO: 278610 - DNA, 19 bp, Homo sapiens
  siRNA target sequence for ch-TOG (NM_014756.1,3583-3601).
ctaccccacgggatgaata

SEQ ID NO: 278611 - DNA, 19 bp, Homo sapiens
  siRNA target sequence for ch-TOG (NM_014756.1,3586-3604).
ccccacgggatgaatacat

SEQ ID NO: 278612 - DNA, 19 bp, Homo sapiens
  siRNA target sequence for ch-TOG (NM_014756.1,3587-3605).
cccacgggatgaatacatt

SEQ ID NO: 278613 - DNA, 19 bp, Homo sapiens
  siRNA target sequence for ch-TOG (NM_014756.1,3602-3620).
cattgagcaactaaagact

SEQ ID NO: 278614 - DNA, 19 bp, Homo sapiens
  siRNA target sequence for ch-TOG (NM_014756.1,3632-3650).
ctgtgtggctaaatggtta

SEQ ID NO: 278615 - DNA, 19 bp, Homo sapiens
  siRNA target sequence for ch-TOG (NM_014756.1,3638-3656).
ggctaaatggttacaagat

SEQ ID NO: 278616 - DNA, 19 bp, Homo sapiens
  siRNA target sequence for ch-TOG (NM_014756.1,3640-3658).
ctaaatggttacaagatga

SEQ ID NO: 278617 - DNA, 19 bp, Homo sapiens
  siRNA target sequence for ch-TOG (NM_014756.1,3646-3664).
ggttacaagatgagatgtt

SEQ ID NO: 278618 - DNA, 19 bp, Homo sapiens
  siRNA target sequence for ch-TOG (NM_014756.1,3647-3665).
gttacaagatgagatgttt

SEQ ID NO: 278619 - DNA, 19 bp, Homo sapiens
  siRNA target sequence for ch-TOG (NM_014756.1,3651-3669).
caagatgagatgtttcact

SEQ ID NO: 278620 - DNA, 19 bp, Homo sapiens
  siRNA target sequence for ch-TOG (NM_014756.1,3672-3690).
gactttcagcatcataaca

SEQ ID NO: 278621 - DNA, 19 bp, Homo sapiens
  siRNA target sequence for ch-TOG (NM_014756.1,3770-3788).
gcttaccctgaggtttttt

SEQ ID NO: 278622 - DNA, 19 bp, Homo sapiens
  siRNA target sequence for ch-TOG (NM_014756.1,3782-3800).
gttttttgacaccaataca

SEQ ID NO: 278623 - DNA, 19 bp, Homo sapiens
  siRNA target sequence for ch-TOG (NM_014756.1,3839-3857).
cttcaccttgctaagtgaa

SEQ ID NO: 278624 - DNA, 19 bp, Homo sapiens
  siRNA target sequence for ch-TOG (NM_014756.1,3844-3862).
ccttgctaagtgaagaaga

SEQ ID NO: 278625 - DNA, 19 bp, Homo sapiens
  siRNA target sequence for ch-TOG (NM_014756.1,3927-3945).
ccaaaggatgtcattcgta

SEQ ID NO: 278626 - DNA, 19 bp, Homo sapiens
  siRNA target sequence for ch-TOG (NM_014756.1,3986-4004).
cccagctagcaagatgttt

SEQ ID NO: 278627 - DNA, 19 bp, Homo sapiens
  siRNA target sequence for ch-TOG (NM_014756.1,4085-4103).
gtcctatggcatgaatgtt

SEQ ID NO: 278628 - DNA, 19 bp, Homo sapiens
  siRNA target sequence for ch-TOG (NM_014756.1,4182-4200).
gcactcaacaccattgtaa

SEQ ID NO: 278629 - DNA, 19 bp, Homo sapiens
  siRNA target sequence for ch-TOG (NM_014756.1,4193-4211).
cattgtaacggtgtacaat

SEQ ID NO: 278630 - DNA, 19 bp, Homo sapiens
  siRNA target sequence for ch-TOG (NM_014756.1,4219-4237).
gggatcaggtgttcaaact

SEQ ID NO: 278631 - DNA, 19 bp, Homo sapiens
  siRNA target sequence for ch-TOG (NM_014756.1,4227-4245).
gtgttcaaactgattggaa

SEQ ID NO: 278632 - DNA, 19 bp, Homo sapiens
  siRNA target sequence for ch-TOG (NM_014756.1,4305-4323).
ccctctgctgcaccaataa

SEQ ID NO: 278633 - DNA, 19 bp, Homo sapiens
  siRNA target sequence for ch-TOG (NM_014756.1,4306-4324).
cctctgctgcaccaataaa

SEQ ID NO: 278634 - DNA, 19 bp, Homo sapiens
  siRNA target sequence for ch-TOG (NM_014756.1,4342-4360).
ctcagcgtgcacagaacat

SEQ ID NO: 278635 - DNA, 19 bp, Homo sapiens
  siRNA target sequence for ch-TOG (NM_014756.1,4344-4362).
cagcgtgcacagaacataa

SEQ ID NO: 278636 - DNA, 19 bp, Homo sapiens
  siRNA target sequence for ch-TOG (NM_014756.1,4347-4365).
cgtgcacagaacataagct

SEQ ID NO: 278637 - DNA, 19 bp, Homo sapiens
  siRNA target sequence for ch-TOG (NM_014756.1,4364-4382).
ctccaatgccaacatgtta

SEQ ID NO: 278638 - DNA, 19 bp, Homo sapiens
  siRNA target sequence for ch-TOG (NM_014756.1,4481-4499).
gctggatctagatgagatt

SEQ ID NO: 278639 - DNA, 19 bp, Homo sapiens
  siRNA target sequence for ch-TOG (NM_014756.1,4512-4530).
ggtacagtccgatgtgaaa

SEQ ID NO: 278640 - DNA, 19 bp, Homo sapiens
  siRNA target sequence for ch-TOG (NM_014756.1,4513-4531).
gtacagtccgatgtgaaat

SEQ ID NO: 278641 - DNA, 19 bp, Homo sapiens
  siRNA target sequence for ch-TOG (NM_014756.1,4525-4543).
gtgaaatgccagaacttgt

SEQ ID NO: 278642 - DNA, 19 bp, Homo sapiens
  siRNA target sequence for ch-TOG (NM_014756.1,4609-4627).
ctccacacttcgatgacat

SEQ ID NO: 278643 - DNA, 19 bp, Homo sapiens
  siRNA target sequence for ch-TOG (NM_014756.1,4620-4638).
gatgacatgcacagtaata

SEQ ID NO: 278644 - DNA, 19 bp, Homo sapiens
  siRNA target sequence for ch-TOG (NM_014756.1,4685-4703).
catcaacacaagtatccaa

SEQ ID NO: 278645 - DNA, 19 bp, Homo sapiens
  siRNA target sequence for ch-TOG (NM_014756.1,4745-4763).
ggcctccactggagtacta

SEQ ID NO: 278646 - DNA, 19 bp, Homo sapiens
  siRNA target sequence for ch-TOG (NM_014756.1,4747-4765).
cctccactggagtactaaa

SEQ ID NO: 278647 - DNA, 19 bp, Homo sapiens
  siRNA target sequence for ch-TOG (NM_014756.1,4748-4766).
ctccactggagtactaaaa

SEQ ID NO: 278648 - DNA, 19 bp, Homo sapiens
  siRNA target sequence for ch-TOG (NM_014756.1,4750-4768).
ccactggagtactaaaaga

SEQ ID NO: 278649 - DNA, 19 bp, Homo sapiens
  siRNA target sequence for ch-TOG (NM_014756.1,4799-4817).
ggattctcggattgaagat

SEQ ID NO: 278650 - DNA, 19 bp, Homo sapiens
  siRNA target sequence for ch-TOG (NM_014756.1,4804-4822).
ctcggattgaagatcttga

SEQ ID NO: 278651 - DNA, 19 bp, Homo sapiens
  siRNA target sequence for ch-TOG (NM_014756.1,4999-5017).
gactgttgcctgataccat

SEQ ID NO: 278652 - DNA, 19 bp, Homo sapiens
  siRNA target sequence for ch-TOG (NM_014756.1,5003-5021).
gttgcctgataccatcaat

SEQ ID NO: 278653 - DNA, 19 bp, Homo sapiens
  siRNA target sequence for ch-TOG (NM_014756.1,5014-5032).
ccatcaatagcattaacct

SEQ ID NO: 278654 - DNA, 19 bp, Homo sapiens
  siRNA target sequence for ch-TOG (NM_014756.1,5015-5033).
catcaatagcattaaccta

SEQ ID NO: 278655 - DNA, 19 bp, Homo sapiens
  siRNA target sequence for ch-TOG (NM_014756.1,5024-5042).
cattaacctagacagaatt

SEQ ID NO: 278656 - DNA, 19 bp, Homo sapiens
  siRNA target sequence for ch-TOG (NM_014756.1,5112-5130).
cccataaggaccctaaaga

SEQ ID NO: 278657 - DNA, 19 bp, Homo sapiens
  siRNA target sequence for ch-TOG (NM_014756.1,5133-5151).
ctgctacacaccttatgca

SEQ ID NO: 278658 - DNA, 19 bp, Homo sapiens
  siRNA target sequence for ch-TOG (NM_014756.1,5135-5153).
gctacacaccttatgcaaa

SEQ ID NO: 278659 - DNA, 19 bp, Homo sapiens
  siRNA target sequence for ch-TOG (NM_014756.1,5291-5309).
gggagcatctcgaatagat

SEQ ID NO: 278660 - DNA, 19 bp, Homo sapiens
  siRNA target sequence for ch-TOG (NM_014756.1,5367-5385).
ggctctaaagaaaacacta

SEQ ID NO: 278661 - DNA, 19 bp, Homo sapiens
  siRNA target sequence for ch-TOG (NM_014756.1,5368-5386).
gctctaaagaaaacactaa

SEQ ID NO: 278662 - DNA, 19 bp, Homo sapiens
  siRNA target sequence for ch-TOG (NM_014756.1,5390-5408).
gggactagcagagttatat

SEQ ID NO: 278663 - DNA, 19 bp, Homo sapiens
  siRNA target sequence for ch-TOG (NM_014756.1,5392-5410).
gactagcagagttatatga

SEQ ID NO: 278664 - DNA, 19 bp, Homo sapiens
  siRNA target sequence for ch-TOG (NM_014756.1,5397-5415).
gcagagttatatgaatata

SEQ ID NO: 278665 - DNA, 19 bp, Homo sapiens
  siRNA target sequence for ch-TOG (NM_014756.1,5493-5511).
ggccttcgggtgattgaga

SEQ ID NO: 278666 - DNA, 19 bp, Homo sapiens
  siRNA target sequence for ch-TOG (NM_014756.1,5523-5541).
ggcaaaggtcgtatttcca

SEQ ID NO: 278667 - DNA, 19 bp, Homo sapiens
  siRNA target sequence for ch-TOG (NM_014756.1,5529-5547).
ggtcgtatttccacttcaa

SEQ ID NO: 278668 - DNA, 19 bp, Homo sapiens
  siRNA target sequence for ch-TOG (NM_014756.1,5603-5621).
gtcctccataggtaacaca

SEQ ID NO: 278669 - DNA, 19 bp, Homo sapiens
  siRNA target sequence for ch-TOG (NM_014756.1,5605-5623).
cctccataggtaacacaaa

SEQ ID NO: 278670 - DNA, 19 bp, Homo sapiens
  siRNA target sequence for ch-TOG (NM_014756.1,5606-5624).
ctccataggtaacacaaat

SEQ ID NO: 278671 - DNA, 19 bp, Homo sapiens
  siRNA target sequence for ch-TOG (NM_014756.1,5826-5844).
cattcagacctggattcta

SEQ ID NO: 278672 - DNA, 19 bp, Homo sapiens
  siRNA target sequence for ch-TOG (NM_014756.1,5879-5897).
ctcctccacagctaacata

SEQ ID NO: 278673 - DNA, 19 bp, Homo sapiens
  siRNA target sequence for CHIC2 (NM_012110.2,325-343).
gcggatttcgacgaaatct

SEQ ID NO: 278674 - DNA, 19 bp, Homo sapiens
  siRNA target sequence for CHIC2 (NM_012110.2,326-344).
cggatttcgacgaaatcta

SEQ ID NO: 278675 - DNA, 19 bp, Homo sapiens
  siRNA target sequence for CHIC2 (NM_012110.2,327-345).
ggatttcgacgaaatctat

SEQ ID NO: 278676 - DNA, 19 bp, Homo sapiens
  siRNA target sequence for CHIC2 (NM_012110.2,426-444).
cggtcacgtcaccgtattt

SEQ ID NO: 278677 - DNA, 19 bp, Homo sapiens
  siRNA target sequence for CHIC2 (NM_012110.2,446-464).
gactgagcaacaaatttga

SEQ ID NO: 278678 - DNA, 19 bp, Homo sapiens
  siRNA target sequence for CHIC2 (NM_012110.2,530-548).
gagttaacagttgtcttaa

SEQ ID NO: 278679 - DNA, 19 bp, Homo sapiens
  siRNA target sequence for CHIC2 (NM_012110.2,552-570).
gaaccttcctgttaatgta

SEQ ID NO: 278680 - DNA, 19 bp, Homo sapiens
  siRNA target sequence for CHIC2 (NM_012110.2,629-647).
cagttatttgcctcagtaa

SEQ ID NO: 278681 - DNA, 19 bp, Homo sapiens
  siRNA target sequence for CHIC2 (NM_012110.2,653-671).
cacgaagatcgattgagaa

SEQ ID NO: 278682 - DNA, 19 bp, Homo sapiens
  siRNA target sequence for CHIC2 (NM_012110.2,662-680).
cgattgagaagttattaga

SEQ ID NO: 278683 - DNA, 19 bp, Homo sapiens
  siRNA target sequence for CHIC2 (NM_012110.2,663-681).
gattgagaagttattagaa

SEQ ID NO: 278684 - DNA, 19 bp, Homo sapiens
  siRNA target sequence for CHIC2 (NM_012110.2,749-767).
cgaataacatgatggaata

SEQ ID NO: 278685 - DNA, 19 bp, Homo sapiens
  siRNA target sequence for CHIC2 (NM_012110.2,769-787).
gtcatcctcatagaatttt

SEQ ID NO: 278686 - DNA, 19 bp, Homo sapiens
  siRNA target sequence for CHORDC1 (NM_012124.1,167-185).
caggtgttccggtctttca

SEQ ID NO: 278687 - DNA, 19 bp, Homo sapiens
  siRNA target sequence for CHORDC1 (NM_012124.1,177-195).
ggtctttcacgatgcatta

SEQ ID NO: 278688 - DNA, 19 bp, Homo sapiens
  siRNA target sequence for CHORDC1 (NM_012124.1,178-196).
gtctttcacgatgcattaa

SEQ ID NO: 278689 - DNA, 19 bp, Homo sapiens
  siRNA target sequence for CHORDC1 (NM_012124.1,210-228).
ctgtaagagaagaacaact

SEQ ID NO: 278690 - DNA, 19 bp, Homo sapiens
  siRNA target sequence for CHORDC1 (NM_012124.1,330-348).
gaaggagctatgtgaatta

SEQ ID NO: 278691 - DNA, 19 bp, Homo sapiens
  siRNA target sequence for CHORDC1 (NM_012124.1,383-401).
ctaagccagtagaagcaat

SEQ ID NO: 278692 - DNA, 19 bp, Homo sapiens
  siRNA target sequence for CHRD (NM_003741.2,684-702).
cccggagcatcgcagttat

SEQ ID NO: 278693 - DNA, 19 bp, Homo sapiens
  siRNA target sequence for CHRD (NM_003741.2,685-703).
ccggagcatcgcagttata

SEQ ID NO: 278694 - DNA, 19 bp, Homo sapiens
  siRNA target sequence for CHRD (NM_003741.2,827-845).
ctagcctccgcttctctat

SEQ ID NO: 278695 - DNA, 19 bp, Homo sapiens
  siRNA target sequence for CHRD (NM_003741.2,1272-1290).
gcagctactgcgagaactt

SEQ ID NO: 278696 - DNA, 19 bp, Homo sapiens
  siRNA target sequence for CHRD (NM_003741.2,1419-1437).
gcgcatcagtggacacatt

SEQ ID NO: 278697 - DNA, 19 bp, Homo sapiens
  siRNA target sequence for CHRD (NM_003741.2,1909-1927).
gcctggctttccttggata

SEQ ID NO: 278698 - DNA, 19 bp, Homo sapiens
  siRNA target sequence for CHRD (NM_003741.2,2179-2197).
gtgcacatagccaaccaat

SEQ ID NO: 278699 - DNA, 19 bp, Homo sapiens
  siRNA target sequence for CHRD (NM_003741.2,2525-2543).
ctgtttgccctgagaaaca

SEQ ID NO: 278700 - DNA, 19 bp, Homo sapiens
  siRNA target sequence for CHRD (NM_003741.2,2659-2677).
ccctttggcttaattaagt

SEQ ID NO: 278701 - DNA, 19 bp, Homo sapiens
  siRNA target sequence for CHRD (NM_003741.2,2661-2679).
ctttggcttaattaagtgt

SEQ ID NO: 278702 - DNA, 19 bp, Homo sapiens
  siRNA target sequence for CHRD (NM_003741.2,3063-3081).
cccagagaccagaactgat

SEQ ID NO: 278703 - DNA, 19 bp, Homo sapiens
  siRNA target sequence for CISH (NM_013324.4,511-529).
cgggaatctggctggtatt

SEQ ID NO: 278704 - DNA, 19 bp, Homo sapiens
  siRNA target sequence for CISH (NM_013324.4,659-677).
ccaatgtacgcattgagta

SEQ ID NO: 278705 - DNA, 19 bp, Homo sapiens
  siRNA target sequence for CISH (NM_013324.4,660-678).
caatgtacgcattgagtat

SEQ ID NO: 278706 - DNA, 19 bp, Homo sapiens
  siRNA target sequence for CISH (NM_013324.4,887-905).
ccactgctgtacacctaaa

SEQ ID NO: 278707 - DNA, 19 bp, Homo sapiens
  siRNA target sequence for COL6A1 (NM_001848.1,378-396).
gtgacgaggtggagatcat

SEQ ID NO: 278708 - DNA, 19 bp, Homo sapiens
  siRNA target sequence for COL6A1 (NM_001848.1,425-443).
cgcgacgcactcaaaagca

SEQ ID NO: 278709 - DNA, 19 bp, Homo sapiens
  siRNA target sequence for COL6A1 (NM_001848.1,483-501).
ccgactgcgctatcaagaa

SEQ ID NO: 278710 - DNA, 19 bp, Homo sapiens
  siRNA target sequence for COL6A1 (NM_001848.1,533-551).
cacctgaaggagaataagt

SEQ ID NO: 278711 - DNA, 19 bp, Homo sapiens
  siRNA target sequence for COL6A1 (NM_001848.1,638-656).
cacctgggcgtcaaagtct

SEQ ID NO: 278712 - DNA, 19 bp, Homo sapiens
  siRNA target sequence for COL6A1 (NM_001848.1,833-851).
gtgtgctgctccttcgaat

SEQ ID NO: 278713 - DNA, 19 bp, Homo sapiens
  siRNA target sequence for COL6A1 (NM_001848.1,1755-1773).
gggaccccggagacgataa

SEQ ID NO: 278714 - DNA, 19 bp, Homo sapiens
  siRNA target sequence for COL6A1 (NM_001848.1,1868-1886).
ccggacgaatgcgagattt

SEQ ID NO: 278715 - DNA, 19 bp, Homo sapiens
  siRNA target sequence for COL6A1 (NM_001848.1,1971-1989).
gcattggcctgcagaactt

SEQ ID NO: 278716 - DNA, 19 bp, Homo sapiens
  siRNA target sequence for COL6A1 (NM_001848.1,2350-2368).
ggtctccgtgggcatcaaa

SEQ ID NO: 278717 - DNA, 19 bp, Homo sapiens
  siRNA target sequence for COL6A1 (NM_001848.1,2517-2535).
cccagatctgcatagacaa

SEQ ID NO: 278718 - DNA, 19 bp, Homo sapiens
  siRNA target sequence for COL6A1 (NM_001848.1,2614-2632).
cgtgggcagccacaacttt

SEQ ID NO: 278719 - DNA, 19 bp, Homo sapiens
  siRNA target sequence for COL6A1 (NM_001848.1,2807-2825).
gtcgatgccatggacttta

SEQ ID NO: 278720 - DNA, 19 bp, Homo sapiens
  siRNA target sequence for COL6A1 (NM_001848.1,2988-3006).
gggcaggcatcgagatctt

SEQ ID NO: 278721 - DNA, 19 bp, Homo sapiens
  siRNA target sequence for CP110 (NM_014711.3,379-397).
gttctgtgaaaaaagtctt

SEQ ID NO: 278722 - DNA, 19 bp, Homo sapiens
  siRNA target sequence for CP110 (NM_014711.3,437-455).
ctccctgctcagtctgaaa

SEQ ID NO: 278723 - DNA, 19 bp, Homo sapiens
  siRNA target sequence for CP110 (NM_014711.3,439-457).
ccctgctcagtctgaaagt

SEQ ID NO: 278724 - DNA, 19 bp, Homo sapiens
  siRNA target sequence for CP110 (NM_014711.3,440-458).
cctgctcagtctgaaagta

SEQ ID NO: 278725 - DNA, 19 bp, Homo sapiens
  siRNA target sequence for CP110 (NM_014711.3,495-513).
ctccactgcttaacattga

SEQ ID NO: 278726 - DNA, 19 bp, Homo sapiens
  siRNA target sequence for CP110 (NM_014711.3,497-515).
ccactgcttaacattgaga

SEQ ID NO: 278727 - DNA, 19 bp, Homo sapiens
  siRNA target sequence for CP110 (NM_014711.3,607-625).
ccaggagattcttgacaat

SEQ ID NO: 278728 - DNA, 19 bp, Homo sapiens
  siRNA target sequence for CP110 (NM_014711.3,620-638).
gacaatgttcaggttagaa

SEQ ID NO: 278729 - DNA, 19 bp, Homo sapiens
  siRNA target sequence for CP110 (NM_014711.3,677-695).
gaaacagtttactctaatt

SEQ ID NO: 278730 - DNA, 19 bp, Homo sapiens
  siRNA target sequence for CP110 (NM_014711.3,696-714).
cagaagtcagaaacttgaa

SEQ ID NO: 278731 - DNA, 19 bp, Homo sapiens
  siRNA target sequence for CP110 (NM_014711.3,768-786).
cagcaaagcttgataagat

SEQ ID NO: 278732 - DNA, 19 bp, Homo sapiens
  siRNA target sequence for CP110 (NM_014711.3,793-811).
gattttgccattggataat

SEQ ID NO: 278733 - DNA, 19 bp, Homo sapiens
  siRNA target sequence for CP110 (NM_014711.3,830-848).
gatggaatagacttagcta

SEQ ID NO: 278734 - DNA, 19 bp, Homo sapiens
  siRNA target sequence for CP110 (NM_014711.3,846-864).
ctagagattcagaaggatt

SEQ ID NO: 278735 - DNA, 19 bp, Homo sapiens
  siRNA target sequence for CP110 (NM_014711.3,872-890).
ccgaagcaatgtgatagtt

SEQ ID NO: 278736 - DNA, 19 bp, Homo sapiens
  siRNA target sequence for CP110 (NM_014711.3,877-895).
gcaatgtgatagttccaat

SEQ ID NO: 278737 - DNA, 19 bp, Homo sapiens
  siRNA target sequence for CP110 (NM_014711.3,878-896).
caatgtgatagttccaata

SEQ ID NO: 278738 - DNA, 19 bp, Homo sapiens
  siRNA target sequence for CP110 (NM_014711.3,891-909).
ccaatattagtcatgtaga

SEQ ID NO: 278739 - DNA, 19 bp, Homo sapiens
  siRNA target sequence for CP110 (NM_014711.3,965-983).
gatggtcccttctcagtaa

SEQ ID NO: 278740 - DNA, 19 bp, Homo sapiens
  siRNA target sequence for CP110 (NM_014711.3,1018-1036).
catcccagatccctatgta

SEQ ID NO: 278741 - DNA, 19 bp, Homo sapiens
  siRNA target sequence for CP110 (NM_014711.3,1022-1040).
ccagatccctatgtaatga

SEQ ID NO: 278742 - DNA, 19 bp, Homo sapiens
  siRNA target sequence for CP110 (NM_014711.3,1137-1155).
gtcatttagacaaagaaca

SEQ ID NO: 278743 - DNA, 19 bp, Homo sapiens
  siRNA target sequence for CP110 (NM_014711.3,1172-1190).
gctgactgtgtaaaagaga

SEQ ID NO: 278744 - DNA, 19 bp, Homo sapiens
  siRNA target sequence for CP110 (NM_014711.3,1219-1237).
ctcagttattcctgacaaa

SEQ ID NO: 278745 - DNA, 19 bp, Homo sapiens
  siRNA target sequence for CP110 (NM_014711.3,1223-1241).
gttattcctgacaaaccaa

SEQ ID NO: 278746 - DNA, 19 bp, Homo sapiens
  siRNA target sequence for CP110 (NM_014711.3,1283-1301).
caagcaagcagcatgagta

SEQ ID NO: 278747 - DNA, 19 bp, Homo sapiens
  siRNA target sequence for CP110 (NM_014711.3,1297-1315).
gagtatgccagttttagct

SEQ ID NO: 278748 - DNA, 19 bp, Homo sapiens
  siRNA target sequence for CP110 (NM_014711.3,1303-1321).
gccagttttagctagcttt

SEQ ID NO: 278749 - DNA, 19 bp, Homo sapiens
  siRNA target sequence for CP110 (NM_014711.3,1304-1322).
ccagttttagctagctttt

SEQ ID NO: 278750 - DNA, 19 bp, Homo sapiens
  siRNA target sequence for CP110 (NM_014711.3,1323-1341).
cgaaagtggacatacctat

SEQ ID NO: 278751 - DNA, 19 bp, Homo sapiens
  siRNA target sequence for CP110 (NM_014711.3,1324-1342).
gaaagtggacatacctata

SEQ ID NO: 278752 - DNA, 19 bp, Homo sapiens
  siRNA target sequence for CP110 (NM_014711.3,1328-1346).
gtggacatacctatacgaa

SEQ ID NO: 278753 - DNA, 19 bp, Homo sapiens
  siRNA target sequence for CP110 (NM_014711.3,1350-1368).
gccatcccactgttctaga

SEQ ID NO: 278754 - DNA, 19 bp, Homo sapiens
  siRNA target sequence for CP110 (NM_014711.3,1434-1452).
caggttcatatgccaaatt

SEQ ID NO: 278755 - DNA, 19 bp, Homo sapiens
  siRNA target sequence for CP110 (NM_014711.3,1455-1473).
ctagtccagagccaagtat

SEQ ID NO: 278756 - DNA, 19 bp, Homo sapiens
  siRNA target sequence for CP110 (NM_014711.3,1465-1483).
gccaagtatgagtcctaaa

SEQ ID NO: 278757 - DNA, 19 bp, Homo sapiens
  siRNA target sequence for CP110 (NM_014711.3,1466-1484).
ccaagtatgagtcctaaaa

SEQ ID NO: 278758 - DNA, 19 bp, Homo sapiens
  siRNA target sequence for CP110 (NM_014711.3,1467-1485).
caagtatgagtcctaaaat

SEQ ID NO: 278759 - DNA, 19 bp, Homo sapiens
  siRNA target sequence for CP110 (NM_014711.3,1506-1524).
catcatcagcgtgtcatat

SEQ ID NO: 278760 - DNA, 19 bp, Homo sapiens
  siRNA target sequence for CP110 (NM_014711.3,1509-1527).
catcagcgtgtcatatact

SEQ ID NO: 278761 - DNA, 19 bp, Homo sapiens
  siRNA target sequence for CP110 (NM_014711.3,1512-1530).
cagcgtgtcatatacttat

SEQ ID NO: 278762 - DNA, 19 bp, Homo sapiens
  siRNA target sequence for CP110 (NM_014711.3,1514-1532).
gcgtgtcatatacttataa

SEQ ID NO: 278763 - DNA, 19 bp, Homo sapiens
  siRNA target sequence for CP110 (NM_014711.3,1515-1533).
cgtgtcatatacttataaa

SEQ ID NO: 278764 - DNA, 19 bp, Homo sapiens
  siRNA target sequence for CP110 (NM_014711.3,1538-1556).
ccaataaatgcctgtgaat

SEQ ID NO: 278765 - DNA, 19 bp, Homo sapiens
  siRNA target sequence for CP110 (NM_014711.3,1553-1571).
gaattaagccctaaaggaa

SEQ ID NO: 278766 - DNA, 19 bp, Homo sapiens
  siRNA target sequence for CP110 (NM_014711.3,1577-1595).
caggcaatggacttaatta

SEQ ID NO: 278767 - DNA, 19 bp, Homo sapiens
  siRNA target sequence for CP110 (NM_014711.3,1579-1597).
ggcaatggacttaattatt

SEQ ID NO: 278768 - DNA, 19 bp, Homo sapiens
  siRNA target sequence for CP110 (NM_014711.3,1585-1603).
ggacttaattattcaagat

SEQ ID NO: 278769 - DNA, 19 bp, Homo sapiens
  siRNA target sequence for CP110 (NM_014711.3,1615-1633).
cacaaatgtgcccgaaatt

SEQ ID NO: 278770 - DNA, 19 bp, Homo sapiens
  siRNA target sequence for CP110 (NM_014711.3,1617-1635).
caaatgtgcccgaaattat

SEQ ID NO: 278771 - DNA, 19 bp, Homo sapiens
  siRNA target sequence for CP110 (NM_014711.3,1626-1644).
ccgaaattatgccaaagtt

SEQ ID NO: 278772 - DNA, 19 bp, Homo sapiens
  siRNA target sequence for CP110 (NM_014711.3,1627-1645).
cgaaattatgccaaagtta

SEQ ID NO: 278773 - DNA, 19 bp, Homo sapiens
  siRNA target sequence for CP110 (NM_014711.3,1652-1670).
gatttagcgggagtttgtt

SEQ ID NO: 278774 - DNA, 19 bp, Homo sapiens
  siRNA target sequence for CP110 (NM_014711.3,1664-1682).
gtttgttcaagcaaggttt

SEQ ID NO: 278775 - DNA, 19 bp, Homo sapiens
  siRNA target sequence for CP110 (NM_014711.3,1746-1764).
gtcaatcttcaggaaatca

SEQ ID NO: 278776 - DNA, 19 bp, Homo sapiens
  siRNA target sequence for CP110 (NM_014711.3,1778-1796).
gttactcatggacttgtta

SEQ ID NO: 278777 - DNA, 19 bp, Homo sapiens
  siRNA target sequence for CP110 (NM_014711.3,1799-1817).
gtggaaggtcagttaacat

SEQ ID NO: 278778 - DNA, 19 bp, Homo sapiens
  siRNA target sequence for CP110 (NM_014711.3,1827-1845).
gaggcgcacacataatgaa

SEQ ID NO: 278779 - DNA, 19 bp, Homo sapiens
  siRNA target sequence for CP110 (NM_014711.3,1829-1847).
ggcgcacacataatgaaca

SEQ ID NO: 278780 - DNA, 19 bp, Homo sapiens
  siRNA target sequence for CP110 (NM_014711.3,1832-1850).
gcacacataatgaacagta

SEQ ID NO: 278781 - DNA, 19 bp, Homo sapiens
  siRNA target sequence for CP110 (NM_014711.3,1888-1906).
cagcagtcagtgtatagca

SEQ ID NO: 278782 - DNA, 19 bp, Homo sapiens
  siRNA target sequence for CP110 (NM_014711.3,1904-1922).
gcaagtccaaactttggaa

SEQ ID NO: 278783 - DNA, 19 bp, Homo sapiens
  siRNA target sequence for CP110 (NM_014711.3,1940-1958).
ccagccagtatgttagaga

SEQ ID NO: 278784 - DNA, 19 bp, Homo sapiens
  siRNA target sequence for CP110 (NM_014711.3,1984-2002).
gaataagtcttatgatgta

SEQ ID NO: 278785 - DNA, 19 bp, Homo sapiens
  siRNA target sequence for CP110 (NM_014711.3,2076-2094).
gaaatgaacaatttttgga

SEQ ID NO: 278786 - DNA, 19 bp, Homo sapiens
  siRNA target sequence for CP110 (NM_014711.3,2111-2129).
gttaaacggagacttgatt

SEQ ID NO: 278787 - DNA, 19 bp, Homo sapiens
  siRNA target sequence for CP110 (NM_014711.3,2117-2135).
cggagacttgatttagata

SEQ ID NO: 278788 - DNA, 19 bp, Homo sapiens
  siRNA target sequence for CP110 (NM_014711.3,2119-2137).
gagacttgatttagatatt

SEQ ID NO: 278789 - DNA, 19 bp, Homo sapiens
  siRNA target sequence for CP110 (NM_014711.3,2153-2171).
gaaaactgcccttatgtca

SEQ ID NO: 278790 - DNA, 19 bp, Homo sapiens
  siRNA target sequence for CP110 (NM_014711.3,2158-2176).
ctgcccttatgtcataaca

SEQ ID NO: 278791 - DNA, 19 bp, Homo sapiens
  siRNA target sequence for CP110 (NM_014711.3,2161-2179).
cccttatgtcataacaagt

SEQ ID NO: 278792 - DNA, 19 bp, Homo sapiens
  siRNA target sequence for CP110 (NM_014711.3,2170-2188).
cataacaagtggaataact

SEQ ID NO: 278793 - DNA, 19 bp, Homo sapiens
  siRNA target sequence for CP110 (NM_014711.3,2178-2196).
gtggaataactgaacaaga

SEQ ID NO: 278794 - DNA, 19 bp, Homo sapiens
  siRNA target sequence for CP110 (NM_014711.3,2264-2282).
ggaactagttccaaagaaa

SEQ ID NO: 278795 - DNA, 19 bp, Homo sapiens
  siRNA target sequence for CP110 (NM_014711.3,2279-2297).
gaaagcgaggagttactaa

SEQ ID NO: 278796 - DNA, 19 bp, Homo sapiens
  siRNA target sequence for CP110 (NM_014711.3,2302-2320).
caagatgttagcttttgaa

SEQ ID NO: 278797 - DNA, 19 bp, Homo sapiens
  siRNA target sequence for CP110 (NM_014711.3,2347-2365).
gcacgcccagcaattatca

SEQ ID NO: 278798 - DNA, 19 bp, Homo sapiens
  siRNA target sequence for CP110 (NM_014711.3,2350-2368).
cgcccagcaattatcacta

SEQ ID NO: 278799 - DNA, 19 bp, Homo sapiens
  siRNA target sequence for CP110 (NM_014711.3,2356-2374).
gcaattatcactactcata

SEQ ID NO: 278800 - DNA, 19 bp, Homo sapiens
  siRNA target sequence for CP110 (NM_014711.3,2552-2570).
gcggactcactccatactt

SEQ ID NO: 278801 - DNA, 19 bp, Homo sapiens
  siRNA target sequence for CP110 (NM_014711.3,2601-2619).
ctgccatgcaatatagctt

SEQ ID NO: 278802 - DNA, 19 bp, Homo sapiens
  siRNA target sequence for CP110 (NM_014711.3,2608-2626).
gcaatatagctttgtttct

SEQ ID NO: 278803 - DNA, 19 bp, Homo sapiens
  siRNA target sequence for CP110 (NM_014711.3,2674-2692).
gaccaaactctcagtaaca

SEQ ID NO: 278804 - DNA, 19 bp, Homo sapiens
  siRNA target sequence for CP110 (NM_014711.3,2715-2733).
ctagatggtctcaagtttt

SEQ ID NO: 278805 - DNA, 19 bp, Homo sapiens
  siRNA target sequence for CP110 (NM_014711.3,2721-2739).
ggtctcaagtttttagtct

SEQ ID NO: 278806 - DNA, 19 bp, Homo sapiens
  siRNA target sequence for CP110 (NM_014711.3,2799-2817).
gacttatgcagacagataa

SEQ ID NO: 278807 - DNA, 19 bp, Homo sapiens
  siRNA target sequence for CP110 (NM_014711.3,2821-2839).
gaagcaacttcgacaaact

SEQ ID NO: 278808 - DNA, 19 bp, Homo sapiens
  siRNA target sequence for CP110 (NM_014711.3,2824-2842).
gcaacttcgacaaactgta

SEQ ID NO: 278809 - DNA, 19 bp, Homo sapiens
  siRNA target sequence for CP110 (NM_014711.3,2825-2843).
caacttcgacaaactgtaa

SEQ ID NO: 278810 - DNA, 19 bp, Homo sapiens
  siRNA target sequence for CP110 (NM_014711.3,2831-2849).
cgacaaactgtaaaagata

SEQ ID NO: 278811 - DNA, 19 bp, Homo sapiens
  siRNA target sequence for CP110 (NM_014711.3,2834-2852).
caaactgtaaaagatacta

SEQ ID NO: 278812 - DNA, 19 bp, Homo sapiens
  siRNA target sequence for CP110 (NM_014711.3,2846-2864).
gatactatggaattcataa

SEQ ID NO: 278813 - DNA, 19 bp, Homo sapiens
  siRNA target sequence for CP110 (NM_014711.3,2899-2917).
cattgtttcagctcaagat

SEQ ID NO: 278814 - DNA, 19 bp, Homo sapiens
  siRNA target sequence for CP110 (NM_014711.3,2955-2973).
ctgccttgtacggtattca

SEQ ID NO: 278815 - DNA, 19 bp, Homo sapiens
  siRNA target sequence for CP110 (NM_014711.3,2958-2976).
ccttgtacggtattcatga

SEQ ID NO: 278816 - DNA, 19 bp, Homo sapiens
  siRNA target sequence for CP110 (NM_014711.3,2962-2980).
gtacggtattcatgacata

SEQ ID NO: 278817 - DNA, 19 bp, Homo sapiens
  siRNA target sequence for CP110 (NM_014711.3,2966-2984).
ggtattcatgacatattct

SEQ ID NO: 278818 - DNA, 19 bp, Homo sapiens
  siRNA target sequence for CP110 (NM_014711.3,3029-3047).
cgagaagttcgcaaagaga

SEQ ID NO: 278819 - DNA, 19 bp, Homo sapiens
  siRNA target sequence for CP110 (NM_014711.3,3236-3254).
gttcataggctacttagta

SEQ ID NO: 278820 - DNA, 19 bp, Homo sapiens
  siRNA target sequence for CP110 (NM_014711.3,3262-3280).
gagtatatgcaggaaaaat

SEQ ID NO: 278821 - DNA, 19 bp, Homo sapiens
  siRNA target sequence for CP110 (NM_014711.3,3293-3311).
gccaaatgttgcgacaatt

SEQ ID NO: 278822 - DNA, 19 bp, Homo sapiens
  siRNA target sequence for CP110 (NM_014711.3,3304-3322).
cgacaatttaagaagacaa

SEQ ID NO: 278823 - DNA, 19 bp, Homo sapiens
  siRNA target sequence for CP110 (NM_014711.3,3307-3325).
caatttaagaagacaacat

SEQ ID NO: 278824 - DNA, 19 bp, Homo sapiens
  siRNA target sequence for CRF (NM_006688.3,281-299).
cggaaggccactatgagat

SEQ ID NO: 278825 - DNA, 19 bp, Homo sapiens
  siRNA target sequence for CRF (NM_006688.3,686-704).
ccaacctaggcaacaacta

SEQ ID NO: 278826 - DNA, 19 bp, Homo sapiens
  siRNA target sequence for CRF (NM_006688.3,720-738).
caagtttacgtgcaacatt

SEQ ID NO: 278827 - DNA, 19 bp, Homo sapiens
  siRNA target sequence for CRF (NM_006688.3,735-753).
cattcccggcacctacttt

SEQ ID NO: 278828 - DNA, 19 bp, Homo sapiens
  siRNA target sequence for CRISP3 (NM_006061.1,223-241).
gcagcaaatgcccaaaagt

SEQ ID NO: 278829 - DNA, 19 bp, Homo sapiens
  siRNA target sequence for CRISP3 (NM_006061.1,273-291).
cccaaaggatcgaatgaca

SEQ ID NO: 278830 - DNA, 19 bp, Homo sapiens
  siRNA target sequence for CRISP3 (NM_006061.1,279-297).
ggatcgaatgacaagtcta

SEQ ID NO: 278831 - DNA, 19 bp, Homo sapiens
  siRNA target sequence for CRISP3 (NM_006061.1,280-298).
gatcgaatgacaagtctaa

SEQ ID NO: 278832 - DNA, 19 bp, Homo sapiens
  siRNA target sequence for CRISP3 (NM_006061.1,459-477).
cctcgttggatgtggaaat

SEQ ID NO: 278833 - DNA, 19 bp, Homo sapiens
  siRNA target sequence for CRISP3 (NM_006061.1,483-501).
ctgtcccaatcaaaaagtt

SEQ ID NO: 278834 - DNA, 19 bp, Homo sapiens
  siRNA target sequence for CRISP3 (NM_006061.1,485-503).
gtcccaatcaaaaagttct

SEQ ID NO: 278835 - DNA, 19 bp, Homo sapiens
  siRNA target sequence for CRISP3 (NM_006061.1,487-505).
cccaatcaaaaagttctaa

SEQ ID NO: 278836 - DNA, 19 bp, Homo sapiens
  siRNA target sequence for CRISP3 (NM_006061.1,539-557).
gtaattgggctaatagact

SEQ ID NO: 278837 - DNA, 19 bp, Homo sapiens
  siRNA target sequence for CRISP3 (NM_006061.1,545-563).
gggctaatagactatatgt

SEQ ID NO: 278838 - DNA, 19 bp, Homo sapiens
  siRNA target sequence for CRISP3 (NM_006061.1,591-609).
cagttgcccagataactgt

SEQ ID NO: 278839 - DNA, 19 bp, Homo sapiens
  siRNA target sequence for CRISP3 (NM_006061.1,639-657).
gtacgaagatctctatagt

SEQ ID NO: 278840 - DNA, 19 bp, Homo sapiens
  siRNA target sequence for CRISP3 (NM_006061.1,643-661).
gaagatctctatagtaact

SEQ ID NO: 278841 - DNA, 19 bp, Homo sapiens
  siRNA target sequence for CRISP3 (NM_006061.1,646-664).
gatctctatagtaactgta

SEQ ID NO: 278842 - DNA, 19 bp, Homo sapiens
  siRNA target sequence for CRISP3 (NM_006061.1,649-667).
ctctatagtaactgtaaaa

SEQ ID NO: 278843 - DNA, 19 bp, Homo sapiens
  siRNA target sequence for CRISP3 (NM_006061.1,675-693).
gctcacattaacctgtaaa

SEQ ID NO: 278844 - DNA, 19 bp, Homo sapiens
  siRNA target sequence for CRISP3 (NM_006061.1,678-696).
cacattaacctgtaaacat

SEQ ID NO: 278845 - DNA, 19 bp, Homo sapiens
  siRNA target sequence for CRISP3 (NM_006061.1,680-698).
cattaacctgtaaacatca

SEQ ID NO: 278846 - DNA, 19 bp, Homo sapiens
  siRNA target sequence for CRYPTIC (NM_032545.2,257-275).
cggtcagtttggcattaca

SEQ ID NO: 278847 - DNA, 19 bp, Homo sapiens
  siRNA target sequence for CRYPTIC (NM_032545.2,269-287).
cattacagatcatcaattt

SEQ ID NO: 278848 - DNA, 19 bp, Homo sapiens
  siRNA target sequence for CRYPTIC (NM_032545.2,288-306).
gggaaacagctatcaaaga

SEQ ID NO: 278849 - DNA, 19 bp, Homo sapiens
  siRNA target sequence for CSDUFD1 (NM_031919.1,72-90).
ctacagaggatcatttcaa

SEQ ID NO: 278850 - DNA, 19 bp, Homo sapiens
  siRNA target sequence for CSDUFD1 (NM_031919.1,133-151).
cactacatcatacactaaa

SEQ ID NO: 278851 - DNA, 19 bp, Homo sapiens
  siRNA target sequence for CSDUFD1 (NM_031919.1,153-171).
ggagttcaggaaaattcgt

SEQ ID NO: 278852 - DNA, 19 bp, Homo sapiens
  siRNA target sequence for CSDUFD1 (NM_031919.1,198-216).
gaatttgatagtttatact

SEQ ID NO: 278853 - DNA, 19 bp, Homo sapiens
  siRNA target sequence for CSDUFD1 (NM_031919.1,215-233).
ctctatactggatgaagta

SEQ ID NO: 278854 - DNA, 19 bp, Homo sapiens
  siRNA target sequence for CSDUFD1 (NM_031919.1,228-246).
gaagtaaaagaaagtatga

SEQ ID NO: 278855 - DNA, 19 bp, Homo sapiens
  siRNA target sequence for CSDUFD1 (NM_031919.1,260-278).
gcaggaacaagctcgtaaa

SEQ ID NO: 278856 - DNA, 19 bp, Homo sapiens
  siRNA target sequence for CSDUFD1 (NM_031919.1,261-279).
caggaacaagctcgtaaat

SEQ ID NO: 278857 - DNA, 19 bp, Homo sapiens
  siRNA target sequence for CSDUFD1 (NM_031919.1,274-292).
gtaaatcccaagagttaca

SEQ ID NO: 278858 - DNA, 19 bp, Homo sapiens
  siRNA target sequence for CSDUFD1 (NM_031919.1,291-309).
cagagtcagattagtcaat

SEQ ID NO: 278859 - DNA, 19 bp, Homo sapiens
  siRNA target sequence for CSDUFD1 (NM_031919.1,295-313).
gtcagattagtcaatgtaa

SEQ ID NO: 278860 - DNA, 19 bp, Homo sapiens
  siRNA target sequence for CSDUFD1 (NM_031919.1,323-341).
ggagaactctgaagaacta

SEQ ID NO: 278861 - DNA, 19 bp, Homo sapiens
  siRNA target sequence for CSDUFD1 (NM_031919.1,326-344).
gaactctgaagaactatta

SEQ ID NO: 278862 - DNA, 19 bp, Homo sapiens
  siRNA target sequence for CSDUFD1 (NM_031919.1,352-370).
caacaaggtcattagatat

SEQ ID NO: 278863 - DNA, 19 bp, Homo sapiens
  siRNA target sequence for CSN3 (NM_005212.1,200-218).
ctccatatgtcccaatgta

SEQ ID NO: 278864 - DNA, 19 bp, Homo sapiens
  siRNA target sequence for CSN3 (NM_005212.1,202-220).
ccatatgtcccaatgtatt

SEQ ID NO: 278865 - DNA, 19 bp, Homo sapiens
  siRNA target sequence for CSN3 (NM_005212.1,203-221).
catatgtcccaatgtatta

SEQ ID NO: 278866 - DNA, 19 bp, Homo sapiens
  siRNA target sequence for CSN3 (NM_005212.1,223-241).
gtgccaaatagctatcctt

SEQ ID NO: 278867 - DNA, 19 bp, Homo sapiens
  siRNA target sequence for CSN3 (NM_005212.1,225-243).
gccaaatagctatccttat

SEQ ID NO: 278868 - DNA, 19 bp, Homo sapiens
  siRNA target sequence for CSN3 (NM_005212.1,227-245).
caaatagctatccttatta

SEQ ID NO: 278869 - DNA, 19 bp, Homo sapiens
  siRNA target sequence for CSN3 (NM_005212.1,239-257).
cttattatggaaccaattt

SEQ ID NO: 278870 - DNA, 19 bp, Homo sapiens
  siRNA target sequence for CSN3 (NM_005212.1,261-279).
ccaacgtagaccagctata

SEQ ID NO: 278871 - DNA, 19 bp, Homo sapiens
  siRNA target sequence for CSN3 (NM_005212.1,265-283).
cgtagaccagctatagcaa

SEQ ID NO: 278872 - DNA, 19 bp, Homo sapiens
  siRNA target sequence for CSN3 (NM_005212.1,266-284).
gtagaccagctatagcaat

SEQ ID NO: 278873 - DNA, 19 bp, Homo sapiens
  siRNA target sequence for CSN3 (NM_005212.1,269-287).
gaccagctatagcaattaa

SEQ ID NO: 278874 - DNA, 19 bp, Homo sapiens
  siRNA target sequence for CSN3 (NM_005212.1,271-289).
ccagctatagcaattaata

SEQ ID NO: 278875 - DNA, 19 bp, Homo sapiens
  siRNA target sequence for CSN3 (NM_005212.1,272-290).
cagctatagcaattaataa

SEQ ID NO: 278876 - DNA, 19 bp, Homo sapiens
  siRNA target sequence for CSN3 (NM_005212.1,302-320).
ctcgcacatattatgcaaa

SEQ ID NO: 278877 - DNA, 19 bp, Homo sapiens
  siRNA target sequence for CSN3 (NM_005212.1,316-334).
gcaaacccagctgtagtta

SEQ ID NO: 278878 - DNA, 19 bp, Homo sapiens
  siRNA target sequence for CSN3 (NM_005212.1,358-376).
cggcaatacctgccaaata

SEQ ID NO: 278879 - DNA, 19 bp, Homo sapiens
  siRNA target sequence for CSN3 (NM_005212.1,429-447).
catccccccaaagaaaatt

SEQ ID NO: 278880 - DNA, 19 bp, Homo sapiens
  siRNA target sequence for CSRP2 (NM_001321.1,220-238).
gcacaacagtggcaattca

SEQ ID NO: 278881 - DNA, 19 bp, Homo sapiens
  siRNA target sequence for CSRP2 (NM_001321.1,237-255).
cacgatgaagagatctact

SEQ ID NO: 278882 - DNA, 19 bp, Homo sapiens
  siRNA target sequence for CSRP2 (NM_001321.1,338-356).
cgagaggctgggcatcaaa

SEQ ID NO: 278883 - DNA, 19 bp, Homo sapiens
  siRNA target sequence for CTAG1 (NM_001327.1,342-360).
gccgcctgcttgagttcta

SEQ ID NO: 278884 - DNA, 19 bp, Homo sapiens
  siRNA target sequence for CTAG2 (NM_020994.1,450-468).
ccggcaacctactgtttat

SEQ ID NO: 278885 - DNA, 19 bp, Homo sapiens
  siRNA target sequence for CTAG2 (NM_020994.1,454-472).
caacctactgtttatgtca

SEQ ID NO: 278886 - DNA, 19 bp, Homo sapiens
  siRNA target sequence for CTAG2 (NM_020994.1,651-669).
gcagaggtgtcgcctttaa

SEQ ID NO: 278887 - DNA, 19 bp, Homo sapiens
  siRNA target sequence for CTAG2 (NM_020994.1,652-670).
cagaggtgtcgcctttaat

SEQ ID NO: 278888 - DNA, 19 bp, Homo sapiens
  siRNA target sequence for CTAG2 (NM_020994.1,654-672).
gaggtgtcgcctttaatgt

SEQ ID NO: 278889 - DNA, 19 bp, Homo sapiens
  siRNA target sequence for CTAG2 (NM_020994.1,656-674).
ggtgtcgcctttaatgtga

SEQ ID NO: 278890 - DNA, 19 bp, Homo sapiens
  siRNA target sequence for CTDSP1 (NM_021198.1,342-360).
cagctcggccgtcattact

SEQ ID NO: 278891 - DNA, 19 bp, Homo sapiens
  siRNA target sequence for CTDSP1 (NM_021198.1,344-362).
gctcggccgtcattactca

SEQ ID NO: 278892 - DNA, 19 bp, Homo sapiens
  siRNA target sequence for CTDSP1 (NM_021198.1,592-610).
caggactcagacaagatct

SEQ ID NO: 278893 - DNA, 19 bp, Homo sapiens
  siRNA target sequence for CTDSP1 (NM_021198.1,758-776).
gaatgggcgagctctttga

SEQ ID NO: 278894 - DNA, 19 bp, Homo sapiens
  siRNA target sequence for CTDSP1 (NM_021198.1,940-958).
gtgctcatcctggacaatt

SEQ ID NO: 278895 - DNA, 19 bp, Homo sapiens
  siRNA target sequence for CTDSP1 (NM_021198.1,1000-1018).
gtggcctcgtggtttgaca

SEQ ID NO: 278896 - DNA, 19 bp, Homo sapiens
  siRNA target sequence for CTDSP2 (NM_005730.2,379-397).
ccaagtcctctcctaagaa

SEQ ID NO: 278897 - DNA, 19 bp, Homo sapiens
  siRNA target sequence for CTDSP2 (NM_005730.2,399-417).
cctcgtggacgtaacatct

SEQ ID NO: 278898 - DNA, 19 bp, Homo sapiens
  siRNA target sequence for CTDSP2 (NM_005730.2,402-420).
cgtggacgtaacatcttca

SEQ ID NO: 278899 - DNA, 19 bp, Homo sapiens
  siRNA target sequence for CTDSP2 (NM_005730.2,403-421).
gtggacgtaacatcttcaa

SEQ ID NO: 278900 - DNA, 19 bp, Homo sapiens
  siRNA target sequence for CTDSP2 (NM_005730.2,475-493).
ctgagctcgctgcgtataa

SEQ ID NO: 278901 - DNA, 19 bp, Homo sapiens
  siRNA target sequence for CTDSP2 (NM_005730.2,535-553).
gtctccagtaccagttcta

SEQ ID NO: 278902 - DNA, 19 bp, Homo sapiens
  siRNA target sequence for CTDSP2 (NM_005730.2,618-636).
gtcattgacctcgatgaaa

SEQ ID NO: 278903 - DNA, 19 bp, Homo sapiens
  siRNA target sequence for CTDSP2 (NM_005730.2,639-657).
cttgtgcatagctccttta

SEQ ID NO: 278904 - DNA, 19 bp, Homo sapiens
  siRNA target sequence for CTDSP2 (NM_005730.2,649-667).
gctcctttaagccaatcaa

SEQ ID NO: 278905 - DNA, 19 bp, Homo sapiens
  siRNA target sequence for CTDSP2 (NM_005730.2,653-671).
ctttaagccaatcaacaat

SEQ ID NO: 278906 - DNA, 19 bp, Homo sapiens
  siRNA target sequence for CTDSP2 (NM_005730.2,680-698).
catagtgcctatagagatt

SEQ ID NO: 278907 - DNA, 19 bp, Homo sapiens
  siRNA target sequence for CTDSP2 (NM_005730.2,706-724).
ccactcaccaggtgtatgt

SEQ ID NO: 278908 - DNA, 19 bp, Homo sapiens
  siRNA target sequence for CTDSP2 (NM_005730.2,733-751).
ggccttatgtggatgagtt

SEQ ID NO: 278909 - DNA, 19 bp, Homo sapiens
  siRNA target sequence for CTDSP2 (NM_005730.2,959-977).
ctcgcctgcttcttacata

SEQ ID NO: 278910 - DNA, 19 bp, Homo sapiens
  siRNA target sequence for CTDSP2 (NM_005730.2,961-979).
cgcctgcttcttacatatt

SEQ ID NO: 278911 - DNA, 19 bp, Homo sapiens
  siRNA target sequence for CTDSP2 (NM_005730.2,1043-1061).
gaacctgatcccaatcttt

SEQ ID NO: 278912 - DNA, 19 bp, Homo sapiens
  siRNA target sequence for CTDSPL (NM_005808.1,518-536).
gcttccgtgattacaatgt

SEQ ID NO: 278913 - DNA, 19 bp, Homo sapiens
  siRNA target sequence for CTDSPL (NM_005808.1,633-651).
ggtgacggtgcttgactat

SEQ ID NO: 278914 - DNA, 19 bp, Homo sapiens
  siRNA target sequence for CTDSPL (NM_005808.1,638-656).
cggtgcttgactatggaaa

SEQ ID NO: 278915 - DNA, 19 bp, Homo sapiens
  siRNA target sequence for CTDSPL (NM_005808.1,701-719).
cgtttaagcctattagtaa

SEQ ID NO: 278916 - DNA, 19 bp, Homo sapiens
  siRNA target sequence for CTDSPL (NM_005808.1,809-827).
ggatggggcagctttttga

SEQ ID NO: 278917 - DNA, 19 bp, Homo sapiens
  siRNA target sequence for CTDSPL (NM_005808.1,810-828).
gatggggcagctttttgaa

SEQ ID NO: 278918 - DNA, 19 bp, Homo sapiens
  siRNA target sequence for CTDSPL (NM_005808.1,813-831).
ggggcagctttttgaatgt

SEQ ID NO: 278919 - DNA, 19 bp, Homo sapiens
  siRNA target sequence for CTDSPL (NM_005808.1,1147-1165).
ctgcacagactctgcaata

SEQ ID NO: 278920 - DNA, 19 bp, Homo sapiens
  siRNA target sequence for CTDSPL (NM_005808.1,1150-1168).
cacagactctgcaataggt

SEQ ID NO: 278921 - DNA, 19 bp, Homo sapiens
  siRNA target sequence for CTNND1 (NM_001331.1,668-686).
ccgggtctcaccacaagat

SEQ ID NO: 278922 - DNA, 19 bp, Homo sapiens
  siRNA target sequence for CTNND1 (NM_001331.1,747-765).
ggcgatgctgaccttgaaa

SEQ ID NO: 278923 - DNA, 19 bp, Homo sapiens
  siRNA target sequence for CTNND1 (NM_001331.1,952-970).
ccacggtcaagaaagtagt

SEQ ID NO: 278924 - DNA, 19 bp, Homo sapiens
  siRNA target sequence for CTNND1 (NM_001331.1,1029-1047).
gtggatgcttcatcagttt

SEQ ID NO: 278925 - DNA, 19 bp, Homo sapiens
  siRNA target sequence for CTNND1 (NM_001331.1,1157-1175).
ctaccctcctgatggttat

SEQ ID NO: 278926 - DNA, 19 bp, Homo sapiens
  siRNA target sequence for CTNND1 (NM_001331.1,1160-1178).
ccctcctgatggttatagt

SEQ ID NO: 278927 - DNA, 19 bp, Homo sapiens
  siRNA target sequence for CTNND1 (NM_001331.1,1171-1189).
gttatagtcgccactatga

SEQ ID NO: 278928 - DNA, 19 bp, Homo sapiens
  siRNA target sequence for CTNND1 (NM_001331.1,1180-1198).
gccactatgaagatggtta

SEQ ID NO: 278929 - DNA, 19 bp, Homo sapiens
  siRNA target sequence for CTNND1 (NM_001331.1,1181-1199).
ccactatgaagatggttat

SEQ ID NO: 278930 - DNA, 19 bp, Homo sapiens
  siRNA target sequence for CTNND1 (NM_001331.1,1277-1295).
ctaccgggcacctagtaga

SEQ ID NO: 278931 - DNA, 19 bp, Homo sapiens
  siRNA target sequence for CTNND1 (NM_001331.1,1288-1306).
ctagtagacaggatgtgta

SEQ ID NO: 278932 - DNA, 19 bp, Homo sapiens
  siRNA target sequence for CTNND1 (NM_001331.1,1394-1412).
gcgtagtatgggctatgat

SEQ ID NO: 278933 - DNA, 19 bp, Homo sapiens
  siRNA target sequence for CTNND1 (NM_001331.1,1396-1414).
gtagtatgggctatgatga

SEQ ID NO: 278934 - DNA, 19 bp, Homo sapiens
  siRNA target sequence for CTNND1 (NM_001331.1,1406-1424).
ctatgatgacctggattat

SEQ ID NO: 278935 - DNA, 19 bp, Homo sapiens
  siRNA target sequence for CTNND1 (NM_001331.1,1521-1539).
gtgccatcggatcaatact

SEQ ID NO: 278936 - DNA, 19 bp, Homo sapiens
  siRNA target sequence for CTNND1 (NM_001331.1,1524-1542).
ccatcggatcaatactact

SEQ ID NO: 278937 - DNA, 19 bp, Homo sapiens
  siRNA target sequence for CTNND1 (NM_001331.1,1563-1581).
gagcgaggaagtttagcaa

SEQ ID NO: 278938 - DNA, 19 bp, Homo sapiens
  siRNA target sequence for CTNND1 (NM_001331.1,1608-1626).
cctccacctcctaattgga

SEQ ID NO: 278939 - DNA, 19 bp, Homo sapiens
  siRNA target sequence for CTNND1 (NM_001331.1,1696-1714).
ctgcatacctgcaacactt

SEQ ID NO: 278940 - DNA, 19 bp, Homo sapiens
  siRNA target sequence for CTNND1 (NM_001331.1,1698-1716).
gcatacctgcaacacttat

SEQ ID NO: 278941 - DNA, 19 bp, Homo sapiens
  siRNA target sequence for CTNND1 (NM_001331.1,1822-1840).
gtggagctctcaagaatat

SEQ ID NO: 278942 - DNA, 19 bp, Homo sapiens
  siRNA target sequence for CTNND1 (NM_001331.1,1824-1842).
ggagctctcaagaatatct

SEQ ID NO: 278943 - DNA, 19 bp, Homo sapiens
  siRNA target sequence for CTNND1 (NM_001331.1,1827-1845).
gctctcaagaatatctctt

SEQ ID NO: 278944 - DNA, 19 bp, Homo sapiens
  siRNA target sequence for CTNND1 (NM_001331.1,1851-1869).
cgtgaccaggataacaaga

SEQ ID NO: 278945 - DNA, 19 bp, Homo sapiens
  siRNA target sequence for CTNND1 (NM_001331.1,1918-1936).
gaaaggctcgtgatatgga

SEQ ID NO: 278946 - DNA, 19 bp, Homo sapiens
  siRNA target sequence for CTNND1 (NM_001331.1,1927-1945).
gtgatatggaccttactga

SEQ ID NO: 278947 - DNA, 19 bp, Homo sapiens
  siRNA target sequence for CTNND1 (NM_001331.1,1934-1952).
ggaccttactgaagttatt

SEQ ID NO: 278948 - DNA, 19 bp, Homo sapiens
  siRNA target sequence for CTNND1 (NM_001331.1,1935-1953).
gaccttactgaagttatta

SEQ ID NO: 278949 - DNA, 19 bp, Homo sapiens
  siRNA target sequence for CTNND1 (NM_001331.1,1975-1993).
catcccatgactcaatcaa

SEQ ID NO: 278950 - DNA, 19 bp, Homo sapiens
  siRNA target sequence for CTNND1 (NM_001331.1,1978-1996).
cccatgactcaatcaaaat

SEQ ID NO: 278951 - DNA, 19 bp, Homo sapiens
  siRNA target sequence for CTNND1 (NM_001331.1,2056-2074).
gttgggagcgggaacctaa

SEQ ID NO: 278952 - DNA, 19 bp, Homo sapiens
  siRNA target sequence for CTNND1 (NM_001331.1,2059-2077).
gggagcgggaacctaatga

SEQ ID NO: 278953 - DNA, 19 bp, Homo sapiens
  siRNA target sequence for CTNND1 (NM_001331.1,2060-2078).
ggagcgggaacctaatgaa

SEQ ID NO: 278954 - DNA, 19 bp, Homo sapiens
  siRNA target sequence for CTNND1 (NM_001331.1,2182-2200).
gggaatgtgatggtttagt

SEQ ID NO: 278955 - DNA, 19 bp, Homo sapiens
  siRNA target sequence for CTNND1 (NM_001331.1,2183-2201).
ggaatgtgatggtttagtt

SEQ ID NO: 278956 - DNA, 19 bp, Homo sapiens
  siRNA target sequence for CTNND1 (NM_001331.1,2287-2305).
ggaacttatcatatcaagt

SEQ ID NO: 278957 - DNA, 19 bp, Homo sapiens
  siRNA target sequence for CTNND1 (NM_001331.1,2349-2367).
cccaatgttgccaacaata

SEQ ID NO: 278958 - DNA, 19 bp, Homo sapiens
  siRNA target sequence for CTNND1 (NM_001331.1,2427-2445).
gaggatccagcaaacgata

SEQ ID NO: 278959 - DNA, 19 bp, Homo sapiens
  siRNA target sequence for CTNND1 (NM_001331.1,2437-2455).
caaacgatacagtggattt

SEQ ID NO: 278960 - DNA, 19 bp, Homo sapiens
  siRNA target sequence for CTNND1 (NM_001331.1,2478-2496).
cgaggctatgagctcttat

SEQ ID NO: 278961 - DNA, 19 bp, Homo sapiens
  siRNA target sequence for CTNND1 (NM_001331.1,2482-2500).
gctatgagctcttatttca

SEQ ID NO: 278962 - DNA, 19 bp, Homo sapiens
  siRNA target sequence for CTNND1 (NM_001331.1,2503-2521).
cagaggtggttcggatata

SEQ ID NO: 278963 - DNA, 19 bp, Homo sapiens
  siRNA target sequence for CTNND1 (NM_001331.1,2508-2526).
gtggttcggatatacatct

SEQ ID NO: 278964 - DNA, 19 bp, Homo sapiens
  siRNA target sequence for CTNND1 (NM_001331.1,2516-2534).
gatatacatctcacttctt

SEQ ID NO: 278965 - DNA, 19 bp, Homo sapiens
  siRNA target sequence for CTNND1 (NM_001331.1,2572-2590).
ctggagctatccagaactt

SEQ ID NO: 278966 - DNA, 19 bp, Homo sapiens
  siRNA target sequence for CTNND1 (NM_001331.1,2605-2623).
ggacgtatggtcgatacat

SEQ ID NO: 278967 - DNA, 19 bp, Homo sapiens
  siRNA target sequence for CTNND1 (NM_001331.1,2735-2753).
ggatgctcgcaacaaagaa

SEQ ID NO: 278968 - DNA, 19 bp, Homo sapiens
  siRNA target sequence for CTNND1 (NM_001331.1,2736-2754).
gatgctcgcaacaaagaat

SEQ ID NO: 278969 - DNA, 19 bp, Homo sapiens
  siRNA target sequence for CTNND1 (NM_001331.1,2739-2757).
gctcgcaacaaagaattaa

SEQ ID NO: 278970 - DNA, 19 bp, Homo sapiens
  siRNA target sequence for CTNND1 (NM_001331.1,2740-2758).
ctcgcaacaaagaattaat

SEQ ID NO: 278971 - DNA, 19 bp, Homo sapiens
  siRNA target sequence for CTNND1 (NM_001331.1,2760-2778).
ggtaaacatgctattccta

SEQ ID NO: 278972 - DNA, 19 bp, Homo sapiens
  siRNA target sequence for CTNND1 (NM_001331.1,2761-2779).
gtaaacatgctattcctaa

SEQ ID NO: 278973 - DNA, 19 bp, Homo sapiens
  siRNA target sequence for CTNND1 (NM_001331.1,2770-2788).
ctattcctaacttggtaaa

SEQ ID NO: 278974 - DNA, 19 bp, Homo sapiens
  siRNA target sequence for CTNND1 (NM_001331.1,2848-2866).
ctattttgaacactatcaa

SEQ ID NO: 278975 - DNA, 19 bp, Homo sapiens
  siRNA target sequence for CTNND1 (NM_001331.1,2910-2928).
gagacacagggtattgaga

SEQ ID NO: 278976 - DNA, 19 bp, Homo sapiens
  siRNA target sequence for CTNND1 (NM_001331.1,2930-2948).
gctggtgttgatcaacaaa

SEQ ID NO: 278977 - DNA, 19 bp, Homo sapiens
  siRNA target sequence for CTNND1 (NM_001331.1,2931-2949).
ctggtgttgatcaacaaat

SEQ ID NO: 278978 - DNA, 19 bp, Homo sapiens
  siRNA target sequence for CTNND1 (NM_001331.1,2957-2975).
ccgctcagaaaaagaagtt

SEQ ID NO: 278979 - DNA, 19 bp, Homo sapiens
  siRNA target sequence for CTNND1 (NM_001331.1,2980-2998).
cagcagcacttgtattaca

SEQ ID NO: 278980 - DNA, 19 bp, Homo sapiens
  siRNA target sequence for CTNND1 (NM_001331.1,2982-3000).
gcagcacttgtattacaga

SEQ ID NO: 278981 - DNA, 19 bp, Homo sapiens
  siRNA target sequence for CTNND1 (NM_001331.1,3001-3019).
caatctggggatataagga

SEQ ID NO: 278982 - DNA, 19 bp, Homo sapiens
  siRNA target sequence for CTNND1 (NM_001331.1,3058-3076).
cagactttcaggtgaatct

SEQ ID NO: 278983 - DNA, 19 bp, Homo sapiens
  siRNA target sequence for CTNND1 (NM_001331.1,3060-3078).
gactttcaggtgaatctaa

SEQ ID NO: 278984 - DNA, 19 bp, Homo sapiens
  siRNA target sequence for CTNND1 (NM_001331.1,3095-3113).
ccagagcagtcattcatat

SEQ ID NO: 278985 - DNA, 19 bp, Homo sapiens
  siRNA target sequence for CTNND1 (NM_001331.1,3098-3116).
gagcagtcattcatatgat

SEQ ID NO: 278986 - DNA, 19 bp, Homo sapiens
  siRNA target sequence for CTNND1 (NM_001331.1,3100-3118).
gcagtcattcatatgatga

SEQ ID NO: 278987 - DNA, 19 bp, Homo sapiens
  siRNA target sequence for CTNND1 (NM_001331.1,3132-3150).
ctcattgaccggaaccaaa

SEQ ID NO: 278988 - DNA, 19 bp, Homo sapiens
  siRNA target sequence for CTNND1 (NM_001331.1,3134-3152).
cattgaccggaaccaaaaa

SEQ ID NO: 278989 - DNA, 19 bp, Homo sapiens
  siRNA target sequence for CTNND1 (NM_001331.1,3140-3158).
ccggaaccaaaaatcagat

SEQ ID NO: 278990 - DNA, 19 bp, Homo sapiens
  siRNA target sequence for CTNND1 (NM_001331.1,3141-3159).
cggaaccaaaaatcagata

SEQ ID NO: 278991 - DNA, 19 bp, Homo sapiens
  siRNA target sequence for CTNND1 (NM_001331.1,3226-3244).
gcgacatggagccattgaa

SEQ ID NO: 278992 - DNA, 19 bp, Homo sapiens
  siRNA target sequence for CTNND1 (NM_001331.1,3341-3359).
cccctccatgcagaagatt

SEQ ID NO: 278993 - DNA, 19 bp, Homo sapiens
  siRNA target sequence for CTNND1 (NM_001331.1,3342-3360).
ccctccatgcagaagattt

SEQ ID NO: 278994 - DNA, 19 bp, Homo sapiens
  siRNA target sequence for CUL4B (NM_003588.2,615-633).
cgagagagaagactttgat

SEQ ID NO: 278995 - DNA, 19 bp, Homo sapiens
  siRNA target sequence for CUL4B (NM_003588.2,777-795).
ggagtttgtagggtttgat

SEQ ID NO: 278996 - DNA, 19 bp, Homo sapiens
  siRNA target sequence for CUL4B (NM_003588.2,905-923).
cttcggtgcatcatgcaaa

SEQ ID NO: 278997 - DNA, 19 bp, Homo sapiens
  siRNA target sequence for CUL4B (NM_003588.2,924-942).
cggcctagccaaatcttct

SEQ ID NO: 278998 - DNA, 19 bp, Homo sapiens
  siRNA target sequence for CUL4B (NM_003588.2,925-943).
ggcctagccaaatcttcta

SEQ ID NO: 278999 - DNA, 19 bp, Homo sapiens
  siRNA target sequence for CUL4B (NM_003588.2,947-965).
ccgtctctagctttgctaa

SEQ ID NO: 279000 - DNA, 19 bp, Homo sapiens
  siRNA target sequence for CUL4B (NM_003588.2,973-991).
cctggctctgctaagaagt

SEQ ID NO: 279001 - DNA, 19 bp, Homo sapiens
  siRNA target sequence for CUL4B (NM_003588.2,974-992).
ctggctctgctaagaagtt

SEQ ID NO: 279002 - DNA, 19 bp, Homo sapiens
  siRNA target sequence for CUL4B (NM_003588.2,983-1001).
ctaagaagttagtgatcaa

SEQ ID NO: 279003 - DNA, 19 bp, Homo sapiens
  siRNA target sequence for CUL4B (NM_003588.2,990-1008).
gttagtgatcaagaacttt

SEQ ID NO: 279004 - DNA, 19 bp, Homo sapiens
  siRNA target sequence for CUL4B (NM_003588.2,1074-1092).
ggaagctattcagaatagt

SEQ ID NO: 279005 - DNA, 19 bp, Homo sapiens
  siRNA target sequence for CUL4B (NM_003588.2,1075-1093).
gaagctattcagaatagta

SEQ ID NO: 279006 - DNA, 19 bp, Homo sapiens
  siRNA target sequence for CUL4B (NM_003588.2,1184-1202).
gacagatctgcgaagatca

SEQ ID NO: 279007 - DNA, 19 bp, Homo sapiens
  siRNA target sequence for CUL4B (NM_003588.2,1238-1256).
cattggatagcgttctttt

SEQ ID NO: 279008 - DNA, 19 bp, Homo sapiens
  siRNA target sequence for CUL4B (NM_003588.2,1305-1323).
catgatcaggagcattttt

SEQ ID NO: 279009 - DNA, 19 bp, Homo sapiens
  siRNA target sequence for CUL4B (NM_003588.2,1337-1355).
gaacttacgttcttcagaa

SEQ ID NO: 279010 - DNA, 19 bp, Homo sapiens
  siRNA target sequence for CUL4B (NM_003588.2,1378-1396).
gacatgggactggagttat

SEQ ID NO: 279011 - DNA, 19 bp, Homo sapiens
  siRNA target sequence for CUL4B (NM_003588.2,1380-1398).
catgggactggagttattt

SEQ ID NO: 279012 - DNA, 19 bp, Homo sapiens
  siRNA target sequence for CUL4B (NM_003588.2,1400-1418).
gggctcatattataagtga

SEQ ID NO: 279013 - DNA, 19 bp, Homo sapiens
  siRNA target sequence for CUL4B (NM_003588.2,1401-1419).
ggctcatattataagtgat

SEQ ID NO: 279014 - DNA, 19 bp, Homo sapiens
  siRNA target sequence for CUL4B (NM_003588.2,1417-1435).
gatcagaaagtgcagaata

SEQ ID NO: 279015 - DNA, 19 bp, Homo sapiens
  siRNA target sequence for CUL4B (NM_003588.2,1428-1446).
gcagaataagacaattgat

SEQ ID NO: 279016 - DNA, 19 bp, Homo sapiens
  siRNA target sequence for CUL4B (NM_003588.2,1439-1457).
caattgatggcattcttct

SEQ ID NO: 279017 - DNA, 19 bp, Homo sapiens
  siRNA target sequence for CUL4B (NM_003588.2,1480-1498).
ggtgaagcaattgatagaa

SEQ ID NO: 279018 - DNA, 19 bp, Homo sapiens
  siRNA target sequence for CUL4B (NM_003588.2,1504-1522).
cttcgaagccttttaagca

SEQ ID NO: 279019 - DNA, 19 bp, Homo sapiens
  siRNA target sequence for CUL4B (NM_003588.2,1597-1615).
gctgaaggccaaaaattaa

SEQ ID NO: 279020 - DNA, 19 bp, Homo sapiens
  siRNA target sequence for CUL4B (NM_003588.2,1629-1647).
ggttcctgaatatctacat

SEQ ID NO: 279021 - DNA, 19 bp, Homo sapiens
  siRNA target sequence for CUL4B (NM_003588.2,1634-1652).
ctgaatatctacatcatgt

SEQ ID NO: 279022 - DNA, 19 bp, Homo sapiens
  siRNA target sequence for CUL4B (NM_003588.2,1636-1654).
gaatatctacatcatgtta

SEQ ID NO: 279023 - DNA, 19 bp, Homo sapiens
  siRNA target sequence for CUL4B (NM_003588.2,1669-1687).
gaagaagcagacagactta

SEQ ID NO: 279024 - DNA, 19 bp, Homo sapiens
  siRNA target sequence for CUL4B (NM_003588.2,1702-1720).
cagaccacccagaagtcat

SEQ ID NO: 279025 - DNA, 19 bp, Homo sapiens
  siRNA target sequence for CUL4B (NM_003588.2,1704-1722).
gaccacccagaagtcatta

SEQ ID NO: 279026 - DNA, 19 bp, Homo sapiens
  siRNA target sequence for CUL4B (NM_003588.2,1711-1729).
cagaagtcattaattgcta

SEQ ID NO: 279027 - DNA, 19 bp, Homo sapiens
  siRNA target sequence for CUL4B (NM_003588.2,1744-1762).
cttctaggtgaacacttaa

SEQ ID NO: 279028 - DNA, 19 bp, Homo sapiens
  siRNA target sequence for CUL4B (NM_003588.2,1765-1783).
gcaattcttcagaaaggtt

SEQ ID NO: 279029 - DNA, 19 bp, Homo sapiens
  siRNA target sequence for CUL4B (NM_003588.2,1806-1824).
ccgaattcaagatttgtct

SEQ ID NO: 279030 - DNA, 19 bp, Homo sapiens
  siRNA target sequence for CUL4B (NM_003588.2,1876-1894).
cagcagtggatcgaatata

SEQ ID NO: 279031 - DNA, 19 bp, Homo sapiens
  siRNA target sequence for CUL4B (NM_003588.2,1899-1917).
ggcatttggcagcactatt

SEQ ID NO: 279032 - DNA, 19 bp, Homo sapiens
  siRNA target sequence for CUL4B (NM_003588.2,1901-1919).
catttggcagcactattgt

SEQ ID NO: 279033 - DNA, 19 bp, Homo sapiens
  siRNA target sequence for CUL4B (NM_003588.2,1906-1924).
ggcagcactattgtaatta

SEQ ID NO: 279034 - DNA, 19 bp, Homo sapiens
  siRNA target sequence for CUL4B (NM_003588.2,1951-1969).
caagaattgctggatttta

SEQ ID NO: 279035 - DNA, 19 bp, Homo sapiens
  siRNA target sequence for CUL4B (NM_003588.2,1972-1990).
gataaggttgaccatataa

SEQ ID NO: 279036 - DNA, 19 bp, Homo sapiens
  siRNA target sequence for CUL4B (NM_003588.2,1977-1995).
ggttgaccatataattgat

SEQ ID NO: 279037 - DNA, 19 bp, Homo sapiens
  siRNA target sequence for CUL4B (NM_003588.2,2041-2059).
gcatttgaaacgttcatta

SEQ ID NO: 279038 - DNA, 19 bp, Homo sapiens
  siRNA target sequence for CUL4B (NM_003588.2,2042-2060).
catttgaaacgttcattaa

SEQ ID NO: 279039 - DNA, 19 bp, Homo sapiens
  siRNA target sequence for CUL4B (NM_003588.2,2047-2065).
gaaacgttcattaacaaaa

SEQ ID NO: 279040 - DNA, 19 bp, Homo sapiens
  siRNA target sequence for CUL4B (NM_003588.2,2077-2095).
ccagctgaacttatagcta

SEQ ID NO: 279041 - DNA, 19 bp, Homo sapiens
  siRNA target sequence for CUL4B (NM_003588.2,2078-2096).
cagctgaacttatagctaa

SEQ ID NO: 279042 - DNA, 19 bp, Homo sapiens
  siRNA target sequence for CUL4B (NM_003588.2,2081-2099).
ctgaacttatagctaagta

SEQ ID NO: 279043 - DNA, 19 bp, Homo sapiens
  siRNA target sequence for CUL4B (NM_003588.2,2092-2110).
gctaagtatgtagattcaa

SEQ ID NO: 279044 - DNA, 19 bp, Homo sapiens
  siRNA target sequence for CUL4B (NM_003588.2,2093-2111).
ctaagtatgtagattcaaa

SEQ ID NO: 279045 - DNA, 19 bp, Homo sapiens
  siRNA target sequence for CUL4B (NM_003588.2,2163-2181).
ggataaaattatgatcata

SEQ ID NO: 279046 - DNA, 19 bp, Homo sapiens
  siRNA target sequence for CUL4B (NM_003588.2,2216-2234).
ccttctataagaaagattt

SEQ ID NO: 279047 - DNA, 19 bp, Homo sapiens
  siRNA target sequence for CUL4B (NM_003588.2,2244-2262).
cctgttagtcggaaagagt

SEQ ID NO: 279048 - DNA, 19 bp, Homo sapiens
  siRNA target sequence for CUL4B (NM_003588.2,2253-2271).
cggaaagagtgcatctgta

SEQ ID NO: 279049 - DNA, 19 bp, Homo sapiens
  siRNA target sequence for CUL4B (NM_003588.2,2289-2307).
gctgtccaaacttaaacat

SEQ ID NO: 279050 - DNA, 19 bp, Homo sapiens
  siRNA target sequence for CUL4B (NM_003588.2,2292-2310).
gtccaaacttaaacatgaa

SEQ ID NO: 279051 - DNA, 19 bp, Homo sapiens
  siRNA target sequence for CUL4B (NM_003588.2,2330-2348).
gcaaacttgaaggaatgtt

SEQ ID NO: 279052 - DNA, 19 bp, Homo sapiens
  siRNA target sequence for CUL4B (NM_003588.2,2407-2425).
cagaatgttccgggaaata

SEQ ID NO: 279053 - DNA, 19 bp, Homo sapiens
  siRNA target sequence for CUL4B (NM_003588.2,2416-2434).
ccgggaaatattgagttaa

SEQ ID NO: 279054 - DNA, 19 bp, Homo sapiens
  siRNA target sequence for CUL4B (NM_003588.2,2454-2472).
gggctattggccgacatat

SEQ ID NO: 279055 - DNA, 19 bp, Homo sapiens
  siRNA target sequence for CUL4B (NM_003588.2,2456-2474).
gctattggccgacatatgt

SEQ ID NO: 279056 - DNA, 19 bp, Homo sapiens
  siRNA target sequence for CUL4B (NM_003588.2,2466-2484).
gacatatgtgcctatggaa

SEQ ID NO: 279057 - DNA, 19 bp, Homo sapiens
  siRNA target sequence for CUL4B (NM_003588.2,2495-2513).
caccagagatggtaaaact

SEQ ID NO: 279058 - DNA, 19 bp, Homo sapiens
  siRNA target sequence for CUL4B (NM_003588.2,2831-2849).
gtaatgatgatttcaaaca

SEQ ID NO: 279059 - DNA, 19 bp, Homo sapiens
  siRNA target sequence for CUL4B (NM_003588.2,2848-2866).
cataaacttttcaggataa

SEQ ID NO: 279060 - DNA, 19 bp, Homo sapiens
  siRNA target sequence for CUL4B (NM_003588.2,2932-2950).
caagacagacagtatcaaa

SEQ ID NO: 279061 - DNA, 19 bp, Homo sapiens
  siRNA target sequence for CUL4B (NM_003588.2,2956-2974).
gctgcaattgttcgaatta

SEQ ID NO: 279062 - DNA, 19 bp, Homo sapiens
  siRNA target sequence for CUL4B (NM_003588.2,2957-2975).
ctgcaattgttcgaattat

SEQ ID NO: 279063 - DNA, 19 bp, Homo sapiens
  siRNA target sequence for CUL4B (NM_003588.2,2997-3015).
ccacaatctccttgtttca

SEQ ID NO: 279064 - DNA, 19 bp, Homo sapiens
  siRNA target sequence for CUL4B (NM_003588.2,3019-3037).
gtgtacaaccagttgaaat

SEQ ID NO: 279065 - DNA, 19 bp, Homo sapiens
  siRNA target sequence for CUL4B (NM_003588.2,3043-3061).
gtaaagcctgctgatctta

SEQ ID NO: 279066 - DNA, 19 bp, Homo sapiens
  siRNA target sequence for CUL4B (NM_003588.2,3052-3070).
gctgatcttaagaagagaa

SEQ ID NO: 279067 - DNA, 19 bp, Homo sapiens
  siRNA target sequence for CUL4B (NM_003588.2,3090-3108).
ggactacatggaaagagat

SEQ ID NO: 279068 - DNA, 19 bp, Homo sapiens
  siRNA target sequence for CXorf1 (NM_004709.1,335-353).
gcaatcataaacattttaa

SEQ ID NO: 279069 - DNA, 19 bp, Homo sapiens
  siRNA target sequence for CXorf1 (NM_004709.1,371-389).
gcatccccactgactatat

SEQ ID NO: 279070 - DNA, 19 bp, Homo sapiens
  siRNA target sequence for CXorf1 (NM_004709.1,372-390).
catccccactgactatatt

SEQ ID NO: 279071 - DNA, 19 bp, Homo sapiens
  siRNA target sequence for CXorf1 (NM_004709.1,376-394).
cccactgactatattctgt

SEQ ID NO: 279072 - DNA, 19 bp, Homo sapiens
  siRNA target sequence for CXorf1 (NM_004709.1,377-395).
ccactgactatattctgtt

SEQ ID NO: 279073 - DNA, 19 bp, Homo sapiens
  siRNA target sequence for CXorf1 (NM_004709.1,413-431).
gcactttcgaccatatttt

SEQ ID NO: 279074 - DNA, 19 bp, Homo sapiens
  siRNA target sequence for CXorf1 (NM_004709.1,414-432).
cactttcgaccatatttta

SEQ ID NO: 279075 - DNA, 19 bp, Homo sapiens
  siRNA target sequence for CXorf1 (NM_004709.1,416-434).
ctttcgaccatattttatt

SEQ ID NO: 279076 - DNA, 19 bp, Homo sapiens
  siRNA target sequence for CXorf1 (NM_004709.1,460-478).
cagctggatattgctattt

SEQ ID NO: 279077 - DNA, 19 bp, Homo sapiens
  siRNA target sequence for CXorf1 (NM_004709.1,561-579).
gggccctgccaagaacata

SEQ ID NO: 279078 - DNA, 19 bp, Homo sapiens
  siRNA target sequence for CXorf1 (NM_004709.1,564-582).
ccctgccaagaacatatct

SEQ ID NO: 279079 - DNA, 19 bp, Homo sapiens
  siRNA target sequence for CXorf1 (NM_004709.1,570-588).
caagaacatatctgtatgt

SEQ ID NO: 279080 - DNA, 19 bp, Homo sapiens
  siRNA target sequence for CXorf12 (NM_003492.1,349-367).
ctgtgttcacgggcatttt

SEQ ID NO: 279081 - DNA, 19 bp, Homo sapiens
  siRNA target sequence for CXorf12 (NM_003492.1,360-378).
ggcattttcgacagtgttt

SEQ ID NO: 279082 - DNA, 19 bp, Homo sapiens
  siRNA target sequence for CXorf12 (NM_003492.1,848-866).
cacctcggctacctactta

SEQ ID NO: 279083 - DNA, 19 bp, Homo sapiens
  siRNA target sequence for CXorf12 (NM_003492.1,853-871).
cggctacctacttagcttt

SEQ ID NO: 279084 - DNA, 19 bp, Homo sapiens
  siRNA target sequence for CXorf2 (NM_001586.1,269-287).
gcctagcccacaacttaca

SEQ ID NO: 279085 - DNA, 19 bp, Homo sapiens
  siRNA target sequence for CXorf2 (NM_001586.1,372-390).
cctcaagctggtatccaaa

SEQ ID NO: 279086 - DNA, 19 bp, Homo sapiens
  siRNA target sequence for CXorf2 (NM_001586.1,697-715).
caggggacgtgcttagaga

SEQ ID NO: 279087 - DNA, 19 bp, Homo sapiens
  siRNA target sequence for CXorf2 (NM_001586.1,799-817).
ctccaggagtcctatcaca

SEQ ID NO: 279088 - DNA, 19 bp, Homo sapiens
  siRNA target sequence for CXorf2 (NM_001586.1,925-943).
ggacagctgaatgagattt

SEQ ID NO: 279089 - DNA, 19 bp, Homo sapiens
  siRNA target sequence for CXorf2 (NM_001586.1,976-994).
gagagaatggcctatctat

SEQ ID NO: 279090 - DNA, 19 bp, Homo sapiens
  siRNA target sequence for CXorf2 (NM_001586.1,980-998).
gaatggcctatctatccta

SEQ ID NO: 279091 - DNA, 19 bp, Homo sapiens
  siRNA target sequence for CXorf2 (NM_001586.1,985-1003).
gcctatctatcctatgaga

SEQ ID NO: 279092 - DNA, 19 bp, Homo sapiens
  siRNA target sequence for CXorf2 (NM_001586.1,1117-1135).
ccgcagatgttgttcaagt

SEQ ID NO: 279093 - DNA, 19 bp, Homo sapiens
  siRNA target sequence for CXorf6 (NM_005491.1,290-308).
gatgggggctaccctaata

SEQ ID NO: 279094 - DNA, 19 bp, Homo sapiens
  siRNA target sequence for CXorf6 (NM_005491.1,293-311).
gggggctaccctaataaaa

SEQ ID NO: 279095 - DNA, 19 bp, Homo sapiens
  siRNA target sequence for CXorf6 (NM_005491.1,294-312).
ggggctaccctaataaaat

SEQ ID NO: 279096 - DNA, 19 bp, Homo sapiens
  siRNA target sequence for CXorf6 (NM_005491.1,295-313).
gggctaccctaataaaatt

SEQ ID NO: 279097 - DNA, 19 bp, Homo sapiens
  siRNA target sequence for CXorf6 (NM_005491.1,296-314).
ggctaccctaataaaatta

SEQ ID NO: 279098 - DNA, 19 bp, Homo sapiens
  siRNA target sequence for CXorf6 (NM_005491.1,389-407).
caggtccctccattgacaa

SEQ ID NO: 279099 - DNA, 19 bp, Homo sapiens
  siRNA target sequence for CXorf6 (NM_005491.1,391-409).
ggtccctccattgacaata

SEQ ID NO: 279100 - DNA, 19 bp, Homo sapiens
  siRNA target sequence for CXorf6 (NM_005491.1,392-410).
gtccctccattgacaataa

SEQ ID NO: 279101 - DNA, 19 bp, Homo sapiens
  siRNA target sequence for CXorf6 (NM_005491.1,394-412).
ccctccattgacaataaat

SEQ ID NO: 279102 - DNA, 19 bp, Homo sapiens
  siRNA target sequence for CXorf6 (NM_005491.1,432-450).
gagtggctggccagtcatt

SEQ ID NO: 279103 - DNA, 19 bp, Homo sapiens
  siRNA target sequence for CXorf6 (NM_005491.1,447-465).
cattactgctggagaataa

SEQ ID NO: 279104 - DNA, 19 bp, Homo sapiens
  siRNA target sequence for CXorf6 (NM_005491.1,467-485).
cctatgaatggcaacatca

SEQ ID NO: 279105 - DNA, 19 bp, Homo sapiens
  siRNA target sequence for CXorf6 (NM_005491.1,468-486).
ctatgaatggcaacatcat

SEQ ID NO: 279106 - DNA, 19 bp, Homo sapiens
  siRNA target sequence for CXorf6 (NM_005491.1,481-499).
catcatgggctcaccattt

SEQ ID NO: 279107 - DNA, 19 bp, Homo sapiens
  siRNA target sequence for CXorf6 (NM_005491.1,487-505).
gggctcaccatttgtagta

SEQ ID NO: 279108 - DNA, 19 bp, Homo sapiens
  siRNA target sequence for CXorf6 (NM_005491.1,534-552).
ggcccactgttccttacta

SEQ ID NO: 279109 - DNA, 19 bp, Homo sapiens
  siRNA target sequence for CXorf6 (NM_005491.1,535-553).
gcccactgttccttactat

SEQ ID NO: 279110 - DNA, 19 bp, Homo sapiens
  siRNA target sequence for CXorf6 (NM_005491.1,537-555).
ccactgttccttactatga

SEQ ID NO: 279111 - DNA, 19 bp, Homo sapiens
  siRNA target sequence for CXorf6 (NM_005491.1,540-558).
ctgttccttactatgagaa

SEQ ID NO: 279112 - DNA, 19 bp, Homo sapiens
  siRNA target sequence for CXorf6 (NM_005491.1,542-560).
gttccttactatgagaaaa

SEQ ID NO: 279113 - DNA, 19 bp, Homo sapiens
  siRNA target sequence for CXorf6 (NM_005491.1,546-564).
cttactatgagaaaatcaa

SEQ ID NO: 279114 - DNA, 19 bp, Homo sapiens
  siRNA target sequence for CXorf6 (NM_005491.1,682-700).
gccactggttttagatcat

SEQ ID NO: 279115 - DNA, 19 bp, Homo sapiens
  siRNA target sequence for CXorf6 (NM_005491.1,726-744).
ccaagccttcggttcagat

SEQ ID NO: 279116 - DNA, 19 bp, Homo sapiens
  siRNA target sequence for CXorf6 (NM_005491.1,837-855).
cagggatcagctattcgat

SEQ ID NO: 279117 - DNA, 19 bp, Homo sapiens
  siRNA target sequence for CXorf6 (NM_005491.1,861-879).
ccaccagtaagcagatagt

SEQ ID NO: 279118 - DNA, 19 bp, Homo sapiens
  siRNA target sequence for CXorf6 (NM_005491.1,878-896).
gtgtcaccgagttcttcaa

SEQ ID NO: 279119 - DNA, 19 bp, Homo sapiens
  siRNA target sequence for CXorf6 (NM_005491.1,1170-1188).
gcatgtcgtccaatacctt

SEQ ID NO: 279120 - DNA, 19 bp, Homo sapiens
  siRNA target sequence for CXorf6 (NM_005491.1,1515-1533).
ctcccaccagtaatcttct

SEQ ID NO: 279121 - DNA, 19 bp, Homo sapiens
  siRNA target sequence for CXorf6 (NM_005491.1,1517-1535).
cccaccagtaatcttctaa

SEQ ID NO: 279122 - DNA, 19 bp, Homo sapiens
  siRNA target sequence for CXorf6 (NM_005491.1,1589-1607).
cccataagcagcaactcat

SEQ ID NO: 279123 - DNA, 19 bp, Homo sapiens
  siRNA target sequence for CXorf6 (NM_005491.1,1693-1711).
gcccttgtcccattttgtt

SEQ ID NO: 279124 - DNA, 19 bp, Homo sapiens
  siRNA target sequence for CXorf6 (NM_005491.1,1879-1897).
gcagcctgaccattcttca

SEQ ID NO: 279125 - DNA, 19 bp, Homo sapiens
  siRNA target sequence for CXorf6 (NM_005491.1,1940-1958).
cgatcagtggcctcagatt

SEQ ID NO: 279126 - DNA, 19 bp, Homo sapiens
  siRNA target sequence for CXorf6 (NM_005491.1,1981-1999).
ggtctgttgccatctgttt

SEQ ID NO: 279127 - DNA, 19 bp, Homo sapiens
  siRNA target sequence for CXorf6 (NM_005491.1,2036-2054).
catcaacacgggaactctt

SEQ ID NO: 279128 - DNA, 19 bp, Homo sapiens
  siRNA target sequence for CXorf6 (NM_005491.1,2039-2057).
caacacgggaactctttca

SEQ ID NO: 279129 - DNA, 19 bp, Homo sapiens
  siRNA target sequence for CXorf6 (NM_005491.1,2042-2060).
cacgggaactctttcacta

SEQ ID NO: 279130 - DNA, 19 bp, Homo sapiens
  siRNA target sequence for CXorf6 (NM_005491.1,2084-2102).
gacgtgtcaccgtctaaca

SEQ ID NO: 279131 - DNA, 19 bp, Homo sapiens
  siRNA target sequence for CXorf6 (NM_005491.1,2086-2104).
cgtgtcaccgtctaacatt

SEQ ID NO: 279132 - DNA, 19 bp, Homo sapiens
  siRNA target sequence for CXorf6 (NM_005491.1,2087-2105).
gtgtcaccgtctaacatta

SEQ ID NO: 279133 - DNA, 19 bp, Homo sapiens
  siRNA target sequence for CXorf6 (NM_005491.1,2089-2107).
gtcaccgtctaacattact

SEQ ID NO: 279134 - DNA, 19 bp, Homo sapiens
  siRNA target sequence for CXorf6 (NM_005491.1,2091-2109).
caccgtctaacattactca

SEQ ID NO: 279135 - DNA, 19 bp, Homo sapiens
  siRNA target sequence for CXorf6 (NM_005491.1,2095-2113).
gtctaacattactcatgta

SEQ ID NO: 279136 - DNA, 19 bp, Homo sapiens
  siRNA target sequence for CXorf6 (NM_005491.1,2097-2115).
ctaacattactcatgtaga

SEQ ID NO: 279137 - DNA, 19 bp, Homo sapiens
  siRNA target sequence for CXX1 (NM_003928.1,396-414).
gggagggtccgctgtgtta

SEQ ID NO: 279138 - DNA, 19 bp, Homo sapiens
  siRNA target sequence for CXX1 (NM_003928.1,398-416).
gagggtccgctgtgttact

SEQ ID NO: 279139 - DNA, 19 bp, Homo sapiens
  siRNA target sequence for CYYR1 (NM_052954.1,193-211).
ggaaccacgccctactgtt

SEQ ID NO: 279140 - DNA, 19 bp, Homo sapiens
  siRNA target sequence for CYYR1 (NM_052954.1,253-271).
gcaattgcgggcattgttt

SEQ ID NO: 279141 - DNA, 19 bp, Homo sapiens
  siRNA target sequence for CYYR1 (NM_052954.1,254-272).
caattgcgggcattgtttt

SEQ ID NO: 279142 - DNA, 19 bp, Homo sapiens
  siRNA target sequence for CYYR1 (NM_052954.1,426-444).
ccacgagatggaatactgt

SEQ ID NO: 279143 - DNA, 19 bp, Homo sapiens
  siRNA target sequence for DGCR14 (NM_022719.1,441-459).
cgctgcccagcctagatgt

SEQ ID NO: 279144 - DNA, 19 bp, Homo sapiens
  siRNA target sequence for DGCR14 (NM_022719.1,886-904).
ccctcgagtgggtggattt

SEQ ID NO: 279145 - DNA, 19 bp, Homo sapiens
  siRNA target sequence for DGCR14 (NM_022719.1,979-997).
cacacccttgagagttgaa

SEQ ID NO: 279146 - DNA, 19 bp, Homo sapiens
  siRNA target sequence for DGCR14 (NM_022719.1,1419-1437).
gcaaagcttcggacttctt

SEQ ID NO: 279147 - DNA, 19 bp, Homo sapiens
  siRNA target sequence for DIPA (NM_006848.1,452-470).
ctggcgctgggcgaagaat

SEQ ID NO: 279148 - DNA, 19 bp, Homo sapiens
  siRNA target sequence for DIPA (NM_006848.1,617-635).
gcctgttcccccgatgatt

SEQ ID NO: 279149 - DNA, 19 bp, Homo sapiens
  siRNA target sequence for DISC1 (NM_018662.1,118-136).
caggcagccgggattgctt

SEQ ID NO: 279150 - DNA, 19 bp, Homo sapiens
  siRNA target sequence for DISC1 (NM_018662.1,666-684).
gcctttacctcaagcttta

SEQ ID NO: 279151 - DNA, 19 bp, Homo sapiens
  siRNA target sequence for DISC1 (NM_018662.1,673-691).
cctcaagctttagctttat

SEQ ID NO: 279152 - DNA, 19 bp, Homo sapiens
  siRNA target sequence for DISC1 (NM_018662.1,917-935).
gcgtgacatgcattcttta

SEQ ID NO: 279153 - DNA, 19 bp, Homo sapiens
  siRNA target sequence for DISC1 (NM_018662.1,1092-1110).
cagatggaggtaatatcct

SEQ ID NO: 279154 - DNA, 19 bp, Homo sapiens
  siRNA target sequence for DISC1 (NM_018662.1,1094-1112).
gatggaggtaatatcctta

SEQ ID NO: 279155 - DNA, 19 bp, Homo sapiens
  siRNA target sequence for DISC1 (NM_018662.1,1098-1116).
gaggtaatatccttaagat

SEQ ID NO: 279156 - DNA, 19 bp, Homo sapiens
  siRNA target sequence for DISC1 (NM_018662.1,1170-1188).
gctgagacgttacaacaaa

SEQ ID NO: 279157 - DNA, 19 bp, Homo sapiens
  siRNA target sequence for DISC1 (NM_018662.1,1175-1193).
gacgttacaacaaagatta

SEQ ID NO: 279158 - DNA, 19 bp, Homo sapiens
  siRNA target sequence for DISC1 (NM_018662.1,1177-1195).
cgttacaacaaagattaga

SEQ ID NO: 279159 - DNA, 19 bp, Homo sapiens
  siRNA target sequence for DISC1 (NM_018662.1,1665-1683).
gagccaccggaaaccataa

SEQ ID NO: 279160 - DNA, 19 bp, Homo sapiens
  siRNA target sequence for DISC1 (NM_018662.1,1668-1686).
ccaccggaaaccataagga

SEQ ID NO: 279161 - DNA, 19 bp, Homo sapiens
  siRNA target sequence for DISC1 (NM_018662.1,1775-1793).
gaggaagaaagttaacgat

SEQ ID NO: 279162 - DNA, 19 bp, Homo sapiens
  siRNA target sequence for DISC1 (NM_018662.1,1813-1831).
ccttgcttgaagccaaaat

SEQ ID NO: 279163 - DNA, 19 bp, Homo sapiens
  siRNA target sequence for DISC1 (NM_018662.1,1872-1890).
ctcaccgaggagattagat

SEQ ID NO: 279164 - DNA, 19 bp, Homo sapiens
  siRNA target sequence for DISC1 (NM_018662.1,1874-1892).
caccgaggagattagatca

SEQ ID NO: 279165 - DNA, 19 bp, Homo sapiens
  siRNA target sequence for DISC1 (NM_018662.1,1876-1894).
ccgaggagattagatcatt

SEQ ID NO: 279166 - DNA, 19 bp, Homo sapiens
  siRNA target sequence for DISC1 (NM_018662.1,1961-1979).
caaaaagctgggaagtgtt

SEQ ID NO: 279167 - DNA, 19 bp, Homo sapiens
  siRNA target sequence for DISC1 (NM_018662.1,1975-1993).
gtgttaaagaagattacaa

SEQ ID NO: 279168 - DNA, 19 bp, Homo sapiens
  siRNA target sequence for DISC1 (NM_018662.1,2021-2039).
ggagactgcctatgaaaca

SEQ ID NO: 279169 - DNA, 19 bp, Homo sapiens
  siRNA target sequence for DISC1 (NM_018662.1,2143-2161).
cttgtcgattgcttatcca

SEQ ID NO: 279170 - DNA, 19 bp, Homo sapiens
  siRNA target sequence for DISC1 (NM_018662.1,2257-2275).
ggctccactccgaggataa

SEQ ID NO: 279171 - DNA, 19 bp, Homo sapiens
  siRNA target sequence for DISC1 (NM_018662.1,2258-2276).
gctccactccgaggataaa

SEQ ID NO: 279172 - DNA, 19 bp, Homo sapiens
  siRNA target sequence for DISC1 (NM_018662.1,2262-2280).
cactccgaggataaaagga

SEQ ID NO: 279173 - DNA, 19 bp, Homo sapiens
  siRNA target sequence for DISC1 (NM_018662.1,2403-2421).
gacataggcaagaagctat

SEQ ID NO: 279174 - DNA, 19 bp, Homo sapiens
  siRNA target sequence for DISC1 (NM_018662.1,2409-2427).
ggcaagaagctattgtact

SEQ ID NO: 279175 - DNA, 19 bp, Homo sapiens
  siRNA target sequence for DISC1 (NM_018662.1,2423-2441).
gtacttggaagatcaactt

SEQ ID NO: 279176 - DNA, 19 bp, Homo sapiens
  siRNA target sequence for DISC1 (NM_018662.1,2458-2476).
gtcatgatgaagatctcat

SEQ ID NO: 279177 - DNA, 19 bp, Homo sapiens
  siRNA target sequence for DKFZP434F091 (NM_015453.1,357-375).
ctaaccaactcctagatgt

SEQ ID NO: 279178 - DNA, 19 bp, Homo sapiens
  siRNA target sequence for DKFZP434F091 (NM_015453.1,429-447).
gtgaatctgagcttctagt

SEQ ID NO: 279179 - DNA, 19 bp, Homo sapiens
  siRNA target sequence for DKFZP434F091 (NM_015453.1,439-457).
gcttctagtcactattgga

SEQ ID NO: 279180 - DNA, 19 bp, Homo sapiens
  siRNA target sequence for DKFZP434F091 (NM_015453.1,506-524).
gagaaacttgggtcatcat

SEQ ID NO: 279181 - DNA, 19 bp, Homo sapiens
  siRNA target sequence for DKFZP434F091 (NM_015453.1,539-557).
gaccgtggcaagatatatt

SEQ ID NO: 279182 - DNA, 19 bp, Homo sapiens
  siRNA target sequence for DKFZP434F091 (NM_015453.1,541-559).
ccgtggcaagatatatttt

SEQ ID NO: 279183 - DNA, 19 bp, Homo sapiens
  siRNA target sequence for DKFZP434F091 (NM_015453.1,598-616).
gagatcagttgataactta

SEQ ID NO: 279184 - DNA, 19 bp, Homo sapiens
  siRNA target sequence for DKFZP434F091 (NM_015453.1,711-729).
ggtcaaaccccttaaaagt

SEQ ID NO: 279185 - DNA, 19 bp, Homo sapiens
  siRNA target sequence for DKFZP434F091 (NM_015453.1,875-893).
gattctcatatcttagatt

SEQ ID NO: 279186 - DNA, 19 bp, Homo sapiens
  siRNA target sequence for DKFZP434F091 (NM_015453.1,908-926).
gccatcaaagaggatgtat

SEQ ID NO: 279187 - DNA, 19 bp, Homo sapiens
  siRNA target sequence for DKFZP434F091 (NM_015453.1,917-935).
gaggatgtatcaacattaa

SEQ ID NO: 279188 - DNA, 19 bp, Homo sapiens
  siRNA target sequence for DKFZP434F091 (NM_015453.1,1085-1103).
ggtgctgttcaagattatt

SEQ ID NO: 279189 - DNA, 19 bp, Homo sapiens
  siRNA target sequence for DKFZP434F091 (NM_015453.1,1114-1132).
ggccgacatgaccaacttt

SEQ ID NO: 279190 - DNA, 19 bp, Homo sapiens
  siRNA target sequence for DKFZP434F091 (NM_015453.1,1116-1134).
ccgacatgaccaactttga

SEQ ID NO: 279191 - DNA, 19 bp, Homo sapiens
  siRNA target sequence for DKFZP434F091 (NM_015453.1,1117-1135).
cgacatgaccaactttgat

SEQ ID NO: 279192 - DNA, 19 bp, Homo sapiens
  siRNA target sequence for DKFZP434F091 (NM_015453.1,1198-1216).
gagtctccaccgaagaaat

SEQ ID NO: 279193 - DNA, 19 bp, Homo sapiens
  siRNA target sequence for DKFZP434F091 (NM_015453.1,1200-1218).
gtctccaccgaagaaatat

SEQ ID NO: 279194 - DNA, 19 bp, Homo sapiens
  siRNA target sequence for DKFZP434F091 (NM_015453.1,1278-1296).
gtgatcctctaccttatga

SEQ ID NO: 279195 - DNA, 19 bp, Homo sapiens
  siRNA target sequence for DKFZP434F091 (NM_015453.1,1280-1298).
gatcctctaccttatgata

SEQ ID NO: 279196 - DNA, 19 bp, Homo sapiens
  siRNA target sequence for DKFZP434F091 (NM_015453.1,1283-1301).
cctctaccttatgatataa

SEQ ID NO: 279197 - DNA, 19 bp, Homo sapiens
  siRNA target sequence for DKFZP434F091 (NM_015453.1,1319-1337).
ggaactggggcaataccaa

SEQ ID NO: 279198 - DNA, 19 bp, Homo sapiens
  siRNA target sequence for DKFZP434F091 (NM_015453.1,1320-1338).
gaactggggcaataccaat

SEQ ID NO: 279199 - DNA, 19 bp, Homo sapiens
  siRNA target sequence for DKFZP434F091 (NM_015453.1,1323-1341).
ctggggcaataccaataga

SEQ ID NO: 279200 - DNA, 19 bp, Homo sapiens
  siRNA target sequence for DKFZP434F091 (NM_015453.1,1356-1374).
ggtctgactgtttccatat

SEQ ID NO: 279201 - DNA, 19 bp, Homo sapiens
  siRNA target sequence for DKFZP434F091 (NM_015453.1,1409-1427).
gcagcaaataacattgcat

SEQ ID NO: 279202 - DNA, 19 bp, Homo sapiens
  siRNA target sequence for DKFZP434F091 (NM_015453.1,1435-1453).
gaccaagagccaaattaaa

SEQ ID NO: 279203 - DNA, 19 bp, Homo sapiens
  siRNA target sequence for DKFZP434F091 (NM_015453.1,1521-1539).
gaactggctctgtggatat

SEQ ID NO: 279204 - DNA, 19 bp, Homo sapiens
  siRNA target sequence for DKFZP434F091 (NM_015453.1,1524-1542).
ctggctctgtggatattat

SEQ ID NO: 279205 - DNA, 19 bp, Homo sapiens
  siRNA target sequence for DKFZP434F091 (NM_015453.1,1527-1545).
gctctgtggatattattgt

SEQ ID NO: 279206 - DNA, 19 bp, Homo sapiens
  siRNA target sequence for DKFZP434F091 (NM_015453.1,1528-1546).
ctctgtggatattattgta

SEQ ID NO: 279207 - DNA, 19 bp, Homo sapiens
  siRNA target sequence for DKFZP434F091 (NM_015453.1,1645-1663).
cacaggccgagctgtacta

SEQ ID NO: 279208 - DNA, 19 bp, Homo sapiens
  siRNA target sequence for DKFZP434F091 (NM_015453.1,1649-1667).
ggccgagctgtactactta

SEQ ID NO: 279209 - DNA, 19 bp, Homo sapiens
  siRNA target sequence for DKFZP434F091 (NM_015453.1,1653-1671).
gagctgtactacttactca

SEQ ID NO: 279210 - DNA, 19 bp, Homo sapiens
  siRNA target sequence for DKFZP434F091 (NM_015453.1,1668-1686).
ctcaagacacaaaatgctt

SEQ ID NO: 279211 - DNA, 19 bp, Homo sapiens
  siRNA target sequence for DKFZP434F091 (NM_015453.1,1769-1787).
gtttacgttctgatacgta

SEQ ID NO: 279212 - DNA, 19 bp, Homo sapiens
  siRNA target sequence for DKFZP434F091 (NM_015453.1,1788-1806).
cacctcaagcttttgttca

SEQ ID NO: 279213 - DNA, 19 bp, Homo sapiens
  siRNA target sequence for DKFZP434G1415 (NM_031292.1,98-116).
ggatttcatggcactataa

SEQ ID NO: 279214 - DNA, 19 bp, Homo sapiens
  siRNA target sequence for DKFZP434G1415 (NM_031292.1,123-141).
caccaagtgactttattgt

SEQ ID NO: 279215 - DNA, 19 bp, Homo sapiens
  siRNA target sequence for DKFZP434G1415 (NM_031292.1,155-173).
gaacagggacagttagtta

SEQ ID NO: 279216 - DNA, 19 bp, Homo sapiens
  siRNA target sequence for DKFZP434G1415 (NM_031292.1,158-176).
cagggacagttagttaata

SEQ ID NO: 279217 - DNA, 19 bp, Homo sapiens
  siRNA target sequence for DKFZP434G1415 (NM_031292.1,161-179).
ggacagttagttaataaga

SEQ ID NO: 279218 - DNA, 19 bp, Homo sapiens
  siRNA target sequence for DKFZP434G1415 (NM_031292.1,185-203).
gatgagcctattttcaaga

SEQ ID NO: 279219 - DNA, 19 bp, Homo sapiens
  siRNA target sequence for DKFZP434G1415 (NM_031292.1,188-206).
gagcctattttcaagatta

SEQ ID NO: 279220 - DNA, 19 bp, Homo sapiens
  siRNA target sequence for DKFZP434G1415 (NM_031292.1,293-311).
gaagttcatactttgatta

SEQ ID NO: 279221 - DNA, 19 bp, Homo sapiens
  siRNA target sequence for DKFZP434G1415 (NM_031292.1,318-336).
ctgatggtgaccaaaatca

SEQ ID NO: 279222 - DNA, 19 bp, Homo sapiens
  siRNA target sequence for DKFZP434G1415 (NM_031292.1,401-419).
gatgttttaagctcctttt

SEQ ID NO: 279223 - DNA, 19 bp, Homo sapiens
  siRNA target sequence for DKFZP434G1415 (NM_031292.1,503-521).
ctacctcctgaattctcaa

SEQ ID NO: 279224 - DNA, 19 bp, Homo sapiens
  siRNA target sequence for DKFZP434G1415 (NM_031292.1,524-542).
ggcagaatccttgacaaaa

SEQ ID NO: 279225 - DNA, 19 bp, Homo sapiens
  siRNA target sequence for DKFZP434G1415 (NM_031292.1,545-563).
cagagggctagtttacaca

SEQ ID NO: 279226 - DNA, 19 bp, Homo sapiens
  siRNA target sequence for DKFZP434G1415 (NM_031292.1,759-777).
gaaaagctgtccaccattt

SEQ ID NO: 279227 - DNA, 19 bp, Homo sapiens
  siRNA target sequence for DKFZP434G1415 (NM_031292.1,764-782).
gctgtccaccattttgtca

SEQ ID NO: 279228 - DNA, 19 bp, Homo sapiens
  siRNA target sequence for DKFZP434G1415 (NM_031292.1,829-847).
gaattgcagtgctggtaat

SEQ ID NO: 279229 - DNA, 19 bp, Homo sapiens
  siRNA target sequence for DKFZP434G1415 (NM_031292.1,951-969).
ccctacgaaaggaaaacct

SEQ ID NO: 279230 - DNA, 19 bp, Homo sapiens
  siRNA target sequence for DKFZP434G1415 (NM_031292.1,976-994).
gtttgaagcgattggtttt

SEQ ID NO: 279231 - DNA, 19 bp, Homo sapiens
  siRNA target sequence for DKFZP434G1415 (NM_031292.1,983-1001).
gcgattggttttttagcta

SEQ ID NO: 279232 - DNA, 19 bp, Homo sapiens
  siRNA target sequence for DKFZP434G1415 (NM_031292.1,984-1002).
cgattggttttttagctat

SEQ ID NO: 279233 - DNA, 19 bp, Homo sapiens
  siRNA target sequence for DKFZP434G1415 (NM_031292.1,1003-1021).
caaacttggtgttattcct

SEQ ID NO: 279234 - DNA, 19 bp, Homo sapiens
  siRNA target sequence for DKFZP434G1415 (NM_031292.1,1013-1031).
gttattccttcggatttta

SEQ ID NO: 279235 - DNA, 19 bp, Homo sapiens
  siRNA target sequence for DKFZP434G1415 (NM_031292.1,1032-1050).
gttatgcaggccttaaaga

SEQ ID NO: 279236 - DNA, 19 bp, Homo sapiens
  siRNA target sequence for DKFZP434G1415 (NM_031292.1,1070-1088).
caagcaatggttgttagaa

SEQ ID NO: 279237 - DNA, 19 bp, Homo sapiens
  siRNA target sequence for DKFZP434G1415 (NM_031292.1,1190-1208).
cagctcaaaggaaatcact

SEQ ID NO: 279238 - DNA, 19 bp, Homo sapiens
  siRNA target sequence for DKFZP434G1415 (NM_031292.1,1435-1453).
ggatgatcctgtaaataga

SEQ ID NO: 279239 - DNA, 19 bp, Homo sapiens
  siRNA target sequence for DKFZP434G1415 (NM_031292.1,1484-1502).
gctaaaggcacactttcat

SEQ ID NO: 279240 - DNA, 19 bp, Homo sapiens
  siRNA target sequence for DKFZP434G1415 (NM_031292.1,1500-1518).
cattgatgcctgaattcaa

SEQ ID NO: 279241 - DNA, 19 bp, Homo sapiens
  siRNA target sequence for DKFZP434G1415 (NM_031292.1,1582-1600).
ccaggcatggttctcttta

SEQ ID NO: 279242 - DNA, 19 bp, Homo sapiens
  siRNA target sequence for DKFZP434G1415 (NM_031292.1,1602-1620).
cccattccatgcgcatatt

SEQ ID NO: 279243 - DNA, 19 bp, Homo sapiens
  siRNA target sequence for DKFZP434G1415 (NM_031292.1,1604-1622).
cattccatgcgcatattct

SEQ ID NO: 279244 - DNA, 19 bp, Homo sapiens
  siRNA target sequence for DKFZP434G1415 (NM_031292.1,1608-1626).
ccatgcgcatattctatgt

SEQ ID NO: 279245 - DNA, 19 bp, Homo sapiens
  siRNA target sequence for DKFZP434G1415 (NM_031292.1,1609-1627).
catgcgcatattctatgtt

SEQ ID NO: 279246 - DNA, 19 bp, Homo sapiens
  siRNA target sequence for DKFZP434G1415 (NM_031292.1,1661-1679).
gtatcttacagacttgaaa

SEQ ID NO: 279247 - DNA, 19 bp, Homo sapiens
  siRNA target sequence for DKFZP434G1415 (NM_031292.1,1727-1745).
gacattgatgacgagaatt

SEQ ID NO: 279248 - DNA, 19 bp, Homo sapiens
  siRNA target sequence for DKFZP434G1415 (NM_031292.1,1736-1754).
gacgagaatttcccaaata

SEQ ID NO: 279249 - DNA, 19 bp, Homo sapiens
  siRNA target sequence for DKFZP434G1415 (NM_031292.1,1739-1757).
gagaatttcccaaatagta

SEQ ID NO: 279250 - DNA, 19 bp, Homo sapiens
  siRNA target sequence for DKFZP434G1415 (NM_031292.1,1778-1796).
gaggagggatcagctaata

SEQ ID NO: 279251 - DNA, 19 bp, Homo sapiens
  siRNA target sequence for DKFZP434G1415 (NM_031292.1,1781-1799).
gagggatcagctaatatgt

SEQ ID NO: 279252 - DNA, 19 bp, Homo sapiens
  siRNA target sequence for DKFZP434G1415 (NM_031292.1,1791-1809).
ctaatatgtatgcaataca

SEQ ID NO: 279253 - DNA, 19 bp, Homo sapiens
  siRNA target sequence for DKFZP434G1415 (NM_031292.1,1823-1841).
ccagtacttggatacaata

SEQ ID NO: 279254 - DNA, 19 bp, Homo sapiens
  siRNA target sequence for DKFZP434G1415 (NM_031292.1,1829-1847).
cttggatacaatattcagt

SEQ ID NO: 279255 - DNA, 19 bp, Homo sapiens
  siRNA target sequence for DKFZP434G1415 (NM_031292.1,1866-1884).
ggcagtggtaccatgacat

SEQ ID NO: 279256 - DNA, 19 bp, Homo sapiens
  siRNA target sequence for DKFZP434G1415 (NM_031292.1,1867-1885).
gcagtggtaccatgacata

SEQ ID NO: 279257 - DNA, 19 bp, Homo sapiens
  siRNA target sequence for DKFZP434G1415 (NM_031292.1,1870-1888).
gtggtaccatgacatactt

SEQ ID NO: 279258 - DNA, 19 bp, Homo sapiens
  siRNA target sequence for DKFZP434G1415 (NM_031292.1,1922-1940).
gtacctactctgaaactga

SEQ ID NO: 279259 - DNA, 19 bp, Homo sapiens
  siRNA target sequence for DKFZP434G1415 (NM_031292.1,1939-1957).
gaatataccaggttgctat

SEQ ID NO: 279260 - DNA, 19 bp, Homo sapiens
  siRNA target sequence for DKFZP434G1415 (NM_031292.1,1953-1971).
gctatagacagattttgaa

SEQ ID NO: 279261 - DNA, 19 bp, Homo sapiens
  siRNA target sequence for DKFZP434G1415 (NM_031292.1,1978-1996).
ctgtaatctctcataccaa

SEQ ID NO: 279262 - DNA, 19 bp, Homo sapiens
  siRNA target sequence for DKFZP434G1415 (NM_031292.1,1993-2011).
ccaactaatggaagatcat

SEQ ID NO: 279263 - DNA, 19 bp, Homo sapiens
  siRNA target sequence for DKFZP434G1415 (NM_031292.1,2018-2036).
gatgtcaaaacgaaaggtt

SEQ ID NO: 279264 - DNA, 19 bp, Homo sapiens
  siRNA target sequence for DKFZP434G1415 (NM_031292.1,2028-2046).
cgaaaggttcccacattga

SEQ ID NO: 279265 - DNA, 19 bp, Homo sapiens
  siRNA target sequence for DKFZP434G1415 (NM_031292.1,2029-2047).
gaaaggttcccacattgat

SEQ ID NO: 279266 - DNA, 19 bp, Homo sapiens
  siRNA target sequence for DKFZP434G1415 (NM_031292.1,2084-2102).
gatgcttcatgctatgcta

SEQ ID NO: 279267 - DNA, 19 bp, Homo sapiens
  siRNA target sequence for DKFZP434G1415 (NM_031292.1,2094-2112).
gctatgctaccgtttgtct

SEQ ID NO: 279268 - DNA, 19 bp, Homo sapiens
  siRNA target sequence for DKFZP564B167 (NM_015415.1,196-214).
ccaccggctcctcgataaa

SEQ ID NO: 279269 - DNA, 19 bp, Homo sapiens
  siRNA target sequence for DKFZP564B167 (NM_015415.1,286-304).
ctgggctccaattatgaaa

SEQ ID NO: 279270 - DNA, 19 bp, Homo sapiens
  siRNA target sequence for DKFZP564B167 (NM_015415.1,363-381).
cagctcaatctgctgtttt

SEQ ID NO: 279271 - DNA, 19 bp, Homo sapiens
  siRNA target sequence for DKFZP564B167 (NM_015415.1,365-383).
gctcaatctgctgttttga

SEQ ID NO: 279272 - DNA, 19 bp, Homo sapiens
  siRNA target sequence for DKFZP564B167 (NM_015415.1,386-404).
gctacagggtttatttggt

SEQ ID NO: 279273 - DNA, 19 bp, Homo sapiens
  siRNA target sequence for DKFZP564B167 (NM_015415.1,392-410).
gggtttatttggtcaagat

SEQ ID NO: 279274 - DNA, 19 bp, Homo sapiens
  siRNA target sequence for DKFZP564B167 (NM_015415.1,393-411).
ggtttatttggtcaagata

SEQ ID NO: 279275 - DNA, 19 bp, Homo sapiens
  siRNA target sequence for DKFZP564B167 (NM_015415.1,403-421).
gtcaagatactcacttgta

SEQ ID NO: 279276 - DNA, 19 bp, Homo sapiens
  siRNA target sequence for DKFZP564B167 (NM_015415.1,439-457).
gagtctgtttgctgttaat

SEQ ID NO: 279277 - DNA, 19 bp, Homo sapiens
  siRNA target sequence for DKFZP564B167 (NM_015415.1,479-497).
gcctctcagctttttcgta

SEQ ID NO: 279278 - DNA, 19 bp, Homo sapiens
  siRNA target sequence for DKFZP564C186 (NM_015658.1,99-117).
cgaatccgagtccgaaaat

SEQ ID NO: 279279 - DNA, 19 bp, Homo sapiens
  siRNA target sequence for DKFZP564C186 (NM_015658.1,100-118).
gaatccgagtccgaaaatt

SEQ ID NO: 279280 - DNA, 19 bp, Homo sapiens
  siRNA target sequence for DKFZP564C186 (NM_015658.1,438-456).
ggggaagaagaattctgtt

SEQ ID NO: 279281 - DNA, 19 bp, Homo sapiens
  siRNA target sequence for DKFZP564C186 (NM_015658.1,611-629).
cggacagtgctgcattcaa

SEQ ID NO: 279282 - DNA, 19 bp, Homo sapiens
  siRNA target sequence for DKFZP564C186 (NM_015658.1,1211-1229).
cataccagtctgtgtacaa

SEQ ID NO: 279283 - DNA, 19 bp, Homo sapiens
  siRNA target sequence for DKK4 (NM_014420.1,247-265).
gacacggactgcaatacca

SEQ ID NO: 279284 - DNA, 19 bp, Homo sapiens
  siRNA target sequence for DKK4 (NM_014420.1,253-271).
gactgcaataccagaaagt

SEQ ID NO: 279285 - DNA, 19 bp, Homo sapiens
  siRNA target sequence for DKK4 (NM_014420.1,297-315).
gccgttctgtgctacatgt

SEQ ID NO: 279286 - DNA, 19 bp, Homo sapiens
  siRNA target sequence for DKK4 (NM_014420.1,367-385).
ctctgtgtgaacgatgttt

SEQ ID NO: 279287 - DNA, 19 bp, Homo sapiens
  siRNA target sequence for DKK4 (NM_014420.1,369-387).
ctgtgtgaacgatgtttgt

SEQ ID NO: 279288 - DNA, 19 bp, Homo sapiens
  siRNA target sequence for DKK4 (NM_014420.1,403-421).
gcaaccccaatattagaaa

SEQ ID NO: 279289 - DNA, 19 bp, Homo sapiens
  siRNA target sequence for DKK4 (NM_014420.1,503-521).
caagtattaagaaatcaca

SEQ ID NO: 279290 - DNA, 19 bp, Homo sapiens
  siRNA target sequence for DKK4 (NM_014420.1,548-566).
gttgtctgagaacttttga

SEQ ID NO: 279291 - DNA, 19 bp, Homo sapiens
  siRNA target sequence for DKK4 (NM_014420.1,718-736).
ctgtgtcgaagccaattga

SEQ ID NO: 279292 - DNA, 19 bp, Homo sapiens
  siRNA target sequence for DKK4 (NM_014420.1,745-763).
cggcagcatgctcgattaa

SEQ ID NO: 279293 - DNA, 19 bp, Homo sapiens
  siRNA target sequence for DKK4 (NM_014420.1,747-765).
gcagcatgctcgattaaga

SEQ ID NO: 279294 - DNA, 19 bp, Homo sapiens
  siRNA target sequence for DKK4 (NM_014420.1,750-768).
gcatgctcgattaagagta

SEQ ID NO: 279295 - DNA, 19 bp, Homo sapiens
  siRNA target sequence for DKK4 (NM_014420.1,751-769).
catgctcgattaagagtat

SEQ ID NO: 279296 - DNA, 19 bp, Homo sapiens
  siRNA target sequence for DLG7 (NM_014750.3,240-258).
gtcgacacaggaaggatat

SEQ ID NO: 279297 - DNA, 19 bp, Homo sapiens
  siRNA target sequence for DLG7 (NM_014750.3,242-260).
cgacacaggaaggatataa

SEQ ID NO: 279298 - DNA, 19 bp, Homo sapiens
  siRNA target sequence for DLG7 (NM_014750.3,247-265).
caggaaggatataagtact

SEQ ID NO: 279299 - DNA, 19 bp, Homo sapiens
  siRNA target sequence for DLG7 (NM_014750.3,250-268).
gaaggatataagtactgaa

SEQ ID NO: 279300 - DNA, 19 bp, Homo sapiens
  siRNA target sequence for DLG7 (NM_014750.3,328-346).
ggaatacgaacgaaataga

SEQ ID NO: 279301 - DNA, 19 bp, Homo sapiens
  siRNA target sequence for DLG7 (NM_014750.3,334-352).
cgaacgaaatagacacttt

SEQ ID NO: 279302 - DNA, 19 bp, Homo sapiens
  siRNA target sequence for DLG7 (NM_014750.3,339-357).
gaaatagacactttggttt

SEQ ID NO: 279303 - DNA, 19 bp, Homo sapiens
  siRNA target sequence for DLG7 (NM_014750.3,354-372).
gtttgaaagatgtaaacat

SEQ ID NO: 279304 - DNA, 19 bp, Homo sapiens
  siRNA target sequence for DLG7 (NM_014750.3,378-396).
ccttggaaggtagaattct

SEQ ID NO: 279305 - DNA, 19 bp, Homo sapiens
  siRNA target sequence for DLG7 (NM_014750.3,386-404).
ggtagaattcttgttgaat

SEQ ID NO: 279306 - DNA, 19 bp, Homo sapiens
  siRNA target sequence for DLG7 (NM_014750.3,390-408).
gaattcttgttgaattaga

SEQ ID NO: 279307 - DNA, 19 bp, Homo sapiens
  siRNA target sequence for DLG7 (NM_014750.3,477-495).
gtgatcaacgaaaacagat

SEQ ID NO: 279308 - DNA, 19 bp, Homo sapiens
  siRNA target sequence for DLG7 (NM_014750.3,550-568).
gaaagctaaacgaggaata

SEQ ID NO: 279309 - DNA, 19 bp, Homo sapiens
  siRNA target sequence for DLG7 (NM_014750.3,579-597).
gtcgttatagacctgatat

SEQ ID NO: 279310 - DNA, 19 bp, Homo sapiens
  siRNA target sequence for DLG7 (NM_014750.3,588-606).
gacctgatatgccttgttt

SEQ ID NO: 279311 - DNA, 19 bp, Homo sapiens
  siRNA target sequence for DLG7 (NM_014750.3,700-718).
ggagcagactaagattgat

SEQ ID NO: 279312 - DNA, 19 bp, Homo sapiens
  siRNA target sequence for DLG7 (NM_014750.3,743-761).
cgacctggtccaagacaaa

SEQ ID NO: 279313 - DNA, 19 bp, Homo sapiens
  siRNA target sequence for DLG7 (NM_014750.3,815-833).
cccacgtcgttgagaatga

SEQ ID NO: 279314 - DNA, 19 bp, Homo sapiens
  siRNA target sequence for DLG7 (NM_014750.3,817-835).
cacgtcgttgagaatgact

SEQ ID NO: 279315 - DNA, 19 bp, Homo sapiens
  siRNA target sequence for DLG7 (NM_014750.3,832-850).
gactcgatcagctactcaa

SEQ ID NO: 279316 - DNA, 19 bp, Homo sapiens
  siRNA target sequence for DLG7 (NM_014750.3,866-884).
cccagaacagtctcatcta

SEQ ID NO: 279317 - DNA, 19 bp, Homo sapiens
  siRNA target sequence for DLG7 (NM_014750.3,983-1001).
cccgacaagggtatttctt

SEQ ID NO: 279318 - DNA, 19 bp, Homo sapiens
  siRNA target sequence for DLG7 (NM_014750.3,985-1003).
cgacaagggtatttcttgt

SEQ ID NO: 279319 - DNA, 19 bp, Homo sapiens
  siRNA target sequence for DLG7 (NM_014750.3,986-1004).
gacaagggtatttcttgta

SEQ ID NO: 279320 - DNA, 19 bp, Homo sapiens
  siRNA target sequence for DLG7 (NM_014750.3,999-1017).
cttgtaaagtcgatagtga

SEQ ID NO: 279321 - DNA, 19 bp, Homo sapiens
  siRNA target sequence for DLG7 (NM_014750.3,1007-1025).
gtcgatagtgaagaaaata

SEQ ID NO: 279322 - DNA, 19 bp, Homo sapiens
  siRNA target sequence for DLG7 (NM_014750.3,1026-1044).
ctttgaattcacaaactaa

SEQ ID NO: 279323 - DNA, 19 bp, Homo sapiens
  siRNA target sequence for DLG7 (NM_014750.3,1087-1105).
ggaaaacttacctgagata

SEQ ID NO: 279324 - DNA, 19 bp, Homo sapiens
  siRNA target sequence for DLG7 (NM_014750.3,1093-1111).
cttacctgagataaatact

SEQ ID NO: 279325 - DNA, 19 bp, Homo sapiens
  siRNA target sequence for DLG7 (NM_014750.3,1139-1157).
gcacctaaggattttatgt

SEQ ID NO: 279326 - DNA, 19 bp, Homo sapiens
  siRNA target sequence for DLG7 (NM_014750.3,1175-1193).
ctgaagacctatcaagtaa

SEQ ID NO: 279327 - DNA, 19 bp, Homo sapiens
  siRNA target sequence for DLG7 (NM_014750.3,1177-1195).
gaagacctatcaagtaaca

SEQ ID NO: 279328 - DNA, 19 bp, Homo sapiens
  siRNA target sequence for DLG7 (NM_014750.3,1383-1401).
ggcatgaagaacatgtttt

SEQ ID NO: 279329 - DNA, 19 bp, Homo sapiens
  siRNA target sequence for DLG7 (NM_014750.3,1496-1514).
caccatggtgtgccatatt

SEQ ID NO: 279330 - DNA, 19 bp, Homo sapiens
  siRNA target sequence for DLG7 (NM_014750.3,1564-1582).
cgagtgggacaggaaactt

SEQ ID NO: 279331 - DNA, 19 bp, Homo sapiens
  siRNA target sequence for DLG7 (NM_014750.3,1567-1585).
gtgggacaggaaacttgaa

SEQ ID NO: 279332 - DNA, 19 bp, Homo sapiens
  siRNA target sequence for DLG7 (NM_014750.3,1632-1650).
gtcaaacaagactccttat

SEQ ID NO: 279333 - DNA, 19 bp, Homo sapiens
  siRNA target sequence for DLG7 (NM_014750.3,1634-1652).
caaacaagactccttatga

SEQ ID NO: 279334 - DNA, 19 bp, Homo sapiens
  siRNA target sequence for DLG7 (NM_014750.3,1725-1743).
gtacagatctggatggatt

SEQ ID NO: 279335 - DNA, 19 bp, Homo sapiens
  siRNA target sequence for DLG7 (NM_014750.3,1739-1757).
ggattttgggatatggtta

SEQ ID NO: 279336 - DNA, 19 bp, Homo sapiens
  siRNA target sequence for DLG7 (NM_014750.3,1748-1766).
gatatggttagttttcaga

SEQ ID NO: 279337 - DNA, 19 bp, Homo sapiens
  siRNA target sequence for DLG7 (NM_014750.3,1815-1833).
ctgggtggcaagtcaataa

SEQ ID NO: 279338 - DNA, 19 bp, Homo sapiens
  siRNA target sequence for DLG7 (NM_014750.3,1817-1835).
gggtggcaagtcaataata

SEQ ID NO: 279339 - DNA, 19 bp, Homo sapiens
  siRNA target sequence for DLG7 (NM_014750.3,1877-1895).
gttgtctcaggtatagcaa

SEQ ID NO: 279340 - DNA, 19 bp, Homo sapiens
  siRNA target sequence for DLG7 (NM_014750.3,1886-1904).
ggtatagcaagtaaaccaa

SEQ ID NO: 279341 - DNA, 19 bp, Homo sapiens
  siRNA target sequence for DLG7 (NM_014750.3,1940-1958).
cgcctagctgccataaaaa

SEQ ID NO: 279342 - DNA, 19 bp, Homo sapiens
  siRNA target sequence for DLG7 (NM_014750.3,1941-1959).
gcctagctgccataaaaaa

SEQ ID NO: 279343 - DNA, 19 bp, Homo sapiens
  siRNA target sequence for DLG7 (NM_014750.3,2014-2032).
gataccaaaggaagttgat

SEQ ID NO: 279344 - DNA, 19 bp, Homo sapiens
  siRNA target sequence for DLG7 (NM_014750.3,2019-2037).
caaaggaagttgataaaat

SEQ ID NO: 279345 - DNA, 19 bp, Homo sapiens
  siRNA target sequence for DLG7 (NM_014750.3,2133-2151).
cacctaagtctgtcaacaa

SEQ ID NO: 279346 - DNA, 19 bp, Homo sapiens
  siRNA target sequence for DLG7 (NM_014750.3,2176-2194).
gatgggcattccacaacaa

SEQ ID NO: 279347 - DNA, 19 bp, Homo sapiens
  siRNA target sequence for DLG7 (NM_014750.3,2179-2197).
gggcattccacaacaaact

SEQ ID NO: 279348 - DNA, 19 bp, Homo sapiens
  siRNA target sequence for DLG7 (NM_014750.3,2180-2198).
ggcattccacaacaaacta

SEQ ID NO: 279349 - DNA, 19 bp, Homo sapiens
  siRNA target sequence for DLG7 (NM_014750.3,2213-2231).
gccggtcctcagaatacga

SEQ ID NO: 279350 - DNA, 19 bp, Homo sapiens
  siRNA target sequence for DLG7 (NM_014750.3,2214-2232).
ccggtcctcagaatacgaa

SEQ ID NO: 279351 - DNA, 19 bp, Homo sapiens
  siRNA target sequence for DLG7 (NM_014750.3,2215-2233).
cggtcctcagaatacgaaa

SEQ ID NO: 279352 - DNA, 19 bp, Homo sapiens
  siRNA target sequence for DLG7 (NM_014750.3,2216-2234).
ggtcctcagaatacgaaaa

SEQ ID NO: 279353 - DNA, 19 bp, Homo sapiens
  siRNA target sequence for DLG7 (NM_014750.3,2220-2238).
ctcagaatacgaaaagtga

SEQ ID NO: 279354 - DNA, 19 bp, Homo sapiens
  siRNA target sequence for DLG7 (NM_014750.3,2248-2266).
gaagactttgtttttgagt

SEQ ID NO: 279355 - DNA, 19 bp, Homo sapiens
  siRNA target sequence for DLG7 (NM_014750.3,2304-2322).
gtcctggattaccagattt

SEQ ID NO: 279356 - DNA, 19 bp, Homo sapiens
  siRNA target sequence for DLG7 (NM_014750.3,2306-2324).
cctggattaccagatttaa

SEQ ID NO: 279357 - DNA, 19 bp, Homo sapiens
  siRNA target sequence for DLG7 (NM_014750.3,2310-2328).
gattaccagatttaattga

SEQ ID NO: 279358 - DNA, 19 bp, Homo sapiens
  siRNA target sequence for DLG7 (NM_014750.3,2354-2372).
gacttgaaggtggattgtt

SEQ ID NO: 279359 - DNA, 19 bp, Homo sapiens
  siRNA target sequence for DLG7 (NM_014750.3,2356-2374).
cttgaaggtggattgttta

SEQ ID NO: 279360 - DNA, 19 bp, Homo sapiens
  siRNA target sequence for DLG7 (NM_014750.3,2370-2388).
gtttatccagtgagagaat

SEQ ID NO: 279361 - DNA, 19 bp, Homo sapiens
  siRNA target sequence for DLG7 (NM_014750.3,2408-2426).
ggtggagtagcagatgata

SEQ ID NO: 279362 - DNA, 19 bp, Homo sapiens
  siRNA target sequence for DLG7 (NM_014750.3,2409-2427).
gtggagtagcagatgatat

SEQ ID NO: 279363 - DNA, 19 bp, Homo sapiens
  siRNA target sequence for DLG7 (NM_014750.3,2418-2436).
cagatgatattaatactaa

SEQ ID NO: 279364 - DNA, 19 bp, Homo sapiens
  siRNA target sequence for DLG7 (NM_014750.3,2493-2511).
catcacaggatgttttgat

SEQ ID NO: 279365 - DNA, 19 bp, Homo sapiens
  siRNA target sequence for DLG7 (NM_014750.3,2581-2599).
gtcagaactatttgataat

SEQ ID NO: 279366 - DNA, 19 bp, Homo sapiens
  siRNA target sequence for DLG7 (NM_014750.3,2630-2648).
gattcaccaggtctaaact

SEQ ID NO: 279367 - DNA, 19 bp, Homo sapiens
  siRNA target sequence for DLG7 (NM_014750.3,2642-2660).
ctaaactgcagtaatccat

SEQ ID NO: 279368 - DNA, 19 bp, Homo sapiens
  siRNA target sequence for DLG7 (NM_014750.3,2668-2686).
gctggagaggagacatcaa

SEQ ID NO: 279369 - DNA, 19 bp, Homo sapiens
  siRNA target sequence for DLG7 (NM_014750.3,2695-2713).
cagacacatttcttttggt

SEQ ID NO: 279370 - DNA, 19 bp, Homo sapiens
  siRNA target sequence for DLGAP1 (NM_004746.2,1018-1036).
cctgcaggttccacaagat

SEQ ID NO: 279371 - DNA, 19 bp, Homo sapiens
  siRNA target sequence for DLGAP1 (NM_004746.2,1048-1066).
gtacaccccacgaggtaaa

SEQ ID NO: 279372 - DNA, 19 bp, Homo sapiens
  siRNA target sequence for DLGAP1 (NM_004746.2,1051-1069).
caccccacgaggtaaagat

SEQ ID NO: 279373 - DNA, 19 bp, Homo sapiens
  siRNA target sequence for DLGAP1 (NM_004746.2,1053-1071).
ccccacgaggtaaagatga

SEQ ID NO: 279374 - DNA, 19 bp, Homo sapiens
  siRNA target sequence for DLGAP1 (NM_004746.2,1054-1072).
cccacgaggtaaagatgat

SEQ ID NO: 279375 - DNA, 19 bp, Homo sapiens
  siRNA target sequence for DLGAP1 (NM_004746.2,1172-1190).
gttgctgcgcggagagaaa

SEQ ID NO: 279376 - DNA, 19 bp, Homo sapiens
  siRNA target sequence for DLGAP1 (NM_004746.2,1181-1199).
cggagagaaagctatctca

SEQ ID NO: 279377 - DNA, 19 bp, Homo sapiens
  siRNA target sequence for DLGAP1 (NM_004746.2,1182-1200).
ggagagaaagctatctcaa

SEQ ID NO: 279378 - DNA, 19 bp, Homo sapiens
  siRNA target sequence for DLGAP1 (NM_004746.2,1265-1283).
ctccagatccggagtcata

SEQ ID NO: 279379 - DNA, 19 bp, Homo sapiens
  siRNA target sequence for DLGAP1 (NM_004746.2,1267-1285).
ccagatccggagtcatagt

SEQ ID NO: 279380 - DNA, 19 bp, Homo sapiens
  siRNA target sequence for DLGAP1 (NM_004746.2,1268-1286).
cagatccggagtcatagtt

SEQ ID NO: 279381 - DNA, 19 bp, Homo sapiens
  siRNA target sequence for DLGAP1 (NM_004746.2,1654-1672).
cacggtgtcatcttgcatt

SEQ ID NO: 279382 - DNA, 19 bp, Homo sapiens
  siRNA target sequence for DLGAP1 (NM_004746.2,1662-1680).
catcttgcattacaacata

SEQ ID NO: 279383 - DNA, 19 bp, Homo sapiens
  siRNA target sequence for DLGAP1 (NM_004746.2,1710-1728).
gaactaccacgaaaccttt

SEQ ID NO: 279384 - DNA, 19 bp, Homo sapiens
  siRNA target sequence for DLGAP1 (NM_004746.2,1713-1731).
ctaccacgaaacctttcat

SEQ ID NO: 279385 - DNA, 19 bp, Homo sapiens
  siRNA target sequence for DLGAP1 (NM_004746.2,1789-1807).
gggccagcgaggagatatt

SEQ ID NO: 279386 - DNA, 19 bp, Homo sapiens
  siRNA target sequence for DLGAP1 (NM_004746.2,1790-1808).
ggccagcgaggagatatta

SEQ ID NO: 279387 - DNA, 19 bp, Homo sapiens
  siRNA target sequence for DLGAP1 (NM_004746.2,1791-1809).
gccagcgaggagatattat

SEQ ID NO: 279388 - DNA, 19 bp, Homo sapiens
  siRNA target sequence for DLGAP1 (NM_004746.2,1793-1811).
cagcgaggagatattatca

SEQ ID NO: 279389 - DNA, 19 bp, Homo sapiens
  siRNA target sequence for DLGAP1 (NM_004746.2,1902-1920).
gccctgccagtcaacacat

SEQ ID NO: 279390 - DNA, 19 bp, Homo sapiens
  siRNA target sequence for DLGAP1 (NM_004746.2,1911-1929).
gtcaacacatgggcaataa

SEQ ID NO: 279391 - DNA, 19 bp, Homo sapiens
  siRNA target sequence for DLGAP1 (NM_004746.2,1983-2001).
ggaagaaggaccactttaa

SEQ ID NO: 279392 - DNA, 19 bp, Homo sapiens
  siRNA target sequence for DLGAP1 (NM_004746.2,2054-2072).
gacaaaacaggggagaata

SEQ ID NO: 279393 - DNA, 19 bp, Homo sapiens
  siRNA target sequence for DLGAP1 (NM_004746.2,2094-2112).
ccgtgggagtgcaagtaga

SEQ ID NO: 279394 - DNA, 19 bp, Homo sapiens
  siRNA target sequence for DLGAP1 (NM_004746.2,2095-2113).
cgtgggagtgcaagtagaa

SEQ ID NO: 279395 - DNA, 19 bp, Homo sapiens
  siRNA target sequence for DLGAP1 (NM_004746.2,2372-2390).
ccggacccctggattgact

SEQ ID NO: 279396 - DNA, 19 bp, Homo sapiens
  siRNA target sequence for DLGAP1 (NM_004746.2,2530-2548).
caacctgcccgaagacatt

SEQ ID NO: 279397 - DNA, 19 bp, Homo sapiens
  siRNA target sequence for DLGAP1 (NM_004746.2,2533-2551).
cctgcccgaagacattcta

SEQ ID NO: 279398 - DNA, 19 bp, Homo sapiens
  siRNA target sequence for DLGAP1 (NM_004746.2,2711-2729).
gaaaatattagtatgaaat

SEQ ID NO: 279399 - DNA, 19 bp, Homo sapiens
  siRNA target sequence for DLGAP1 (NM_004746.2,2732-2750).
gatgaacttcatcagttaa

SEQ ID NO: 279400 - DNA, 19 bp, Homo sapiens
  siRNA target sequence for DLGAP1 (NM_004746.2,2753-2771).
gccaataattggaaacaga

SEQ ID NO: 279401 - DNA, 19 bp, Homo sapiens
  siRNA target sequence for DOC1 (NM_014890.1,175-193).
cccttcaaagacagaaaat

SEQ ID NO: 279402 - DNA, 19 bp, Homo sapiens
  siRNA target sequence for DOC1 (NM_014890.1,218-236).
ggaaacacataccaaacta

SEQ ID NO: 279403 - DNA, 19 bp, Homo sapiens
  siRNA target sequence for DOC1 (NM_014890.1,304-322).
cgcagaccacaaagtttca

SEQ ID NO: 279404 - DNA, 19 bp, Homo sapiens
  siRNA target sequence for DOC1 (NM_014890.1,356-374).
caatgaggacagtcaaaat

SEQ ID NO: 279405 - DNA, 19 bp, Homo sapiens
  siRNA target sequence for DOC1 (NM_014890.1,410-428).
gcagattgatgagttagaa

SEQ ID NO: 279406 - DNA, 19 bp, Homo sapiens
  siRNA target sequence for DOC1 (NM_014890.1,431-449).
gacaaacaggtctttacga

SEQ ID NO: 279407 - DNA, 19 bp, Homo sapiens
  siRNA target sequence for DOC1 (NM_014890.1,437-455).
caggtctttacgaaaagca

SEQ ID NO: 279408 - DNA, 19 bp, Homo sapiens
  siRNA target sequence for DOC1 (NM_014890.1,461-479).
ggagctgcaagatataaaa

SEQ ID NO: 279409 - DNA, 19 bp, Homo sapiens
  siRNA target sequence for DOC1 (NM_014890.1,567-585).
ctcaataagaggcttgaaa

SEQ ID NO: 279410 - DNA, 19 bp, Homo sapiens
  siRNA target sequence for DOC1 (NM_014890.1,582-600).
gaaagggagacgttacaga

SEQ ID NO: 279411 - DNA, 19 bp, Homo sapiens
  siRNA target sequence for DOC1 (NM_014890.1,586-604).
gggagacgttacagagtaa

SEQ ID NO: 279412 - DNA, 19 bp, Homo sapiens
  siRNA target sequence for DOC1 (NM_014890.1,593-611).
gttacagagtaaagacttt

SEQ ID NO: 279413 - DNA, 19 bp, Homo sapiens
  siRNA target sequence for DOC1 (NM_014890.1,601-619).
gtaaagactttaaactaga

SEQ ID NO: 279414 - DNA, 19 bp, Homo sapiens
  siRNA target sequence for DOC1 (NM_014890.1,640-658).
gaattatggctctggaaaa

SEQ ID NO: 279415 - DNA, 19 bp, Homo sapiens
  siRNA target sequence for DOC1 (NM_014890.1,785-803).
gctagaagccattgaaagt

SEQ ID NO: 279416 - DNA, 19 bp, Homo sapiens
  siRNA target sequence for DOC1 (NM_014890.1,798-816).
gaaagtcggctagaaaaga

SEQ ID NO: 279417 - DNA, 19 bp, Homo sapiens
  siRNA target sequence for DOC1 (NM_014890.1,804-822).
cggctagaaaagacagaat

SEQ ID NO: 279418 - DNA, 19 bp, Homo sapiens
  siRNA target sequence for DOC1 (NM_014890.1,834-852).
gaggatttaactaaactga

SEQ ID NO: 279419 - DNA, 19 bp, Homo sapiens
  siRNA target sequence for DOC1 (NM_014890.1,945-963).
cttcaagtggagcaaaata

SEQ ID NO: 279420 - DNA, 19 bp, Homo sapiens
  siRNA target sequence for DOC1 (NM_014890.1,1016-1034).
gtccaaaaccgatgtagaa

SEQ ID NO: 279421 - DNA, 19 bp, Homo sapiens
  siRNA target sequence for DOC1 (NM_014890.1,1018-1036).
ccaaaaccgatgtagaaga

SEQ ID NO: 279422 - DNA, 19 bp, Homo sapiens
  siRNA target sequence for DOC1 (NM_014890.1,1019-1037).
caaaaccgatgtagaagaa

SEQ ID NO: 279423 - DNA, 19 bp, Homo sapiens
  siRNA target sequence for DOC1 (NM_014890.1,1113-1131).
ctcctgtcaagagttaata

SEQ ID NO: 279424 - DNA, 19 bp, Homo sapiens
  siRNA target sequence for DOC1 (NM_014890.1,1136-1154).
gaaaaataggcttcaatca

SEQ ID NO: 279425 - DNA, 19 bp, Homo sapiens
  siRNA target sequence for DOC1 (NM_014890.1,1208-1226).
gaaatccacaacagcatta

SEQ ID NO: 279426 - DNA, 19 bp, Homo sapiens
  siRNA target sequence for DOC1 (NM_014890.1,1347-1365).
ctagaacgaaggtatgcta

SEQ ID NO: 279427 - DNA, 19 bp, Homo sapiens
  siRNA target sequence for DOC1 (NM_014890.1,1371-1389).
cgagacaaagctcaatttt

SEQ ID NO: 279428 - DNA, 19 bp, Homo sapiens
  siRNA target sequence for DOC1 (NM_014890.1,1393-1411).
ctaaagagctagaacatgt

SEQ ID NO: 279429 - DNA, 19 bp, Homo sapiens
  siRNA target sequence for DOC1 (NM_014890.1,1419-1437).
gaacttgctaagtacaagt

SEQ ID NO: 279430 - DNA, 19 bp, Homo sapiens
  siRNA target sequence for DOC1 (NM_014890.1,1450-1468).
cagagaccagccatgaaca

SEQ ID NO: 279431 - DNA, 19 bp, Homo sapiens
  siRNA target sequence for DOC1 (NM_014890.1,1522-1540).
gagaagtggatgcattaaa

SEQ ID NO: 279432 - DNA, 19 bp, Homo sapiens
  siRNA target sequence for DOC1 (NM_014890.1,1671-1689).
ctcactaaggagttagaga

SEQ ID NO: 279433 - DNA, 19 bp, Homo sapiens
  siRNA target sequence for DOC1 (NM_014890.1,1686-1704).
gagaggtaccggcatttca

SEQ ID NO: 279434 - DNA, 19 bp, Homo sapiens
  siRNA target sequence for DOC1 (NM_014890.1,1688-1706).
gaggtaccggcatttcagt

SEQ ID NO: 279435 - DNA, 19 bp, Homo sapiens
  siRNA target sequence for DOC1 (NM_014890.1,1690-1708).
ggtaccggcatttcagtaa

SEQ ID NO: 279436 - DNA, 19 bp, Homo sapiens
  siRNA target sequence for DOC1 (NM_014890.1,1794-1812).
gaaccacctgattacaaga

SEQ ID NO: 279437 - DNA, 19 bp, Homo sapiens
  siRNA target sequence for DOC1 (NM_014890.1,1826-1844).
ggaacgtgcagtcatcaat

SEQ ID NO: 279438 - DNA, 19 bp, Homo sapiens
  siRNA target sequence for DOC1 (NM_014890.1,1979-1997).
ggagggccatcttcagaat

SEQ ID NO: 279439 - DNA, 19 bp, Homo sapiens
  siRNA target sequence for DOC1 (NM_014890.1,2065-2083).
ctgggcagccacttcatat

SEQ ID NO: 279440 - DNA, 19 bp, Homo sapiens
  siRNA target sequence for DOC1 (NM_014890.1,2068-2086).
ggcagccacttcatataaa

SEQ ID NO: 279441 - DNA, 19 bp, Homo sapiens
  siRNA target sequence for DOC1 (NM_014890.1,2072-2090).
gccacttcatataaaggtt

SEQ ID NO: 279442 - DNA, 19 bp, Homo sapiens
  siRNA target sequence for DOC1 (NM_014890.1,2073-2091).
ccacttcatataaaggtta

SEQ ID NO: 279443 - DNA, 19 bp, Homo sapiens
  siRNA target sequence for DOC1 (NM_014890.1,2115-2133).
gccactcttgaaatcacaa

SEQ ID NO: 279444 - DNA, 19 bp, Homo sapiens
  siRNA target sequence for DOC1 (NM_014890.1,2143-2161).
cagagagtcctcactctta

SEQ ID NO: 279445 - DNA, 19 bp, Homo sapiens
  siRNA target sequence for DOC1 (NM_014890.1,2145-2163).
gagagtcctcactcttaca

SEQ ID NO: 279446 - DNA, 19 bp, Homo sapiens
  siRNA target sequence for DOC1 (NM_014890.1,2162-2180).
cacgagtactgcagtgata

SEQ ID NO: 279447 - DNA, 19 bp, Homo sapiens
  siRNA target sequence for DOC1 (NM_014890.1,2191-2209).
gcacgccaaagcaaaggat

SEQ ID NO: 279448 - DNA, 19 bp, Homo sapiens
  siRNA target sequence for DOC1 (NM_014890.1,2192-2210).
cacgccaaagcaaaggata

SEQ ID NO: 279449 - DNA, 19 bp, Homo sapiens
  siRNA target sequence for DOC1 (NM_014890.1,2217-2235).
ctccaaaacgcctccataa

SEQ ID NO: 279450 - DNA, 19 bp, Homo sapiens
  siRNA target sequence for DOC1 (NM_014890.1,2227-2245).
cctccataacaccagtaaa

SEQ ID NO: 279451 - DNA, 19 bp, Homo sapiens
  siRNA target sequence for DOC1 (NM_014890.1,2261-2279).
cgaagacctcatgaattta

SEQ ID NO: 279452 - DNA, 19 bp, Homo sapiens
  siRNA target sequence for DOC1 (NM_014890.1,2283-2301).
caaggcatgtccccaatta

SEQ ID NO: 279453 - DNA, 19 bp, Homo sapiens
  siRNA target sequence for DOC1 (NM_014890.1,2336-2354).
gtcttgtggttctctaact

SEQ ID NO: 279454 - DNA, 19 bp, Homo sapiens
  siRNA target sequence for DOC1 (NM_182909.1,497-515).
gagggctcagcccaaaaga

SEQ ID NO: 279455 - DNA, 19 bp, Homo sapiens
  siRNA target sequence for DOC1 (NM_182909.1,514-532).
gaaatttccaagacatact

SEQ ID NO: 279456 - DNA, 19 bp, Homo sapiens
  siRNA target sequence for DOC1 (NM_182909.1,548-566).
caagggcctaaaaacatga

SEQ ID NO: 279457 - DNA, 19 bp, Homo sapiens
  siRNA target sequence for DOC1 (NM_182909.1,593-611).
cccagtgagtcggatgtaa

SEQ ID NO: 279458 - DNA, 19 bp, Homo sapiens
  siRNA target sequence for DOC1 (NM_182909.1,594-612).
ccagtgagtcggatgtaat

SEQ ID NO: 279459 - DNA, 19 bp, Homo sapiens
  siRNA target sequence for DOC1 (NM_182909.1,595-613).
cagtgagtcggatgtaata

SEQ ID NO: 279460 - DNA, 19 bp, Homo sapiens
  siRNA target sequence for DOC1 (NM_182909.1,597-615).
gtgagtcggatgtaatact

SEQ ID NO: 279461 - DNA, 19 bp, Homo sapiens
  siRNA target sequence for DOC1 (NM_182909.1,675-693).
caagagatgacctgttatt

SEQ ID NO: 279462 - DNA, 19 bp, Homo sapiens
  siRNA target sequence for DOC1 (NM_182909.1,785-803).
gctcagtatgggtttgtca

SEQ ID NO: 279463 - DNA, 19 bp, Homo sapiens
  siRNA target sequence for DOC1 (NM_182909.1,795-813).
ggtttgtcactccaaaaaa

SEQ ID NO: 279464 - DNA, 19 bp, Homo sapiens
  siRNA target sequence for DOC1 (NM_182909.1,881-899).
gagaaaccaatgaatgagt

SEQ ID NO: 279465 - DNA, 19 bp, Homo sapiens
  siRNA target sequence for DOC1 (NM_182909.1,892-910).
gaatgagttggacaaagtt

SEQ ID NO: 279466 - DNA, 19 bp, Homo sapiens
  siRNA target sequence for DOC1 (NM_182909.1,972-990).
cccgtaggcaaaccatatt

SEQ ID NO: 279467 - DNA, 19 bp, Homo sapiens
  siRNA target sequence for DOC1 (NM_182909.1,1599-1617).
ggaaacgtgtgctagatat

SEQ ID NO: 279468 - DNA, 19 bp, Homo sapiens
  siRNA target sequence for DONSON (NM_017613.2,380-398).
ccggtcccgtttttagatt

SEQ ID NO: 279469 - DNA, 19 bp, Homo sapiens
  siRNA target sequence for DONSON (NM_017613.2,382-400).
ggtcccgtttttagattct

SEQ ID NO: 279470 - DNA, 19 bp, Homo sapiens
  siRNA target sequence for DONSON (NM_017613.2,383-401).
gtcccgtttttagattcta

SEQ ID NO: 279471 - DNA, 19 bp, Homo sapiens
  siRNA target sequence for DONSON (NM_017613.2,404-422).
caagaaaatgatttgctat

SEQ ID NO: 279472 - DNA, 19 bp, Homo sapiens
  siRNA target sequence for DONSON (NM_017613.2,437-455).
cctgaaagaacaactgtta

SEQ ID NO: 279473 - DNA, 19 bp, Homo sapiens
  siRNA target sequence for DONSON (NM_017613.2,467-485).
cagacttcacatgtatcat

SEQ ID NO: 279474 - DNA, 19 bp, Homo sapiens
  siRNA target sequence for DONSON (NM_017613.2,508-526).
ctcaaaaagtactgagtta

SEQ ID NO: 279475 - DNA, 19 bp, Homo sapiens
  siRNA target sequence for DONSON (NM_017613.2,527-545).
cctgtggactggagtatta

SEQ ID NO: 279476 - DNA, 19 bp, Homo sapiens
  siRNA target sequence for DONSON (NM_017613.2,528-546).
ctgtggactggagtattaa

SEQ ID NO: 279477 - DNA, 19 bp, Homo sapiens
  siRNA target sequence for DONSON (NM_017613.2,530-548).
gtggactggagtattaaaa

SEQ ID NO: 279478 - DNA, 19 bp, Homo sapiens
  siRNA target sequence for DONSON (NM_017613.2,577-595).
ctttacctgggcagatcat

SEQ ID NO: 279479 - DNA, 19 bp, Homo sapiens
  siRNA target sequence for DONSON (NM_017613.2,620-638).
ggtcttgtccagcattgta

SEQ ID NO: 279480 - DNA, 19 bp, Homo sapiens
  siRNA target sequence for DONSON (NM_017613.2,631-649).
gcattgtagggcaacagaa

SEQ ID NO: 279481 - DNA, 19 bp, Homo sapiens
  siRNA target sequence for DONSON (NM_017613.2,709-727).
ccagcagagccttatctat

SEQ ID NO: 279482 - DNA, 19 bp, Homo sapiens
  siRNA target sequence for DONSON (NM_017613.2,767-785).
cgtattggagctgatagaa

SEQ ID NO: 279483 - DNA, 19 bp, Homo sapiens
  siRNA target sequence for DONSON (NM_017613.2,821-839).
gcaaccctgcagcatgttt

SEQ ID NO: 279484 - DNA, 19 bp, Homo sapiens
  siRNA target sequence for DONSON (NM_017613.2,848-866).
gactggtctgtgagcttta

SEQ ID NO: 279485 - DNA, 19 bp, Homo sapiens
  siRNA target sequence for DONSON (NM_017613.2,914-932).
gtttgtacctatcagttta

SEQ ID NO: 279486 - DNA, 19 bp, Homo sapiens
  siRNA target sequence for DONSON (NM_017613.2,940-958).
gttccgagcagcaggatta

SEQ ID NO: 279487 - DNA, 19 bp, Homo sapiens
  siRNA target sequence for DONSON (NM_017613.2,959-977).
gctggaagtgacttaatca

SEQ ID NO: 279488 - DNA, 19 bp, Homo sapiens
  siRNA target sequence for DONSON (NM_017613.2,970-988).
cttaatcacagctctcata

SEQ ID NO: 279489 - DNA, 19 bp, Homo sapiens
  siRNA target sequence for DONSON (NM_017613.2,992-1010).
ccaacaactcgaggtttaa

SEQ ID NO: 279490 - DNA, 19 bp, Homo sapiens
  siRNA target sequence for DONSON (NM_017613.2,1017-1035).
ctatgagaaatgaaggtat

SEQ ID NO: 279491 - DNA, 19 bp, Homo sapiens
  siRNA target sequence for DONSON (NM_017613.2,1166-1184).
gagatgggtgtgcaagata

SEQ ID NO: 279492 - DNA, 19 bp, Homo sapiens
  siRNA target sequence for DONSON (NM_017613.2,1259-1277).
gaatctgttgtgttggtaa

SEQ ID NO: 279493 - DNA, 19 bp, Homo sapiens
  siRNA target sequence for DONSON (NM_017613.2,1265-1283).
gttgtgttggtaaaaggaa

SEQ ID NO: 279494 - DNA, 19 bp, Homo sapiens
  siRNA target sequence for DONSON (NM_017613.2,1280-1298).
ggaatcaacacctttacat

SEQ ID NO: 279495 - DNA, 19 bp, Homo sapiens
  siRNA target sequence for DONSON (NM_017613.2,1390-1408).
ccgaggtgccacaatgcaa

SEQ ID NO: 279496 - DNA, 19 bp, Homo sapiens
  siRNA target sequence for DONSON (NM_017613.2,1391-1409).
cgaggtgccacaatgcaaa

SEQ ID NO: 279497 - DNA, 19 bp, Homo sapiens
  siRNA target sequence for DONSON (NM_017613.2,1395-1413).
gtgccacaatgcaaatgct

SEQ ID NO: 279498 - DNA, 19 bp, Homo sapiens
  siRNA target sequence for DONSON (NM_017613.2,1397-1415).
gccacaatgcaaatgctta

SEQ ID NO: 279499 - DNA, 19 bp, Homo sapiens
  siRNA target sequence for DONSON (NM_017613.2,1522-1540).
catgctgctcaaatcttca

SEQ ID NO: 279500 - DNA, 19 bp, Homo sapiens
  siRNA target sequence for DONSON (NM_017613.2,1576-1594).
cgagccaactgctgtattt

SEQ ID NO: 279501 - DNA, 19 bp, Homo sapiens
  siRNA target sequence for DONSON (NM_017613.2,1577-1595).
gagccaactgctgtattta

SEQ ID NO: 279502 - DNA, 19 bp, Homo sapiens
  siRNA target sequence for DONSON (NM_017613.2,1637-1655).
gttcataaggagcttacta

SEQ ID NO: 279503 - DNA, 19 bp, Homo sapiens
  siRNA target sequence for DONSON (NM_017613.2,1732-1750).
ggtgctgagagactacatt

SEQ ID NO: 279504 - DNA, 19 bp, Homo sapiens
  siRNA target sequence for DONSON (NM_017613.2,1733-1751).
gtgctgagagactacattt

SEQ ID NO: 279505 - DNA, 19 bp, Homo sapiens
  siRNA target sequence for DONSON (NM_017613.2,1735-1753).
gctgagagactacatttat

SEQ ID NO: 279506 - DNA, 19 bp, Homo sapiens
  siRNA target sequence for DP1 (NM_005669.3,286-304).
gacctactgggtagtgtat

SEQ ID NO: 279507 - DNA, 19 bp, Homo sapiens
  siRNA target sequence for DP1 (NM_005669.3,323-341).
gaattcttctctgatatct

SEQ ID NO: 279508 - DNA, 19 bp, Homo sapiens
  siRNA target sequence for DSCR10 (NM_148676.1,550-568).
ctctgctgagtctggttat

SEQ ID NO: 279509 - DNA, 19 bp, Homo sapiens
  siRNA target sequence for DSCR3 (NM_006052.1,254-272).
ggacatcaagattaaaaga

SEQ ID NO: 279510 - DNA, 19 bp, Homo sapiens
  siRNA target sequence for DSCR3 (NM_006052.1,271-289).
gagcgaataaagtttatca

SEQ ID NO: 279511 - DNA, 19 bp, Homo sapiens
  siRNA target sequence for DSCR3 (NM_006052.1,309-327).
ggcgtggtggtcatatcga

SEQ ID NO: 279512 - DNA, 19 bp, Homo sapiens
  siRNA target sequence for DSCR3 (NM_006052.1,317-335).
ggtcatatcgagtaaggat

SEQ ID NO: 279513 - DNA, 19 bp, Homo sapiens
  siRNA target sequence for DSCR3 (NM_006052.1,318-336).
gtcatatcgagtaaggatt

SEQ ID NO: 279514 - DNA, 19 bp, Homo sapiens
  siRNA target sequence for DSCR3 (NM_006052.1,364-382).
ccatggaaggaactgtaaa

SEQ ID NO: 279515 - DNA, 19 bp, Homo sapiens
  siRNA target sequence for DSCR3 (NM_006052.1,530-548).
gcacttgaagggtaacaaa

SEQ ID NO: 279516 - DNA, 19 bp, Homo sapiens
  siRNA target sequence for DSCR3 (NM_006052.1,539-557).
gggtaacaaagttctgtat

SEQ ID NO: 279517 - DNA, 19 bp, Homo sapiens
  siRNA target sequence for DSCR3 (NM_006052.1,541-559).
gtaacaaagttctgtatga

SEQ ID NO: 279518 - DNA, 19 bp, Homo sapiens
  siRNA target sequence for DSCR3 (NM_006052.1,562-580).
cgtatcatggcgtgtttgt

SEQ ID NO: 279519 - DNA, 19 bp, Homo sapiens
  siRNA target sequence for DSCR3 (NM_006052.1,571-589).
gcgtgtttgtcaacattca

SEQ ID NO: 279520 - DNA, 19 bp, Homo sapiens
  siRNA target sequence for DSCR3 (NM_006052.1,627-645).
gccaaggacttgacaaaga

SEQ ID NO: 279521 - DNA, 19 bp, Homo sapiens
  siRNA target sequence for DSCR3 (NM_006052.1,699-717).
cccgtggacttcacgatta

SEQ ID NO: 279522 - DNA, 19 bp, Homo sapiens
  siRNA target sequence for DSCR3 (NM_006052.1,701-719).
cgtggacttcacgattaca

SEQ ID NO: 279523 - DNA, 19 bp, Homo sapiens
  siRNA target sequence for DSCR3 (NM_006052.1,712-730).
cgattacacctgaaacctt

SEQ ID NO: 279524 - DNA, 19 bp, Homo sapiens
  siRNA target sequence for DSCR3 (NM_006052.1,713-731).
gattacacctgaaacctta

SEQ ID NO: 279525 - DNA, 19 bp, Homo sapiens
  siRNA target sequence for DSCR3 (NM_006052.1,778-796).
gacatctcaactcaacaaa

SEQ ID NO: 279526 - DNA, 19 bp, Homo sapiens
  siRNA target sequence for DSCR3 (NM_006052.1,780-798).
catctcaactcaacaaact

SEQ ID NO: 279527 - DNA, 19 bp, Homo sapiens
  siRNA target sequence for DSCR3 (NM_006052.1,919-937).
gcgacgccacggagattca

SEQ ID NO: 279528 - DNA, 19 bp, Homo sapiens
  siRNA target sequence for DSCR3 (NM_006052.1,921-939).
gacgccacggagattcaga

SEQ ID NO: 279529 - DNA, 19 bp, Homo sapiens
  siRNA target sequence for DSCR3 (NM_006052.1,926-944).
cacggagattcagaacatt

SEQ ID NO: 279530 - DNA, 19 bp, Homo sapiens
  siRNA target sequence for DSCR4 (NM_005867.1,117-135).
catcttgacgagagatgat

SEQ ID NO: 279531 - DNA, 19 bp, Homo sapiens
  siRNA target sequence for DSCR4 (NM_005867.1,120-138).
cttgacgagagatgatgaa

SEQ ID NO: 279532 - DNA, 19 bp, Homo sapiens
  siRNA target sequence for DSCR4 (NM_005867.1,133-151).
gatgaaccccggatattta

SEQ ID NO: 279533 - DNA, 19 bp, Homo sapiens
  siRNA target sequence for DSCR4 (NM_005867.1,368-386).
gtctgatttggaaatacca

SEQ ID NO: 279534 - DNA, 19 bp, Homo sapiens
  siRNA target sequence for DSCR4 (NM_005867.1,377-395).
ggaaataccaactttacct

SEQ ID NO: 279535 - DNA, 19 bp, Homo sapiens
  siRNA target sequence for DSCR4 (NM_005867.1,401-419).
ggctccacaagaaatcaga

SEQ ID NO: 279536 - DNA, 19 bp, Homo sapiens
  siRNA target sequence for DSCR4 (NM_005867.1,402-420).
gctccacaagaaatcagat

SEQ ID NO: 279537 - DNA, 19 bp, Homo sapiens
  siRNA target sequence for DSCR6 (NM_018962.1,439-457).
catcctgtaagagtctatt

SEQ ID NO: 279538 - DNA, 19 bp, Homo sapiens
  siRNA target sequence for DSCR6 (NM_018962.1,451-469).
gtctatttacccatgtcaa

SEQ ID NO: 279539 - DNA, 19 bp, Homo sapiens
  siRNA target sequence for DSCR6 (NM_018962.1,462-480).
catgtcaaagcgtcaagaa

SEQ ID NO: 279540 - DNA, 19 bp, Homo sapiens
  siRNA target sequence for DSCR6 (NM_018962.1,467-485).
caaagcgtcaagaatacct

SEQ ID NO: 279541 - DNA, 19 bp, Homo sapiens
  siRNA target sequence for DSCR6 (NM_018962.1,523-541).
gtgcaagccacgattgact

SEQ ID NO: 279542 - DNA, 19 bp, Homo sapiens
  siRNA target sequence for DSCR8 (NM_032589.1,179-197).
gagaaagggtcttcattca

SEQ ID NO: 279543 - DNA, 19 bp, Homo sapiens
  siRNA target sequence for DSCR8 (NM_032589.1,384-402).
gtgctggcccagtatgagt

SEQ ID NO: 279544 - DNA, 19 bp, Homo sapiens
  siRNA target sequence for DSCR9 (NM_148675.1,899-917).
ccgtccagcagcgtataga

SEQ ID NO: 279545 - DNA, 19 bp, Homo sapiens
  siRNA target sequence for DSCR9 (NM_148675.1,921-939).
gcccatgtctgcgatgtaa

SEQ ID NO: 279546 - DNA, 19 bp, Homo sapiens
  siRNA target sequence for DSCR9 (NM_148675.1,923-941).
ccatgtctgcgatgtaact

SEQ ID NO: 279547 - DNA, 19 bp, Homo sapiens
  siRNA target sequence for DSCR9 (NM_148675.1,983-1001).
cgtcctccagcgtatgcta

SEQ ID NO: 279548 - DNA, 19 bp, Homo sapiens
  siRNA target sequence for DSCR9 (NM_148675.1,1046-1064).
ccgaagaggatgggaaaat

SEQ ID NO: 279549 - DNA, 19 bp, Homo sapiens
  siRNA target sequence for DXS9879E (NM_006014.2,691-709).
cgaatttccgtcatcaact

SEQ ID NO: 279550 - DNA, 19 bp, Homo sapiens
  siRNA target sequence for DXS9879E (NM_006014.2,698-716).
ccgtcatcaactttcttga

SEQ ID NO: 279551 - DNA, 19 bp, Homo sapiens
  siRNA target sequence for E46L (NM_013236.1,281-299).
cgctcacggcgctcttcaa

SEQ ID NO: 279552 - DNA, 19 bp, Homo sapiens
  siRNA target sequence for E46L (NM_013236.1,282-300).
gctcacggcgctcttcaaa

SEQ ID NO: 279553 - DNA, 19 bp, Homo sapiens
  siRNA target sequence for E46L (NM_013236.1,303-321).
gcagcggaaccgagaaaca

SEQ ID NO: 279554 - DNA, 19 bp, Homo sapiens
  siRNA target sequence for E46L (NM_013236.1,330-348).
gactatcttccaaagagtt

SEQ ID NO: 279555 - DNA, 19 bp, Homo sapiens
  siRNA target sequence for E46L (NM_013236.1,344-362).
gagttctggatatcctaaa

SEQ ID NO: 279556 - DNA, 19 bp, Homo sapiens
  siRNA target sequence for E46L (NM_013236.1,346-364).
gttctggatatcctaaaga

SEQ ID NO: 279557 - DNA, 19 bp, Homo sapiens
  siRNA target sequence for E46L (NM_013236.1,349-367).
ctggatatcctaaagaaat

SEQ ID NO: 279558 - DNA, 19 bp, Homo sapiens
  siRNA target sequence for E46L (NM_013236.1,351-369).
ggatatcctaaagaaatct

SEQ ID NO: 279559 - DNA, 19 bp, Homo sapiens
  siRNA target sequence for E46L (NM_013236.1,352-370).
gatatcctaaagaaatctt

SEQ ID NO: 279560 - DNA, 19 bp, Homo sapiens
  siRNA target sequence for E46L (NM_013236.1,401-419).
catcccaagtggaaaacct

SEQ ID NO: 279561 - DNA, 19 bp, Homo sapiens
  siRNA target sequence for E46L (NM_013236.1,422-440).
cttccagtctgcagttaat

SEQ ID NO: 279562 - DNA, 19 bp, Homo sapiens
  siRNA target sequence for E46L (NM_013236.1,430-448).
ctgcagttaataacagaat

SEQ ID NO: 279563 - DNA, 19 bp, Homo sapiens
  siRNA target sequence for E46L (NM_013236.1,463-481).
cgcaatgcttgcatagagt

SEQ ID NO: 279564 - DNA, 19 bp, Homo sapiens
  siRNA target sequence for E46L (NM_013236.1,504-522).
caggaacttggatacgatt

SEQ ID NO: 279565 - DNA, 19 bp, Homo sapiens
  siRNA target sequence for E46L (NM_013236.1,523-541).
ggtgttgctgttgatttga

SEQ ID NO: 279566 - DNA, 19 bp, Homo sapiens
  siRNA target sequence for E46L (NM_013236.1,524-542).
gtgttgctgttgatttgat

SEQ ID NO: 279567 - DNA, 19 bp, Homo sapiens
  siRNA target sequence for E46L (NM_013236.1,595-613).
cgctgtggcctgcagtttt

SEQ ID NO: 279568 - DNA, 19 bp, Homo sapiens
  siRNA target sequence for E46L (NM_013236.1,621-639).
cattgcctcacggaatgaa

SEQ ID NO: 279569 - DNA, 19 bp, Homo sapiens
  siRNA target sequence for E46L (NM_013236.1,625-643).
gcctcacggaatgaagatt

SEQ ID NO: 279570 - DNA, 19 bp, Homo sapiens
  siRNA target sequence for E46L (NM_013236.1,640-658).
gattcccagtctattgttt

SEQ ID NO: 279571 - DNA, 19 bp, Homo sapiens
  siRNA target sequence for E46L (NM_013236.1,718-736).
gttgcctactcttcaatga

SEQ ID NO: 279572 - DNA, 19 bp, Homo sapiens
  siRNA target sequence for E46L (NM_013236.1,749-767).
cccttaatcatgaaagaat

SEQ ID NO: 279573 - DNA, 19 bp, Homo sapiens
  siRNA target sequence for E46L (NM_013236.1,777-795).
ggaggagaacctcaatatt

SEQ ID NO: 279574 - DNA, 19 bp, Homo sapiens
  siRNA target sequence for E46L (NM_013236.1,780-798).
ggagaacctcaatattgca

SEQ ID NO: 279575 - DNA, 19 bp, Homo sapiens
  siRNA target sequence for E46L (NM_013236.1,781-799).
gagaacctcaatattgcaa

SEQ ID NO: 279576 - DNA, 19 bp, Homo sapiens
  siRNA target sequence for E46L (NM_013236.1,836-854).
cagaatggccgttcttgat

SEQ ID NO: 279577 - DNA, 19 bp, Homo sapiens
  siRNA target sequence for E46L (NM_013236.1,838-856).
gaatggccgttcttgatta

SEQ ID NO: 279578 - DNA, 19 bp, Homo sapiens
  siRNA target sequence for E46L (NM_013236.1,843-861).
gccgttcttgattattaca

SEQ ID NO: 279579 - DNA, 19 bp, Homo sapiens
  siRNA target sequence for E46L (NM_013236.1,845-863).
cgttcttgattattacaga

SEQ ID NO: 279580 - DNA, 19 bp, Homo sapiens
  siRNA target sequence for E46L (NM_013236.1,873-891).
gaaaagcccggaattggta

SEQ ID NO: 279581 - DNA, 19 bp, Homo sapiens
  siRNA target sequence for E46L (NM_013236.1,932-950).
cactgttagaccttatgat

SEQ ID NO: 279582 - DNA, 19 bp, Homo sapiens
  siRNA target sequence for E46L (NM_013236.1,942-960).
ccttatgatagccaagata

SEQ ID NO: 279583 - DNA, 19 bp, Homo sapiens
  siRNA target sequence for E46L (NM_013236.1,974-992).
cactcaccaaggatgacat

SEQ ID NO: 279584 - DNA, 19 bp, Homo sapiens
  siRNA target sequence for E46L (NM_013236.1,984-1002).
ggatgacatccctgtgttt

SEQ ID NO: 279585 - DNA, 19 bp, Homo sapiens
  siRNA target sequence for E46L (NM_013236.1,1005-1023).
gcggcatgctgagttgatt

SEQ ID NO: 279586 - DNA, 19 bp, Homo sapiens
  siRNA target sequence for E46L (NM_013236.1,1122-1140).
cgtcctgtgcgaaatgact

SEQ ID NO: 279587 - DNA, 19 bp, Homo sapiens
  siRNA target sequence for E46L (NM_013236.1,1131-1149).
cgaaatgactgtgaatact

SEQ ID NO: 279588 - DNA, 19 bp, Homo sapiens
  siRNA target sequence for E46L (NM_013236.1,1296-1314).
ggccaatgggtttaagtct

SEQ ID NO: 279589 - DNA, 19 bp, Homo sapiens
  siRNA target sequence for E46L (NM_013236.1,1320-1338).
cattcgtctgattggaaat

SEQ ID NO: 279590 - DNA, 19 bp, Homo sapiens
  siRNA target sequence for E46L (NM_013236.1,1324-1342).
cgtctgattggaaatctgt

SEQ ID NO: 279591 - DNA, 19 bp, Homo sapiens
  siRNA target sequence for E46L (NM_013236.1,1333-1351).
ggaaatctgtgttacaaga

SEQ ID NO: 279592 - DNA, 19 bp, Homo sapiens
  siRNA target sequence for E46L (NM_013236.1,1438-1456).
ctgacccagtgggtgatat

SEQ ID NO: 279593 - DNA, 19 bp, Homo sapiens
  siRNA target sequence for E46L (NM_013236.1,1440-1458).
gacccagtgggtgatatat

SEQ ID NO: 279594 - DNA, 19 bp, Homo sapiens
  siRNA target sequence for E46L (NM_013236.1,1466-1484).
gaaaccttaccgaagacaa

SEQ ID NO: 279595 - DNA, 19 bp, Homo sapiens
  siRNA target sequence for E46L (NM_013236.1,1534-1552).
gatgcatccctacttaaaa

SEQ ID NO: 279596 - DNA, 19 bp, Homo sapiens
  siRNA target sequence for E46L (NM_013236.1,1587-1605).
gctgatcctgaaatctact

SEQ ID NO: 279597 - DNA, 19 bp, Homo sapiens
  siRNA target sequence for E46L (NM_013236.1,1590-1608).
gatcctgaaatctactaga

SEQ ID NO: 279598 - DNA, 19 bp, Homo sapiens
  siRNA target sequence for EAT2 (NM_053282.1,168-186).
gtggatggcaactttcttt

SEQ ID NO: 279599 - DNA, 19 bp, Homo sapiens
  siRNA target sequence for EAT2 (NM_053282.1,224-242).
ctgtgtctcgtttaaaaat

SEQ ID NO: 279600 - DNA, 19 bp, Homo sapiens
  siRNA target sequence for EAT2 (NM_053282.1,226-244).
gtgtctcgtttaaaaatat

SEQ ID NO: 279601 - DNA, 19 bp, Homo sapiens
  siRNA target sequence for EAT2 (NM_053282.1,257-275).
ccgaatcttcagagagaaa

SEQ ID NO: 279602 - DNA, 19 bp, Homo sapiens
  siRNA target sequence for EAT2 (NM_053282.1,279-297).
gggtattacaggatacaga

SEQ ID NO: 279603 - DNA, 19 bp, Homo sapiens
  siRNA target sequence for EAT2 (NM_053282.1,328-346).
caagcctaaaggaactgat

SEQ ID NO: 279604 - DNA, 19 bp, Homo sapiens
  siRNA target sequence for EAT2 (NM_053282.1,373-391).
ggatggtggttcacctttt

SEQ ID NO: 279605 - DNA, 19 bp, Homo sapiens
  siRNA target sequence for EAT2 (NM_053282.1,374-392).
gatggtggttcacctttta

SEQ ID NO: 279606 - DNA, 19 bp, Homo sapiens
  siRNA target sequence for EAT2 (NM_053282.1,424-442).
gatggagaggattgaaatt

SEQ ID NO: 279607 - DNA, 19 bp, Homo sapiens
  siRNA target sequence for EAT2 (NM_053282.1,444-462).
gagttggaaacatttgtga

SEQ ID NO: 279608 - DNA, 19 bp, Homo sapiens
  siRNA target sequence for EAT2 (NM_053282.1,472-490).
gcgattatgtggatgtctt

SEQ ID NO: 279609 - DNA, 19 bp, Homo sapiens
  siRNA target sequence for EML4 (NM_019063.2,251-269).
cggcagtctcgatgatagt

SEQ ID NO: 279610 - DNA, 19 bp, Homo sapiens
  siRNA target sequence for EML4 (NM_019063.2,252-270).
ggcagtctcgatgatagta

SEQ ID NO: 279611 - DNA, 19 bp, Homo sapiens
  siRNA target sequence for EML4 (NM_019063.2,253-271).
gcagtctcgatgatagtat

SEQ ID NO: 279612 - DNA, 19 bp, Homo sapiens
  siRNA target sequence for EML4 (NM_019063.2,254-272).
cagtctcgatgatagtatt

SEQ ID NO: 279613 - DNA, 19 bp, Homo sapiens
  siRNA target sequence for EML4 (NM_019063.2,383-401).
gaggcgtcttgcaatctct

SEQ ID NO: 279614 - DNA, 19 bp, Homo sapiens
  siRNA target sequence for EML4 (NM_019063.2,471-489).
cccatgtcctgtataacca

SEQ ID NO: 279615 - DNA, 19 bp, Homo sapiens
  siRNA target sequence for EML4 (NM_019063.2,472-490).
ccatgtcctgtataaccaa

SEQ ID NO: 279616 - DNA, 19 bp, Homo sapiens
  siRNA target sequence for EML4 (NM_019063.2,473-491).
catgtcctgtataaccaat

SEQ ID NO: 279617 - DNA, 19 bp, Homo sapiens
  siRNA target sequence for EML4 (NM_019063.2,568-586).
ctaaaagtggtacagaaaa

SEQ ID NO: 279618 - DNA, 19 bp, Homo sapiens
  siRNA target sequence for EML4 (NM_019063.2,717-735).
ccagaaagcaagaatgcta

SEQ ID NO: 279619 - DNA, 19 bp, Homo sapiens
  siRNA target sequence for EML4 (NM_019063.2,733-751).
ctactcccaccaaaagcat

SEQ ID NO: 279620 - DNA, 19 bp, Homo sapiens
  siRNA target sequence for EML4 (NM_019063.2,740-758).
caccaaaagcataaaacga

SEQ ID NO: 279621 - DNA, 19 bp, Homo sapiens
  siRNA target sequence for EML4 (NM_019063.2,757-775).
gaccatcaccagctgaaaa

SEQ ID NO: 279622 - DNA, 19 bp, Homo sapiens
  siRNA target sequence for EML4 (NM_019063.2,765-783).
ccagctgaaaagtcacata

SEQ ID NO: 279623 - DNA, 19 bp, Homo sapiens
  siRNA target sequence for EML4 (NM_019063.2,768-786).
gctgaaaagtcacataatt

SEQ ID NO: 279624 - DNA, 19 bp, Homo sapiens
  siRNA target sequence for EML4 (NM_019063.2,799-817).
cagatgatagccgtaataa

SEQ ID NO: 279625 - DNA, 19 bp, Homo sapiens
  siRNA target sequence for EML4 (NM_019063.2,801-819).
gatgatagccgtaataaat

SEQ ID NO: 279626 - DNA, 19 bp, Homo sapiens
  siRNA target sequence for EML4 (NM_019063.2,804-822).
gatagccgtaataaattgt

SEQ ID NO: 279627 - DNA, 19 bp, Homo sapiens
  siRNA target sequence for EML4 (NM_019063.2,811-829).
gtaataaattgtcgaaaat

SEQ ID NO: 279628 - DNA, 19 bp, Homo sapiens
  siRNA target sequence for EML4 (NM_019063.2,821-839).
gtcgaaaataccttcaaca

SEQ ID NO: 279629 - DNA, 19 bp, Homo sapiens
  siRNA target sequence for EML4 (NM_019063.2,868-886).
ctgcagacaagcataaaga

SEQ ID NO: 279630 - DNA, 19 bp, Homo sapiens
  siRNA target sequence for EML4 (NM_019063.2,930-948).
cgcggtcggccaattacca

SEQ ID NO: 279631 - DNA, 19 bp, Homo sapiens
  siRNA target sequence for EML4 (NM_019063.2,931-949).
gcggtcggccaattaccat

SEQ ID NO: 279632 - DNA, 19 bp, Homo sapiens
  siRNA target sequence for EML4 (NM_019063.2,936-954).
cggccaattaccatgttca

SEQ ID NO: 279633 - DNA, 19 bp, Homo sapiens
  siRNA target sequence for EML4 (NM_019063.2,937-955).
ggccaattaccatgttcat

SEQ ID NO: 279634 - DNA, 19 bp, Homo sapiens
  siRNA target sequence for EML4 (NM_019063.2,938-956).
gccaattaccatgttcatt

SEQ ID NO: 279635 - DNA, 19 bp, Homo sapiens
  siRNA target sequence for EML4 (NM_019063.2,958-976).
cttccgatgttgacaacta

SEQ ID NO: 279636 - DNA, 19 bp, Homo sapiens
  siRNA target sequence for EML4 (NM_019063.2,961-979).
ccgatgttgacaactatga

SEQ ID NO: 279637 - DNA, 19 bp, Homo sapiens
  siRNA target sequence for EML4 (NM_019063.2,962-980).
cgatgttgacaactatgat

SEQ ID NO: 279638 - DNA, 19 bp, Homo sapiens
  siRNA target sequence for EML4 (NM_019063.2,1017-1035).
ctggagtgggcatatggtt

SEQ ID NO: 279639 - DNA, 19 bp, Homo sapiens
  siRNA target sequence for EML4 (NM_019063.2,1019-1037).
ggagtgggcatatggttat

SEQ ID NO: 279640 - DNA, 19 bp, Homo sapiens
  siRNA target sequence for EML4 (NM_019063.2,1022-1040).
gtgggcatatggttatcga

SEQ ID NO: 279641 - DNA, 19 bp, Homo sapiens
  siRNA target sequence for EML4 (NM_019063.2,1046-1064).
ggactgtagagctaatgtt

SEQ ID NO: 279642 - DNA, 19 bp, Homo sapiens
  siRNA target sequence for EML4 (NM_019063.2,1105-1123).
cagtagtagtactatttaa

SEQ ID NO: 279643 - DNA, 19 bp, Homo sapiens
  siRNA target sequence for EML4 (NM_019063.2,1107-1125).
gtagtagtactatttaatt

SEQ ID NO: 279644 - DNA, 19 bp, Homo sapiens
  siRNA target sequence for EML4 (NM_019063.2,1182-1200).
gctatacatcctgacaaaa

SEQ ID NO: 279645 - DNA, 19 bp, Homo sapiens
  siRNA target sequence for EML4 (NM_019063.2,1205-1223).
gattgcaactggacagata

SEQ ID NO: 279646 - DNA, 19 bp, Homo sapiens
  siRNA target sequence for EML4 (NM_019063.2,1265-1283).
cagagtgtgggattctgtt

SEQ ID NO: 279647 - DNA, 19 bp, Homo sapiens
  siRNA target sequence for EML4 (NM_019063.2,1292-1310).
cacactgcagattattgga

SEQ ID NO: 279648 - DNA, 19 bp, Homo sapiens
  siRNA target sequence for EML4 (NM_019063.2,1330-1348).
gagtaggatgcctggattt

SEQ ID NO: 279649 - DNA, 19 bp, Homo sapiens
  siRNA target sequence for EML4 (NM_019063.2,1356-1374).
gcagattcaggtgttcatt

SEQ ID NO: 279650 - DNA, 19 bp, Homo sapiens
  siRNA target sequence for EML4 (NM_019063.2,1357-1375).
cagattcaggtgttcattt

SEQ ID NO: 279651 - DNA, 19 bp, Homo sapiens
  siRNA target sequence for EML4 (NM_019063.2,1488-1506).
cacccaacagatgcaaata

SEQ ID NO: 279652 - DNA, 19 bp, Homo sapiens
  siRNA target sequence for EML4 (NM_019063.2,1491-1509).
ccaacagatgcaaatacca

SEQ ID NO: 279653 - DNA, 19 bp, Homo sapiens
  siRNA target sequence for EML4 (NM_019063.2,1495-1513).
cagatgcaaataccataat

SEQ ID NO: 279654 - DNA, 19 bp, Homo sapiens
  siRNA target sequence for EML4 (NM_019063.2,1497-1515).
gatgcaaataccataatta

SEQ ID NO: 279655 - DNA, 19 bp, Homo sapiens
  siRNA target sequence for EML4 (NM_019063.2,1519-1537).
gcggtaaatctcatatttt

SEQ ID NO: 279656 - DNA, 19 bp, Homo sapiens
  siRNA target sequence for EML4 (NM_019063.2,1521-1539).
ggtaaatctcatattttct

SEQ ID NO: 279657 - DNA, 19 bp, Homo sapiens
  siRNA target sequence for EML4 (NM_019063.2,1546-1564).
cctggagcggcaattcact

SEQ ID NO: 279658 - DNA, 19 bp, Homo sapiens
  siRNA target sequence for EML4 (NM_019063.2,1550-1568).
gagcggcaattcactaaca

SEQ ID NO: 279659 - DNA, 19 bp, Homo sapiens
  siRNA target sequence for EML4 (NM_019063.2,1553-1571).
cggcaattcactaacaaga

SEQ ID NO: 279660 - DNA, 19 bp, Homo sapiens
  siRNA target sequence for EML4 (NM_019063.2,1554-1572).
ggcaattcactaacaagaa

SEQ ID NO: 279661 - DNA, 19 bp, Homo sapiens
  siRNA target sequence for EML4 (NM_019063.2,1555-1573).
gcaattcactaacaagaaa

SEQ ID NO: 279662 - DNA, 19 bp, Homo sapiens
  siRNA target sequence for EML4 (NM_019063.2,1662-1680).
ggtggagtcatgcttatat

SEQ ID NO: 279663 - DNA, 19 bp, Homo sapiens
  siRNA target sequence for EML4 (NM_019063.2,1665-1683).
ggagtcatgcttatatgga

SEQ ID NO: 279664 - DNA, 19 bp, Homo sapiens
  siRNA target sequence for EML4 (NM_019063.2,1717-1735).
gacctaaaggtgtatatca

SEQ ID NO: 279665 - DNA, 19 bp, Homo sapiens
  siRNA target sequence for EML4 (NM_019063.2,1719-1737).
cctaaaggtgtatatcaaa

SEQ ID NO: 279666 - DNA, 19 bp, Homo sapiens
  siRNA target sequence for EML4 (NM_019063.2,1766-1784).
cagtgtgttcacactttgt

SEQ ID NO: 279667 - DNA, 19 bp, Homo sapiens
  siRNA target sequence for EML4 (NM_019063.2,1884-1902).
gatcagtatggcacaatca

SEQ ID NO: 279668 - DNA, 19 bp, Homo sapiens
  siRNA target sequence for EML4 (NM_019063.2,1922-1940).
ggcagatcaatttttagta

SEQ ID NO: 279669 - DNA, 19 bp, Homo sapiens
  siRNA target sequence for EML4 (NM_019063.2,2082-2100).
gtgtgcctgtggaactcaa

SEQ ID NO: 279670 - DNA, 19 bp, Homo sapiens
  siRNA target sequence for EML4 (NM_019063.2,2143-2161).
gacactgtgcagattttca

SEQ ID NO: 279671 - DNA, 19 bp, Homo sapiens
  siRNA target sequence for EML4 (NM_019063.2,2197-2215).
caggcaggtggtttgttct

SEQ ID NO: 279672 - DNA, 19 bp, Homo sapiens
  siRNA target sequence for EML4 (NM_019063.2,2227-2245).
ccagagatctagtttctat

SEQ ID NO: 279673 - DNA, 19 bp, Homo sapiens
  siRNA target sequence for EML4 (NM_019063.2,2272-2290).
ctgtgatgcgctactcaat

SEQ ID NO: 279674 - DNA, 19 bp, Homo sapiens
  siRNA target sequence for EML4 (NM_019063.2,2276-2294).
gatgcgctactcaatagat

SEQ ID NO: 279675 - DNA, 19 bp, Homo sapiens
  siRNA target sequence for EML4 (NM_019063.2,2308-2326).
ctgtaggatctcatgacaa

SEQ ID NO: 279676 - DNA, 19 bp, Homo sapiens
  siRNA target sequence for EML4 (NM_019063.2,2337-2355).
ctctatgtagtctctgaaa

SEQ ID NO: 279677 - DNA, 19 bp, Homo sapiens
  siRNA target sequence for EML4 (NM_019063.2,2391-2409).
ggacattccagctacatca

SEQ ID NO: 279678 - DNA, 19 bp, Homo sapiens
  siRNA target sequence for EML4 (NM_019063.2,2422-2440).
ggtccccagacaacaagta

SEQ ID NO: 279679 - DNA, 19 bp, Homo sapiens
  siRNA target sequence for EML4 (NM_019063.2,2423-2441).
gtccccagacaacaagtat

SEQ ID NO: 279680 - DNA, 19 bp, Homo sapiens
  siRNA target sequence for EML4 (NM_019063.2,2425-2443).
ccccagacaacaagtatat

SEQ ID NO: 279681 - DNA, 19 bp, Homo sapiens
  siRNA target sequence for EML4 (NM_019063.2,2447-2465).
gtctaactcgggagactat

SEQ ID NO: 279682 - DNA, 19 bp, Homo sapiens
  siRNA target sequence for EML4 (NM_019063.2,2455-2473).
cgggagactatgaaatatt

SEQ ID NO: 279683 - DNA, 19 bp, Homo sapiens
  siRNA target sequence for EML4 (NM_019063.2,2460-2478).
gactatgaaatattgtact

SEQ ID NO: 279684 - DNA, 19 bp, Homo sapiens
  siRNA target sequence for EML4 (NM_019063.2,2487-2505).
ccaaatggctgcaaactaa

SEQ ID NO: 279685 - DNA, 19 bp, Homo sapiens
  siRNA target sequence for EML4 (NM_019063.2,2509-2527).
ggaatcgatcggattgtaa

SEQ ID NO: 279686 - DNA, 19 bp, Homo sapiens
  siRNA target sequence for EML4 (NM_019063.2,2518-2536).
cggattgtaaggacattga

SEQ ID NO: 279687 - DNA, 19 bp, Homo sapiens
  siRNA target sequence for EML4 (NM_019063.2,2531-2549).
cattgattggacgacatat

SEQ ID NO: 279688 - DNA, 19 bp, Homo sapiens
  siRNA target sequence for EML4 (NM_019063.2,2552-2570).
ctgtgtgctaggatttcaa

SEQ ID NO: 279689 - DNA, 19 bp, Homo sapiens
  siRNA target sequence for EML4 (NM_019063.2,2592-2610).
ggatctgatgggacagata

SEQ ID NO: 279690 - DNA, 19 bp, Homo sapiens
  siRNA target sequence for EML4 (NM_019063.2,2619-2637).
ctggtgcgatcccacaata

SEQ ID NO: 279691 - DNA, 19 bp, Homo sapiens
  siRNA target sequence for EML4 (NM_019063.2,2621-2639).
ggtgcgatcccacaataga

SEQ ID NO: 279692 - DNA, 19 bp, Homo sapiens
  siRNA target sequence for EML4 (NM_019063.2,2622-2640).
gtgcgatcccacaatagaa

SEQ ID NO: 279693 - DNA, 19 bp, Homo sapiens
  siRNA target sequence for EML4 (NM_019063.2,2649-2667).
gctgttgccgatgactttt

SEQ ID NO: 279694 - DNA, 19 bp, Homo sapiens
  siRNA target sequence for EML4 (NM_019063.2,2652-2670).
gttgccgatgacttttgta

SEQ ID NO: 279695 - DNA, 19 bp, Homo sapiens
  siRNA target sequence for EML4 (NM_019063.2,2656-2674).
ccgatgacttttgtaaagt

SEQ ID NO: 279696 - DNA, 19 bp, Homo sapiens
  siRNA target sequence for EML4 (NM_019063.2,2709-2727).
gctcccagtcacaagtaca

SEQ ID NO: 279697 - DNA, 19 bp, Homo sapiens
  siRNA target sequence for EML4 (NM_019063.2,2772-2790).
gacagtcacctgatatcaa

SEQ ID NO: 279698 - DNA, 19 bp, Homo sapiens
  siRNA target sequence for EML4 (NM_019063.2,2774-2792).
cagtcacctgatatcaact

SEQ ID NO: 279699 - DNA, 19 bp, Homo sapiens
  siRNA target sequence for EML4 (NM_019063.2,2783-2801).
gatatcaactggtggaaaa

SEQ ID NO: 279700 - DNA, 19 bp, Homo sapiens
  siRNA target sequence for EML4 (NM_019063.2,2856-2874).
gagactgtagcggatacta

SEQ ID NO: 279701 - DNA, 19 bp, Homo sapiens
  siRNA target sequence for EML4 (NM_019063.2,2858-2876).
gactgtagcggatactact

SEQ ID NO: 279702 - DNA, 19 bp, Homo sapiens
  siRNA target sequence for EML4 (NM_019063.2,2862-2880).
gtagcggatactactctaa

SEQ ID NO: 279703 - DNA, 19 bp, Homo sapiens
  siRNA target sequence for EML4 (NM_019063.2,2866-2884).
cggatactactctaaccaa

SEQ ID NO: 279704 - DNA, 19 bp, Homo sapiens
  siRNA target sequence for EML4 (NM_019063.2,2891-2909).
cgtctcttccactgaaagt

SEQ ID NO: 279705 - DNA, 19 bp, Homo sapiens
  siRNA target sequence for EML4 (NM_019063.2,2970-2988).
gaggaaagtagaataagca

SEQ ID NO: 279706 - DNA, 19 bp, Homo sapiens
  siRNA target sequence for EML4 (NM_019063.2,3080-3098).
ccttggtgagcctctttat

SEQ ID NO: 279707 - DNA, 19 bp, Homo sapiens
  siRNA target sequence for EML4 (NM_019063.2,3085-3103).
gtgagcctctttatgaaga

SEQ ID NO: 279708 - DNA, 19 bp, Homo sapiens
  siRNA target sequence for EML4 (NM_019063.2,3102-3120).
gagccatgcaacgagataa

SEQ ID NO: 279709 - DNA, 19 bp, Homo sapiens
  siRNA target sequence for EML4 (NM_019063.2,3105-3123).
ccatgcaacgagataagca

SEQ ID NO: 279710 - DNA, 19 bp, Homo sapiens
  siRNA target sequence for EML4 (NM_019063.2,3106-3124).
catgcaacgagataagcaa

SEQ ID NO: 279711 - DNA, 19 bp, Homo sapiens
  siRNA target sequence for EPB41L4A (NM_022140.2,290-308).
gctgttccggaagaatttt

SEQ ID NO: 279712 - DNA, 19 bp, Homo sapiens
  siRNA target sequence for EPB41L4A (NM_022140.2,302-320).
gaattttactgcgaagttt

SEQ ID NO: 279713 - DNA, 19 bp, Homo sapiens
  siRNA target sequence for EPB41L4A (NM_022140.2,326-344).
ctggatgaatccaagttaa

SEQ ID NO: 279714 - DNA, 19 bp, Homo sapiens
  siRNA target sequence for EPB41L4A (NM_022140.2,397-415).
ccttgaccacgtattccat

SEQ ID NO: 279715 - DNA, 19 bp, Homo sapiens
  siRNA target sequence for EPB41L4A (NM_022140.2,526-544).
caacactggacctccatat

SEQ ID NO: 279716 - DNA, 19 bp, Homo sapiens
  siRNA target sequence for EPB41L4A (NM_022140.2,529-547).
cactggacctccatatact

SEQ ID NO: 279717 - DNA, 19 bp, Homo sapiens
  siRNA target sequence for EPB41L4A (NM_022140.2,531-549).
ctggacctccatatacttt

SEQ ID NO: 279718 - DNA, 19 bp, Homo sapiens
  siRNA target sequence for EPB41L4A (NM_022140.2,534-552).
gacctccatatactttgta

SEQ ID NO: 279719 - DNA, 19 bp, Homo sapiens
  siRNA target sequence for EPB41L4A (NM_022140.2,536-554).
cctccatatactttgtatt

SEQ ID NO: 279720 - DNA, 19 bp, Homo sapiens
  siRNA target sequence for EPB41L4A (NM_022140.2,537-555).
ctccatatactttgtattt

SEQ ID NO: 279721 - DNA, 19 bp, Homo sapiens
  siRNA target sequence for EPB41L4A (NM_022140.2,573-591).
ctgaagatccatgtaaact

SEQ ID NO: 279722 - DNA, 19 bp, Homo sapiens
  siRNA target sequence for EPB41L4A (NM_022140.2,575-593).
gaagatccatgtaaactta

SEQ ID NO: 279723 - DNA, 19 bp, Homo sapiens
  siRNA target sequence for EPB41L4A (NM_022140.2,706-724).
gtcggagcttggagattat

SEQ ID NO: 279724 - DNA, 19 bp, Homo sapiens
  siRNA target sequence for EPB41L4A (NM_022140.2,741-759).
ctgcaggatatgtatctga

SEQ ID NO: 279725 - DNA, 19 bp, Homo sapiens
  siRNA target sequence for EPB41L4A (NM_022140.2,909-927).
ccgtctatggagaaaacaa

SEQ ID NO: 279726 - DNA, 19 bp, Homo sapiens
  siRNA target sequence for EPB41L4A (NM_022140.2,930-948).
ctgagtatttcttaggatt

SEQ ID NO: 279727 - DNA, 19 bp, Homo sapiens
  siRNA target sequence for EPB41L4A (NM_022140.2,951-969).
ctccggttggtgttgttgt

SEQ ID NO: 279728 - DNA, 19 bp, Homo sapiens
  siRNA target sequence for EPB41L4A (NM_022140.2,1006-1024).
gcctcggattacaaaggtt

SEQ ID NO: 279729 - DNA, 19 bp, Homo sapiens
  siRNA target sequence for EPB41L4A (NM_022140.2,1055-1073).
gtactgggaaaagattgta

SEQ ID NO: 279730 - DNA, 19 bp, Homo sapiens
  siRNA target sequence for EPB41L4A (NM_022140.2,1135-1153).
cagtgtggaacatcataca

SEQ ID NO: 279731 - DNA, 19 bp, Homo sapiens
  siRNA target sequence for EPB41L4A (NM_022140.2,1311-1329).
gaagtcgaagcaagactta

SEQ ID NO: 279732 - DNA, 19 bp, Homo sapiens
  siRNA target sequence for EPB41L4A (NM_022140.2,1350-1368).
cacagccagctgaatcaaa

SEQ ID NO: 279733 - DNA, 19 bp, Homo sapiens
  siRNA target sequence for EPB41L4A (NM_022140.2,1442-1460).
ccagtaaaaagctttaaga

SEQ ID NO: 279734 - DNA, 19 bp, Homo sapiens
  siRNA target sequence for EPB41L4A (NM_022140.2,1484-1502).
gatacccaaagaagcaaat

SEQ ID NO: 279735 - DNA, 19 bp, Homo sapiens
  siRNA target sequence for EPB41L4A (NM_022140.2,1534-1552).
gagtggactctacaattct

SEQ ID NO: 279736 - DNA, 19 bp, Homo sapiens
  siRNA target sequence for EPB41L4A (NM_022140.2,1563-1581).
gcactaagtcgccaaagtt

SEQ ID NO: 279737 - DNA, 19 bp, Homo sapiens
  siRNA target sequence for EPB41L4A (NM_022140.2,1606-1624).
ctcctgtggaagtgacaat

SEQ ID NO: 279738 - DNA, 19 bp, Homo sapiens
  siRNA target sequence for EPB41L4A (NM_022140.2,1609-1627).
ctgtggaagtgacaatgat

SEQ ID NO: 279739 - DNA, 19 bp, Homo sapiens
  siRNA target sequence for EPB41L4A (NM_022140.2,1657-1675).
ccataacagtggtgaagat

SEQ ID NO: 279740 - DNA, 19 bp, Homo sapiens
  siRNA target sequence for EPB41L4A (NM_022140.2,1658-1676).
cataacagtggtgaagatt

SEQ ID NO: 279741 - DNA, 19 bp, Homo sapiens
  siRNA target sequence for EPB41L4A (NM_022140.2,1668-1686).
gtgaagattcagatcttaa

SEQ ID NO: 279742 - DNA, 19 bp, Homo sapiens
  siRNA target sequence for EPB41L4A (NM_022140.2,1725-1743).
gtggtagtgaatcagaaaa

SEQ ID NO: 279743 - DNA, 19 bp, Homo sapiens
  siRNA target sequence for EPB41L4A (NM_022140.2,1776-1794).
gaatacggcaggagaatga

SEQ ID NO: 279744 - DNA, 19 bp, Homo sapiens
  siRNA target sequence for EPB41L4A (NM_022140.2,1782-1800).
ggcaggagaatgatatggt

SEQ ID NO: 279745 - DNA, 19 bp, Homo sapiens
  siRNA target sequence for EPB41L4A (NM_022140.2,1787-1805).
gagaatgatatggttgatt

SEQ ID NO: 279746 - DNA, 19 bp, Homo sapiens
  siRNA target sequence for EPB41L4A (NM_022140.2,1814-1832).
cagtgggaagctgtattaa

SEQ ID NO: 279747 - DNA, 19 bp, Homo sapiens
  siRNA target sequence for EPB41L4A (NM_022140.2,1896-1914).
cgagaagccccgatatcca

SEQ ID NO: 279748 - DNA, 19 bp, Homo sapiens
  siRNA target sequence for EPB41L4A (NM_022140.2,1897-1915).
gagaagccccgatatccaa

SEQ ID NO: 279749 - DNA, 19 bp, Homo sapiens
  siRNA target sequence for EPB41L4A (NM_022140.2,1905-1923).
ccgatatccaagcaaaaga

SEQ ID NO: 279750 - DNA, 19 bp, Homo sapiens
  siRNA target sequence for EPB41L4A (NM_022140.2,1965-1983).
ccggattgtccgaagaaca

SEQ ID NO: 279751 - DNA, 19 bp, Homo sapiens
  siRNA target sequence for ERH (NM_004450.1,206-224).
caacagtccctctatcaca

SEQ ID NO: 279752 - DNA, 19 bp, Homo sapiens
  siRNA target sequence for ERH (NM_004450.1,209-227).
cagtccctctatcacatat

SEQ ID NO: 279753 - DNA, 19 bp, Homo sapiens
  siRNA target sequence for ERH (NM_004450.1,211-229).
gtccctctatcacatatga

SEQ ID NO: 279754 - DNA, 19 bp, Homo sapiens
  siRNA target sequence for ERH (NM_004450.1,213-231).
ccctctatcacatatgaca

SEQ ID NO: 279755 - DNA, 19 bp, Homo sapiens
  siRNA target sequence for ERH (NM_004450.1,289-307).
gagctgatacccagacata

SEQ ID NO: 279756 - DNA, 19 bp, Homo sapiens
  siRNA target sequence for ERH (NM_004450.1,300-318).
cagacataccagccttata

SEQ ID NO: 279757 - DNA, 19 bp, Homo sapiens
  siRNA target sequence for ET (NM_024311.2,262-280).
cggaatctaaaaagctttt

SEQ ID NO: 279758 - DNA, 19 bp, Homo sapiens
  siRNA target sequence for ET (NM_024311.2,340-358).
gaaatgtggcgcaaactgt

SEQ ID NO: 279759 - DNA, 19 bp, Homo sapiens
  siRNA target sequence for ET (NM_024311.2,357-375).
gtcatcaggagcttaaata

SEQ ID NO: 279760 - DNA, 19 bp, Homo sapiens
  siRNA target sequence for ET (NM_024311.2,387-405).
cacggcagtggatatacca

SEQ ID NO: 279761 - DNA, 19 bp, Homo sapiens
  siRNA target sequence for ET (NM_024311.2,403-421).
ccagcatggctattatcta

SEQ ID NO: 279762 - DNA, 19 bp, Homo sapiens
  siRNA target sequence for ET (NM_024311.2,404-422).
cagcatggctattatctat

SEQ ID NO: 279763 - DNA, 19 bp, Homo sapiens
  siRNA target sequence for ET (NM_024311.2,455-473).
gtcagtggttgccattgta

SEQ ID NO: 279764 - DNA, 19 bp, Homo sapiens
  siRNA target sequence for ET (NM_024311.2,474-492).
ggacctcaactctctatgt

SEQ ID NO: 279765 - DNA, 19 bp, Homo sapiens
  siRNA target sequence for ET (NM_024311.2,475-493).
gacctcaactctctatgtt

SEQ ID NO: 279766 - DNA, 19 bp, Homo sapiens
  siRNA target sequence for ET (NM_024311.2,495-513).
gccagtggtttattttaca

SEQ ID NO: 279767 - DNA, 19 bp, Homo sapiens
  siRNA target sequence for ET (NM_024311.2,683-701).
gcagtctagcttgttcttt

SEQ ID NO: 279768 - DNA, 19 bp, Homo sapiens
  siRNA target sequence for ET (NM_024311.2,756-774).
gaccgaagaacagtgttta

SEQ ID NO: 279769 - DNA, 19 bp, Homo sapiens
  siRNA target sequence for ET (NM_024311.2,758-776).
ccgaagaacagtgtttatt

SEQ ID NO: 279770 - DNA, 19 bp, Homo sapiens
  siRNA target sequence for ET (NM_024311.2,798-816).
gtggggacagttctattct

SEQ ID NO: 279771 - DNA, 19 bp, Homo sapiens
  siRNA target sequence for ET (NM_024311.2,800-818).
ggggacagttctattcttt

SEQ ID NO: 279772 - DNA, 19 bp, Homo sapiens
  siRNA target sequence for ET (NM_024311.2,893-911).
cgagtctgcccagaacaat

SEQ ID NO: 279773 - DNA, 19 bp, Homo sapiens
  siRNA target sequence for ET (NM_024311.2,901-919).
cccagaacaatctgacaaa

SEQ ID NO: 279774 - DNA, 19 bp, Homo sapiens
  siRNA target sequence for ET (NM_024311.2,920-938).
ggcagtagatgcttttaaa

SEQ ID NO: 279775 - DNA, 19 bp, Homo sapiens
  siRNA target sequence for ET (NM_024311.2,965-983).
ggagatgctccttcttagt

SEQ ID NO: 279776 - DNA, 19 bp, Homo sapiens
  siRNA target sequence for ET (NM_024311.2,966-984).
gagatgctccttcttagta

SEQ ID NO: 279777 - DNA, 19 bp, Homo sapiens
  siRNA target sequence for ET (NM_024311.2,994-1012).
cttatacaggtctggaatt

SEQ ID NO: 279778 - DNA, 19 bp, Homo sapiens
  siRNA target sequence for ET (NM_024311.2,1000-1018).
caggtctggaattaacttt

SEQ ID NO: 279779 - DNA, 19 bp, Homo sapiens
  siRNA target sequence for ET (NM_024311.2,1002-1020).
ggtctggaattaactttct

SEQ ID NO: 279780 - DNA, 19 bp, Homo sapiens
  siRNA target sequence for ET (NM_024311.2,1042-1060).
gtattggtgctacaaataa

SEQ ID NO: 279781 - DNA, 19 bp, Homo sapiens
  siRNA target sequence for ET (NM_024311.2,1143-1161).
ggcctgctgagcaagaaca

SEQ ID NO: 279782 - DNA, 19 bp, Homo sapiens
  siRNA target sequence for ET (NM_024311.2,1154-1172).
caagaacaatcgttttggt

SEQ ID NO: 279783 - DNA, 19 bp, Homo sapiens
  siRNA target sequence for ET (NM_024311.2,1195-1213).
gcatcctggtgcacttcat

SEQ ID NO: 279784 - DNA, 19 bp, Homo sapiens
  siRNA target sequence for ET (NM_024311.2,1196-1214).
catcctggtgcacttcata

SEQ ID NO: 279785 - DNA, 19 bp, Homo sapiens
  siRNA target sequence for ET (NM_024311.2,1200-1218).
ctggtgcacttcatagctt

SEQ ID NO: 279786 - DNA, 19 bp, Homo sapiens
  siRNA target sequence for ET (NM_024311.2,1202-1220).
ggtgcacttcatagctttt

SEQ ID NO: 279787 - DNA, 19 bp, Homo sapiens
  siRNA target sequence for ET (NM_024311.2,1203-1221).
gtgcacttcatagcttttt

SEQ ID NO: 279788 - DNA, 19 bp, Homo sapiens
  siRNA target sequence for ET (NM_024311.2,1292-1310).
catcaaatccagcaaagaa

SEQ ID NO: 279789 - DNA, 19 bp, Homo sapiens
  siRNA target sequence for ET (NM_024311.2,1295-1313).
caaatccagcaaagaagtt

SEQ ID NO: 279790 - DNA, 19 bp, Homo sapiens
  siRNA target sequence for ET (NM_024311.2,1375-1393).
gtatcttgggctttctgta

SEQ ID NO: 279791 - DNA, 19 bp, Homo sapiens
  siRNA target sequence for ET (NM_024311.2,1382-1400).
gggctttctgtattctgaa

SEQ ID NO: 279792 - DNA, 19 bp, Homo sapiens
  siRNA target sequence for ET (NM_024311.2,1420-1438).
ccatcttcaagtttgttca

SEQ ID NO: 279793 - DNA, 19 bp, Homo sapiens
  siRNA target sequence for ET (NM_024311.2,1427-1445).
caagtttgttcagtctatt

SEQ ID NO: 279794 - DNA, 19 bp, Homo sapiens
  siRNA target sequence for ET (NM_024311.2,1450-1468).
cagccgtggcatttttcta

SEQ ID NO: 279795 - DNA, 19 bp, Homo sapiens
  siRNA target sequence for ET (NM_024311.2,1452-1470).
gccgtggcatttttctaca

SEQ ID NO: 279796 - DNA, 19 bp, Homo sapiens
  siRNA target sequence for ET (NM_024311.2,1556-1574).
ggaagctgccgcctttgta

SEQ ID NO: 279797 - DNA, 19 bp, Homo sapiens
  siRNA target sequence for ET (NM_024311.2,1582-1600).
gctctgactaccgaagtat

SEQ ID NO: 279798 - DNA, 19 bp, Homo sapiens
  siRNA target sequence for FAF1 (NM_007051.2,498-516).
ggcatgtactggcattgaa

SEQ ID NO: 279799 - DNA, 19 bp, Homo sapiens
  siRNA target sequence for FAF1 (NM_007051.2,499-517).
gcatgtactggcattgaaa

SEQ ID NO: 279800 - DNA, 19 bp, Homo sapiens
  siRNA target sequence for FAF1 (NM_007051.2,500-518).
catgtactggcattgaaaa

SEQ ID NO: 279801 - DNA, 19 bp, Homo sapiens
  siRNA target sequence for FAF1 (NM_007051.2,503-521).
gtactggcattgaaaacat

SEQ ID NO: 279802 - DNA, 19 bp, Homo sapiens
  siRNA target sequence for FAF1 (NM_007051.2,519-537).
cattgacgaagctattaca

SEQ ID NO: 279803 - DNA, 19 bp, Homo sapiens
  siRNA target sequence for FAF1 (NM_007051.2,525-543).
cgaagctattacattgctt

SEQ ID NO: 279804 - DNA, 19 bp, Homo sapiens
  siRNA target sequence for FAF1 (NM_007051.2,601-619).
ggcattctacaaagtgaat

SEQ ID NO: 279805 - DNA, 19 bp, Homo sapiens
  siRNA target sequence for FAF1 (NM_007051.2,698-716).
cagcgtttcgacctgtaat

SEQ ID NO: 279806 - DNA, 19 bp, Homo sapiens
  siRNA target sequence for FAF1 (NM_007051.2,719-737).
catccaggcagattgtaga

SEQ ID NO: 279807 - DNA, 19 bp, Homo sapiens
  siRNA target sequence for FAF1 (NM_007051.2,812-830).
gtactgttggagagattaa

SEQ ID NO: 279808 - DNA, 19 bp, Homo sapiens
  siRNA target sequence for FAF1 (NM_007051.2,821-839).
gagagattaaacagattct

SEQ ID NO: 279809 - DNA, 19 bp, Homo sapiens
  siRNA target sequence for FAF1 (NM_007051.2,907-925).
gacagtacggtcctaaaat

SEQ ID NO: 279810 - DNA, 19 bp, Homo sapiens
  siRNA target sequence for FAF1 (NM_007051.2,926-944).
ctctacacttgccaaaaaa

SEQ ID NO: 279811 - DNA, 19 bp, Homo sapiens
  siRNA target sequence for FAF1 (NM_007051.2,928-946).
ctacacttgccaaaaaaca

SEQ ID NO: 279812 - DNA, 19 bp, Homo sapiens
  siRNA target sequence for FAF1 (NM_007051.2,937-955).
ccaaaaaacaacagtcttt

SEQ ID NO: 279813 - DNA, 19 bp, Homo sapiens
  siRNA target sequence for FAF1 (NM_007051.2,1007-1025).
ccctgcaggagtcattaaa

SEQ ID NO: 279814 - DNA, 19 bp, Homo sapiens
  siRNA target sequence for FAF1 (NM_007051.2,1008-1026).
cctgcaggagtcattaaat

SEQ ID NO: 279815 - DNA, 19 bp, Homo sapiens
  siRNA target sequence for FAF1 (NM_007051.2,1011-1029).
gcaggagtcattaaatcaa

SEQ ID NO: 279816 - DNA, 19 bp, Homo sapiens
  siRNA target sequence for FAF1 (NM_007051.2,1015-1033).
gagtcattaaatcaaaact

SEQ ID NO: 279817 - DNA, 19 bp, Homo sapiens
  siRNA target sequence for FAF1 (NM_007051.2,1123-1141).
gtgtatgaccttacaagta

SEQ ID NO: 279818 - DNA, 19 bp, Homo sapiens
  siRNA target sequence for FAF1 (NM_007051.2,1181-1199).
ctgctacagacgactcaat

SEQ ID NO: 279819 - DNA, 19 bp, Homo sapiens
  siRNA target sequence for FAF1 (NM_007051.2,1183-1201).
gctacagacgactcaatgt

SEQ ID NO: 279820 - DNA, 19 bp, Homo sapiens
  siRNA target sequence for FAF1 (NM_007051.2,1620-1638).
gttctgctcacaaatgctt

SEQ ID NO: 279821 - DNA, 19 bp, Homo sapiens
  siRNA target sequence for FAF1 (NM_007051.2,1685-1703).
gggcttgggatctgacaaa

SEQ ID NO: 279822 - DNA, 19 bp, Homo sapiens
  siRNA target sequence for FAF1 (NM_007051.2,1754-1772).
gtgttgtggcacaaaccat

SEQ ID NO: 279823 - DNA, 19 bp, Homo sapiens
  siRNA target sequence for FAF1 (NM_007051.2,1765-1783).
caaaccattcggactcaaa

SEQ ID NO: 279824 - DNA, 19 bp, Homo sapiens
  siRNA target sequence for FAF1 (NM_007051.2,1778-1796).
ctcaaaaaacggatcagtt

SEQ ID NO: 279825 - DNA, 19 bp, Homo sapiens
  siRNA target sequence for FAF1 (NM_007051.2,1818-1836).
gggaaagcgatcatctaat

SEQ ID NO: 279826 - DNA, 19 bp, Homo sapiens
  siRNA target sequence for FAF1 (NM_007051.2,1820-1838).
gaaagcgatcatctaatga

SEQ ID NO: 279827 - DNA, 19 bp, Homo sapiens
  siRNA target sequence for FAF1 (NM_007051.2,1849-1867).
gtgatacaagggaacacaa

SEQ ID NO: 279828 - DNA, 19 bp, Homo sapiens
  siRNA target sequence for FAF1 (NM_007051.2,1865-1883).
caacagtagatgagttaat

SEQ ID NO: 279829 - DNA, 19 bp, Homo sapiens
  siRNA target sequence for FAF1 (NM_007051.2,1868-1886).
cagtagatgagttaatgat

SEQ ID NO: 279830 - DNA, 19 bp, Homo sapiens
  siRNA target sequence for FAF1 (NM_007051.2,1992-2010).
ggcctatcgcctttcactt

SEQ ID NO: 279831 - DNA, 19 bp, Homo sapiens
  siRNA target sequence for FAF1 (NM_007051.2,2235-2253).
caagctccagattgtcttt

SEQ ID NO: 279832 - DNA, 19 bp, Homo sapiens
  siRNA target sequence for FAF1 (NM_007051.2,2263-2281).
gcttccaaaggatttccat

SEQ ID NO: 279833 - DNA, 19 bp, Homo sapiens
  siRNA target sequence for FAF1 (NM_007051.2,2273-2291).
gatttccatgggatgagta

SEQ ID NO: 279834 - DNA, 19 bp, Homo sapiens
  siRNA target sequence for FAF1 (NM_007051.2,2278-2296).
ccatgggatgagtacaagt

SEQ ID NO: 279835 - DNA, 19 bp, Homo sapiens
  siRNA target sequence for FAF1 (NM_007051.2,2279-2297).
catgggatgagtacaagtt

SEQ ID NO: 279836 - DNA, 19 bp, Homo sapiens
  siRNA target sequence for FAF1 (NM_007051.2,2284-2302).
gatgagtacaagttactga

SEQ ID NO: 279837 - DNA, 19 bp, Homo sapiens
  siRNA target sequence for FAF1 (NM_007051.2,2312-2330).
ctaggagagacgtaactca

SEQ ID NO: 279838 - DNA, 19 bp, Homo sapiens
  siRNA target sequence for FAF1 (NM_007051.2,2327-2345).
ctcaactggacccaaataa

SEQ ID NO: 279839 - DNA, 19 bp, Homo sapiens
  siRNA target sequence for FAF1 (NM_007051.2,2332-2350).
ctggacccaaataaatcat

SEQ ID NO: 279840 - DNA, 19 bp, Homo sapiens
  siRNA target sequence for FAF1 (NM_007051.2,2334-2352).
ggacccaaataaatcatta

SEQ ID NO: 279841 - DNA, 19 bp, Homo sapiens
  siRNA target sequence for FAF1 (NM_007051.2,2372-2390).
ctcaagaaacccttttcct

SEQ ID NO: 279842 - DNA, 19 bp, Homo sapiens
  siRNA target sequence for FAM3A (NM_021806.1,431-449).
ccacgggccaggaagtaca

SEQ ID NO: 279843 - DNA, 19 bp, Homo sapiens
  siRNA target sequence for FAM3A (NM_021806.1,432-450).
cacgggccaggaagtacaa

SEQ ID NO: 279844 - DNA, 19 bp, Homo sapiens
  siRNA target sequence for FAM3A (NM_021806.1,665-683).
gtcaacgacctgttgaagt

SEQ ID NO: 279845 - DNA, 19 bp, Homo sapiens
  siRNA target sequence for FAM3A (NM_021806.1,667-685).
caacgacctgttgaagttt

SEQ ID NO: 279846 - DNA, 19 bp, Homo sapiens
  siRNA target sequence for FAM3A (NM_021806.1,670-688).
cgacctgttgaagtttatt

SEQ ID NO: 279847 - DNA, 19 bp, Homo sapiens
  siRNA target sequence for FANCD2 (NM_033084.2,135-153).
gaagcaaccactttccaaa

SEQ ID NO: 279848 - DNA, 19 bp, Homo sapiens
  siRNA target sequence for FANCD2 (NM_033084.2,217-235).
cttaagatatcaggaatta

SEQ ID NO: 279849 - DNA, 19 bp, Homo sapiens
  siRNA target sequence for FANCD2 (NM_033084.2,222-240).
gatatcaggaattattctt

SEQ ID NO: 279850 - DNA, 19 bp, Homo sapiens
  siRNA target sequence for FANCD2 (NM_033084.2,245-263).
cgggagagagtcagaatca

SEQ ID NO: 279851 - DNA, 19 bp, Homo sapiens
  siRNA target sequence for FANCD2 (NM_033084.2,356-374).
gtggcctggagtcttacat

SEQ ID NO: 279852 - DNA, 19 bp, Homo sapiens
  siRNA target sequence for FANCD2 (NM_033084.2,438-456).
cagtatgggtgcatcttat

SEQ ID NO: 279853 - DNA, 19 bp, Homo sapiens
  siRNA target sequence for FANCD2 (NM_033084.2,445-463).
ggtgcatcttattctaaga

SEQ ID NO: 279854 - DNA, 19 bp, Homo sapiens
  siRNA target sequence for FANCD2 (NM_033084.2,475-493).
ctgcttctggggattgaca

SEQ ID NO: 279855 - DNA, 19 bp, Homo sapiens
  siRNA target sequence for FANCD2 (NM_033084.2,499-517).
cagcctgccattatcaaaa

SEQ ID NO: 279856 - DNA, 19 bp, Homo sapiens
  siRNA target sequence for FANCD2 (NM_033084.2,502-520).
cctgccattatcaaaacct

SEQ ID NO: 279857 - DNA, 19 bp, Homo sapiens
  siRNA target sequence for FANCD2 (NM_033084.2,573-591).
caacatacctcgactcatt

SEQ ID NO: 279858 - DNA, 19 bp, Homo sapiens
  siRNA target sequence for FANCD2 (NM_033084.2,586-604).
ctcattgtcagtcaactaa

SEQ ID NO: 279859 - DNA, 19 bp, Homo sapiens
  siRNA target sequence for FANCD2 (NM_033084.2,634-652).
gacctcaccaccaagatca

SEQ ID NO: 279860 - DNA, 19 bp, Homo sapiens
  siRNA target sequence for FANCD2 (NM_033084.2,758-776).
gtgacctactgatagagaa

SEQ ID NO: 279861 - DNA, 19 bp, Homo sapiens
  siRNA target sequence for FANCD2 (NM_033084.2,760-778).
gacctactgatagagaata

SEQ ID NO: 279862 - DNA, 19 bp, Homo sapiens
  siRNA target sequence for FANCD2 (NM_033084.2,762-780).
cctactgatagagaatact

SEQ ID NO: 279863 - DNA, 19 bp, Homo sapiens
  siRNA target sequence for FANCD2 (NM_033084.2,763-781).
ctactgatagagaatactt

SEQ ID NO: 279864 - DNA, 19 bp, Homo sapiens
  siRNA target sequence for FANCD2 (NM_033084.2,850-868).
cgccagttggtgatggata

SEQ ID NO: 279865 - DNA, 19 bp, Homo sapiens
  siRNA target sequence for FANCD2 (NM_033084.2,865-883).
gataagttgtcgtctatta

SEQ ID NO: 279866 - DNA, 19 bp, Homo sapiens
  siRNA target sequence for FANCD2 (NM_033084.2,878-896).
ctattagattggaggattt

SEQ ID NO: 279867 - DNA, 19 bp, Homo sapiens
  siRNA target sequence for FANCD2 (NM_033084.2,891-909).
ggatttacctgtgataata

SEQ ID NO: 279868 - DNA, 19 bp, Homo sapiens
  siRNA target sequence for FANCD2 (NM_033084.2,978-996).
ggatctgcagcattgtgtt

SEQ ID NO: 279869 - DNA, 19 bp, Homo sapiens
  siRNA target sequence for FANCD2 (NM_033084.2,1012-1030).
caggcttcccaagtaaagt

SEQ ID NO: 279870 - DNA, 19 bp, Homo sapiens
  siRNA target sequence for FANCD2 (NM_033084.2,1015-1033).
gcttcccaagtaaagttga

SEQ ID NO: 279871 - DNA, 19 bp, Homo sapiens
  siRNA target sequence for FANCD2 (NM_033084.2,1016-1034).
cttcccaagtaaagttgaa

SEQ ID NO: 279872 - DNA, 19 bp, Homo sapiens
  siRNA target sequence for FANCD2 (NM_033084.2,1049-1067).
caagttcctcaggaaatca

SEQ ID NO: 279873 - DNA, 19 bp, Homo sapiens
  siRNA target sequence for FANCD2 (NM_033084.2,1074-1092).
cagcggtcagagctgtatt

SEQ ID NO: 279874 - DNA, 19 bp, Homo sapiens
  siRNA target sequence for FANCD2 (NM_033084.2,1076-1094).
gcggtcagagctgtattat

SEQ ID NO: 279875 - DNA, 19 bp, Homo sapiens
  siRNA target sequence for FANCD2 (NM_033084.2,1077-1095).
cggtcagagctgtattatt

SEQ ID NO: 279876 - DNA, 19 bp, Homo sapiens
  siRNA target sequence for FANCD2 (NM_033084.2,1088-1106).
gtattattctcctctttga

SEQ ID NO: 279877 - DNA, 19 bp, Homo sapiens
  siRNA target sequence for FANCD2 (NM_033084.2,1118-1136).
cagctattagatatgagaa

SEQ ID NO: 279878 - DNA, 19 bp, Homo sapiens
  siRNA target sequence for FANCD2 (NM_033084.2,1187-1205).
ctgaacacaaggtgtttga

SEQ ID NO: 279879 - DNA, 19 bp, Homo sapiens
  siRNA target sequence for FANCD2 (NM_033084.2,1204-1222).
gacctggtgatgcttttca

SEQ ID NO: 279880 - DNA, 19 bp, Homo sapiens
  siRNA target sequence for FANCD2 (NM_033084.2,1212-1230).
gatgcttttcatcatctat

SEQ ID NO: 279881 - DNA, 19 bp, Homo sapiens
  siRNA target sequence for FANCD2 (NM_033084.2,1224-1242).
catctatagcaccaatact

SEQ ID NO: 279882 - DNA, 19 bp, Homo sapiens
  siRNA target sequence for FANCD2 (NM_033084.2,1232-1250).
gcaccaatactcagacaaa

SEQ ID NO: 279883 - DNA, 19 bp, Homo sapiens
  siRNA target sequence for FANCD2 (NM_033084.2,1235-1253).
ccaatactcagacaaagaa

SEQ ID NO: 279884 - DNA, 19 bp, Homo sapiens
  siRNA target sequence for FANCD2 (NM_033084.2,1241-1259).
ctcagacaaagaagtacat

SEQ ID NO: 279885 - DNA, 19 bp, Homo sapiens
  siRNA target sequence for FANCD2 (NM_033084.2,1261-1279).
gacagggtgctaagaaata

SEQ ID NO: 279886 - DNA, 19 bp, Homo sapiens
  siRNA target sequence for FANCD2 (NM_033084.2,1270-1288).
ctaagaaataagattcgat

SEQ ID NO: 279887 - DNA, 19 bp, Homo sapiens
  siRNA target sequence for FANCD2 (NM_033084.2,1306-1324).
cagctgctccagagtacat

SEQ ID NO: 279888 - DNA, 19 bp, Homo sapiens
  siRNA target sequence for FANCD2 (NM_033084.2,1309-1327).
ctgctccagagtacattct

SEQ ID NO: 279889 - DNA, 19 bp, Homo sapiens
  siRNA target sequence for FANCD2 (NM_033084.2,1319-1337).
gtacattctctgttcatta

SEQ ID NO: 279890 - DNA, 19 bp, Homo sapiens
  siRNA target sequence for FANCD2 (NM_033084.2,1326-1344).
ctctgttcattacttagtt

SEQ ID NO: 279891 - DNA, 19 bp, Homo sapiens
  siRNA target sequence for FANCD2 (NM_033084.2,1374-1392).
gctggctcagagtttgctt

SEQ ID NO: 279892 - DNA, 19 bp, Homo sapiens
  siRNA target sequence for FANCD2 (NM_033084.2,1418-1436).
catttggcagtctcctata

SEQ ID NO: 279893 - DNA, 19 bp, Homo sapiens
  siRNA target sequence for FANCD2 (NM_033084.2,1429-1447).
ctcctatacaaatatgcat

SEQ ID NO: 279894 - DNA, 19 bp, Homo sapiens
  siRNA target sequence for FANCD2 (NM_033084.2,1538-1556).
ccttagatgtccttctaga

SEQ ID NO: 279895 - DNA, 19 bp, Homo sapiens
  siRNA target sequence for FANCD2 (NM_033084.2,1637-1655).
cccctcagcaaatacgaaa

SEQ ID NO: 279896 - DNA, 19 bp, Homo sapiens
  siRNA target sequence for FANCD2 (NM_033084.2,1669-1687).
ctcagcacactggcattta

SEQ ID NO: 279897 - DNA, 19 bp, Homo sapiens
  siRNA target sequence for FANCD2 (NM_033084.2,1678-1696).
ctggcatttagcaaacaga

SEQ ID NO: 279898 - DNA, 19 bp, Homo sapiens
  siRNA target sequence for FANCD2 (NM_033084.2,1750-1768).
ctctctagcaccgtattca

SEQ ID NO: 279899 - DNA, 19 bp, Homo sapiens
  siRNA target sequence for FANCD2 (NM_033084.2,1754-1772).
ctagcaccgtattcaagta

SEQ ID NO: 279900 - DNA, 19 bp, Homo sapiens
  siRNA target sequence for FANCD2 (NM_033084.2,1773-1791).
caagctcattgggattatt

SEQ ID NO: 279901 - DNA, 19 bp, Homo sapiens
  siRNA target sequence for FANCD2 (NM_033084.2,1776-1794).
gctcattgggattattggt

SEQ ID NO: 279902 - DNA, 19 bp, Homo sapiens
  siRNA target sequence for FANCD2 (NM_033084.2,1818-1836).
ggcggcagacagaagtgaa

SEQ ID NO: 279903 - DNA, 19 bp, Homo sapiens
  siRNA target sequence for FANCD2 (NM_033084.2,1819-1837).
gcggcagacagaagtgaat

SEQ ID NO: 279904 - DNA, 19 bp, Homo sapiens
  siRNA target sequence for FANCD2 (NM_033084.2,1939-1957).
caggcctctgcactttact

SEQ ID NO: 279905 - DNA, 19 bp, Homo sapiens
  siRNA target sequence for FANCD2 (NM_033084.2,2017-2035).
gttgggcataccatctgta

SEQ ID NO: 279906 - DNA, 19 bp, Homo sapiens
  siRNA target sequence for FANCD2 (NM_033084.2,2077-2095).
ccggaaggtgactttccat

SEQ ID NO: 279907 - DNA, 19 bp, Homo sapiens
  siRNA target sequence for FANCD2 (NM_033084.2,2078-2096).
cggaaggtgactttccatt

SEQ ID NO: 279908 - DNA, 19 bp, Homo sapiens
  siRNA target sequence for FANCD2 (NM_033084.2,2110-2128).
ctgtacggactggaagaat

SEQ ID NO: 279909 - DNA, 19 bp, Homo sapiens
  siRNA target sequence for FANCD2 (NM_033084.2,2257-2275).
ccgtatttccggttactga

SEQ ID NO: 279910 - DNA, 19 bp, Homo sapiens
  siRNA target sequence for FANCD2 (NM_033084.2,2267-2285).
ggttactgagactttgtgt

SEQ ID NO: 279911 - DNA, 19 bp, Homo sapiens
  siRNA target sequence for FANCD2 (NM_033084.2,2291-2309).
gacagcataacggaaactt

SEQ ID NO: 279912 - DNA, 19 bp, Homo sapiens
  siRNA target sequence for FANCD2 (NM_033084.2,2303-2321).
gaaacttggaggagattga

SEQ ID NO: 279913 - DNA, 19 bp, Homo sapiens
  siRNA target sequence for FANCD2 (NM_033084.2,2313-2331).
ggagattgatggtctacta

SEQ ID NO: 279914 - DNA, 19 bp, Homo sapiens
  siRNA target sequence for FANCD2 (NM_033084.2,2316-2334).
gattgatggtctactagat

SEQ ID NO: 279915 - DNA, 19 bp, Homo sapiens
  siRNA target sequence for FANCD2 (NM_033084.2,2336-2354).
gtcctatattcctaactga

SEQ ID NO: 279916 - DNA, 19 bp, Homo sapiens
  siRNA target sequence for FANCD2 (NM_033084.2,2387-2405).
ctgctaaagagcgttcatt

SEQ ID NO: 279917 - DNA, 19 bp, Homo sapiens
  siRNA target sequence for FANCD2 (NM_033084.2,2389-2407).
gctaaagagcgttcattca

SEQ ID NO: 279918 - DNA, 19 bp, Homo sapiens
  siRNA target sequence for FANCD2 (NM_033084.2,2436-2454).
ctggttccgagagattgta

SEQ ID NO: 279919 - DNA, 19 bp, Homo sapiens
  siRNA target sequence for FANCD2 (NM_033084.2,2438-2456).
ggttccgagagattgtaaa

SEQ ID NO: 279920 - DNA, 19 bp, Homo sapiens
  siRNA target sequence for FANCD2 (NM_033084.2,2504-2522).
ctcggttaaagcacattgt

SEQ ID NO: 279921 - DNA, 19 bp, Homo sapiens
  siRNA target sequence for FANCD2 (NM_033084.2,2553-2571).
ggcagtcaccccagactat

SEQ ID NO: 279922 - DNA, 19 bp, Homo sapiens
  siRNA target sequence for FANCD2 (NM_033084.2,2589-2607).
ctttgatgtggaaacttta

SEQ ID NO: 279923 - DNA, 19 bp, Homo sapiens
  siRNA target sequence for FANCD2 (NM_033084.2,2596-2614).
gtggaaactttagatataa

SEQ ID NO: 279924 - DNA, 19 bp, Homo sapiens
  siRNA target sequence for FANCD2 (NM_033084.2,2703-2721).
ctcctctgacacactttca

SEQ ID NO: 279925 - DNA, 19 bp, Homo sapiens
  siRNA target sequence for FANCD2 (NM_033084.2,2743-2761).
gaccctacgccatctcata

SEQ ID NO: 279926 - DNA, 19 bp, Homo sapiens
  siRNA target sequence for FANCD2 (NM_033084.2,2745-2763).
ccctacgccatctcataga

SEQ ID NO: 279927 - DNA, 19 bp, Homo sapiens
  siRNA target sequence for FANCD2 (NM_033084.2,2804-2822).
catcattgttactacataa

SEQ ID NO: 279928 - DNA, 19 bp, Homo sapiens
  siRNA target sequence for FANCD2 (NM_033084.2,2859-2877).
cttctctattctacattgt

SEQ ID NO: 279929 - DNA, 19 bp, Homo sapiens
  siRNA target sequence for FANCD2 (NM_033084.2,2878-2896).
ggacttgtgacgaagttca

SEQ ID NO: 279930 - DNA, 19 bp, Homo sapiens
  siRNA target sequence for FANCD2 (NM_033084.2,2879-2897).
gacttgtgacgaagttcat

SEQ ID NO: 279931 - DNA, 19 bp, Homo sapiens
  siRNA target sequence for FANCD2 (NM_033084.2,2881-2899).
cttgtgacgaagttcatct

SEQ ID NO: 279932 - DNA, 19 bp, Homo sapiens
  siRNA target sequence for FANCD2 (NM_033084.2,2886-2904).
gacgaagttcatcttagat

SEQ ID NO: 279933 - DNA, 19 bp, Homo sapiens
  siRNA target sequence for FANCD2 (NM_033084.2,2889-2907).
gaagttcatcttagatact

SEQ ID NO: 279934 - DNA, 19 bp, Homo sapiens
  siRNA target sequence for FANCD2 (NM_033084.2,3042-3060).
caaaggaagccggaatatt

SEQ ID NO: 279935 - DNA, 19 bp, Homo sapiens
  siRNA target sequence for FANCD2 (NM_033084.2,3047-3065).
gaagccggaatattggatt

SEQ ID NO: 279936 - DNA, 19 bp, Homo sapiens
  siRNA target sequence for FANCD2 (NM_033084.2,3051-3069).
ccggaatattggattctca

SEQ ID NO: 279937 - DNA, 19 bp, Homo sapiens
  siRNA target sequence for FANCD2 (NM_033084.2,3168-3186).
gtgtttagctgctgagaat

SEQ ID NO: 279938 - DNA, 19 bp, Homo sapiens
  siRNA target sequence for FANCD2 (NM_033084.2,3170-3188).
gtttagctgctgagaatca

SEQ ID NO: 279939 - DNA, 19 bp, Homo sapiens
  siRNA target sequence for FANCD2 (NM_033084.2,3222-3240).
ggagtaccacataatgtct

SEQ ID NO: 279940 - DNA, 19 bp, Homo sapiens
  siRNA target sequence for FANCD2 (NM_033084.2,3331-3349).
gccctccatgtccttagta

SEQ ID NO: 279941 - DNA, 19 bp, Homo sapiens
  siRNA target sequence for FANCD2 (NM_033084.2,3342-3360).
ccttagtagccgactgaaa

SEQ ID NO: 279942 - DNA, 19 bp, Homo sapiens
  siRNA target sequence for FANCD2 (NM_033084.2,3420-3438).
gaatttccatcaaagcatt

SEQ ID NO: 279943 - DNA, 19 bp, Homo sapiens
  siRNA target sequence for FANCD2 (NM_033084.2,3468-3486).
cagacttttgatggttatt

SEQ ID NO: 279944 - DNA, 19 bp, Homo sapiens
  siRNA target sequence for FANCD2 (NM_033084.2,3480-3498).
ggttattttggagaaatca

SEQ ID NO: 279945 - DNA, 19 bp, Homo sapiens
  siRNA target sequence for FANCD2 (NM_033084.2,3563-3581).
ggccaagtggggataaaga

SEQ ID NO: 279946 - DNA, 19 bp, Homo sapiens
  siRNA target sequence for FANCD2 (NM_033084.2,3831-3849).
ctcgcagcagattcatgaa

SEQ ID NO: 279947 - DNA, 19 bp, Homo sapiens
  siRNA target sequence for FANCD2 (NM_033084.2,3874-3892).
gctgttcgagacttcagta

SEQ ID NO: 279948 - DNA, 19 bp, Homo sapiens
  siRNA target sequence for FANCD2 (NM_033084.2,3948-3966).
gaagtatgggcgtctcttt

SEQ ID NO: 279949 - DNA, 19 bp, Homo sapiens
  siRNA target sequence for FANCD2 (NM_033084.2,3973-3991).
gcatttctgaagcaatgta

SEQ ID NO: 279950 - DNA, 19 bp, Homo sapiens
  siRNA target sequence for FANCD2 (NM_033084.2,3989-4007).
gtatgccgctcctagactt

SEQ ID NO: 279951 - DNA, 19 bp, Homo sapiens
  siRNA target sequence for FANCD2 (NM_033084.2,3994-4012).
ccgctcctagacttcagtt

SEQ ID NO: 279952 - DNA, 19 bp, Homo sapiens
  siRNA target sequence for FANCD2 (NM_033084.2,3995-4013).
cgctcctagacttcagttt

SEQ ID NO: 279953 - DNA, 19 bp, Homo sapiens
  siRNA target sequence for FANCD2 (NM_033084.2,3996-4014).
gctcctagacttcagtttt

SEQ ID NO: 279954 - DNA, 19 bp, Homo sapiens
  siRNA target sequence for FANCD2 (NM_033084.2,3999-4017).
cctagacttcagttttaga

SEQ ID NO: 279955 - DNA, 19 bp, Homo sapiens
  siRNA target sequence for FANCD2 (NM_033084.2,4088-4106).
gtgggcattccaagattca

SEQ ID NO: 279956 - DNA, 19 bp, Homo sapiens
  siRNA target sequence for FANCD2 (NM_033084.2,4115-4133).
cgagactcacccaacatgt

SEQ ID NO: 279957 - DNA, 19 bp, Homo sapiens
  siRNA target sequence for FANCD2 (NM_033084.2,4165-4183).
gtttgcagagtcaaagcta

SEQ ID NO: 279958 - DNA, 19 bp, Homo sapiens
  siRNA target sequence for FANCD2 (NM_033084.2,4185-4203).
gctcactctcaacaattgt

SEQ ID NO: 279959 - DNA, 19 bp, Homo sapiens
  siRNA target sequence for FANCD2 (NM_033084.2,4186-4204).
ctcactctcaacaattgta

SEQ ID NO: 279960 - DNA, 19 bp, Homo sapiens
  siRNA target sequence for FANCD2 (NM_033084.2,4215-4233).
ctggctgggcaatctaaaa

SEQ ID NO: 279961 - DNA, 19 bp, Homo sapiens
  siRNA target sequence for FANCD2 (NM_033084.2,4338-4356).
cactgaggtatctctacaa

SEQ ID NO: 279962 - DNA, 19 bp, Homo sapiens
  siRNA target sequence for FANCD2 (NM_033084.2,4415-4433).
gcagaactttgcctactta

SEQ ID NO: 279963 - DNA, 19 bp, Homo sapiens
  siRNA target sequence for FANCD2 (NM_033084.2,4425-4443).
gcctacttatgtttattgt

SEQ ID NO: 279964 - DNA, 19 bp, Homo sapiens
  siRNA target sequence for FANCE (NM_021922.1,642-660).
gcttctccactgtctgaaa

SEQ ID NO: 279965 - DNA, 19 bp, Homo sapiens
  siRNA target sequence for FANCE (NM_021922.1,827-845).
gagggtccccaaaagatta

SEQ ID NO: 279966 - DNA, 19 bp, Homo sapiens
  siRNA target sequence for FANCE (NM_021922.1,881-899).
gagacccgaacataagtca

SEQ ID NO: 279967 - DNA, 19 bp, Homo sapiens
  siRNA target sequence for FANCE (NM_021922.1,1125-1143).
cagcttcttcacgaatgta

SEQ ID NO: 279968 - DNA, 19 bp, Homo sapiens
  siRNA target sequence for FANCE (NM_021922.1,1127-1145).
gcttcttcacgaatgtagt

SEQ ID NO: 279969 - DNA, 19 bp, Homo sapiens
  siRNA target sequence for FANCE (NM_021922.1,1320-1338).
gcctcccgcctgcttacaa

SEQ ID NO: 279970 - DNA, 19 bp, Homo sapiens
  siRNA target sequence for FANCE (NM_021922.1,1322-1340).
ctcccgcctgcttacaact

SEQ ID NO: 279971 - DNA, 19 bp, Homo sapiens
  siRNA target sequence for FANCE (NM_021922.1,1418-1436).
cacaggtcctgctcaaaca

SEQ ID NO: 279972 - DNA, 19 bp, Homo sapiens
  siRNA target sequence for FANCE (NM_021922.1,1428-1446).
gctcaaacagagttactgt

SEQ ID NO: 279973 - DNA, 19 bp, Homo sapiens
  siRNA target sequence for FANCE (NM_021922.1,1477-1495).
cagatgcacaggttctaat

SEQ ID NO: 279974 - DNA, 19 bp, Homo sapiens
  siRNA target sequence for FANCE (NM_021922.1,1678-1696).
ccaagtatcaggctaacat

SEQ ID NO: 279975 - DNA, 19 bp, Homo sapiens
  siRNA target sequence for FANCE (NM_021922.1,1723-1741).
ctatggccctagaacctaa

SEQ ID NO: 279976 - DNA, 19 bp, Homo sapiens
  siRNA target sequence for FANCF (NM_022725.1,453-471).
gcttcaatggctatagaga

SEQ ID NO: 279977 - DNA, 19 bp, Homo sapiens
  siRNA target sequence for FANCF (NM_022725.1,640-658).
gttgcagccgcctttgtct

SEQ ID NO: 279978 - DNA, 19 bp, Homo sapiens
  siRNA target sequence for FANCF (NM_022725.1,680-698).
gaacccggcatccacaaat

SEQ ID NO: 279979 - DNA, 19 bp, Homo sapiens
  siRNA target sequence for FANCF (NM_022725.1,739-757).
ggggaattcggaagtcttt

SEQ ID NO: 279980 - DNA, 19 bp, Homo sapiens
  siRNA target sequence for FANCF (NM_022725.1,785-803).
gggcttttgactttagtga

SEQ ID NO: 279981 - DNA, 19 bp, Homo sapiens
  siRNA target sequence for FANCF (NM_022725.1,849-867).
cagactggggtcaacgttt

SEQ ID NO: 279982 - DNA, 19 bp, Homo sapiens
  siRNA target sequence for FANCF (NM_022725.1,858-876).
gtcaacgtttgcactatga

SEQ ID NO: 279983 - DNA, 19 bp, Homo sapiens
  siRNA target sequence for FANCF (NM_022725.1,868-886).
gcactatgaccttcagaaa

SEQ ID NO: 279984 - DNA, 19 bp, Homo sapiens
  siRNA target sequence for FANCF (NM_022725.1,926-944).
gaggagttgcacaataggt

SEQ ID NO: 279985 - DNA, 19 bp, Homo sapiens
  siRNA target sequence for FANCF (NM_022725.1,928-946).
ggagttgcacaataggttt

SEQ ID NO: 279986 - DNA, 19 bp, Homo sapiens
  siRNA target sequence for FANCF (NM_022725.1,931-949).
gttgcacaataggtttcaa

SEQ ID NO: 279987 - DNA, 19 bp, Homo sapiens
  siRNA target sequence for FANCF (NM_022725.1,1014-1032).
cgcaggatggagattttga

SEQ ID NO: 279988 - DNA, 19 bp, Homo sapiens
  siRNA target sequence for FANCF (NM_022725.1,1073-1091).
cttcgtagtggtgcattta

SEQ ID NO: 279989 - DNA, 19 bp, Homo sapiens
  siRNA target sequence for FANCF (NM_022725.1,1076-1094).
cgtagtggtgcatttagga

SEQ ID NO: 279990 - DNA, 19 bp, Homo sapiens
  siRNA target sequence for FANCF (NM_022725.1,1077-1095).
gtagtggtgcatttaggaa

SEQ ID NO: 279991 - DNA, 19 bp, Homo sapiens
  siRNA target sequence for FETUB (NM_014375.1,239-257).
ctttgccctgcgggatatt

SEQ ID NO: 279992 - DNA, 19 bp, Homo sapiens
  siRNA target sequence for FETUB (NM_014375.1,244-262).
ccctgcgggatattaacaa

SEQ ID NO: 279993 - DNA, 19 bp, Homo sapiens
  siRNA target sequence for FETUB (NM_014375.1,249-267).
cgggatattaacaaagaca

SEQ ID NO: 279994 - DNA, 19 bp, Homo sapiens
  siRNA target sequence for FETUB (NM_014375.1,305-323).
cgacgcccaggaatacaga

SEQ ID NO: 279995 - DNA, 19 bp, Homo sapiens
  siRNA target sequence for FETUB (NM_014375.1,331-349).
gcctgggatctctgttcta

SEQ ID NO: 279996 - DNA, 19 bp, Homo sapiens
  siRNA target sequence for FETUB (NM_014375.1,379-397).
gccatgtgctcagaaagaa

SEQ ID NO: 279997 - DNA, 19 bp, Homo sapiens
  siRNA target sequence for FETUB (NM_014375.1,408-426).
gactgtggaatgaggatat

SEQ ID NO: 279998 - DNA, 19 bp, Homo sapiens
  siRNA target sequence for FETUB (NM_014375.1,470-488).
gaacaacccaagtagagtt

SEQ ID NO: 279999 - DNA, 19 bp, Homo sapiens
  siRNA target sequence for FETUB (NM_014375.1,476-494).
cccaagtagagttctctat

SEQ ID NO: 280000 - DNA, 19 bp, Homo sapiens
  siRNA target sequence for FETUB (NM_014375.1,477-495).
ccaagtagagttctctatt

SEQ ID NO: 280001 - DNA, 19 bp, Homo sapiens
  siRNA target sequence for FETUB (NM_014375.1,478-496).
caagtagagttctctattt

SEQ ID NO: 280002 - DNA, 19 bp, Homo sapiens
  siRNA target sequence for FETUB (NM_014375.1,489-507).
ctctatttagctgcttata

SEQ ID NO: 280003 - DNA, 19 bp, Homo sapiens
  siRNA target sequence for FETUB (NM_014375.1,514-532).
ctcttcgcccagtttcaaa

SEQ ID NO: 280004 - DNA, 19 bp, Homo sapiens
  siRNA target sequence for FETUB (NM_014375.1,516-534).
cttcgcccagtttcaaaaa

SEQ ID NO: 280005 - DNA, 19 bp, Homo sapiens
  siRNA target sequence for FETUB (NM_014375.1,616-634).
ccgagtctcttgcgaaata

SEQ ID NO: 280006 - DNA, 19 bp, Homo sapiens
  siRNA target sequence for FETUB (NM_014375.1,618-636).
gagtctcttgcgaaataca

SEQ ID NO: 280007 - DNA, 19 bp, Homo sapiens
  siRNA target sequence for FETUB (NM_014375.1,622-640).
ctcttgcgaaatacaacaa

SEQ ID NO: 280008 - DNA, 19 bp, Homo sapiens
  siRNA target sequence for FETUB (NM_014375.1,627-645).
gcgaaatacaacaatgaga

SEQ ID NO: 280009 - DNA, 19 bp, Homo sapiens
  siRNA target sequence for FETUB (NM_014375.1,738-756).
gaatcaccatgtactaaat

SEQ ID NO: 280010 - DNA, 19 bp, Homo sapiens
  siRNA target sequence for FETUB (NM_014375.1,761-779).
ggccagcagctgttcactt

SEQ ID NO: 280011 - DNA, 19 bp, Homo sapiens
  siRNA target sequence for FETUB (NM_014375.1,801-819).
gttggtctttgcaaaggtt

SEQ ID NO: 280012 - DNA, 19 bp, Homo sapiens
  siRNA target sequence for FETUB (NM_014375.1,909-927).
gctgttaaccagaaaccta

SEQ ID NO: 280013 - DNA, 19 bp, Homo sapiens
  siRNA target sequence for FEZ2 (NM_005102.1,199-217).
ctgcagggggacgagattt

SEQ ID NO: 280014 - DNA, 19 bp, Homo sapiens
  siRNA target sequence for FEZ2 (NM_005102.1,202-220).
cagggggacgagatttgga

SEQ ID NO: 280015 - DNA, 19 bp, Homo sapiens
  siRNA target sequence for FEZ2 (NM_005102.1,204-222).
gggggacgagatttggaat

SEQ ID NO: 280016 - DNA, 19 bp, Homo sapiens
  siRNA target sequence for FEZ2 (NM_005102.1,219-237).
gaatgccctgacagataat

SEQ ID NO: 280017 - DNA, 19 bp, Homo sapiens
  siRNA target sequence for FEZ2 (NM_005102.1,284-302).
ccttgcacttgcttactct

SEQ ID NO: 280018 - DNA, 19 bp, Homo sapiens
  siRNA target sequence for FEZ2 (NM_005102.1,299-317).
ctctgaacctctcagaaaa

SEQ ID NO: 280019 - DNA, 19 bp, Homo sapiens
  siRNA target sequence for FEZ2 (NM_005102.1,311-329).
cagaaaaaggggtaagtga

SEQ ID NO: 280020 - DNA, 19 bp, Homo sapiens
  siRNA target sequence for FEZ2 (NM_005102.1,393-411).
catcgtctcctgtgttaat

SEQ ID NO: 280021 - DNA, 19 bp, Homo sapiens
  siRNA target sequence for FEZ2 (NM_005102.1,396-414).
cgtctcctgtgttaatgat

SEQ ID NO: 280022 - DNA, 19 bp, Homo sapiens
  siRNA target sequence for FEZ2 (NM_005102.1,399-417).
ctcctgtgttaatgatgaa

SEQ ID NO: 280023 - DNA, 19 bp, Homo sapiens
  siRNA target sequence for FEZ2 (NM_005102.1,429-447).
ggcagaccaggttattgaa

SEQ ID NO: 280024 - DNA, 19 bp, Homo sapiens
  siRNA target sequence for FEZ2 (NM_005102.1,505-523).
cagtcagatcggctttcaa

SEQ ID NO: 280025 - DNA, 19 bp, Homo sapiens
  siRNA target sequence for FEZ2 (NM_005102.1,511-529).
gatcggctttcaatgcttt

SEQ ID NO: 280026 - DNA, 19 bp, Homo sapiens
  siRNA target sequence for FEZ2 (NM_005102.1,521-539).
caatgctttcccaggaaat

SEQ ID NO: 280027 - DNA, 19 bp, Homo sapiens
  siRNA target sequence for FEZ2 (NM_005102.1,530-548).
cccaggaaattcaaactct

SEQ ID NO: 280028 - DNA, 19 bp, Homo sapiens
  siRNA target sequence for FEZ2 (NM_005102.1,591-609).
gctctcagtgtctgagtta

SEQ ID NO: 280029 - DNA, 19 bp, Homo sapiens
  siRNA target sequence for FEZ2 (NM_005102.1,592-610).
ctctcagtgtctgagttaa

SEQ ID NO: 280030 - DNA, 19 bp, Homo sapiens
  siRNA target sequence for FEZ2 (NM_005102.1,594-612).
ctcagtgtctgagttaaat

SEQ ID NO: 280031 - DNA, 19 bp, Homo sapiens
  siRNA target sequence for FEZ2 (NM_005102.1,857-875).
ctacagtcattccttatga

SEQ ID NO: 280032 - DNA, 19 bp, Homo sapiens
  siRNA target sequence for FEZ2 (NM_005102.1,885-903).
cggaccaccgtctgttgaa

SEQ ID NO: 280033 - DNA, 19 bp, Homo sapiens
  siRNA target sequence for FEZ2 (NM_005102.1,893-911).
cgtctgttgaagatcttca

SEQ ID NO: 280034 - DNA, 19 bp, Homo sapiens
  siRNA target sequence for FEZ2 (NM_005102.1,898-916).
gttgaagatcttcaaatat

SEQ ID NO: 280035 - DNA, 19 bp, Homo sapiens
  siRNA target sequence for FEZ2 (NM_005102.1,962-980).
cgagcttgttaactgatta

SEQ ID NO: 280036 - DNA, 19 bp, Homo sapiens
  siRNA target sequence for FHL1 (NM_001449.3,259-277).
gaagtatgtgcaaaaggat

SEQ ID NO: 280037 - DNA, 19 bp, Homo sapiens
  siRNA target sequence for FHL1 (NM_001449.3,291-309).
gcctgaaatgctttgacaa

SEQ ID NO: 280038 - DNA, 19 bp, Homo sapiens
  siRNA target sequence for FHL1 (NM_001449.3,425-443).
caccccttggccaatgaga

SEQ ID NO: 280039 - DNA, 19 bp, Homo sapiens
  siRNA target sequence for FHL1 (NM_001449.3,636-654).
ctaaaggggaggacttcta

SEQ ID NO: 280040 - DNA, 19 bp, Homo sapiens
  siRNA target sequence for FHL1 (NM_001449.3,715-733).
cacatctggaggaatcact

SEQ ID NO: 280041 - DNA, 19 bp, Homo sapiens
  siRNA target sequence for FHL1 (NM_001449.3,747-765).
cctggcatgccgattgctt

SEQ ID NO: 280042 - DNA, 19 bp, Homo sapiens
  siRNA target sequence for FHL1 (NM_001449.3,834-852).
gcgtggattgctacaagaa

SEQ ID NO: 280043 - DNA, 19 bp, Homo sapiens
  siRNA target sequence for FHL1 (NM_001449.3,836-854).
gtggattgctacaagaact

SEQ ID NO: 280044 - DNA, 19 bp, Homo sapiens
  siRNA target sequence for FHL1 (NM_001449.3,838-856).
ggattgctacaagaacttt

SEQ ID NO: 280045 - DNA, 19 bp, Homo sapiens
  siRNA target sequence for FHL1 (NM_001449.3,888-906).
ccatcactgggtttggtaa

SEQ ID NO: 280046 - DNA, 19 bp, Homo sapiens
  siRNA target sequence for FHL1 (NM_001449.3,913-931).
cagtgtggtggcctatgaa

SEQ ID NO: 280047 - DNA, 19 bp, Homo sapiens
  siRNA target sequence for FHL1 (NM_001449.3,985-1003).
ggccaacaagcgctttgtt

SEQ ID NO: 280048 - DNA, 19 bp, Homo sapiens
  siRNA target sequence for FHL1 (NM_001449.3,986-1004).
gccaacaagcgctttgttt

SEQ ID NO: 280049 - DNA, 19 bp, Homo sapiens
  siRNA target sequence for FHL1 (NM_001449.3,1009-1027).
ccaggagcaagtgtattgt

SEQ ID NO: 280050 - DNA, 19 bp, Homo sapiens
  siRNA target sequence for FHL1 (NM_001449.3,1029-1047).
ccgactgtgccaaaaagct

SEQ ID NO: 280051 - DNA, 19 bp, Homo sapiens
  siRNA target sequence for FKBPL (NM_022110.3,273-291).
ggagacgccaccagtcaat

SEQ ID NO: 280052 - DNA, 19 bp, Homo sapiens
  siRNA target sequence for FKBPL (NM_022110.3,274-292).
gagacgccaccagtcaata

SEQ ID NO: 280053 - DNA, 19 bp, Homo sapiens
  siRNA target sequence for FKBPL (NM_022110.3,276-294).
gacgccaccagtcaataca

SEQ ID NO: 280054 - DNA, 19 bp, Homo sapiens
  siRNA target sequence for FKBPL (NM_022110.3,278-296).
cgccaccagtcaatacaat

SEQ ID NO: 280055 - DNA, 19 bp, Homo sapiens
  siRNA target sequence for FKBPL (NM_022110.3,358-376).
gattcagttattcagatta

SEQ ID NO: 280056 - DNA, 19 bp, Homo sapiens
  siRNA target sequence for FKBPL (NM_022110.3,490-508).
gaaggagactctcataagt

SEQ ID NO: 280057 - DNA, 19 bp, Homo sapiens
  siRNA target sequence for FKBPL (NM_022110.3,568-586).
cccgatgggagctttgtca

SEQ ID NO: 280058 - DNA, 19 bp, Homo sapiens
  siRNA target sequence for FKBPL (NM_022110.3,569-587).
ccgatgggagctttgtcaa

SEQ ID NO: 280059 - DNA, 19 bp, Homo sapiens
  siRNA target sequence for FKBPL (NM_022110.3,734-752).
cttggggggagctcataga

SEQ ID NO: 280060 - DNA, 19 bp, Homo sapiens
  siRNA target sequence for FKBPL (NM_022110.3,739-757).
ggggagctcatagagaaat

SEQ ID NO: 280061 - DNA, 19 bp, Homo sapiens
  siRNA target sequence for FKBPL (NM_022110.3,913-931).
gcaaggggcacagaactat

SEQ ID NO: 280062 - DNA, 19 bp, Homo sapiens
  siRNA target sequence for FKBPL (NM_022110.3,914-932).
caaggggcacagaactatt

SEQ ID NO: 280063 - DNA, 19 bp, Homo sapiens
  siRNA target sequence for FKBPL (NM_022110.3,918-936).
gggcacagaactatttcga

SEQ ID NO: 280064 - DNA, 19 bp, Homo sapiens
  siRNA target sequence for FKSG2 (NM_021631.1,181-199).
gttactgaaagcacgataa

SEQ ID NO: 280065 - DNA, 19 bp, Homo sapiens
  siRNA target sequence for FKSG2 (NM_021631.1,187-205).
gaaagcacgataatcacta

SEQ ID NO: 280066 - DNA, 19 bp, Homo sapiens
  siRNA target sequence for FKSG2 (NM_021631.1,192-210).
cacgataatcactagtgtt

SEQ ID NO: 280067 - DNA, 19 bp, Homo sapiens
  siRNA target sequence for FKSG2 (NM_021631.1,288-306).
gaaatcaatcaacgaaaaa

SEQ ID NO: 280068 - DNA, 19 bp, Homo sapiens
  siRNA target sequence for FKSG2 (NM_021631.1,293-311).
caatcaacgaaaaacttga

SEQ ID NO: 280069 - DNA, 19 bp, Homo sapiens
  siRNA target sequence for FKSG2 (NM_021631.1,444-462).
gctgaactaccgtaaggat

SEQ ID NO: 280070 - DNA, 19 bp, Homo sapiens
  siRNA target sequence for FKSG2 (NM_021631.1,453-471).
ccgtaaggatggtcagtat

SEQ ID NO: 280071 - DNA, 19 bp, Homo sapiens
  siRNA target sequence for FKSG2 (NM_021631.1,455-473).
gtaaggatggtcagtatga

SEQ ID NO: 280072 - DNA, 19 bp, Homo sapiens
  siRNA target sequence for FKSG2 (NM_021631.1,464-482).
gtcagtatgaccccatata

SEQ ID NO: 280073 - DNA, 19 bp, Homo sapiens
  siRNA target sequence for FLJ10525 (NM_018126.1,371-389).
gcgctgtgcaattcatgat

SEQ ID NO: 280074 - DNA, 19 bp, Homo sapiens
  siRNA target sequence for FLJ10525 (NM_018126.1,373-391).
gctgtgcaattcatgatga

SEQ ID NO: 280075 - DNA, 19 bp, Homo sapiens
  siRNA target sequence for FLJ10525 (NM_018126.1,379-397).
caattcatgatgaccaata

SEQ ID NO: 280076 - DNA, 19 bp, Homo sapiens
  siRNA target sequence for FLJ10525 (NM_018126.1,424-442).
cgcttgttcacagtttact

SEQ ID NO: 280077 - DNA, 19 bp, Homo sapiens
  siRNA target sequence for FLJ10525 (NM_018126.1,532-550).
gctctgaggctgcatcaaa

SEQ ID NO: 280078 - DNA, 19 bp, Homo sapiens
  siRNA target sequence for FLJ10525 (NM_018126.1,540-558).
gctgcatcaaagattacca

SEQ ID NO: 280079 - DNA, 19 bp, Homo sapiens
  siRNA target sequence for FLJ10525 (NM_018126.1,609-627).
ctgccactacctgttgtat

SEQ ID NO: 280080 - DNA, 19 bp, Homo sapiens
  siRNA target sequence for FLJ10525 (NM_018126.1,648-666).
ctatccagttacaatgagt

SEQ ID NO: 280081 - DNA, 19 bp, Homo sapiens
  siRNA target sequence for FLJ10525 (NM_018126.1,652-670).
ccagttacaatgagtatct

SEQ ID NO: 280082 - DNA, 19 bp, Homo sapiens
  siRNA target sequence for FLJ10525 (NM_018126.1,693-711).
gcttcatgctgccacatat

SEQ ID NO: 280083 - DNA, 19 bp, Homo sapiens
  siRNA target sequence for FLJ10525 (NM_018126.1,694-712).
cttcatgctgccacatata

SEQ ID NO: 280084 - DNA, 19 bp, Homo sapiens
  siRNA target sequence for FLJ10525 (NM_018126.1,697-715).
catgctgccacatatacga

SEQ ID NO: 280085 - DNA, 19 bp, Homo sapiens
  siRNA target sequence for FLJ10525 (NM_018126.1,700-718).
gctgccacatatacgaaaa

SEQ ID NO: 280086 - DNA, 19 bp, Homo sapiens
  siRNA target sequence for FLJ10525 (NM_018126.1,701-719).
ctgccacatatacgaaaaa

SEQ ID NO: 280087 - DNA, 19 bp, Homo sapiens
  siRNA target sequence for FLJ10525 (NM_018126.1,704-722).
ccacatatacgaaaaaggt

SEQ ID NO: 280088 - DNA, 19 bp, Homo sapiens
  siRNA target sequence for FLJ10525 (NM_018126.1,729-747).
cgcaaggggctcaaatagt

SEQ ID NO: 280089 - DNA, 19 bp, Homo sapiens
  siRNA target sequence for FLJ10525 (NM_018126.1,731-749).
caaggggctcaaatagttt

SEQ ID NO: 280090 - DNA, 19 bp, Homo sapiens
  siRNA target sequence for FLJ10525 (NM_018126.1,771-789).
ggacaaattaagtgctaat

SEQ ID NO: 280091 - DNA, 19 bp, Homo sapiens
  siRNA target sequence for FLJ10525 (NM_018126.1,804-822).
gaaattcattgcttgcaat

SEQ ID NO: 280092 - DNA, 19 bp, Homo sapiens
  siRNA target sequence for FLJ10525 (NM_018126.1,834-852).
gatgcctgcgacagttttt

SEQ ID NO: 280093 - DNA, 19 bp, Homo sapiens
  siRNA target sequence for FLJ10525 (NM_018126.1,875-893).
gtttgctccaaccttttat

SEQ ID NO: 280094 - DNA, 19 bp, Homo sapiens
  siRNA target sequence for FLJ10525 (NM_018126.1,880-898).
ctccaaccttttatatact

SEQ ID NO: 280095 - DNA, 19 bp, Homo sapiens
  siRNA target sequence for FLJ10525 (NM_018126.1,902-920).
gatttcttacccttcgata

SEQ ID NO: 280096 - DNA, 19 bp, Homo sapiens
  siRNA target sequence for FLJ10525 (NM_018126.1,907-925).
cttacccttcgatattcgt

SEQ ID NO: 280097 - DNA, 19 bp, Homo sapiens
  siRNA target sequence for FLJ10525 (NM_018126.1,917-935).
gatattcgtctcgaagaaa

SEQ ID NO: 280098 - DNA, 19 bp, Homo sapiens
  siRNA target sequence for FLJ10525 (NM_018126.1,937-955).
ccatattgtcggaccttat

SEQ ID NO: 280099 - DNA, 19 bp, Homo sapiens
  siRNA target sequence for FLJ10525 (NM_018126.1,938-956).
catattgtcggaccttatt

SEQ ID NO: 280100 - DNA, 19 bp, Homo sapiens
  siRNA target sequence for FLJ10525 (NM_018126.1,947-965).
ggaccttatttaatgaact

SEQ ID NO: 280101 - DNA, 19 bp, Homo sapiens
  siRNA target sequence for FLJ10525 (NM_018126.1,968-986).
ggattgttgttgaacacat

SEQ ID NO: 280102 - DNA, 19 bp, Homo sapiens
  siRNA target sequence for FLJ10525 (NM_018126.1,969-987).
gattgttgttgaacacata

SEQ ID NO: 280103 - DNA, 19 bp, Homo sapiens
  siRNA target sequence for FLJ10525 (NM_018126.1,973-991).
gttgttgaacacataataa

SEQ ID NO: 280104 - DNA, 19 bp, Homo sapiens
  siRNA target sequence for FLJ10525 (NM_018126.1,1000-1018).
gcttgcccactgtttgtga

SEQ ID NO: 280105 - DNA, 19 bp, Homo sapiens
  siRNA target sequence for FLJ10525 (NM_018126.1,1032-1050).
ccagagcattgcctttata

SEQ ID NO: 280106 - DNA, 19 bp, Homo sapiens
  siRNA target sequence for FLJ10525 (NM_018126.1,1033-1051).
cagagcattgcctttataa

SEQ ID NO: 280107 - DNA, 19 bp, Homo sapiens
  siRNA target sequence for FLJ10769 (NM_018210.1,100-118).
cgccactggacgcagtttt

SEQ ID NO: 280108 - DNA, 19 bp, Homo sapiens
  siRNA target sequence for FLJ10769 (NM_018210.1,101-119).
gccactggacgcagtttta

SEQ ID NO: 280109 - DNA, 19 bp, Homo sapiens
  siRNA target sequence for FLJ10769 (NM_018210.1,105-123).
ctggacgcagttttagaaa

SEQ ID NO: 280110 - DNA, 19 bp, Homo sapiens
  siRNA target sequence for FLJ10769 (NM_018210.1,107-125).
ggacgcagttttagaaaga

SEQ ID NO: 280111 - DNA, 19 bp, Homo sapiens
  siRNA target sequence for FLJ10769 (NM_018210.1,124-142).
gagcgttttcgctacgtaa

SEQ ID NO: 280112 - DNA, 19 bp, Homo sapiens
  siRNA target sequence for FLJ10769 (NM_018210.1,128-146).
gttttcgctacgtaaagca

SEQ ID NO: 280113 - DNA, 19 bp, Homo sapiens
  siRNA target sequence for FLJ10769 (NM_018210.1,138-156).
cgtaaagcacattcgataa

SEQ ID NO: 280114 - DNA, 19 bp, Homo sapiens
  siRNA target sequence for FLJ10769 (NM_018210.1,139-157).
gtaaagcacattcgataaa

SEQ ID NO: 280115 - DNA, 19 bp, Homo sapiens
  siRNA target sequence for FLJ10769 (NM_018210.1,144-162).
gcacattcgataaaggata

SEQ ID NO: 280116 - DNA, 19 bp, Homo sapiens
  siRNA target sequence for FLJ10769 (NM_018210.1,145-163).
cacattcgataaaggatat

SEQ ID NO: 280117 - DNA, 19 bp, Homo sapiens
  siRNA target sequence for FLJ10769 (NM_018210.1,177-195).
cagctggtgagaaatatca

SEQ ID NO: 280118 - DNA, 19 bp, Homo sapiens
  siRNA target sequence for FLJ10769 (NM_018210.1,179-197).
gctggtgagaaatatcata

SEQ ID NO: 280119 - DNA, 19 bp, Homo sapiens
  siRNA target sequence for FLJ10769 (NM_018210.1,404-422).
cagccccaatgctgttcat

SEQ ID NO: 280120 - DNA, 19 bp, Homo sapiens
  siRNA target sequence for FLJ10769 (NM_018210.1,406-424).
gccccaatgctgttcatga

SEQ ID NO: 280121 - DNA, 19 bp, Homo sapiens
  siRNA target sequence for FLJ10769 (NM_018210.1,535-553).
gggacatccctgttgtcat

SEQ ID NO: 280122 - DNA, 19 bp, Homo sapiens
  siRNA target sequence for FLJ10769 (NM_018210.1,901-919).
caaatgggggcatatcaga

SEQ ID NO: 280123 - DNA, 19 bp, Homo sapiens
  siRNA target sequence for FLJ10769 (NM_018210.1,908-926).
gggcatatcagacttgaaa

SEQ ID NO: 280124 - DNA, 19 bp, Homo sapiens
  siRNA target sequence for FLJ10769 (NM_018210.1,938-956).
gggtcctgagattgaaaca

SEQ ID NO: 280125 - DNA, 19 bp, Homo sapiens
  siRNA target sequence for FLJ10769 (NM_018210.1,1133-1151).
ccaccacctccgacatgat

SEQ ID NO: 280126 - DNA, 19 bp, Homo sapiens
  siRNA target sequence for FLJ11294 (NM_018383.2,220-238).
gcacctcgacagctgtttt

SEQ ID NO: 280127 - DNA, 19 bp, Homo sapiens
  siRNA target sequence for FLJ11294 (NM_018383.2,223-241).
cctcgacagctgttttata

SEQ ID NO: 280128 - DNA, 19 bp, Homo sapiens
  siRNA target sequence for FLJ11294 (NM_018383.2,224-242).
ctcgacagctgttttataa

SEQ ID NO: 280129 - DNA, 19 bp, Homo sapiens
  siRNA target sequence for FLJ11294 (NM_018383.2,310-328).
gctgtgaaccgaaaaacca

SEQ ID NO: 280130 - DNA, 19 bp, Homo sapiens
  siRNA target sequence for FLJ11294 (NM_018383.2,320-338).
gaaaaaccatagactacaa

SEQ ID NO: 280131 - DNA, 19 bp, Homo sapiens
  siRNA target sequence for FLJ11294 (NM_018383.2,331-349).
gactacaatccatctgtaa

SEQ ID NO: 280132 - DNA, 19 bp, Homo sapiens
  siRNA target sequence for FLJ11294 (NM_018383.2,406-424).
cagcctgatgcaggttatt

SEQ ID NO: 280133 - DNA, 19 bp, Homo sapiens
  siRNA target sequence for FLJ11294 (NM_018383.2,409-427).
cctgatgcaggttattaca

SEQ ID NO: 280134 - DNA, 19 bp, Homo sapiens
  siRNA target sequence for FLJ11294 (NM_018383.2,416-434).
caggttattacaatgatct

SEQ ID NO: 280135 - DNA, 19 bp, Homo sapiens
  siRNA target sequence for FLJ11294 (NM_018383.2,439-457).
ccacctataggaatgttga

SEQ ID NO: 280136 - DNA, 19 bp, Homo sapiens
  siRNA target sequence for FLJ11294 (NM_018383.2,442-460).
cctataggaatgttgaata

SEQ ID NO: 280137 - DNA, 19 bp, Homo sapiens
  siRNA target sequence for FLJ11294 (NM_018383.2,443-461).
ctataggaatgttgaataa

SEQ ID NO: 280138 - DNA, 19 bp, Homo sapiens
  siRNA target sequence for FLJ11294 (NM_018383.2,449-467).
gaatgttgaataatcctat

SEQ ID NO: 280139 - DNA, 19 bp, Homo sapiens
  siRNA target sequence for FLJ11294 (NM_018383.2,463-481).
cctatgaatgcagtaacaa

SEQ ID NO: 280140 - DNA, 19 bp, Homo sapiens
  siRNA target sequence for FLJ11294 (NM_018383.2,490-508).
gttcggacatcaacaaata

SEQ ID NO: 280141 - DNA, 19 bp, Homo sapiens
  siRNA target sequence for FLJ11294 (NM_018383.2,494-512).
ggacatcaacaaataaagt

SEQ ID NO: 280142 - DNA, 19 bp, Homo sapiens
  siRNA target sequence for FLJ11294 (NM_018383.2,561-579).
ggtcactggagcttctagt

SEQ ID NO: 280143 - DNA, 19 bp, Homo sapiens
  siRNA target sequence for FLJ11294 (NM_018383.2,571-589).
gcttctagtggggagttta

SEQ ID NO: 280144 - DNA, 19 bp, Homo sapiens
  siRNA target sequence for FLJ11294 (NM_018383.2,597-615).
gaatggactcactttcaat

SEQ ID NO: 280145 - DNA, 19 bp, Homo sapiens
  siRNA target sequence for FLJ11294 (NM_018383.2,602-620).
gactcactttcaattttga

SEQ ID NO: 280146 - DNA, 19 bp, Homo sapiens
  siRNA target sequence for FLJ11294 (NM_018383.2,655-673).
gccatgacgtggtcacata

SEQ ID NO: 280147 - DNA, 19 bp, Homo sapiens
  siRNA target sequence for FLJ11294 (NM_018383.2,656-674).
ccatgacgtggtcacataa

SEQ ID NO: 280148 - DNA, 19 bp, Homo sapiens
  siRNA target sequence for FLJ11294 (NM_018383.2,657-675).
catgacgtggtcacataat

SEQ ID NO: 280149 - DNA, 19 bp, Homo sapiens
  siRNA target sequence for FLJ11294 (NM_018383.2,695-713).
cagaccacggaggatatgt

SEQ ID NO: 280150 - DNA, 19 bp, Homo sapiens
  siRNA target sequence for FLJ11294 (NM_018383.2,697-715).
gaccacggaggatatgtga

SEQ ID NO: 280151 - DNA, 19 bp, Homo sapiens
  siRNA target sequence for FLJ11294 (NM_018383.2,722-740).
ggcagtcgaacatgaacaa

SEQ ID NO: 280152 - DNA, 19 bp, Homo sapiens
  siRNA target sequence for FLJ11294 (NM_018383.2,789-807).
ctcacccacggataataaa

SEQ ID NO: 280153 - DNA, 19 bp, Homo sapiens
  siRNA target sequence for FLJ11294 (NM_018383.2,791-809).
cacccacggataataaatt

SEQ ID NO: 280154 - DNA, 19 bp, Homo sapiens
  siRNA target sequence for FLJ11294 (NM_018383.2,920-938).
caaccaaagggttagttgt

SEQ ID NO: 280155 - DNA, 19 bp, Homo sapiens
  siRNA target sequence for FLJ11294 (NM_018383.2,937-955).
gtttcaggaagtaaagata

SEQ ID NO: 280156 - DNA, 19 bp, Homo sapiens
  siRNA target sequence for FLJ11294 (NM_018383.2,956-974).
gtcaacagccaatcaagtt

SEQ ID NO: 280157 - DNA, 19 bp, Homo sapiens
  siRNA target sequence for FLJ11294 (NM_018383.2,996-1014).
gagtcttgcaacacttcat

SEQ ID NO: 280158 - DNA, 19 bp, Homo sapiens
  siRNA target sequence for FLJ11294 (NM_018383.2,1007-1025).
cacttcatgcccataaaaa

SEQ ID NO: 280159 - DNA, 19 bp, Homo sapiens
  siRNA target sequence for FLJ11294 (NM_018383.2,1073-1091).
cagcatcacgtgatcatct

SEQ ID NO: 280160 - DNA, 19 bp, Homo sapiens
  siRNA target sequence for FLJ11294 (NM_018383.2,1079-1097).
cacgtgatcatctctgtaa

SEQ ID NO: 280161 - DNA, 19 bp, Homo sapiens
  siRNA target sequence for FLJ11294 (NM_018383.2,1090-1108).
ctctgtaaactttttgata

SEQ ID NO: 280162 - DNA, 19 bp, Homo sapiens
  siRNA target sequence for FLJ11294 (NM_018383.2,1135-1153).
gtcttccgaggtcataaga

SEQ ID NO: 280163 - DNA, 19 bp, Homo sapiens
  siRNA target sequence for FLJ11294 (NM_018383.2,1140-1158).
ccgaggtcataagaaagaa

SEQ ID NO: 280164 - DNA, 19 bp, Homo sapiens
  siRNA target sequence for FLJ11294 (NM_018383.2,1210-1228).
gggtctgatggttctttgt

SEQ ID NO: 280165 - DNA, 19 bp, Homo sapiens
  siRNA target sequence for FLJ11294 (NM_018383.2,1212-1230).
gtctgatggttctttgtta

SEQ ID NO: 280166 - DNA, 19 bp, Homo sapiens
  siRNA target sequence for FLJ11294 (NM_018383.2,1276-1294).
gctcacgaagggatgatct

SEQ ID NO: 280167 - DNA, 19 bp, Homo sapiens
  siRNA target sequence for FLJ11294 (NM_018383.2,1308-1326).
gcatcctcttgggcatatt

SEQ ID NO: 280168 - DNA, 19 bp, Homo sapiens
  siRNA target sequence for FLJ11294 (NM_018383.2,1345-1363).
gaccatactagcaaattct

SEQ ID NO: 280169 - DNA, 19 bp, Homo sapiens
  siRNA target sequence for FLJ11294 (NM_018383.2,1370-1388).
gaaaccgaccaggtgataa

SEQ ID NO: 280170 - DNA, 19 bp, Homo sapiens
  siRNA target sequence for FLJ11294 (NM_018383.2,1393-1411).
cgagatcgatataatctaa

SEQ ID NO: 280171 - DNA, 19 bp, Homo sapiens
  siRNA target sequence for FLJ11294 (NM_018383.2,1394-1412).
gagatcgatataatctaaa

SEQ ID NO: 280172 - DNA, 19 bp, Homo sapiens
  siRNA target sequence for FLJ11294 (NM_018383.2,1399-1417).
cgatataatctaaaccttt

SEQ ID NO: 280173 - DNA, 19 bp, Homo sapiens
  siRNA target sequence for FLJ11294 (NM_018383.2,1450-1468).
gatgacctcgaacctaata

SEQ ID NO: 280174 - DNA, 19 bp, Homo sapiens
  siRNA target sequence for FLJ11294 (NM_018383.2,1463-1481).
ctaatagcctggcagtaat

SEQ ID NO: 280175 - DNA, 19 bp, Homo sapiens
  siRNA target sequence for FLJ11294 (NM_018383.2,1492-1510).
ggaataccagaacaactaa

SEQ ID NO: 280176 - DNA, 19 bp, Homo sapiens
  siRNA target sequence for FLJ11294 (NM_018383.2,1517-1535).
ctatggaacaagaacagat

SEQ ID NO: 280177 - DNA, 19 bp, Homo sapiens
  siRNA target sequence for FLJ11294 (NM_018383.2,1632-1650).
gaagaaagttccttatgca

SEQ ID NO: 280178 - DNA, 19 bp, Homo sapiens
  siRNA target sequence for FLJ11294 (NM_018383.2,1635-1653).
gaaagttccttatgcaaaa

SEQ ID NO: 280179 - DNA, 19 bp, Homo sapiens
  siRNA target sequence for FLJ11294 (NM_018383.2,1785-1803).
gcaagaaatggctacatta

SEQ ID NO: 280180 - DNA, 19 bp, Homo sapiens
  siRNA target sequence for FLJ11294 (NM_018383.2,1794-1812).
ggctacattacaatatact

SEQ ID NO: 280181 - DNA, 19 bp, Homo sapiens
  siRNA target sequence for FLJ11294 (NM_018383.2,1827-1845).
ggagcaacttaaaattgaa

SEQ ID NO: 280182 - DNA, 19 bp, Homo sapiens
  siRNA target sequence for FLJ11294 (NM_018383.2,1943-1961).
ctcagattcctcaaggttt

SEQ ID NO: 280183 - DNA, 19 bp, Homo sapiens
  siRNA target sequence for FLJ11294 (NM_018383.2,2355-2373).
ggggcctccgggtactcaa

SEQ ID NO: 280184 - DNA, 19 bp, Homo sapiens
  siRNA target sequence for FLJ11294 (NM_018383.2,2360-2378).
ctccgggtactcaaggtat

SEQ ID NO: 280185 - DNA, 19 bp, Homo sapiens
  siRNA target sequence for FLJ11294 (NM_018383.2,2548-2566).
gctccccaagggatgatta

SEQ ID NO: 280186 - DNA, 19 bp, Homo sapiens
  siRNA target sequence for FLJ11294 (NM_018383.2,2623-2641).
cacggccctcaggaaatga

SEQ ID NO: 280187 - DNA, 19 bp, Homo sapiens
  siRNA target sequence for FLJ11294 (NM_018383.2,2625-2643).
cggccctcaggaaatgaga

SEQ ID NO: 280188 - DNA, 19 bp, Homo sapiens
  siRNA target sequence for FLJ11294 (NM_018383.2,2846-2864).
ctcaagggccaataccatt

SEQ ID NO: 280189 - DNA, 19 bp, Homo sapiens
  siRNA target sequence for FLJ11294 (NM_018383.2,3041-3059).
gccctccaaaccatcacat

SEQ ID NO: 280190 - DNA, 19 bp, Homo sapiens
  siRNA target sequence for FLJ11294 (NM_018383.2,3179-3197).
cagacttccccgatgactt

SEQ ID NO: 280191 - DNA, 19 bp, Homo sapiens
  siRNA target sequence for FLJ11294 (NM_018383.2,3236-3254).
gccaccggttacgtgaatt

SEQ ID NO: 280192 - DNA, 19 bp, Homo sapiens
  siRNA target sequence for FLJ11294 (NM_018383.2,3237-3255).
ccaccggttacgtgaattt

SEQ ID NO: 280193 - DNA, 19 bp, Homo sapiens
  siRNA target sequence for FLJ11294 (NM_018383.2,3432-3450).
cgaggacccacgttttcga

SEQ ID NO: 280194 - DNA, 19 bp, Homo sapiens
  siRNA target sequence for FLJ11294 (NM_018383.2,3451-3469).
gggcgcagagaagaaagtt

SEQ ID NO: 280195 - DNA, 19 bp, Homo sapiens
  siRNA target sequence for FLJ11294 (NM_018383.2,3452-3470).
ggcgcagagaagaaagttt

SEQ ID NO: 280196 - DNA, 19 bp, Homo sapiens
  siRNA target sequence for FLJ11294 (NM_018383.2,3663-3681).
cgagttccctcgctttgaa

SEQ ID NO: 280197 - DNA, 19 bp, Homo sapiens
  siRNA target sequence for FLJ11294 (NM_018383.2,3720-3738).
gcctgggccaggtcatgaa

SEQ ID NO: 280198 - DNA, 19 bp, Homo sapiens
  siRNA target sequence for FLJ11294 (NM_018383.2,3724-3742).
gggccaggtcatgaacatt

SEQ ID NO: 280199 - DNA, 19 bp, Homo sapiens
  siRNA target sequence for FLJ11294 (NM_018383.2,4097-4115).
ggggtagagggagtaacat

SEQ ID NO: 280200 - DNA, 19 bp, Homo sapiens
  siRNA target sequence for FLJ11294 (NM_018383.2,4099-4117).
ggtagagggagtaacatga

SEQ ID NO: 280201 - DNA, 19 bp, Homo sapiens
  siRNA target sequence for FLJ11749 (NM_024591.2,288-306).
ggccatggttcagagtatt

SEQ ID NO: 280202 - DNA, 19 bp, Homo sapiens
  siRNA target sequence for FLJ11749 (NM_024591.2,290-308).
ccatggttcagagtattga

SEQ ID NO: 280203 - DNA, 19 bp, Homo sapiens
  siRNA target sequence for FLJ11749 (NM_024591.2,307-325).
gagttcacccagatcgaaa

SEQ ID NO: 280204 - DNA, 19 bp, Homo sapiens
  siRNA target sequence for FLJ11749 (NM_024591.2,312-330).
cacccagatcgaaatgaaa

SEQ ID NO: 280205 - DNA, 19 bp, Homo sapiens
  siRNA target sequence for FLJ11749 (NM_024591.2,314-332).
cccagatcgaaatgaaagt

SEQ ID NO: 280206 - DNA, 19 bp, Homo sapiens
  siRNA target sequence for FLJ11749 (NM_024591.2,316-334).
cagatcgaaatgaaagtga

SEQ ID NO: 280207 - DNA, 19 bp, Homo sapiens
  siRNA target sequence for FLJ11749 (NM_024591.2,343-361).
ctgcagtttggaaatgagt

SEQ ID NO: 280208 - DNA, 19 bp, Homo sapiens
  siRNA target sequence for FLJ13448 (NM_025147.2,71-89).
ggtcatacggccttgagaa

SEQ ID NO: 280209 - DNA, 19 bp, Homo sapiens
  siRNA target sequence for FLJ13448 (NM_025147.2,145-163).
cgtgcggaatggcagatat

SEQ ID NO: 280210 - DNA, 19 bp, Homo sapiens
  siRNA target sequence for FLJ13448 (NM_025147.2,148-166).
gcggaatggcagatattta

SEQ ID NO: 280211 - DNA, 19 bp, Homo sapiens
  siRNA target sequence for FLJ13448 (NM_025147.2,168-186).
cttcctgtggtatactgat

SEQ ID NO: 280212 - DNA, 19 bp, Homo sapiens
  siRNA target sequence for FLJ13448 (NM_025147.2,190-208).
cagaactcttccactacat

SEQ ID NO: 280213 - DNA, 19 bp, Homo sapiens
  siRNA target sequence for FLJ13448 (NM_025147.2,200-218).
ccactacatacctcaattt

SEQ ID NO: 280214 - DNA, 19 bp, Homo sapiens
  siRNA target sequence for FLJ13448 (NM_025147.2,239-257).
cgaactttcttcaaaatca

SEQ ID NO: 280215 - DNA, 19 bp, Homo sapiens
  siRNA target sequence for FLJ13448 (NM_025147.2,258-276).
ctgcaccattaataaacaa

SEQ ID NO: 280216 - DNA, 19 bp, Homo sapiens
  siRNA target sequence for FLJ13448 (NM_025147.2,309-327).
gatattcaatgcaggaaat

SEQ ID NO: 280217 - DNA, 19 bp, Homo sapiens
  siRNA target sequence for FLJ13448 (NM_025147.2,319-337).
gcaggaaatgtatgatgta

SEQ ID NO: 280218 - DNA, 19 bp, Homo sapiens
  siRNA target sequence for FLJ13448 (NM_025147.2,322-340).
ggaaatgtatgatgtagta

SEQ ID NO: 280219 - DNA, 19 bp, Homo sapiens
  siRNA target sequence for FLJ13448 (NM_025147.2,323-341).
gaaatgtatgatgtagtat

SEQ ID NO: 280220 - DNA, 19 bp, Homo sapiens
  siRNA target sequence for FLJ13448 (NM_025147.2,352-370).
ggattacaagcattttgtt

SEQ ID NO: 280221 - DNA, 19 bp, Homo sapiens
  siRNA target sequence for FLJ13448 (NM_025147.2,372-390).
cttggtgcaaaaaatcaga

SEQ ID NO: 280222 - DNA, 19 bp, Homo sapiens
  siRNA target sequence for FLJ13448 (NM_025147.2,446-464).
cctgtgttggagcgatata

SEQ ID NO: 280223 - DNA, 19 bp, Homo sapiens
  siRNA target sequence for FLJ13448 (NM_025147.2,449-467).
gtgttggagcgatatacat

SEQ ID NO: 280224 - DNA, 19 bp, Homo sapiens
  siRNA target sequence for FLJ13448 (NM_025147.2,451-469).
gttggagcgatatacatca

SEQ ID NO: 280225 - DNA, 19 bp, Homo sapiens
  siRNA target sequence for FLJ13448 (NM_025147.2,454-472).
ggagcgatatacatcagta

SEQ ID NO: 280226 - DNA, 19 bp, Homo sapiens
  siRNA target sequence for FLJ13448 (NM_025147.2,457-475).
gcgatatacatcagtagta

SEQ ID NO: 280227 - DNA, 19 bp, Homo sapiens
  siRNA target sequence for FLJ13448 (NM_025147.2,458-476).
cgatatacatcagtagtaa

SEQ ID NO: 280228 - DNA, 19 bp, Homo sapiens
  siRNA target sequence for FLJ13448 (NM_025147.2,481-499).
ggtgaaacctcatttagta

SEQ ID NO: 280229 - DNA, 19 bp, Homo sapiens
  siRNA target sequence for FLJ13448 (NM_025147.2,482-500).
gtgaaacctcatttagtaa

SEQ ID NO: 280230 - DNA, 19 bp, Homo sapiens
  siRNA target sequence for FLJ13448 (NM_025147.2,518-536).
gggagacttttcaatcatt

SEQ ID NO: 280231 - DNA, 19 bp, Homo sapiens
  siRNA target sequence for FLJ13448 (NM_025147.2,519-537).
ggagacttttcaatcattt

SEQ ID NO: 280232 - DNA, 19 bp, Homo sapiens
  siRNA target sequence for FLJ13448 (NM_025147.2,640-658).
gcttgccacactctttttt

SEQ ID NO: 280233 - DNA, 19 bp, Homo sapiens
  siRNA target sequence for FLJ13448 (NM_025147.2,680-698).
gtagctgcctttgaaagaa

SEQ ID NO: 280234 - DNA, 19 bp, Homo sapiens
  siRNA target sequence for FLJ13448 (NM_025147.2,710-728).
ctgtatggtccagaaacaa

SEQ ID NO: 280235 - DNA, 19 bp, Homo sapiens
  siRNA target sequence for FLJ13448 (NM_025147.2,712-730).
gtatggtccagaaacaaat

SEQ ID NO: 280236 - DNA, 19 bp, Homo sapiens
  siRNA target sequence for FLJ13448 (NM_025147.2,739-757).
ggagttaatgcttcatgaa

SEQ ID NO: 280237 - DNA, 19 bp, Homo sapiens
  siRNA target sequence for FLJ14007 (NM_024699.1,58-76).
gccggcagcgagattttct

SEQ ID NO: 280238 - DNA, 19 bp, Homo sapiens
  siRNA target sequence for FLJ14007 (NM_024699.1,59-77).
ccggcagcgagattttctt

SEQ ID NO: 280239 - DNA, 19 bp, Homo sapiens
  siRNA target sequence for FLJ14007 (NM_024699.1,174-192).
ctgaagacagatcaacata

SEQ ID NO: 280240 - DNA, 19 bp, Homo sapiens
  siRNA target sequence for FLJ14007 (NM_024699.1,176-194).
gaagacagatcaacataca

SEQ ID NO: 280241 - DNA, 19 bp, Homo sapiens
  siRNA target sequence for FLJ14007 (NM_024699.1,231-249).
gaacttgtggcagttatat

SEQ ID NO: 280242 - DNA, 19 bp, Homo sapiens
  siRNA target sequence for FLJ14007 (NM_024699.1,284-302).
ccgtcatcagtcagatcat

SEQ ID NO: 280243 - DNA, 19 bp, Homo sapiens
  siRNA target sequence for FLJ14007 (NM_024699.1,343-361).
ccactcagaaacttgttaa

SEQ ID NO: 280244 - DNA, 19 bp, Homo sapiens
  siRNA target sequence for FLJ14007 (NM_024699.1,433-451).
ctgcaaaggttgcattgat

SEQ ID NO: 280245 - DNA, 19 bp, Homo sapiens
  siRNA target sequence for FLJ14007 (NM_024699.1,465-483).
catgctgatggcgataagt

SEQ ID NO: 280246 - DNA, 19 bp, Homo sapiens
  siRNA target sequence for FLJ14007 (NM_024699.1,468-486).
gctgatggcgataagtcat

SEQ ID NO: 280247 - DNA, 19 bp, Homo sapiens
  siRNA target sequence for FLJ14007 (NM_024699.1,469-487).
ctgatggcgataagtcatt

SEQ ID NO: 280248 - DNA, 19 bp, Homo sapiens
  siRNA target sequence for FLJ14007 (NM_024699.1,567-585).
caccgatggagcattggaa

SEQ ID NO: 280249 - DNA, 19 bp, Homo sapiens
  siRNA target sequence for FLJ14007 (NM_024699.1,684-702).
gccttacccttggatcata

SEQ ID NO: 280250 - DNA, 19 bp, Homo sapiens
  siRNA target sequence for FLJ14007 (NM_024699.1,686-704).
cttacccttggatcatact

SEQ ID NO: 280251 - DNA, 19 bp, Homo sapiens
  siRNA target sequence for FLJ14007 (NM_024699.1,725-743).
ggaggattgtcctttatat

SEQ ID NO: 280252 - DNA, 19 bp, Homo sapiens
  siRNA target sequence for FLJ14007 (NM_024699.1,726-744).
gaggattgtcctttatata

SEQ ID NO: 280253 - DNA, 19 bp, Homo sapiens
  siRNA target sequence for FLJ20485 (NM_019042.2,1588-1606).
ggcataatacccagaaata

SEQ ID NO: 280254 - DNA, 19 bp, Homo sapiens
  siRNA target sequence for FLJ20485 (NM_019042.2,1598-1616).
ccagaaataatcgcttaat

SEQ ID NO: 280255 - DNA, 19 bp, Homo sapiens
  siRNA target sequence for FLJ20485 (NM_019042.2,1601-1619).
gaaataatcgcttaatgta

SEQ ID NO: 280256 - DNA, 19 bp, Homo sapiens
  siRNA target sequence for FLJ20485 (NM_019042.2,1609-1627).
cgcttaatgtatattcata

SEQ ID NO: 280257 - DNA, 19 bp, Homo sapiens
  siRNA target sequence for FLJ20485 (NM_019042.2,1642-1660).
gtgtggaataacatggtaa

SEQ ID NO: 280258 - DNA, 19 bp, Homo sapiens
  siRNA target sequence for FLJ20485 (NM_019042.2,1661-1679).
gcaagaggatagaagacta

SEQ ID NO: 280259 - DNA, 19 bp, Homo sapiens
  siRNA target sequence for FLJ20485 (NM_019042.2,1662-1680).
caagaggatagaagactat

SEQ ID NO: 280260 - DNA, 19 bp, Homo sapiens
  siRNA target sequence for FLJ20485 (NM_019042.2,1721-1739).
ccacagccacctatattga

SEQ ID NO: 280261 - DNA, 19 bp, Homo sapiens
  siRNA target sequence for FLJ20485 (NM_019042.2,1747-1765).
gatgttaataattactcta

SEQ ID NO: 280262 - DNA, 19 bp, Homo sapiens
  siRNA target sequence for FLJ20485 (NM_019042.2,1763-1781).
ctatccatgatgtggtaat

SEQ ID NO: 280263 - DNA, 19 bp, Homo sapiens
  siRNA target sequence for FLJ20485 (NM_019042.2,1782-1800).
gcccttgcctggtttcgat

SEQ ID NO: 280264 - DNA, 19 bp, Homo sapiens
  siRNA target sequence for FLJ20485 (NM_019042.2,1790-1808).
ctggtttcgatgttatcta

SEQ ID NO: 280265 - DNA, 19 bp, Homo sapiens
  siRNA target sequence for FLJ20485 (NM_019042.2,1801-1819).
gttatctacccaaagcata

SEQ ID NO: 280266 - DNA, 19 bp, Homo sapiens
  siRNA target sequence for FLJ20485 (NM_019042.2,1848-1866).
cacagctgacaatcttgat

SEQ ID NO: 280267 - DNA, 19 bp, Homo sapiens
  siRNA target sequence for FLJ20485 (NM_019042.2,1850-1868).
cagctgacaatcttgatat

SEQ ID NO: 280268 - DNA, 19 bp, Homo sapiens
  siRNA target sequence for FLJ20485 (NM_019042.2,1855-1873).
gacaatcttgatattgaca

SEQ ID NO: 280269 - DNA, 19 bp, Homo sapiens
  siRNA target sequence for FLJ20485 (NM_019042.2,1861-1879).
cttgatattgacaacatga

SEQ ID NO: 280270 - DNA, 19 bp, Homo sapiens
  siRNA target sequence for FLJ20485 (NM_019042.2,1880-1898).
gacacaaaattcgagatta

SEQ ID NO: 280271 - DNA, 19 bp, Homo sapiens
  siRNA target sequence for FLJ20485 (NM_019042.2,1882-1900).
cacaaaattcgagattatt

SEQ ID NO: 280272 - DNA, 19 bp, Homo sapiens
  siRNA target sequence for FLJ20485 (NM_019042.2,1907-1925).
caggggcctaccgaaagat

SEQ ID NO: 280273 - DNA, 19 bp, Homo sapiens
  siRNA target sequence for FLJ20485 (NM_019042.2,1912-1930).
gcctaccgaaagatcatta

SEQ ID NO: 280274 - DNA, 19 bp, Homo sapiens
  siRNA target sequence for FLJ20485 (NM_019042.2,1913-1931).
cctaccgaaagatcattat

SEQ ID NO: 280275 - DNA, 19 bp, Homo sapiens
  siRNA target sequence for FLJ20485 (NM_019042.2,1914-1932).
ctaccgaaagatcattatt

SEQ ID NO: 280276 - DNA, 19 bp, Homo sapiens
  siRNA target sequence for FLJ20485 (NM_019042.2,1917-1935).
ccgaaagatcattattcgt

SEQ ID NO: 280277 - DNA, 19 bp, Homo sapiens
  siRNA target sequence for FLJ20485 (NM_019042.2,1926-1944).
cattattcgtcctcagaat

SEQ ID NO: 280278 - DNA, 19 bp, Homo sapiens
  siRNA target sequence for FLJ20485 (NM_019042.2,1950-1968).
ctgggaagtcgttgcatat

SEQ ID NO: 280279 - DNA, 19 bp, Homo sapiens
  siRNA target sequence for FLJ20485 (NM_019042.2,1952-1970).
gggaagtcgttgcatatga

SEQ ID NO: 280280 - DNA, 19 bp, Homo sapiens
  siRNA target sequence for FLJ20485 (NM_019042.2,1953-1971).
ggaagtcgttgcatatgat

SEQ ID NO: 280281 - DNA, 19 bp, Homo sapiens
  siRNA target sequence for FLJ20485 (NM_019042.2,2049-2067).
caaatacagggctctgaaa

SEQ ID NO: 280282 - DNA, 19 bp, Homo sapiens
  siRNA target sequence for FLJ20485 (NM_019042.2,2109-2127).
cattcgagaagtgctaaaa

SEQ ID NO: 280283 - DNA, 19 bp, Homo sapiens
  siRNA target sequence for FLJ20485 (NM_019042.2,2149-2167).
cagacgcagctgaatacaa

SEQ ID NO: 280284 - DNA, 19 bp, Homo sapiens
  siRNA target sequence for FLJ21128 (NM_025083.2,317-335).
cttcagggcaggtgacatt

SEQ ID NO: 280285 - DNA, 19 bp, Homo sapiens
  siRNA target sequence for FLJ21128 (NM_025083.2,327-345).
ggtgacattacggagttaa

SEQ ID NO: 280286 - DNA, 19 bp, Homo sapiens
  siRNA target sequence for FLJ21128 (NM_025083.2,328-346).
gtgacattacggagttaaa

SEQ ID NO: 280287 - DNA, 19 bp, Homo sapiens
  siRNA target sequence for FLJ21128 (NM_025083.2,428-446).
ctgccaagtgggcatcaat

SEQ ID NO: 280288 - DNA, 19 bp, Homo sapiens
  siRNA target sequence for FLJ21128 (NM_025083.2,432-450).
caagtgggcatcaatcaga

SEQ ID NO: 280289 - DNA, 19 bp, Homo sapiens
  siRNA target sequence for FLJ21128 (NM_025083.2,453-471).
ggcacaggcaagtttgtca

SEQ ID NO: 280290 - DNA, 19 bp, Homo sapiens
  siRNA target sequence for FLJ21128 (NM_025083.2,454-472).
gcacaggcaagtttgtcaa

SEQ ID NO: 280291 - DNA, 19 bp, Homo sapiens
  siRNA target sequence for FLJ21128 (NM_025083.2,490-508).
gcagtgcccctcagaatat

SEQ ID NO: 280292 - DNA, 19 bp, Homo sapiens
  siRNA target sequence for FLJ21128 (NM_025083.2,558-576).
cagcaacagtgctcaaaga

SEQ ID NO: 280293 - DNA, 19 bp, Homo sapiens
  siRNA target sequence for FLJ21128 (NM_025083.2,582-600).
gtcgacaggcacatggaat

SEQ ID NO: 280294 - DNA, 19 bp, Homo sapiens
  siRNA target sequence for FLJ21128 (NM_025083.2,602-620).
cttgagtcagtccaaaagt

SEQ ID NO: 280295 - DNA, 19 bp, Homo sapiens
  siRNA target sequence for FLJ21128 (NM_025083.2,669-687).
caggcaactcccaagaaaa

SEQ ID NO: 280296 - DNA, 19 bp, Homo sapiens
  siRNA target sequence for FLJ21128 (NM_025083.2,671-689).
ggcaactcccaagaaaagt

SEQ ID NO: 280297 - DNA, 19 bp, Homo sapiens
  siRNA target sequence for FLJ21128 (NM_025083.2,678-696).
cccaagaaaagtggtttaa

SEQ ID NO: 280298 - DNA, 19 bp, Homo sapiens
  siRNA target sequence for FLJ21128 (NM_025083.2,730-748).
gcttcggggatgatattga

SEQ ID NO: 280299 - DNA, 19 bp, Homo sapiens
  siRNA target sequence for FLJ21128 (NM_025083.2,756-774).
ccagacacagattttgatt

SEQ ID NO: 280300 - DNA, 19 bp, Homo sapiens
  siRNA target sequence for FLJ21128 (NM_025083.2,892-910).
gccatgatgagaacatctt

SEQ ID NO: 280301 - DNA, 19 bp, Homo sapiens
  siRNA target sequence for FLJ21128 (NM_025083.2,912-930).
gagtccgagcccattgtct

SEQ ID NO: 280302 - DNA, 19 bp, Homo sapiens
  siRNA target sequence for FLJ21128 (NM_025083.2,914-932).
gtccgagcccattgtctat

SEQ ID NO: 280303 - DNA, 19 bp, Homo sapiens
  siRNA target sequence for FLJ21128 (NM_025083.2,985-1003).
gcctggttgtcccaagtat

SEQ ID NO: 280304 - DNA, 19 bp, Homo sapiens
  siRNA target sequence for FLJ21128 (NM_025083.2,986-1004).
cctggttgtcccaagtatt

SEQ ID NO: 280305 - DNA, 19 bp, Homo sapiens
  siRNA target sequence for FLJ21128 (NM_025083.2,987-1005).
ctggttgtcccaagtattt

SEQ ID NO: 280306 - DNA, 19 bp, Homo sapiens
  siRNA target sequence for FLJ21128 (NM_025083.2,990-1008).
gttgtcccaagtatttcct

SEQ ID NO: 280307 - DNA, 19 bp, Homo sapiens
  siRNA target sequence for FLJ21128 (NM_025083.2,1132-1150).
ggttgaatcccaaaaatgt

SEQ ID NO: 280308 - DNA, 19 bp, Homo sapiens
  siRNA target sequence for FLJ21128 (NM_025083.2,1239-1257).
gatgtccaggtcatccttt

SEQ ID NO: 280309 - DNA, 19 bp, Homo sapiens
  siRNA target sequence for FLJ21128 (NM_025083.2,1272-1290).
gtcaagatgttggaatcta

SEQ ID NO: 280310 - DNA, 19 bp, Homo sapiens
  siRNA target sequence for FLJ21128 (NM_025083.2,1512-1530).
ggcattgatgccaaatggt

SEQ ID NO: 280311 - DNA, 19 bp, Homo sapiens
  siRNA target sequence for FLJ21128 (NM_025083.2,1565-1583).
gcacgcaggccgtatctat

SEQ ID NO: 280312 - DNA, 19 bp, Homo sapiens
  siRNA target sequence for FLJ21128 (NM_025083.2,1566-1584).
cacgcaggccgtatctatt

SEQ ID NO: 280313 - DNA, 19 bp, Homo sapiens
  siRNA target sequence for FLJ21128 (NM_025083.2,1569-1587).
gcaggccgtatctatttgt

SEQ ID NO: 280314 - DNA, 19 bp, Homo sapiens
  siRNA target sequence for FLJ21827 (NM_020153.2,513-531).
ccagaccccttctcatgta

SEQ ID NO: 280315 - DNA, 19 bp, Homo sapiens
  siRNA target sequence for FLJ21827 (NM_020153.2,516-534).
gaccccttctcatgtactt

SEQ ID NO: 280316 - DNA, 19 bp, Homo sapiens
  siRNA target sequence for FLJ21827 (NM_020153.2,518-536).
ccccttctcatgtacttga

SEQ ID NO: 280317 - DNA, 19 bp, Homo sapiens
  siRNA target sequence for FLJ21827 (NM_020153.2,605-623).
ctcaacggggctttagtga

SEQ ID NO: 280318 - DNA, 19 bp, Homo sapiens
  siRNA target sequence for FLJ21827 (NM_020153.2,607-625).
caacggggctttagtgaaa

SEQ ID NO: 280319 - DNA, 19 bp, Homo sapiens
  siRNA target sequence for FLJ21827 (NM_020153.2,728-746).
ctgcagactatgagcattt

SEQ ID NO: 280320 - DNA, 19 bp, Homo sapiens
  siRNA target sequence for FLJ21827 (NM_020153.2,852-870).
cccagctgtcggggatatt

SEQ ID NO: 280321 - DNA, 19 bp, Homo sapiens
  siRNA target sequence for FLJ21827 (NM_020153.2,854-872).
cagctgtcggggatattga

SEQ ID NO: 280322 - DNA, 19 bp, Homo sapiens
  siRNA target sequence for FLJ21827 (NM_020153.2,912-930).
caaccttggcctattggta

SEQ ID NO: 280323 - DNA, 19 bp, Homo sapiens
  siRNA target sequence for FLJ21827 (NM_020153.2,967-985).
gtgctctcactctggttaa

SEQ ID NO: 280324 - DNA, 19 bp, Homo sapiens
  siRNA target sequence for FLJ21827 (NM_020153.2,976-994).
ctctggttaacagagaatt

SEQ ID NO: 280325 - DNA, 19 bp, Homo sapiens
  siRNA target sequence for FLJ21827 (NM_020153.2,1008-1026).
catcacacaacatatgaaa

SEQ ID NO: 280326 - DNA, 19 bp, Homo sapiens
  siRNA target sequence for FLJ21827 (NM_020153.2,1091-1109).
ctgaattacaccgttctaa

SEQ ID NO: 280327 - DNA, 19 bp, Homo sapiens
  siRNA target sequence for FLJ21827 (NM_020153.2,1136-1154).
ggcccatgcccgacattga

SEQ ID NO: 280328 - DNA, 19 bp, Homo sapiens
  siRNA target sequence for FLJ21827 (NM_020153.2,1212-1230).
gcccacggcagagattgat

SEQ ID NO: 280329 - DNA, 19 bp, Homo sapiens
  siRNA target sequence for FLJ21827 (NM_020153.2,1213-1231).
cccacggcagagattgatt

SEQ ID NO: 280330 - DNA, 19 bp, Homo sapiens
  siRNA target sequence for FLJ21827 (NM_020153.2,1322-1340).
ccctctactcagaattcaa

SEQ ID NO: 280331 - DNA, 19 bp, Homo sapiens
  siRNA target sequence for FLJ32452 (NM_144576.2,341-359).
ctcgggctgcccagatctt

SEQ ID NO: 280332 - DNA, 19 bp, Homo sapiens
  siRNA target sequence for FLJ32452 (NM_144576.2,364-382).
gctgaggctggcttacctt

SEQ ID NO: 280333 - DNA, 19 bp, Homo sapiens
  siRNA target sequence for FLJ32452 (NM_144576.2,434-452).
cttactcggagcgtagaat

SEQ ID NO: 280334 - DNA, 19 bp, Homo sapiens
  siRNA target sequence for FLJ32452 (NM_144576.2,449-467).
gaatcatggggtactcaat

SEQ ID NO: 280335 - DNA, 19 bp, Homo sapiens
  siRNA target sequence for FLJ32452 (NM_144576.2,498-516).
ccaggagtatcgtgagttt

SEQ ID NO: 280336 - DNA, 19 bp, Homo sapiens
  siRNA target sequence for FLJ32452 (NM_144576.2,548-566).
ccagccgtaagggtcattt

SEQ ID NO: 280337 - DNA, 19 bp, Homo sapiens
  siRNA target sequence for FLJ32452 (NM_144576.2,593-611).
cacctgtcatggaacgtta

SEQ ID NO: 280338 - DNA, 19 bp, Homo sapiens
  siRNA target sequence for FLJ32452 (NM_144576.2,645-663).
ggtcaaggctgtttgtact

SEQ ID NO: 280339 - DNA, 19 bp, Homo sapiens
  siRNA target sequence for FLJ32452 (NM_144576.2,673-691).
ctcttcaaccacttagaga

SEQ ID NO: 280340 - DNA, 19 bp, Homo sapiens
  siRNA target sequence for FLJ32452 (NM_144576.2,699-717).
gcgattcagccctggtatt

SEQ ID NO: 280341 - DNA, 19 bp, Homo sapiens
  siRNA target sequence for FLJ32452 (NM_144576.2,737-755).
gcactgtggacttttcgat

SEQ ID NO: 280342 - DNA, 19 bp, Homo sapiens
  siRNA target sequence for FLJ32452 (NM_144576.2,742-760).
gtggacttttcgatttcct

SEQ ID NO: 280343 - DNA, 19 bp, Homo sapiens
  siRNA target sequence for FLJ32452 (NM_144576.2,744-762).
ggacttttcgatttccttt

SEQ ID NO: 280344 - DNA, 19 bp, Homo sapiens
  siRNA target sequence for FLJ32452 (NM_144576.2,789-807).
gctggccaccatgtttttt

SEQ ID NO: 280345 - DNA, 19 bp, Homo sapiens
  siRNA target sequence for FLJ32452 (NM_144576.2,792-810).
ggccaccatgttttttgat

SEQ ID NO: 280346 - DNA, 19 bp, Homo sapiens
  siRNA target sequence for FLJ32452 (NM_144576.2,878-896).
ccatcccccgtgaactgat

SEQ ID NO: 280347 - DNA, 19 bp, Homo sapiens
  siRNA target sequence for FN5 (NM_020179.1,346-364).
ccgtggtcgtgctcttgat

SEQ ID NO: 280348 - DNA, 19 bp, Homo sapiens
  siRNA target sequence for FSD1 (NM_024333.1,245-263).
catgcttatgaagataaaa

SEQ ID NO: 280349 - DNA, 19 bp, Homo sapiens
  siRNA target sequence for FSD1 (NM_024333.1,438-456).
gccttccggctatcattga

SEQ ID NO: 280350 - DNA, 19 bp, Homo sapiens
  siRNA target sequence for FSD1 (NM_024333.1,439-457).
ccttccggctatcattgaa

SEQ ID NO: 280351 - DNA, 19 bp, Homo sapiens
  siRNA target sequence for FSD1 (NM_024333.1,440-458).
cttccggctatcattgaaa

SEQ ID NO: 280352 - DNA, 19 bp, Homo sapiens
  siRNA target sequence for FSD1 (NM_024333.1,745-763).
ccctgacaggtctcaagtt

SEQ ID NO: 280353 - DNA, 19 bp, Homo sapiens
  siRNA target sequence for FSD1 (NM_024333.1,746-764).
cctgacaggtctcaagttt

SEQ ID NO: 280354 - DNA, 19 bp, Homo sapiens
  siRNA target sequence for FSD1 (NM_024333.1,786-804).
cgtgtgaaggcctgtaaca

SEQ ID NO: 280355 - DNA, 19 bp, Homo sapiens
  siRNA target sequence for FSD1 (NM_024333.1,787-805).
gtgtgaaggcctgtaacaa

SEQ ID NO: 280356 - DNA, 19 bp, Homo sapiens
  siRNA target sequence for FSD1 (NM_024333.1,953-971).
caaggctcgcgagaaagat

SEQ ID NO: 280357 - DNA, 19 bp, Homo sapiens
  siRNA target sequence for FSD1 (NM_024333.1,1225-1243).
ggtgcctgcacgtcaacaa

SEQ ID NO: 280358 - DNA, 19 bp, Homo sapiens
  siRNA target sequence for FSD1 (NM_024333.1,1226-1244).
gtgcctgcacgtcaacaat

SEQ ID NO: 280359 - DNA, 19 bp, Homo sapiens
  siRNA target sequence for FSD1 (NM_024333.1,1361-1379).
caatgcccgcaccaaacaa

SEQ ID NO: 280360 - DNA, 19 bp, Homo sapiens
  siRNA target sequence for FSD1 (NM_024333.1,1380-1398).
gtgctgcacactttcaaga

SEQ ID NO: 280361 - DNA, 19 bp, Homo sapiens
  siRNA target sequence for GAGEC1 (NM_007003.2,132-150).
ctcccgatgtggttgcatt

SEQ ID NO: 280362 - DNA, 19 bp, Homo sapiens
  siRNA target sequence for GAGEC1 (NM_007003.2,151-169).
cgtggctcccggtgaatct

SEQ ID NO: 280363 - DNA, 19 bp, Homo sapiens
  siRNA target sequence for GAGEC1 (NM_007003.2,234-252).
ctccgatcgaagaacgtaa

SEQ ID NO: 280364 - DNA, 19 bp, Homo sapiens
  siRNA target sequence for GAGEC1 (NM_007003.2,237-255).
cgatcgaagaacgtaaagt

SEQ ID NO: 280365 - DNA, 19 bp, Homo sapiens
  siRNA target sequence for GAGEC1 (NM_007003.2,238-256).
gatcgaagaacgtaaagta

SEQ ID NO: 280366 - DNA, 19 bp, Homo sapiens
  siRNA target sequence for GAGEC1 (NM_007003.2,311-329).
ggctctgatgtaaaagaga

SEQ ID NO: 280367 - DNA, 19 bp, Homo sapiens
  siRNA target sequence for GAGEC1 (NM_007003.2,339-357).
ctaatcctaagcatgctaa

SEQ ID NO: 280368 - DNA, 19 bp, Homo sapiens
  siRNA target sequence for GAGEC1 (NM_007003.2,344-362).
cctaagcatgctaagacta

SEQ ID NO: 280369 - DNA, 19 bp, Homo sapiens
  siRNA target sequence for GAGEC1 (NM_007003.2,345-363).
ctaagcatgctaagactaa

SEQ ID NO: 280370 - DNA, 19 bp, Homo sapiens
  siRNA target sequence for GAS1 (NM_002048.1,736-754).
gcatctcggccctcattca

SEQ ID NO: 280371 - DNA, 19 bp, Homo sapiens
  siRNA target sequence for GAS8 (NM_001481.1,253-271).
gcgagcgggaggaacgaaa

SEQ ID NO: 280372 - DNA, 19 bp, Homo sapiens
  siRNA target sequence for GAS8 (NM_001481.1,258-276).
cgggaggaacgaaactact

SEQ ID NO: 280373 - DNA, 19 bp, Homo sapiens
  siRNA target sequence for GAS8 (NM_001481.1,637-655).
ccaggatgcggaatgattt

SEQ ID NO: 280374 - DNA, 19 bp, Homo sapiens
  siRNA target sequence for GAS8 (NM_001481.1,661-679).
ggcaagttcgagaaattga

SEQ ID NO: 280375 - DNA, 19 bp, Homo sapiens
  siRNA target sequence for GAS8 (NM_001481.1,720-738).
ctcgacttgcggagaaaga

SEQ ID NO: 280376 - DNA, 19 bp, Homo sapiens
  siRNA target sequence for GAS8 (NM_001481.1,722-740).
cgacttgcggagaaagact

SEQ ID NO: 280377 - DNA, 19 bp, Homo sapiens
  siRNA target sequence for GAS8 (NM_001481.1,814-832).
ccgacattaagaactacta

SEQ ID NO: 280378 - DNA, 19 bp, Homo sapiens
  siRNA target sequence for GAS8 (NM_001481.1,816-834).
gacattaagaactactaca

SEQ ID NO: 280379 - DNA, 19 bp, Homo sapiens
  siRNA target sequence for GAS8 (NM_001481.1,1037-1055).
gatcctgctttgcacaaaa

SEQ ID NO: 280380 - DNA, 19 bp, Homo sapiens
  siRNA target sequence for GAS8 (NM_001481.1,1051-1069).
caaaagcccgtttgaaagt

SEQ ID NO: 280381 - DNA, 19 bp, Homo sapiens
  siRNA target sequence for GAS8 (NM_001481.1,1333-1351).
gcaagctggaggatgttct

SEQ ID NO: 280382 - DNA, 19 bp, Homo sapiens
  siRNA target sequence for GAS8 (NM_001481.1,1347-1365).
gttcttgagtcgaagaaca

SEQ ID NO: 280383 - DNA, 19 bp, Homo sapiens
  siRNA target sequence for GCN5L1 (NM_001487.1,106-124).
cccgcctcctaaaagaaca

SEQ ID NO: 280384 - DNA, 19 bp, Homo sapiens
  siRNA target sequence for GCN5L1 (NM_001487.1,244-262).
cctacatgaaccagagaaa

SEQ ID NO: 280385 - DNA, 19 bp, Homo sapiens
  siRNA target sequence for GCN5L1 (NM_001487.1,424-442).
ccactgcactggaatatgt

SEQ ID NO: 280386 - DNA, 19 bp, Homo sapiens
  siRNA target sequence for GKN1 (NM_019617.2,90-108).
ctcctgccctagctaacta

SEQ ID NO: 280387 - DNA, 19 bp, Homo sapiens
  siRNA target sequence for GKN1 (NM_019617.2,92-110).
cctgccctagctaactata

SEQ ID NO: 280388 - DNA, 19 bp, Homo sapiens
  siRNA target sequence for GKN1 (NM_019617.2,93-111).
ctgccctagctaactataa

SEQ ID NO: 280389 - DNA, 19 bp, Homo sapiens
  siRNA target sequence for GKN1 (NM_019617.2,95-113).
gccctagctaactataata

SEQ ID NO: 280390 - DNA, 19 bp, Homo sapiens
  siRNA target sequence for GKN1 (NM_019617.2,96-114).
ccctagctaactataatat

SEQ ID NO: 280391 - DNA, 19 bp, Homo sapiens
  siRNA target sequence for GKN1 (NM_019617.2,98-116).
ctagctaactataatatca

SEQ ID NO: 280392 - DNA, 19 bp, Homo sapiens
  siRNA target sequence for GKN1 (NM_019617.2,165-183).
gtgtcaacaatgaacacaa

SEQ ID NO: 280393 - DNA, 19 bp, Homo sapiens
  siRNA target sequence for GKN1 (NM_019617.2,188-206).
gccaatgttgacaataaca

SEQ ID NO: 280394 - DNA, 19 bp, Homo sapiens
  siRNA target sequence for GKN1 (NM_019617.2,189-207).
ccaatgttgacaataacaa

SEQ ID NO: 280395 - DNA, 19 bp, Homo sapiens
  siRNA target sequence for GKN1 (NM_019617.2,223-241).
gaattccatctgggattat

SEQ ID NO: 280396 - DNA, 19 bp, Homo sapiens
  siRNA target sequence for GKN1 (NM_019617.2,282-300).
catgcattgtgcacaaaat

SEQ ID NO: 280397 - DNA, 19 bp, Homo sapiens
  siRNA target sequence for GKN1 (NM_019617.2,285-303).
gcattgtgcacaaaatgaa

SEQ ID NO: 280398 - DNA, 19 bp, Homo sapiens
  siRNA target sequence for GKN1 (NM_019617.2,408-426).
cagtcaacccaaacaaagt

SEQ ID NO: 280399 - DNA, 19 bp, Homo sapiens
  siRNA target sequence for GKN1 (NM_019617.2,438-456).
gcaagttcggaaaaaacat

SEQ ID NO: 280400 - DNA, 19 bp, Homo sapiens
  siRNA target sequence for GKN1 (NM_019617.2,439-457).
caagttcggaaaaaacatt

SEQ ID NO: 280401 - DNA, 19 bp, Homo sapiens
  siRNA target sequence for GKN1 (NM_019617.2,468-486).
gtcgtgggattccaacata

SEQ ID NO: 280402 - DNA, 19 bp, Homo sapiens
  siRNA target sequence for GKN1 (NM_019617.2,471-489).
gtgggattccaacatacat

SEQ ID NO: 280403 - DNA, 19 bp, Homo sapiens
  siRNA target sequence for GKN1 (NM_019617.2,538-556).
ctacacgaccagtgtacta

SEQ ID NO: 280404 - DNA, 19 bp, Homo sapiens
  siRNA target sequence for GKN1 (NM_019617.2,543-561).
cgaccagtgtactatggat

SEQ ID NO: 280405 - DNA, 19 bp, Homo sapiens
  siRNA target sequence for GKN1 (NM_019617.2,544-562).
gaccagtgtactatggatt

SEQ ID NO: 280406 - DNA, 19 bp, Homo sapiens
  siRNA target sequence for GLTSCR2 (NM_015710.2,165-183).
ggcgaggcccaagaaataa

SEQ ID NO: 280407 - DNA, 19 bp, Homo sapiens
  siRNA target sequence for GLTSCR2 (NM_015710.2,167-185).
cgaggcccaagaaataaga

SEQ ID NO: 280408 - DNA, 19 bp, Homo sapiens
  siRNA target sequence for GLTSCR2 (NM_015710.2,376-394).
gtcactgcttctcaagaaa

SEQ ID NO: 280409 - DNA, 19 bp, Homo sapiens
  siRNA target sequence for GLTSCR2 (NM_015710.2,410-428).
ctcatcctcgagaacacat

SEQ ID NO: 280410 - DNA, 19 bp, Homo sapiens
  siRNA target sequence for GLTSCR2 (NM_015710.2,782-800).
ggagcttcctacaatccat

SEQ ID NO: 280411 - DNA, 19 bp, Homo sapiens
  siRNA target sequence for GLTSCR2 (NM_015710.2,790-808).
ctacaatccatcctttgaa

SEQ ID NO: 280412 - DNA, 19 bp, Homo sapiens
  siRNA target sequence for GLTSCR2 (NM_015710.2,1364-1382).
cttcgagaccggttcaaga

SEQ ID NO: 280413 - DNA, 19 bp, Homo sapiens
  siRNA target sequence for GPM6B (NM_005278.2,334-352).
caactgatgcagtatgtca

SEQ ID NO: 280414 - DNA, 19 bp, Homo sapiens
  siRNA target sequence for GPM6B (NM_005278.2,358-376).
ggaattgcgtcctttttct

SEQ ID NO: 280415 - DNA, 19 bp, Homo sapiens
  siRNA target sequence for GPM6B (NM_005278.2,359-377).
gaattgcgtcctttttctt

SEQ ID NO: 280416 - DNA, 19 bp, Homo sapiens
  siRNA target sequence for GPM6B (NM_005278.2,375-393).
cttcttgtatgggatcatt

SEQ ID NO: 280417 - DNA, 19 bp, Homo sapiens
  siRNA target sequence for GPM6B (NM_005278.2,436-454).
ctgcacggtgagtttaaaa

SEQ ID NO: 280418 - DNA, 19 bp, Homo sapiens
  siRNA target sequence for GPM6B (NM_005278.2,470-488).
gatgcatcagtggaatgtt

SEQ ID NO: 280419 - DNA, 19 bp, Homo sapiens
  siRNA target sequence for GPM6B (NM_005278.2,542-560).
cagcggtgcccgtgtttat

SEQ ID NO: 280420 - DNA, 19 bp, Homo sapiens
  siRNA target sequence for GPM6B (NM_005278.2,544-562).
gcggtgcccgtgtttatgt

SEQ ID NO: 280421 - DNA, 19 bp, Homo sapiens
  siRNA target sequence for GPM6B (NM_005278.2,545-563).
cggtgcccgtgtttatgtt

SEQ ID NO: 280422 - DNA, 19 bp, Homo sapiens
  siRNA target sequence for GPM6B (NM_005278.2,547-565).
gtgcccgtgtttatgttct

SEQ ID NO: 280423 - DNA, 19 bp, Homo sapiens
  siRNA target sequence for GPM6B (NM_005278.2,551-569).
ccgtgtttatgttctacaa

SEQ ID NO: 280424 - DNA, 19 bp, Homo sapiens
  siRNA target sequence for GPM6B (NM_005278.2,553-571).
gtgtttatgttctacaaca

SEQ ID NO: 280425 - DNA, 19 bp, Homo sapiens
  siRNA target sequence for GPM6B (NM_005278.2,676-694).
gctttccccggaaaaatat

SEQ ID NO: 280426 - DNA, 19 bp, Homo sapiens
  siRNA target sequence for GPM6B (NM_005278.2,719-737).
gcaacacaaacgagttcta

SEQ ID NO: 280427 - DNA, 19 bp, Homo sapiens
  siRNA target sequence for GPM6B (NM_005278.2,794-812).
ccctgctgatctacatgat

SEQ ID NO: 280428 - DNA, 19 bp, Homo sapiens
  siRNA target sequence for GPM6B (NM_005278.2,804-822).
ctacatgatggctactaca

SEQ ID NO: 280429 - DNA, 19 bp, Homo sapiens
  siRNA target sequence for GPM6B (NM_005278.2,807-825).
catgatggctactacatat

SEQ ID NO: 280430 - DNA, 19 bp, Homo sapiens
  siRNA target sequence for GPM6B (NM_005278.2,832-850).
gcggttttgaagtttaaga

SEQ ID NO: 280431 - DNA, 19 bp, Homo sapiens
  siRNA target sequence for GPM6B (NM_005278.2,855-873).
ggaagattgctgcactaaa

SEQ ID NO: 280432 - DNA, 19 bp, Homo sapiens
  siRNA target sequence for GPM6B (NM_005278.2,856-874).
gaagattgctgcactaaat

SEQ ID NO: 280433 - DNA, 19 bp, Homo sapiens
  siRNA target sequence for GPM6B (NM_005278.2,859-877).
gattgctgcactaaattct

SEQ ID NO: 280434 - DNA, 19 bp, Homo sapiens
  siRNA target sequence for GPR155 (NM_152529.3,256-274).
cctgcagagaacttaacca

SEQ ID NO: 280435 - DNA, 19 bp, Homo sapiens
  siRNA target sequence for GPR155 (NM_152529.3,257-275).
ctgcagagaacttaaccat

SEQ ID NO: 280436 - DNA, 19 bp, Homo sapiens
  siRNA target sequence for GPR155 (NM_152529.3,280-298).
gtcaatatgaccaagactt

SEQ ID NO: 280437 - DNA, 19 bp, Homo sapiens
  siRNA target sequence for GPR155 (NM_152529.3,305-323).
cagcagtaacgcatggatt

SEQ ID NO: 280438 - DNA, 19 bp, Homo sapiens
  siRNA target sequence for GPR155 (NM_152529.3,308-326).
cagtaacgcatggatttaa

SEQ ID NO: 280439 - DNA, 19 bp, Homo sapiens
  siRNA target sequence for GPR155 (NM_152529.3,310-328).
gtaacgcatggatttaatt

SEQ ID NO: 280440 - DNA, 19 bp, Homo sapiens
  siRNA target sequence for GPR155 (NM_152529.3,320-338).
gatttaattccactaatga

SEQ ID NO: 280441 - DNA, 19 bp, Homo sapiens
  siRNA target sequence for GPR155 (NM_152529.3,332-350).
ctaatgacccaccttcaat

SEQ ID NO: 280442 - DNA, 19 bp, Homo sapiens
  siRNA target sequence for GPR155 (NM_152529.3,337-355).
gacccaccttcaatgtcaa

SEQ ID NO: 280443 - DNA, 19 bp, Homo sapiens
  siRNA target sequence for GPR155 (NM_152529.3,340-358).
ccaccttcaatgtcaatta

SEQ ID NO: 280444 - DNA, 19 bp, Homo sapiens
  siRNA target sequence for GPR155 (NM_152529.3,423-441).
ggccaatgtcataacatca

SEQ ID NO: 280445 - DNA, 19 bp, Homo sapiens
  siRNA target sequence for GPR155 (NM_152529.3,448-466).
gccaaaggactaggaaatt

SEQ ID NO: 280446 - DNA, 19 bp, Homo sapiens
  siRNA target sequence for GPR155 (NM_152529.3,454-472).
ggactaggaaattttgtct

SEQ ID NO: 280447 - DNA, 19 bp, Homo sapiens
  siRNA target sequence for GPR155 (NM_152529.3,481-499).
gcacttccagctttattat

SEQ ID NO: 280448 - DNA, 19 bp, Homo sapiens
  siRNA target sequence for GPR155 (NM_152529.3,532-550).
gtggactggtccttcctat

SEQ ID NO: 280449 - DNA, 19 bp, Homo sapiens
  siRNA target sequence for GPR155 (NM_152529.3,535-553).
gactggtccttcctatata

SEQ ID NO: 280450 - DNA, 19 bp, Homo sapiens
  siRNA target sequence for GPR155 (NM_152529.3,539-557).
ggtccttcctatatagtat

SEQ ID NO: 280451 - DNA, 19 bp, Homo sapiens
  siRNA target sequence for GPR155 (NM_152529.3,542-560).
ccttcctatatagtatctt

SEQ ID NO: 280452 - DNA, 19 bp, Homo sapiens
  siRNA target sequence for GPR155 (NM_152529.3,619-637).
cctgatagtcgatttagca

SEQ ID NO: 280453 - DNA, 19 bp, Homo sapiens
  siRNA target sequence for GPR155 (NM_152529.3,662-680).
ctacacaaagtaatgactt

SEQ ID NO: 280454 - DNA, 19 bp, Homo sapiens
  siRNA target sequence for GPR155 (NM_152529.3,683-701).
cattgggataccctatagt

SEQ ID NO: 280455 - DNA, 19 bp, Homo sapiens
  siRNA target sequence for GPR155 (NM_152529.3,687-705).
gggataccctatagttgaa

SEQ ID NO: 280456 - DNA, 19 bp, Homo sapiens
  siRNA target sequence for GPR155 (NM_152529.3,693-711).
ccctatagttgaagcttta

SEQ ID NO: 280457 - DNA, 19 bp, Homo sapiens
  siRNA target sequence for GPR155 (NM_152529.3,694-712).
cctatagttgaagctttat

SEQ ID NO: 280458 - DNA, 19 bp, Homo sapiens
  siRNA target sequence for GPR155 (NM_152529.3,695-713).
ctatagttgaagctttata

SEQ ID NO: 280459 - DNA, 19 bp, Homo sapiens
  siRNA target sequence for GPR155 (NM_152529.3,700-718).
gttgaagctttatatcaaa

SEQ ID NO: 280460 - DNA, 19 bp, Homo sapiens
  siRNA target sequence for GPR155 (NM_152529.3,703-721).
gaagctttatatcaaacta

SEQ ID NO: 280461 - DNA, 19 bp, Homo sapiens
  siRNA target sequence for GPR155 (NM_152529.3,730-748).
gaatatctccagtacattt

SEQ ID NO: 280462 - DNA, 19 bp, Homo sapiens
  siRNA target sequence for GPR155 (NM_152529.3,760-778).
ccaatatctcttatgatgt

SEQ ID NO: 280463 - DNA, 19 bp, Homo sapiens
  siRNA target sequence for GPR155 (NM_152529.3,867-885).
cggactcctgcgtgtatta

SEQ ID NO: 280464 - DNA, 19 bp, Homo sapiens
  siRNA target sequence for GPR155 (NM_152529.3,869-887).
gactcctgcgtgtattaca

SEQ ID NO: 280465 - DNA, 19 bp, Homo sapiens
  siRNA target sequence for GPR155 (NM_152529.3,871-889).
ctcctgcgtgtattacaga

SEQ ID NO: 280466 - DNA, 19 bp, Homo sapiens
  siRNA target sequence for GPR155 (NM_152529.3,912-930).
cattggcatcgccttcaat

SEQ ID NO: 280467 - DNA, 19 bp, Homo sapiens
  siRNA target sequence for GPR155 (NM_152529.3,921-939).
cgccttcaattttattctt

SEQ ID NO: 280468 - DNA, 19 bp, Homo sapiens
  siRNA target sequence for GPR155 (NM_152529.3,944-962).
gaaaggtacctgtatatgt

SEQ ID NO: 280469 - DNA, 19 bp, Homo sapiens
  siRNA target sequence for GPR155 (NM_152529.3,998-1016).
ctggatcagccctatttta

SEQ ID NO: 280470 - DNA, 19 bp, Homo sapiens
  siRNA target sequence for GPR155 (NM_152529.3,1001-1019).
gatcagccctattttatct

SEQ ID NO: 280471 - DNA, 19 bp, Homo sapiens
  siRNA target sequence for GPR155 (NM_152529.3,1028-1046).
cgatggtgggaaaaataaa

SEQ ID NO: 280472 - DNA, 19 bp, Homo sapiens
  siRNA target sequence for GPR155 (NM_152529.3,1053-1071).
gaagaagtcggcatttgta

SEQ ID NO: 280473 - DNA, 19 bp, Homo sapiens
  siRNA target sequence for GPR155 (NM_152529.3,1056-1074).
gaagtcggcatttgtagta

SEQ ID NO: 280474 - DNA, 19 bp, Homo sapiens
  siRNA target sequence for GPR155 (NM_152529.3,1059-1077).
gtcggcatttgtagtacta

SEQ ID NO: 280475 - DNA, 19 bp, Homo sapiens
  siRNA target sequence for GPR155 (NM_152529.3,1061-1079).
cggcatttgtagtactaat

SEQ ID NO: 280476 - DNA, 19 bp, Homo sapiens
  siRNA target sequence for GPR155 (NM_152529.3,1153-1171).
gacagtgtggtgaaccata

SEQ ID NO: 280477 - DNA, 19 bp, Homo sapiens
  siRNA target sequence for GPR155 (NM_152529.3,1159-1177).
gtggtgaaccatacaagtt

SEQ ID NO: 280478 - DNA, 19 bp, Homo sapiens
  siRNA target sequence for GPR155 (NM_152529.3,1161-1179).
ggtgaaccatacaagttta

SEQ ID NO: 280479 - DNA, 19 bp, Homo sapiens
  siRNA target sequence for GPR155 (NM_152529.3,1167-1185).
ccatacaagtttatcaaat

SEQ ID NO: 280480 - DNA, 19 bp, Homo sapiens
  siRNA target sequence for GPR155 (NM_152529.3,1217-1235).
caccaggagtggctatctt

SEQ ID NO: 280481 - DNA, 19 bp, Homo sapiens
  siRNA target sequence for GPR155 (NM_152529.3,1303-1321).
gctcccatcatgtacgttt

SEQ ID NO: 280482 - DNA, 19 bp, Homo sapiens
  siRNA target sequence for GPR155 (NM_152529.3,1318-1336).
gtttctgcctggttactga

SEQ ID NO: 280483 - DNA, 19 bp, Homo sapiens
  siRNA target sequence for GPR155 (NM_152529.3,1372-1390).
gccatccagaatgttagtt

SEQ ID NO: 280484 - DNA, 19 bp, Homo sapiens
  siRNA target sequence for GPR155 (NM_152529.3,1373-1391).
ccatccagaatgttagttt

SEQ ID NO: 280485 - DNA, 19 bp, Homo sapiens
  siRNA target sequence for GPR155 (NM_152529.3,1377-1395).
ccagaatgttagttttgat

SEQ ID NO: 280486 - DNA, 19 bp, Homo sapiens
  siRNA target sequence for GPR155 (NM_152529.3,1378-1396).
cagaatgttagttttgata

SEQ ID NO: 280487 - DNA, 19 bp, Homo sapiens
  siRNA target sequence for GPR155 (NM_152529.3,1427-1445).
ggtctctggctattcttct

SEQ ID NO: 280488 - DNA, 19 bp, Homo sapiens
  siRNA target sequence for GPR155 (NM_152529.3,1428-1446).
gtctctggctattcttctt

SEQ ID NO: 280489 - DNA, 19 bp, Homo sapiens
  siRNA target sequence for GPR155 (NM_152529.3,1432-1450).
ctggctattcttcttttga

SEQ ID NO: 280490 - DNA, 19 bp, Homo sapiens
  siRNA target sequence for GPR155 (NM_152529.3,1434-1452).
ggctattcttcttttgagt

SEQ ID NO: 280491 - DNA, 19 bp, Homo sapiens
  siRNA target sequence for GPR155 (NM_152529.3,1465-1483).
cagcttcctcatatgctta

SEQ ID NO: 280492 - DNA, 19 bp, Homo sapiens
  siRNA target sequence for GPR155 (NM_152529.3,1471-1489).
cctcatatgcttacaacta

SEQ ID NO: 280493 - DNA, 19 bp, Homo sapiens
  siRNA target sequence for GPR155 (NM_152529.3,1472-1490).
ctcatatgcttacaactaa

SEQ ID NO: 280494 - DNA, 19 bp, Homo sapiens
  siRNA target sequence for GPR155 (NM_152529.3,1480-1498).
cttacaactaatttactca

SEQ ID NO: 280495 - DNA, 19 bp, Homo sapiens
  siRNA target sequence for GPR155 (NM_152529.3,1519-1537).
gctggaatgatgatatgga

SEQ ID NO: 280496 - DNA, 19 bp, Homo sapiens
  siRNA target sequence for GPR155 (NM_152529.3,1627-1645).
cttctagcaatttctttgt

SEQ ID NO: 280497 - DNA, 19 bp, Homo sapiens
  siRNA target sequence for GPR155 (NM_152529.3,1659-1677).
gcgagagagggtacaaatt

SEQ ID NO: 280498 - DNA, 19 bp, Homo sapiens
  siRNA target sequence for GPR155 (NM_152529.3,1679-1697).
ctgttggaataatcataat

SEQ ID NO: 280499 - DNA, 19 bp, Homo sapiens
  siRNA target sequence for GPR155 (NM_152529.3,1681-1699).
gttggaataatcataatat

SEQ ID NO: 280500 - DNA, 19 bp, Homo sapiens
  siRNA target sequence for GPR155 (NM_152529.3,1740-1758).
gataactggaaaacacaat

SEQ ID NO: 280501 - DNA, 19 bp, Homo sapiens
  siRNA target sequence for GPR155 (NM_152529.3,1878-1896).
ccaagcaggaagctatgaa

SEQ ID NO: 280502 - DNA, 19 bp, Homo sapiens
  siRNA target sequence for GPR155 (NM_152529.3,1924-1942).
gtggtggagcctggaaata

SEQ ID NO: 280503 - DNA, 19 bp, Homo sapiens
  siRNA target sequence for GPR155 (NM_152529.3,1956-1974).
gagtccagcaccagtaaat

SEQ ID NO: 280504 - DNA, 19 bp, Homo sapiens
  siRNA target sequence for GPR155 (NM_152529.3,1958-1976).
gtccagcaccagtaaatga

SEQ ID NO: 280505 - DNA, 19 bp, Homo sapiens
  siRNA target sequence for GPR155 (NM_152529.3,2057-2075).
caatagagccaatagcaaa

SEQ ID NO: 280506 - DNA, 19 bp, Homo sapiens
  siRNA target sequence for GPR155 (NM_152529.3,2082-2100).
caccagtgagcctgtgatt

SEQ ID NO: 280507 - DNA, 19 bp, Homo sapiens
  siRNA target sequence for GPR155 (NM_152529.3,2091-2109).
gcctgtgattccttcgttt

SEQ ID NO: 280508 - DNA, 19 bp, Homo sapiens
  siRNA target sequence for GPR155 (NM_152529.3,2095-2113).
gtgattccttcgtttgaga

SEQ ID NO: 280509 - DNA, 19 bp, Homo sapiens
  siRNA target sequence for GPR155 (NM_152529.3,2097-2115).
gattccttcgtttgagaaa

SEQ ID NO: 280510 - DNA, 19 bp, Homo sapiens
  siRNA target sequence for GPR155 (NM_152529.3,2242-2260).
ggcctgttcgctaatcttt

SEQ ID NO: 280511 - DNA, 19 bp, Homo sapiens
  siRNA target sequence for GPR155 (NM_152529.3,2257-2275).
ctttccagttgtttatggt

SEQ ID NO: 280512 - DNA, 19 bp, Homo sapiens
  siRNA target sequence for GPR155 (NM_152529.3,2340-2358).
ctttggtcagggatttatt

SEQ ID NO: 280513 - DNA, 19 bp, Homo sapiens
  siRNA target sequence for GPR155 (NM_152529.3,2370-2388).
ctttggattagataaacat

SEQ ID NO: 280514 - DNA, 19 bp, Homo sapiens
  siRNA target sequence for GPR155 (NM_152529.3,2394-2412).
catcctgcctttcaaaaga

SEQ ID NO: 280515 - DNA, 19 bp, Homo sapiens
  siRNA target sequence for GPR155 (NM_152529.3,2414-2432).
gacttgaattcctatggaa

SEQ ID NO: 280516 - DNA, 19 bp, Homo sapiens
  siRNA target sequence for GPR155 (NM_152529.3,2520-2538).
cctctgtatccgaaacatt

SEQ ID NO: 280517 - DNA, 19 bp, Homo sapiens
  siRNA target sequence for GPR155 (NM_152529.3,2525-2543).
gtatccgaaacattgtcaa

SEQ ID NO: 280518 - DNA, 19 bp, Homo sapiens
  siRNA target sequence for GPR155 (NM_152529.3,2595-2613).
cctggtgagctggctaatt

SEQ ID NO: 280519 - DNA, 19 bp, Homo sapiens
  siRNA target sequence for GPR155 (NM_152529.3,2598-2616).
ggtgagctggctaattgaa

SEQ ID NO: 280520 - DNA, 19 bp, Homo sapiens
  siRNA target sequence for GPR155 (NM_152529.3,2635-2653).
cgtggtgaagctgtgatat

SEQ ID NO: 280521 - DNA, 19 bp, Homo sapiens
  siRNA target sequence for GPR155 (NM_152529.3,2674-2692).
gggggagtcatccaacata

SEQ ID NO: 280522 - DNA, 19 bp, Homo sapiens
  siRNA target sequence for GPR155 (NM_152529.3,2676-2694).
gggagtcatccaacatatt

SEQ ID NO: 280523 - DNA, 19 bp, Homo sapiens
  siRNA target sequence for GPR155 (NM_152529.3,2677-2695).
ggagtcatccaacatatta

SEQ ID NO: 280524 - DNA, 19 bp, Homo sapiens
  siRNA target sequence for GPR155 (NM_152529.3,2712-2730).
ccgggatgagtacttgttt

SEQ ID NO: 280525 - DNA, 19 bp, Homo sapiens
  siRNA target sequence for GPR155 (NM_152529.3,2713-2731).
cgggatgagtacttgtttt

SEQ ID NO: 280526 - DNA, 19 bp, Homo sapiens
  siRNA target sequence for GPR155 (NM_152529.3,2721-2739).
gtacttgttttacagattt

SEQ ID NO: 280527 - DNA, 19 bp, Homo sapiens
  siRNA target sequence for GPR155 (NM_152529.3,2733-2751).
cagatttcttcaaaagagt

SEQ ID NO: 280528 - DNA, 19 bp, Homo sapiens
  siRNA target sequence for GPR155 (NM_152529.3,2765-2783).
ctcctgctattaatgcaaa

SEQ ID NO: 280529 - DNA, 19 bp, Homo sapiens
  siRNA target sequence for GRCC9 (NM_032641.1,376-394).
gggtaagaggggctattca

SEQ ID NO: 280530 - DNA, 19 bp, Homo sapiens
  siRNA target sequence for GREB1 (NM_014668.2,327-345).
gaagacgacacgctttgaa

SEQ ID NO: 280531 - DNA, 19 bp, Homo sapiens
  siRNA target sequence for GREB1 (NM_014668.2,343-361).
gaagaggtcttgcacaatt

SEQ ID NO: 280532 - DNA, 19 bp, Homo sapiens
  siRNA target sequence for GREB1 (NM_014668.2,346-364).
gaggtcttgcacaattcca

SEQ ID NO: 280533 - DNA, 19 bp, Homo sapiens
  siRNA target sequence for GREB1 (NM_014668.2,438-456).
gcagcttgccgctctagaa

SEQ ID NO: 280534 - DNA, 19 bp, Homo sapiens
  siRNA target sequence for GREB1 (NM_014668.2,601-619).
ctgcgccttgtctccattt

SEQ ID NO: 280535 - DNA, 19 bp, Homo sapiens
  siRNA target sequence for GREB1 (NM_014668.2,717-735).
gttcttgccagatgacaat

SEQ ID NO: 280536 - DNA, 19 bp, Homo sapiens
  siRNA target sequence for GREB1 (NM_014668.2,804-822).
cacggaattctccaatcat

SEQ ID NO: 280537 - DNA, 19 bp, Homo sapiens
  siRNA target sequence for GREB1 (NM_014668.2,855-873).
gcagaaacacttgaagtat

SEQ ID NO: 280538 - DNA, 19 bp, Homo sapiens
  siRNA target sequence for GREB1 (NM_014668.2,890-908).
cacaagggactctaaccaa

SEQ ID NO: 280539 - DNA, 19 bp, Homo sapiens
  siRNA target sequence for GREB1 (NM_014668.2,901-919).
ctaaccaaaggacctttaa

SEQ ID NO: 280540 - DNA, 19 bp, Homo sapiens
  siRNA target sequence for GREB1 (NM_014668.2,927-945).
gaaaggctcagagtttaga

SEQ ID NO: 280541 - DNA, 19 bp, Homo sapiens
  siRNA target sequence for GREB1 (NM_014668.2,1106-1124).
caatgggtccggctgtttt

SEQ ID NO: 280542 - DNA, 19 bp, Homo sapiens
  siRNA target sequence for GREB1 (NM_014668.2,1120-1138).
gttttcaacggcaaagatt

SEQ ID NO: 280543 - DNA, 19 bp, Homo sapiens
  siRNA target sequence for GREB1 (NM_014668.2,1185-1203).
gcgaccatcggctttaggt

SEQ ID NO: 280544 - DNA, 19 bp, Homo sapiens
  siRNA target sequence for GREB1 (NM_014668.2,1186-1204).
cgaccatcggctttaggta

SEQ ID NO: 280545 - DNA, 19 bp, Homo sapiens
  siRNA target sequence for GREB1 (NM_014668.2,1187-1205).
gaccatcggctttaggtat

SEQ ID NO: 280546 - DNA, 19 bp, Homo sapiens
  siRNA target sequence for GREB1 (NM_014668.2,1190-1208).
catcggctttaggtatctt

SEQ ID NO: 280547 - DNA, 19 bp, Homo sapiens
  siRNA target sequence for GREB1 (NM_014668.2,1195-1213).
gctttaggtatcttgtcaa

SEQ ID NO: 280548 - DNA, 19 bp, Homo sapiens
  siRNA target sequence for GREB1 (NM_014668.2,1196-1214).
ctttaggtatcttgtcaaa

SEQ ID NO: 280549 - DNA, 19 bp, Homo sapiens
  siRNA target sequence for GREB1 (NM_014668.2,1295-1313).
gtgggaacagagctaagta

SEQ ID NO: 280550 - DNA, 19 bp, Homo sapiens
  siRNA target sequence for GREB1 (NM_014668.2,1298-1316).
ggaacagagctaagtatga

SEQ ID NO: 280551 - DNA, 19 bp, Homo sapiens
  siRNA target sequence for GREB1 (NM_014668.2,1437-1455).
ggccaagccagtgatattt

SEQ ID NO: 280552 - DNA, 19 bp, Homo sapiens
  siRNA target sequence for GREB1 (NM_014668.2,1439-1457).
ccaagccagtgatatttaa

SEQ ID NO: 280553 - DNA, 19 bp, Homo sapiens
  siRNA target sequence for GREB1 (NM_014668.2,1507-1525).
gtcagccccctcttgtaca

SEQ ID NO: 280554 - DNA, 19 bp, Homo sapiens
  siRNA target sequence for GREB1 (NM_014668.2,1988-2006).
ccgtcaccggaaaatacca

SEQ ID NO: 280555 - DNA, 19 bp, Homo sapiens
  siRNA target sequence for GREB1 (NM_014668.2,1989-2007).
cgtcaccggaaaataccaa

SEQ ID NO: 280556 - DNA, 19 bp, Homo sapiens
  siRNA target sequence for GREB1 (NM_014668.2,2046-2064).
gtaccagaaggaagtcaat

SEQ ID NO: 280557 - DNA, 19 bp, Homo sapiens
  siRNA target sequence for GREB1 (NM_014668.2,2118-2136).
ctgtccagagggtgacatt

SEQ ID NO: 280558 - DNA, 19 bp, Homo sapiens
  siRNA target sequence for GREB1 (NM_014668.2,2120-2138).
gtccagagggtgacattga

SEQ ID NO: 280559 - DNA, 19 bp, Homo sapiens
  siRNA target sequence for GREB1 (NM_014668.2,2129-2147).
gtgacattgacattttgct

SEQ ID NO: 280560 - DNA, 19 bp, Homo sapiens
  siRNA target sequence for GREB1 (NM_014668.2,2195-2213).
ctgcctcttctgtcactaa

SEQ ID NO: 280561 - DNA, 19 bp, Homo sapiens
  siRNA target sequence for GREB1 (NM_014668.2,2242-2260).
ccggtgtgcacaagttaca

SEQ ID NO: 280562 - DNA, 19 bp, Homo sapiens
  siRNA target sequence for GREB1 (NM_014668.2,2243-2261).
cggtgtgcacaagttacaa

SEQ ID NO: 280563 - DNA, 19 bp, Homo sapiens
  siRNA target sequence for GREB1 (NM_014668.2,2316-2334).
ctcccatgtgtgttccatt

SEQ ID NO: 280564 - DNA, 19 bp, Homo sapiens
  siRNA target sequence for GREB1 (NM_014668.2,2337-2355).
ggattccagcacccaaaat

SEQ ID NO: 280565 - DNA, 19 bp, Homo sapiens
  siRNA target sequence for GREB1 (NM_014668.2,2499-2517).
gagggtggaacagtatgtt

SEQ ID NO: 280566 - DNA, 19 bp, Homo sapiens
  siRNA target sequence for GREB1 (NM_014668.2,2501-2519).
gggtggaacagtatgttct

SEQ ID NO: 280567 - DNA, 19 bp, Homo sapiens
  siRNA target sequence for GREB1 (NM_014668.2,2629-2647).
gtgagtagcactgttcata

SEQ ID NO: 280568 - DNA, 19 bp, Homo sapiens
  siRNA target sequence for GREB1 (NM_014668.2,2633-2651).
gtagcactgttcataacct

SEQ ID NO: 280569 - DNA, 19 bp, Homo sapiens
  siRNA target sequence for GREB1 (NM_014668.2,2644-2662).
cataacctctattctcaaa

SEQ ID NO: 280570 - DNA, 19 bp, Homo sapiens
  siRNA target sequence for GREB1 (NM_014668.2,2811-2829).
gcctgcctcctgcagtaat

SEQ ID NO: 280571 - DNA, 19 bp, Homo sapiens
  siRNA target sequence for GREB1 (NM_014668.2,2831-2849).
gagtggacttatatcatga

SEQ ID NO: 280572 - DNA, 19 bp, Homo sapiens
  siRNA target sequence for GREB1 (NM_014668.2,2833-2851).
gtggacttatatcatgaaa

SEQ ID NO: 280573 - DNA, 19 bp, Homo sapiens
  siRNA target sequence for GREB1 (NM_014668.2,2865-2883).
cgggctgtcggagtttatt

SEQ ID NO: 280574 - DNA, 19 bp, Homo sapiens
  siRNA target sequence for GREB1 (NM_014668.2,2867-2885).
ggctgtcggagtttattga

SEQ ID NO: 280575 - DNA, 19 bp, Homo sapiens
  siRNA target sequence for GREB1 (NM_014668.2,2869-2887).
ctgtcggagtttattgaat

SEQ ID NO: 280576 - DNA, 19 bp, Homo sapiens
  siRNA target sequence for GREB1 (NM_014668.2,2906-2924).
gcctccccttgctcagata

SEQ ID NO: 280577 - DNA, 19 bp, Homo sapiens
  siRNA target sequence for GREB1 (NM_014668.2,2910-2928).
ccccttgctcagatacgat

SEQ ID NO: 280578 - DNA, 19 bp, Homo sapiens
  siRNA target sequence for GREB1 (NM_014668.2,2911-2929).
cccttgctcagatacgata

SEQ ID NO: 280579 - DNA, 19 bp, Homo sapiens
  siRNA target sequence for GREB1 (NM_014668.2,2943-2961).
catggtcactgcattagga

SEQ ID NO: 280580 - DNA, 19 bp, Homo sapiens
  siRNA target sequence for GREB1 (NM_014668.2,3277-3295).
gtggggaagcacttcgtaa

SEQ ID NO: 280581 - DNA, 19 bp, Homo sapiens
  siRNA target sequence for GREB1 (NM_014668.2,3281-3299).
ggaagcacttcgtaaagca

SEQ ID NO: 280582 - DNA, 19 bp, Homo sapiens
  siRNA target sequence for GREB1 (NM_014668.2,3435-3453).
ctgtgacctgcgattgata

SEQ ID NO: 280583 - DNA, 19 bp, Homo sapiens
  siRNA target sequence for GREB1 (NM_014668.2,3437-3455).
gtgacctgcgattgataaa

SEQ ID NO: 280584 - DNA, 19 bp, Homo sapiens
  siRNA target sequence for GREB1 (NM_014668.2,3439-3457).
gacctgcgattgataaact

SEQ ID NO: 280585 - DNA, 19 bp, Homo sapiens
  siRNA target sequence for GREB1 (NM_014668.2,3810-3828).
cagagcccctggtgagaaa

SEQ ID NO: 280586 - DNA, 19 bp, Homo sapiens
  siRNA target sequence for GREB1 (NM_014668.2,3812-3830).
gagcccctggtgagaaaca

SEQ ID NO: 280587 - DNA, 19 bp, Homo sapiens
  siRNA target sequence for GREB1 (NM_014668.2,4524-4542).
gccctttgactacatcatt

SEQ ID NO: 280588 - DNA, 19 bp, Homo sapiens
  siRNA target sequence for GREB1 (NM_014668.2,4526-4544).
cctttgactacatcattca

SEQ ID NO: 280589 - DNA, 19 bp, Homo sapiens
  siRNA target sequence for GREB1 (NM_014668.2,4539-4557).
cattcacgacccgaagtat

SEQ ID NO: 280590 - DNA, 19 bp, Homo sapiens
  siRNA target sequence for GREB1 (NM_014668.2,4545-4563).
cgacccgaagtatgaagat

SEQ ID NO: 280591 - DNA, 19 bp, Homo sapiens
  siRNA target sequence for GREB1 (NM_014668.2,4580-4598).
cgcactatcagggtataaa

SEQ ID NO: 280592 - DNA, 19 bp, Homo sapiens
  siRNA target sequence for GREB1 (NM_014668.2,4584-4602).
ctatcagggtataaagagt

SEQ ID NO: 280593 - DNA, 19 bp, Homo sapiens
  siRNA target sequence for GREB1 (NM_014668.2,4622-4640).
ggaagccggaggaccttta

SEQ ID NO: 280594 - DNA, 19 bp, Homo sapiens
  siRNA target sequence for GREB1 (NM_014668.2,4623-4641).
gaagccggaggacctttat

SEQ ID NO: 280595 - DNA, 19 bp, Homo sapiens
  siRNA target sequence for GREB1 (NM_014668.2,4741-4759).
cgctaccagctgtatgagt

SEQ ID NO: 280596 - DNA, 19 bp, Homo sapiens
  siRNA target sequence for GREB1 (NM_014668.2,4908-4926).
caagagccatgaatatata

SEQ ID NO: 280597 - DNA, 19 bp, Homo sapiens
  siRNA target sequence for GREB1 (NM_014668.2,4960-4978).
cacgaacatgggctcttta

SEQ ID NO: 280598 - DNA, 19 bp, Homo sapiens
  siRNA target sequence for GREB1 (NM_014668.2,4962-4980).
cgaacatgggctctttaat

SEQ ID NO: 280599 - DNA, 19 bp, Homo sapiens
  siRNA target sequence for GREB1 (NM_014668.2,4966-4984).
catgggctctttaatctgt

SEQ ID NO: 280600 - DNA, 19 bp, Homo sapiens
  siRNA target sequence for GREB1 (NM_014668.2,5252-5270).
ggaacgtggtggatgtcaa

SEQ ID NO: 280601 - DNA, 19 bp, Homo sapiens
  siRNA target sequence for GREB1 (NM_014668.2,5483-5501).
cccagaacgtgcagtacaa

SEQ ID NO: 280602 - DNA, 19 bp, Homo sapiens
  siRNA target sequence for GREB1 (NM_014668.2,5519-5537).
gtgacgatgtagacttcaa

SEQ ID NO: 280603 - DNA, 19 bp, Homo sapiens
  siRNA target sequence for GREB1 (NM_014668.2,5581-5599).
cgcttcagcgtgatgaaga

SEQ ID NO: 280604 - DNA, 19 bp, Homo sapiens
  siRNA target sequence for GREB1 (NM_014668.2,5582-5600).
gcttcagcgtgatgaagaa

SEQ ID NO: 280605 - DNA, 19 bp, Homo sapiens
  siRNA target sequence for GREB1 (NM_014668.2,5643-5661).
caaggtgtctgataactct

SEQ ID NO: 280606 - DNA, 19 bp, Homo sapiens
  siRNA target sequence for GREB1 (NM_014668.2,5870-5888).
ccaggccccactctttaaa

SEQ ID NO: 280607 - DNA, 19 bp, Homo sapiens
  siRNA target sequence for GREB1 (NM_014668.2,5873-5891).
ggccccactctttaaacat

SEQ ID NO: 280608 - DNA, 19 bp, Homo sapiens
  siRNA target sequence for GREB1 (NM_014668.2,5953-5971).
gctagctttttgaaaaagt

SEQ ID NO: 280609 - DNA, 19 bp, Homo sapiens
  siRNA target sequence for GREB1 (NM_033090.1,1586-1604).
ggtccagctggcacatcaa

SEQ ID NO: 280610 - DNA, 19 bp, Homo sapiens
  siRNA target sequence for GREB1 (NM_033090.1,1592-1610).
gctggcacatcaaatacga

SEQ ID NO: 280611 - DNA, 19 bp, Homo sapiens
  siRNA target sequence for GREB1 (NM_033090.1,1593-1611).
ctggcacatcaaatacgaa

SEQ ID NO: 280612 - DNA, 19 bp, Homo sapiens
  siRNA target sequence for GREB1 (NM_033090.1,1595-1613).
ggcacatcaaatacgaaat

SEQ ID NO: 280613 - DNA, 19 bp, Homo sapiens
  siRNA target sequence for GREB1 (NM_148903.1,1461-1479).
cagtgatatttaaagtatt

SEQ ID NO: 280614 - DNA, 19 bp, Homo sapiens
  siRNA target sequence for GTSE1 (NM_016426.3,281-299).
gttcgtggaggtgtacaaa

SEQ ID NO: 280615 - DNA, 19 bp, Homo sapiens
  siRNA target sequence for GTSE1 (NM_016426.3,293-311).
gtacaaagaagctcactta

SEQ ID NO: 280616 - DNA, 19 bp, Homo sapiens
  siRNA target sequence for GTSE1 (NM_016426.3,304-322).
ctcacttactggctttaca

SEQ ID NO: 280617 - DNA, 19 bp, Homo sapiens
  siRNA target sequence for GTSE1 (NM_016426.3,312-330).
ctggctttacacattgaga

SEQ ID NO: 280618 - DNA, 19 bp, Homo sapiens
  siRNA target sequence for GTSE1 (NM_016426.3,382-400).
gccagggcgtggaaagatt

SEQ ID NO: 280619 - DNA, 19 bp, Homo sapiens
  siRNA target sequence for GTSE1 (NM_016426.3,384-402).
cagggcgtggaaagattca

SEQ ID NO: 280620 - DNA, 19 bp, Homo sapiens
  siRNA target sequence for GTSE1 (NM_016426.3,607-625).
cgcactctgctcatgcttt

SEQ ID NO: 280621 - DNA, 19 bp, Homo sapiens
  siRNA target sequence for GTSE1 (NM_016426.3,702-720).
cctcgagcggcctctgtta

SEQ ID NO: 280622 - DNA, 19 bp, Homo sapiens
  siRNA target sequence for GTSE1 (NM_016426.3,818-836).
ggatgttctccctgacaaa

SEQ ID NO: 280623 - DNA, 19 bp, Homo sapiens
  siRNA target sequence for GTSE1 (NM_016426.3,898-916).
cgatccctgttccaaacaa

SEQ ID NO: 280624 - DNA, 19 bp, Homo sapiens
  siRNA target sequence for GTSE1 (NM_016426.3,1029-1047).
gcagtgggcaaagctaaat

SEQ ID NO: 280625 - DNA, 19 bp, Homo sapiens
  siRNA target sequence for GTSE1 (NM_016426.3,1179-1197).
gccaagcgggtcgatgttt

SEQ ID NO: 280626 - DNA, 19 bp, Homo sapiens
  siRNA target sequence for GTSE1 (NM_016426.3,1181-1199).
caagcgggtcgatgtttct

SEQ ID NO: 280627 - DNA, 19 bp, Homo sapiens
  siRNA target sequence for GTSE1 (NM_016426.3,1618-1636).
cgatgacccccaaaacgat

SEQ ID NO: 280628 - DNA, 19 bp, Homo sapiens
  siRNA target sequence for GTSE1 (NM_016426.3,1907-1925).
ccctagtgaggctcttctt

SEQ ID NO: 280629 - DNA, 19 bp, Homo sapiens
  siRNA target sequence for GTSE1 (NM_016426.3,1909-1927).
ctagtgaggctcttcttgt

SEQ ID NO: 280630 - DNA, 19 bp, Homo sapiens
  siRNA target sequence for GTSE1 (NM_016426.3,1914-1932).
gaggctcttcttgtagata

SEQ ID NO: 280631 - DNA, 19 bp, Homo sapiens
  siRNA target sequence for GTSE1 (NM_016426.3,1917-1935).
gctcttcttgtagatatca

SEQ ID NO: 280632 - DNA, 19 bp, Homo sapiens
  siRNA target sequence for GTSE1 (NM_016426.3,1918-1936).
ctcttcttgtagatatcaa

SEQ ID NO: 280633 - DNA, 19 bp, Homo sapiens
  siRNA target sequence for GTSE1 (NM_016426.3,1969-1987).
caagccagcccctcattga

SEQ ID NO: 280634 - DNA, 19 bp, Homo sapiens
  siRNA target sequence for GTSE1 (NM_016426.3,2027-2045).
cgtggctgtaggatctgaa

SEQ ID NO: 280635 - DNA, 19 bp, Homo sapiens
  siRNA target sequence for GTSE1 (NM_016426.3,2055-2073).
ctgatcgacctcatgacaa

SEQ ID NO: 280636 - DNA, 19 bp, Homo sapiens
  siRNA target sequence for GTSE1 (NM_016426.3,2077-2095).
ctccagacatgaataaaaa

SEQ ID NO: 280637 - DNA, 19 bp, Homo sapiens
  siRNA target sequence for H-plk (NM_015852.1,1299-1317).
gatggtagctaaacattta

SEQ ID NO: 280638 - DNA, 19 bp, Homo sapiens
  siRNA target sequence for H-plk (NM_015852.1,1302-1320).
ggtagctaaacatttagtt

SEQ ID NO: 280639 - DNA, 19 bp, Homo sapiens
  siRNA target sequence for H-plk (NM_015852.1,1306-1324).
gctaaacatttagttatgt

SEQ ID NO: 280640 - DNA, 19 bp, Homo sapiens
  siRNA target sequence for H-plk (NM_015852.1,1307-1325).
ctaaacatttagttatgtt

SEQ ID NO: 280641 - DNA, 19 bp, Homo sapiens
  siRNA target sequence for H-plk (NM_015852.1,2487-2505).
ctcaaaacttagtacatgt

SEQ ID NO: 280642 - DNA, 19 bp, Homo sapiens
  siRNA target sequence for H-plk (NM_015852.1,2489-2507).
caaaacttagtacatgtaa

SEQ ID NO: 280643 - DNA, 19 bp, Homo sapiens
  siRNA target sequence for H41 (NM_017548.2,617-635).
cagggttcaggcaatgcaa

SEQ ID NO: 280644 - DNA, 19 bp, Homo sapiens
  siRNA target sequence for H41 (NM_017548.2,675-693).
caagatccaggtgataact

SEQ ID NO: 280645 - DNA, 19 bp, Homo sapiens
  siRNA target sequence for H41 (NM_017548.2,812-830).
gatgactagtggtgtgtat

SEQ ID NO: 280646 - DNA, 19 bp, Homo sapiens
  siRNA target sequence for HBLD1 (NM_194279.1,242-260).
ggatgctccggattccaat

SEQ ID NO: 280647 - DNA, 19 bp, Homo sapiens
  siRNA target sequence for HBLD1 (NM_194279.1,243-261).
gatgctccggattccaata

SEQ ID NO: 280648 - DNA, 19 bp, Homo sapiens
  siRNA target sequence for HBLD1 (NM_194279.1,246-264).
gctccggattccaatacaa

SEQ ID NO: 280649 - DNA, 19 bp, Homo sapiens
  siRNA target sequence for HBLD1 (NM_194279.1,247-265).
ctccggattccaatacaaa

SEQ ID NO: 280650 - DNA, 19 bp, Homo sapiens
  siRNA target sequence for HBLD1 (NM_194279.1,249-267).
ccggattccaatacaaatt

SEQ ID NO: 280651 - DNA, 19 bp, Homo sapiens
  siRNA target sequence for HBLD1 (NM_194279.1,270-288).
cactggatacagttatcaa

SEQ ID NO: 280652 - DNA, 19 bp, Homo sapiens
  siRNA target sequence for HBLD1 (NM_194279.1,289-307).
ccccgacgacagggtattt

SEQ ID NO: 280653 - DNA, 19 bp, Homo sapiens
  siRNA target sequence for HBLD1 (NM_194279.1,391-409).
gatccgaagctcatttcaa

SEQ ID NO: 280654 - DNA, 19 bp, Homo sapiens
  siRNA target sequence for HCG9 (NM_005844.2,129-147).
gtccccacagcaataggaa

SEQ ID NO: 280655 - DNA, 19 bp, Homo sapiens
  siRNA target sequence for HCG9 (NM_005844.2,157-175).
cctggtcccgaaaaaagga

SEQ ID NO: 280656 - DNA, 19 bp, Homo sapiens
  siRNA target sequence for HERPUD1 (NM_014685.1,249-267).
gaggaccagaggttaattt

SEQ ID NO: 280657 - DNA, 19 bp, Homo sapiens
  siRNA target sequence for HERPUD1 (NM_014685.1,251-269).
ggaccagaggttaatttat

SEQ ID NO: 280658 - DNA, 19 bp, Homo sapiens
  siRNA target sequence for HERPUD1 (NM_014685.1,252-270).
gaccagaggttaatttatt

SEQ ID NO: 280659 - DNA, 19 bp, Homo sapiens
  siRNA target sequence for HERPUD1 (NM_014685.1,311-329).
gcttccaaagcaggaaaaa

SEQ ID NO: 280660 - DNA, 19 bp, Homo sapiens
  siRNA target sequence for HERPUD1 (NM_014685.1,321-339).
caggaaaaacggcatgttt

SEQ ID NO: 280661 - DNA, 19 bp, Homo sapiens
  siRNA target sequence for HERPUD1 (NM_014685.1,342-360).
catctggtgtgcaatgtga

SEQ ID NO: 280662 - DNA, 19 bp, Homo sapiens
  siRNA target sequence for HERPUD1 (NM_014685.1,413-431).
ggagcctgctggttctaat

SEQ ID NO: 280663 - DNA, 19 bp, Homo sapiens
  siRNA target sequence for HERPUD1 (NM_014685.1,483-501).
gttcttcggaacctttctt

SEQ ID NO: 280664 - DNA, 19 bp, Homo sapiens
  siRNA target sequence for HERPUD1 (NM_014685.1,607-625).
cctggttccagcagatata

SEQ ID NO: 280665 - DNA, 19 bp, Homo sapiens
  siRNA target sequence for HERPUD1 (NM_014685.1,630-648).
cgacagtactacatgcaat

SEQ ID NO: 280666 - DNA, 19 bp, Homo sapiens
  siRNA target sequence for HERPUD1 (NM_014685.1,633-651).
cagtactacatgcaatatt

SEQ ID NO: 280667 - DNA, 19 bp, Homo sapiens
  siRNA target sequence for HERPUD1 (NM_014685.1,664-682).
ctgcatcaggggcttttgt

SEQ ID NO: 280668 - DNA, 19 bp, Homo sapiens
  siRNA target sequence for HERPUD1 (NM_014685.1,727-745).
ctccagcccctattcacaa

SEQ ID NO: 280669 - DNA, 19 bp, Homo sapiens
  siRNA target sequence for HERPUD1 (NM_014685.1,786-804).
gctcctcaagtggttgtta

SEQ ID NO: 280670 - DNA, 19 bp, Homo sapiens
  siRNA target sequence for HERPUD1 (NM_014685.1,838-856).
cacaaggtggccctattgt

SEQ ID NO: 280671 - DNA, 19 bp, Homo sapiens
  siRNA target sequence for HERPUD1 (NM_014685.1,887-905).
gttggattggacctattca

SEQ ID NO: 280672 - DNA, 19 bp, Homo sapiens
  siRNA target sequence for HERPUD1 (NM_014685.1,1005-1023).
cacgttgggtggtttccat

SEQ ID NO: 280673 - DNA, 19 bp, Homo sapiens
  siRNA target sequence for HERPUD1 (NM_014685.1,1007-1025).
cgttgggtggtttccattt

SEQ ID NO: 280674 - DNA, 19 bp, Homo sapiens
  siRNA target sequence for HERPUD1 (NM_014685.1,1027-1045).
gaccgaggccggttcagaa

SEQ ID NO: 280675 - DNA, 19 bp, Homo sapiens
  siRNA target sequence for HERPUD1 (NM_014685.1,1063-1081).
ctcctcctgacgttgtaaa

SEQ ID NO: 280676 - DNA, 19 bp, Homo sapiens
  siRNA target sequence for HERPUD1 (NM_014685.1,1066-1084).
ctcctgacgttgtaaatca

SEQ ID NO: 280677 - DNA, 19 bp, Homo sapiens
  siRNA target sequence for HERPUD1 (NM_014685.1,1198-1216).
gcacagcatggcttgtctt

SEQ ID NO: 280678 - DNA, 19 bp, Homo sapiens
  siRNA target sequence for HERPUD1 (NM_014685.1,1207-1225).
ggcttgtcttcaagacttt

SEQ ID NO: 280679 - DNA, 19 bp, Homo sapiens
  siRNA target sequence for HHLA2 (NM_007072.2,441-459).
cttcctcattctcataaca

SEQ ID NO: 280680 - DNA, 19 bp, Homo sapiens
  siRNA target sequence for HHLA2 (NM_007072.2,444-462).
cctcattctcataacatct

SEQ ID NO: 280681 - DNA, 19 bp, Homo sapiens
  siRNA target sequence for HHLA2 (NM_007072.2,467-485).
gtggatctcaaggcatatt

SEQ ID NO: 280682 - DNA, 19 bp, Homo sapiens
  siRNA target sequence for HHLA2 (NM_007072.2,512-530).
ctatgaatgaacaaatcgt

SEQ ID NO: 280683 - DNA, 19 bp, Homo sapiens
  siRNA target sequence for HHLA2 (NM_007072.2,578-596).
ggggatccgaagtcgtaat

SEQ ID NO: 280684 - DNA, 19 bp, Homo sapiens
  siRNA target sequence for HHLA2 (NM_007072.2,579-597).
gggatccgaagtcgtaata

SEQ ID NO: 280685 - DNA, 19 bp, Homo sapiens
  siRNA target sequence for HHLA2 (NM_007072.2,581-599).
gatccgaagtcgtaataca

SEQ ID NO: 280686 - DNA, 19 bp, Homo sapiens
  siRNA target sequence for HHLA2 (NM_007072.2,591-609).
cgtaatacactggaagtat

SEQ ID NO: 280687 - DNA, 19 bp, Homo sapiens
  siRNA target sequence for HHLA2 (NM_007072.2,603-621).
gaagtatcaagatagctat

SEQ ID NO: 280688 - DNA, 19 bp, Homo sapiens
  siRNA target sequence for HHLA2 (NM_007072.2,663-681).
ccaagatcccagatatgca

SEQ ID NO: 280689 - DNA, 19 bp, Homo sapiens
  siRNA target sequence for HHLA2 (NM_007072.2,684-702).
caggacatcccttttctat

SEQ ID NO: 280690 - DNA, 19 bp, Homo sapiens
  siRNA target sequence for HHLA2 (NM_007072.2,686-704).
ggacatcccttttctataa

SEQ ID NO: 280691 - DNA, 19 bp, Homo sapiens
  siRNA target sequence for HHLA2 (NM_007072.2,819-837).
gctaaaggtgggagttttt

SEQ ID NO: 280692 - DNA, 19 bp, Homo sapiens
  siRNA target sequence for HHLA2 (NM_007072.2,838-856).
ctcacacccgtgatgaagt

SEQ ID NO: 280693 - DNA, 19 bp, Homo sapiens
  siRNA target sequence for HHLA2 (NM_007072.2,840-858).
cacacccgtgatgaagtat

SEQ ID NO: 280694 - DNA, 19 bp, Homo sapiens
  siRNA target sequence for HHLA2 (NM_007072.2,842-860).
cacccgtgatgaagtatga

SEQ ID NO: 280695 - DNA, 19 bp, Homo sapiens
  siRNA target sequence for HHLA2 (NM_007072.2,844-862).
cccgtgatgaagtatgaaa

SEQ ID NO: 280696 - DNA, 19 bp, Homo sapiens
  siRNA target sequence for HHLA2 (NM_007072.2,845-863).
ccgtgatgaagtatgaaaa

SEQ ID NO: 280697 - DNA, 19 bp, Homo sapiens
  siRNA target sequence for HHLA2 (NM_007072.2,890-908).
gcagcgtgttaagtgttta

SEQ ID NO: 280698 - DNA, 19 bp, Homo sapiens
  siRNA target sequence for HHLA2 (NM_007072.2,891-909).
cagcgtgttaagtgtttat

SEQ ID NO: 280699 - DNA, 19 bp, Homo sapiens
  siRNA target sequence for HHLA2 (NM_007072.2,894-912).
cgtgttaagtgtttatcct

SEQ ID NO: 280700 - DNA, 19 bp, Homo sapiens
  siRNA target sequence for HHLA2 (NM_007072.2,904-922).
gtttatcctcgtccaatta

SEQ ID NO: 280701 - DNA, 19 bp, Homo sapiens
  siRNA target sequence for HHLA2 (NM_007072.2,917-935).
caattatcacgtggaaaat

SEQ ID NO: 280702 - DNA, 19 bp, Homo sapiens
  siRNA target sequence for HHLA2 (NM_007072.2,936-954).
ggacaacacacctatctct

SEQ ID NO: 280703 - DNA, 19 bp, Homo sapiens
  siRNA target sequence for HHLA2 (NM_007072.2,970-988).
gaaacagggtctttggatt

SEQ ID NO: 280704 - DNA, 19 bp, Homo sapiens
  siRNA target sequence for HHLA2 (NM_007072.2,1002-1020).
cagcccactgaatattaca

SEQ ID NO: 280705 - DNA, 19 bp, Homo sapiens
  siRNA target sequence for HHLA2 (NM_007072.2,1019-1037).
caggatcaaattcatctta

SEQ ID NO: 280706 - DNA, 19 bp, Homo sapiens
  siRNA target sequence for HHLA2 (NM_007072.2,1082-1100).
ggcgctggacgatgaaaga

SEQ ID NO: 280707 - DNA, 19 bp, Homo sapiens
  siRNA target sequence for HHLA2 (NM_007072.2,1083-1101).
gcgctggacgatgaaagat

SEQ ID NO: 280708 - DNA, 19 bp, Homo sapiens
  siRNA target sequence for HHLA2 (NM_007072.2,1128-1146).
cgtttcactctcatgtcaa

SEQ ID NO: 280709 - DNA, 19 bp, Homo sapiens
  siRNA target sequence for HHLA2 (NM_007072.2,1137-1155).
ctcatgtcaacctgtaaat

SEQ ID NO: 280710 - DNA, 19 bp, Homo sapiens
  siRNA target sequence for HHLA2 (NM_007072.2,1139-1157).
catgtcaacctgtaaatga

SEQ ID NO: 280711 - DNA, 19 bp, Homo sapiens
  siRNA target sequence for HHLA2 (NM_007072.2,1142-1160).
gtcaacctgtaaatgatta

SEQ ID NO: 280712 - DNA, 19 bp, Homo sapiens
  siRNA target sequence for HHLA2 (NM_007072.2,1186-1204).
gttacttggtccagaatga

SEQ ID NO: 280713 - DNA, 19 bp, Homo sapiens
  siRNA target sequence for HHLA2 (NM_007072.2,1237-1255).
ctgagctcctcacaaaata

SEQ ID NO: 280714 - DNA, 19 bp, Homo sapiens
  siRNA target sequence for HHLA2 (NM_007072.2,1239-1257).
gagctcctcacaaaataca

SEQ ID NO: 280715 - DNA, 19 bp, Homo sapiens
  siRNA target sequence for HHLA2 (NM_007072.2,1429-1447).
gaaacagcttcccataaca

SEQ ID NO: 280716 - DNA, 19 bp, Homo sapiens
  siRNA target sequence for HHLA2 (NM_007072.2,1441-1459).
cataacaaaggcttatgga

SEQ ID NO: 280717 - DNA, 19 bp, Homo sapiens
  siRNA target sequence for HHLA2 (NM_007072.2,1497-1515).
gatttggagcgtaaaatgt

SEQ ID NO: 280718 - DNA, 19 bp, Homo sapiens
  siRNA target sequence for HHLA2 (NM_007072.2,1615-1633).
cccgataatggcgaagaaa

SEQ ID NO: 280719 - DNA, 19 bp, Homo sapiens
  siRNA target sequence for HHLA2 (NM_007072.2,1616-1634).
ccgataatggcgaagaaaa

SEQ ID NO: 280720 - DNA, 19 bp, Homo sapiens
  siRNA target sequence for HRASLS3 (NM_007069.1,632-650).
ggtcaacaacaaacatgat

SEQ ID NO: 280721 - DNA, 19 bp, Homo sapiens
  siRNA target sequence for HRASLS3 (NM_007069.1,859-877).
gagtcatgttctcaagaaa

SEQ ID NO: 280722 - DNA, 19 bp, Homo sapiens
  siRNA target sequence for HRASLS3 (NM_007069.1,861-879).
gtcatgttctcaagaaaca

SEQ ID NO: 280723 - DNA, 19 bp, Homo sapiens
  siRNA target sequence for HSA272196 (NM_018405.2,247-265).
gtgagggcacccattctga

SEQ ID NO: 280724 - DNA, 19 bp, Homo sapiens
  siRNA target sequence for HSA272196 (NM_018405.2,326-344).
gtcagaagggacaaactgt

SEQ ID NO: 280725 - DNA, 19 bp, Homo sapiens
  siRNA target sequence for HSA272196 (NM_018405.2,445-463).
gcatttctcaagagcttaa

SEQ ID NO: 280726 - DNA, 19 bp, Homo sapiens
  siRNA target sequence for HSA272196 (NM_018405.2,481-499).
ccccacaaggagacatgat

SEQ ID NO: 280727 - DNA, 19 bp, Homo sapiens
  siRNA target sequence for HSA272196 (NM_018405.2,518-536).
ccatccgcctccactgata

SEQ ID NO: 280728 - DNA, 19 bp, Homo sapiens
  siRNA target sequence for HSA272196 (NM_018405.2,526-544).
ctccactgataccctatta

SEQ ID NO: 280729 - DNA, 19 bp, Homo sapiens
  siRNA target sequence for HSA272196 (NM_018405.2,531-549).
ctgataccctattattcca

SEQ ID NO: 280730 - DNA, 19 bp, Homo sapiens
  siRNA target sequence for HSHIN1 (NM_017493.4,83-101).
cgtttatagaaggatcatt

SEQ ID NO: 280731 - DNA, 19 bp, Homo sapiens
  siRNA target sequence for HSHIN1 (NM_017493.4,247-265).
cctgaaaaggtgttactgt

SEQ ID NO: 280732 - DNA, 19 bp, Homo sapiens
  siRNA target sequence for HSHIN1 (NM_017493.4,330-348).
gtgtcagtctctcctttat

SEQ ID NO: 280733 - DNA, 19 bp, Homo sapiens
  siRNA target sequence for HSPC117 (NM_014306.2,99-117).
gagtcgcagctataatgat

SEQ ID NO: 280734 - DNA, 19 bp, Homo sapiens
  siRNA target sequence for HSPC117 (NM_014306.2,189-207).
ggttgaaggtgttttctat

SEQ ID NO: 280735 - DNA, 19 bp, Homo sapiens
  siRNA target sequence for HSPC117 (NM_014306.2,326-344).
gaattgttcatcgatctat

SEQ ID NO: 280736 - DNA, 19 bp, Homo sapiens
  siRNA target sequence for HSPC117 (NM_014306.2,365-383).
caggatatgggtttgctat

SEQ ID NO: 280737 - DNA, 19 bp, Homo sapiens
  siRNA target sequence for HSPC117 (NM_014306.2,436-454).
ggtggtgtcgggtttgaca

SEQ ID NO: 280738 - DNA, 19 bp, Homo sapiens
  siRNA target sequence for HSPC117 (NM_014306.2,437-455).
gtggtgtcgggtttgacat

SEQ ID NO: 280739 - DNA, 19 bp, Homo sapiens
  siRNA target sequence for HSPC117 (NM_014306.2,440-458).
gtgtcgggtttgacatcaa

SEQ ID NO: 280740 - DNA, 19 bp, Homo sapiens
  siRNA target sequence for HSPC117 (NM_014306.2,442-460).
gtcgggtttgacatcaact

SEQ ID NO: 280741 - DNA, 19 bp, Homo sapiens
  siRNA target sequence for HSPC117 (NM_014306.2,463-481).
ggtgtccgcttgctaagaa

SEQ ID NO: 280742 - DNA, 19 bp, Homo sapiens
  siRNA target sequence for HSPC117 (NM_014306.2,468-486).
ccgcttgctaagaaccaat

SEQ ID NO: 280743 - DNA, 19 bp, Homo sapiens
  siRNA target sequence for HSPC117 (NM_014306.2,469-487).
cgcttgctaagaaccaatt

SEQ ID NO: 280744 - DNA, 19 bp, Homo sapiens
  siRNA target sequence for HSPC117 (NM_014306.2,470-488).
gcttgctaagaaccaattt

SEQ ID NO: 280745 - DNA, 19 bp, Homo sapiens
  siRNA target sequence for HSPC117 (NM_014306.2,471-489).
cttgctaagaaccaattta

SEQ ID NO: 280746 - DNA, 19 bp, Homo sapiens
  siRNA target sequence for HSPC117 (NM_014306.2,483-501).
caatttagatgaaagtgat

SEQ ID NO: 280747 - DNA, 19 bp, Homo sapiens
  siRNA target sequence for HSPC117 (NM_014306.2,619-637).
ggggtggactggtccttaa

SEQ ID NO: 280748 - DNA, 19 bp, Homo sapiens
  siRNA target sequence for HSPC117 (NM_014306.2,621-639).
ggtggactggtccttaaga

SEQ ID NO: 280749 - DNA, 19 bp, Homo sapiens
  siRNA target sequence for HSPC117 (NM_014306.2,624-642).
ggactggtccttaagagaa

SEQ ID NO: 280750 - DNA, 19 bp, Homo sapiens
  siRNA target sequence for HSPC117 (NM_014306.2,699-717).
ggctgaccccaataaagtt

SEQ ID NO: 280751 - DNA, 19 bp, Homo sapiens
  siRNA target sequence for HSPC117 (NM_014306.2,700-718).
gctgaccccaataaagttt

SEQ ID NO: 280752 - DNA, 19 bp, Homo sapiens
  siRNA target sequence for HSPC117 (NM_014306.2,762-780).
gggagcaggcaaccattat

SEQ ID NO: 280753 - DNA, 19 bp, Homo sapiens
  siRNA target sequence for HSPC117 (NM_014306.2,770-788).
gcaaccattatgcagaaat

SEQ ID NO: 280754 - DNA, 19 bp, Homo sapiens
  siRNA target sequence for HSPC117 (NM_014306.2,908-926).
cagatgcgctggtagctat

SEQ ID NO: 280755 - DNA, 19 bp, Homo sapiens
  siRNA target sequence for HSPC117 (NM_014306.2,948-966).
caagattatagtcaatgat

SEQ ID NO: 280756 - DNA, 19 bp, Homo sapiens
  siRNA target sequence for HSPC117 (NM_014306.2,998-1016).
cagagggtcaagactatct

SEQ ID NO: 280757 - DNA, 19 bp, Homo sapiens
  siRNA target sequence for HSPC117 (NM_014306.2,1088-1106).
ctttcgccaaggtcttcaa

SEQ ID NO: 280758 - DNA, 19 bp, Homo sapiens
  siRNA target sequence for HSPC117 (NM_014306.2,1194-1212).
ggaacggacactgttagta

SEQ ID NO: 280759 - DNA, 19 bp, Homo sapiens
  siRNA target sequence for HSPC117 (NM_014306.2,1253-1271).
ccctcattgctgttgatta

SEQ ID NO: 280760 - DNA, 19 bp, Homo sapiens
  siRNA target sequence for HSPC117 (NM_014306.2,1257-1275).
cattgctgttgattaccaa

SEQ ID NO: 280761 - DNA, 19 bp, Homo sapiens
  siRNA target sequence for HSPC117 (NM_014306.2,1311-1329).
gggaacctgtagttatgtt

SEQ ID NO: 280762 - DNA, 19 bp, Homo sapiens
  siRNA target sequence for HSPC117 (NM_014306.2,1393-1411).
gcattgtcccgagcaaaat

SEQ ID NO: 280763 - DNA, 19 bp, Homo sapiens
  siRNA target sequence for HSPC117 (NM_014306.2,1405-1423).
gcaaaatctcgacgtaatt

SEQ ID NO: 280764 - DNA, 19 bp, Homo sapiens
  siRNA target sequence for HSPC117 (NM_014306.2,1406-1424).
caaaatctcgacgtaattt

SEQ ID NO: 280765 - DNA, 19 bp, Homo sapiens
  siRNA target sequence for HSPC117 (NM_014306.2,1412-1430).
ctcgacgtaatttagattt

SEQ ID NO: 280766 - DNA, 19 bp, Homo sapiens
  siRNA target sequence for HSPC117 (NM_014306.2,1415-1433).
gacgtaatttagatttcca

SEQ ID NO: 280767 - DNA, 19 bp, Homo sapiens
  siRNA target sequence for HSPC117 (NM_014306.2,1481-1499).
cctcacccaaactggttat

SEQ ID NO: 280768 - DNA, 19 bp, Homo sapiens
  siRNA target sequence for HSPC117 (NM_014306.2,1484-1502).
cacccaaactggttatgga

SEQ ID NO: 280769 - DNA, 19 bp, Homo sapiens
  siRNA target sequence for HSPC117 (NM_014306.2,1511-1529).
ctgagtcctataagaatgt

SEQ ID NO: 280770 - DNA, 19 bp, Homo sapiens
  siRNA target sequence for HSPC117 (NM_014306.2,1513-1531).
gagtcctataagaatgtga

SEQ ID NO: 280771 - DNA, 19 bp, Homo sapiens
  siRNA target sequence for HSPC117 (NM_014306.2,1528-1546).
gtgacagatgtggtaaata

SEQ ID NO: 280772 - DNA, 19 bp, Homo sapiens
  siRNA target sequence for HSPC117 (NM_014306.2,1568-1586).
gcaagaaagccattaaact

SEQ ID NO: 280773 - DNA, 19 bp, Homo sapiens
  siRNA target sequence for HSPC121 (NM_016395.1,191-209).
gcgacaccgcgagctatat

SEQ ID NO: 280774 - DNA, 19 bp, Homo sapiens
  siRNA target sequence for HSPC121 (NM_016395.1,193-211).
gacaccgcgagctatatct

SEQ ID NO: 280775 - DNA, 19 bp, Homo sapiens
  siRNA target sequence for HSPC121 (NM_016395.1,295-313).
ccaaaggagacaatgtcta

SEQ ID NO: 280776 - DNA, 19 bp, Homo sapiens
  siRNA target sequence for HSPC121 (NM_016395.1,351-369).
gagcctgtttacaaactga

SEQ ID NO: 280777 - DNA, 19 bp, Homo sapiens
  siRNA target sequence for HSPC121 (NM_016395.1,437-455).
ggaaaagcgaccactgttt

SEQ ID NO: 280778 - DNA, 19 bp, Homo sapiens
  siRNA target sequence for HSPC121 (NM_016395.1,438-456).
gaaaagcgaccactgtttt

SEQ ID NO: 280779 - DNA, 19 bp, Homo sapiens
  siRNA target sequence for HSPC121 (NM_016395.1,452-470).
gtttttggctcctgacttt

SEQ ID NO: 280780 - DNA, 19 bp, Homo sapiens
  siRNA target sequence for HSPC121 (NM_016395.1,471-489).
gatcgttggctggatgaat

SEQ ID NO: 280781 - DNA, 19 bp, Homo sapiens
  siRNA target sequence for HSPC121 (NM_016395.1,564-582).
cctgaaactcttacaaact

SEQ ID NO: 280782 - DNA, 19 bp, Homo sapiens
  siRNA target sequence for HSPC121 (NM_016395.1,571-589).
ctcttacaaacttaaggaa

SEQ ID NO: 280783 - DNA, 19 bp, Homo sapiens
  siRNA target sequence for HSPC121 (NM_016395.1,591-609).
ggatacctgtttatgtata

SEQ ID NO: 280784 - DNA, 19 bp, Homo sapiens
  siRNA target sequence for HSPC121 (NM_016395.1,626-644).
gggattctcctggatcttt

SEQ ID NO: 280785 - DNA, 19 bp, Homo sapiens
  siRNA target sequence for HSPC121 (NM_016395.1,650-668).
cctgactgtgcgattctgt

SEQ ID NO: 280786 - DNA, 19 bp, Homo sapiens
  siRNA target sequence for HSPC121 (NM_016395.1,651-669).
ctgactgtgcgattctgta

SEQ ID NO: 280787 - DNA, 19 bp, Homo sapiens
  siRNA target sequence for HSPC121 (NM_016395.1,655-673).
ctgtgcgattctgtatctt

SEQ ID NO: 280788 - DNA, 19 bp, Homo sapiens
  siRNA target sequence for HSPC121 (NM_016395.1,674-692).
gggaaaagagtccttttat

SEQ ID NO: 280789 - DNA, 19 bp, Homo sapiens
  siRNA target sequence for HSPC121 (NM_016395.1,711-729).
gctgacatgatgtatttct

SEQ ID NO: 280790 - DNA, 19 bp, Homo sapiens
  siRNA target sequence for HSPC121 (NM_016395.1,741-759).
gcagttgtggaaactatca

SEQ ID NO: 280791 - DNA, 19 bp, Homo sapiens
  siRNA target sequence for HSPC121 (NM_016395.1,899-917).
gtggagtgcaattgaaatt

SEQ ID NO: 280792 - DNA, 19 bp, Homo sapiens
  siRNA target sequence for HSPC121 (NM_016395.1,971-989).
cacatggcttcgttacact

SEQ ID NO: 280793 - DNA, 19 bp, Homo sapiens
  siRNA target sequence for HSPC121 (NM_016395.1,988-1006).
ctctgtggattcccttata

SEQ ID NO: 280794 - DNA, 19 bp, Homo sapiens
  siRNA target sequence for HSPC121 (NM_016395.1,1038-1056).
gtgattcagtccattccaa

SEQ ID NO: 280795 - DNA, 19 bp, Homo sapiens
  siRNA target sequence for HSPC121 (NM_016395.1,1048-1066).
ccattccaatattcaatga

SEQ ID NO: 280796 - DNA, 19 bp, Homo sapiens
  siRNA target sequence for HSPC121 (NM_016395.1,1065-1083).
gagaccggacgattcagtt

SEQ ID NO: 280797 - DNA, 19 bp, Homo sapiens
  siRNA target sequence for HSPC121 (NM_016395.1,1070-1088).
cggacgattcagtttcaca

SEQ ID NO: 280798 - DNA, 19 bp, Homo sapiens
  siRNA target sequence for HSPC121 (NM_016395.1,1072-1090).
gacgattcagtttcacatt

SEQ ID NO: 280799 - DNA, 19 bp, Homo sapiens
  siRNA target sequence for HSPC148 (NM_016403.1,124-142).
ggtgatttgagccaacttt

SEQ ID NO: 280800 - DNA, 19 bp, Homo sapiens
  siRNA target sequence for HSPC148 (NM_016403.1,139-157).
ctttcaaagcagtattcaa

SEQ ID NO: 280801 - DNA, 19 bp, Homo sapiens
  siRNA target sequence for HSPC148 (NM_016403.1,163-181).
gacctaccctctcatacaa

SEQ ID NO: 280802 - DNA, 19 bp, Homo sapiens
  siRNA target sequence for HSPC148 (NM_016403.1,166-184).
ctaccctctcatacaaaga

SEQ ID NO: 280803 - DNA, 19 bp, Homo sapiens
  siRNA target sequence for HSPC148 (NM_016403.1,169-187).
ccctctcatacaaagataa

SEQ ID NO: 280804 - DNA, 19 bp, Homo sapiens
  siRNA target sequence for HSPC148 (NM_016403.1,170-188).
cctctcatacaaagataaa

SEQ ID NO: 280805 - DNA, 19 bp, Homo sapiens
  siRNA target sequence for HSPC148 (NM_016403.1,212-230).
cccctgaagaggttcgtaa

SEQ ID NO: 280806 - DNA, 19 bp, Homo sapiens
  siRNA target sequence for HSPC148 (NM_016403.1,377-395).
cagatgaccctctaacaga

SEQ ID NO: 280807 - DNA, 19 bp, Homo sapiens
  siRNA target sequence for HSPC148 (NM_016403.1,533-551).
ggattcgtatggaaaacat

SEQ ID NO: 280808 - DNA, 19 bp, Homo sapiens
  siRNA target sequence for HSPC148 (NM_016403.1,538-556).
cgtatggaaaacattctga

SEQ ID NO: 280809 - DNA, 19 bp, Homo sapiens
  siRNA target sequence for HSPC148 (NM_016403.1,598-616).
caggccaacttcaaagtta

SEQ ID NO: 280810 - DNA, 19 bp, Homo sapiens
  siRNA target sequence for HSPC148 (NM_016403.1,626-644).
gggatgatgacgttgtctt

SEQ ID NO: 280811 - DNA, 19 bp, Homo sapiens
  siRNA target sequence for HSPC148 (NM_016403.1,634-652).
gacgttgtcttcaagaact

SEQ ID NO: 280812 - DNA, 19 bp, Homo sapiens
  siRNA target sequence for HSPC148 (NM_016403.1,645-663).
caagaactgtgcaaaaggt

SEQ ID NO: 280813 - DNA, 19 bp, Homo sapiens
  siRNA target sequence for HSPC148 (NM_016403.1,651-669).
ctgtgcaaaaggtgtagat

SEQ ID NO: 280814 - DNA, 19 bp, Homo sapiens
  siRNA target sequence for HSPC148 (NM_016403.1,653-671).
gtgcaaaaggtgtagatga

SEQ ID NO: 280815 - DNA, 19 bp, Homo sapiens
  siRNA target sequence for HSPC148 (NM_016403.1,700-718).
gacacactgcgatctgaat

SEQ ID NO: 280816 - DNA, 19 bp, Homo sapiens
  siRNA target sequence for HSPC148 (NM_016403.1,706-724).
ctgcgatctgaatttcaca

SEQ ID NO: 280817 - DNA, 19 bp, Homo sapiens
  siRNA target sequence for HSPC148 (NM_016403.1,709-727).
cgatctgaatttcacaaaa

SEQ ID NO: 280818 - DNA, 19 bp, Homo sapiens
  siRNA target sequence for HSPC177 (NM_016410.2,347-365).
gaacaagccaattatacca

SEQ ID NO: 280819 - DNA, 19 bp, Homo sapiens
  siRNA target sequence for HSPC177 (NM_016410.2,454-472).
cgaccagattgaggattta

SEQ ID NO: 280820 - DNA, 19 bp, Homo sapiens
  siRNA target sequence for HSPC177 (NM_016410.2,662-680).
ggtgttcccactgatacaa

SEQ ID NO: 280821 - DNA, 19 bp, Homo sapiens
  siRNA target sequence for HSRG1 (NM_014940.2,574-592).
gagaatagtcccacatgta

SEQ ID NO: 280822 - DNA, 19 bp, Homo sapiens
  siRNA target sequence for HSRG1 (NM_014940.2,650-668).
gccagcggaagcatgtgtt

SEQ ID NO: 280823 - DNA, 19 bp, Homo sapiens
  siRNA target sequence for HSRG1 (NM_014940.2,728-746).
cggctaccatgggtgtaat

SEQ ID NO: 280824 - DNA, 19 bp, Homo sapiens
  siRNA target sequence for HSRG1 (NM_014940.2,730-748).
gctaccatgggtgtaatga

SEQ ID NO: 280825 - DNA, 19 bp, Homo sapiens
  siRNA target sequence for HSRG1 (NM_014940.2,916-934).
cagatcgtgagcacactta

SEQ ID NO: 280826 - DNA, 19 bp, Homo sapiens
  siRNA target sequence for HSRG1 (NM_014940.2,918-936).
gatcgtgagcacacttaca

SEQ ID NO: 280827 - DNA, 19 bp, Homo sapiens
  siRNA target sequence for HSRG1 (NM_014940.2,1483-1501).
gaggctgccagcttctcta

SEQ ID NO: 280828 - DNA, 19 bp, Homo sapiens
  siRNA target sequence for HSRG1 (NM_014940.2,1485-1503).
ggctgccagcttctctaat

SEQ ID NO: 280829 - DNA, 19 bp, Homo sapiens
  siRNA target sequence for HSRG1 (NM_014940.2,1558-1576).
ctccggcacttcctgtata

SEQ ID NO: 280830 - DNA, 19 bp, Homo sapiens
  siRNA target sequence for HSRG1 (NM_014940.2,1721-1739).
gacccctgcgcctcattta

SEQ ID NO: 280831 - DNA, 19 bp, Homo sapiens
  siRNA target sequence for HSRG1 (NM_014940.2,1772-1790).
gggtgacctccaaattcga

SEQ ID NO: 280832 - DNA, 19 bp, Homo sapiens
  siRNA target sequence for HSRG1 (NM_014940.2,1820-1838).
ccaaggcaggtgcaatctt

SEQ ID NO: 280833 - DNA, 19 bp, Homo sapiens
  siRNA target sequence for HSRG1 (NM_014940.2,1879-1897).
gaccggctcttcattcgtt

SEQ ID NO: 280834 - DNA, 19 bp, Homo sapiens
  siRNA target sequence for HSRG1 (NM_014940.2,1894-1912).
cgttacccacccaagtact

SEQ ID NO: 280835 - DNA, 19 bp, Homo sapiens
  siRNA target sequence for IFI27 (NM_005532.1,144-162).
ggccaggattgctacagtt

SEQ ID NO: 280836 - DNA, 19 bp, Homo sapiens
  siRNA target sequence for IFI27 (NM_005532.1,149-167).
ggattgctacagttgtgat

SEQ ID NO: 280837 - DNA, 19 bp, Homo sapiens
  siRNA target sequence for IFI27 (NM_005532.1,353-371).
ccggattgaccaagttcat

SEQ ID NO: 280838 - DNA, 19 bp, Homo sapiens
  siRNA target sequence for IFIT1 (NM_001548.1,69-87).
gtacaaatggtgatgatca

SEQ ID NO: 280839 - DNA, 19 bp, Homo sapiens
  siRNA target sequence for IFIT1 (NM_001548.1,83-101).
gatcatcaggtcaaggata

SEQ ID NO: 280840 - DNA, 19 bp, Homo sapiens
  siRNA target sequence for IFIT1 (NM_001548.1,132-150).
gggagttatccattgatga

SEQ ID NO: 280841 - DNA, 19 bp, Homo sapiens
  siRNA target sequence for IFIT1 (NM_001548.1,151-169).
cgatgaaatgcctgattta

SEQ ID NO: 280842 - DNA, 19 bp, Homo sapiens
  siRNA target sequence for IFIT1 (NM_001548.1,473-491).
gagtgtccagaaatagact

SEQ ID NO: 280843 - DNA, 19 bp, Homo sapiens
  siRNA target sequence for IFIT1 (NM_001548.1,625-643).
cctggatggctttaaatta

SEQ ID NO: 280844 - DNA, 19 bp, Homo sapiens
  siRNA target sequence for IFIT1 (NM_001548.1,685-703).
gcaggctgtccgcttaaat

SEQ ID NO: 280845 - DNA, 19 bp, Homo sapiens
  siRNA target sequence for IFIT1 (NM_001548.1,688-706).
ggctgtccgcttaaatcca

SEQ ID NO: 280846 - DNA, 19 bp, Homo sapiens
  siRNA target sequence for IFIT1 (NM_001548.1,704-722).
ccagacaatggatatatta

SEQ ID NO: 280847 - DNA, 19 bp, Homo sapiens
  siRNA target sequence for IFIT1 (NM_001548.1,788-806).
gaagctctagccaacatgt

SEQ ID NO: 280848 - DNA, 19 bp, Homo sapiens
  siRNA target sequence for IFIT1 (NM_001548.1,1015-1033).
gctagacaaaatgataaga

SEQ ID NO: 280849 - DNA, 19 bp, Homo sapiens
  siRNA target sequence for IFIT1 (NM_001548.1,1016-1034).
ctagacaaaatgataagat

SEQ ID NO: 280850 - DNA, 19 bp, Homo sapiens
  siRNA target sequence for IFIT1 (NM_001548.1,1245-1263).
ctgacgtcaatgcaattat

SEQ ID NO: 280851 - DNA, 19 bp, Homo sapiens
  siRNA target sequence for IFIT1 (NM_001548.1,1309-1327).
ggataaaagtatcaattct

SEQ ID NO: 280852 - DNA, 19 bp, Homo sapiens
  siRNA target sequence for IFIT4 (NM_001549.2,190-208).
gtgtgtaaccagattgaat

SEQ ID NO: 280853 - DNA, 19 bp, Homo sapiens
  siRNA target sequence for IFIT4 (NM_001549.2,192-210).
gtgtaaccagattgaattt

SEQ ID NO: 280854 - DNA, 19 bp, Homo sapiens
  siRNA target sequence for IFIT4 (NM_001549.2,240-258).
caacttgttggcctacata

SEQ ID NO: 280855 - DNA, 19 bp, Homo sapiens
  siRNA target sequence for IFIT4 (NM_001549.2,243-261).
cttgttggcctacataaaa

SEQ ID NO: 280856 - DNA, 19 bp, Homo sapiens
  siRNA target sequence for IFIT4 (NM_001549.2,427-445).
gtagataaggtgaaacaaa

SEQ ID NO: 280857 - DNA, 19 bp, Homo sapiens
  siRNA target sequence for IFIT4 (NM_001549.2,577-595).
cccaacaacccagaattct

SEQ ID NO: 280858 - DNA, 19 bp, Homo sapiens
  siRNA target sequence for IFIT4 (NM_001549.2,614-632).
cgatgtaccatctggataa

SEQ ID NO: 280859 - DNA, 19 bp, Homo sapiens
  siRNA target sequence for IFIT4 (NM_001549.2,686-704).
gtcctgataaccaatacgt

SEQ ID NO: 280860 - DNA, 19 bp, Homo sapiens
  siRNA target sequence for IFIT4 (NM_001549.2,786-804).
gtctccttgccaaacagat

SEQ ID NO: 280861 - DNA, 19 bp, Homo sapiens
  siRNA target sequence for IFIT4 (NM_001549.2,842-860).
gtgacctagacaaagctat

SEQ ID NO: 280862 - DNA, 19 bp, Homo sapiens
  siRNA target sequence for IFIT4 (NM_001549.2,882-900).
ggaatccacaccaaacaat

SEQ ID NO: 280863 - DNA, 19 bp, Homo sapiens
  siRNA target sequence for IFIT4 (NM_001549.2,927-945).
ctgctacaaggcaaaagta

SEQ ID NO: 280864 - DNA, 19 bp, Homo sapiens
  siRNA target sequence for IFIT4 (NM_001549.2,957-975).
gaatacaggagaatctgaa

SEQ ID NO: 280865 - DNA, 19 bp, Homo sapiens
  siRNA target sequence for IFIT4 (NM_001549.2,1018-1036).
gctatggactattcgaata

SEQ ID NO: 280866 - DNA, 19 bp, Homo sapiens
  siRNA target sequence for IFIT4 (NM_001549.2,1019-1037).
ctatggactattcgaataa

SEQ ID NO: 280867 - DNA, 19 bp, Homo sapiens
  siRNA target sequence for IFIT4 (NM_001549.2,1023-1041).
ggactattcgaataaagct

SEQ ID NO: 280868 - DNA, 19 bp, Homo sapiens
  siRNA target sequence for IFIT4 (NM_001549.2,1050-1068).
gggactgaatcctctgaat

SEQ ID NO: 280869 - DNA, 19 bp, Homo sapiens
  siRNA target sequence for IFIT4 (NM_001549.2,1092-1110).
cctggagacggaatgttat

SEQ ID NO: 280870 - DNA, 19 bp, Homo sapiens
  siRNA target sequence for IFIT4 (NM_001549.2,1096-1114).
gagacggaatgttatcaga

SEQ ID NO: 280871 - DNA, 19 bp, Homo sapiens
  siRNA target sequence for IFIT4 (NM_001549.2,1208-1226).
ctgctgtgcaacatggttt

SEQ ID NO: 280872 - DNA, 19 bp, Homo sapiens
  siRNA target sequence for IFIT4 (NM_001549.2,1211-1229).
ctgtgcaacatggtttaga

SEQ ID NO: 280873 - DNA, 19 bp, Homo sapiens
  siRNA target sequence for IFIT4 (NM_001549.2,1239-1257).
cataagcaaaaaatcaact

SEQ ID NO: 280874 - DNA, 19 bp, Homo sapiens
  siRNA target sequence for IFIT4 (NM_001549.2,1276-1294).
gaccaaccacagaatgtat

SEQ ID NO: 280875 - DNA, 19 bp, Homo sapiens
  siRNA target sequence for IFIT4 (NM_001549.2,1331-1349).
ggtatcttcaaggattaat

SEQ ID NO: 280876 - DNA, 19 bp, Homo sapiens
  siRNA target sequence for IFIT4 (NM_001549.2,1332-1350).
gtatcttcaaggattaatt

SEQ ID NO: 280877 - DNA, 19 bp, Homo sapiens
  siRNA target sequence for IFIT4 (NM_001549.2,1371-1389).
gctgcaagcagccaaatgt

SEQ ID NO: 280878 - DNA, 19 bp, Homo sapiens
  siRNA target sequence for IFIT4 (NM_001549.2,1374-1392).
gcaagcagccaaatgttat

SEQ ID NO: 280879 - DNA, 19 bp, Homo sapiens
  siRNA target sequence for IFIT4 (NM_001549.2,1430-1448).
caggcataggcagtatttt

SEQ ID NO: 280880 - DNA, 19 bp, Homo sapiens
  siRNA target sequence for IFIT4 (NM_001549.2,1433-1451).
gcataggcagtattttcct

SEQ ID NO: 280881 - DNA, 19 bp, Homo sapiens
  siRNA target sequence for IFIT4 (NM_001549.2,1529-1547).
ctaactcagagcaactgaa

SEQ ID NO: 280882 - DNA, 19 bp, Homo sapiens
  siRNA target sequence for IFIT5 (NM_012420.1,233-251).
ggcaacagcttgaatttct

SEQ ID NO: 280883 - DNA, 19 bp, Homo sapiens
  siRNA target sequence for IFIT5 (NM_012420.1,234-252).
gcaacagcttgaatttctt

SEQ ID NO: 280884 - DNA, 19 bp, Homo sapiens
  siRNA target sequence for IFIT5 (NM_012420.1,266-284).
gacttgctctttataacct

SEQ ID NO: 280885 - DNA, 19 bp, Homo sapiens
  siRNA target sequence for IFIT5 (NM_012420.1,459-477).
gaagtatacaggtaagata

SEQ ID NO: 280886 - DNA, 19 bp, Homo sapiens
  siRNA target sequence for IFIT5 (NM_012420.1,469-487).
ggtaagatagggaatgtct

SEQ ID NO: 280887 - DNA, 19 bp, Homo sapiens
  siRNA target sequence for IFIT5 (NM_012420.1,478-496).
gggaatgtctgtaagaaat

SEQ ID NO: 280888 - DNA, 19 bp, Homo sapiens
  siRNA target sequence for IFIT5 (NM_012420.1,503-521).
gtccttctaactacaagtt

SEQ ID NO: 280889 - DNA, 19 bp, Homo sapiens
  siRNA target sequence for IFIT5 (NM_012420.1,628-646).
cctgacaatccagaattta

SEQ ID NO: 280890 - DNA, 19 bp, Homo sapiens
  siRNA target sequence for IFIT5 (NM_012420.1,648-666).
catcggctatgctatcaca

SEQ ID NO: 280891 - DNA, 19 bp, Homo sapiens
  siRNA target sequence for IFIT5 (NM_012420.1,667-685).
gtgtatcggctggatgatt

SEQ ID NO: 280892 - DNA, 19 bp, Homo sapiens
  siRNA target sequence for IFIT5 (NM_012420.1,673-691).
cggctggatgattctgata

SEQ ID NO: 280893 - DNA, 19 bp, Homo sapiens
  siRNA target sequence for IFIT5 (NM_012420.1,697-715).
gggtctgtaaagagctttt

SEQ ID NO: 280894 - DNA, 19 bp, Homo sapiens
  siRNA target sequence for IFIT5 (NM_012420.1,752-770).
cagataacagctatattaa

SEQ ID NO: 280895 - DNA, 19 bp, Homo sapiens
  siRNA target sequence for IFIT5 (NM_012420.1,759-777).
cagctatattaaggttttt

SEQ ID NO: 280896 - DNA, 19 bp, Homo sapiens
  siRNA target sequence for IFIT5 (NM_012420.1,761-779).
gctatattaaggtttttct

SEQ ID NO: 280897 - DNA, 19 bp, Homo sapiens
  siRNA target sequence for IFIT5 (NM_012420.1,835-853).
gaaatcctggaccaaatat

SEQ ID NO: 280898 - DNA, 19 bp, Homo sapiens
  siRNA target sequence for IFIT5 (NM_012420.1,861-879).
gccttacgtccttcgttat

SEQ ID NO: 280899 - DNA, 19 bp, Homo sapiens
  siRNA target sequence for IFIT5 (NM_012420.1,1030-1048).
cacaacagacctaaaggaa

SEQ ID NO: 280900 - DNA, 19 bp, Homo sapiens
  siRNA target sequence for IFIT5 (NM_012420.1,1035-1053).
cagacctaaaggaaaggat

SEQ ID NO: 280901 - DNA, 19 bp, Homo sapiens
  siRNA target sequence for IFIT5 (NM_012420.1,1071-1089).
gctgatttcatctgctata

SEQ ID NO: 280902 - DNA, 19 bp, Homo sapiens
  siRNA target sequence for IFIT5 (NM_012420.1,1074-1092).
gatttcatctgctatattt

SEQ ID NO: 280903 - DNA, 19 bp, Homo sapiens
  siRNA target sequence for IFIT5 (NM_012420.1,1106-1124).
ccatggaacgagactctat

SEQ ID NO: 280904 - DNA, 19 bp, Homo sapiens
  siRNA target sequence for IFIT5 (NM_012420.1,1114-1132).
cgagactctatgtttgcat

SEQ ID NO: 280905 - DNA, 19 bp, Homo sapiens
  siRNA target sequence for IFIT5 (NM_012420.1,1208-1226).
ctcttcgtctggagaacat

SEQ ID NO: 280906 - DNA, 19 bp, Homo sapiens
  siRNA target sequence for IFIT5 (NM_012420.1,1224-1242).
cataaccgatgatcacaaa

SEQ ID NO: 280907 - DNA, 19 bp, Homo sapiens
  siRNA target sequence for IFIT5 (NM_012420.1,1229-1247).
ccgatgatcacaaacatca

SEQ ID NO: 280908 - DNA, 19 bp, Homo sapiens
  siRNA target sequence for IFIT5 (NM_012420.1,1237-1255).
cacaaacatcagatccatt

SEQ ID NO: 280909 - DNA, 19 bp, Homo sapiens
  siRNA target sequence for IFIT5 (NM_012420.1,1275-1293).
ggaatttcaccgtaaatca

SEQ ID NO: 280910 - DNA, 19 bp, Homo sapiens
  siRNA target sequence for IFIT5 (NM_012420.1,1388-1406).
ctaccaagagactttgtca

SEQ ID NO: 280911 - DNA, 19 bp, Homo sapiens
  siRNA target sequence for IFIT5 (NM_012420.1,1435-1453).
gccctagggtttgtttaca

SEQ ID NO: 280912 - DNA, 19 bp, Homo sapiens
  siRNA target sequence for IFIT5 (NM_012420.1,1436-1454).
ccctagggtttgtttacaa

SEQ ID NO: 280913 - DNA, 19 bp, Homo sapiens
  siRNA target sequence for IFIT5 (NM_012420.1,1472-1490).
ggcaagctgctgagtacta

SEQ ID NO: 280914 - DNA, 19 bp, Homo sapiens
  siRNA target sequence for IFIT5 (NM_012420.1,1473-1491).
gcaagctgctgagtactat

SEQ ID NO: 280915 - DNA, 19 bp, Homo sapiens
  siRNA target sequence for IFIT5 (NM_012420.1,1546-1564).
gagctccgactttccattt

SEQ ID NO: 280916 - DNA, 19 bp, Homo sapiens
  siRNA target sequence for IFRD2 (NM_006764.2,187-205).
gacgcttcggagttaacca

SEQ ID NO: 280917 - DNA, 19 bp, Homo sapiens
  siRNA target sequence for IFRD2 (NM_006764.2,247-265).
gcattgtgggtgcatagtt

SEQ ID NO: 280918 - DNA, 19 bp, Homo sapiens
  siRNA target sequence for IFRD2 (NM_006764.2,310-328).
caggcctctgggattagta

SEQ ID NO: 280919 - DNA, 19 bp, Homo sapiens
  siRNA target sequence for IFRD2 (NM_006764.2,619-637).
cgcagcaccgccagtgaat

SEQ ID NO: 280920 - DNA, 19 bp, Homo sapiens
  siRNA target sequence for IFRD2 (NM_006764.2,1332-1350).
cgctgccggtgaaaccatt

SEQ ID NO: 280921 - DNA, 19 bp, Homo sapiens
  siRNA target sequence for IFRD2 (NM_006764.2,1377-1395).
ccttgaggaggagtttgtt

SEQ ID NO: 280922 - DNA, 19 bp, Homo sapiens
  siRNA target sequence for IFRD2 (NM_006764.2,1523-1541).
gcggtgaatgcgaagaaga

SEQ ID NO: 280923 - DNA, 19 bp, Homo sapiens
  siRNA target sequence for IFRD2 (NM_006764.2,1556-1574).
gctttgaggtgctctacat

SEQ ID NO: 280924 - DNA, 19 bp, Homo sapiens
  siRNA target sequence for IMPACT (NM_018439.1,69-87).
gaggcagaatgaggaaatt

SEQ ID NO: 280925 - DNA, 19 bp, Homo sapiens
  siRNA target sequence for IMPACT (NM_018439.1,114-132).
ggagtggtgtgtcattgat

SEQ ID NO: 280926 - DNA, 19 bp, Homo sapiens
  siRNA target sequence for IMPACT (NM_018439.1,158-176).
gaattagcgacgatataga

SEQ ID NO: 280927 - DNA, 19 bp, Homo sapiens
  siRNA target sequence for IMPACT (NM_018439.1,205-223).
gtgatgctgccgaatgaat

SEQ ID NO: 280928 - DNA, 19 bp, Homo sapiens
  siRNA target sequence for IMPACT (NM_018439.1,230-248).
gtacagctccacctatcta

SEQ ID NO: 280929 - DNA, 19 bp, Homo sapiens
  siRNA target sequence for IMPACT (NM_018439.1,276-294).
gcaagaacgtgcggattta

SEQ ID NO: 280930 - DNA, 19 bp, Homo sapiens
  siRNA target sequence for IMPACT (NM_018439.1,280-298).
gaacgtgcggatttatcaa

SEQ ID NO: 280931 - DNA, 19 bp, Homo sapiens
  siRNA target sequence for IMPACT (NM_018439.1,283-301).
cgtgcggatttatcaaata

SEQ ID NO: 280932 - DNA, 19 bp, Homo sapiens
  siRNA target sequence for IMPACT (NM_018439.1,302-320).
gccttgaggaaatatatat

SEQ ID NO: 280933 - DNA, 19 bp, Homo sapiens
  siRNA target sequence for IMPACT (NM_018439.1,307-325).
gaggaaatatatattcaga

SEQ ID NO: 280934 - DNA, 19 bp, Homo sapiens
  siRNA target sequence for IMPACT (NM_018439.1,324-342).
gaatatcggtgaaagtatt

SEQ ID NO: 280935 - DNA, 19 bp, Homo sapiens
  siRNA target sequence for IMPACT (NM_018439.1,403-421).
ccaggcccagatgtaaaga

SEQ ID NO: 280936 - DNA, 19 bp, Homo sapiens
  siRNA target sequence for IMPACT (NM_018439.1,404-422).
caggcccagatgtaaagaa

SEQ ID NO: 280937 - DNA, 19 bp, Homo sapiens
  siRNA target sequence for IMPACT (NM_018439.1,469-487).
gcatgtcagccggaaagtt

SEQ ID NO: 280938 - DNA, 19 bp, Homo sapiens
  siRNA target sequence for IMPACT (NM_018439.1,496-514).
gcattggattttgatatca

SEQ ID NO: 280939 - DNA, 19 bp, Homo sapiens
  siRNA target sequence for IMPACT (NM_018439.1,521-539).
ctcggacagaagtagaagt

SEQ ID NO: 280940 - DNA, 19 bp, Homo sapiens
  siRNA target sequence for IMPACT (NM_018439.1,677-695).
ctagtgccacccacaacat

SEQ ID NO: 280941 - DNA, 19 bp, Homo sapiens
  siRNA target sequence for IMPACT (NM_018439.1,787-805).
catctcatggagattttga

SEQ ID NO: 280942 - DNA, 19 bp, Homo sapiens
  siRNA target sequence for IMPACT (NM_018439.1,862-880).
ccagatcgctttaaacata

SEQ ID NO: 280943 - DNA, 19 bp, Homo sapiens
  siRNA target sequence for IMPACT (NM_018439.1,865-883).
gatcgctttaaacatatca

SEQ ID NO: 280944 - DNA, 19 bp, Homo sapiens
  siRNA target sequence for IMPACT (NM_018439.1,868-886).
cgctttaaacatatcaaca

SEQ ID NO: 280945 - DNA, 19 bp, Homo sapiens
  siRNA target sequence for JPH1 (NM_020647.1,291-309).
gggagtggtcacatggttt

SEQ ID NO: 280946 - DNA, 19 bp, Homo sapiens
  siRNA target sequence for JPH1 (NM_020647.1,612-630).
gcggtttcgtgctcaactt

SEQ ID NO: 280947 - DNA, 19 bp, Homo sapiens
  siRNA target sequence for JPH1 (NM_020647.1,644-662).
gagctagcgggcaagaaga

SEQ ID NO: 280948 - DNA, 19 bp, Homo sapiens
  siRNA target sequence for JPH1 (NM_020647.1,811-829).
cagctttggcgatgtagat

SEQ ID NO: 280949 - DNA, 19 bp, Homo sapiens
  siRNA target sequence for JPH1 (NM_020647.1,933-951).
gctccaatggcatgaagta

SEQ ID NO: 280950 - DNA, 19 bp, Homo sapiens
  siRNA target sequence for JPH1 (NM_020647.1,936-954).
ccaatggcatgaagtatga

SEQ ID NO: 280951 - DNA, 19 bp, Homo sapiens
  siRNA target sequence for JPH1 (NM_020647.1,937-955).
caatggcatgaagtatgaa

SEQ ID NO: 280952 - DNA, 19 bp, Homo sapiens
  siRNA target sequence for JPH1 (NM_020647.1,959-977).
gagtgggcaaataacaaga

SEQ ID NO: 280953 - DNA, 19 bp, Homo sapiens
  siRNA target sequence for JPH1 (NM_020647.1,1046-1064).
ctggtccgtgggataagga

SEQ ID NO: 280954 - DNA, 19 bp, Homo sapiens
  siRNA target sequence for JPH1 (NM_020647.1,1066-1084).
gcagcttataccaataaga

SEQ ID NO: 280955 - DNA, 19 bp, Homo sapiens
  siRNA target sequence for JPH1 (NM_020647.1,1269-1287).
gggagctgtcacctgattt

SEQ ID NO: 280956 - DNA, 19 bp, Homo sapiens
  siRNA target sequence for JPH1 (NM_020647.1,1299-1317).
gccctgattacgtcaaaca

SEQ ID NO: 280957 - DNA, 19 bp, Homo sapiens
  siRNA target sequence for JPH1 (NM_020647.1,1301-1319).
cctgattacgtcaaacaga

SEQ ID NO: 280958 - DNA, 19 bp, Homo sapiens
  siRNA target sequence for JPH1 (NM_020647.1,1417-1435).
cacgacacccccaagatct

SEQ ID NO: 280959 - DNA, 19 bp, Homo sapiens
  siRNA target sequence for JPH1 (NM_020647.1,1619-1637).
gtgccccagtccaagtact

SEQ ID NO: 280960 - DNA, 19 bp, Homo sapiens
  siRNA target sequence for JPH1 (NM_020647.1,1854-1872).
ctgagccaaaagctaagaa

SEQ ID NO: 280961 - DNA, 19 bp, Homo sapiens
  siRNA target sequence for JPH1 (NM_020647.1,1873-1891).
gtctgaacttgctatacca

SEQ ID NO: 280962 - DNA, 19 bp, Homo sapiens
  siRNA target sequence for JPH1 (NM_020647.1,1898-1916).
ccagcaagcaacgattcat

SEQ ID NO: 280963 - DNA, 19 bp, Homo sapiens
  siRNA target sequence for JPH1 (NM_020647.1,1947-1965).
gccctaattcaatcatgat

SEQ ID NO: 280964 - DNA, 19 bp, Homo sapiens
  siRNA target sequence for JPH1 (NM_020647.1,1948-1966).
ccctaattcaatcatgatt

SEQ ID NO: 280965 - DNA, 19 bp, Homo sapiens
  siRNA target sequence for KERA (NM_007035.2,623-641).
caggcacaatctgtttcat

SEQ ID NO: 280966 - DNA, 19 bp, Homo sapiens
  siRNA target sequence for KERA (NM_007035.2,664-682).
gacactgtgtggtctagaa

SEQ ID NO: 280967 - DNA, 19 bp, Homo sapiens
  siRNA target sequence for KERA (NM_007035.2,666-684).
cactgtgtggtctagaagt

SEQ ID NO: 280968 - DNA, 19 bp, Homo sapiens
  siRNA target sequence for KERA (NM_007035.2,690-708).
gcaggtctatgaagtacat

SEQ ID NO: 280969 - DNA, 19 bp, Homo sapiens
  siRNA target sequence for KERA (NM_007035.2,693-711).
ggtctatgaagtacatgat

SEQ ID NO: 280970 - DNA, 19 bp, Homo sapiens
  siRNA target sequence for KERA (NM_007035.2,853-871).
caaaacaacctgatagaaa

SEQ ID NO: 280971 - DNA, 19 bp, Homo sapiens
  siRNA target sequence for KERA (NM_007035.2,906-924).
gctaagatggataaatcta

SEQ ID NO: 280972 - DNA, 19 bp, Homo sapiens
  siRNA target sequence for KERA (NM_007035.2,942-960).
caactacggaattgaaaaa

SEQ ID NO: 280973 - DNA, 19 bp, Homo sapiens
  siRNA target sequence for KERA (NM_007035.2,945-963).
ctacggaattgaaaaagga

SEQ ID NO: 280974 - DNA, 19 bp, Homo sapiens
  siRNA target sequence for KERA (NM_007035.2,993-1011).
cttatttctggaagataat

SEQ ID NO: 280975 - DNA, 19 bp, Homo sapiens
  siRNA target sequence for KERA (NM_007035.2,1039-1057).
ccaagaagtttagaacaat

SEQ ID NO: 280976 - DNA, 19 bp, Homo sapiens
  siRNA target sequence for KERA (NM_007035.2,1046-1064).
gtttagaacaattacaatt

SEQ ID NO: 280977 - DNA, 19 bp, Homo sapiens
  siRNA target sequence for KERA (NM_007035.2,1091-1109).
ctcaagggacctttagcaa

SEQ ID NO: 280978 - DNA, 19 bp, Homo sapiens
  siRNA target sequence for KERA (NM_007035.2,1132-1150).
gacctacagaacaacaaat

SEQ ID NO: 280979 - DNA, 19 bp, Homo sapiens
  siRNA target sequence for KERA (NM_007035.2,1333-1351).
gtggcctttttgagactaa

SEQ ID NO: 280980 - DNA, 19 bp, Homo sapiens
  siRNA target sequence for KERA (NM_007035.2,1335-1353).
ggcctttttgagactaaat

SEQ ID NO: 280981 - DNA, 19 bp, Homo sapiens
  siRNA target sequence for KERA (NM_007035.2,1337-1355).
cctttttgagactaaatca

SEQ ID NO: 280982 - DNA, 19 bp, Homo sapiens
  siRNA target sequence for KERA (NM_007035.2,1391-1409).
gatttgatgtatcatcaat

SEQ ID NO: 280983 - DNA, 19 bp, Homo sapiens
  siRNA target sequence for KERA (NM_007035.2,1406-1424).
caattctagatcttcaact

SEQ ID NO: 280984 - DNA, 19 bp, Homo sapiens
  siRNA target sequence for KERA (NM_007035.2,1427-1445).
cgcacaatcaactcacaaa

SEQ ID NO: 280985 - DNA, 19 bp, Homo sapiens
  siRNA target sequence for KERA (NM_007035.2,1547-1565).
ctgcagaacgagattcctt

SEQ ID NO: 280986 - DNA, 19 bp, Homo sapiens
  siRNA target sequence for KERA (NM_007035.2,1566-1584).
cagttatggacctcatctt

SEQ ID NO: 280987 - DNA, 19 bp, Homo sapiens
  siRNA target sequence for KERA (NM_007035.2,1590-1608).
cctccgtctggatggaaat

SEQ ID NO: 280988 - DNA, 19 bp, Homo sapiens
  siRNA target sequence for KERA (NM_007035.2,1594-1612).
cgtctggatggaaatgaaa

SEQ ID NO: 280989 - DNA, 19 bp, Homo sapiens
  siRNA target sequence for KIAA0174 (NM_014761.1,69-87).
gggctctggatttaaagct

SEQ ID NO: 280990 - DNA, 19 bp, Homo sapiens
  siRNA target sequence for KIAA0174 (NM_014761.1,88-106).
gagcgcttaagagtgaatt

SEQ ID NO: 280991 - DNA, 19 bp, Homo sapiens
  siRNA target sequence for KIAA0174 (NM_014761.1,117-135).
cataaatcgccttaaacta

SEQ ID NO: 280992 - DNA, 19 bp, Homo sapiens
  siRNA target sequence for KIAA0174 (NM_014761.1,305-323).
ctcggtttggccttatcca

SEQ ID NO: 280993 - DNA, 19 bp, Homo sapiens
  siRNA target sequence for KIAA0174 (NM_014761.1,324-342).
gtctatgaaggaactagat

SEQ ID NO: 280994 - DNA, 19 bp, Homo sapiens
  siRNA target sequence for KIAA0174 (NM_014761.1,355-373).
gaatctgtgtctacattga

SEQ ID NO: 280995 - DNA, 19 bp, Homo sapiens
  siRNA target sequence for KIAA0174 (NM_014761.1,433-451).
ctctgtgccaagtatagca

SEQ ID NO: 280996 - DNA, 19 bp, Homo sapiens
  siRNA target sequence for KIAA0174 (NM_014761.1,441-459).
caagtatagcaaggaatat

SEQ ID NO: 280997 - DNA, 19 bp, Homo sapiens
  siRNA target sequence for KIAA0174 (NM_014761.1,454-472).
gaatatggcaagctatgta

SEQ ID NO: 280998 - DNA, 19 bp, Homo sapiens
  siRNA target sequence for KIAA0174 (NM_014761.1,549-567).
ggagagatacctgattgaa

SEQ ID NO: 280999 - DNA, 19 bp, Homo sapiens
  siRNA target sequence for KIAA0174 (NM_014761.1,550-568).
gagagatacctgattgaaa

SEQ ID NO: 281000 - DNA, 19 bp, Homo sapiens
  siRNA target sequence for KIAA0174 (NM_014761.1,631-649).
ggggtagagacagatctta

SEQ ID NO: 281001 - DNA, 19 bp, Homo sapiens
  siRNA target sequence for KIAA0174 (NM_014761.1,632-650).
gggtagagacagatcttat

SEQ ID NO: 281002 - DNA, 19 bp, Homo sapiens
  siRNA target sequence for KIAA0174 (NM_014761.1,633-651).
ggtagagacagatcttatt

SEQ ID NO: 281003 - DNA, 19 bp, Homo sapiens
  siRNA target sequence for KIAA0174 (NM_014761.1,804-822).
gccaaagggaccatcagat

SEQ ID NO: 281004 - DNA, 19 bp, Homo sapiens
  siRNA target sequence for KIAA0174 (NM_014761.1,810-828).
gggaccatcagatttcaat

SEQ ID NO: 281005 - DNA, 19 bp, Homo sapiens
  siRNA target sequence for KIAA0174 (NM_014761.1,852-870).
ggcctttcccaatattcat

SEQ ID NO: 281006 - DNA, 19 bp, Homo sapiens
  siRNA target sequence for KIAA0174 (NM_014761.1,1001-1019).
gacctgcagataactatga

SEQ ID NO: 281007 - DNA, 19 bp, Homo sapiens
  siRNA target sequence for KIAA0174 (NM_014761.1,1091-1109).
cagcatctgaagacattga

SEQ ID NO: 281008 - DNA, 19 bp, Homo sapiens
  siRNA target sequence for KIAA0186 (NM_021067.1,199-217).
gatgaaagctttgtatgaa

SEQ ID NO: 281009 - DNA, 19 bp, Homo sapiens
  siRNA target sequence for KIAA0186 (NM_021067.1,207-225).
ctttgtatgaacaaaacca

SEQ ID NO: 281010 - DNA, 19 bp, Homo sapiens
  siRNA target sequence for KIAA0186 (NM_021067.1,249-267).
caggtggacgaagtgattt

SEQ ID NO: 281011 - DNA, 19 bp, Homo sapiens
  siRNA target sequence for KIAA0186 (NM_021067.1,257-275).
cgaagtgatttgataccaa

SEQ ID NO: 281012 - DNA, 19 bp, Homo sapiens
  siRNA target sequence for KIAA0186 (NM_021067.1,290-308).
cactgttctctgttaagaa

SEQ ID NO: 281013 - DNA, 19 bp, Homo sapiens
  siRNA target sequence for KIAA0186 (NM_021067.1,312-330).
gacgctgcactgtagcata

SEQ ID NO: 281014 - DNA, 19 bp, Homo sapiens
  siRNA target sequence for KIAA0186 (NM_021067.1,381-399).
gcgtcttgccaaatgcatt

SEQ ID NO: 281015 - DNA, 19 bp, Homo sapiens
  siRNA target sequence for KIAA0186 (NM_021067.1,382-400).
cgtcttgccaaatgcatta

SEQ ID NO: 281016 - DNA, 19 bp, Homo sapiens
  siRNA target sequence for KIAA0186 (NM_021067.1,385-403).
cttgccaaatgcattacga

SEQ ID NO: 281017 - DNA, 19 bp, Homo sapiens
  siRNA target sequence for KIAA0186 (NM_021067.1,419-437).
gaagaaatggagtggttta

SEQ ID NO: 281018 - DNA, 19 bp, Homo sapiens
  siRNA target sequence for KIAA0186 (NM_021067.1,485-503).
gatgaaggtttggacatta

SEQ ID NO: 281019 - DNA, 19 bp, Homo sapiens
  siRNA target sequence for KIAA0186 (NM_021067.1,519-537).
caccaaaaagcctatatat

SEQ ID NO: 281020 - DNA, 19 bp, Homo sapiens
  siRNA target sequence for KIAA0186 (NM_021067.1,542-560).
gtccggtgtctaaaagact

SEQ ID NO: 281021 - DNA, 19 bp, Homo sapiens
  siRNA target sequence for KIAA0186 (NM_021067.1,544-562).
ccggtgtctaaaagactat

SEQ ID NO: 281022 - DNA, 19 bp, Homo sapiens
  siRNA target sequence for KIAA0285 (NM_014807.2,680-698).
cctgcgtagaccaatctga

SEQ ID NO: 281023 - DNA, 19 bp, Homo sapiens
  siRNA target sequence for KIAA0285 (NM_014807.2,856-874).
ggtgaggggctgctcatat

SEQ ID NO: 281024 - DNA, 19 bp, Homo sapiens
  siRNA target sequence for KIAA0285 (NM_014807.2,859-877).
gaggggctgctcatatcct

SEQ ID NO: 281025 - DNA, 19 bp, Homo sapiens
  siRNA target sequence for KIAA0285 (NM_014807.2,1109-1127).
gacctaaccggttattcct

SEQ ID NO: 281026 - DNA, 19 bp, Homo sapiens
  siRNA target sequence for KIAA0285 (NM_014807.2,1539-1557).
cacacctaccaagaagatt

SEQ ID NO: 281027 - DNA, 19 bp, Homo sapiens
  siRNA target sequence for KIAA0285 (NM_014807.2,1541-1559).
cacctaccaagaagattga

SEQ ID NO: 281028 - DNA, 19 bp, Homo sapiens
  siRNA target sequence for KIAA0285 (NM_014807.2,1579-1597).
cccgatggcaccattgtca

SEQ ID NO: 281029 - DNA, 19 bp, Homo sapiens
  siRNA target sequence for KIAA0285 (NM_014807.2,1625-1643).
cccgtatagacggcaaatt

SEQ ID NO: 281030 - DNA, 19 bp, Homo sapiens
  siRNA target sequence for KIAA0285 (NM_014807.2,1626-1644).
ccgtatagacggcaaatta

SEQ ID NO: 281031 - DNA, 19 bp, Homo sapiens
  siRNA target sequence for KIAA0285 (NM_014807.2,1628-1646).
gtatagacggcaaattaga

SEQ ID NO: 281032 - DNA, 19 bp, Homo sapiens
  siRNA target sequence for KIAA0285 (NM_014807.2,1849-1867).
cgcagcactctcatcatct

SEQ ID NO: 281033 - DNA, 19 bp, Homo sapiens
  siRNA target sequence for KIAA0285 (NM_014807.2,2064-2082).
gacaacccgttcggatatt

SEQ ID NO: 281034 - DNA, 19 bp, Homo sapiens
  siRNA target sequence for KIAA0285 (NM_014807.2,2069-2087).
cccgttcggatatttctga

SEQ ID NO: 281035 - DNA, 19 bp, Homo sapiens
  siRNA target sequence for KIAA0285 (NM_014807.2,2183-2201).
gcggcactaagctcatctt

SEQ ID NO: 281036 - DNA, 19 bp, Homo sapiens
  siRNA target sequence for KIAA0285 (NM_014807.2,2273-2291).
cgcccagtgtccgaaagaa

SEQ ID NO: 281037 - DNA, 19 bp, Homo sapiens
  siRNA target sequence for KIAA0905 (NM_014933.1,103-121).
cccagaatcaccccattta

SEQ ID NO: 281038 - DNA, 19 bp, Homo sapiens
  siRNA target sequence for KIAA0905 (NM_014933.1,107-125).
gaatcaccccatttaccta

SEQ ID NO: 281039 - DNA, 19 bp, Homo sapiens
  siRNA target sequence for KIAA0905 (NM_014933.1,122-140).
cctagcaacaggaacatct

SEQ ID NO: 281040 - DNA, 19 bp, Homo sapiens
  siRNA target sequence for KIAA0905 (NM_014933.1,136-154).
catctgctcagcaattgga

SEQ ID NO: 281041 - DNA, 19 bp, Homo sapiens
  siRNA target sequence for KIAA0905 (NM_014933.1,178-196).
cccttgagatatttgaatt

SEQ ID NO: 281042 - DNA, 19 bp, Homo sapiens
  siRNA target sequence for KIAA0905 (NM_014933.1,207-225).
gatccatccttggatatga

SEQ ID NO: 281043 - DNA, 19 bp, Homo sapiens
  siRNA target sequence for KIAA0905 (NM_014933.1,215-233).
cttggatatgaaatcttgt

SEQ ID NO: 281044 - DNA, 19 bp, Homo sapiens
  siRNA target sequence for KIAA0905 (NM_014933.1,250-268).
ctcacaggtaccacaagtt

SEQ ID NO: 281045 - DNA, 19 bp, Homo sapiens
  siRNA target sequence for KIAA0905 (NM_014933.1,252-270).
cacaggtaccacaagttga

SEQ ID NO: 281046 - DNA, 19 bp, Homo sapiens
  siRNA target sequence for KIAA0905 (NM_014933.1,254-272).
caggtaccacaagttgatt

SEQ ID NO: 281047 - DNA, 19 bp, Homo sapiens
  siRNA target sequence for KIAA0905 (NM_014933.1,351-369).
ctctatgatccttctaaaa

SEQ ID NO: 281048 - DNA, 19 bp, Homo sapiens
  siRNA target sequence for KIAA0905 (NM_014933.1,353-371).
ctatgatccttctaaaatt

SEQ ID NO: 281049 - DNA, 19 bp, Homo sapiens
  siRNA target sequence for KIAA0905 (NM_014933.1,430-448).
gagccttggatgtgaacat

SEQ ID NO: 281050 - DNA, 19 bp, Homo sapiens
  siRNA target sequence for KIAA0905 (NM_014933.1,432-450).
gccttggatgtgaacattt

SEQ ID NO: 281051 - DNA, 19 bp, Homo sapiens
  siRNA target sequence for KIAA0905 (NM_014933.1,464-482).
ggtagcttctggtgctaat

SEQ ID NO: 281052 - DNA, 19 bp, Homo sapiens
  siRNA target sequence for KIAA0905 (NM_014933.1,472-490).
ctggtgctaatgaatctga

SEQ ID NO: 281053 - DNA, 19 bp, Homo sapiens
  siRNA target sequence for KIAA0905 (NM_014933.1,494-512).
ctacatatgggatctaaat

SEQ ID NO: 281054 - DNA, 19 bp, Homo sapiens
  siRNA target sequence for KIAA0905 (NM_014933.1,497-515).
catatgggatctaaataat

SEQ ID NO: 281055 - DNA, 19 bp, Homo sapiens
  siRNA target sequence for KIAA0905 (NM_014933.1,547-565).
cacagccgccagaagatat

SEQ ID NO: 281056 - DNA, 19 bp, Homo sapiens
  siRNA target sequence for KIAA0905 (NM_014933.1,674-692).
cagtgaccatagtaacaga

SEQ ID NO: 281057 - DNA, 19 bp, Homo sapiens
  siRNA target sequence for KIAA0905 (NM_014933.1,779-797).
gatgtgggatcttcgattt

SEQ ID NO: 281058 - DNA, 19 bp, Homo sapiens
  siRNA target sequence for KIAA0905 (NM_014933.1,782-800).
gtgggatcttcgatttgct

SEQ ID NO: 281059 - DNA, 19 bp, Homo sapiens
  siRNA target sequence for KIAA0905 (NM_014933.1,808-826).
cacttcgtgtcctggaaaa

SEQ ID NO: 281060 - DNA, 19 bp, Homo sapiens
  siRNA target sequence for KIAA0905 (NM_014933.1,859-877).
gcatggcagatcctgaatt

SEQ ID NO: 281061 - DNA, 19 bp, Homo sapiens
  siRNA target sequence for KIAA0905 (NM_014933.1,863-881).
ggcagatcctgaattgtta

SEQ ID NO: 281062 - DNA, 19 bp, Homo sapiens
  siRNA target sequence for KIAA0905 (NM_014933.1,865-883).
cagatcctgaattgttact

SEQ ID NO: 281063 - DNA, 19 bp, Homo sapiens
  siRNA target sequence for KIAA0905 (NM_014933.1,867-885).
gatcctgaattgttactga

SEQ ID NO: 281064 - DNA, 19 bp, Homo sapiens
  siRNA target sequence for KIAA0905 (NM_014933.1,926-944).
cacaggagaggtgttatat

SEQ ID NO: 281065 - DNA, 19 bp, Homo sapiens
  siRNA target sequence for KIAA0905 (NM_014933.1,931-949).
gagaggtgttatatgaact

SEQ ID NO: 281066 - DNA, 19 bp, Homo sapiens
  siRNA target sequence for KIAA0905 (NM_014933.1,961-979).
cacagtggtgcttcgatat

SEQ ID NO: 281067 - DNA, 19 bp, Homo sapiens
  siRNA target sequence for KIAA0905 (NM_014933.1,983-1001).
gtggtgtccccgaaatcct

SEQ ID NO: 281068 - DNA, 19 bp, Homo sapiens
  siRNA target sequence for KIAA0905 (NM_014933.1,1007-1025).
cttatcagctgcttcgttt

SEQ ID NO: 281069 - DNA, 19 bp, Homo sapiens
  siRNA target sequence for KIAA0905 (NM_014933.1,1022-1040).
gtttgatgggcgtatcagt

SEQ ID NO: 281070 - DNA, 19 bp, Homo sapiens
  siRNA target sequence for KIAA0905 (NM_014933.1,1026-1044).
gatgggcgtatcagtgttt

SEQ ID NO: 281071 - DNA, 19 bp, Homo sapiens
  siRNA target sequence for KIAA0905 (NM_014933.1,1029-1047).
gggcgtatcagtgtttatt

SEQ ID NO: 281072 - DNA, 19 bp, Homo sapiens
  siRNA target sequence for KIAA0905 (NM_014933.1,1031-1049).
gcgtatcagtgtttattct

SEQ ID NO: 281073 - DNA, 19 bp, Homo sapiens
  siRNA target sequence for KIAA0905 (NM_014933.1,1086-1104).
caagttgacaagctttcat

SEQ ID NO: 281074 - DNA, 19 bp, Homo sapiens
  siRNA target sequence for KIAA0905 (NM_014933.1,1092-1110).
gacaagctttcatcatctt

SEQ ID NO: 281075 - DNA, 19 bp, Homo sapiens
  siRNA target sequence for KIAA0905 (NM_014933.1,1145-1163).
ccttcctccgttacaaatt

SEQ ID NO: 281076 - DNA, 19 bp, Homo sapiens
  siRNA target sequence for KIAA0905 (NM_014933.1,1170-1188).
cagactgctcagcatagta

SEQ ID NO: 281077 - DNA, 19 bp, Homo sapiens
  siRNA target sequence for KIAA0905 (NM_014933.1,1172-1190).
gactgctcagcatagtata

SEQ ID NO: 281078 - DNA, 19 bp, Homo sapiens
  siRNA target sequence for KIAA0905 (NM_014933.1,1174-1192).
ctgctcagcatagtatagt

SEQ ID NO: 281079 - DNA, 19 bp, Homo sapiens
  siRNA target sequence for KIAA0905 (NM_014933.1,1255-1273).
gaggcaaactggttacgtt

SEQ ID NO: 281080 - DNA, 19 bp, Homo sapiens
  siRNA target sequence for KIAA0905 (NM_014933.1,1266-1284).
gttacgtttgagaatgtca

SEQ ID NO: 281081 - DNA, 19 bp, Homo sapiens
  siRNA target sequence for KIAA0905 (NM_014933.1,1337-1355).
cattagtcaggttgtaaca

SEQ ID NO: 281082 - DNA, 19 bp, Homo sapiens
  siRNA target sequence for KIAA0905 (NM_014933.1,1372-1390).
gccgatcagaccaacttca

SEQ ID NO: 281083 - DNA, 19 bp, Homo sapiens
  siRNA target sequence for KIAA0905 (NM_014933.1,1440-1458).
gatgcttctcagactgaat

SEQ ID NO: 281084 - DNA, 19 bp, Homo sapiens
  siRNA target sequence for KIAA0905 (NM_014933.1,1524-1542).
gaacttctaggatacagaa

SEQ ID NO: 281085 - DNA, 19 bp, Homo sapiens
  siRNA target sequence for KIAA0905 (NM_014933.1,1591-1609).
gagccaatgtggctcttaa

SEQ ID NO: 281086 - DNA, 19 bp, Homo sapiens
  siRNA target sequence for KIAA0905 (NM_014933.1,1725-1743).
ggaggaacatttaatatct

SEQ ID NO: 281087 - DNA, 19 bp, Homo sapiens
  siRNA target sequence for KIAA0905 (NM_014933.1,1754-1772).
ggacattgatggtttaatt

SEQ ID NO: 281088 - DNA, 19 bp, Homo sapiens
  siRNA target sequence for KIAA0905 (NM_014933.1,1780-1798).
ctttgctgacgggcaattt

SEQ ID NO: 281089 - DNA, 19 bp, Homo sapiens
  siRNA target sequence for KIAA0905 (NM_014933.1,1785-1803).
ctgacgggcaattttgaga

SEQ ID NO: 281090 - DNA, 19 bp, Homo sapiens
  siRNA target sequence for KIAA0905 (NM_014933.1,1812-1830).
gacctttgtttacatgata

SEQ ID NO: 281091 - DNA, 19 bp, Homo sapiens
  siRNA target sequence for KIAA0905 (NM_014933.1,1834-1852).
gcatggccgatgccattat

SEQ ID NO: 281092 - DNA, 19 bp, Homo sapiens
  siRNA target sequence for KIAA0905 (NM_014933.1,1859-1877).
catagcaggtggacaagaa

SEQ ID NO: 281093 - DNA, 19 bp, Homo sapiens
  siRNA target sequence for KIAA0905 (NM_014933.1,2007-2025).
gctttagctgcagtattga

SEQ ID NO: 281094 - DNA, 19 bp, Homo sapiens
  siRNA target sequence for KIAA0905 (NM_014933.1,2016-2034).
gcagtattgacttatgcaa

SEQ ID NO: 281095 - DNA, 19 bp, Homo sapiens
  siRNA target sequence for KIAA0905 (NM_014933.1,2031-2049).
gcaaagccggatgaatttt

SEQ ID NO: 281096 - DNA, 19 bp, Homo sapiens
  siRNA target sequence for KIAA0905 (NM_014933.1,2112-2130).
caagcatgtctctgctata

SEQ ID NO: 281097 - DNA, 19 bp, Homo sapiens
  siRNA target sequence for KIAA0905 (NM_014933.1,2134-2152).
gtgcagggaatgtagagaa

SEQ ID NO: 281098 - DNA, 19 bp, Homo sapiens
  siRNA target sequence for KIAA0905 (NM_014933.1,2198-2216).
gtcacttcaggatctgatt

SEQ ID NO: 281099 - DNA, 19 bp, Homo sapiens
  siRNA target sequence for KIAA0905 (NM_014933.1,2256-2274).
caagccatggacactagta

SEQ ID NO: 281100 - DNA, 19 bp, Homo sapiens
  siRNA target sequence for KIAA0905 (NM_014933.1,2261-2279).
catggacactagtactgta

SEQ ID NO: 281101 - DNA, 19 bp, Homo sapiens
  siRNA target sequence for KIAA0905 (NM_014933.1,2286-2304).
ctcttggctgcgaagatga

SEQ ID NO: 281102 - DNA, 19 bp, Homo sapiens
  siRNA target sequence for KIAA0905 (NM_014933.1,2396-2414).
gcttcgtgacagactttgt

SEQ ID NO: 281103 - DNA, 19 bp, Homo sapiens
  siRNA target sequence for KIAA0905 (NM_014933.1,2517-2535).
cagatgccaagagttcaaa

SEQ ID NO: 281104 - DNA, 19 bp, Homo sapiens
  siRNA target sequence for KIAA0905 (NM_014933.1,2519-2537).
gatgccaagagttcaaact

SEQ ID NO: 281105 - DNA, 19 bp, Homo sapiens
  siRNA target sequence for KIAA0905 (NM_014933.1,2568-2586).
ccacctccgggtttcataa

SEQ ID NO: 281106 - DNA, 19 bp, Homo sapiens
  siRNA target sequence for KIAA0905 (NM_014933.1,2572-2590).
ctccgggtttcataatgca

SEQ ID NO: 281107 - DNA, 19 bp, Homo sapiens
  siRNA target sequence for KIAA0905 (NM_014933.1,2713-2731).
caggggggtcagcaatgta

SEQ ID NO: 281108 - DNA, 19 bp, Homo sapiens
  siRNA target sequence for KIAA0905 (NM_014933.1,2774-2792).
ccctaacaccccttacata

SEQ ID NO: 281109 - DNA, 19 bp, Homo sapiens
  siRNA target sequence for KIAA0905 (NM_014933.1,2775-2793).
cctaacaccccttacatat

SEQ ID NO: 281110 - DNA, 19 bp, Homo sapiens
  siRNA target sequence for KIAA0905 (NM_014933.1,2780-2798).
caccccttacatatcttct

SEQ ID NO: 281111 - DNA, 19 bp, Homo sapiens
  siRNA target sequence for KIAA0905 (NM_014933.1,3109-3127).
ccatcacatcaccaatcat

SEQ ID NO: 281112 - DNA, 19 bp, Homo sapiens
  siRNA target sequence for KIAA0905 (NM_014933.1,3139-3157).
gtgacccccagtcacaaat

SEQ ID NO: 281113 - DNA, 19 bp, Homo sapiens
  siRNA target sequence for KIAA0905 (NM_014933.1,3189-3207).
ctgtcaagccagtcttcat

SEQ ID NO: 281114 - DNA, 19 bp, Homo sapiens
  siRNA target sequence for KIAA0905 (NM_014933.1,3254-3272).
gcaacctcttggtcaaaca

SEQ ID NO: 281115 - DNA, 19 bp, Homo sapiens
  siRNA target sequence for KIAA0905 (NM_014933.1,3315-3333).
ccaggggctcctattggaa

SEQ ID NO: 281116 - DNA, 19 bp, Homo sapiens
  siRNA target sequence for KIAA0905 (NM_014933.1,3318-3336).
ggggctcctattggaaata

SEQ ID NO: 281117 - DNA, 19 bp, Homo sapiens
  siRNA target sequence for KIAA0905 (NM_014933.1,3321-3339).
gctcctattggaaatacct

SEQ ID NO: 281118 - DNA, 19 bp, Homo sapiens
  siRNA target sequence for KIAA0905 (NM_014933.1,3391-3409).
cagatgagcacctcattct

SEQ ID NO: 281119 - DNA, 19 bp, Homo sapiens
  siRNA target sequence for KIAA0905 (NM_014933.1,3415-3433).
ccacatttgaggatcttat

SEQ ID NO: 281120 - DNA, 19 bp, Homo sapiens
  siRNA target sequence for KIAA0905 (NM_014933.1,3416-3434).
cacatttgaggatcttatt

SEQ ID NO: 281121 - DNA, 19 bp, Homo sapiens
  siRNA target sequence for KIAA0905 (NM_014933.1,3469-3487).
ccaagaggaagctagatga

SEQ ID NO: 281122 - DNA, 19 bp, Homo sapiens
  siRNA target sequence for KIAA0905 (NM_014933.1,3493-3511).
gcaaacgtttggagtttct

SEQ ID NO: 281123 - DNA, 19 bp, Homo sapiens
  siRNA target sequence for KIAA0905 (NM_014933.1,3503-3521).
ggagtttctgtatgataaa

SEQ ID NO: 281124 - DNA, 19 bp, Homo sapiens
  siRNA target sequence for KIAA0905 (NM_014933.1,3522-3540).
cttagggaacagacacttt

SEQ ID NO: 281125 - DNA, 19 bp, Homo sapiens
  siRNA target sequence for KIAA0905 (NM_014933.1,3553-3571).
ccagtggtttacacaacat

SEQ ID NO: 281126 - DNA, 19 bp, Homo sapiens
  siRNA target sequence for KIAA0905 (NM_014933.1,3554-3572).
cagtggtttacacaacatt

SEQ ID NO: 281127 - DNA, 19 bp, Homo sapiens
  siRNA target sequence for KIAA0905 (NM_014933.1,3569-3587).
cattgcaaggagcattgaa

SEQ ID NO: 281128 - DNA, 19 bp, Homo sapiens
  siRNA target sequence for KIAA0905 (NM_014933.1,3613-3631).
ccatgcatacccacatagt

SEQ ID NO: 281129 - DNA, 19 bp, Homo sapiens
  siRNA target sequence for KIAA0905 (NM_014933.1,3614-3632).
catgcatacccacatagtt

SEQ ID NO: 281130 - DNA, 19 bp, Homo sapiens
  siRNA target sequence for KIAA0905 (NM_014933.1,3670-3688).
cagttctcaaagttgttct

SEQ ID NO: 281131 - DNA, 19 bp, Homo sapiens
  siRNA target sequence for KIAA1173 (NM_020707.2,234-252).
cctccttgaggcttcacaa

SEQ ID NO: 281132 - DNA, 19 bp, Homo sapiens
  siRNA target sequence for KIAA1173 (NM_020707.2,237-255).
ccttgaggcttcacaagat

SEQ ID NO: 281133 - DNA, 19 bp, Homo sapiens
  siRNA target sequence for KIAA1173 (NM_020707.2,359-377).
cctttcgcaacgtcatcat

SEQ ID NO: 281134 - DNA, 19 bp, Homo sapiens
  siRNA target sequence for KIAA1173 (NM_020707.2,606-624).
gatggaccccctaatctct

SEQ ID NO: 281135 - DNA, 19 bp, Homo sapiens
  siRNA target sequence for KIAA1173 (NM_020707.2,644-662).
caggcacttttgatcttca

SEQ ID NO: 281136 - DNA, 19 bp, Homo sapiens
  siRNA target sequence for KIAA1173 (NM_020707.2,647-665).
gcacttttgatcttcaaga

SEQ ID NO: 281137 - DNA, 19 bp, Homo sapiens
  siRNA target sequence for KIAA1173 (NM_020707.2,760-778).
gctgacctgctcaagtaca

SEQ ID NO: 281138 - DNA, 19 bp, Homo sapiens
  siRNA target sequence for KIAA1173 (NM_020707.2,1011-1029).
cgctggcctagcctattca

SEQ ID NO: 281139 - DNA, 19 bp, Homo sapiens
  siRNA target sequence for KIAA1173 (NM_020707.2,1012-1030).
gctggcctagcctattcaa

SEQ ID NO: 281140 - DNA, 19 bp, Homo sapiens
  siRNA target sequence for KIAA1173 (NM_020707.2,1176-1194).
caacgactggctttgcaaa

SEQ ID NO: 281141 - DNA, 19 bp, Homo sapiens
  siRNA target sequence for KIAA1173 (NM_020707.2,1179-1197).
cgactggctttgcaaatat

SEQ ID NO: 281142 - DNA, 19 bp, Homo sapiens
  siRNA target sequence for KIAA1173 (NM_020707.2,1190-1208).
gcaaatatgtgtataacca

SEQ ID NO: 281143 - DNA, 19 bp, Homo sapiens
  siRNA target sequence for KIAA1173 (NM_020707.2,1288-1306).
gggccttgtgacattgtct

SEQ ID NO: 281144 - DNA, 19 bp, Homo sapiens
  siRNA target sequence for KIAA1173 (NM_020707.2,1326-1344).
ctgctttggcctcaacttt

SEQ ID NO: 281145 - DNA, 19 bp, Homo sapiens
  siRNA target sequence for KIAA1173 (NM_020707.2,1484-1502).
gcctgaacagcctcaaatt

SEQ ID NO: 281146 - DNA, 19 bp, Homo sapiens
  siRNA target sequence for KIAA1173 (NM_020707.2,1486-1504).
ctgaacagcctcaaattca

SEQ ID NO: 281147 - DNA, 19 bp, Homo sapiens
  siRNA target sequence for KIAA1173 (NM_020707.2,1553-1571).
cgctgtccatcctgtttgt

SEQ ID NO: 281148 - DNA, 19 bp, Homo sapiens
  siRNA target sequence for KIAA1173 (NM_020707.2,1580-1598).
gtggcgtccagctggtaaa

SEQ ID NO: 281149 - DNA, 19 bp, Homo sapiens
  siRNA target sequence for KIAA1173 (NM_020707.2,1583-1601).
gcgtccagctggtaaagga

SEQ ID NO: 281150 - DNA, 19 bp, Homo sapiens
  siRNA target sequence for KREMEN1 (NM_032045.3,122-140).
gccaatggtgcggattata

SEQ ID NO: 281151 - DNA, 19 bp, Homo sapiens
  siRNA target sequence for KREMEN1 (NM_032045.3,151-169).
gaactggacagcactacaa

SEQ ID NO: 281152 - DNA, 19 bp, Homo sapiens
  siRNA target sequence for KREMEN1 (NM_032045.3,172-190).
cgggaagccatgtctgttt

SEQ ID NO: 281153 - DNA, 19 bp, Homo sapiens
  siRNA target sequence for KREMEN1 (NM_032045.3,251-269).
ctgggtgagcacaactatt

SEQ ID NO: 281154 - DNA, 19 bp, Homo sapiens
  siRNA target sequence for KREMEN1 (NM_032045.3,254-272).
ggtgagcacaactattgca

SEQ ID NO: 281155 - DNA, 19 bp, Homo sapiens
  siRNA target sequence for KREMEN1 (NM_032045.3,259-277).
gcacaactattgcagaaat

SEQ ID NO: 281156 - DNA, 19 bp, Homo sapiens
  siRNA target sequence for KREMEN1 (NM_032045.3,326-344).
ggtgtctactggaagtact

SEQ ID NO: 281157 - DNA, 19 bp, Homo sapiens
  siRNA target sequence for KREMEN1 (NM_032045.3,334-352).
ctggaagtactgtgagata

SEQ ID NO: 281158 - DNA, 19 bp, Homo sapiens
  siRNA target sequence for KREMEN1 (NM_032045.3,424-442).
cagtaaaacgtccaacaaa

SEQ ID NO: 281159 - DNA, 19 bp, Homo sapiens
  siRNA target sequence for KREMEN1 (NM_032045.3,426-444).
gtaaaacgtccaacaaact

SEQ ID NO: 281160 - DNA, 19 bp, Homo sapiens
  siRNA target sequence for KREMEN1 (NM_032045.3,436-454).
caacaaactcaccatacaa

SEQ ID NO: 281161 - DNA, 19 bp, Homo sapiens
  siRNA target sequence for KREMEN1 (NM_032045.3,473-491).
cggagtcagaggttcaagt

SEQ ID NO: 281162 - DNA, 19 bp, Homo sapiens
  siRNA target sequence for KREMEN1 (NM_032045.3,527-545).
ggaaacaatcctgattact

SEQ ID NO: 281163 - DNA, 19 bp, Homo sapiens
  siRNA target sequence for KREMEN1 (NM_032045.3,561-579).
cagccagtaccgaatgcaa

SEQ ID NO: 281164 - DNA, 19 bp, Homo sapiens
  siRNA target sequence for KREMEN1 (NM_032045.3,656-674).
gcctgcggtgggaactact

SEQ ID NO: 281165 - DNA, 19 bp, Homo sapiens
  siRNA target sequence for KREMEN1 (NM_032045.3,783-801).
gcttccccctatttgacat

SEQ ID NO: 281166 - DNA, 19 bp, Homo sapiens
  siRNA target sequence for KREMEN1 (NM_032045.3,903-921).
ctctggacttcgtcatctt

SEQ ID NO: 281167 - DNA, 19 bp, Homo sapiens
  siRNA target sequence for KREMEN1 (NM_032045.3,907-925).
ggacttcgtcatcttgtat

SEQ ID NO: 281168 - DNA, 19 bp, Homo sapiens
  siRNA target sequence for KREMEN1 (NM_032045.3,908-926).
gacttcgtcatcttgtatt

SEQ ID NO: 281169 - DNA, 19 bp, Homo sapiens
  siRNA target sequence for KREMEN1 (NM_032045.3,928-946).
cttctctgatcgcatcaat

SEQ ID NO: 281170 - DNA, 19 bp, Homo sapiens
  siRNA target sequence for KREMEN1 (NM_032045.3,1225-1243).
cacagtcacagccattgta

SEQ ID NO: 281171 - DNA, 19 bp, Homo sapiens
  siRNA target sequence for KREMEN1 (NM_032045.3,1233-1251).
cagccattgtagcaaagat

SEQ ID NO: 281172 - DNA, 19 bp, Homo sapiens
  siRNA target sequence for KREMEN1 (NM_032045.3,1253-1271).
cttctgcacgtcacattca

SEQ ID NO: 281173 - DNA, 19 bp, Homo sapiens
  siRNA target sequence for KREMEN1 (NM_032045.3,1256-1274).
ctgcacgtcacattcaaat

SEQ ID NO: 281174 - DNA, 19 bp, Homo sapiens
  siRNA target sequence for KREMEN1 (NM_032045.3,1297-1315).
ggaccttagggattgtcat

SEQ ID NO: 281175 - DNA, 19 bp, Homo sapiens
  siRNA target sequence for KREMEN1 (NM_032045.3,1300-1318).
ccttagggattgtcatcaa

SEQ ID NO: 281176 - DNA, 19 bp, Homo sapiens
  siRNA target sequence for KREMEN1 (NM_032045.3,1417-1435).
ccgcaatccccttgcaatt

SEQ ID NO: 281177 - DNA, 19 bp, Homo sapiens
  siRNA target sequence for KTN1 (NM_004986.1,178-196).
cattatatgatgaagttct

SEQ ID NO: 281178 - DNA, 19 bp, Homo sapiens
  siRNA target sequence for KTN1 (NM_004986.1,221-239).
gcttattcctaccaaaaca

SEQ ID NO: 281179 - DNA, 19 bp, Homo sapiens
  siRNA target sequence for KTN1 (NM_004986.1,317-335).
gagtgtacctcgagacttt

SEQ ID NO: 281180 - DNA, 19 bp, Homo sapiens
  siRNA target sequence for KTN1 (NM_004986.1,319-337).
gtgtacctcgagactttaa

SEQ ID NO: 281181 - DNA, 19 bp, Homo sapiens
  siRNA target sequence for KTN1 (NM_004986.1,321-339).
gtacctcgagactttaaat

SEQ ID NO: 281182 - DNA, 19 bp, Homo sapiens
  siRNA target sequence for KTN1 (NM_004986.1,393-411).
gtcgttgaaacttcaagta

SEQ ID NO: 281183 - DNA, 19 bp, Homo sapiens
  siRNA target sequence for KTN1 (NM_004986.1,395-413).
cgttgaaacttcaagtagt

SEQ ID NO: 281184 - DNA, 19 bp, Homo sapiens
  siRNA target sequence for KTN1 (NM_004986.1,517-535).
ctgtcccagttactaaaca

SEQ ID NO: 281185 - DNA, 19 bp, Homo sapiens
  siRNA target sequence for KTN1 (NM_004986.1,631-649).
ctctcatggtaccatcaaa

SEQ ID NO: 281186 - DNA, 19 bp, Homo sapiens
  siRNA target sequence for KTN1 (NM_004986.1,633-651).
ctcatggtaccatcaaaaa

SEQ ID NO: 281187 - DNA, 19 bp, Homo sapiens
  siRNA target sequence for KTN1 (NM_004986.1,667-685).
ccctccaccaagagactaa

SEQ ID NO: 281188 - DNA, 19 bp, Homo sapiens
  siRNA target sequence for KTN1 (NM_004986.1,749-767).
cgtagatgaaccccttatt

SEQ ID NO: 281189 - DNA, 19 bp, Homo sapiens
  siRNA target sequence for KTN1 (NM_004986.1,761-779).
ccttattcatgcaactact

SEQ ID NO: 281190 - DNA, 19 bp, Homo sapiens
  siRNA target sequence for KTN1 (NM_004986.1,762-780).
cttattcatgcaactactt

SEQ ID NO: 281191 - DNA, 19 bp, Homo sapiens
  siRNA target sequence for KTN1 (NM_004986.1,831-849).
gaggttattgatttgctta

SEQ ID NO: 281192 - DNA, 19 bp, Homo sapiens
  siRNA target sequence for KTN1 (NM_004986.1,872-890).
ccagaaatctgggactaaa

SEQ ID NO: 281193 - DNA, 19 bp, Homo sapiens
  siRNA target sequence for KTN1 (NM_004986.1,880-898).
ctgggactaaaaaactgaa

SEQ ID NO: 281194 - DNA, 19 bp, Homo sapiens
  siRNA target sequence for KTN1 (NM_004986.1,985-1003).
ctctttgtgttgtagactt

SEQ ID NO: 281195 - DNA, 19 bp, Homo sapiens
  siRNA target sequence for KTN1 (NM_004986.1,1013-1031).
gaagtctggtgtaatacaa

SEQ ID NO: 281196 - DNA, 19 bp, Homo sapiens
  siRNA target sequence for KTN1 (NM_004986.1,1140-1158).
gatcggtgtaagcagttaa

SEQ ID NO: 281197 - DNA, 19 bp, Homo sapiens
  siRNA target sequence for KTN1 (NM_004986.1,1196-1214).
ggttataacaaggatgaaa

SEQ ID NO: 281198 - DNA, 19 bp, Homo sapiens
  siRNA target sequence for KTN1 (NM_004986.1,1204-1222).
caaggatgaaagatcgaat

SEQ ID NO: 281199 - DNA, 19 bp, Homo sapiens
  siRNA target sequence for KTN1 (NM_004986.1,1208-1226).
gatgaaagatcgaattgga

SEQ ID NO: 281200 - DNA, 19 bp, Homo sapiens
  siRNA target sequence for KTN1 (NM_004986.1,1238-1256).
ggaacataatgtatttcaa

SEQ ID NO: 281201 - DNA, 19 bp, Homo sapiens
  siRNA target sequence for KTN1 (NM_004986.1,1239-1257).
gaacataatgtatttcaaa

SEQ ID NO: 281202 - DNA, 19 bp, Homo sapiens
  siRNA target sequence for KTN1 (NM_004986.1,1353-1371).
caggaaaatggtatactga

SEQ ID NO: 281203 - DNA, 19 bp, Homo sapiens
  siRNA target sequence for KTN1 (NM_004986.1,1377-1395).
gcagtcagcaacactacaa

SEQ ID NO: 281204 - DNA, 19 bp, Homo sapiens
  siRNA target sequence for KTN1 (NM_004986.1,1393-1411).
caaatcaactggaaagcaa

SEQ ID NO: 281205 - DNA, 19 bp, Homo sapiens
  siRNA target sequence for KTN1 (NM_004986.1,1434-1452).
ctacgccaggattatgcta

SEQ ID NO: 281206 - DNA, 19 bp, Homo sapiens
  siRNA target sequence for KTN1 (NM_004986.1,1534-1552).
ctcagttgaaggttcaact

SEQ ID NO: 281207 - DNA, 19 bp, Homo sapiens
  siRNA target sequence for KTN1 (NM_004986.1,1628-1646).
gcaagatttacagagtaaa

SEQ ID NO: 281208 - DNA, 19 bp, Homo sapiens
  siRNA target sequence for KTN1 (NM_004986.1,1668-1686).
gtacagagtctgcatagta

SEQ ID NO: 281209 - DNA, 19 bp, Homo sapiens
  siRNA target sequence for KTN1 (NM_004986.1,1673-1691).
gagtctgcatagtaagctt

SEQ ID NO: 281210 - DNA, 19 bp, Homo sapiens
  siRNA target sequence for KTN1 (NM_004986.1,1679-1697).
gcatagtaagcttacagat

SEQ ID NO: 281211 - DNA, 19 bp, Homo sapiens
  siRNA target sequence for KTN1 (NM_004986.1,1680-1698).
catagtaagcttacagata

SEQ ID NO: 281212 - DNA, 19 bp, Homo sapiens
  siRNA target sequence for KTN1 (NM_004986.1,1684-1702).
gtaagcttacagatacctt

SEQ ID NO: 281213 - DNA, 19 bp, Homo sapiens
  siRNA target sequence for KTN1 (NM_004986.1,1716-1734).
cagttggagcaaagactaa

SEQ ID NO: 281214 - DNA, 19 bp, Homo sapiens
  siRNA target sequence for KTN1 (NM_004986.1,1725-1743).
caaagactaatgcagttaa

SEQ ID NO: 281215 - DNA, 19 bp, Homo sapiens
  siRNA target sequence for KTN1 (NM_004986.1,1865-1883).
ccagacctccgcttcagtt

SEQ ID NO: 281216 - DNA, 19 bp, Homo sapiens
  siRNA target sequence for KTN1 (NM_004986.1,1868-1886).
gacctccgcttcagttcta

SEQ ID NO: 281217 - DNA, 19 bp, Homo sapiens
  siRNA target sequence for KTN1 (NM_004986.1,1879-1897).
cagttctagcagaagaatt

SEQ ID NO: 281218 - DNA, 19 bp, Homo sapiens
  siRNA target sequence for KTN1 (NM_004986.1,1920-1938).
gataagcagataaaacaga

SEQ ID NO: 281219 - DNA, 19 bp, Homo sapiens
  siRNA target sequence for KTN1 (NM_004986.1,1959-1977).
gaacgtgatcgtttaacaa

SEQ ID NO: 281220 - DNA, 19 bp, Homo sapiens
  siRNA target sequence for KTN1 (NM_004986.1,1962-1980).
cgtgatcgtttaacaagta

SEQ ID NO: 281221 - DNA, 19 bp, Homo sapiens
  siRNA target sequence for KTN1 (NM_004986.1,1963-1981).
gtgatcgtttaacaagtaa

SEQ ID NO: 281222 - DNA, 19 bp, Homo sapiens
  siRNA target sequence for KTN1 (NM_004986.1,2142-2160).
gagcaactacaacatgaaa

SEQ ID NO: 281223 - DNA, 19 bp, Homo sapiens
  siRNA target sequence for KTN1 (NM_004986.1,2372-2390).
ggagctgaatgcaataaga

SEQ ID NO: 281224 - DNA, 19 bp, Homo sapiens
  siRNA target sequence for KTN1 (NM_004986.1,2401-2419).
catctctgacaaaagaagt

SEQ ID NO: 281225 - DNA, 19 bp, Homo sapiens
  siRNA target sequence for KTN1 (NM_004986.1,2461-2479).
cctctctagttgaagaact

SEQ ID NO: 281226 - DNA, 19 bp, Homo sapiens
  siRNA target sequence for KTN1 (NM_004986.1,2464-2482).
ctctagttgaagaacttaa

SEQ ID NO: 281227 - DNA, 19 bp, Homo sapiens
  siRNA target sequence for KTN1 (NM_004986.1,2640-2658).
gctcaacagttatctatca

SEQ ID NO: 281228 - DNA, 19 bp, Homo sapiens
  siRNA target sequence for KTN1 (NM_004986.1,2672-2690).
ggagcttcagaacttatta

SEQ ID NO: 281229 - DNA, 19 bp, Homo sapiens
  siRNA target sequence for KTN1 (NM_004986.1,2673-2691).
gagcttcagaacttattaa

SEQ ID NO: 281230 - DNA, 19 bp, Homo sapiens
  siRNA target sequence for KTN1 (NM_004986.1,2768-2786).
gtggttacaggatcttcaa

SEQ ID NO: 281231 - DNA, 19 bp, Homo sapiens
  siRNA target sequence for KTN1 (NM_004986.1,2771-2789).
gttacaggatcttcaagaa

SEQ ID NO: 281232 - DNA, 19 bp, Homo sapiens
  siRNA target sequence for KTN1 (NM_004986.1,2817-2835).
caggaagtagcacaacata

SEQ ID NO: 281233 - DNA, 19 bp, Homo sapiens
  siRNA target sequence for KTN1 (NM_004986.1,2820-2838).
gaagtagcacaacataact

SEQ ID NO: 281234 - DNA, 19 bp, Homo sapiens
  siRNA target sequence for KTN1 (NM_004986.1,2823-2841).
gtagcacaacataacttga

SEQ ID NO: 281235 - DNA, 19 bp, Homo sapiens
  siRNA target sequence for KTN1 (NM_004986.1,2860-2878).
cacagtttgaagaacttga

SEQ ID NO: 281236 - DNA, 19 bp, Homo sapiens
  siRNA target sequence for KTN1 (NM_004986.1,2919-2937).
gaagccatgctaaaagaga

SEQ ID NO: 281237 - DNA, 19 bp, Homo sapiens
  siRNA target sequence for KTN1 (NM_004986.1,2956-2974).
gcaaaacacagctgttaca

SEQ ID NO: 281238 - DNA, 19 bp, Homo sapiens
  siRNA target sequence for KTN1 (NM_004986.1,2969-2987).
gttacaggatgtacaagat

SEQ ID NO: 281239 - DNA, 19 bp, Homo sapiens
  siRNA target sequence for KTN1 (NM_004986.1,3035-3053).
ctaccaacaggcatcttct

SEQ ID NO: 281240 - DNA, 19 bp, Homo sapiens
  siRNA target sequence for KTN1 (NM_004986.1,3112-3130).
gtctctggaatgagttaga

SEQ ID NO: 281241 - DNA, 19 bp, Homo sapiens
  siRNA target sequence for KTN1 (NM_004986.1,3114-3132).
ctctggaatgagttagatt

SEQ ID NO: 281242 - DNA, 19 bp, Homo sapiens
  siRNA target sequence for KTN1 (NM_004986.1,3116-3134).
ctggaatgagttagattct

SEQ ID NO: 281243 - DNA, 19 bp, Homo sapiens
  siRNA target sequence for KTN1 (NM_004986.1,3118-3136).
ggaatgagttagattcttt

SEQ ID NO: 281244 - DNA, 19 bp, Homo sapiens
  siRNA target sequence for KTN1 (NM_004986.1,3249-3267).
gtcccttctaatttgagtt

SEQ ID NO: 281245 - DNA, 19 bp, Homo sapiens
  siRNA target sequence for KTN1 (NM_004986.1,3329-3347).
gtcagaggaggttaaggtt

SEQ ID NO: 281246 - DNA, 19 bp, Homo sapiens
  siRNA target sequence for KTN1 (NM_004986.1,3345-3363).
gttctagagcacaagttga

SEQ ID NO: 281247 - DNA, 19 bp, Homo sapiens
  siRNA target sequence for KTN1 (NM_004986.1,3504-3522).
gaatcacacaagactatta

SEQ ID NO: 281248 - DNA, 19 bp, Homo sapiens
  siRNA target sequence for KTN1 (NM_004986.1,3508-3526).
cacacaagactattaaaca

SEQ ID NO: 281249 - DNA, 19 bp, Homo sapiens
  siRNA target sequence for KTN1 (NM_004986.1,3530-3548).
gcagtcatcatttacatct

SEQ ID NO: 281250 - DNA, 19 bp, Homo sapiens
  siRNA target sequence for KTN1 (NM_004986.1,3555-3573).
caagagctagagcgattaa

SEQ ID NO: 281251 - DNA, 19 bp, Homo sapiens
  siRNA target sequence for KTN1 (NM_004986.1,3558-3576).
gagctagagcgattaagaa

SEQ ID NO: 281252 - DNA, 19 bp, Homo sapiens
  siRNA target sequence for KTN1 (NM_004986.1,3566-3584).
gcgattaagaagcgaaaat

SEQ ID NO: 281253 - DNA, 19 bp, Homo sapiens
  siRNA target sequence for KTN1 (NM_004986.1,3568-3586).
gattaagaagcgaaaataa

SEQ ID NO: 281254 - DNA, 19 bp, Homo sapiens
  siRNA target sequence for KTN1 (NM_004986.1,3574-3592).
gaagcgaaaataaggatat

SEQ ID NO: 281255 - DNA, 19 bp, Homo sapiens
  siRNA target sequence for KTN1 (NM_004986.1,3577-3595).
gcgaaaataaggatattga

SEQ ID NO: 281256 - DNA, 19 bp, Homo sapiens
  siRNA target sequence for KTN1 (NM_004986.1,3578-3596).
cgaaaataaggatattgaa

SEQ ID NO: 281257 - DNA, 19 bp, Homo sapiens
  siRNA target sequence for KTN1 (NM_004986.1,3607-3625).
gagaacgagaacatttgga

SEQ ID NO: 281258 - DNA, 19 bp, Homo sapiens
  siRNA target sequence for KTN1 (NM_004986.1,3647-3665).
gatggaacgatctacctat

SEQ ID NO: 281259 - DNA, 19 bp, Homo sapiens
  siRNA target sequence for KTN1 (NM_004986.1,3650-3668).
ggaacgatctacctatgtt

SEQ ID NO: 281260 - DNA, 19 bp, Homo sapiens
  siRNA target sequence for KTN1 (NM_004986.1,3651-3669).
gaacgatctacctatgtta

SEQ ID NO: 281261 - DNA, 19 bp, Homo sapiens
  siRNA target sequence for KTN1 (NM_004986.1,3710-3728).
cacaaaacttagaactgaa

SEQ ID NO: 281262 - DNA, 19 bp, Homo sapiens
  siRNA target sequence for KTN1 (NM_004986.1,3746-3764).
ggtagctggtgatttgcat

SEQ ID NO: 281263 - DNA, 19 bp, Homo sapiens
  siRNA target sequence for KTN1 (NM_004986.1,3747-3765).
gtagctggtgatttgcata

SEQ ID NO: 281264 - DNA, 19 bp, Homo sapiens
  siRNA target sequence for KTN1 (NM_004986.1,3783-3801).
gagcttatccagtcaaaaa

SEQ ID NO: 281265 - DNA, 19 bp, Homo sapiens
  siRNA target sequence for KTN1 (NM_004986.1,3813-3831).
gctggagacactactgtta

SEQ ID NO: 281266 - DNA, 19 bp, Homo sapiens
  siRNA target sequence for KTN1 (NM_004986.1,3814-3832).
ctggagacactactgttat

SEQ ID NO: 281267 - DNA, 19 bp, Homo sapiens
  siRNA target sequence for KTN1 (NM_004986.1,3817-3835).
gagacactactgttattga

SEQ ID NO: 281268 - DNA, 19 bp, Homo sapiens
  siRNA target sequence for KTN1 (NM_004986.1,3819-3837).
gacactactgttattgaaa

SEQ ID NO: 281269 - DNA, 19 bp, Homo sapiens
  siRNA target sequence for KTN1 (NM_004986.1,3926-3944).
gcttcaggcggtaaaccaa

SEQ ID NO: 281270 - DNA, 19 bp, Homo sapiens
  siRNA target sequence for KTN1 (NM_004986.1,3966-3984).
cactaccaggtgttagagt

SEQ ID NO: 281271 - DNA, 19 bp, Homo sapiens
  siRNA target sequence for KTN1 (NM_182926.1,221-239).
cttattccttcaatagtta

SEQ ID NO: 281272 - DNA, 19 bp, Homo sapiens
  siRNA target sequence for LENG1 (NM_024316.1,139-157).
gcaagaggcccgtacagaa

SEQ ID NO: 281273 - DNA, 19 bp, Homo sapiens
  siRNA target sequence for LENG1 (NM_024316.1,140-158).
caagaggcccgtacagaat

SEQ ID NO: 281274 - DNA, 19 bp, Homo sapiens
  siRNA target sequence for LENG1 (NM_024316.1,145-163).
ggcccgtacagaattccta

SEQ ID NO: 281275 - DNA, 19 bp, Homo sapiens
  siRNA target sequence for LENG1 (NM_024316.1,276-294).
gagtgatcagaggcaataa

SEQ ID NO: 281276 - DNA, 19 bp, Homo sapiens
  siRNA target sequence for LENG1 (NM_024316.1,737-755).
cggtacaactcccaattca

SEQ ID NO: 281277 - DNA, 19 bp, Homo sapiens
  siRNA target sequence for LENG1 (NM_024316.1,738-756).
ggtacaactcccaattcaa

SEQ ID NO: 281278 - DNA, 19 bp, Homo sapiens
  siRNA target sequence for LENG4 (NM_024298.2,557-575).
ggtcctgggctgaagagat

SEQ ID NO: 281279 - DNA, 19 bp, Homo sapiens
  siRNA target sequence for LENG4 (NM_024298.2,624-642).
cccacactttgcattctct

SEQ ID NO: 281280 - DNA, 19 bp, Homo sapiens
  siRNA target sequence for LENG4 (NM_024298.2,1458-1476).
ggtggctggcgcagtatat

SEQ ID NO: 281281 - DNA, 19 bp, Homo sapiens
  siRNA target sequence for LENG4 (NM_024298.2,1461-1479).
ggctggcgcagtatatcta

SEQ ID NO: 281282 - DNA, 19 bp, Homo sapiens
  siRNA target sequence for LENG4 (NM_024298.2,1463-1481).
ctggcgcagtatatctaca

SEQ ID NO: 281283 - DNA, 19 bp, Homo sapiens
  siRNA target sequence for LENG4 (NM_024298.2,1466-1484).
gcgcagtatatctacaaga

SEQ ID NO: 281284 - DNA, 19 bp, Homo sapiens
  siRNA target sequence for LENG4 (NM_024298.2,1486-1504).
cgcacctgcccgttcctat

SEQ ID NO: 281285 - DNA, 19 bp, Homo sapiens
  siRNA target sequence for LGP1 (NM_032484.3,1043-1061).
ggacggctgtcgaacttct

SEQ ID NO: 281286 - DNA, 19 bp, Homo sapiens
  siRNA target sequence for LGP1 (NM_032484.3,1051-1069).
gtcgaacttctggatgttt

SEQ ID NO: 281287 - DNA, 19 bp, Homo sapiens
  siRNA target sequence for LGP1 (NM_032484.3,1288-1306).
caaggactagccttcttct

SEQ ID NO: 281288 - DNA, 19 bp, Homo sapiens
  siRNA target sequence for LGP1 (NM_032484.3,1302-1320).
cttctctcctgcttatgct

SEQ ID NO: 281289 - DNA, 19 bp, Homo sapiens
  siRNA target sequence for LGP1 (NM_032484.3,1332-1350).
ggtgctgggcctaaaccta

SEQ ID NO: 281290 - DNA, 19 bp, Homo sapiens
  siRNA target sequence for LGP1 (NM_032484.3,1552-1570).
gttggtgcctacaatcagt

SEQ ID NO: 281291 - DNA, 19 bp, Homo sapiens
  siRNA target sequence for LGP1 (NM_032484.3,1573-1591).
ccagtcgtcaggttcatct

SEQ ID NO: 281292 - DNA, 19 bp, Homo sapiens
  siRNA target sequence for LGP1 (NM_032484.3,1613-1631).
gtgtgcgaggggaagatat

SEQ ID NO: 281293 - DNA, 19 bp, Homo sapiens
  siRNA target sequence for LGP1 (NM_032484.3,1617-1635).
gcgaggggaagatattggt

SEQ ID NO: 281294 - DNA, 19 bp, Homo sapiens
  siRNA target sequence for LGP1 (NM_032484.3,1751-1769).
cccactacgaggtgtttgt

SEQ ID NO: 281295 - DNA, 19 bp, Homo sapiens
  siRNA target sequence for Lin10 (NM_025187.3,266-284).
gcactgtcgcatcatcaaa

SEQ ID NO: 281296 - DNA, 19 bp, Homo sapiens
  siRNA target sequence for Lin10 (NM_025187.3,267-285).
cactgtcgcatcatcaaaa

SEQ ID NO: 281297 - DNA, 19 bp, Homo sapiens
  siRNA target sequence for Lin10 (NM_025187.3,271-289).
gtcgcatcatcaaaaacgt

SEQ ID NO: 281298 - DNA, 19 bp, Homo sapiens
  siRNA target sequence for Lin10 (NM_025187.3,322-340).
gccatgacctcattcttaa

SEQ ID NO: 281299 - DNA, 19 bp, Homo sapiens
  siRNA target sequence for Lin10 (NM_025187.3,344-362).
gactcaggacgggatcaaa

SEQ ID NO: 281300 - DNA, 19 bp, Homo sapiens
  siRNA target sequence for Lin10 (NM_025187.3,346-364).
ctcaggacgggatcaaact

SEQ ID NO: 281301 - DNA, 19 bp, Homo sapiens
  siRNA target sequence for Lin10 (NM_025187.3,348-366).
caggacgggatcaaactaa

SEQ ID NO: 281302 - DNA, 19 bp, Homo sapiens
  siRNA target sequence for Lin10 (NM_025187.3,390-408).
cttaaggtgatcgaagtat

SEQ ID NO: 281303 - DNA, 19 bp, Homo sapiens
  siRNA target sequence for Lin10 (NM_025187.3,395-413).
ggtgatcgaagtatgtgat

SEQ ID NO: 281304 - DNA, 19 bp, Homo sapiens
  siRNA target sequence for Lin10 (NM_025187.3,396-414).
gtgatcgaagtatgtgatt

SEQ ID NO: 281305 - DNA, 19 bp, Homo sapiens
  siRNA target sequence for Lin10 (NM_025187.3,401-419).
cgaagtatgtgatttgact

SEQ ID NO: 281306 - DNA, 19 bp, Homo sapiens
  siRNA target sequence for Lin10 (NM_025187.3,409-427).
gtgatttgactaaagtaaa

SEQ ID NO: 281307 - DNA, 19 bp, Homo sapiens
  siRNA target sequence for Lin10 (NM_025187.3,442-460).
gcgtgcattttaattctca

SEQ ID NO: 281308 - DNA, 19 bp, Homo sapiens
  siRNA target sequence for Lin10 (NM_025187.3,604-622).
caaagtatgagcccaattt

SEQ ID NO: 281309 - DNA, 19 bp, Homo sapiens
  siRNA target sequence for Lin10 (NM_025187.3,651-669).
ccccatggagcaactgtaa

SEQ ID NO: 281310 - DNA, 19 bp, Homo sapiens
  siRNA target sequence for Lin10 (NM_025187.3,657-675).
ggagcaactgtaaaacgaa

SEQ ID NO: 281311 - DNA, 19 bp, Homo sapiens
  siRNA target sequence for Lin10 (NM_025187.3,658-676).
gagcaactgtaaaacgaat

SEQ ID NO: 281312 - DNA, 19 bp, Homo sapiens
  siRNA target sequence for Lin10 (NM_025187.3,661-679).
caactgtaaaacgaatgta

SEQ ID NO: 281313 - DNA, 19 bp, Homo sapiens
  siRNA target sequence for Lin10 (NM_025187.3,664-682).
ctgtaaaacgaatgtacat

SEQ ID NO: 281314 - DNA, 19 bp, Homo sapiens
  siRNA target sequence for Lin10 (NM_025187.3,666-684).
gtaaaacgaatgtacatct

SEQ ID NO: 281315 - DNA, 19 bp, Homo sapiens
  siRNA target sequence for Lin10 (NM_025187.3,757-775).
ctgagagtgtagatgttct

SEQ ID NO: 281316 - DNA, 19 bp, Homo sapiens
  siRNA target sequence for Lin10 (NM_025187.3,853-871).
ccaagatgcgggtatttga

SEQ ID NO: 281317 - DNA, 19 bp, Homo sapiens
  siRNA target sequence for Lin10 (NM_025187.3,917-935).
gcttggctctccacacaaa

SEQ ID NO: 281318 - DNA, 19 bp, Homo sapiens
  siRNA target sequence for Lin10 (NM_025187.3,973-991).
ctccttcccctcataaaca

SEQ ID NO: 281319 - DNA, 19 bp, Homo sapiens
  siRNA target sequence for Lin10 (NM_025187.3,976-994).
cttcccctcataaacaagt

SEQ ID NO: 281320 - DNA, 19 bp, Homo sapiens
  siRNA target sequence for Lin10 (NM_025187.3,996-1014).
ccatcgaagtgtaatgact

SEQ ID NO: 281321 - DNA, 19 bp, Homo sapiens
  siRNA target sequence for Lin10 (NM_025187.3,997-1015).
catcgaagtgtaatgacta

SEQ ID NO: 281322 - DNA, 19 bp, Homo sapiens
  siRNA target sequence for Lin10 (NM_025187.3,1000-1018).
cgaagtgtaatgactactt

SEQ ID NO: 281323 - DNA, 19 bp, Homo sapiens
  siRNA target sequence for Lin10 (NM_025187.3,1059-1077).
gcgaatacacacaaagtga

SEQ ID NO: 281324 - DNA, 19 bp, Homo sapiens
  siRNA target sequence for Lin10 (NM_025187.3,1289-1307).
caacaccaacccatttggt

SEQ ID NO: 281325 - DNA, 19 bp, Homo sapiens
  siRNA target sequence for LLGL1 (NM_004140.2,67-85).
gagcttttcgccttcaaca

SEQ ID NO: 281326 - DNA, 19 bp, Homo sapiens
  siRNA target sequence for LLGL1 (NM_004140.2,70-88).
cttttcgccttcaacaaga

SEQ ID NO: 281327 - DNA, 19 bp, Homo sapiens
  siRNA target sequence for LLGL1 (NM_004140.2,170-188).
ctggggctgtcaagatcta

SEQ ID NO: 281328 - DNA, 19 bp, Homo sapiens
  siRNA target sequence for LLGL1 (NM_004140.2,311-329).
gggagattgtccaccataa

SEQ ID NO: 281329 - DNA, 19 bp, Homo sapiens
  siRNA target sequence for LLGL1 (NM_004140.2,312-330).
ggagattgtccaccataat

SEQ ID NO: 281330 - DNA, 19 bp, Homo sapiens
  siRNA target sequence for LLGL1 (NM_004140.2,619-637).
ctgcgggaccccacaaaga

SEQ ID NO: 281331 - DNA, 19 bp, Homo sapiens
  siRNA target sequence for LLGL1 (NM_004140.2,866-884).
cctgcaaggccattaacaa

SEQ ID NO: 281332 - DNA, 19 bp, Homo sapiens
  siRNA target sequence for LLGL1 (NM_004140.2,870-888).
caaggccattaacaagatt

SEQ ID NO: 281333 - DNA, 19 bp, Homo sapiens
  siRNA target sequence for LLGL1 (NM_004140.2,891-909).
gtggcggaactgtgaatct

SEQ ID NO: 281334 - DNA, 19 bp, Homo sapiens
  siRNA target sequence for LLGL1 (NM_004140.2,958-976).
ggtgaccgccactgtgtaa

SEQ ID NO: 281335 - DNA, 19 bp, Homo sapiens
  siRNA target sequence for LLGL1 (NM_004140.2,1000-1018).
gtgacgctggacttcactt

SEQ ID NO: 281336 - DNA, 19 bp, Homo sapiens
  siRNA target sequence for LLGL1 (NM_004140.2,1176-1194).
gcactcctctgcaatcact

SEQ ID NO: 281337 - DNA, 19 bp, Homo sapiens
  siRNA target sequence for LLGL1 (NM_004140.2,1623-1641).
ggtactggagcttagtgat

SEQ ID NO: 281338 - DNA, 19 bp, Homo sapiens
  siRNA target sequence for LLGL1 (NM_004140.2,1946-1964).
gggtgaagtctctcaagaa

SEQ ID NO: 281339 - DNA, 19 bp, Homo sapiens
  siRNA target sequence for LLGL1 (NM_004140.2,2155-2173).
gtcgtgcgttgcctatact

SEQ ID NO: 281340 - DNA, 19 bp, Homo sapiens
  siRNA target sequence for LLGL1 (NM_004140.2,2172-2190).
ctttgccgacacattcctt

SEQ ID NO: 281341 - DNA, 19 bp, Homo sapiens
  siRNA target sequence for LLGL1 (NM_004140.2,2766-2784).
cctgatatccccatcagaa

SEQ ID NO: 281342 - DNA, 19 bp, Homo sapiens
  siRNA target sequence for LLGL1 (NM_004140.2,2767-2785).
ctgatatccccatcagaat

SEQ ID NO: 281343 - DNA, 19 bp, Homo sapiens
  siRNA target sequence for LLGL1 (NM_004140.2,2800-2818).
ctaagtgcccggaacatca

SEQ ID NO: 281344 - DNA, 19 bp, Homo sapiens
  siRNA target sequence for LMCD1 (NM_014583.2,142-160).
ccaggagttaaaaagatgt

SEQ ID NO: 281345 - DNA, 19 bp, Homo sapiens
  siRNA target sequence for LMCD1 (NM_014583.2,277-295).
gaggaccactgcctaacat

SEQ ID NO: 281346 - DNA, 19 bp, Homo sapiens
  siRNA target sequence for LMCD1 (NM_014583.2,279-297).
ggaccactgcctaacatct

SEQ ID NO: 281347 - DNA, 19 bp, Homo sapiens
  siRNA target sequence for LMCD1 (NM_014583.2,330-348).
gctgatggactccaagtat

SEQ ID NO: 281348 - DNA, 19 bp, Homo sapiens
  siRNA target sequence for LMCD1 (NM_014583.2,331-349).
ctgatggactccaagtatt

SEQ ID NO: 281349 - DNA, 19 bp, Homo sapiens
  siRNA target sequence for LMCD1 (NM_014583.2,377-395).
gggacggcatccggattta

SEQ ID NO: 281350 - DNA, 19 bp, Homo sapiens
  siRNA target sequence for LMCD1 (NM_014583.2,414-432).
catgaccaaccctattgct

SEQ ID NO: 281351 - DNA, 19 bp, Homo sapiens
  siRNA target sequence for LMCD1 (NM_014583.2,588-606).
gcaccagctccccatctat

SEQ ID NO: 281352 - DNA, 19 bp, Homo sapiens
  siRNA target sequence for LMCD1 (NM_014583.2,620-638).
cgcgctgccgtggactttt

SEQ ID NO: 281353 - DNA, 19 bp, Homo sapiens
  siRNA target sequence for LMCD1 (NM_014583.2,623-641).
gctgccgtggacttttgga

SEQ ID NO: 281354 - DNA, 19 bp, Homo sapiens
  siRNA target sequence for LMCD1 (NM_014583.2,810-828).
cagtgacccgtccaaagaa

SEQ ID NO: 281355 - DNA, 19 bp, Homo sapiens
  siRNA target sequence for LMCD1 (NM_014583.2,812-830).
gtgacccgtccaaagaagt

SEQ ID NO: 281356 - DNA, 19 bp, Homo sapiens
  siRNA target sequence for LMCD1 (NM_014583.2,1037-1055).
gctccggctgcgatgagat

SEQ ID NO: 281357 - DNA, 19 bp, Homo sapiens
  siRNA target sequence for LMCD1 (NM_014583.2,1038-1056).
ctccggctgcgatgagata

SEQ ID NO: 281358 - DNA, 19 bp, Homo sapiens
  siRNA target sequence for LMCD1 (NM_014583.2,1040-1058).
ccggctgcgatgagataat

SEQ ID NO: 281359 - DNA, 19 bp, Homo sapiens
  siRNA target sequence for LMCD1 (NM_014583.2,1041-1059).
cggctgcgatgagataata

SEQ ID NO: 281360 - DNA, 19 bp, Homo sapiens
  siRNA target sequence for LMCD1 (NM_014583.2,1042-1060).
ggctgcgatgagataatat

SEQ ID NO: 281361 - DNA, 19 bp, Homo sapiens
  siRNA target sequence for LMCD1 (NM_014583.2,1043-1061).
gctgcgatgagataatatt

SEQ ID NO: 281362 - DNA, 19 bp, Homo sapiens
  siRNA target sequence for LMCD1 (NM_014583.2,1097-1115).
ggcaccgaaagcactttgt

SEQ ID NO: 281363 - DNA, 19 bp, Homo sapiens
  siRNA target sequence for LMNB2 (NM_032737.2,596-614).
gtcatgcagtggccaaaaa

SEQ ID NO: 281364 - DNA, 19 bp, Homo sapiens
  siRNA target sequence for LMNB2 (NM_032737.2,1558-1576).
gaggagatcgcctacaagt

SEQ ID NO: 281365 - DNA, 19 bp, Homo sapiens
  siRNA target sequence for LMNB2 (NM_032737.2,1561-1579).
gagatcgcctacaagttca

SEQ ID NO: 281366 - DNA, 19 bp, Homo sapiens
  siRNA target sequence for LMNB2 (NM_032737.2,1767-1785).
ctcggtgatgcgtgagaat

SEQ ID NO: 281367 - DNA, 19 bp, Homo sapiens
  siRNA target sequence for LMNB2 (NM_032737.2,1769-1787).
cggtgatgcgtgagaatga

SEQ ID NO: 281368 - DNA, 19 bp, Homo sapiens
  siRNA target sequence for LMNB2 (NM_032737.2,1771-1789).
gtgatgcgtgagaatgaga

SEQ ID NO: 281369 - DNA, 19 bp, Homo sapiens
  siRNA target sequence for LMNB2 (NM_032737.2,1773-1791).
gatgcgtgagaatgagaat

SEQ ID NO: 281370 - DNA, 19 bp, Homo sapiens
  siRNA target sequence for LMO6 (NM_006150.3,216-234).
gacctggaacgcatcatgt

SEQ ID NO: 281371 - DNA, 19 bp, Homo sapiens
  siRNA target sequence for LMO6 (NM_006150.3,333-351).
gagcaggtatatcaatttt

SEQ ID NO: 281372 - DNA, 19 bp, Homo sapiens
  siRNA target sequence for LMO6 (NM_006150.3,1089-1107).
ccacgccgaggcctaatct

SEQ ID NO: 281373 - DNA, 19 bp, Homo sapiens
  siRNA target sequence for LMO6 (NM_006150.3,1090-1108).
cacgccgaggcctaatctt

SEQ ID NO: 281374 - DNA, 19 bp, Homo sapiens
  siRNA target sequence for LMO6 (NM_006150.3,1092-1110).
cgccgaggcctaatcttct

SEQ ID NO: 281375 - DNA, 19 bp, Homo sapiens
  siRNA target sequence for LMO6 (NM_006150.3,1400-1418).
cctgcgcccagatgatagt

SEQ ID NO: 281376 - DNA, 19 bp, Homo sapiens
  siRNA target sequence for LMO6 (NM_006150.3,1607-1625).
cagacgtcgccactatcaa

SEQ ID NO: 281377 - DNA, 19 bp, Homo sapiens
  siRNA target sequence for LMO6 (NM_006150.3,1612-1630).
gtcgccactatcaatgtga

SEQ ID NO: 281378 - DNA, 19 bp, Homo sapiens
  siRNA target sequence for LMO6 (NM_006150.3,1641-1659).
gggtcagactcggaatctt

SEQ ID NO: 281379 - DNA, 19 bp, Homo sapiens
  siRNA target sequence for LMO6 (NM_006150.3,1840-1858).
gtcaggcccgagacaagaa

SEQ ID NO: 281380 - DNA, 19 bp, Homo sapiens
  siRNA target sequence for LOC130617 (NM_138802.1,213-231).
gctgtcagcgcttggattt

SEQ ID NO: 281381 - DNA, 19 bp, Homo sapiens
  siRNA target sequence for LOC130617 (NM_138802.1,251-269).
gcctgctcaggcatcttct

SEQ ID NO: 281382 - DNA, 19 bp, Homo sapiens
  siRNA target sequence for LOC130617 (NM_138802.1,309-327).
ctgcttaccaaaaggatat

SEQ ID NO: 281383 - DNA, 19 bp, Homo sapiens
  siRNA target sequence for LOC130617 (NM_138802.1,434-452).
ccagcacagcaaaaacgta

SEQ ID NO: 281384 - DNA, 19 bp, Homo sapiens
  siRNA target sequence for LOC130617 (NM_138802.1,438-456).
cacagcaaaaacgtaagat

SEQ ID NO: 281385 - DNA, 19 bp, Homo sapiens
  siRNA target sequence for LOC130617 (NM_138802.1,440-458).
cagcaaaaacgtaagatct

SEQ ID NO: 281386 - DNA, 19 bp, Homo sapiens
  siRNA target sequence for LOC130617 (NM_138802.1,443-461).
caaaaacgtaagatcttca

SEQ ID NO: 281387 - DNA, 19 bp, Homo sapiens
  siRNA target sequence for LOC130617 (NM_138802.1,449-467).
cgtaagatcttcaccaata

SEQ ID NO: 281388 - DNA, 19 bp, Homo sapiens
  siRNA target sequence for LOC130617 (NM_138802.1,450-468).
gtaagatcttcaccaataa

SEQ ID NO: 281389 - DNA, 19 bp, Homo sapiens
  siRNA target sequence for LOC130617 (NM_138802.1,454-472).
gatcttcaccaataagtgt

SEQ ID NO: 281390 - DNA, 19 bp, Homo sapiens
  siRNA target sequence for LOC130617 (NM_138802.1,486-504).
gccggcagcgagaaatgat

SEQ ID NO: 281391 - DNA, 19 bp, Homo sapiens
  siRNA target sequence for LOC130617 (NM_138802.1,488-506).
cggcagcgagaaatgatga

SEQ ID NO: 281392 - DNA, 19 bp, Homo sapiens
  siRNA target sequence for LOC130617 (NM_138802.1,521-539).
cgctgtagccgaaacttct

SEQ ID NO: 281393 - DNA, 19 bp, Homo sapiens
  siRNA target sequence for LOC130617 (NM_138802.1,728-746).
gcccctccagtgattgctt

SEQ ID NO: 281394 - DNA, 19 bp, Homo sapiens
  siRNA target sequence for LOC130617 (NM_138802.1,873-891).
ccagtgaggcagaatacca

SEQ ID NO: 281395 - DNA, 19 bp, Homo sapiens
  siRNA target sequence for LOC55974 (NM_018845.1,292-310).
gcgcttcagaccctgtata

SEQ ID NO: 281396 - DNA, 19 bp, Homo sapiens
  siRNA target sequence for LOC55974 (NM_018845.1,293-311).
cgcttcagaccctgtatat

SEQ ID NO: 281397 - DNA, 19 bp, Homo sapiens
  siRNA target sequence for LOC55974 (NM_018845.1,295-313).
cttcagaccctgtatatct

SEQ ID NO: 281398 - DNA, 19 bp, Homo sapiens
  siRNA target sequence for LOC55974 (NM_018845.1,501-519).
cttggctaaggtgattcaa

SEQ ID NO: 281399 - DNA, 19 bp, Homo sapiens
  siRNA target sequence for LOC55974 (NM_018845.1,504-522).
ggctaaggtgattcaaact

SEQ ID NO: 281400 - DNA, 19 bp, Homo sapiens
  siRNA target sequence for LOC55974 (NM_018845.1,505-523).
gctaaggtgattcaaacta

SEQ ID NO: 281401 - DNA, 19 bp, Homo sapiens
  siRNA target sequence for LOC55974 (NM_018845.1,506-524).
ctaaggtgattcaaactaa

SEQ ID NO: 281402 - DNA, 19 bp, Homo sapiens
  siRNA target sequence for LOC55974 (NM_018845.1,510-528).
ggtgattcaaactaaatca

SEQ ID NO: 281403 - DNA, 19 bp, Homo sapiens
  siRNA target sequence for LOC55974 (NM_018845.1,511-529).
gtgattcaaactaaatcaa

SEQ ID NO: 281404 - DNA, 19 bp, Homo sapiens
  siRNA target sequence for LOC55974 (NM_018845.1,602-620).
gactcagagatccctatat

SEQ ID NO: 281405 - DNA, 19 bp, Homo sapiens
  siRNA target sequence for LOC55974 (NM_018845.1,641-659).
gaatcgtcaccagctttat

SEQ ID NO: 281406 - DNA, 19 bp, Homo sapiens
  siRNA target sequence for LOC91614 (NM_139160.1,357-375).
ggatgagaggtttatgtga

SEQ ID NO: 281407 - DNA, 19 bp, Homo sapiens
  siRNA target sequence for LOC91614 (NM_139160.1,365-383).
ggtttatgtgagttctact

SEQ ID NO: 281408 - DNA, 19 bp, Homo sapiens
  siRNA target sequence for LOC91614 (NM_139160.1,384-402).
ggcaggaatttggcataaa

SEQ ID NO: 281409 - DNA, 19 bp, Homo sapiens
  siRNA target sequence for LOC91614 (NM_139160.1,448-466).
gagcagcatcataaacact

SEQ ID NO: 281410 - DNA, 19 bp, Homo sapiens
  siRNA target sequence for LOC91614 (NM_139160.1,454-472).
catcataaacactcttcaa

SEQ ID NO: 281411 - DNA, 19 bp, Homo sapiens
  siRNA target sequence for LOC91614 (NM_139160.1,479-497).
gtggaagtgaaaaaacgaa

SEQ ID NO: 281412 - DNA, 19 bp, Homo sapiens
  siRNA target sequence for LOC91614 (NM_139160.1,565-583).
cctaattcagaataagtat

SEQ ID NO: 281413 - DNA, 19 bp, Homo sapiens
  siRNA target sequence for LOC91614 (NM_139160.1,633-651).
cgcttatggactacaaagt

SEQ ID NO: 281414 - DNA, 19 bp, Homo sapiens
  siRNA target sequence for LOC91614 (NM_139160.1,634-652).
gcttatggactacaaagta

SEQ ID NO: 281415 - DNA, 19 bp, Homo sapiens
  siRNA target sequence for LOC91614 (NM_139160.1,635-653).
cttatggactacaaagtat

SEQ ID NO: 281416 - DNA, 19 bp, Homo sapiens
  siRNA target sequence for LOC91614 (NM_139160.1,665-683).
ccaaccaaagtctttggaa

SEQ ID NO: 281417 - DNA, 19 bp, Homo sapiens
  siRNA target sequence for LOC91614 (NM_139160.1,800-818).
gcagatgcattatttaagt

SEQ ID NO: 281418 - DNA, 19 bp, Homo sapiens
  siRNA target sequence for LOC91614 (NM_139160.1,848-866).
gacctgtgggaaaatctga

SEQ ID NO: 281419 - DNA, 19 bp, Homo sapiens
  siRNA target sequence for LOC91614 (NM_139160.1,879-897).
ccaactcccctcatgtaaa

SEQ ID NO: 281420 - DNA, 19 bp, Homo sapiens
  siRNA target sequence for LOC91614 (NM_139160.1,880-898).
caactcccctcatgtaaat

SEQ ID NO: 281421 - DNA, 19 bp, Homo sapiens
  siRNA target sequence for LOC91614 (NM_139160.1,909-927).
ccttgtctccacaagttat

SEQ ID NO: 281422 - DNA, 19 bp, Homo sapiens
  siRNA target sequence for LOC91614 (NM_139160.1,951-969).
caattgggcgtctactaca

SEQ ID NO: 281423 - DNA, 19 bp, Homo sapiens
  siRNA target sequence for LOC91614 (NM_139160.1,957-975).
ggcgtctactacaacttgt

SEQ ID NO: 281424 - DNA, 19 bp, Homo sapiens
  siRNA target sequence for LOC91614 (NM_139160.1,958-976).
gcgtctactacaacttgta

SEQ ID NO: 281425 - DNA, 19 bp, Homo sapiens
  siRNA target sequence for LOC91614 (NM_139160.1,960-978).
gtctactacaacttgtaga

SEQ ID NO: 281426 - DNA, 19 bp, Homo sapiens
  siRNA target sequence for LOC91614 (NM_139160.1,1057-1075).
ggtcaacagcagtaactat

SEQ ID NO: 281427 - DNA, 19 bp, Homo sapiens
  siRNA target sequence for LOC91614 (NM_139160.1,1085-1103).
gggattctcaaggcttata

SEQ ID NO: 281428 - DNA, 19 bp, Homo sapiens
  siRNA target sequence for LOC91614 (NM_139160.1,1127-1145).
ctctcggcagcaattgact

SEQ ID NO: 281429 - DNA, 19 bp, Homo sapiens
  siRNA target sequence for LOC91614 (NM_139160.1,1206-1224).
cagaccgaacagacttagt

SEQ ID NO: 281430 - DNA, 19 bp, Homo sapiens
  siRNA target sequence for LOC91614 (NM_139160.1,1208-1226).
gaccgaacagacttagtga

SEQ ID NO: 281431 - DNA, 19 bp, Homo sapiens
  siRNA target sequence for LOC91614 (NM_139160.1,1225-1243).
gaaagaacttctgtttgat

SEQ ID NO: 281432 - DNA, 19 bp, Homo sapiens
  siRNA target sequence for LOC91614 (NM_139160.1,1266-1284).
gtagggaacctctgttaaa

SEQ ID NO: 281433 - DNA, 19 bp, Homo sapiens
  siRNA target sequence for LOC91614 (NM_139160.1,1269-1287).
gggaacctctgttaaatca

SEQ ID NO: 281434 - DNA, 19 bp, Homo sapiens
  siRNA target sequence for LOC91614 (NM_139160.1,1271-1289).
gaacctctgttaaatcact

SEQ ID NO: 281435 - DNA, 19 bp, Homo sapiens
  siRNA target sequence for LOC91614 (NM_139160.1,1274-1292).
cctctgttaaatcacttat

SEQ ID NO: 281436 - DNA, 19 bp, Homo sapiens
  siRNA target sequence for LOC91614 (NM_139160.1,1286-1304).
cacttatctgacgttcata

SEQ ID NO: 281437 - DNA, 19 bp, Homo sapiens
  siRNA target sequence for LOC91614 (NM_139160.1,1288-1306).
cttatctgacgttcataat

SEQ ID NO: 281438 - DNA, 19 bp, Homo sapiens
  siRNA target sequence for LOC91614 (NM_139160.1,1333-1351).
gaagacggaaatagcttta

SEQ ID NO: 281439 - DNA, 19 bp, Homo sapiens
  siRNA target sequence for LOC91614 (NM_139160.1,1336-1354).
gacggaaatagctttagaa

SEQ ID NO: 281440 - DNA, 19 bp, Homo sapiens
  siRNA target sequence for LOC91614 (NM_139160.1,1427-1445).
gctgttgcagcaaatcctt

SEQ ID NO: 281441 - DNA, 19 bp, Homo sapiens
  siRNA target sequence for LOC91614 (NM_139160.1,1437-1455).
caaatccttctgagtttaa

SEQ ID NO: 281442 - DNA, 19 bp, Homo sapiens
  siRNA target sequence for LOC91614 (NM_139160.1,1474-1492).
caaccgaatggttgtgaaa

SEQ ID NO: 281443 - DNA, 19 bp, Homo sapiens
  siRNA target sequence for LOC91614 (NM_139160.1,1478-1496).
cgaatggttgtgaaaagga

SEQ ID NO: 281444 - DNA, 19 bp, Homo sapiens
  siRNA target sequence for LOC91614 (NM_139160.1,1495-1513).
gatattctcaaaagctatt

SEQ ID NO: 281445 - DNA, 19 bp, Homo sapiens
  siRNA target sequence for LOC91614 (NM_139160.1,1555-1573).
ggtactctttttaatggat

SEQ ID NO: 281446 - DNA, 19 bp, Homo sapiens
  siRNA target sequence for LOC91614 (NM_139160.1,1570-1588).
ggatcatcagaaagatgtt

SEQ ID NO: 281447 - DNA, 19 bp, Homo sapiens
  siRNA target sequence for LOC91614 (NM_139160.1,1594-1612).
gattcctggaactctacat

SEQ ID NO: 281448 - DNA, 19 bp, Homo sapiens
  siRNA target sequence for LOC91614 (NM_139160.1,1639-1657).
catacagaacggaagagat

SEQ ID NO: 281449 - DNA, 19 bp, Homo sapiens
  siRNA target sequence for LOC91614 (NM_139160.1,1645-1663).
gaacggaagagatccaaat

SEQ ID NO: 281450 - DNA, 19 bp, Homo sapiens
  siRNA target sequence for LOC91614 (NM_139160.1,1648-1666).
cggaagagatccaaataga

SEQ ID NO: 281451 - DNA, 19 bp, Homo sapiens
  siRNA target sequence for LOC91614 (NM_139160.1,1650-1668).
gaagagatccaaatagaga

SEQ ID NO: 281452 - DNA, 19 bp, Homo sapiens
  siRNA target sequence for LOC91614 (NM_139160.1,1667-1685).
gatgcaggatatatttatt

SEQ ID NO: 281453 - DNA, 19 bp, Homo sapiens
  siRNA target sequence for LOC91614 (NM_139160.1,1742-1760).
gagctgttgaatttactaa

SEQ ID NO: 281454 - DNA, 19 bp, Homo sapiens
  siRNA target sequence for LOC91614 (NM_139160.1,1769-1787).
gatgaggattcaaaacttt

SEQ ID NO: 281455 - DNA, 19 bp, Homo sapiens
  siRNA target sequence for LOC91614 (NM_139160.1,1811-1829).
ctaggtcaattctataagt

SEQ ID NO: 281456 - DNA, 19 bp, Homo sapiens
  siRNA target sequence for LPIN1 (NM_145693.1,146-164).
ctctcagggtgcattgaca

SEQ ID NO: 281457 - DNA, 19 bp, Homo sapiens
  siRNA target sequence for LPIN1 (NM_145693.1,153-171).
ggtgcattgacatcattgt

SEQ ID NO: 281458 - DNA, 19 bp, Homo sapiens
  siRNA target sequence for LPIN1 (NM_145693.1,344-362).
gataatgatcaggaagtta

SEQ ID NO: 281459 - DNA, 19 bp, Homo sapiens
  siRNA target sequence for LPIN1 (NM_145693.1,401-419).
ggagcttcgagaatggaat

SEQ ID NO: 281460 - DNA, 19 bp, Homo sapiens
  siRNA target sequence for LPIN1 (NM_145693.1,468-486).
gcacgccagcccaagtgat

SEQ ID NO: 281461 - DNA, 19 bp, Homo sapiens
  siRNA target sequence for LPIN1 (NM_145693.1,505-523).
gtcaagcagctctgtagta

SEQ ID NO: 281462 - DNA, 19 bp, Homo sapiens
  siRNA target sequence for LPIN1 (NM_145693.1,507-525).
caagcagctctgtagtaaa

SEQ ID NO: 281463 - DNA, 19 bp, Homo sapiens
  siRNA target sequence for LPIN1 (NM_145693.1,652-670).
ggagagcagcagaactctt

SEQ ID NO: 281464 - DNA, 19 bp, Homo sapiens
  siRNA target sequence for LPIN1 (NM_145693.1,657-675).
gcagcagaactcttcctaa

SEQ ID NO: 281465 - DNA, 19 bp, Homo sapiens
  siRNA target sequence for LPIN1 (NM_145693.1,658-676).
cagcagaactcttcctaat

SEQ ID NO: 281466 - DNA, 19 bp, Homo sapiens
  siRNA target sequence for LPIN1 (NM_145693.1,663-681).
gaactcttcctaatgatat

SEQ ID NO: 281467 - DNA, 19 bp, Homo sapiens
  siRNA target sequence for LPIN1 (NM_145693.1,802-820).
ccgaccttcaacacctaaa

SEQ ID NO: 281468 - DNA, 19 bp, Homo sapiens
  siRNA target sequence for LPIN1 (NM_145693.1,803-821).
cgaccttcaacacctaaaa

SEQ ID NO: 281469 - DNA, 19 bp, Homo sapiens
  siRNA target sequence for LPIN1 (NM_145693.1,901-919).
gccgcaggctgctaagtct

SEQ ID NO: 281470 - DNA, 19 bp, Homo sapiens
  siRNA target sequence for LPIN1 (NM_145693.1,902-920).
ccgcaggctgctaagtctt

SEQ ID NO: 281471 - DNA, 19 bp, Homo sapiens
  siRNA target sequence for LPIN1 (NM_145693.1,907-925).
ggctgctaagtcttcttct

SEQ ID NO: 281472 - DNA, 19 bp, Homo sapiens
  siRNA target sequence for LPIN1 (NM_145693.1,948-966).
gcccattgagcagtagaaa

SEQ ID NO: 281473 - DNA, 19 bp, Homo sapiens
  siRNA target sequence for LPIN1 (NM_145693.1,949-967).
cccattgagcagtagaaaa

SEQ ID NO: 281474 - DNA, 19 bp, Homo sapiens
  siRNA target sequence for LPIN1 (NM_145693.1,992-1010).
gccattcacagcgaatctt

SEQ ID NO: 281475 - DNA, 19 bp, Homo sapiens
  siRNA target sequence for LPIN1 (NM_145693.1,994-1012).
cattcacagcgaatcttca

SEQ ID NO: 281476 - DNA, 19 bp, Homo sapiens
  siRNA target sequence for LPIN1 (NM_145693.1,1002-1020).
gcgaatcttcagacacttt

SEQ ID NO: 281477 - DNA, 19 bp, Homo sapiens
  siRNA target sequence for LPIN1 (NM_145693.1,1008-1026).
cttcagacacttttagtga

SEQ ID NO: 281478 - DNA, 19 bp, Homo sapiens
  siRNA target sequence for LPIN1 (NM_145693.1,1181-1199).
gtccagacagcaaacaaga

SEQ ID NO: 281479 - DNA, 19 bp, Homo sapiens
  siRNA target sequence for LPIN1 (NM_145693.1,1245-1263).
gtgctgacggcgtctactt

SEQ ID NO: 281480 - DNA, 19 bp, Homo sapiens
  siRNA target sequence for LPIN1 (NM_145693.1,1492-1510).
ccgggagatcacgaaagat

SEQ ID NO: 281481 - DNA, 19 bp, Homo sapiens
  siRNA target sequence for LPIN1 (NM_145693.1,1547-1565).
gtggacaaccccgctatta

SEQ ID NO: 281482 - DNA, 19 bp, Homo sapiens
  siRNA target sequence for LPIN1 (NM_145693.1,1574-1592).
cccaatctcgtggtaaaga

SEQ ID NO: 281483 - DNA, 19 bp, Homo sapiens
  siRNA target sequence for LPIN1 (NM_145693.1,1575-1593).
ccaatctcgtggtaaagat

SEQ ID NO: 281484 - DNA, 19 bp, Homo sapiens
  siRNA target sequence for LPIN1 (NM_145693.1,1576-1594).
caatctcgtggtaaagatt

SEQ ID NO: 281485 - DNA, 19 bp, Homo sapiens
  siRNA target sequence for LPIN1 (NM_145693.1,1646-1664).
caggccttccagaaacctt

SEQ ID NO: 281486 - DNA, 19 bp, Homo sapiens
  siRNA target sequence for LPIN1 (NM_145693.1,1686-1704).
ctatcatgagggataaaat

SEQ ID NO: 281487 - DNA, 19 bp, Homo sapiens
  siRNA target sequence for LPIN1 (NM_145693.1,1755-1773).
caatcaaggaggaaagtaa

SEQ ID NO: 281488 - DNA, 19 bp, Homo sapiens
  siRNA target sequence for LPIN1 (NM_145693.1,1837-1855).
ggccaccagggtaaagcat

SEQ ID NO: 281489 - DNA, 19 bp, Homo sapiens
  siRNA target sequence for LPIN1 (NM_145693.1,1843-1861).
cagggtaaagcatgaatca

SEQ ID NO: 281490 - DNA, 19 bp, Homo sapiens
  siRNA target sequence for LPIN1 (NM_145693.1,1957-1975).
gacttccgagcagcttaaa

SEQ ID NO: 281491 - DNA, 19 bp, Homo sapiens
  siRNA target sequence for LPIN1 (NM_145693.1,1995-2013).
gccccaacgacgtggtttt

SEQ ID NO: 281492 - DNA, 19 bp, Homo sapiens
  siRNA target sequence for LPIN1 (NM_145693.1,1999-2017).
caacgacgtggttttcagt

SEQ ID NO: 281493 - DNA, 19 bp, Homo sapiens
  siRNA target sequence for LPIN1 (NM_145693.1,2049-2067).
gtgagggcaccatctatct

SEQ ID NO: 281494 - DNA, 19 bp, Homo sapiens
  siRNA target sequence for LPIN1 (NM_145693.1,2051-2069).
gagggcaccatctatctgt

SEQ ID NO: 281495 - DNA, 19 bp, Homo sapiens
  siRNA target sequence for LPIN1 (NM_145693.1,2126-2144).
gatactcttggccacattt

SEQ ID NO: 281496 - DNA, 19 bp, Homo sapiens
  siRNA target sequence for LPIN1 (NM_145693.1,2147-2165).
cccacccttgggaaggatt

SEQ ID NO: 281497 - DNA, 19 bp, Homo sapiens
  siRNA target sequence for LPIN1 (NM_145693.1,2201-2219).
gtgagccagaatggatata

SEQ ID NO: 281498 - DNA, 19 bp, Homo sapiens
  siRNA target sequence for LPIN1 (NM_145693.1,2434-2452).
caacacagaacccttttat

SEQ ID NO: 281499 - DNA, 19 bp, Homo sapiens
  siRNA target sequence for LPIN1 (NM_145693.1,2437-2455).
cacagaacccttttatgct

SEQ ID NO: 281500 - DNA, 19 bp, Homo sapiens
  siRNA target sequence for LPIN1 (NM_145693.1,2468-2486).
cgaccagctgatgtgtatt

SEQ ID NO: 281501 - DNA, 19 bp, Homo sapiens
  siRNA target sequence for LPIN1 (NM_145693.1,2471-2489).
ccagctgatgtgtattcat

SEQ ID NO: 281502 - DNA, 19 bp, Homo sapiens
  siRNA target sequence for LPIN1 (NM_145693.1,2475-2493).
ctgatgtgtattcatacaa

SEQ ID NO: 281503 - DNA, 19 bp, Homo sapiens
  siRNA target sequence for LPIN1 (NM_145693.1,2495-2513).
caagtaggagtgtctttga

SEQ ID NO: 281504 - DNA, 19 bp, Homo sapiens
  siRNA target sequence for LPIN1 (NM_145693.1,2504-2522).
gtgtctttgaatagaatat

SEQ ID NO: 281505 - DNA, 19 bp, Homo sapiens
  siRNA target sequence for LPIN1 (NM_145693.1,2658-2676).
cggataccttcagtaactt

SEQ ID NO: 281506 - DNA, 19 bp, Homo sapiens
  siRNA target sequence for LPP (NM_005578.1,335-353).
ggaaccccagcatttcagt

SEQ ID NO: 281507 - DNA, 19 bp, Homo sapiens
  siRNA target sequence for LPP (NM_005578.1,387-405).
ggtagttgctccaaaacct

SEQ ID NO: 281508 - DNA, 19 bp, Homo sapiens
  siRNA target sequence for LPP (NM_005578.1,388-406).
gtagttgctccaaaaccta

SEQ ID NO: 281509 - DNA, 19 bp, Homo sapiens
  siRNA target sequence for LPP (NM_005578.1,404-422).
ctaagtacaacccatacaa

SEQ ID NO: 281510 - DNA, 19 bp, Homo sapiens
  siRNA target sequence for LPP (NM_005578.1,591-609).
cagcctggacgctgagatt

SEQ ID NO: 281511 - DNA, 19 bp, Homo sapiens
  siRNA target sequence for LPP (NM_005578.1,675-693).
gagctccactggttcaaca

SEQ ID NO: 281512 - DNA, 19 bp, Homo sapiens
  siRNA target sequence for LPP (NM_005578.1,747-765).
gaaccaaccccctctaaca

SEQ ID NO: 281513 - DNA, 19 bp, Homo sapiens
  siRNA target sequence for LPP (NM_005578.1,931-949).
cagcccagccctcattata

SEQ ID NO: 281514 - DNA, 19 bp, Homo sapiens
  siRNA target sequence for LPP (NM_005578.1,1046-1064).
cacggggaggcatggatta

SEQ ID NO: 281515 - DNA, 19 bp, Homo sapiens
  siRNA target sequence for LPP (NM_005578.1,1388-1406).
cgtcagttgccccttcatt

SEQ ID NO: 281516 - DNA, 19 bp, Homo sapiens
  siRNA target sequence for LPP (NM_005578.1,1449-1467).
gtatgacatggaaaatcca

SEQ ID NO: 281517 - DNA, 19 bp, Homo sapiens
  siRNA target sequence for LPP (NM_005578.1,1465-1483).
ccacctgctgacgaatact

SEQ ID NO: 281518 - DNA, 19 bp, Homo sapiens
  siRNA target sequence for LPP (NM_005578.1,1558-1576).
cacgtggattgttttacct

SEQ ID NO: 281519 - DNA, 19 bp, Homo sapiens
  siRNA target sequence for LPP (NM_005578.1,1599-1617).
ccgagggcagccattctat

SEQ ID NO: 281520 - DNA, 19 bp, Homo sapiens
  siRNA target sequence for LPP (NM_005578.1,1610-1628).
cattctatgctgtggaaaa

SEQ ID NO: 281521 - DNA, 19 bp, Homo sapiens
  siRNA target sequence for LPP (NM_005578.1,1638-1656).
ctgcgagccctgctacatt

SEQ ID NO: 281522 - DNA, 19 bp, Homo sapiens
  siRNA target sequence for LPP (NM_005578.1,1640-1658).
gcgagccctgctacattaa

SEQ ID NO: 281523 - DNA, 19 bp, Homo sapiens
  siRNA target sequence for LPP (NM_005578.1,1716-1734).
caccgggaaggcctatcat

SEQ ID NO: 281524 - DNA, 19 bp, Homo sapiens
  siRNA target sequence for LPP (NM_005578.1,1905-1923).
ccgtattgtggctttggat

SEQ ID NO: 281525 - DNA, 19 bp, Homo sapiens
  siRNA target sequence for LPP (NM_005578.1,1916-1934).
ctttggatcgagatttcca

SEQ ID NO: 281526 - DNA, 19 bp, Homo sapiens
  siRNA target sequence for LRBA (NM_006726.1,362-380).
cccatcaggggcatcagaa

SEQ ID NO: 281527 - DNA, 19 bp, Homo sapiens
  siRNA target sequence for LRBA (NM_006726.1,367-385).
caggggcatcagaatgaaa

SEQ ID NO: 281528 - DNA, 19 bp, Homo sapiens
  siRNA target sequence for LRBA (NM_006726.1,391-409).
cgtgttgaccggtttggtt

SEQ ID NO: 281529 - DNA, 19 bp, Homo sapiens
  siRNA target sequence for LRBA (NM_006726.1,397-415).
gaccggtttggttgaagtt

SEQ ID NO: 281530 - DNA, 19 bp, Homo sapiens
  siRNA target sequence for LRBA (NM_006726.1,426-444).
ccaatagggatattgtaga

SEQ ID NO: 281531 - DNA, 19 bp, Homo sapiens
  siRNA target sequence for LRBA (NM_006726.1,460-478).
gttggtaggaggacagttt

SEQ ID NO: 281532 - DNA, 19 bp, Homo sapiens
  siRNA target sequence for LRBA (NM_006726.1,529-547).
ggtggacctactggaaaaa

SEQ ID NO: 281533 - DNA, 19 bp, Homo sapiens
  siRNA target sequence for LRBA (NM_006726.1,601-619).
gaaaagcatacggaatctt

SEQ ID NO: 281534 - DNA, 19 bp, Homo sapiens
  siRNA target sequence for LRBA (NM_006726.1,606-624).
gcatacggaatcttcaagt

SEQ ID NO: 281535 - DNA, 19 bp, Homo sapiens
  siRNA target sequence for LRBA (NM_006726.1,632-650).
gaagtaggccttgttgaaa

SEQ ID NO: 281536 - DNA, 19 bp, Homo sapiens
  siRNA target sequence for LRBA (NM_006726.1,679-697).
caatatgatagcagatctt

SEQ ID NO: 281537 - DNA, 19 bp, Homo sapiens
  siRNA target sequence for LRBA (NM_006726.1,712-730).
gggagtgctggctagctat

SEQ ID NO: 281538 - DNA, 19 bp, Homo sapiens
  siRNA target sequence for LRBA (NM_006726.1,714-732).
gagtgctggctagctataa

SEQ ID NO: 281539 - DNA, 19 bp, Homo sapiens
  siRNA target sequence for LRBA (NM_006726.1,716-734).
gtgctggctagctataatt

SEQ ID NO: 281540 - DNA, 19 bp, Homo sapiens
  siRNA target sequence for LRBA (NM_006726.1,719-737).
ctggctagctataatttga

SEQ ID NO: 281541 - DNA, 19 bp, Homo sapiens
  siRNA target sequence for LRBA (NM_006726.1,721-739).
ggctagctataatttgaca

SEQ ID NO: 281542 - DNA, 19 bp, Homo sapiens
  siRNA target sequence for LRBA (NM_006726.1,738-756).
cagttcgcgagctaaagct

SEQ ID NO: 281543 - DNA, 19 bp, Homo sapiens
  siRNA target sequence for LRBA (NM_006726.1,740-758).
gttcgcgagctaaagcttt

SEQ ID NO: 281544 - DNA, 19 bp, Homo sapiens
  siRNA target sequence for LRBA (NM_006726.1,743-761).
cgcgagctaaagcttttct

SEQ ID NO: 281545 - DNA, 19 bp, Homo sapiens
  siRNA target sequence for LRBA (NM_006726.1,744-762).
gcgagctaaagcttttctt

SEQ ID NO: 281546 - DNA, 19 bp, Homo sapiens
  siRNA target sequence for LRBA (NM_006726.1,746-764).
gagctaaagcttttcttca

SEQ ID NO: 281547 - DNA, 19 bp, Homo sapiens
  siRNA target sequence for LRBA (NM_006726.1,815-833).
ctgtctgtgttaaagcata

SEQ ID NO: 281548 - DNA, 19 bp, Homo sapiens
  siRNA target sequence for LRBA (NM_006726.1,829-847).
gcatatgcctcagaagtat

SEQ ID NO: 281549 - DNA, 19 bp, Homo sapiens
  siRNA target sequence for LRBA (NM_006726.1,848-866).
ggtcctgatgcctttttta

SEQ ID NO: 281550 - DNA, 19 bp, Homo sapiens
  siRNA target sequence for LRBA (NM_006726.1,849-867).
gtcctgatgccttttttaa

SEQ ID NO: 281551 - DNA, 19 bp, Homo sapiens
  siRNA target sequence for LRBA (NM_006726.1,851-869).
cctgatgccttttttaact

SEQ ID NO: 281552 - DNA, 19 bp, Homo sapiens
  siRNA target sequence for LRBA (NM_006726.1,880-898).
gagtgctgcagctattgca

SEQ ID NO: 281553 - DNA, 19 bp, Homo sapiens
  siRNA target sequence for LRBA (NM_006726.1,920-938).
ccataccagaatggtttta

SEQ ID NO: 281554 - DNA, 19 bp, Homo sapiens
  siRNA target sequence for LRBA (NM_006726.1,932-950).
ggttttacatttcatacat

SEQ ID NO: 281555 - DNA, 19 bp, Homo sapiens
  siRNA target sequence for LRBA (NM_006726.1,1024-1042).
caaaggtcttggctattct

SEQ ID NO: 281556 - DNA, 19 bp, Homo sapiens
  siRNA target sequence for LRBA (NM_006726.1,1055-1073).
ggaggctgtttgattgtaa

SEQ ID NO: 281557 - DNA, 19 bp, Homo sapiens
  siRNA target sequence for LRBA (NM_006726.1,1131-1149).
cacaaaagtggtatatggt

SEQ ID NO: 281558 - DNA, 19 bp, Homo sapiens
  siRNA target sequence for LRBA (NM_006726.1,1133-1151).
caaaagtggtatatggtta

SEQ ID NO: 281559 - DNA, 19 bp, Homo sapiens
  siRNA target sequence for LRBA (NM_006726.1,1138-1156).
gtggtatatggttaccata

SEQ ID NO: 281560 - DNA, 19 bp, Homo sapiens
  siRNA target sequence for LRBA (NM_006726.1,1152-1170).
ccatagtacacatctataa

SEQ ID NO: 281561 - DNA, 19 bp, Homo sapiens
  siRNA target sequence for LRBA (NM_006726.1,1165-1183).
ctataaccgatggaagaat

SEQ ID NO: 281562 - DNA, 19 bp, Homo sapiens
  siRNA target sequence for LRBA (NM_006726.1,1171-1189).
ccgatggaagaatagtgaa

SEQ ID NO: 281563 - DNA, 19 bp, Homo sapiens
  siRNA target sequence for LRBA (NM_006726.1,1187-1205).
gaacttcgatgttatgtga

SEQ ID NO: 281564 - DNA, 19 bp, Homo sapiens
  siRNA target sequence for LRBA (NM_006726.1,1246-1264).
caacactagcgataccttt

SEQ ID NO: 281565 - DNA, 19 bp, Homo sapiens
  siRNA target sequence for LRBA (NM_006726.1,1251-1269).
ctagcgatacctttgacaa

SEQ ID NO: 281566 - DNA, 19 bp, Homo sapiens
  siRNA target sequence for LRBA (NM_006726.1,1255-1273).
cgatacctttgacaaatgt

SEQ ID NO: 281567 - DNA, 19 bp, Homo sapiens
  siRNA target sequence for LRBA (NM_006726.1,1256-1274).
gatacctttgacaaatgtt

SEQ ID NO: 281568 - DNA, 19 bp, Homo sapiens
  siRNA target sequence for LRBA (NM_006726.1,1293-1311).
cagcagatgctaatagagt

SEQ ID NO: 281569 - DNA, 19 bp, Homo sapiens
  siRNA target sequence for LRBA (NM_006726.1,1320-1338).
gtcagatgactgcagttta

SEQ ID NO: 281570 - DNA, 19 bp, Homo sapiens
  siRNA target sequence for LRBA (NM_006726.1,1361-1379).
gcagctcagatatttgcta

SEQ ID NO: 281571 - DNA, 19 bp, Homo sapiens
  siRNA target sequence for LRBA (NM_006726.1,1364-1382).
gctcagatatttgctattt

SEQ ID NO: 281572 - DNA, 19 bp, Homo sapiens
  siRNA target sequence for LRBA (NM_006726.1,1396-1414).
gggatacaagggtacattt

SEQ ID NO: 281573 - DNA, 19 bp, Homo sapiens
  siRNA target sequence for LRBA (NM_006726.1,1397-1415).
ggatacaagggtacattta

SEQ ID NO: 281574 - DNA, 19 bp, Homo sapiens
  siRNA target sequence for LRBA (NM_006726.1,1425-1443).
cagaaagcgaccttttcct

SEQ ID NO: 281575 - DNA, 19 bp, Homo sapiens
  siRNA target sequence for LRBA (NM_006726.1,1445-1463).
gctgagcatcacaaacttt

SEQ ID NO: 281576 - DNA, 19 bp, Homo sapiens
  siRNA target sequence for LRBA (NM_006726.1,1481-1499).
ctctctagtgccattgcat

SEQ ID NO: 281577 - DNA, 19 bp, Homo sapiens
  siRNA target sequence for LRBA (NM_006726.1,1492-1510).
cattgcattcacgtacaat

SEQ ID NO: 281578 - DNA, 19 bp, Homo sapiens
  siRNA target sequence for LRBA (NM_006726.1,1507-1525).
caatccacgggctacagat

SEQ ID NO: 281579 - DNA, 19 bp, Homo sapiens
  siRNA target sequence for LRBA (NM_006726.1,1551-1569).
ctaaggacaacccttcaat

SEQ ID NO: 281580 - DNA, 19 bp, Homo sapiens
  siRNA target sequence for LRBA (NM_006726.1,1630-1648).
catccaaagtgcaatgcat

SEQ ID NO: 281581 - DNA, 19 bp, Homo sapiens
  siRNA target sequence for LRBA (NM_006726.1,1650-1668).
caattggaggagtacaagt

SEQ ID NO: 281582 - DNA, 19 bp, Homo sapiens
  siRNA target sequence for LRBA (NM_006726.1,1694-1712).
gattacaggcaatatttgt

SEQ ID NO: 281583 - DNA, 19 bp, Homo sapiens
  siRNA target sequence for LRBA (NM_006726.1,1720-1738).
gattgatttgactatatgt

SEQ ID NO: 281584 - DNA, 19 bp, Homo sapiens
  siRNA target sequence for LRBA (NM_006726.1,1748-1766).
ctggcctttatcatggaat

SEQ ID NO: 281585 - DNA, 19 bp, Homo sapiens
  siRNA target sequence for LRBA (NM_006726.1,1751-1769).
gcctttatcatggaattgt

SEQ ID NO: 281586 - DNA, 19 bp, Homo sapiens
  siRNA target sequence for LRBA (NM_006726.1,1752-1770).
cctttatcatggaattgtt

SEQ ID NO: 281587 - DNA, 19 bp, Homo sapiens
  siRNA target sequence for LRBA (NM_006726.1,1809-1827).
gtaagggcttcttggtaat

SEQ ID NO: 281588 - DNA, 19 bp, Homo sapiens
  siRNA target sequence for LRBA (NM_006726.1,1815-1833).
gcttcttggtaataggata

SEQ ID NO: 281589 - DNA, 19 bp, Homo sapiens
  siRNA target sequence for LRBA (NM_006726.1,1816-1834).
cttcttggtaataggatat

SEQ ID NO: 281590 - DNA, 19 bp, Homo sapiens
  siRNA target sequence for LRBA (NM_006726.1,1970-1988).
cctgccatatggattcata

SEQ ID NO: 281591 - DNA, 19 bp, Homo sapiens
  siRNA target sequence for LRBA (NM_006726.1,2099-2117).
cacacgctgaagtactact

SEQ ID NO: 281592 - DNA, 19 bp, Homo sapiens
  siRNA target sequence for LRBA (NM_006726.1,2113-2131).
ctactactgggcagtgaat

SEQ ID NO: 281593 - DNA, 19 bp, Homo sapiens
  siRNA target sequence for LRBA (NM_006726.1,2147-2165).
ggtatcaccccaaaaggat

SEQ ID NO: 281594 - DNA, 19 bp, Homo sapiens
  siRNA target sequence for LRBA (NM_006726.1,2152-2170).
caccccaaaaggattagat

SEQ ID NO: 281595 - DNA, 19 bp, Homo sapiens
  siRNA target sequence for LRBA (NM_006726.1,2171-2189).
ggaccgcgacctaatcaaa

SEQ ID NO: 281596 - DNA, 19 bp, Homo sapiens
  siRNA target sequence for LRBA (NM_006726.1,2172-2190).
gaccgcgacctaatcaaaa

SEQ ID NO: 281597 - DNA, 19 bp, Homo sapiens
  siRNA target sequence for LRBA (NM_006726.1,2175-2193).
cgcgacctaatcaaaaaga

SEQ ID NO: 281598 - DNA, 19 bp, Homo sapiens
  siRNA target sequence for LRBA (NM_006726.1,2176-2194).
gcgacctaatcaaaaagaa

SEQ ID NO: 281599 - DNA, 19 bp, Homo sapiens
  siRNA target sequence for LRBA (NM_006726.1,2177-2195).
cgacctaatcaaaaagaaa

SEQ ID NO: 281600 - DNA, 19 bp, Homo sapiens
  siRNA target sequence for LRBA (NM_006726.1,2178-2196).
gacctaatcaaaaagaaat

SEQ ID NO: 281601 - DNA, 19 bp, Homo sapiens
  siRNA target sequence for LRBA (NM_006726.1,2204-2222).
ctacgagcattcttgttga

SEQ ID NO: 281602 - DNA, 19 bp, Homo sapiens
  siRNA target sequence for LRBA (NM_006726.1,2207-2225).
cgagcattcttgttgatgt

SEQ ID NO: 281603 - DNA, 19 bp, Homo sapiens
  siRNA target sequence for LRBA (NM_006726.1,2210-2228).
gcattcttgttgatgttca

SEQ ID NO: 281604 - DNA, 19 bp, Homo sapiens
  siRNA target sequence for LRBA (NM_006726.1,2278-2296).
ggccattcttaattaccta

SEQ ID NO: 281605 - DNA, 19 bp, Homo sapiens
  siRNA target sequence for LRBA (NM_006726.1,2305-2323).
gcatgaggatgacaatcta

SEQ ID NO: 281606 - DNA, 19 bp, Homo sapiens
  siRNA target sequence for LRBA (NM_006726.1,2311-2329).
ggatgacaatctaatggat

SEQ ID NO: 281607 - DNA, 19 bp, Homo sapiens
  siRNA target sequence for LRBA (NM_006726.1,2356-2374).
gtcagaacaccctaactct

SEQ ID NO: 281608 - DNA, 19 bp, Homo sapiens
  siRNA target sequence for LRBA (NM_006726.1,2360-2378).
gaacaccctaactctatga

SEQ ID NO: 281609 - DNA, 19 bp, Homo sapiens
  siRNA target sequence for LRBA (NM_006726.1,2382-2400).
ctgcttttgaccaaaggaa

SEQ ID NO: 281610 - DNA, 19 bp, Homo sapiens
  siRNA target sequence for LRBA (NM_006726.1,2397-2415).
ggaatgggttacgtgttat

SEQ ID NO: 281611 - DNA, 19 bp, Homo sapiens
  siRNA target sequence for LRBA (NM_006726.1,2402-2420).
gggttacgtgttatctaca

SEQ ID NO: 281612 - DNA, 19 bp, Homo sapiens
  siRNA target sequence for LRBA (NM_006726.1,2403-2421).
ggttacgtgttatctacaa

SEQ ID NO: 281613 - DNA, 19 bp, Homo sapiens
  siRNA target sequence for LRBA (NM_006726.1,2404-2422).
gttacgtgttatctacaaa

SEQ ID NO: 281614 - DNA, 19 bp, Homo sapiens
  siRNA target sequence for LRBA (NM_006726.1,2462-2480).
cttaaggcaatgggttatt

SEQ ID NO: 281615 - DNA, 19 bp, Homo sapiens
  siRNA target sequence for LRBA (NM_006726.1,2557-2575).
gctcatgcttcagacaaat

SEQ ID NO: 281616 - DNA, 19 bp, Homo sapiens
  siRNA target sequence for LRBA (NM_006726.1,2558-2576).
ctcatgcttcagacaaatt

SEQ ID NO: 281617 - DNA, 19 bp, Homo sapiens
  siRNA target sequence for LRBA (NM_006726.1,2615-2633).
cttatagaacagattggta

SEQ ID NO: 281618 - DNA, 19 bp, Homo sapiens
  siRNA target sequence for LRBA (NM_006726.1,2630-2648).
ggtactcaggtgatacata

SEQ ID NO: 281619 - DNA, 19 bp, Homo sapiens
  siRNA target sequence for LRBA (NM_006726.1,2631-2649).
gtactcaggtgatacataa

SEQ ID NO: 281620 - DNA, 19 bp, Homo sapiens
  siRNA target sequence for LRBA (NM_006726.1,2711-2729).
gcgaccctacttcgaaatt

SEQ ID NO: 281621 - DNA, 19 bp, Homo sapiens
  siRNA target sequence for LRBA (NM_006726.1,2713-2731).
gaccctacttcgaaattct

SEQ ID NO: 281622 - DNA, 19 bp, Homo sapiens
  siRNA target sequence for LRBA (NM_006726.1,2755-2773).
ggttcgcagagcctttctt

SEQ ID NO: 281623 - DNA, 19 bp, Homo sapiens
  siRNA target sequence for LRBA (NM_006726.1,2756-2774).
gttcgcagagcctttcttt

SEQ ID NO: 281624 - DNA, 19 bp, Homo sapiens
  siRNA target sequence for LRBA (NM_006726.1,2865-2883).
gctattttaatcctaagaa

SEQ ID NO: 281625 - DNA, 19 bp, Homo sapiens
  siRNA target sequence for LRBA (NM_006726.1,2912-2930).
gtatacgccatattcagaa

SEQ ID NO: 281626 - DNA, 19 bp, Homo sapiens
  siRNA target sequence for LRBA (NM_006726.1,2935-2953).
gctttaccatgcagtcaaa

SEQ ID NO: 281627 - DNA, 19 bp, Homo sapiens
  siRNA target sequence for LRBA (NM_006726.1,2942-2960).
catgcagtcaaatatgagt

SEQ ID NO: 281628 - DNA, 19 bp, Homo sapiens
  siRNA target sequence for LRBA (NM_006726.1,2973-2991).
gtgtatgggtagacacttt

SEQ ID NO: 281629 - DNA, 19 bp, Homo sapiens
  siRNA target sequence for LRBA (NM_006726.1,2975-2993).
gtatgggtagacactttat

SEQ ID NO: 281630 - DNA, 19 bp, Homo sapiens
  siRNA target sequence for LRBA (NM_006726.1,2981-2999).
gtagacactttatcaatca

SEQ ID NO: 281631 - DNA, 19 bp, Homo sapiens
  siRNA target sequence for LRBA (NM_006726.1,3011-3029).
gtcacttttgaaatacaca

SEQ ID NO: 281632 - DNA, 19 bp, Homo sapiens
  siRNA target sequence for LRBA (NM_006726.1,3156-3174).
cccagcaaccagatacgaa

SEQ ID NO: 281633 - DNA, 19 bp, Homo sapiens
  siRNA target sequence for LRBA (NM_006726.1,3161-3179).
caaccagatacgaaggatt

SEQ ID NO: 281634 - DNA, 19 bp, Homo sapiens
  siRNA target sequence for LRBA (NM_006726.1,3210-3228).
gtaatgaaaattcaagtat

SEQ ID NO: 281635 - DNA, 19 bp, Homo sapiens
  siRNA target sequence for LRBA (NM_006726.1,3245-3263).
ctagaatctgcatctaata

SEQ ID NO: 281636 - DNA, 19 bp, Homo sapiens
  siRNA target sequence for LRBA (NM_006726.1,3271-3289).
gcaaactactaatacatct

SEQ ID NO: 281637 - DNA, 19 bp, Homo sapiens
  siRNA target sequence for LRBA (NM_006726.1,3272-3290).
caaactactaatacatctt

SEQ ID NO: 281638 - DNA, 19 bp, Homo sapiens
  siRNA target sequence for LRBA (NM_006726.1,3276-3294).
ctactaatacatcttatga

SEQ ID NO: 281639 - DNA, 19 bp, Homo sapiens
  siRNA target sequence for LRBA (NM_006726.1,3416-3434).
gtggctatttcctctaatt

SEQ ID NO: 281640 - DNA, 19 bp, Homo sapiens
  siRNA target sequence for LRBA (NM_006726.1,3476-3494).
gtaactgcttctataagtt

SEQ ID NO: 281641 - DNA, 19 bp, Homo sapiens
  siRNA target sequence for LRBA (NM_006726.1,3629-3647).
ctccaagataacagtttgt

SEQ ID NO: 281642 - DNA, 19 bp, Homo sapiens
  siRNA target sequence for LRBA (NM_006726.1,3660-3678).
ctgaagccggtgaaaaact

SEQ ID NO: 281643 - DNA, 19 bp, Homo sapiens
  siRNA target sequence for LRBA (NM_006726.1,3669-3687).
gtgaaaaactggacatgtt

SEQ ID NO: 281644 - DNA, 19 bp, Homo sapiens
  siRNA target sequence for LRBA (NM_006726.1,3739-3757).
gcaaactgatactgaaact

SEQ ID NO: 281645 - DNA, 19 bp, Homo sapiens
  siRNA target sequence for LRBA (NM_006726.1,3809-3827).
gctatgtcaccagaaacta

SEQ ID NO: 281646 - DNA, 19 bp, Homo sapiens
  siRNA target sequence for LRBA (NM_006726.1,3835-3853).
ccaaatagctgtagaatca

SEQ ID NO: 281647 - DNA, 19 bp, Homo sapiens
  siRNA target sequence for LRBA (NM_006726.1,3969-3987).
cgaagttggatgtttccaa

SEQ ID NO: 281648 - DNA, 19 bp, Homo sapiens
  siRNA target sequence for LRBA (NM_006726.1,3973-3991).
gttggatgtttccaatgtt

SEQ ID NO: 281649 - DNA, 19 bp, Homo sapiens
  siRNA target sequence for LRBA (NM_006726.1,4058-4076).
catgtgcttgagatatcaa

SEQ ID NO: 281650 - DNA, 19 bp, Homo sapiens
  siRNA target sequence for LRBA (NM_006726.1,4132-4150).
gagggattccagatctact

SEQ ID NO: 281651 - DNA, 19 bp, Homo sapiens
  siRNA target sequence for LRBA (NM_006726.1,4143-4161).
gatctactgtgtttcgtat

SEQ ID NO: 281652 - DNA, 19 bp, Homo sapiens
  siRNA target sequence for LRBA (NM_006726.1,4179-4197).
ctcagatgcatcaacgttt

SEQ ID NO: 281653 - DNA, 19 bp, Homo sapiens
  siRNA target sequence for LRBA (NM_006726.1,4193-4211).
cgtttgctcactgatctat

SEQ ID NO: 281654 - DNA, 19 bp, Homo sapiens
  siRNA target sequence for LRBA (NM_006726.1,4194-4212).
gtttgctcactgatctatt

SEQ ID NO: 281655 - DNA, 19 bp, Homo sapiens
  siRNA target sequence for LRBA (NM_006726.1,4265-4283).
gttatggacttcgtgaata

SEQ ID NO: 281656 - DNA, 19 bp, Homo sapiens
  siRNA target sequence for LRBA (NM_006726.1,4276-4294).
cgtgaatagcagtgataat

SEQ ID NO: 281657 - DNA, 19 bp, Homo sapiens
  siRNA target sequence for LRBA (NM_006726.1,4285-4303).
cagtgataatgtcatcttt

SEQ ID NO: 281658 - DNA, 19 bp, Homo sapiens
  siRNA target sequence for LRBA (NM_006726.1,4392-4410).
catcggctacacatgaact

SEQ ID NO: 281659 - DNA, 19 bp, Homo sapiens
  siRNA target sequence for LRBA (NM_006726.1,4479-4497).
gccttgtggatgtgcttat

SEQ ID NO: 281660 - DNA, 19 bp, Homo sapiens
  siRNA target sequence for LRBA (NM_006726.1,4480-4498).
ccttgtggatgtgcttata

SEQ ID NO: 281661 - DNA, 19 bp, Homo sapiens
  siRNA target sequence for LRBA (NM_006726.1,4486-4504).
ggatgtgcttatatttgca

SEQ ID NO: 281662 - DNA, 19 bp, Homo sapiens
  siRNA target sequence for LRBA (NM_006726.1,4487-4505).
gatgtgcttatatttgcaa

SEQ ID NO: 281663 - DNA, 19 bp, Homo sapiens
  siRNA target sequence for LRBA (NM_006726.1,4492-4510).
gcttatatttgcaagttct

SEQ ID NO: 281664 - DNA, 19 bp, Homo sapiens
  siRNA target sequence for LRBA (NM_006726.1,4567-4585).
gcagtgtctccgactagtt

SEQ ID NO: 281665 - DNA, 19 bp, Homo sapiens
  siRNA target sequence for LRBA (NM_006726.1,4570-4588).
gtgtctccgactagtttgt

SEQ ID NO: 281666 - DNA, 19 bp, Homo sapiens
  siRNA target sequence for LRBA (NM_006726.1,4587-4605).
gtgcagtcgcagtaaggaa

SEQ ID NO: 281667 - DNA, 19 bp, Homo sapiens
  siRNA target sequence for LRBA (NM_006726.1,4589-4607).
gcagtcgcagtaaggaatt

SEQ ID NO: 281668 - DNA, 19 bp, Homo sapiens
  siRNA target sequence for LRBA (NM_006726.1,4592-4610).
gtcgcagtaaggaattgct

SEQ ID NO: 281669 - DNA, 19 bp, Homo sapiens
  siRNA target sequence for LRBA (NM_006726.1,4669-4687).
gcatagccttattccttta

SEQ ID NO: 281670 - DNA, 19 bp, Homo sapiens
  siRNA target sequence for LRBA (NM_006726.1,4729-4747).
cggtatatctccagtaaga

SEQ ID NO: 281671 - DNA, 19 bp, Homo sapiens
  siRNA target sequence for LRBA (NM_006726.1,4731-4749).
gtatatctccagtaagaga

SEQ ID NO: 281672 - DNA, 19 bp, Homo sapiens
  siRNA target sequence for LRBA (NM_006726.1,4763-4781).
ctacaggacatggatatta

SEQ ID NO: 281673 - DNA, 19 bp, Homo sapiens
  siRNA target sequence for LRBA (NM_006726.1,4784-4802).
cggcttagggcagttgttt

SEQ ID NO: 281674 - DNA, 19 bp, Homo sapiens
  siRNA target sequence for LRBA (NM_006726.1,4806-4824).
gagacatagaggatagcaa

SEQ ID NO: 281675 - DNA, 19 bp, Homo sapiens
  siRNA target sequence for LRBA (NM_006726.1,4841-4859).
gccttggcagtagtatact

SEQ ID NO: 281676 - DNA, 19 bp, Homo sapiens
  siRNA target sequence for LRBA (NM_006726.1,4871-4889).
cttatggtctccaagtaca

SEQ ID NO: 281677 - DNA, 19 bp, Homo sapiens
  siRNA target sequence for LRBA (NM_006726.1,4894-4912).
cattttggaaccccaaaat

SEQ ID NO: 281678 - DNA, 19 bp, Homo sapiens
  siRNA target sequence for LRBA (NM_006726.1,4924-4942).
ccagtcatgtacagaaact

SEQ ID NO: 281679 - DNA, 19 bp, Homo sapiens
  siRNA target sequence for LRBA (NM_006726.1,5090-5108).
ggaagccatgtggaagtaa

SEQ ID NO: 281680 - DNA, 19 bp, Homo sapiens
  siRNA target sequence for LRBA (NM_006726.1,5155-5173).
cagcgaggtgctatctact

SEQ ID NO: 281681 - DNA, 19 bp, Homo sapiens
  siRNA target sequence for LRBA (NM_006726.1,5161-5179).
ggtgctatctactctttct

SEQ ID NO: 281682 - DNA, 19 bp, Homo sapiens
  siRNA target sequence for LRBA (NM_006726.1,5169-5187).
ctactctttctttagaagt

SEQ ID NO: 281683 - DNA, 19 bp, Homo sapiens
  siRNA target sequence for LRBA (NM_006726.1,5172-5190).
ctctttctttagaagtcaa

SEQ ID NO: 281684 - DNA, 19 bp, Homo sapiens
  siRNA target sequence for LRBA (NM_006726.1,5194-5212).
gtctccggaaaccaaaaat

SEQ ID NO: 281685 - DNA, 19 bp, Homo sapiens
  siRNA target sequence for LRBA (NM_006726.1,5239-5257).
ggctacaccgtcagtttca

SEQ ID NO: 281686 - DNA, 19 bp, Homo sapiens
  siRNA target sequence for LRBA (NM_006726.1,5241-5259).
ctacaccgtcagtttcagt

SEQ ID NO: 281687 - DNA, 19 bp, Homo sapiens
  siRNA target sequence for LRBA (NM_006726.1,5288-5306).
ctccgaagcttggttaaca

SEQ ID NO: 281688 - DNA, 19 bp, Homo sapiens
  siRNA target sequence for LRBA (NM_006726.1,5387-5405).
caacccgtgcagttcagat

SEQ ID NO: 281689 - DNA, 19 bp, Homo sapiens
  siRNA target sequence for LRBA (NM_006726.1,5392-5410).
cgtgcagttcagatctttt

SEQ ID NO: 281690 - DNA, 19 bp, Homo sapiens
  siRNA target sequence for LRBA (NM_006726.1,5447-5465).
gtctcaccttccaccttta

SEQ ID NO: 281691 - DNA, 19 bp, Homo sapiens
  siRNA target sequence for LRBA (NM_006726.1,5458-5476).
cacctttaatacaagcata

SEQ ID NO: 281692 - DNA, 19 bp, Homo sapiens
  siRNA target sequence for LRBA (NM_006726.1,5495-5513).
gtggtttcctcagtagatt

SEQ ID NO: 281693 - DNA, 19 bp, Homo sapiens
  siRNA target sequence for LRBA (NM_006726.1,5497-5515).
ggtttcctcagtagattca

SEQ ID NO: 281694 - DNA, 19 bp, Homo sapiens
  siRNA target sequence for LRBA (NM_006726.1,5540-5558).
gaatcaccaggcagtagat

SEQ ID NO: 281695 - DNA, 19 bp, Homo sapiens
  siRNA target sequence for LRBA (NM_006726.1,5547-5565).
caggcagtagatcatctaa

SEQ ID NO: 281696 - DNA, 19 bp, Homo sapiens
  siRNA target sequence for LRBA (NM_006726.1,5585-5603).
ccaacagttgattcagttt

SEQ ID NO: 281697 - DNA, 19 bp, Homo sapiens
  siRNA target sequence for LRBA (NM_006726.1,5604-5622).
cacaagatccggtttcaaa

SEQ ID NO: 281698 - DNA, 19 bp, Homo sapiens
  siRNA target sequence for LRBA (NM_006726.1,5606-5624).
caagatccggtttcaaata

SEQ ID NO: 281699 - DNA, 19 bp, Homo sapiens
  siRNA target sequence for LRBA (NM_006726.1,5612-5630).
ccggtttcaaatatgagta

SEQ ID NO: 281700 - DNA, 19 bp, Homo sapiens
  siRNA target sequence for LRBA (NM_006726.1,5613-5631).
cggtttcaaatatgagtat

SEQ ID NO: 281701 - DNA, 19 bp, Homo sapiens
  siRNA target sequence for LRBA (NM_006726.1,5641-5659).
gcttgaacacgctttggaa

SEQ ID NO: 281702 - DNA, 19 bp, Homo sapiens
  siRNA target sequence for LRBA (NM_006726.1,5746-5764).
gcttatagaaggaacaagt

SEQ ID NO: 281703 - DNA, 19 bp, Homo sapiens
  siRNA target sequence for LRBA (NM_006726.1,5757-5775).
gaacaagtctggtttgcat

SEQ ID NO: 281704 - DNA, 19 bp, Homo sapiens
  siRNA target sequence for LRBA (NM_006726.1,5773-5791).
catgaagtcgagtagttca

SEQ ID NO: 281705 - DNA, 19 bp, Homo sapiens
  siRNA target sequence for LRBA (NM_006726.1,5776-5794).
gaagtcgagtagttcagtt

SEQ ID NO: 281706 - DNA, 19 bp, Homo sapiens
  siRNA target sequence for LRBA (NM_006726.1,5787-5805).
gttcagttgtggaattggt

SEQ ID NO: 281707 - DNA, 19 bp, Homo sapiens
  siRNA target sequence for LRBA (NM_006726.1,5889-5907).
ggttgcttagccagacaat

SEQ ID NO: 281708 - DNA, 19 bp, Homo sapiens
  siRNA target sequence for LRBA (NM_006726.1,5908-5926).
gaaggatcatctagtaaga

SEQ ID NO: 281709 - DNA, 19 bp, Homo sapiens
  siRNA target sequence for LRBA (NM_006726.1,5911-5929).
ggatcatctagtaagagta

SEQ ID NO: 281710 - DNA, 19 bp, Homo sapiens
  siRNA target sequence for LRBA (NM_006726.1,6038-6056).
gagaagatgtgtgatcatt

SEQ ID NO: 281711 - DNA, 19 bp, Homo sapiens
  siRNA target sequence for LRBA (NM_006726.1,6085-6103).
cgtgacagcaactcaacta

SEQ ID NO: 281712 - DNA, 19 bp, Homo sapiens
  siRNA target sequence for LRBA (NM_006726.1,6137-6155).
catggagcctggggaaatt

SEQ ID NO: 281713 - DNA, 19 bp, Homo sapiens
  siRNA target sequence for LRBA (NM_006726.1,6257-6275).
cctgaagcgacactaaaaa

SEQ ID NO: 281714 - DNA, 19 bp, Homo sapiens
  siRNA target sequence for LRBA (NM_006726.1,6283-6301).
ggaacatgtgtgcattttt

SEQ ID NO: 281715 - DNA, 19 bp, Homo sapiens
  siRNA target sequence for LRBA (NM_006726.1,6292-6310).
gtgcatttttaaattgaga

SEQ ID NO: 281716 - DNA, 19 bp, Homo sapiens
  siRNA target sequence for LRBA (NM_006726.1,6367-6385).
gagtcaggctttaggaaat

SEQ ID NO: 281717 - DNA, 19 bp, Homo sapiens
  siRNA target sequence for LRBA (NM_006726.1,6412-6430).
ggaaggcgatgatgatact

SEQ ID NO: 281718 - DNA, 19 bp, Homo sapiens
  siRNA target sequence for LRBA (NM_006726.1,6541-6559).
cacctcctccgaactctat

SEQ ID NO: 281719 - DNA, 19 bp, Homo sapiens
  siRNA target sequence for LRBA (NM_006726.1,6543-6561).
cctcctccgaactctattt

SEQ ID NO: 281720 - DNA, 19 bp, Homo sapiens
  siRNA target sequence for LRBA (NM_006726.1,6572-6590).
gaagaggatcctaacttca

SEQ ID NO: 281721 - DNA, 19 bp, Homo sapiens
  siRNA target sequence for LRBA (NM_006726.1,6577-6595).
ggatcctaacttcaaaaaa

SEQ ID NO: 281722 - DNA, 19 bp, Homo sapiens
  siRNA target sequence for LRBA (NM_006726.1,6582-6600).
ctaacttcaaaaaaatcga

SEQ ID NO: 281723 - DNA, 19 bp, Homo sapiens
  siRNA target sequence for LRBA (NM_006726.1,6604-6622).
caagatcttggcatataca

SEQ ID NO: 281724 - DNA, 19 bp, Homo sapiens
  siRNA target sequence for LRBA (NM_006726.1,6653-6671).
gagatacgatcaatctttt

SEQ ID NO: 281725 - DNA, 19 bp, Homo sapiens
  siRNA target sequence for LRBA (NM_006726.1,6655-6673).
gatacgatcaatcttttct

SEQ ID NO: 281726 - DNA, 19 bp, Homo sapiens
  siRNA target sequence for LRBA (NM_006726.1,6667-6685).
cttttctcgtcgttatctt

SEQ ID NO: 281727 - DNA, 19 bp, Homo sapiens
  siRNA target sequence for LRBA (NM_006726.1,6672-6690).
ctcgtcgttatcttttgca

SEQ ID NO: 281728 - DNA, 19 bp, Homo sapiens
  siRNA target sequence for LRBA (NM_006726.1,6674-6692).
cgtcgttatcttttgcaaa

SEQ ID NO: 281729 - DNA, 19 bp, Homo sapiens
  siRNA target sequence for LRBA (NM_006726.1,6675-6693).
gtcgttatcttttgcaaaa

SEQ ID NO: 281730 - DNA, 19 bp, Homo sapiens
  siRNA target sequence for LRBA (NM_006726.1,6696-6714).
cagccctggagatctttat

SEQ ID NO: 281731 - DNA, 19 bp, Homo sapiens
  siRNA target sequence for LRBA (NM_006726.1,6751-6769).
ccctgcaacagtaaagaaa

SEQ ID NO: 281732 - DNA, 19 bp, Homo sapiens
  siRNA target sequence for LRBA (NM_006726.1,6753-6771).
ctgcaacagtaaagaaagt

SEQ ID NO: 281733 - DNA, 19 bp, Homo sapiens
  siRNA target sequence for LRBA (NM_006726.1,6796-6814).
cgttggaacaagttttgga

SEQ ID NO: 281734 - DNA, 19 bp, Homo sapiens
  siRNA target sequence for LRBA (NM_006726.1,6817-6835).
gcctcaaaccagacgtatt

SEQ ID NO: 281735 - DNA, 19 bp, Homo sapiens
  siRNA target sequence for LRBA (NM_006726.1,6821-6839).
caaaccagacgtatttcat

SEQ ID NO: 281736 - DNA, 19 bp, Homo sapiens
  siRNA target sequence for LRBA (NM_006726.1,6843-6861).
ctagtccacgtcagctttt

SEQ ID NO: 281737 - DNA, 19 bp, Homo sapiens
  siRNA target sequence for LRBA (NM_006726.1,6846-6864).
gtccacgtcagctttttaa

SEQ ID NO: 281738 - DNA, 19 bp, Homo sapiens
  siRNA target sequence for LRBA (NM_006726.1,6890-6908).
caacacagagagatatcta

SEQ ID NO: 281739 - DNA, 19 bp, Homo sapiens
  siRNA target sequence for LRBA (NM_006726.1,6906-6924).
ctaattttgagtacttgat

SEQ ID NO: 281740 - DNA, 19 bp, Homo sapiens
  siRNA target sequence for LRBA (NM_006726.1,6914-6932).
gagtacttgatgtttctca

SEQ ID NO: 281741 - DNA, 19 bp, Homo sapiens
  siRNA target sequence for LRBA (NM_006726.1,6937-6955).
gatagcaggacggagttat

SEQ ID NO: 281742 - DNA, 19 bp, Homo sapiens
  siRNA target sequence for LRBA (NM_006726.1,6947-6965).
cggagttataatgacttaa

SEQ ID NO: 281743 - DNA, 19 bp, Homo sapiens
  siRNA target sequence for LRBA (NM_006726.1,6948-6966).
ggagttataatgacttaaa

SEQ ID NO: 281744 - DNA, 19 bp, Homo sapiens
  siRNA target sequence for LRBA (NM_006726.1,6949-6967).
gagttataatgacttaaat

SEQ ID NO: 281745 - DNA, 19 bp, Homo sapiens
  siRNA target sequence for LRBA (NM_006726.1,6983-7001).
ccttgggtcatcactaatt

SEQ ID NO: 281746 - DNA, 19 bp, Homo sapiens
  siRNA target sequence for LRBA (NM_006726.1,6988-7006).
ggtcatcactaattatgaa

SEQ ID NO: 281747 - DNA, 19 bp, Homo sapiens
  siRNA target sequence for LRBA (NM_006726.1,6989-7007).
gtcatcactaattatgaat

SEQ ID NO: 281748 - DNA, 19 bp, Homo sapiens
  siRNA target sequence for LRBA (NM_006726.1,7064-7082).
ggagctctgaacccaaaaa

SEQ ID NO: 281749 - DNA, 19 bp, Homo sapiens
  siRNA target sequence for LRBA (NM_006726.1,7093-7111).
cttcgctgagcgttatgaa

SEQ ID NO: 281750 - DNA, 19 bp, Homo sapiens
  siRNA target sequence for LRBA (NM_006726.1,7096-7114).
cgctgagcgttatgaatca

SEQ ID NO: 281751 - DNA, 19 bp, Homo sapiens
  siRNA target sequence for LRBA (NM_006726.1,7127-7145).
caagttccaaagtttcact

SEQ ID NO: 281752 - DNA, 19 bp, Homo sapiens
  siRNA target sequence for LRBA (NM_006726.1,7199-7217).
gaaccctttacaacttatt

SEQ ID NO: 281753 - DNA, 19 bp, Homo sapiens
  siRNA target sequence for LRBA (NM_006726.1,7228-7246).
gcaaggaggcaaatttgat

SEQ ID NO: 281754 - DNA, 19 bp, Homo sapiens
  siRNA target sequence for LRBA (NM_006726.1,7247-7265).
catgcagatcgaacttttt

SEQ ID NO: 281755 - DNA, 19 bp, Homo sapiens
  siRNA target sequence for LRBA (NM_006726.1,7250-7268).
gcagatcgaactttttcat

SEQ ID NO: 281756 - DNA, 19 bp, Homo sapiens
  siRNA target sequence for LRBA (NM_006726.1,7253-7271).
gatcgaactttttcatcaa

SEQ ID NO: 281757 - DNA, 19 bp, Homo sapiens
  siRNA target sequence for LRBA (NM_006726.1,7295-7313).
cagcgtgatacctctgata

SEQ ID NO: 281758 - DNA, 19 bp, Homo sapiens
  siRNA target sequence for LRBA (NM_006726.1,7298-7316).
cgtgatacctctgatatta

SEQ ID NO: 281759 - DNA, 19 bp, Homo sapiens
  siRNA target sequence for LRBA (NM_006726.1,7318-7336).
ggagttgatccctgaattt

SEQ ID NO: 281760 - DNA, 19 bp, Homo sapiens
  siRNA target sequence for LRBA (NM_006726.1,7351-7369).
gatgtttgtcaacttcaat

SEQ ID NO: 281761 - DNA, 19 bp, Homo sapiens
  siRNA target sequence for LRBA (NM_006726.1,7358-7376).
gtcaacttcaataattata

SEQ ID NO: 281762 - DNA, 19 bp, Homo sapiens
  siRNA target sequence for LRBA (NM_006726.1,7498-7516).
ccagcttcaccaatggatt

SEQ ID NO: 281763 - DNA, 19 bp, Homo sapiens
  siRNA target sequence for LRBA (NM_006726.1,7560-7578).
gagccctcaatgtgttcta

SEQ ID NO: 281764 - DNA, 19 bp, Homo sapiens
  siRNA target sequence for LRBA (NM_006726.1,7595-7613).
ggagctgtcaatctgaatt

SEQ ID NO: 281765 - DNA, 19 bp, Homo sapiens
  siRNA target sequence for LRBA (NM_006726.1,7599-7617).
ctgtcaatctgaattcaat

SEQ ID NO: 281766 - DNA, 19 bp, Homo sapiens
  siRNA target sequence for LRBA (NM_006726.1,7601-7619).
gtcaatctgaattcaataa

SEQ ID NO: 281767 - DNA, 19 bp, Homo sapiens
  siRNA target sequence for LRBA (NM_006726.1,7603-7621).
caatctgaattcaataact

SEQ ID NO: 281768 - DNA, 19 bp, Homo sapiens
  siRNA target sequence for LRBA (NM_006726.1,7674-7692).
ctccttctcaactactcat

SEQ ID NO: 281769 - DNA, 19 bp, Homo sapiens
  siRNA target sequence for LRBA (NM_006726.1,7724-7742).
caagtgagtccattgatgt

SEQ ID NO: 281770 - DNA, 19 bp, Homo sapiens
  siRNA target sequence for LRBA (NM_006726.1,7727-7745).
gtgagtccattgatgttca

SEQ ID NO: 281771 - DNA, 19 bp, Homo sapiens
  siRNA target sequence for LRBA (NM_006726.1,7872-7890).
ggttatttgcggtgaacaa

SEQ ID NO: 281772 - DNA, 19 bp, Homo sapiens
  siRNA target sequence for LRBA (NM_006726.1,7873-7891).
gttatttgcggtgaacaaa

SEQ ID NO: 281773 - DNA, 19 bp, Homo sapiens
  siRNA target sequence for LRBA (NM_006726.1,7942-7960).
gctgccagtggaaatcgat

SEQ ID NO: 281774 - DNA, 19 bp, Homo sapiens
  siRNA target sequence for LRBA (NM_006726.1,7951-7969).
ggaaatcgatcctctcata

SEQ ID NO: 281775 - DNA, 19 bp, Homo sapiens
  siRNA target sequence for LRBA (NM_006726.1,7961-7979).
cctctcatagccagcaata

SEQ ID NO: 281776 - DNA, 19 bp, Homo sapiens
  siRNA target sequence for LRBA (NM_006726.1,7996-8014).
gcaaatcactgacctttta

SEQ ID NO: 281777 - DNA, 19 bp, Homo sapiens
  siRNA target sequence for LRBA (NM_006726.1,8006-8024).
gaccttttagaccaaagta

SEQ ID NO: 281778 - DNA, 19 bp, Homo sapiens
  siRNA target sequence for LRBA (NM_006726.1,8008-8026).
ccttttagaccaaagtatt

SEQ ID NO: 281779 - DNA, 19 bp, Homo sapiens
  siRNA target sequence for LRBA (NM_006726.1,8055-8073).
cttcagacaaccgctatat

SEQ ID NO: 281780 - DNA, 19 bp, Homo sapiens
  siRNA target sequence for LRBA (NM_006726.1,8177-8195).
gctcgttctgagtcatata

SEQ ID NO: 281781 - DNA, 19 bp, Homo sapiens
  siRNA target sequence for LRBA (NM_006726.1,8199-8217).
ggggaaattgctacattct

SEQ ID NO: 281782 - DNA, 19 bp, Homo sapiens
  siRNA target sequence for LRBA (NM_006726.1,8229-8247).
gtgatgcaactcttttgct

SEQ ID NO: 281783 - DNA, 19 bp, Homo sapiens
  siRNA target sequence for LRBA (NM_006726.1,8306-8324).
gctcctcgggccattttga

SEQ ID NO: 281784 - DNA, 19 bp, Homo sapiens
  siRNA target sequence for LRBA (NM_006726.1,8490-8508).
caagagagggtcattgtgt

SEQ ID NO: 281785 - DNA, 19 bp, Homo sapiens
  siRNA target sequence for LRBA (NM_006726.1,8495-8513).
gagggtcattgtgtcatat

SEQ ID NO: 281786 - DNA, 19 bp, Homo sapiens
  siRNA target sequence for LRBA (NM_006726.1,8498-8516).
ggtcattgtgtcatattct

SEQ ID NO: 281787 - DNA, 19 bp, Homo sapiens
  siRNA target sequence for LRBA (NM_006726.1,8558-8576).
ctccaggccacgatggaaa

SEQ ID NO: 281788 - DNA, 19 bp, Homo sapiens
  siRNA target sequence for LRBA (NM_006726.1,8572-8590).
ggaaacagatgataacata

SEQ ID NO: 281789 - DNA, 19 bp, Homo sapiens
  siRNA target sequence for LRBA (NM_006726.1,8738-8756).
gaccagaggtgcatcattt

SEQ ID NO: 281790 - DNA, 19 bp, Homo sapiens
  siRNA target sequence for LRBA (NM_006726.1,8772-8790).
gaagcattgtgctatttta

SEQ ID NO: 281791 - DNA, 19 bp, Homo sapiens
  siRNA target sequence for LRBA (NM_006726.1,8783-8801).
ctattttacaacgacttta

SEQ ID NO: 281792 - DNA, 19 bp, Homo sapiens
  siRNA target sequence for LRBA (NM_006726.1,8806-8824).
gtggcatcatgaataccaa

SEQ ID NO: 281793 - DNA, 19 bp, Homo sapiens
  siRNA target sequence for LRG (NM_052972.1,23-41).
gagcagacagcgaccaaaa

SEQ ID NO: 281794 - DNA, 19 bp, Homo sapiens
  siRNA target sequence for LRG (NM_052972.1,363-381).
ctgagggtgctggatctaa

SEQ ID NO: 281795 - DNA, 19 bp, Homo sapiens
  siRNA target sequence for LRG (NM_052972.1,635-653).
gaggggtccgctgcaatta

SEQ ID NO: 281796 - DNA, 19 bp, Homo sapiens
  siRNA target sequence for LRG (NM_052972.1,637-655).
ggggtccgctgcaattaga

SEQ ID NO: 281797 - DNA, 19 bp, Homo sapiens
  siRNA target sequence for LRG (NM_052972.1,638-656).
gggtccgctgcaattagaa

SEQ ID NO: 281798 - DNA, 19 bp, Homo sapiens
  siRNA target sequence for LRG (NM_052972.1,804-822).
ctggacctctccaataact

SEQ ID NO: 281799 - DNA, 19 bp, Homo sapiens
  siRNA target sequence for LRG (NM_052972.1,806-824).
ggacctctccaataactca

SEQ ID NO: 281800 - DNA, 19 bp, Homo sapiens
  siRNA target sequence for LRG (NM_052972.1,930-948).
ctgagcgacctctatcgtt

SEQ ID NO: 281801 - DNA, 19 bp, Homo sapiens
  siRNA target sequence for LRPPRC (NM_133259.2,266-284).
gaggagtccactttttctt

SEQ ID NO: 281802 - DNA, 19 bp, Homo sapiens
  siRNA target sequence for LRPPRC (NM_133259.2,269-287).
gagtccactttttcttcta

SEQ ID NO: 281803 - DNA, 19 bp, Homo sapiens
  siRNA target sequence for LRPPRC (NM_133259.2,313-331).
ggctctaatgagactagat

SEQ ID NO: 281804 - DNA, 19 bp, Homo sapiens
  siRNA target sequence for LRPPRC (NM_133259.2,315-333).
ctctaatgagactagatct

SEQ ID NO: 281805 - DNA, 19 bp, Homo sapiens
  siRNA target sequence for LRPPRC (NM_133259.2,364-382).
gaagcttctacaaaaagtt

SEQ ID NO: 281806 - DNA, 19 bp, Homo sapiens
  siRNA target sequence for LRPPRC (NM_133259.2,430-448).
gcttctactacgtagttgt

SEQ ID NO: 281807 - DNA, 19 bp, Homo sapiens
  siRNA target sequence for LRPPRC (NM_133259.2,507-525).
gggacacacttcagaaatt

SEQ ID NO: 281808 - DNA, 19 bp, Homo sapiens
  siRNA target sequence for LRPPRC (NM_133259.2,520-538).
gaaattaggtgctgtgtat

SEQ ID NO: 281809 - DNA, 19 bp, Homo sapiens
  siRNA target sequence for LRPPRC (NM_133259.2,535-553).
gtatgatgtgagtcactat

SEQ ID NO: 281810 - DNA, 19 bp, Homo sapiens
  siRNA target sequence for LRPPRC (NM_133259.2,542-560).
gtgagtcactataatgctt

SEQ ID NO: 281811 - DNA, 19 bp, Homo sapiens
  siRNA target sequence for LRPPRC (NM_133259.2,544-562).
gagtcactataatgcttta

SEQ ID NO: 281812 - DNA, 19 bp, Homo sapiens
  siRNA target sequence for LRPPRC (NM_133259.2,548-566).
cactataatgctttactta

SEQ ID NO: 281813 - DNA, 19 bp, Homo sapiens
  siRNA target sequence for LRPPRC (NM_133259.2,550-568).
ctataatgctttacttaaa

SEQ ID NO: 281814 - DNA, 19 bp, Homo sapiens
  siRNA target sequence for LRPPRC (NM_133259.2,569-587).
gtctatcttcaaaatgaat

SEQ ID NO: 281815 - DNA, 19 bp, Homo sapiens
  siRNA target sequence for LRPPRC (NM_133259.2,661-679).
gagattgattgcttcttat

SEQ ID NO: 281816 - DNA, 19 bp, Homo sapiens
  siRNA target sequence for LRPPRC (NM_133259.2,681-699).
gtaatgtaggagatattga

SEQ ID NO: 281817 - DNA, 19 bp, Homo sapiens
  siRNA target sequence for LRPPRC (NM_133259.2,705-723).
ccagcaagattcttggatt

SEQ ID NO: 281818 - DNA, 19 bp, Homo sapiens
  siRNA target sequence for LRPPRC (NM_133259.2,708-726).
gcaagattcttggatttat

SEQ ID NO: 281819 - DNA, 19 bp, Homo sapiens
  siRNA target sequence for LRPPRC (NM_133259.2,716-734).
cttggatttatgaaaacta

SEQ ID NO: 281820 - DNA, 19 bp, Homo sapiens
  siRNA target sequence for LRPPRC (NM_133259.2,860-878).
gacacatacctcgcattat

SEQ ID NO: 281821 - DNA, 19 bp, Homo sapiens
  siRNA target sequence for LRPPRC (NM_133259.2,864-882).
catacctcgcattattgaa

SEQ ID NO: 281822 - DNA, 19 bp, Homo sapiens
  siRNA target sequence for LRPPRC (NM_133259.2,891-909).
ctgagaagggcgacattga

SEQ ID NO: 281823 - DNA, 19 bp, Homo sapiens
  siRNA target sequence for LRPPRC (NM_133259.2,899-917).
ggcgacattgaccatgtta

SEQ ID NO: 281824 - DNA, 19 bp, Homo sapiens
  siRNA target sequence for LRPPRC (NM_133259.2,900-918).
gcgacattgaccatgttaa

SEQ ID NO: 281825 - DNA, 19 bp, Homo sapiens
  siRNA target sequence for LRPPRC (NM_133259.2,1002-1020).
ctgggtatcctcagtatgt

SEQ ID NO: 281826 - DNA, 19 bp, Homo sapiens
  siRNA target sequence for LRPPRC (NM_133259.2,1004-1022).
gggtatcctcagtatgtct

SEQ ID NO: 281827 - DNA, 19 bp, Homo sapiens
  siRNA target sequence for LRPPRC (NM_133259.2,1109-1127).
gaagatgtagcgttgcaaa

SEQ ID NO: 281828 - DNA, 19 bp, Homo sapiens
  siRNA target sequence for LRPPRC (NM_133259.2,1112-1130).
gatgtagcgttgcaaattt

SEQ ID NO: 281829 - DNA, 19 bp, Homo sapiens
  siRNA target sequence for LRPPRC (NM_133259.2,1133-1151).
ctagcatgccccgtatcaa

SEQ ID NO: 281830 - DNA, 19 bp, Homo sapiens
  siRNA target sequence for LRPPRC (NM_133259.2,1176-1194).
gcagtttctttttacaaca

SEQ ID NO: 281831 - DNA, 19 bp, Homo sapiens
  siRNA target sequence for LRPPRC (NM_133259.2,1190-1208).
caacactgtgtgactatga

SEQ ID NO: 281832 - DNA, 19 bp, Homo sapiens
  siRNA target sequence for LRPPRC (NM_133259.2,1226-1244).
ctaacagactactgtaaga

SEQ ID NO: 281833 - DNA, 19 bp, Homo sapiens
  siRNA target sequence for LRPPRC (NM_133259.2,1230-1248).
cagactactgtaagaagtt

SEQ ID NO: 281834 - DNA, 19 bp, Homo sapiens
  siRNA target sequence for LRPPRC (NM_133259.2,1287-1305).
ccctccattgtgctttact

SEQ ID NO: 281835 - DNA, 19 bp, Homo sapiens
  siRNA target sequence for LRPPRC (NM_133259.2,1296-1314).
gtgctttactcgccaataa

SEQ ID NO: 281836 - DNA, 19 bp, Homo sapiens
  siRNA target sequence for LRPPRC (NM_133259.2,1298-1316).
gctttactcgccaataaaa

SEQ ID NO: 281837 - DNA, 19 bp, Homo sapiens
  siRNA target sequence for LRPPRC (NM_133259.2,1304-1322).
ctcgccaataaaactgatt

SEQ ID NO: 281838 - DNA, 19 bp, Homo sapiens
  siRNA target sequence for LRPPRC (NM_133259.2,1364-1382).
cctatcagacctcactatt

SEQ ID NO: 281839 - DNA, 19 bp, Homo sapiens
  siRNA target sequence for LRPPRC (NM_133259.2,1378-1396).
ctatttctggccattgcta

SEQ ID NO: 281840 - DNA, 19 bp, Homo sapiens
  siRNA target sequence for LRPPRC (NM_133259.2,1397-1415).
gttggacgtcggaaggaaa

SEQ ID NO: 281841 - DNA, 19 bp, Homo sapiens
  siRNA target sequence for LRPPRC (NM_133259.2,1400-1418).
ggacgtcggaaggaaaaaa

SEQ ID NO: 281842 - DNA, 19 bp, Homo sapiens
  siRNA target sequence for LRPPRC (NM_133259.2,1453-1471).
gcaagaattgggagtacat

SEQ ID NO: 281843 - DNA, 19 bp, Homo sapiens
  siRNA target sequence for LRPPRC (NM_133259.2,1469-1487).
catcctgatcaggaaacat

SEQ ID NO: 281844 - DNA, 19 bp, Homo sapiens
  siRNA target sequence for LRPPRC (NM_133259.2,1472-1490).
cctgatcaggaaacatata

SEQ ID NO: 281845 - DNA, 19 bp, Homo sapiens
  siRNA target sequence for LRPPRC (NM_133259.2,1501-1519).
gattccatgctttgatagt

SEQ ID NO: 281846 - DNA, 19 bp, Homo sapiens
  siRNA target sequence for LRPPRC (NM_133259.2,1506-1524).
catgctttgatagtgtaaa

SEQ ID NO: 281847 - DNA, 19 bp, Homo sapiens
  siRNA target sequence for LRPPRC (NM_133259.2,1554-1572).
gatgtctgtctgatagtga

SEQ ID NO: 281848 - DNA, 19 bp, Homo sapiens
  siRNA target sequence for LRPPRC (NM_133259.2,1613-1631).
gggaacttagactttgtat

SEQ ID NO: 281849 - DNA, 19 bp, Homo sapiens
  siRNA target sequence for LRPPRC (NM_133259.2,1614-1632).
ggaacttagactttgtatt

SEQ ID NO: 281850 - DNA, 19 bp, Homo sapiens
  siRNA target sequence for LRPPRC (NM_133259.2,1615-1633).
gaacttagactttgtatta

SEQ ID NO: 281851 - DNA, 19 bp, Homo sapiens
  siRNA target sequence for LRPPRC (NM_133259.2,1660-1678).
catctcgctgcagtctata

SEQ ID NO: 281852 - DNA, 19 bp, Homo sapiens
  siRNA target sequence for LRPPRC (NM_133259.2,1663-1681).
ctcgctgcagtctataaga

SEQ ID NO: 281853 - DNA, 19 bp, Homo sapiens
  siRNA target sequence for LRPPRC (NM_133259.2,1704-1722).
ggaggtctatgaatataaa

SEQ ID NO: 281854 - DNA, 19 bp, Homo sapiens
  siRNA target sequence for LRPPRC (NM_133259.2,1708-1726).
gtctatgaatataaatctt

SEQ ID NO: 281855 - DNA, 19 bp, Homo sapiens
  siRNA target sequence for LRPPRC (NM_133259.2,1728-1746).
ggagcgagataacagaatt

SEQ ID NO: 281856 - DNA, 19 bp, Homo sapiens
  siRNA target sequence for LRPPRC (NM_133259.2,1750-1768).
gtacaaggatggacgttat

SEQ ID NO: 281857 - DNA, 19 bp, Homo sapiens
  siRNA target sequence for LRPPRC (NM_133259.2,1791-1809).
cggaagctgttggctattt

SEQ ID NO: 281858 - DNA, 19 bp, Homo sapiens
  siRNA target sequence for LRPPRC (NM_133259.2,1797-1815).
ctgttggctattttcttta

SEQ ID NO: 281859 - DNA, 19 bp, Homo sapiens
  siRNA target sequence for LRPPRC (NM_133259.2,1811-1829).
ctttataacttgattgaca

SEQ ID NO: 281860 - DNA, 19 bp, Homo sapiens
  siRNA target sequence for LRPPRC (NM_133259.2,1862-1880).
gagcatttgagacaatact

SEQ ID NO: 281861 - DNA, 19 bp, Homo sapiens
  siRNA target sequence for LRPPRC (NM_133259.2,1897-1915).
gatgaatgtaaaaattcct

SEQ ID NO: 281862 - DNA, 19 bp, Homo sapiens
  siRNA target sequence for LRPPRC (NM_133259.2,2030-2048).
caacttacatcatctgaat

SEQ ID NO: 281863 - DNA, 19 bp, Homo sapiens
  siRNA target sequence for LRPPRC (NM_133259.2,2050-2068).
ggagtccacacttgaaaca

SEQ ID NO: 281864 - DNA, 19 bp, Homo sapiens
  siRNA target sequence for LRPPRC (NM_133259.2,2088-2106).
ctataagagatgtcctaaa

SEQ ID NO: 281865 - DNA, 19 bp, Homo sapiens
  siRNA target sequence for LRPPRC (NM_133259.2,2099-2117).
gtcctaaagcaactcatat

SEQ ID NO: 281866 - DNA, 19 bp, Homo sapiens
  siRNA target sequence for LRPPRC (NM_133259.2,2113-2131).
catattagtgctttgttca

SEQ ID NO: 281867 - DNA, 19 bp, Homo sapiens
  siRNA target sequence for LRPPRC (NM_133259.2,2192-2210).
ggtggctatgcagctttaa

SEQ ID NO: 281868 - DNA, 19 bp, Homo sapiens
  siRNA target sequence for LRPPRC (NM_133259.2,2196-2214).
gctatgcagctttaataaa

SEQ ID NO: 281869 - DNA, 19 bp, Homo sapiens
  siRNA target sequence for LRPPRC (NM_133259.2,2220-2238).
gctgtcgacatgataaagt

SEQ ID NO: 281870 - DNA, 19 bp, Homo sapiens
  siRNA target sequence for LRPPRC (NM_133259.2,2221-2239).
ctgtcgacatgataaagta

SEQ ID NO: 281871 - DNA, 19 bp, Homo sapiens
  siRNA target sequence for LRPPRC (NM_133259.2,2223-2241).
gtcgacatgataaagtaga

SEQ ID NO: 281872 - DNA, 19 bp, Homo sapiens
  siRNA target sequence for LRPPRC (NM_133259.2,2264-2282).
gaatttgaccgcttagatt

SEQ ID NO: 281873 - DNA, 19 bp, Homo sapiens
  siRNA target sequence for LRPPRC (NM_133259.2,2308-2326).
gtatgtaggccttgtaaga

SEQ ID NO: 281874 - DNA, 19 bp, Homo sapiens
  siRNA target sequence for LRPPRC (NM_133259.2,2312-2330).
gtaggccttgtaagagtat

SEQ ID NO: 281875 - DNA, 19 bp, Homo sapiens
  siRNA target sequence for LRPPRC (NM_133259.2,2343-2361).
gcaagctccaagatgctat

SEQ ID NO: 281876 - DNA, 19 bp, Homo sapiens
  siRNA target sequence for LRPPRC (NM_133259.2,2409-2427).
caacagccttgtccttttt

SEQ ID NO: 281877 - DNA, 19 bp, Homo sapiens
  siRNA target sequence for LRPPRC (NM_133259.2,2434-2452).
gctaaatggcgcagcttta

SEQ ID NO: 281878 - DNA, 19 bp, Homo sapiens
  siRNA target sequence for LRPPRC (NM_133259.2,2454-2472).
gaggtgaaattgaaacagt

SEQ ID NO: 281879 - DNA, 19 bp, Homo sapiens
  siRNA target sequence for LRPPRC (NM_133259.2,2513-2531).
gaaccatccaccaacataa

SEQ ID NO: 281880 - DNA, 19 bp, Homo sapiens
  siRNA target sequence for LRPPRC (NM_133259.2,2558-2576).
gaaaagggcgacctatcta

SEQ ID NO: 281881 - DNA, 19 bp, Homo sapiens
  siRNA target sequence for LRPPRC (NM_133259.2,2582-2600).
cttgaggtcgccattgact

SEQ ID NO: 281882 - DNA, 19 bp, Homo sapiens
  siRNA target sequence for LRPPRC (NM_133259.2,2597-2615).
gactgctatgaaaagtata

SEQ ID NO: 281883 - DNA, 19 bp, Homo sapiens
  siRNA target sequence for LRPPRC (NM_133259.2,2664-2682).
gcgagactgatctaattca

SEQ ID NO: 281884 - DNA, 19 bp, Homo sapiens
  siRNA target sequence for LRPPRC (NM_133259.2,2728-2746).
gctctatgatctcttcttt

SEQ ID NO: 281885 - DNA, 19 bp, Homo sapiens
  siRNA target sequence for LRPPRC (NM_133259.2,2913-2931).
gtgatagagaccagatgta

SEQ ID NO: 281886 - DNA, 19 bp, Homo sapiens
  siRNA target sequence for LRPPRC (NM_133259.2,2919-2937).
gagaccagatgtactacaa

SEQ ID NO: 281887 - DNA, 19 bp, Homo sapiens
  siRNA target sequence for LRPPRC (NM_133259.2,2929-2947).
gtactacaatctgctaaaa

SEQ ID NO: 281888 - DNA, 19 bp, Homo sapiens
  siRNA target sequence for LRPPRC (NM_133259.2,2985-3003).
cagtctggaataaaatcca

SEQ ID NO: 281889 - DNA, 19 bp, Homo sapiens
  siRNA target sequence for LRPPRC (NM_133259.2,3014-3032).
gttattcctcgtgaaaaga

SEQ ID NO: 281890 - DNA, 19 bp, Homo sapiens
  siRNA target sequence for LRPPRC (NM_133259.2,3023-3041).
cgtgaaaagacattaagat

SEQ ID NO: 281891 - DNA, 19 bp, Homo sapiens
  siRNA target sequence for LRPPRC (NM_133259.2,3031-3049).
gacattaagattattagca

SEQ ID NO: 281892 - DNA, 19 bp, Homo sapiens
  siRNA target sequence for LRPPRC (NM_133259.2,3155-3173).
cctgatttccagaaagata

SEQ ID NO: 281893 - DNA, 19 bp, Homo sapiens
  siRNA target sequence for LRPPRC (NM_133259.2,3182-3200).
gcctgccgattgaaccaaa

SEQ ID NO: 281894 - DNA, 19 bp, Homo sapiens
  siRNA target sequence for LRPPRC (NM_133259.2,3183-3201).
cctgccgattgaaccaaaa

SEQ ID NO: 281895 - DNA, 19 bp, Homo sapiens
  siRNA target sequence for LRPPRC (NM_133259.2,3184-3202).
ctgccgattgaaccaaaaa

SEQ ID NO: 281896 - DNA, 19 bp, Homo sapiens
  siRNA target sequence for LRPPRC (NM_133259.2,3207-3225).
gggcatatgatattttcct

SEQ ID NO: 281897 - DNA, 19 bp, Homo sapiens
  siRNA target sequence for LRPPRC (NM_133259.2,3270-3288).
gcaatctcattaaattact

SEQ ID NO: 281898 - DNA, 19 bp, Homo sapiens
  siRNA target sequence for LRPPRC (NM_133259.2,3376-3394).
caacagccgcctcatcata

SEQ ID NO: 281899 - DNA, 19 bp, Homo sapiens
  siRNA target sequence for LRPPRC (NM_133259.2,3386-3404).
ctcatcataacgcaagtta

SEQ ID NO: 281900 - DNA, 19 bp, Homo sapiens
  siRNA target sequence for LRPPRC (NM_133259.2,3397-3415).
gcaagttaggcgggattat

SEQ ID NO: 281901 - DNA, 19 bp, Homo sapiens
  siRNA target sequence for LRPPRC (NM_133259.2,3398-3416).
caagttaggcgggattatt

SEQ ID NO: 281902 - DNA, 19 bp, Homo sapiens
  siRNA target sequence for LRPPRC (NM_133259.2,3401-3419).
gttaggcgggattatttga

SEQ ID NO: 281903 - DNA, 19 bp, Homo sapiens
  siRNA target sequence for LRPPRC (NM_133259.2,3514-3532).
gggtgatgttgaaaacata

SEQ ID NO: 281904 - DNA, 19 bp, Homo sapiens
  siRNA target sequence for LRPPRC (NM_133259.2,3634-3652).
catagatgccgcaatagaa

SEQ ID NO: 281905 - DNA, 19 bp, Homo sapiens
  siRNA target sequence for LRPPRC (NM_133259.2,3642-3660).
ccgcaatagaaaacattga

SEQ ID NO: 281906 - DNA, 19 bp, Homo sapiens
  siRNA target sequence for LRPPRC (NM_133259.2,3643-3661).
cgcaatagaaaacattgaa

SEQ ID NO: 281907 - DNA, 19 bp, Homo sapiens
  siRNA target sequence for LRPPRC (NM_133259.2,3686-3704).
gtcattgaaccccaatact

SEQ ID NO: 281908 - DNA, 19 bp, Homo sapiens
  siRNA target sequence for LRPPRC (NM_133259.2,3703-3721).
cttcggcttggcatactta

SEQ ID NO: 281909 - DNA, 19 bp, Homo sapiens
  siRNA target sequence for LRPPRC (NM_133259.2,3707-3725).
ggcttggcatacttattca

SEQ ID NO: 281910 - DNA, 19 bp, Homo sapiens
  siRNA target sequence for LRPPRC (NM_133259.2,3771-3789).
gcatcatggcggagagatt

SEQ ID NO: 281911 - DNA, 19 bp, Homo sapiens
  siRNA target sequence for LRPPRC (NM_133259.2,3782-3800).
gagagattggccaatcagt

SEQ ID NO: 281912 - DNA, 19 bp, Homo sapiens
  siRNA target sequence for LRPPRC (NM_133259.2,3784-3802).
gagattggccaatcagttt

SEQ ID NO: 281913 - DNA, 19 bp, Homo sapiens
  siRNA target sequence for LRPPRC (NM_133259.2,3791-3809).
gccaatcagtttgcaattt

SEQ ID NO: 281914 - DNA, 19 bp, Homo sapiens
  siRNA target sequence for LRPPRC (NM_133259.2,3905-3923).
caaaccccgattttgttgt

SEQ ID NO: 281915 - DNA, 19 bp, Homo sapiens
  siRNA target sequence for LRPPRC (NM_133259.2,4073-4091).
gcactgtatgaacatttga

SEQ ID NO: 281916 - DNA, 19 bp, Homo sapiens
  siRNA target sequence for LRPPRC (NM_133259.2,4085-4103).
catttgactgcaaagaata

SEQ ID NO: 281917 - DNA, 19 bp, Homo sapiens
  siRNA target sequence for LY6G5B (NM_021221.1,890-908).
gatcaccatctattatgat

SEQ ID NO: 281918 - DNA, 19 bp, Homo sapiens
  siRNA target sequence for LY6G5B (NM_021221.1,931-949).
gaggctgtggacagtacat

SEQ ID NO: 281919 - DNA, 19 bp, Homo sapiens
  siRNA target sequence for LY6G5B (NM_021221.1,933-951).
ggctgtggacagtacattt

SEQ ID NO: 281920 - DNA, 19 bp, Homo sapiens
  siRNA target sequence for LY6G5B (NM_021221.1,937-955).
gtggacagtacatttccta

SEQ ID NO: 281921 - DNA, 19 bp, Homo sapiens
  siRNA target sequence for LY6G5B (NM_021221.1,952-970).
cctaccgctgccaagaaaa

SEQ ID NO: 281922 - DNA, 19 bp, Homo sapiens
  siRNA target sequence for LY6G5B (NM_021221.1,1256-1274).
cttgttcctcaatagttca

SEQ ID NO: 281923 - DNA, 19 bp, Homo sapiens
  siRNA target sequence for LY9 (NM_002348.1,144-162).
cctgctcatgggactaaga

SEQ ID NO: 281924 - DNA, 19 bp, Homo sapiens
  siRNA target sequence for LY9 (NM_002348.1,297-315).
cgcacgtcccaaagaaaat

SEQ ID NO: 281925 - DNA, 19 bp, Homo sapiens
  siRNA target sequence for LY9 (NM_002348.1,299-317).
cacgtcccaaagaaaatgt

SEQ ID NO: 281926 - DNA, 19 bp, Homo sapiens
  siRNA target sequence for LY9 (NM_002348.1,316-334).
gtaaccattatggtcaaaa

SEQ ID NO: 281927 - DNA, 19 bp, Homo sapiens
  siRNA target sequence for LY9 (NM_002348.1,376-394).
ctgtgcatcagcaatctga

SEQ ID NO: 281928 - DNA, 19 bp, Homo sapiens
  siRNA target sequence for LY9 (NM_002348.1,736-754).
catgttgggcagttctgta

SEQ ID NO: 281929 - DNA, 19 bp, Homo sapiens
  siRNA target sequence for LY9 (NM_002348.1,868-886).
gtctggttgtttaacacat

SEQ ID NO: 281930 - DNA, 19 bp, Homo sapiens
  siRNA target sequence for LY9 (NM_002348.1,876-894).
gtttaacacatccatcatt

SEQ ID NO: 281931 - DNA, 19 bp, Homo sapiens
  siRNA target sequence for LY9 (NM_002348.1,882-900).
cacatccatcattagcaaa

SEQ ID NO: 281932 - DNA, 19 bp, Homo sapiens
  siRNA target sequence for LY9 (NM_002348.1,920-938).
cggcagatccactcattaa

SEQ ID NO: 281933 - DNA, 19 bp, Homo sapiens
  siRNA target sequence for LY9 (NM_002348.1,1190-1208).
ggggaaacactgtcatgta

SEQ ID NO: 281934 - DNA, 19 bp, Homo sapiens
  siRNA target sequence for LY9 (NM_002348.1,1192-1210).
ggaaacactgtcatgtaca

SEQ ID NO: 281935 - DNA, 19 bp, Homo sapiens
  siRNA target sequence for LY9 (NM_002348.1,1364-1382).
gttcaggacctgagagaaa

SEQ ID NO: 281936 - DNA, 19 bp, Homo sapiens
  siRNA target sequence for LY9 (NM_002348.1,1369-1387).
ggacctgagagaaacacaa

SEQ ID NO: 281937 - DNA, 19 bp, Homo sapiens
  siRNA target sequence for LY9 (NM_002348.1,1370-1388).
gacctgagagaaacacaaa

SEQ ID NO: 281938 - DNA, 19 bp, Homo sapiens
  siRNA target sequence for LY9 (NM_002348.1,1534-1552).
gctggccacacgctatact

SEQ ID NO: 281939 - DNA, 19 bp, Homo sapiens
  siRNA target sequence for LY9 (NM_002348.1,1553-1571).
ctgtgctctcccaaggata

SEQ ID NO: 281940 - DNA, 19 bp, Homo sapiens
  siRNA target sequence for LY9 (NM_002348.1,1780-1798).
cccgtcactccatatgtca

SEQ ID NO: 281941 - DNA, 19 bp, Homo sapiens
  siRNA target sequence for LY9 (NM_002348.1,1790-1808).
catatgtcacggaagttga

SEQ ID NO: 281942 - DNA, 19 bp, Homo sapiens
  siRNA target sequence for LY9 (NM_002348.1,1966-1984).
gaaagtcctacctatgaaa

SEQ ID NO: 281943 - DNA, 19 bp, Homo sapiens
  siRNA target sequence for MAC30 (NM_014573.1,492-510).
cgatactctccacatttct

SEQ ID NO: 281944 - DNA, 19 bp, Homo sapiens
  siRNA target sequence for MAC30 (NM_014573.1,613-631).
cccattcatacttttaatt

SEQ ID NO: 281945 - DNA, 19 bp, Homo sapiens
  siRNA target sequence for MAC30 (NM_014573.1,645-663).
gcccctactacaagtatga

SEQ ID NO: 281946 - DNA, 19 bp, Homo sapiens
  siRNA target sequence for MAD1L1 (NM_003550.1,192-210).
ggggaaaacaccatggttt

SEQ ID NO: 281947 - DNA, 19 bp, Homo sapiens
  siRNA target sequence for MAD1L1 (NM_003550.1,193-211).
gggaaaacaccatggtttt

SEQ ID NO: 281948 - DNA, 19 bp, Homo sapiens
  siRNA target sequence for MAD1L1 (NM_003550.1,194-212).
ggaaaacaccatggtttta

SEQ ID NO: 281949 - DNA, 19 bp, Homo sapiens
  siRNA target sequence for MAD1L1 (NM_003550.1,195-213).
gaaaacaccatggttttat

SEQ ID NO: 281950 - DNA, 19 bp, Homo sapiens
  siRNA target sequence for MAD1L1 (NM_003550.1,574-592).
ggcagtgtcagcagaactt

SEQ ID NO: 281951 - DNA, 19 bp, Homo sapiens
  siRNA target sequence for MAD1L1 (NM_003550.1,758-776).
gctggacctgcaacacaaa

SEQ ID NO: 281952 - DNA, 19 bp, Homo sapiens
  siRNA target sequence for MAD1L1 (NM_003550.1,762-780).
gacctgcaacacaaaaaat

SEQ ID NO: 281953 - DNA, 19 bp, Homo sapiens
  siRNA target sequence for MAD1L1 (NM_003550.1,837-855).
gaccacgagcagcagatta

SEQ ID NO: 281954 - DNA, 19 bp, Homo sapiens
  siRNA target sequence for MAD1L1 (NM_003550.1,888-906).
caggatgcagcgattgtga

SEQ ID NO: 281955 - DNA, 19 bp, Homo sapiens
  siRNA target sequence for MAD1L1 (NM_003550.1,2026-2044).
ggctcaaggaggttttcca

SEQ ID NO: 281956 - DNA, 19 bp, Homo sapiens
  siRNA target sequence for MAGEA4 (NM_002362.3,552-570).
gtaacaaggtggatgagtt

SEQ ID NO: 281957 - DNA, 19 bp, Homo sapiens
  siRNA target sequence for MAGEA4 (NM_002362.3,793-811).
gggtaataatcagatcttt

SEQ ID NO: 281958 - DNA, 19 bp, Homo sapiens
  siRNA target sequence for MAGEA4 (NM_002362.3,835-853).
cgtcctgggcacaattgca

SEQ ID NO: 281959 - DNA, 19 bp, Homo sapiens
  siRNA target sequence for MAGEA4 (NM_002362.3,836-854).
gtcctgggcacaattgcaa

SEQ ID NO: 281960 - DNA, 19 bp, Homo sapiens
  siRNA target sequence for MAGEA5 (NM_021049.2,421-439).
cactgccatcgatttcact

SEQ ID NO: 281961 - DNA, 19 bp, Homo sapiens
  siRNA target sequence for MAGEA5 (NM_021049.2,425-443).
gccatcgatttcactctat

SEQ ID NO: 281962 - DNA, 19 bp, Homo sapiens
  siRNA target sequence for MAGEA5 (NM_021049.2,438-456).
ctctatggaggcaatccat

SEQ ID NO: 281963 - DNA, 19 bp, Homo sapiens
  siRNA target sequence for MAGEA9 (NM_005365.4,825-843).
gcctctcgtgcgatagcat

SEQ ID NO: 281964 - DNA, 19 bp, Homo sapiens
  siRNA target sequence for MAGEL2 (NM_019066.2,471-489).
cagctacctcccagtttca

SEQ ID NO: 281965 - DNA, 19 bp, Homo sapiens
  siRNA target sequence for MAGEL2 (NM_019066.2,606-624).
gggtcccacagcccaatat

SEQ ID NO: 281966 - DNA, 19 bp, Homo sapiens
  siRNA target sequence for MAGEL2 (NM_019066.2,608-626).
gtcccacagcccaatatga

SEQ ID NO: 281967 - DNA, 19 bp, Homo sapiens
  siRNA target sequence for MAGEL2 (NM_019066.2,610-628).
cccacagcccaatatgaat

SEQ ID NO: 281968 - DNA, 19 bp, Homo sapiens
  siRNA target sequence for MAGEL2 (NM_019066.2,799-817).
ccacacgctagcctttcat

SEQ ID NO: 281969 - DNA, 19 bp, Homo sapiens
  siRNA target sequence for MAGEL2 (NM_019066.2,834-852).
ggccctgggagaatctaaa

SEQ ID NO: 281970 - DNA, 19 bp, Homo sapiens
  siRNA target sequence for MAGEL2 (NM_019066.2,1249-1267).
cctccgagagtataaagat

SEQ ID NO: 281971 - DNA, 19 bp, Homo sapiens
  siRNA target sequence for MAGEL2 (NM_019066.2,1268-1286).
gagtgcttagatatcatca

SEQ ID NO: 281972 - DNA, 19 bp, Homo sapiens
  siRNA target sequence for MAGEL2 (NM_019066.2,1315-1333).
ctttggttatcaattgaaa

SEQ ID NO: 281973 - DNA, 19 bp, Homo sapiens
  siRNA target sequence for MAGEL2 (NM_019066.2,1319-1337).
ggttatcaattgaaagaaa

SEQ ID NO: 281974 - DNA, 19 bp, Homo sapiens
  siRNA target sequence for MAGEL2 (NM_019066.2,1320-1338).
gttatcaattgaaagaaat

SEQ ID NO: 281975 - DNA, 19 bp, Homo sapiens
  siRNA target sequence for MAGEL2 (NM_019066.2,1344-1362).
ccaaaaaccacgcctatat

SEQ ID NO: 281976 - DNA, 19 bp, Homo sapiens
  siRNA target sequence for MAGEL2 (NM_019066.2,1380-1398).
gctaccatacagggaattt

SEQ ID NO: 281977 - DNA, 19 bp, Homo sapiens
  siRNA target sequence for MAGEL2 (NM_019066.2,1393-1411).
gaatttggtggcatcctat

SEQ ID NO: 281978 - DNA, 19 bp, Homo sapiens
  siRNA target sequence for MAGEL2 (NM_019066.2,1400-1418).
gtggcatcctatttagaca

SEQ ID NO: 281979 - DNA, 19 bp, Homo sapiens
  siRNA target sequence for MAGEL2 (NM_019066.2,1444-1462).
ggtcttgagcctcatcttt

SEQ ID NO: 281980 - DNA, 19 bp, Homo sapiens
  siRNA target sequence for MAGEL2 (NM_019066.2,1476-1494).
gtgtcagggaggatctgat

SEQ ID NO: 281981 - DNA, 19 bp, Homo sapiens
  siRNA target sequence for MAGEL2 (NM_019066.2,1482-1500).
gggaggatctgatctttaa

SEQ ID NO: 281982 - DNA, 19 bp, Homo sapiens
  siRNA target sequence for MAGEL2 (NM_019066.2,1531-1549).
ggagacaaacggtctcttt

SEQ ID NO: 281983 - DNA, 19 bp, Homo sapiens
  siRNA target sequence for MAGEL2 (NM_019066.2,1536-1554).
caaacggtctctttggaaa

SEQ ID NO: 281984 - DNA, 19 bp, Homo sapiens
  siRNA target sequence for MAGEL2 (NM_019066.2,1606-1624).
caggcgaatcccttacact

SEQ ID NO: 281985 - DNA, 19 bp, Homo sapiens
  siRNA target sequence for MAGEL2 (NM_019066.2,1621-1639).
cactgagcccgcagagtat

SEQ ID NO: 281986 - DNA, 19 bp, Homo sapiens
  siRNA target sequence for MAGEL2 (NM_019066.2,1623-1641).
ctgagcccgcagagtatga

SEQ ID NO: 281987 - DNA, 19 bp, Homo sapiens
  siRNA target sequence for MAGEL2 (NM_019066.2,1625-1643).
gagcccgcagagtatgagt

SEQ ID NO: 281988 - DNA, 19 bp, Homo sapiens
  siRNA target sequence for MAGEL2 (NM_019066.2,1702-1720).
ggccaagctccataagaaa

SEQ ID NO: 281989 - DNA, 19 bp, Homo sapiens
  siRNA target sequence for MAGEL2 (NM_019066.2,1705-1723).
caagctccataagaaagat

SEQ ID NO: 281990 - DNA, 19 bp, Homo sapiens
  siRNA target sequence for MAGEL2 (NM_019066.2,1731-1749).
gctggccattccattacct

SEQ ID NO: 281991 - DNA, 19 bp, Homo sapiens
  siRNA target sequence for MAGEL2 (NM_019066.2,1732-1750).
ctggccattccattacctt

SEQ ID NO: 281992 - DNA, 19 bp, Homo sapiens
  siRNA target sequence for Magmas (NM_016069.8,287-305).
gaagaactatgaacactta

SEQ ID NO: 281993 - DNA, 19 bp, Homo sapiens
  siRNA target sequence for MCSP (NM_030663.2,179-197).
ccagcaaaaggcaatcaat

SEQ ID NO: 281994 - DNA, 19 bp, Homo sapiens
  siRNA target sequence for MCSP (NM_030663.2,380-398).
gaagtctcaccccttaaca

SEQ ID NO: 281995 - DNA, 19 bp, Homo sapiens
  siRNA target sequence for MCSP (NM_030663.2,457-475).
gccccatagcccacaaaat

SEQ ID NO: 281996 - DNA, 19 bp, Homo sapiens
  siRNA target sequence for MCSP (NM_030663.2,461-479).
catagcccacaaaatgagt

SEQ ID NO: 281997 - DNA, 19 bp, Homo sapiens
  siRNA target sequence for MCSP (NM_030663.2,476-494).
gagtccaggccaagcaaat

SEQ ID NO: 281998 - DNA, 19 bp, Homo sapiens
  siRNA target sequence for MFAP4 (NM_002404.1,142-160).
ggactgtgacgacatctat

SEQ ID NO: 281999 - DNA, 19 bp, Homo sapiens
  siRNA target sequence for MFAP4 (NM_002404.1,255-273).
ggaagtggacggttttcca

SEQ ID NO: 282000 - DNA, 19 bp, Homo sapiens
  siRNA target sequence for MGC13272 (NM_032355.2,277-295).
cacattgactccttctgat

SEQ ID NO: 282001 - DNA, 19 bp, Homo sapiens
  siRNA target sequence for MGC13272 (NM_032355.2,494-512).
cagatcagccaggacttta

SEQ ID NO: 282002 - DNA, 19 bp, Homo sapiens
  siRNA target sequence for MGC13272 (NM_032355.2,842-860).
gatggctacaaggtagtat

SEQ ID NO: 282003 - DNA, 19 bp, Homo sapiens
  siRNA target sequence for MGC13272 (NM_032355.2,846-864).
gctacaaggtagtattcgt

SEQ ID NO: 282004 - DNA, 19 bp, Homo sapiens
  siRNA target sequence for MGC13272 (NM_032355.2,953-971).
cagatcctaagccttctta

SEQ ID NO: 282005 - DNA, 19 bp, Homo sapiens
  siRNA target sequence for MGC13272 (NM_032355.2,1001-1019).
cagaagcagaactatgatt

SEQ ID NO: 282006 - DNA, 19 bp, Homo sapiens
  siRNA target sequence for MGC13272 (NM_032355.2,1328-1346).
gtgtgcctgcccaaattca

SEQ ID NO: 282007 - DNA, 19 bp, Homo sapiens
  siRNA target sequence for MGC13272 (NM_032355.2,1366-1384).
cgcacacatctcttaccta

SEQ ID NO: 282008 - DNA, 19 bp, Homo sapiens
  siRNA target sequence for MGC13272 (NM_032355.2,1565-1583).
cgtcacttcctctataagt

SEQ ID NO: 282009 - DNA, 19 bp, Homo sapiens
  siRNA target sequence for MGC13272 (NM_032355.2,1703-1721).
cgcccactcaagaccattt

SEQ ID NO: 282010 - DNA, 19 bp, Homo sapiens
  siRNA target sequence for MGC13272 (NM_032355.2,1704-1722).
gcccactcaagaccattta

SEQ ID NO: 282011 - DNA, 19 bp, Homo sapiens
  siRNA target sequence for MGC13272 (NM_032355.2,1706-1724).
ccactcaagaccatttact

SEQ ID NO: 282012 - DNA, 19 bp, Homo sapiens
  siRNA target sequence for MGC13272 (NM_032355.2,1707-1725).
cactcaagaccatttacta

SEQ ID NO: 282013 - DNA, 19 bp, Homo sapiens
  siRNA target sequence for MGC13272 (NM_032355.2,1709-1727).
ctcaagaccatttactaca

SEQ ID NO: 282014 - DNA, 19 bp, Homo sapiens
  siRNA target sequence for MGC13272 (NM_032355.2,1764-1782).
gcgcctttgagctctacat

SEQ ID NO: 282015 - DNA, 19 bp, Homo sapiens
  siRNA target sequence for MGC13272 (NM_032355.2,1766-1784).
gcctttgagctctacatgt

SEQ ID NO: 282016 - DNA, 19 bp, Homo sapiens
  siRNA target sequence for MGC13272 (NM_032355.2,1772-1790).
gagctctacatgtgttaca

SEQ ID NO: 282017 - DNA, 19 bp, Homo sapiens
  siRNA target sequence for MGC13272 (NM_032355.2,1815-1833).
ccgtcagtgccatccataa

SEQ ID NO: 282018 - DNA, 19 bp, Homo sapiens
  siRNA target sequence for MGC13272 (NM_032355.2,1862-1880).
gaccgcctcttcattctca

SEQ ID NO: 282019 - DNA, 19 bp, Homo sapiens
  siRNA target sequence for MGC13272 (NM_032355.2,1877-1895).
ctcacgcccctcacctatt

SEQ ID NO: 282020 - DNA, 19 bp, Homo sapiens
  siRNA target sequence for MGC23947 (NM_152278.1,283-301).
gcccgtatggagaatttga

SEQ ID NO: 282021 - DNA, 19 bp, Homo sapiens
  siRNA target sequence for MGC26979 (NM_153704.2,23-41).
gcggtttggtccctcttat

SEQ ID NO: 282022 - DNA, 19 bp, Homo sapiens
  siRNA target sequence for MGC26979 (NM_153704.2,57-75).
ccgcgttccttctgttgtt

SEQ ID NO: 282023 - DNA, 19 bp, Homo sapiens
  siRNA target sequence for MGC26979 (NM_153704.2,126-144).
cggagaagtgcgacaacaa

SEQ ID NO: 282024 - DNA, 19 bp, Homo sapiens
  siRNA target sequence for MGC26979 (NM_153704.2,135-153).
gcgacaacaaccagtactt

SEQ ID NO: 282025 - DNA, 19 bp, Homo sapiens
  siRNA target sequence for MGC26979 (NM_153704.2,203-221).
gatgcccgaggaacttcat

SEQ ID NO: 282026 - DNA, 19 bp, Homo sapiens
  siRNA target sequence for MGC26979 (NM_153704.2,209-227).
cgaggaacttcatgtgtat

SEQ ID NO: 282027 - DNA, 19 bp, Homo sapiens
  siRNA target sequence for MGC26979 (NM_153704.2,237-255).
gatttcagatgatctctaa

SEQ ID NO: 282028 - DNA, 19 bp, Homo sapiens
  siRNA target sequence for MGC26979 (NM_153704.2,260-278).
ggaggacctgctattattt

SEQ ID NO: 282029 - DNA, 19 bp, Homo sapiens
  siRNA target sequence for MGC26979 (NM_153704.2,263-281).
ggacctgctattatttgta

SEQ ID NO: 282030 - DNA, 19 bp, Homo sapiens
  siRNA target sequence for MGC26979 (NM_153704.2,320-338).
ggctggaactgcatttctt

SEQ ID NO: 282031 - DNA, 19 bp, Homo sapiens
  siRNA target sequence for MGC26979 (NM_153704.2,373-391).
ctgtcccattggccatatt

SEQ ID NO: 282032 - DNA, 19 bp, Homo sapiens
  siRNA target sequence for MGC26979 (NM_153704.2,375-393).
gtcccattggccatatttt

SEQ ID NO: 282033 - DNA, 19 bp, Homo sapiens
  siRNA target sequence for MGC26979 (NM_153704.2,378-396).
ccattggccatattttagt

SEQ ID NO: 282034 - DNA, 19 bp, Homo sapiens
  siRNA target sequence for MGC26979 (NM_153704.2,397-415).
ggaaagagacattaatgga

SEQ ID NO: 282035 - DNA, 19 bp, Homo sapiens
  siRNA target sequence for MGC26979 (NM_153704.2,402-420).
gagacattaatggaacatt

SEQ ID NO: 282036 - DNA, 19 bp, Homo sapiens
  siRNA target sequence for MGC26979 (NM_153704.2,404-422).
gacattaatggaacattgt

SEQ ID NO: 282037 - DNA, 19 bp, Homo sapiens
  siRNA target sequence for MGC26979 (NM_153704.2,546-564).
gttcagaacctaacatttt

SEQ ID NO: 282038 - DNA, 19 bp, Homo sapiens
  siRNA target sequence for MGC26979 (NM_153704.2,663-681).
ggtttgcaaagtatttgca

SEQ ID NO: 282039 - DNA, 19 bp, Homo sapiens
  siRNA target sequence for MGC26979 (NM_153704.2,668-686).
gcaaagtatttgcaatcat

SEQ ID NO: 282040 - DNA, 19 bp, Homo sapiens
  siRNA target sequence for MGC26979 (NM_153704.2,704-722).
gtatatgccaatctaacat

SEQ ID NO: 282041 - DNA, 19 bp, Homo sapiens
  siRNA target sequence for MGC26979 (NM_153704.2,712-730).
caatctaacatcttgtcaa

SEQ ID NO: 282042 - DNA, 19 bp, Homo sapiens
  siRNA target sequence for MGC26979 (NM_153704.2,726-744).
gtcaagctcttggaaatat

SEQ ID NO: 282043 - DNA, 19 bp, Homo sapiens
  siRNA target sequence for MGC26979 (NM_153704.2,789-807).
catgtggactatttcagtt

SEQ ID NO: 282044 - DNA, 19 bp, Homo sapiens
  siRNA target sequence for MGC26979 (NM_153704.2,794-812).
ggactatttcagtttatct

SEQ ID NO: 282045 - DNA, 19 bp, Homo sapiens
  siRNA target sequence for MGC26979 (NM_153704.2,827-845).
ggactgagcactgttcatt

SEQ ID NO: 282046 - DNA, 19 bp, Homo sapiens
  siRNA target sequence for MGC26979 (NM_153704.2,908-926).
cctcaagtgctcagttcta

SEQ ID NO: 282047 - DNA, 19 bp, Homo sapiens
  siRNA target sequence for MGC26979 (NM_153704.2,986-1004).
gttgctgcttcctatgata

SEQ ID NO: 282048 - DNA, 19 bp, Homo sapiens
  siRNA target sequence for MGC26979 (NM_153704.2,989-1007).
gctgcttcctatgatataa

SEQ ID NO: 282049 - DNA, 19 bp, Homo sapiens
  siRNA target sequence for MGC26979 (NM_153704.2,1066-1084).
cacagagacaaggctaaat

SEQ ID NO: 282050 - DNA, 19 bp, Homo sapiens
  siRNA target sequence for MGC26979 (NM_153704.2,1100-1118).
ggaacaacctaccaacaaa

SEQ ID NO: 282051 - DNA, 19 bp, Homo sapiens
  siRNA target sequence for MGC26979 (NM_153704.2,1107-1125).
cctaccaacaaaattgtga

SEQ ID NO: 282052 - DNA, 19 bp, Homo sapiens
  siRNA target sequence for MGC26979 (NM_153704.2,1130-1148).
cctatctctaagatcttaa

SEQ ID NO: 282053 - DNA, 19 bp, Homo sapiens
  siRNA target sequence for MGC26979 (NM_153704.2,1137-1155).
ctaagatcttaattgactt

SEQ ID NO: 282054 - DNA, 19 bp, Homo sapiens
  siRNA target sequence for MGC26979 (NM_153704.2,1161-1179).
ctcctatattttatgatgt

SEQ ID NO: 282055 - DNA, 19 bp, Homo sapiens
  siRNA target sequence for MGC26979 (NM_153704.2,1224-1242).
ctgtgcctgtgttaaacct

SEQ ID NO: 282056 - DNA, 19 bp, Homo sapiens
  siRNA target sequence for MGC26979 (NM_153704.2,1228-1246).
gcctgtgttaaacctaaat

SEQ ID NO: 282057 - DNA, 19 bp, Homo sapiens
  siRNA target sequence for MGC26979 (NM_153704.2,1234-1252).
gttaaacctaaatcttcaa

SEQ ID NO: 282058 - DNA, 19 bp, Homo sapiens
  siRNA target sequence for MGC26979 (NM_153704.2,1247-1265).
cttcaacataataagatat

SEQ ID NO: 282059 - DNA, 19 bp, Homo sapiens
  siRNA target sequence for MGC26979 (NM_153704.2,1305-1323).
ctcggcgcattttcttagt

SEQ ID NO: 282060 - DNA, 19 bp, Homo sapiens
  siRNA target sequence for MGC26979 (NM_153704.2,1318-1336).
cttagtggatgcagtaagt

SEQ ID NO: 282061 - DNA, 19 bp, Homo sapiens
  siRNA target sequence for MGC26979 (NM_153704.2,1340-1358).
cgagaaaatgacttaggaa

SEQ ID NO: 282062 - DNA, 19 bp, Homo sapiens
  siRNA target sequence for MGC26979 (NM_153704.2,1406-1424).
caccttgtacccaacacaa

SEQ ID NO: 282063 - DNA, 19 bp, Homo sapiens
  siRNA target sequence for MGC26979 (NM_153704.2,1465-1483).
cagtgacattgatatcaaa

SEQ ID NO: 282064 - DNA, 19 bp, Homo sapiens
  siRNA target sequence for MGC26979 (NM_153704.2,1496-1514).
cagtctgtgaaggtttctt

SEQ ID NO: 282065 - DNA, 19 bp, Homo sapiens
  siRNA target sequence for MGC26979 (NM_153704.2,1512-1530).
ctttctcagtcacatatga

SEQ ID NO: 282066 - DNA, 19 bp, Homo sapiens
  siRNA target sequence for MGC26979 (NM_153704.2,1547-1565).
gcacatgtccagacagata

SEQ ID NO: 282067 - DNA, 19 bp, Homo sapiens
  siRNA target sequence for MGC26979 (NM_153704.2,1582-1600).
gggtgggctagctgtttta

SEQ ID NO: 282068 - DNA, 19 bp, Homo sapiens
  siRNA target sequence for MGC26979 (NM_153704.2,1586-1604).
gggctagctgttttagcat

SEQ ID NO: 282069 - DNA, 19 bp, Homo sapiens
  siRNA target sequence for MGC26979 (NM_153704.2,1646-1664).
cccatgattgatttacaga

SEQ ID NO: 282070 - DNA, 19 bp, Homo sapiens
  siRNA target sequence for MGC26979 (NM_153704.2,1697-1715).
gatctggccaatgttttct

SEQ ID NO: 282071 - DNA, 19 bp, Homo sapiens
  siRNA target sequence for MGC26979 (NM_153704.2,1725-1743).
cagtgggaacaggtcttta

SEQ ID NO: 282072 - DNA, 19 bp, Homo sapiens
  siRNA target sequence for MGC26979 (NM_153704.2,1727-1745).
gtgggaacaggtctttact

SEQ ID NO: 282073 - DNA, 19 bp, Homo sapiens
  siRNA target sequence for MGC26979 (NM_153704.2,1870-1888).
gctcatatcccagattaca

SEQ ID NO: 282074 - DNA, 19 bp, Homo sapiens
  siRNA target sequence for MGC26979 (NM_153704.2,1871-1889).
ctcatatcccagattacaa

SEQ ID NO: 282075 - DNA, 19 bp, Homo sapiens
  siRNA target sequence for MGC26979 (NM_153704.2,1873-1891).
catatcccagattacaata

SEQ ID NO: 282076 - DNA, 19 bp, Homo sapiens
  siRNA target sequence for MGC26979 (NM_153704.2,1972-1990).
cactgttcctgtaagcata

SEQ ID NO: 282077 - DNA, 19 bp, Homo sapiens
  siRNA target sequence for MGC26979 (NM_153704.2,2087-2105).
gaggttgtgggattcaaga

SEQ ID NO: 282078 - DNA, 19 bp, Homo sapiens
  siRNA target sequence for MGC26979 (NM_153704.2,2090-2108).
gttgtgggattcaagaact

SEQ ID NO: 282079 - DNA, 19 bp, Homo sapiens
  siRNA target sequence for MGC26979 (NM_153704.2,2119-2137).
ggactcatcttctagtctt

SEQ ID NO: 282080 - DNA, 19 bp, Homo sapiens
  siRNA target sequence for MGC26979 (NM_153704.2,2120-2138).
gactcatcttctagtcttt

SEQ ID NO: 282081 - DNA, 19 bp, Homo sapiens
  siRNA target sequence for MGC26979 (NM_153704.2,2165-2183).
ccttatagctgcattttga

SEQ ID NO: 282082 - DNA, 19 bp, Homo sapiens
  siRNA target sequence for MGC26979 (NM_153704.2,2204-2222).
ctttggctagccattggaa

SEQ ID NO: 282083 - DNA, 19 bp, Homo sapiens
  siRNA target sequence for MGC26979 (NM_153704.2,2209-2227).
gctagccattggaattata

SEQ ID NO: 282084 - DNA, 19 bp, Homo sapiens
  siRNA target sequence for MGC26979 (NM_153704.2,2279-2297).
cgacagttcgttgatttat

SEQ ID NO: 282085 - DNA, 19 bp, Homo sapiens
  siRNA target sequence for MGC26979 (NM_153704.2,2282-2300).
cagttcgttgatttatgct

SEQ ID NO: 282086 - DNA, 19 bp, Homo sapiens
  siRNA target sequence for MGC26979 (NM_153704.2,2288-2306).
gttgatttatgctctatga

SEQ ID NO: 282087 - DNA, 19 bp, Homo sapiens
  siRNA target sequence for MGC26979 (NM_153704.2,2291-2309).
gatttatgctctatgagta

SEQ ID NO: 282088 - DNA, 19 bp, Homo sapiens
  siRNA target sequence for MGC26979 (NM_153704.2,2331-2349).
cccacaaatgttttggata

SEQ ID NO: 282089 - DNA, 19 bp, Homo sapiens
  siRNA target sequence for MGC26979 (NM_153704.2,2372-2390).
catgggcatgcagatacta

SEQ ID NO: 282090 - DNA, 19 bp, Homo sapiens
  siRNA target sequence for MGC26979 (NM_153704.2,2375-2393).
gggcatgcagatactaata

SEQ ID NO: 282091 - DNA, 19 bp, Homo sapiens
  siRNA target sequence for MGC26979 (NM_153704.2,2376-2394).
ggcatgcagatactaatat

SEQ ID NO: 282092 - DNA, 19 bp, Homo sapiens
  siRNA target sequence for MGC26979 (NM_153704.2,2399-2417).
gaaatgaatatgaacctta

SEQ ID NO: 282093 - DNA, 19 bp, Homo sapiens
  siRNA target sequence for MGC26979 (NM_153704.2,2468-2486).
gatggtcagacttttgaga

SEQ ID NO: 282094 - DNA, 19 bp, Homo sapiens
  siRNA target sequence for MGC26979 (NM_153704.2,2523-2541).
gaattcatgagacactaat

SEQ ID NO: 282095 - DNA, 19 bp, Homo sapiens
  siRNA target sequence for MGC26979 (NM_153704.2,2533-2551).
gacactaataaggaaaaat

SEQ ID NO: 282096 - DNA, 19 bp, Homo sapiens
  siRNA target sequence for MGC26979 (NM_153704.2,2558-2576).
gctagactactgagttcat

SEQ ID NO: 282097 - DNA, 19 bp, Homo sapiens
  siRNA target sequence for MGC26979 (NM_153704.2,2637-2655).
ccttcattgaccatgttca

SEQ ID NO: 282098 - DNA, 19 bp, Homo sapiens
  siRNA target sequence for MGC26979 (NM_153704.2,2651-2669).
gttcataaggaaatggatt

SEQ ID NO: 282099 - DNA, 19 bp, Homo sapiens
  siRNA target sequence for MGC26979 (NM_153704.2,2770-2788).
cagcagtgtcctgtattat

SEQ ID NO: 282100 - DNA, 19 bp, Homo sapiens
  siRNA target sequence for MGC26979 (NM_153704.2,2773-2791).
cagtgtcctgtattatgga

SEQ ID NO: 282101 - DNA, 19 bp, Homo sapiens
  siRNA target sequence for MGC26979 (NM_153704.2,2845-2863).
ggcttgccaaaattttatt

SEQ ID NO: 282102 - DNA, 19 bp, Homo sapiens
  siRNA target sequence for MGC26979 (NM_153704.2,2871-2889).
ccttccttacatatctaca

SEQ ID NO: 282103 - DNA, 19 bp, Homo sapiens
  siRNA target sequence for MGC26979 (NM_153704.2,2872-2890).
cttccttacatatctacaa

SEQ ID NO: 282104 - DNA, 19 bp, Homo sapiens
  siRNA target sequence for MGC26979 (NM_153704.2,2904-2922).
gatatatccgtaatacagt

SEQ ID NO: 282105 - DNA, 19 bp, Homo sapiens
  siRNA target sequence for MGC26979 (NM_153704.2,2949-2967).
cattggtggatcaaagatt

SEQ ID NO: 282106 - DNA, 19 bp, Homo sapiens
  siRNA target sequence for MGC26979 (NM_153704.2,2954-2972).
gtggatcaaagatttttga

SEQ ID NO: 282107 - DNA, 19 bp, Homo sapiens
  siRNA target sequence for MGC26979 (NM_153704.2,2956-2974).
ggatcaaagatttttgatt

SEQ ID NO: 282108 - DNA, 19 bp, Homo sapiens
  siRNA target sequence for MGC29816 (NM_152272.1,150-168).
ctgttctccgctttcaaga

SEQ ID NO: 282109 - DNA, 19 bp, Homo sapiens
  siRNA target sequence for MGC29816 (NM_152272.1,457-475).
ctaacatgctgggagataa

SEQ ID NO: 282110 - DNA, 19 bp, Homo sapiens
  siRNA target sequence for MGC29816 (NM_152272.1,533-551).
ggaggtgtatcgtctgtat

SEQ ID NO: 282111 - DNA, 19 bp, Homo sapiens
  siRNA target sequence for MGC29816 (NM_152272.1,537-555).
gtgtatcgtctgtatcaga

SEQ ID NO: 282112 - DNA, 19 bp, Homo sapiens
  siRNA target sequence for MGC29816 (NM_152272.1,627-645).
gatgagaggaccttctact

SEQ ID NO: 282113 - DNA, 19 bp, Homo sapiens
  siRNA target sequence for MGC29816 (NM_152272.1,748-766).
cagtcaatgacgtagatgt

SEQ ID NO: 282114 - DNA, 19 bp, Homo sapiens
  siRNA target sequence for MGC29816 (NM_152272.1,865-883).
catgccgagcaggaaagaa

SEQ ID NO: 282115 - DNA, 19 bp, Homo sapiens
  siRNA target sequence for MGC29816 (NM_152272.1,1035-1053).
gtaggagcactcaaactct

SEQ ID NO: 282116 - DNA, 19 bp, Homo sapiens
  siRNA target sequence for MGC29816 (NM_152272.1,1118-1136).
cacccaggatgaagtttct

SEQ ID NO: 282117 - DNA, 19 bp, Homo sapiens
  siRNA target sequence for MGC29816 (NM_152272.1,1145-1163).
ggctggtggggtaacaaat

SEQ ID NO: 282118 - DNA, 19 bp, Homo sapiens
  siRNA target sequence for MGC29816 (NM_152272.1,1154-1172).
ggtaacaaatggcttagat

SEQ ID NO: 282119 - DNA, 19 bp, Homo sapiens
  siRNA target sequence for MGC29816 (NM_152272.1,1155-1173).
gtaacaaatggcttagatt

SEQ ID NO: 282120 - DNA, 19 bp, Homo sapiens
  siRNA target sequence for MGC29816 (NM_152272.1,1223-1241).
caccaaagaacctttggat

SEQ ID NO: 282121 - DNA, 19 bp, Homo sapiens
  siRNA target sequence for MGC29816 (NM_152272.1,1257-1275).
cgcaataggcattttacca

SEQ ID NO: 282122 - DNA, 19 bp, Homo sapiens
  siRNA target sequence for MGC29816 (NM_152272.1,1258-1276).
gcaataggcattttaccaa

SEQ ID NO: 282123 - DNA, 19 bp, Homo sapiens
  siRNA target sequence for MGC29816 (NM_152272.1,1355-1373).
ggtcccaagcagtaaatct

SEQ ID NO: 282124 - DNA, 19 bp, Homo sapiens
  siRNA target sequence for MGC29816 (NM_152272.1,1383-1401).
caattggaaccgactctaa

SEQ ID NO: 282125 - DNA, 19 bp, Homo sapiens
  siRNA target sequence for MLF2 (NM_005439.1,241-259).
gatggatccctttgctatt

SEQ ID NO: 282126 - DNA, 19 bp, Homo sapiens
  siRNA target sequence for MLF2 (NM_005439.1,255-273).
ctattcaccgtcagcatat

SEQ ID NO: 282127 - DNA, 19 bp, Homo sapiens
  siRNA target sequence for MLF2 (NM_005439.1,269-287).
catatgagccgtatgttgt

SEQ ID NO: 282128 - DNA, 19 bp, Homo sapiens
  siRNA target sequence for MLF2 (NM_005439.1,286-304).
gtcaggtggctttggatat

SEQ ID NO: 282129 - DNA, 19 bp, Homo sapiens
  siRNA target sequence for MLF2 (NM_005439.1,405-423).
gaatgtcgggtggtttcat

SEQ ID NO: 282130 - DNA, 19 bp, Homo sapiens
  siRNA target sequence for MLF2 (NM_005439.1,512-530).
gtcatctcctactccaata

SEQ ID NO: 282131 - DNA, 19 bp, Homo sapiens
  siRNA target sequence for MLF2 (NM_005439.1,609-627).
ggactgttcgggattcaga

SEQ ID NO: 282132 - DNA, 19 bp, Homo sapiens
  siRNA target sequence for MLF2 (NM_005439.1,685-703).
ccagcgctcccgaaaccat

SEQ ID NO: 282133 - DNA, 19 bp, Homo sapiens
  siRNA target sequence for MLF2 (NM_005439.1,722-740).
gagcggcaggactatatca

SEQ ID NO: 282134 - DNA, 19 bp, Homo sapiens
  siRNA target sequence for MLN51 (NM_007359.3,495-513).
gttctctcggattatgaaa

SEQ ID NO: 282135 - DNA, 19 bp, Homo sapiens
  siRNA target sequence for MLN51 (NM_007359.3,761-779).
gaagaatccagcatacata

SEQ ID NO: 282136 - DNA, 19 bp, Homo sapiens
  siRNA target sequence for MLN51 (NM_007359.3,781-799).
ctcggaaagggctcttctt

SEQ ID NO: 282137 - DNA, 19 bp, Homo sapiens
  siRNA target sequence for MLN51 (NM_007359.3,848-866).
ggggcgtcagcgaaagcta

SEQ ID NO: 282138 - DNA, 19 bp, Homo sapiens
  siRNA target sequence for MLN51 (NM_007359.3,849-867).
gggcgtcagcgaaagctat

SEQ ID NO: 282139 - DNA, 19 bp, Homo sapiens
  siRNA target sequence for MLN51 (NM_007359.3,853-871).
gtcagcgaaagctatggaa

SEQ ID NO: 282140 - DNA, 19 bp, Homo sapiens
  siRNA target sequence for MLN51 (NM_007359.3,880-898).
gtcgctgggagcatgacaa

SEQ ID NO: 282141 - DNA, 19 bp, Homo sapiens
  siRNA target sequence for MLN51 (NM_007359.3,883-901).
gctgggagcatgacaagtt

SEQ ID NO: 282142 - DNA, 19 bp, Homo sapiens
  siRNA target sequence for MLN51 (NM_007359.3,935-953).
ggagctcattgctctttat

SEQ ID NO: 282143 - DNA, 19 bp, Homo sapiens
  siRNA target sequence for MLN51 (NM_007359.3,938-956).
gctcattgctctttatggt

SEQ ID NO: 282144 - DNA, 19 bp, Homo sapiens
  siRNA target sequence for MLN51 (NM_007359.3,973-991).
ctcataatcctgatgacat

SEQ ID NO: 282145 - DNA, 19 bp, Homo sapiens
  siRNA target sequence for MLN51 (NM_007359.3,1056-1074).
ggtgagcggctaaacaagt

SEQ ID NO: 282146 - DNA, 19 bp, Homo sapiens
  siRNA target sequence for MLN51 (NM_007359.3,1194-1212).
gaaggtcgtgctggtttta

SEQ ID NO: 282147 - DNA, 19 bp, Homo sapiens
  siRNA target sequence for MLN51 (NM_007359.3,1245-1263).
cggtctggtgagactgtta

SEQ ID NO: 282148 - DNA, 19 bp, Homo sapiens
  siRNA target sequence for MLN51 (NM_007359.3,1246-1264).
ggtctggtgagactgttaa

SEQ ID NO: 282149 - DNA, 19 bp, Homo sapiens
  siRNA target sequence for MLN51 (NM_007359.3,1256-1274).
gactgttaagcatgagatt

SEQ ID NO: 282150 - DNA, 19 bp, Homo sapiens
  siRNA target sequence for MLN51 (NM_007359.3,1260-1278).
gttaagcatgagattagtt

SEQ ID NO: 282151 - DNA, 19 bp, Homo sapiens
  siRNA target sequence for MLN51 (NM_007359.3,1417-1435).
ctgataggcccattgagaa

SEQ ID NO: 282152 - DNA, 19 bp, Homo sapiens
  siRNA target sequence for MLN51 (NM_007359.3,1425-1443).
cccattgagaagaaatcct

SEQ ID NO: 282153 - DNA, 19 bp, Homo sapiens
  siRNA target sequence for MLN51 (NM_007359.3,1555-1573).
ccccaactccacctactaa

SEQ ID NO: 282154 - DNA, 19 bp, Homo sapiens
  siRNA target sequence for MLN51 (NM_007359.3,1557-1575).
ccaactccacctactaaga

SEQ ID NO: 282155 - DNA, 19 bp, Homo sapiens
  siRNA target sequence for MLN51 (NM_007359.3,1590-1608).
gctccggtggattctagta

SEQ ID NO: 282156 - DNA, 19 bp, Homo sapiens
  siRNA target sequence for MLN51 (NM_007359.3,1593-1611).
ccggtggattctagtacaa

SEQ ID NO: 282157 - DNA, 19 bp, Homo sapiens
  siRNA target sequence for MLN51 (NM_007359.3,1595-1613).
ggtggattctagtacaagt

SEQ ID NO: 282158 - DNA, 19 bp, Homo sapiens
  siRNA target sequence for MLN51 (NM_007359.3,1622-1640).
gcaagatgtggcacaacta

SEQ ID NO: 282159 - DNA, 19 bp, Homo sapiens
  siRNA target sequence for MLN51 (NM_007359.3,1701-1719).
cgaggtatgcccaaccata

SEQ ID NO: 282160 - DNA, 19 bp, Homo sapiens
  siRNA target sequence for MLN51 (NM_007359.3,1702-1720).
gaggtatgcccaaccatat

SEQ ID NO: 282161 - DNA, 19 bp, Homo sapiens
  siRNA target sequence for MLN51 (NM_007359.3,1839-1857).
cctccagtgcatatcagta

SEQ ID NO: 282162 - DNA, 19 bp, Homo sapiens
  siRNA target sequence for MLN51 (NM_007359.3,1840-1858).
ctccagtgcatatcagtat

SEQ ID NO: 282163 - DNA, 19 bp, Homo sapiens
  siRNA target sequence for MLN51 (NM_007359.3,1843-1861).
cagtgcatatcagtatcat

SEQ ID NO: 282164 - DNA, 19 bp, Homo sapiens
  siRNA target sequence for MLN51 (NM_007359.3,1855-1873).
gtatcatggagggacatta

SEQ ID NO: 282165 - DNA, 19 bp, Homo sapiens
  siRNA target sequence for MLN51 (NM_007359.3,1862-1880).
ggagggacattactatgat

SEQ ID NO: 282166 - DNA, 19 bp, Homo sapiens
  siRNA target sequence for MLN51 (NM_007359.3,1889-1907).
gttccagggaccaatctat

SEQ ID NO: 282167 - DNA, 19 bp, Homo sapiens
  siRNA target sequence for MLN51 (NM_007359.3,2101-2119).
ctgctccaggcgtcatgaa

SEQ ID NO: 282168 - DNA, 19 bp, Homo sapiens
  siRNA target sequence for MLN51 (NM_007359.3,2103-2121).
gctccaggcgtcatgaact

SEQ ID NO: 282169 - DNA, 19 bp, Homo sapiens
  siRNA target sequence for MLN51 (NM_007359.3,2104-2122).
ctccaggcgtcatgaactt

SEQ ID NO: 282170 - DNA, 19 bp, Homo sapiens
  siRNA target sequence for MLN51 (NM_007359.3,2109-2127).
ggcgtcatgaactttggta

SEQ ID NO: 282171 - DNA, 19 bp, Homo sapiens
  siRNA target sequence for MLN51 (NM_007359.3,2111-2129).
cgtcatgaactttggtaat

SEQ ID NO: 282172 - DNA, 19 bp, Homo sapiens
  siRNA target sequence for MLN51 (NM_007359.3,2175-2193).
cctcatctgtatcctaata

SEQ ID NO: 282173 - DNA, 19 bp, Homo sapiens
  siRNA target sequence for MLN51 (NM_007359.3,2198-2216).
ggccccatcacaggtatat

SEQ ID NO: 282174 - DNA, 19 bp, Homo sapiens
  siRNA target sequence for MLN51 (NM_007359.3,2201-2219).
cccatcacaggtatatgga

SEQ ID NO: 282175 - DNA, 19 bp, Homo sapiens
  siRNA target sequence for MLN51 (NM_007359.3,2217-2235).
ggaggagtgacctactata

SEQ ID NO: 282176 - DNA, 19 bp, Homo sapiens
  siRNA target sequence for MLN51 (NM_007359.3,2218-2236).
gaggagtgacctactataa

SEQ ID NO: 282177 - DNA, 19 bp, Homo sapiens
  siRNA target sequence for MN1 (NM_002430.1,1007-1025).
ccagggcgagaggaacttt

SEQ ID NO: 282178 - DNA, 19 bp, Homo sapiens
  siRNA target sequence for MN1 (NM_002430.1,1008-1026).
cagggcgagaggaacttta

SEQ ID NO: 282179 - DNA, 19 bp, Homo sapiens
  siRNA target sequence for MN1 (NM_002430.1,1131-1149).
ccgatcttgggcatgaaca

SEQ ID NO: 282180 - DNA, 19 bp, Homo sapiens
  siRNA target sequence for MN1 (NM_002430.1,1132-1150).
cgatcttgggcatgaacat

SEQ ID NO: 282181 - DNA, 19 bp, Homo sapiens
  siRNA target sequence for MN1 (NM_002430.1,1636-1654).
ccgtcgactcgctggaata

SEQ ID NO: 282182 - DNA, 19 bp, Homo sapiens
  siRNA target sequence for MN1 (NM_002430.1,1638-1656).
gtcgactcgctggaataca

SEQ ID NO: 282183 - DNA, 19 bp, Homo sapiens
  siRNA target sequence for MN1 (NM_002430.1,1640-1658).
cgactcgctggaatacaat

SEQ ID NO: 282184 - DNA, 19 bp, Homo sapiens
  siRNA target sequence for MN1 (NM_002430.1,1641-1659).
gactcgctggaatacaatt

SEQ ID NO: 282185 - DNA, 19 bp, Homo sapiens
  siRNA target sequence for MN1 (NM_002430.1,1674-1692).
cctcgggacattttgacat

SEQ ID NO: 282186 - DNA, 19 bp, Homo sapiens
  siRNA target sequence for MN1 (NM_002430.1,1954-1972).
ccaggcacccgttaatgca

SEQ ID NO: 282187 - DNA, 19 bp, Homo sapiens
  siRNA target sequence for MN1 (NM_002430.1,2058-2076).
ctagtccgacaaaattcgt

SEQ ID NO: 282188 - DNA, 19 bp, Homo sapiens
  siRNA target sequence for MN1 (NM_002430.1,2206-2224).
cggagcatgcacccttatt

SEQ ID NO: 282189 - DNA, 19 bp, Homo sapiens
  siRNA target sequence for MN1 (NM_002430.1,2390-2408).
caacggcgctctggataat

SEQ ID NO: 282190 - DNA, 19 bp, Homo sapiens
  siRNA target sequence for MN1 (NM_002430.1,3338-3356).
gcgcacctcggccagtaaa

SEQ ID NO: 282191 - DNA, 19 bp, Homo sapiens
  siRNA target sequence for MN1 (NM_002430.1,3339-3357).
cgcacctcggccagtaaat

SEQ ID NO: 282192 - DNA, 19 bp, Homo sapiens
  siRNA target sequence for MN1 (NM_002430.1,3340-3358).
gcacctcggccagtaaatt

SEQ ID NO: 282193 - DNA, 19 bp, Homo sapiens
  siRNA target sequence for MN1 (NM_002430.1,3442-3460).
ccgcttgccagaacatgat

SEQ ID NO: 282194 - DNA, 19 bp, Homo sapiens
  siRNA target sequence for MN1 (NM_002430.1,3776-3794).
gggacggggtcgcagaaaa

SEQ ID NO: 282195 - DNA, 19 bp, Homo sapiens
  siRNA target sequence for MN1 (NM_002430.1,3777-3795).
ggacggggtcgcagaaaaa

SEQ ID NO: 282196 - DNA, 19 bp, Homo sapiens
  siRNA target sequence for MN1 (NM_002430.1,3943-3961).
caccgacgccccacgaaaa

SEQ ID NO: 282197 - DNA, 19 bp, Homo sapiens
  siRNA target sequence for MN1 (NM_002430.1,4047-4065).
gccaagtcggacagtagtt

SEQ ID NO: 282198 - DNA, 19 bp, Homo sapiens
  siRNA target sequence for MN1 (NM_002430.1,4266-4284).
ctgggcatcatgtctaact

SEQ ID NO: 282199 - DNA, 19 bp, Homo sapiens
  siRNA target sequence for MN1 (NM_002430.1,4268-4286).
gggcatcatgtctaactct

SEQ ID NO: 282200 - DNA, 19 bp, Homo sapiens
  siRNA target sequence for MN1 (NM_002430.1,4269-4287).
ggcatcatgtctaactcta

SEQ ID NO: 282201 - DNA, 19 bp, Homo sapiens
  siRNA target sequence for MN1 (NM_002430.1,4855-4873).
ggcggtccctgcattctga

SEQ ID NO: 282202 - DNA, 19 bp, Homo sapiens
  siRNA target sequence for MORF4L2 (NM_012286.1,314-332).
cagaaagcagggttctcaa

SEQ ID NO: 282203 - DNA, 19 bp, Homo sapiens
  siRNA target sequence for MORF4L2 (NM_012286.1,617-635).
ggcagaccccactgttgaa

SEQ ID NO: 282204 - DNA, 19 bp, Homo sapiens
  siRNA target sequence for MORF4L2 (NM_012286.1,618-636).
gcagaccccactgttgaaa

SEQ ID NO: 282205 - DNA, 19 bp, Homo sapiens
  siRNA target sequence for MORF4L2 (NM_012286.1,637-655).
gtgaggaggcgtttaagaa

SEQ ID NO: 282206 - DNA, 19 bp, Homo sapiens
  siRNA target sequence for MORF4L2 (NM_012286.1,639-657).
gaggaggcgtttaagaata

SEQ ID NO: 282207 - DNA, 19 bp, Homo sapiens
  siRNA target sequence for MORF4L2 (NM_012286.1,641-659).
ggaggcgtttaagaataga

SEQ ID NO: 282208 - DNA, 19 bp, Homo sapiens
  siRNA target sequence for MORF4L2 (NM_012286.1,642-660).
gaggcgtttaagaatagaa

SEQ ID NO: 282209 - DNA, 19 bp, Homo sapiens
  siRNA target sequence for MORF4L2 (NM_012286.1,653-671).
gaatagaatggaggttaaa

SEQ ID NO: 282210 - DNA, 19 bp, Homo sapiens
  siRNA target sequence for MORF4L2 (NM_012286.1,658-676).
gaatggaggttaaagtgaa

SEQ ID NO: 282211 - DNA, 19 bp, Homo sapiens
  siRNA target sequence for MORF4L2 (NM_012286.1,803-821).
gaaatcgcagggaaatgtt

SEQ ID NO: 282212 - DNA, 19 bp, Homo sapiens
  siRNA target sequence for MORF4L2 (NM_012286.1,955-973).
ctccaatgtcccaggttta

SEQ ID NO: 282213 - DNA, 19 bp, Homo sapiens
  siRNA target sequence for MORF4L2 (NM_012286.1,979-997).
caccacacctactgagatt

SEQ ID NO: 282214 - DNA, 19 bp, Homo sapiens
  siRNA target sequence for MORF4L2 (NM_012286.1,1054-1072).
cattattgttgggctattt

SEQ ID NO: 282215 - DNA, 19 bp, Homo sapiens
  siRNA target sequence for MORF4L2 (NM_012286.1,1066-1084).
gctatttgcatgatttcct

SEQ ID NO: 282216 - DNA, 19 bp, Homo sapiens
  siRNA target sequence for MORF4L2 (NM_012286.1,1100-1118).
gaattctgcatctctcttt

SEQ ID NO: 282217 - DNA, 19 bp, Homo sapiens
  siRNA target sequence for MORF4L2 (NM_012286.1,1120-1138).
ctgccagtgattacaaagt

SEQ ID NO: 282218 - DNA, 19 bp, Homo sapiens
  siRNA target sequence for MPV17 (NM_002437.3,83-101).
cgctcacccgtggaaagta

SEQ ID NO: 282219 - DNA, 19 bp, Homo sapiens
  siRNA target sequence for MPV17 (NM_002437.3,85-103).
ctcacccgtggaaagtaca

SEQ ID NO: 282220 - DNA, 19 bp, Homo sapiens
  siRNA target sequence for MPV17 (NM_002437.3,125-143).
gatgggcctgggtgacatt

SEQ ID NO: 282221 - DNA, 19 bp, Homo sapiens
  siRNA target sequence for MPV17 (NM_002437.3,129-147).
ggcctgggtgacattatct

SEQ ID NO: 282222 - DNA, 19 bp, Homo sapiens
  siRNA target sequence for MPV17 (NM_002437.3,247-265).
gaggctggtacaaggtttt

SEQ ID NO: 282223 - DNA, 19 bp, Homo sapiens
  siRNA target sequence for MPV17 (NM_002437.3,332-350).
ctttgccccgtgttttcta

SEQ ID NO: 282224 - DNA, 19 bp, Homo sapiens
  siRNA target sequence for MPV17 (NM_002437.3,364-382).
cactggtaggggcacttaa

SEQ ID NO: 282225 - DNA, 19 bp, Homo sapiens
  siRNA target sequence for MPV17 (NM_002437.3,410-428).
caaactacagcgggattat

SEQ ID NO: 282226 - DNA, 19 bp, Homo sapiens
  siRNA target sequence for MPV17 (NM_002437.3,489-507).
ctggtcccccttcattaca

SEQ ID NO: 282227 - DNA, 19 bp, Homo sapiens
  siRNA target sequence for MPV17 (NM_002437.3,512-530).
ggccgttgtccaatgtgtt

SEQ ID NO: 282228 - DNA, 19 bp, Homo sapiens
  siRNA target sequence for MPV17 (NM_002437.3,522-540).
caatgtgttgctgttatct

SEQ ID NO: 282229 - DNA, 19 bp, Homo sapiens
  siRNA target sequence for MRPL39 (NM_017446.2,66-84).
cccggtggcgggatcaaat

SEQ ID NO: 282230 - DNA, 19 bp, Homo sapiens
  siRNA target sequence for MRPL39 (NM_017446.2,75-93).
gggatcaaatggagattta

SEQ ID NO: 282231 - DNA, 19 bp, Homo sapiens
  siRNA target sequence for MRPL39 (NM_017446.2,114-132).
cagctgtcaccgacagaat

SEQ ID NO: 282232 - DNA, 19 bp, Homo sapiens
  siRNA target sequence for MRPL39 (NM_017446.2,119-137).
gtcaccgacagaattgaca

SEQ ID NO: 282233 - DNA, 19 bp, Homo sapiens
  siRNA target sequence for MRPL39 (NM_017446.2,124-142).
cgacagaattgacagaaat

SEQ ID NO: 282234 - DNA, 19 bp, Homo sapiens
  siRNA target sequence for MRPL39 (NM_017446.2,134-152).
gacagaaatgcggaatgat

SEQ ID NO: 282235 - DNA, 19 bp, Homo sapiens
  siRNA target sequence for MRPL39 (NM_017446.2,136-154).
cagaaatgcggaatgatct

SEQ ID NO: 282236 - DNA, 19 bp, Homo sapiens
  siRNA target sequence for MRPL39 (NM_017446.2,143-161).
gcggaatgatctctttaat

SEQ ID NO: 282237 - DNA, 19 bp, Homo sapiens
  siRNA target sequence for MRPL39 (NM_017446.2,144-162).
cggaatgatctctttaata

SEQ ID NO: 282238 - DNA, 19 bp, Homo sapiens
  siRNA target sequence for MRPL39 (NM_017446.2,171-189).
gccaggcagttatcattaa

SEQ ID NO: 282239 - DNA, 19 bp, Homo sapiens
  siRNA target sequence for MRPL39 (NM_017446.2,173-191).
caggcagttatcattaact

SEQ ID NO: 282240 - DNA, 19 bp, Homo sapiens
  siRNA target sequence for MRPL39 (NM_017446.2,190-208).
ctccccgaactgagaagat

SEQ ID NO: 282241 - DNA, 19 bp, Homo sapiens
  siRNA target sequence for MRPL39 (NM_017446.2,193-211).
cccgaactgagaagataga

SEQ ID NO: 282242 - DNA, 19 bp, Homo sapiens
  siRNA target sequence for MRPL39 (NM_017446.2,194-212).
ccgaactgagaagatagaa

SEQ ID NO: 282243 - DNA, 19 bp, Homo sapiens
  siRNA target sequence for MRPL39 (NM_017446.2,203-221).
gaagatagaagttaagcat

SEQ ID NO: 282244 - DNA, 19 bp, Homo sapiens
  siRNA target sequence for MRPL39 (NM_017446.2,241-259).
gtactgtcttcgtgatgaa

SEQ ID NO: 282245 - DNA, 19 bp, Homo sapiens
  siRNA target sequence for MRPL39 (NM_017446.2,244-262).
ctgtcttcgtgatgaataa

SEQ ID NO: 282246 - DNA, 19 bp, Homo sapiens
  siRNA target sequence for MRPL39 (NM_017446.2,246-264).
gtcttcgtgatgaataaaa

SEQ ID NO: 282247 - DNA, 19 bp, Homo sapiens
  siRNA target sequence for MRPL39 (NM_017446.2,294-312).
catttaagcgagtggtatt

SEQ ID NO: 282248 - DNA, 19 bp, Homo sapiens
  siRNA target sequence for MRPL39 (NM_017446.2,343-361).
gacagccttgggacatgta

SEQ ID NO: 282249 - DNA, 19 bp, Homo sapiens
  siRNA target sequence for MRPL39 (NM_017446.2,345-363).
cagccttgggacatgtata

SEQ ID NO: 282250 - DNA, 19 bp, Homo sapiens
  siRNA target sequence for MRPL39 (NM_017446.2,356-374).
catgtataagcctttaaca

SEQ ID NO: 282251 - DNA, 19 bp, Homo sapiens
  siRNA target sequence for MRPL39 (NM_017446.2,444-462).
cgttcctgtgctatgatga

SEQ ID NO: 282252 - DNA, 19 bp, Homo sapiens
  siRNA target sequence for MRPL39 (NM_017446.2,445-463).
gttcctgtgctatgatgat

SEQ ID NO: 282253 - DNA, 19 bp, Homo sapiens
  siRNA target sequence for MRPL39 (NM_017446.2,458-476).
gatgatgggctgtgtgata

SEQ ID NO: 282254 - DNA, 19 bp, Homo sapiens
  siRNA target sequence for MRPL39 (NM_017446.2,512-530).
ggtcagagctccagaagtt

SEQ ID NO: 282255 - DNA, 19 bp, Homo sapiens
  siRNA target sequence for MRPL39 (NM_017446.2,522-540).
ccagaagttcctgtaattt

SEQ ID NO: 282256 - DNA, 19 bp, Homo sapiens
  siRNA target sequence for MRPL39 (NM_017446.2,541-559).
ctggtgccttctgttatga

SEQ ID NO: 282257 - DNA, 19 bp, Homo sapiens
  siRNA target sequence for MRPL39 (NM_017446.2,560-578).
cgtagttttggatagcaaa

SEQ ID NO: 282258 - DNA, 19 bp, Homo sapiens
  siRNA target sequence for MRPL39 (NM_017446.2,630-648).
gctcatgctttaatttata

SEQ ID NO: 282259 - DNA, 19 bp, Homo sapiens
  siRNA target sequence for MRPL39 (NM_017446.2,681-699).
gcaaaagtggcattggaaa

SEQ ID NO: 282260 - DNA, 19 bp, Homo sapiens
  siRNA target sequence for MRPL39 (NM_017446.2,689-707).
ggcattggaaatatttcaa

SEQ ID NO: 282261 - DNA, 19 bp, Homo sapiens
  siRNA target sequence for MRPL39 (NM_017446.2,712-730).
gcaagtacaaagtagattt

SEQ ID NO: 282262 - DNA, 19 bp, Homo sapiens
  siRNA target sequence for MRPL39 (NM_017446.2,716-734).
gtacaaagtagatttcata

SEQ ID NO: 282263 - DNA, 19 bp, Homo sapiens
  siRNA target sequence for MRPL39 (NM_017446.2,781-799).
gaataggtgacttcattga

SEQ ID NO: 282264 - DNA, 19 bp, Homo sapiens
  siRNA target sequence for MRPL39 (NM_017446.2,803-821).
gagtgagggccctcttatt

SEQ ID NO: 282265 - DNA, 19 bp, Homo sapiens
  siRNA target sequence for MRPL39 (NM_017446.2,878-896).
cacccagccaagtctcata

SEQ ID NO: 282266 - DNA, 19 bp, Homo sapiens
  siRNA target sequence for MRPL39 (NM_017446.2,882-900).
cagccaagtctcatacgaa

SEQ ID NO: 282267 - DNA, 19 bp, Homo sapiens
  siRNA target sequence for MRPL39 (NM_017446.2,886-904).
caagtctcatacgaagatt

SEQ ID NO: 282268 - DNA, 19 bp, Homo sapiens
  siRNA target sequence for MRPL39 (NM_017446.2,914-932).
gtctttacctgttcactta

SEQ ID NO: 282269 - DNA, 19 bp, Homo sapiens
  siRNA target sequence for MRPL39 (NM_017446.2,946-964).
caatatgggataagctatt

SEQ ID NO: 282270 - DNA, 19 bp, Homo sapiens
  siRNA target sequence for MRPL39 (NM_017446.2,973-991).
ctcggaaaatggtaactga

SEQ ID NO: 282271 - DNA, 19 bp, Homo sapiens
  siRNA target sequence for MRPL39 (NM_017446.2,1005-1023).
gcaacagaggaatgtacat

SEQ ID NO: 282272 - DNA, 19 bp, Homo sapiens
  siRNA target sequence for MRPL39 (NM_080794.2,993-1011).
cccattctccttctattta

SEQ ID NO: 282273 - DNA, 19 bp, Homo sapiens
  siRNA target sequence for MRPL40 (NM_003776.2,50-68).
cctccgtgctgcgaagtat

SEQ ID NO: 282274 - DNA, 19 bp, Homo sapiens
  siRNA target sequence for MRPL40 (NM_003776.2,110-128).
ggcagacgcagcttagaga

SEQ ID NO: 282275 - DNA, 19 bp, Homo sapiens
  siRNA target sequence for MRPL40 (NM_003776.2,133-151).
caccagcgagcgtcattgt

SEQ ID NO: 282276 - DNA, 19 bp, Homo sapiens
  siRNA target sequence for MRPL40 (NM_003776.2,136-154).
cagcgagcgtcattgttgt

SEQ ID NO: 282277 - DNA, 19 bp, Homo sapiens
  siRNA target sequence for MRPL40 (NM_003776.2,139-157).
cgagcgtcattgttgtctt

SEQ ID NO: 282278 - DNA, 19 bp, Homo sapiens
  siRNA target sequence for MRPL40 (NM_003776.2,140-158).
gagcgtcattgttgtcttt

SEQ ID NO: 282279 - DNA, 19 bp, Homo sapiens
  siRNA target sequence for MRPL40 (NM_003776.2,142-160).
gcgtcattgttgtctttct

SEQ ID NO: 282280 - DNA, 19 bp, Homo sapiens
  siRNA target sequence for MRPL40 (NM_003776.2,163-181).
gaactcattcccatgagat

SEQ ID NO: 282281 - DNA, 19 bp, Homo sapiens
  siRNA target sequence for MRPL40 (NM_003776.2,273-291).
ggctactcaagagctaatt

SEQ ID NO: 282282 - DNA, 19 bp, Homo sapiens
  siRNA target sequence for MRPL40 (NM_003776.2,313-331).
cctctaaagttcttggata

SEQ ID NO: 282283 - DNA, 19 bp, Homo sapiens
  siRNA target sequence for MRPL40 (NM_003776.2,444-462).
caccatcagggctatgcta

SEQ ID NO: 282284 - DNA, 19 bp, Homo sapiens
  siRNA target sequence for MRPL40 (NM_003776.2,524-542).
ccatcaagcgggatcctaa

SEQ ID NO: 282285 - DNA, 19 bp, Homo sapiens
  siRNA target sequence for MRPL40 (NM_003776.2,578-596).
caccaccgatccctaacta

SEQ ID NO: 282286 - DNA, 19 bp, Homo sapiens
  siRNA target sequence for MRPL40 (NM_003776.2,607-625).
gaaggcaggtacaatgaca

SEQ ID NO: 282287 - DNA, 19 bp, Homo sapiens
  siRNA target sequence for MRPS10 (NM_018141.2,60-78).
ggcagggattggggaattt

SEQ ID NO: 282288 - DNA, 19 bp, Homo sapiens
  siRNA target sequence for MRPS10 (NM_018141.2,61-79).
gcagggattggggaatttt

SEQ ID NO: 282289 - DNA, 19 bp, Homo sapiens
  siRNA target sequence for MRPS10 (NM_018141.2,100-118).
caatacagccaaaaatggt

SEQ ID NO: 282290 - DNA, 19 bp, Homo sapiens
  siRNA target sequence for MRPS10 (NM_018141.2,148-166).
ggtacagttttcaaaccta

SEQ ID NO: 282291 - DNA, 19 bp, Homo sapiens
  siRNA target sequence for MRPS10 (NM_018141.2,159-177).
caaacctacacgttgatgt

SEQ ID NO: 282292 - DNA, 19 bp, Homo sapiens
  siRNA target sequence for MRPS22 (NM_020191.2,16-34).
ccctcggaacaactgtatt

SEQ ID NO: 282293 - DNA, 19 bp, Homo sapiens
  siRNA target sequence for MRPS22 (NM_020191.2,64-82).
gcgtggaacgggtctgttt

SEQ ID NO: 282294 - DNA, 19 bp, Homo sapiens
  siRNA target sequence for MRPS22 (NM_020191.2,170-188).
ctccgaggccgcagaatct

SEQ ID NO: 282295 - DNA, 19 bp, Homo sapiens
  siRNA target sequence for MRPS22 (NM_020191.2,239-257).
catactcacgaaaatgaca

SEQ ID NO: 282296 - DNA, 19 bp, Homo sapiens
  siRNA target sequence for MRPS22 (NM_020191.2,275-293).
gacttttaagccagctata

SEQ ID NO: 282297 - DNA, 19 bp, Homo sapiens
  siRNA target sequence for MRPS22 (NM_020191.2,277-295).
cttttaagccagctataca

SEQ ID NO: 282298 - DNA, 19 bp, Homo sapiens
  siRNA target sequence for MRPS22 (NM_020191.2,305-323).
gccaccaacctataagcta

SEQ ID NO: 282299 - DNA, 19 bp, Homo sapiens
  siRNA target sequence for MRPS22 (NM_020191.2,368-386).
ggcagctaaagtacgatta

SEQ ID NO: 282300 - DNA, 19 bp, Homo sapiens
  siRNA target sequence for MRPS22 (NM_020191.2,369-387).
gcagctaaagtacgattaa

SEQ ID NO: 282301 - DNA, 19 bp, Homo sapiens
  siRNA target sequence for MRPS22 (NM_020191.2,370-388).
cagctaaagtacgattaaa

SEQ ID NO: 282302 - DNA, 19 bp, Homo sapiens
  siRNA target sequence for MRPS22 (NM_020191.2,372-390).
gctaaagtacgattaaaaa

SEQ ID NO: 282303 - DNA, 19 bp, Homo sapiens
  siRNA target sequence for MRPS22 (NM_020191.2,373-391).
ctaaagtacgattaaaaat

SEQ ID NO: 282304 - DNA, 19 bp, Homo sapiens
  siRNA target sequence for MRPS22 (NM_020191.2,404-422).
ggaagagcgagtaccaata

SEQ ID NO: 282305 - DNA, 19 bp, Homo sapiens
  siRNA target sequence for MRPS22 (NM_020191.2,405-423).
gaagagcgagtaccaataa

SEQ ID NO: 282306 - DNA, 19 bp, Homo sapiens
  siRNA target sequence for MRPS22 (NM_020191.2,412-430).
gagtaccaataaatgatgt

SEQ ID NO: 282307 - DNA, 19 bp, Homo sapiens
  siRNA target sequence for MRPS22 (NM_020191.2,429-447).
gtgttagctgaagataaga

SEQ ID NO: 282308 - DNA, 19 bp, Homo sapiens
  siRNA target sequence for MRPS22 (NM_020191.2,479-497).
gtttactgatatatcatat

SEQ ID NO: 282309 - DNA, 19 bp, Homo sapiens
  siRNA target sequence for MRPS22 (NM_020191.2,484-502).
ctgatatatcatatagcat

SEQ ID NO: 282310 - DNA, 19 bp, Homo sapiens
  siRNA target sequence for MRPS22 (NM_020191.2,504-522).
ccacaccgggagcgtttta

SEQ ID NO: 282311 - DNA, 19 bp, Homo sapiens
  siRNA target sequence for MRPS22 (NM_020191.2,505-523).
cacaccgggagcgttttat

SEQ ID NO: 282312 - DNA, 19 bp, Homo sapiens
  siRNA target sequence for MRPS22 (NM_020191.2,574-592).
gggaccgaatgatacaagt

SEQ ID NO: 282313 - DNA, 19 bp, Homo sapiens
  siRNA target sequence for MRPS22 (NM_020191.2,576-594).
gaccgaatgatacaagttt

SEQ ID NO: 282314 - DNA, 19 bp, Homo sapiens
  siRNA target sequence for MRPS22 (NM_020191.2,599-617).
cccaaaagaaggtcgtaaa

SEQ ID NO: 282315 - DNA, 19 bp, Homo sapiens
  siRNA target sequence for MRPS22 (NM_020191.2,600-618).
ccaaaagaaggtcgtaaaa

SEQ ID NO: 282316 - DNA, 19 bp, Homo sapiens
  siRNA target sequence for MRPS22 (NM_020191.2,645-663).
gaaaatcttaggactatgt

SEQ ID NO: 282317 - DNA, 19 bp, Homo sapiens
  siRNA target sequence for MRPS22 (NM_020191.2,681-699).
gttgatgtcctcaatctct

SEQ ID NO: 282318 - DNA, 19 bp, Homo sapiens
  siRNA target sequence for MRPS22 (NM_020191.2,717-735).
ccagattccacagagtata

SEQ ID NO: 282319 - DNA, 19 bp, Homo sapiens
  siRNA target sequence for MRPS22 (NM_020191.2,720-738).
gattccacagagtatatca

SEQ ID NO: 282320 - DNA, 19 bp, Homo sapiens
  siRNA target sequence for MRPS22 (NM_020191.2,786-804).
gaccttttacgttcaacaa

SEQ ID NO: 282321 - DNA, 19 bp, Homo sapiens
  siRNA target sequence for MRPS22 (NM_020191.2,788-806).
ccttttacgttcaacaaga

SEQ ID NO: 282322 - DNA, 19 bp, Homo sapiens
  siRNA target sequence for MRPS22 (NM_020191.2,822-840).
gtgtggtattttgtaaata

SEQ ID NO: 282323 - DNA, 19 bp, Homo sapiens
  siRNA target sequence for MRPS22 (NM_020191.2,867-885).
gaccagattcagagagatt

SEQ ID NO: 282324 - DNA, 19 bp, Homo sapiens
  siRNA target sequence for MRPS22 (NM_020191.2,1019-1037).
gaagggagcctatatagaa

SEQ ID NO: 282325 - DNA, 19 bp, Homo sapiens
  siRNA target sequence for MRPS22 (NM_020191.2,1042-1060).
cactgcagacttatcaaga

SEQ ID NO: 282326 - DNA, 19 bp, Homo sapiens
  siRNA target sequence for MRPS24 (NM_032014.1,122-140).
cccgagtacgcgtaagcaa

SEQ ID NO: 282327 - DNA, 19 bp, Homo sapiens
  siRNA target sequence for MRPS24 (NM_032014.1,256-274).
cgaacggtggaggatgttt

SEQ ID NO: 282328 - DNA, 19 bp, Homo sapiens
  siRNA target sequence for MRPS24 (NM_032014.1,257-275).
gaacggtggaggatgtttt

SEQ ID NO: 282329 - DNA, 19 bp, Homo sapiens
  siRNA target sequence for MRPS24 (NM_032014.1,260-278).
cggtggaggatgttttcct

SEQ ID NO: 282330 - DNA, 19 bp, Homo sapiens
  siRNA target sequence for MRPS24 (NM_032014.1,425-443).
ctttgctgtcctactttta

SEQ ID NO: 282331 - DNA, 19 bp, Homo sapiens
  siRNA target sequence for MRPS24 (NM_032014.1,429-447).
gctgtcctacttttacaaa

SEQ ID NO: 282332 - DNA, 19 bp, Homo sapiens
  siRNA target sequence for MRPS24 (NM_032014.1,430-448).
ctgtcctacttttacaaat

SEQ ID NO: 282333 - DNA, 19 bp, Homo sapiens
  siRNA target sequence for MRPS24 (NM_032014.1,477-495).
gccctcaaaggttgtgtat

SEQ ID NO: 282334 - DNA, 19 bp, Homo sapiens
  siRNA target sequence for MRPS24 (NM_032014.1,482-500).
caaaggttgtgtataagta

SEQ ID NO: 282335 - DNA, 19 bp, Homo sapiens
  siRNA target sequence for MSLN (NM_005823.2,347-365).
ccttggcacagaagaatgt

SEQ ID NO: 282336 - DNA, 19 bp, Homo sapiens
  siRNA target sequence for MSLN (NM_005823.2,440-458).
cattggacctgctgctatt

SEQ ID NO: 282337 - DNA, 19 bp, Homo sapiens
  siRNA target sequence for MSLN (NM_005823.2,1018-1036).
gacgagagcctcatcttct

SEQ ID NO: 282338 - DNA, 19 bp, Homo sapiens
  siRNA target sequence for MSLN (NM_005823.2,1021-1039).
gagagcctcatcttctaca

SEQ ID NO: 282339 - DNA, 19 bp, Homo sapiens
  siRNA target sequence for MSLN (NM_005823.2,1129-1147).
ctggacgtcctaaagcata

SEQ ID NO: 282340 - DNA, 19 bp, Homo sapiens
  siRNA target sequence for MSLN (NM_005823.2,1324-1342).
ctgatcgaccgctttgtga

SEQ ID NO: 282341 - DNA, 19 bp, Homo sapiens
  siRNA target sequence for MSLN (NM_005823.2,1553-1571).
ccgaatacttcgtgaagat

SEQ ID NO: 282342 - DNA, 19 bp, Homo sapiens
  siRNA target sequence for MSLN (NM_005823.2,1613-1631).
cgctcagtcagcagaatgt

SEQ ID NO: 282343 - DNA, 19 bp, Homo sapiens
  siRNA target sequence for MSLN (NM_005823.2,1615-1633).
ctcagtcagcagaatgtga

SEQ ID NO: 282344 - DNA, 19 bp, Homo sapiens
  siRNA target sequence for MSMB (NM_002443.2,70-88).
ccttcgtgactttatgcaa

SEQ ID NO: 282345 - DNA, 19 bp, Homo sapiens
  siRNA target sequence for MSMB (NM_002443.2,71-89).
cttcgtgactttatgcaat

SEQ ID NO: 282346 - DNA, 19 bp, Homo sapiens
  siRNA target sequence for MSMB (NM_002443.2,85-103).
gcaatgcatcatgctattt

SEQ ID NO: 282347 - DNA, 19 bp, Homo sapiens
  siRNA target sequence for MSMB (NM_002443.2,94-112).
catgctatttcatacctaa

SEQ ID NO: 282348 - DNA, 19 bp, Homo sapiens
  siRNA target sequence for MSMB (NM_002443.2,97-115).
gctatttcatacctaatga

SEQ ID NO: 282349 - DNA, 19 bp, Homo sapiens
  siRNA target sequence for MSMB (NM_002443.2,117-135).
ggagttccaggagattcaa

SEQ ID NO: 282350 - DNA, 19 bp, Homo sapiens
  siRNA target sequence for MSMB (NM_002443.2,140-158).
gaaatgcatggatctcaaa

SEQ ID NO: 282351 - DNA, 19 bp, Homo sapiens
  siRNA target sequence for MSMB (NM_002443.2,159-177).
ggaaacaaacacccaataa

SEQ ID NO: 282352 - DNA, 19 bp, Homo sapiens
  siRNA target sequence for MSMB (NM_002443.2,214-232).
cttgctacgaaacagaaat

SEQ ID NO: 282353 - DNA, 19 bp, Homo sapiens
  siRNA target sequence for MSMB (NM_002443.2,221-239).
cgaaacagaaatttcatgt

SEQ ID NO: 282354 - DNA, 19 bp, Homo sapiens
  siRNA target sequence for MSMB (NM_002443.2,253-271).
ctacacctgtgggttatga

SEQ ID NO: 282355 - DNA, 19 bp, Homo sapiens
  siRNA target sequence for MSMB (NM_002443.2,352-370).
gttctgtcagtgaatggat

SEQ ID NO: 282356 - DNA, 19 bp, Homo sapiens
  siRNA target sequence for MSMB (NM_002443.2,355-373).
ctgtcagtgaatggataat

SEQ ID NO: 282357 - DNA, 19 bp, Homo sapiens
  siRNA target sequence for MUM-1 (NM_032853.2,222-240).
cgatgggaaaagcgattat

SEQ ID NO: 282358 - DNA, 19 bp, Homo sapiens
  siRNA target sequence for MUM-1 (NM_032853.2,258-276).
gcccgaaccgcgacttcaa

SEQ ID NO: 282359 - DNA, 19 bp, Homo sapiens
  siRNA target sequence for MUM-1 (NM_032853.2,260-278).
ccgaaccgcgacttcaaca

SEQ ID NO: 282360 - DNA, 19 bp, Homo sapiens
  siRNA target sequence for MUM-1 (NM_032853.2,261-279).
cgaaccgcgacttcaacaa

SEQ ID NO: 282361 - DNA, 19 bp, Homo sapiens
  siRNA target sequence for MUM-1 (NM_032853.2,262-280).
gaaccgcgacttcaacaaa

SEQ ID NO: 282362 - DNA, 19 bp, Homo sapiens
  siRNA target sequence for MUM-1 (NM_032853.2,401-419).
ctcgttagcctcacagaat

SEQ ID NO: 282363 - DNA, 19 bp, Homo sapiens
  siRNA target sequence for MUM-1 (NM_032853.2,486-504).
ctgagcgagggctcgattt

SEQ ID NO: 282364 - DNA, 19 bp, Homo sapiens
  siRNA target sequence for MUM-1 (NM_032853.2,577-595).
cctcgccctgtgattcgaa

SEQ ID NO: 282365 - DNA, 19 bp, Homo sapiens
  siRNA target sequence for MUM-1 (NM_032853.2,672-690).
ctgtcaagttcgttcactt

SEQ ID NO: 282366 - DNA, 19 bp, Homo sapiens
  siRNA target sequence for MUM-1 (NM_032853.2,1078-1096).
gagaatgccctgcgaaaaa

SEQ ID NO: 282367 - DNA, 19 bp, Homo sapiens
  siRNA target sequence for MUM-1 (NM_032853.2,1080-1098).
gaatgccctgcgaaaaaga

SEQ ID NO: 282368 - DNA, 19 bp, Homo sapiens
  siRNA target sequence for MUM-1 (NM_032853.2,1327-1345).
ccatggggtctaattccat

SEQ ID NO: 282369 - DNA, 19 bp, Homo sapiens
  siRNA target sequence for MUM-1 (NM_032853.2,1336-1354).
ctaattccatgcgttctat

SEQ ID NO: 282370 - DNA, 19 bp, Homo sapiens
  siRNA target sequence for MUM-1 (NM_032853.2,1382-1400).
gccaccaagagtcctttta

SEQ ID NO: 282371 - DNA, 19 bp, Homo sapiens
  siRNA target sequence for MUM-1 (NM_032853.2,1383-1401).
ccaccaagagtccttttat

SEQ ID NO: 282372 - DNA, 19 bp, Homo sapiens
  siRNA target sequence for MUM-1 (NM_032853.2,1384-1402).
caccaagagtccttttata

SEQ ID NO: 282373 - DNA, 19 bp, Homo sapiens
  siRNA target sequence for MUM-1 (NM_032853.2,1387-1405).
caagagtccttttatacca

SEQ ID NO: 282374 - DNA, 19 bp, Homo sapiens
  siRNA target sequence for MUM-1 (NM_032853.2,1403-1421).
ccacgaaccacgttcgttt

SEQ ID NO: 282375 - DNA, 19 bp, Homo sapiens
  siRNA target sequence for MUM-1 (NM_032853.2,1406-1424).
cgaaccacgttcgtttgaa

SEQ ID NO: 282376 - DNA, 19 bp, Homo sapiens
  siRNA target sequence for MUM-1 (NM_032853.2,1486-1504).
gcgtcaggcagagagataa

SEQ ID NO: 282377 - DNA, 19 bp, Homo sapiens
  siRNA target sequence for MUM-1 (NM_032853.2,1533-1551).
cacatgaacccgaaaatga

SEQ ID NO: 282378 - DNA, 19 bp, Homo sapiens
  siRNA target sequence for MUM-1 (NM_032853.2,1535-1553).
catgaacccgaaaatgaaa

SEQ ID NO: 282379 - DNA, 19 bp, Homo sapiens
  siRNA target sequence for MUM-1 (NM_032853.2,1554-1572).
ggtttcacagtgtctctta

SEQ ID NO: 282380 - DNA, 19 bp, Homo sapiens
  siRNA target sequence for MUM-1 (NM_032853.2,1688-1706).
gttaggctgcgggtctttt

SEQ ID NO: 282381 - DNA, 19 bp, Homo sapiens
  siRNA target sequence for MUM-1 (NM_032853.2,1730-1748).
cgcggctgatataagctat

SEQ ID NO: 282382 - DNA, 19 bp, Homo sapiens
  siRNA target sequence for MUM-1 (NM_032853.2,2141-2159).
cgaccggatccggttcatt

SEQ ID NO: 282383 - DNA, 19 bp, Homo sapiens
  siRNA target sequence for MUM-1 (NM_032853.2,2227-2245).
cggctgaggagaagtacat

SEQ ID NO: 282384 - DNA, 19 bp, Homo sapiens
  siRNA target sequence for MUM-1 (NM_032853.2,2258-2276).
gctgagctaccgggaaaaa

SEQ ID NO: 282385 - DNA, 19 bp, Homo sapiens
  siRNA target sequence for NAG (NM_015909.1,403-421).
catggactcgagaaaccaa

SEQ ID NO: 282386 - DNA, 19 bp, Homo sapiens
  siRNA target sequence for NAG (NM_015909.1,409-427).
ctcgagaaaccaatttcat

SEQ ID NO: 282387 - DNA, 19 bp, Homo sapiens
  siRNA target sequence for NAG (NM_015909.1,411-429).
cgagaaaccaatttcattt

SEQ ID NO: 282388 - DNA, 19 bp, Homo sapiens
  siRNA target sequence for NAG (NM_015909.1,430-448).
gttaaaaacactcaatcta

SEQ ID NO: 282389 - DNA, 19 bp, Homo sapiens
  siRNA target sequence for NAG (NM_015909.1,463-481).
cgcaagctgatggttagat

SEQ ID NO: 282390 - DNA, 19 bp, Homo sapiens
  siRNA target sequence for NAG (NM_015909.1,511-529).
cctgtcagtgagtctcatt

SEQ ID NO: 282391 - DNA, 19 bp, Homo sapiens
  siRNA target sequence for NAG (NM_015909.1,536-554).
cgttgctgcaagacatgtt

SEQ ID NO: 282392 - DNA, 19 bp, Homo sapiens
  siRNA target sequence for NAG (NM_015909.1,537-555).
gttgctgcaagacatgtta

SEQ ID NO: 282393 - DNA, 19 bp, Homo sapiens
  siRNA target sequence for NAG (NM_015909.1,557-575).
ctatgcagcagaatgtata

SEQ ID NO: 282394 - DNA, 19 bp, Homo sapiens
  siRNA target sequence for NAG (NM_015909.1,561-579).
gcagcagaatgtatacaca

SEQ ID NO: 282395 - DNA, 19 bp, Homo sapiens
  siRNA target sequence for NAG (NM_015909.1,590-608).
ctgatgcctgctatgagat

SEQ ID NO: 282396 - DNA, 19 bp, Homo sapiens
  siRNA target sequence for NAG (NM_015909.1,599-617).
gctatgagatatttacaga

SEQ ID NO: 282397 - DNA, 19 bp, Homo sapiens
  siRNA target sequence for NAG (NM_015909.1,629-647).
gctctagtcgccttgaaaa

SEQ ID NO: 282398 - DNA, 19 bp, Homo sapiens
  siRNA target sequence for NAG (NM_015909.1,632-650).
ctagtcgccttgaaaacat

SEQ ID NO: 282399 - DNA, 19 bp, Homo sapiens
  siRNA target sequence for NAG (NM_015909.1,738-756).
ggtcagctacgaaaagagt

SEQ ID NO: 282400 - DNA, 19 bp, Homo sapiens
  siRNA target sequence for NAG (NM_015909.1,741-759).
cagctacgaaaagagtatt

SEQ ID NO: 282401 - DNA, 19 bp, Homo sapiens
  siRNA target sequence for NAG (NM_015909.1,777-795).
cagcagagagtacttcaat

SEQ ID NO: 282402 - DNA, 19 bp, Homo sapiens
  siRNA target sequence for NAG (NM_015909.1,836-854).
ggtgctgcttacaactgat

SEQ ID NO: 282403 - DNA, 19 bp, Homo sapiens
  siRNA target sequence for NAG (NM_015909.1,837-855).
gtgctgcttacaactgata

SEQ ID NO: 282404 - DNA, 19 bp, Homo sapiens
  siRNA target sequence for NAG (NM_015909.1,842-860).
gcttacaactgataacaga

SEQ ID NO: 282405 - DNA, 19 bp, Homo sapiens
  siRNA target sequence for NAG (NM_015909.1,861-879).
cagaccccctgccattcaa

SEQ ID NO: 282406 - DNA, 19 bp, Homo sapiens
  siRNA target sequence for NAG (NM_015909.1,863-881).
gaccccctgccattcaaga

SEQ ID NO: 282407 - DNA, 19 bp, Homo sapiens
  siRNA target sequence for NAG (NM_015909.1,882-900).
ggagctagatcttatccaa

SEQ ID NO: 282408 - DNA, 19 bp, Homo sapiens
  siRNA target sequence for NAG (NM_015909.1,897-915).
ccaagccgttggatgtctt

SEQ ID NO: 282409 - DNA, 19 bp, Homo sapiens
  siRNA target sequence for NAG (NM_015909.1,902-920).
ccgttggatgtcttgaaga

SEQ ID NO: 282410 - DNA, 19 bp, Homo sapiens
  siRNA target sequence for NAG (NM_015909.1,976-994).
ctcatcaaggagtgtattt

SEQ ID NO: 282411 - DNA, 19 bp, Homo sapiens
  siRNA target sequence for NAG (NM_015909.1,997-1015).
cagtcccccacatgctata

SEQ ID NO: 282412 - DNA, 19 bp, Homo sapiens
  siRNA target sequence for NAG (NM_015909.1,1002-1020).
ccccacatgctataaacaa

SEQ ID NO: 282413 - DNA, 19 bp, Homo sapiens
  siRNA target sequence for NAG (NM_015909.1,1086-1104).
gggacaggttctaatcctt

SEQ ID NO: 282414 - DNA, 19 bp, Homo sapiens
  siRNA target sequence for NAG (NM_015909.1,1087-1105).
ggacaggttctaatccttt

SEQ ID NO: 282415 - DNA, 19 bp, Homo sapiens
  siRNA target sequence for NAG (NM_015909.1,1137-1155).
caaagcagccagtatgcat

SEQ ID NO: 282416 - DNA, 19 bp, Homo sapiens
  siRNA target sequence for NAG (NM_015909.1,1164-1182).
gctgatggccacaggttat

SEQ ID NO: 282417 - DNA, 19 bp, Homo sapiens
  siRNA target sequence for NAG (NM_015909.1,1170-1188).
ggccacaggttatcctaaa

SEQ ID NO: 282418 - DNA, 19 bp, Homo sapiens
  siRNA target sequence for NAG (NM_015909.1,1183-1201).
cctaaaagttgggatgttt

SEQ ID NO: 282419 - DNA, 19 bp, Homo sapiens
  siRNA target sequence for NAG (NM_015909.1,1281-1299).
ccctcctagcagcattgaa

SEQ ID NO: 282420 - DNA, 19 bp, Homo sapiens
  siRNA target sequence for NAG (NM_015909.1,1283-1301).
ctcctagcagcattgaact

SEQ ID NO: 282421 - DNA, 19 bp, Homo sapiens
  siRNA target sequence for NAG (NM_015909.1,1286-1304).
ctagcagcattgaacttct

SEQ ID NO: 282422 - DNA, 19 bp, Homo sapiens
  siRNA target sequence for NAG (NM_015909.1,1393-1411).
gcttcaccattaactagta

SEQ ID NO: 282423 - DNA, 19 bp, Homo sapiens
  siRNA target sequence for NAG (NM_015909.1,1415-1433).
cagtacaagaggatgaagt

SEQ ID NO: 282424 - DNA, 19 bp, Homo sapiens
  siRNA target sequence for NAG (NM_015909.1,1435-1453).
ggtgttccaggtagcaatt

SEQ ID NO: 282425 - DNA, 19 bp, Homo sapiens
  siRNA target sequence for NAG (NM_015909.1,1478-1496).
ctgctaccaccatgaaagt

SEQ ID NO: 282426 - DNA, 19 bp, Homo sapiens
  siRNA target sequence for NAG (NM_015909.1,1554-1572).
gtggtggaagaagtcttta

SEQ ID NO: 282427 - DNA, 19 bp, Homo sapiens
  siRNA target sequence for NAG (NM_015909.1,1623-1641).
cggaactacagccaatgaa

SEQ ID NO: 282428 - DNA, 19 bp, Homo sapiens
  siRNA target sequence for NAG (NM_015909.1,1658-1676).
ggtgtcatcctttttatga

SEQ ID NO: 282429 - DNA, 19 bp, Homo sapiens
  siRNA target sequence for NAG (NM_015909.1,1817-1835).
caacaactgaagttctctt

SEQ ID NO: 282430 - DNA, 19 bp, Homo sapiens
  siRNA target sequence for NAG (NM_015909.1,1872-1890).
cttggctcttgcttacctt

SEQ ID NO: 282431 - DNA, 19 bp, Homo sapiens
  siRNA target sequence for NAG (NM_015909.1,1895-1913).
ccttaccacaagtgttaga

SEQ ID NO: 282432 - DNA, 19 bp, Homo sapiens
  siRNA target sequence for NAG (NM_015909.1,1915-1933).
gctaaccggtgctttgaaa

SEQ ID NO: 282433 - DNA, 19 bp, Homo sapiens
  siRNA target sequence for NAG (NM_015909.1,1940-1958).
ccccctctgcattatctct

SEQ ID NO: 282434 - DNA, 19 bp, Homo sapiens
  siRNA target sequence for NAG (NM_015909.1,1960-1978).
cagctggcagcgtattact

SEQ ID NO: 282435 - DNA, 19 bp, Homo sapiens
  siRNA target sequence for NAG (NM_015909.1,1962-1980).
gctggcagcgtattactat

SEQ ID NO: 282436 - DNA, 19 bp, Homo sapiens
  siRNA target sequence for NAG (NM_015909.1,1963-1981).
ctggcagcgtattactata

SEQ ID NO: 282437 - DNA, 19 bp, Homo sapiens
  siRNA target sequence for NAG (NM_015909.1,1997-2015).
cccgattggccccatgttt

SEQ ID NO: 282438 - DNA, 19 bp, Homo sapiens
  siRNA target sequence for NAG (NM_015909.1,1999-2017).
cgattggccccatgtttca

SEQ ID NO: 282439 - DNA, 19 bp, Homo sapiens
  siRNA target sequence for NAG (NM_015909.1,2050-2068).
cccaaagaactaatcaaga

SEQ ID NO: 282440 - DNA, 19 bp, Homo sapiens
  siRNA target sequence for NAG (NM_015909.1,2106-2124).
ctggcctgaagaccttatt

SEQ ID NO: 282441 - DNA, 19 bp, Homo sapiens
  siRNA target sequence for NAG (NM_015909.1,2109-2127).
gcctgaagaccttatttca

SEQ ID NO: 282442 - DNA, 19 bp, Homo sapiens
  siRNA target sequence for NAG (NM_015909.1,2136-2154).
gcagttacactgctacaat

SEQ ID NO: 282443 - DNA, 19 bp, Homo sapiens
  siRNA target sequence for NAG (NM_015909.1,2139-2157).
gttacactgctacaatgaa

SEQ ID NO: 282444 - DNA, 19 bp, Homo sapiens
  siRNA target sequence for NAG (NM_015909.1,2288-2306).
gcgtctacagcattgctat

SEQ ID NO: 282445 - DNA, 19 bp, Homo sapiens
  siRNA target sequence for NAG (NM_015909.1,2331-2349).
ctcccgctgggaagttttt

SEQ ID NO: 282446 - DNA, 19 bp, Homo sapiens
  siRNA target sequence for NAG (NM_015909.1,2383-2401).
ggtttgtccacactagaaa

SEQ ID NO: 282447 - DNA, 19 bp, Homo sapiens
  siRNA target sequence for NAG (NM_015909.1,2384-2402).
gtttgtccacactagaaat

SEQ ID NO: 282448 - DNA, 19 bp, Homo sapiens
  siRNA target sequence for NAG (NM_015909.1,2388-2406).
gtccacactagaaattgaa

SEQ ID NO: 282449 - DNA, 19 bp, Homo sapiens
  siRNA target sequence for NAG (NM_015909.1,2390-2408).
ccacactagaaattgaaaa

SEQ ID NO: 282450 - DNA, 19 bp, Homo sapiens
  siRNA target sequence for NAG (NM_015909.1,2469-2487).
gcacatggtcaagtatatt

SEQ ID NO: 282451 - DNA, 19 bp, Homo sapiens
  siRNA target sequence for NAG (NM_015909.1,2470-2488).
cacatggtcaagtatattt

SEQ ID NO: 282452 - DNA, 19 bp, Homo sapiens
  siRNA target sequence for NAG (NM_015909.1,2495-2513).
ctattggtggctttgatca

SEQ ID NO: 282453 - DNA, 19 bp, Homo sapiens
  siRNA target sequence for NAG (NM_015909.1,2512-2530).
cacgaaaggctgcagtatt

SEQ ID NO: 282454 - DNA, 19 bp, Homo sapiens
  siRNA target sequence for NAG (NM_015909.1,2514-2532).
cgaaaggctgcagtattat

SEQ ID NO: 282455 - DNA, 19 bp, Homo sapiens
  siRNA target sequence for NAG (NM_015909.1,2515-2533).
gaaaggctgcagtattatt

SEQ ID NO: 282456 - DNA, 19 bp, Homo sapiens
  siRNA target sequence for NAG (NM_015909.1,2602-2620).
cgactgctgaagaagttta

SEQ ID NO: 282457 - DNA, 19 bp, Homo sapiens
  siRNA target sequence for NAG (NM_015909.1,2626-2644).
gttgcatcaggtcttaatt

SEQ ID NO: 282458 - DNA, 19 bp, Homo sapiens
  siRNA target sequence for NAG (NM_015909.1,2633-2651).
caggtcttaattacaaaaa

SEQ ID NO: 282459 - DNA, 19 bp, Homo sapiens
  siRNA target sequence for NAG (NM_015909.1,2864-2882).
ggcttcatgcctatgatgt

SEQ ID NO: 282460 - DNA, 19 bp, Homo sapiens
  siRNA target sequence for NAG (NM_015909.1,2975-2993).
ctgtggaagcccgtaaaga

SEQ ID NO: 282461 - DNA, 19 bp, Homo sapiens
  siRNA target sequence for NAG (NM_015909.1,2977-2995).
gtggaagcccgtaaagaga

SEQ ID NO: 282462 - DNA, 19 bp, Homo sapiens
  siRNA target sequence for NAG (NM_015909.1,2983-3001).
gcccgtaaagagatgacta

SEQ ID NO: 282463 - DNA, 19 bp, Homo sapiens
  siRNA target sequence for NAG (NM_015909.1,2986-3004).
cgtaaagagatgactagaa

SEQ ID NO: 282464 - DNA, 19 bp, Homo sapiens
  siRNA target sequence for NAG (NM_015909.1,3070-3088).
caagaagctaaggattcta

SEQ ID NO: 282465 - DNA, 19 bp, Homo sapiens
  siRNA target sequence for NAG (NM_015909.1,3081-3099).
ggattctaaagttacctat

SEQ ID NO: 282466 - DNA, 19 bp, Homo sapiens
  siRNA target sequence for NAG (NM_015909.1,3281-3299).
gtcagcctctagcaatgat

SEQ ID NO: 282467 - DNA, 19 bp, Homo sapiens
  siRNA target sequence for NAG (NM_015909.1,3360-3378).
gagtgcaatcatgaaaata

SEQ ID NO: 282468 - DNA, 19 bp, Homo sapiens
  siRNA target sequence for NAG (NM_015909.1,3362-3380).
gtgcaatcatgaaaataat

SEQ ID NO: 282469 - DNA, 19 bp, Homo sapiens
  siRNA target sequence for NAG (NM_015909.1,3435-3453).
ggtcctggaaggtgttgtt

SEQ ID NO: 282470 - DNA, 19 bp, Homo sapiens
  siRNA target sequence for NAG (NM_015909.1,3617-3635).
gcaagctcctcgtgttctt

SEQ ID NO: 282471 - DNA, 19 bp, Homo sapiens
  siRNA target sequence for NAG (NM_015909.1,3618-3636).
caagctcctcgtgttcttt

SEQ ID NO: 282472 - DNA, 19 bp, Homo sapiens
  siRNA target sequence for NAG (NM_015909.1,3621-3639).
gctcctcgtgttctttaga

SEQ ID NO: 282473 - DNA, 19 bp, Homo sapiens
  siRNA target sequence for NAG (NM_015909.1,3771-3789).
cttggttttacttttgcaa

SEQ ID NO: 282474 - DNA, 19 bp, Homo sapiens
  siRNA target sequence for NAG (NM_015909.1,3794-3812).
ggccacctatgaaaagtga

SEQ ID NO: 282475 - DNA, 19 bp, Homo sapiens
  siRNA target sequence for NAG (NM_015909.1,3811-3829).
gaatatgtcataaccaata

SEQ ID NO: 282476 - DNA, 19 bp, Homo sapiens
  siRNA target sequence for NAG (NM_015909.1,3817-3835).
gtcataaccaataatccat

SEQ ID NO: 282477 - DNA, 19 bp, Homo sapiens
  siRNA target sequence for NAG (NM_015909.1,3853-3871).
gtgatgctaaccagatgta

SEQ ID NO: 282478 - DNA, 19 bp, Homo sapiens
  siRNA target sequence for NAG (NM_015909.1,3866-3884).
gatgtacgatggagaacaa

SEQ ID NO: 282479 - DNA, 19 bp, Homo sapiens
  siRNA target sequence for NAG (NM_015909.1,3890-3908).
gattggggaatgaagtttt

SEQ ID NO: 282480 - DNA, 19 bp, Homo sapiens
  siRNA target sequence for NAG (NM_015909.1,4002-4020).
gcttccatctctgaaactt

SEQ ID NO: 282481 - DNA, 19 bp, Homo sapiens
  siRNA target sequence for NAG (NM_015909.1,4076-4094).
cagtcactacggtgaatga

SEQ ID NO: 282482 - DNA, 19 bp, Homo sapiens
  siRNA target sequence for NAG (NM_015909.1,4078-4096).
gtcactacggtgaatgatt

SEQ ID NO: 282483 - DNA, 19 bp, Homo sapiens
  siRNA target sequence for NAG (NM_015909.1,4082-4100).
ctacggtgaatgattccaa

SEQ ID NO: 282484 - DNA, 19 bp, Homo sapiens
  siRNA target sequence for NAG (NM_015909.1,4167-4185).
cttctatccacgtattgtt

SEQ ID NO: 282485 - DNA, 19 bp, Homo sapiens
  siRNA target sequence for NAP1 (NM_016481.2,171-189).
ccagtcggctacttggaat

SEQ ID NO: 282486 - DNA, 19 bp, Homo sapiens
  siRNA target sequence for NAP1 (NM_016481.2,174-192).
gtcggctacttggaatctt

SEQ ID NO: 282487 - DNA, 19 bp, Homo sapiens
  siRNA target sequence for NAP1 (NM_016481.2,176-194).
cggctacttggaatcttgt

SEQ ID NO: 282488 - DNA, 19 bp, Homo sapiens
  siRNA target sequence for NAP1 (NM_016481.2,177-195).
ggctacttggaatcttgtt

SEQ ID NO: 282489 - DNA, 19 bp, Homo sapiens
  siRNA target sequence for NAP1 (NM_016481.2,246-264).
cgagcctgtttgaggatta

SEQ ID NO: 282490 - DNA, 19 bp, Homo sapiens
  siRNA target sequence for NAP1 (NM_016481.2,249-267).
gcctgtttgaggattagaa

SEQ ID NO: 282491 - DNA, 19 bp, Homo sapiens
  siRNA target sequence for NAP1 (NM_016481.2,260-278).
gattagaaagaggatcttt

SEQ ID NO: 282492 - DNA, 19 bp, Homo sapiens
  siRNA target sequence for NAP1 (NM_016481.2,299-317).
gatgggcctagaacagttt

SEQ ID NO: 282493 - DNA, 19 bp, Homo sapiens
  siRNA target sequence for NAP1 (NM_016481.2,304-322).
gcctagaacagttttctca

SEQ ID NO: 282494 - DNA, 19 bp, Homo sapiens
  siRNA target sequence for NAP1 (NM_016481.2,305-323).
cctagaacagttttctcat

SEQ ID NO: 282495 - DNA, 19 bp, Homo sapiens
  siRNA target sequence for NAP1 (NM_016481.2,432-450).
cctcatcgtcccaatgcaa

SEQ ID NO: 282496 - DNA, 19 bp, Homo sapiens
  siRNA target sequence for NAP1 (NM_016481.2,433-451).
ctcatcgtcccaatgcaat

SEQ ID NO: 282497 - DNA, 19 bp, Homo sapiens
  siRNA target sequence for NAP1 (NM_016481.2,505-523).
ctggaattgacatgataca

SEQ ID NO: 282498 - DNA, 19 bp, Homo sapiens
  siRNA target sequence for NAP1 (NM_016481.2,526-544).
gcacacccgtactagacat

SEQ ID NO: 282499 - DNA, 19 bp, Homo sapiens
  siRNA target sequence for NAP1 (NM_016481.2,563-581).
gtatgactcaccgcaaaat

SEQ ID NO: 282500 - DNA, 19 bp, Homo sapiens
  siRNA target sequence for NAP1 (NM_016481.2,567-585).
gactcaccgcaaaatgtga

SEQ ID NO: 282501 - DNA, 19 bp, Homo sapiens
  siRNA target sequence for NAP1 (NM_016481.2,587-605).
ggagcctttagcagacttt

SEQ ID NO: 282502 - DNA, 19 bp, Homo sapiens
  siRNA target sequence for NAP1 (NM_016481.2,590-608).
gcctttagcagactttaat

SEQ ID NO: 282503 - DNA, 19 bp, Homo sapiens
  siRNA target sequence for NAP1 (NM_016481.2,591-609).
cctttagcagactttaatt

SEQ ID NO: 282504 - DNA, 19 bp, Homo sapiens
  siRNA target sequence for NAP1 (NM_016481.2,708-726).
ccccaccatagcactaaga

SEQ ID NO: 282505 - DNA, 19 bp, Homo sapiens
  siRNA target sequence for NAP1 (NM_016481.2,718-736).
gcactaagaggaaacctaa

SEQ ID NO: 282506 - DNA, 19 bp, Homo sapiens
  siRNA target sequence for NAP1 (NM_016481.2,869-887).
cagcgtggcagaagaacaa

SEQ ID NO: 282507 - DNA, 19 bp, Homo sapiens
  siRNA target sequence for NAP1 (NM_016481.2,1070-1088).
ggctcctgtggccacttta

SEQ ID NO: 282508 - DNA, 19 bp, Homo sapiens
  siRNA target sequence for NAP1 (NM_016481.2,1152-1170).
caggcgtcatttaaatatt

SEQ ID NO: 282509 - DNA, 19 bp, Homo sapiens
  siRNA target sequence for NAP1 (NM_016481.2,1154-1172).
ggcgtcatttaaatatttt

SEQ ID NO: 282510 - DNA, 19 bp, Homo sapiens
  siRNA target sequence for NAP1 (NM_016481.2,1257-1275).
gaccgccttttctacttta

SEQ ID NO: 282511 - DNA, 19 bp, Homo sapiens
  siRNA target sequence for NAP1 (NM_016481.2,1259-1277).
ccgccttttctactttact

SEQ ID NO: 282512 - DNA, 19 bp, Homo sapiens
  siRNA target sequence for NBR2 (NM_005821.2,600-618).
ggttcctgacacaaggatt

SEQ ID NO: 282513 - DNA, 19 bp, Homo sapiens
  siRNA target sequence for NCSTN (NM_015331.1,304-322).
caacgccactcatcagatt

SEQ ID NO: 282514 - DNA, 19 bp, Homo sapiens
  siRNA target sequence for NCSTN (NM_015331.1,323-341).
ggctgccagtcttcaatta

SEQ ID NO: 282515 - DNA, 19 bp, Homo sapiens
  siRNA target sequence for NCSTN (NM_015331.1,345-363).
gagacacaggggttatcca

SEQ ID NO: 282516 - DNA, 19 bp, Homo sapiens
  siRNA target sequence for NCSTN (NM_015331.1,354-372).
gggttatccacgtagtaga

SEQ ID NO: 282517 - DNA, 19 bp, Homo sapiens
  siRNA target sequence for NCSTN (NM_015331.1,385-403).
cctacagtgggtattgact

SEQ ID NO: 282518 - DNA, 19 bp, Homo sapiens
  siRNA target sequence for NCSTN (NM_015331.1,481-499).
gagaaccagccgaattgct

SEQ ID NO: 282519 - DNA, 19 bp, Homo sapiens
  siRNA target sequence for NCSTN (NM_015331.1,578-596).
ggtgtttactccaattcct

SEQ ID NO: 282520 - DNA, 19 bp, Homo sapiens
  siRNA target sequence for NCSTN (NM_015331.1,579-597).
gtgtttactccaattccta

SEQ ID NO: 282521 - DNA, 19 bp, Homo sapiens
  siRNA target sequence for NCSTN (NM_015331.1,614-632).
cactgcagagaaatacagt

SEQ ID NO: 282522 - DNA, 19 bp, Homo sapiens
  siRNA target sequence for NCSTN (NM_015331.1,645-663).
gcaatggtttggcttatga

SEQ ID NO: 282523 - DNA, 19 bp, Homo sapiens
  siRNA target sequence for NCSTN (NM_015331.1,651-669).
gtttggcttatgaagactt

SEQ ID NO: 282524 - DNA, 19 bp, Homo sapiens
  siRNA target sequence for NCSTN (NM_015331.1,656-674).
gcttatgaagactttagtt

SEQ ID NO: 282525 - DNA, 19 bp, Homo sapiens
  siRNA target sequence for NCSTN (NM_015331.1,676-694).
ccccatctttcttcttgaa

SEQ ID NO: 282526 - DNA, 19 bp, Homo sapiens
  siRNA target sequence for NCSTN (NM_015331.1,715-733).
catcaagcagtgctatcaa

SEQ ID NO: 282527 - DNA, 19 bp, Homo sapiens
  siRNA target sequence for NCSTN (NM_015331.1,885-903).
gtgaccccctgtctgatta

SEQ ID NO: 282528 - DNA, 19 bp, Homo sapiens
  siRNA target sequence for NCSTN (NM_015331.1,889-907).
ccccctgtctgattacaat

SEQ ID NO: 282529 - DNA, 19 bp, Homo sapiens
  siRNA target sequence for NCSTN (NM_015331.1,891-909).
ccctgtctgattacaatgt

SEQ ID NO: 282530 - DNA, 19 bp, Homo sapiens
  siRNA target sequence for NCSTN (NM_015331.1,915-933).
gcatgctaaagcctataaa

SEQ ID NO: 282531 - DNA, 19 bp, Homo sapiens
  siRNA target sequence for NCSTN (NM_015331.1,985-1003).
gctggatagtcgttccttt

SEQ ID NO: 282532 - DNA, 19 bp, Homo sapiens
  siRNA target sequence for NCSTN (NM_015331.1,986-1004).
ctggatagtcgttcctttt

SEQ ID NO: 282533 - DNA, 19 bp, Homo sapiens
  siRNA target sequence for NCSTN (NM_015331.1,1129-1147).
ctttcaaggggaaactttt

SEQ ID NO: 282534 - DNA, 19 bp, Homo sapiens
  siRNA target sequence for NCSTN (NM_015331.1,1133-1151).
caaggggaaacttttgact

SEQ ID NO: 282535 - DNA, 19 bp, Homo sapiens
  siRNA target sequence for NCSTN (NM_015331.1,1164-1182).
cgaggatggtctacgatat

SEQ ID NO: 282536 - DNA, 19 bp, Homo sapiens
  siRNA target sequence for NCSTN (NM_015331.1,1238-1256).
ggacaggtggccttaagaa

SEQ ID NO: 282537 - DNA, 19 bp, Homo sapiens
  siRNA target sequence for NCSTN (NM_015331.1,1241-1259).
caggtggccttaagaactt

SEQ ID NO: 282538 - DNA, 19 bp, Homo sapiens
  siRNA target sequence for NCSTN (NM_015331.1,1243-1261).
ggtggccttaagaacttca

SEQ ID NO: 282539 - DNA, 19 bp, Homo sapiens
  siRNA target sequence for NCSTN (NM_015331.1,1246-1264).
ggccttaagaacttcatta

SEQ ID NO: 282540 - DNA, 19 bp, Homo sapiens
  siRNA target sequence for NCSTN (NM_015331.1,1248-1266).
ccttaagaacttcattaga

SEQ ID NO: 282541 - DNA, 19 bp, Homo sapiens
  siRNA target sequence for NCSTN (NM_015331.1,1433-1451).
cttcgagctcgaaacatct

SEQ ID NO: 282542 - DNA, 19 bp, Homo sapiens
  siRNA target sequence for NCSTN (NM_015331.1,1476-1494).
ctggtgccttccataacaa

SEQ ID NO: 282543 - DNA, 19 bp, Homo sapiens
  siRNA target sequence for NCSTN (NM_015331.1,1479-1497).
gtgccttccataacaaata

SEQ ID NO: 282544 - DNA, 19 bp, Homo sapiens
  siRNA target sequence for NCSTN (NM_015331.1,1565-1583).
gaggacctgaactttgtaa

SEQ ID NO: 282545 - DNA, 19 bp, Homo sapiens
  siRNA target sequence for NCSTN (NM_015331.1,1567-1585).
ggacctgaactttgtaaca

SEQ ID NO: 282546 - DNA, 19 bp, Homo sapiens
  siRNA target sequence for NCSTN (NM_015331.1,1621-1639).
gctgggacgtgctctgtat

SEQ ID NO: 282547 - DNA, 19 bp, Homo sapiens
  siRNA target sequence for NCSTN (NM_015331.1,1708-1726).
ctatgggttcctgattaaa

SEQ ID NO: 282548 - DNA, 19 bp, Homo sapiens
  siRNA target sequence for NCSTN (NM_015331.1,1824-1842).
ccaacaccacttatgttgt

SEQ ID NO: 282549 - DNA, 19 bp, Homo sapiens
  siRNA target sequence for NCSTN (NM_015331.1,1830-1848).
ccacttatgttgtacagta

SEQ ID NO: 282550 - DNA, 19 bp, Homo sapiens
  siRNA target sequence for NCSTN (NM_015331.1,1899-1917).
gccaggatccaagtaaagt

SEQ ID NO: 282551 - DNA, 19 bp, Homo sapiens
  siRNA target sequence for NCSTN (NM_015331.1,1923-1941).
gtgaaaacaaggatctgta

SEQ ID NO: 282552 - DNA, 19 bp, Homo sapiens
  siRNA target sequence for NCSTN (NM_015331.1,1958-1976).
cagggccctttgcattcta

SEQ ID NO: 282553 - DNA, 19 bp, Homo sapiens
  siRNA target sequence for NCSTN (NM_015331.1,1962-1980).
gccctttgcattctaatga

SEQ ID NO: 282554 - DNA, 19 bp, Homo sapiens
  siRNA target sequence for NCSTN (NM_015331.1,1996-2014).
ccggtgtgtgcgttctact

SEQ ID NO: 282555 - DNA, 19 bp, Homo sapiens
  siRNA target sequence for NCSTN (NM_015331.1,2005-2023).
gcgttctactgcacgatta

SEQ ID NO: 282556 - DNA, 19 bp, Homo sapiens
  siRNA target sequence for NCSTN (NM_015331.1,2111-2129).
cgtgcccggatatttctca

SEQ ID NO: 282557 - DNA, 19 bp, Homo sapiens
  siRNA target sequence for NCSTN (NM_015331.1,2112-2130).
gtgcccggatatttctcat

SEQ ID NO: 282558 - DNA, 19 bp, Homo sapiens
  siRNA target sequence for NCSTN (NM_015331.1,2197-2215).
cgtcacctactgcatcaat

SEQ ID NO: 282559 - DNA, 19 bp, Homo sapiens
  siRNA target sequence for NDRG2 (NM_016250.1,261-279).
cgatgtgggactcaactat

SEQ ID NO: 282560 - DNA, 19 bp, Homo sapiens
  siRNA target sequence for NDRG2 (NM_016250.1,262-280).
gatgtgggactcaactata

SEQ ID NO: 282561 - DNA, 19 bp, Homo sapiens
  siRNA target sequence for NDRG2 (NM_016250.1,267-285).
gggactcaactataaatct

SEQ ID NO: 282562 - DNA, 19 bp, Homo sapiens
  siRNA target sequence for NDRG2 (NM_016250.1,268-286).
ggactcaactataaatctt

SEQ ID NO: 282563 - DNA, 19 bp, Homo sapiens
  siRNA target sequence for NDRG2 (NM_016250.1,443-461).
gcgtcctgcagtacctaaa

SEQ ID NO: 282564 - DNA, 19 bp, Homo sapiens
  siRNA target sequence for NDRG2 (NM_016250.1,444-462).
cgtcctgcagtacctaaat

SEQ ID NO: 282565 - DNA, 19 bp, Homo sapiens
  siRNA target sequence for NDRG2 (NM_016250.1,445-463).
gtcctgcagtacctaaatt

SEQ ID NO: 282566 - DNA, 19 bp, Homo sapiens
  siRNA target sequence for NDRG2 (NM_016250.1,448-466).
ctgcagtacctaaatttct

SEQ ID NO: 282567 - DNA, 19 bp, Homo sapiens
  siRNA target sequence for NDRG2 (NM_016250.1,451-469).
cagtacctaaatttctcta

SEQ ID NO: 282568 - DNA, 19 bp, Homo sapiens
  siRNA target sequence for NDRG2 (NM_016250.1,501-519).
ctacatcctggcgagatat

SEQ ID NO: 282569 - DNA, 19 bp, Homo sapiens
  siRNA target sequence for NDRG2 (NM_016250.1,512-530).
cgagatatgctcttaacca

SEQ ID NO: 282570 - DNA, 19 bp, Homo sapiens
  siRNA target sequence for NDRG2 (NM_016250.1,547-565).
ggtcttgtcctcatcaaca

SEQ ID NO: 282571 - DNA, 19 bp, Homo sapiens
  siRNA target sequence for NDRG2 (NM_016250.1,626-644).
cttccattccggagatgat

SEQ ID NO: 282572 - DNA, 19 bp, Homo sapiens
  siRNA target sequence for NDRG2 (NM_016250.1,725-743).
cacccaacctggataacat

SEQ ID NO: 282573 - DNA, 19 bp, Homo sapiens
  siRNA target sequence for NDRG2 (NM_016250.1,771-789).
ccgccgagacctgaacttt

SEQ ID NO: 282574 - DNA, 19 bp, Homo sapiens
  siRNA target sequence for NEDF (NM_016079.1,64-82).
gtcaatgagtggtcattga

SEQ ID NO: 282575 - DNA, 19 bp, Homo sapiens
  siRNA target sequence for NEDF (NM_016079.1,113-131).
ggcaaataagggatatcca

SEQ ID NO: 282576 - DNA, 19 bp, Homo sapiens
  siRNA target sequence for NEDF (NM_016079.1,114-132).
gcaaataagggatatccaa

SEQ ID NO: 282577 - DNA, 19 bp, Homo sapiens
  siRNA target sequence for NEDF (NM_016079.1,115-133).
caaataagggatatccaaa

SEQ ID NO: 282578 - DNA, 19 bp, Homo sapiens
  siRNA target sequence for NEDF (NM_016079.1,186-204).
gaaggatgtctgcatagtt

SEQ ID NO: 282579 - DNA, 19 bp, Homo sapiens
  siRNA target sequence for NEDF (NM_016079.1,238-256).
gtgagcaagctgtatgcat

SEQ ID NO: 282580 - DNA, 19 bp, Homo sapiens
  siRNA target sequence for NEDF (NM_016079.1,243-261).
caagctgtatgcatccaaa

SEQ ID NO: 282581 - DNA, 19 bp, Homo sapiens
  siRNA target sequence for NEUGRIN (NM_016645.1,679-697).
ggagcagatacggtattta

SEQ ID NO: 282582 - DNA, 19 bp, Homo sapiens
  siRNA target sequence for NEUGRIN (NM_016645.1,682-700).
gcagatacggtatttacat

SEQ ID NO: 282583 - DNA, 19 bp, Homo sapiens
  siRNA target sequence for NEUGRIN (NM_016645.1,690-708).
ggtatttacatgaggaatt

SEQ ID NO: 282584 - DNA, 19 bp, Homo sapiens
  siRNA target sequence for NEUGRIN (NM_016645.1,733-751).
gttggctgaaggctttgat

SEQ ID NO: 282585 - DNA, 19 bp, Homo sapiens
  siRNA target sequence for NEUGRIN (NM_016645.1,766-784).
gatccgaagagttttaaaa

SEQ ID NO: 282586 - DNA, 19 bp, Homo sapiens
  siRNA target sequence for NOC4 (NM_006067.3,418-436).
ggctctcaccctgattgat

SEQ ID NO: 282587 - DNA, 19 bp, Homo sapiens
  siRNA target sequence for NOC4 (NM_006067.3,422-440).
ctcaccctgattgattcat

SEQ ID NO: 282588 - DNA, 19 bp, Homo sapiens
  siRNA target sequence for NOC4 (NM_006067.3,457-475).
ctacgtgattgctggttat

SEQ ID NO: 282589 - DNA, 19 bp, Homo sapiens
  siRNA target sequence for NOC4 (NM_006067.3,460-478).
cgtgattgctggttattat

SEQ ID NO: 282590 - DNA, 19 bp, Homo sapiens
  siRNA target sequence for NOC4 (NM_006067.3,463-481).
gattgctggttattatcaa

SEQ ID NO: 282591 - DNA, 19 bp, Homo sapiens
  siRNA target sequence for NOC4 (NM_006067.3,468-486).
ctggttattatcaagctaa

SEQ ID NO: 282592 - DNA, 19 bp, Homo sapiens
  siRNA target sequence for NOC4 (NM_006067.3,471-489).
gttattatcaagctaatga

SEQ ID NO: 282593 - DNA, 19 bp, Homo sapiens
  siRNA target sequence for NOC4 (NM_006067.3,567-585).
cgctcatcatggtagacaa

SEQ ID NO: 282594 - DNA, 19 bp, Homo sapiens
  siRNA target sequence for NOC4 (NM_006067.3,581-599).
gacaacaccaagtttacga

SEQ ID NO: 282595 - DNA, 19 bp, Homo sapiens
  siRNA target sequence for NOC4 (NM_006067.3,660-678).
gagacccacaccatgacta

SEQ ID NO: 282596 - DNA, 19 bp, Homo sapiens
  siRNA target sequence for NOC4 (NM_006067.3,742-760).
gacgctcgtggatttcgat

SEQ ID NO: 282597 - DNA, 19 bp, Homo sapiens
  siRNA target sequence for NOC4 (NM_006067.3,744-762).
cgctcgtggatttcgataa

SEQ ID NO: 282598 - DNA, 19 bp, Homo sapiens
  siRNA target sequence for NOC4 (NM_006067.3,770-788).
gatgacattcggaatgact

SEQ ID NO: 282599 - DNA, 19 bp, Homo sapiens
  siRNA target sequence for NOC4 (NM_006067.3,796-814).
cccagagatcaataaagct

SEQ ID NO: 282600 - DNA, 19 bp, Homo sapiens
  siRNA target sequence for NOLA3 (NM_018648.2,124-142).
gcagggagatcgagtctat

SEQ ID NO: 282601 - DNA, 19 bp, Homo sapiens
  siRNA target sequence for NOLA3 (NM_018648.2,139-157).
ctatacgctgaagaaattt

SEQ ID NO: 282602 - DNA, 19 bp, Homo sapiens
  siRNA target sequence for NOLA3 (NM_018648.2,205-223).
cccagatgacaaatactct

SEQ ID NO: 282603 - DNA, 19 bp, Homo sapiens
  siRNA target sequence for NOLA3 (NM_018648.2,227-245).
caccgaatcaccatcaaga

SEQ ID NO: 282604 - DNA, 19 bp, Homo sapiens
  siRNA target sequence for NOLA3 (NM_018648.2,229-247).
ccgaatcaccatcaagaaa

SEQ ID NO: 282605 - DNA, 19 bp, Homo sapiens
  siRNA target sequence for NPC2 (NM_006432.3,163-181).
ccgaaccggtgcagttcaa

SEQ ID NO: 282606 - DNA, 19 bp, Homo sapiens
  siRNA target sequence for NPC2 (NM_006432.3,197-215).
ggatggagttataaaggaa

SEQ ID NO: 282607 - DNA, 19 bp, Homo sapiens
  siRNA target sequence for NPC2 (NM_006432.3,284-302).
caccttcaccagcaatatt

SEQ ID NO: 282608 - DNA, 19 bp, Homo sapiens
  siRNA target sequence for NPC2 (NM_006432.3,286-304).
ccttcaccagcaatattca

SEQ ID NO: 282609 - DNA, 19 bp, Homo sapiens
  siRNA target sequence for NPC2 (NM_006432.3,292-310).
ccagcaatattcagtctaa

SEQ ID NO: 282610 - DNA, 19 bp, Homo sapiens
  siRNA target sequence for NPC2 (NM_006432.3,370-388).
ctgagcctgatggttgtaa

SEQ ID NO: 282611 - DNA, 19 bp, Homo sapiens
  siRNA target sequence for NPC2 (NM_006432.3,374-392).
gcctgatggttgtaagagt

SEQ ID NO: 282612 - DNA, 19 bp, Homo sapiens
  siRNA target sequence for NPC2 (NM_006432.3,457-475).
gcgaatatccctctataaa

SEQ ID NO: 282613 - DNA, 19 bp, Homo sapiens
  siRNA target sequence for NPC2 (NM_006432.3,529-547).
gggaaatcccagtacagat

SEQ ID NO: 282614 - DNA, 19 bp, Homo sapiens
  siRNA target sequence for NPC2 (NM_006432.3,538-556).
cagtacagatcgtttctca

SEQ ID NO: 282615 - DNA, 19 bp, Homo sapiens
  siRNA target sequence for NRM (NM_007243.1,88-106).
gagttcgtgcgctttacct

SEQ ID NO: 282616 - DNA, 19 bp, Homo sapiens
  siRNA target sequence for NRM (NM_007243.1,105-123).
ctcccttcggccacttctt

SEQ ID NO: 282617 - DNA, 19 bp, Homo sapiens
  siRNA target sequence for NRM (NM_007243.1,222-240).
gctcctgcttctatttgtt

SEQ ID NO: 282618 - DNA, 19 bp, Homo sapiens
  siRNA target sequence for NTN2L (NM_006181.1,1560-1578).
cgcatcagcctaaagaagt

SEQ ID NO: 282619 - DNA, 19 bp, Homo sapiens
  siRNA target sequence for NTN2L (NM_006181.1,1561-1579).
gcatcagcctaaagaagtt

SEQ ID NO: 282620 - DNA, 19 bp, Homo sapiens
  siRNA target sequence for NTNG1 (NM_014917.1,820-838).
gggacattatgatttgtgt

SEQ ID NO: 282621 - DNA, 19 bp, Homo sapiens
  siRNA target sequence for NTNG1 (NM_014917.1,863-881).
gggaaagtttgggattaca

SEQ ID NO: 282622 - DNA, 19 bp, Homo sapiens
  siRNA target sequence for NTNG1 (NM_014917.1,864-882).
ggaaagtttgggattacat

SEQ ID NO: 282623 - DNA, 19 bp, Homo sapiens
  siRNA target sequence for NTNG1 (NM_014917.1,896-914).
gaatccacggacatgacaa

SEQ ID NO: 282624 - DNA, 19 bp, Homo sapiens
  siRNA target sequence for NTNG1 (NM_014917.1,903-921).
cggacatgacaaaatatct

SEQ ID NO: 282625 - DNA, 19 bp, Homo sapiens
  siRNA target sequence for NTNG1 (NM_014917.1,932-950).
ctcgatcctccggatatta

SEQ ID NO: 282626 - DNA, 19 bp, Homo sapiens
  siRNA target sequence for NTNG1 (NM_014917.1,935-953).
gatcctccggatattacct

SEQ ID NO: 282627 - DNA, 19 bp, Homo sapiens
  siRNA target sequence for NTNG1 (NM_014917.1,993-1011).
cctacatgtgcaataatga

SEQ ID NO: 282628 - DNA, 19 bp, Homo sapiens
  siRNA target sequence for NTNG1 (NM_014917.1,1119-1137).
ccaagcctctccaggttaa

SEQ ID NO: 282629 - DNA, 19 bp, Homo sapiens
  siRNA target sequence for NTNG1 (NM_014917.1,1124-1142).
cctctccaggttaacatca

SEQ ID NO: 282630 - DNA, 19 bp, Homo sapiens
  siRNA target sequence for NTNG1 (NM_014917.1,1168-1186).
gctaacagacaacatagtt

SEQ ID NO: 282631 - DNA, 19 bp, Homo sapiens
  siRNA target sequence for NTNG1 (NM_014917.1,1175-1193).
gacaacatagttattacct

SEQ ID NO: 282632 - DNA, 19 bp, Homo sapiens
  siRNA target sequence for NTNG1 (NM_014917.1,1202-1220).
gggcgtccagaccaaatga

SEQ ID NO: 282633 - DNA, 19 bp, Homo sapiens
  siRNA target sequence for NTNG1 (NM_014917.1,1203-1221).
ggcgtccagaccaaatgat

SEQ ID NO: 282634 - DNA, 19 bp, Homo sapiens
  siRNA target sequence for NTNG1 (NM_014917.1,1225-1243).
ggagaagtctctcgattat

SEQ ID NO: 282635 - DNA, 19 bp, Homo sapiens
  siRNA target sequence for NTNG1 (NM_014917.1,1254-1272).
ggcagccctatcagtatta

SEQ ID NO: 282636 - DNA, 19 bp, Homo sapiens
  siRNA target sequence for NTNG1 (NM_014917.1,1255-1273).
gcagccctatcagtattat

SEQ ID NO: 282637 - DNA, 19 bp, Homo sapiens
  siRNA target sequence for NTNG1 (NM_014917.1,1307-1325).
cctaaatccgtgaaggatt

SEQ ID NO: 282638 - DNA, 19 bp, Homo sapiens
  siRNA target sequence for NTNG1 (NM_014917.1,1314-1332).
ccgtgaaggatttatcaca

SEQ ID NO: 282639 - DNA, 19 bp, Homo sapiens
  siRNA target sequence for NTNG1 (NM_014917.1,1376-1394).
gggtatacaacaaatagca

SEQ ID NO: 282640 - DNA, 19 bp, Homo sapiens
  siRNA target sequence for NTNG1 (NM_014917.1,1377-1395).
ggtatacaacaaatagcaa

SEQ ID NO: 282641 - DNA, 19 bp, Homo sapiens
  siRNA target sequence for NTNG1 (NM_014917.1,1378-1396).
gtatacaacaaatagcaaa

SEQ ID NO: 282642 - DNA, 19 bp, Homo sapiens
  siRNA target sequence for NTNG1 (NM_014917.1,1420-1438).
caggttcgcgttttttgct

SEQ ID NO: 282643 - DNA, 19 bp, Homo sapiens
  siRNA target sequence for NTNG1 (NM_014917.1,1440-1458).
gacctcgcctacgcaatat

SEQ ID NO: 282644 - DNA, 19 bp, Homo sapiens
  siRNA target sequence for NTNG1 (NM_014917.1,1477-1495).
gctggatacaaccaagaaa

SEQ ID NO: 282645 - DNA, 19 bp, Homo sapiens
  siRNA target sequence for NTNG1 (NM_014917.1,1549-1567).
cgttggggaaatatttgta

SEQ ID NO: 282646 - DNA, 19 bp, Homo sapiens
  siRNA target sequence for NTNG1 (NM_014917.1,1619-1637).
cgaggaaggtgcaagtgta

SEQ ID NO: 282647 - DNA, 19 bp, Homo sapiens
  siRNA target sequence for NTNG1 (NM_014917.1,1623-1641).
gaaggtgcaagtgtaatct

SEQ ID NO: 282648 - DNA, 19 bp, Homo sapiens
  siRNA target sequence for NTNG1 (NM_014917.1,1658-1676).
gtgtatgacaacagcaaat

SEQ ID NO: 282649 - DNA, 19 bp, Homo sapiens
  siRNA target sequence for NTNG1 (NM_014917.1,1804-1822).
ccccagtatttccagtatt

SEQ ID NO: 282650 - DNA, 19 bp, Homo sapiens
  siRNA target sequence for NTNG2 (NM_032536.1,296-314).
catgagaatccctacctat

SEQ ID NO: 282651 - DNA, 19 bp, Homo sapiens
  siRNA target sequence for NTNG2 (NM_032536.1,733-751).
ggaccgcttcgccatcttt

SEQ ID NO: 282652 - DNA, 19 bp, Homo sapiens
  siRNA target sequence for NTNG2 (NM_032536.1,1162-1180).
caaccgctgcagctacatt

SEQ ID NO: 282653 - DNA, 19 bp, Homo sapiens
  siRNA target sequence for NXPH3 (NM_007225.1,275-293).
cgccccatggccaattcca

SEQ ID NO: 282654 - DNA, 19 bp, Homo sapiens
  siRNA target sequence for NXPH3 (NM_007225.1,322-340).
ggaggcttggggcattctt

SEQ ID NO: 282655 - DNA, 19 bp, Homo sapiens
  siRNA target sequence for NXPH3 (NM_007225.1,378-396).
cctcagccaaggtgaagaa

SEQ ID NO: 282656 - DNA, 19 bp, Homo sapiens
  siRNA target sequence for NXPH3 (NM_007225.1,413-431).
gacttctactccaacatca

SEQ ID NO: 282657 - DNA, 19 bp, Homo sapiens
  siRNA target sequence for NXPH3 (NM_007225.1,451-469).
gctcgtcacagggaagatt

SEQ ID NO: 282658 - DNA, 19 bp, Homo sapiens
  siRNA target sequence for NXPH3 (NM_007225.1,495-513).
gcgtccacttccaacacaa

SEQ ID NO: 282659 - DNA, 19 bp, Homo sapiens
  siRNA target sequence for NXPH3 (NM_007225.1,603-621).
ccaaggcctccaaaatctt

SEQ ID NO: 282660 - DNA, 19 bp, Homo sapiens
  siRNA target sequence for NXPH3 (NM_007225.1,815-833).
ccagattacaactaccata

SEQ ID NO: 282661 - DNA, 19 bp, Homo sapiens
  siRNA target sequence for NXPH4 (NM_007224.1,487-505).
ctggggggacttctacttt

SEQ ID NO: 282662 - DNA, 19 bp, Homo sapiens
  siRNA target sequence for NXPH4 (NM_007224.1,845-863).
gagtcacgcgctttcaatt

SEQ ID NO: 282663 - DNA, 19 bp, Homo sapiens
  siRNA target sequence for NXPH4 (NM_007224.1,864-882).
gccacgtggagtatgagaa

SEQ ID NO: 282664 - DNA, 19 bp, Homo sapiens
  siRNA target sequence for NYREN18 (NM_016118.3,124-142).
gggaagacaggattcaact

SEQ ID NO: 282665 - DNA, 19 bp, Homo sapiens
  siRNA target sequence for NYREN18 (NM_016118.3,141-159).
ctttggaaacctccatata

SEQ ID NO: 282666 - DNA, 19 bp, Homo sapiens
  siRNA target sequence for NYREN18 (NM_016118.3,209-227).
gtactctgacagactagaa

SEQ ID NO: 282667 - DNA, 19 bp, Homo sapiens
  siRNA target sequence for NYREN18 (NM_016118.3,313-331).
caacgggaattgctacaat

SEQ ID NO: 282668 - DNA, 19 bp, Homo sapiens
  siRNA target sequence for NYREN18 (NM_016118.3,324-342).
gctacaatcgaggtgtttt

SEQ ID NO: 282669 - DNA, 19 bp, Homo sapiens
  siRNA target sequence for NYREN18 (NM_016118.3,325-343).
ctacaatcgaggtgttttt

SEQ ID NO: 282670 - DNA, 19 bp, Homo sapiens
  siRNA target sequence for NYREN18 (NM_016118.3,513-531).
ggcgtggctcacaatgtga

SEQ ID NO: 282671 - DNA, 19 bp, Homo sapiens
  siRNA target sequence for NYREN18 (NM_016118.3,534-552).
gcgatggtgcttgaactaa

SEQ ID NO: 282672 - DNA, 19 bp, Homo sapiens
  siRNA target sequence for NYREN18 (NM_016118.3,535-553).
cgatggtgcttgaactaaa

SEQ ID NO: 282673 - DNA, 19 bp, Homo sapiens
  siRNA target sequence for NYREN18 (NM_016118.3,542-560).
gcttgaactaaaacaatct

SEQ ID NO: 282674 - DNA, 19 bp, Homo sapiens
  siRNA target sequence for NYREN18 (NM_016118.3,564-582).
gaggacgcgaggaaaaact

SEQ ID NO: 282675 - DNA, 19 bp, Homo sapiens
  siRNA target sequence for NYREN18 (NM_016118.3,574-592).
ggaaaaacttccagttaga

SEQ ID NO: 282676 - DNA, 19 bp, Homo sapiens
  siRNA target sequence for NYREN18 (NM_016118.3,704-722).
gacaccgtacttagacata

SEQ ID NO: 282677 - DNA, 19 bp, Homo sapiens
  siRNA target sequence for NYREN18 (NM_016118.3,708-726).
ccgtacttagacatagcta

SEQ ID NO: 282678 - DNA, 19 bp, Homo sapiens
  siRNA target sequence for NYREN18 (NM_016118.3,709-727).
cgtacttagacatagctaa

SEQ ID NO: 282679 - DNA, 19 bp, Homo sapiens
  siRNA target sequence for NYREN18 (NM_016118.3,729-747).
cagacaggcagatcaatca

SEQ ID NO: 282680 - DNA, 19 bp, Homo sapiens
  siRNA target sequence for NYREN18 (NM_016118.3,731-749).
gacaggcagatcaatcaga

SEQ ID NO: 282681 - DNA, 19 bp, Homo sapiens
  siRNA target sequence for NYREN18 (NM_016118.3,746-764).
cagaattcccccatcagaa

SEQ ID NO: 282682 - DNA, 19 bp, Homo sapiens
  siRNA target sequence for NYREN18 (NM_016118.3,852-870).
ctgttggacgctgacaaat

SEQ ID NO: 282683 - DNA, 19 bp, Homo sapiens
  siRNA target sequence for NYREN18 (NM_016118.3,897-915).
ctggacacagtggataact

SEQ ID NO: 282684 - DNA, 19 bp, Homo sapiens
  siRNA target sequence for NYREN18 (NM_016118.3,919-937).
ccgtcctccagctggatat

SEQ ID NO: 282685 - DNA, 19 bp, Homo sapiens
  siRNA target sequence for NYREN18 (NM_016118.3,920-938).
cgtcctccagctggatata

SEQ ID NO: 282686 - DNA, 19 bp, Homo sapiens
  siRNA target sequence for NYREN18 (NM_016118.3,924-942).
ctccagctggatatagtgt

SEQ ID NO: 282687 - DNA, 19 bp, Homo sapiens
  siRNA target sequence for NYREN18 (NM_016118.3,933-951).
gatatagtgtggtgttact

SEQ ID NO: 282688 - DNA, 19 bp, Homo sapiens
  siRNA target sequence for NYREN18 (NM_016118.3,1027-1045).
gttacggagaaaatcatca

SEQ ID NO: 282689 - DNA, 19 bp, Homo sapiens
  siRNA target sequence for NYREN18 (NM_016118.3,1050-1068).
ctggtccacataaaaggaa

SEQ ID NO: 282690 - DNA, 19 bp, Homo sapiens
  siRNA target sequence for NYREN18 (NM_016118.3,1116-1134).
gggatccgaaactatcaca

SEQ ID NO: 282691 - DNA, 19 bp, Homo sapiens
  siRNA target sequence for NYREN18 (NM_016118.3,1172-1190).
ggcacgtcagctctttaaa

SEQ ID NO: 282692 - DNA, 19 bp, Homo sapiens
  siRNA target sequence for NYREN18 (NM_016118.3,1226-1244).
gttgcagttggggtttact

SEQ ID NO: 282693 - DNA, 19 bp, Homo sapiens
  siRNA target sequence for NYREN18 (NM_016118.3,1296-1314).
gcggccactcatattacca

SEQ ID NO: 282694 - DNA, 19 bp, Homo sapiens
  siRNA target sequence for NYREN18 (NM_016118.3,1297-1315).
cggccactcatattaccaa

SEQ ID NO: 282695 - DNA, 19 bp, Homo sapiens
  siRNA target sequence for NYREN18 (NM_016118.3,1323-1341).
gaggaactggcccaaataa

SEQ ID NO: 282696 - DNA, 19 bp, Homo sapiens
  siRNA target sequence for NYREN18 (NM_016118.3,1446-1464).
cctcagatgtggtggttaa

SEQ ID NO: 282697 - DNA, 19 bp, Homo sapiens
  siRNA target sequence for NYREN18 (NM_016118.3,1456-1474).
ggtggttaaatgattccaa

SEQ ID NO: 282698 - DNA, 19 bp, Homo sapiens
  siRNA target sequence for NYREN18 (NM_016118.3,1484-1502).
cgacaaccgtcaagaaagt

SEQ ID NO: 282699 - DNA, 19 bp, Homo sapiens
  siRNA target sequence for NYREN18 (NM_016118.3,1741-1759).
cagaggccgtcaatgagat

SEQ ID NO: 282700 - DNA, 19 bp, Homo sapiens
  siRNA target sequence for NYREN18 (NM_016118.3,1835-1853).
gtacctatcctatgtagaa

SEQ ID NO: 282701 - DNA, 19 bp, Homo sapiens
  siRNA target sequence for NYREN18 (NM_016118.3,1843-1861).
cctatgtagaaaataggaa

SEQ ID NO: 282702 - DNA, 19 bp, Homo sapiens
  siRNA target sequence for OFD1 (NM_003611.1,317-335).
ggcgcagtccaacatgttt

SEQ ID NO: 282703 - DNA, 19 bp, Homo sapiens
  siRNA target sequence for OFD1 (NM_003611.1,318-336).
gcgcagtccaacatgttta

SEQ ID NO: 282704 - DNA, 19 bp, Homo sapiens
  siRNA target sequence for OFD1 (NM_003611.1,363-381).
gaactgcgcaaaaagctat

SEQ ID NO: 282705 - DNA, 19 bp, Homo sapiens
  siRNA target sequence for OFD1 (NM_003611.1,400-418).
ggggtatactggatacact

SEQ ID NO: 282706 - DNA, 19 bp, Homo sapiens
  siRNA target sequence for OFD1 (NM_003611.1,480-498).
ctgcagcctcggtccattt

SEQ ID NO: 282707 - DNA, 19 bp, Homo sapiens
  siRNA target sequence for OFD1 (NM_003611.1,485-503).
gcctcggtccatttcagta

SEQ ID NO: 282708 - DNA, 19 bp, Homo sapiens
  siRNA target sequence for OFD1 (NM_003611.1,526-544).
gcgcctctaactctttagt

SEQ ID NO: 282709 - DNA, 19 bp, Homo sapiens
  siRNA target sequence for OFD1 (NM_003611.1,538-556).
ctttagtggcagatcactt

SEQ ID NO: 282710 - DNA, 19 bp, Homo sapiens
  siRNA target sequence for OFD1 (NM_003611.1,545-563).
ggcagatcacttacaaaga

SEQ ID NO: 282711 - DNA, 19 bp, Homo sapiens
  siRNA target sequence for OFD1 (NM_003611.1,546-564).
gcagatcacttacaaagat

SEQ ID NO: 282712 - DNA, 19 bp, Homo sapiens
  siRNA target sequence for OFD1 (NM_003611.1,565-583).
gtggctatgaatattcact

SEQ ID NO: 282713 - DNA, 19 bp, Homo sapiens
  siRNA target sequence for OFD1 (NM_003611.1,567-585).
ggctatgaatattcacttt

SEQ ID NO: 282714 - DNA, 19 bp, Homo sapiens
  siRNA target sequence for OFD1 (NM_003611.1,638-656).
ggatctattacaactcatt

SEQ ID NO: 282715 - DNA, 19 bp, Homo sapiens
  siRNA target sequence for OFD1 (NM_003611.1,673-691).
ccagtctctacaaatcact

SEQ ID NO: 282716 - DNA, 19 bp, Homo sapiens
  siRNA target sequence for OFD1 (NM_003611.1,692-710).
ggtttcaggatctgataaa

SEQ ID NO: 282717 - DNA, 19 bp, Homo sapiens
  siRNA target sequence for OFD1 (NM_003611.1,765-783).
caagctaaagagagttgta

SEQ ID NO: 282718 - DNA, 19 bp, Homo sapiens
  siRNA target sequence for OFD1 (NM_003611.1,768-786).
gctaaagagagttgtaata

SEQ ID NO: 282719 - DNA, 19 bp, Homo sapiens
  siRNA target sequence for OFD1 (NM_003611.1,774-792).
gagagttgtaatatggaaa

SEQ ID NO: 282720 - DNA, 19 bp, Homo sapiens
  siRNA target sequence for OFD1 (NM_003611.1,795-813).
cagacaagttcgacattta

SEQ ID NO: 282721 - DNA, 19 bp, Homo sapiens
  siRNA target sequence for OFD1 (NM_003611.1,836-854).
gcttcagcttattgatgat

SEQ ID NO: 282722 - DNA, 19 bp, Homo sapiens
  siRNA target sequence for OFD1 (NM_003611.1,868-886).
cttaccctcagcgtatcaa

SEQ ID NO: 282723 - DNA, 19 bp, Homo sapiens
  siRNA target sequence for OFD1 (NM_003611.1,876-894).
cagcgtatcaagttcgaat

SEQ ID NO: 282724 - DNA, 19 bp, Homo sapiens
  siRNA target sequence for OFD1 (NM_003611.1,879-897).
cgtatcaagttcgaatctt

SEQ ID NO: 282725 - DNA, 19 bp, Homo sapiens
  siRNA target sequence for OFD1 (NM_003611.1,884-902).
caagttcgaatctttagaa

SEQ ID NO: 282726 - DNA, 19 bp, Homo sapiens
  siRNA target sequence for OFD1 (NM_003611.1,908-926).
gctaaatgagtataagaga

SEQ ID NO: 282727 - DNA, 19 bp, Homo sapiens
  siRNA target sequence for OFD1 (NM_003611.1,956-974).
gtgtcaaaagttgaagttt

SEQ ID NO: 282728 - DNA, 19 bp, Homo sapiens
  siRNA target sequence for OFD1 (NM_003611.1,958-976).
gtcaaaagttgaagttttt

SEQ ID NO: 282729 - DNA, 19 bp, Homo sapiens
  siRNA target sequence for OFD1 (NM_003611.1,981-999).
gataccgagatagcaaaaa

SEQ ID NO: 282730 - DNA, 19 bp, Homo sapiens
  siRNA target sequence for OFD1 (NM_003611.1,985-1003).
ccgagatagcaaaaattaa

SEQ ID NO: 282731 - DNA, 19 bp, Homo sapiens
  siRNA target sequence for OFD1 (NM_003611.1,1089-1107).
ctcgttcttcgggaaaaga

SEQ ID NO: 282732 - DNA, 19 bp, Homo sapiens
  siRNA target sequence for OFD1 (NM_003611.1,1127-1145).
caagcaccaagagattgaa

SEQ ID NO: 282733 - DNA, 19 bp, Homo sapiens
  siRNA target sequence for OFD1 (NM_003611.1,1130-1148).
gcaccaagagattgaaaca

SEQ ID NO: 282734 - DNA, 19 bp, Homo sapiens
  siRNA target sequence for OFD1 (NM_003611.1,1307-1325).
gcagaatataaagagtttt

SEQ ID NO: 282735 - DNA, 19 bp, Homo sapiens
  siRNA target sequence for OFD1 (NM_003611.1,1386-1404).
gatgactacatcattagaa

SEQ ID NO: 282736 - DNA, 19 bp, Homo sapiens
  siRNA target sequence for OFD1 (NM_003611.1,1389-1407).
gactacatcattagaacta

SEQ ID NO: 282737 - DNA, 19 bp, Homo sapiens
  siRNA target sequence for OFD1 (NM_003611.1,1394-1412).
catcattagaactaatcga

SEQ ID NO: 282738 - DNA, 19 bp, Homo sapiens
  siRNA target sequence for OFD1 (NM_003611.1,1402-1420).
gaactaatcgactgattga

SEQ ID NO: 282739 - DNA, 19 bp, Homo sapiens
  siRNA target sequence for OFD1 (NM_003611.1,1410-1428).
cgactgattgaagatgaaa

SEQ ID NO: 282740 - DNA, 19 bp, Homo sapiens
  siRNA target sequence for OFD1 (NM_003611.1,1464-1482).
gagctcatagctattaatt

SEQ ID NO: 282741 - DNA, 19 bp, Homo sapiens
  siRNA target sequence for OFD1 (NM_003611.1,1466-1484).
gctcatagctattaattca

SEQ ID NO: 282742 - DNA, 19 bp, Homo sapiens
  siRNA target sequence for OFD1 (NM_003611.1,1493-1511).
ggaactcaatcaatctgta

SEQ ID NO: 282743 - DNA, 19 bp, Homo sapiens
  siRNA target sequence for OFD1 (NM_003611.1,1527-1545).
cttgagcttgaattagagt

SEQ ID NO: 282744 - DNA, 19 bp, Homo sapiens
  siRNA target sequence for OFD1 (NM_003611.1,1554-1572).
gcccagtctttggcaataa

SEQ ID NO: 282745 - DNA, 19 bp, Homo sapiens
  siRNA target sequence for OFD1 (NM_003611.1,1613-1631).
gagtgattattcactacta

SEQ ID NO: 282746 - DNA, 19 bp, Homo sapiens
  siRNA target sequence for OFD1 (NM_003611.1,1615-1633).
gtgattattcactactaaa

SEQ ID NO: 282747 - DNA, 19 bp, Homo sapiens
  siRNA target sequence for OFD1 (NM_003611.1,1743-1761).
gaacttgcagtctttcaga

SEQ ID NO: 282748 - DNA, 19 bp, Homo sapiens
  siRNA target sequence for OFD1 (NM_003611.1,1797-1815).
gagcatgaggagttcgaaa

SEQ ID NO: 282749 - DNA, 19 bp, Homo sapiens
  siRNA target sequence for OFD1 (NM_003611.1,1822-1840).
ggcaagctctgcacaaaca

SEQ ID NO: 282750 - DNA, 19 bp, Homo sapiens
  siRNA target sequence for OFD1 (NM_003611.1,1890-1908).
ggttacaaagcttctgtaa

SEQ ID NO: 282751 - DNA, 19 bp, Homo sapiens
  siRNA target sequence for OFD1 (NM_003611.1,1895-1913).
caaagcttctgtaaagagt

SEQ ID NO: 282752 - DNA, 19 bp, Homo sapiens
  siRNA target sequence for OFD1 (NM_003611.1,1966-1984).
ccctagagaatgaagtgta

SEQ ID NO: 282753 - DNA, 19 bp, Homo sapiens
  siRNA target sequence for OFD1 (NM_003611.1,1977-1995).
gaagtgtactgcaatccaa

SEQ ID NO: 282754 - DNA, 19 bp, Homo sapiens
  siRNA target sequence for OFD1 (NM_003611.1,2006-2024).
gatcgatcgttctgtcaat

SEQ ID NO: 282755 - DNA, 19 bp, Homo sapiens
  siRNA target sequence for OFD1 (NM_003611.1,2010-2028).
gatcgttctgtcaatggat

SEQ ID NO: 282756 - DNA, 19 bp, Homo sapiens
  siRNA target sequence for OFD1 (NM_003611.1,2013-2031).
cgttctgtcaatggattaa

SEQ ID NO: 282757 - DNA, 19 bp, Homo sapiens
  siRNA target sequence for OFD1 (NM_003611.1,2048-2066).
gccttgcaatggtgagata

SEQ ID NO: 282758 - DNA, 19 bp, Homo sapiens
  siRNA target sequence for OFD1 (NM_003611.1,2061-2079).
gagataagtggggatttct

SEQ ID NO: 282759 - DNA, 19 bp, Homo sapiens
  siRNA target sequence for OFD1 (NM_003611.1,2105-2123).
cgttctagcacgtatggtt

SEQ ID NO: 282760 - DNA, 19 bp, Homo sapiens
  siRNA target sequence for OFD1 (NM_003611.1,2121-2139).
gttgcatcaaggatcacaa

SEQ ID NO: 282761 - DNA, 19 bp, Homo sapiens
  siRNA target sequence for OFD1 (NM_003611.1,2203-2221).
ctaaggcaagggtcaaaga

SEQ ID NO: 282762 - DNA, 19 bp, Homo sapiens
  siRNA target sequence for OFD1 (NM_003611.1,2232-2250).
gaggccgaacgcttggaaa

SEQ ID NO: 282763 - DNA, 19 bp, Homo sapiens
  siRNA target sequence for OFD1 (NM_003611.1,2267-2285).
ccatcggagagtcattaaa

SEQ ID NO: 282764 - DNA, 19 bp, Homo sapiens
  siRNA target sequence for OFD1 (NM_003611.1,2268-2286).
catcggagagtcattaaaa

SEQ ID NO: 282765 - DNA, 19 bp, Homo sapiens
  siRNA target sequence for OFD1 (NM_003611.1,2271-2289).
cggagagtcattaaaaact

SEQ ID NO: 282766 - DNA, 19 bp, Homo sapiens
  siRNA target sequence for OFD1 (NM_003611.1,2273-2291).
gagagtcattaaaaactct

SEQ ID NO: 282767 - DNA, 19 bp, Homo sapiens
  siRNA target sequence for OFD1 (NM_003611.1,2365-2383).
gttccccggaaagacatat

SEQ ID NO: 282768 - DNA, 19 bp, Homo sapiens
  siRNA target sequence for OFD1 (NM_003611.1,2368-2386).
ccccggaaagacatatttt

SEQ ID NO: 282769 - DNA, 19 bp, Homo sapiens
  siRNA target sequence for OFD1 (NM_003611.1,2421-2439).
gtgggcacacttgaagaaa

SEQ ID NO: 282770 - DNA, 19 bp, Homo sapiens
  siRNA target sequence for OFD1 (NM_003611.1,2542-2560).
gaagcctcgaaagtgaaat

SEQ ID NO: 282771 - DNA, 19 bp, Homo sapiens
  siRNA target sequence for OFD1 (NM_003611.1,2602-2620).
gtccttgtcctgacagaat

SEQ ID NO: 282772 - DNA, 19 bp, Homo sapiens
  siRNA target sequence for OFD1 (NM_003611.1,2677-2695).
gccctccggagcagaaagt

SEQ ID NO: 282773 - DNA, 19 bp, Homo sapiens
  siRNA target sequence for OFD1 (NM_003611.1,2690-2708).
gaaagtgggtctttatcga

SEQ ID NO: 282774 - DNA, 19 bp, Homo sapiens
  siRNA target sequence for OFD1 (NM_003611.1,2756-2774).
gctagcttttaaggataat

SEQ ID NO: 282775 - DNA, 19 bp, Homo sapiens
  siRNA target sequence for OFD1 (NM_003611.1,2769-2787).
gataatgaggagtttgaat

SEQ ID NO: 282776 - DNA, 19 bp, Homo sapiens
  siRNA target sequence for OFD1 (NM_003611.1,2777-2795).
ggagtttgaatcatctttt

SEQ ID NO: 282777 - DNA, 19 bp, Homo sapiens
  siRNA target sequence for OFD1 (NM_003611.1,2906-2924).
cccaagtgtagatcagaaa

SEQ ID NO: 282778 - DNA, 19 bp, Homo sapiens
  siRNA target sequence for OFD1 (NM_003611.1,3037-3055).
gaagagaactagaaaaact

SEQ ID NO: 282779 - DNA, 19 bp, Homo sapiens
  siRNA target sequence for OFD1 (NM_003611.1,3132-3150).
gaaatgagtaatcaagaaa

SEQ ID NO: 282780 - DNA, 19 bp, Homo sapiens
  siRNA target sequence for OFD1 (NM_003611.1,3166-3184).
ctcacagtgaaaatccttt

SEQ ID NO: 282781 - DNA, 19 bp, Homo sapiens
  siRNA target sequence for OFD1 (NM_003611.1,3230-3248).
ggcagataagagctcaaaa

SEQ ID NO: 282782 - DNA, 19 bp, Homo sapiens
  siRNA target sequence for OFD1 (NM_003611.1,3275-3293).
ggacacgctgcaatctagt

SEQ ID NO: 282783 - DNA, 19 bp, Homo sapiens
  siRNA target sequence for OFD1 (NM_003611.1,3281-3299).
gctgcaatctagtgacaaa

SEQ ID NO: 282784 - DNA, 19 bp, Homo sapiens
  siRNA target sequence for OFD1 (NM_003611.1,3294-3312).
gacaaagtcgaaagtttaa

SEQ ID NO: 282785 - DNA, 19 bp, Homo sapiens
  siRNA target sequence for OTOF (NM_004802.2,641-659).
gtcaagacgctcttcctta

SEQ ID NO: 282786 - DNA, 19 bp, Homo sapiens
  siRNA target sequence for OTOF (NM_004802.2,1063-1081).
ggacgatccgcccatcatt

SEQ ID NO: 282787 - DNA, 19 bp, Homo sapiens
  siRNA target sequence for OTOF (NM_004802.2,1067-1085).
gatccgcccatcattgtca

SEQ ID NO: 282788 - DNA, 19 bp, Homo sapiens
  siRNA target sequence for OTOF (NM_004802.2,1071-1089).
cgcccatcattgtcattga

SEQ ID NO: 282789 - DNA, 19 bp, Homo sapiens
  siRNA target sequence for OTOF (NM_004802.2,1072-1090).
gcccatcattgtcattgaa

SEQ ID NO: 282790 - DNA, 19 bp, Homo sapiens
  siRNA target sequence for OTOF (NM_004802.2,1194-1212).
cacctcagctcgagtacta

SEQ ID NO: 282791 - DNA, 19 bp, Homo sapiens
  siRNA target sequence for OTOF (NM_004802.2,1404-1422).
ggggcctacgggacctaaa

SEQ ID NO: 282792 - DNA, 19 bp, Homo sapiens
  siRNA target sequence for OTOF (NM_004802.2,1491-1509).
cgtccctgatccacaatta

SEQ ID NO: 282793 - DNA, 19 bp, Homo sapiens
  siRNA target sequence for OTOF (NM_004802.2,1496-1514).
ctgatccacaattataaga

SEQ ID NO: 282794 - DNA, 19 bp, Homo sapiens
  siRNA target sequence for OTOF (NM_004802.2,1659-1677).
ccctgcgacgcttcatcta

SEQ ID NO: 282795 - DNA, 19 bp, Homo sapiens
  siRNA target sequence for OTOF (NM_004802.2,1780-1798).
gctggacgcgacttctgaa

SEQ ID NO: 282796 - DNA, 19 bp, Homo sapiens
  siRNA target sequence for OTOF (NM_004802.2,1945-1963).
ggagcaacttcgacaacaa

SEQ ID NO: 282797 - DNA, 19 bp, Homo sapiens
  siRNA target sequence for OTOF (NM_004802.2,2173-2191).
gtccgagtttgataacttt

SEQ ID NO: 282798 - DNA, 19 bp, Homo sapiens
  siRNA target sequence for OTOF (NM_004802.2,2226-2244).
gcaagaccggggatgatga

SEQ ID NO: 282799 - DNA, 19 bp, Homo sapiens
  siRNA target sequence for OTOF (NM_004802.2,2289-2307).
gctccctctgcgtgtacaa

SEQ ID NO: 282800 - DNA, 19 bp, Homo sapiens
  siRNA target sequence for OTOF (NM_004802.2,2292-2310).
ccctctgcgtgtacaaagt

SEQ ID NO: 282801 - DNA, 19 bp, Homo sapiens
  siRNA target sequence for OTOF (NM_004802.2,2382-2400).
gcaatgaccccatcaatgt

SEQ ID NO: 282802 - DNA, 19 bp, Homo sapiens
  siRNA target sequence for OTOF (NM_004802.2,2593-2611).
gctgacggtggctgtgtat

SEQ ID NO: 282803 - DNA, 19 bp, Homo sapiens
  siRNA target sequence for OTOF (NM_004802.2,2719-2737).
ctccacacatggctacaat

SEQ ID NO: 282804 - DNA, 19 bp, Homo sapiens
  siRNA target sequence for OTOF (NM_004802.2,2721-2739).
ccacacatggctacaatat

SEQ ID NO: 282805 - DNA, 19 bp, Homo sapiens
  siRNA target sequence for OTOF (NM_004802.2,3375-3393).
gggacgagaccgagtacaa

SEQ ID NO: 282806 - DNA, 19 bp, Homo sapiens
  siRNA target sequence for OTOF (NM_004802.2,3551-3569).
cccctcgtgtccatcttca

SEQ ID NO: 282807 - DNA, 19 bp, Homo sapiens
  siRNA target sequence for OTOF (NM_004802.2,3650-3668).
gctgagctgcatttactga

SEQ ID NO: 282808 - DNA, 19 bp, Homo sapiens
  siRNA target sequence for OTOF (NM_004802.2,3743-3761).
cccgacacgagcttcatct

SEQ ID NO: 282809 - DNA, 19 bp, Homo sapiens
  siRNA target sequence for OTOF (NM_004802.2,3816-3834).
ggctgctcctcaaactgtt

SEQ ID NO: 282810 - DNA, 19 bp, Homo sapiens
  siRNA target sequence for OTOF (NM_194248.1,179-197).
gaccggatcgccaaagtga

SEQ ID NO: 282811 - DNA, 19 bp, Homo sapiens
  siRNA target sequence for OTOF (NM_194248.1,183-201).
ggatcgccaaagtgacttt

SEQ ID NO: 282812 - DNA, 19 bp, Homo sapiens
  siRNA target sequence for OTOF (NM_194248.1,198-216).
ctttccgagggcaatcctt

SEQ ID NO: 282813 - DNA, 19 bp, Homo sapiens
  siRNA target sequence for OTOF (NM_194248.1,203-221).
cgagggcaatccttctact

SEQ ID NO: 282814 - DNA, 19 bp, Homo sapiens
  siRNA target sequence for OTOF (NM_194248.1,285-303).
ccagcagcatcgacagaaa

SEQ ID NO: 282815 - DNA, 19 bp, Homo sapiens
  siRNA target sequence for OTOF (NM_194248.1,286-304).
cagcagcatcgacagaaat

SEQ ID NO: 282816 - DNA, 19 bp, Homo sapiens
  siRNA target sequence for OTOF (NM_194248.1,415-433).
gactgacacgctgattgat

SEQ ID NO: 282817 - DNA, 19 bp, Homo sapiens
  siRNA target sequence for OTOF (NM_194248.1,529-547).
gggagatgagtctcttcaa

SEQ ID NO: 282818 - DNA, 19 bp, Homo sapiens
  siRNA target sequence for OTOF (NM_194248.1,805-823).
cacagctctcaccactaat

SEQ ID NO: 282819 - DNA, 19 bp, Homo sapiens
  siRNA target sequence for OTOF (NM_194248.1,807-825).
cagctctcaccactaatgt

SEQ ID NO: 282820 - DNA, 19 bp, Homo sapiens
  siRNA target sequence for OTOF (NM_194248.1,835-853).
gcgatctaagccagacatt

SEQ ID NO: 282821 - DNA, 19 bp, Homo sapiens
  siRNA target sequence for OTOF (NM_194248.1,836-854).
cgatctaagccagacatta

SEQ ID NO: 282822 - DNA, 19 bp, Homo sapiens
  siRNA target sequence for OTOF (NM_194248.1,999-1017).
ccactaactgcccctatta

SEQ ID NO: 282823 - DNA, 19 bp, Homo sapiens
  siRNA target sequence for OTOF (NM_194248.1,1011-1029).
cctattacaacgagtactt

SEQ ID NO: 282824 - DNA, 19 bp, Homo sapiens
  siRNA target sequence for OTOF (NM_194248.1,1050-1068).
ctccggatgtcatgtttga

SEQ ID NO: 282825 - DNA, 19 bp, Homo sapiens
  siRNA target sequence for OTOF (NM_194248.1,1292-1310).
ccccacaaggccaatgaga

SEQ ID NO: 282826 - DNA, 19 bp, Homo sapiens
  siRNA target sequence for OTOF (NM_194248.1,1309-1327).
gaccgacgaagatgacatt

SEQ ID NO: 282827 - DNA, 19 bp, Homo sapiens
  siRNA target sequence for OTOF (NM_194248.1,1311-1329).
ccgacgaagatgacattga

SEQ ID NO: 282828 - DNA, 19 bp, Homo sapiens
  siRNA target sequence for OTOF (NM_194248.1,1378-1396).
ccggttctatgtgaaaatt

SEQ ID NO: 282829 - DNA, 19 bp, Homo sapiens
  siRNA target sequence for OTOF (NM_194248.1,1379-1397).
cggttctatgtgaaaattt

SEQ ID NO: 282830 - DNA, 19 bp, Homo sapiens
  siRNA target sequence for OTOF (NM_194248.1,1409-1427).
gggctgccccgtatgaaca

SEQ ID NO: 282831 - DNA, 19 bp, Homo sapiens
  siRNA target sequence for OTOF (NM_194248.1,1412-1430).
ctgccccgtatgaacacaa

SEQ ID NO: 282832 - DNA, 19 bp, Homo sapiens
  siRNA target sequence for OTOF (NM_194248.1,1431-1449).
gcctcatggccaatgtaaa

SEQ ID NO: 282833 - DNA, 19 bp, Homo sapiens
  siRNA target sequence for OTOF (NM_194248.1,1433-1451).
ctcatggccaatgtaaaga

SEQ ID NO: 282834 - DNA, 19 bp, Homo sapiens
  siRNA target sequence for OTOF (NM_194248.1,1454-1472).
gctttcatcggtgaaaaca

SEQ ID NO: 282835 - DNA, 19 bp, Homo sapiens
  siRNA target sequence for OTOF (NM_194248.1,1489-1507).
ctacgtgcaagtcttcttt

SEQ ID NO: 282836 - DNA, 19 bp, Homo sapiens
  siRNA target sequence for OTOF (NM_194248.1,1511-1529).
ggccagaagggcaagactt

SEQ ID NO: 282837 - DNA, 19 bp, Homo sapiens
  siRNA target sequence for OTOF (NM_194248.1,1653-1671).
ccatcggcacccacttcat

SEQ ID NO: 282838 - DNA, 19 bp, Homo sapiens
  siRNA target sequence for OTOF (NM_194248.1,1669-1687).
cattgacctgcgcaagatt

SEQ ID NO: 282839 - DNA, 19 bp, Homo sapiens
  siRNA target sequence for OTOF (NM_194248.1,1673-1691).
gacctgcgcaagatttcta

SEQ ID NO: 282840 - DNA, 19 bp, Homo sapiens
  siRNA target sequence for OTOF (NM_194248.1,1675-1693).
cctgcgcaagatttctaat

SEQ ID NO: 282841 - DNA, 19 bp, Homo sapiens
  siRNA target sequence for OTOF (NM_194248.1,1748-1766).
ggctccacacgtaactaca

SEQ ID NO: 282842 - DNA, 19 bp, Homo sapiens
  siRNA target sequence for OTOF (NM_194248.1,1927-1945).
ggagagctgtgcaggtaaa

SEQ ID NO: 282843 - DNA, 19 bp, Homo sapiens
  siRNA target sequence for OTOF (NM_194248.1,2044-2062).
ctatgggaacgaagttgat

SEQ ID NO: 282844 - DNA, 19 bp, Homo sapiens
  siRNA target sequence for OTOF (NM_194248.1,2249-2267).
cgaaagccctgcatctaca

SEQ ID NO: 282845 - DNA, 19 bp, Homo sapiens
  siRNA target sequence for OTOF (NM_194323.1,3773-3791).
cctctcaagtccatcaagt

SEQ ID NO: 282846 - DNA, 19 bp, Homo sapiens
  siRNA target sequence for OTOF (NM_194323.1,3807-3825).
ggtacaagtggctcatcat

SEQ ID NO: 282847 - DNA, 19 bp, Homo sapiens
  siRNA target sequence for OXR1 (NM_181354.2,380-398).
cctaaagggactattgagt

SEQ ID NO: 282848 - DNA, 19 bp, Homo sapiens
  siRNA target sequence for OXR1 (NM_181354.2,381-399).
ctaaagggactattgagta

SEQ ID NO: 282849 - DNA, 19 bp, Homo sapiens
  siRNA target sequence for OXR1 (NM_181354.2,388-406).
gactattgagtatactgtt

SEQ ID NO: 282850 - DNA, 19 bp, Homo sapiens
  siRNA target sequence for OXR1 (NM_181354.2,429-447).
gcatagccctgaagtttga

SEQ ID NO: 282851 - DNA, 19 bp, Homo sapiens
  siRNA target sequence for OXR1 (NM_181354.2,430-448).
catagccctgaagtttgat

SEQ ID NO: 282852 - DNA, 19 bp, Homo sapiens
  siRNA target sequence for OXR1 (NM_181354.2,450-468).
caacacctaacgaacttgt

SEQ ID NO: 282853 - DNA, 19 bp, Homo sapiens
  siRNA target sequence for OXR1 (NM_181354.2,453-471).
cacctaacgaacttgttca

SEQ ID NO: 282854 - DNA, 19 bp, Homo sapiens
  siRNA target sequence for OXR1 (NM_181354.2,455-473).
cctaacgaacttgttcaat

SEQ ID NO: 282855 - DNA, 19 bp, Homo sapiens
  siRNA target sequence for OXR1 (NM_181354.2,460-478).
cgaacttgttcaattaaat

SEQ ID NO: 282856 - DNA, 19 bp, Homo sapiens
  siRNA target sequence for OXR1 (NM_181354.2,551-569).
gagagctctccatctctaa

SEQ ID NO: 282857 - DNA, 19 bp, Homo sapiens
  siRNA target sequence for OXR1 (NM_181354.2,680-698).
cgacctgcacgagttgtat

SEQ ID NO: 282858 - DNA, 19 bp, Homo sapiens
  siRNA target sequence for OXR1 (NM_181354.2,683-701).
cctgcacgagttgtatctt

SEQ ID NO: 282859 - DNA, 19 bp, Homo sapiens
  siRNA target sequence for OXR1 (NM_181354.2,689-707).
cgagttgtatcttcaactt

SEQ ID NO: 282860 - DNA, 19 bp, Homo sapiens
  siRNA target sequence for OXR1 (NM_181354.2,712-730).
ggaggaggaagcatttact

SEQ ID NO: 282861 - DNA, 19 bp, Homo sapiens
  siRNA target sequence for OXR1 (NM_181354.2,793-811).
gctgctagttacaccaaat

SEQ ID NO: 282862 - DNA, 19 bp, Homo sapiens
  siRNA target sequence for OXR1 (NM_181354.2,794-812).
ctgctagttacaccaaata

SEQ ID NO: 282863 - DNA, 19 bp, Homo sapiens
  siRNA target sequence for OXR1 (NM_181354.2,797-815).
ctagttacaccaaataata

SEQ ID NO: 282864 - DNA, 19 bp, Homo sapiens
  siRNA target sequence for OXR1 (NM_181354.2,800-818).
gttacaccaaataatataa

SEQ ID NO: 282865 - DNA, 19 bp, Homo sapiens
  siRNA target sequence for OXR1 (NM_181354.2,820-838).
gtttgatccacataaaaat

SEQ ID NO: 282866 - DNA, 19 bp, Homo sapiens
  siRNA target sequence for OXR1 (NM_181354.2,877-895).
catcatgtgtccaatggaa

SEQ ID NO: 282867 - DNA, 19 bp, Homo sapiens
  siRNA target sequence for OXR1 (NM_181354.2,908-926).
gctgcaatgtacaaagaaa

SEQ ID NO: 282868 - DNA, 19 bp, Homo sapiens
  siRNA target sequence for OXR1 (NM_181354.2,946-964).
ggaatctttacccatagat

SEQ ID NO: 282869 - DNA, 19 bp, Homo sapiens
  siRNA target sequence for OXR1 (NM_181354.2,947-965).
gaatctttacccatagata

SEQ ID NO: 282870 - DNA, 19 bp, Homo sapiens
  siRNA target sequence for OXR1 (NM_181354.2,1045-1063).
ccgagatgcaggtaatgat

SEQ ID NO: 282871 - DNA, 19 bp, Homo sapiens
  siRNA target sequence for OXR1 (NM_181354.2,1046-1064).
cgagatgcaggtaatgata

SEQ ID NO: 282872 - DNA, 19 bp, Homo sapiens
  siRNA target sequence for OXR1 (NM_181354.2,1142-1160).
cgagaggagcttgtatctt

SEQ ID NO: 282873 - DNA, 19 bp, Homo sapiens
  siRNA target sequence for OXR1 (NM_181354.2,1169-1187).
ctgcgacaagataaatctt

SEQ ID NO: 282874 - DNA, 19 bp, Homo sapiens
  siRNA target sequence for OXR1 (NM_181354.2,1171-1189).
gcgacaagataaatcttct

SEQ ID NO: 282875 - DNA, 19 bp, Homo sapiens
  siRNA target sequence for OXR1 (NM_181354.2,1191-1209).
gtgcgtcatcagaatctgt

SEQ ID NO: 282876 - DNA, 19 bp, Homo sapiens
  siRNA target sequence for OXR1 (NM_181354.2,1265-1283).
ggtactcctggtcacttaa

SEQ ID NO: 282877 - DNA, 19 bp, Homo sapiens
  siRNA target sequence for OXR1 (NM_181354.2,1279-1297).
cttaagatctgatactgaa

SEQ ID NO: 282878 - DNA, 19 bp, Homo sapiens
  siRNA target sequence for OXR1 (NM_181354.2,1318-1336).
gactttatgtcataaaact

SEQ ID NO: 282879 - DNA, 19 bp, Homo sapiens
  siRNA target sequence for OXR1 (NM_181354.2,1370-1388).
gatcagattgcagataact

SEQ ID NO: 282880 - DNA, 19 bp, Homo sapiens
  siRNA target sequence for OXR1 (NM_181354.2,1380-1398).
cagataactttcaaggaat

SEQ ID NO: 282881 - DNA, 19 bp, Homo sapiens
  siRNA target sequence for OXR1 (NM_181354.2,1603-1621).
gctacgcaaactttggaaa

SEQ ID NO: 282882 - DNA, 19 bp, Homo sapiens
  siRNA target sequence for OXR1 (NM_181354.2,1604-1622).
ctacgcaaactttggaaaa

SEQ ID NO: 282883 - DNA, 19 bp, Homo sapiens
  siRNA target sequence for OXR1 (NM_181354.2,1618-1636).
gaaaacccatactatgcaa

SEQ ID NO: 282884 - DNA, 19 bp, Homo sapiens
  siRNA target sequence for OXR1 (NM_181354.2,1624-1642).
ccatactatgcaacaaact

SEQ ID NO: 282885 - DNA, 19 bp, Homo sapiens
  siRNA target sequence for OXR1 (NM_181354.2,1625-1643).
catactatgcaacaaacta

SEQ ID NO: 282886 - DNA, 19 bp, Homo sapiens
  siRNA target sequence for OXR1 (NM_181354.2,1685-1703).
gctaagcataaaattacat

SEQ ID NO: 282887 - DNA, 19 bp, Homo sapiens
  siRNA target sequence for OXR1 (NM_181354.2,1752-1770).
ggcatcgattacataagtt

SEQ ID NO: 282888 - DNA, 19 bp, Homo sapiens
  siRNA target sequence for OXR1 (NM_181354.2,1754-1772).
catcgattacataagttct

SEQ ID NO: 282889 - DNA, 19 bp, Homo sapiens
  siRNA target sequence for OXR1 (NM_181354.2,1757-1775).
cgattacataagttcttgt

SEQ ID NO: 282890 - DNA, 19 bp, Homo sapiens
  siRNA target sequence for OXR1 (NM_181354.2,1798-1816).
gaggaaaacgtttgtatct

SEQ ID NO: 282891 - DNA, 19 bp, Homo sapiens
  siRNA target sequence for OXR1 (NM_181354.2,1801-1819).
gaaaacgtttgtatctcaa

SEQ ID NO: 282892 - DNA, 19 bp, Homo sapiens
  siRNA target sequence for OXR1 (NM_181354.2,1838-1856).
cagtatgcacagagagata

SEQ ID NO: 282893 - DNA, 19 bp, Homo sapiens
  siRNA target sequence for OXR1 (NM_181354.2,1858-1876).
gaaacatgaatattggttt

SEQ ID NO: 282894 - DNA, 19 bp, Homo sapiens
  siRNA target sequence for OXR1 (NM_181354.2,1873-1891).
gtttgctgtgccacaagaa

SEQ ID NO: 282895 - DNA, 19 bp, Homo sapiens
  siRNA target sequence for OXR1 (NM_181354.2,1901-1919).
cacttgtatgccttcttca

SEQ ID NO: 282896 - DNA, 19 bp, Homo sapiens
  siRNA target sequence for OXR1 (NM_181354.2,1903-1921).
cttgtatgccttcttcatt

SEQ ID NO: 282897 - DNA, 19 bp, Homo sapiens
  siRNA target sequence for OXR1 (NM_181354.2,1949-1967).
gatactggcgaatatacca

SEQ ID NO: 282898 - DNA, 19 bp, Homo sapiens
  siRNA target sequence for OXR1 (NM_181354.2,1968-1986).
gagaacctggatttatagt

SEQ ID NO: 282899 - DNA, 19 bp, Homo sapiens
  siRNA target sequence for OXR1 (NM_181354.2,1974-1992).
ctggatttatagtagtaaa

SEQ ID NO: 282900 - DNA, 19 bp, Homo sapiens
  siRNA target sequence for OXR1 (NM_181354.2,2013-2031).
caattgaggattctagtaa

SEQ ID NO: 282901 - DNA, 19 bp, Homo sapiens
  siRNA target sequence for OXR1 (NM_181354.2,2042-2060).
gccagagaatgggagatta

SEQ ID NO: 282902 - DNA, 19 bp, Homo sapiens
  siRNA target sequence for OXR1 (NM_181354.2,2048-2066).
gaatgggagattactacaa

SEQ ID NO: 282903 - DNA, 19 bp, Homo sapiens
  siRNA target sequence for OXR1 (NM_181354.2,2067-2085).
gggaagacataaattcaaa

SEQ ID NO: 282904 - DNA, 19 bp, Homo sapiens
  siRNA target sequence for OXR1 (NM_181354.2,2113-2131).
ggagtctgaatcttttcga

SEQ ID NO: 282905 - DNA, 19 bp, Homo sapiens
  siRNA target sequence for OXR1 (NM_181354.2,2215-2233).
ctatccatggactcttgtt

SEQ ID NO: 282906 - DNA, 19 bp, Homo sapiens
  siRNA target sequence for OXR1 (NM_181354.2,2260-2278).
cttgaaaactctttatcga

SEQ ID NO: 282907 - DNA, 19 bp, Homo sapiens
  siRNA target sequence for OXR1 (NM_181354.2,2277-2295).
gaacaatgacaggtttaga

SEQ ID NO: 282908 - DNA, 19 bp, Homo sapiens
  siRNA target sequence for OXR1 (NM_181354.2,2301-2319).
cagtgctgatggtgattaa

SEQ ID NO: 282909 - DNA, 19 bp, Homo sapiens
  siRNA target sequence for OXR1 (NM_181354.2,2336-2354).
gtttttggtgcgttagcat

SEQ ID NO: 282910 - DNA, 19 bp, Homo sapiens
  siRNA target sequence for OXR1 (NM_181354.2,2412-2430).
cattctgtccggagtttga

SEQ ID NO: 282911 - DNA, 19 bp, Homo sapiens
  siRNA target sequence for OXR1 (NM_181354.2,2443-2461).
gacaggagataatatgttt

SEQ ID NO: 282912 - DNA, 19 bp, Homo sapiens
  siRNA target sequence for OXR1 (NM_181354.2,2553-2571).
gccattcttgtaaaacgtt

SEQ ID NO: 282913 - DNA, 19 bp, Homo sapiens
  siRNA target sequence for OXR1 (NM_181354.2,2569-2587).
gtttgggaatcgtacactt

SEQ ID NO: 282914 - DNA, 19 bp, Homo sapiens
  siRNA target sequence for OXR1 (NM_181354.2,2573-2591).
gggaatcgtacactttcta

SEQ ID NO: 282915 - DNA, 19 bp, Homo sapiens
  siRNA target sequence for OXR1 (NM_181354.2,2574-2592).
ggaatcgtacactttctaa

SEQ ID NO: 282916 - DNA, 19 bp, Homo sapiens
  siRNA target sequence for P53AIP1 (NM_022112.1,425-443).
gtgccgacatcccaagttt

SEQ ID NO: 282917 - DNA, 19 bp, Homo sapiens
  siRNA target sequence for P53AIP1 (NM_022112.1,428-446).
ccgacatcccaagttttca

SEQ ID NO: 282918 - DNA, 19 bp, Homo sapiens
  siRNA target sequence for P53AIP1 (NM_022112.1,430-448).
gacatcccaagttttcaga

SEQ ID NO: 282919 - DNA, 19 bp, Homo sapiens
  siRNA target sequence for P8 (NM_012385.1,301-319).
gtgaccaagctgcagaatt

SEQ ID NO: 282920 - DNA, 19 bp, Homo sapiens
  siRNA target sequence for PART1 (NM_016590.2,59-77).
gccgtgtcagaactcaatt

SEQ ID NO: 282921 - DNA, 19 bp, Homo sapiens
  siRNA target sequence for PART1 (NM_016590.2,71-89).
ctcaattacgactacatat

SEQ ID NO: 282922 - DNA, 19 bp, Homo sapiens
  siRNA target sequence for PART1 (NM_016590.2,114-132).
ctcagggtacgccaactat

SEQ ID NO: 282923 - DNA, 19 bp, Homo sapiens
  siRNA target sequence for PART1 (NM_016590.2,146-164).
ctcgtacgctgggctataa

SEQ ID NO: 282924 - DNA, 19 bp, Homo sapiens
  siRNA target sequence for PART1 (NM_016590.2,149-167).
gtacgctgggctataatct

SEQ ID NO: 282925 - DNA, 19 bp, Homo sapiens
  siRNA target sequence for PDCD1LG2 (NM_025239.2,301-319).
caccagatagcagctttat

SEQ ID NO: 282926 - DNA, 19 bp, Homo sapiens
  siRNA target sequence for PDCD1LG2 (NM_025239.2,329-347).
cagtccctaaggaactgta

SEQ ID NO: 282927 - DNA, 19 bp, Homo sapiens
  siRNA target sequence for PDCD1LG2 (NM_025239.2,372-390).
gaccctggaatgcaacttt

SEQ ID NO: 282928 - DNA, 19 bp, Homo sapiens
  siRNA target sequence for PDCD1LG2 (NM_025239.2,374-392).
ccctggaatgcaactttga

SEQ ID NO: 282929 - DNA, 19 bp, Homo sapiens
  siRNA target sequence for PDCD1LG2 (NM_025239.2,544-562).
gacgaaggacagtaccaat

SEQ ID NO: 282930 - DNA, 19 bp, Homo sapiens
  siRNA target sequence for PDCD1LG2 (NM_025239.2,684-702).
ctgccaggctacaggttat

SEQ ID NO: 282931 - DNA, 19 bp, Homo sapiens
  siRNA target sequence for PDCD1LG2 (NM_025239.2,687-705).
ccaggctacaggttatcct

SEQ ID NO: 282932 - DNA, 19 bp, Homo sapiens
  siRNA target sequence for PDCD1LG2 (NM_025239.2,809-827).
caccccctggcagaaactt

SEQ ID NO: 282933 - DNA, 19 bp, Homo sapiens
  siRNA target sequence for PDCD1LG2 (NM_025239.2,850-868).
cacgtgagggaacttactt

SEQ ID NO: 282934 - DNA, 19 bp, Homo sapiens
  siRNA target sequence for PDCD1LG2 (NM_025239.2,914-932).
caacttggctgcttcacat

SEQ ID NO: 282935 - DNA, 19 bp, Homo sapiens
  siRNA target sequence for PDCD1LG2 (NM_025239.2,974-992).
cagtgatagccctaagaaa

SEQ ID NO: 282936 - DNA, 19 bp, Homo sapiens
  siRNA target sequence for PHEMX (NM_005705.3,445-463).
cacctacgacctggtatat

SEQ ID NO: 282937 - DNA, 19 bp, Homo sapiens
  siRNA target sequence for PHEMX (NM_005705.3,447-465).
cctacgacctggtatatga

SEQ ID NO: 282938 - DNA, 19 bp, Homo sapiens
  siRNA target sequence for PHEMX (NM_005705.3,513-531).
ccatccaggacgtgtttct

SEQ ID NO: 282939 - DNA, 19 bp, Homo sapiens
  siRNA target sequence for PHEMX (NM_005705.3,836-854).
cagggtggacccacacatt

SEQ ID NO: 282940 - DNA, 19 bp, Homo sapiens
  siRNA target sequence for PHEMX (NM_005705.3,838-856).
gggtggacccacacattgt

SEQ ID NO: 282941 - DNA, 19 bp, Homo sapiens
  siRNA target sequence for PHEMX (NM_005705.3,840-858).
gtggacccacacattgtct

SEQ ID NO: 282942 - DNA, 19 bp, Homo sapiens
  siRNA target sequence for PHEMX (NM_005705.3,862-880).
ctccgaagcagttgctatt

SEQ ID NO: 282943 - DNA, 19 bp, Homo sapiens
  siRNA target sequence for PHEMX (NM_005705.3,865-883).
cgaagcagttgctattggt

SEQ ID NO: 282944 - DNA, 19 bp, Homo sapiens
  siRNA target sequence for PHEMX (NM_139022.2,226-244).
ccatggtgactcttaccta

SEQ ID NO: 282945 - DNA, 19 bp, Homo sapiens
  siRNA target sequence for PHEMX (NM_139024.2,466-484).
gcaggcgatgaaagtttct

SEQ ID NO: 282946 - DNA, 19 bp, Homo sapiens
  siRNA target sequence for PKP2 (NM_004572.1,237-255).
ccgtgggcaacggaaatct

SEQ ID NO: 282947 - DNA, 19 bp, Homo sapiens
  siRNA target sequence for PKP2 (NM_004572.1,238-256).
cgtgggcaacggaaatctt

SEQ ID NO: 282948 - DNA, 19 bp, Homo sapiens
  siRNA target sequence for PKP2 (NM_004572.1,296-314).
cacttggttgaaaatgatt

SEQ ID NO: 282949 - DNA, 19 bp, Homo sapiens
  siRNA target sequence for PKP2 (NM_004572.1,335-353).
gttcctaaaacctatgaca

SEQ ID NO: 282950 - DNA, 19 bp, Homo sapiens
  siRNA target sequence for PKP2 (NM_004572.1,589-607).
cctagtgccaccgagatat

SEQ ID NO: 282951 - DNA, 19 bp, Homo sapiens
  siRNA target sequence for PKP2 (NM_004572.1,1162-1180).
cgagtgcttccagaaatct

SEQ ID NO: 282952 - DNA, 19 bp, Homo sapiens
  siRNA target sequence for PKP2 (NM_004572.1,1185-1203).
ctcggaagagggttaacca

SEQ ID NO: 282953 - DNA, 19 bp, Homo sapiens
  siRNA target sequence for PKP2 (NM_004572.1,1231-1249).
gctcctaaaagttcagaat

SEQ ID NO: 282954 - DNA, 19 bp, Homo sapiens
  siRNA target sequence for PKP2 (NM_004572.1,1268-1286).
gtgtgtggggccttgagaa

SEQ ID NO: 282955 - DNA, 19 bp, Homo sapiens
  siRNA target sequence for PKP2 (NM_004572.1,1276-1294).
ggccttgagaaacttagta

SEQ ID NO: 282956 - DNA, 19 bp, Homo sapiens
  siRNA target sequence for PKP2 (NM_004572.1,1282-1300).
gagaaacttagtatttgaa

SEQ ID NO: 282957 - DNA, 19 bp, Homo sapiens
  siRNA target sequence for PKP2 (NM_004572.1,1403-1421).
gaccatacagtcaatttaa

SEQ ID NO: 282958 - DNA, 19 bp, Homo sapiens
  siRNA target sequence for PKP2 (NM_004572.1,1405-1423).
ccatacagtcaatttaaga

SEQ ID NO: 282959 - DNA, 19 bp, Homo sapiens
  siRNA target sequence for PKP2 (NM_004572.1,1554-1572).
catctaatgacaaactcaa

SEQ ID NO: 282960 - DNA, 19 bp, Homo sapiens
  siRNA target sequence for PKP2 (NM_004572.1,1557-1575).
ctaatgacaaactcaagaa

SEQ ID NO: 282961 - DNA, 19 bp, Homo sapiens
  siRNA target sequence for PKP2 (NM_004572.1,1568-1586).
ctcaagaatctcatgataa

SEQ ID NO: 282962 - DNA, 19 bp, Homo sapiens
  siRNA target sequence for PKP2 (NM_004572.1,1573-1591).
gaatctcatgataacagaa

SEQ ID NO: 282963 - DNA, 19 bp, Homo sapiens
  siRNA target sequence for PKP2 (NM_004572.1,1598-1616).
cttacgctgacggagaata

SEQ ID NO: 282964 - DNA, 19 bp, Homo sapiens
  siRNA target sequence for PKP2 (NM_004572.1,1602-1620).
cgctgacggagaatatcat

SEQ ID NO: 282965 - DNA, 19 bp, Homo sapiens
  siRNA target sequence for PKP2 (NM_004572.1,1676-1694).
gattttgacatattctaca

SEQ ID NO: 282966 - DNA, 19 bp, Homo sapiens
  siRNA target sequence for PKP2 (NM_004572.1,1703-1721).
ggatgcctaagaaacatga

SEQ ID NO: 282967 - DNA, 19 bp, Homo sapiens
  siRNA target sequence for PKP2 (NM_004572.1,1758-1776).
gatgtgacggactcattga

SEQ ID NO: 282968 - DNA, 19 bp, Homo sapiens
  siRNA target sequence for PKP2 (NM_004572.1,2065-2083).
cattgttataaggatgtat

SEQ ID NO: 282969 - DNA, 19 bp, Homo sapiens
  siRNA target sequence for PKP2 (NM_004572.1,2086-2104).
gtccttgatcgccaaaagt

SEQ ID NO: 282970 - DNA, 19 bp, Homo sapiens
  siRNA target sequence for PKP2 (NM_004572.1,2107-2125).
ccgcaactacacacaagaa

SEQ ID NO: 282971 - DNA, 19 bp, Homo sapiens
  siRNA target sequence for PKP2 (NM_004572.1,2287-2305).
gaatctgtcccggaatctt

SEQ ID NO: 282972 - DNA, 19 bp, Homo sapiens
  siRNA target sequence for PKP2 (NM_004572.1,2373-2391).
cgagtactgaccttctcat

SEQ ID NO: 282973 - DNA, 19 bp, Homo sapiens
  siRNA target sequence for PKP2 (NM_004572.1,2374-2392).
gagtactgaccttctcatt

SEQ ID NO: 282974 - DNA, 19 bp, Homo sapiens
  siRNA target sequence for PKP2 (NM_004572.1,2406-2424).
ctgcctgttacacattgaa

SEQ ID NO: 282975 - DNA, 19 bp, Homo sapiens
  siRNA target sequence for PKP2 (NM_004572.1,2408-2426).
gcctgttacacattgaaca

SEQ ID NO: 282976 - DNA, 19 bp, Homo sapiens
  siRNA target sequence for PKP2 (NM_004572.1,2412-2430).
gttacacattgaacaacat

SEQ ID NO: 282977 - DNA, 19 bp, Homo sapiens
  siRNA target sequence for PKP2 (NM_004572.1,2453-2471).
gcacgcgaccttctaaaca

SEQ ID NO: 282978 - DNA, 19 bp, Homo sapiens
  siRNA target sequence for PKP2 (NM_004572.1,2520-2538).
cctccaacaaagcaagtaa

SEQ ID NO: 282979 - DNA, 19 bp, Homo sapiens
  siRNA target sequence for PKP2 (NM_004572.1,2524-2542).
caacaaagcaagtaaagct

SEQ ID NO: 282980 - DNA, 19 bp, Homo sapiens
  siRNA target sequence for PKP2 (NM_004572.1,2582-2600).
ctgcatcatgcctacaaga

SEQ ID NO: 282981 - DNA, 19 bp, Homo sapiens
  siRNA target sequence for PKP2 (NM_004572.1,2593-2611).
ctacaagaaggctcagttt

SEQ ID NO: 282982 - DNA, 19 bp, Homo sapiens
  siRNA target sequence for PLAC1 (NM_021796.1,327-345).
cctcacctctgcgttttca

SEQ ID NO: 282983 - DNA, 19 bp, Homo sapiens
  siRNA target sequence for PLAC1 (NM_021796.1,406-424).
gtgcaccccttcatgctaa

SEQ ID NO: 282984 - DNA, 19 bp, Homo sapiens
  siRNA target sequence for PLAC1 (NM_021796.1,507-525).
gttcacctaccgtgttact

SEQ ID NO: 282985 - DNA, 19 bp, Homo sapiens
  siRNA target sequence for PLAC1 (NM_021796.1,510-528).
cacctaccgtgttactgaa

SEQ ID NO: 282986 - DNA, 19 bp, Homo sapiens
  siRNA target sequence for PLAC1 (NM_021796.1,513-531).
ctaccgtgttactgaatgt

SEQ ID NO: 282987 - DNA, 19 bp, Homo sapiens
  siRNA target sequence for PLAC1 (NM_021796.1,556-574).
caggacatggttatctaca

SEQ ID NO: 282988 - DNA, 19 bp, Homo sapiens
  siRNA target sequence for PLAC1 (NM_021796.1,580-598).
gagatacactactcttcta

SEQ ID NO: 282989 - DNA, 19 bp, Homo sapiens
  siRNA target sequence for PLAC1 (NM_021796.1,596-614).
ctaagggcacgccatctaa

SEQ ID NO: 282990 - DNA, 19 bp, Homo sapiens
  siRNA target sequence for PLAC1 (NM_021796.1,600-618).
gggcacgccatctaagttt

SEQ ID NO: 282991 - DNA, 19 bp, Homo sapiens
  siRNA target sequence for PLAC1 (NM_021796.1,602-620).
gcacgccatctaagtttgt

SEQ ID NO: 282992 - DNA, 19 bp, Homo sapiens
  siRNA target sequence for PLAC1 (NM_021796.1,605-623).
cgccatctaagtttgtgat

SEQ ID NO: 282993 - DNA, 19 bp, Homo sapiens
  siRNA target sequence for PLAC1 (NM_021796.1,861-879).
gccatctcactttcttgat

SEQ ID NO: 282994 - DNA, 19 bp, Homo sapiens
  siRNA target sequence for PLAC1 (NM_021796.1,862-880).
ccatctcactttcttgata

SEQ ID NO: 282995 - DNA, 19 bp, Homo sapiens
  siRNA target sequence for PLAC1 (NM_021796.1,896-914).
ctcttcacacagatgatat

SEQ ID NO: 282996 - DNA, 19 bp, Homo sapiens
  siRNA target sequence for POLA2 (NM_002689.2,396-414).
ctgcgaggaggctctaatt

SEQ ID NO: 282997 - DNA, 19 bp, Homo sapiens
  siRNA target sequence for POLA2 (NM_002689.2,398-416).
gcgaggaggctctaattga

SEQ ID NO: 282998 - DNA, 19 bp, Homo sapiens
  siRNA target sequence for POLA2 (NM_002689.2,400-418).
gaggaggctctaattgaga

SEQ ID NO: 282999 - DNA, 19 bp, Homo sapiens
  siRNA target sequence for POLA2 (NM_002689.2,461-479).
gaatggtaggcgagcttat

SEQ ID NO: 283000 - DNA, 19 bp, Homo sapiens
  siRNA target sequence for POLA2 (NM_002689.2,488-506).
gcaccagcacacataaagt

SEQ ID NO: 283001 - DNA, 19 bp, Homo sapiens
  siRNA target sequence for POLA2 (NM_002689.2,489-507).
caccagcacacataaagtt

SEQ ID NO: 283002 - DNA, 19 bp, Homo sapiens
  siRNA target sequence for POLA2 (NM_002689.2,531-549).
ctcttttgagcatgagttt

SEQ ID NO: 283003 - DNA, 19 bp, Homo sapiens
  siRNA target sequence for POLA2 (NM_002689.2,533-551).
cttttgagcatgagtttct

SEQ ID NO: 283004 - DNA, 19 bp, Homo sapiens
  siRNA target sequence for POLA2 (NM_002689.2,546-564).
gtttctgagcaaaagatta

SEQ ID NO: 283005 - DNA, 19 bp, Homo sapiens
  siRNA target sequence for POLA2 (NM_002689.2,550-568).
ctgagcaaaagattatcga

SEQ ID NO: 283006 - DNA, 19 bp, Homo sapiens
  siRNA target sequence for POLA2 (NM_002689.2,552-570).
gagcaaaagattatcgaaa

SEQ ID NO: 283007 - DNA, 19 bp, Homo sapiens
  siRNA target sequence for POLA2 (NM_002689.2,605-623).
caggagctagagacattgt

SEQ ID NO: 283008 - DNA, 19 bp, Homo sapiens
  siRNA target sequence for POLA2 (NM_002689.2,703-721).
cagaagcgagctatctcta

SEQ ID NO: 283009 - DNA, 19 bp, Homo sapiens
  siRNA target sequence for POLA2 (NM_002689.2,775-793).
ctactctcaccgtcaagtt

SEQ ID NO: 283010 - DNA, 19 bp, Homo sapiens
  siRNA target sequence for POLA2 (NM_002689.2,867-885).
cttagcacagggagtatct

SEQ ID NO: 283011 - DNA, 19 bp, Homo sapiens
  siRNA target sequence for POLA2 (NM_002689.2,946-964).
ctaactgggagctacaaat

SEQ ID NO: 283012 - DNA, 19 bp, Homo sapiens
  siRNA target sequence for POLA2 (NM_002689.2,954-972).
gagctacaaatccatgttt

SEQ ID NO: 283013 - DNA, 19 bp, Homo sapiens
  siRNA target sequence for POLA2 (NM_002689.2,1028-1046).
gcgaactcaaggaacatta

SEQ ID NO: 283014 - DNA, 19 bp, Homo sapiens
  siRNA target sequence for POLA2 (NM_002689.2,1035-1053).
caaggaacattacaagatt

SEQ ID NO: 283015 - DNA, 19 bp, Homo sapiens
  siRNA target sequence for POLA2 (NM_002689.2,1105-1123).
ggccagattggctgtgata

SEQ ID NO: 283016 - DNA, 19 bp, Homo sapiens
  siRNA target sequence for POLA2 (NM_002689.2,1137-1155).
gaacaacaagtcagtgatt

SEQ ID NO: 283017 - DNA, 19 bp, Homo sapiens
  siRNA target sequence for POLA2 (NM_002689.2,1159-1177).
gagggagaccgggaacatt

SEQ ID NO: 283018 - DNA, 19 bp, Homo sapiens
  siRNA target sequence for POLA2 (NM_002689.2,1179-1197).
ctcgggtgctcaaattcca

SEQ ID NO: 283019 - DNA, 19 bp, Homo sapiens
  siRNA target sequence for POLA2 (NM_002689.2,1234-1252).
cctggacaggttgtaatta

SEQ ID NO: 283020 - DNA, 19 bp, Homo sapiens
  siRNA target sequence for POLA2 (NM_002689.2,1235-1253).
ctggacaggttgtaattat

SEQ ID NO: 283021 - DNA, 19 bp, Homo sapiens
  siRNA target sequence for POLA2 (NM_002689.2,1266-1284).
caccactggtaggaaactt

SEQ ID NO: 283022 - DNA, 19 bp, Homo sapiens
  siRNA target sequence for POLA2 (NM_002689.2,1268-1286).
ccactggtaggaaacttgt

SEQ ID NO: 283023 - DNA, 19 bp, Homo sapiens
  siRNA target sequence for POLA2 (NM_002689.2,1478-1496).
gccctttcctggatgctaa

SEQ ID NO: 283024 - DNA, 19 bp, Homo sapiens
  siRNA target sequence for POLA2 (NM_002689.2,1551-1569).
gcagtgtctacgaacaatt

SEQ ID NO: 283025 - DNA, 19 bp, Homo sapiens
  siRNA target sequence for POLA2 (NM_002689.2,1552-1570).
cagtgtctacgaacaatta

SEQ ID NO: 283026 - DNA, 19 bp, Homo sapiens
  siRNA target sequence for POLA2 (NM_002689.2,1554-1572).
gtgtctacgaacaattatt

SEQ ID NO: 283027 - DNA, 19 bp, Homo sapiens
  siRNA target sequence for POLA2 (NM_002689.2,1592-1610).
gctcccaccttgtctttgt

SEQ ID NO: 283028 - DNA, 19 bp, Homo sapiens
  siRNA target sequence for POLA2 (NM_002689.2,1603-1621).
gtctttgtcccgtcattga

SEQ ID NO: 283029 - DNA, 19 bp, Homo sapiens
  siRNA target sequence for POLA2 (NM_002689.2,1675-1693).
ctgtctcgagaggacaaaa

SEQ ID NO: 283030 - DNA, 19 bp, Homo sapiens
  siRNA target sequence for POLA2 (NM_002689.2,1741-1759).
gtgatcttcggcttgacat

SEQ ID NO: 283031 - DNA, 19 bp, Homo sapiens
  siRNA target sequence for POLA2 (NM_002689.2,1786-1804).
gccgaggagatcagtagtt

SEQ ID NO: 283032 - DNA, 19 bp, Homo sapiens
  siRNA target sequence for POLA2 (NM_002689.2,1788-1806).
cgaggagatcagtagttct

SEQ ID NO: 283033 - DNA, 19 bp, Homo sapiens
  siRNA target sequence for POLA2 (NM_002689.2,1823-1841).
gattcagccgaatactcaa

SEQ ID NO: 283034 - DNA, 19 bp, Homo sapiens
  siRNA target sequence for POLA2 (NM_002689.2,1832-1850).
gaatactcaagcacatctt

SEQ ID NO: 283035 - DNA, 19 bp, Homo sapiens
  siRNA target sequence for POLA2 (NM_002689.2,1905-1923).
ctatgagtcgttctatgtt

SEQ ID NO: 283036 - DNA, 19 bp, Homo sapiens
  siRNA target sequence for POLA2 (NM_002689.2,1943-1961).
ccccagatgtcctcatcat

SEQ ID NO: 283037 - DNA, 19 bp, Homo sapiens
  siRNA target sequence for POPDC2 (NM_022135.2,174-192).
cagggttcagcgtgcatta

SEQ ID NO: 283038 - DNA, 19 bp, Homo sapiens
  siRNA target sequence for POPDC2 (NM_022135.2,177-195).
ggttcagcgtgcattaggt

SEQ ID NO: 283039 - DNA, 19 bp, Homo sapiens
  siRNA target sequence for POPDC2 (NM_022135.2,264-282).
ggcagtggggtgtatggat

SEQ ID NO: 283040 - DNA, 19 bp, Homo sapiens
  siRNA target sequence for POPDC2 (NM_022135.2,272-290).
ggtgtatggatgcttctat

SEQ ID NO: 283041 - DNA, 19 bp, Homo sapiens
  siRNA target sequence for POPDC2 (NM_022135.2,354-372).
ggcctggacattgttcttt

SEQ ID NO: 283042 - DNA, 19 bp, Homo sapiens
  siRNA target sequence for POPDC2 (NM_022135.2,508-526).
catacaaggagattgttca

SEQ ID NO: 283043 - DNA, 19 bp, Homo sapiens
  siRNA target sequence for POPDC2 (NM_022135.2,637-655).
gccaggatgggcagtttct

SEQ ID NO: 283044 - DNA, 19 bp, Homo sapiens
  siRNA target sequence for POPDC2 (NM_022135.2,654-672).
ctgcactacatctttccat

SEQ ID NO: 283045 - DNA, 19 bp, Homo sapiens
  siRNA target sequence for POPDC2 (NM_022135.2,835-853).
cggctctgctgggatatga

SEQ ID NO: 283046 - DNA, 19 bp, Homo sapiens
  siRNA target sequence for POPDC2 (NM_022135.2,863-881).
gaagctctacactctcaat

SEQ ID NO: 283047 - DNA, 19 bp, Homo sapiens
  siRNA target sequence for POPDC2 (NM_022135.2,884-902).
caagctctttgctaagttt

SEQ ID NO: 283048 - DNA, 19 bp, Homo sapiens
  siRNA target sequence for POPDC2 (NM_022135.2,1050-1068).
caaacacccccttgttcta

SEQ ID NO: 283049 - DNA, 19 bp, Homo sapiens
  siRNA target sequence for POPDC2 (NM_022135.2,1160-1178).
ccagagctactctcaagtt

SEQ ID NO: 283050 - DNA, 19 bp, Homo sapiens
  siRNA target sequence for POPDC2 (NM_022135.2,1163-1181).
gagctactctcaagttata

SEQ ID NO: 283051 - DNA, 19 bp, Homo sapiens
  siRNA target sequence for POPDC3 (NM_022361.3,489-507).
cgaaggagccatttatcat

SEQ ID NO: 283052 - DNA, 19 bp, Homo sapiens
  siRNA target sequence for POPDC3 (NM_022361.3,628-646).
gtctgtgcagctgacatat

SEQ ID NO: 283053 - DNA, 19 bp, Homo sapiens
  siRNA target sequence for POPDC3 (NM_022361.3,630-648).
ctgtgcagctgacatattt

SEQ ID NO: 283054 - DNA, 19 bp, Homo sapiens
  siRNA target sequence for POPDC3 (NM_022361.3,653-671).
ggaattttgtactgtttgt

SEQ ID NO: 283055 - DNA, 19 bp, Homo sapiens
  siRNA target sequence for POPDC3 (NM_022361.3,681-699).
catgcaatttgttcatatt

SEQ ID NO: 283056 - DNA, 19 bp, Homo sapiens
  siRNA target sequence for POPDC3 (NM_022361.3,706-724).
caagttcgcagcataacct

SEQ ID NO: 283057 - DNA, 19 bp, Homo sapiens
  siRNA target sequence for POPDC3 (NM_022361.3,722-740).
cctttgcccgagaattcca

SEQ ID NO: 283058 - DNA, 19 bp, Homo sapiens
  siRNA target sequence for POPDC3 (NM_022361.3,728-746).
cccgagaattccaagtgtt

SEQ ID NO: 283059 - DNA, 19 bp, Homo sapiens
  siRNA target sequence for POPDC3 (NM_022361.3,783-801).
gcctgtcttcagaacgatt

SEQ ID NO: 283060 - DNA, 19 bp, Homo sapiens
  siRNA target sequence for POPDC3 (NM_022361.3,787-805).
gtcttcagaacgattgctt

SEQ ID NO: 283061 - DNA, 19 bp, Homo sapiens
  siRNA target sequence for POPDC3 (NM_022361.3,809-827).
gctctgaagtggttacttt

SEQ ID NO: 283062 - DNA, 19 bp, Homo sapiens
  siRNA target sequence for POPDC3 (NM_022361.3,847-865).
gccatgcaggggaaaactt

SEQ ID NO: 283063 - DNA, 19 bp, Homo sapiens
  siRNA target sequence for POPDC3 (NM_022361.3,855-873).
ggggaaaacttccattgat

SEQ ID NO: 283064 - DNA, 19 bp, Homo sapiens
  siRNA target sequence for POPDC3 (NM_022361.3,900-918).
gatcagagtgacagttgat

SEQ ID NO: 283065 - DNA, 19 bp, Homo sapiens
  siRNA target sequence for POPDC3 (NM_022361.3,919-937).
ggcgaatttctgcattaca

SEQ ID NO: 283066 - DNA, 19 bp, Homo sapiens
  siRNA target sequence for POPDC3 (NM_022361.3,1017-1035).
cactgcagaaactgattgt

SEQ ID NO: 283067 - DNA, 19 bp, Homo sapiens
  siRNA target sequence for POPDC3 (NM_022361.3,1078-1096).
gctcagcatcgctacatct

SEQ ID NO: 283068 - DNA, 19 bp, Homo sapiens
  siRNA target sequence for POPDC3 (NM_022361.3,1121-1139).
gcagtgacattgcagataa

SEQ ID NO: 283069 - DNA, 19 bp, Homo sapiens
  siRNA target sequence for POPDC3 (NM_022361.3,1141-1159).
ctctatgccttgaatgaca

SEQ ID NO: 283070 - DNA, 19 bp, Homo sapiens
  siRNA target sequence for POPDC3 (NM_022361.3,1149-1167).
cttgaatgacagggtatat

SEQ ID NO: 283071 - DNA, 19 bp, Homo sapiens
  siRNA target sequence for POPDC3 (NM_022361.3,1196-1214).
ggctacccaacttctatca

SEQ ID NO: 283072 - DNA, 19 bp, Homo sapiens
  siRNA target sequence for POPDC3 (NM_022361.3,1197-1215).
gctacccaacttctatcaa

SEQ ID NO: 283073 - DNA, 19 bp, Homo sapiens
  siRNA target sequence for POPDC3 (NM_022361.3,1198-1216).
ctacccaacttctatcaaa

SEQ ID NO: 283074 - DNA, 19 bp, Homo sapiens
  siRNA target sequence for POPDC3 (NM_022361.3,1201-1219).
cccaacttctatcaaatgt

SEQ ID NO: 283075 - DNA, 19 bp, Homo sapiens
  siRNA target sequence for POPDC3 (NM_022361.3,1241-1259).
cacccctgacacaacattt

SEQ ID NO: 283076 - DNA, 19 bp, Homo sapiens
  siRNA target sequence for POPDC3 (NM_022361.3,1244-1262).
ccctgacacaacattttca

SEQ ID NO: 283077 - DNA, 19 bp, Homo sapiens
  siRNA target sequence for POPDC3 (NM_022361.3,1246-1264).
ctgacacaacattttcaga

SEQ ID NO: 283078 - DNA, 19 bp, Homo sapiens
  siRNA target sequence for POPDC3 (NM_022361.3,1263-1281).
gaattccagacgatactgt

SEQ ID NO: 283079 - DNA, 19 bp, Homo sapiens
  siRNA target sequence for POPDC3 (NM_022361.3,1268-1286).
ccagacgatactgtgataa

SEQ ID NO: 283080 - DNA, 19 bp, Homo sapiens
  siRNA target sequence for POPDC3 (NM_022361.3,1269-1287).
cagacgatactgtgataaa

SEQ ID NO: 283081 - DNA, 19 bp, Homo sapiens
  siRNA target sequence for PP3111 (NM_022156.3,520-538).
gggctgcccacagatgata

SEQ ID NO: 283082 - DNA, 19 bp, Homo sapiens
  siRNA target sequence for PP3111 (NM_022156.3,765-783).
cagcgtcctgggagcatat

SEQ ID NO: 283083 - DNA, 19 bp, Homo sapiens
  siRNA target sequence for PP3111 (NM_022156.3,767-785).
gcgtcctgggagcatatca

SEQ ID NO: 283084 - DNA, 19 bp, Homo sapiens
  siRNA target sequence for PP3111 (NM_022156.3,1358-1376).
ccctctctgaagccaaaat

SEQ ID NO: 283085 - DNA, 19 bp, Homo sapiens
  siRNA target sequence for PP3111 (NM_022156.3,1487-1505).
cacggattgctttttaaaa

SEQ ID NO: 283086 - DNA, 19 bp, Homo sapiens
  siRNA target sequence for PP35 (NM_181581.1,345-363).
ctgcatgcaaacgacaata

SEQ ID NO: 283087 - DNA, 19 bp, Homo sapiens
  siRNA target sequence for PP35 (NM_181581.1,385-403).
cccatagaaatgtttcatt

SEQ ID NO: 283088 - DNA, 19 bp, Homo sapiens
  siRNA target sequence for PP35 (NM_181581.1,425-443).
gtgccccaatggttcgata

SEQ ID NO: 283089 - DNA, 19 bp, Homo sapiens
  siRNA target sequence for PP35 (NM_181581.1,427-445).
gccccaatggttcgatatt

SEQ ID NO: 283090 - DNA, 19 bp, Homo sapiens
  siRNA target sequence for PP35 (NM_181581.1,429-447).
cccaatggttcgatattca

SEQ ID NO: 283091 - DNA, 19 bp, Homo sapiens
  siRNA target sequence for PP35 (NM_181581.1,430-448).
ccaatggttcgatattcaa

SEQ ID NO: 283092 - DNA, 19 bp, Homo sapiens
  siRNA target sequence for PP35 (NM_181581.1,453-471).
ggcttttaggacactagta

SEQ ID NO: 283093 - DNA, 19 bp, Homo sapiens
  siRNA target sequence for PP35 (NM_181581.1,454-472).
gcttttaggacactagtaa

SEQ ID NO: 283094 - DNA, 19 bp, Homo sapiens
  siRNA target sequence for PP35 (NM_181581.1,494-512).
gttacacaccaatgattgt

SEQ ID NO: 283095 - DNA, 19 bp, Homo sapiens
  siRNA target sequence for PP35 (NM_181581.1,511-529).
gttgccgctgattttgtca

SEQ ID NO: 283096 - DNA, 19 bp, Homo sapiens
  siRNA target sequence for PP35 (NM_181581.1,516-534).
cgctgattttgtcaaatct

SEQ ID NO: 283097 - DNA, 19 bp, Homo sapiens
  siRNA target sequence for PP35 (NM_181581.1,541-559).
gccagagacagcgaattta

SEQ ID NO: 283098 - DNA, 19 bp, Homo sapiens
  siRNA target sequence for PP35 (NM_181581.1,549-567).
cagcgaatttaccacaaat

SEQ ID NO: 283099 - DNA, 19 bp, Homo sapiens
  siRNA target sequence for PP35 (NM_181581.1,551-569).
gcgaatttaccacaaatca

SEQ ID NO: 283100 - DNA, 19 bp, Homo sapiens
  siRNA target sequence for PP35 (NM_181581.1,552-570).
cgaatttaccacaaatcaa

SEQ ID NO: 283101 - DNA, 19 bp, Homo sapiens
  siRNA target sequence for PP35 (NM_181581.1,601-619).
gctaacgatgcaagacttt

SEQ ID NO: 283102 - DNA, 19 bp, Homo sapiens
  siRNA target sequence for PP35 (NM_181581.1,606-624).
cgatgcaagacttttatct

SEQ ID NO: 283103 - DNA, 19 bp, Homo sapiens
  siRNA target sequence for PP35 (NM_181581.1,625-643).
gatgctgctcgtatagtct

SEQ ID NO: 283104 - DNA, 19 bp, Homo sapiens
  siRNA target sequence for PP35 (NM_181581.1,644-662).
gtccttatgcgaatggaat

SEQ ID NO: 283105 - DNA, 19 bp, Homo sapiens
  siRNA target sequence for PP35 (NM_181581.1,647-665).
cttatgcgaatggaataga

SEQ ID NO: 283106 - DNA, 19 bp, Homo sapiens
  siRNA target sequence for PP35 (NM_181581.1,652-670).
gcgaatggaatagacatta

SEQ ID NO: 283107 - DNA, 19 bp, Homo sapiens
  siRNA target sequence for PP35 (NM_181581.1,692-710).
gggcaatggcagaaggtta

SEQ ID NO: 283108 - DNA, 19 bp, Homo sapiens
  siRNA target sequence for PP35 (NM_181581.1,706-724).
ggttatggggcttgcttaa

SEQ ID NO: 283109 - DNA, 19 bp, Homo sapiens
  siRNA target sequence for PP35 (NM_181581.1,707-725).
gttatggggcttgcttaat

SEQ ID NO: 283110 - DNA, 19 bp, Homo sapiens
  siRNA target sequence for PP35 (NM_181581.1,734-752).
cagagcttgttcaagacat

SEQ ID NO: 283111 - DNA, 19 bp, Homo sapiens
  siRNA target sequence for PP35 (NM_181581.1,812-830).
ggatccatgatgaccttaa

SEQ ID NO: 283112 - DNA, 19 bp, Homo sapiens
  siRNA target sequence for PP35 (NM_181581.1,817-835).
catgatgaccttaaaagaa

SEQ ID NO: 283113 - DNA, 19 bp, Homo sapiens
  siRNA target sequence for PP35 (NM_181581.1,922-940).
gtgcactatgattccatta

SEQ ID NO: 283114 - DNA, 19 bp, Homo sapiens
  siRNA target sequence for PP35 (NM_181581.1,976-994).
gctaatggagacatcagaa

SEQ ID NO: 283115 - DNA, 19 bp, Homo sapiens
  siRNA target sequence for PP35 (NM_181581.1,1047-1065).
ggttgcaagaggactctta

SEQ ID NO: 283116 - DNA, 19 bp, Homo sapiens
  siRNA target sequence for PP35 (NM_181581.1,1051-1069).
gcaagaggactcttagcaa

SEQ ID NO: 283117 - DNA, 19 bp, Homo sapiens
  siRNA target sequence for PP35 (NM_181581.1,1052-1070).
caagaggactcttagcaaa

SEQ ID NO: 283118 - DNA, 19 bp, Homo sapiens
  siRNA target sequence for PP35 (NM_181581.1,1116-1134).
ctgggactgggttgacatt

SEQ ID NO: 283119 - DNA, 19 bp, Homo sapiens
  siRNA target sequence for PP35 (NM_181581.1,1147-1165).
gggactccttacatgtgtt

SEQ ID NO: 283120 - DNA, 19 bp, Homo sapiens
  siRNA target sequence for PP35 (NM_181581.1,1148-1166).
ggactccttacatgtgttt

SEQ ID NO: 283121 - DNA, 19 bp, Homo sapiens
  siRNA target sequence for PP35 (NM_181581.1,1241-1259).
gcacatcagcaatcataga

SEQ ID NO: 283122 - DNA, 19 bp, Homo sapiens
  siRNA target sequence for PP35 (NM_181581.1,1242-1260).
cacatcagcaatcatagat

SEQ ID NO: 283123 - DNA, 19 bp, Homo sapiens
  siRNA target sequence for PP35 (NM_181581.1,1244-1262).
catcagcaatcatagatta

SEQ ID NO: 283124 - DNA, 19 bp, Homo sapiens
  siRNA target sequence for PP35 (NM_181581.1,1249-1267).
gcaatcatagattacctta

SEQ ID NO: 283125 - DNA, 19 bp, Homo sapiens
  siRNA target sequence for PRCC (NM_005973.4,650-668).
caatctgccccctccaatt

SEQ ID NO: 283126 - DNA, 19 bp, Homo sapiens
  siRNA target sequence for PRCC (NM_005973.4,743-761).
gttgcataagggagattca

SEQ ID NO: 283127 - DNA, 19 bp, Homo sapiens
  siRNA target sequence for PRCC (NM_005973.4,746-764).
gcataagggagattcagat

SEQ ID NO: 283128 - DNA, 19 bp, Homo sapiens
  siRNA target sequence for PRCC (NM_005973.4,747-765).
cataagggagattcagatt

SEQ ID NO: 283129 - DNA, 19 bp, Homo sapiens
  siRNA target sequence for PRCC (NM_005973.4,918-936).
gatggctcccctgatacta

SEQ ID NO: 283130 - DNA, 19 bp, Homo sapiens
  siRNA target sequence for PRCC (NM_005973.4,1009-1027).
cgtcgccctctgctatcaa

SEQ ID NO: 283131 - DNA, 19 bp, Homo sapiens
  siRNA target sequence for PRCC (NM_005973.4,1262-1280).
gatggcagcaggttcaagt

SEQ ID NO: 283132 - DNA, 19 bp, Homo sapiens
  siRNA target sequence for PRCC (NM_005973.4,1313-1331).
ctacagctacaatcagttt

SEQ ID NO: 283133 - DNA, 19 bp, Homo sapiens
  siRNA target sequence for PRCC (NM_005973.4,1349-1367).
caatgccgctggtgcttat

SEQ ID NO: 283134 - DNA, 19 bp, Homo sapiens
  siRNA target sequence for PRCC (NM_005973.4,1557-1575).
cagcaatggatgactaagt

SEQ ID NO: 283135 - DNA, 19 bp, Homo sapiens
  siRNA target sequence for PRCC (NM_005973.4,1559-1577).
gcaatggatgactaagtca

SEQ ID NO: 283136 - DNA, 19 bp, Homo sapiens
  siRNA target sequence for PRCC (NM_005973.4,1560-1578).
caatggatgactaagtcat

SEQ ID NO: 283137 - DNA, 19 bp, Homo sapiens
  siRNA target sequence for PRCC (NM_005973.4,1742-1760).
gacccaagccaaatatgga

SEQ ID NO: 283138 - DNA, 19 bp, Homo sapiens
  siRNA target sequence for PRCC (NM_005973.4,1744-1762).
cccaagccaaatatggatt

SEQ ID NO: 283139 - DNA, 19 bp, Homo sapiens
  siRNA target sequence for PRKAG2 (NM_016203.2,246-264).
ggagggttccggaaagcat

SEQ ID NO: 283140 - DNA, 19 bp, Homo sapiens
  siRNA target sequence for PRKAG2 (NM_016203.2,247-265).
gagggttccggaaagcatt

SEQ ID NO: 283141 - DNA, 19 bp, Homo sapiens
  siRNA target sequence for PRKAG2 (NM_016203.2,617-635).
ccctggaatcctataagca

SEQ ID NO: 283142 - DNA, 19 bp, Homo sapiens
  siRNA target sequence for PRKAG2 (NM_016203.2,637-655).
gagcctgaacggttagaga

SEQ ID NO: 283143 - DNA, 19 bp, Homo sapiens
  siRNA target sequence for PRKAG2 (NM_016203.2,639-657).
gcctgaacggttagagaat

SEQ ID NO: 283144 - DNA, 19 bp, Homo sapiens
  siRNA target sequence for PRKAG2 (NM_016203.2,648-666).
gttagagaatcgcatctat

SEQ ID NO: 283145 - DNA, 19 bp, Homo sapiens
  siRNA target sequence for PRKAG2 (NM_016203.2,741-759).
ggcatcaccgacacactat

SEQ ID NO: 283146 - DNA, 19 bp, Homo sapiens
  siRNA target sequence for PRKAG2 (NM_016203.2,866-884).
gtgtttacatgcgattcat

SEQ ID NO: 283147 - DNA, 19 bp, Homo sapiens
  siRNA target sequence for PRKAG2 (NM_016203.2,868-886).
gtttacatgcgattcatga

SEQ ID NO: 283148 - DNA, 19 bp, Homo sapiens
  siRNA target sequence for PRKAG2 (NM_016203.2,885-903).
gaggtcacacaagtgttat

SEQ ID NO: 283149 - DNA, 19 bp, Homo sapiens
  siRNA target sequence for PRKAG2 (NM_016203.2,887-905).
ggtcacacaagtgttatga

SEQ ID NO: 283150 - DNA, 19 bp, Homo sapiens
  siRNA target sequence for PRKAG2 (NM_016203.2,890-908).
cacacaagtgttatgacat

SEQ ID NO: 283151 - DNA, 19 bp, Homo sapiens
  siRNA target sequence for PRKAG2 (NM_016203.2,931-949).
gttgtctttgatactacat

SEQ ID NO: 283152 - DNA, 19 bp, Homo sapiens
  siRNA target sequence for PRKAG2 (NM_016203.2,940-958).
gatactacattacaagtta

SEQ ID NO: 283153 - DNA, 19 bp, Homo sapiens
  siRNA target sequence for PRKAG2 (NM_016203.2,1001-1019).
cgccactgtgggagagtaa

SEQ ID NO: 283154 - DNA, 19 bp, Homo sapiens
  siRNA target sequence for PRKAG2 (NM_016203.2,1004-1022).
cactgtgggagagtaaaaa

SEQ ID NO: 283155 - DNA, 19 bp, Homo sapiens
  siRNA target sequence for PRKAG2 (NM_016203.2,1033-1051).
gtaggaatgctaacaatta

SEQ ID NO: 283156 - DNA, 19 bp, Homo sapiens
  siRNA target sequence for PRKAG2 (NM_016203.2,1080-1098).
ctataaatcacctatggta

SEQ ID NO: 283157 - DNA, 19 bp, Homo sapiens
  siRNA target sequence for PRKAG2 (NM_016203.2,1091-1109).
ctatggtacagatttatga

SEQ ID NO: 283158 - DNA, 19 bp, Homo sapiens
  siRNA target sequence for PRKAG2 (NM_016203.2,1133-1151).
catggagggagctttattt

SEQ ID NO: 283159 - DNA, 19 bp, Homo sapiens
  siRNA target sequence for PRKAG2 (NM_016203.2,1196-1214).
gcctcttcgatgctgtata

SEQ ID NO: 283160 - DNA, 19 bp, Homo sapiens
  siRNA target sequence for PRKAG2 (NM_016203.2,1207-1225).
gctgtatactccttgatca

SEQ ID NO: 283161 - DNA, 19 bp, Homo sapiens
  siRNA target sequence for PRKAG2 (NM_016203.2,1248-1266).
cgttattgaccctatcagt

SEQ ID NO: 283162 - DNA, 19 bp, Homo sapiens
  siRNA target sequence for PRKAG2 (NM_016203.2,1265-1283).
gtgggaatgcactttatat

SEQ ID NO: 283163 - DNA, 19 bp, Homo sapiens
  siRNA target sequence for PRKAG2 (NM_016203.2,1315-1333).
cagctttttatgtctgata

SEQ ID NO: 283164 - DNA, 19 bp, Homo sapiens
  siRNA target sequence for PRKAG2 (NM_016203.2,1487-1505).
caggaaaagttgtagatat

SEQ ID NO: 283165 - DNA, 19 bp, Homo sapiens
  siRNA target sequence for PRKAG2 (NM_016203.2,1547-1565).
catacaataacctagatat

SEQ ID NO: 283166 - DNA, 19 bp, Homo sapiens
  siRNA target sequence for PRKAG2 (NM_016203.2,1644-1662).
gaccatcgtggacagaata

SEQ ID NO: 283167 - DNA, 19 bp, Homo sapiens
  siRNA target sequence for PRKAG2 (NM_016203.2,1646-1664).
ccatcgtggacagaatagt

SEQ ID NO: 283168 - DNA, 19 bp, Homo sapiens
  siRNA target sequence for PRKAG2 (NM_016203.2,1647-1665).
catcgtggacagaatagta

SEQ ID NO: 283169 - DNA, 19 bp, Homo sapiens
  siRNA target sequence for PRKAG2 (NM_016203.2,1650-1668).
cgtggacagaatagtaaga

SEQ ID NO: 283170 - DNA, 19 bp, Homo sapiens
  siRNA target sequence for PRM3 (NM_021247.1,82-100).
cacgaatcctccatgaaaa

SEQ ID NO: 283171 - DNA, 19 bp, Homo sapiens
  siRNA target sequence for PRM3 (NM_021247.1,113-131).
gtgtgagtcaggataactt

SEQ ID NO: 283172 - DNA, 19 bp, Homo sapiens
  siRNA target sequence for PRM3 (NM_021247.1,115-133).
gtgagtcaggataacttct

SEQ ID NO: 283173 - DNA, 19 bp, Homo sapiens
  siRNA target sequence for PRM3 (NM_021247.1,124-142).
gataacttctccttgtcat

SEQ ID NO: 283174 - DNA, 19 bp, Homo sapiens
  siRNA target sequence for PROK2 (NM_021935.2,163-181).
gtcaagagcataaggattt

SEQ ID NO: 283175 - DNA, 19 bp, Homo sapiens
  siRNA target sequence for PROK2 (NM_021935.2,224-242).
ctcgtaaagttccattttt

SEQ ID NO: 283176 - DNA, 19 bp, Homo sapiens
  siRNA target sequence for PROK2 (NM_021935.2,276-294).
gccaggcttggcctgttta

SEQ ID NO: 283177 - DNA, 19 bp, Homo sapiens
  siRNA target sequence for PROK2 (NM_021935.2,287-305).
cctgtttacggacttcatt

SEQ ID NO: 283178 - DNA, 19 bp, Homo sapiens
  siRNA target sequence for PROK2 (NM_021935.2,288-306).
ctgtttacggacttcattt

SEQ ID NO: 283179 - DNA, 19 bp, Homo sapiens
  siRNA target sequence for PROL1 (NM_021225.1,101-119).
gggcctgttggctcttatt

SEQ ID NO: 283180 - DNA, 19 bp, Homo sapiens
  siRNA target sequence for PROL1 (NM_021225.1,102-120).
ggcctgttggctcttattt

SEQ ID NO: 283181 - DNA, 19 bp, Homo sapiens
  siRNA target sequence for PROL1 (NM_021225.1,104-122).
cctgttggctcttatttca

SEQ ID NO: 283182 - DNA, 19 bp, Homo sapiens
  siRNA target sequence for PROL1 (NM_021225.1,105-123).
ctgttggctcttatttcat

SEQ ID NO: 283183 - DNA, 19 bp, Homo sapiens
  siRNA target sequence for PROL1 (NM_021225.1,107-125).
gttggctcttatttcatgt

SEQ ID NO: 283184 - DNA, 19 bp, Homo sapiens
  siRNA target sequence for PROL1 (NM_021225.1,234-252).
ccctatgactcaagactta

SEQ ID NO: 283185 - DNA, 19 bp, Homo sapiens
  siRNA target sequence for PROL1 (NM_021225.1,235-253).
cctatgactcaagacttaa

SEQ ID NO: 283186 - DNA, 19 bp, Homo sapiens
  siRNA target sequence for PROL1 (NM_021225.1,236-254).
ctatgactcaagacttaat

SEQ ID NO: 283187 - DNA, 19 bp, Homo sapiens
  siRNA target sequence for PROL1 (NM_021225.1,317-335).
ccaagcagtcattctatct

SEQ ID NO: 283188 - DNA, 19 bp, Homo sapiens
  siRNA target sequence for PROL1 (NM_021225.1,381-399).
ggttatccaaacctacatt

SEQ ID NO: 283189 - DNA, 19 bp, Homo sapiens
  siRNA target sequence for PROL1 (NM_021225.1,401-419).
cccactaagaccttactat

SEQ ID NO: 283190 - DNA, 19 bp, Homo sapiens
  siRNA target sequence for PROL1 (NM_021225.1,420-438).
gtaggacctattaggatat

SEQ ID NO: 283191 - DNA, 19 bp, Homo sapiens
  siRNA target sequence for PROL1 (NM_021225.1,423-441).
ggacctattaggatattaa

SEQ ID NO: 283192 - DNA, 19 bp, Homo sapiens
  siRNA target sequence for PROL1 (NM_021225.1,424-442).
gacctattaggatattaaa

SEQ ID NO: 283193 - DNA, 19 bp, Homo sapiens
  siRNA target sequence for PROL1 (NM_021225.1,518-536).
caccaccgcagatacaaca

SEQ ID NO: 283194 - DNA, 19 bp, Homo sapiens
  siRNA target sequence for PROL1 (NM_021225.1,520-538).
ccaccgcagatacaacaat

SEQ ID NO: 283195 - DNA, 19 bp, Homo sapiens
  siRNA target sequence for PROL1 (NM_021225.1,603-621).
gatcagctcctcaacagta

SEQ ID NO: 283196 - DNA, 19 bp, Homo sapiens
  siRNA target sequence for PROL1 (NM_021225.1,608-626).
gctcctcaacagtacctat

SEQ ID NO: 283197 - DNA, 19 bp, Homo sapiens
  siRNA target sequence for PROL1 (NM_021225.1,612-630).
ctcaacagtacctatctct

SEQ ID NO: 283198 - DNA, 19 bp, Homo sapiens
  siRNA target sequence for PROSC (NM_007198.2,627-645).
ctagtggcggtcagcaaaa

SEQ ID NO: 283199 - DNA, 19 bp, Homo sapiens
  siRNA target sequence for PROSC (NM_007198.2,691-709).
gcacttttggcgagaacta

SEQ ID NO: 283200 - DNA, 19 bp, Homo sapiens
  siRNA target sequence for PROSC (NM_007198.2,733-751).
catcaaatcccaaaattct

SEQ ID NO: 283201 - DNA, 19 bp, Homo sapiens
  siRNA target sequence for PROSC (NM_007198.2,741-759).
cccaaaattctgtctttgt

SEQ ID NO: 283202 - DNA, 19 bp, Homo sapiens
  siRNA target sequence for PROSC (NM_007198.2,743-761).
caaaattctgtctttgtgt

SEQ ID NO: 283203 - DNA, 19 bp, Homo sapiens
  siRNA target sequence for PROSC (NM_007198.2,767-785).
gatcaaatggcacttcatt

SEQ ID NO: 283204 - DNA, 19 bp, Homo sapiens
  siRNA target sequence for PROSC (NM_007198.2,870-888).
gcagacaaagtgaacagtt

SEQ ID NO: 283205 - DNA, 19 bp, Homo sapiens
  siRNA target sequence for PROSC (NM_007198.2,907-925).
ctcctgaaaggttaaaggt

SEQ ID NO: 283206 - DNA, 19 bp, Homo sapiens
  siRNA target sequence for PROSC (NM_007198.2,924-942).
gttatggtccagattaaca

SEQ ID NO: 283207 - DNA, 19 bp, Homo sapiens
  siRNA target sequence for PROSC (NM_007198.2,990-1008).
gccatcgtggagcacataa

SEQ ID NO: 283208 - DNA, 19 bp, Homo sapiens
  siRNA target sequence for PROSC (NM_007198.2,991-1009).
ccatcgtggagcacataaa

SEQ ID NO: 283209 - DNA, 19 bp, Homo sapiens
  siRNA target sequence for PROSC (NM_007198.2,1058-1076).
ctttgggcatgatcttagt

SEQ ID NO: 283210 - DNA, 19 bp, Homo sapiens
  siRNA target sequence for PROSC (NM_007198.2,1092-1110).
gacttccagctgttattgt

SEQ ID NO: 283211 - DNA, 19 bp, Homo sapiens
  siRNA target sequence for PROSC (NM_007198.2,1174-1192).
gcatgtccgcggatttcca

SEQ ID NO: 283212 - DNA, 19 bp, Homo sapiens
  siRNA target sequence for PROSC (NM_007198.2,1224-1242).
cgaataggaagcacgattt

SEQ ID NO: 283213 - DNA, 19 bp, Homo sapiens
  siRNA target sequence for PROSC (NM_007198.2,1225-1243).
gaataggaagcacgatttt

SEQ ID NO: 283214 - DNA, 19 bp, Homo sapiens
  siRNA target sequence for PROSC (NM_007198.2,1245-1263).
ggagagcgggattactcaa

SEQ ID NO: 283215 - DNA, 19 bp, Homo sapiens
  siRNA target sequence for PROSC (NM_007198.2,1246-1264).
gagagcgggattactcaaa

SEQ ID NO: 283216 - DNA, 19 bp, Homo sapiens
  siRNA target sequence for PRX (NM_020956.1,526-544).
gcgccgagccttacaaagt

SEQ ID NO: 283217 - DNA, 19 bp, Homo sapiens
  siRNA target sequence for PRX (NM_181882.1,661-679).
gtctgtcccctgtgaagaa

SEQ ID NO: 283218 - DNA, 19 bp, Homo sapiens
  siRNA target sequence for PRX (NM_181882.1,2432-2450).
catgaagctcccagagata

SEQ ID NO: 283219 - DNA, 19 bp, Homo sapiens
  siRNA target sequence for PRX (NM_181882.1,2605-2623).
ctccggaggtgcagctaaa

SEQ ID NO: 283220 - DNA, 19 bp, Homo sapiens
  siRNA target sequence for PRX (NM_181882.1,2752-2770).
cagggaagctggtaacact

SEQ ID NO: 283221 - DNA, 19 bp, Homo sapiens
  siRNA target sequence for PRX (NM_181882.1,2964-2982).
ccctctgttgaaattgtca

SEQ ID NO: 283222 - DNA, 19 bp, Homo sapiens
  siRNA target sequence for PRX (NM_181882.1,3055-3073).
ccaagttctccttacctaa

SEQ ID NO: 283223 - DNA, 19 bp, Homo sapiens
  siRNA target sequence for PRX (NM_181882.1,3059-3077).
gttctccttacctaagttt

SEQ ID NO: 283224 - DNA, 19 bp, Homo sapiens
  siRNA target sequence for PRX (NM_181882.1,3329-3347).
gtttgctctccccaagttt

SEQ ID NO: 283225 - DNA, 19 bp, Homo sapiens
  siRNA target sequence for PRX (NM_181882.1,3424-3442).
gggatgggagggtgaagat

SEQ ID NO: 283226 - DNA, 19 bp, Homo sapiens
  siRNA target sequence for PRX (NM_181882.1,3535-3553).
ccaccgctgtgcagcttaa

SEQ ID NO: 283227 - DNA, 19 bp, Homo sapiens
  siRNA target sequence for PRX (NM_181882.1,3538-3556).
ccgctgtgcagcttaagat

SEQ ID NO: 283228 - DNA, 19 bp, Homo sapiens
  siRNA target sequence for PRX (NM_181882.1,3885-3903).
gtgggtgagggtgtcttta

SEQ ID NO: 283229 - DNA, 19 bp, Homo sapiens
  siRNA target sequence for PSG9 (NM_002784.2,326-344).
cattacattatatcgtata

SEQ ID NO: 283230 - DNA, 19 bp, Homo sapiens
  siRNA target sequence for PSG9 (NM_002784.2,339-357).
cgtatatagttgatggtaa

SEQ ID NO: 283231 - DNA, 19 bp, Homo sapiens
  siRNA target sequence for PSG9 (NM_002784.2,494-512).
gaagaaattcgacatttca

SEQ ID NO: 283232 - DNA, 19 bp, Homo sapiens
  siRNA target sequence for PSMD9 (NM_002813.4,243-261).
cgtgctggaaagccaaaaa

SEQ ID NO: 283233 - DNA, 19 bp, Homo sapiens
  siRNA target sequence for PSMD9 (NM_002813.4,517-535).
cgggccttcgccaaagtga

SEQ ID NO: 283234 - DNA, 19 bp, Homo sapiens
  siRNA target sequence for PTD008 (NM_016145.1,259-277).
cacggaggccgaacaaagt

SEQ ID NO: 283235 - DNA, 19 bp, Homo sapiens
  siRNA target sequence for PTD008 (NM_016145.1,327-345).
ccgacgccggactacatga

SEQ ID NO: 283236 - DNA, 19 bp, Homo sapiens
  siRNA target sequence for PTD008 (NM_016145.1,328-346).
cgacgccggactacatgaa

SEQ ID NO: 283237 - DNA, 19 bp, Homo sapiens
  siRNA target sequence for PTD008 (NM_016145.1,373-391).
gcggcctcatgcttaagct

SEQ ID NO: 283238 - DNA, 19 bp, Homo sapiens
  siRNA target sequence for PTTG1IP (NM_004339.2,382-400).
ctttggtgcaacactaaca

SEQ ID NO: 283239 - DNA, 19 bp, Homo sapiens
  siRNA target sequence for PTTG1IP (NM_004339.2,436-454).
ccaccggcttccctttgta

SEQ ID NO: 283240 - DNA, 19 bp, Homo sapiens
  siRNA target sequence for PTTG1IP (NM_004339.2,437-455).
caccggcttccctttgtaa

SEQ ID NO: 283241 - DNA, 19 bp, Homo sapiens
  siRNA target sequence for PTTG1IP (NM_004339.2,466-484).
gcacgctggggagtttgtt

SEQ ID NO: 283242 - DNA, 19 bp, Homo sapiens
  siRNA target sequence for PTTG1IP (NM_004339.2,718-736).
gaagaaaacccgtatgcta

SEQ ID NO: 283243 - DNA, 19 bp, Homo sapiens
  siRNA target sequence for PTTG1IP (NM_004339.2,726-744).
cccgtatgctagatttgaa

SEQ ID NO: 283244 - DNA, 19 bp, Homo sapiens
  siRNA target sequence for PTTG1IP (NM_004339.2,727-745).
ccgtatgctagatttgaaa

SEQ ID NO: 283245 - DNA, 19 bp, Homo sapiens
  siRNA target sequence for RAI2 (NM_021785.2,428-446).
ctcctgccttggctaataa

SEQ ID NO: 283246 - DNA, 19 bp, Homo sapiens
  siRNA target sequence for RAI2 (NM_021785.2,534-552).
cgtgccagccccatccatt

SEQ ID NO: 283247 - DNA, 19 bp, Homo sapiens
  siRNA target sequence for RAI2 (NM_021785.2,640-658).
gtggtgatgcccattcaca

SEQ ID NO: 283248 - DNA, 19 bp, Homo sapiens
  siRNA target sequence for RAI2 (NM_021785.2,821-839).
ccagtaccatccacaacaa

SEQ ID NO: 283249 - DNA, 19 bp, Homo sapiens
  siRNA target sequence for RAI2 (NM_021785.2,935-953).
ctgtgctccagaatttgtt

SEQ ID NO: 283250 - DNA, 19 bp, Homo sapiens
  siRNA target sequence for RAI2 (NM_021785.2,1012-1030).
gtgcccccacagcctttta

SEQ ID NO: 283251 - DNA, 19 bp, Homo sapiens
  siRNA target sequence for RAI2 (NM_021785.2,1191-1209).
cggcctgcacccctttaaa

SEQ ID NO: 283252 - DNA, 19 bp, Homo sapiens
  siRNA target sequence for RAI2 (NM_021785.2,1286-1304).
gccgccacacggtcattaa

SEQ ID NO: 283253 - DNA, 19 bp, Homo sapiens
  siRNA target sequence for RAI2 (NM_021785.2,1289-1307).
gccacacggtcattaagat

SEQ ID NO: 283254 - DNA, 19 bp, Homo sapiens
  siRNA target sequence for RAI2 (NM_021785.2,1327-1345).
ctggatctctccatgaagt

SEQ ID NO: 283255 - DNA, 19 bp, Homo sapiens
  siRNA target sequence for RAI2 (NM_021785.2,1515-1533).
cagtggcatggaaatttct

SEQ ID NO: 283256 - DNA, 19 bp, Homo sapiens
  siRNA target sequence for RAI2 (NM_021785.2,1517-1535).
gtggcatggaaatttcttt

SEQ ID NO: 283257 - DNA, 19 bp, Homo sapiens
  siRNA target sequence for RAI2 (NM_021785.2,1558-1576).
gccccagccatgatggata

SEQ ID NO: 283258 - DNA, 19 bp, Homo sapiens
  siRNA target sequence for RAI2 (NM_021785.2,1637-1655).
gcgaagtcaaggctgaaaa

SEQ ID NO: 283259 - DNA, 19 bp, Homo sapiens
  siRNA target sequence for RAI2 (NM_021785.2,1711-1729).
gatgctgtgcctaccatat

SEQ ID NO: 283260 - DNA, 19 bp, Homo sapiens
  siRNA target sequence for RAI2 (NM_021785.2,1857-1875).
ccttaggaaacccatcaaa

SEQ ID NO: 283261 - DNA, 19 bp, Homo sapiens
  siRNA target sequence for RAI2 (NM_021785.2,1879-1897).
cggagcataaagttaaaga

SEQ ID NO: 283262 - DNA, 19 bp, Homo sapiens
  siRNA target sequence for RAI2 (NM_021785.2,1945-1963).
ctggccaccttttttccaa

SEQ ID NO: 283263 - DNA, 19 bp, Homo sapiens
  siRNA target sequence for RARRES2 (NM_002889.2,353-371).
gcctggcctgcatcaaact

SEQ ID NO: 283264 - DNA, 19 bp, Homo sapiens
  siRNA target sequence for RCD-8 (NM_014329.2,241-259).
gccatccagtgcctacaat

SEQ ID NO: 283265 - DNA, 19 bp, Homo sapiens
  siRNA target sequence for RCD-8 (NM_014329.2,500-518).
cctgtcgccaagtatgact

SEQ ID NO: 283266 - DNA, 19 bp, Homo sapiens
  siRNA target sequence for RCD-8 (NM_014329.2,515-533).
gactgggaacagaagtact

SEQ ID NO: 283267 - DNA, 19 bp, Homo sapiens
  siRNA target sequence for RCD-8 (NM_014329.2,747-765).
ggcgcttggctctggttaa

SEQ ID NO: 283268 - DNA, 19 bp, Homo sapiens
  siRNA target sequence for RCD-8 (NM_014329.2,748-766).
gcgcttggctctggttaat

SEQ ID NO: 283269 - DNA, 19 bp, Homo sapiens
  siRNA target sequence for RCD-8 (NM_014329.2,760-778).
ggttaatggcaaaattcaa

SEQ ID NO: 283270 - DNA, 19 bp, Homo sapiens
  siRNA target sequence for RCD-8 (NM_014329.2,827-845).
cactttcgcaggatcatct

SEQ ID NO: 283271 - DNA, 19 bp, Homo sapiens
  siRNA target sequence for RCD-8 (NM_014329.2,1000-1018).
gggcttcattgtggtaaaa

SEQ ID NO: 283272 - DNA, 19 bp, Homo sapiens
  siRNA target sequence for RCD-8 (NM_014329.2,1259-1277).
gaccagaaccgagagttaa

SEQ ID NO: 283273 - DNA, 19 bp, Homo sapiens
  siRNA target sequence for RCD-8 (NM_014329.2,1262-1280).
cagaaccgagagttaaaga

SEQ ID NO: 283274 - DNA, 19 bp, Homo sapiens
  siRNA target sequence for RCD-8 (NM_014329.2,1355-1373).
ccccctagcctcaaggttt

SEQ ID NO: 283275 - DNA, 19 bp, Homo sapiens
  siRNA target sequence for RCD-8 (NM_014329.2,1359-1377).
ctagcctcaaggtttgctt

SEQ ID NO: 283276 - DNA, 19 bp, Homo sapiens
  siRNA target sequence for RCD-8 (NM_014329.2,1418-1436).
cggaaggtcctctatgtga

SEQ ID NO: 283277 - DNA, 19 bp, Homo sapiens
  siRNA target sequence for RCD-8 (NM_014329.2,1419-1437).
ggaaggtcctctatgtgat

SEQ ID NO: 283278 - DNA, 19 bp, Homo sapiens
  siRNA target sequence for RCD-8 (NM_014329.2,1646-1664).
gtgctcatcaagctctttt

SEQ ID NO: 283279 - DNA, 19 bp, Homo sapiens
  siRNA target sequence for RCD-8 (NM_014329.2,1648-1666).
gctcatcaagctcttttgt

SEQ ID NO: 283280 - DNA, 19 bp, Homo sapiens
  siRNA target sequence for RCD-8 (NM_014329.2,1754-1772).
gcccacgaggacttcacat

SEQ ID NO: 283281 - DNA, 19 bp, Homo sapiens
  siRNA target sequence for RCD-8 (NM_014329.2,1895-1913).
gagaccaagcccaagttga

SEQ ID NO: 283282 - DNA, 19 bp, Homo sapiens
  siRNA target sequence for RCD-8 (NM_014329.2,2386-2404).
ggccctgtcccgtggtttt

SEQ ID NO: 283283 - DNA, 19 bp, Homo sapiens
  siRNA target sequence for RCD-8 (NM_014329.2,2536-2554).
ggatggagatcggcataat

SEQ ID NO: 283284 - DNA, 19 bp, Homo sapiens
  siRNA target sequence for RCD-8 (NM_014329.2,2537-2555).
gatggagatcggcataata

SEQ ID NO: 283285 - DNA, 19 bp, Homo sapiens
  siRNA target sequence for RCD-8 (NM_014329.2,2618-2636).
cccacagcacctgacatta

SEQ ID NO: 283286 - DNA, 19 bp, Homo sapiens
  siRNA target sequence for RCD-8 (NM_014329.2,2620-2638).
cacagcacctgacattact

SEQ ID NO: 283287 - DNA, 19 bp, Homo sapiens
  siRNA target sequence for RCD-8 (NM_014329.2,2707-2725).
cttccaccgaccaccatat

SEQ ID NO: 283288 - DNA, 19 bp, Homo sapiens
  siRNA target sequence for RCD-8 (NM_014329.2,2767-2785).
gcaaagtgaccatgatgat

SEQ ID NO: 283289 - DNA, 19 bp, Homo sapiens
  siRNA target sequence for RCD-8 (NM_014329.2,2980-2998).
ggactggccagcactaatt

SEQ ID NO: 283290 - DNA, 19 bp, Homo sapiens
  siRNA target sequence for RCD-8 (NM_014329.2,3258-3276).
gcagcatacgggatgagat

SEQ ID NO: 283291 - DNA, 19 bp, Homo sapiens
  siRNA target sequence for RCD-8 (NM_014329.2,3398-3416).
ctgctcaagtccaagaact

SEQ ID NO: 283292 - DNA, 19 bp, Homo sapiens
  siRNA target sequence for RER1 (NM_007033.2,119-137).
ccttcggtggtgtacagat

SEQ ID NO: 283293 - DNA, 19 bp, Homo sapiens
  siRNA target sequence for RER1 (NM_007033.2,120-138).
cttcggtggtgtacagatt

SEQ ID NO: 283294 - DNA, 19 bp, Homo sapiens
  siRNA target sequence for RER1 (NM_007033.2,222-240).
gcctgagctttgtctacat

SEQ ID NO: 283295 - DNA, 19 bp, Homo sapiens
  siRNA target sequence for RER1 (NM_007033.2,224-242).
ctgagctttgtctacatga

SEQ ID NO: 283296 - DNA, 19 bp, Homo sapiens
  siRNA target sequence for RER1 (NM_007033.2,226-244).
gagctttgtctacatgatt

SEQ ID NO: 283297 - DNA, 19 bp, Homo sapiens
  siRNA target sequence for RER1 (NM_007033.2,256-274).
gctgcagggttggtacatt

SEQ ID NO: 283298 - DNA, 19 bp, Homo sapiens
  siRNA target sequence for RER1 (NM_007033.2,289-307).
ggggatctaccatctaaat

SEQ ID NO: 283299 - DNA, 19 bp, Homo sapiens
  siRNA target sequence for RER1 (NM_007033.2,291-309).
ggatctaccatctaaatct

SEQ ID NO: 283300 - DNA, 19 bp, Homo sapiens
  siRNA target sequence for RER1 (NM_007033.2,292-310).
gatctaccatctaaatctt

SEQ ID NO: 283301 - DNA, 19 bp, Homo sapiens
  siRNA target sequence for RER1 (NM_007033.2,331-349).
caaagtggatccttcctta

SEQ ID NO: 283302 - DNA, 19 bp, Homo sapiens
  siRNA target sequence for RER1 (NM_007033.2,416-434).
cgaaggctcccagagttta

SEQ ID NO: 283303 - DNA, 19 bp, Homo sapiens
  siRNA target sequence for RER1 (NM_007033.2,592-610).
ctttcttcgacgctttcaa

SEQ ID NO: 283304 - DNA, 19 bp, Homo sapiens
  siRNA target sequence for RER1 (NM_007033.2,625-643).
ggccgattctggtgatgta

SEQ ID NO: 283305 - DNA, 19 bp, Homo sapiens
  siRNA target sequence for RIOK2 (NM_018343.1,68-86).
gccaagttgcgttacatga

SEQ ID NO: 283306 - DNA, 19 bp, Homo sapiens
  siRNA target sequence for RIOK2 (NM_018343.1,104-122).
gtcttgaccgcggttgaaa

SEQ ID NO: 283307 - DNA, 19 bp, Homo sapiens
  siRNA target sequence for RIOK2 (NM_018343.1,125-143).
ggcatgaagaaccatgaaa

SEQ ID NO: 283308 - DNA, 19 bp, Homo sapiens
  siRNA target sequence for RIOK2 (NM_018343.1,149-167).
cccggcagtttgattgctt

SEQ ID NO: 283309 - DNA, 19 bp, Homo sapiens
  siRNA target sequence for RIOK2 (NM_018343.1,236-254).
gcttgggagcgtaccaaaa

SEQ ID NO: 283310 - DNA, 19 bp, Homo sapiens
  siRNA target sequence for RIOK2 (NM_018343.1,260-278).
cagggctatcggttgacaa

SEQ ID NO: 283311 - DNA, 19 bp, Homo sapiens
  siRNA target sequence for RIOK2 (NM_018343.1,262-280).
gggctatcggttgacaaat

SEQ ID NO: 283312 - DNA, 19 bp, Homo sapiens
  siRNA target sequence for RIOK2 (NM_018343.1,265-283).
ctatcggttgacaaatgca

SEQ ID NO: 283313 - DNA, 19 bp, Homo sapiens
  siRNA target sequence for RIOK2 (NM_018343.1,399-417).
gacaacaatttgcattaaa

SEQ ID NO: 283314 - DNA, 19 bp, Homo sapiens
  siRNA target sequence for RIOK2 (NM_018343.1,431-449).
ggaagaacctcgtttcgaa

SEQ ID NO: 283315 - DNA, 19 bp, Homo sapiens
  siRNA target sequence for RIOK2 (NM_018343.1,435-453).
gaacctcgtttcgaaattt

SEQ ID NO: 283316 - DNA, 19 bp, Homo sapiens
  siRNA target sequence for RIOK2 (NM_018343.1,438-456).
cctcgtttcgaaatttgaa

SEQ ID NO: 283317 - DNA, 19 bp, Homo sapiens
  siRNA target sequence for RIOK2 (NM_018343.1,439-457).
ctcgtttcgaaatttgaaa

SEQ ID NO: 283318 - DNA, 19 bp, Homo sapiens
  siRNA target sequence for RIOK2 (NM_018343.1,454-472).
gaaaaacaaacgcgattat

SEQ ID NO: 283319 - DNA, 19 bp, Homo sapiens
  siRNA target sequence for RIOK2 (NM_018343.1,460-478).
caaacgcgattatcataaa

SEQ ID NO: 283320 - DNA, 19 bp, Homo sapiens
  siRNA target sequence for RIOK2 (NM_018343.1,464-482).
cgcgattatcataaacata

SEQ ID NO: 283321 - DNA, 19 bp, Homo sapiens
  siRNA target sequence for RIOK2 (NM_018343.1,537-555).
cctatatgaaggcattgta

SEQ ID NO: 283322 - DNA, 19 bp, Homo sapiens
  siRNA target sequence for RIOK2 (NM_018343.1,538-556).
ctatatgaaggcattgtat

SEQ ID NO: 283323 - DNA, 19 bp, Homo sapiens
  siRNA target sequence for RIOK2 (NM_018343.1,548-566).
gcattgtatgagaggaaat

SEQ ID NO: 283324 - DNA, 19 bp, Homo sapiens
  siRNA target sequence for RIOK2 (NM_018343.1,572-590).
gttccaaagccaattgatt

SEQ ID NO: 283325 - DNA, 19 bp, Homo sapiens
  siRNA target sequence for RIOK2 (NM_018343.1,605-623).
gtggtcatggaactcataa

SEQ ID NO: 283326 - DNA, 19 bp, Homo sapiens
  siRNA target sequence for RIOK2 (NM_018343.1,607-625).
ggtcatggaactcataaat

SEQ ID NO: 283327 - DNA, 19 bp, Homo sapiens
  siRNA target sequence for RIOK2 (NM_018343.1,643-661).
gatacaccatgttgaagat

SEQ ID NO: 283328 - DNA, 19 bp, Homo sapiens
  siRNA target sequence for RIOK2 (NM_018343.1,669-687).
cagtatatgatgaagctat

SEQ ID NO: 283329 - DNA, 19 bp, Homo sapiens
  siRNA target sequence for RIOK2 (NM_018343.1,770-788).
catatcaccatgattgatt

SEQ ID NO: 283330 - DNA, 19 bp, Homo sapiens
  siRNA target sequence for RIOK2 (NM_018343.1,845-863).
gttaaatgcattaaagatt

SEQ ID NO: 283331 - DNA, 19 bp, Homo sapiens
  siRNA target sequence for RIOK2 (NM_018343.1,876-894).
gtttcagctacgaaagtga

SEQ ID NO: 283332 - DNA, 19 bp, Homo sapiens
  siRNA target sequence for RIOK2 (NM_018343.1,882-900).
gctacgaaagtgagctttt

SEQ ID NO: 283333 - DNA, 19 bp, Homo sapiens
  siRNA target sequence for RIOK2 (NM_018343.1,883-901).
ctacgaaagtgagcttttt

SEQ ID NO: 283334 - DNA, 19 bp, Homo sapiens
  siRNA target sequence for RIOK2 (NM_018343.1,951-969).
ctgccagtggctacacaaa

SEQ ID NO: 283335 - DNA, 19 bp, Homo sapiens
  siRNA target sequence for RIOK2 (NM_018343.1,957-975).
gtggctacacaaaggaaat

SEQ ID NO: 283336 - DNA, 19 bp, Homo sapiens
  siRNA target sequence for RIOK2 (NM_018343.1,970-988).
ggaaatgcaggcagatgat

SEQ ID NO: 283337 - DNA, 19 bp, Homo sapiens
  siRNA target sequence for RIOK2 (NM_018343.1,1037-1055).
gagggatctgaattctcat

SEQ ID NO: 283338 - DNA, 19 bp, Homo sapiens
  siRNA target sequence for RIOK2 (NM_018343.1,1141-1159).
ctgctattgcagatcatct

SEQ ID NO: 283339 - DNA, 19 bp, Homo sapiens
  siRNA target sequence for RIOK2 (NM_018343.1,1211-1229).
gcacggagttttgaaatga

SEQ ID NO: 283340 - DNA, 19 bp, Homo sapiens
  siRNA target sequence for RIOK2 (NM_018343.1,1388-1406).
gatgaatgccctcatctaa

SEQ ID NO: 283341 - DNA, 19 bp, Homo sapiens
  siRNA target sequence for RIOK2 (NM_018343.1,1409-1427).
gccttgtcgtcattaaata

SEQ ID NO: 283342 - DNA, 19 bp, Homo sapiens
  siRNA target sequence for RIOK2 (NM_018343.1,1411-1429).
cttgtcgtcattaaataga

SEQ ID NO: 283343 - DNA, 19 bp, Homo sapiens
  siRNA target sequence for RIOK2 (NM_018343.1,1416-1434).
cgtcattaaatagagaatt

SEQ ID NO: 283344 - DNA, 19 bp, Homo sapiens
  siRNA target sequence for RIOK2 (NM_018343.1,1460-1478).
gtgggagctatgaatcagt

SEQ ID NO: 283345 - DNA, 19 bp, Homo sapiens
  siRNA target sequence for RIOK2 (NM_018343.1,1462-1480).
gggagctatgaatcagtat

SEQ ID NO: 283346 - DNA, 19 bp, Homo sapiens
  siRNA target sequence for RIOK2 (NM_018343.1,1471-1489).
gaatcagtatagaacaaga

SEQ ID NO: 283347 - DNA, 19 bp, Homo sapiens
  siRNA target sequence for RIOK2 (NM_018343.1,1517-1535).
gctgtaagctgttcaacaa

SEQ ID NO: 283348 - DNA, 19 bp, Homo sapiens
  siRNA target sequence for RIOK2 (NM_018343.1,1518-1536).
ctgtaagctgttcaacaat

SEQ ID NO: 283349 - DNA, 19 bp, Homo sapiens
  siRNA target sequence for RIOK2 (NM_018343.1,1564-1582).
gaaacgtcagttgacaaaa

SEQ ID NO: 283350 - DNA, 19 bp, Homo sapiens
  siRNA target sequence for RIOK3 (NM_003831.2,221-239).
gctattcctcaaaatacaa

SEQ ID NO: 283351 - DNA, 19 bp, Homo sapiens
  siRNA target sequence for RIOK3 (NM_003831.2,227-245).
cctcaaaatacaatatctt

SEQ ID NO: 283352 - DNA, 19 bp, Homo sapiens
  siRNA target sequence for RIOK3 (NM_003831.2,332-350).
gctgaaggaccatttatta

SEQ ID NO: 283353 - DNA, 19 bp, Homo sapiens
  siRNA target sequence for RIOK3 (NM_003831.2,431-449).
cagcttaggcgtgaagaaa

SEQ ID NO: 283354 - DNA, 19 bp, Homo sapiens
  siRNA target sequence for RIOK3 (NM_003831.2,433-451).
gcttaggcgtgaagaaaaa

SEQ ID NO: 283355 - DNA, 19 bp, Homo sapiens
  siRNA target sequence for RIOK3 (NM_003831.2,462-480).
gagatagcaaagtttccat

SEQ ID NO: 283356 - DNA, 19 bp, Homo sapiens
  siRNA target sequence for RIOK3 (NM_003831.2,464-482).
gatagcaaagtttccattt

SEQ ID NO: 283357 - DNA, 19 bp, Homo sapiens
  siRNA target sequence for RIOK3 (NM_003831.2,520-538).
cagcgatagctctgaagat

SEQ ID NO: 283358 - DNA, 19 bp, Homo sapiens
  siRNA target sequence for RIOK3 (NM_003831.2,550-568).
gcaggatactcgtgatgat

SEQ ID NO: 283359 - DNA, 19 bp, Homo sapiens
  siRNA target sequence for RIOK3 (NM_003831.2,588-606).
cggttcccactcctaaaaa

SEQ ID NO: 283360 - DNA, 19 bp, Homo sapiens
  siRNA target sequence for RIOK3 (NM_003831.2,607-625).
gggctttattggaaaagga

SEQ ID NO: 283361 - DNA, 19 bp, Homo sapiens
  siRNA target sequence for RIOK3 (NM_003831.2,851-869).
cctaagacacgtttactta

SEQ ID NO: 283362 - DNA, 19 bp, Homo sapiens
  siRNA target sequence for RIOK3 (NM_003831.2,852-870).
ctaagacacgtttacttat

SEQ ID NO: 283363 - DNA, 19 bp, Homo sapiens
  siRNA target sequence for RIOK3 (NM_003831.2,890-908).
ggaatgttggagacaatca

SEQ ID NO: 283364 - DNA, 19 bp, Homo sapiens
  siRNA target sequence for RIOK3 (NM_003831.2,901-919).
gacaatcactggctgtatt

SEQ ID NO: 283365 - DNA, 19 bp, Homo sapiens
  siRNA target sequence for RIOK3 (NM_003831.2,907-925).
cactggctgtattagtaca

SEQ ID NO: 283366 - DNA, 19 bp, Homo sapiens
  siRNA target sequence for RIOK3 (NM_003831.2,931-949).
ggagtctgttgtctttcat

SEQ ID NO: 283367 - DNA, 19 bp, Homo sapiens
  siRNA target sequence for RIOK3 (NM_003831.2,979-997).
ggaagatagtaaagttata

SEQ ID NO: 283368 - DNA, 19 bp, Homo sapiens
  siRNA target sequence for RIOK3 (NM_003831.2,1004-1022).
gaatgtgccatcaaggtat

SEQ ID NO: 283369 - DNA, 19 bp, Homo sapiens
  siRNA target sequence for RIOK3 (NM_003831.2,1048-1066).
gaatcgtgacaaatatatt

SEQ ID NO: 283370 - DNA, 19 bp, Homo sapiens
  siRNA target sequence for RIOK3 (NM_003831.2,1185-1203).
gtccaacagttgtactact

SEQ ID NO: 283371 - DNA, 19 bp, Homo sapiens
  siRNA target sequence for RIOK3 (NM_003831.2,1256-1274).
cctaaattaaaagaagtaa

SEQ ID NO: 283372 - DNA, 19 bp, Homo sapiens
  siRNA target sequence for RIOK3 (NM_003831.2,1303-1321).
ctactatcaaactcttcat

SEQ ID NO: 283373 - DNA, 19 bp, Homo sapiens
  siRNA target sequence for RIOK3 (NM_003831.2,1319-1337).
catttgatgcggcagttat

SEQ ID NO: 283374 - DNA, 19 bp, Homo sapiens
  siRNA target sequence for RIOK3 (NM_003831.2,1324-1342).
gatgcggcagttatatcat

SEQ ID NO: 283375 - DNA, 19 bp, Homo sapiens
  siRNA target sequence for RIOK3 (NM_003831.2,1327-1345).
gcggcagttatatcatgaa

SEQ ID NO: 283376 - DNA, 19 bp, Homo sapiens
  siRNA target sequence for RIOK3 (NM_003831.2,1328-1346).
cggcagttatatcatgaat

SEQ ID NO: 283377 - DNA, 19 bp, Homo sapiens
  siRNA target sequence for RIOK3 (NM_003831.2,1330-1348).
gcagttatatcatgaatgt

SEQ ID NO: 283378 - DNA, 19 bp, Homo sapiens
  siRNA target sequence for RIOK3 (NM_003831.2,1331-1349).
cagttatatcatgaatgta

SEQ ID NO: 283379 - DNA, 19 bp, Homo sapiens
  siRNA target sequence for RIOK3 (NM_003831.2,1364-1382).
gacctcagtgagtataaca

SEQ ID NO: 283380 - DNA, 19 bp, Homo sapiens
  siRNA target sequence for RIOK3 (NM_003831.2,1469-1487).
cgggactgcaggaatgtct

SEQ ID NO: 283381 - DNA, 19 bp, Homo sapiens
  siRNA target sequence for RIOK3 (NM_003831.2,1527-1545).
gtgaacgagaactcttcaa

SEQ ID NO: 283382 - DNA, 19 bp, Homo sapiens
  siRNA target sequence for RIOK3 (NM_003831.2,1550-1568).
gtttcaggcttaaacatca

SEQ ID NO: 283383 - DNA, 19 bp, Homo sapiens
  siRNA target sequence for RIOK3 (NM_003831.2,1631-1649).
cacgttcagaagaatggaa

SEQ ID NO: 283384 - DNA, 19 bp, Homo sapiens
  siRNA target sequence for RIOK3 (NM_003831.2,1679-1697).
ggagacccaccactactat

SEQ ID NO: 283385 - DNA, 19 bp, Homo sapiens
  siRNA target sequence for RIOK3 (NM_003831.2,1680-1698).
gagacccaccactactata

SEQ ID NO: 283386 - DNA, 19 bp, Homo sapiens
  siRNA target sequence for RP1 (NM_006269.1,151-169).
gagtgataccccttctact

SEQ ID NO: 283387 - DNA, 19 bp, Homo sapiens
  siRNA target sequence for RP1 (NM_006269.1,161-179).
ccttctactggtttttcca

SEQ ID NO: 283388 - DNA, 19 bp, Homo sapiens
  siRNA target sequence for RP1 (NM_006269.1,248-266).
gtggccaagcgaatcagtt

SEQ ID NO: 283389 - DNA, 19 bp, Homo sapiens
  siRNA target sequence for RP1 (NM_006269.1,252-270).
ccaagcgaatcagtttcta

SEQ ID NO: 283390 - DNA, 19 bp, Homo sapiens
  siRNA target sequence for RP1 (NM_006269.1,257-275).
cgaatcagtttctacaaga

SEQ ID NO: 283391 - DNA, 19 bp, Homo sapiens
  siRNA target sequence for RP1 (NM_006269.1,311-329).
gtcaaccctcgctccttta

SEQ ID NO: 283392 - DNA, 19 bp, Homo sapiens
  siRNA target sequence for RP1 (NM_006269.1,322-340).
ctcctttaagtcctttgat

SEQ ID NO: 283393 - DNA, 19 bp, Homo sapiens
  siRNA target sequence for RP1 (NM_006269.1,446-464).
gacggcgagtcctacctat

SEQ ID NO: 283394 - DNA, 19 bp, Homo sapiens
  siRNA target sequence for RP1 (NM_006269.1,449-467).
ggcgagtcctacctatgtt

SEQ ID NO: 283395 - DNA, 19 bp, Homo sapiens
  siRNA target sequence for RP1 (NM_006269.1,684-702).
gcttcgaggcatttctaca

SEQ ID NO: 283396 - DNA, 19 bp, Homo sapiens
  siRNA target sequence for RP1 (NM_006269.1,813-831).
caggaagggagccatttaa

SEQ ID NO: 283397 - DNA, 19 bp, Homo sapiens
  siRNA target sequence for RP1 (NM_006269.1,836-854).
ggaaattatgacatccaaa

SEQ ID NO: 283398 - DNA, 19 bp, Homo sapiens
  siRNA target sequence for RP1 (NM_006269.1,859-877).
cttgcttcctgctagatta

SEQ ID NO: 283399 - DNA, 19 bp, Homo sapiens
  siRNA target sequence for RP1 (NM_006269.1,862-880).
gcttcctgctagattacca

SEQ ID NO: 283400 - DNA, 19 bp, Homo sapiens
  siRNA target sequence for RP1 (NM_006269.1,898-916).
gtaccccaagggaaatgca

SEQ ID NO: 283401 - DNA, 19 bp, Homo sapiens
  siRNA target sequence for RP1 (NM_006269.1,930-948).
gaaagataagcacacatat

SEQ ID NO: 283402 - DNA, 19 bp, Homo sapiens
  siRNA target sequence for RP1 (NM_006269.1,964-982).
gtcccagatttattctgtt

SEQ ID NO: 283403 - DNA, 19 bp, Homo sapiens
  siRNA target sequence for RP1 (NM_006269.1,1007-1025).
gattgctacttagactatt

SEQ ID NO: 283404 - DNA, 19 bp, Homo sapiens
  siRNA target sequence for RP1 (NM_006269.1,1012-1030).
ctacttagactattctttt

SEQ ID NO: 283405 - DNA, 19 bp, Homo sapiens
  siRNA target sequence for RP1 (NM_006269.1,1100-1118).
gatattgagaaatcaatta

SEQ ID NO: 283406 - DNA, 19 bp, Homo sapiens
  siRNA target sequence for RP1 (NM_006269.1,1194-1212).
ggacaactactgtcagtaa

SEQ ID NO: 283407 - DNA, 19 bp, Homo sapiens
  siRNA target sequence for RP1 (NM_006269.1,1195-1213).
gacaactactgtcagtaaa

SEQ ID NO: 283408 - DNA, 19 bp, Homo sapiens
  siRNA target sequence for RP1 (NM_006269.1,1215-1233).
ctggtccttctaataatga

SEQ ID NO: 283409 - DNA, 19 bp, Homo sapiens
  siRNA target sequence for RP1 (NM_006269.1,1330-1348).
ggagcgaagcagtaatcaa

SEQ ID NO: 283410 - DNA, 19 bp, Homo sapiens
  siRNA target sequence for RP1 (NM_006269.1,1415-1433).
gctagttgggagaatgcta

SEQ ID NO: 283411 - DNA, 19 bp, Homo sapiens
  siRNA target sequence for RP1 (NM_006269.1,1431-1449).
ctactgtggacacagatat

SEQ ID NO: 283412 - DNA, 19 bp, Homo sapiens
  siRNA target sequence for RP1 (NM_006269.1,1468-1486).
ccaagcaaagcatcgtttt

SEQ ID NO: 283413 - DNA, 19 bp, Homo sapiens
  siRNA target sequence for RP1 (NM_006269.1,1469-1487).
caagcaaagcatcgttttt

SEQ ID NO: 283414 - DNA, 19 bp, Homo sapiens
  siRNA target sequence for RP1 (NM_006269.1,1543-1561).
cagtgtgaccttagtatct

SEQ ID NO: 283415 - DNA, 19 bp, Homo sapiens
  siRNA target sequence for RP1 (NM_006269.1,1545-1563).
gtgtgaccttagtatctga

SEQ ID NO: 283416 - DNA, 19 bp, Homo sapiens
  siRNA target sequence for RP1 (NM_006269.1,1551-1569).
ccttagtatctgaaactga

SEQ ID NO: 283417 - DNA, 19 bp, Homo sapiens
  siRNA target sequence for RP1 (NM_006269.1,1570-1588).
ggttcaagagaaaatgatt

SEQ ID NO: 283418 - DNA, 19 bp, Homo sapiens
  siRNA target sequence for RP1 (NM_006269.1,1590-1608).
gacagttttcatatagtga

SEQ ID NO: 283419 - DNA, 19 bp, Homo sapiens
  siRNA target sequence for RP1 (NM_006269.1,1663-1681).
cagtaaaatgtcatcagta

SEQ ID NO: 283420 - DNA, 19 bp, Homo sapiens
  siRNA target sequence for RP1 (NM_006269.1,1672-1690).
gtcatcagtatctaacaaa

SEQ ID NO: 283421 - DNA, 19 bp, Homo sapiens
  siRNA target sequence for RP1 (NM_006269.1,1694-1712).
gtacttgttcagatcaata

SEQ ID NO: 283422 - DNA, 19 bp, Homo sapiens
  siRNA target sequence for RP1 (NM_006269.1,1705-1723).
gatcaataacaatgatcaa

SEQ ID NO: 283423 - DNA, 19 bp, Homo sapiens
  siRNA target sequence for RP1 (NM_006269.1,1765-1783).
gcttaagtcaagtgcaata

SEQ ID NO: 283424 - DNA, 19 bp, Homo sapiens
  siRNA target sequence for RP1 (NM_006269.1,1787-1805).
gctggtgttatagaaatta

SEQ ID NO: 283425 - DNA, 19 bp, Homo sapiens
  siRNA target sequence for RP1 (NM_006269.1,1790-1808).
ggtgttatagaaattacaa

SEQ ID NO: 283426 - DNA, 19 bp, Homo sapiens
  siRNA target sequence for RP1 (NM_006269.1,1825-1843).
gatgtcacataataatggt

SEQ ID NO: 283427 - DNA, 19 bp, Homo sapiens
  siRNA target sequence for RP1 (NM_006269.1,1841-1859).
ggtttgccatcaactatat

SEQ ID NO: 283428 - DNA, 19 bp, Homo sapiens
  siRNA target sequence for RP1 (NM_006269.1,1846-1864).
gccatcaactatatcaaat

SEQ ID NO: 283429 - DNA, 19 bp, Homo sapiens
  siRNA target sequence for RP1 (NM_006269.1,1848-1866).
catcaactatatcaaataa

SEQ ID NO: 283430 - DNA, 19 bp, Homo sapiens
  siRNA target sequence for RP1 (NM_006269.1,1900-1918).
ggtattggacaacaaaact

SEQ ID NO: 283431 - DNA, 19 bp, Homo sapiens
  siRNA target sequence for RP1 (NM_006269.1,1917-1935).
ctggtatcaagaacttcaa

SEQ ID NO: 283432 - DNA, 19 bp, Homo sapiens
  siRNA target sequence for RP1 (NM_006269.1,1919-1937).
ggtatcaagaacttcaaaa

SEQ ID NO: 283433 - DNA, 19 bp, Homo sapiens
  siRNA target sequence for RP1 (NM_006269.1,1955-1973).
gataggttcagtcctattt

SEQ ID NO: 283434 - DNA, 19 bp, Homo sapiens
  siRNA target sequence for RP1 (NM_006269.1,2060-2078).
gtcactgcaagaattgaca

SEQ ID NO: 283435 - DNA, 19 bp, Homo sapiens
  siRNA target sequence for RP1 (NM_006269.1,2070-2088).
gaattgacagactaattaa

SEQ ID NO: 283436 - DNA, 19 bp, Homo sapiens
  siRNA target sequence for RP1 (NM_006269.1,2075-2093).
gacagactaattaatgaat

SEQ ID NO: 283437 - DNA, 19 bp, Homo sapiens
  siRNA target sequence for RP1 (NM_006269.1,2097-2115).
ctcagtgtggtttaacaaa

SEQ ID NO: 283438 - DNA, 19 bp, Homo sapiens
  siRNA target sequence for RP1 (NM_006269.1,2112-2130).
caaaacttccaaaaaatga

SEQ ID NO: 283439 - DNA, 19 bp, Homo sapiens
  siRNA target sequence for RP1 (NM_006269.1,2175-2193).
ctcgacagcaagcaataaa

SEQ ID NO: 283440 - DNA, 19 bp, Homo sapiens
  siRNA target sequence for RP1 (NM_006269.1,2177-2195).
cgacagcaagcaataaatt

SEQ ID NO: 283441 - DNA, 19 bp, Homo sapiens
  siRNA target sequence for RP1 (NM_006269.1,2284-2302).
gatagtgcaagattcagat

SEQ ID NO: 283442 - DNA, 19 bp, Homo sapiens
  siRNA target sequence for RP1 (NM_006269.1,2379-2397).
gttccaaaagtaatctcaa

SEQ ID NO: 283443 - DNA, 19 bp, Homo sapiens
  siRNA target sequence for RP1 (NM_006269.1,2393-2411).
ctcaattccacgatttcca

SEQ ID NO: 283444 - DNA, 19 bp, Homo sapiens
  siRNA target sequence for RP1 (NM_006269.1,2456-2474).
gttcaaggacttttaacca

SEQ ID NO: 283445 - DNA, 19 bp, Homo sapiens
  siRNA target sequence for RP1 (NM_006269.1,2478-2496).
gaaaatctagatcactaaa

SEQ ID NO: 283446 - DNA, 19 bp, Homo sapiens
  siRNA target sequence for RP1 (NM_006269.1,2526-2544).
gagaaatcggtcaaagaga

SEQ ID NO: 283447 - DNA, 19 bp, Homo sapiens
  siRNA target sequence for RP1 (NM_006269.1,2528-2546).
gaaatcggtcaaagagata

SEQ ID NO: 283448 - DNA, 19 bp, Homo sapiens
  siRNA target sequence for RP1 (NM_006269.1,2534-2552).
ggtcaaagagataaagtgt

SEQ ID NO: 283449 - DNA, 19 bp, Homo sapiens
  siRNA target sequence for RP1 (NM_006269.1,2551-2569).
gtttcctcacaatgaatct

SEQ ID NO: 283450 - DNA, 19 bp, Homo sapiens
  siRNA target sequence for RP1 (NM_006269.1,2627-2645).
gagcaaaaacccaaagatt

SEQ ID NO: 283451 - DNA, 19 bp, Homo sapiens
  siRNA target sequence for RP1 (NM_006269.1,2672-2690).
gtggcatctgggtatttga

SEQ ID NO: 283452 - DNA, 19 bp, Homo sapiens
  siRNA target sequence for RP1 (NM_006269.1,2674-2692).
ggcatctgggtatttgaga

SEQ ID NO: 283453 - DNA, 19 bp, Homo sapiens
  siRNA target sequence for RP1 (NM_006269.1,2814-2832).
caaccagggcaaattcttt

SEQ ID NO: 283454 - DNA, 19 bp, Homo sapiens
  siRNA target sequence for RP1 (NM_006269.1,2863-2881).
ggctattgctcatcattca

SEQ ID NO: 283455 - DNA, 19 bp, Homo sapiens
  siRNA target sequence for RP1 (NM_006269.1,2864-2882).
gctattgctcatcattcaa

SEQ ID NO: 283456 - DNA, 19 bp, Homo sapiens
  siRNA target sequence for RP1 (NM_006269.1,2865-2883).
ctattgctcatcattcaat

SEQ ID NO: 283457 - DNA, 19 bp, Homo sapiens
  siRNA target sequence for RP1 (NM_006269.1,2870-2888).
gctcatcattcaattcaaa

SEQ ID NO: 283458 - DNA, 19 bp, Homo sapiens
  siRNA target sequence for RP1 (NM_006269.1,2899-2917).
gagttggttgcagaacata

SEQ ID NO: 283459 - DNA, 19 bp, Homo sapiens
  siRNA target sequence for RP1 (NM_006269.1,2908-2926).
gcagaacataaatccatat

SEQ ID NO: 283460 - DNA, 19 bp, Homo sapiens
  siRNA target sequence for RP1 (NM_006269.1,2927-2945).
ccaactttaaagcctataa

SEQ ID NO: 283461 - DNA, 19 bp, Homo sapiens
  siRNA target sequence for RP1 (NM_006269.1,2969-2987).
gaaacgagtgtggtaaatt

SEQ ID NO: 283462 - DNA, 19 bp, Homo sapiens
  siRNA target sequence for RP1 (NM_006269.1,2978-2996).
gtggtaaattgtagcaata

SEQ ID NO: 283463 - DNA, 19 bp, Homo sapiens
  siRNA target sequence for RP1 (NM_006269.1,3008-3026).
gggaatgatccccatacaa

SEQ ID NO: 283464 - DNA, 19 bp, Homo sapiens
  siRNA target sequence for RP1 (NM_006269.1,3009-3027).
ggaatgatccccatacaaa

SEQ ID NO: 283465 - DNA, 19 bp, Homo sapiens
  siRNA target sequence for RP1 (NM_006269.1,3010-3028).
gaatgatccccatacaaat

SEQ ID NO: 283466 - DNA, 19 bp, Homo sapiens
  siRNA target sequence for RP1 (NM_006269.1,3084-3102).
ccggtttgacaggagataa

SEQ ID NO: 283467 - DNA, 19 bp, Homo sapiens
  siRNA target sequence for RP1 (NM_006269.1,3085-3103).
cggtttgacaggagataat

SEQ ID NO: 283468 - DNA, 19 bp, Homo sapiens
  siRNA target sequence for RP1 (NM_006269.1,3087-3105).
gtttgacaggagataatct

SEQ ID NO: 283469 - DNA, 19 bp, Homo sapiens
  siRNA target sequence for RP1 (NM_006269.1,3113-3131).
gagggagataagtctttta

SEQ ID NO: 283470 - DNA, 19 bp, Homo sapiens
  siRNA target sequence for RP1 (NM_006269.1,3115-3133).
gggagataagtcttttatt

SEQ ID NO: 283471 - DNA, 19 bp, Homo sapiens
  siRNA target sequence for RP1 (NM_006269.1,3172-3190).
ggttggatctctgaatgat

SEQ ID NO: 283472 - DNA, 19 bp, Homo sapiens
  siRNA target sequence for RP1 (NM_006269.1,3177-3195).
gatctctgaatgatgctta

SEQ ID NO: 283473 - DNA, 19 bp, Homo sapiens
  siRNA target sequence for RP1 (NM_006269.1,3226-3244).
gtcacagtcagctattaat

SEQ ID NO: 283474 - DNA, 19 bp, Homo sapiens
  siRNA target sequence for RP1 (NM_006269.1,3346-3364).
ggctgccattcaagtagat

SEQ ID NO: 283475 - DNA, 19 bp, Homo sapiens
  siRNA target sequence for RP1 (NM_006269.1,3415-3433).
ccaattgcaagcttcagtt

SEQ ID NO: 283476 - DNA, 19 bp, Homo sapiens
  siRNA target sequence for RP1 (NM_006269.1,3448-3466).
gactcagaatggagttgtt

SEQ ID NO: 283477 - DNA, 19 bp, Homo sapiens
  siRNA target sequence for RP1 (NM_006269.1,3450-3468).
ctcagaatggagttgttca

SEQ ID NO: 283478 - DNA, 19 bp, Homo sapiens
  siRNA target sequence for RP1 (NM_006269.1,3494-3512).
ccctttcattctgcaatat

SEQ ID NO: 283479 - DNA, 19 bp, Homo sapiens
  siRNA target sequence for RP1 (NM_006269.1,3543-3561).
ggctcttggtgctaaacct

SEQ ID NO: 283480 - DNA, 19 bp, Homo sapiens
  siRNA target sequence for RP1 (NM_006269.1,3545-3563).
ctcttggtgctaaacctaa

SEQ ID NO: 283481 - DNA, 19 bp, Homo sapiens
  siRNA target sequence for RP1 (NM_006269.1,3574-3592).
gaatagcttctgtcaagtt

SEQ ID NO: 283482 - DNA, 19 bp, Homo sapiens
  siRNA target sequence for RP1 (NM_006269.1,3601-3619).
caaggctaccaacaaatct

SEQ ID NO: 283483 - DNA, 19 bp, Homo sapiens
  siRNA target sequence for RP1 (NM_006269.1,3621-3639).
cagaaacacttgcattgtt

SEQ ID NO: 283484 - DNA, 19 bp, Homo sapiens
  siRNA target sequence for RP1 (NM_006269.1,3632-3650).
gcattgttggagattctaa

SEQ ID NO: 283485 - DNA, 19 bp, Homo sapiens
  siRNA target sequence for RP1 (NM_006269.1,3690-3708).
ctgctgttgccaatttagt

SEQ ID NO: 283486 - DNA, 19 bp, Homo sapiens
  siRNA target sequence for RP1 (NM_006269.1,3757-3775).
ggttccaatagatctttct

SEQ ID NO: 283487 - DNA, 19 bp, Homo sapiens
  siRNA target sequence for RP1 (NM_006269.1,3767-3785).
gatctttctgcaaattgtt

SEQ ID NO: 283488 - DNA, 19 bp, Homo sapiens
  siRNA target sequence for RP1 (NM_006269.1,3810-3828).
ctaagtgcagtgaaaatga

SEQ ID NO: 283489 - DNA, 19 bp, Homo sapiens
  siRNA target sequence for RP1 (NM_006269.1,3954-3972).
ctccaaaagagacatgtaa

SEQ ID NO: 283490 - DNA, 19 bp, Homo sapiens
  siRNA target sequence for RP1 (NM_006269.1,3969-3987).
gtaaccccagtgacacttt

SEQ ID NO: 283491 - DNA, 19 bp, Homo sapiens
  siRNA target sequence for RP1 (NM_006269.1,4010-4028).
gtggatcagacttctatga

SEQ ID NO: 283492 - DNA, 19 bp, Homo sapiens
  siRNA target sequence for RP1 (NM_006269.1,4012-4030).
ggatcagacttctatgaat

SEQ ID NO: 283493 - DNA, 19 bp, Homo sapiens
  siRNA target sequence for RP1 (NM_006269.1,4013-4031).
gatcagacttctatgaata

SEQ ID NO: 283494 - DNA, 19 bp, Homo sapiens
  siRNA target sequence for RP1 (NM_006269.1,4027-4045).
gaataaggcttgtttccta

SEQ ID NO: 283495 - DNA, 19 bp, Homo sapiens
  siRNA target sequence for RP1 (NM_006269.1,4051-4069).
ggtctgttcacttactgat

SEQ ID NO: 283496 - DNA, 19 bp, Homo sapiens
  siRNA target sequence for RP1 (NM_006269.1,4056-4074).
gttcacttactgatactgt

SEQ ID NO: 283497 - DNA, 19 bp, Homo sapiens
  siRNA target sequence for RP1 (NM_006269.1,4094-4112).
gctcaaaaggagaaccata

SEQ ID NO: 283498 - DNA, 19 bp, Homo sapiens
  siRNA target sequence for RP1 (NM_006269.1,4120-4138).
gggagcttgcccaattgat

SEQ ID NO: 283499 - DNA, 19 bp, Homo sapiens
  siRNA target sequence for RP1 (NM_006269.1,4122-4140).
gagcttgcccaattgatga

SEQ ID NO: 283500 - DNA, 19 bp, Homo sapiens
  siRNA target sequence for RP1 (NM_006269.1,4141-4159).
gacctacgttcctgtcaat

SEQ ID NO: 283501 - DNA, 19 bp, Homo sapiens
  siRNA target sequence for RP1 (NM_006269.1,4143-4161).
cctacgttcctgtcaatgt

SEQ ID NO: 283502 - DNA, 19 bp, Homo sapiens
  siRNA target sequence for RP1 (NM_006269.1,4151-4169).
cctgtcaatgtctgcaata

SEQ ID NO: 283503 - DNA, 19 bp, Homo sapiens
  siRNA target sequence for RP1 (NM_006269.1,4154-4172).
gtcaatgtctgcaatacca

SEQ ID NO: 283504 - DNA, 19 bp, Homo sapiens
  siRNA target sequence for RP1 (NM_006269.1,4156-4174).
caatgtctgcaataccatt

SEQ ID NO: 283505 - DNA, 19 bp, Homo sapiens
  siRNA target sequence for RP1 (NM_006269.1,4160-4178).
gtctgcaataccattgact

SEQ ID NO: 283506 - DNA, 19 bp, Homo sapiens
  siRNA target sequence for RP1 (NM_006269.1,4216-4234).
ggattcaactgaagagtta

SEQ ID NO: 283507 - DNA, 19 bp, Homo sapiens
  siRNA target sequence for RP1 (NM_006269.1,4239-4257).
gaggtgatgacattcagaa

SEQ ID NO: 283508 - DNA, 19 bp, Homo sapiens
  siRNA target sequence for RP1 (NM_006269.1,4249-4267).
cattcagaaagatctaaat

SEQ ID NO: 283509 - DNA, 19 bp, Homo sapiens
  siRNA target sequence for RP1 (NM_006269.1,4310-4328).
gtgtcacatcaaaatgtca

SEQ ID NO: 283510 - DNA, 19 bp, Homo sapiens
  siRNA target sequence for RP1 (NM_006269.1,4314-4332).
cacatcaaaatgtcagtaa

SEQ ID NO: 283511 - DNA, 19 bp, Homo sapiens
  siRNA target sequence for RP1 (NM_006269.1,4344-4362).
gtggcctttgcctaagtga

SEQ ID NO: 283512 - DNA, 19 bp, Homo sapiens
  siRNA target sequence for RP1 (NM_006269.1,4347-4365).
gcctttgcctaagtgaaaa

SEQ ID NO: 283513 - DNA, 19 bp, Homo sapiens
  siRNA target sequence for RP1 (NM_006269.1,4373-4391).
gaacttgataagaaacata

SEQ ID NO: 283514 - DNA, 19 bp, Homo sapiens
  siRNA target sequence for RP1 (NM_006269.1,4384-4402).
gaaacatagttctctagat

SEQ ID NO: 283515 - DNA, 19 bp, Homo sapiens
  siRNA target sequence for RP1 (NM_006269.1,4392-4410).
gttctctagatgattttga

SEQ ID NO: 283516 - DNA, 19 bp, Homo sapiens
  siRNA target sequence for RP1 (NM_006269.1,4487-4505).
gaaccaggctcaataacca

SEQ ID NO: 283517 - DNA, 19 bp, Homo sapiens
  siRNA target sequence for RP1 (NM_006269.1,4504-4522).
caacagcatgacatcaagt

SEQ ID NO: 283518 - DNA, 19 bp, Homo sapiens
  siRNA target sequence for RP1 (NM_006269.1,4568-4586).
catgacactgatatcttta

SEQ ID NO: 283519 - DNA, 19 bp, Homo sapiens
  siRNA target sequence for RP1 (NM_006269.1,4637-4655).
gaggtagaggctagtaaaa

SEQ ID NO: 283520 - DNA, 19 bp, Homo sapiens
  siRNA target sequence for RP1 (NM_006269.1,4639-4657).
ggtagaggctagtaaaact

SEQ ID NO: 283521 - DNA, 19 bp, Homo sapiens
  siRNA target sequence for RP1 (NM_006269.1,4640-4658).
gtagaggctagtaaaactt

SEQ ID NO: 283522 - DNA, 19 bp, Homo sapiens
  siRNA target sequence for RP1 (NM_006269.1,4670-4688).
gacatctctagtaagaata

SEQ ID NO: 283523 - DNA, 19 bp, Homo sapiens
  siRNA target sequence for RP1 (NM_006269.1,4677-4695).
ctagtaagaatattatgga

SEQ ID NO: 283524 - DNA, 19 bp, Homo sapiens
  siRNA target sequence for RP1 (NM_006269.1,4992-5010).
gcgaacttacccaagagaa

SEQ ID NO: 283525 - DNA, 19 bp, Homo sapiens
  siRNA target sequence for RP1 (NM_006269.1,4993-5011).
cgaacttacccaagagaaa

SEQ ID NO: 283526 - DNA, 19 bp, Homo sapiens
  siRNA target sequence for RP1 (NM_006269.1,5094-5112).
ggtctacccgcaaatctca

SEQ ID NO: 283527 - DNA, 19 bp, Homo sapiens
  siRNA target sequence for RP1 (NM_006269.1,5111-5129).
caggtttgtccttataatt

SEQ ID NO: 283528 - DNA, 19 bp, Homo sapiens
  siRNA target sequence for RP1 (NM_006269.1,5201-5219).
caggtatctagtagttcat

SEQ ID NO: 283529 - DNA, 19 bp, Homo sapiens
  siRNA target sequence for RP1 (NM_006269.1,5204-5222).
gtatctagtagttcatcta

SEQ ID NO: 283530 - DNA, 19 bp, Homo sapiens
  siRNA target sequence for RP1 (NM_006269.1,5208-5226).
ctagtagttcatctatgtt

SEQ ID NO: 283531 - DNA, 19 bp, Homo sapiens
  siRNA target sequence for RP1 (NM_006269.1,5220-5238).
ctatgttgcaggaattcca

SEQ ID NO: 283532 - DNA, 19 bp, Homo sapiens
  siRNA target sequence for RP1 (NM_006269.1,5273-5291).
gtgagggacaattattgta

SEQ ID NO: 283533 - DNA, 19 bp, Homo sapiens
  siRNA target sequence for RP1 (NM_006269.1,5337-5355).
gaatcctcacagacataga

SEQ ID NO: 283534 - DNA, 19 bp, Homo sapiens
  siRNA target sequence for RP1 (NM_006269.1,5357-5375).
gaaggagtactgattgaca

SEQ ID NO: 283535 - DNA, 19 bp, Homo sapiens
  siRNA target sequence for RP1 (NM_006269.1,5407-5425).
gctaaggatgtcatctgaa

SEQ ID NO: 283536 - DNA, 19 bp, Homo sapiens
  siRNA target sequence for RP1 (NM_006269.1,5408-5426).
ctaaggatgtcatctgaaa

SEQ ID NO: 283537 - DNA, 19 bp, Homo sapiens
  siRNA target sequence for RP1 (NM_006269.1,5462-5480).
gtggacaccctacttgata

SEQ ID NO: 283538 - DNA, 19 bp, Homo sapiens
  siRNA target sequence for RP1 (NM_006269.1,5465-5483).
gacaccctacttgataata

SEQ ID NO: 283539 - DNA, 19 bp, Homo sapiens
  siRNA target sequence for RP1 (NM_006269.1,5485-5503).
cagcagtgaggtaccatat

SEQ ID NO: 283540 - DNA, 19 bp, Homo sapiens
  siRNA target sequence for RP1 (NM_006269.1,5488-5506).
cagtgaggtaccatattca

SEQ ID NO: 283541 - DNA, 19 bp, Homo sapiens
  siRNA target sequence for RP1 (NM_006269.1,5492-5510).
gaggtaccatattcacatt

SEQ ID NO: 283542 - DNA, 19 bp, Homo sapiens
  siRNA target sequence for RP1 (NM_006269.1,5494-5512).
ggtaccatattcacatttt

SEQ ID NO: 283543 - DNA, 19 bp, Homo sapiens
  siRNA target sequence for RP1 (NM_006269.1,5529-5547).
gcccaacgatggatgaact

SEQ ID NO: 283544 - DNA, 19 bp, Homo sapiens
  siRNA target sequence for RP1 (NM_006269.1,5572-5590).
gactcaaccccttgaacta

SEQ ID NO: 283545 - DNA, 19 bp, Homo sapiens
  siRNA target sequence for RP1 (NM_006269.1,5581-5599).
ccttgaactaaaatgcaat

SEQ ID NO: 283546 - DNA, 19 bp, Homo sapiens
  siRNA target sequence for RP1 (NM_006269.1,5582-5600).
cttgaactaaaatgcaatt

SEQ ID NO: 283547 - DNA, 19 bp, Homo sapiens
  siRNA target sequence for RP1 (NM_006269.1,5585-5603).
gaactaaaatgcaattact

SEQ ID NO: 283548 - DNA, 19 bp, Homo sapiens
  siRNA target sequence for RP1 (NM_006269.1,5619-5637).
gtagtgactcagaaccttt

SEQ ID NO: 283549 - DNA, 19 bp, Homo sapiens
  siRNA target sequence for RP1 (NM_006269.1,5622-5640).
gtgactcagaaccttttca

SEQ ID NO: 283550 - DNA, 19 bp, Homo sapiens
  siRNA target sequence for RP1 (NM_006269.1,5666-5684).
gaaacctgtgccaaggaaa

SEQ ID NO: 283551 - DNA, 19 bp, Homo sapiens
  siRNA target sequence for RP1 (NM_006269.1,5718-5736).
gtcatcagtcagaaagagt

SEQ ID NO: 283552 - DNA, 19 bp, Homo sapiens
  siRNA target sequence for RP1 (NM_006269.1,5817-5835).
cattgcctggcagtaatat

SEQ ID NO: 283553 - DNA, 19 bp, Homo sapiens
  siRNA target sequence for RP1 (NM_006269.1,5859-5877).
ctgactctttggataaact

SEQ ID NO: 283554 - DNA, 19 bp, Homo sapiens
  siRNA target sequence for RP1 (NM_006269.1,5901-5919).
gcccaatactaactgttat

SEQ ID NO: 283555 - DNA, 19 bp, Homo sapiens
  siRNA target sequence for RP1 (NM_006269.1,5939-5957).
gaagaccgaggatttgcat

SEQ ID NO: 283556 - DNA, 19 bp, Homo sapiens
  siRNA target sequence for RP1 (NM_006269.1,5955-5973).
catatcgcaaagaatctga

SEQ ID NO: 283557 - DNA, 19 bp, Homo sapiens
  siRNA target sequence for RP1 (NM_006269.1,6007-6025).
gaaaatacacccatattta

SEQ ID NO: 283558 - DNA, 19 bp, Homo sapiens
  siRNA target sequence for RP1 (NM_006269.1,6235-6253).
ggaaaggttttgtatgaat

SEQ ID NO: 283559 - DNA, 19 bp, Homo sapiens
  siRNA target sequence for RP1 (NM_006269.1,6256-6274).
cttgcacacatcattgtta

SEQ ID NO: 283560 - DNA, 19 bp, Homo sapiens
  siRNA target sequence for RP1 (NM_006269.1,6259-6277).
gcacacatcattgttagtt

SEQ ID NO: 283561 - DNA, 19 bp, Homo sapiens
  siRNA target sequence for RP1 (NM_006269.1,6278-6296).
gtgggtaatgtggattcaa

SEQ ID NO: 283562 - DNA, 19 bp, Homo sapiens
  siRNA target sequence for RP1 (NM_006269.1,6310-6328).
cagcggtcagacaaatgaa

SEQ ID NO: 283563 - DNA, 19 bp, Homo sapiens
  siRNA target sequence for RP1 (NM_006269.1,6338-6356).
gcagtcgatgagaataaca

SEQ ID NO: 283564 - DNA, 19 bp, Homo sapiens
  siRNA target sequence for RP1 (NM_006269.1,6341-6359).
gtcgatgagaataacaact

SEQ ID NO: 283565 - DNA, 19 bp, Homo sapiens
  siRNA target sequence for RP1 (NM_006269.1,6343-6361).
cgatgagaataacaactta

SEQ ID NO: 283566 - DNA, 19 bp, Homo sapiens
  siRNA target sequence for RP1 (NM_006269.1,6380-6398).
ggctcaagaacaaatctca

SEQ ID NO: 283567 - DNA, 19 bp, Homo sapiens
  siRNA target sequence for RP1 (NM_006269.1,6381-6399).
gctcaagaacaaatctcaa

SEQ ID NO: 283568 - DNA, 19 bp, Homo sapiens
  siRNA target sequence for RP1 (NM_006269.1,6400-6418).
ccaagtagtaagagaaaat

SEQ ID NO: 283569 - DNA, 19 bp, Homo sapiens
  siRNA target sequence for RP1 (NM_006269.1,6404-6422).
gtagtaagagaaaatatca

SEQ ID NO: 283570 - DNA, 19 bp, Homo sapiens
  siRNA target sequence for RP1 (NM_006269.1,6450-6468).
gtcaagcttgcctcttaga

SEQ ID NO: 283571 - DNA, 19 bp, Homo sapiens
  siRNA target sequence for RP1 (NM_006269.1,6455-6473).
gcttgcctcttagatattt

SEQ ID NO: 283572 - DNA, 19 bp, Homo sapiens
  siRNA target sequence for RP1 (NM_006269.1,6482-6500).
gagacctccttaaatatta

SEQ ID NO: 283573 - DNA, 19 bp, Homo sapiens
  siRNA target sequence for RP1 (NM_006269.1,6535-6553).
gggtgaaaatcttttcatt

SEQ ID NO: 283574 - DNA, 19 bp, Homo sapiens
  siRNA target sequence for RP1 (NM_006269.1,6556-6574).
ggaagaggaagacatatta

SEQ ID NO: 283575 - DNA, 19 bp, Homo sapiens
  siRNA target sequence for RP1 (NM_006269.1,6562-6580).
ggaagacatattaaattta

SEQ ID NO: 283576 - DNA, 19 bp, Homo sapiens
  siRNA target sequence for RP42 (NM_020640.2,66-84).
catcgcagaaggataaagt

SEQ ID NO: 283577 - DNA, 19 bp, Homo sapiens
  siRNA target sequence for RP42 (NM_020640.2,76-94).
ggataaagttcgtcagttt

SEQ ID NO: 283578 - DNA, 19 bp, Homo sapiens
  siRNA target sequence for RP42 (NM_020640.2,83-101).
gttcgtcagtttatgatct

SEQ ID NO: 283579 - DNA, 19 bp, Homo sapiens
  siRNA target sequence for RP42 (NM_020640.2,86-104).
cgtcagtttatgatcttca

SEQ ID NO: 283580 - DNA, 19 bp, Homo sapiens
  siRNA target sequence for RP42 (NM_020640.2,97-115).
gatcttcacacaatctagt

SEQ ID NO: 283581 - DNA, 19 bp, Homo sapiens
  siRNA target sequence for RP42 (NM_020640.2,157-175).
gttagatgttgcaacagat

SEQ ID NO: 283582 - DNA, 19 bp, Homo sapiens
  siRNA target sequence for RP42 (NM_020640.2,206-224).
cgagagagtgtaaaaggat

SEQ ID NO: 283583 - DNA, 19 bp, Homo sapiens
  siRNA target sequence for RP42 (NM_020640.2,241-259).
gttagaacagctgtacaat

SEQ ID NO: 283584 - DNA, 19 bp, Homo sapiens
  siRNA target sequence for RP42 (NM_020640.2,332-350).
ctcgatccagccagcatta

SEQ ID NO: 283585 - DNA, 19 bp, Homo sapiens
  siRNA target sequence for RP42 (NM_020640.2,343-361).
cagcattagtgtgttgatt

SEQ ID NO: 283586 - DNA, 19 bp, Homo sapiens
  siRNA target sequence for RP42 (NM_020640.2,345-363).
gcattagtgtgttgattat

SEQ ID NO: 283587 - DNA, 19 bp, Homo sapiens
  siRNA target sequence for RP42 (NM_020640.2,438-456).
gatgtgacagcatagaaaa

SEQ ID NO: 283588 - DNA, 19 bp, Homo sapiens
  siRNA target sequence for RP42 (NM_020640.2,441-459).
gtgacagcatagaaaaact

SEQ ID NO: 283589 - DNA, 19 bp, Homo sapiens
  siRNA target sequence for RP42 (NM_020640.2,493-511).
gaaagaaccaggacgattt

SEQ ID NO: 283590 - DNA, 19 bp, Homo sapiens
  siRNA target sequence for RP42 (NM_020640.2,500-518).
ccaggacgatttaaggatt

SEQ ID NO: 283591 - DNA, 19 bp, Homo sapiens
  siRNA target sequence for RP42 (NM_020640.2,504-522).
gacgatttaaggattttta

SEQ ID NO: 283592 - DNA, 19 bp, Homo sapiens
  siRNA target sequence for RP42 (NM_020640.2,583-601).
cattgcctactggaactta

SEQ ID NO: 283593 - DNA, 19 bp, Homo sapiens
  siRNA target sequence for RP42 (NM_020640.2,649-667).
gttggaacatcataaacga

SEQ ID NO: 283594 - DNA, 19 bp, Homo sapiens
  siRNA target sequence for RP42 (NM_020640.2,659-677).
cataaacgatcaataccaa

SEQ ID NO: 283595 - DNA, 19 bp, Homo sapiens
  siRNA target sequence for RP42 (NM_020640.2,665-683).
cgatcaataccaaaagaca

SEQ ID NO: 283596 - DNA, 19 bp, Homo sapiens
  siRNA target sequence for SACS (NM_014363.3,198-216).
gggccagctctctatgtgt

SEQ ID NO: 283597 - DNA, 19 bp, Homo sapiens
  siRNA target sequence for SACS (NM_014363.3,199-217).
ggccagctctctatgtgta

SEQ ID NO: 283598 - DNA, 19 bp, Homo sapiens
  siRNA target sequence for SACS (NM_014363.3,202-220).
cagctctctatgtgtacaa

SEQ ID NO: 283599 - DNA, 19 bp, Homo sapiens
  siRNA target sequence for SACS (NM_014363.3,205-223).
ctctctatgtgtacaacaa

SEQ ID NO: 283600 - DNA, 19 bp, Homo sapiens
  siRNA target sequence for SACS (NM_014363.3,242-260).
ggactggcacggcattcaa

SEQ ID NO: 283601 - DNA, 19 bp, Homo sapiens
  siRNA target sequence for SACS (NM_014363.3,248-266).
gcacggcattcaagaaata

SEQ ID NO: 283602 - DNA, 19 bp, Homo sapiens
  siRNA target sequence for SACS (NM_014363.3,296-314).
gaaggtcggaagatttgga

SEQ ID NO: 283603 - DNA, 19 bp, Homo sapiens
  siRNA target sequence for SACS (NM_014363.3,299-317).
ggtcggaagatttggaatt

SEQ ID NO: 283604 - DNA, 19 bp, Homo sapiens
  siRNA target sequence for SACS (NM_014363.3,307-325).
gatttggaattgggtttaa

SEQ ID NO: 283605 - DNA, 19 bp, Homo sapiens
  siRNA target sequence for SACS (NM_014363.3,380-398).
gatgctagatcctcatcaa

SEQ ID NO: 283606 - DNA, 19 bp, Homo sapiens
  siRNA target sequence for SACS (NM_014363.3,383-401).
gctagatcctcatcaaaca

SEQ ID NO: 283607 - DNA, 19 bp, Homo sapiens
  siRNA target sequence for SACS (NM_014363.3,387-405).
gatcctcatcaaacacttt

SEQ ID NO: 283608 - DNA, 19 bp, Homo sapiens
  siRNA target sequence for SACS (NM_014363.3,423-441).
ggccaatgttggaatctca

SEQ ID NO: 283609 - DNA, 19 bp, Homo sapiens
  siRNA target sequence for SACS (NM_014363.3,424-442).
gccaatgttggaatctcaa

SEQ ID NO: 283610 - DNA, 19 bp, Homo sapiens
  siRNA target sequence for SACS (NM_014363.3,425-443).
ccaatgttggaatctcaaa

SEQ ID NO: 283611 - DNA, 19 bp, Homo sapiens
  siRNA target sequence for SACS (NM_014363.3,520-538).
catttataaacggcaattt

SEQ ID NO: 283612 - DNA, 19 bp, Homo sapiens
  siRNA target sequence for SACS (NM_014363.3,570-588).
ctacaaccttcacaactta

SEQ ID NO: 283613 - DNA, 19 bp, Homo sapiens
  siRNA target sequence for SACS (NM_014363.3,573-591).
caaccttcacaacttagta

SEQ ID NO: 283614 - DNA, 19 bp, Homo sapiens
  siRNA target sequence for SACS (NM_014363.3,576-594).
ccttcacaacttagtagta

SEQ ID NO: 283615 - DNA, 19 bp, Homo sapiens
  siRNA target sequence for SACS (NM_014363.3,577-595).
cttcacaacttagtagtaa

SEQ ID NO: 283616 - DNA, 19 bp, Homo sapiens
  siRNA target sequence for SACS (NM_014363.3,678-696).
gtgcaggatgtttccttat

SEQ ID NO: 283617 - DNA, 19 bp, Homo sapiens
  siRNA target sequence for SACS (NM_014363.3,709-727).
ctgacggaacagagaaact

SEQ ID NO: 283618 - DNA, 19 bp, Homo sapiens
  siRNA target sequence for SACS (NM_014363.3,776-794).
gccgaattctataaagatt

SEQ ID NO: 283619 - DNA, 19 bp, Homo sapiens
  siRNA target sequence for SACS (NM_014363.3,791-809).
gattctgggaactgctata

SEQ ID NO: 283620 - DNA, 19 bp, Homo sapiens
  siRNA target sequence for SACS (NM_014363.3,798-816).
ggaactgctataagtaact

SEQ ID NO: 283621 - DNA, 19 bp, Homo sapiens
  siRNA target sequence for SACS (NM_014363.3,799-817).
gaactgctataagtaacta

SEQ ID NO: 283622 - DNA, 19 bp, Homo sapiens
  siRNA target sequence for SACS (NM_014363.3,804-822).
gctataagtaactattgta

SEQ ID NO: 283623 - DNA, 19 bp, Homo sapiens
  siRNA target sequence for SACS (NM_014363.3,842-860).
catcacctgtgtaacatat

SEQ ID NO: 283624 - DNA, 19 bp, Homo sapiens
  siRNA target sequence for SACS (NM_014363.3,856-874).
catatcacgtaaatattgt

SEQ ID NO: 283625 - DNA, 19 bp, Homo sapiens
  siRNA target sequence for SACS (NM_014363.3,939-957).
gggcgagggatcagtagta

SEQ ID NO: 283626 - DNA, 19 bp, Homo sapiens
  siRNA target sequence for SACS (NM_014363.3,940-958).
ggcgagggatcagtagtaa

SEQ ID NO: 283627 - DNA, 19 bp, Homo sapiens
  siRNA target sequence for SACS (NM_014363.3,1044-1062).
ggagcaacgtctgatttct

SEQ ID NO: 283628 - DNA, 19 bp, Homo sapiens
  siRNA target sequence for SACS (NM_014363.3,1061-1079).
ctcaggaaaagcattttgt

SEQ ID NO: 283629 - DNA, 19 bp, Homo sapiens
  siRNA target sequence for SACS (NM_014363.3,1155-1173).
gataaccgcaggagcataa

SEQ ID NO: 283630 - DNA, 19 bp, Homo sapiens
  siRNA target sequence for SACS (NM_014363.3,1200-1218).
gacccggcagccttatgga

SEQ ID NO: 283631 - DNA, 19 bp, Homo sapiens
  siRNA target sequence for SACS (NM_014363.3,1202-1220).
cccggcagccttatggaat

SEQ ID NO: 283632 - DNA, 19 bp, Homo sapiens
  siRNA target sequence for SACS (NM_014363.3,1206-1224).
gcagccttatggaatgagt

SEQ ID NO: 283633 - DNA, 19 bp, Homo sapiens
  siRNA target sequence for SACS (NM_014363.3,1268-1286).
cttagattcaataaaacgt

SEQ ID NO: 283634 - DNA, 19 bp, Homo sapiens
  siRNA target sequence for SACS (NM_014363.3,1313-1331).
ccccttgtcagttgatgtt

SEQ ID NO: 283635 - DNA, 19 bp, Homo sapiens
  siRNA target sequence for SACS (NM_014363.3,1314-1332).
cccttgtcagttgatgtta

SEQ ID NO: 283636 - DNA, 19 bp, Homo sapiens
  siRNA target sequence for SACS (NM_014363.3,1319-1337).
gtcagttgatgttatctat

SEQ ID NO: 283637 - DNA, 19 bp, Homo sapiens
  siRNA target sequence for SACS (NM_014363.3,1321-1339).
cagttgatgttatctataa

SEQ ID NO: 283638 - DNA, 19 bp, Homo sapiens
  siRNA target sequence for SACS (NM_014363.3,1326-1344).
gatgttatctataagcttt

SEQ ID NO: 283639 - DNA, 19 bp, Homo sapiens
  siRNA target sequence for SACS (NM_014363.3,1347-1365).
ccggaggcgagcaaagtca

SEQ ID NO: 283640 - DNA, 19 bp, Homo sapiens
  siRNA target sequence for SACS (NM_014363.3,1348-1366).
cggaggcgagcaaagtcaa

SEQ ID NO: 283641 - DNA, 19 bp, Homo sapiens
  siRNA target sequence for SACS (NM_014363.3,1381-1399).
cggtgttagagcctctatt

SEQ ID NO: 283642 - DNA, 19 bp, Homo sapiens
  siRNA target sequence for SACS (NM_014363.3,1383-1401).
gtgttagagcctctattca

SEQ ID NO: 283643 - DNA, 19 bp, Homo sapiens
  siRNA target sequence for SACS (NM_014363.3,1466-1484).
gtacttctcagaacttgat

SEQ ID NO: 283644 - DNA, 19 bp, Homo sapiens
  siRNA target sequence for SACS (NM_014363.3,1469-1487).
cttctcagaacttgatgaa

SEQ ID NO: 283645 - DNA, 19 bp, Homo sapiens
  siRNA target sequence for SACS (NM_014363.3,1786-1804).
ctgtatcagaccaagatgt

SEQ ID NO: 283646 - DNA, 19 bp, Homo sapiens
  siRNA target sequence for SACS (NM_014363.3,1857-1875).
ggaagatttattttggata

SEQ ID NO: 283647 - DNA, 19 bp, Homo sapiens
  siRNA target sequence for SACS (NM_014363.3,1965-1983).
cgatttgcacgtcttatca

SEQ ID NO: 283648 - DNA, 19 bp, Homo sapiens
  siRNA target sequence for SACS (NM_014363.3,1966-1984).
gatttgcacgtcttatcaa

SEQ ID NO: 283649 - DNA, 19 bp, Homo sapiens
  siRNA target sequence for SACS (NM_014363.3,2008-2026).
ctggcagagaattgattgt

SEQ ID NO: 283650 - DNA, 19 bp, Homo sapiens
  siRNA target sequence for SACS (NM_014363.3,2032-2050).
ggtatccatttgatgaaaa

SEQ ID NO: 283651 - DNA, 19 bp, Homo sapiens
  siRNA target sequence for SACS (NM_014363.3,2143-2161).
cacttatccccagaactat

SEQ ID NO: 283652 - DNA, 19 bp, Homo sapiens
  siRNA target sequence for SACS (NM_014363.3,2182-2200).
gtgtggaactcattagact

SEQ ID NO: 283653 - DNA, 19 bp, Homo sapiens
  siRNA target sequence for SACS (NM_014363.3,2203-2221).
ggattccatcgttagtcat

SEQ ID NO: 283654 - DNA, 19 bp, Homo sapiens
  siRNA target sequence for SACS (NM_014363.3,2204-2222).
gattccatcgttagtcatt

SEQ ID NO: 283655 - DNA, 19 bp, Homo sapiens
  siRNA target sequence for SACS (NM_014363.3,2209-2227).
catcgttagtcattttaga

SEQ ID NO: 283656 - DNA, 19 bp, Homo sapiens
  siRNA target sequence for SACS (NM_014363.3,2217-2235).
gtcattttagacgatgaat

SEQ ID NO: 283657 - DNA, 19 bp, Homo sapiens
  siRNA target sequence for SACS (NM_014363.3,2319-2337).
caacatccgcttattaaaa

SEQ ID NO: 283658 - DNA, 19 bp, Homo sapiens
  siRNA target sequence for SACS (NM_014363.3,2322-2340).
catccgcttattaaaaaat

SEQ ID NO: 283659 - DNA, 19 bp, Homo sapiens
  siRNA target sequence for SACS (NM_014363.3,2325-2343).
ccgcttattaaaaaatata

SEQ ID NO: 283660 - DNA, 19 bp, Homo sapiens
  siRNA target sequence for SACS (NM_014363.3,2365-2383).
ctgttttgcagataatgga

SEQ ID NO: 283661 - DNA, 19 bp, Homo sapiens
  siRNA target sequence for SACS (NM_014363.3,2396-2414).
gcagaaattgtgtaatcaa

SEQ ID NO: 283662 - DNA, 19 bp, Homo sapiens
  siRNA target sequence for SACS (NM_014363.3,2423-2441).
gctacttccaacacacaaa

SEQ ID NO: 283663 - DNA, 19 bp, Homo sapiens
  siRNA target sequence for SACS (NM_014363.3,2442-2460).
gatgccctgaggaagttct

SEQ ID NO: 283664 - DNA, 19 bp, Homo sapiens
  siRNA target sequence for SACS (NM_014363.3,2515-2533).
caatattcaagcgcattaa

SEQ ID NO: 283665 - DNA, 19 bp, Homo sapiens
  siRNA target sequence for SACS (NM_014363.3,2525-2543).
gcgcattaaccattcttct

SEQ ID NO: 283666 - DNA, 19 bp, Homo sapiens
  siRNA target sequence for SACS (NM_014363.3,2557-2575).
cctcttatacaaaattgaa

SEQ ID NO: 283667 - DNA, 19 bp, Homo sapiens
  siRNA target sequence for SACS (NM_014363.3,2613-2631).
gcagatctgcgactttcta

SEQ ID NO: 283668 - DNA, 19 bp, Homo sapiens
  siRNA target sequence for SACS (NM_014363.3,2616-2634).
gatctgcgactttctattt

SEQ ID NO: 283669 - DNA, 19 bp, Homo sapiens
  siRNA target sequence for SACS (NM_014363.3,2710-2728).
gctgcttaaagcttgtttt

SEQ ID NO: 283670 - DNA, 19 bp, Homo sapiens
  siRNA target sequence for SACS (NM_014363.3,2763-2781).
gaggtaacacagcttatgt

SEQ ID NO: 283671 - DNA, 19 bp, Homo sapiens
  siRNA target sequence for SACS (NM_014363.3,2780-2798).
gttatgggtccttgagaat

SEQ ID NO: 283672 - DNA, 19 bp, Homo sapiens
  siRNA target sequence for SACS (NM_014363.3,2786-2804).
ggtccttgagaatctatct

SEQ ID NO: 283673 - DNA, 19 bp, Homo sapiens
  siRNA target sequence for SACS (NM_014363.3,2787-2805).
gtccttgagaatctatctt

SEQ ID NO: 283674 - DNA, 19 bp, Homo sapiens
  siRNA target sequence for SACS (NM_014363.3,2793-2811).
gagaatctatcttctctta

SEQ ID NO: 283675 - DNA, 19 bp, Homo sapiens
  siRNA target sequence for SACS (NM_014363.3,2887-2905).
cagctggtgaactctttga

SEQ ID NO: 283676 - DNA, 19 bp, Homo sapiens
  siRNA target sequence for SACS (NM_014363.3,2900-2918).
ctttgaccctgatatagaa

SEQ ID NO: 283677 - DNA, 19 bp, Homo sapiens
  siRNA target sequence for SACS (NM_014363.3,2907-2925).
cctgatatagaagtactaa

SEQ ID NO: 283678 - DNA, 19 bp, Homo sapiens
  siRNA target sequence for SACS (NM_014363.3,2922-2940).
ctaaaggatctcttttgta

SEQ ID NO: 283679 - DNA, 19 bp, Homo sapiens
  siRNA target sequence for SACS (NM_014363.3,2985-3003).
gatattcttcactccttaa

SEQ ID NO: 283680 - DNA, 19 bp, Homo sapiens
  siRNA target sequence for SACS (NM_014363.3,2999-3017).
cttaagacagattggttta

SEQ ID NO: 283681 - DNA, 19 bp, Homo sapiens
  siRNA target sequence for SACS (NM_014363.3,3023-3041).
cgaagccagtctcaaagaa

SEQ ID NO: 283682 - DNA, 19 bp, Homo sapiens
  siRNA target sequence for SACS (NM_014363.3,3053-3071).
gcaagtggcaaaaaaaatt

SEQ ID NO: 283683 - DNA, 19 bp, Homo sapiens
  siRNA target sequence for SACS (NM_014363.3,3086-3104).
cggtgcttgtcctgatcaa

SEQ ID NO: 283684 - DNA, 19 bp, Homo sapiens
  siRNA target sequence for SACS (NM_014363.3,3088-3106).
gtgcttgtcctgatcaaga

SEQ ID NO: 283685 - DNA, 19 bp, Homo sapiens
  siRNA target sequence for SACS (NM_014363.3,3130-3148).
ccctcttactggttttaaa

SEQ ID NO: 283686 - DNA, 19 bp, Homo sapiens
  siRNA target sequence for SACS (NM_014363.3,3259-3277).
ggaaaggagatctctgtaa

SEQ ID NO: 283687 - DNA, 19 bp, Homo sapiens
  siRNA target sequence for SACS (NM_014363.3,3375-3393).
gcattagggatcttcacaa

SEQ ID NO: 283688 - DNA, 19 bp, Homo sapiens
  siRNA target sequence for SACS (NM_014363.3,3381-3399).
gggatcttcacaaaaccta

SEQ ID NO: 283689 - DNA, 19 bp, Homo sapiens
  siRNA target sequence for SACS (NM_014363.3,3435-3453).
gttgattggtattcttcaa

SEQ ID NO: 283690 - DNA, 19 bp, Homo sapiens
  siRNA target sequence for SACS (NM_014363.3,3442-3460).
ggtattcttcaaaaacctt

SEQ ID NO: 283691 - DNA, 19 bp, Homo sapiens
  siRNA target sequence for SACS (NM_014363.3,3448-3466).
cttcaaaaacctttagtga

SEQ ID NO: 283692 - DNA, 19 bp, Homo sapiens
  siRNA target sequence for SACS (NM_014363.3,3465-3483).
gatgaagactactatcaat

SEQ ID NO: 283693 - DNA, 19 bp, Homo sapiens
  siRNA target sequence for SACS (NM_014363.3,3476-3494).
ctatcaattccagcatatt

SEQ ID NO: 283694 - DNA, 19 bp, Homo sapiens
  siRNA target sequence for SACS (NM_014363.3,3511-3529).
gattcatgcatgatcatct

SEQ ID NO: 283695 - DNA, 19 bp, Homo sapiens
  siRNA target sequence for SACS (NM_014363.3,3515-3533).
catgcatgatcatctaaat

SEQ ID NO: 283696 - DNA, 19 bp, Homo sapiens
  siRNA target sequence for SACS (NM_014363.3,3600-3618).
cttgcccaggctgtgatta

SEQ ID NO: 283697 - DNA, 19 bp, Homo sapiens
  siRNA target sequence for SACS (NM_014363.3,3605-3623).
ccaggctgtgattaaacca

SEQ ID NO: 283698 - DNA, 19 bp, Homo sapiens
  siRNA target sequence for SACS (NM_014363.3,3638-3656).
ccttcagccttatttgcat

SEQ ID NO: 283699 - DNA, 19 bp, Homo sapiens
  siRNA target sequence for SACS (NM_014363.3,3639-3657).
cttcagccttatttgcata

SEQ ID NO: 283700 - DNA, 19 bp, Homo sapiens
  siRNA target sequence for SACS (NM_014363.3,3663-3681).
cctaaaaccatggcaaaat

SEQ ID NO: 283701 - DNA, 19 bp, Homo sapiens
  siRNA target sequence for SACS (NM_014363.3,3716-3734).
ggagttgacatcagatcat

SEQ ID NO: 283702 - DNA, 19 bp, Homo sapiens
  siRNA target sequence for SACS (NM_014363.3,3717-3735).
gagttgacatcagatcata

SEQ ID NO: 283703 - DNA, 19 bp, Homo sapiens
  siRNA target sequence for SACS (NM_014363.3,3719-3737).
gttgacatcagatcatatt

SEQ ID NO: 283704 - DNA, 19 bp, Homo sapiens
  siRNA target sequence for SACS (NM_014363.3,3729-3747).
gatcatatttccatggtta

SEQ ID NO: 283705 - DNA, 19 bp, Homo sapiens
  siRNA target sequence for SACS (NM_014363.3,3739-3757).
ccatggttattcagaagat

SEQ ID NO: 283706 - DNA, 19 bp, Homo sapiens
  siRNA target sequence for SACS (NM_014363.3,3740-3758).
catggttattcagaagata

SEQ ID NO: 283707 - DNA, 19 bp, Homo sapiens
  siRNA target sequence for SACS (NM_014363.3,3777-3795).
gatctcagtgaacaagaaa

SEQ ID NO: 283708 - DNA, 19 bp, Homo sapiens
  siRNA target sequence for SACS (NM_014363.3,3813-3831).
cttatgttgaatattatca

SEQ ID NO: 283709 - DNA, 19 bp, Homo sapiens
  siRNA target sequence for SACS (NM_014363.3,3830-3848).
cagatggctgtatagcaat

SEQ ID NO: 283710 - DNA, 19 bp, Homo sapiens
  siRNA target sequence for SACS (NM_014363.3,3835-3853).
ggctgtatagcaatcagat

SEQ ID NO: 283711 - DNA, 19 bp, Homo sapiens
  siRNA target sequence for SACS (NM_014363.3,3836-3854).
gctgtatagcaatcagatt

SEQ ID NO: 283712 - DNA, 19 bp, Homo sapiens
  siRNA target sequence for SACS (NM_014363.3,3865-3883).
ccaacacaccagttcctat

SEQ ID NO: 283713 - DNA, 19 bp, Homo sapiens
  siRNA target sequence for SACS (NM_014363.3,3866-3884).
caacacaccagttcctata

SEQ ID NO: 283714 - DNA, 19 bp, Homo sapiens
  siRNA target sequence for SACS (NM_014363.3,3869-3887).
cacaccagttcctatacat

SEQ ID NO: 283715 - DNA, 19 bp, Homo sapiens
  siRNA target sequence for SACS (NM_014363.3,3871-3889).
caccagttcctatacatca

SEQ ID NO: 283716 - DNA, 19 bp, Homo sapiens
  siRNA target sequence for SACS (NM_014363.3,3879-3897).
cctatacatcatagcaaaa

SEQ ID NO: 283717 - DNA, 19 bp, Homo sapiens
  siRNA target sequence for SACS (NM_014363.3,3900-3918).
ccttctaaacttatcatga

SEQ ID NO: 283718 - DNA, 19 bp, Homo sapiens
  siRNA target sequence for SACS (NM_014363.3,3901-3919).
cttctaaacttatcatgaa

SEQ ID NO: 283719 - DNA, 19 bp, Homo sapiens
  siRNA target sequence for SACS (NM_014363.3,3954-3972).
gttgatgaccttaatgact

SEQ ID NO: 283720 - DNA, 19 bp, Homo sapiens
  siRNA target sequence for SACS (NM_014363.3,3985-4003).
ctgtggaaccaatcatttt

SEQ ID NO: 283721 - DNA, 19 bp, Homo sapiens
  siRNA target sequence for SACS (NM_014363.3,4047-4065).
gttccatgccttagtacaa

SEQ ID NO: 283722 - DNA, 19 bp, Homo sapiens
  siRNA target sequence for SACS (NM_014363.3,4055-4073).
ccttagtacaagactgata

SEQ ID NO: 283723 - DNA, 19 bp, Homo sapiens
  siRNA target sequence for SACS (NM_014363.3,4056-4074).
cttagtacaagactgataa

SEQ ID NO: 283724 - DNA, 19 bp, Homo sapiens
  siRNA target sequence for SACS (NM_014363.3,4066-4084).
gactgataaatcctgaaaa

SEQ ID NO: 283725 - DNA, 19 bp, Homo sapiens
  siRNA target sequence for SACS (NM_014363.3,4113-4131).
gagccacttactgtaagaa

SEQ ID NO: 283726 - DNA, 19 bp, Homo sapiens
  siRNA target sequence for SACS (NM_014363.3,4116-4134).
ccacttactgtaagaatta

SEQ ID NO: 283727 - DNA, 19 bp, Homo sapiens
  siRNA target sequence for SACS (NM_014363.3,4193-4211).
cgctgatgatgcaaatgca

SEQ ID NO: 283728 - DNA, 19 bp, Homo sapiens
  siRNA target sequence for SACS (NM_014363.3,4299-4317).
cctgctttgtggtcattca

SEQ ID NO: 283729 - DNA, 19 bp, Homo sapiens
  siRNA target sequence for SACS (NM_014363.3,4300-4318).
ctgctttgtggtcattcaa

SEQ ID NO: 283730 - DNA, 19 bp, Homo sapiens
  siRNA target sequence for SACS (NM_014363.3,4307-4325).
gtggtcattcaacaattct

SEQ ID NO: 283731 - DNA, 19 bp, Homo sapiens
  siRNA target sequence for SACS (NM_014363.3,4309-4327).
ggtcattcaacaattctca

SEQ ID NO: 283732 - DNA, 19 bp, Homo sapiens
  siRNA target sequence for SACS (NM_014363.3,4310-4328).
gtcattcaacaattctcaa

SEQ ID NO: 283733 - DNA, 19 bp, Homo sapiens
  siRNA target sequence for SACS (NM_014363.3,4430-4448).
gtaccatatcactgacatt

SEQ ID NO: 283734 - DNA, 19 bp, Homo sapiens
  siRNA target sequence for SACS (NM_014363.3,4439-4457).
cactgacattcccatcatt

SEQ ID NO: 283735 - DNA, 19 bp, Homo sapiens
  siRNA target sequence for SACS (NM_014363.3,4443-4461).
gacattcccatcattatga

SEQ ID NO: 283736 - DNA, 19 bp, Homo sapiens
  siRNA target sequence for SACS (NM_014363.3,4460-4478).
gagtcgggaattcatgata

SEQ ID NO: 283737 - DNA, 19 bp, Homo sapiens
  siRNA target sequence for SACS (NM_014363.3,4462-4480).
gtcgggaattcatgataat

SEQ ID NO: 283738 - DNA, 19 bp, Homo sapiens
  siRNA target sequence for SACS (NM_014363.3,4464-4482).
cgggaattcatgataatgt

SEQ ID NO: 283739 - DNA, 19 bp, Homo sapiens
  siRNA target sequence for SACS (NM_014363.3,4465-4483).
gggaattcatgataatgtt

SEQ ID NO: 283740 - DNA, 19 bp, Homo sapiens
  siRNA target sequence for SACS (NM_014363.3,4481-4499).
gttcgatccaaacataaat

SEQ ID NO: 283741 - DNA, 19 bp, Homo sapiens
  siRNA target sequence for SACS (NM_014363.3,4484-4502).
cgatccaaacataaatcat

SEQ ID NO: 283742 - DNA, 19 bp, Homo sapiens
  siRNA target sequence for SACS (NM_014363.3,4576-4594).
gaaaatttcctaatcagtt

SEQ ID NO: 283743 - DNA, 19 bp, Homo sapiens
  siRNA target sequence for SACS (NM_014363.3,4595-4613).
caaaccatttatagatgta

SEQ ID NO: 283744 - DNA, 19 bp, Homo sapiens
  siRNA target sequence for SACS (NM_014363.3,4647-4665).
ccttacagctataatggaa

SEQ ID NO: 283745 - DNA, 19 bp, Homo sapiens
  siRNA target sequence for SACS (NM_014363.3,4673-4691).
ccgactgtcctttagaact

SEQ ID NO: 283746 - DNA, 19 bp, Homo sapiens
  siRNA target sequence for SACS (NM_014363.3,4701-4719).
gcaaaagtgagtgaagtta

SEQ ID NO: 283747 - DNA, 19 bp, Homo sapiens
  siRNA target sequence for SACS (NM_014363.3,4729-4747).
gctacaatacagcagatat

SEQ ID NO: 283748 - DNA, 19 bp, Homo sapiens
  siRNA target sequence for SACS (NM_014363.3,4779-4797).
ggacacaggcttatcattt

SEQ ID NO: 283749 - DNA, 19 bp, Homo sapiens
  siRNA target sequence for SACS (NM_014363.3,4782-4800).
cacaggcttatcattttca

SEQ ID NO: 283750 - DNA, 19 bp, Homo sapiens
  siRNA target sequence for SACS (NM_014363.3,4805-4823).
gagtgtaaagtcaatgtat

SEQ ID NO: 283751 - DNA, 19 bp, Homo sapiens
  siRNA target sequence for SACS (NM_014363.3,4844-4862).
ggaaaccaaccccagttta

SEQ ID NO: 283752 - DNA, 19 bp, Homo sapiens
  siRNA target sequence for SACS (NM_014363.3,4856-4874).
cagtttagcacaagataca

SEQ ID NO: 283753 - DNA, 19 bp, Homo sapiens
  siRNA target sequence for SACS (NM_014363.3,4864-4882).
cacaagatacagtaataat

SEQ ID NO: 283754 - DNA, 19 bp, Homo sapiens
  siRNA target sequence for SACS (NM_014363.3,4916-4934).
cacacctgtcttaagtgtt

SEQ ID NO: 283755 - DNA, 19 bp, Homo sapiens
  siRNA target sequence for SACS (NM_014363.3,4944-4962).
gctgctaagctcatgaaga

SEQ ID NO: 283756 - DNA, 19 bp, Homo sapiens
  siRNA target sequence for SACS (NM_014363.3,4991-5009).
cagtgatgaaccaaagtca

SEQ ID NO: 283757 - DNA, 19 bp, Homo sapiens
  siRNA target sequence for SACS (NM_014363.3,5054-5072).
cagaaggattgctgattta

SEQ ID NO: 283758 - DNA, 19 bp, Homo sapiens
  siRNA target sequence for SACS (NM_014363.3,5117-5135).
ctttgaaatggctaagtct

SEQ ID NO: 283759 - DNA, 19 bp, Homo sapiens
  siRNA target sequence for SACS (NM_014363.3,5127-5145).
gctaagtctggccaatcaa

SEQ ID NO: 283760 - DNA, 19 bp, Homo sapiens
  siRNA target sequence for SACS (NM_014363.3,5324-5342).
gacagtgaaaccacacatt

SEQ ID NO: 283761 - DNA, 19 bp, Homo sapiens
  siRNA target sequence for SACS (NM_014363.3,5343-5361).
ggagaggtgttttgctatt

SEQ ID NO: 283762 - DNA, 19 bp, Homo sapiens
  siRNA target sequence for SACS (NM_014363.3,5380-5398).
caggcttgccagttcatat

SEQ ID NO: 283763 - DNA, 19 bp, Homo sapiens
  siRNA target sequence for SACS (NM_014363.3,5382-5400).
ggcttgccagttcatatca

SEQ ID NO: 283764 - DNA, 19 bp, Homo sapiens
  siRNA target sequence for SACS (NM_014363.3,5383-5401).
gcttgccagttcatatcaa

SEQ ID NO: 283765 - DNA, 19 bp, Homo sapiens
  siRNA target sequence for SACS (NM_014363.3,5405-5423).
gtgctttgctgttacatca

SEQ ID NO: 283766 - DNA, 19 bp, Homo sapiens
  siRNA target sequence for SACS (NM_014363.3,5471-5489).
cacgttcatgagacatgtt

SEQ ID NO: 283767 - DNA, 19 bp, Homo sapiens
  siRNA target sequence for SACS (NM_014363.3,5474-5492).
gttcatgagacatgttatt

SEQ ID NO: 283768 - DNA, 19 bp, Homo sapiens
  siRNA target sequence for SACS (NM_014363.3,5536-5554).
ccactagtggggagctaat

SEQ ID NO: 283769 - DNA, 19 bp, Homo sapiens
  siRNA target sequence for SACS (NM_014363.3,5539-5557).
ctagtggggagctaatgga

SEQ ID NO: 283770 - DNA, 19 bp, Homo sapiens
  siRNA target sequence for SACS (NM_014363.3,5542-5560).
gtggggagctaatggatta

SEQ ID NO: 283771 - DNA, 19 bp, Homo sapiens
  siRNA target sequence for SACS (NM_014363.3,5544-5562).
ggggagctaatggattata

SEQ ID NO: 283772 - DNA, 19 bp, Homo sapiens
  siRNA target sequence for SACS (NM_014363.3,5550-5568).
ctaatggattatacttact

SEQ ID NO: 283773 - DNA, 19 bp, Homo sapiens
  siRNA target sequence for SACS (NM_014363.3,5579-5597).
gcccgatcctgatttagtt

SEQ ID NO: 283774 - DNA, 19 bp, Homo sapiens
  siRNA target sequence for SACS (NM_014363.3,5587-5605).
ctgatttagttcatgatga

SEQ ID NO: 283775 - DNA, 19 bp, Homo sapiens
  siRNA target sequence for SACS (NM_014363.3,5686-5704).
gatctacttgggtttccat

SEQ ID NO: 283776 - DNA, 19 bp, Homo sapiens
  siRNA target sequence for SACS (NM_014363.3,5697-5715).
gtttccatgaagaacgtaa

SEQ ID NO: 283777 - DNA, 19 bp, Homo sapiens
  siRNA target sequence for SACS (NM_014363.3,5701-5719).
ccatgaagaacgtaagatt

SEQ ID NO: 283778 - DNA, 19 bp, Homo sapiens
  siRNA target sequence for SACS (NM_014363.3,5705-5723).
gaagaacgtaagatttcta

SEQ ID NO: 283779 - DNA, 19 bp, Homo sapiens
  siRNA target sequence for SACS (NM_014363.3,5708-5726).
gaacgtaagatttctagat

SEQ ID NO: 283780 - DNA, 19 bp, Homo sapiens
  siRNA target sequence for SACS (NM_014363.3,5716-5734).
gatttctagatgactctat

SEQ ID NO: 283781 - DNA, 19 bp, Homo sapiens
  siRNA target sequence for SACS (NM_014363.3,5721-5739).
ctagatgactctatactta

SEQ ID NO: 283782 - DNA, 19 bp, Homo sapiens
  siRNA target sequence for SACS (NM_014363.3,5724-5742).
gatgactctatacttaaaa

SEQ ID NO: 283783 - DNA, 19 bp, Homo sapiens
  siRNA target sequence for SACS (NM_014363.3,5727-5745).
gactctatacttaaaagaa

SEQ ID NO: 283784 - DNA, 19 bp, Homo sapiens
  siRNA target sequence for SACS (NM_014363.3,5760-5778).
gcagccttcaagatatttt

SEQ ID NO: 283785 - DNA, 19 bp, Homo sapiens
  siRNA target sequence for SACS (NM_014363.3,5795-5813).
gactgggtccaaaaacctt

SEQ ID NO: 283786 - DNA, 19 bp, Homo sapiens
  siRNA target sequence for SACS (NM_014363.3,5833-5851).
cttcggtaaaattaggatt

SEQ ID NO: 283787 - DNA, 19 bp, Homo sapiens
  siRNA target sequence for SACS (NM_014363.3,5836-5854).
cggtaaaattaggatttga

SEQ ID NO: 283788 - DNA, 19 bp, Homo sapiens
  siRNA target sequence for SACS (NM_014363.3,5856-5874).
gaagctggctgcaaacaga

SEQ ID NO: 283789 - DNA, 19 bp, Homo sapiens
  siRNA target sequence for SACS (NM_014363.3,5873-5891).
gatactacttgaaaacaca

SEQ ID NO: 283790 - DNA, 19 bp, Homo sapiens
  siRNA target sequence for SACS (NM_014363.3,5952-5970).
gaacttagagatcctttaa

SEQ ID NO: 283791 - DNA, 19 bp, Homo sapiens
  siRNA target sequence for SACS (NM_014363.3,6008-6026).
gggagttcttcgtgttact

SEQ ID NO: 283792 - DNA, 19 bp, Homo sapiens
  siRNA target sequence for SACS (NM_014363.3,6088-6106).
ccgaaggacgagttgcaaa

SEQ ID NO: 283793 - DNA, 19 bp, Homo sapiens
  siRNA target sequence for SACS (NM_014363.3,6099-6117).
gttgcaaagttatttgata

SEQ ID NO: 283794 - DNA, 19 bp, Homo sapiens
  siRNA target sequence for SACS (NM_014363.3,6142-6160).
gttctactcaggattatct

SEQ ID NO: 283795 - DNA, 19 bp, Homo sapiens
  siRNA target sequence for SACS (NM_014363.3,6150-6168).
caggattatctcaatccta

SEQ ID NO: 283796 - DNA, 19 bp, Homo sapiens
  siRNA target sequence for SACS (NM_014363.3,6191-6209).
gttaggtatggcaaaagat

SEQ ID NO: 283797 - DNA, 19 bp, Homo sapiens
  siRNA target sequence for SACS (NM_014363.3,6195-6213).
ggtatggcaaaagatgata

SEQ ID NO: 283798 - DNA, 19 bp, Homo sapiens
  siRNA target sequence for SACS (NM_014363.3,6243-6261).
gtgtcagtagctgaaatta

SEQ ID NO: 283799 - DNA, 19 bp, Homo sapiens
  siRNA target sequence for SACS (NM_014363.3,6279-6297).
gctgcatgcctaagaagta

SEQ ID NO: 283800 - DNA, 19 bp, Homo sapiens
  siRNA target sequence for SACS (NM_014363.3,6283-6301).
catgcctaagaagtagtat

SEQ ID NO: 283801 - DNA, 19 bp, Homo sapiens
  siRNA target sequence for SACS (NM_014363.3,6286-6304).
gcctaagaagtagtatctt

SEQ ID NO: 283802 - DNA, 19 bp, Homo sapiens
  siRNA target sequence for SACS (NM_014363.3,6302-6320).
cttattgagtcttatcgat

SEQ ID NO: 283803 - DNA, 19 bp, Homo sapiens
  siRNA target sequence for SACS (NM_014363.3,6308-6326).
gagtcttatcgatgagaaa

SEQ ID NO: 283804 - DNA, 19 bp, Homo sapiens
  siRNA target sequence for SACS (NM_014363.3,6310-6328).
gtcttatcgatgagaaact

SEQ ID NO: 283805 - DNA, 19 bp, Homo sapiens
  siRNA target sequence for SACS (NM_014363.3,6505-6523).
gtcttttgcaaccaattct

SEQ ID NO: 283806 - DNA, 19 bp, Homo sapiens
  siRNA target sequence for SACS (NM_014363.3,6550-6568).
gttgtggttcagtgtcatt

SEQ ID NO: 283807 - DNA, 19 bp, Homo sapiens
  siRNA target sequence for SACS (NM_014363.3,6559-6577).
cagtgtcattggctgttaa

SEQ ID NO: 283808 - DNA, 19 bp, Homo sapiens
  siRNA target sequence for SACS (NM_014363.3,6579-6597).
gagtttttgggattactca

SEQ ID NO: 283809 - DNA, 19 bp, Homo sapiens
  siRNA target sequence for SACS (NM_014363.3,6596-6614).
caagaagccaacagttgat

SEQ ID NO: 283810 - DNA, 19 bp, Homo sapiens
  siRNA target sequence for SACS (NM_014363.3,6612-6630).
gatctggttataaaccaat

SEQ ID NO: 283811 - DNA, 19 bp, Homo sapiens
  siRNA target sequence for SACS (NM_014363.3,6617-6635).
ggttataaaccaattgaaa

SEQ ID NO: 283812 - DNA, 19 bp, Homo sapiens
  siRNA target sequence for SACS (NM_014363.3,6678-6696).
gagaatatcaccaatgctt

SEQ ID NO: 283813 - DNA, 19 bp, Homo sapiens
  siRNA target sequence for SACS (NM_014363.3,6688-6706).
ccaatgcttgctacaaata

SEQ ID NO: 283814 - DNA, 19 bp, Homo sapiens
  siRNA target sequence for SACS (NM_014363.3,6697-6715).
gctacaaataccttcatga

SEQ ID NO: 283815 - DNA, 19 bp, Homo sapiens
  siRNA target sequence for SACS (NM_014363.3,6698-6716).
ctacaaataccttcatgaa

SEQ ID NO: 283816 - DNA, 19 bp, Homo sapiens
  siRNA target sequence for SACS (NM_014363.3,6711-6729).
catgaagccttgatgcaaa

SEQ ID NO: 283817 - DNA, 19 bp, Homo sapiens
  siRNA target sequence for SACS (NM_014363.3,6732-6750).
gaaatcactaagatgtcaa

SEQ ID NO: 283818 - DNA, 19 bp, Homo sapiens
  siRNA target sequence for SACS (NM_014363.3,6737-6755).
cactaagatgtcaattatt

SEQ ID NO: 283819 - DNA, 19 bp, Homo sapiens
  siRNA target sequence for SACS (NM_014363.3,6739-6757).
ctaagatgtcaattattga

SEQ ID NO: 283820 - DNA, 19 bp, Homo sapiens
  siRNA target sequence for SACS (NM_014363.3,6746-6764).
gtcaattattgataagtta

SEQ ID NO: 283821 - DNA, 19 bp, Homo sapiens
  siRNA target sequence for SACS (NM_014363.3,6769-6787).
cctttagcttcattctagt

SEQ ID NO: 283822 - DNA, 19 bp, Homo sapiens
  siRNA target sequence for SACS (NM_014363.3,6839-6857).
ggcggcaccatacctttat

SEQ ID NO: 283823 - DNA, 19 bp, Homo sapiens
  siRNA target sequence for SACS (NM_014363.3,6841-6859).
cggcaccatacctttatca

SEQ ID NO: 283824 - DNA, 19 bp, Homo sapiens
  siRNA target sequence for SACS (NM_014363.3,6843-6861).
gcaccatacctttatcagt

SEQ ID NO: 283825 - DNA, 19 bp, Homo sapiens
  siRNA target sequence for SACS (NM_014363.3,6844-6862).
caccatacctttatcagtt

SEQ ID NO: 283826 - DNA, 19 bp, Homo sapiens
  siRNA target sequence for SACS (NM_014363.3,6858-6876).
cagttgcctaataagtata

SEQ ID NO: 283827 - DNA, 19 bp, Homo sapiens
  siRNA target sequence for SACS (NM_014363.3,6860-6878).
gttgcctaataagtataaa

SEQ ID NO: 283828 - DNA, 19 bp, Homo sapiens
  siRNA target sequence for SACS (NM_014363.3,6942-6960).
gctcttgttttggaatcta

SEQ ID NO: 283829 - DNA, 19 bp, Homo sapiens
  siRNA target sequence for SACS (NM_014363.3,7005-7023).
cagctttgccgacgaataa

SEQ ID NO: 283830 - DNA, 19 bp, Homo sapiens
  siRNA target sequence for SACS (NM_014363.3,7008-7026).
ctttgccgacgaataatca

SEQ ID NO: 283831 - DNA, 19 bp, Homo sapiens
  siRNA target sequence for SACS (NM_014363.3,7032-7050).
ggaatatggagtctcatta

SEQ ID NO: 283832 - DNA, 19 bp, Homo sapiens
  siRNA target sequence for SACS (NM_014363.3,7091-7109).
gatattattgccagatact

SEQ ID NO: 283833 - DNA, 19 bp, Homo sapiens
  siRNA target sequence for SACS (NM_014363.3,7119-7137).
cttctccctgctaaatcgt

SEQ ID NO: 283834 - DNA, 19 bp, Homo sapiens
  siRNA target sequence for SACS (NM_014363.3,7125-7143).
cctgctaaatcgttatgct

SEQ ID NO: 283835 - DNA, 19 bp, Homo sapiens
  siRNA target sequence for SACS (NM_014363.3,7126-7144).
ctgctaaatcgttatgcta

SEQ ID NO: 283836 - DNA, 19 bp, Homo sapiens
  siRNA target sequence for SACS (NM_014363.3,7145-7163).
caatgattgcccttggata

SEQ ID NO: 283837 - DNA, 19 bp, Homo sapiens
  siRNA target sequence for SACS (NM_014363.3,7167-7185).
gtaaaggataccactgtaa

SEQ ID NO: 283838 - DNA, 19 bp, Homo sapiens
  siRNA target sequence for SACS (NM_014363.3,7245-7263).
cgacacaaagccttagaaa

SEQ ID NO: 283839 - DNA, 19 bp, Homo sapiens
  siRNA target sequence for SACS (NM_014363.3,7333-7351).
gaattaagagcatccttaa

SEQ ID NO: 283840 - DNA, 19 bp, Homo sapiens
  siRNA target sequence for SACS (NM_014363.3,7404-7422).
gatgcaaaggcgacagaaa

SEQ ID NO: 283841 - DNA, 19 bp, Homo sapiens
  siRNA target sequence for SACS (NM_014363.3,7446-7464).
cagcatccagttgatagaa

SEQ ID NO: 283842 - DNA, 19 bp, Homo sapiens
  siRNA target sequence for SACS (NM_014363.3,7448-7466).
gcatccagttgatagaata

SEQ ID NO: 283843 - DNA, 19 bp, Homo sapiens
  siRNA target sequence for SACS (NM_014363.3,7449-7467).
catccagttgatagaatat

SEQ ID NO: 283844 - DNA, 19 bp, Homo sapiens
  siRNA target sequence for SACS (NM_014363.3,7500-7518).
gcactttgtgtgtacaaca

SEQ ID NO: 283845 - DNA, 19 bp, Homo sapiens
  siRNA target sequence for SACS (NM_014363.3,7514-7532).
caacaaccagccatttaca

SEQ ID NO: 283846 - DNA, 19 bp, Homo sapiens
  siRNA target sequence for SACS (NM_014363.3,7573-7591).
cgaaagagggaaatcctta

SEQ ID NO: 283847 - DNA, 19 bp, Homo sapiens
  siRNA target sequence for SACS (NM_014363.3,7609-7627).
gaataggattcaattctgt

SEQ ID NO: 283848 - DNA, 19 bp, Homo sapiens
  siRNA target sequence for SACS (NM_014363.3,7670-7688).
catcctgtgtatttttgat

SEQ ID NO: 283849 - DNA, 19 bp, Homo sapiens
  siRNA target sequence for SACS (NM_014363.3,7729-7747).
ccggacgcatgtttagaga

SEQ ID NO: 283850 - DNA, 19 bp, Homo sapiens
  siRNA target sequence for SACS (NM_014363.3,7731-7749).
ggacgcatgtttagagatt

SEQ ID NO: 283851 - DNA, 19 bp, Homo sapiens
  siRNA target sequence for SACS (NM_014363.3,7735-7753).
gcatgtttagagatttgga

SEQ ID NO: 283852 - DNA, 19 bp, Homo sapiens
  siRNA target sequence for SACS (NM_014363.3,7766-7784).
gacacagttctcagatgtt

SEQ ID NO: 283853 - DNA, 19 bp, Homo sapiens
  siRNA target sequence for SACS (NM_014363.3,7777-7795).
cagatgttctggatcttta

SEQ ID NO: 283854 - DNA, 19 bp, Homo sapiens
  siRNA target sequence for SACS (NM_014363.3,7818-7836).
gataattgcacaatgttca

SEQ ID NO: 283855 - DNA, 19 bp, Homo sapiens
  siRNA target sequence for SACS (NM_014363.3,7826-7844).
cacaatgttcagatttcct

SEQ ID NO: 283856 - DNA, 19 bp, Homo sapiens
  siRNA target sequence for SACS (NM_014363.3,7835-7853).
cagatttcctcttcgtaat

SEQ ID NO: 283857 - DNA, 19 bp, Homo sapiens
  siRNA target sequence for SACS (NM_014363.3,7862-7880).
ggcaaaagtttcggaaatt

SEQ ID NO: 283858 - DNA, 19 bp, Homo sapiens
  siRNA target sequence for SACS (NM_014363.3,7984-8002).
ctatttgtgaaatagataa

SEQ ID NO: 283859 - DNA, 19 bp, Homo sapiens
  siRNA target sequence for SACS (NM_014363.3,8003-8021).
gagtactggagctctaaat

SEQ ID NO: 283860 - DNA, 19 bp, Homo sapiens
  siRNA target sequence for SACS (NM_014363.3,8005-8023).
gtactggagctctaaatgt

SEQ ID NO: 283861 - DNA, 19 bp, Homo sapiens
  siRNA target sequence for SACS (NM_014363.3,8091-8109).
gtaattgatagtgttacta

SEQ ID NO: 283862 - DNA, 19 bp, Homo sapiens
  siRNA target sequence for SACS (NM_014363.3,8134-8152).
cagttcaacaaataaccta

SEQ ID NO: 283863 - DNA, 19 bp, Homo sapiens
  siRNA target sequence for SACS (NM_014363.3,8136-8154).
gttcaacaaataacctata

SEQ ID NO: 283864 - DNA, 19 bp, Homo sapiens
  siRNA target sequence for SACS (NM_014363.3,8149-8167).
cctatactatggatactga

SEQ ID NO: 283865 - DNA, 19 bp, Homo sapiens
  siRNA target sequence for SACS (NM_014363.3,8184-8202).
cttactacgtggctaattt

SEQ ID NO: 283866 - DNA, 19 bp, Homo sapiens
  siRNA target sequence for SACS (NM_014363.3,8188-8206).
ctacgtggctaatttgtaa

SEQ ID NO: 283867 - DNA, 19 bp, Homo sapiens
  siRNA target sequence for SACS (NM_014363.3,8192-8210).
gtggctaatttgtaataga

SEQ ID NO: 283868 - DNA, 19 bp, Homo sapiens
  siRNA target sequence for SACS (NM_014363.3,8209-8227).
gatcaggcttttcaagtat

SEQ ID NO: 283869 - DNA, 19 bp, Homo sapiens
  siRNA target sequence for SACS (NM_014363.3,8264-8282).
gaaccaagatattactctt

SEQ ID NO: 283870 - DNA, 19 bp, Homo sapiens
  siRNA target sequence for SACS (NM_014363.3,8331-8349).
ccccatagggccttctgtt

SEQ ID NO: 283871 - DNA, 19 bp, Homo sapiens
  siRNA target sequence for SACS (NM_014363.3,8332-8350).
cccatagggccttctgttt

SEQ ID NO: 283872 - DNA, 19 bp, Homo sapiens
  siRNA target sequence for SACS (NM_014363.3,8369-8387).
gactgggctgccatttcat

SEQ ID NO: 283873 - DNA, 19 bp, Homo sapiens
  siRNA target sequence for SACS (NM_014363.3,8371-8389).
ctgggctgccatttcatgt

SEQ ID NO: 283874 - DNA, 19 bp, Homo sapiens
  siRNA target sequence for SACS (NM_014363.3,8374-8392).
ggctgccatttcatgtgaa

SEQ ID NO: 283875 - DNA, 19 bp, Homo sapiens
  siRNA target sequence for SACS (NM_014363.3,8375-8393).
gctgccatttcatgtgaat

SEQ ID NO: 283876 - DNA, 19 bp, Homo sapiens
  siRNA target sequence for SACS (NM_014363.3,8423-8441).
gaacctgtggcgtgatgat

SEQ ID NO: 283877 - DNA, 19 bp, Homo sapiens
  siRNA target sequence for SACS (NM_014363.3,8426-8444).
cctgtggcgtgatgataat

SEQ ID NO: 283878 - DNA, 19 bp, Homo sapiens
  siRNA target sequence for SACS (NM_014363.3,8429-8447).
gtggcgtgatgataatgga

SEQ ID NO: 283879 - DNA, 19 bp, Homo sapiens
  siRNA target sequence for SACS (NM_014363.3,8454-8472).
gttcgaagtgactggaata

SEQ ID NO: 283880 - DNA, 19 bp, Homo sapiens
  siRNA target sequence for SACS (NM_014363.3,8463-8481).
gactggaataacagtttaa

SEQ ID NO: 283881 - DNA, 19 bp, Homo sapiens
  siRNA target sequence for SACS (NM_014363.3,8496-8514).
gctcctgcatatgttgaat

SEQ ID NO: 283882 - DNA, 19 bp, Homo sapiens
  siRNA target sequence for SACS (NM_014363.3,8508-8526).
gttgaattgctaatacagt

SEQ ID NO: 283883 - DNA, 19 bp, Homo sapiens
  siRNA target sequence for SACS (NM_014363.3,8557-8575).
caacattatcagtgttaca

SEQ ID NO: 283884 - DNA, 19 bp, Homo sapiens
  siRNA target sequence for SACS (NM_014363.3,8579-8597).
cacccctattcatgttgta

SEQ ID NO: 283885 - DNA, 19 bp, Homo sapiens
  siRNA target sequence for SACS (NM_014363.3,8581-8599).
cccctattcatgttgtaaa

SEQ ID NO: 283886 - DNA, 19 bp, Homo sapiens
  siRNA target sequence for SACS (NM_014363.3,8592-8610).
gttgtaaaggacactttaa

SEQ ID NO: 283887 - DNA, 19 bp, Homo sapiens
  siRNA target sequence for SACS (NM_014363.3,8646-8664).
gatctacagccagatttat

SEQ ID NO: 283888 - DNA, 19 bp, Homo sapiens
  siRNA target sequence for SACS (NM_014363.3,8692-8710).
gcattcacgaagacatgaa

SEQ ID NO: 283889 - DNA, 19 bp, Homo sapiens
  siRNA target sequence for SACS (NM_014363.3,8705-8723).
catgaaacgtcttttacct

SEQ ID NO: 283890 - DNA, 19 bp, Homo sapiens
  siRNA target sequence for SACS (NM_014363.3,8724-8742).
gttgtgcgggctccaaata

SEQ ID NO: 283891 - DNA, 19 bp, Homo sapiens
  siRNA target sequence for SACS (NM_014363.3,8729-8747).
gcgggctccaaatattgat

SEQ ID NO: 283892 - DNA, 19 bp, Homo sapiens
  siRNA target sequence for SACS (NM_014363.3,8756-8774).
cttgcactctgcagttata

SEQ ID NO: 283893 - DNA, 19 bp, Homo sapiens
  siRNA target sequence for SACS (NM_014363.3,8759-8777).
gcactctgcagttataatt

SEQ ID NO: 283894 - DNA, 19 bp, Homo sapiens
  siRNA target sequence for SACS (NM_014363.3,8760-8778).
cactctgcagttataatta

SEQ ID NO: 283895 - DNA, 19 bp, Homo sapiens
  siRNA target sequence for SACS (NM_014363.3,8783-8801).
gatcaatatgtctacttct

SEQ ID NO: 283896 - DNA, 19 bp, Homo sapiens
  siRNA target sequence for SACS (NM_014363.3,8809-8827).
ctagaccattttttgacaa

SEQ ID NO: 283897 - DNA, 19 bp, Homo sapiens
  siRNA target sequence for SACS (NM_014363.3,8876-8894).
caccacacgcaaaacagta

SEQ ID NO: 283898 - DNA, 19 bp, Homo sapiens
  siRNA target sequence for SACS (NM_014363.3,8961-8979).
gatgaaactgctaatcttt

SEQ ID NO: 283899 - DNA, 19 bp, Homo sapiens
  siRNA target sequence for SACS (NM_014363.3,9027-9045).
gctgatatcagatcttttt

SEQ ID NO: 283900 - DNA, 19 bp, Homo sapiens
  siRNA target sequence for SACS (NM_014363.3,9097-9115).
gtcgtctgcagcagactaa

SEQ ID NO: 283901 - DNA, 19 bp, Homo sapiens
  siRNA target sequence for SACS (NM_014363.3,9100-9118).
gtctgcagcagactaatct

SEQ ID NO: 283902 - DNA, 19 bp, Homo sapiens
  siRNA target sequence for SACS (NM_014363.3,9102-9120).
ctgcagcagactaatctaa

SEQ ID NO: 283903 - DNA, 19 bp, Homo sapiens
  siRNA target sequence for SACS (NM_014363.3,9107-9125).
gcagactaatctaaaactt

SEQ ID NO: 283904 - DNA, 19 bp, Homo sapiens
  siRNA target sequence for SACS (NM_014363.3,9244-9262).
caaaacgacccaagtttct

SEQ ID NO: 283905 - DNA, 19 bp, Homo sapiens
  siRNA target sequence for SACS (NM_014363.3,9249-9267).
cgacccaagtttctaacaa

SEQ ID NO: 283906 - DNA, 19 bp, Homo sapiens
  siRNA target sequence for SACS (NM_014363.3,9252-9270).
cccaagtttctaacaacat

SEQ ID NO: 283907 - DNA, 19 bp, Homo sapiens
  siRNA target sequence for SACS (NM_014363.3,9253-9271).
ccaagtttctaacaacata

SEQ ID NO: 283908 - DNA, 19 bp, Homo sapiens
  siRNA target sequence for SACS (NM_014363.3,9254-9272).
caagtttctaacaacatat

SEQ ID NO: 283909 - DNA, 19 bp, Homo sapiens
  siRNA target sequence for SACS (NM_014363.3,9261-9279).
ctaacaacatatcatgaat

SEQ ID NO: 283910 - DNA, 19 bp, Homo sapiens
  siRNA target sequence for SACS (NM_014363.3,9286-9304).
catcccgcaaagacttgtt

SEQ ID NO: 283911 - DNA, 19 bp, Homo sapiens
  siRNA target sequence for SACS (NM_014363.3,9297-9315).
gacttgtttatgaatacat

SEQ ID NO: 283912 - DNA, 19 bp, Homo sapiens
  siRNA target sequence for SACS (NM_014363.3,9460-9478).
gtgagtcttggcttaagaa

SEQ ID NO: 283913 - DNA, 19 bp, Homo sapiens
  siRNA target sequence for SACS (NM_014363.3,9555-9573).
gttgatactctaaaagact

SEQ ID NO: 283914 - DNA, 19 bp, Homo sapiens
  siRNA target sequence for SACS (NM_014363.3,9582-9600).
cttccaggaacaaagttta

SEQ ID NO: 283915 - DNA, 19 bp, Homo sapiens
  siRNA target sequence for SACS (NM_014363.3,9662-9680).
gcacattgcagtttttcca

SEQ ID NO: 283916 - DNA, 19 bp, Homo sapiens
  siRNA target sequence for SACS (NM_014363.3,9663-9681).
cacattgcagtttttccaa

SEQ ID NO: 283917 - DNA, 19 bp, Homo sapiens
  siRNA target sequence for SACS (NM_014363.3,9665-9683).
cattgcagtttttccaaat

SEQ ID NO: 283918 - DNA, 19 bp, Homo sapiens
  siRNA target sequence for SACS (NM_014363.3,9684-9702).
gcccagagtgataaagttt

SEQ ID NO: 283919 - DNA, 19 bp, Homo sapiens
  siRNA target sequence for SACS (NM_014363.3,9685-9703).
cccagagtgataaagtttt

SEQ ID NO: 283920 - DNA, 19 bp, Homo sapiens
  siRNA target sequence for SACS (NM_014363.3,9790-9808).
gtcacacagcaaatataga

SEQ ID NO: 283921 - DNA, 19 bp, Homo sapiens
  siRNA target sequence for SACS (NM_014363.3,9821-9839).
catcttgaaggctctacat

SEQ ID NO: 283922 - DNA, 19 bp, Homo sapiens
  siRNA target sequence for SACS (NM_014363.3,9824-9842).
cttgaaggctctacattat

SEQ ID NO: 283923 - DNA, 19 bp, Homo sapiens
  siRNA target sequence for SACS (NM_014363.3,9837-9855).
cattatatggtccaaactt

SEQ ID NO: 283924 - DNA, 19 bp, Homo sapiens
  siRNA target sequence for SACS (NM_014363.3,9845-9863).
ggtccaaacttcaacattt

SEQ ID NO: 283925 - DNA, 19 bp, Homo sapiens
  siRNA target sequence for SACS (NM_014363.3,9846-9864).
gtccaaacttcaacattta

SEQ ID NO: 283926 - DNA, 19 bp, Homo sapiens
  siRNA target sequence for SACS (NM_014363.3,9986-10004).
catcagtggccgctatgta

SEQ ID NO: 283927 - DNA, 19 bp, Homo sapiens
  siRNA target sequence for SACS (NM_014363.3,9996-10014).
cgctatgtaagcattggaa

SEQ ID NO: 283928 - DNA, 19 bp, Homo sapiens
  siRNA target sequence for SACS (NM_014363.3,9997-10015).
gctatgtaagcattggaaa

SEQ ID NO: 283929 - DNA, 19 bp, Homo sapiens
  siRNA target sequence for SACS (NM_014363.3,9998-10016).
ctatgtaagcattggaaaa

SEQ ID NO: 283930 - DNA, 19 bp, Homo sapiens
  siRNA target sequence for SACS (NM_014363.3,10020-10038).
ggaacatgctacgtactta

SEQ ID NO: 283931 - DNA, 19 bp, Homo sapiens
  siRNA target sequence for SACS (NM_014363.3,10028-10046).
ctacgtacttacaaaaagt

SEQ ID NO: 283932 - DNA, 19 bp, Homo sapiens
  siRNA target sequence for SACS (NM_014363.3,10125-10143).
ctatatgaggtgattggtt

SEQ ID NO: 283933 - DNA, 19 bp, Homo sapiens
  siRNA target sequence for SACS (NM_014363.3,10141-10159).
gttgtgtacctgtagatga

SEQ ID NO: 283934 - DNA, 19 bp, Homo sapiens
  siRNA target sequence for SACS (NM_014363.3,10155-10173).
gatgatcttgaggtatatt

SEQ ID NO: 283935 - DNA, 19 bp, Homo sapiens
  siRNA target sequence for SACS (NM_014363.3,10158-10176).
gatcttgaggtatatttga

SEQ ID NO: 283936 - DNA, 19 bp, Homo sapiens
  siRNA target sequence for SACS (NM_014363.3,10188-10206).
ccaaaaattgaaaatctct

SEQ ID NO: 283937 - DNA, 19 bp, Homo sapiens
  siRNA target sequence for SACS (NM_014363.3,10207-10225).
cttatgatgcaaaattaga

SEQ ID NO: 283938 - DNA, 19 bp, Homo sapiens
  siRNA target sequence for SACS (NM_014363.3,10227-10245).
cacttgatctaccttaaga

SEQ ID NO: 283939 - DNA, 19 bp, Homo sapiens
  siRNA target sequence for SACS (NM_014363.3,10229-10247).
cttgatctaccttaagaat

SEQ ID NO: 283940 - DNA, 19 bp, Homo sapiens
  siRNA target sequence for SACS (NM_014363.3,10263-10281).
gaggaattatcagagatta

SEQ ID NO: 283941 - DNA, 19 bp, Homo sapiens
  siRNA target sequence for SACS (NM_014363.3,10275-10293).
gagattaaggaacaacttt

SEQ ID NO: 283942 - DNA, 19 bp, Homo sapiens
  siRNA target sequence for SACS (NM_014363.3,10326-10344).
gatgctaacagtagactaa

SEQ ID NO: 283943 - DNA, 19 bp, Homo sapiens
  siRNA target sequence for SACS (NM_014363.3,10330-10348).
ctaacagtagactaaagca

SEQ ID NO: 283944 - DNA, 19 bp, Homo sapiens
  siRNA target sequence for SACS (NM_014363.3,10374-10392).
gtgagagtttttgaagtta

SEQ ID NO: 283945 - DNA, 19 bp, Homo sapiens
  siRNA target sequence for SACS (NM_014363.3,10378-10396).
gagtttttgaagttatgct

SEQ ID NO: 283946 - DNA, 19 bp, Homo sapiens
  siRNA target sequence for SACS (NM_014363.3,10395-10413).
cttcctgaaaaattgttta

SEQ ID NO: 283947 - DNA, 19 bp, Homo sapiens
  siRNA target sequence for SACS (NM_014363.3,10455-10473).
cccaaaaatcatgttacat

SEQ ID NO: 283948 - DNA, 19 bp, Homo sapiens
  siRNA target sequence for SACS (NM_014363.3,10464-10482).
catgttacatttatgacat

SEQ ID NO: 283949 - DNA, 19 bp, Homo sapiens
  siRNA target sequence for SACS (NM_014363.3,10536-10554).
cagttgttacagtttgcta

SEQ ID NO: 283950 - DNA, 19 bp, Homo sapiens
  siRNA target sequence for SACS (NM_014363.3,10562-10580).
cagtgtgagggctaataca

SEQ ID NO: 283951 - DNA, 19 bp, Homo sapiens
  siRNA target sequence for SACS (NM_014363.3,10641-10659).
caagaacgaatggatttgt

SEQ ID NO: 283952 - DNA, 19 bp, Homo sapiens
  siRNA target sequence for SACS (NM_014363.3,10644-10662).
gaacgaatggatttgttat

SEQ ID NO: 283953 - DNA, 19 bp, Homo sapiens
  siRNA target sequence for SACS (NM_014363.3,10674-10692).
ctgaaagaactatctttaa

SEQ ID NO: 283954 - DNA, 19 bp, Homo sapiens
  siRNA target sequence for SACS (NM_014363.3,10723-10741).
cggaattcattagatttca

SEQ ID NO: 283955 - DNA, 19 bp, Homo sapiens
  siRNA target sequence for SACS (NM_014363.3,10724-10742).
ggaattcattagatttcat

SEQ ID NO: 283956 - DNA, 19 bp, Homo sapiens
  siRNA target sequence for SACS (NM_014363.3,10764-10782).
ggaacacttcctcttataa

SEQ ID NO: 283957 - DNA, 19 bp, Homo sapiens
  siRNA target sequence for SACS (NM_014363.3,10770-10788).
cttcctcttataaagttca

SEQ ID NO: 283958 - DNA, 19 bp, Homo sapiens
  siRNA target sequence for SACS (NM_014363.3,10787-10805).
caatggagcacaggtaaat

SEQ ID NO: 283959 - DNA, 19 bp, Homo sapiens
  siRNA target sequence for SACS (NM_014363.3,10794-10812).
gcacaggtaaatccaaaat

SEQ ID NO: 283960 - DNA, 19 bp, Homo sapiens
  siRNA target sequence for SACS (NM_014363.3,10824-10842).
gatgtactccagctgttat

SEQ ID NO: 283961 - DNA, 19 bp, Homo sapiens
  siRNA target sequence for SACS (NM_014363.3,10844-10862).
gacatcctgccctattctt

SEQ ID NO: 283962 - DNA, 19 bp, Homo sapiens
  siRNA target sequence for SACS (NM_014363.3,10873-10891).
ctacacccttaagcattaa

SEQ ID NO: 283963 - DNA, 19 bp, Homo sapiens
  siRNA target sequence for SACS (NM_014363.3,10876-10894).
cacccttaagcattaaaga

SEQ ID NO: 283964 - DNA, 19 bp, Homo sapiens
  siRNA target sequence for SACS (NM_014363.3,10926-10944).
cagcttgaacaagttttaa

SEQ ID NO: 283965 - DNA, 19 bp, Homo sapiens
  siRNA target sequence for SACS (NM_014363.3,10928-10946).
gcttgaacaagttttaaat

SEQ ID NO: 283966 - DNA, 19 bp, Homo sapiens
  siRNA target sequence for SACS (NM_014363.3,10968-10986).
cctcctcttgataaggtaa

SEQ ID NO: 283967 - DNA, 19 bp, Homo sapiens
  siRNA target sequence for SACS (NM_014363.3,10969-10987).
ctcctcttgataaggtaat

SEQ ID NO: 283968 - DNA, 19 bp, Homo sapiens
  siRNA target sequence for SACS (NM_014363.3,10974-10992).
cttgataaggtaatcaata

SEQ ID NO: 283969 - DNA, 19 bp, Homo sapiens
  siRNA target sequence for SACS (NM_014363.3,10988-11006).
caataactgcagaaacata

SEQ ID NO: 283970 - DNA, 19 bp, Homo sapiens
  siRNA target sequence for SACS (NM_014363.3,11017-11035).
cgacgttggatgaagaaat

SEQ ID NO: 283971 - DNA, 19 bp, Homo sapiens
  siRNA target sequence for SACS (NM_014363.3,11062-11080).
ggagcatatatgaattcct

SEQ ID NO: 283972 - DNA, 19 bp, Homo sapiens
  siRNA target sequence for SACS (NM_014363.3,11111-11129).
gttgcgaggggttgctttt

SEQ ID NO: 283973 - DNA, 19 bp, Homo sapiens
  siRNA target sequence for SACS (NM_014363.3,11115-11133).
cgaggggttgcttttgtga

SEQ ID NO: 283974 - DNA, 19 bp, Homo sapiens
  siRNA target sequence for SACS (NM_014363.3,11162-11180).
gcctgaggaggtagtcata

SEQ ID NO: 283975 - DNA, 19 bp, Homo sapiens
  siRNA target sequence for SACS (NM_014363.3,11163-11181).
cctgaggaggtagtcataa

SEQ ID NO: 283976 - DNA, 19 bp, Homo sapiens
  siRNA target sequence for SACS (NM_014363.3,11164-11182).
ctgaggaggtagtcataaa

SEQ ID NO: 283977 - DNA, 19 bp, Homo sapiens
  siRNA target sequence for SACS (NM_014363.3,11168-11186).
ggaggtagtcataaaccta

SEQ ID NO: 283978 - DNA, 19 bp, Homo sapiens
  siRNA target sequence for SACS (NM_014363.3,11172-11190).
gtagtcataaacctagaat

SEQ ID NO: 283979 - DNA, 19 bp, Homo sapiens
  siRNA target sequence for SACS (NM_014363.3,11177-11195).
cataaacctagaatatgaa

SEQ ID NO: 283980 - DNA, 19 bp, Homo sapiens
  siRNA target sequence for SACS (NM_014363.3,11216-11234).
gtacaagctacctttagaa

SEQ ID NO: 283981 - DNA, 19 bp, Homo sapiens
  siRNA target sequence for SACS (NM_014363.3,11219-11237).
caagctacctttagaactt

SEQ ID NO: 283982 - DNA, 19 bp, Homo sapiens
  siRNA target sequence for SACS (NM_014363.3,11247-11265).
caccagttgttcaaacact

SEQ ID NO: 283983 - DNA, 19 bp, Homo sapiens
  siRNA target sequence for SACS (NM_014363.3,11258-11276).
caaacacttaggtactgaa

SEQ ID NO: 283984 - DNA, 19 bp, Homo sapiens
  siRNA target sequence for SACS (NM_014363.3,11262-11280).
cacttaggtactgaagata

SEQ ID NO: 283985 - DNA, 19 bp, Homo sapiens
  siRNA target sequence for SACS (NM_014363.3,11290-11308).
ctaagcaatatgttgaagt

SEQ ID NO: 283986 - DNA, 19 bp, Homo sapiens
  siRNA target sequence for SACS (NM_014363.3,11307-11325).
gtgttgagccgcatattta

SEQ ID NO: 283987 - DNA, 19 bp, Homo sapiens
  siRNA target sequence for SACS (NM_014363.3,11309-11327).
gttgagccgcatatttaaa

SEQ ID NO: 283988 - DNA, 19 bp, Homo sapiens
  siRNA target sequence for SACS (NM_014363.3,11332-11350).
ctgagggcaaacaattaga

SEQ ID NO: 283989 - DNA, 19 bp, Homo sapiens
  siRNA target sequence for SACS (NM_014363.3,11338-11356).
gcaaacaattagatcctaa

SEQ ID NO: 283990 - DNA, 19 bp, Homo sapiens
  siRNA target sequence for SACS (NM_014363.3,11339-11357).
caaacaattagatcctaat

SEQ ID NO: 283991 - DNA, 19 bp, Homo sapiens
  siRNA target sequence for SACS (NM_014363.3,11358-11376).
gaaatgcgtacagttaaga

SEQ ID NO: 283992 - DNA, 19 bp, Homo sapiens
  siRNA target sequence for SACS (NM_014363.3,11401-11419).
gtctacagaatgattcagt

SEQ ID NO: 283993 - DNA, 19 bp, Homo sapiens
  siRNA target sequence for SACS (NM_014363.3,11428-11446).
ggagtgatctcgagaatgt

SEQ ID NO: 283994 - DNA, 19 bp, Homo sapiens
  siRNA target sequence for SACS (NM_014363.3,11429-11447).
gagtgatctcgagaatgta

SEQ ID NO: 283995 - DNA, 19 bp, Homo sapiens
  siRNA target sequence for SACS (NM_014363.3,11481-11499).
ggtagattggtaaagtcaa

SEQ ID NO: 283996 - DNA, 19 bp, Homo sapiens
  siRNA target sequence for SACS (NM_014363.3,11489-11507).
ggtaaagtcaagcatctta

SEQ ID NO: 283997 - DNA, 19 bp, Homo sapiens
  siRNA target sequence for SACS (NM_014363.3,11495-11513).
gtcaagcatcttagtgttt

SEQ ID NO: 283998 - DNA, 19 bp, Homo sapiens
  siRNA target sequence for SACS (NM_014363.3,11497-11515).
caagcatcttagtgtttga

SEQ ID NO: 283999 - DNA, 19 bp, Homo sapiens
  siRNA target sequence for SACS (NM_014363.3,11514-11532).
gacgatgcgccacattata

SEQ ID NO: 284000 - DNA, 19 bp, Homo sapiens
  siRNA target sequence for SACS (NM_014363.3,11516-11534).
cgatgcgccacattataaa

SEQ ID NO: 284001 - DNA, 19 bp, Homo sapiens
  siRNA target sequence for SACS (NM_014363.3,11517-11535).
gatgcgccacattataaaa

SEQ ID NO: 284002 - DNA, 19 bp, Homo sapiens
  siRNA target sequence for SACS (NM_014363.3,11607-11625).
ggatttcacactaagttga

SEQ ID NO: 284003 - DNA, 19 bp, Homo sapiens
  siRNA target sequence for SACS (NM_014363.3,11608-11626).
gatttcacactaagttgat

SEQ ID NO: 284004 - DNA, 19 bp, Homo sapiens
  siRNA target sequence for SACS (NM_014363.3,11646-11664).
cttagacctcgattattga

SEQ ID NO: 284005 - DNA, 19 bp, Homo sapiens
  siRNA target sequence for SACS (NM_014363.3,11656-11674).
gattattgagcagtatact

SEQ ID NO: 284006 - DNA, 19 bp, Homo sapiens
  siRNA target sequence for SACS (NM_014363.3,11665-11683).
gcagtatacttgaagaaca

SEQ ID NO: 284007 - DNA, 19 bp, Homo sapiens
  siRNA target sequence for SACS (NM_014363.3,11666-11684).
cagtatacttgaagaacaa

SEQ ID NO: 284008 - DNA, 19 bp, Homo sapiens
  siRNA target sequence for SACS (NM_014363.3,11668-11686).
gtatacttgaagaacaatt

SEQ ID NO: 284009 - DNA, 19 bp, Homo sapiens
  siRNA target sequence for SACS (NM_014363.3,11691-11709).
gaagagactcccaaagttt

SEQ ID NO: 284010 - DNA, 19 bp, Homo sapiens
  siRNA target sequence for SACS (NM_014363.3,11728-11746).
gttctcttcaaggaagatt

SEQ ID NO: 284011 - DNA, 19 bp, Homo sapiens
  siRNA target sequence for SACS (NM_014363.3,11739-11757).
ggaagattgcagttactct

SEQ ID NO: 284012 - DNA, 19 bp, Homo sapiens
  siRNA target sequence for SACS (NM_014363.3,11771-11789).
gttcattacaggactgatt

SEQ ID NO: 284013 - DNA, 19 bp, Homo sapiens
  siRNA target sequence for SACS (NM_014363.3,11779-11797).
caggactgattagaattat

SEQ ID NO: 284014 - DNA, 19 bp, Homo sapiens
  siRNA target sequence for SACS (NM_014363.3,11781-11799).
ggactgattagaattatga

SEQ ID NO: 284015 - DNA, 19 bp, Homo sapiens
  siRNA target sequence for SACS (NM_014363.3,11782-11800).
gactgattagaattatgaa

SEQ ID NO: 284016 - DNA, 19 bp, Homo sapiens
  siRNA target sequence for SACS (NM_014363.3,11835-11853).
gaaaaagccataagacttt

SEQ ID NO: 284017 - DNA, 19 bp, Homo sapiens
  siRNA target sequence for SACS (NM_014363.3,11897-11915).
gcttcaaacaacattaaga

SEQ ID NO: 284018 - DNA, 19 bp, Homo sapiens
  siRNA target sequence for SACS (NM_014363.3,11908-11926).
cattaagagttaaaggttt

SEQ ID NO: 284019 - DNA, 19 bp, Homo sapiens
  siRNA target sequence for SACS (NM_014363.3,11916-11934).
gttaaaggttttaatccta

SEQ ID NO: 284020 - DNA, 19 bp, Homo sapiens
  siRNA target sequence for SACS (NM_014363.3,11942-11960).
cagcagaagtgaaactttt

SEQ ID NO: 284021 - DNA, 19 bp, Homo sapiens
  siRNA target sequence for SACS (NM_014363.3,11969-11987).
gaagcgatttggtaatgca

SEQ ID NO: 284022 - DNA, 19 bp, Homo sapiens
  siRNA target sequence for SACS (NM_014363.3,11986-12004).
cagtcatcttgctctacat

SEQ ID NO: 284023 - DNA, 19 bp, Homo sapiens
  siRNA target sequence for SACS (NM_014363.3,11996-12014).
gctctacattcaacattca

SEQ ID NO: 284024 - DNA, 19 bp, Homo sapiens
  siRNA target sequence for SACS (NM_014363.3,12110-12128).
gctaggatgcaatgatatt

SEQ ID NO: 284025 - DNA, 19 bp, Homo sapiens
  siRNA target sequence for SACS (NM_014363.3,12150-12168).
gacagtttaggagtgaaat

SEQ ID NO: 284026 - DNA, 19 bp, Homo sapiens
  siRNA target sequence for SACS (NM_014363.3,12152-12170).
cagtttaggagtgaaatat

SEQ ID NO: 284027 - DNA, 19 bp, Homo sapiens
  siRNA target sequence for SACS (NM_014363.3,12154-12172).
gtttaggagtgaaatatga

SEQ ID NO: 284028 - DNA, 19 bp, Homo sapiens
  siRNA target sequence for SACS (NM_014363.3,12175-12193).
cttcggagccatcaaaact

SEQ ID NO: 284029 - DNA, 19 bp, Homo sapiens
  siRNA target sequence for SACS (NM_014363.3,12187-12205).
caaaactggaacttccaat

SEQ ID NO: 284030 - DNA, 19 bp, Homo sapiens
  siRNA target sequence for SACS (NM_014363.3,12245-12263).
gcttatggacccaatgaat

SEQ ID NO: 284031 - DNA, 19 bp, Homo sapiens
  siRNA target sequence for SACS (NM_014363.3,12313-12331).
gtgatatctatggatcata

SEQ ID NO: 284032 - DNA, 19 bp, Homo sapiens
  siRNA target sequence for SACS (NM_014363.3,12352-12370).
caattattgtacaagaagt

SEQ ID NO: 284033 - DNA, 19 bp, Homo sapiens
  siRNA target sequence for SACS (NM_014363.3,12378-12396).
gaagatgctgacaattcta

SEQ ID NO: 284034 - DNA, 19 bp, Homo sapiens
  siRNA target sequence for SACS (NM_014363.3,12381-12399).
gatgctgacaattctagtt

SEQ ID NO: 284035 - DNA, 19 bp, Homo sapiens
  siRNA target sequence for SACS (NM_014363.3,12385-12403).
ctgacaattctagttttct

SEQ ID NO: 284036 - DNA, 19 bp, Homo sapiens
  siRNA target sequence for SACS (NM_014363.3,12394-12412).
ctagttttctaggaaagat

SEQ ID NO: 284037 - DNA, 19 bp, Homo sapiens
  siRNA target sequence for SACS (NM_014363.3,12410-12428).
gatatatcagatagatatt

SEQ ID NO: 284038 - DNA, 19 bp, Homo sapiens
  siRNA target sequence for SACS (NM_014363.3,12419-12437).
gatagatattggttatagt

SEQ ID NO: 284039 - DNA, 19 bp, Homo sapiens
  siRNA target sequence for SACS (NM_014363.3,12591-12609).
gagagccacaagacttctt

SEQ ID NO: 284040 - DNA, 19 bp, Homo sapiens
  siRNA target sequence for SACS (NM_014363.3,12599-12617).
caagacttcttccaaacat

SEQ ID NO: 284041 - DNA, 19 bp, Homo sapiens
  siRNA target sequence for SACS (NM_014363.3,12625-12643).
ccaaaaagcttaaggttaa

SEQ ID NO: 284042 - DNA, 19 bp, Homo sapiens
  siRNA target sequence for SACS (NM_014363.3,12626-12644).
caaaaagcttaaggttaat

SEQ ID NO: 284043 - DNA, 19 bp, Homo sapiens
  siRNA target sequence for SACS (NM_014363.3,12703-12721).
cagaatcggaacgaaaaaa

SEQ ID NO: 284044 - DNA, 19 bp, Homo sapiens
  siRNA target sequence for SACS (NM_014363.3,12709-12727).
cggaacgaaaaaagattat

SEQ ID NO: 284045 - DNA, 19 bp, Homo sapiens
  siRNA target sequence for SACS (NM_014363.3,12722-12740).
gattattaggcggttgtat

SEQ ID NO: 284046 - DNA, 19 bp, Homo sapiens
  siRNA target sequence for SACS (NM_014363.3,12773-12791).
ccatgacattgccaatgaa

SEQ ID NO: 284047 - DNA, 19 bp, Homo sapiens
  siRNA target sequence for SACS (NM_014363.3,12836-12854).
ggcttttctagatcaaaat

SEQ ID NO: 284048 - DNA, 19 bp, Homo sapiens
  siRNA target sequence for SACS (NM_014363.3,12862-12880).
gggcctccagacgaacatt

SEQ ID NO: 284049 - DNA, 19 bp, Homo sapiens
  siRNA target sequence for SACS (NM_014363.3,12863-12881).
ggcctccagacgaacattt

SEQ ID NO: 284050 - DNA, 19 bp, Homo sapiens
  siRNA target sequence for SACS (NM_014363.3,12864-12882).
gcctccagacgaacatttt

SEQ ID NO: 284051 - DNA, 19 bp, Homo sapiens
  siRNA target sequence for SACS (NM_014363.3,12866-12884).
ctccagacgaacattttca

SEQ ID NO: 284052 - DNA, 19 bp, Homo sapiens
  siRNA target sequence for SACS (NM_014363.3,12896-12914).
ccgatttcagtcagacaaa

SEQ ID NO: 284053 - DNA, 19 bp, Homo sapiens
  siRNA target sequence for SACS (NM_014363.3,12897-12915).
cgatttcagtcagacaaat

SEQ ID NO: 284054 - DNA, 19 bp, Homo sapiens
  siRNA target sequence for SACS (NM_014363.3,12907-12925).
cagacaaatactcatttca

SEQ ID NO: 284055 - DNA, 19 bp, Homo sapiens
  siRNA target sequence for SACS (NM_014363.3,12909-12927).
gacaaatactcatttcaga

SEQ ID NO: 284056 - DNA, 19 bp, Homo sapiens
  siRNA target sequence for SACS (NM_014363.3,12924-12942).
cagagattctatacttcat

SEQ ID NO: 284057 - DNA, 19 bp, Homo sapiens
  siRNA target sequence for SACS (NM_014363.3,12951-12969).
gaagcaacgagccataaat

SEQ ID NO: 284058 - DNA, 19 bp, Homo sapiens
  siRNA target sequence for SACS (NM_014363.3,12955-12973).
caacgagccataaatctga

SEQ ID NO: 284059 - DNA, 19 bp, Homo sapiens
  siRNA target sequence for SACS (NM_014363.3,13014-13032).
ggacagacttactctcaaa

SEQ ID NO: 284060 - DNA, 19 bp, Homo sapiens
  siRNA target sequence for SACS (NM_014363.3,13041-13059).
gttcctcccactttcaagt

SEQ ID NO: 284061 - DNA, 19 bp, Homo sapiens
  siRNA target sequence for SACS (NM_014363.3,13081-13099).
cacgcagatggctaagaca

SEQ ID NO: 284062 - DNA, 19 bp, Homo sapiens
  siRNA target sequence for SACS (NM_014363.3,13123-13141).
ccaggaatgaccttcataa

SEQ ID NO: 284063 - DNA, 19 bp, Homo sapiens
  siRNA target sequence for SACS (NM_014363.3,13124-13142).
caggaatgaccttcataaa

SEQ ID NO: 284064 - DNA, 19 bp, Homo sapiens
  siRNA target sequence for SACS (NM_014363.3,13215-13233).
gtgaggggaaagtctgata

SEQ ID NO: 284065 - DNA, 19 bp, Homo sapiens
  siRNA target sequence for SACS (NM_014363.3,13217-13235).
gaggggaaagtctgataaa

SEQ ID NO: 284066 - DNA, 19 bp, Homo sapiens
  siRNA target sequence for SACS (NM_014363.3,13219-13237).
ggggaaagtctgataaaga

SEQ ID NO: 284067 - DNA, 19 bp, Homo sapiens
  siRNA target sequence for SACS (NM_014363.3,13249-13267).
ctgcacttgctcagaaaat

SEQ ID NO: 284068 - DNA, 19 bp, Homo sapiens
  siRNA target sequence for SACS (NM_014363.3,13313-13331).
cacattggaagcttatggt

SEQ ID NO: 284069 - DNA, 19 bp, Homo sapiens
  siRNA target sequence for SACS (NM_014363.3,13324-13342).
cttatggtgtagacagttt

SEQ ID NO: 284070 - DNA, 19 bp, Homo sapiens
  siRNA target sequence for SACS (NM_014363.3,13415-13433).
gagggtgatggaatgtact

SEQ ID NO: 284071 - DNA, 19 bp, Homo sapiens
  siRNA target sequence for SACS (NM_014363.3,13425-13443).
gaatgtactgcctgtatca

SEQ ID NO: 284072 - DNA, 19 bp, Homo sapiens
  siRNA target sequence for SACS (NM_014363.3,13429-13447).
gtactgcctgtatcataat

SEQ ID NO: 284073 - DNA, 19 bp, Homo sapiens
  siRNA target sequence for SBDS (NM_016038.2,829-847).
ctgcttccgagaaattgat

SEQ ID NO: 284074 - DNA, 19 bp, Homo sapiens
  siRNA target sequence for SBDS (NM_016038.2,839-857).
gaaattgatgagctaataa

SEQ ID NO: 284075 - DNA, 19 bp, Homo sapiens
  siRNA target sequence for SBDS (NM_016038.2,882-900).
ctttggaagtactcaatct

SEQ ID NO: 284076 - DNA, 19 bp, Homo sapiens
  siRNA target sequence for SCA7 (NM_000333.1,1276-1294).
catcccattcagcaaagta

SEQ ID NO: 284077 - DNA, 19 bp, Homo sapiens
  siRNA target sequence for SCA7 (NM_000333.1,1341-1359).
gattcatccgaaaatggat

SEQ ID NO: 284078 - DNA, 19 bp, Homo sapiens
  siRNA target sequence for SCA7 (NM_000333.1,1356-1374).
ggatggcacactactgaaa

SEQ ID NO: 284079 - DNA, 19 bp, Homo sapiens
  siRNA target sequence for SCA7 (NM_000333.1,1417-1435).
gtcaagcctggccttaact

SEQ ID NO: 284080 - DNA, 19 bp, Homo sapiens
  siRNA target sequence for SCA7 (NM_000333.1,1428-1446).
ccttaactgcccctcaata

SEQ ID NO: 284081 - DNA, 19 bp, Homo sapiens
  siRNA target sequence for SCA7 (NM_000333.1,1505-1523).
cgcccactctggaaaagaa

SEQ ID NO: 284082 - DNA, 19 bp, Homo sapiens
  siRNA target sequence for SCA7 (NM_000333.1,1533-1551).
caattccaataataggaaa

SEQ ID NO: 284083 - DNA, 19 bp, Homo sapiens
  siRNA target sequence for SCA7 (NM_000333.1,1846-1864).
cctcacggagtgattcctt

SEQ ID NO: 284084 - DNA, 19 bp, Homo sapiens
  siRNA target sequence for SCA7 (NM_000333.1,1855-1873).
gtgattccttccgaatcaa

SEQ ID NO: 284085 - DNA, 19 bp, Homo sapiens
  siRNA target sequence for SCA7 (NM_000333.1,1875-1893).
gccttttgtagctagtaaa

SEQ ID NO: 284086 - DNA, 19 bp, Homo sapiens
  siRNA target sequence for SCA7 (NM_000333.1,2017-2035).
ccagcttctcggttatcca

SEQ ID NO: 284087 - DNA, 19 bp, Homo sapiens
  siRNA target sequence for SCA7 (NM_000333.1,2043-2061).
gggcgaaggcgatgacaaa

SEQ ID NO: 284088 - DNA, 19 bp, Homo sapiens
  siRNA target sequence for SCA7 (NM_000333.1,2046-2064).
cgaaggcgatgacaaagaa

SEQ ID NO: 284089 - DNA, 19 bp, Homo sapiens
  siRNA target sequence for SCA7 (NM_000333.1,2134-2152).
gggagccggcagataggaa

SEQ ID NO: 284090 - DNA, 19 bp, Homo sapiens
  siRNA target sequence for SCA7 (NM_000333.1,2155-2173).
ggctattacgtgtttgact

SEQ ID NO: 284091 - DNA, 19 bp, Homo sapiens
  siRNA target sequence for SCA7 (NM_000333.1,2368-2386).
ccagtcctgctctcatcta

SEQ ID NO: 284092 - DNA, 19 bp, Homo sapiens
  siRNA target sequence for SCA7 (NM_000333.1,2419-2437).
gctcatggaaccacactaa

SEQ ID NO: 284093 - DNA, 19 bp, Homo sapiens
  siRNA target sequence for SCA7 (NM_000333.1,2420-2438).
ctcatggaaccacactaaa

SEQ ID NO: 284094 - DNA, 19 bp, Homo sapiens
  siRNA target sequence for SCA7 (NM_000333.1,2564-2582).
ccaggaaacctcagaaatt

SEQ ID NO: 284095 - DNA, 19 bp, Homo sapiens
  siRNA target sequence for SCA7 (NM_000333.1,2833-2851).
ctcaactgtgtgacgaata

SEQ ID NO: 284096 - DNA, 19 bp, Homo sapiens
  siRNA target sequence for SCA7 (NM_000333.1,2838-2856).
ctgtgtgacgaataaagca

SEQ ID NO: 284097 - DNA, 19 bp, Homo sapiens
  siRNA target sequence for SCA7 (NM_000333.1,2911-2929).
cctgctgaatccatcaaga

SEQ ID NO: 284098 - DNA, 19 bp, Homo sapiens
  siRNA target sequence for SCA7 (NM_000333.1,2946-2964).
gaacagcagtgattctact

SEQ ID NO: 284099 - DNA, 19 bp, Homo sapiens
  siRNA target sequence for SCA7 (NM_000333.1,3009-3027).
caactcccacggcagtttt

SEQ ID NO: 284100 - DNA, 19 bp, Homo sapiens
  siRNA target sequence for SCA7 (NM_000333.1,3046-3064).
ctagacaaactcataggaa

SEQ ID NO: 284101 - DNA, 19 bp, Homo sapiens
  siRNA target sequence for SCA7 (NM_000333.1,3086-3104).
gctcgagcagcatcaacaa

SEQ ID NO: 284102 - DNA, 19 bp, Homo sapiens
  siRNA target sequence for SCHIP1 (NM_014575.1,78-96).
gtccgggcagcgtgttaca

SEQ ID NO: 284103 - DNA, 19 bp, Homo sapiens
  siRNA target sequence for SCHIP1 (NM_014575.1,229-247).
ccttgctccgagtgcaaat

SEQ ID NO: 284104 - DNA, 19 bp, Homo sapiens
  siRNA target sequence for SCHIP1 (NM_014575.1,721-739).
ccggtgccacctatggatt

SEQ ID NO: 284105 - DNA, 19 bp, Homo sapiens
  siRNA target sequence for SCHIP1 (NM_014575.1,889-907).
gatggcccaggaatttata

SEQ ID NO: 284106 - DNA, 19 bp, Homo sapiens
  siRNA target sequence for SCHIP1 (NM_014575.1,1245-1263).
gtctcccgtcgctgatctt

SEQ ID NO: 284107 - DNA, 19 bp, Homo sapiens
  siRNA target sequence for SCHIP1 (NM_014575.1,1272-1290).
catgcctcatataagtgaa

SEQ ID NO: 284108 - DNA, 19 bp, Homo sapiens
  siRNA target sequence for SCHIP1 (NM_014575.1,1321-1339).
gacctgagagacatgacta

SEQ ID NO: 284109 - DNA, 19 bp, Homo sapiens
  siRNA target sequence for SCHIP1 (NM_014575.1,1337-1355).
ctattgggcagctacaagt

SEQ ID NO: 284110 - DNA, 19 bp, Homo sapiens
  siRNA target sequence for SCHIP1 (NM_014575.1,1345-1363).
cagctacaagtgatagtca

SEQ ID NO: 284111 - DNA, 19 bp, Homo sapiens
  siRNA target sequence for SCHIP1 (NM_014575.1,1347-1365).
gctacaagtgatagtcaat

SEQ ID NO: 284112 - DNA, 19 bp, Homo sapiens
  siRNA target sequence for SCHIP1 (NM_014575.1,1369-1387).
ctccattcccagatagaaa

SEQ ID NO: 284113 - DNA, 19 bp, Homo sapiens
  siRNA target sequence for SCHIP1 (NM_014575.1,1377-1395).
ccagatagaaagcttgaat

SEQ ID NO: 284114 - DNA, 19 bp, Homo sapiens
  siRNA target sequence for SCHIP1 (NM_014575.1,1476-1494).
gaccagacatgctgaaagt

SEQ ID NO: 284115 - DNA, 19 bp, Homo sapiens
  siRNA target sequence for SEL1L (NM_005065.3,129-147).
ccaggatgaatccttagat

SEQ ID NO: 284116 - DNA, 19 bp, Homo sapiens
  siRNA target sequence for SEL1L (NM_005065.3,130-148).
caggatgaatccttagatt

SEQ ID NO: 284117 - DNA, 19 bp, Homo sapiens
  siRNA target sequence for SEL1L (NM_005065.3,145-163).
gattccaagactactttga

SEQ ID NO: 284118 - DNA, 19 bp, Homo sapiens
  siRNA target sequence for SEL1L (NM_005065.3,153-171).
gactactttgacatcagat

SEQ ID NO: 284119 - DNA, 19 bp, Homo sapiens
  siRNA target sequence for SEL1L (NM_005065.3,164-182).
catcagatgagtcagtaaa

SEQ ID NO: 284120 - DNA, 19 bp, Homo sapiens
  siRNA target sequence for SEL1L (NM_005065.3,203-221).
gagtagttgctggtcaaat

SEQ ID NO: 284121 - DNA, 19 bp, Homo sapiens
  siRNA target sequence for SEL1L (NM_005065.3,456-474).
gtatgatgaatgtacatca

SEQ ID NO: 284122 - DNA, 19 bp, Homo sapiens
  siRNA target sequence for SEL1L (NM_005065.3,503-521).
gtgctacaacctatgacta

SEQ ID NO: 284123 - DNA, 19 bp, Homo sapiens
  siRNA target sequence for SEL1L (NM_005065.3,506-524).
ctacaacctatgactacaa

SEQ ID NO: 284124 - DNA, 19 bp, Homo sapiens
  siRNA target sequence for SEL1L (NM_005065.3,537-555).
gtggggcttttgtgaaact

SEQ ID NO: 284125 - DNA, 19 bp, Homo sapiens
  siRNA target sequence for SEL1L (NM_005065.3,647-665).
gccaaaaaagagaagcata

SEQ ID NO: 284126 - DNA, 19 bp, Homo sapiens
  siRNA target sequence for SEL1L (NM_005065.3,662-680).
catatcggtatctccaaaa

SEQ ID NO: 284127 - DNA, 19 bp, Homo sapiens
  siRNA target sequence for SEL1L (NM_005065.3,711-729).
ggagagagtgtcatatgct

SEQ ID NO: 284128 - DNA, 19 bp, Homo sapiens
  siRNA target sequence for SEL1L (NM_005065.3,716-734).
gagtgtcatatgctctttt

SEQ ID NO: 284129 - DNA, 19 bp, Homo sapiens
  siRNA target sequence for SEL1L (NM_005065.3,718-736).
gtgtcatatgctcttttat

SEQ ID NO: 284130 - DNA, 19 bp, Homo sapiens
  siRNA target sequence for SEL1L (NM_005065.3,720-738).
gtcatatgctcttttattt

SEQ ID NO: 284131 - DNA, 19 bp, Homo sapiens
  siRNA target sequence for SEL1L (NM_005065.3,765-783).
ggcagcgagagagatgttt

SEQ ID NO: 284132 - DNA, 19 bp, Homo sapiens
  siRNA target sequence for SEL1L (NM_005065.3,901-919).
gctcttgggggcaatctaa

SEQ ID NO: 284133 - DNA, 19 bp, Homo sapiens
  siRNA target sequence for SEL1L (NM_005065.3,902-920).
ctcttgggggcaatctaat

SEQ ID NO: 284134 - DNA, 19 bp, Homo sapiens
  siRNA target sequence for SEL1L (NM_005065.3,927-945).
catggttttgggttacaga

SEQ ID NO: 284135 - DNA, 19 bp, Homo sapiens
  siRNA target sequence for SEL1L (NM_005065.3,964-982).
gtcctccagagttgtgaat

SEQ ID NO: 284136 - DNA, 19 bp, Homo sapiens
  siRNA target sequence for SEL1L (NM_005065.3,966-984).
cctccagagttgtgaatct

SEQ ID NO: 284137 - DNA, 19 bp, Homo sapiens
  siRNA target sequence for SEL1L (NM_005065.3,990-1008).
gactcactatcgtcttgtt

SEQ ID NO: 284138 - DNA, 19 bp, Homo sapiens
  siRNA target sequence for SEL1L (NM_005065.3,1001-1019).
gtcttgttgccaatcatgt

SEQ ID NO: 284139 - DNA, 19 bp, Homo sapiens
  siRNA target sequence for SEL1L (NM_005065.3,1015-1033).
catgttgctagtgatatct

SEQ ID NO: 284140 - DNA, 19 bp, Homo sapiens
  siRNA target sequence for SEL1L (NM_005065.3,1047-1065).
ctcagtagtacagagaata

SEQ ID NO: 284141 - DNA, 19 bp, Homo sapiens
  siRNA target sequence for SEL1L (NM_005065.3,1140-1158).
gttcctagctgaaaaaggt

SEQ ID NO: 284142 - DNA, 19 bp, Homo sapiens
  siRNA target sequence for SEL1L (NM_005065.3,1148-1166).
ctgaaaaaggtgatgtaca

SEQ ID NO: 284143 - DNA, 19 bp, Homo sapiens
  siRNA target sequence for SEL1L (NM_005065.3,1200-1218).
cggagggcgtggagtagaa

SEQ ID NO: 284144 - DNA, 19 bp, Homo sapiens
  siRNA target sequence for SEL1L (NM_005065.3,1234-1252).
gcatttgactacttcaatt

SEQ ID NO: 284145 - DNA, 19 bp, Homo sapiens
  siRNA target sequence for SEL1L (NM_005065.3,1287-1305).
ctttttgggaaagatgtat

SEQ ID NO: 284146 - DNA, 19 bp, Homo sapiens
  siRNA target sequence for SEL1L (NM_005065.3,1324-1342).
gtacctcagagtaatgaga

SEQ ID NO: 284147 - DNA, 19 bp, Homo sapiens
  siRNA target sequence for SEL1L (NM_005065.3,1341-1359).
gacagctctccactacttt

SEQ ID NO: 284148 - DNA, 19 bp, Homo sapiens
  siRNA target sequence for SEL1L (NM_005065.3,1343-1361).
cagctctccactactttaa

SEQ ID NO: 284149 - DNA, 19 bp, Homo sapiens
  siRNA target sequence for SEL1L (NM_005065.3,1419-1437).
ctatgggagaggagttcaa

SEQ ID NO: 284150 - DNA, 19 bp, Homo sapiens
  siRNA target sequence for SEL1L (NM_005065.3,1424-1442).
ggagaggagttcaagttaa

SEQ ID NO: 284151 - DNA, 19 bp, Homo sapiens
  siRNA target sequence for SEL1L (NM_005065.3,1425-1443).
gagaggagttcaagttaat

SEQ ID NO: 284152 - DNA, 19 bp, Homo sapiens
  siRNA target sequence for SEL1L (NM_005065.3,1427-1445).
gaggagttcaagttaatta

SEQ ID NO: 284153 - DNA, 19 bp, Homo sapiens
  siRNA target sequence for SEL1L (NM_005065.3,1509-1527).
gcttggttccatgtactat

SEQ ID NO: 284154 - DNA, 19 bp, Homo sapiens
  siRNA target sequence for SEL1L (NM_005065.3,1510-1528).
cttggttccatgtactata

SEQ ID NO: 284155 - DNA, 19 bp, Homo sapiens
  siRNA target sequence for SEL1L (NM_005065.3,1537-1555).
ggagtcaagagagattata

SEQ ID NO: 284156 - DNA, 19 bp, Homo sapiens
  siRNA target sequence for SEL1L (NM_005065.3,1595-1613).
gccatatcttggctttcta

SEQ ID NO: 284157 - DNA, 19 bp, Homo sapiens
  siRNA target sequence for SEL1L (NM_005065.3,1644-1662).
cggcgtgatgcgatcatgt

SEQ ID NO: 284158 - DNA, 19 bp, Homo sapiens
  siRNA target sequence for SEL1L (NM_005065.3,1674-1692).
ggagttgtttaagaatgta

SEQ ID NO: 284159 - DNA, 19 bp, Homo sapiens
  siRNA target sequence for SEL1L (NM_005065.3,1677-1695).
gttgtttaagaatgtatgt

SEQ ID NO: 284160 - DNA, 19 bp, Homo sapiens
  siRNA target sequence for SEL1L (NM_005065.3,1699-1717).
cgaggccgttggtctgaaa

SEQ ID NO: 284161 - DNA, 19 bp, Homo sapiens
  siRNA target sequence for SEL1L (NM_005065.3,1710-1728).
gtctgaaaggcttatgact

SEQ ID NO: 284162 - DNA, 19 bp, Homo sapiens
  siRNA target sequence for SEL1L (NM_005065.3,1720-1738).
cttatgactgcctataaca

SEQ ID NO: 284163 - DNA, 19 bp, Homo sapiens
  siRNA target sequence for SEL1L (NM_005065.3,1731-1749).
ctataacagctataaagat

SEQ ID NO: 284164 - DNA, 19 bp, Homo sapiens
  siRNA target sequence for SEL1L (NM_005065.3,1788-1806).
ggctgaacagggctatgaa

SEQ ID NO: 284165 - DNA, 19 bp, Homo sapiens
  siRNA target sequence for SEL1L (NM_005065.3,1858-1876).
gtaggtgagaatgaaactt

SEQ ID NO: 284166 - DNA, 19 bp, Homo sapiens
  siRNA target sequence for SEL1L (NM_005065.3,1910-1928).
cctctcaaggctatactgt

SEQ ID NO: 284167 - DNA, 19 bp, Homo sapiens
  siRNA target sequence for SEL1L (NM_005065.3,1920-1938).
ctatactgtggctagaatt

SEQ ID NO: 284168 - DNA, 19 bp, Homo sapiens
  siRNA target sequence for SEL1L (NM_005065.3,1925-1943).
ctgtggctagaattaagct

SEQ ID NO: 284169 - DNA, 19 bp, Homo sapiens
  siRNA target sequence for SEL1L (NM_005065.3,1964-1982).
ggtttggcaccgatgtaga

SEQ ID NO: 284170 - DNA, 19 bp, Homo sapiens
  siRNA target sequence for SEL1L (NM_005065.3,1965-1983).
gtttggcaccgatgtagat

SEQ ID NO: 284171 - DNA, 19 bp, Homo sapiens
  siRNA target sequence for SEL1L (NM_005065.3,1974-1992).
cgatgtagattatgaaact

SEQ ID NO: 284172 - DNA, 19 bp, Homo sapiens
  siRNA target sequence for SEL1L (NM_005065.3,2033-2051).
gtgcacaagctatgtttaa

SEQ ID NO: 284173 - DNA, 19 bp, Homo sapiens
  siRNA target sequence for SEL1L (NM_005065.3,2036-2054).
cacaagctatgtttaatct

SEQ ID NO: 284174 - DNA, 19 bp, Homo sapiens
  siRNA target sequence for SEL1L (NM_005065.3,2079-2097).
gggcattaaacaggatatt

SEQ ID NO: 284175 - DNA, 19 bp, Homo sapiens
  siRNA target sequence for SEL1L (NM_005065.3,2098-2116).
caccttgcgaaacgttttt

SEQ ID NO: 284176 - DNA, 19 bp, Homo sapiens
  siRNA target sequence for SEL1L (NM_005065.3,2104-2122).
gcgaaacgtttttatgaca

SEQ ID NO: 284177 - DNA, 19 bp, Homo sapiens
  siRNA target sequence for SEL1L (NM_005065.3,2105-2123).
cgaaacgtttttatgacat

SEQ ID NO: 284178 - DNA, 19 bp, Homo sapiens
  siRNA target sequence for SEL1L (NM_005065.3,2136-2154).
cagcccagatgcacaagtt

SEQ ID NO: 284179 - DNA, 19 bp, Homo sapiens
  siRNA target sequence for SEL1L (NM_005065.3,2216-2234).
caaacattcgagatatgtt

SEQ ID NO: 284180 - DNA, 19 bp, Homo sapiens
  siRNA target sequence for SEL1L (NM_005065.3,2264-2282).
gacctgagtgggaccttta

SEQ ID NO: 284181 - DNA, 19 bp, Homo sapiens
  siRNA target sequence for SEL1L (NM_005065.3,2304-2322).
gctgttgggaacagtcata

SEQ ID NO: 284182 - DNA, 19 bp, Homo sapiens
  siRNA target sequence for SEPX1 (NM_016332.1,267-285).
gcgtccggagcacaataga

SEQ ID NO: 284183 - DNA, 19 bp, Homo sapiens
  siRNA target sequence for SEPX1 (NM_016332.1,268-286).
cgtccggagcacaatagat

SEQ ID NO: 284184 - DNA, 19 bp, Homo sapiens
  siRNA target sequence for SEPX1 (NM_016332.1,365-383).
ggcagtcccgattctgaat

SEQ ID NO: 284185 - DNA, 19 bp, Homo sapiens
  siRNA target sequence for SEPX1 (NM_016332.1,366-384).
gcagtcccgattctgaata

SEQ ID NO: 284186 - DNA, 19 bp, Homo sapiens
  siRNA target sequence for SEPX1 (NM_016332.1,389-407).
gcagctcgctgaagtttgt

SEQ ID NO: 284187 - DNA, 19 bp, Homo sapiens
  siRNA target sequence for Shax3 (NM_152284.2,184-202).
caagttgggcaagttcttt

SEQ ID NO: 284188 - DNA, 19 bp, Homo sapiens
  siRNA target sequence for Shax3 (NM_152284.2,299-317).
gagtacctggaaaatcgaa

SEQ ID NO: 284189 - DNA, 19 bp, Homo sapiens
  siRNA target sequence for Shax3 (NM_152284.2,371-389).
gcattacaggcactaaaga

SEQ ID NO: 284190 - DNA, 19 bp, Homo sapiens
  siRNA target sequence for Shax3 (NM_152284.2,421-439).
gattgatggcacactttct

SEQ ID NO: 284191 - DNA, 19 bp, Homo sapiens
  siRNA target sequence for Shax3 (NM_152284.2,522-540).
cgatgaaatctgttcatga

SEQ ID NO: 284192 - DNA, 19 bp, Homo sapiens
  siRNA target sequence for Shax3 (NM_152284.2,593-611).
caggatatcgcccaagaaa

SEQ ID NO: 284193 - DNA, 19 bp, Homo sapiens
  siRNA target sequence for Shax3 (NM_152284.2,596-614).
gatatcgcccaagaaatct

SEQ ID NO: 284194 - DNA, 19 bp, Homo sapiens
  siRNA target sequence for Shax3 (NM_152284.2,755-773).
ctcccagcacagccaaata

SEQ ID NO: 284195 - DNA, 19 bp, Homo sapiens
  siRNA target sequence for SHFM1 (NM_006304.1,149-167).
ggtagacttaggtctgtta

SEQ ID NO: 284196 - DNA, 19 bp, Homo sapiens
  siRNA target sequence for SHFM1 (NM_006304.1,206-224).
ctgggctggcttagatgaa

SEQ ID NO: 284197 - DNA, 19 bp, Homo sapiens
  siRNA target sequence for SHFM1 (NM_006304.1,209-227).
ggctggcttagatgaagat

SEQ ID NO: 284198 - DNA, 19 bp, Homo sapiens
  siRNA target sequence for SHFM1 (NM_006304.1,306-324).
ctagagaaacatggttata

SEQ ID NO: 284199 - DNA, 19 bp, Homo sapiens
  siRNA target sequence for SHFM3 (NM_022039.2,1166-1184).
gggaagattggcattcata

SEQ ID NO: 284200 - DNA, 19 bp, Homo sapiens
  siRNA target sequence for SHFM3 (NM_022039.2,1684-1702).
ctcctactacggtgttgta

SEQ ID NO: 284201 - DNA, 19 bp, Homo sapiens
  siRNA target sequence for SHOC2 (NM_007373.1,469-487).
ggcattttcagttgacaat

SEQ ID NO: 284202 - DNA, 19 bp, Homo sapiens
  siRNA target sequence for SHOC2 (NM_007373.1,509-527).
gcacctgggactagaaaaa

SEQ ID NO: 284203 - DNA, 19 bp, Homo sapiens
  siRNA target sequence for SHOC2 (NM_007373.1,562-580).
caaatgccgggaagagaat

SEQ ID NO: 284204 - DNA, 19 bp, Homo sapiens
  siRNA target sequence for SHOC2 (NM_007373.1,567-585).
gccgggaagagaattcaat

SEQ ID NO: 284205 - DNA, 19 bp, Homo sapiens
  siRNA target sequence for SHOC2 (NM_007373.1,600-618).
ccaagagatctatacacat

SEQ ID NO: 284206 - DNA, 19 bp, Homo sapiens
  siRNA target sequence for SHOC2 (NM_007373.1,601-619).
caagagatctatacacata

SEQ ID NO: 284207 - DNA, 19 bp, Homo sapiens
  siRNA target sequence for SHOC2 (NM_007373.1,634-652).
caaagagttgactcaatta

SEQ ID NO: 284208 - DNA, 19 bp, Homo sapiens
  siRNA target sequence for SHOC2 (NM_007373.1,647-665).
caattaacagaactttatt

SEQ ID NO: 284209 - DNA, 19 bp, Homo sapiens
  siRNA target sequence for SHOC2 (NM_007373.1,721-739).
catgacactggctctaagt

SEQ ID NO: 284210 - DNA, 19 bp, Homo sapiens
  siRNA target sequence for SHOC2 (NM_007373.1,730-748).
ggctctaagtgaaaattca

SEQ ID NO: 284211 - DNA, 19 bp, Homo sapiens
  siRNA target sequence for SHOC2 (NM_007373.1,734-752).
ctaagtgaaaattcactta

SEQ ID NO: 284212 - DNA, 19 bp, Homo sapiens
  siRNA target sequence for SHOC2 (NM_007373.1,761-779).
cctgactctcttgataact

SEQ ID NO: 284213 - DNA, 19 bp, Homo sapiens
  siRNA target sequence for SHOC2 (NM_007373.1,762-780).
ctgactctcttgataactt

SEQ ID NO: 284214 - DNA, 19 bp, Homo sapiens
  siRNA target sequence for SHOC2 (NM_007373.1,796-814).
gcttgatttacggcataat

SEQ ID NO: 284215 - DNA, 19 bp, Homo sapiens
  siRNA target sequence for SHOC2 (NM_007373.1,797-815).
cttgatttacggcataata

SEQ ID NO: 284216 - DNA, 19 bp, Homo sapiens
  siRNA target sequence for SHOC2 (NM_007373.1,864-882).
ctctttaccttcgctttaa

SEQ ID NO: 284217 - DNA, 19 bp, Homo sapiens
  siRNA target sequence for SHOC2 (NM_007373.1,871-889).
ccttcgctttaatcgtata

SEQ ID NO: 284218 - DNA, 19 bp, Homo sapiens
  siRNA target sequence for SHOC2 (NM_007373.1,872-890).
cttcgctttaatcgtataa

SEQ ID NO: 284219 - DNA, 19 bp, Homo sapiens
  siRNA target sequence for SHOC2 (NM_007373.1,875-893).
cgctttaatcgtataacta

SEQ ID NO: 284220 - DNA, 19 bp, Homo sapiens
  siRNA target sequence for SHOC2 (NM_007373.1,877-895).
ctttaatcgtataactact

SEQ ID NO: 284221 - DNA, 19 bp, Homo sapiens
  siRNA target sequence for SHOC2 (NM_007373.1,939-957).
gcattcgagagaacaaaat

SEQ ID NO: 284222 - DNA, 19 bp, Homo sapiens
  siRNA target sequence for SHOC2 (NM_007373.1,940-958).
cattcgagagaacaaaatt

SEQ ID NO: 284223 - DNA, 19 bp, Homo sapiens
  siRNA target sequence for SHOC2 (NM_007373.1,1006-1024).
ggatgtagctcacaatcaa

SEQ ID NO: 284224 - DNA, 19 bp, Homo sapiens
  siRNA target sequence for SHOC2 (NM_007373.1,1096-1114).
gctagacctcccagatact

SEQ ID NO: 284225 - DNA, 19 bp, Homo sapiens
  siRNA target sequence for SHOC2 (NM_007373.1,1102-1120).
cctcccagatactatagga

SEQ ID NO: 284226 - DNA, 19 bp, Homo sapiens
  siRNA target sequence for SHOC2 (NM_007373.1,1103-1121).
ctcccagatactataggaa

SEQ ID NO: 284227 - DNA, 19 bp, Homo sapiens
  siRNA target sequence for SHOC2 (NM_007373.1,1139-1157).
cgtcttggtctgagatata

SEQ ID NO: 284228 - DNA, 19 bp, Homo sapiens
  siRNA target sequence for SHOC2 (NM_007373.1,1140-1158).
gtcttggtctgagatataa

SEQ ID NO: 284229 - DNA, 19 bp, Homo sapiens
  siRNA target sequence for SHOC2 (NM_007373.1,1195-1213).
cagtgcacttgaagaatta

SEQ ID NO: 284230 - DNA, 19 bp, Homo sapiens
  siRNA target sequence for SHOC2 (NM_007373.1,1239-1257).
ctttaccagagagtctttt

SEQ ID NO: 284231 - DNA, 19 bp, Homo sapiens
  siRNA target sequence for SHOC2 (NM_007373.1,1281-1299).
gtttgaccttagctagaaa

SEQ ID NO: 284232 - DNA, 19 bp, Homo sapiens
  siRNA target sequence for SHOC2 (NM_007373.1,1344-1362).
ccatctattccctcaacat

SEQ ID NO: 284233 - DNA, 19 bp, Homo sapiens
  siRNA target sequence for SHOC2 (NM_007373.1,1364-1382).
gaacacaatcgaatcaaca

SEQ ID NO: 284234 - DNA, 19 bp, Homo sapiens
  siRNA target sequence for SHOC2 (NM_007373.1,1369-1387).
caatcgaatcaacaaaatt

SEQ ID NO: 284235 - DNA, 19 bp, Homo sapiens
  siRNA target sequence for SHOC2 (NM_007373.1,1373-1391).
cgaatcaacaaaattccat

SEQ ID NO: 284236 - DNA, 19 bp, Homo sapiens
  siRNA target sequence for SHOC2 (NM_007373.1,1415-1433).
gtattaagtaagctgaata

SEQ ID NO: 284237 - DNA, 19 bp, Homo sapiens
  siRNA target sequence for SHOC2 (NM_007373.1,1435-1453).
gaaggacaatcagttaaca

SEQ ID NO: 284238 - DNA, 19 bp, Homo sapiens
  siRNA target sequence for SHOC2 (NM_007373.1,1438-1456).
ggacaatcagttaacatca

SEQ ID NO: 284239 - DNA, 19 bp, Homo sapiens
  siRNA target sequence for SHOC2 (NM_007373.1,1452-1470).
catcacttcccttggattt

SEQ ID NO: 284240 - DNA, 19 bp, Homo sapiens
  siRNA target sequence for SHOC2 (NM_007373.1,1479-1497).
ggaccagtatggtagaatt

SEQ ID NO: 284241 - DNA, 19 bp, Homo sapiens
  siRNA target sequence for SHOC2 (NM_007373.1,1540-1558).
gtctggtctcgtttctctt

SEQ ID NO: 284242 - DNA, 19 bp, Homo sapiens
  siRNA target sequence for SHOC2 (NM_007373.1,1554-1572).
ctcttgaggttcttatctt

SEQ ID NO: 284243 - DNA, 19 bp, Homo sapiens
  siRNA target sequence for SHOC2 (NM_007373.1,1559-1577).
gaggttcttatcttatcaa

SEQ ID NO: 284244 - DNA, 19 bp, Homo sapiens
  siRNA target sequence for SHOC2 (NM_007373.1,1570-1588).
cttatcaaacaatcttcta

SEQ ID NO: 284245 - DNA, 19 bp, Homo sapiens
  siRNA target sequence for SHOC2 (NM_007373.1,1680-1698).
catatcttaaggatttaca

SEQ ID NO: 284246 - DNA, 19 bp, Homo sapiens
  siRNA target sequence for SHOC2 (NM_007373.1,1697-1715).
cagaaattagtcttgacaa

SEQ ID NO: 284247 - DNA, 19 bp, Homo sapiens
  siRNA target sequence for SHOC2 (NM_007373.1,1742-1760).
ggcattggtcaccttacta

SEQ ID NO: 284248 - DNA, 19 bp, Homo sapiens
  siRNA target sequence for SHOC2 (NM_007373.1,1743-1761).
gcattggtcaccttactaa

SEQ ID NO: 284249 - DNA, 19 bp, Homo sapiens
  siRNA target sequence for SHOC2 (NM_007373.1,1744-1762).
cattggtcaccttactaat

SEQ ID NO: 284250 - DNA, 19 bp, Homo sapiens
  siRNA target sequence for SHOC2 (NM_007373.1,1778-1796).
cttggagagaacctactta

SEQ ID NO: 284251 - DNA, 19 bp, Homo sapiens
  siRNA target sequence for SHOC2 (NM_007373.1,1996-2014).
gatgcagggtccatatcgt

SEQ ID NO: 284252 - DNA, 19 bp, Homo sapiens
  siRNA target sequence for SIPA1L1 (NM_015556.1,459-477).
gcgcttccggtcccaaaat

SEQ ID NO: 284253 - DNA, 19 bp, Homo sapiens
  siRNA target sequence for SIPA1L1 (NM_015556.1,472-490).
caaaatggcagcttaggat

SEQ ID NO: 284254 - DNA, 19 bp, Homo sapiens
  siRNA target sequence for SIPA1L1 (NM_015556.1,529-547).
ggttctcaccatataacct

SEQ ID NO: 284255 - DNA, 19 bp, Homo sapiens
  siRNA target sequence for SIPA1L1 (NM_015556.1,570-588).
gggggtaagggcaaggatt

SEQ ID NO: 284256 - DNA, 19 bp, Homo sapiens
  siRNA target sequence for SIPA1L1 (NM_015556.1,599-617).
ccccaagaaaggaaaacat

SEQ ID NO: 284257 - DNA, 19 bp, Homo sapiens
  siRNA target sequence for SIPA1L1 (NM_015556.1,600-618).
cccaagaaaggaaaacata

SEQ ID NO: 284258 - DNA, 19 bp, Homo sapiens
  siRNA target sequence for SIPA1L1 (NM_015556.1,629-647).
gccgttcaagccaggaaat

SEQ ID NO: 284259 - DNA, 19 bp, Homo sapiens
  siRNA target sequence for SIPA1L1 (NM_015556.1,630-648).
ccgttcaagccaggaaata

SEQ ID NO: 284260 - DNA, 19 bp, Homo sapiens
  siRNA target sequence for SIPA1L1 (NM_015556.1,632-650).
gttcaagccaggaaataga

SEQ ID NO: 284261 - DNA, 19 bp, Homo sapiens
  siRNA target sequence for SIPA1L1 (NM_015556.1,696-714).
gagtcagggaagttctgtt

SEQ ID NO: 284262 - DNA, 19 bp, Homo sapiens
  siRNA target sequence for SIPA1L1 (NM_015556.1,710-728).
ctgttagcctcaattccaa

SEQ ID NO: 284263 - DNA, 19 bp, Homo sapiens
  siRNA target sequence for SIPA1L1 (NM_015556.1,862-880).
cagcgaagcaacagtgata

SEQ ID NO: 284264 - DNA, 19 bp, Homo sapiens
  siRNA target sequence for SIPA1L1 (NM_015556.1,882-900).
caccataagtgaacttgat

SEQ ID NO: 284265 - DNA, 19 bp, Homo sapiens
  siRNA target sequence for SIPA1L1 (NM_015556.1,952-970).
ctgcacagggaatatggta

SEQ ID NO: 284266 - DNA, 19 bp, Homo sapiens
  siRNA target sequence for SIPA1L1 (NM_015556.1,968-986).
gtagcacatcttcaattga

SEQ ID NO: 284267 - DNA, 19 bp, Homo sapiens
  siRNA target sequence for SIPA1L1 (NM_015556.1,971-989).
gcacatcttcaattgataa

SEQ ID NO: 284268 - DNA, 19 bp, Homo sapiens
  siRNA target sequence for SIPA1L1 (NM_015556.1,1023-1041).
gttaaagggctacaaagat

SEQ ID NO: 284269 - DNA, 19 bp, Homo sapiens
  siRNA target sequence for SIPA1L1 (NM_015556.1,1035-1053).
caaagatgacaaatctgat

SEQ ID NO: 284270 - DNA, 19 bp, Homo sapiens
  siRNA target sequence for SIPA1L1 (NM_015556.1,1077-1095).
cagtgactttctcattact

SEQ ID NO: 284271 - DNA, 19 bp, Homo sapiens
  siRNA target sequence for SIPA1L1 (NM_015556.1,1114-1132).
ggtttctctttggatgtaa

SEQ ID NO: 284272 - DNA, 19 bp, Homo sapiens
  siRNA target sequence for SIPA1L1 (NM_015556.1,1115-1133).
gtttctctttggatgtaat

SEQ ID NO: 284273 - DNA, 19 bp, Homo sapiens
  siRNA target sequence for SIPA1L1 (NM_015556.1,1190-1208).
cactcaagcgacgttcaaa

SEQ ID NO: 284274 - DNA, 19 bp, Homo sapiens
  siRNA target sequence for SIPA1L1 (NM_015556.1,1192-1210).
ctcaagcgacgttcaaaat

SEQ ID NO: 284275 - DNA, 19 bp, Homo sapiens
  siRNA target sequence for SIPA1L1 (NM_015556.1,1194-1212).
caagcgacgttcaaaatct

SEQ ID NO: 284276 - DNA, 19 bp, Homo sapiens
  siRNA target sequence for SIPA1L1 (NM_015556.1,1197-1215).
gcgacgttcaaaatctgaa

SEQ ID NO: 284277 - DNA, 19 bp, Homo sapiens
  siRNA target sequence for SIPA1L1 (NM_015556.1,1198-1216).
cgacgttcaaaatctgaaa

SEQ ID NO: 284278 - DNA, 19 bp, Homo sapiens
  siRNA target sequence for SIPA1L1 (NM_015556.1,1271-1289).
ggaagtcatcagatcttga

SEQ ID NO: 284279 - DNA, 19 bp, Homo sapiens
  siRNA target sequence for SIPA1L1 (NM_015556.1,1272-1290).
gaagtcatcagatcttgaa

SEQ ID NO: 284280 - DNA, 19 bp, Homo sapiens
  siRNA target sequence for SIPA1L1 (NM_015556.1,1275-1293).
gtcatcagatcttgaagat

SEQ ID NO: 284281 - DNA, 19 bp, Homo sapiens
  siRNA target sequence for SIPA1L1 (NM_015556.1,1347-1365).
ctatgatgtccagagtata

SEQ ID NO: 284282 - DNA, 19 bp, Homo sapiens
  siRNA target sequence for SIPA1L1 (NM_015556.1,1351-1369).
gatgtccagagtatattat

SEQ ID NO: 284283 - DNA, 19 bp, Homo sapiens
  siRNA target sequence for SIPA1L1 (NM_015556.1,1392-1410).
gaacaggcacaatgttatt

SEQ ID NO: 284284 - DNA, 19 bp, Homo sapiens
  siRNA target sequence for SIPA1L1 (NM_015556.1,1480-1498).
cattcagccagttttagct

SEQ ID NO: 284285 - DNA, 19 bp, Homo sapiens
  siRNA target sequence for SIPA1L1 (NM_015556.1,1519-1537).
gacctgaattccaaaggaa

SEQ ID NO: 284286 - DNA, 19 bp, Homo sapiens
  siRNA target sequence for SIPA1L1 (NM_015556.1,1548-1566).
ggaccagggagatgataaa

SEQ ID NO: 284287 - DNA, 19 bp, Homo sapiens
  siRNA target sequence for SIPA1L1 (NM_015556.1,1675-1693).
gaaagtgcctcctttgagt

SEQ ID NO: 284288 - DNA, 19 bp, Homo sapiens
  siRNA target sequence for SIPA1L1 (NM_015556.1,1758-1776).
ggtgttgcacctagataga

SEQ ID NO: 284289 - DNA, 19 bp, Homo sapiens
  siRNA target sequence for SIPA1L1 (NM_015556.1,1804-1822).
gatctgggtgcatactatt

SEQ ID NO: 284290 - DNA, 19 bp, Homo sapiens
  siRNA target sequence for SIPA1L1 (NM_015556.1,1809-1827).
gggtgcatactattataga

SEQ ID NO: 284291 - DNA, 19 bp, Homo sapiens
  siRNA target sequence for SIPA1L1 (NM_015556.1,1811-1829).
gtgcatactattatagaaa

SEQ ID NO: 284292 - DNA, 19 bp, Homo sapiens
  siRNA target sequence for SIPA1L1 (NM_015556.1,1842-1860).
gaaggaacactggaactat

SEQ ID NO: 284293 - DNA, 19 bp, Homo sapiens
  siRNA target sequence for SIPA1L1 (NM_015556.1,1888-1906).
gtggctgtgagcattcgaa

SEQ ID NO: 284294 - DNA, 19 bp, Homo sapiens
  siRNA target sequence for SIPA1L1 (NM_015556.1,1942-1960).
ccgtacaactaccgaataa

SEQ ID NO: 284295 - DNA, 19 bp, Homo sapiens
  siRNA target sequence for SIPA1L1 (NM_015556.1,1943-1961).
cgtacaactaccgaataat

SEQ ID NO: 284296 - DNA, 19 bp, Homo sapiens
  siRNA target sequence for SIPA1L1 (NM_015556.1,1953-1971).
ccgaataatttttagaact

SEQ ID NO: 284297 - DNA, 19 bp, Homo sapiens
  siRNA target sequence for SIPA1L1 (NM_015556.1,2179-2197).
cagaaagtaggcatcatgt

SEQ ID NO: 284298 - DNA, 19 bp, Homo sapiens
  siRNA target sequence for SIPA1L1 (NM_015556.1,2249-2267).
ctggcccagcctttgaaga

SEQ ID NO: 284299 - DNA, 19 bp, Homo sapiens
  siRNA target sequence for SIPA1L1 (NM_015556.1,2290-2308).
cgagttcggctcaaaggat

SEQ ID NO: 284300 - DNA, 19 bp, Homo sapiens
  siRNA target sequence for SIPA1L1 (NM_015556.1,2291-2309).
gagttcggctcaaaggatt

SEQ ID NO: 284301 - DNA, 19 bp, Homo sapiens
  siRNA target sequence for SIPA1L1 (NM_015556.1,2323-2341).
gcacagcttgataccaaaa

SEQ ID NO: 284302 - DNA, 19 bp, Homo sapiens
  siRNA target sequence for SIPA1L1 (NM_015556.1,2370-2388).
cacaacatacaaagattat

SEQ ID NO: 284303 - DNA, 19 bp, Homo sapiens
  siRNA target sequence for SIPA1L1 (NM_015556.1,2468-2486).
gaaatgatatcgtaacaat

SEQ ID NO: 284304 - DNA, 19 bp, Homo sapiens
  siRNA target sequence for SIPA1L1 (NM_015556.1,2478-2496).
cgtaacaattgttttccaa

SEQ ID NO: 284305 - DNA, 19 bp, Homo sapiens
  siRNA target sequence for SIPA1L1 (NM_015556.1,2509-2527).
cagccattcagcccaaaaa

SEQ ID NO: 284306 - DNA, 19 bp, Homo sapiens
  siRNA target sequence for SIPA1L1 (NM_015556.1,2513-2531).
cattcagcccaaaaaacat

SEQ ID NO: 284307 - DNA, 19 bp, Homo sapiens
  siRNA target sequence for SIPA1L1 (NM_015556.1,2661-2679).
ggtcactttccctaagtca

SEQ ID NO: 284308 - DNA, 19 bp, Homo sapiens
  siRNA target sequence for SIPA1L1 (NM_015556.1,2662-2680).
gtcactttccctaagtcaa

SEQ ID NO: 284309 - DNA, 19 bp, Homo sapiens
  siRNA target sequence for SIPA1L1 (NM_015556.1,2697-2715).
ccttttggcgaaagtgatt

SEQ ID NO: 284310 - DNA, 19 bp, Homo sapiens
  siRNA target sequence for SIPA1L1 (NM_015556.1,2698-2716).
cttttggcgaaagtgatta

SEQ ID NO: 284311 - DNA, 19 bp, Homo sapiens
  siRNA target sequence for SIPA1L1 (NM_015556.1,2703-2721).
ggcgaaagtgattaatgca

SEQ ID NO: 284312 - DNA, 19 bp, Homo sapiens
  siRNA target sequence for SIPA1L1 (NM_015556.1,2765-2783).
ctcggacccgccaggaata

SEQ ID NO: 284313 - DNA, 19 bp, Homo sapiens
  siRNA target sequence for SIPA1L1 (NM_015556.1,2826-2844).
cgacccttctggcaagttt

SEQ ID NO: 284314 - DNA, 19 bp, Homo sapiens
  siRNA target sequence for SIPA1L1 (NM_015556.1,2836-2854).
ggcaagtttccgttcatct

SEQ ID NO: 284315 - DNA, 19 bp, Homo sapiens
  siRNA target sequence for SIPA1L1 (NM_015556.1,2938-2956).
cgggctgaagactacaaca

SEQ ID NO: 284316 - DNA, 19 bp, Homo sapiens
  siRNA target sequence for SIPA1L1 (NM_015556.1,2939-2957).
gggctgaagactacaacaa

SEQ ID NO: 284317 - DNA, 19 bp, Homo sapiens
  siRNA target sequence for SIPA1L1 (NM_015556.1,3023-3041).
caaagagcgtggtcttcaa

SEQ ID NO: 284318 - DNA, 19 bp, Homo sapiens
  siRNA target sequence for SIPA1L1 (NM_015556.1,3027-3045).
gagcgtggtcttcaattgt

SEQ ID NO: 284319 - DNA, 19 bp, Homo sapiens
  siRNA target sequence for SIPA1L1 (NM_015556.1,3039-3057).
caattgttcctgtagagat

SEQ ID NO: 284320 - DNA, 19 bp, Homo sapiens
  siRNA target sequence for SIPA1L1 (NM_015556.1,3060-3078).
gatagggtggacttcaact

SEQ ID NO: 284321 - DNA, 19 bp, Homo sapiens
  siRNA target sequence for SIPA1L1 (NM_015556.1,3086-3104).
gcctcaaaatcttctatga

SEQ ID NO: 284322 - DNA, 19 bp, Homo sapiens
  siRNA target sequence for SIPA1L1 (NM_015556.1,3099-3117).
ctatgaacgaggagaatgt

SEQ ID NO: 284323 - DNA, 19 bp, Homo sapiens
  siRNA target sequence for SIPA1L1 (NM_015556.1,3116-3134).
gtgtttcagtgggtagttt

SEQ ID NO: 284324 - DNA, 19 bp, Homo sapiens
  siRNA target sequence for SIPA1L1 (NM_015556.1,3124-3142).
gtgggtagttttattaaca

SEQ ID NO: 284325 - DNA, 19 bp, Homo sapiens
  siRNA target sequence for SIPA1L1 (NM_015556.1,3150-3168).
gatcaaagagattgtcaaa

SEQ ID NO: 284326 - DNA, 19 bp, Homo sapiens
  siRNA target sequence for SIPA1L1 (NM_015556.1,3207-3225).
gatgactctgcgaagaaat

SEQ ID NO: 284327 - DNA, 19 bp, Homo sapiens
  siRNA target sequence for SIPA1L1 (NM_015556.1,3405-3423).
ggtgaaggttgtcatcatt

SEQ ID NO: 284328 - DNA, 19 bp, Homo sapiens
  siRNA target sequence for SIPA1L1 (NM_015556.1,3502-3520).
gaaggtgtttcatacgaat

SEQ ID NO: 284329 - DNA, 19 bp, Homo sapiens
  siRNA target sequence for SIPA1L1 (NM_015556.1,3508-3526).
gtttcatacgaattcaagt

SEQ ID NO: 284330 - DNA, 19 bp, Homo sapiens
  siRNA target sequence for SIPA1L1 (NM_015556.1,3530-3548).
ccttccgaaataataacaa

SEQ ID NO: 284331 - DNA, 19 bp, Homo sapiens
  siRNA target sequence for SIPA1L1 (NM_015556.1,3728-3746).
ctcctggttcggacatcta

SEQ ID NO: 284332 - DNA, 19 bp, Homo sapiens
  siRNA target sequence for SIPA1L1 (NM_015556.1,3731-3749).
ctggttcggacatctatgt

SEQ ID NO: 284333 - DNA, 19 bp, Homo sapiens
  siRNA target sequence for SIPA1L1 (NM_015556.1,3733-3751).
ggttcggacatctatgtga

SEQ ID NO: 284334 - DNA, 19 bp, Homo sapiens
  siRNA target sequence for SIPA1L1 (NM_015556.1,3796-3814).
cctagcaacttgtcttcat

SEQ ID NO: 284335 - DNA, 19 bp, Homo sapiens
  siRNA target sequence for SIPA1L1 (NM_015556.1,3807-3825).
gtcttcatccagtgatact

SEQ ID NO: 284336 - DNA, 19 bp, Homo sapiens
  siRNA target sequence for SIPA1L1 (NM_015556.1,3985-4003).
gaccagatggcttacagtt

SEQ ID NO: 284337 - DNA, 19 bp, Homo sapiens
  siRNA target sequence for SIPA1L1 (NM_015556.1,3988-4006).
cagatggcttacagttata

SEQ ID NO: 284338 - DNA, 19 bp, Homo sapiens
  siRNA target sequence for SIPA1L1 (NM_015556.1,4036-4054).
ctcgagcagcatgaatata

SEQ ID NO: 284339 - DNA, 19 bp, Homo sapiens
  siRNA target sequence for SIPA1L1 (NM_015556.1,4038-4056).
cgagcagcatgaatataca

SEQ ID NO: 284340 - DNA, 19 bp, Homo sapiens
  siRNA target sequence for SIPA1L1 (NM_015556.1,4069-4087).
catctcccagcagtatcaa

SEQ ID NO: 284341 - DNA, 19 bp, Homo sapiens
  siRNA target sequence for SIPA1L1 (NM_015556.1,4074-4092).
cccagcagtatcaaaggta

SEQ ID NO: 284342 - DNA, 19 bp, Homo sapiens
  siRNA target sequence for SIPA1L1 (NM_015556.1,4112-4130).
gccccagtgggagattaat

SEQ ID NO: 284343 - DNA, 19 bp, Homo sapiens
  siRNA target sequence for SIPA1L1 (NM_015556.1,4138-4156).
gatccagtggttcatttgt

SEQ ID NO: 284344 - DNA, 19 bp, Homo sapiens
  siRNA target sequence for SIPA1L1 (NM_015556.1,4164-4182).
caaacaagggcattctgat

SEQ ID NO: 284345 - DNA, 19 bp, Homo sapiens
  siRNA target sequence for SIPA1L1 (NM_015556.1,4229-4247).
cgtcaagtgcccatagtga

SEQ ID NO: 284346 - DNA, 19 bp, Homo sapiens
  siRNA target sequence for SIPA1L1 (NM_015556.1,4261-4279).
gatggggaccgcacagaat

SEQ ID NO: 284347 - DNA, 19 bp, Homo sapiens
  siRNA target sequence for SIPA1L1 (NM_015556.1,4280-4298).
ccgaactcaacagctataa

SEQ ID NO: 284348 - DNA, 19 bp, Homo sapiens
  siRNA target sequence for SIPA1L1 (NM_015556.1,4282-4300).
gaactcaacagctataact

SEQ ID NO: 284349 - DNA, 19 bp, Homo sapiens
  siRNA target sequence for SIPA1L1 (NM_015556.1,4494-4512).
cggcctggaccggaaaaca

SEQ ID NO: 284350 - DNA, 19 bp, Homo sapiens
  siRNA target sequence for SIPA1L1 (NM_015556.1,4583-4601).
gcaccttcagtataaacga

SEQ ID NO: 284351 - DNA, 19 bp, Homo sapiens
  siRNA target sequence for SIPA1L1 (NM_015556.1,4584-4602).
caccttcagtataaacgat

SEQ ID NO: 284352 - DNA, 19 bp, Homo sapiens
  siRNA target sequence for SIPA1L1 (NM_015556.1,4603-4621).
gctgcttcccacacaagta

SEQ ID NO: 284353 - DNA, 19 bp, Homo sapiens
  siRNA target sequence for SIPA1L1 (NM_015556.1,4667-4685).
cccggagttcacctaaaga

SEQ ID NO: 284354 - DNA, 19 bp, Homo sapiens
  siRNA target sequence for SIPA1L1 (NM_015556.1,4668-4686).
ccggagttcacctaaagaa

SEQ ID NO: 284355 - DNA, 19 bp, Homo sapiens
  siRNA target sequence for SIPA1L1 (NM_015556.1,4794-4812).
gtacctgattggatggaaa

SEQ ID NO: 284356 - DNA, 19 bp, Homo sapiens
  siRNA target sequence for SIPA1L1 (NM_015556.1,4816-4834).
cccgaaggaaccataaact

SEQ ID NO: 284357 - DNA, 19 bp, Homo sapiens
  siRNA target sequence for SIPA1L1 (NM_015556.1,4869-4887).
gagcgatggcaatgaaata

SEQ ID NO: 284358 - DNA, 19 bp, Homo sapiens
  siRNA target sequence for SIPA1L1 (NM_015556.1,4974-4992).
gaaactaattgatcttgaa

SEQ ID NO: 284359 - DNA, 19 bp, Homo sapiens
  siRNA target sequence for SIPA1L1 (NM_015556.1,5549-5567).
ctcccactctggcttctaa

SEQ ID NO: 284360 - DNA, 19 bp, Homo sapiens
  siRNA target sequence for SKI (NM_003036.1,437-455).
gtctgccgcagattctcaa

SEQ ID NO: 284361 - DNA, 19 bp, Homo sapiens
  siRNA target sequence for SKI (NM_003036.1,500-518).
gcgacgagctccacatcta

SEQ ID NO: 284362 - DNA, 19 bp, Homo sapiens
  siRNA target sequence for SKI (NM_003036.1,739-757).
gagtgcttcggcaagtgta

SEQ ID NO: 284363 - DNA, 19 bp, Homo sapiens
  siRNA target sequence for SKI (NM_003036.1,1051-1069).
gagcctccggcctccataa

SEQ ID NO: 284364 - DNA, 19 bp, Homo sapiens
  siRNA target sequence for SKI (NM_003036.1,1053-1071).
gcctccggcctccataaga

SEQ ID NO: 284365 - DNA, 19 bp, Homo sapiens
  siRNA target sequence for SKI (NM_003036.1,1064-1082).
ccataagacccaaaacaga

SEQ ID NO: 284366 - DNA, 19 bp, Homo sapiens
  siRNA target sequence for SKI (NM_003036.1,1531-1549).
gaaagcagggaggaattca

SEQ ID NO: 284367 - DNA, 19 bp, Homo sapiens
  siRNA target sequence for SLC22A1LS (NM_007105.1,783-801).
gatgcctcagccagtctta

SEQ ID NO: 284368 - DNA, 19 bp, Homo sapiens
  siRNA target sequence for SLC22A1LS (NM_007105.1,1022-1040).
gctccgaggagaatgcaaa

SEQ ID NO: 284369 - DNA, 19 bp, Homo sapiens
  siRNA target sequence for SLC35F2 (NM_017515.3,235-253).
gcctgctgcgcaggataaa

SEQ ID NO: 284370 - DNA, 19 bp, Homo sapiens
  siRNA target sequence for SLC35F2 (NM_017515.3,236-254).
cctgctgcgcaggataaaa

SEQ ID NO: 284371 - DNA, 19 bp, Homo sapiens
  siRNA target sequence for SLC35F2 (NM_017515.3,291-309).
gccctgggtcagatgttgt

SEQ ID NO: 284372 - DNA, 19 bp, Homo sapiens
  siRNA target sequence for SLC35F2 (NM_017515.3,341-359).
ccagtatttggcagaaaga

SEQ ID NO: 284373 - DNA, 19 bp, Homo sapiens
  siRNA target sequence for SLC35F2 (NM_017515.3,376-394).
ccatgcttcagagctttat

SEQ ID NO: 284374 - DNA, 19 bp, Homo sapiens
  siRNA target sequence for SLC35F2 (NM_017515.3,380-398).
gcttcagagctttatcaat

SEQ ID NO: 284375 - DNA, 19 bp, Homo sapiens
  siRNA target sequence for SLC35F2 (NM_017515.3,381-399).
cttcagagctttatcaatt

SEQ ID NO: 284376 - DNA, 19 bp, Homo sapiens
  siRNA target sequence for SLC35F2 (NM_017515.3,403-421).
gcttgctgttcctaattta

SEQ ID NO: 284377 - DNA, 19 bp, Homo sapiens
  siRNA target sequence for SLC35F2 (NM_017515.3,426-444).
gtgatgctggcatttcgat

SEQ ID NO: 284378 - DNA, 19 bp, Homo sapiens
  siRNA target sequence for SLC35F2 (NM_017515.3,442-460).
gatcaggcagtgataacct

SEQ ID NO: 284379 - DNA, 19 bp, Homo sapiens
  siRNA target sequence for SLC35F2 (NM_017515.3,445-463).
caggcagtgataacctttt

SEQ ID NO: 284380 - DNA, 19 bp, Homo sapiens
  siRNA target sequence for SLC35F2 (NM_017515.3,449-467).
cagtgataaccttttagta

SEQ ID NO: 284381 - DNA, 19 bp, Homo sapiens
  siRNA target sequence for SLC35F2 (NM_017515.3,451-469).
gtgataaccttttagtaat

SEQ ID NO: 284382 - DNA, 19 bp, Homo sapiens
  siRNA target sequence for SLC35F2 (NM_017515.3,511-529).
cagatgtggaagctaatta

SEQ ID NO: 284383 - DNA, 19 bp, Homo sapiens
  siRNA target sequence for SLC35F2 (NM_017515.3,545-563).
ctaccagtacacaactcta

SEQ ID NO: 284384 - DNA, 19 bp, Homo sapiens
  siRNA target sequence for SLC35F2 (NM_017515.3,565-583).
ccagtgtccagcttttgga

SEQ ID NO: 284385 - DNA, 19 bp, Homo sapiens
  siRNA target sequence for SLC35F2 (NM_017515.3,566-584).
cagtgtccagcttttggat

SEQ ID NO: 284386 - DNA, 19 bp, Homo sapiens
  siRNA target sequence for SLC35F2 (NM_017515.3,692-710).
catggttggtgcagacata

SEQ ID NO: 284387 - DNA, 19 bp, Homo sapiens
  siRNA target sequence for SLC35F2 (NM_017515.3,728-746).
caattcagggagtgatgta

SEQ ID NO: 284388 - DNA, 19 bp, Homo sapiens
  siRNA target sequence for SLC35F2 (NM_017515.3,828-846).
ctgagcagacaggagtttt

SEQ ID NO: 284389 - DNA, 19 bp, Homo sapiens
  siRNA target sequence for SLC35F2 (NM_017515.3,830-848).
gagcagacaggagttttta

SEQ ID NO: 284390 - DNA, 19 bp, Homo sapiens
  siRNA target sequence for SLC35F2 (NM_017515.3,890-908).
gctattgattgtggaatat

SEQ ID NO: 284391 - DNA, 19 bp, Homo sapiens
  siRNA target sequence for SLC35F2 (NM_017515.3,891-909).
ctattgattgtggaatata

SEQ ID NO: 284392 - DNA, 19 bp, Homo sapiens
  siRNA target sequence for SLC35F2 (NM_017515.3,896-914).
gattgtggaatataaggat

SEQ ID NO: 284393 - DNA, 19 bp, Homo sapiens
  siRNA target sequence for SLC35F2 (NM_017515.3,911-929).
ggatattgccagcattcat

SEQ ID NO: 284394 - DNA, 19 bp, Homo sapiens
  siRNA target sequence for SLC35F2 (NM_017515.3,912-930).
gatattgccagcattcatt

SEQ ID NO: 284395 - DNA, 19 bp, Homo sapiens
  siRNA target sequence for SLC35F2 (NM_017515.3,961-979).
catttgccctgtgtatgtt

SEQ ID NO: 284396 - DNA, 19 bp, Homo sapiens
  siRNA target sequence for SLC35F2 (NM_017515.3,999-1017).
ccattggtgattaaagtca

SEQ ID NO: 284397 - DNA, 19 bp, Homo sapiens
  siRNA target sequence for SMARCD1 (NM_003076.3,477-495).
gcagcaggcggtccaaaat

SEQ ID NO: 284398 - DNA, 19 bp, Homo sapiens
  siRNA target sequence for SMARCD1 (NM_003076.3,480-498).
gcaggcggtccaaaatcga

SEQ ID NO: 284399 - DNA, 19 bp, Homo sapiens
  siRNA target sequence for SMARCD1 (NM_003076.3,481-499).
caggcggtccaaaatcgaa

SEQ ID NO: 284400 - DNA, 19 bp, Homo sapiens
  siRNA target sequence for SMARCD1 (NM_003076.3,610-628).
ctggaccagactatcatga

SEQ ID NO: 284401 - DNA, 19 bp, Homo sapiens
  siRNA target sequence for SMARCD1 (NM_003076.3,630-648).
gaaacggctagatatccaa

SEQ ID NO: 284402 - DNA, 19 bp, Homo sapiens
  siRNA target sequence for SMARCD1 (NM_003076.3,680-698).
ggaagctgcgaattttcat

SEQ ID NO: 284403 - DNA, 19 bp, Homo sapiens
  siRNA target sequence for SMARCD1 (NM_003076.3,895-913).
gacaaccatctggtagaat

SEQ ID NO: 284404 - DNA, 19 bp, Homo sapiens
  siRNA target sequence for SMARCD1 (NM_003076.3,983-1001).
ggtgtactgtcctactgat

SEQ ID NO: 284405 - DNA, 19 bp, Homo sapiens
  siRNA target sequence for SMARCD1 (NM_003076.3,1048-1066).
cgactcctgggcatccata

SEQ ID NO: 284406 - DNA, 19 bp, Homo sapiens
  siRNA target sequence for SMARCD1 (NM_003076.3,1096-1114).
ctgtggcaatatattaaga

SEQ ID NO: 284407 - DNA, 19 bp, Homo sapiens
  siRNA target sequence for SMARCD1 (NM_003076.3,1133-1151).
ctcacgagcgggagtttgt

SEQ ID NO: 284408 - DNA, 19 bp, Homo sapiens
  siRNA target sequence for SMARCD1 (NM_003076.3,1135-1153).
cacgagcgggagtttgtca

SEQ ID NO: 284409 - DNA, 19 bp, Homo sapiens
  siRNA target sequence for SMARCD1 (NM_003076.3,1183-1201).
gagtctcaacgtatgaagt

SEQ ID NO: 284410 - DNA, 19 bp, Homo sapiens
  siRNA target sequence for SMARCD1 (NM_003076.3,1185-1203).
gtctcaacgtatgaagttt

SEQ ID NO: 284411 - DNA, 19 bp, Homo sapiens
  siRNA target sequence for SMARCD1 (NM_003076.3,1272-1290).
cagtgttgacccgaatgat

SEQ ID NO: 284412 - DNA, 19 bp, Homo sapiens
  siRNA target sequence for SMARCD1 (NM_003076.3,1274-1292).
gtgttgacccgaatgatca

SEQ ID NO: 284413 - DNA, 19 bp, Homo sapiens
  siRNA target sequence for SMARCD1 (NM_003076.3,1279-1297).
gacccgaatgatcagaaaa

SEQ ID NO: 284414 - DNA, 19 bp, Homo sapiens
  siRNA target sequence for SMARCD1 (NM_003076.3,1293-1311).
gaaaaagacagcttgttat

SEQ ID NO: 284415 - DNA, 19 bp, Homo sapiens
  siRNA target sequence for SMARCD1 (NM_003076.3,1301-1319).
cagcttgttatgacattga

SEQ ID NO: 284416 - DNA, 19 bp, Homo sapiens
  siRNA target sequence for SMARCD1 (NM_003076.3,1304-1322).
cttgttatgacattgatgt

SEQ ID NO: 284417 - DNA, 19 bp, Homo sapiens
  siRNA target sequence for SMARCD1 (NM_003076.3,1482-1500).
ccctcagggtttcatcaat

SEQ ID NO: 284418 - DNA, 19 bp, Homo sapiens
  siRNA target sequence for SMARCD1 (NM_003076.3,1571-1589).
gccgagctgagttctactt

SEQ ID NO: 284419 - DNA, 19 bp, Homo sapiens
  siRNA target sequence for SMARCD1 (NM_003076.3,1610-1628).
ctgtgtgccgatacttcta

SEQ ID NO: 284420 - DNA, 19 bp, Homo sapiens
  siRNA target sequence for SMARCD1 (NM_003076.3,1612-1630).
gtgtgccgatacttctact

SEQ ID NO: 284421 - DNA, 19 bp, Homo sapiens
  siRNA target sequence for SMARCD1 (NM_003076.3,1639-1657).
cagcagagacgacaagaat

SEQ ID NO: 284422 - DNA, 19 bp, Homo sapiens
  siRNA target sequence for SMARCD1 (NM_003076.3,1641-1659).
gcagagacgacaagaatta

SEQ ID NO: 284423 - DNA, 19 bp, Homo sapiens
  siRNA target sequence for SMARCD1 (NM_003076.3,1668-1686).
cctgggaatccggaataca

SEQ ID NO: 284424 - DNA, 19 bp, Homo sapiens
  siRNA target sequence for SMARCD1 (NM_003076.3,1669-1687).
ctgggaatccggaatacat

SEQ ID NO: 284425 - DNA, 19 bp, Homo sapiens
  siRNA target sequence for SMARCD1 (NM_139071.1,1399-1417).
ctagacaacaagacaatga

SEQ ID NO: 284426 - DNA, 19 bp, Homo sapiens
  siRNA target sequence for SNAP25 (NM_003081.2,694-712).
gtcacatggccctggatat

SEQ ID NO: 284427 - DNA, 19 bp, Homo sapiens
  siRNA target sequence for SNAP25 (NM_003081.2,715-733).
gcaatgagatcgatacaca

SEQ ID NO: 284428 - DNA, 19 bp, Homo sapiens
  siRNA target sequence for SNAP25 (NM_003081.2,773-791).
caacaaaaccagaattgat

SEQ ID NO: 284429 - DNA, 19 bp, Homo sapiens
  siRNA target sequence for SNAP25 (NM_003081.2,796-814).
ccaaccaacgtgcaacaaa

SEQ ID NO: 284430 - DNA, 19 bp, Homo sapiens
  siRNA target sequence for SNAP25 (NM_130811.1,399-417).
gggatggaccaaatcaata

SEQ ID NO: 284431 - DNA, 19 bp, Homo sapiens
  siRNA target sequence for SOST (NM_025237.1,120-138).
gggtggcaggcgttcaaga

SEQ ID NO: 284432 - DNA, 19 bp, Homo sapiens
  siRNA target sequence for SOST (NM_025237.1,122-140).
gtggcaggcgttcaagaat

SEQ ID NO: 284433 - DNA, 19 bp, Homo sapiens
  siRNA target sequence for SOST (NM_025237.1,124-142).
ggcaggcgttcaagaatga

SEQ ID NO: 284434 - DNA, 19 bp, Homo sapiens
  siRNA target sequence for SOST (NM_025237.1,125-143).
gcaggcgttcaagaatgat

SEQ ID NO: 284435 - DNA, 19 bp, Homo sapiens
  siRNA target sequence for SPAG8 (NM_012436.2,147-165).
ggtcgcggtcgcgatcttt

SEQ ID NO: 284436 - DNA, 19 bp, Homo sapiens
  siRNA target sequence for SPAG8 (NM_012436.2,148-166).
gtcgcggtcgcgatcttta

SEQ ID NO: 284437 - DNA, 19 bp, Homo sapiens
  siRNA target sequence for SPAG8 (NM_012436.2,150-168).
cgcggtcgcgatctttaga

SEQ ID NO: 284438 - DNA, 19 bp, Homo sapiens
  siRNA target sequence for SPAG8 (NM_012436.2,152-170).
cggtcgcgatctttagaca

SEQ ID NO: 284439 - DNA, 19 bp, Homo sapiens
  siRNA target sequence for SPAG8 (NM_012436.2,153-171).
ggtcgcgatctttagacat

SEQ ID NO: 284440 - DNA, 19 bp, Homo sapiens
  siRNA target sequence for SPAG8 (NM_012436.2,154-172).
gtcgcgatctttagacata

SEQ ID NO: 284441 - DNA, 19 bp, Homo sapiens
  siRNA target sequence for SPAG8 (NM_012436.2,156-174).
cgcgatctttagacataca

SEQ ID NO: 284442 - DNA, 19 bp, Homo sapiens
  siRNA target sequence for SPAG8 (NM_012436.2,314-332).
gccaaagcagctgcattat

SEQ ID NO: 284443 - DNA, 19 bp, Homo sapiens
  siRNA target sequence for SPAG8 (NM_012436.2,321-339).
cagctgcattatctacaaa

SEQ ID NO: 284444 - DNA, 19 bp, Homo sapiens
  siRNA target sequence for SPAG8 (NM_012436.2,323-341).
gctgcattatctacaaaga

SEQ ID NO: 284445 - DNA, 19 bp, Homo sapiens
  siRNA target sequence for SPAG8 (NM_012436.2,348-366).
cgccctgttctgagttcat

SEQ ID NO: 284446 - DNA, 19 bp, Homo sapiens
  siRNA target sequence for SPAG8 (NM_012436.2,413-431).
cccggctttacccacaata

SEQ ID NO: 284447 - DNA, 19 bp, Homo sapiens
  siRNA target sequence for SPAG8 (NM_012436.2,414-432).
ccggctttacccacaatat

SEQ ID NO: 284448 - DNA, 19 bp, Homo sapiens
  siRNA target sequence for SPAG8 (NM_012436.2,450-468).
gctttgagcccgtctatgt

SEQ ID NO: 284449 - DNA, 19 bp, Homo sapiens
  siRNA target sequence for SPAG8 (NM_012436.2,498-516).
caactgaccatagttctaa

SEQ ID NO: 284450 - DNA, 19 bp, Homo sapiens
  siRNA target sequence for SPAG8 (NM_012436.2,780-798).
cagatcgggtccctaacta

SEQ ID NO: 284451 - DNA, 19 bp, Homo sapiens
  siRNA target sequence for SPAG8 (NM_012436.2,782-800).
gatcgggtccctaactata

SEQ ID NO: 284452 - DNA, 19 bp, Homo sapiens
  siRNA target sequence for SPAG8 (NM_012436.2,785-803).
cgggtccctaactatacct

SEQ ID NO: 284453 - DNA, 19 bp, Homo sapiens
  siRNA target sequence for SPAG8 (NM_012436.2,912-930).
ggaagcttatggtttgcta

SEQ ID NO: 284454 - DNA, 19 bp, Homo sapiens
  siRNA target sequence for SPAG8 (NM_012436.2,913-931).
gaagcttatggtttgctat

SEQ ID NO: 284455 - DNA, 19 bp, Homo sapiens
  siRNA target sequence for SPAG8 (NM_012436.2,917-935).
cttatggtttgctatgaaa

SEQ ID NO: 284456 - DNA, 19 bp, Homo sapiens
  siRNA target sequence for SPAG8 (NM_012436.2,1018-1036).
ggatggctctgagagtttt

SEQ ID NO: 284457 - DNA, 19 bp, Homo sapiens
  siRNA target sequence for SPAG8 (NM_012436.2,1019-1037).
gatggctctgagagttttt

SEQ ID NO: 284458 - DNA, 19 bp, Homo sapiens
  siRNA target sequence for SPAG8 (NM_012436.2,1057-1075).
gggactgctgactatgcaa

SEQ ID NO: 284459 - DNA, 19 bp, Homo sapiens
  siRNA target sequence for SPAG8 (NM_012436.2,1064-1082).
ctgactatgcaactaaagt

SEQ ID NO: 284460 - DNA, 19 bp, Homo sapiens
  siRNA target sequence for SPAG8 (NM_012436.2,1066-1084).
gactatgcaactaaagtca

SEQ ID NO: 284461 - DNA, 19 bp, Homo sapiens
  siRNA target sequence for SPAG8 (NM_012436.2,1124-1142).
ccaccaggaaacgtctatt

SEQ ID NO: 284462 - DNA, 19 bp, Homo sapiens
  siRNA target sequence for SPAG8 (NM_012436.2,1254-1272).
ctgtgacacaccatgacta

SEQ ID NO: 284463 - DNA, 19 bp, Homo sapiens
  siRNA target sequence for SPAG8 (NM_172312.1,1432-1450).
gaaagaatgggggtttaca

SEQ ID NO: 284464 - DNA, 19 bp, Homo sapiens
  siRNA target sequence for SPAG8 (NM_172312.1,1484-1502).
gccacacctggtgaatact

SEQ ID NO: 284465 - DNA, 19 bp, Homo sapiens
  siRNA target sequence for SPAG8 (NM_172312.1,1486-1504).
cacacctggtgaatactca

SEQ ID NO: 284466 - DNA, 19 bp, Homo sapiens
  siRNA target sequence for SPAG8 (NM_172312.1,1584-1602).
gcaagaaaacggtaactca

SEQ ID NO: 284467 - DNA, 19 bp, Homo sapiens
  siRNA target sequence for SPAG8 (NM_172312.1,1585-1603).
caagaaaacggtaactcaa

SEQ ID NO: 284468 - DNA, 19 bp, Homo sapiens
  siRNA target sequence for SPANXB1 (NM_032461.2,393-411).
cgactgaaagacctaaaaa

SEQ ID NO: 284469 - DNA, 19 bp, Homo sapiens
  siRNA target sequence for SPATA2 (NM_006038.2,260-278).
gaagcccagttcaatggat

SEQ ID NO: 284470 - DNA, 19 bp, Homo sapiens
  siRNA target sequence for SPATA2 (NM_006038.2,265-283).
ccagttcaatggatactaa

SEQ ID NO: 284471 - DNA, 19 bp, Homo sapiens
  siRNA target sequence for SPATA2 (NM_006038.2,266-284).
cagttcaatggatactaaa

SEQ ID NO: 284472 - DNA, 19 bp, Homo sapiens
  siRNA target sequence for SPATA2 (NM_006038.2,268-286).
gttcaatggatactaaatt

SEQ ID NO: 284473 - DNA, 19 bp, Homo sapiens
  siRNA target sequence for SPATA2 (NM_006038.2,416-434).
ggtggatcccttttatcga

SEQ ID NO: 284474 - DNA, 19 bp, Homo sapiens
  siRNA target sequence for SPATA2 (NM_006038.2,439-457).
ggctgatccagttctatga

SEQ ID NO: 284475 - DNA, 19 bp, Homo sapiens
  siRNA target sequence for SPATA2 (NM_006038.2,603-621).
ccttttgtttattatgtca

SEQ ID NO: 284476 - DNA, 19 bp, Homo sapiens
  siRNA target sequence for SPATA2 (NM_006038.2,1224-1242).
ctgcgcggtacctacttct

SEQ ID NO: 284477 - DNA, 19 bp, Homo sapiens
  siRNA target sequence for SPATA2 (NM_006038.2,1325-1343).
gtggctgctcagaaacgat

SEQ ID NO: 284478 - DNA, 19 bp, Homo sapiens
  siRNA target sequence for SPATA2 (NM_006038.2,1534-1552).
catctctgcgggagaagta

SEQ ID NO: 284479 - DNA, 19 bp, Homo sapiens
  siRNA target sequence for SPATA2 (NM_006038.2,1587-1605).
caccttcactccaaatcca

SEQ ID NO: 284480 - DNA, 19 bp, Homo sapiens
  siRNA target sequence for SPATA2 (NM_006038.2,1669-1687).
gcacccagtgttcaaaagt

SEQ ID NO: 284481 - DNA, 19 bp, Homo sapiens
  siRNA target sequence for SPATA2 (NM_006038.2,1700-1718).
ctgcctcagcgcttaccat

SEQ ID NO: 284482 - DNA, 19 bp, Homo sapiens
  siRNA target sequence for SPATA2 (NM_006038.2,1702-1720).
gcctcagcgcttaccatta

SEQ ID NO: 284483 - DNA, 19 bp, Homo sapiens
  siRNA target sequence for SPATA2 (NM_006038.2,1703-1721).
cctcagcgcttaccattat

SEQ ID NO: 284484 - DNA, 19 bp, Homo sapiens
  siRNA target sequence for SPATA2 (NM_006038.2,1724-1742).
cccctgctacaaaaagagt

SEQ ID NO: 284485 - DNA, 19 bp, Homo sapiens
  siRNA target sequence for SPRY3 (NM_005840.1,465-483).
cggtgacagatgattttca

SEQ ID NO: 284486 - DNA, 19 bp, Homo sapiens
  siRNA target sequence for SPRY3 (NM_005840.1,511-529).
ctctactcatgctagcaat

SEQ ID NO: 284487 - DNA, 19 bp, Homo sapiens
  siRNA target sequence for SPRY3 (NM_005840.1,516-534).
ctcatgctagcaatgacta

SEQ ID NO: 284488 - DNA, 19 bp, Homo sapiens
  siRNA target sequence for SPRY3 (NM_005840.1,593-611).
caaacccacaagtctgatt

SEQ ID NO: 284489 - DNA, 19 bp, Homo sapiens
  siRNA target sequence for SPRY3 (NM_005840.1,683-701).
cagcatctgagccaatcta

SEQ ID NO: 284490 - DNA, 19 bp, Homo sapiens
  siRNA target sequence for SPRY3 (NM_005840.1,771-789).
caccttcaggccaatccat

SEQ ID NO: 284491 - DNA, 19 bp, Homo sapiens
  siRNA target sequence for SPRY3 (NM_005840.1,987-1005).
ctgagagcctcctcgatta

SEQ ID NO: 284492 - DNA, 19 bp, Homo sapiens
  siRNA target sequence for SPRY3 (NM_005840.1,1023-1041).
gtgtcaagggcctcttcta

SEQ ID NO: 284493 - DNA, 19 bp, Homo sapiens
  siRNA target sequence for SPRY3 (NM_005840.1,1087-1105).
ctcttgtgggcctagttct

SEQ ID NO: 284494 - DNA, 19 bp, Homo sapiens
  siRNA target sequence for SQSTM1 (NM_003900.2,274-292).
cagtgacgaggaattgaca

SEQ ID NO: 284495 - DNA, 19 bp, Homo sapiens
  siRNA target sequence for SQSTM1 (NM_003900.2,446-464).
gtaggaacccgctacaagt

SEQ ID NO: 284496 - DNA, 19 bp, Homo sapiens
  siRNA target sequence for SQSTM1 (NM_003900.2,476-494).
ccagactacgacttgtgta

SEQ ID NO: 284497 - DNA, 19 bp, Homo sapiens
  siRNA target sequence for SQSTM1 (NM_003900.2,591-609).
ggctccggaaggtgaaaca

SEQ ID NO: 284498 - DNA, 19 bp, Homo sapiens
  siRNA target sequence for SQSTM1 (NM_003900.2,727-745).
ggaggatccgagtgtgaat

SEQ ID NO: 284499 - DNA, 19 bp, Homo sapiens
  siRNA target sequence for SQSTM1 (NM_003900.2,786-804).
gccctctgggcattgaagt

SEQ ID NO: 284500 - DNA, 19 bp, Homo sapiens
  siRNA target sequence for SQSTM1 (NM_003900.2,787-805).
ccctctgggcattgaagtt

SEQ ID NO: 284501 - DNA, 19 bp, Homo sapiens
  siRNA target sequence for SQSTM1 (NM_003900.2,795-813).
gcattgaagttgatatcga

SEQ ID NO: 284502 - DNA, 19 bp, Homo sapiens
  siRNA target sequence for SQSTM1 (NM_003900.2,922-940).
caagccgggtgggaatgtt

SEQ ID NO: 284503 - DNA, 19 bp, Homo sapiens
  siRNA target sequence for SQSTM1 (NM_003900.2,1249-1267).
catgggcttctctgatgaa

SEQ ID NO: 284504 - DNA, 19 bp, Homo sapiens
  siRNA target sequence for ST7 (NM_013437.2,48-66).
ctgtcgctggagcacaaaa

SEQ ID NO: 284505 - DNA, 19 bp, Homo sapiens
  siRNA target sequence for ST7 (NM_013437.2,50-68).
gtcgctggagcacaaaaga

SEQ ID NO: 284506 - DNA, 19 bp, Homo sapiens
  siRNA target sequence for ST7 (NM_013437.2,52-70).
cgctggagcacaaaagagt

SEQ ID NO: 284507 - DNA, 19 bp, Homo sapiens
  siRNA target sequence for ST7 (NM_013437.2,89-107).
cgttgctcttgcttttcct

SEQ ID NO: 284508 - DNA, 19 bp, Homo sapiens
  siRNA target sequence for ST7 (NM_013437.2,208-226).
gcaccaagtggcataatca

SEQ ID NO: 284509 - DNA, 19 bp, Homo sapiens
  siRNA target sequence for ST7 (NM_013437.2,211-229).
ccaagtggcataatcacaa

SEQ ID NO: 284510 - DNA, 19 bp, Homo sapiens
  siRNA target sequence for ST7 (NM_013437.2,286-304).
gcaaacccaggcgaaatca

SEQ ID NO: 284511 - DNA, 19 bp, Homo sapiens
  siRNA target sequence for ST7 (NM_013437.2,287-305).
caaacccaggcgaaatcat

SEQ ID NO: 284512 - DNA, 19 bp, Homo sapiens
  siRNA target sequence for ST7 (NM_013437.2,291-309).
cccaggcgaaatcattact

SEQ ID NO: 284513 - DNA, 19 bp, Homo sapiens
  siRNA target sequence for ST7 (NM_013437.2,292-310).
ccaggcgaaatcattacta

SEQ ID NO: 284514 - DNA, 19 bp, Homo sapiens
  siRNA target sequence for ST7 (NM_013437.2,293-311).
caggcgaaatcattactat

SEQ ID NO: 284515 - DNA, 19 bp, Homo sapiens
  siRNA target sequence for ST7 (NM_013437.2,295-313).
ggcgaaatcattactataa

SEQ ID NO: 284516 - DNA, 19 bp, Homo sapiens
  siRNA target sequence for ST7 (NM_013437.2,297-315).
cgaaatcattactataagt

SEQ ID NO: 284517 - DNA, 19 bp, Homo sapiens
  siRNA target sequence for ST7 (NM_013437.2,298-316).
gaaatcattactataagtt

SEQ ID NO: 284518 - DNA, 19 bp, Homo sapiens
  siRNA target sequence for ST7 (NM_013437.2,341-359).
ccagaaggtgcaatttgga

SEQ ID NO: 284519 - DNA, 19 bp, Homo sapiens
  siRNA target sequence for ST7 (NM_013437.2,358-376).
gactggttgacaatagaaa

SEQ ID NO: 284520 - DNA, 19 bp, Homo sapiens
  siRNA target sequence for ST7 (NM_013437.2,421-439).
ccacctccgtatatctctt

SEQ ID NO: 284521 - DNA, 19 bp, Homo sapiens
  siRNA target sequence for ST7 (NM_013437.2,450-468).
catctggattaggtttcat

SEQ ID NO: 284522 - DNA, 19 bp, Homo sapiens
  siRNA target sequence for ST7 (NM_013437.2,466-484).
cattcggatgacaacatct

SEQ ID NO: 284523 - DNA, 19 bp, Homo sapiens
  siRNA target sequence for ST7 (NM_013437.2,472-490).
gatgacaacatctctagaa

SEQ ID NO: 284524 - DNA, 19 bp, Homo sapiens
  siRNA target sequence for ST7 (NM_013437.2,483-501).
ctctagaaagggtttcaga

SEQ ID NO: 284525 - DNA, 19 bp, Homo sapiens
  siRNA target sequence for ST7 (NM_013437.2,493-511).
ggtttcagactggcatatt

SEQ ID NO: 284526 - DNA, 19 bp, Homo sapiens
  siRNA target sequence for ST7 (NM_013437.2,541-559).
gcttgtgatcagtttcgtt

SEQ ID NO: 284527 - DNA, 19 bp, Homo sapiens
  siRNA target sequence for ST7 (NM_013437.2,552-570).
gtttcgttgtggtaatgga

SEQ ID NO: 284528 - DNA, 19 bp, Homo sapiens
  siRNA target sequence for ST7 (NM_013437.2,583-601).
gaagcctggaaatgtaata

SEQ ID NO: 284529 - DNA, 19 bp, Homo sapiens
  siRNA target sequence for ST7 (NM_013437.2,586-604).
gcctggaaatgtaataaca

SEQ ID NO: 284530 - DNA, 19 bp, Homo sapiens
  siRNA target sequence for ST7 (NM_013437.2,587-605).
cctggaaatgtaataacat

SEQ ID NO: 284531 - DNA, 19 bp, Homo sapiens
  siRNA target sequence for ST7 (NM_013437.2,715-733).
cgttttaccaaagtttaca

SEQ ID NO: 284532 - DNA, 19 bp, Homo sapiens
  siRNA target sequence for ST7 (NM_013437.2,734-752).
cttgcctccccgaatcttt

SEQ ID NO: 284533 - DNA, 19 bp, Homo sapiens
  siRNA target sequence for ST7 (NM_013437.2,743-761).
ccgaatctttaaaatgtga

SEQ ID NO: 284534 - DNA, 19 bp, Homo sapiens
  siRNA target sequence for ST7 (NM_013437.2,801-819).
ctgtgatgtgccaacatgt

SEQ ID NO: 284535 - DNA, 19 bp, Homo sapiens
  siRNA target sequence for ST7 (NM_013437.2,818-836).
gtgggcaatggctaaaata

SEQ ID NO: 284536 - DNA, 19 bp, Homo sapiens
  siRNA target sequence for ST7 (NM_013437.2,890-908).
gcaattgcacctggttaat

SEQ ID NO: 284537 - DNA, 19 bp, Homo sapiens
  siRNA target sequence for ST7 (NM_013437.2,891-909).
caattgcacctggttaata

SEQ ID NO: 284538 - DNA, 19 bp, Homo sapiens
  siRNA target sequence for ST7 (NM_013437.2,917-935).
gtgatcaccgtaaagtcat

SEQ ID NO: 284539 - DNA, 19 bp, Homo sapiens
  siRNA target sequence for ST7 (NM_013437.2,941-959).
gcttcactgactttaaact

SEQ ID NO: 284540 - DNA, 19 bp, Homo sapiens
  siRNA target sequence for ST7 (NM_013437.2,976-994).
ggtgattatgtcaaaatat

SEQ ID NO: 284541 - DNA, 19 bp, Homo sapiens
  siRNA target sequence for ST7 (NM_013437.2,977-995).
gtgattatgtcaaaatata

SEQ ID NO: 284542 - DNA, 19 bp, Homo sapiens
  siRNA target sequence for ST7 (NM_013437.2,1009-1027).
gagaatccacacaagcttt

SEQ ID NO: 284543 - DNA, 19 bp, Homo sapiens
  siRNA target sequence for ST7 (NM_013437.2,1029-1047).
gcgtgtgttgacagctttt

SEQ ID NO: 284544 - DNA, 19 bp, Homo sapiens
  siRNA target sequence for ST7 (NM_013437.2,1035-1053).
gttgacagcttttgattct

SEQ ID NO: 284545 - DNA, 19 bp, Homo sapiens
  siRNA target sequence for ST7 (NM_013437.2,1038-1056).
gacagcttttgattctcat

SEQ ID NO: 284546 - DNA, 19 bp, Homo sapiens
  siRNA target sequence for ST7 (NM_013437.2,1057-1075).
gcacctcttacagttgttt

SEQ ID NO: 284547 - DNA, 19 bp, Homo sapiens
  siRNA target sequence for ST7 (NM_013437.2,1084-1102).
ggacagataagggtacatt

SEQ ID NO: 284548 - DNA, 19 bp, Homo sapiens
  siRNA target sequence for ST7 (NM_013437.2,1085-1103).
gacagataagggtacattt

SEQ ID NO: 284549 - DNA, 19 bp, Homo sapiens
  siRNA target sequence for ST7 (NM_013437.2,1126-1144).
gcaaggggatttaatgcta

SEQ ID NO: 284550 - DNA, 19 bp, Homo sapiens
  siRNA target sequence for ST7 (NM_013437.2,1130-1148).
ggggatttaatgctactta

SEQ ID NO: 284551 - DNA, 19 bp, Homo sapiens
  siRNA target sequence for ST7 (NM_013437.2,1304-1322).
cccgaaatggtgtctgtta

SEQ ID NO: 284552 - DNA, 19 bp, Homo sapiens
  siRNA target sequence for ST7 (NM_013437.2,1337-1355).
gctgcaactaccagaatca

SEQ ID NO: 284553 - DNA, 19 bp, Homo sapiens
  siRNA target sequence for ST7 (NM_013437.2,1338-1356).
ctgcaactaccagaatcat

SEQ ID NO: 284554 - DNA, 19 bp, Homo sapiens
  siRNA target sequence for ST7 (NM_013437.2,1426-1444).
cgttgtgtgtttgaaagtt

SEQ ID NO: 284555 - DNA, 19 bp, Homo sapiens
  siRNA target sequence for ST7 (NM_013437.2,1558-1576).
ctgttactcgtcatagcat

SEQ ID NO: 284556 - DNA, 19 bp, Homo sapiens
  siRNA target sequence for ST7 (NM_013437.2,1569-1587).
catagcattgggatgtact

SEQ ID NO: 284557 - DNA, 19 bp, Homo sapiens
  siRNA target sequence for ST7 (NM_013437.2,1573-1591).
gcattgggatgtacttgta

SEQ ID NO: 284558 - DNA, 19 bp, Homo sapiens
  siRNA target sequence for ST7 (NM_013437.2,1574-1592).
cattgggatgtacttgtaa

SEQ ID NO: 284559 - DNA, 19 bp, Homo sapiens
  siRNA target sequence for ST7 (NM_013437.2,1586-1604).
cttgtaagctttattctct

SEQ ID NO: 284560 - DNA, 19 bp, Homo sapiens
  siRNA target sequence for ST7 (NM_013437.2,1646-1664).
gagtggaagcagaattgtt

SEQ ID NO: 284561 - DNA, 19 bp, Homo sapiens
  siRNA target sequence for ST7 (NM_013437.2,1679-1697).
ctccctcgtatggacaatt

SEQ ID NO: 284562 - DNA, 19 bp, Homo sapiens
  siRNA target sequence for ST7 (NM_013437.2,1681-1699).
ccctcgtatggacaattga

SEQ ID NO: 284563 - DNA, 19 bp, Homo sapiens
  siRNA target sequence for ST7 (NM_013437.2,1789-1807).
cgatctcagcttggattta

SEQ ID NO: 284564 - DNA, 19 bp, Homo sapiens
  siRNA target sequence for ST7 (NM_013437.2,2144-2162).
gaggtggtcatgcagataa

SEQ ID NO: 284565 - DNA, 19 bp, Homo sapiens
  siRNA target sequence for ST7 (NM_013437.2,2206-2224).
gcacgtcaccagcttacaa

SEQ ID NO: 284566 - DNA, 19 bp, Homo sapiens
  siRNA target sequence for ST7 (NM_013437.2,2249-2267).
ggctacgctgggtacgttt

SEQ ID NO: 284567 - DNA, 19 bp, Homo sapiens
  siRNA target sequence for ST7 (NM_013437.2,2256-2274).
ctgggtacgttttacatta

SEQ ID NO: 284568 - DNA, 19 bp, Homo sapiens
  siRNA target sequence for ST7 (NM_013437.2,2259-2277).
ggtacgttttacattagga

SEQ ID NO: 284569 - DNA, 19 bp, Homo sapiens
  siRNA target sequence for ST7 (NM_013437.2,2279-2297).
gatcaagttccctaagtca

SEQ ID NO: 284570 - DNA, 19 bp, Homo sapiens
  siRNA target sequence for ST7 (NM_013437.2,2306-2324).
gtcctttgagacaacttga

SEQ ID NO: 284571 - DNA, 19 bp, Homo sapiens
  siRNA target sequence for ST7 (NM_013437.2,2412-2430).
ctgctccagacctcttctt

SEQ ID NO: 284572 - DNA, 19 bp, Homo sapiens
  siRNA target sequence for ST7 (NM_013437.2,2417-2435).
ccagacctcttcttgatct

SEQ ID NO: 284573 - DNA, 19 bp, Homo sapiens
  siRNA target sequence for ST7 (NM_013437.2,2455-2473).
gggcttagacaaccatata

SEQ ID NO: 284574 - DNA, 19 bp, Homo sapiens
  siRNA target sequence for ST7 (NM_013437.2,2456-2474).
ggcttagacaaccatataa

SEQ ID NO: 284575 - DNA, 19 bp, Homo sapiens
  siRNA target sequence for ST7 (NM_013437.2,2457-2475).
gcttagacaaccatataat

SEQ ID NO: 284576 - DNA, 19 bp, Homo sapiens
  siRNA target sequence for ST7 (NM_013437.2,2517-2535).
ctgtgagcgctgtggtatt

SEQ ID NO: 284577 - DNA, 19 bp, Homo sapiens
  siRNA target sequence for ST7 (NM_013437.2,2519-2537).
gtgagcgctgtggtattgt

SEQ ID NO: 284578 - DNA, 19 bp, Homo sapiens
  siRNA target sequence for ST7 (NM_013437.2,2550-2568).
gataccagacacttgctta

SEQ ID NO: 284579 - DNA, 19 bp, Homo sapiens
  siRNA target sequence for ST7 (NM_013437.2,2559-2577).
cacttgcttagaagtaaca

SEQ ID NO: 284580 - DNA, 19 bp, Homo sapiens
  siRNA target sequence for STAF65(gamma) (NM_014860.1,364-382).
gggagagataccaatatca

SEQ ID NO: 284581 - DNA, 19 bp, Homo sapiens
  siRNA target sequence for STAF65(gamma) (NM_014860.1,365-383).
ggagagataccaatatcat

SEQ ID NO: 284582 - DNA, 19 bp, Homo sapiens
  siRNA target sequence for STAF65(gamma) (NM_014860.1,525-543).
gtctcaccatccatacgat

SEQ ID NO: 284583 - DNA, 19 bp, Homo sapiens
  siRNA target sequence for STAF65(gamma) (NM_014860.1,689-707).
ctgcctttagattgtaaga

SEQ ID NO: 284584 - DNA, 19 bp, Homo sapiens
  siRNA target sequence for STAF65(gamma) (NM_014860.1,691-709).
gcctttagattgtaagaat

SEQ ID NO: 284585 - DNA, 19 bp, Homo sapiens
  siRNA target sequence for STAF65(gamma) (NM_014860.1,850-868).
gggctttgactgtgctaat

SEQ ID NO: 284586 - DNA, 19 bp, Homo sapiens
  siRNA target sequence for STAF65(gamma) (NM_014860.1,877-895).
cctggagaccctaactgat

SEQ ID NO: 284587 - DNA, 19 bp, Homo sapiens
  siRNA target sequence for STAF65(gamma) (NM_014860.1,891-909).
ctgatgtggcacatgagta

SEQ ID NO: 284588 - DNA, 19 bp, Homo sapiens
  siRNA target sequence for STAF65(gamma) (NM_014860.1,905-923).
gagtattgccttaagttta

SEQ ID NO: 284589 - DNA, 19 bp, Homo sapiens
  siRNA target sequence for STAF65(gamma) (NM_014860.1,961-979).
gctgggacagactcctttt

SEQ ID NO: 284590 - DNA, 19 bp, Homo sapiens
  siRNA target sequence for STAF65(gamma) (NM_014860.1,1055-1073).
cgcatcaaggactatcaca

SEQ ID NO: 284591 - DNA, 19 bp, Homo sapiens
  siRNA target sequence for STAF65(gamma) (NM_014860.1,1141-1159).
cacagaggacgctaaacct

SEQ ID NO: 284592 - DNA, 19 bp, Homo sapiens
  siRNA target sequence for STAF65(gamma) (NM_014860.1,1151-1169).
gctaaacctgtgaagatca

SEQ ID NO: 284593 - DNA, 19 bp, Homo sapiens
  siRNA target sequence for STAF65(gamma) (NM_014860.1,1178-1196).
cctgtgagcgacatcactt

SEQ ID NO: 284594 - DNA, 19 bp, Homo sapiens
  siRNA target sequence for STAF65(gamma) (NM_014860.1,1435-1453).
cttcgaggagcctatgtca

SEQ ID NO: 284595 - DNA, 19 bp, Homo sapiens
  siRNA target sequence for SUMF2 (NM_015411.1,104-122).
gctcaagctaggaaatgga

SEQ ID NO: 284596 - DNA, 19 bp, Homo sapiens
  siRNA target sequence for SUMF2 (NM_015411.1,228-246).
ccctttgccatcgacatat

SEQ ID NO: 284597 - DNA, 19 bp, Homo sapiens
  siRNA target sequence for SUMF2 (NM_015411.1,230-248).
ctttgccatcgacatattt

SEQ ID NO: 284598 - DNA, 19 bp, Homo sapiens
  siRNA target sequence for SUMF2 (NM_015411.1,249-267).
cctgtcaccaacaaagatt

SEQ ID NO: 284599 - DNA, 19 bp, Homo sapiens
  siRNA target sequence for SUMF2 (NM_015411.1,572-590).
gggcttgaagggtcaagtt

SEQ ID NO: 284600 - DNA, 19 bp, Homo sapiens
  siRNA target sequence for SUMF2 (NM_015411.1,644-662).
gttccccaagggagacaaa

SEQ ID NO: 284601 - DNA, 19 bp, Homo sapiens
  siRNA target sequence for SUMF2 (NM_015411.1,684-702).
gtctccccagtgaatgctt

SEQ ID NO: 284602 - DNA, 19 bp, Homo sapiens
  siRNA target sequence for SUMF2 (NM_015411.1,872-890).
gggcaacactccagattca

SEQ ID NO: 284603 - DNA, 19 bp, Homo sapiens
  siRNA target sequence for SURF2 (NM_017503.2,362-380).
gcgagctctgtgtaaatat

SEQ ID NO: 284604 - DNA, 19 bp, Homo sapiens
  siRNA target sequence for SURF2 (NM_017503.2,515-533).
ggggggagctgcaagtgat

SEQ ID NO: 284605 - DNA, 19 bp, Homo sapiens
  siRNA target sequence for SURF2 (NM_017503.2,731-749).
gcagttgggctcgttgaaa

SEQ ID NO: 284606 - DNA, 19 bp, Homo sapiens
  siRNA target sequence for SURF2 (NM_017503.2,739-757).
gctcgttgaaaaagaagtt

SEQ ID NO: 284607 - DNA, 19 bp, Homo sapiens
  siRNA target sequence for SURF2 (NM_017503.2,784-802).
gcttcagctcctgtaaaca

SEQ ID NO: 284608 - DNA, 19 bp, Homo sapiens
  siRNA target sequence for SURF4 (NM_033161.2,415-433).
cgggctctttggaatcata

SEQ ID NO: 284609 - DNA, 19 bp, Homo sapiens
  siRNA target sequence for SURF4 (NM_033161.2,615-633).
gggtcttgctggttctgat

SEQ ID NO: 284610 - DNA, 19 bp, Homo sapiens
  siRNA target sequence for SURF4 (NM_033161.2,652-670).
ctttgacgccagcttcttt

SEQ ID NO: 284611 - DNA, 19 bp, Homo sapiens
  siRNA target sequence for SURF4 (NM_033161.2,656-674).
gacgccagcttcttttcta

SEQ ID NO: 284612 - DNA, 19 bp, Homo sapiens
  siRNA target sequence for SURF4 (NM_033161.2,713-731).
gtggccattggttttaaaa

SEQ ID NO: 284613 - DNA, 19 bp, Homo sapiens
  siRNA target sequence for SURF4 (NM_033161.2,764-782).
ctctttgccatcaacgtat

SEQ ID NO: 284614 - DNA, 19 bp, Homo sapiens
  siRNA target sequence for SURF4 (NM_033161.2,766-784).
ctttgccatcaacgtatat

SEQ ID NO: 284615 - DNA, 19 bp, Homo sapiens
  siRNA target sequence for SURF4 (NM_033161.2,770-788).
gccatcaacgtatatttca

SEQ ID NO: 284616 - DNA, 19 bp, Homo sapiens
  siRNA target sequence for SURF4 (NM_033161.2,798-816).
ggaccattccagtctacaa

SEQ ID NO: 284617 - DNA, 19 bp, Homo sapiens
  siRNA target sequence for SYMPK (NM_004819.1,573-591).
gctattggactctgacaat

SEQ ID NO: 284618 - DNA, 19 bp, Homo sapiens
  siRNA target sequence for SYMPK (NM_004819.1,601-619).
cgcacccacgccatcaagt

SEQ ID NO: 284619 - DNA, 19 bp, Homo sapiens
  siRNA target sequence for SYMPK (NM_004819.1,602-620).
gcacccacgccatcaagtt

SEQ ID NO: 284620 - DNA, 19 bp, Homo sapiens
  siRNA target sequence for SYMPK (NM_004819.1,677-695).
gacgccaggagcatgatat

SEQ ID NO: 284621 - DNA, 19 bp, Homo sapiens
  siRNA target sequence for SYMPK (NM_004819.1,679-697).
cgccaggagcatgatatca

SEQ ID NO: 284622 - DNA, 19 bp, Homo sapiens
  siRNA target sequence for SYMPK (NM_004819.1,885-903).
gatccaggcctatgaaact

SEQ ID NO: 284623 - DNA, 19 bp, Homo sapiens
  siRNA target sequence for SYMPK (NM_004819.1,945-963).
gagcagtgtgcgtaagaat

SEQ ID NO: 284624 - DNA, 19 bp, Homo sapiens
  siRNA target sequence for SYMPK (NM_004819.1,950-968).
gtgtgcgtaagaatctgaa

SEQ ID NO: 284625 - DNA, 19 bp, Homo sapiens
  siRNA target sequence for SYMPK (NM_004819.1,1121-1139).
cggactccacactcaagaa

SEQ ID NO: 284626 - DNA, 19 bp, Homo sapiens
  siRNA target sequence for SYMPK (NM_004819.1,1123-1141).
gactccacactcaagaaga

SEQ ID NO: 284627 - DNA, 19 bp, Homo sapiens
  siRNA target sequence for SYMPK (NM_004819.1,1459-1477).
gtagagcagaccaaacagt

SEQ ID NO: 284628 - DNA, 19 bp, Homo sapiens
  siRNA target sequence for SYMPK (NM_004819.1,1625-1643).
ggaggccagagcccattat

SEQ ID NO: 284629 - DNA, 19 bp, Homo sapiens
  siRNA target sequence for SYMPK (NM_004819.1,1671-1689).
cgctggtgggcgcaagaaa

SEQ ID NO: 284630 - DNA, 19 bp, Homo sapiens
  siRNA target sequence for SYMPK (NM_004819.1,1672-1690).
gctggtgggcgcaagaaaa

SEQ ID NO: 284631 - DNA, 19 bp, Homo sapiens
  siRNA target sequence for SYMPK (NM_004819.1,1673-1691).
ctggtgggcgcaagaaaat

SEQ ID NO: 284632 - DNA, 19 bp, Homo sapiens
  siRNA target sequence for SYMPK (NM_004819.1,1675-1693).
ggtgggcgcaagaaaattt

SEQ ID NO: 284633 - DNA, 19 bp, Homo sapiens
  siRNA target sequence for SYMPK (NM_004819.1,1805-1823).
cagcccaggtccgcataaa

SEQ ID NO: 284634 - DNA, 19 bp, Homo sapiens
  siRNA target sequence for SYMPK (NM_004819.1,1807-1825).
gcccaggtccgcataaaga

SEQ ID NO: 284635 - DNA, 19 bp, Homo sapiens
  siRNA target sequence for SYMPK (NM_004819.1,1808-1826).
cccaggtccgcataaagat

SEQ ID NO: 284636 - DNA, 19 bp, Homo sapiens
  siRNA target sequence for SYMPK (NM_004819.1,1928-1946).
ggctctaccaggagtacaa

SEQ ID NO: 284637 - DNA, 19 bp, Homo sapiens
  siRNA target sequence for SYMPK (NM_004819.1,2156-2174).
cacttcgagacctgatctt

SEQ ID NO: 284638 - DNA, 19 bp, Homo sapiens
  siRNA target sequence for SYMPK (NM_004819.1,2256-2274).
ggccctgctgttcatcaaa

SEQ ID NO: 284639 - DNA, 19 bp, Homo sapiens
  siRNA target sequence for SYMPK (NM_004819.1,2299-2317).
cgggagtatgtggagaaat

SEQ ID NO: 284640 - DNA, 19 bp, Homo sapiens
  siRNA target sequence for SYMPK (NM_004819.1,2557-2575).
cgaggaatgggcatgaact

SEQ ID NO: 284641 - DNA, 19 bp, Homo sapiens
  siRNA target sequence for SYMPK (NM_004819.1,2589-2607).
cctgctggtggaaaattgt

SEQ ID NO: 284642 - DNA, 19 bp, Homo sapiens
  siRNA target sequence for SYMPK (NM_004819.1,2780-2798).
ccctgcctaaactcatcaa

SEQ ID NO: 284643 - DNA, 19 bp, Homo sapiens
  siRNA target sequence for SYMPK (NM_004819.1,2786-2804).
ctaaactcatcaaactcaa

SEQ ID NO: 284644 - DNA, 19 bp, Homo sapiens
  siRNA target sequence for SYMPK (NM_004819.1,2850-2868).
gcatggtgagggaaactca

SEQ ID NO: 284645 - DNA, 19 bp, Homo sapiens
  siRNA target sequence for SYMPK (NM_004819.1,2896-2914).
ctcctgatcgcattacaca

SEQ ID NO: 284646 - DNA, 19 bp, Homo sapiens
  siRNA target sequence for SYMPK (NM_004819.1,2924-2942).
ccgtgaagtgcgacatgaa

SEQ ID NO: 284647 - DNA, 19 bp, Homo sapiens
  siRNA target sequence for TBL2 (NM_012453.1,220-238).
cgcctgccaaaaagcaaat

SEQ ID NO: 284648 - DNA, 19 bp, Homo sapiens
  siRNA target sequence for TBL2 (NM_012453.1,355-373).
gagccacagcgggaacata

SEQ ID NO: 284649 - DNA, 19 bp, Homo sapiens
  siRNA target sequence for TBL2 (NM_012453.1,673-691).
cattggcattgctaacaca

SEQ ID NO: 284650 - DNA, 19 bp, Homo sapiens
  siRNA target sequence for TBL2 (NM_012453.1,807-825).
ctccctgtggcagatttgt

SEQ ID NO: 284651 - DNA, 19 bp, Homo sapiens
  siRNA target sequence for TBL2 (NM_012453.1,902-920).
gtgcgagccttcgaactaa

SEQ ID NO: 284652 - DNA, 19 bp, Homo sapiens
  siRNA target sequence for TBL2 (NM_012453.1,935-953).
gctgtgcactcgtttgctt

SEQ ID NO: 284653 - DNA, 19 bp, Homo sapiens
  siRNA target sequence for TBL2 (NM_012453.1,988-1006).
caaggatggtacatggaaa

SEQ ID NO: 284654 - DNA, 19 bp, Homo sapiens
  siRNA target sequence for TBL2 (NM_012453.1,992-1010).
gatggtacatggaaactgt

SEQ ID NO: 284655 - DNA, 19 bp, Homo sapiens
  siRNA target sequence for TBL2 (NM_012453.1,1057-1075).
gaagacaggccgctttgaa

SEQ ID NO: 284656 - DNA, 19 bp, Homo sapiens
  siRNA target sequence for TBL2 (NM_012453.1,1140-1158).
ccagtggcagtagtattca

SEQ ID NO: 284657 - DNA, 19 bp, Homo sapiens
  siRNA target sequence for TBL2 (NM_012453.1,1149-1167).
gtagtattcatctctacaa

SEQ ID NO: 284658 - DNA, 19 bp, Homo sapiens
  siRNA target sequence for TBL2 (NM_012453.1,1203-1221).
gggtccatggcgagtgtat

SEQ ID NO: 284659 - DNA, 19 bp, Homo sapiens
  siRNA target sequence for TBL2 (NM_012453.1,1214-1232).
gagtgtatcgccaacttgt

SEQ ID NO: 284660 - DNA, 19 bp, Homo sapiens
  siRNA target sequence for TBL2 (NM_032988.1,226-244).
gcccaggagcttttttcct

SEQ ID NO: 284661 - DNA, 19 bp, Homo sapiens
  siRNA target sequence for TBL2 (NM_032988.1,282-300).
gccagctttgtgactcaat

SEQ ID NO: 284662 - DNA, 19 bp, Homo sapiens
  siRNA target sequence for TBL2 (NM_032988.1,283-301).
ccagctttgtgactcaatt

SEQ ID NO: 284663 - DNA, 19 bp, Homo sapiens
  siRNA target sequence for TBL2 (NM_032988.1,291-309).
gtgactcaattaagtatct

SEQ ID NO: 284664 - DNA, 19 bp, Homo sapiens
  siRNA target sequence for TCL6 (NM_012468.3,1818-1836).
gaagatcacgggaattaca

SEQ ID NO: 284665 - DNA, 19 bp, Homo sapiens
  siRNA target sequence for TCL6 (NM_012468.3,1821-1839).
gatcacgggaattacaagt

SEQ ID NO: 284666 - DNA, 19 bp, Homo sapiens
  siRNA target sequence for TCL6 (NM_012468.3,1845-1863).
cctgaagtatgatcacaaa

SEQ ID NO: 284667 - DNA, 19 bp, Homo sapiens
  siRNA target sequence for TCL6 (NM_012468.3,1904-1922).
gtggctcggacgaagtgtt

SEQ ID NO: 284668 - DNA, 19 bp, Homo sapiens
  siRNA target sequence for TCL6 (NM_012468.3,2028-2046).
ctgtgcacatcctacgtta

SEQ ID NO: 284669 - DNA, 19 bp, Homo sapiens
  siRNA target sequence for TCL6 (NM_012468.3,2032-2050).
gcacatcctacgttactat

SEQ ID NO: 284670 - DNA, 19 bp, Homo sapiens
  siRNA target sequence for TCL6 (NM_012468.3,2033-2051).
cacatcctacgttactatt

SEQ ID NO: 284671 - DNA, 19 bp, Homo sapiens
  siRNA target sequence for TCL6 (NM_012468.3,2039-2057).
ctacgttactattcaaact

SEQ ID NO: 284672 - DNA, 19 bp, Homo sapiens
  siRNA target sequence for TCL6 (NM_020552.2,1826-1844).
gaagcaaggcacaagtcat

SEQ ID NO: 284673 - DNA, 19 bp, Homo sapiens
  siRNA target sequence for TCL6 (NM_020552.2,2048-2066).
ggcacgtgcctgtctcatt

SEQ ID NO: 284674 - DNA, 19 bp, Homo sapiens
  siRNA target sequence for TCL6 (NM_020552.2,2091-2109).
gactgtgccagcacaaagt

SEQ ID NO: 284675 - DNA, 19 bp, Homo sapiens
  siRNA target sequence for TCL6 (NM_020553.2,1419-1437).
ctctgtgcttatatctcat

SEQ ID NO: 284676 - DNA, 19 bp, Homo sapiens
  siRNA target sequence for TCL6 (NM_020553.2,1421-1439).
ctgtgcttatatctcatat

SEQ ID NO: 284677 - DNA, 19 bp, Homo sapiens
  siRNA target sequence for TCTE1L (NM_006520.1,117-135).
gaagcccacaatattgtca

SEQ ID NO: 284678 - DNA, 19 bp, Homo sapiens
  siRNA target sequence for TCTE1L (NM_006520.1,140-158).
gtgtgtagatggggtttta

SEQ ID NO: 284679 - DNA, 19 bp, Homo sapiens
  siRNA target sequence for TCTE1L (NM_006520.1,160-178).
gtggtgaagattataatca

SEQ ID NO: 284680 - DNA, 19 bp, Homo sapiens
  siRNA target sequence for TCTE1L (NM_006520.1,162-180).
ggtgaagattataatcaca

SEQ ID NO: 284681 - DNA, 19 bp, Homo sapiens
  siRNA target sequence for TCTE1L (NM_006520.1,191-209).
ccagtggactgcaagcata

SEQ ID NO: 284682 - DNA, 19 bp, Homo sapiens
  siRNA target sequence for TCTE1L (NM_006520.1,201-219).
gcaagcatagtggaacaat

SEQ ID NO: 284683 - DNA, 19 bp, Homo sapiens
  siRNA target sequence for TCTE1L (NM_006520.1,205-223).
gcatagtggaacaatcctt

SEQ ID NO: 284684 - DNA, 19 bp, Homo sapiens
  siRNA target sequence for TCTE1L (NM_006520.1,206-224).
catagtggaacaatcctta

SEQ ID NO: 284685 - DNA, 19 bp, Homo sapiens
  siRNA target sequence for TCTE1L (NM_006520.1,239-257).
gttgggaaaagcctataaa

SEQ ID NO: 284686 - DNA, 19 bp, Homo sapiens
  siRNA target sequence for TCTE1L (NM_006520.1,342-360).
ggaacctgtaccgtaagat

SEQ ID NO: 284687 - DNA, 19 bp, Homo sapiens
  siRNA target sequence for TCTE1L (NM_006520.1,368-386).
ccggaccatgaactgtatt

SEQ ID NO: 284688 - DNA, 19 bp, Homo sapiens
  siRNA target sequence for TCTE1L (NM_006520.1,392-410).
cgtttttgccattgctatt

SEQ ID NO: 284689 - DNA, 19 bp, Homo sapiens
  siRNA target sequence for TEX27 (NM_021943.1,160-178).
ggtccagcaagactatgaa

SEQ ID NO: 284690 - DNA, 19 bp, Homo sapiens
  siRNA target sequence for TEX27 (NM_021943.1,161-179).
gtccagcaagactatgaat

SEQ ID NO: 284691 - DNA, 19 bp, Homo sapiens
  siRNA target sequence for TEX27 (NM_021943.1,247-265).
gtaacagccaatcagattt

SEQ ID NO: 284692 - DNA, 19 bp, Homo sapiens
  siRNA target sequence for TEX27 (NM_021943.1,305-323).
gataaccacgccaactctt

SEQ ID NO: 284693 - DNA, 19 bp, Homo sapiens
  siRNA target sequence for TEX27 (NM_021943.1,340-358).
cgcttccgacagaactgaa

SEQ ID NO: 284694 - DNA, 19 bp, Homo sapiens
  siRNA target sequence for TEX27 (NM_021943.1,341-359).
gcttccgacagaactgaat

SEQ ID NO: 284695 - DNA, 19 bp, Homo sapiens
  siRNA target sequence for TEX27 (NM_021943.1,401-419).
cacagctcatgtctcatta

SEQ ID NO: 284696 - DNA, 19 bp, Homo sapiens
  siRNA target sequence for TEX27 (NM_021943.1,403-421).
cagctcatgtctcattaat

SEQ ID NO: 284697 - DNA, 19 bp, Homo sapiens
  siRNA target sequence for TEX27 (NM_021943.1,405-423).
gctcatgtctcattaatca

SEQ ID NO: 284698 - DNA, 19 bp, Homo sapiens
  siRNA target sequence for TEX27 (NM_021943.1,526-544).
ccagtcgatctaaacagaa

SEQ ID NO: 284699 - DNA, 19 bp, Homo sapiens
  siRNA target sequence for TEX27 (NM_021943.1,560-578).
cttccagtgccaaaccaaa

SEQ ID NO: 284700 - DNA, 19 bp, Homo sapiens
  siRNA target sequence for TEX27 (NM_021943.1,607-625).
cgtgtcgctgcggttatgt

SEQ ID NO: 284701 - DNA, 19 bp, Homo sapiens
  siRNA target sequence for TEX27 (NM_021943.1,610-628).
gtcgctgcggttatgtgtt

SEQ ID NO: 284702 - DNA, 19 bp, Homo sapiens
  siRNA target sequence for TFG (NM_006070.3,319-337).
cggacagttggatctaagt

SEQ ID NO: 284703 - DNA, 19 bp, Homo sapiens
  siRNA target sequence for TFG (NM_006070.3,332-350).
ctaagtgggaagctaatca

SEQ ID NO: 284704 - DNA, 19 bp, Homo sapiens
  siRNA target sequence for TFG (NM_006070.3,370-388).
ggatattcggcgaattcct

SEQ ID NO: 284705 - DNA, 19 bp, Homo sapiens
  siRNA target sequence for TFG (NM_006070.3,371-389).
gatattcggcgaattccta

SEQ ID NO: 284706 - DNA, 19 bp, Homo sapiens
  siRNA target sequence for TFG (NM_006070.3,379-397).
gcgaattcctattcataat

SEQ ID NO: 284707 - DNA, 19 bp, Homo sapiens
  siRNA target sequence for TFG (NM_006070.3,386-404).
cctattcataatgaagata

SEQ ID NO: 284708 - DNA, 19 bp, Homo sapiens
  siRNA target sequence for TFG (NM_006070.3,413-431).
gatgaattagtgctaatga

SEQ ID NO: 284709 - DNA, 19 bp, Homo sapiens
  siRNA target sequence for TFG (NM_006070.3,450-468).
gaaaacttctgagtaatga

SEQ ID NO: 284710 - DNA, 19 bp, Homo sapiens
  siRNA target sequence for TFG (NM_006070.3,460-478).
gagtaatgatgaagtaaca

SEQ ID NO: 284711 - DNA, 19 bp, Homo sapiens
  siRNA target sequence for TFG (NM_006070.3,467-485).
gatgaagtaacaataaagt

SEQ ID NO: 284712 - DNA, 19 bp, Homo sapiens
  siRNA target sequence for TFG (NM_006070.3,494-512).
gaagatggagatcttataa

SEQ ID NO: 284713 - DNA, 19 bp, Homo sapiens
  siRNA target sequence for TFG (NM_006070.3,497-515).
gatggagatcttataacaa

SEQ ID NO: 284714 - DNA, 19 bp, Homo sapiens
  siRNA target sequence for TFG (NM_006070.3,500-518).
ggagatcttataacaattt

SEQ ID NO: 284715 - DNA, 19 bp, Homo sapiens
  siRNA target sequence for TFG (NM_006070.3,501-519).
gagatcttataacaatttt

SEQ ID NO: 284716 - DNA, 19 bp, Homo sapiens
  siRNA target sequence for TFG (NM_006070.3,548-566).
cagtgcagtaggatactga

SEQ ID NO: 284717 - DNA, 19 bp, Homo sapiens
  siRNA target sequence for TFG (NM_006070.3,638-656).
ctgatagaacttcgaaata

SEQ ID NO: 284718 - DNA, 19 bp, Homo sapiens
  siRNA target sequence for TFG (NM_006070.3,640-658).
gatagaacttcgaaataaa

SEQ ID NO: 284719 - DNA, 19 bp, Homo sapiens
  siRNA target sequence for TFG (NM_006070.3,650-668).
cgaaataaagtgaatcgtt

SEQ ID NO: 284720 - DNA, 19 bp, Homo sapiens
  siRNA target sequence for TFG (NM_006070.3,659-677).
gtgaatcgtttattggata

SEQ ID NO: 284721 - DNA, 19 bp, Homo sapiens
  siRNA target sequence for TFG (NM_006070.3,698-716).
ccaggaccttccaccaata

SEQ ID NO: 284722 - DNA, 19 bp, Homo sapiens
  siRNA target sequence for TFG (NM_006070.3,699-717).
caggaccttccaccaatat

SEQ ID NO: 284723 - DNA, 19 bp, Homo sapiens
  siRNA target sequence for TFG (NM_006070.3,859-877).
gtcagcgtttggcttaaca

SEQ ID NO: 284724 - DNA, 19 bp, Homo sapiens
  siRNA target sequence for TFG (NM_006070.3,861-879).
cagcgtttggcttaacaga

SEQ ID NO: 284725 - DNA, 19 bp, Homo sapiens
  siRNA target sequence for TFG (NM_006070.3,1014-1032).
ctcaagcaggtcagattga

SEQ ID NO: 284726 - DNA, 19 bp, Homo sapiens
  siRNA target sequence for TFG (NM_006070.3,1105-1123).
gcctcaacagtatggtatt

SEQ ID NO: 284727 - DNA, 19 bp, Homo sapiens
  siRNA target sequence for TFG (NM_006070.3,1107-1125).
ctcaacagtatggtattca

SEQ ID NO: 284728 - DNA, 19 bp, Homo sapiens
  siRNA target sequence for TFG (NM_006070.3,1109-1127).
caacagtatggtattcagt

SEQ ID NO: 284729 - DNA, 19 bp, Homo sapiens
  siRNA target sequence for TFG (NM_006070.3,1112-1130).
cagtatggtattcagtatt

SEQ ID NO: 284730 - DNA, 19 bp, Homo sapiens
  siRNA target sequence for TFG (NM_006070.3,1126-1144).
gtattcagcaagctatagt

SEQ ID NO: 284731 - DNA, 19 bp, Homo sapiens
  siRNA target sequence for TFG (NM_006070.3,1267-1285).
gtaccaggcgagcaattat

SEQ ID NO: 284732 - DNA, 19 bp, Homo sapiens
  siRNA target sequence for TFG (NM_006070.3,1270-1288).
ccaggcgagcaattatcct

SEQ ID NO: 284733 - DNA, 19 bp, Homo sapiens
  siRNA target sequence for TFG (NM_006070.3,1279-1297).
caattatcctgcacaaact

SEQ ID NO: 284734 - DNA, 19 bp, Homo sapiens
  siRNA target sequence for TFG (NM_006070.3,1311-1329).
cttctcagcctactaatta

SEQ ID NO: 284735 - DNA, 19 bp, Homo sapiens
  siRNA target sequence for TFG (NM_006070.3,1369-1387).
ccaacctggggcctatcaa

SEQ ID NO: 284736 - DNA, 19 bp, Homo sapiens
  siRNA target sequence for TFG (NM_006070.3,1492-1510).
ccaacctggacctggttat

SEQ ID NO: 284737 - DNA, 19 bp, Homo sapiens
  siRNA target sequence for TFG (NM_006070.3,1496-1514).
cctggacctggttatcgat

SEQ ID NO: 284738 - DNA, 19 bp, Homo sapiens
  siRNA target sequence for THSD3 (NM_182509.2,360-378).
ccgggattggccaacacaa

SEQ ID NO: 284739 - DNA, 19 bp, Homo sapiens
  siRNA target sequence for THSD3 (NM_182509.2,369-387).
gccaacacaaccttgagta

SEQ ID NO: 284740 - DNA, 19 bp, Homo sapiens
  siRNA target sequence for THSD3 (NM_182509.2,639-657).
cctgataaccagactatga

SEQ ID NO: 284741 - DNA, 19 bp, Homo sapiens
  siRNA target sequence for THSD3 (NM_182509.2,855-873).
ctacggacatgcatgatca

SEQ ID NO: 284742 - DNA, 19 bp, Homo sapiens
  siRNA target sequence for THSD3 (NM_182509.2,858-876).
cggacatgcatgatcaaga

SEQ ID NO: 284743 - DNA, 19 bp, Homo sapiens
  siRNA target sequence for THY1 (NM_006288.2,164-182).
ggactgccgccatgagaat

SEQ ID NO: 284744 - DNA, 19 bp, Homo sapiens
  siRNA target sequence for THY1 (NM_006288.2,214-232).
gcctgacccgtgagacaaa

SEQ ID NO: 284745 - DNA, 19 bp, Homo sapiens
  siRNA target sequence for THY1 (NM_006288.2,289-307).
ccaacttcaccagcaaata

SEQ ID NO: 284746 - DNA, 19 bp, Homo sapiens
  siRNA target sequence for THY1 (NM_006288.2,311-329).
catgaaggtcctctactta

SEQ ID NO: 284747 - DNA, 19 bp, Homo sapiens
  siRNA target sequence for THY1 (NM_006288.2,513-531).
ctccaggccacggatttca

SEQ ID NO: 284748 - DNA, 19 bp, Homo sapiens
  siRNA target sequence for TIMP3 (NM_000362.3,1500-1518).
gacaggtcgcgtctatgat

SEQ ID NO: 284749 - DNA, 19 bp, Homo sapiens
  siRNA target sequence for TIMP3 (NM_000362.3,1510-1528).
gtctatgatggcaagatgt

SEQ ID NO: 284750 - DNA, 19 bp, Homo sapiens
  siRNA target sequence for TIMP3 (NM_000362.3,1601-1619).
ggtatcacctgggttgtaa

SEQ ID NO: 284751 - DNA, 19 bp, Homo sapiens
  siRNA target sequence for TIMP3 (NM_000362.3,1685-1703).
ccgacatgctctccaattt

SEQ ID NO: 284752 - DNA, 19 bp, Homo sapiens
  siRNA target sequence for TIMP3 (NM_000362.3,1714-1732).
ggctaccagtccaaacact

SEQ ID NO: 284753 - DNA, 19 bp, Homo sapiens
  siRNA target sequence for TIMP3 (NM_000362.3,1715-1733).
gctaccagtccaaacacta

SEQ ID NO: 284754 - DNA, 19 bp, Homo sapiens
  siRNA target sequence for TLE4 (NM_007005.3,885-903).
gcctgctcaaccctttaaa

SEQ ID NO: 284755 - DNA, 19 bp, Homo sapiens
  siRNA target sequence for TLE4 (NM_007005.3,886-904).
cctgctcaaccctttaaat

SEQ ID NO: 284756 - DNA, 19 bp, Homo sapiens
  siRNA target sequence for TLE4 (NM_007005.3,887-905).
ctgctcaaccctttaaatt

SEQ ID NO: 284757 - DNA, 19 bp, Homo sapiens
  siRNA target sequence for TLE4 (NM_007005.3,921-939).
ctgtgatcggattaaggaa

SEQ ID NO: 284758 - DNA, 19 bp, Homo sapiens
  siRNA target sequence for TLE4 (NM_007005.3,929-947).
ggattaaggaagagtttca

SEQ ID NO: 284759 - DNA, 19 bp, Homo sapiens
  siRNA target sequence for TLE4 (NM_007005.3,1049-1067).
cctatgggttgaatataga

SEQ ID NO: 284760 - DNA, 19 bp, Homo sapiens
  siRNA target sequence for TLE4 (NM_007005.3,1050-1068).
ctatgggttgaatatagaa

SEQ ID NO: 284761 - DNA, 19 bp, Homo sapiens
  siRNA target sequence for TLE4 (NM_007005.3,1055-1073).
ggttgaatatagaaatgca

SEQ ID NO: 284762 - DNA, 19 bp, Homo sapiens
  siRNA target sequence for TLE4 (NM_007005.3,1208-1226).
ccatcattgggcaacaact

SEQ ID NO: 284763 - DNA, 19 bp, Homo sapiens
  siRNA target sequence for TLE4 (NM_007005.3,1363-1381).
cagtcccatcttccaatta

SEQ ID NO: 284764 - DNA, 19 bp, Homo sapiens
  siRNA target sequence for TLE4 (NM_007005.3,1539-1557).
ggaaattgcagctcgttat

SEQ ID NO: 284765 - DNA, 19 bp, Homo sapiens
  siRNA target sequence for TLE4 (NM_007005.3,1671-1689).
gacacgcctgctcaagaaa

SEQ ID NO: 284766 - DNA, 19 bp, Homo sapiens
  siRNA target sequence for TLE4 (NM_007005.3,1686-1704).
gaaagatgccccgattagt

SEQ ID NO: 284767 - DNA, 19 bp, Homo sapiens
  siRNA target sequence for TLE4 (NM_007005.3,1698-1716).
gattagtccagcctctatt

SEQ ID NO: 284768 - DNA, 19 bp, Homo sapiens
  siRNA target sequence for TLE4 (NM_007005.3,1749-1767).
caaagaacttagccttaat

SEQ ID NO: 284769 - DNA, 19 bp, Homo sapiens
  siRNA target sequence for TLE4 (NM_007005.3,1753-1771).
gaacttagccttaatgaaa

SEQ ID NO: 284770 - DNA, 19 bp, Homo sapiens
  siRNA target sequence for TLE4 (NM_007005.3,1762-1780).
cttaatgaaaaatctacta

SEQ ID NO: 284771 - DNA, 19 bp, Homo sapiens
  siRNA target sequence for TLE4 (NM_007005.3,1775-1793).
ctactactcccgtctcaaa

SEQ ID NO: 284772 - DNA, 19 bp, Homo sapiens
  siRNA target sequence for TLE4 (NM_007005.3,1783-1801).
cccgtctcaaagtccaata

SEQ ID NO: 284773 - DNA, 19 bp, Homo sapiens
  siRNA target sequence for TLE4 (NM_007005.3,1803-1821).
ccctactccacgaactgat

SEQ ID NO: 284774 - DNA, 19 bp, Homo sapiens
  siRNA target sequence for TLE4 (NM_007005.3,2115-2133).
catgcgtgtgccagcaata

SEQ ID NO: 284775 - DNA, 19 bp, Homo sapiens
  siRNA target sequence for TLE4 (NM_007005.3,2118-2136).
gcgtgtgccagcaatacct

SEQ ID NO: 284776 - DNA, 19 bp, Homo sapiens
  siRNA target sequence for TLE4 (NM_007005.3,2414-2432).
gtctgaacagggataacta

SEQ ID NO: 284777 - DNA, 19 bp, Homo sapiens
  siRNA target sequence for TLE4 (NM_007005.3,2657-2675).
ccttggtgaggcaattcca

SEQ ID NO: 284778 - DNA, 19 bp, Homo sapiens
  siRNA target sequence for TLE4 (NM_007005.3,2956-2974).
gcccattgtggcaaatggt

SEQ ID NO: 284779 - DNA, 19 bp, Homo sapiens
  siRNA target sequence for TLE4 (NM_007005.3,2957-2975).
cccattgtggcaaatggtt

SEQ ID NO: 284780 - DNA, 19 bp, Homo sapiens
  siRNA target sequence for TLE4 (NM_007005.3,3080-3098).
ccgtggacgacaaatacat

SEQ ID NO: 284781 - DNA, 19 bp, Homo sapiens
  siRNA target sequence for TLE4 (NM_007005.3,3081-3099).
cgtggacgacaaatacatt

SEQ ID NO: 284782 - DNA, 19 bp, Homo sapiens
  siRNA target sequence for TM4SF1 (NM_014220.1,124-142).
gatgcatcggacattctct

SEQ ID NO: 284783 - DNA, 19 bp, Homo sapiens
  siRNA target sequence for TM4SF1 (NM_014220.1,159-177).
ctgtgcatcgcggctaata

SEQ ID NO: 284784 - DNA, 19 bp, Homo sapiens
  siRNA target sequence for TM4SF1 (NM_014220.1,161-179).
gtgcatcgcggctaatatt

SEQ ID NO: 284785 - DNA, 19 bp, Homo sapiens
  siRNA target sequence for TM4SF1 (NM_014220.1,163-181).
gcatcgcggctaatatttt

SEQ ID NO: 284786 - DNA, 19 bp, Homo sapiens
  siRNA target sequence for TM4SF1 (NM_014220.1,167-185).
cgcggctaatattttgctt

SEQ ID NO: 284787 - DNA, 19 bp, Homo sapiens
  siRNA target sequence for TM4SF1 (NM_014220.1,168-186).
gcggctaatattttgcttt

SEQ ID NO: 284788 - DNA, 19 bp, Homo sapiens
  siRNA target sequence for TM4SF1 (NM_014220.1,193-211).
ccaatggggaaacaaagta

SEQ ID NO: 284789 - DNA, 19 bp, Homo sapiens
  siRNA target sequence for TM4SF1 (NM_014220.1,233-251).
ccgcttcgtgtggttcttt

SEQ ID NO: 284790 - DNA, 19 bp, Homo sapiens
  siRNA target sequence for TM4SF1 (NM_014220.1,234-252).
cgcttcgtgtggttctttt

SEQ ID NO: 284791 - DNA, 19 bp, Homo sapiens
  siRNA target sequence for TM4SF1 (NM_014220.1,360-378).
cgatgtgcgatgctttctt

SEQ ID NO: 284792 - DNA, 19 bp, Homo sapiens
  siRNA target sequence for TM4SF1 (NM_014220.1,366-384).
gcgatgctttcttctgtat

SEQ ID NO: 284793 - DNA, 19 bp, Homo sapiens
  siRNA target sequence for TM4SF1 (NM_014220.1,367-385).
cgatgctttcttctgtatt

SEQ ID NO: 284794 - DNA, 19 bp, Homo sapiens
  siRNA target sequence for TM4SF1 (NM_014220.1,386-404).
ggctgctctcattggaatt

SEQ ID NO: 284795 - DNA, 19 bp, Homo sapiens
  siRNA target sequence for TM4SF1 (NM_014220.1,453-471).
ggaccactatgtcttgatt

SEQ ID NO: 284796 - DNA, 19 bp, Homo sapiens
  siRNA target sequence for TM4SF1 (NM_014220.1,603-621).
gctcttggtggaattgaat

SEQ ID NO: 284797 - DNA, 19 bp, Homo sapiens
  siRNA target sequence for TM4SF1 (NM_014220.1,612-630).
ggaattgaattcatcttgt

SEQ ID NO: 284798 - DNA, 19 bp, Homo sapiens
  siRNA target sequence for TM4SF1 (NM_014220.1,629-647).
gtgtcttattcaagtaata

SEQ ID NO: 284799 - DNA, 19 bp, Homo sapiens
  siRNA target sequence for TM4SF1 (NM_014220.1,683-701).
ctctcaccaacagcaatat

SEQ ID NO: 284800 - DNA, 19 bp, Homo sapiens
  siRNA target sequence for TM4SF1 (NM_014220.1,685-703).
ctcaccaacagcaatatga

SEQ ID NO: 284801 - DNA, 19 bp, Homo sapiens
  siRNA target sequence for TM6SF1 (NM_023003.1,110-128).
cggtcacctatgtcttcaa

SEQ ID NO: 284802 - DNA, 19 bp, Homo sapiens
  siRNA target sequence for TM6SF1 (NM_023003.1,205-223).
gctcgtgtcctcgtcaaaa

SEQ ID NO: 284803 - DNA, 19 bp, Homo sapiens
  siRNA target sequence for TM6SF1 (NM_023003.1,209-227).
gtgtcctcgtcaaaagaaa

SEQ ID NO: 284804 - DNA, 19 bp, Homo sapiens
  siRNA target sequence for TM6SF1 (NM_023003.1,213-231).
cctcgtcaaaagaaaacca

SEQ ID NO: 284805 - DNA, 19 bp, Homo sapiens
  siRNA target sequence for TM6SF1 (NM_023003.1,236-254).
gggacccactgttctatgt

SEQ ID NO: 284806 - DNA, 19 bp, Homo sapiens
  siRNA target sequence for TM6SF1 (NM_023003.1,238-256).
gacccactgttctatgtgt

SEQ ID NO: 284807 - DNA, 19 bp, Homo sapiens
  siRNA target sequence for TM6SF1 (NM_023003.1,240-258).
cccactgttctatgtgtat

SEQ ID NO: 284808 - DNA, 19 bp, Homo sapiens
  siRNA target sequence for TM6SF1 (NM_023003.1,253-271).
gtgtatgcagtttttggat

SEQ ID NO: 284809 - DNA, 19 bp, Homo sapiens
  siRNA target sequence for TM6SF1 (NM_023003.1,259-277).
gcagtttttggatttacca

SEQ ID NO: 284810 - DNA, 19 bp, Homo sapiens
  siRNA target sequence for TM6SF1 (NM_023003.1,279-297).
cgtggtgaacctcatcata

SEQ ID NO: 284811 - DNA, 19 bp, Homo sapiens
  siRNA target sequence for TM6SF1 (NM_023003.1,373-391).
gcatatgggcacatgatct

SEQ ID NO: 284812 - DNA, 19 bp, Homo sapiens
  siRNA target sequence for TM6SF1 (NM_023003.1,399-417).
ggatggctctgctcattat

SEQ ID NO: 284813 - DNA, 19 bp, Homo sapiens
  siRNA target sequence for TM6SF1 (NM_023003.1,404-422).
gctctgctcattatctgat

SEQ ID NO: 284814 - DNA, 19 bp, Homo sapiens
  siRNA target sequence for TM6SF1 (NM_023003.1,407-425).
ctgctcattatctgatgta

SEQ ID NO: 284815 - DNA, 19 bp, Homo sapiens
  siRNA target sequence for TM6SF1 (NM_023003.1,448-466).
gcatgggaggaaacttata

SEQ ID NO: 284816 - DNA, 19 bp, Homo sapiens
  siRNA target sequence for TM6SF1 (NM_023003.1,573-591).
cttaagcataccatatact

SEQ ID NO: 284817 - DNA, 19 bp, Homo sapiens
  siRNA target sequence for TM6SF1 (NM_023003.1,579-597).
cataccatatacttgtctt

SEQ ID NO: 284818 - DNA, 19 bp, Homo sapiens
  siRNA target sequence for TM6SF1 (NM_023003.1,621-639).
ctataatcagccatcagaa

SEQ ID NO: 284819 - DNA, 19 bp, Homo sapiens
  siRNA target sequence for TM6SF1 (NM_023003.1,630-648).
gccatcagaaaattataat

SEQ ID NO: 284820 - DNA, 19 bp, Homo sapiens
  siRNA target sequence for TM6SF1 (NM_023003.1,690-708).
gctgagaagaccatttgat

SEQ ID NO: 284821 - DNA, 19 bp, Homo sapiens
  siRNA target sequence for TM6SF1 (NM_023003.1,691-709).
ctgagaagaccatttgatt

SEQ ID NO: 284822 - DNA, 19 bp, Homo sapiens
  siRNA target sequence for TM6SF1 (NM_023003.1,695-713).
gaagaccatttgatttaat

SEQ ID NO: 284823 - DNA, 19 bp, Homo sapiens
  siRNA target sequence for TM6SF1 (NM_023003.1,749-767).
gcctgttcagaggtttgat

SEQ ID NO: 284824 - DNA, 19 bp, Homo sapiens
  siRNA target sequence for TM6SF1 (NM_023003.1,760-778).
ggtttgattgctttggatt

SEQ ID NO: 284825 - DNA, 19 bp, Homo sapiens
  siRNA target sequence for TM6SF1 (NM_023003.1,785-803).
ctgagctctgccgattata

SEQ ID NO: 284826 - DNA, 19 bp, Homo sapiens
  siRNA target sequence for TM6SF1 (NM_023003.1,787-805).
gagctctgccgattatata

SEQ ID NO: 284827 - DNA, 19 bp, Homo sapiens
  siRNA target sequence for TM6SF1 (NM_023003.1,795-813).
ccgattatatacgcaattt

SEQ ID NO: 284828 - DNA, 19 bp, Homo sapiens
  siRNA target sequence for TM6SF1 (NM_023003.1,797-815).
gattatatacgcaatttca

SEQ ID NO: 284829 - DNA, 19 bp, Homo sapiens
  siRNA target sequence for TM6SF1 (NM_023003.1,831-849).
ggatcctgctgcttatcct

SEQ ID NO: 284830 - DNA, 19 bp, Homo sapiens
  siRNA target sequence for TM6SF1 (NM_023003.1,862-880).
ctggcatatatgttctatt

SEQ ID NO: 284831 - DNA, 19 bp, Homo sapiens
  siRNA target sequence for TM6SF1 (NM_023003.1,935-953).
ggatgcctgacatcacatt

SEQ ID NO: 284832 - DNA, 19 bp, Homo sapiens
  siRNA target sequence for TM6SF1 (NM_023003.1,1012-1030).
gctagaactgcttatgtct

SEQ ID NO: 284833 - DNA, 19 bp, Homo sapiens
  siRNA target sequence for TM6SF1 (NM_023003.1,1013-1031).
ctagaactgcttatgtcta

SEQ ID NO: 284834 - DNA, 19 bp, Homo sapiens
  siRNA target sequence for TM6SF1 (NM_023003.1,1096-1114).
cagctcttggcctatcgtt

SEQ ID NO: 284835 - DNA, 19 bp, Homo sapiens
  siRNA target sequence for TM6SF1 (NM_023003.1,1105-1123).
gcctatcgttgtatctaca

SEQ ID NO: 284836 - DNA, 19 bp, Homo sapiens
  siRNA target sequence for TM6SF1 (NM_023003.1,1106-1124).
cctatcgttgtatctacaa

SEQ ID NO: 284837 - DNA, 19 bp, Homo sapiens
  siRNA target sequence for TM6SF1 (NM_023003.1,1107-1125).
ctatcgttgtatctacaaa

SEQ ID NO: 284838 - DNA, 19 bp, Homo sapiens
  siRNA target sequence for TMEFF2 (NM_016192.2,437-455).
ctttgcgagggcttttgct

SEQ ID NO: 284839 - DNA, 19 bp, Homo sapiens
  siRNA target sequence for TMEFF2 (NM_016192.2,512-530).
gctttccctacctccttaa

SEQ ID NO: 284840 - DNA, 19 bp, Homo sapiens
  siRNA target sequence for TMEFF2 (NM_016192.2,555-573).
ggaattgctctggttatga

SEQ ID NO: 284841 - DNA, 19 bp, Homo sapiens
  siRNA target sequence for TMEFF2 (NM_016192.2,602-620).
gacaccaacacctgtaaat

SEQ ID NO: 284842 - DNA, 19 bp, Homo sapiens
  siRNA target sequence for TMEFF2 (NM_016192.2,604-622).
caccaacacctgtaaattt

SEQ ID NO: 284843 - DNA, 19 bp, Homo sapiens
  siRNA target sequence for TMEFF2 (NM_016192.2,607-625).
caacacctgtaaatttgat

SEQ ID NO: 284844 - DNA, 19 bp, Homo sapiens
  siRNA target sequence for TMEFF2 (NM_016192.2,714-732).
gggagagctaccagaatga

SEQ ID NO: 284845 - DNA, 19 bp, Homo sapiens
  siRNA target sequence for TMEFF2 (NM_016192.2,716-734).
gagagctaccagaatgagt

SEQ ID NO: 284846 - DNA, 19 bp, Homo sapiens
  siRNA target sequence for TMEFF2 (NM_016192.2,720-738).
gctaccagaatgagtgtta

SEQ ID NO: 284847 - DNA, 19 bp, Homo sapiens
  siRNA target sequence for TMEFF2 (NM_016192.2,742-760).
gcgacaggctgcatgcaaa

SEQ ID NO: 284848 - DNA, 19 bp, Homo sapiens
  siRNA target sequence for TMEFF2 (NM_016192.2,781-799).
ggtgtcagaaggatcatgt

SEQ ID NO: 284849 - DNA, 19 bp, Homo sapiens
  siRNA target sequence for TMEFF2 (NM_016192.2,866-884).
gagacatccacctgtgata

SEQ ID NO: 284850 - DNA, 19 bp, Homo sapiens
  siRNA target sequence for TMEFF2 (NM_016192.2,868-886).
gacatccacctgtgatatt

SEQ ID NO: 284851 - DNA, 19 bp, Homo sapiens
  siRNA target sequence for TMEFF2 (NM_016192.2,926-944).
gtctggtgtgtgtgtaata

SEQ ID NO: 284852 - DNA, 19 bp, Homo sapiens
  siRNA target sequence for TMEFF2 (NM_016192.2,979-997).
cgcttctgatgggaaatct

SEQ ID NO: 284853 - DNA, 19 bp, Homo sapiens
  siRNA target sequence for TMEFF2 (NM_016192.2,981-999).
cttctgatgggaaatctta

SEQ ID NO: 284854 - DNA, 19 bp, Homo sapiens
  siRNA target sequence for TMEFF2 (NM_016192.2,1060-1078).
gtctttgggtcgatgtcaa

SEQ ID NO: 284855 - DNA, 19 bp, Homo sapiens
  siRNA target sequence for TMEFF2 (NM_016192.2,1070-1088).
cgatgtcaagataacacaa

SEQ ID NO: 284856 - DNA, 19 bp, Homo sapiens
  siRNA target sequence for TMEFF2 (NM_016192.2,1079-1097).
gataacacaactacaacta

SEQ ID NO: 284857 - DNA, 19 bp, Homo sapiens
  siRNA target sequence for TMEFF2 (NM_016192.2,1184-1202).
ccttgtccggaacattaca

SEQ ID NO: 284858 - DNA, 19 bp, Homo sapiens
  siRNA target sequence for TMEFF2 (NM_016192.2,1185-1203).
cttgtccggaacattacaa

SEQ ID NO: 284859 - DNA, 19 bp, Homo sapiens
  siRNA target sequence for TMEFF2 (NM_016192.2,1225-1243).
gtgtgagcattctatcaat

SEQ ID NO: 284860 - DNA, 19 bp, Homo sapiens
  siRNA target sequence for TMEFF2 (NM_016192.2,1227-1245).
gtgagcattctatcaatat

SEQ ID NO: 284861 - DNA, 19 bp, Homo sapiens
  siRNA target sequence for TMEFF2 (NM_016192.2,1329-1347).
ccggtcctgtacgatttca

SEQ ID NO: 284862 - DNA, 19 bp, Homo sapiens
  siRNA target sequence for TMEFF2 (NM_016192.2,1331-1349).
ggtcctgtacgatttcagt

SEQ ID NO: 284863 - DNA, 19 bp, Homo sapiens
  siRNA target sequence for TMEFF2 (NM_016192.2,1332-1350).
gtcctgtacgatttcagta

SEQ ID NO: 284864 - DNA, 19 bp, Homo sapiens
  siRNA target sequence for TMEFF2 (NM_016192.2,1403-1421).
gtggtcctctgcatcacaa

SEQ ID NO: 284865 - DNA, 19 bp, Homo sapiens
  siRNA target sequence for TMEFF2 (NM_016192.2,1409-1427).
ctctgcatcacaaggaaat

SEQ ID NO: 284866 - DNA, 19 bp, Homo sapiens
  siRNA target sequence for TMEFF2 (NM_016192.2,1471-1489).
gcactacagttcagacaat

SEQ ID NO: 284867 - DNA, 19 bp, Homo sapiens
  siRNA target sequence for TMEFF2 (NM_016192.2,1472-1490).
cactacagttcagacaata

SEQ ID NO: 284868 - DNA, 19 bp, Homo sapiens
  siRNA target sequence for TMEFF2 (NM_016192.2,1474-1492).
ctacagttcagacaataca

SEQ ID NO: 284869 - DNA, 19 bp, Homo sapiens
  siRNA target sequence for TMEFF2 (NM_016192.2,1477-1495).
cagttcagacaatacaaca

SEQ ID NO: 284870 - DNA, 19 bp, Homo sapiens
  siRNA target sequence for TMEFF2 (NM_016192.2,1497-1515).
gagcgtccacgaggttaat

SEQ ID NO: 284871 - DNA, 19 bp, Homo sapiens
  siRNA target sequence for TMEFF2 (NM_016192.2,1499-1517).
gcgtccacgaggttaatct

SEQ ID NO: 284872 - DNA, 19 bp, Homo sapiens
  siRNA target sequence for TMEM14A (NM_014051.2,158-176).
ggacctgatcggttttggt

SEQ ID NO: 284873 - DNA, 19 bp, Homo sapiens
  siRNA target sequence for TMEM14A (NM_014051.2,159-177).
gacctgatcggttttggtt

SEQ ID NO: 284874 - DNA, 19 bp, Homo sapiens
  siRNA target sequence for TMEM14A (NM_014051.2,161-179).
cctgatcggttttggttat

SEQ ID NO: 284875 - DNA, 19 bp, Homo sapiens
  siRNA target sequence for TMEM14A (NM_014051.2,164-182).
gatcggttttggttatgca

SEQ ID NO: 284876 - DNA, 19 bp, Homo sapiens
  siRNA target sequence for TMEM14A (NM_014051.2,183-201).
gccctcgtgacatttggaa

SEQ ID NO: 284877 - DNA, 19 bp, Homo sapiens
  siRNA target sequence for TMEM14A (NM_014051.2,226-244).
gtggtgttccgtctttgat

SEQ ID NO: 284878 - DNA, 19 bp, Homo sapiens
  siRNA target sequence for TMEM14A (NM_014051.2,238-256).
ctttgattgctggtctttt

SEQ ID NO: 284879 - DNA, 19 bp, Homo sapiens
  siRNA target sequence for TMEM14A (NM_014051.2,296-314).
caatgacaaacgagatgta

SEQ ID NO: 284880 - DNA, 19 bp, Homo sapiens
  siRNA target sequence for TMEM14A (NM_014051.2,312-330).
gtaaaagtgtcactgttta

SEQ ID NO: 284881 - DNA, 19 bp, Homo sapiens
  siRNA target sequence for TMEM14A (NM_014051.2,406-424).
caggtttaagcctcatgat

SEQ ID NO: 284882 - DNA, 19 bp, Homo sapiens
  siRNA target sequence for TMEM14A (NM_014051.2,408-426).
ggtttaagcctcatgatga

SEQ ID NO: 284883 - DNA, 19 bp, Homo sapiens
  siRNA target sequence for TMEM14A (NM_014051.2,409-427).
gtttaagcctcatgatgat

SEQ ID NO: 284884 - DNA, 19 bp, Homo sapiens
  siRNA target sequence for TMEM8 (NM_021259.1,574-592).
cccagaagatcgagttgaa

SEQ ID NO: 284885 - DNA, 19 bp, Homo sapiens
  siRNA target sequence for TMEM8 (NM_021259.1,646-664).
gggtggtcgagatttccat

SEQ ID NO: 284886 - DNA, 19 bp, Homo sapiens
  siRNA target sequence for TMEM8 (NM_021259.1,953-971).
cgggacagtggctttcagt

SEQ ID NO: 284887 - DNA, 19 bp, Homo sapiens
  siRNA target sequence for TMEM8 (NM_021259.1,1037-1055).
ccaaaaccagagcttcaat

SEQ ID NO: 284888 - DNA, 19 bp, Homo sapiens
  siRNA target sequence for TMEM8 (NM_021259.1,1364-1382).
cttccttggcttcaatact

SEQ ID NO: 284889 - DNA, 19 bp, Homo sapiens
  siRNA target sequence for TMEM8 (NM_021259.1,1572-1590).
gtgccctgtttgaacgatt

SEQ ID NO: 284890 - DNA, 19 bp, Homo sapiens
  siRNA target sequence for TMEM8 (NM_021259.1,1741-1759).
cgctcagcaacctcatgtt

SEQ ID NO: 284891 - DNA, 19 bp, Homo sapiens
  siRNA target sequence for TMEM8 (NM_021259.1,2227-2245).
ctagcgacaactactacta

SEQ ID NO: 284892 - DNA, 19 bp, Homo sapiens
  siRNA target sequence for TMEM9 (NM_016456.2,192-210).
gaagatatccggtgcaaat

SEQ ID NO: 284893 - DNA, 19 bp, Homo sapiens
  siRNA target sequence for TMEM9 (NM_016456.2,195-213).
gatatccggtgcaaatgca

SEQ ID NO: 284894 - DNA, 19 bp, Homo sapiens
  siRNA target sequence for TMEM9 (NM_016456.2,467-485).
ccgaaagccggatgcatat

SEQ ID NO: 284895 - DNA, 19 bp, Homo sapiens
  siRNA target sequence for TMEM9 (NM_016456.2,468-486).
cgaaagccggatgcatata

SEQ ID NO: 284896 - DNA, 19 bp, Homo sapiens
  siRNA target sequence for TMEPAI (NM_020182.3,942-960).
gcgcgcacccccaaacaga

SEQ ID NO: 284897 - DNA, 19 bp, Homo sapiens
  siRNA target sequence for TMEPAI (NM_020182.3,943-961).
cgcgcacccccaaacagaa

SEQ ID NO: 284898 - DNA, 19 bp, Homo sapiens
  siRNA target sequence for TPARL (NM_018475.2,199-217).
cgggtcgagaaaatattta

SEQ ID NO: 284899 - DNA, 19 bp, Homo sapiens
  siRNA target sequence for TPARL (NM_018475.2,226-244).
gctccagttcataccaata

SEQ ID NO: 284900 - DNA, 19 bp, Homo sapiens
  siRNA target sequence for TPARL (NM_018475.2,273-291).
gggatttatccatgcattt

SEQ ID NO: 284901 - DNA, 19 bp, Homo sapiens
  siRNA target sequence for TPARL (NM_018475.2,275-293).
gatttatccatgcatttgt

SEQ ID NO: 284902 - DNA, 19 bp, Homo sapiens
  siRNA target sequence for TPARL (NM_018475.2,292-310).
gtcgctgccatatcagtta

SEQ ID NO: 284903 - DNA, 19 bp, Homo sapiens
  siRNA target sequence for TPARL (NM_018475.2,295-313).
gctgccatatcagttatta

SEQ ID NO: 284904 - DNA, 19 bp, Homo sapiens
  siRNA target sequence for TPARL (NM_018475.2,300-318).
catatcagttattattgta

SEQ ID NO: 284905 - DNA, 19 bp, Homo sapiens
  siRNA target sequence for TPARL (NM_018475.2,328-346).
ggtgataagacatttttta

SEQ ID NO: 284906 - DNA, 19 bp, Homo sapiens
  siRNA target sequence for TPARL (NM_018475.2,329-347).
gtgataagacattttttat

SEQ ID NO: 284907 - DNA, 19 bp, Homo sapiens
  siRNA target sequence for TPARL (NM_018475.2,465-483).
cagggtctatacatactat

SEQ ID NO: 284908 - DNA, 19 bp, Homo sapiens
  siRNA target sequence for TPARL (NM_018475.2,503-521).
ccatttttggcattagaat

SEQ ID NO: 284909 - DNA, 19 bp, Homo sapiens
  siRNA target sequence for TPARL (NM_018475.2,649-667).
gaaacgggtacaagcataa

SEQ ID NO: 284910 - DNA, 19 bp, Homo sapiens
  siRNA target sequence for TPARL (NM_018475.2,653-671).
cgggtacaagcataacagt

SEQ ID NO: 284911 - DNA, 19 bp, Homo sapiens
  siRNA target sequence for TPARL (NM_018475.2,654-672).
gggtacaagcataacagta

SEQ ID NO: 284912 - DNA, 19 bp, Homo sapiens
  siRNA target sequence for TPARL (NM_018475.2,715-733).
caagctcttacattaacat

SEQ ID NO: 284913 - DNA, 19 bp, Homo sapiens
  siRNA target sequence for TPARL (NM_018475.2,748-766).
ggtgatcgctctcaactaa

SEQ ID NO: 284914 - DNA, 19 bp, Homo sapiens
  siRNA target sequence for TPARL (NM_018475.2,751-769).
gatcgctctcaactaacta

SEQ ID NO: 284915 - DNA, 19 bp, Homo sapiens
  siRNA target sequence for TPARL (NM_018475.2,754-772).
cgctctcaactaactacaa

SEQ ID NO: 284916 - DNA, 19 bp, Homo sapiens
  siRNA target sequence for TPARL (NM_018475.2,755-773).
gctctcaactaactacaat

SEQ ID NO: 284917 - DNA, 19 bp, Homo sapiens
  siRNA target sequence for TPARL (NM_018475.2,756-774).
ctctcaactaactacaatt

SEQ ID NO: 284918 - DNA, 19 bp, Homo sapiens
  siRNA target sequence for TPARL (NM_018475.2,760-778).
caactaactacaattgtat

SEQ ID NO: 284919 - DNA, 19 bp, Homo sapiens
  siRNA target sequence for TPARL (NM_018475.2,839-857).
gcacgggattggcagtaat

SEQ ID NO: 284920 - DNA, 19 bp, Homo sapiens
  siRNA target sequence for TPARL (NM_018475.2,840-858).
cacgggattggcagtaatt

SEQ ID NO: 284921 - DNA, 19 bp, Homo sapiens
  siRNA target sequence for TPARL (NM_018475.2,843-861).
gggattggcagtaattgga

SEQ ID NO: 284922 - DNA, 19 bp, Homo sapiens
  siRNA target sequence for TPARL (NM_018475.2,851-869).
cagtaattggaggaagaat

SEQ ID NO: 284923 - DNA, 19 bp, Homo sapiens
  siRNA target sequence for TPARL (NM_018475.2,870-888).
gatagcacagaaaatctct

SEQ ID NO: 284924 - DNA, 19 bp, Homo sapiens
  siRNA target sequence for TPARL (NM_018475.2,887-905).
ctgtcagaactgtgacaat

SEQ ID NO: 284925 - DNA, 19 bp, Homo sapiens
  siRNA target sequence for TPD52L1 (NM_003287.1,313-331).
cagctagaagacgaaatta

SEQ ID NO: 284926 - DNA, 19 bp, Homo sapiens
  siRNA target sequence for TPD52L1 (NM_003287.1,315-333).
gctagaagacgaaattaca

SEQ ID NO: 284927 - DNA, 19 bp, Homo sapiens
  siRNA target sequence for TPD52L1 (NM_003287.1,356-374).
cgaaagaaaggcatctagt

SEQ ID NO: 284928 - DNA, 19 bp, Homo sapiens
  siRNA target sequence for TPD52L1 (NM_003287.1,357-375).
gaaagaaaggcatctagtt

SEQ ID NO: 284929 - DNA, 19 bp, Homo sapiens
  siRNA target sequence for TPD52L1 (NM_003287.1,365-383).
ggcatctagttgagataaa

SEQ ID NO: 284930 - DNA, 19 bp, Homo sapiens
  siRNA target sequence for TPD52L1 (NM_003287.1,393-411).
cggcatgaacctgatgaat

SEQ ID NO: 284931 - DNA, 19 bp, Homo sapiens
  siRNA target sequence for TPD52L1 (NM_003287.1,395-413).
gcatgaacctgatgaatga

SEQ ID NO: 284932 - DNA, 19 bp, Homo sapiens
  siRNA target sequence for TPD52L1 (NM_003287.1,412-430).
gaattaaaacagaacttca

SEQ ID NO: 284933 - DNA, 19 bp, Homo sapiens
  siRNA target sequence for TPD52L1 (NM_003287.1,570-588).
ctccattcgccattccata

SEQ ID NO: 284934 - DNA, 19 bp, Homo sapiens
  siRNA target sequence for TPD52L1 (NM_003287.1,573-591).
cattcgccattccataagt

SEQ ID NO: 284935 - DNA, 19 bp, Homo sapiens
  siRNA target sequence for TPD52L1 (NM_003287.1,678-696).
cggtacgaaccctaatgga

SEQ ID NO: 284936 - DNA, 19 bp, Homo sapiens
  siRNA target sequence for TSGA10 (NM_025244.1,630-648).
gatgcgaagtaggtctaaa

SEQ ID NO: 284937 - DNA, 19 bp, Homo sapiens
  siRNA target sequence for TSGA10 (NM_025244.1,633-651).
gcgaagtaggtctaaaagt

SEQ ID NO: 284938 - DNA, 19 bp, Homo sapiens
  siRNA target sequence for TSGA10 (NM_025244.1,683-701).
caaactgtgatgtagaact

SEQ ID NO: 284939 - DNA, 19 bp, Homo sapiens
  siRNA target sequence for TSGA10 (NM_025244.1,689-707).
gtgatgtagaacttttgaa

SEQ ID NO: 284940 - DNA, 19 bp, Homo sapiens
  siRNA target sequence for TSGA10 (NM_025244.1,716-734).
caagagatcgtgaagaact

SEQ ID NO: 284941 - DNA, 19 bp, Homo sapiens
  siRNA target sequence for TSGA10 (NM_025244.1,725-743).
gtgaagaacttaaatgcat

SEQ ID NO: 284942 - DNA, 19 bp, Homo sapiens
  siRNA target sequence for TSGA10 (NM_025244.1,781-799).
ggtaatgtcaaggttctta

SEQ ID NO: 284943 - DNA, 19 bp, Homo sapiens
  siRNA target sequence for TSGA10 (NM_025244.1,803-821).
ctgagagagacaagatctt

SEQ ID NO: 284944 - DNA, 19 bp, Homo sapiens
  siRNA target sequence for TSGA10 (NM_025244.1,856-874).
cgacttcgacgagaaatga

SEQ ID NO: 284945 - DNA, 19 bp, Homo sapiens
  siRNA target sequence for TSGA10 (NM_025244.1,857-875).
gacttcgacgagaaatgat

SEQ ID NO: 284946 - DNA, 19 bp, Homo sapiens
  siRNA target sequence for TSGA10 (NM_025244.1,859-877).
cttcgacgagaaatgatga

SEQ ID NO: 284947 - DNA, 19 bp, Homo sapiens
  siRNA target sequence for TSGA10 (NM_025244.1,882-900).
ctgtaagagtcctaaatca

SEQ ID NO: 284948 - DNA, 19 bp, Homo sapiens
  siRNA target sequence for TSGA10 (NM_025244.1,902-920).
caacggcacatgctattct

SEQ ID NO: 284949 - DNA, 19 bp, Homo sapiens
  siRNA target sequence for TSGA10 (NM_025244.1,922-940).
cggcgagtggagactgaaa

SEQ ID NO: 284950 - DNA, 19 bp, Homo sapiens
  siRNA target sequence for TSGA10 (NM_025244.1,941-959).
gagatgtagcctttactga

SEQ ID NO: 284951 - DNA, 19 bp, Homo sapiens
  siRNA target sequence for TSGA10 (NM_025244.1,974-992).
ccacagaacgagatagtct

SEQ ID NO: 284952 - DNA, 19 bp, Homo sapiens
  siRNA target sequence for TSGA10 (NM_025244.1,975-993).
cacagaacgagatagtcta

SEQ ID NO: 284953 - DNA, 19 bp, Homo sapiens
  siRNA target sequence for TSGA10 (NM_025244.1,991-1009).
ctaagggagaggctaaaga

SEQ ID NO: 284954 - DNA, 19 bp, Homo sapiens
  siRNA target sequence for TSGA10 (NM_025244.1,1068-1086).
ggagtgtacagttcataat

SEQ ID NO: 284955 - DNA, 19 bp, Homo sapiens
  siRNA target sequence for TSGA10 (NM_025244.1,1073-1091).
gtacagttcataatcttga

SEQ ID NO: 284956 - DNA, 19 bp, Homo sapiens
  siRNA target sequence for TSGA10 (NM_025244.1,1096-1114).
gaacgtatggagcaaatgt

SEQ ID NO: 284957 - DNA, 19 bp, Homo sapiens
  siRNA target sequence for TSGA10 (NM_025244.1,1099-1117).
cgtatggagcaaatgtcaa

SEQ ID NO: 284958 - DNA, 19 bp, Homo sapiens
  siRNA target sequence for TSGA10 (NM_025244.1,1100-1118).
gtatggagcaaatgtcaaa

SEQ ID NO: 284959 - DNA, 19 bp, Homo sapiens
  siRNA target sequence for TSGA10 (NM_025244.1,1145-1163).
gcactgtggaaaaagaaat

SEQ ID NO: 284960 - DNA, 19 bp, Homo sapiens
  siRNA target sequence for TSGA10 (NM_025244.1,1188-1206).
ggataccgaaagtgaactt

SEQ ID NO: 284961 - DNA, 19 bp, Homo sapiens
  siRNA target sequence for TSGA10 (NM_025244.1,1209-1227).
cagacaaaaagcagagaat

SEQ ID NO: 284962 - DNA, 19 bp, Homo sapiens
  siRNA target sequence for TSGA10 (NM_025244.1,1315-1333).
cttactcaggagaaaatta

SEQ ID NO: 284963 - DNA, 19 bp, Homo sapiens
  siRNA target sequence for TSGA10 (NM_025244.1,1378-1396).
gcacagcgagaagaaatca

SEQ ID NO: 284964 - DNA, 19 bp, Homo sapiens
  siRNA target sequence for TSGA10 (NM_025244.1,1406-1424).
gtggaaccctcaatgatct

SEQ ID NO: 284965 - DNA, 19 bp, Homo sapiens
  siRNA target sequence for TSGA10 (NM_025244.1,1481-1499).
catcccttggagagagttt

SEQ ID NO: 284966 - DNA, 19 bp, Homo sapiens
  siRNA target sequence for TSGA10 (NM_025244.1,1569-1587).
gtgtactgaggccctaatt

SEQ ID NO: 284967 - DNA, 19 bp, Homo sapiens
  siRNA target sequence for TSGA10 (NM_025244.1,1571-1589).
gtactgaggccctaattgt

SEQ ID NO: 284968 - DNA, 19 bp, Homo sapiens
  siRNA target sequence for TSGA10 (NM_025244.1,1581-1599).
cctaattgtgtgtgaacaa

SEQ ID NO: 284969 - DNA, 19 bp, Homo sapiens
  siRNA target sequence for TSGA10 (NM_025244.1,1610-1628).
gaatgcgtcggcaattgga

SEQ ID NO: 284970 - DNA, 19 bp, Homo sapiens
  siRNA target sequence for TSGA10 (NM_025244.1,1619-1637).
ggcaattggatgagacaaa

SEQ ID NO: 284971 - DNA, 19 bp, Homo sapiens
  siRNA target sequence for TSGA10 (NM_025244.1,1653-1671).
gatcgccagggaaagagat

SEQ ID NO: 284972 - DNA, 19 bp, Homo sapiens
  siRNA target sequence for TSGA10 (NM_025244.1,1657-1675).
gccagggaaagagatatct

SEQ ID NO: 284973 - DNA, 19 bp, Homo sapiens
  siRNA target sequence for TSGA10 (NM_025244.1,1679-1697).
ctcatgacaatgacaatct

SEQ ID NO: 284974 - DNA, 19 bp, Homo sapiens
  siRNA target sequence for TSGA10 (NM_025244.1,1692-1710).
caatctccaggaacagttt

SEQ ID NO: 284975 - DNA, 19 bp, Homo sapiens
  siRNA target sequence for TSGA10 (NM_025244.1,1735-1753).
gcactgtccaaaaaattga

SEQ ID NO: 284976 - DNA, 19 bp, Homo sapiens
  siRNA target sequence for TSGA10 (NM_025244.1,1756-1774).
gacactcataatgaactta

SEQ ID NO: 284977 - DNA, 19 bp, Homo sapiens
  siRNA target sequence for TSGA10 (NM_025244.1,1758-1776).
cactcataatgaacttaat

SEQ ID NO: 284978 - DNA, 19 bp, Homo sapiens
  siRNA target sequence for TSGA10 (NM_025244.1,1760-1778).
ctcataatgaacttaatga

SEQ ID NO: 284979 - DNA, 19 bp, Homo sapiens
  siRNA target sequence for TSGA10 (NM_025244.1,1788-1806).
gaaggttcaagatactaat

SEQ ID NO: 284980 - DNA, 19 bp, Homo sapiens
  siRNA target sequence for TSGA10 (NM_025244.1,1802-1820).
ctaatttggaggttaacaa

SEQ ID NO: 284981 - DNA, 19 bp, Homo sapiens
  siRNA target sequence for TSGA10 (NM_025244.1,1812-1830).
ggttaacaagctgaagaat

SEQ ID NO: 284982 - DNA, 19 bp, Homo sapiens
  siRNA target sequence for TSGA10 (NM_025244.1,1813-1831).
gttaacaagctgaagaata

SEQ ID NO: 284983 - DNA, 19 bp, Homo sapiens
  siRNA target sequence for TSGA10 (NM_025244.1,1850-1868).
ctgagaaccggcaaatgat

SEQ ID NO: 284984 - DNA, 19 bp, Homo sapiens
  siRNA target sequence for TSGA10 (NM_025244.1,1924-1942).
caatcagaggcagataaca

SEQ ID NO: 284985 - DNA, 19 bp, Homo sapiens
  siRNA target sequence for TSGA10 (NM_025244.1,2020-2038).
gaggttgagcaacacttaa

SEQ ID NO: 284986 - DNA, 19 bp, Homo sapiens
  siRNA target sequence for TSGA10 (NM_025244.1,2022-2040).
ggttgagcaacacttaaat

SEQ ID NO: 284987 - DNA, 19 bp, Homo sapiens
  siRNA target sequence for TSGA10 (NM_025244.1,2061-2079).
ccagatttctaccttacat

SEQ ID NO: 284988 - DNA, 19 bp, Homo sapiens
  siRNA target sequence for TSGA10 (NM_025244.1,2062-2080).
cagatttctaccttacata

SEQ ID NO: 284989 - DNA, 19 bp, Homo sapiens
  siRNA target sequence for TSGA10 (NM_025244.1,2069-2087).
ctaccttacataaatctgt

SEQ ID NO: 284990 - DNA, 19 bp, Homo sapiens
  siRNA target sequence for TSGA10 (NM_025244.1,2136-2154).
cgctcttgcagatttgtct

SEQ ID NO: 284991 - DNA, 19 bp, Homo sapiens
  siRNA target sequence for TSGA10 (NM_025244.1,2159-2177).
ctagggaactctgtattaa

SEQ ID NO: 284992 - DNA, 19 bp, Homo sapiens
  siRNA target sequence for TSGA10 (NM_025244.1,2190-2208).
caaagaacttcttaatcga

SEQ ID NO: 284993 - DNA, 19 bp, Homo sapiens
  siRNA target sequence for TSGA10 (NM_025244.1,2211-2229).
gctggttgctaaagatcaa

SEQ ID NO: 284994 - DNA, 19 bp, Homo sapiens
  siRNA target sequence for TSGA10 (NM_025244.1,2288-2306).
ggagtcagatggcaaatga

SEQ ID NO: 284995 - DNA, 19 bp, Homo sapiens
  siRNA target sequence for TSGA10 (NM_025244.1,2343-2361).
ggccaatcgagacaaagaa

SEQ ID NO: 284996 - DNA, 19 bp, Homo sapiens
  siRNA target sequence for TSGA10 (NM_025244.1,2345-2363).
ccaatcgagacaaagaata

SEQ ID NO: 284997 - DNA, 19 bp, Homo sapiens
  siRNA target sequence for TSGA10 (NM_025244.1,2346-2364).
caatcgagacaaagaatat

SEQ ID NO: 284998 - DNA, 19 bp, Homo sapiens
  siRNA target sequence for TSGA10 (NM_025244.1,2445-2463).
ggccatccagagtagagat

SEQ ID NO: 284999 - DNA, 19 bp, Homo sapiens
  siRNA target sequence for TSGA10 (NM_025244.1,2461-2479).
gatgtggcccagttcagaa

SEQ ID NO: 285000 - DNA, 19 bp, Homo sapiens
  siRNA target sequence for TSGA10 (NM_025244.1,2500-2518).
gctgatttagacattacca

SEQ ID NO: 285001 - DNA, 19 bp, Homo sapiens
  siRNA target sequence for TSGA10 (NM_025244.1,2501-2519).
ctgatttagacattaccaa

SEQ ID NO: 285002 - DNA, 19 bp, Homo sapiens
  siRNA target sequence for TSGA10 (NM_025244.1,2503-2521).
gatttagacattaccaaaa

SEQ ID NO: 285003 - DNA, 19 bp, Homo sapiens
  siRNA target sequence for TSGA10 (NM_025244.1,2549-2567).
gggagagggccgtacaaga

SEQ ID NO: 285004 - DNA, 19 bp, Homo sapiens
  siRNA target sequence for TSGA10 (NM_025244.1,2550-2568).
ggagagggccgtacaagaa

SEQ ID NO: 285005 - DNA, 19 bp, Homo sapiens
  siRNA target sequence for TSGA10 (NM_025244.1,2575-2593).
cgccaaaattattcaagta

SEQ ID NO: 285006 - DNA, 19 bp, Homo sapiens
  siRNA target sequence for TSGA10 (NM_025244.1,2596-2614).
gcttatcatatgagttcta

SEQ ID NO: 285007 - DNA, 19 bp, Homo sapiens
  siRNA target sequence for TSGA10 (NM_025244.1,2687-2705).
gatcattagaagagaatct

SEQ ID NO: 285008 - DNA, 19 bp, Homo sapiens
  siRNA target sequence for TU3A (NM_007177.1,721-739).
ggaatccggagctcatcaa

SEQ ID NO: 285009 - DNA, 19 bp, Homo sapiens
  siRNA target sequence for TU3A (NM_007177.1,1034-1052).
ggaaaacctgcggagaatt

SEQ ID NO: 285010 - DNA, 19 bp, Homo sapiens
  siRNA target sequence for TXNIP (NM_006472.1,364-382).
cttgcggagtggctaaagt

SEQ ID NO: 285011 - DNA, 19 bp, Homo sapiens
  siRNA target sequence for TXNIP (NM_006472.1,461-479).
ccagccaacaggtgagaat

SEQ ID NO: 285012 - DNA, 19 bp, Homo sapiens
  siRNA target sequence for TXNIP (NM_006472.1,592-610).
gggtgaaggcttttcttga

SEQ ID NO: 285013 - DNA, 19 bp, Homo sapiens
  siRNA target sequence for TXNIP (NM_006472.1,614-632).
cccgagccagccaactcaa

SEQ ID NO: 285014 - DNA, 19 bp, Homo sapiens
  siRNA target sequence for TXNIP (NM_006472.1,672-690).
gtcaatacccctgatttaa

SEQ ID NO: 285015 - DNA, 19 bp, Homo sapiens
  siRNA target sequence for TXNIP (NM_006472.1,692-710).
ggcacctgtgtctgctaaa

SEQ ID NO: 285016 - DNA, 19 bp, Homo sapiens
  siRNA target sequence for TXNIP (NM_006472.1,819-837).
gactttgagaatacatgtt

SEQ ID NO: 285017 - DNA, 19 bp, Homo sapiens
  siRNA target sequence for TXNIP (NM_006472.1,909-927).
ctgactcagaagttgtcat

SEQ ID NO: 285018 - DNA, 19 bp, Homo sapiens
  siRNA target sequence for TXNIP (NM_006472.1,928-946).
cagtcagaggcaatcatat

SEQ ID NO: 285019 - DNA, 19 bp, Homo sapiens
  siRNA target sequence for TXNIP (NM_006472.1,930-948).
gtcagaggcaatcatatta

SEQ ID NO: 285020 - DNA, 19 bp, Homo sapiens
  siRNA target sequence for TXNIP (NM_006472.1,982-1000).
gccttcgggttcagaagat

SEQ ID NO: 285021 - DNA, 19 bp, Homo sapiens
  siRNA target sequence for TXNIP (NM_006472.1,984-1002).
cttcgggttcagaagatca

SEQ ID NO: 285022 - DNA, 19 bp, Homo sapiens
  siRNA target sequence for TXNIP (NM_006472.1,1022-1040).
caacatccttcgagttgaa

SEQ ID NO: 285023 - DNA, 19 bp, Homo sapiens
  siRNA target sequence for TXNIP (NM_006472.1,1025-1043).
catccttcgagttgaatat

SEQ ID NO: 285024 - DNA, 19 bp, Homo sapiens
  siRNA target sequence for TXNIP (NM_006472.1,1029-1047).
cttcgagttgaatattcct

SEQ ID NO: 285025 - DNA, 19 bp, Homo sapiens
  siRNA target sequence for TXNIP (NM_006472.1,1035-1053).
gttgaatattccttactga

SEQ ID NO: 285026 - DNA, 19 bp, Homo sapiens
  siRNA target sequence for TXNIP (NM_006472.1,1174-1192).
gttgggtagatctgaacat

SEQ ID NO: 285027 - DNA, 19 bp, Homo sapiens
  siRNA target sequence for TXNIP (NM_006472.1,1216-1234).
cctgctatatggatgtcat

SEQ ID NO: 285028 - DNA, 19 bp, Homo sapiens
  siRNA target sequence for TXNIP (NM_006472.1,1217-1235).
ctgctatatggatgtcatt

SEQ ID NO: 285029 - DNA, 19 bp, Homo sapiens
  siRNA target sequence for TXNIP (NM_006472.1,1296-1314).
caagacagccctatcttta

SEQ ID NO: 285030 - DNA, 19 bp, Homo sapiens
  siRNA target sequence for TXNIP (NM_006472.1,1299-1317).
gacagccctatctttatgt

SEQ ID NO: 285031 - DNA, 19 bp, Homo sapiens
  siRNA target sequence for TXNIP (NM_006472.1,1301-1319).
cagccctatctttatgtat

SEQ ID NO: 285032 - DNA, 19 bp, Homo sapiens
  siRNA target sequence for TXNIP (NM_006472.1,1337-1355).
catgccaccaccgacttat

SEQ ID NO: 285033 - DNA, 19 bp, Homo sapiens
  siRNA target sequence for TXNIP (NM_006472.1,1340-1358).
gccaccaccgacttatact

SEQ ID NO: 285034 - DNA, 19 bp, Homo sapiens
  siRNA target sequence for TXNIP (NM_006472.1,1342-1360).
caccaccgacttatactga

SEQ ID NO: 285035 - DNA, 19 bp, Homo sapiens
  siRNA target sequence for UACA (NM_018003.1,126-144).
cgcatgcagcagattggaa

SEQ ID NO: 285036 - DNA, 19 bp, Homo sapiens
  siRNA target sequence for UACA (NM_018003.1,174-192).
cagaaaggggggatgtaga

SEQ ID NO: 285037 - DNA, 19 bp, Homo sapiens
  siRNA target sequence for UACA (NM_018003.1,176-194).
gaaaggggggatgtagaaa

SEQ ID NO: 285038 - DNA, 19 bp, Homo sapiens
  siRNA target sequence for UACA (NM_018003.1,180-198).
ggggggatgtagaaaaagt

SEQ ID NO: 285039 - DNA, 19 bp, Homo sapiens
  siRNA target sequence for UACA (NM_018003.1,223-241).
ggtcaatccaggcaaacta

SEQ ID NO: 285040 - DNA, 19 bp, Homo sapiens
  siRNA target sequence for UACA (NM_018003.1,226-244).
caatccaggcaaactagat

SEQ ID NO: 285041 - DNA, 19 bp, Homo sapiens
  siRNA target sequence for UACA (NM_018003.1,297-315).
gtttgaatgccatccttat

SEQ ID NO: 285042 - DNA, 19 bp, Homo sapiens
  siRNA target sequence for UACA (NM_018003.1,301-319).
gaatgccatccttatacat

SEQ ID NO: 285043 - DNA, 19 bp, Homo sapiens
  siRNA target sequence for UACA (NM_018003.1,311-329).
cttatacatggagttgata

SEQ ID NO: 285044 - DNA, 19 bp, Homo sapiens
  siRNA target sequence for UACA (NM_018003.1,375-393).
ctaagtatggacatgcatt

SEQ ID NO: 285045 - DNA, 19 bp, Homo sapiens
  siRNA target sequence for UACA (NM_018003.1,394-412).
gtgcctacaaaaacttcta

SEQ ID NO: 285046 - DNA, 19 bp, Homo sapiens
  siRNA target sequence for UACA (NM_018003.1,396-414).
gcctacaaaaacttctaca

SEQ ID NO: 285047 - DNA, 19 bp, Homo sapiens
  siRNA target sequence for UACA (NM_018003.1,514-532).
ccatggggcctctgtgaat

SEQ ID NO: 285048 - DNA, 19 bp, Homo sapiens
  siRNA target sequence for UACA (NM_018003.1,549-567).
ggcggacaccacttgttct

SEQ ID NO: 285049 - DNA, 19 bp, Homo sapiens
  siRNA target sequence for UACA (NM_018003.1,577-595).
gatgagtaggccaacaata

SEQ ID NO: 285050 - DNA, 19 bp, Homo sapiens
  siRNA target sequence for UACA (NM_018003.1,580-598).
gagtaggccaacaatatgt

SEQ ID NO: 285051 - DNA, 19 bp, Homo sapiens
  siRNA target sequence for UACA (NM_018003.1,661-679).
catgctaggttgcgaatat

SEQ ID NO: 285052 - DNA, 19 bp, Homo sapiens
  siRNA target sequence for UACA (NM_018003.1,664-682).
gctaggttgcgaatatggt

SEQ ID NO: 285053 - DNA, 19 bp, Homo sapiens
  siRNA target sequence for UACA (NM_018003.1,665-683).
ctaggttgcgaatatggtt

SEQ ID NO: 285054 - DNA, 19 bp, Homo sapiens
  siRNA target sequence for UACA (NM_018003.1,687-705).
gagatgcagtagaagtctt

SEQ ID NO: 285055 - DNA, 19 bp, Homo sapiens
  siRNA target sequence for UACA (NM_018003.1,737-755).
gatgcgcttggccatgata

SEQ ID NO: 285056 - DNA, 19 bp, Homo sapiens
  siRNA target sequence for UACA (NM_018003.1,742-760).
gcttggccatgatagttct

SEQ ID NO: 285057 - DNA, 19 bp, Homo sapiens
  siRNA target sequence for UACA (NM_018003.1,743-761).
cttggccatgatagttctt

SEQ ID NO: 285058 - DNA, 19 bp, Homo sapiens
  siRNA target sequence for UACA (NM_018003.1,746-764).
ggccatgatagttcttact

SEQ ID NO: 285059 - DNA, 19 bp, Homo sapiens
  siRNA target sequence for UACA (NM_018003.1,748-766).
ccatgatagttcttactat

SEQ ID NO: 285060 - DNA, 19 bp, Homo sapiens
  siRNA target sequence for UACA (NM_018003.1,779-797).
gacaatctggacattctaa

SEQ ID NO: 285061 - DNA, 19 bp, Homo sapiens
  siRNA target sequence for UACA (NM_018003.1,810-828).
ctgcatcggaaaataccaa

SEQ ID NO: 285062 - DNA, 19 bp, Homo sapiens
  siRNA target sequence for UACA (NM_018003.1,865-883).
gcaacagcgaaatttgaca

SEQ ID NO: 285063 - DNA, 19 bp, Homo sapiens
  siRNA target sequence for UACA (NM_018003.1,880-898).
gacacacatgcaagatgaa

SEQ ID NO: 285064 - DNA, 19 bp, Homo sapiens
  siRNA target sequence for UACA (NM_018003.1,914-932).
catcagagggagcatcaaa

SEQ ID NO: 285065 - DNA, 19 bp, Homo sapiens
  siRNA target sequence for UACA (NM_018003.1,1042-1060).
gaatgaggaagttatggtt

SEQ ID NO: 285066 - DNA, 19 bp, Homo sapiens
  siRNA target sequence for UACA (NM_018003.1,1096-1114).
gtcccttttggcagctaaa

SEQ ID NO: 285067 - DNA, 19 bp, Homo sapiens
  siRNA target sequence for UACA (NM_018003.1,1124-1142).
catgaagaaagcttaagga

SEQ ID NO: 285068 - DNA, 19 bp, Homo sapiens
  siRNA target sequence for UACA (NM_018003.1,1270-1288).
gtgtacttccccaggtata

SEQ ID NO: 285069 - DNA, 19 bp, Homo sapiens
  siRNA target sequence for UACA (NM_018003.1,1284-1302).
gtataccagcccatatgca

SEQ ID NO: 285070 - DNA, 19 bp, Homo sapiens
  siRNA target sequence for UACA (NM_018003.1,1295-1313).
catatgcaaagcagatcta

SEQ ID NO: 285071 - DNA, 19 bp, Homo sapiens
  siRNA target sequence for UACA (NM_018003.1,1301-1319).
caaagcagatctatgttaa

SEQ ID NO: 285072 - DNA, 19 bp, Homo sapiens
  siRNA target sequence for UACA (NM_018003.1,1340-1358).
cccagtcaaacgtcatact

SEQ ID NO: 285073 - DNA, 19 bp, Homo sapiens
  siRNA target sequence for UACA (NM_018003.1,1346-1364).
caaacgtcatactctgaaa

SEQ ID NO: 285074 - DNA, 19 bp, Homo sapiens
  siRNA target sequence for UACA (NM_018003.1,1350-1368).
cgtcatactctgaaaatga

SEQ ID NO: 285075 - DNA, 19 bp, Homo sapiens
  siRNA target sequence for UACA (NM_018003.1,1353-1371).
catactctgaaaatgaaat

SEQ ID NO: 285076 - DNA, 19 bp, Homo sapiens
  siRNA target sequence for UACA (NM_018003.1,1388-1406).
gaagcaatgcgaactttct

SEQ ID NO: 285077 - DNA, 19 bp, Homo sapiens
  siRNA target sequence for UACA (NM_018003.1,1426-1444).
ccgactgaagctccaaaat

SEQ ID NO: 285078 - DNA, 19 bp, Homo sapiens
  siRNA target sequence for UACA (NM_018003.1,1470-1488).
gcaaagctttagcattaga

SEQ ID NO: 285079 - DNA, 19 bp, Homo sapiens
  siRNA target sequence for UACA (NM_018003.1,1471-1489).
caaagctttagcattagaa

SEQ ID NO: 285080 - DNA, 19 bp, Homo sapiens
  siRNA target sequence for UACA (NM_018003.1,1528-1546).
gcaattagaagatgcatta

SEQ ID NO: 285081 - DNA, 19 bp, Homo sapiens
  siRNA target sequence for UACA (NM_018003.1,1571-1589).
gagtcagaaggtaaagtta

SEQ ID NO: 285082 - DNA, 19 bp, Homo sapiens
  siRNA target sequence for UACA (NM_018003.1,1613-1631).
gcccttaaagaacacttaa

SEQ ID NO: 285083 - DNA, 19 bp, Homo sapiens
  siRNA target sequence for UACA (NM_018003.1,1659-1677).
gactaaccgaggaactgaa

SEQ ID NO: 285084 - DNA, 19 bp, Homo sapiens
  siRNA target sequence for UACA (NM_018003.1,1808-1826).
gaaaataagcgattacaga

SEQ ID NO: 285085 - DNA, 19 bp, Homo sapiens
  siRNA target sequence for UACA (NM_018003.1,1829-1847).
gaacttagtatgtgtgaaa

SEQ ID NO: 285086 - DNA, 19 bp, Homo sapiens
  siRNA target sequence for UACA (NM_018003.1,1911-1929).
cgaagttggccctttccat

SEQ ID NO: 285087 - DNA, 19 bp, Homo sapiens
  siRNA target sequence for UACA (NM_018003.1,1959-1977).
gctcattatcaaatgaagt

SEQ ID NO: 285088 - DNA, 19 bp, Homo sapiens
  siRNA target sequence for UACA (NM_018003.1,1962-1980).
cattatcaaatgaagtgaa

SEQ ID NO: 285089 - DNA, 19 bp, Homo sapiens
  siRNA target sequence for UACA (NM_018003.1,2105-2123).
gaacatgaacaggttaaga

SEQ ID NO: 285090 - DNA, 19 bp, Homo sapiens
  siRNA target sequence for UACA (NM_018003.1,2158-2176).
gaagatcactgagttaaca

SEQ ID NO: 285091 - DNA, 19 bp, Homo sapiens
  siRNA target sequence for UACA (NM_018003.1,2239-2257).
ggagcaagcacataactta

SEQ ID NO: 285092 - DNA, 19 bp, Homo sapiens
  siRNA target sequence for UACA (NM_018003.1,2243-2261).
caagcacataacttaacaa

SEQ ID NO: 285093 - DNA, 19 bp, Homo sapiens
  siRNA target sequence for UACA (NM_018003.1,2254-2272).
cttaacaattgaaatgaaa

SEQ ID NO: 285094 - DNA, 19 bp, Homo sapiens
  siRNA target sequence for UACA (NM_018003.1,2432-2450).
gatgtaagccgcctagaaa

SEQ ID NO: 285095 - DNA, 19 bp, Homo sapiens
  siRNA target sequence for UACA (NM_018003.1,2443-2461).
cctagaaactgtgtttgta

SEQ ID NO: 285096 - DNA, 19 bp, Homo sapiens
  siRNA target sequence for UACA (NM_018003.1,2455-2473).
gtttgtacctcctgagaaa

SEQ ID NO: 285097 - DNA, 19 bp, Homo sapiens
  siRNA target sequence for UACA (NM_018003.1,2576-2594).
gctctcacatctgaaaaca

SEQ ID NO: 285098 - DNA, 19 bp, Homo sapiens
  siRNA target sequence for UACA (NM_018003.1,2631-2649).
cagttaaaacccatgaaga

SEQ ID NO: 285099 - DNA, 19 bp, Homo sapiens
  siRNA target sequence for UACA (NM_018003.1,2669-2687).
gacacgttagccaaaacta

SEQ ID NO: 285100 - DNA, 19 bp, Homo sapiens
  siRNA target sequence for UACA (NM_018003.1,2674-2692).
gttagccaaaactaacaga

SEQ ID NO: 285101 - DNA, 19 bp, Homo sapiens
  siRNA target sequence for UACA (NM_018003.1,2678-2696).
gccaaaactaacagagaat

SEQ ID NO: 285102 - DNA, 19 bp, Homo sapiens
  siRNA target sequence for UACA (NM_018003.1,2680-2698).
caaaactaacagagaatta

SEQ ID NO: 285103 - DNA, 19 bp, Homo sapiens
  siRNA target sequence for UACA (NM_018003.1,2852-2870).
ctaagtcagagcatgagaa

SEQ ID NO: 285104 - DNA, 19 bp, Homo sapiens
  siRNA target sequence for UACA (NM_018003.1,2868-2886).
gaaaggtgcaggatagtaa

SEQ ID NO: 285105 - DNA, 19 bp, Homo sapiens
  siRNA target sequence for UACA (NM_018003.1,2915-2933).
ggccaagaagagattgtga

SEQ ID NO: 285106 - DNA, 19 bp, Homo sapiens
  siRNA target sequence for UACA (NM_018003.1,2932-2950).
gacactgcatgccgaaatt

SEQ ID NO: 285107 - DNA, 19 bp, Homo sapiens
  siRNA target sequence for UACA (NM_018003.1,2934-2952).
cactgcatgccgaaattaa

SEQ ID NO: 285108 - DNA, 19 bp, Homo sapiens
  siRNA target sequence for UACA (NM_018003.1,2965-2983).
ggagctcgacacaatacaa

SEQ ID NO: 285109 - DNA, 19 bp, Homo sapiens
  siRNA target sequence for UACA (NM_018003.1,2968-2986).
gctcgacacaatacaagaa

SEQ ID NO: 285110 - DNA, 19 bp, Homo sapiens
  siRNA target sequence for UACA (NM_018003.1,2969-2987).
ctcgacacaatacaagaat

SEQ ID NO: 285111 - DNA, 19 bp, Homo sapiens
  siRNA target sequence for UACA (NM_018003.1,3026-3044).
gagtgcgagagaaaattta

SEQ ID NO: 285112 - DNA, 19 bp, Homo sapiens
  siRNA target sequence for UACA (NM_018003.1,3028-3046).
gtgcgagagaaaatttaaa

SEQ ID NO: 285113 - DNA, 19 bp, Homo sapiens
  siRNA target sequence for UACA (NM_018003.1,3082-3100).
gcagacacaaaagtatagt

SEQ ID NO: 285114 - DNA, 19 bp, Homo sapiens
  siRNA target sequence for UACA (NM_018003.1,3243-3261).
cagacgagctaaacaaaca

SEQ ID NO: 285115 - DNA, 19 bp, Homo sapiens
  siRNA target sequence for UACA (NM_018003.1,3245-3263).
gacgagctaaacaaacagt

SEQ ID NO: 285116 - DNA, 19 bp, Homo sapiens
  siRNA target sequence for UACA (NM_018003.1,3247-3265).
cgagctaaacaaacagtta

SEQ ID NO: 285117 - DNA, 19 bp, Homo sapiens
  siRNA target sequence for UACA (NM_018003.1,3288-3306).
cggaagtaaagaatgtgaa

SEQ ID NO: 285118 - DNA, 19 bp, Homo sapiens
  siRNA target sequence for UACA (NM_018003.1,3417-3435).
ctcttaatggcacaattga

SEQ ID NO: 285119 - DNA, 19 bp, Homo sapiens
  siRNA target sequence for UACA (NM_018003.1,3429-3447).
caattgaaaatctaaagga

SEQ ID NO: 285120 - DNA, 19 bp, Homo sapiens
  siRNA target sequence for UACA (NM_018003.1,3494-3512).
gtgaccaaactgcatcaat

SEQ ID NO: 285121 - DNA, 19 bp, Homo sapiens
  siRNA target sequence for UACA (NM_018003.1,3548-3566).
gcagagcatttgcagatta

SEQ ID NO: 285122 - DNA, 19 bp, Homo sapiens
  siRNA target sequence for UACA (NM_018003.1,3662-3680).
cagtcggaggttcagaata

SEQ ID NO: 285123 - DNA, 19 bp, Homo sapiens
  siRNA target sequence for UACA (NM_018003.1,3664-3682).
gtcggaggttcagaatact

SEQ ID NO: 285124 - DNA, 19 bp, Homo sapiens
  siRNA target sequence for UACA (NM_018003.1,3715-3733).
ggtagttgacttgtctaaa

SEQ ID NO: 285125 - DNA, 19 bp, Homo sapiens
  siRNA target sequence for UACA (NM_018003.1,3716-3734).
gtagttgacttgtctaaat

SEQ ID NO: 285126 - DNA, 19 bp, Homo sapiens
  siRNA target sequence for UACA (NM_018003.1,3914-3932).
cagaaggaacgatgtgata

SEQ ID NO: 285127 - DNA, 19 bp, Homo sapiens
  siRNA target sequence for UACA (NM_018003.1,3923-3941).
cgatgtgataagtccttaa

SEQ ID NO: 285128 - DNA, 19 bp, Homo sapiens
  siRNA target sequence for UACA (NM_018003.1,3942-3960).
caacaatcacagagttaca

SEQ ID NO: 285129 - DNA, 19 bp, Homo sapiens
  siRNA target sequence for UACA (NM_018003.1,4009-4027).
gataactgaactgcttaat

SEQ ID NO: 285130 - DNA, 19 bp, Homo sapiens
  siRNA target sequence for UACA (NM_018003.1,4255-4273).
ggctctgctccagatcata

SEQ ID NO: 285131 - DNA, 19 bp, Homo sapiens
  siRNA target sequence for UACA (NM_018003.1,4259-4277).
ctgctccagatcatacaaa

SEQ ID NO: 285132 - DNA, 19 bp, Homo sapiens
  siRNA target sequence for USP6NL (NM_014688.1,315-333).
ccaggagcgagctgaaata

SEQ ID NO: 285133 - DNA, 19 bp, Homo sapiens
  siRNA target sequence for USP6NL (NM_014688.1,318-336).
ggagcgagctgaaatagtt

SEQ ID NO: 285134 - DNA, 19 bp, Homo sapiens
  siRNA target sequence for USP6NL (NM_014688.1,388-406).
gctgattaccttgtttaca

SEQ ID NO: 285135 - DNA, 19 bp, Homo sapiens
  siRNA target sequence for USP6NL (NM_014688.1,389-407).
ctgattaccttgtttacaa

SEQ ID NO: 285136 - DNA, 19 bp, Homo sapiens
  siRNA target sequence for USP6NL (NM_014688.1,441-459).
ggagctcccagatcataat

SEQ ID NO: 285137 - DNA, 19 bp, Homo sapiens
  siRNA target sequence for USP6NL (NM_014688.1,564-582).
gcgaatttacaaaggaata

SEQ ID NO: 285138 - DNA, 19 bp, Homo sapiens
  siRNA target sequence for USP6NL (NM_014688.1,608-626).
gggccctccttcttgagat

SEQ ID NO: 285139 - DNA, 19 bp, Homo sapiens
  siRNA target sequence for USP6NL (NM_014688.1,643-661).
gaaacaagggacctgtata

SEQ ID NO: 285140 - DNA, 19 bp, Homo sapiens
  siRNA target sequence for USP6NL (NM_014688.1,650-668).
gggacctgtatagtaaatt

SEQ ID NO: 285141 - DNA, 19 bp, Homo sapiens
  siRNA target sequence for USP6NL (NM_014688.1,717-735).
ggatgtcaaccgcacattt

SEQ ID NO: 285142 - DNA, 19 bp, Homo sapiens
  siRNA target sequence for USP6NL (NM_014688.1,731-749).
catttcgggaccacattat

SEQ ID NO: 285143 - DNA, 19 bp, Homo sapiens
  siRNA target sequence for USP6NL (NM_014688.1,736-754).
cgggaccacattatgttta

SEQ ID NO: 285144 - DNA, 19 bp, Homo sapiens
  siRNA target sequence for USP6NL (NM_014688.1,738-756).
ggaccacattatgtttaga

SEQ ID NO: 285145 - DNA, 19 bp, Homo sapiens
  siRNA target sequence for USP6NL (NM_014688.1,802-820).
gcctattctatttataaca

SEQ ID NO: 285146 - DNA, 19 bp, Homo sapiens
  siRNA target sequence for USP6NL (NM_014688.1,848-866).
gccagatcacagctttact

SEQ ID NO: 285147 - DNA, 19 bp, Homo sapiens
  siRNA target sequence for USP6NL (NM_014688.1,857-875).
cagctttactcctcatgta

SEQ ID NO: 285148 - DNA, 19 bp, Homo sapiens
  siRNA target sequence for USP6NL (NM_014688.1,860-878).
ctttactcctcatgtatat

SEQ ID NO: 285149 - DNA, 19 bp, Homo sapiens
  siRNA target sequence for USP6NL (NM_014688.1,972-990).
cttgaggtttcaagaacat

SEQ ID NO: 285150 - DNA, 19 bp, Homo sapiens
  siRNA target sequence for USP6NL (NM_014688.1,977-995).
ggtttcaagaacatcatga

SEQ ID NO: 285151 - DNA, 19 bp, Homo sapiens
  siRNA target sequence for USP6NL (NM_014688.1,1039-1057).
gattctcaagaaatctaca

SEQ ID NO: 285152 - DNA, 19 bp, Homo sapiens
  siRNA target sequence for USP6NL (NM_014688.1,1053-1071).
ctacacaagtttttacaca

SEQ ID NO: 285153 - DNA, 19 bp, Homo sapiens
  siRNA target sequence for USP6NL (NM_014688.1,1058-1076).
caagtttttacacaatgaa

SEQ ID NO: 285154 - DNA, 19 bp, Homo sapiens
  siRNA target sequence for USP6NL (NM_014688.1,1102-1120).
cgtactccctttacactaa

SEQ ID NO: 285155 - DNA, 19 bp, Homo sapiens
  siRNA target sequence for USP6NL (NM_014688.1,1103-1121).
gtactccctttacactaaa

SEQ ID NO: 285156 - DNA, 19 bp, Homo sapiens
  siRNA target sequence for USP6NL (NM_014688.1,1127-1145).
gaatatgggatatctacat

SEQ ID NO: 285157 - DNA, 19 bp, Homo sapiens
  siRNA target sequence for USP6NL (NM_014688.1,1133-1151).
gggatatctacatctttga

SEQ ID NO: 285158 - DNA, 19 bp, Homo sapiens
  siRNA target sequence for USP6NL (NM_014688.1,1134-1152).
ggatatctacatctttgaa

SEQ ID NO: 285159 - DNA, 19 bp, Homo sapiens
  siRNA target sequence for USP6NL (NM_014688.1,1150-1168).
gaaggagaacgagttctta

SEQ ID NO: 285160 - DNA, 19 bp, Homo sapiens
  siRNA target sequence for USP6NL (NM_014688.1,1165-1183).
cttactgctatgtcttaca

SEQ ID NO: 285161 - DNA, 19 bp, Homo sapiens
  siRNA target sequence for USP6NL (NM_014688.1,1176-1194).
gtcttacaccatcttaaaa

SEQ ID NO: 285162 - DNA, 19 bp, Homo sapiens
  siRNA target sequence for USP6NL (NM_014688.1,1184-1202).
ccatcttaaaattacacaa

SEQ ID NO: 285163 - DNA, 19 bp, Homo sapiens
  siRNA target sequence for USP6NL (NM_014688.1,1252-1270).
gagaccctggcaaaggatt

SEQ ID NO: 285164 - DNA, 19 bp, Homo sapiens
  siRNA target sequence for USP6NL (NM_014688.1,1293-1311).
gatagagcaacttcagatt

SEQ ID NO: 285165 - DNA, 19 bp, Homo sapiens
  siRNA target sequence for USP6NL (NM_014688.1,1656-1674).
cagttccaggcaatataat

SEQ ID NO: 285166 - DNA, 19 bp, Homo sapiens
  siRNA target sequence for USP6NL (NM_014688.1,1678-1696).
gcagctgccaaccaaaata

SEQ ID NO: 285167 - DNA, 19 bp, Homo sapiens
  siRNA target sequence for USP6NL (NM_014688.1,1681-1699).
gctgccaaccaaaatagca

SEQ ID NO: 285168 - DNA, 19 bp, Homo sapiens
  siRNA target sequence for USP6NL (NM_014688.1,1697-1715).
gcaacgccacttcaaatat

SEQ ID NO: 285169 - DNA, 19 bp, Homo sapiens
  siRNA target sequence for USP6NL (NM_014688.1,1725-1743).
gtttgtgcccaaatggaat

SEQ ID NO: 285170 - DNA, 19 bp, Homo sapiens
  siRNA target sequence for USP6NL (NM_014688.1,1862-1880).
caaacgtgcggccaaagat

SEQ ID NO: 285171 - DNA, 19 bp, Homo sapiens
  siRNA target sequence for USP6NL (NM_014688.1,2043-2061).
gcacgctgagccaagttct

SEQ ID NO: 285172 - DNA, 19 bp, Homo sapiens
  siRNA target sequence for USP6NL (NM_014688.1,2044-2062).
cacgctgagccaagttcta

SEQ ID NO: 285173 - DNA, 19 bp, Homo sapiens
  siRNA target sequence for USP6NL (NM_014688.1,2046-2064).
cgctgagccaagttctagt

SEQ ID NO: 285174 - DNA, 19 bp, Homo sapiens
  siRNA target sequence for USP6NL (NM_014688.1,2057-2075).
gttctagtccatcaaaagt

SEQ ID NO: 285175 - DNA, 19 bp, Homo sapiens
  siRNA target sequence for USP6NL (NM_014688.1,2063-2081).
gtccatcaaaagtatccaa

SEQ ID NO: 285176 - DNA, 19 bp, Homo sapiens
  siRNA target sequence for USP6NL (NM_014688.1,2069-2087).
caaaagtatccaacaagtt

SEQ ID NO: 285177 - DNA, 19 bp, Homo sapiens
  siRNA target sequence for USP6NL (NM_014688.1,2187-2205).
cgtttaccacggaaactct

SEQ ID NO: 285178 - DNA, 19 bp, Homo sapiens
  siRNA target sequence for USP6NL (NM_014688.1,2255-2273).
gccctgggactcaactgaa

SEQ ID NO: 285179 - DNA, 19 bp, Homo sapiens
  siRNA target sequence for USP6NL (NM_014688.1,2256-2274).
ccctgggactcaactgaat

SEQ ID NO: 285180 - DNA, 19 bp, Homo sapiens
  siRNA target sequence for USP6NL (NM_014688.1,2260-2278).
gggactcaactgaatcctt

SEQ ID NO: 285181 - DNA, 19 bp, Homo sapiens
  siRNA target sequence for USP6NL (NM_014688.1,2283-2301).
gagacctcatggttctact

SEQ ID NO: 285182 - DNA, 19 bp, Homo sapiens
  siRNA target sequence for USP6NL (NM_014688.1,2314-2332).
gcttctccggagaaatctt

SEQ ID NO: 285183 - DNA, 19 bp, Homo sapiens
  siRNA target sequence for USP6NL (NM_014688.1,2358-2376).
gccgtctagtcgaatagaa

SEQ ID NO: 285184 - DNA, 19 bp, Homo sapiens
  siRNA target sequence for USP6NL (NM_014688.1,2360-2378).
cgtctagtcgaatagaagt

SEQ ID NO: 285185 - DNA, 19 bp, Homo sapiens
  siRNA target sequence for USP6NL (NM_014688.1,2483-2501).
catggtcagaagttagtta

SEQ ID NO: 285186 - DNA, 19 bp, Homo sapiens
  siRNA target sequence for USP6NL (NM_014688.1,2549-2567).
gccgtggcaatttaccaaa

SEQ ID NO: 285187 - DNA, 19 bp, Homo sapiens
  siRNA target sequence for USP6NL (NM_014688.1,2550-2568).
ccgtggcaatttaccaaaa

SEQ ID NO: 285188 - DNA, 19 bp, Homo sapiens
  siRNA target sequence for USP6NL (NM_014688.1,2551-2569).
cgtggcaatttaccaaaat

SEQ ID NO: 285189 - DNA, 19 bp, Homo sapiens
  siRNA target sequence for USP6NL (NM_014688.1,2611-2629).
cctgcagtttctgtagata

SEQ ID NO: 285190 - DNA, 19 bp, Homo sapiens
  siRNA target sequence for USP6NL (NM_014688.1,2626-2644).
gatagtcccgtgagatata

SEQ ID NO: 285191 - DNA, 19 bp, Homo sapiens
  siRNA target sequence for USP6NL (NM_014688.1,2632-2650).
cccgtgagatataaagctt

SEQ ID NO: 285192 - DNA, 19 bp, Homo sapiens
  siRNA target sequence for USP6NL (NM_014688.1,2672-2690).
gtccatctggatatccata

SEQ ID NO: 285193 - DNA, 19 bp, Homo sapiens
  siRNA target sequence for USP6NL (NM_014688.1,2674-2692).
ccatctggatatccatatt

SEQ ID NO: 285194 - DNA, 19 bp, Homo sapiens
  siRNA target sequence for UXT (NM_004182.2,111-129).
cgctacgagaccttcatca

SEQ ID NO: 285195 - DNA, 19 bp, Homo sapiens
  siRNA target sequence for UXT (NM_004182.2,167-185).
ccatcgagacaaggtatat

SEQ ID NO: 285196 - DNA, 19 bp, Homo sapiens
  siRNA target sequence for UXT (NM_004182.2,240-258).
gctaagcactcggagttat

SEQ ID NO: 285197 - DNA, 19 bp, Homo sapiens
  siRNA target sequence for UXT (NM_004182.2,241-259).
ctaagcactcggagttata

SEQ ID NO: 285198 - DNA, 19 bp, Homo sapiens
  siRNA target sequence for UXT (NM_004182.2,267-285).
gtggatttgggctgtaact

SEQ ID NO: 285199 - DNA, 19 bp, Homo sapiens
  siRNA target sequence for UXT (NM_004182.2,327-345).
gtggccctgggatatggtt

SEQ ID NO: 285200 - DNA, 19 bp, Homo sapiens
  siRNA target sequence for UXT (NM_004182.2,476-494).
ggggcttagagaactacaa

SEQ ID NO: 285201 - DNA, 19 bp, Homo sapiens
  siRNA target sequence for VCX-2r (NM_016378.1,401-419).
gtgtggatggccagctttt

SEQ ID NO: 285202 - DNA, 19 bp, Homo sapiens
  siRNA target sequence for VMD2 (NM_004183.1,181-199).
gctatatggcgagttctta

SEQ ID NO: 285203 - DNA, 19 bp, Homo sapiens
  siRNA target sequence for VMD2 (NM_004183.1,182-200).
ctatatggcgagttcttaa

SEQ ID NO: 285204 - DNA, 19 bp, Homo sapiens
  siRNA target sequence for VMD2 (NM_004183.1,260-278).
caacagctgatgtttgaga

SEQ ID NO: 285205 - DNA, 19 bp, Homo sapiens
  siRNA target sequence for VMD2 (NM_004183.1,562-580).
gcaagcaggctttatgact

SEQ ID NO: 285206 - DNA, 19 bp, Homo sapiens
  siRNA target sequence for VMD2 (NM_004183.1,764-782).
gcctacgactggattagta

SEQ ID NO: 285207 - DNA, 19 bp, Homo sapiens
  siRNA target sequence for VMD2 (NM_004183.1,765-783).
cctacgactggattagtat

SEQ ID NO: 285208 - DNA, 19 bp, Homo sapiens
  siRNA target sequence for VMD2 (NM_004183.1,829-847).
cttcctgacttgtctagtt

SEQ ID NO: 285209 - DNA, 19 bp, Homo sapiens
  siRNA target sequence for VMD2 (NM_004183.1,1014-1032).
ggattgtcgacaggaattt

SEQ ID NO: 285210 - DNA, 19 bp, Homo sapiens
  siRNA target sequence for VMD2 (NM_004183.1,1080-1098).
ggatggagccggacatgta

SEQ ID NO: 285211 - DNA, 19 bp, Homo sapiens
  siRNA target sequence for VMD2 (NM_004183.1,1089-1107).
cggacatgtactggaataa

SEQ ID NO: 285212 - DNA, 19 bp, Homo sapiens
  siRNA target sequence for VMD2 (NM_004183.1,1379-1397).
gcagccaaacagaacgtta

SEQ ID NO: 285213 - DNA, 19 bp, Homo sapiens
  siRNA target sequence for VMD2 (NM_004183.1,1466-1484).
cagaggccaggctactaca

SEQ ID NO: 285214 - DNA, 19 bp, Homo sapiens
  siRNA target sequence for VMD2 (NM_004183.1,1657-1675).
gatggagcacccagaagta

SEQ ID NO: 285215 - DNA, 19 bp, Homo sapiens
  siRNA target sequence for VMD2 (NM_004183.1,1660-1678).
ggagcacccagaagtatct

SEQ ID NO: 285216 - DNA, 19 bp, Homo sapiens
  siRNA target sequence for VMD2 (NM_004183.1,1720-1738).
gccagagatccccgaaaat

SEQ ID NO: 285217 - DNA, 19 bp, Homo sapiens
  siRNA target sequence for VMD2 (NM_004183.1,1722-1740).
cagagatccccgaaaatca

SEQ ID NO: 285218 - DNA, 19 bp, Homo sapiens
  siRNA target sequence for VMD2 (NM_004183.1,1774-1792).
catacacactacactcaaa

SEQ ID NO: 285219 - DNA, 19 bp, Homo sapiens
  siRNA target sequence for VMD2 (NM_004183.1,1805-1823).
ccttattgggccttggaaa

SEQ ID NO: 285220 - DNA, 19 bp, Homo sapiens
  siRNA target sequence for VMD2L1 (NM_017682.1,121-139).
cgagaagcttgtgatttat

SEQ ID NO: 285221 - DNA, 19 bp, Homo sapiens
  siRNA target sequence for VMD2L1 (NM_017682.1,122-140).
gagaagcttgtgatttatt

SEQ ID NO: 285222 - DNA, 19 bp, Homo sapiens
  siRNA target sequence for VMD2L1 (NM_017682.1,172-190).
cttcgtgcttggcttttat

SEQ ID NO: 285223 - DNA, 19 bp, Homo sapiens
  siRNA target sequence for VMD2L1 (NM_017682.1,216-234).
ggagccagtacctatgcat

SEQ ID NO: 285224 - DNA, 19 bp, Homo sapiens
  siRNA target sequence for VMD2L1 (NM_017682.1,434-452).
gagcgcaagaagtttgaaa

SEQ ID NO: 285225 - DNA, 19 bp, Homo sapiens
  siRNA target sequence for VMD2L1 (NM_017682.1,455-473).
ctgaactcatcctacaaca

SEQ ID NO: 285226 - DNA, 19 bp, Homo sapiens
  siRNA target sequence for VMD2L1 (NM_017682.1,565-583).
gctcgaggagctgaatgtt

SEQ ID NO: 285227 - DNA, 19 bp, Homo sapiens
  siRNA target sequence for VMD2L1 (NM_017682.1,566-584).
ctcgaggagctgaatgttt

SEQ ID NO: 285228 - DNA, 19 bp, Homo sapiens
  siRNA target sequence for VMD2L1 (NM_017682.1,600-618).
gaatgctctttcactatga

SEQ ID NO: 285229 - DNA, 19 bp, Homo sapiens
  siRNA target sequence for VMD2L1 (NM_017682.1,1038-1056).
cgctggccaaagaagacat

SEQ ID NO: 285230 - DNA, 19 bp, Homo sapiens
  siRNA target sequence for VMD2L2 (NM_153274.1,6-24).
ggtttcatacactctcaaa

SEQ ID NO: 285231 - DNA, 19 bp, Homo sapiens
  siRNA target sequence for VMD2L2 (NM_153274.1,36-54).
ccgcttcggaggtttctct

SEQ ID NO: 285232 - DNA, 19 bp, Homo sapiens
  siRNA target sequence for VMD2L2 (NM_153274.1,241-259).
gtattgggtttctatgtga

SEQ ID NO: 285233 - DNA, 19 bp, Homo sapiens
  siRNA target sequence for VMD2L2 (NM_153274.1,472-490).
gtggacgcaggtttcatgt

SEQ ID NO: 285234 - DNA, 19 bp, Homo sapiens
  siRNA target sequence for VMD2L2 (NM_153274.1,588-606).
gagggacgggcgaatacgt

SEQ ID NO: 285235 - DNA, 19 bp, Homo sapiens
  siRNA target sequence for VMD2L2 (NM_153274.1,596-614).
ggcgaatacgtgacgatat

SEQ ID NO: 285236 - DNA, 19 bp, Homo sapiens
  siRNA target sequence for VMD2L2 (NM_153274.1,655-673).
gccaagtgcagcatgctat

SEQ ID NO: 285237 - DNA, 19 bp, Homo sapiens
  siRNA target sequence for VMD2L2 (NM_153274.1,924-942).
gatcatcaacccatttggt

SEQ ID NO: 285238 - DNA, 19 bp, Homo sapiens
  siRNA target sequence for VMD2L2 (NM_153274.1,1003-1021).
ctatccgtggacgaaatgt

SEQ ID NO: 285239 - DNA, 19 bp, Homo sapiens
  siRNA target sequence for VMD2L3 (NM_152439.1,322-340).
cccggaatgaaggtagaat

SEQ ID NO: 285240 - DNA, 19 bp, Homo sapiens
  siRNA target sequence for VMD2L3 (NM_152439.1,324-342).
cggaatgaaggtagaatca

SEQ ID NO: 285241 - DNA, 19 bp, Homo sapiens
  siRNA target sequence for VMD2L3 (NM_152439.1,351-369).
gttgatctgcaatcattga

SEQ ID NO: 285242 - DNA, 19 bp, Homo sapiens
  siRNA target sequence for VMD2L3 (NM_152439.1,354-372).
gatctgcaatcattgatga

SEQ ID NO: 285243 - DNA, 19 bp, Homo sapiens
  siRNA target sequence for VMD2L3 (NM_152439.1,429-447).
gggattccgctggtttaca

SEQ ID NO: 285244 - DNA, 19 bp, Homo sapiens
  siRNA target sequence for VMD2L3 (NM_152439.1,511-529).
ggtgcattgacagaaattt

SEQ ID NO: 285245 - DNA, 19 bp, Homo sapiens
  siRNA target sequence for VMD2L3 (NM_152439.1,530-548).
gcaggtctctcttttagct

SEQ ID NO: 285246 - DNA, 19 bp, Homo sapiens
  siRNA target sequence for VMD2L3 (NM_152439.1,612-630).
gctcgcccaccatacacat

SEQ ID NO: 285247 - DNA, 19 bp, Homo sapiens
  siRNA target sequence for VMD2L3 (NM_152439.1,613-631).
ctcgcccaccatacacatt

SEQ ID NO: 285248 - DNA, 19 bp, Homo sapiens
  siRNA target sequence for VMD2L3 (NM_152439.1,718-736).
ggctgtgggattatgagaa

SEQ ID NO: 285249 - DNA, 19 bp, Homo sapiens
  siRNA target sequence for VMD2L3 (NM_152439.1,744-762).
catcggcattccatgataa

SEQ ID NO: 285250 - DNA, 19 bp, Homo sapiens
  siRNA target sequence for VMD2L3 (NM_152439.1,747-765).
cggcattccatgataagaa

SEQ ID NO: 285251 - DNA, 19 bp, Homo sapiens
  siRNA target sequence for VMD2L3 (NM_152439.1,749-767).
gcattccatgataagaaga

SEQ ID NO: 285252 - DNA, 19 bp, Homo sapiens
  siRNA target sequence for VMD2L3 (NM_152439.1,891-909).
ctggatgtgccctcaagaa

SEQ ID NO: 285253 - DNA, 19 bp, Homo sapiens
  siRNA target sequence for WBSCR5 (NM_014146.2,516-534).
gccatggagtattacaact

SEQ ID NO: 285254 - DNA, 19 bp, Homo sapiens
  siRNA target sequence for WBSCR5 (NM_014146.2,545-563).
ctcgaagcccccagaagat

SEQ ID NO: 285255 - DNA, 19 bp, Homo sapiens
  siRNA target sequence for WBSCR5 (NM_014146.2,571-589).
ccaattcctacgagaatgt

SEQ ID NO: 285256 - DNA, 19 bp, Homo sapiens
  siRNA target sequence for WDR6 (NM_018031.2,46-64).
gctctcgaggactacgttt

SEQ ID NO: 285257 - DNA, 19 bp, Homo sapiens
  siRNA target sequence for WDR6 (NM_018031.2,72-90).
ggcaacctcggagcttata

SEQ ID NO: 285258 - DNA, 19 bp, Homo sapiens
  siRNA target sequence for WDR6 (NM_018031.2,74-92).
caacctcggagcttatact

SEQ ID NO: 285259 - DNA, 19 bp, Homo sapiens
  siRNA target sequence for WDR6 (NM_018031.2,181-199).
gggcatctgcggatgataa

SEQ ID NO: 285260 - DNA, 19 bp, Homo sapiens
  siRNA target sequence for WDR6 (NM_018031.2,182-200).
ggcatctgcggatgataaa

SEQ ID NO: 285261 - DNA, 19 bp, Homo sapiens
  siRNA target sequence for WDR6 (NM_018031.2,213-231).
cctgcttggccactatctt

SEQ ID NO: 285262 - DNA, 19 bp, Homo sapiens
  siRNA target sequence for WDR6 (NM_018031.2,214-232).
ctgcttggccactatctta

SEQ ID NO: 285263 - DNA, 19 bp, Homo sapiens
  siRNA target sequence for WDR6 (NM_018031.2,309-327).
gggactccgagttgtgaaa

SEQ ID NO: 285264 - DNA, 19 bp, Homo sapiens
  siRNA target sequence for WDR6 (NM_018031.2,316-334).
cgagttgtgaaaattagct

SEQ ID NO: 285265 - DNA, 19 bp, Homo sapiens
  siRNA target sequence for WDR6 (NM_018031.2,406-424).
cgctggcttgagggaaata

SEQ ID NO: 285266 - DNA, 19 bp, Homo sapiens
  siRNA target sequence for WDR6 (NM_018031.2,456-474).
gctatatgaccctgtagta

SEQ ID NO: 285267 - DNA, 19 bp, Homo sapiens
  siRNA target sequence for WDR6 (NM_018031.2,611-629).
ctgccttagcagacaacaa

SEQ ID NO: 285268 - DNA, 19 bp, Homo sapiens
  siRNA target sequence for WDR6 (NM_018031.2,1906-1924).
cccgatgggagcatggtta

SEQ ID NO: 285269 - DNA, 19 bp, Homo sapiens
  siRNA target sequence for WDR6 (NM_018031.2,1907-1925).
ccgatgggagcatggttat

SEQ ID NO: 285270 - DNA, 19 bp, Homo sapiens
  siRNA target sequence for WDR6 (NM_018031.2,1931-1949).
gtttccatgccaatgagtt

SEQ ID NO: 285271 - DNA, 19 bp, Homo sapiens
  siRNA target sequence for WDR6 (NM_018031.2,2010-2028).
ccgttcgtgggcattctct

SEQ ID NO: 285272 - DNA, 19 bp, Homo sapiens
  siRNA target sequence for WDR6 (NM_018031.2,2137-2155).
catggccgtgagatcactt

SEQ ID NO: 285273 - DNA, 19 bp, Homo sapiens
  siRNA target sequence for WDR6 (NM_018031.2,2142-2160).
ccgtgagatcacttgtgta

SEQ ID NO: 285274 - DNA, 19 bp, Homo sapiens
  siRNA target sequence for WDR6 (NM_018031.2,2249-2267).
ccgacttgactgacattgt

SEQ ID NO: 285275 - DNA, 19 bp, Homo sapiens
  siRNA target sequence for WDR6 (NM_018031.2,2262-2280).
cattgtgatcacatgtagt

SEQ ID NO: 285276 - DNA, 19 bp, Homo sapiens
  siRNA target sequence for WDR6 (NM_018031.2,2334-2352).
cgcactcacagctgtttgt

SEQ ID NO: 285277 - DNA, 19 bp, Homo sapiens
  siRNA target sequence for WDR6 (NM_018031.2,2344-2362).
gctgtttgtaaccatatct

SEQ ID NO: 285278 - DNA, 19 bp, Homo sapiens
  siRNA target sequence for WDR6 (NM_018031.2,2546-2564).
cgtcccaccggctagatga

SEQ ID NO: 285279 - DNA, 19 bp, Homo sapiens
  siRNA target sequence for WDR6 (NM_018031.2,2549-2567).
cccaccggctagatgagta

SEQ ID NO: 285280 - DNA, 19 bp, Homo sapiens
  siRNA target sequence for WDR6 (NM_018031.2,2550-2568).
ccaccggctagatgagtat

SEQ ID NO: 285281 - DNA, 19 bp, Homo sapiens
  siRNA target sequence for WDR6 (NM_018031.2,2551-2569).
caccggctagatgagtatt

SEQ ID NO: 285282 - DNA, 19 bp, Homo sapiens
  siRNA target sequence for WDR6 (NM_018031.2,2588-2606).
ggcatcggatggttaaggt

SEQ ID NO: 285283 - DNA, 19 bp, Homo sapiens
  siRNA target sequence for WDR6 (NM_018031.2,2589-2607).
gcatcggatggttaaggta

SEQ ID NO: 285284 - DNA, 19 bp, Homo sapiens
  siRNA target sequence for WDR6 (NM_018031.2,2699-2717).
ccgtaaggctctttctttt

SEQ ID NO: 285285 - DNA, 19 bp, Homo sapiens
  siRNA target sequence for WDR6 (NM_018031.2,3385-3403).
gtttacaactggtatgact

SEQ ID NO: 285286 - DNA, 19 bp, Homo sapiens
  siRNA target sequence for WFDC1 (NM_021197.2,262-280).
ggctctgccaagaatatct

SEQ ID NO: 285287 - DNA, 19 bp, Homo sapiens
  siRNA target sequence for WFDC1 (NM_021197.2,298-316).
gcgaggctggccgagaaat

SEQ ID NO: 285288 - DNA, 19 bp, Homo sapiens
  siRNA target sequence for WFDC1 (NM_021197.2,680-698).
gtgacgtggccgaaggtat

SEQ ID NO: 285289 - DNA, 19 bp, Homo sapiens
  siRNA target sequence for WFDC1 (NM_021197.2,744-762).
gcgaatcctacgacacaaa

SEQ ID NO: 285290 - DNA, 19 bp, Homo sapiens
  siRNA target sequence for WFDC1 (NM_021197.2,746-764).
gaatcctacgacacaaact

SEQ ID NO: 285291 - DNA, 19 bp, Homo sapiens
  siRNA target sequence for WFDC1 (NM_021197.2,778-796).
ccagaaggtgactcaaaga

SEQ ID NO: 285292 - DNA, 19 bp, Homo sapiens
  siRNA target sequence for WFDC1 (NM_021197.2,820-838).
caacagaagcactttcagt

SEQ ID NO: 285293 - DNA, 19 bp, Homo sapiens
  siRNA target sequence for WIT-1 (NM_015855.2,984-1002).
catgtggcgttgatacact

SEQ ID NO: 285294 - DNA, 19 bp, Homo sapiens
  siRNA target sequence for WIT-1 (NM_015855.2,1022-1040).
ggcctcgaaggtgcataat

SEQ ID NO: 285295 - DNA, 19 bp, Homo sapiens
  siRNA target sequence for WIT-1 (NM_015855.2,1023-1041).
gcctcgaaggtgcataatt

SEQ ID NO: 285296 - DNA, 19 bp, Homo sapiens
  siRNA target sequence for WIT-1 (NM_015855.2,1024-1042).
cctcgaaggtgcataatta

SEQ ID NO: 285297 - DNA, 19 bp, Homo sapiens
  siRNA target sequence for WIT-1 (NM_015855.2,1025-1043).
ctcgaaggtgcataattat

SEQ ID NO: 285298 - DNA, 19 bp, Homo sapiens
  siRNA target sequence for WIT-1 (NM_015855.2,1031-1049).
ggtgcataattattgcaat

SEQ ID NO: 285299 - DNA, 19 bp, Homo sapiens
  siRNA target sequence for WSB1 (NM_015626.7,333-351).
cgagggtcaacgagaaaga

SEQ ID NO: 285300 - DNA, 19 bp, Homo sapiens
  siRNA target sequence for WSB1 (NM_015626.7,346-364).
gaaagagatcgtgagatta

SEQ ID NO: 285301 - DNA, 19 bp, Homo sapiens
  siRNA target sequence for WSB1 (NM_015626.7,350-368).
gagatcgtgagattacgta

SEQ ID NO: 285302 - DNA, 19 bp, Homo sapiens
  siRNA target sequence for WSB1 (NM_015626.7,355-373).
cgtgagattacgtactata

SEQ ID NO: 285303 - DNA, 19 bp, Homo sapiens
  siRNA target sequence for WSB1 (NM_015626.7,358-376).
gagattacgtactataggt

SEQ ID NO: 285304 - DNA, 19 bp, Homo sapiens
  siRNA target sequence for WSB1 (NM_015626.7,449-467).
gatggttcatactttgctt

SEQ ID NO: 285305 - DNA, 19 bp, Homo sapiens
  siRNA target sequence for WSB1 (NM_015626.7,477-495).
gacatcgcacagtaaagct

SEQ ID NO: 285306 - DNA, 19 bp, Homo sapiens
  siRNA target sequence for WSB1 (NM_015626.7,529-547).
cttgcatggcaccaagaat

SEQ ID NO: 285307 - DNA, 19 bp, Homo sapiens
  siRNA target sequence for WSB1 (NM_015626.7,553-571).
caattcaagcagtttaaga

SEQ ID NO: 285308 - DNA, 19 bp, Homo sapiens
  siRNA target sequence for WSB1 (NM_015626.7,610-628).
gcctcgtgaacatattata

SEQ ID NO: 285309 - DNA, 19 bp, Homo sapiens
  siRNA target sequence for WSB1 (NM_015626.7,614-632).
cgtgaacatattatagact

SEQ ID NO: 285310 - DNA, 19 bp, Homo sapiens
  siRNA target sequence for WSB1 (NM_015626.7,683-701).
cagagtcgctgtgtaaata

SEQ ID NO: 285311 - DNA, 19 bp, Homo sapiens
  siRNA target sequence for WSB1 (NM_015626.7,685-703).
gagtcgctgtgtaaatata

SEQ ID NO: 285312 - DNA, 19 bp, Homo sapiens
  siRNA target sequence for WSB1 (NM_015626.7,687-705).
gtcgctgtgtaaatataga

SEQ ID NO: 285313 - DNA, 19 bp, Homo sapiens
  siRNA target sequence for WSB1 (NM_015626.7,743-761).
cttgctacagggttgaaca

SEQ ID NO: 285314 - DNA, 19 bp, Homo sapiens
  siRNA target sequence for WSB1 (NM_015626.7,806-824).
cttaacttggtagatcata

SEQ ID NO: 285315 - DNA, 19 bp, Homo sapiens
  siRNA target sequence for WSB1 (NM_015626.7,827-845).
gaagtggtcagagatttaa

SEQ ID NO: 285316 - DNA, 19 bp, Homo sapiens
  siRNA target sequence for WSB1 (NM_015626.7,830-848).
gtggtcagagatttaactt

SEQ ID NO: 285317 - DNA, 19 bp, Homo sapiens
  siRNA target sequence for WSB1 (NM_015626.7,835-853).
cagagatttaacttttgct

SEQ ID NO: 285318 - DNA, 19 bp, Homo sapiens
  siRNA target sequence for WSB1 (NM_015626.7,877-895).
gtcagcttcaagagacaaa

SEQ ID NO: 285319 - DNA, 19 bp, Homo sapiens
  siRNA target sequence for WSB1 (NM_015626.7,1018-1036).
cagtaaagcagttttcctt

SEQ ID NO: 285320 - DNA, 19 bp, Homo sapiens
  siRNA target sequence for WSB1 (NM_015626.7,1057-1075).
catgatacggaaactagaa

SEQ ID NO: 285321 - DNA, 19 bp, Homo sapiens
  siRNA target sequence for WSB1 (NM_015626.7,1129-1147).
ggctactgcatcttatgat

SEQ ID NO: 285322 - DNA, 19 bp, Homo sapiens
  siRNA target sequence for WSB1 (NM_015626.7,1130-1148).
gctactgcatcttatgata

SEQ ID NO: 285323 - DNA, 19 bp, Homo sapiens
  siRNA target sequence for WSB1 (NM_015626.7,1140-1158).
cttatgatactcgagtata

SEQ ID NO: 285324 - DNA, 19 bp, Homo sapiens
  siRNA target sequence for WSB1 (NM_015626.7,1212-1230).
ccccacctactccaatatt

SEQ ID NO: 285325 - DNA, 19 bp, Homo sapiens
  siRNA target sequence for WSB1 (NM_015626.7,1213-1231).
cccacctactccaatattt

SEQ ID NO: 285326 - DNA, 19 bp, Homo sapiens
  siRNA target sequence for WSB1 (NM_015626.7,1249-1267).
ccggtgggtacgatctgta

SEQ ID NO: 285327 - DNA, 19 bp, Homo sapiens
  siRNA target sequence for WSB1 (NM_015626.7,1250-1268).
cggtgggtacgatctgtat

SEQ ID NO: 285328 - DNA, 19 bp, Homo sapiens
  siRNA target sequence for WSB1 (NM_015626.7,1252-1270).
gtgggtacgatctgtatct

SEQ ID NO: 285329 - DNA, 19 bp, Homo sapiens
  siRNA target sequence for WSB1 (NM_015626.7,1254-1272).
gggtacgatctgtatcttt

SEQ ID NO: 285330 - DNA, 19 bp, Homo sapiens
  siRNA target sequence for WSB1 (NM_015626.7,1255-1273).
ggtacgatctgtatctttt

SEQ ID NO: 285331 - DNA, 19 bp, Homo sapiens
  siRNA target sequence for WSB1 (NM_015626.7,1256-1274).
gtacgatctgtatctttta

SEQ ID NO: 285332 - DNA, 19 bp, Homo sapiens
  siRNA target sequence for WSB1 (NM_015626.7,1295-1313).
gcaagccttgctgatgata

SEQ ID NO: 285333 - DNA, 19 bp, Homo sapiens
  siRNA target sequence for WSB1 (NM_015626.7,1296-1314).
caagccttgctgatgataa

SEQ ID NO: 285334 - DNA, 19 bp, Homo sapiens
  siRNA target sequence for WSB1 (NM_015626.7,1321-1339).
gaggttctggagaattgat

SEQ ID NO: 285335 - DNA, 19 bp, Homo sapiens
  siRNA target sequence for WSB1 (NM_015626.7,1323-1341).
ggttctggagaattgatga

SEQ ID NO: 285336 - DNA, 19 bp, Homo sapiens
  siRNA target sequence for WSB1 (NM_015626.7,1384-1402).
ctgtgccttctctactgat

SEQ ID NO: 285337 - DNA, 19 bp, Homo sapiens
  siRNA target sequence for WSB1 (NM_015626.7,1427-1445).
catgacggaagtgtgtatt

SEQ ID NO: 285338 - DNA, 19 bp, Homo sapiens
  siRNA target sequence for WSB1 (NM_015626.7,1468-1486).
ccctagcctgcaacattta

SEQ ID NO: 285339 - DNA, 19 bp, Homo sapiens
  siRNA target sequence for WSB1 (NM_015626.7,1469-1487).
cctagcctgcaacatttat

SEQ ID NO: 285340 - DNA, 19 bp, Homo sapiens
  siRNA target sequence for WSB1 (NM_015626.7,1481-1499).
catttatgtcgcatgtcaa

SEQ ID NO: 285341 - DNA, 19 bp, Homo sapiens
  siRNA target sequence for WSB1 (NM_015626.7,1539-1557).
cgattccttccaagctttt

SEQ ID NO: 285342 - DNA, 19 bp, Homo sapiens
  siRNA target sequence for WSB1 (NM_015626.7,1559-1577).
gagtttctctcgtatcgta

SEQ ID NO: 285343 - DNA, 19 bp, Homo sapiens
  siRNA target sequence for XG (NM_175569.1,376-394).
cccgacagcggtggaaata

SEQ ID NO: 285344 - DNA, 19 bp, Homo sapiens
  siRNA target sequence for XG (NM_175569.1,377-395).
ccgacagcggtggaaatat

SEQ ID NO: 285345 - DNA, 19 bp, Homo sapiens
  siRNA target sequence for XG (NM_175569.1,452-470).
gaggttacttcaatgatgt

SEQ ID NO: 285346 - DNA, 19 bp, Homo sapiens
  siRNA target sequence for XG (NM_175569.1,669-687).
gggagcagcagccagttat

SEQ ID NO: 285347 - DNA, 19 bp, Homo sapiens
  siRNA target sequence for YIF1 (NM_020470.1,197-215).
gacacaagcggtggttatt

SEQ ID NO: 285348 - DNA, 19 bp, Homo sapiens
  siRNA target sequence for YIF1 (NM_020470.1,356-374).
gagctgcaccgttttgtgt

SEQ ID NO: 285349 - DNA, 19 bp, Homo sapiens
  siRNA target sequence for YIF1 (NM_020470.1,375-393).
ctgtgagcaaactcaagta

SEQ ID NO: 285350 - DNA, 19 bp, Homo sapiens
  siRNA target sequence for YIF1 (NM_020470.1,730-748).
ggcctacagtggctacaaa

SEQ ID NO: 285351 - DNA, 19 bp, Homo sapiens
  siRNA target sequence for YIF1 (NM_020470.1,731-749).
gcctacagtggctacaaat

SEQ ID NO: 285352 - DNA, 19 bp, Homo sapiens
  siRNA target sequence for YIF1 (NM_020470.1,732-750).
cctacagtggctacaaata

SEQ ID NO: 285353 - DNA, 19 bp, Homo sapiens
  siRNA target sequence for YIF1 (NM_020470.1,828-846).
catcggcgctcatgtactt

SEQ ID NO: 285354 - DNA, 19 bp, Homo sapiens
  siRNA target sequence for ZNF200 (NM_003454.2,891-909).
gccaaagcagtcctttata

SEQ ID NO: 285355 - DNA, 19 bp, Homo sapiens
  siRNA target sequence for ZNF200 (NM_003454.2,1032-1050).
ggtccagcccagtcagaaa

SEQ ID NO: 285356 - DNA, 19 bp, Homo sapiens
  siRNA target sequence for ZNF200 (NM_003454.2,1057-1075).
gagaccttggttattatga

SEQ ID NO: 285357 - DNA, 19 bp, Homo sapiens
  siRNA target sequence for ZNF200 (NM_003454.2,1213-1231).
gatttgaatgtatttcact

SEQ ID NO: 285358 - DNA, 19 bp, Homo sapiens
  siRNA target sequence for ZNF200 (NM_003454.2,1248-1266).
gagcttggatcctactcaa

SEQ ID NO: 285359 - DNA, 19 bp, Homo sapiens
  siRNA target sequence for ZNF200 (NM_003454.2,1298-1316).
gtgtcggggaaatgatgtt

SEQ ID NO: 285360 - DNA, 19 bp, Homo sapiens
  siRNA target sequence for ZNF200 (NM_003454.2,1311-1329).
gatgttactggcagtcaat

SEQ ID NO: 285361 - DNA, 19 bp, Homo sapiens
  siRNA target sequence for ZNF200 (NM_003454.2,1320-1338).
ggcagtcaatggcagtaat

SEQ ID NO: 285362 - DNA, 19 bp, Homo sapiens
  siRNA target sequence for ZNF200 (NM_003454.2,1357-1375).
gagagggaacctgtagaaa

SEQ ID NO: 285363 - DNA, 19 bp, Homo sapiens
  siRNA target sequence for ZNF200 (NM_003454.2,1359-1377).
gagggaacctgtagaaaat

SEQ ID NO: 285364 - DNA, 19 bp, Homo sapiens
  siRNA target sequence for ZNF200 (NM_003454.2,1445-1463).
ccgataaccaggaaaagga

SEQ ID NO: 285365 - DNA, 19 bp, Homo sapiens
  siRNA target sequence for ZNF200 (NM_003454.2,1542-1560).
ggaactctcaaaatatgta

SEQ ID NO: 285366 - DNA, 19 bp, Homo sapiens
  siRNA target sequence for ZNF200 (NM_003454.2,1633-1651).
cagtttaatgaaagttctt

SEQ ID NO: 285367 - DNA, 19 bp, Homo sapiens
  siRNA target sequence for ZNF200 (NM_003454.2,1823-1841).
ggagtcgtcatgaaggaat

SEQ ID NO: 285368 - DNA, 19 bp, Homo sapiens
  siRNA target sequence for ZNF200 (NM_003454.2,1842-1860).
ccatataagggagaagata

SEQ ID NO: 285369 - DNA, 19 bp, Homo sapiens
  siRNA target sequence for ZNF200 (NM_003454.2,1932-1950).
ggctgagagaccatatggt

SEQ ID NO: 285370 - DNA, 19 bp, Homo sapiens
  siRNA target sequence for ZNF200 (NM_003454.2,1933-1951).
gctgagagaccatatggtt

SEQ ID NO: 285371 - DNA, 19 bp, Homo sapiens
  siRNA target sequence for ZNF200 (NM_003454.2,1970-1988).
gatttggtcggctgtcaaa

SEQ ID NO: 285372 - DNA, 19 bp, Homo sapiens
  siRNA target sequence for ZNF200 (NM_003454.2,1975-1993).
ggtcggctgtcaaactgta

SEQ ID NO: 285373 - DNA, 19 bp, Homo sapiens
  siRNA target sequence for ZP4 (NM_021186.2,70-88).
gaggcaccagattattcca

SEQ ID NO: 285374 - DNA, 19 bp, Homo sapiens
  siRNA target sequence for ZP4 (NM_021186.2,149-167).
cgtctcctcctgtactaat

SEQ ID NO: 285375 - DNA, 19 bp, Homo sapiens
  siRNA target sequence for ZP4 (NM_021186.2,154-172).
cctcctgtactaatagctt

SEQ ID NO: 285376 - DNA, 19 bp, Homo sapiens
  siRNA target sequence for ZP4 (NM_021186.2,218-236).
gtggcacctggataagaaa

SEQ ID NO: 285377 - DNA, 19 bp, Homo sapiens
  siRNA target sequence for ZP4 (NM_021186.2,256-274).
gtgttggaggcaacctata

SEQ ID NO: 285378 - DNA, 19 bp, Homo sapiens
  siRNA target sequence for ZP4 (NM_021186.2,312-330).
catgccagttggagttgaa

SEQ ID NO: 285379 - DNA, 19 bp, Homo sapiens
  siRNA target sequence for ZP4 (NM_021186.2,375-393).
gctcaagtgtcctatggat

SEQ ID NO: 285380 - DNA, 19 bp, Homo sapiens
  siRNA target sequence for ZP4 (NM_021186.2,381-399).
gtgtcctatggatcttcta

SEQ ID NO: 285381 - DNA, 19 bp, Homo sapiens
  siRNA target sequence for ZP4 (NM_021186.2,496-514).
gggctaggctgttgttata

SEQ ID NO: 285382 - DNA, 19 bp, Homo sapiens
  siRNA target sequence for ZP4 (NM_021186.2,499-517).
ctaggctgttgttatagct

SEQ ID NO: 285383 - DNA, 19 bp, Homo sapiens
  siRNA target sequence for ZP4 (NM_021186.2,525-543).
ggtgaattcctgctactat

SEQ ID NO: 285384 - DNA, 19 bp, Homo sapiens
  siRNA target sequence for ZP4 (NM_021186.2,571-589).
cgagagggccatttctcta

SEQ ID NO: 285385 - DNA, 19 bp, Homo sapiens
  siRNA target sequence for ZP4 (NM_021186.2,572-590).
gagagggccatttctctat

SEQ ID NO: 285386 - DNA, 19 bp, Homo sapiens
  siRNA target sequence for ZP4 (NM_021186.2,639-657).
gcgcttggcccttaggaat

SEQ ID NO: 285387 - DNA, 19 bp, Homo sapiens
  siRNA target sequence for ZP4 (NM_021186.2,683-701).
caacacaagcttttgttct

SEQ ID NO: 285388 - DNA, 19 bp, Homo sapiens
  siRNA target sequence for ZP4 (NM_021186.2,746-764).
ctggagaccgagcagtata

SEQ ID NO: 285389 - DNA, 19 bp, Homo sapiens
  siRNA target sequence for ZP4 (NM_021186.2,749-767).
gagaccgagcagtatatga

SEQ ID NO: 285390 - DNA, 19 bp, Homo sapiens
  siRNA target sequence for ZP4 (NM_021186.2,781-799).
gcaactagggatgtgaaaa

SEQ ID NO: 285391 - DNA, 19 bp, Homo sapiens
  siRNA target sequence for ZP4 (NM_021186.2,873-891).
caactctctcccaatcaat

SEQ ID NO: 285392 - DNA, 19 bp, Homo sapiens
  siRNA target sequence for ZP4 (NM_021186.2,1381-1399).
gatctcagtcgaagaagaa

SEQ ID NO: 285393 - DNA, 19 bp, Homo sapiens
  siRNA target sequence for ZP4 (NM_021186.2,1384-1402).
ctcagtcgaagaagaaatt

SEQ ID NO: 285394 - DNA, 19 bp, Homo sapiens
  siRNA target sequence for ZP4 (NM_021186.2,1386-1404).
cagtcgaagaagaaatttt

SEQ ID NO: 285395 - DNA, 19 bp, Homo sapiens
  siRNA target sequence for ZP4 (NM_021186.2,1388-1406).
gtcgaagaagaaattttga

SEQ ID NO: 285396 - DNA, 19 bp, Homo sapiens
  siRNA target sequence for ZP4 (NM_021186.2,1422-1440).
cactactgctagtgtttct

SEQ ID NO: 285397 - DNA, 19 bp, Homo sapiens
  siRNA target sequence for ZP4 (NM_021186.2,1502-1520).
ctgtagactcgaaagttct

SEQ ID NO: 285398 - DNA, 19 bp, Homo sapiens
  siRNA target sequence for ZP4 (NM_021186.2,1551-1569).
ccttggagccttgttagta

SEQ ID NO: 285399 - DNA, 19 bp, Homo sapiens
  siRNA target sequence for ZP4 (NM_021186.2,1552-1570).
cttggagccttgttagtat

SEQ ID NO: 285400 - DNA, 19 bp, Homo sapiens
  siRNA target sequence for ZP4 (NM_021186.2,1556-1574).
gagccttgttagtatccta

SEQ ID NO: 285401 - DNA, 19 bp, Homo sapiens
  siRNA target sequence for AGS3 (NM_015597.2,66-84).
gacaggcgtggccttcttt

SEQ ID NO: 285402 - DNA, 19 bp, Homo sapiens
  siRNA target sequence for AGS3 (NM_015597.2,68-86).
caggcgtggccttctttga

SEQ ID NO: 285403 - DNA, 19 bp, Homo sapiens
  siRNA target sequence for AGS3 (NM_015597.2,367-385).
gcgagggccctctacaaca

SEQ ID NO: 285404 - DNA, 19 bp, Homo sapiens
  siRNA target sequence for AGS3 (NM_015597.2,488-506).
gcaaggcctccgagttcta

SEQ ID NO: 285405 - DNA, 19 bp, Homo sapiens
  siRNA target sequence for AGS3 (NM_015597.2,574-592).
ctgggcaacacccactatt

SEQ ID NO: 285406 - DNA, 19 bp, Homo sapiens
  siRNA target sequence for AGS3 (NM_015597.2,577-595).
ggcaacacccactatttgt

SEQ ID NO: 285407 - DNA, 19 bp, Homo sapiens
  siRNA target sequence for AGS3 (NM_015597.2,736-754).
gccgagtactacaagaaga

SEQ ID NO: 285408 - DNA, 19 bp, Homo sapiens
  siRNA target sequence for AGS3 (NM_015597.2,1410-1428).
ggacgaggagtgcttcttt

SEQ ID NO: 285409 - DNA, 19 bp, Homo sapiens
  siRNA target sequence for AGS3 (NM_015597.2,1565-1583).
cgccccagaccgaggaatt

SEQ ID NO: 285410 - DNA, 19 bp, Homo sapiens
  siRNA target sequence for AGS3 (NM_015597.2,1567-1585).
ccccagaccgaggaattct

SEQ ID NO: 285411 - DNA, 19 bp, Homo sapiens
  siRNA target sequence for AGS3 (NM_015597.2,1568-1586).
cccagaccgaggaattctt

SEQ ID NO: 285412 - DNA, 19 bp, Homo sapiens
  siRNA target sequence for C15orf15 (NM_016304.2,186-204).
cctggacacggcatgatgt

SEQ ID NO: 285413 - DNA, 19 bp, Homo sapiens
  siRNA target sequence for C15orf15 (NM_016304.2,187-205).
ctggacacggcatgatgtt

SEQ ID NO: 285414 - DNA, 19 bp, Homo sapiens
  siRNA target sequence for C1orf33 (NM_016183.2,134-152).
gacacctacaagtaccttt

SEQ ID NO: 285415 - DNA, 19 bp, Homo sapiens
  siRNA target sequence for C1orf33 (NM_016183.2,138-156).
cctacaagtaccttttcat

SEQ ID NO: 285416 - DNA, 19 bp, Homo sapiens
  siRNA target sequence for C1orf33 (NM_016183.2,214-232).
gcacagccggatgttcttt

SEQ ID NO: 285417 - DNA, 19 bp, Homo sapiens
  siRNA target sequence for C1orf33 (NM_016183.2,262-280).
gggtcggagcccatctgat

SEQ ID NO: 285418 - DNA, 19 bp, Homo sapiens
  siRNA target sequence for C1orf33 (NM_016183.2,267-285).
ggagcccatctgatgaata

SEQ ID NO: 285419 - DNA, 19 bp, Homo sapiens
  siRNA target sequence for C1orf33 (NM_016183.2,296-314).
ctgcaccaggtcagcaaaa

SEQ ID NO: 285420 - DNA, 19 bp, Homo sapiens
  siRNA target sequence for C1orf33 (NM_016183.2,299-317).
caccaggtcagcaaaaggt

SEQ ID NO: 285421 - DNA, 19 bp, Homo sapiens
  siRNA target sequence for C1orf33 (NM_016183.2,403-421).
cgcccgagctggtaacaaa

SEQ ID NO: 285422 - DNA, 19 bp, Homo sapiens
  siRNA target sequence for C1orf33 (NM_016183.2,612-630).
ggtatgagatggctgaatt

SEQ ID NO: 285423 - DNA, 19 bp, Homo sapiens
  siRNA target sequence for DAP3 (NM_004632.2,103-121).
gatgctgaaaggaataaca

SEQ ID NO: 285424 - DNA, 19 bp, Homo sapiens
  siRNA target sequence for DAP3 (NM_004632.2,148-166).
ggaccctgggcgtttttta

SEQ ID NO: 285425 - DNA, 19 bp, Homo sapiens
  siRNA target sequence for DAP3 (NM_004632.2,152-170).
cctgggcgttttttacaca

SEQ ID NO: 285426 - DNA, 19 bp, Homo sapiens
  siRNA target sequence for DAP3 (NM_004632.2,153-171).
ctgggcgttttttacacat

SEQ ID NO: 285427 - DNA, 19 bp, Homo sapiens
  siRNA target sequence for DAP3 (NM_004632.2,178-196).
ccaggctcgccaaagcatt

SEQ ID NO: 285428 - DNA, 19 bp, Homo sapiens
  siRNA target sequence for DAP3 (NM_004632.2,198-216).
ctgctcacctagataacca

SEQ ID NO: 285429 - DNA, 19 bp, Homo sapiens
  siRNA target sequence for DAP3 (NM_004632.2,227-245).
gagagtccgagagctattt

SEQ ID NO: 285430 - DNA, 19 bp, Homo sapiens
  siRNA target sequence for DAP3 (NM_004632.2,246-264).
cccgcaccaatgagaatga

SEQ ID NO: 285431 - DNA, 19 bp, Homo sapiens
  siRNA target sequence for DAP3 (NM_004632.2,290-308).
gagggtcagcactacaaca

SEQ ID NO: 285432 - DNA, 19 bp, Homo sapiens
  siRNA target sequence for DAP3 (NM_004632.2,319-337).
ggatttggagactgtattt

SEQ ID NO: 285433 - DNA, 19 bp, Homo sapiens
  siRNA target sequence for DAP3 (NM_004632.2,386-404).
gaagcttgcctgatggtaa

SEQ ID NO: 285434 - DNA, 19 bp, Homo sapiens
  siRNA target sequence for DAP3 (NM_004632.2,405-423).
ggaaaccagccctagaact

SEQ ID NO: 285435 - DNA, 19 bp, Homo sapiens
  siRNA target sequence for DAP3 (NM_004632.2,442-460).
caccagttttgcttatcca

SEQ ID NO: 285436 - DNA, 19 bp, Homo sapiens
  siRNA target sequence for DAP3 (NM_004632.2,452-470).
gcttatccagctatacgat

SEQ ID NO: 285437 - DNA, 19 bp, Homo sapiens
  siRNA target sequence for DAP3 (NM_004632.2,453-471).
cttatccagctatacgata

SEQ ID NO: 285438 - DNA, 19 bp, Homo sapiens
  siRNA target sequence for DAP3 (NM_004632.2,459-477).
cagctatacgatatcttct

SEQ ID NO: 285439 - DNA, 19 bp, Homo sapiens
  siRNA target sequence for DAP3 (NM_004632.2,462-480).
ctatacgatatcttctgta

SEQ ID NO: 285440 - DNA, 19 bp, Homo sapiens
  siRNA target sequence for DAP3 (NM_004632.2,510-528).
gtctttgccatgttattca

SEQ ID NO: 285441 - DNA, 19 bp, Homo sapiens
  siRNA target sequence for DAP3 (NM_004632.2,545-563).
gactggctgatactacata

SEQ ID NO: 285442 - DNA, 19 bp, Homo sapiens
  siRNA target sequence for DAP3 (NM_004632.2,550-568).
gctgatactacatattcca

SEQ ID NO: 285443 - DNA, 19 bp, Homo sapiens
  siRNA target sequence for DAP3 (NM_004632.2,619-637).
caacaaacagcgctttgat

SEQ ID NO: 285444 - DNA, 19 bp, Homo sapiens
  siRNA target sequence for DAP3 (NM_004632.2,628-646).
gcgctttgatcaaccttta

SEQ ID NO: 285445 - DNA, 19 bp, Homo sapiens
  siRNA target sequence for DAP3 (NM_004632.2,630-648).
gctttgatcaacctttaga

SEQ ID NO: 285446 - DNA, 19 bp, Homo sapiens
  siRNA target sequence for DAP3 (NM_004632.2,657-675).
cctggctgaagaatttcaa

SEQ ID NO: 285447 - DNA, 19 bp, Homo sapiens
  siRNA target sequence for DAP3 (NM_004632.2,694-712).
cctgaaccagataaaagtt

SEQ ID NO: 285448 - DNA, 19 bp, Homo sapiens
  siRNA target sequence for DAP3 (NM_004632.2,697-715).
gaaccagataaaagttcaa

SEQ ID NO: 285449 - DNA, 19 bp, Homo sapiens
  siRNA target sequence for DAP3 (NM_004632.2,710-728).
gttcaagagaagtatgtct

SEQ ID NO: 285450 - DNA, 19 bp, Homo sapiens
  siRNA target sequence for DAP3 (NM_004632.2,725-743).
gtctggaataagagagaaa

SEQ ID NO: 285451 - DNA, 19 bp, Homo sapiens
  siRNA target sequence for DAP3 (NM_004632.2,838-856).
gctaaagaggcaaagttct

SEQ ID NO: 285452 - DNA, 19 bp, Homo sapiens
  siRNA target sequence for DAP3 (NM_004632.2,839-857).
ctaaagaggcaaagttctt

SEQ ID NO: 285453 - DNA, 19 bp, Homo sapiens
  siRNA target sequence for DAP3 (NM_004632.2,880-898).
ggccgtggatggaatcaat

SEQ ID NO: 285454 - DNA, 19 bp, Homo sapiens
  siRNA target sequence for DAP3 (NM_004632.2,952-970).
cgaggaattagcacttgtt

SEQ ID NO: 285455 - DNA, 19 bp, Homo sapiens
  siRNA target sequence for DAP3 (NM_004632.2,1004-1022).
catggaggcgccattgtgt

SEQ ID NO: 285456 - DNA, 19 bp, Homo sapiens
  siRNA target sequence for DAP3 (NM_004632.2,1138-1156).
caactataacccaaaggaa

SEQ ID NO: 285457 - DNA, 19 bp, Homo sapiens
  siRNA target sequence for DAP3 (NM_004632.2,1235-1253).
gagctgctgttcctaagta

SEQ ID NO: 285458 - DNA, 19 bp, Homo sapiens
  siRNA target sequence for FLJ12331 (NM_024986.1,233-251).
ctgggctagtacaccttat

SEQ ID NO: 285459 - DNA, 19 bp, Homo sapiens
  siRNA target sequence for FLJ12331 (NM_024986.1,538-556).
cataagctttcatacaaga

SEQ ID NO: 285460 - DNA, 19 bp, Homo sapiens
  siRNA target sequence for FLJ12331 (NM_024986.1,543-561).
gctttcatacaagaataat

SEQ ID NO: 285461 - DNA, 19 bp, Homo sapiens
  siRNA target sequence for GADD45A (NM_001924.2,679-697).
gaatccacattcatctcaa

SEQ ID NO: 285462 - DNA, 19 bp, Homo sapiens
  siRNA target sequence for GADD45A (NM_001924.2,703-721).
ggatcctgccttaagtcaa

SEQ ID NO: 285463 - DNA, 19 bp, Homo sapiens
  siRNA target sequence for GADD45A (NM_001924.2,707-725).
cctgccttaagtcaactta

SEQ ID NO: 285464 - DNA, 19 bp, Homo sapiens
  siRNA target sequence for GADD45A (NM_001924.2,708-726).
ctgccttaagtcaacttat

SEQ ID NO: 285465 - DNA, 19 bp, Homo sapiens
  siRNA target sequence for GADD45A (NM_001924.2,712-730).
cttaagtcaacttatttgt

SEQ ID NO: 285466 - DNA, 19 bp, Homo sapiens
  siRNA target sequence for GADD45A (NM_001924.2,758-776).
caatgggttccagtgatta

SEQ ID NO: 285467 - DNA, 19 bp, Homo sapiens
  siRNA target sequence for GADD45B (NM_015675.1,165-183).
cggtggaggagcttttggt

SEQ ID NO: 285468 - DNA, 19 bp, Homo sapiens
  siRNA target sequence for GADD45B (NM_015675.1,224-242).
gagtcggccaagttgatga

SEQ ID NO: 285469 - DNA, 19 bp, Homo sapiens
  siRNA target sequence for GADD45B (NM_015675.1,226-244).
gtcggccaagttgatgaat

SEQ ID NO: 285470 - DNA, 19 bp, Homo sapiens
  siRNA target sequence for GADD45B (NM_015675.1,228-246).
cggccaagttgatgaatgt

SEQ ID NO: 285471 - DNA, 19 bp, Homo sapiens
  siRNA target sequence for GADD45B (NM_015675.1,518-536).
gccagctactgcgaagaaa

SEQ ID NO: 285472 - DNA, 19 bp, Homo sapiens
  siRNA target sequence for GADD45B (NM_015675.1,551-569).
cagtgggtcccctacatct

SEQ ID NO: 285473 - DNA, 19 bp, Homo sapiens
  siRNA target sequence for GADD45G (NM_006705.2,177-195).
ggaaagcgctgcatgagtt

SEQ ID NO: 285474 - DNA, 19 bp, Homo sapiens
  siRNA target sequence for GADD45G (NM_006705.2,325-343).
cgcgctgcagatccatttt

SEQ ID NO: 285475 - DNA, 19 bp, Homo sapiens
  siRNA target sequence for GADD45G (NM_006705.2,326-344).
gcgctgcagatccatttta

SEQ ID NO: 285476 - DNA, 19 bp, Homo sapiens
  siRNA target sequence for LACTB (NM_032857.2,455-473).
ggtcagaaggtttaggtta

SEQ ID NO: 285477 - DNA, 19 bp, Homo sapiens
  siRNA target sequence for LACTB (NM_032857.2,456-474).
gtcagaaggtttaggttat

SEQ ID NO: 285478 - DNA, 19 bp, Homo sapiens
  siRNA target sequence for LACTB (NM_032857.2,486-504).
gaaccgtgtaccatgtaaa

SEQ ID NO: 285479 - DNA, 19 bp, Homo sapiens
  siRNA target sequence for LACTB (NM_032857.2,489-507).
ccgtgtaccatgtaaacca

SEQ ID NO: 285480 - DNA, 19 bp, Homo sapiens
  siRNA target sequence for LACTB (NM_032857.2,510-528).
gacagttatgcgaattgct

SEQ ID NO: 285481 - DNA, 19 bp, Homo sapiens
  siRNA target sequence for LACTB (NM_032857.2,580-598).
gggaaactggatcttgata

SEQ ID NO: 285482 - DNA, 19 bp, Homo sapiens
  siRNA target sequence for LACTB (NM_032857.2,581-599).
ggaaactggatcttgatat

SEQ ID NO: 285483 - DNA, 19 bp, Homo sapiens
  siRNA target sequence for LACTB (NM_032857.2,654-672).
ggtttctgtcacaacaaga

SEQ ID NO: 285484 - DNA, 19 bp, Homo sapiens
  siRNA target sequence for LACTB (NM_032857.2,659-677).
ctgtcacaacaagattact

SEQ ID NO: 285485 - DNA, 19 bp, Homo sapiens
  siRNA target sequence for LACTB (NM_032857.2,663-681).
cacaacaagattactgatt

SEQ ID NO: 285486 - DNA, 19 bp, Homo sapiens
  siRNA target sequence for LACTB (NM_032857.2,684-702).
ccatttaagtggaattcgt

SEQ ID NO: 285487 - DNA, 19 bp, Homo sapiens
  siRNA target sequence for LACTB (NM_032857.2,692-710).
gtggaattcgtcattatga

SEQ ID NO: 285488 - DNA, 19 bp, Homo sapiens
  siRNA target sequence for LACTB (NM_032857.2,743-761).
cttataaagccttgaagat

SEQ ID NO: 285489 - DNA, 19 bp, Homo sapiens
  siRNA target sequence for LACTB (NM_032857.2,856-874).
gccaaatgccggaattcaa

SEQ ID NO: 285490 - DNA, 19 bp, Homo sapiens
  siRNA target sequence for LACTB (NM_032857.2,857-875).
ccaaatgccggaattcaaa

SEQ ID NO: 285491 - DNA, 19 bp, Homo sapiens
  siRNA target sequence for LACTB (NM_032857.2,904-922).
caaggcgaattatatttga

SEQ ID NO: 285492 - DNA, 19 bp, Homo sapiens
  siRNA target sequence for LACTB (NM_032857.2,946-964).
gaatccctaagattattta

SEQ ID NO: 285493 - DNA, 19 bp, Homo sapiens
  siRNA target sequence for LACTB (NM_032857.2,1026-1044).
cctactggcagccatagta

SEQ ID NO: 285494 - DNA, 19 bp, Homo sapiens
  siRNA target sequence for LACTB (NM_032857.2,1072-1090).
gactatatgcagaaaatat

SEQ ID NO: 285495 - DNA, 19 bp, Homo sapiens
  siRNA target sequence for LACTB (NM_032857.2,1126-1144).
gaaaacgagccagtgattt

SEQ ID NO: 285496 - DNA, 19 bp, Homo sapiens
  siRNA target sequence for LACTB (NM_032857.2,1131-1149).
cgagccagtgatttacaat

SEQ ID NO: 285497 - DNA, 19 bp, Homo sapiens
  siRNA target sequence for LACTB (NM_032857.2,1132-1150).
gagccagtgatttacaata

SEQ ID NO: 285498 - DNA, 19 bp, Homo sapiens
  siRNA target sequence for LACTB (NM_032857.2,1203-1221).
cgtggataactcctataaa

SEQ ID NO: 285499 - DNA, 19 bp, Homo sapiens
  siRNA target sequence for LACTB (NM_032857.2,1297-1315).
gttgggctgtttaagaact

SEQ ID NO: 285500 - DNA, 19 bp, Homo sapiens
  siRNA target sequence for LACTB (NM_032857.2,1300-1318).
gggctgtttaagaactcaa

SEQ ID NO: 285501 - DNA, 19 bp, Homo sapiens
  siRNA target sequence for LACTB (NM_032857.2,1454-1472).
cgtatggttcgtgtagaaa

SEQ ID NO: 285502 - DNA, 19 bp, Homo sapiens
  siRNA target sequence for LACTB (NM_032857.2,1548-1566).
ggatacagagactataaat

SEQ ID NO: 285503 - DNA, 19 bp, Homo sapiens
  siRNA target sequence for LACTB (NM_032857.2,1577-1595).
ccccaagaggaatcattgt

SEQ ID NO: 285504 - DNA, 19 bp, Homo sapiens
  siRNA target sequence for LACTB (NM_032857.2,1578-1596).
cccaagaggaatcattgtt

SEQ ID NO: 285505 - DNA, 19 bp, Homo sapiens
  siRNA target sequence for LACTB (NM_032857.2,1585-1603).
ggaatcattgtttctatca

SEQ ID NO: 285506 - DNA, 19 bp, Homo sapiens
  siRNA target sequence for LACTB (NM_032857.2,1615-1633).
caatctgttggcctcaata

SEQ ID NO: 285507 - DNA, 19 bp, Homo sapiens
  siRNA target sequence for LACTB (NM_032857.2,1644-1662).
gaagattgcccttgaattt

SEQ ID NO: 285508 - DNA, 19 bp, Homo sapiens
  siRNA target sequence for MGC9651 (NM_152301.3,309-327).
ggacatcgcgtctcttata

SEQ ID NO: 285509 - DNA, 19 bp, Homo sapiens
  siRNA target sequence for MGC9651 (NM_152301.3,547-565).
ctcgtctggcgaatagaga

SEQ ID NO: 285510 - DNA, 19 bp, Homo sapiens
  siRNA target sequence for MRP63 (NM_024026.3,335-353).
ctcgaccatctcaatgtca

SEQ ID NO: 285511 - DNA, 19 bp, Homo sapiens
  siRNA target sequence for MRP63 (NM_024026.3,344-362).
ctcaatgtcaccaagaaat

SEQ ID NO: 285512 - DNA, 19 bp, Homo sapiens
  siRNA target sequence for MRPL11 (NM_016050.2,198-216).
gtcagagaggcgtttccat

SEQ ID NO: 285513 - DNA, 19 bp, Homo sapiens
  siRNA target sequence for MRPL11 (NM_016050.2,278-296).
cctaccaagattttagtga

SEQ ID NO: 285514 - DNA, 19 bp, Homo sapiens
  siRNA target sequence for MRPL11 (NM_016050.2,279-297).
ctaccaagattttagtgaa

SEQ ID NO: 285515 - DNA, 19 bp, Homo sapiens
  siRNA target sequence for MRPL11 (NM_016050.2,415-433).
gaccttgaagcatgtgtat

SEQ ID NO: 285516 - DNA, 19 bp, Homo sapiens
  siRNA target sequence for MRPL11 (NM_016050.2,417-435).
ccttgaagcatgtgtatga

SEQ ID NO: 285517 - DNA, 19 bp, Homo sapiens
  siRNA target sequence for MRPL11 (NM_016050.2,547-565).
gaaggacctcagttcagaa

SEQ ID NO: 285518 - DNA, 19 bp, Homo sapiens
  siRNA target sequence for MRPL11 (NM_170738.1,120-138).
ccgagagaggcgtttccat

SEQ ID NO: 285519 - DNA, 19 bp, Homo sapiens
  siRNA target sequence for MRPL13 (NM_014078.4,337-355).
ccagcaatgggccactttt

SEQ ID NO: 285520 - DNA, 19 bp, Homo sapiens
  siRNA target sequence for MRPL13 (NM_014078.4,341-359).
caatgggccacttttgcta

SEQ ID NO: 285521 - DNA, 19 bp, Homo sapiens
  siRNA target sequence for MRPL13 (NM_014078.4,346-364).
ggccacttttgctagaata

SEQ ID NO: 285522 - DNA, 19 bp, Homo sapiens
  siRNA target sequence for MRPL13 (NM_014078.4,356-374).
gctagaatatggtatctct

SEQ ID NO: 285523 - DNA, 19 bp, Homo sapiens
  siRNA target sequence for MRPL13 (NM_014078.4,357-375).
ctagaatatggtatctctt

SEQ ID NO: 285524 - DNA, 19 bp, Homo sapiens
  siRNA target sequence for MRPL13 (NM_014078.4,426-444).
gacttcagggattacataa

SEQ ID NO: 285525 - DNA, 19 bp, Homo sapiens
  siRNA target sequence for MRPL13 (NM_014078.4,473-491).
ggggatcatgttgttataa

SEQ ID NO: 285526 - DNA, 19 bp, Homo sapiens
  siRNA target sequence for MRPL13 (NM_014078.4,557-575).
ggctacccaggtggattta

SEQ ID NO: 285527 - DNA, 19 bp, Homo sapiens
  siRNA target sequence for MRPL13 (NM_014078.4,559-577).
ctacccaggtggatttaga

SEQ ID NO: 285528 - DNA, 19 bp, Homo sapiens
  siRNA target sequence for MRPL13 (NM_014078.4,606-624).
gggatccagtggcaattgt

SEQ ID NO: 285529 - DNA, 19 bp, Homo sapiens
  siRNA target sequence for MRPL13 (NM_014078.4,608-626).
gatccagtggcaattgtaa

SEQ ID NO: 285530 - DNA, 19 bp, Homo sapiens
  siRNA target sequence for MRPL13 (NM_014078.4,612-630).
cagtggcaattgtaaaact

SEQ ID NO: 285531 - DNA, 19 bp, Homo sapiens
  siRNA target sequence for MRPL13 (NM_014078.4,745-763).
gcttcctcaaccacgaaaa

SEQ ID NO: 285532 - DNA, 19 bp, Homo sapiens
  siRNA target sequence for MRPL13 (NM_014078.4,752-770).
caaccacgaaaaataccta

SEQ ID NO: 285533 - DNA, 19 bp, Homo sapiens
  siRNA target sequence for MRPL13 (NM_014078.4,768-786).
ctaaacgtctagatgagta

SEQ ID NO: 285534 - DNA, 19 bp, Homo sapiens
  siRNA target sequence for MRPL13 (NM_014078.4,803-821).
gacgccttcccaagattgt

SEQ ID NO: 285535 - DNA, 19 bp, Homo sapiens
  siRNA target sequence for MRPL13 (NM_014078.4,822-840).
ggactccacctgaagatta

SEQ ID NO: 285536 - DNA, 19 bp, Homo sapiens
  siRNA target sequence for MRPL14 (NM_032111.1,298-316).
ggtgggcgaccagatacta

SEQ ID NO: 285537 - DNA, 19 bp, Homo sapiens
  siRNA target sequence for MRPL14 (NM_032111.1,434-452).
cctgtggggacacgaatta

SEQ ID NO: 285538 - DNA, 19 bp, Homo sapiens
  siRNA target sequence for MRPL14 (NM_032111.1,437-455).
gtggggacacgaattaaga

SEQ ID NO: 285539 - DNA, 19 bp, Homo sapiens
  siRNA target sequence for MRPL14 (NM_032111.1,439-457).
ggggacacgaattaagaca

SEQ ID NO: 285540 - DNA, 19 bp, Homo sapiens
  siRNA target sequence for MRPL14 (NM_032111.1,482-500).
cgggaaggcgagtattcca

SEQ ID NO: 285541 - DNA, 19 bp, Homo sapiens
  siRNA target sequence for MRPL14 (NM_032111.1,483-501).
gggaaggcgagtattccaa

SEQ ID NO: 285542 - DNA, 19 bp, Homo sapiens
  siRNA target sequence for MRPL14 (NM_032111.1,508-526).
ggccattgctcagaacttt

SEQ ID NO: 285543 - DNA, 19 bp, Homo sapiens
  siRNA target sequence for MRPL15 (NM_014175.2,127-145).
gtgagcctggccaacttaa

SEQ ID NO: 285544 - DNA, 19 bp, Homo sapiens
  siRNA target sequence for MRPL15 (NM_014175.2,188-206).
gtcggagaagaggtagaaa

SEQ ID NO: 285545 - DNA, 19 bp, Homo sapiens
  siRNA target sequence for MRPL15 (NM_014175.2,299-317).
caaaatacgggtttaacga

SEQ ID NO: 285546 - DNA, 19 bp, Homo sapiens
  siRNA target sequence for MRPL15 (NM_014175.2,309-327).
gtttaacgaaggacatagt

SEQ ID NO: 285547 - DNA, 19 bp, Homo sapiens
  siRNA target sequence for MRPL15 (NM_014175.2,336-354).
ccagtataagcctttgagt

SEQ ID NO: 285548 - DNA, 19 bp, Homo sapiens
  siRNA target sequence for MRPL15 (NM_014175.2,397-415).
cctagtcaacctattgact

SEQ ID NO: 285549 - DNA, 19 bp, Homo sapiens
  siRNA target sequence for MRPL15 (NM_014175.2,398-416).
ctagtcaacctattgactt

SEQ ID NO: 285550 - DNA, 19 bp, Homo sapiens
  siRNA target sequence for MRPL15 (NM_014175.2,414-432).
cttaacccagcttgtcaat

SEQ ID NO: 285551 - DNA, 19 bp, Homo sapiens
  siRNA target sequence for MRPL15 (NM_014175.2,453-471).
gccacttaaaagggattat

SEQ ID NO: 285552 - DNA, 19 bp, Homo sapiens
  siRNA target sequence for MRPL15 (NM_014175.2,490-508).
gagggtgctgacaccttta

SEQ ID NO: 285553 - DNA, 19 bp, Homo sapiens
  siRNA target sequence for MRPL15 (NM_014175.2,501-519).
cacctttacggcaaaagtt

SEQ ID NO: 285554 - DNA, 19 bp, Homo sapiens
  siRNA target sequence for MRPL15 (NM_014175.2,503-521).
cctttacggcaaaagttaa

SEQ ID NO: 285555 - DNA, 19 bp, Homo sapiens
  siRNA target sequence for MRPL15 (NM_014175.2,594-612).
cttctatgatccaagaagt

SEQ ID NO: 285556 - DNA, 19 bp, Homo sapiens
  siRNA target sequence for MRPL15 (NM_014175.2,626-644).
gcaaacctgttccattctt

SEQ ID NO: 285557 - DNA, 19 bp, Homo sapiens
  siRNA target sequence for MRPL15 (NM_014175.2,649-667).
cgtggacaacccattccaa

SEQ ID NO: 285558 - DNA, 19 bp, Homo sapiens
  siRNA target sequence for MRPL15 (NM_014175.2,732-750).
ggcggatcctgccaaattt

SEQ ID NO: 285559 - DNA, 19 bp, Homo sapiens
  siRNA target sequence for MRPL15 (NM_014175.2,769-787).
ctcgccaggaagtatggtt

SEQ ID NO: 285560 - DNA, 19 bp, Homo sapiens
  siRNA target sequence for MRPL15 (NM_014175.2,771-789).
cgccaggaagtatggttat

SEQ ID NO: 285561 - DNA, 19 bp, Homo sapiens
  siRNA target sequence for MRPL15 (NM_014175.2,777-795).
gaagtatggttatatctta

SEQ ID NO: 285562 - DNA, 19 bp, Homo sapiens
  siRNA target sequence for MRPL15 (NM_014175.2,792-810).
cttacctgatatcactaaa

SEQ ID NO: 285563 - DNA, 19 bp, Homo sapiens
  siRNA target sequence for MRPL15 (NM_014175.2,875-893).
caggatgggtggtgaatat

SEQ ID NO: 285564 - DNA, 19 bp, Homo sapiens
  siRNA target sequence for MRPL15 (NM_014175.2,888-906).
gaatatggccgataagaaa

SEQ ID NO: 285565 - DNA, 19 bp, Homo sapiens
  siRNA target sequence for MRPL15 (NM_014175.2,894-912).
ggccgataagaaaatccta

SEQ ID NO: 285566 - DNA, 19 bp, Homo sapiens
  siRNA target sequence for MRPL15 (NM_014175.2,895-913).
gccgataagaaaatcctaa

SEQ ID NO: 285567 - DNA, 19 bp, Homo sapiens
  siRNA target sequence for MRPL15 (NM_014175.2,896-914).
ccgataagaaaatcctaaa

SEQ ID NO: 285568 - DNA, 19 bp, Homo sapiens
  siRNA target sequence for MRPL15 (NM_014175.2,931-949).
ctccttaagtattatacct

SEQ ID NO: 285569 - DNA, 19 bp, Homo sapiens
  siRNA target sequence for MRPL16 (NM_017840.2,254-272).
cgggtgcccttgtcagatt

SEQ ID NO: 285570 - DNA, 19 bp, Homo sapiens
  siRNA target sequence for MRPL16 (NM_017840.2,398-416).
gtaagaagagaacctaaaa

SEQ ID NO: 285571 - DNA, 19 bp, Homo sapiens
  siRNA target sequence for MRPL16 (NM_017840.2,601-619).
gcccatcactcgcaaaagt

SEQ ID NO: 285572 - DNA, 19 bp, Homo sapiens
  siRNA target sequence for MRPL16 (NM_017840.2,603-621).
ccatcactcgcaaaagtgt

SEQ ID NO: 285573 - DNA, 19 bp, Homo sapiens
  siRNA target sequence for MRPL16 (NM_017840.2,604-622).
catcactcgcaaaagtgtt

SEQ ID NO: 285574 - DNA, 19 bp, Homo sapiens
  siRNA target sequence for MRPL16 (NM_017840.2,637-655).
gggaggcaaaggtgctatt

SEQ ID NO: 285575 - DNA, 19 bp, Homo sapiens
  siRNA target sequence for MRPL16 (NM_017840.2,639-657).
gaggcaaaggtgctattga

SEQ ID NO: 285576 - DNA, 19 bp, Homo sapiens
  siRNA target sequence for MRPL16 (NM_017840.2,703-721).
gggtgggcgttgtgaattt

SEQ ID NO: 285577 - DNA, 19 bp, Homo sapiens
  siRNA target sequence for MRPL16 (NM_017840.2,708-726).
ggcgttgtgaatttgaaga

SEQ ID NO: 285578 - DNA, 19 bp, Homo sapiens
  siRNA target sequence for MRPL16 (NM_017840.2,883-901).
gctgggcatacggaaagta

SEQ ID NO: 285579 - DNA, 19 bp, Homo sapiens
  siRNA target sequence for MRPL16 (NM_017840.2,899-917).
gtactgagcccatatgact

SEQ ID NO: 285580 - DNA, 19 bp, Homo sapiens
  siRNA target sequence for MRPL17 (NM_022061.2,326-344).
ggcccctcggtacaaagat

SEQ ID NO: 285581 - DNA, 19 bp, Homo sapiens
  siRNA target sequence for MRPL17 (NM_022061.2,328-346).
cccctcggtacaaagatca

SEQ ID NO: 285582 - DNA, 19 bp, Homo sapiens
  siRNA target sequence for MRPL17 (NM_022061.2,329-347).
ccctcggtacaaagatcaa

SEQ ID NO: 285583 - DNA, 19 bp, Homo sapiens
  siRNA target sequence for MRPL17 (NM_022061.2,330-348).
cctcggtacaaagatcaaa

SEQ ID NO: 285584 - DNA, 19 bp, Homo sapiens
  siRNA target sequence for MRPL17 (NM_022061.2,349-367).
ctgggggctacacaagaat

SEQ ID NO: 285585 - DNA, 19 bp, Homo sapiens
  siRNA target sequence for MRPL17 (NM_022061.2,377-395).
cccaaatcggagtttggat

SEQ ID NO: 285586 - DNA, 19 bp, Homo sapiens
  siRNA target sequence for MRPL17 (NM_022061.2,407-425).
ggcagtgatcgagtataaa

SEQ ID NO: 285587 - DNA, 19 bp, Homo sapiens
  siRNA target sequence for MRPL17 (NM_022061.2,460-478).
gagacagccaccttacact

SEQ ID NO: 285588 - DNA, 19 bp, Homo sapiens
  siRNA target sequence for MRPL18 (NM_014161.2,138-156).
cggttttgggggttgttct

SEQ ID NO: 285589 - DNA, 19 bp, Homo sapiens
  siRNA target sequence for MRPL18 (NM_014161.2,249-267).
gctgtcgccccagaattca

SEQ ID NO: 285590 - DNA, 19 bp, Homo sapiens
  siRNA target sequence for MRPL18 (NM_014161.2,284-302).
gaacctggagcttttatct

SEQ ID NO: 285591 - DNA, 19 bp, Homo sapiens
  siRNA target sequence for MRPL18 (NM_014161.2,356-374).
gcacaggttgcgagttata

SEQ ID NO: 285592 - DNA, 19 bp, Homo sapiens
  siRNA target sequence for MRPL18 (NM_014161.2,357-375).
cacaggttgcgagttataa

SEQ ID NO: 285593 - DNA, 19 bp, Homo sapiens
  siRNA target sequence for MRPL18 (NM_014161.2,442-460).
ctcgtgagtgggctattaa

SEQ ID NO: 285594 - DNA, 19 bp, Homo sapiens
  siRNA target sequence for MRPL18 (NM_014161.2,488-506).
ggtggcttgtgagagtata

SEQ ID NO: 285595 - DNA, 19 bp, Homo sapiens
  siRNA target sequence for MRPL18 (NM_014161.2,491-509).
ggcttgtgagagtatagga

SEQ ID NO: 285596 - DNA, 19 bp, Homo sapiens
  siRNA target sequence for MRPL18 (NM_014161.2,529-547).
gcttagaggcgggaatcaa

SEQ ID NO: 285597 - DNA, 19 bp, Homo sapiens
  siRNA target sequence for MRPL18 (NM_014161.2,534-552).
gaggcgggaatcaacttca

SEQ ID NO: 285598 - DNA, 19 bp, Homo sapiens
  siRNA target sequence for MRPL18 (NM_014161.2,590-608).
ctcgatgaaacgactacaa

SEQ ID NO: 285599 - DNA, 19 bp, Homo sapiens
  siRNA target sequence for MRPL18 (NM_014161.2,639-657).
cgggaacctcagagaatct

SEQ ID NO: 285600 - DNA, 19 bp, Homo sapiens
  siRNA target sequence for MRPL19 (NM_014763.2,64-82).
cctaggccggagtttccaa

SEQ ID NO: 285601 - DNA, 19 bp, Homo sapiens
  siRNA target sequence for MRPL19 (NM_014763.2,233-251).
ccggaacgcaggttcttga

SEQ ID NO: 285602 - DNA, 19 bp, Homo sapiens
  siRNA target sequence for MRPL19 (NM_014763.2,247-265).
cttgagtcctgaattcatt

SEQ ID NO: 285603 - DNA, 19 bp, Homo sapiens
  siRNA target sequence for MRPL19 (NM_014763.2,284-302).
gatcctctgaaatttcaaa

SEQ ID NO: 285604 - DNA, 19 bp, Homo sapiens
  siRNA target sequence for MRPL19 (NM_014763.2,391-409).
cccatatgccagtggaaaa

SEQ ID NO: 285605 - DNA, 19 bp, Homo sapiens
  siRNA target sequence for MRPL19 (NM_014763.2,450-468).
gaggacttggagctacttt

SEQ ID NO: 285606 - DNA, 19 bp, Homo sapiens
  siRNA target sequence for MRPL19 (NM_014763.2,452-470).
ggacttggagctactttca

SEQ ID NO: 285607 - DNA, 19 bp, Homo sapiens
  siRNA target sequence for MRPL19 (NM_014763.2,458-476).
ggagctactttcatcctta

SEQ ID NO: 285608 - DNA, 19 bp, Homo sapiens
  siRNA target sequence for MRPL19 (NM_014763.2,462-480).
ctactttcatccttaggaa

SEQ ID NO: 285609 - DNA, 19 bp, Homo sapiens
  siRNA target sequence for MRPL19 (NM_014763.2,491-509).
ggacaaggtgtcgagattt

SEQ ID NO: 285610 - DNA, 19 bp, Homo sapiens
  siRNA target sequence for MRPL19 (NM_014763.2,502-520).
cgagatttgctttgaactt

SEQ ID NO: 285611 - DNA, 19 bp, Homo sapiens
  siRNA target sequence for MRPL19 (NM_014763.2,539-557).
gagattcaggtggtcaaat

SEQ ID NO: 285612 - DNA, 19 bp, Homo sapiens
  siRNA target sequence for MRPL19 (NM_014763.2,560-578).
gagaaacggctggatgata

SEQ ID NO: 285613 - DNA, 19 bp, Homo sapiens
  siRNA target sequence for MRPL19 (NM_014763.2,569-587).
ctggatgatagcttgctat

SEQ ID NO: 285614 - DNA, 19 bp, Homo sapiens
  siRNA target sequence for MRPL19 (NM_014763.2,572-590).
gatgatagcttgctatact

SEQ ID NO: 285615 - DNA, 19 bp, Homo sapiens
  siRNA target sequence for MRPL19 (NM_014763.2,594-612).
gagatgcccttcctgaata

SEQ ID NO: 285616 - DNA, 19 bp, Homo sapiens
  siRNA target sequence for MRPL19 (NM_014763.2,596-614).
gatgcccttcctgaatata

SEQ ID NO: 285617 - DNA, 19 bp, Homo sapiens
  siRNA target sequence for MRPL19 (NM_014763.2,599-617).
gcccttcctgaatatagca

SEQ ID NO: 285618 - DNA, 19 bp, Homo sapiens
  siRNA target sequence for MRPL19 (NM_014763.2,628-646).
gaatatgaagccagtagta

SEQ ID NO: 285619 - DNA, 19 bp, Homo sapiens
  siRNA target sequence for MRPL19 (NM_014763.2,669-687).
ctgttaatgagctgaaagt

SEQ ID NO: 285620 - DNA, 19 bp, Homo sapiens
  siRNA target sequence for MRPL19 (NM_014763.2,671-689).
gttaatgagctgaaagtaa

SEQ ID NO: 285621 - DNA, 19 bp, Homo sapiens
  siRNA target sequence for MRPL19 (NM_014763.2,697-715).
gcctaagccctggtctaaa

SEQ ID NO: 285622 - DNA, 19 bp, Homo sapiens
  siRNA target sequence for MRPL19 (NM_014763.2,716-734).
cgctgggaacgtccaaatt

SEQ ID NO: 285623 - DNA, 19 bp, Homo sapiens
  siRNA target sequence for MRPL19 (NM_014763.2,717-735).
gctgggaacgtccaaattt

SEQ ID NO: 285624 - DNA, 19 bp, Homo sapiens
  siRNA target sequence for MRPL19 (NM_014763.2,718-736).
ctgggaacgtccaaatttt

SEQ ID NO: 285625 - DNA, 19 bp, Homo sapiens
  siRNA target sequence for MRPL19 (NM_014763.2,721-739).
ggaacgtccaaattttaat

SEQ ID NO: 285626 - DNA, 19 bp, Homo sapiens
  siRNA target sequence for MRPL19 (NM_014763.2,722-740).
gaacgtccaaattttaata

SEQ ID NO: 285627 - DNA, 19 bp, Homo sapiens
  siRNA target sequence for MRPL19 (NM_014763.2,809-827).
ccatggcttgaatttgata

SEQ ID NO: 285628 - DNA, 19 bp, Homo sapiens
  siRNA target sequence for MRPL19 (NM_014763.2,810-828).
catggcttgaatttgatat

SEQ ID NO: 285629 - DNA, 19 bp, Homo sapiens
  siRNA target sequence for MRPL19 (NM_014763.2,813-831).
ggcttgaatttgatatgat

SEQ ID NO: 285630 - DNA, 19 bp, Homo sapiens
  siRNA target sequence for MRPL19 (NM_014763.2,829-847).
gatgagggaatatgatact

SEQ ID NO: 285631 - DNA, 19 bp, Homo sapiens
  siRNA target sequence for MRPL19 (NM_014763.2,832-850).
gagggaatatgatacttca

SEQ ID NO: 285632 - DNA, 19 bp, Homo sapiens
  siRNA target sequence for MRPL19 (NM_014763.2,834-852).
gggaatatgatacttcaaa

SEQ ID NO: 285633 - DNA, 19 bp, Homo sapiens
  siRNA target sequence for MRPL19 (NM_014763.2,875-893).
gaaattgaagcgtcgaaaa

SEQ ID NO: 285634 - DNA, 19 bp, Homo sapiens
  siRNA target sequence for MRPL2 (NM_015950.2,209-227).
ggcccttaatgccaacttt

SEQ ID NO: 285635 - DNA, 19 bp, Homo sapiens
  siRNA target sequence for MRPL2 (NM_015950.2,307-325).
gaatccgggtgcatggtat

SEQ ID NO: 285636 - DNA, 19 bp, Homo sapiens
  siRNA target sequence for MRPL2 (NM_015950.2,335-353).
ccacaagcaacgttatcga

SEQ ID NO: 285637 - DNA, 19 bp, Homo sapiens
  siRNA target sequence for MRPL2 (NM_015950.2,336-354).
cacaagcaacgttatcgaa

SEQ ID NO: 285638 - DNA, 19 bp, Homo sapiens
  siRNA target sequence for MRPL2 (NM_015950.2,341-359).
gcaacgttatcgaatgatt

SEQ ID NO: 285639 - DNA, 19 bp, Homo sapiens
  siRNA target sequence for MRPL2 (NM_015950.2,345-363).
cgttatcgaatgattgact

SEQ ID NO: 285640 - DNA, 19 bp, Homo sapiens
  siRNA target sequence for MRPL2 (NM_015950.2,487-505).
ggatcatcgccacagaaaa

SEQ ID NO: 285641 - DNA, 19 bp, Homo sapiens
  siRNA target sequence for MRPL2 (NM_015950.2,516-534).
ggagatacaatcttgaact

SEQ ID NO: 285642 - DNA, 19 bp, Homo sapiens
  siRNA target sequence for MRPL2 (NM_015950.2,775-793).
gagtatccaacgttgatca

SEQ ID NO: 285643 - DNA, 19 bp, Homo sapiens
  siRNA target sequence for MRPL2 (NM_015950.2,777-795).
gtatccaacgttgatcata

SEQ ID NO: 285644 - DNA, 19 bp, Homo sapiens
  siRNA target sequence for MRPL2 (NM_015950.2,781-799).
ccaacgttgatcataacaa

SEQ ID NO: 285645 - DNA, 19 bp, Homo sapiens
  siRNA target sequence for MRPL2 (NM_015950.2,836-854).
gggcaagaggcctaacagt

SEQ ID NO: 285646 - DNA, 19 bp, Homo sapiens
  siRNA target sequence for MRPL2 (NM_015950.2,877-895).
gctgggctggccgaaagat

SEQ ID NO: 285647 - DNA, 19 bp, Homo sapiens
  siRNA target sequence for MRPL2 (NM_015950.2,900-918).
ccactaccccccatgaaga

SEQ ID NO: 285648 - DNA, 19 bp, Homo sapiens
  siRNA target sequence for MRPL22 (NM_014180.2,47-65).
cagttgggtgcgttatgga

SEQ ID NO: 285649 - DNA, 19 bp, Homo sapiens
  siRNA target sequence for MRPL22 (NM_014180.2,49-67).
gttgggtgcgttatggata

SEQ ID NO: 285650 - DNA, 19 bp, Homo sapiens
  siRNA target sequence for MRPL22 (NM_014180.2,52-70).
gggtgcgttatggatacat

SEQ ID NO: 285651 - DNA, 19 bp, Homo sapiens
  siRNA target sequence for MRPL22 (NM_014180.2,100-118).
gggtgttttacctcaatca

SEQ ID NO: 285652 - DNA, 19 bp, Homo sapiens
  siRNA target sequence for MRPL22 (NM_014180.2,102-120).
gtgttttacctcaatcata

SEQ ID NO: 285653 - DNA, 19 bp, Homo sapiens
  siRNA target sequence for MRPL22 (NM_014180.2,226-244).
ctaccactgtcgaagacaa

SEQ ID NO: 285654 - DNA, 19 bp, Homo sapiens
  siRNA target sequence for MRPL22 (NM_014180.2,230-248).
cactgtcgaagacaaataa

SEQ ID NO: 285655 - DNA, 19 bp, Homo sapiens
  siRNA target sequence for MRPL22 (NM_014180.2,270-288).
ggtatttggcaaaattgat

SEQ ID NO: 285656 - DNA, 19 bp, Homo sapiens
  siRNA target sequence for MRPL22 (NM_014180.2,286-304).
gatacgaggaatgtctatt

SEQ ID NO: 285657 - DNA, 19 bp, Homo sapiens
  siRNA target sequence for MRPL22 (NM_014180.2,311-329).
gctttggctcagttggaat

SEQ ID NO: 285658 - DNA, 19 bp, Homo sapiens
  siRNA target sequence for MRPL22 (NM_014180.2,312-330).
ctttggctcagttggaatt

SEQ ID NO: 285659 - DNA, 19 bp, Homo sapiens
  siRNA target sequence for MRPL22 (NM_014180.2,316-334).
ggctcagttggaattcaat

SEQ ID NO: 285660 - DNA, 19 bp, Homo sapiens
  siRNA target sequence for MRPL22 (NM_014180.2,345-363).
gggccaaaataattaaaga

SEQ ID NO: 285661 - DNA, 19 bp, Homo sapiens
  siRNA target sequence for MRPL22 (NM_014180.2,390-408).
cagtgagagaccataacgt

SEQ ID NO: 285662 - DNA, 19 bp, Homo sapiens
  siRNA target sequence for MRPL22 (NM_014180.2,398-416).
gaccataacgtggaattca

SEQ ID NO: 285663 - DNA, 19 bp, Homo sapiens
  siRNA target sequence for MRPL22 (NM_014180.2,407-425).
gtggaattcaggtccaatt

SEQ ID NO: 285664 - DNA, 19 bp, Homo sapiens
  siRNA target sequence for MRPL22 (NM_014180.2,409-427).
ggaattcaggtccaattta

SEQ ID NO: 285665 - DNA, 19 bp, Homo sapiens
  siRNA target sequence for MRPL22 (NM_014180.2,410-428).
gaattcaggtccaatttat

SEQ ID NO: 285666 - DNA, 19 bp, Homo sapiens
  siRNA target sequence for MRPL22 (NM_014180.2,415-433).
caggtccaatttatatata

SEQ ID NO: 285667 - DNA, 19 bp, Homo sapiens
  siRNA target sequence for MRPL22 (NM_014180.2,418-436).
gtccaatttatatatagct

SEQ ID NO: 285668 - DNA, 19 bp, Homo sapiens
  siRNA target sequence for MRPL22 (NM_014180.2,587-605).
gcccatgccaaagagtata

SEQ ID NO: 285669 - DNA, 19 bp, Homo sapiens
  siRNA target sequence for MRPL22 (NM_014180.2,588-606).
cccatgccaaagagtatat

SEQ ID NO: 285670 - DNA, 19 bp, Homo sapiens
  siRNA target sequence for MRPL22 (NM_014180.2,589-607).
ccatgccaaagagtatatt

SEQ ID NO: 285671 - DNA, 19 bp, Homo sapiens
  siRNA target sequence for MRPL24 (NM_024540.2,358-376).
gggcaaagtggttcaagtt

SEQ ID NO: 285672 - DNA, 19 bp, Homo sapiens
  siRNA target sequence for MRPL24 (NM_024540.2,415-433).
cacacattaccgctacatt

SEQ ID NO: 285673 - DNA, 19 bp, Homo sapiens
  siRNA target sequence for MRPL24 (NM_024540.2,533-551).
gagatcgagtggagattta

SEQ ID NO: 285674 - DNA, 19 bp, Homo sapiens
  siRNA target sequence for MRPL24 (NM_024540.2,535-553).
gatcgagtggagatttact

SEQ ID NO: 285675 - DNA, 19 bp, Homo sapiens
  siRNA target sequence for MRPL24 (NM_024540.2,582-600).
cacgatcagggagaattat

SEQ ID NO: 285676 - DNA, 19 bp, Homo sapiens
  siRNA target sequence for MRPL24 (NM_024540.2,637-655).
ccctgaaacgtggattgat

SEQ ID NO: 285677 - DNA, 19 bp, Homo sapiens
  siRNA target sequence for MRPL24 (NM_024540.2,696-714).
cctatgtgccctgtctaaa

SEQ ID NO: 285678 - DNA, 19 bp, Homo sapiens
  siRNA target sequence for MRPL24 (NM_024540.2,769-787).
caagaaggtctattggtat

SEQ ID NO: 285679 - DNA, 19 bp, Homo sapiens
  siRNA target sequence for MRPL27 (NM_016504.2,68-86).
gccgttacatccttgctaa

SEQ ID NO: 285680 - DNA, 19 bp, Homo sapiens
  siRNA target sequence for MRPL27 (NM_016504.2,102-120).
cagctcttgctgtcagata

SEQ ID NO: 285681 - DNA, 19 bp, Homo sapiens
  siRNA target sequence for MRPL27 (NM_016504.2,135-153).
cgggtggtagctccaaaaa

SEQ ID NO: 285682 - DNA, 19 bp, Homo sapiens
  siRNA target sequence for MRPL27 (NM_016504.2,177-195).
gacgccaaggcattaagaa

SEQ ID NO: 285683 - DNA, 19 bp, Homo sapiens
  siRNA target sequence for MRPL27 (NM_016504.2,199-217).
ggaaggtcactatgttcat

SEQ ID NO: 285684 - DNA, 19 bp, Homo sapiens
  siRNA target sequence for MRPL27 (NM_016504.2,212-230).
gttcatgctgggaacatca

SEQ ID NO: 285685 - DNA, 19 bp, Homo sapiens
  siRNA target sequence for MRPL27 (NM_016504.2,315-333).
ggatagtccgctacactaa

SEQ ID NO: 285686 - DNA, 19 bp, Homo sapiens
  siRNA target sequence for MRPL27 (NM_016504.2,363-381).
cggaggctgtggatctgat

SEQ ID NO: 285687 - DNA, 19 bp, Homo sapiens
  siRNA target sequence for MRPL27 (NM_016504.2,442-460).
gcctgagggcaccttcaaa

SEQ ID NO: 285688 - DNA, 19 bp, Homo sapiens
  siRNA target sequence for MRPL27 (NM_016504.2,457-475).
caaactggtagctatgctt

SEQ ID NO: 285689 - DNA, 19 bp, Homo sapiens
  siRNA target sequence for MRPL30 (NM_016503.2,170-188).
ggattttgcgcttagtagt

SEQ ID NO: 285690 - DNA, 19 bp, Homo sapiens
  siRNA target sequence for MRPL30 (NM_016503.2,171-189).
gattttgcgcttagtagtt

SEQ ID NO: 285691 - DNA, 19 bp, Homo sapiens
  siRNA target sequence for MRPL30 (NM_016503.2,226-244).
ggtgtggagtctcttattt

SEQ ID NO: 285692 - DNA, 19 bp, Homo sapiens
  siRNA target sequence for MRPL30 (NM_016503.2,262-280).
cacaaattcaccagatcaa

SEQ ID NO: 285693 - DNA, 19 bp, Homo sapiens
  siRNA target sequence for MRPL30 (NM_016503.2,303-321).
ggcctcacctgaagatcat

SEQ ID NO: 285694 - DNA, 19 bp, Homo sapiens
  siRNA target sequence for MRPL30 (NM_016503.2,305-323).
cctcacctgaagatcatga

SEQ ID NO: 285695 - DNA, 19 bp, Homo sapiens
  siRNA target sequence for MRPL30 (NM_016503.2,341-359).
cacagaaccctcataaact

SEQ ID NO: 285696 - DNA, 19 bp, Homo sapiens
  siRNA target sequence for MRPL30 (NM_016503.2,348-366).
ccctcataaactgcatatt

SEQ ID NO: 285697 - DNA, 19 bp, Homo sapiens
  siRNA target sequence for MRPL30 (NM_016503.2,350-368).
ctcataaactgcatattgt

SEQ ID NO: 285698 - DNA, 19 bp, Homo sapiens
  siRNA target sequence for MRPL30 (NM_016503.2,426-444).
gcttggattagaaaaagca

SEQ ID NO: 285699 - DNA, 19 bp, Homo sapiens
  siRNA target sequence for MRPL30 (NM_016503.2,443-461).
cacatacccctcaagttca

SEQ ID NO: 285700 - DNA, 19 bp, Homo sapiens
  siRNA target sequence for MRPL30 (NM_016503.2,451-469).
cctcaagttcacaagaata

SEQ ID NO: 285701 - DNA, 19 bp, Homo sapiens
  siRNA target sequence for MRPL30 (NM_016503.2,452-470).
ctcaagttcacaagaatat

SEQ ID NO: 285702 - DNA, 19 bp, Homo sapiens
  siRNA target sequence for MRPL30 (NM_016503.2,465-483).
gaatatcccttcagtgaat

SEQ ID NO: 285703 - DNA, 19 bp, Homo sapiens
  siRNA target sequence for MRPL30 (NM_016503.2,496-514).
gtagttaagcatttgataa

SEQ ID NO: 285704 - DNA, 19 bp, Homo sapiens
  siRNA target sequence for MRPL30 (NM_016503.2,504-522).
gcatttgataaggtttgtt

SEQ ID NO: 285705 - DNA, 19 bp, Homo sapiens
  siRNA target sequence for MRPL32 (NM_031903.1,96-114).
ggggagtgcttcgaaacta

SEQ ID NO: 285706 - DNA, 19 bp, Homo sapiens
  siRNA target sequence for MRPL32 (NM_031903.1,98-116).
ggagtgcttcgaaactact

SEQ ID NO: 285707 - DNA, 19 bp, Homo sapiens
  siRNA target sequence for MRPL32 (NM_031903.1,172-190).
gtggggaccagcattagca

SEQ ID NO: 285708 - DNA, 19 bp, Homo sapiens
  siRNA target sequence for MRPL32 (NM_031903.1,194-212).
cagggcccagccatgttta

SEQ ID NO: 285709 - DNA, 19 bp, Homo sapiens
  siRNA target sequence for MRPL32 (NM_031903.1,198-216).
gcccagccatgtttacaga

SEQ ID NO: 285710 - DNA, 19 bp, Homo sapiens
  siRNA target sequence for MRPL32 (NM_031903.1,252-270).
ccagccttttggacagtat

SEQ ID NO: 285711 - DNA, 19 bp, Homo sapiens
  siRNA target sequence for MRPL32 (NM_031903.1,276-294).
ggatggcagctcccaaaaa

SEQ ID NO: 285712 - DNA, 19 bp, Homo sapiens
  siRNA target sequence for MRPL32 (NM_031903.1,297-315).
gacgcaccattgaagttaa

SEQ ID NO: 285713 - DNA, 19 bp, Homo sapiens
  siRNA target sequence for MRPL32 (NM_031903.1,330-348).
gaaatccgcagaagcttat

SEQ ID NO: 285714 - DNA, 19 bp, Homo sapiens
  siRNA target sequence for MRPL32 (NM_031903.1,384-402).
gtggtcacctgaaacagaa

SEQ ID NO: 285715 - DNA, 19 bp, Homo sapiens
  siRNA target sequence for MRPL32 (NM_031903.1,417-435).
cctactgctatgaaaaggt

SEQ ID NO: 285716 - DNA, 19 bp, Homo sapiens
  siRNA target sequence for MRPL32 (NM_031903.1,535-553).
gacaccgtctgaacaagat

SEQ ID NO: 285717 - DNA, 19 bp, Homo sapiens
  siRNA target sequence for MRPL32 (NM_031903.1,537-555).
caccgtctgaacaagatca

SEQ ID NO: 285718 - DNA, 19 bp, Homo sapiens
  siRNA target sequence for MRPL32 (NM_031903.1,556-574).
gggcaagaggatcattgaa

SEQ ID NO: 285719 - DNA, 19 bp, Homo sapiens
  siRNA target sequence for MRPL33 (NM_004891.2,165-183).
cgactgcgggaaaaactga

SEQ ID NO: 285720 - DNA, 19 bp, Homo sapiens
  siRNA target sequence for MRPL33 (NM_004891.2,182-200).
gactcttttgcattatgat

SEQ ID NO: 285721 - DNA, 19 bp, Homo sapiens
  siRNA target sequence for MRPL33 (NM_004891.2,198-216).
gatccagttgtgaaacaaa

SEQ ID NO: 285722 - DNA, 19 bp, Homo sapiens
  siRNA target sequence for MRPL33 (NM_004891.2,217-235).
gagtcctcttcgtggaaaa

SEQ ID NO: 285723 - DNA, 19 bp, Homo sapiens
  siRNA target sequence for MRPL33 (NM_145330.1,198-216).
ggggatactgattcagaaa

SEQ ID NO: 285724 - DNA, 19 bp, Homo sapiens
  siRNA target sequence for MRPL33 (NM_145330.1,199-217).
gggatactgattcagaaat

SEQ ID NO: 285725 - DNA, 19 bp, Homo sapiens
  siRNA target sequence for MRPL35 (NM_016622.2,159-177).
ccactggacgttttagtca

SEQ ID NO: 285726 - DNA, 19 bp, Homo sapiens
  siRNA target sequence for MRPL35 (NM_016622.2,162-180).
ctggacgttttagtcatat

SEQ ID NO: 285727 - DNA, 19 bp, Homo sapiens
  siRNA target sequence for MRPL35 (NM_016622.2,165-183).
gacgttttagtcatattca

SEQ ID NO: 285728 - DNA, 19 bp, Homo sapiens
  siRNA target sequence for MRPL35 (NM_016622.2,167-185).
cgttttagtcatattcaga

SEQ ID NO: 285729 - DNA, 19 bp, Homo sapiens
  siRNA target sequence for MRPL35 (NM_016622.2,245-263).
catacctcagtgatcctta

SEQ ID NO: 285730 - DNA, 19 bp, Homo sapiens
  siRNA target sequence for MRPL35 (NM_016622.2,250-268).
ctcagtgatccttaataga

SEQ ID NO: 285731 - DNA, 19 bp, Homo sapiens
  siRNA target sequence for MRPL35 (NM_016622.2,298-316).
gctgccagtcagatctcta

SEQ ID NO: 285732 - DNA, 19 bp, Homo sapiens
  siRNA target sequence for MRPL35 (NM_016622.2,299-317).
ctgccagtcagatctctaa

SEQ ID NO: 285733 - DNA, 19 bp, Homo sapiens
  siRNA target sequence for MRPL35 (NM_016622.2,301-319).
gccagtcagatctctaaca

SEQ ID NO: 285734 - DNA, 19 bp, Homo sapiens
  siRNA target sequence for MRPL35 (NM_016622.2,302-320).
ccagtcagatctctaacat

SEQ ID NO: 285735 - DNA, 19 bp, Homo sapiens
  siRNA target sequence for MRPL35 (NM_016622.2,303-321).
cagtcagatctctaacata

SEQ ID NO: 285736 - DNA, 19 bp, Homo sapiens
  siRNA target sequence for MRPL35 (NM_016622.2,305-323).
gtcagatctctaacatact

SEQ ID NO: 285737 - DNA, 19 bp, Homo sapiens
  siRNA target sequence for MRPL35 (NM_016622.2,460-478).
gcgattgagggaatttgta

SEQ ID NO: 285738 - DNA, 19 bp, Homo sapiens
  siRNA target sequence for MRPL35 (NM_016622.2,461-479).
cgattgagggaatttgtat

SEQ ID NO: 285739 - DNA, 19 bp, Homo sapiens
  siRNA target sequence for MRPL35 (NM_016622.2,494-512).
cagagtaaactcttagata

SEQ ID NO: 285740 - DNA, 19 bp, Homo sapiens
  siRNA target sequence for MRPL35 (NM_016622.2,546-564).
ggtacgttgatgatcctta

SEQ ID NO: 285741 - DNA, 19 bp, Homo sapiens
  siRNA target sequence for MRPL35 (NM_016622.2,581-599).
cgaacaaacctgaaagtat

SEQ ID NO: 285742 - DNA, 19 bp, Homo sapiens
  siRNA target sequence for MRPL36 (NM_032479.2,57-75).
gcaaatctttttataagga

SEQ ID NO: 285743 - DNA, 19 bp, Homo sapiens
  siRNA target sequence for MRPL36 (NM_032479.2,58-76).
caaatctttttataaggaa

SEQ ID NO: 285744 - DNA, 19 bp, Homo sapiens
  siRNA target sequence for MRPL36 (NM_032479.2,126-144).
gccctctccacatttctat

SEQ ID NO: 285745 - DNA, 19 bp, Homo sapiens
  siRNA target sequence for MRPL36 (NM_032479.2,236-254).
gcctgcgctggggttcaaa

SEQ ID NO: 285746 - DNA, 19 bp, Homo sapiens
  siRNA target sequence for MRPL36 (NM_032479.2,237-255).
cctgcgctggggttcaaaa

SEQ ID NO: 285747 - DNA, 19 bp, Homo sapiens
  siRNA target sequence for MRPL36 (NM_032479.2,238-256).
ctgcgctggggttcaaaaa

SEQ ID NO: 285748 - DNA, 19 bp, Homo sapiens
  siRNA target sequence for MRPL36 (NM_032479.2,240-258).
gcgctggggttcaaaaaca

SEQ ID NO: 285749 - DNA, 19 bp, Homo sapiens
  siRNA target sequence for MRPL36 (NM_032479.2,312-330).
cggtggtacgtctactgta

SEQ ID NO: 285750 - DNA, 19 bp, Homo sapiens
  siRNA target sequence for MRPL36 (NM_032479.2,313-331).
ggtggtacgtctactgtaa

SEQ ID NO: 285751 - DNA, 19 bp, Homo sapiens
  siRNA target sequence for MRPL36 (NM_032479.2,314-332).
gtggtacgtctactgtaaa

SEQ ID NO: 285752 - DNA, 19 bp, Homo sapiens
  siRNA target sequence for MRPL37 (NM_016491.2,359-377).
cgagcatccgctgtacaaa

SEQ ID NO: 285753 - DNA, 19 bp, Homo sapiens
  siRNA target sequence for MRPL37 (NM_016491.2,412-430).
gccttctcgagggtgtaaa

SEQ ID NO: 285754 - DNA, 19 bp, Homo sapiens
  siRNA target sequence for MRPL37 (NM_016491.2,444-462).
ctcaccaagaccaagttaa

SEQ ID NO: 285755 - DNA, 19 bp, Homo sapiens
  siRNA target sequence for MRPL37 (NM_016491.2,448-466).
ccaagaccaagttaataga

SEQ ID NO: 285756 - DNA, 19 bp, Homo sapiens
  siRNA target sequence for MRPL37 (NM_016491.2,449-467).
caagaccaagttaatagaa

SEQ ID NO: 285757 - DNA, 19 bp, Homo sapiens
  siRNA target sequence for MRPL37 (NM_016491.2,485-503).
gcttagccttgttgatgat

SEQ ID NO: 285758 - DNA, 19 bp, Homo sapiens
  siRNA target sequence for MRPL37 (NM_016491.2,505-523).
caaggaaccacatagagaa

SEQ ID NO: 285759 - DNA, 19 bp, Homo sapiens
  siRNA target sequence for MRPL37 (NM_016491.2,531-549).
gagtgcgttctgaatgtga

SEQ ID NO: 285760 - DNA, 19 bp, Homo sapiens
  siRNA target sequence for MRPL37 (NM_016491.2,568-586).
ggcagaccactgaggaaat

SEQ ID NO: 285761 - DNA, 19 bp, Homo sapiens
  siRNA target sequence for MRPL37 (NM_016491.2,612-630).
gtcatcgtggacaacctaa

SEQ ID NO: 285762 - DNA, 19 bp, Homo sapiens
  siRNA target sequence for MRPL37 (NM_016491.2,626-644).
cctaatacagctgtgtaaa

SEQ ID NO: 285763 - DNA, 19 bp, Homo sapiens
  siRNA target sequence for MRPL37 (NM_016491.2,687-705).
gtccaaaactccacgtttt

SEQ ID NO: 285764 - DNA, 19 bp, Homo sapiens
  siRNA target sequence for MRPL37 (NM_016491.2,761-779).
ccgactgagcactaaggat

SEQ ID NO: 285765 - DNA, 19 bp, Homo sapiens
  siRNA target sequence for MRPL37 (NM_016491.2,859-877).
ccatcatcgatcttcatga

SEQ ID NO: 285766 - DNA, 19 bp, Homo sapiens
  siRNA target sequence for MRPL37 (NM_016491.2,860-878).
catcatcgatcttcatgaa

SEQ ID NO: 285767 - DNA, 19 bp, Homo sapiens
  siRNA target sequence for MRPL37 (NM_016491.2,866-884).
cgatcttcatgaatgcaat

SEQ ID NO: 285768 - DNA, 19 bp, Homo sapiens
  siRNA target sequence for MRPL37 (NM_016491.2,880-898).
gcaatatttatgatgtgaa

SEQ ID NO: 285769 - DNA, 19 bp, Homo sapiens
  siRNA target sequence for MRPL37 (NM_016491.2,940-958).
cccataccctgtacttact

SEQ ID NO: 285770 - DNA, 19 bp, Homo sapiens
  siRNA target sequence for MRPL37 (NM_016491.2,959-977).
ggacaaagccaatttacga

SEQ ID NO: 285771 - DNA, 19 bp, Homo sapiens
  siRNA target sequence for MRPL37 (NM_016491.2,1013-1031).
gatgatcctgtttgctttt

SEQ ID NO: 285772 - DNA, 19 bp, Homo sapiens
  siRNA target sequence for MRPL37 (NM_016491.2,1055-1073).
gctcctctatgggaatgat

SEQ ID NO: 285773 - DNA, 19 bp, Homo sapiens
  siRNA target sequence for MRPL37 (NM_016491.2,1119-1137).
gatggacgtgtcttccatt

SEQ ID NO: 285774 - DNA, 19 bp, Homo sapiens
  siRNA target sequence for MRPL37 (NM_016491.2,1133-1151).
ccatttcctagtgtttcaa

SEQ ID NO: 285775 - DNA, 19 bp, Homo sapiens
  siRNA target sequence for MRPL37 (NM_016491.2,1139-1157).
cctagtgtttcaactgaat

SEQ ID NO: 285776 - DNA, 19 bp, Homo sapiens
  siRNA target sequence for MRPL37 (NM_016491.2,1140-1158).
ctagtgtttcaactgaata

SEQ ID NO: 285777 - DNA, 19 bp, Homo sapiens
  siRNA target sequence for MRPL37 (NM_016491.2,1174-1192).
gtaacgagggtgtcaagaa

SEQ ID NO: 285778 - DNA, 19 bp, Homo sapiens
  siRNA target sequence for MRPL37 (NM_016491.2,1221-1239).
ctctatcagcatttttggt

SEQ ID NO: 285779 - DNA, 19 bp, Homo sapiens
  siRNA target sequence for MRPL37 (NM_016491.2,1238-1256).
gtgtctcccagtgatcaaa

SEQ ID NO: 285780 - DNA, 19 bp, Homo sapiens
  siRNA target sequence for MRPL4 (NM_015956.2,589-607).
ctatgtggcagaagaactt

SEQ ID NO: 285781 - DNA, 19 bp, Homo sapiens
  siRNA target sequence for MRPL4 (NM_015956.2,763-781).
ccacaagttactactacat

SEQ ID NO: 285782 - DNA, 19 bp, Homo sapiens
  siRNA target sequence for MRPL4 (NM_015956.2,1115-1133).
gcaggactcacgttacaga

SEQ ID NO: 285783 - DNA, 19 bp, Homo sapiens
  siRNA target sequence for MRPL41 (NM_032477.1,238-256).
ggaggttcgtgcagatcaa

SEQ ID NO: 285784 - DNA, 19 bp, Homo sapiens
  siRNA target sequence for MRPL42 (NM_014050.2,158-176).
ggctgtagctgcagtaaaa

SEQ ID NO: 285785 - DNA, 19 bp, Homo sapiens
  siRNA target sequence for MRPL42 (NM_014050.2,159-177).
gctgtagctgcagtaaaat

SEQ ID NO: 285786 - DNA, 19 bp, Homo sapiens
  siRNA target sequence for MRPL42 (NM_014050.2,180-198).
gtgatgtcaaagagaacta

SEQ ID NO: 285787 - DNA, 19 bp, Homo sapiens
  siRNA target sequence for MRPL42 (NM_014050.2,219-237).
gtccaaaatggagctttat

SEQ ID NO: 285788 - DNA, 19 bp, Homo sapiens
  siRNA target sequence for MRPL42 (NM_014050.2,265-283).
ctcctctaccagatgacta

SEQ ID NO: 285789 - DNA, 19 bp, Homo sapiens
  siRNA target sequence for MRPL42 (NM_014050.2,267-285).
cctctaccagatgactata

SEQ ID NO: 285790 - DNA, 19 bp, Homo sapiens
  siRNA target sequence for MRPL42 (NM_014050.2,385-403).
ggccagatcctgtgcataa

SEQ ID NO: 285791 - DNA, 19 bp, Homo sapiens
  siRNA target sequence for MRPL42 (NM_014050.2,387-405).
ccagatcctgtgcataata

SEQ ID NO: 285792 - DNA, 19 bp, Homo sapiens
  siRNA target sequence for MRPL42 (NM_014050.2,467-485).
ggaaggacctatgatagaa

SEQ ID NO: 285793 - DNA, 19 bp, Homo sapiens
  siRNA target sequence for MRPL43 (NM_032112.2,242-260).
ggaatccaggggtcgtaat

SEQ ID NO: 285794 - DNA, 19 bp, Homo sapiens
  siRNA target sequence for MRPL43 (NM_032112.2,243-261).
gaatccaggggtcgtaata

SEQ ID NO: 285795 - DNA, 19 bp, Homo sapiens
  siRNA target sequence for MRPL43 (NM_032112.2,248-266).
caggggtcgtaatatatgt

SEQ ID NO: 285796 - DNA, 19 bp, Homo sapiens
  siRNA target sequence for MRPL43 (NM_032112.2,253-271).
gtcgtaatatatgtaaact

SEQ ID NO: 285797 - DNA, 19 bp, Homo sapiens
  siRNA target sequence for MRPL43 (NM_032112.2,293-311).
gagtagtggccgaatacct

SEQ ID NO: 285798 - DNA, 19 bp, Homo sapiens
  siRNA target sequence for MRPL43 (NM_032112.2,295-313).
gtagtggccgaatacctta

SEQ ID NO: 285799 - DNA, 19 bp, Homo sapiens
  siRNA target sequence for MRPL43 (NM_176792.1,622-640).
cctatctcatcctcattga

SEQ ID NO: 285800 - DNA, 19 bp, Homo sapiens
  siRNA target sequence for MRPL43 (NM_176793.1,586-604).
ggctggcccgacccaatat

SEQ ID NO: 285801 - DNA, 19 bp, Homo sapiens
  siRNA target sequence for MRPL43 (NM_176793.1,590-608).
ggcccgacccaatatcagt

SEQ ID NO: 285802 - DNA, 19 bp, Homo sapiens
  siRNA target sequence for MRPL43 (NM_176793.1,591-609).
gcccgacccaatatcagtt

SEQ ID NO: 285803 - DNA, 19 bp, Homo sapiens
  siRNA target sequence for MRPL43 (NM_176793.1,646-664).
cgtcctgaacccttgtcat

SEQ ID NO: 285804 - DNA, 19 bp, Homo sapiens
  siRNA target sequence for MRPL43 (NM_176794.1,598-616).
cctcagaagcacatagcta

SEQ ID NO: 285805 - DNA, 19 bp, Homo sapiens
  siRNA target sequence for MRPL43 (NM_176794.1,599-617).
ctcagaagcacatagctat

SEQ ID NO: 285806 - DNA, 19 bp, Homo sapiens
  siRNA target sequence for MRPL46 (NM_022163.2,226-244).
ctctactgcagcagattga

SEQ ID NO: 285807 - DNA, 19 bp, Homo sapiens
  siRNA target sequence for MRPL46 (NM_022163.2,228-246).
ctactgcagcagattgaga

SEQ ID NO: 285808 - DNA, 19 bp, Homo sapiens
  siRNA target sequence for MRPL46 (NM_022163.2,356-374).
gctggcgcaagatttggaa

SEQ ID NO: 285809 - DNA, 19 bp, Homo sapiens
  siRNA target sequence for MRPL46 (NM_022163.2,360-378).
gcgcaagatttggaagata

SEQ ID NO: 285810 - DNA, 19 bp, Homo sapiens
  siRNA target sequence for MRPL46 (NM_022163.2,361-379).
cgcaagatttggaagatat

SEQ ID NO: 285811 - DNA, 19 bp, Homo sapiens
  siRNA target sequence for MRPL46 (NM_022163.2,475-493).
ggaaccttgtcctgttagt

SEQ ID NO: 285812 - DNA, 19 bp, Homo sapiens
  siRNA target sequence for MRPL46 (NM_022163.2,508-526).
gagaccaggatgtttggat

SEQ ID NO: 285813 - DNA, 19 bp, Homo sapiens
  siRNA target sequence for MRPL46 (NM_022163.2,589-607).
ccacactctcagaaaacaa

SEQ ID NO: 285814 - DNA, 19 bp, Homo sapiens
  siRNA target sequence for MRPL46 (NM_022163.2,640-658).
gtgggcactacacattcaa

SEQ ID NO: 285815 - DNA, 19 bp, Homo sapiens
  siRNA target sequence for MRPL46 (NM_022163.2,642-660).
gggcactacacattcaagt

SEQ ID NO: 285816 - DNA, 19 bp, Homo sapiens
  siRNA target sequence for MRPL46 (NM_022163.2,670-688).
caatgcggacagagagtaa

SEQ ID NO: 285817 - DNA, 19 bp, Homo sapiens
  siRNA target sequence for MRPL46 (NM_022163.2,693-711).
ggagccaaggtgttcttct

SEQ ID NO: 285818 - DNA, 19 bp, Homo sapiens
  siRNA target sequence for MRPL46 (NM_022163.2,713-731).
caaagcactgctattaact

SEQ ID NO: 285819 - DNA, 19 bp, Homo sapiens
  siRNA target sequence for MRPL46 (NM_022163.2,722-740).
gctattaactggagacttt

SEQ ID NO: 285820 - DNA, 19 bp, Homo sapiens
  siRNA target sequence for MRPL46 (NM_022163.2,751-769).
ggaataagggccatcatgt

SEQ ID NO: 285821 - DNA, 19 bp, Homo sapiens
  siRNA target sequence for MRPL46 (NM_022163.2,786-804).
gagctgggtgactatttga

SEQ ID NO: 285822 - DNA, 19 bp, Homo sapiens
  siRNA target sequence for MRPL46 (NM_022163.2,822-840).
caagttaggaggtttgttt

SEQ ID NO: 285823 - DNA, 19 bp, Homo sapiens
  siRNA target sequence for MRPL47 (NM_020409.2,73-91).
gaaatcttcccgatcgtta

SEQ ID NO: 285824 - DNA, 19 bp, Homo sapiens
  siRNA target sequence for MRPL47 (NM_020409.2,172-190).
ccaatatagattacttcat

SEQ ID NO: 285825 - DNA, 19 bp, Homo sapiens
  siRNA target sequence for MRPL47 (NM_020409.2,173-191).
caatatagattacttcata

SEQ ID NO: 285826 - DNA, 19 bp, Homo sapiens
  siRNA target sequence for MRPL47 (NM_020409.2,210-228).
gactagaagaattttttga

SEQ ID NO: 285827 - DNA, 19 bp, Homo sapiens
  siRNA target sequence for MRPL47 (NM_020409.2,279-297).
cctgtcagcaactaaggaa

SEQ ID NO: 285828 - DNA, 19 bp, Homo sapiens
  siRNA target sequence for MRPL47 (NM_020409.2,286-304).
gcaactaaggaacaaaagt

SEQ ID NO: 285829 - DNA, 19 bp, Homo sapiens
  siRNA target sequence for MRPL47 (NM_020409.2,323-341).
ctttggtatgtcttactga

SEQ ID NO: 285830 - DNA, 19 bp, Homo sapiens
  siRNA target sequence for MRPL47 (NM_020409.2,327-345).
ggtatgtcttactgaaaga

SEQ ID NO: 285831 - DNA, 19 bp, Homo sapiens
  siRNA target sequence for MRPL47 (NM_020409.2,405-423).
gtccagagcggttagataa

SEQ ID NO: 285832 - DNA, 19 bp, Homo sapiens
  siRNA target sequence for MRPL47 (NM_020409.2,408-426).
cagagcggttagataaggt

SEQ ID NO: 285833 - DNA, 19 bp, Homo sapiens
  siRNA target sequence for MRPL47 (NM_020409.2,435-453).
ccatggatgcattagataa

SEQ ID NO: 285834 - DNA, 19 bp, Homo sapiens
  siRNA target sequence for MRPL47 (NM_020409.2,488-506).
cttcagactggtcaagaaa

SEQ ID NO: 285835 - DNA, 19 bp, Homo sapiens
  siRNA target sequence for MRPL47 (NM_020409.2,546-564).
gaatcatctggcacaagtt

SEQ ID NO: 285836 - DNA, 19 bp, Homo sapiens
  siRNA target sequence for MRPL47 (NM_020409.2,562-580).
gttcaagcagtgggttata

SEQ ID NO: 285837 - DNA, 19 bp, Homo sapiens
  siRNA target sequence for MRPL47 (NM_020409.2,565-583).
caagcagtgggttatacct

SEQ ID NO: 285838 - DNA, 19 bp, Homo sapiens
  siRNA target sequence for MRPL47 (NM_020409.2,587-605).
cacctaaataaaagataca

SEQ ID NO: 285839 - DNA, 19 bp, Homo sapiens
  siRNA target sequence for MRPL47 (NM_020409.2,600-618).
gatacaataggaaacgatt

SEQ ID NO: 285840 - DNA, 19 bp, Homo sapiens
  siRNA target sequence for MRPL47 (NM_020409.2,628-646).
gccttatgtggaccatttt

SEQ ID NO: 285841 - DNA, 19 bp, Homo sapiens
  siRNA target sequence for MRPL47 (NM_020409.2,649-667).
cagactggaacgtgagaaa

SEQ ID NO: 285842 - DNA, 19 bp, Homo sapiens
  siRNA target sequence for MRPL47 (NM_020409.2,664-682).
gaaacgagcccgcatcaaa

SEQ ID NO: 285843 - DNA, 19 bp, Homo sapiens
  siRNA target sequence for MRPL47 (NM_020409.2,684-702).
cacggaaggaaaatttaga

SEQ ID NO: 285844 - DNA, 19 bp, Homo sapiens
  siRNA target sequence for MRPL47 (NM_020409.2,746-764).
gctgaagcccaaaagtcaa

SEQ ID NO: 285845 - DNA, 19 bp, Homo sapiens
  siRNA target sequence for MRPL48 (NM_016055.3,295-313).
gcggaaccttggaaaaggt

SEQ ID NO: 285846 - DNA, 19 bp, Homo sapiens
  siRNA target sequence for MRPL48 (NM_016055.3,315-333).
ctgtgcctgaggaacaata

SEQ ID NO: 285847 - DNA, 19 bp, Homo sapiens
  siRNA target sequence for MRPL48 (NM_016055.3,319-337).
gcctgaggaacaataccat

SEQ ID NO: 285848 - DNA, 19 bp, Homo sapiens
  siRNA target sequence for MRPL48 (NM_016055.3,397-415).
ctgtaggtggaattctact

SEQ ID NO: 285849 - DNA, 19 bp, Homo sapiens
  siRNA target sequence for MRPL48 (NM_016055.3,399-417).
gtaggtggaattctactaa

SEQ ID NO: 285850 - DNA, 19 bp, Homo sapiens
  siRNA target sequence for MRPL48 (NM_016055.3,402-420).
ggtggaattctactaagta

SEQ ID NO: 285851 - DNA, 19 bp, Homo sapiens
  siRNA target sequence for MRPL48 (NM_016055.3,444-462).
cccacccacggcattggaa

SEQ ID NO: 285852 - DNA, 19 bp, Homo sapiens
  siRNA target sequence for MRPL48 (NM_016055.3,448-466).
cccacggcattggaaagta

SEQ ID NO: 285853 - DNA, 19 bp, Homo sapiens
  siRNA target sequence for MRPL48 (NM_016055.3,450-468).
cacggcattggaaagtaca

SEQ ID NO: 285854 - DNA, 19 bp, Homo sapiens
  siRNA target sequence for MRPL48 (NM_016055.3,459-477).
ggaaagtacaagcacttaa

SEQ ID NO: 285855 - DNA, 19 bp, Homo sapiens
  siRNA target sequence for MRPL48 (NM_016055.3,460-478).
gaaagtacaagcacttaat

SEQ ID NO: 285856 - DNA, 19 bp, Homo sapiens
  siRNA target sequence for MRPL48 (NM_016055.3,536-554).
ggggacagattatgaatat

SEQ ID NO: 285857 - DNA, 19 bp, Homo sapiens
  siRNA target sequence for MRPL48 (NM_016055.3,570-588).
catctgactgcatatgata

SEQ ID NO: 285858 - DNA, 19 bp, Homo sapiens
  siRNA target sequence for MRPL48 (NM_016055.3,590-608).
gaccctggcagagagttat

SEQ ID NO: 285859 - DNA, 19 bp, Homo sapiens
  siRNA target sequence for MRPL48 (NM_016055.3,602-620).
gagttatgcccagtatgtt

SEQ ID NO: 285860 - DNA, 19 bp, Homo sapiens
  siRNA target sequence for MRPL48 (NM_016055.3,604-622).
gttatgcccagtatgttca

SEQ ID NO: 285861 - DNA, 19 bp, Homo sapiens
  siRNA target sequence for MRPL48 (NM_016055.3,667-685).
caatgccaaccaaaaccat

SEQ ID NO: 285862 - DNA, 19 bp, Homo sapiens
  siRNA target sequence for MRPL48 (NM_016055.3,906-924).
gaactgttggccaagttga

SEQ ID NO: 285863 - DNA, 19 bp, Homo sapiens
  siRNA target sequence for MRPL50 (NM_019051.1,80-98).
gggacaccatgtagagaat

SEQ ID NO: 285864 - DNA, 19 bp, Homo sapiens
  siRNA target sequence for MRPL50 (NM_019051.1,81-99).
ggacaccatgtagagaatt

SEQ ID NO: 285865 - DNA, 19 bp, Homo sapiens
  siRNA target sequence for MRPL50 (NM_019051.1,82-100).
gacaccatgtagagaattt

SEQ ID NO: 285866 - DNA, 19 bp, Homo sapiens
  siRNA target sequence for MRPL50 (NM_019051.1,102-120).
ggtctcgattcagaaaaga

SEQ ID NO: 285867 - DNA, 19 bp, Homo sapiens
  siRNA target sequence for MRPL50 (NM_019051.1,173-191).
gtgtgtccacctttacgaa

SEQ ID NO: 285868 - DNA, 19 bp, Homo sapiens
  siRNA target sequence for MRPL50 (NM_019051.1,218-236).
ctccagagtcgtttggaat

SEQ ID NO: 285869 - DNA, 19 bp, Homo sapiens
  siRNA target sequence for MRPL50 (NM_019051.1,227-245).
cgtttggaatcttacgtta

SEQ ID NO: 285870 - DNA, 19 bp, Homo sapiens
  siRNA target sequence for MRPL50 (NM_019051.1,228-246).
gtttggaatcttacgttaa

SEQ ID NO: 285871 - DNA, 19 bp, Homo sapiens
  siRNA target sequence for MRPL50 (NM_019051.1,232-250).
ggaatcttacgttaaagaa

SEQ ID NO: 285872 - DNA, 19 bp, Homo sapiens
  siRNA target sequence for MRPL50 (NM_019051.1,241-259).
cgttaaagaagtttttggt

SEQ ID NO: 285873 - DNA, 19 bp, Homo sapiens
  siRNA target sequence for MRPL50 (NM_019051.1,299-317).
gatagtcgtctaaagttca

SEQ ID NO: 285874 - DNA, 19 bp, Homo sapiens
  siRNA target sequence for MRPL50 (NM_019051.1,303-321).
gtcgtctaaagttcaatct

SEQ ID NO: 285875 - DNA, 19 bp, Homo sapiens
  siRNA target sequence for MRPL50 (NM_019051.1,382-400).
gtgcagggttagagatgtt

SEQ ID NO: 285876 - DNA, 19 bp, Homo sapiens
  siRNA target sequence for MRPL50 (NM_019051.1,384-402).
gcagggttagagatgttct

SEQ ID NO: 285877 - DNA, 19 bp, Homo sapiens
  siRNA target sequence for MRPL50 (NM_019051.1,385-403).
cagggttagagatgttctt

SEQ ID NO: 285878 - DNA, 19 bp, Homo sapiens
  siRNA target sequence for MRPL50 (NM_019051.1,387-405).
gggttagagatgttcttga

SEQ ID NO: 285879 - DNA, 19 bp, Homo sapiens
  siRNA target sequence for MRPL50 (NM_019051.1,388-406).
ggttagagatgttcttgat

SEQ ID NO: 285880 - DNA, 19 bp, Homo sapiens
  siRNA target sequence for MRPL50 (NM_019051.1,389-407).
gttagagatgttcttgatt

SEQ ID NO: 285881 - DNA, 19 bp, Homo sapiens
  siRNA target sequence for MRPL50 (NM_019051.1,409-427).
ctataatgtccctattcaa

SEQ ID NO: 285882 - DNA, 19 bp, Homo sapiens
  siRNA target sequence for MRPL50 (NM_019051.1,416-434).
gtccctattcaagatagat

SEQ ID NO: 285883 - DNA, 19 bp, Homo sapiens
  siRNA target sequence for MRPL50 (NM_019051.1,418-436).
ccctattcaagatagatct

SEQ ID NO: 285884 - DNA, 19 bp, Homo sapiens
  siRNA target sequence for MRPL50 (NM_019051.1,419-437).
cctattcaagatagatcta

SEQ ID NO: 285885 - DNA, 19 bp, Homo sapiens
  siRNA target sequence for MRPL50 (NM_019051.1,420-438).
ctattcaagatagatctaa

SEQ ID NO: 285886 - DNA, 19 bp, Homo sapiens
  siRNA target sequence for MRPL51 (NM_016497.2,335-353).
cgggatcctgggaaacttt

SEQ ID NO: 285887 - DNA, 19 bp, Homo sapiens
  siRNA target sequence for MRPL51 (NM_016497.2,427-445).
gtatccgaaagaggaaaat

SEQ ID NO: 285888 - DNA, 19 bp, Homo sapiens
  siRNA target sequence for MRPL51 (NM_016497.2,522-540).
cgacatgggaagtttcgat

SEQ ID NO: 285889 - DNA, 19 bp, Homo sapiens
  siRNA target sequence for MRPL9 (NM_031420.2,308-326).
cggcgacatcgcgtctata

SEQ ID NO: 285890 - DNA, 19 bp, Homo sapiens
  siRNA target sequence for MRPL9 (NM_031420.2,309-327).
ggcgacatcgcgtctataa

SEQ ID NO: 285891 - DNA, 19 bp, Homo sapiens
  siRNA target sequence for MRPL9 (NM_031420.2,312-330).
gacatcgcgtctataagct

SEQ ID NO: 285892 - DNA, 19 bp, Homo sapiens
  siRNA target sequence for MRPL9 (NM_031420.2,381-399).
cgcagtcggtggagaatgt

SEQ ID NO: 285893 - DNA, 19 bp, Homo sapiens
  siRNA target sequence for MRPL9 (NM_031420.2,464-482).
ggactggctgtatatgcat

SEQ ID NO: 285894 - DNA, 19 bp, Homo sapiens
  siRNA target sequence for MRPL9 (NM_031420.2,564-582).
gtgaggcgacagtgaaatt

SEQ ID NO: 285895 - DNA, 19 bp, Homo sapiens
  siRNA target sequence for MRPL9 (NM_031420.2,568-586).
ggcgacagtgaaatttcta

SEQ ID NO: 285896 - DNA, 19 bp, Homo sapiens
  siRNA target sequence for MRPL9 (NM_031420.2,604-622).
ggtagggatgaagaacaat

SEQ ID NO: 285897 - DNA, 19 bp, Homo sapiens
  siRNA target sequence for MRPL9 (NM_031420.2,634-652).
gctgaaccctgaaatagtt

SEQ ID NO: 285898 - DNA, 19 bp, Homo sapiens
  siRNA target sequence for MRPL9 (NM_031420.2,685-703).
ggttgccccacatacatta

SEQ ID NO: 285899 - DNA, 19 bp, Homo sapiens
  siRNA target sequence for MRPL9 (NM_031420.2,686-704).
gttgccccacatacattaa

SEQ ID NO: 285900 - DNA, 19 bp, Homo sapiens
  siRNA target sequence for MRPL9 (NM_031420.2,689-707).
gccccacatacattaaagt

SEQ ID NO: 285901 - DNA, 19 bp, Homo sapiens
  siRNA target sequence for MRPL9 (NM_031420.2,690-708).
ccccacatacattaaagtt

SEQ ID NO: 285902 - DNA, 19 bp, Homo sapiens
  siRNA target sequence for MRPL9 (NM_031420.2,728-746).
cggtggggcgagtattggt

SEQ ID NO: 285903 - DNA, 19 bp, Homo sapiens
  siRNA target sequence for MRPL9 (NM_031420.2,745-763).
gtgtgaggtgacggtaaat

SEQ ID NO: 285904 - DNA, 19 bp, Homo sapiens
  siRNA target sequence for MRPL9 (NM_031420.2,757-775).
ggtaaatgggcttgatact

SEQ ID NO: 285905 - DNA, 19 bp, Homo sapiens
  siRNA target sequence for MRPL9 (NM_031420.2,786-804).
ctatgtctgtcgtgaactt

SEQ ID NO: 285906 - DNA, 19 bp, Homo sapiens
  siRNA target sequence for MRPL9 (NM_031420.2,813-831).
ccaagaccaaaagatataa

SEQ ID NO: 285907 - DNA, 19 bp, Homo sapiens
  siRNA target sequence for MRPS11 (NM_022839.2,396-414).
cggccaagcagaaagttga

SEQ ID NO: 285908 - DNA, 19 bp, Homo sapiens
  siRNA target sequence for MRPS11 (NM_022839.2,397-415).
ggccaagcagaaagttgaa

SEQ ID NO: 285909 - DNA, 19 bp, Homo sapiens
  siRNA target sequence for MRPS11 (NM_022839.2,399-417).
ccaagcagaaagttgaaca

SEQ ID NO: 285910 - DNA, 19 bp, Homo sapiens
  siRNA target sequence for MRPS11 (NM_022839.2,578-596).
gagccccttgcctttgctt

SEQ ID NO: 285911 - DNA, 19 bp, Homo sapiens
  siRNA target sequence for MRPS11 (NM_022839.2,669-687).
cagcggcgagagctaaaca

SEQ ID NO: 285912 - DNA, 19 bp, Homo sapiens
  siRNA target sequence for MRPS11 (NM_022839.2,672-690).
cggcgagagctaaacaaaa

SEQ ID NO: 285913 - DNA, 19 bp, Homo sapiens
  siRNA target sequence for MRPS11 (NM_022839.2,770-788).
ggcctggaagtgatctcaa

SEQ ID NO: 285914 - DNA, 19 bp, Homo sapiens
  siRNA target sequence for MRPS11 (NM_022839.2,775-793).
ggaagtgatctcaatcaca

SEQ ID NO: 285915 - DNA, 19 bp, Homo sapiens
  siRNA target sequence for MRPS12 (NM_021107.1,369-387).
ctcaacacgtccctaactt

SEQ ID NO: 285916 - DNA, 19 bp, Homo sapiens
  siRNA target sequence for MRPS12 (NM_021107.1,371-389).
caacacgtccctaacttgt

SEQ ID NO: 285917 - DNA, 19 bp, Homo sapiens
  siRNA target sequence for MRPS14 (NM_022100.1,86-104).
ccaagttcgaagtcactat

SEQ ID NO: 285918 - DNA, 19 bp, Homo sapiens
  siRNA target sequence for MRPS14 (NM_022100.1,115-133).
gaatgtggcgcgatgtgaa

SEQ ID NO: 285919 - DNA, 19 bp, Homo sapiens
  siRNA target sequence for MRPS14 (NM_022100.1,125-143).
cgatgtgaagagacgaaaa

SEQ ID NO: 285920 - DNA, 19 bp, Homo sapiens
  siRNA target sequence for MRPS14 (NM_022100.1,160-178).
cagatgagaggctacgtat

SEQ ID NO: 285921 - DNA, 19 bp, Homo sapiens
  siRNA target sequence for MRPS14 (NM_022100.1,162-180).
gatgagaggctacgtatta

SEQ ID NO: 285922 - DNA, 19 bp, Homo sapiens
  siRNA target sequence for MRPS14 (NM_022100.1,165-183).
gagaggctacgtattaatt

SEQ ID NO: 285923 - DNA, 19 bp, Homo sapiens
  siRNA target sequence for MRPS14 (NM_022100.1,167-185).
gaggctacgtattaattca

SEQ ID NO: 285924 - DNA, 19 bp, Homo sapiens
  siRNA target sequence for MRPS14 (NM_022100.1,169-187).
ggctacgtattaattcact

SEQ ID NO: 285925 - DNA, 19 bp, Homo sapiens
  siRNA target sequence for MRPS14 (NM_022100.1,257-275).
ggatagctgtcctgttaga

SEQ ID NO: 285926 - DNA, 19 bp, Homo sapiens
  siRNA target sequence for MRPS14 (NM_022100.1,258-276).
gatagctgtcctgttagaa

SEQ ID NO: 285927 - DNA, 19 bp, Homo sapiens
  siRNA target sequence for MRPS14 (NM_022100.1,326-344).
ctggaggcttagtcgtata

SEQ ID NO: 285928 - DNA, 19 bp, Homo sapiens
  siRNA target sequence for MRPS14 (NM_022100.1,328-346).
ggaggcttagtcgtatagt

SEQ ID NO: 285929 - DNA, 19 bp, Homo sapiens
  siRNA target sequence for MRPS14 (NM_022100.1,331-349).
ggcttagtcgtatagtctt

SEQ ID NO: 285930 - DNA, 19 bp, Homo sapiens
  siRNA target sequence for MRPS15 (NM_031280.2,111-129).
gaggacgctgagtttgatt

SEQ ID NO: 285931 - DNA, 19 bp, Homo sapiens
  siRNA target sequence for MRPS15 (NM_031280.2,174-192).
cggtgggagcgccaagttt

SEQ ID NO: 285932 - DNA, 19 bp, Homo sapiens
  siRNA target sequence for MRPS15 (NM_031280.2,178-196).
gggagcgccaagtttcctt

SEQ ID NO: 285933 - DNA, 19 bp, Homo sapiens
  siRNA target sequence for MRPS15 (NM_031280.2,302-320).
ctacgctgctcaaagacta

SEQ ID NO: 285934 - DNA, 19 bp, Homo sapiens
  siRNA target sequence for MRPS15 (NM_031280.2,335-353).
gaattgagaaggttgatga

SEQ ID NO: 285935 - DNA, 19 bp, Homo sapiens
  siRNA target sequence for MRPS15 (NM_031280.2,358-376).
gtgaaaagactcttgtctt

SEQ ID NO: 285936 - DNA, 19 bp, Homo sapiens
  siRNA target sequence for MRPS15 (NM_031280.2,600-618).
cctccgtaacaccaactat

SEQ ID NO: 285937 - DNA, 19 bp, Homo sapiens
  siRNA target sequence for MRPS15 (NM_031280.2,603-621).
ccgtaacaccaactatgat

SEQ ID NO: 285938 - DNA, 19 bp, Homo sapiens
  siRNA target sequence for MRPS15 (NM_031280.2,609-627).
caccaactatgatgtcttt

SEQ ID NO: 285939 - DNA, 19 bp, Homo sapiens
  siRNA target sequence for MRPS15 (NM_031280.2,622-640).
gtctttgagaagatatgct

SEQ ID NO: 285940 - DNA, 19 bp, Homo sapiens
  siRNA target sequence for MRPS15 (NM_031280.2,660-678).
caccttcccccctctgtat

SEQ ID NO: 285941 - DNA, 19 bp, Homo sapiens
  siRNA target sequence for MRPS15 (NM_031280.2,831-849).
caaagccataccaaagaca

SEQ ID NO: 285942 - DNA, 19 bp, Homo sapiens
  siRNA target sequence for MRPS16 (NM_016065.2,295-313).
cagggatggccgtttcgta

SEQ ID NO: 285943 - DNA, 19 bp, Homo sapiens
  siRNA target sequence for MRPS16 (NM_016065.2,382-400).
caggatccgtcattggatt

SEQ ID NO: 285944 - DNA, 19 bp, Homo sapiens
  siRNA target sequence for MRPS16 (NM_016065.2,415-433).
cctctctaagcctatggaa

SEQ ID NO: 285945 - DNA, 19 bp, Homo sapiens
  siRNA target sequence for MRPS16 (NM_016065.2,461-479).
cctctgcatcctatgatga

SEQ ID NO: 285946 - DNA, 19 bp, Homo sapiens
  siRNA target sequence for MRPS16 (NM_016065.2,462-480).
ctctgcatcctatgatgat

SEQ ID NO: 285947 - DNA, 19 bp, Homo sapiens
  siRNA target sequence for MRPS16 (NM_016065.2,464-482).
ctgcatcctatgatgatca

SEQ ID NO: 285948 - DNA, 19 bp, Homo sapiens
  siRNA target sequence for MRPS16 (NM_016065.2,515-533).
cgtgaagtcctgttagctt

SEQ ID NO: 285949 - DNA, 19 bp, Homo sapiens
  siRNA target sequence for MRPS17 (NM_015969.2,51-69).
cgtccatgccagatggatt

SEQ ID NO: 285950 - DNA, 19 bp, Homo sapiens
  siRNA target sequence for MRPS17 (NM_015969.2,136-154).
gatccctatttattaaagt

SEQ ID NO: 285951 - DNA, 19 bp, Homo sapiens
  siRNA target sequence for MRPS17 (NM_015969.2,139-157).
ccctatttattaaagtatt

SEQ ID NO: 285952 - DNA, 19 bp, Homo sapiens
  siRNA target sequence for MRPS17 (NM_015969.2,245-263).
cacgagcaaagcatgtgaa

SEQ ID NO: 285953 - DNA, 19 bp, Homo sapiens
  siRNA target sequence for MRPS17 (NM_015969.2,288-306).
caaagttggaaaagtcata

SEQ ID NO: 285954 - DNA, 19 bp, Homo sapiens
  siRNA target sequence for MRPS17 (NM_015969.2,371-389).
ccacccagctaagcaaaaa

SEQ ID NO: 285955 - DNA, 19 bp, Homo sapiens
  siRNA target sequence for MRPS17 (NM_015969.2,372-390).
cacccagctaagcaaaaat

SEQ ID NO: 285956 - DNA, 19 bp, Homo sapiens
  siRNA target sequence for MRPS18A (NM_018135.2,143-161).
ggaagacaactataattga

SEQ ID NO: 285957 - DNA, 19 bp, Homo sapiens
  siRNA target sequence for MRPS18A (NM_018135.2,305-323).
gcatgctgccccgaaagat

SEQ ID NO: 285958 - DNA, 19 bp, Homo sapiens
  siRNA target sequence for MRPS18A (NM_018135.2,381-399).
ccgagcaggtctattacca

SEQ ID NO: 285959 - DNA, 19 bp, Homo sapiens
  siRNA target sequence for MRPS18A (NM_018135.2,382-400).
cgagcaggtctattaccaa

SEQ ID NO: 285960 - DNA, 19 bp, Homo sapiens
  siRNA target sequence for MRPS18A (NM_018135.2,383-401).
gagcaggtctattaccaaa

SEQ ID NO: 285961 - DNA, 19 bp, Homo sapiens
  siRNA target sequence for MRPS18A (NM_018135.2,386-404).
caggtctattaccaaatca

SEQ ID NO: 285962 - DNA, 19 bp, Homo sapiens
  siRNA target sequence for MRPS18A (NM_018135.2,388-406).
ggtctattaccaaatcaca

SEQ ID NO: 285963 - DNA, 19 bp, Homo sapiens
  siRNA target sequence for MRPS18A (NM_018135.2,486-504).
cgtcaagcccatctacaaa

SEQ ID NO: 285964 - DNA, 19 bp, Homo sapiens
  siRNA target sequence for MRPS18B (NM_014046.2,67-85).
gaggcggcttcctatgcta

SEQ ID NO: 285965 - DNA, 19 bp, Homo sapiens
  siRNA target sequence for MRPS18B (NM_014046.2,178-196).
catttctccttataaggat

SEQ ID NO: 285966 - DNA, 19 bp, Homo sapiens
  siRNA target sequence for MRPS18B (NM_014046.2,193-211).
ggatgagccctggaaatat

SEQ ID NO: 285967 - DNA, 19 bp, Homo sapiens
  siRNA target sequence for MRPS18B (NM_014046.2,299-317).
cagcggactcggaagacat

SEQ ID NO: 285968 - DNA, 19 bp, Homo sapiens
  siRNA target sequence for MRPS18B (NM_014046.2,304-322).
gactcggaagacatgtatt

SEQ ID NO: 285969 - DNA, 19 bp, Homo sapiens
  siRNA target sequence for MRPS18B (NM_014046.2,315-333).
catgtattcgtcggaataa

SEQ ID NO: 285970 - DNA, 19 bp, Homo sapiens
  siRNA target sequence for MRPS18B (NM_014046.2,318-336).
gtattcgtcggaataaagt

SEQ ID NO: 285971 - DNA, 19 bp, Homo sapiens
  siRNA target sequence for MRPS18B (NM_014046.2,354-372).
ccatctgtcgagatcacaa

SEQ ID NO: 285972 - DNA, 19 bp, Homo sapiens
  siRNA target sequence for MRPS18B (NM_014046.2,420-438).
gcgcccacacgggtatcat

SEQ ID NO: 285973 - DNA, 19 bp, Homo sapiens
  siRNA target sequence for MRPS18B (NM_014046.2,427-445).
cacgggtatcatcttctat

SEQ ID NO: 285974 - DNA, 19 bp, Homo sapiens
  siRNA target sequence for MRPS18B (NM_014046.2,439-457).
cttctatgctccatacaca

SEQ ID NO: 285975 - DNA, 19 bp, Homo sapiens
  siRNA target sequence for MRPS18B (NM_014046.2,512-530).
gatcatggtctcctcattt

SEQ ID NO: 285976 - DNA, 19 bp, Homo sapiens
  siRNA target sequence for MRPS18B (NM_014046.2,554-572).
cgggaccttgacttcagta

SEQ ID NO: 285977 - DNA, 19 bp, Homo sapiens
  siRNA target sequence for MRPS18C (NM_016067.1,209-227).
gcccatttcaatggaaaat

SEQ ID NO: 285978 - DNA, 19 bp, Homo sapiens
  siRNA target sequence for MRPS2 (NM_016034.2,131-149).
gcgcgacggcccttatgat

SEQ ID NO: 285979 - DNA, 19 bp, Homo sapiens
  siRNA target sequence for MRPS2 (NM_016034.2,171-189).
cgatttcaacgacaagatt

SEQ ID NO: 285980 - DNA, 19 bp, Homo sapiens
  siRNA target sequence for MRPS2 (NM_016034.2,172-190).
gatttcaacgacaagattt

SEQ ID NO: 285981 - DNA, 19 bp, Homo sapiens
  siRNA target sequence for MRPS2 (NM_016034.2,177-195).
caacgacaagattttgaat

SEQ ID NO: 285982 - DNA, 19 bp, Homo sapiens
  siRNA target sequence for MRPS2 (NM_016034.2,289-307).
ggctgtcggcacaggttta

SEQ ID NO: 285983 - DNA, 19 bp, Homo sapiens
  siRNA target sequence for MRPS2 (NM_016034.2,290-308).
gctgtcggcacaggtttat

SEQ ID NO: 285984 - DNA, 19 bp, Homo sapiens
  siRNA target sequence for MRPS2 (NM_016034.2,293-311).
gtcggcacaggtttatgga

SEQ ID NO: 285985 - DNA, 19 bp, Homo sapiens
  siRNA target sequence for MRPS21 (NM_018997.1,582-600).
gcatacaggaccctaaaca

SEQ ID NO: 285986 - DNA, 19 bp, Homo sapiens
  siRNA target sequence for MRPS21 (NM_018997.1,610-628).
ctatggatgggctcattga

SEQ ID NO: 285987 - DNA, 19 bp, Homo sapiens
  siRNA target sequence for MRPS21 (NM_018997.1,618-636).
gggctcattgaggacatta

SEQ ID NO: 285988 - DNA, 19 bp, Homo sapiens
  siRNA target sequence for MRPS21 (NM_018997.1,619-637).
ggctcattgaggacattaa

SEQ ID NO: 285989 - DNA, 19 bp, Homo sapiens
  siRNA target sequence for MRPS21 (NM_018997.1,639-657).
catcggcggtattatgaga

SEQ ID NO: 285990 - DNA, 19 bp, Homo sapiens
  siRNA target sequence for MRPS21 (NM_018997.1,723-741).
gctcgcaagatcaacttct

SEQ ID NO: 285991 - DNA, 19 bp, Homo sapiens
  siRNA target sequence for MRPS21 (NM_018997.1,724-742).
ctcgcaagatcaacttctt

SEQ ID NO: 285992 - DNA, 19 bp, Homo sapiens
  siRNA target sequence for MRPS21 (NM_018997.1,726-744).
cgcaagatcaacttcttga

SEQ ID NO: 285993 - DNA, 19 bp, Homo sapiens
  siRNA target sequence for MRPS21 (NM_018997.1,727-745).
gcaagatcaacttcttgat

SEQ ID NO: 285994 - DNA, 19 bp, Homo sapiens
  siRNA target sequence for MRPS21 (NM_018997.1,737-755).
cttcttgatgcgaaagaat

SEQ ID NO: 285995 - DNA, 19 bp, Homo sapiens
  siRNA target sequence for MRPS23 (NM_016070.2,115-133).
cctgtggtttgacgtatat

SEQ ID NO: 285996 - DNA, 19 bp, Homo sapiens
  siRNA target sequence for MRPS23 (NM_016070.2,223-241).
ccacgaggatcggattaga

SEQ ID NO: 285997 - DNA, 19 bp, Homo sapiens
  siRNA target sequence for MRPS23 (NM_016070.2,233-251).
cggattagagcgaagtttt

SEQ ID NO: 285998 - DNA, 19 bp, Homo sapiens
  siRNA target sequence for MRPS23 (NM_016070.2,234-252).
ggattagagcgaagtttta

SEQ ID NO: 285999 - DNA, 19 bp, Homo sapiens
  siRNA target sequence for MRPS23 (NM_016070.2,240-258).
gagcgaagttttattcagt

SEQ ID NO: 286000 - DNA, 19 bp, Homo sapiens
  siRNA target sequence for MRPS23 (NM_016070.2,259-277).
gtatgggtctggtcaaaga

SEQ ID NO: 286001 - DNA, 19 bp, Homo sapiens
  siRNA target sequence for MRPS23 (NM_016070.2,386-404).
gaaacagggaaggctttat

SEQ ID NO: 286002 - DNA, 19 bp, Homo sapiens
  siRNA target sequence for MRPS23 (NM_016070.2,543-561).
cacaggaccagcatttgga

SEQ ID NO: 286003 - DNA, 19 bp, Homo sapiens
  siRNA target sequence for MRPS25 (NM_022497.3,146-164).
cgcaccctgcaatatctga

SEQ ID NO: 286004 - DNA, 19 bp, Homo sapiens
  siRNA target sequence for MRPS25 (NM_022497.3,196-214).
gaaggtcatgacagtgaat

SEQ ID NO: 286005 - DNA, 19 bp, Homo sapiens
  siRNA target sequence for MRPS25 (NM_022497.3,200-218).
gtcatgacagtgaattaca

SEQ ID NO: 286006 - DNA, 19 bp, Homo sapiens
  siRNA target sequence for MRPS25 (NM_022497.3,272-290).
cctcagattcaatacaaaa

SEQ ID NO: 286007 - DNA, 19 bp, Homo sapiens
  siRNA target sequence for MRPS25 (NM_022497.3,336-354).
ccttcctgcgattctactt

SEQ ID NO: 286008 - DNA, 19 bp, Homo sapiens
  siRNA target sequence for MRPS25 (NM_022497.3,337-355).
cttcctgcgattctactta

SEQ ID NO: 286009 - DNA, 19 bp, Homo sapiens
  siRNA target sequence for MRPS25 (NM_022497.3,341-359).
ctgcgattctacttagatt

SEQ ID NO: 286010 - DNA, 19 bp, Homo sapiens
  siRNA target sequence for MRPS25 (NM_022497.3,343-361).
gcgattctacttagattct

SEQ ID NO: 286011 - DNA, 19 bp, Homo sapiens
  siRNA target sequence for MRPS25 (NM_022497.3,589-607).
gatgagggggaagtacaaa

SEQ ID NO: 286012 - DNA, 19 bp, Homo sapiens
  siRNA target sequence for MRPS26 (NM_030811.3,134-152).
gacccgctggccaaatcca

SEQ ID NO: 286013 - DNA, 19 bp, Homo sapiens
  siRNA target sequence for MRPS27 (NM_015084.1,156-174).
gctgatcttgcatctttaa

SEQ ID NO: 286014 - DNA, 19 bp, Homo sapiens
  siRNA target sequence for MRPS27 (NM_015084.1,157-175).
ctgatcttgcatctttaat

SEQ ID NO: 286015 - DNA, 19 bp, Homo sapiens
  siRNA target sequence for MRPS27 (NM_015084.1,200-218).
gcctgttagttctttaaca

SEQ ID NO: 286016 - DNA, 19 bp, Homo sapiens
  siRNA target sequence for MRPS27 (NM_015084.1,202-220).
ctgttagttctttaacaat

SEQ ID NO: 286017 - DNA, 19 bp, Homo sapiens
  siRNA target sequence for MRPS27 (NM_015084.1,217-235).
caatatcacggcttataga

SEQ ID NO: 286018 - DNA, 19 bp, Homo sapiens
  siRNA target sequence for MRPS27 (NM_015084.1,223-241).
cacggcttatagacaacat

SEQ ID NO: 286019 - DNA, 19 bp, Homo sapiens
  siRNA target sequence for MRPS27 (NM_015084.1,225-243).
cggcttatagacaacattt

SEQ ID NO: 286020 - DNA, 19 bp, Homo sapiens
  siRNA target sequence for MRPS27 (NM_015084.1,228-246).
cttatagacaacatttcct

SEQ ID NO: 286021 - DNA, 19 bp, Homo sapiens
  siRNA target sequence for MRPS27 (NM_015084.1,244-262).
cctctcgggaagagataga

SEQ ID NO: 286022 - DNA, 19 bp, Homo sapiens
  siRNA target sequence for MRPS27 (NM_015084.1,245-263).
ctctcgggaagagatagat

SEQ ID NO: 286023 - DNA, 19 bp, Homo sapiens
  siRNA target sequence for MRPS27 (NM_015084.1,257-275).
gatagatcatgcagagtat

SEQ ID NO: 286024 - DNA, 19 bp, Homo sapiens
  siRNA target sequence for MRPS27 (NM_015084.1,267-285).
gcagagtattacctttaca

SEQ ID NO: 286025 - DNA, 19 bp, Homo sapiens
  siRNA target sequence for MRPS27 (NM_015084.1,340-358).
ggattaggcagtgtctaaa

SEQ ID NO: 286026 - DNA, 19 bp, Homo sapiens
  siRNA target sequence for MRPS27 (NM_015084.1,664-682).
gtttcagttcccagttgta

SEQ ID NO: 286027 - DNA, 19 bp, Homo sapiens
  siRNA target sequence for MRPS27 (NM_015084.1,680-698).
gtatggctatgcacttctt

SEQ ID NO: 286028 - DNA, 19 bp, Homo sapiens
  siRNA target sequence for MRPS27 (NM_015084.1,737-755).
ccacaacatgcctctgata

SEQ ID NO: 286029 - DNA, 19 bp, Homo sapiens
  siRNA target sequence for MRPS27 (NM_015084.1,1002-1020).
cgatttaaggccttacatt

SEQ ID NO: 286030 - DNA, 19 bp, Homo sapiens
  siRNA target sequence for MRPS27 (NM_015084.1,1010-1028).
ggccttacattctaagctt

SEQ ID NO: 286031 - DNA, 19 bp, Homo sapiens
  siRNA target sequence for MRPS27 (NM_015084.1,1032-1050).
gctctgggcaaaattgagt

SEQ ID NO: 286032 - DNA, 19 bp, Homo sapiens
  siRNA target sequence for MRPS27 (NM_015084.1,1047-1065).
gagtcagaaggtcttttaa

SEQ ID NO: 286033 - DNA, 19 bp, Homo sapiens
  siRNA target sequence for MRPS27 (NM_015084.1,1051-1069).
cagaaggtcttttaagtct

SEQ ID NO: 286034 - DNA, 19 bp, Homo sapiens
  siRNA target sequence for MRPS27 (NM_015084.1,1123-1141).
ccacctatgagcagaatct

SEQ ID NO: 286035 - DNA, 19 bp, Homo sapiens
  siRNA target sequence for MRPS27 (NM_015084.1,1150-1168).
ggcatctagaccttgtaca

SEQ ID NO: 286036 - DNA, 19 bp, Homo sapiens
  siRNA target sequence for MRPS27 (NM_015084.1,1211-1229).
ggagtaccaggctcagaaa

SEQ ID NO: 286037 - DNA, 19 bp, Homo sapiens
  siRNA target sequence for MRPS31 (NM_005830.2,298-316).
gaaaatacgaaaaaagact

SEQ ID NO: 286038 - DNA, 19 bp, Homo sapiens
  siRNA target sequence for MRPS31 (NM_005830.2,383-401).
ccaaaagaagaccacttaa

SEQ ID NO: 286039 - DNA, 19 bp, Homo sapiens
  siRNA target sequence for MRPS31 (NM_005830.2,440-458).
cagaatatgctccaaagaa

SEQ ID NO: 286040 - DNA, 19 bp, Homo sapiens
  siRNA target sequence for MRPS31 (NM_005830.2,598-616).
gatgcaaagcgacctaaaa

SEQ ID NO: 286041 - DNA, 19 bp, Homo sapiens
  siRNA target sequence for MRPS31 (NM_005830.2,601-619).
gcaaagcgacctaaaatta

SEQ ID NO: 286042 - DNA, 19 bp, Homo sapiens
  siRNA target sequence for MRPS31 (NM_005830.2,607-625).
cgacctaaaattagtttca

SEQ ID NO: 286043 - DNA, 19 bp, Homo sapiens
  siRNA target sequence for MRPS31 (NM_005830.2,690-708).
gcttcggattcagtttgat

SEQ ID NO: 286044 - DNA, 19 bp, Homo sapiens
  siRNA target sequence for MRPS31 (NM_005830.2,738-756).
gaagacggatgatcttaaa

SEQ ID NO: 286045 - DNA, 19 bp, Homo sapiens
  siRNA target sequence for MRPS31 (NM_005830.2,776-794).
cagggaaaagacttaatat

SEQ ID NO: 286046 - DNA, 19 bp, Homo sapiens
  siRNA target sequence for MRPS31 (NM_005830.2,895-913).
caaccccttcagaatggat

SEQ ID NO: 286047 - DNA, 19 bp, Homo sapiens
  siRNA target sequence for MRPS31 (NM_005830.2,949-967).
ctatgggagttcccaatta

SEQ ID NO: 286048 - DNA, 19 bp, Homo sapiens
  siRNA target sequence for MRPS31 (NM_005830.2,1035-1053).
ggagagctttccaaaacaa

SEQ ID NO: 286049 - DNA, 19 bp, Homo sapiens
  siRNA target sequence for MRPS31 (NM_005830.2,1055-1073).
gaccaattcgccacttcat

SEQ ID NO: 286050 - DNA, 19 bp, Homo sapiens
  siRNA target sequence for MRPS31 (NM_005830.2,1085-1103).
cttgtggcctttccaaaaa

SEQ ID NO: 286051 - DNA, 19 bp, Homo sapiens
  siRNA target sequence for MRPS31 (NM_005830.2,1098-1116).
caaaaacccatatcttagt

SEQ ID NO: 286052 - DNA, 19 bp, Homo sapiens
  siRNA target sequence for MRPS31 (NM_005830.2,1104-1122).
cccatatcttagtgttaaa

SEQ ID NO: 286053 - DNA, 19 bp, Homo sapiens
  siRNA target sequence for MRPS31 (NM_005830.2,1106-1124).
catatcttagtgttaaaca

SEQ ID NO: 286054 - DNA, 19 bp, Homo sapiens
  siRNA target sequence for MRPS33 (NM_016071.2,141-159).
gtcctccctttcagaatat

SEQ ID NO: 286055 - DNA, 19 bp, Homo sapiens
  siRNA target sequence for MRPS33 (NM_016071.2,202-220).
gtcaccaggcctactaatt

SEQ ID NO: 286056 - DNA, 19 bp, Homo sapiens
  siRNA target sequence for MRPS33 (NM_016071.2,211-229).
cctactaattccaagtcta

SEQ ID NO: 286057 - DNA, 19 bp, Homo sapiens
  siRNA target sequence for MRPS33 (NM_016071.2,212-230).
ctactaattccaagtctat

SEQ ID NO: 286058 - DNA, 19 bp, Homo sapiens
  siRNA target sequence for MRPS33 (NM_016071.2,276-294).
ggagacttatgattggtat

SEQ ID NO: 286059 - DNA, 19 bp, Homo sapiens
  siRNA target sequence for MRPS33 (NM_016071.2,324-342).
gcagacgctccgatttctt

SEQ ID NO: 286060 - DNA, 19 bp, Homo sapiens
  siRNA target sequence for MRPS34 (NM_023936.1,365-383).
gggcatcctgaccttcaaa

SEQ ID NO: 286061 - DNA, 19 bp, Homo sapiens
  siRNA target sequence for MRPS34 (NM_023936.1,622-640).
gggattaccctgcaaaaca

SEQ ID NO: 286062 - DNA, 19 bp, Homo sapiens
  siRNA target sequence for MRPS35 (NM_021821.2,151-169).
cctagcctgccggaaagaa

SEQ ID NO: 286063 - DNA, 19 bp, Homo sapiens
  siRNA target sequence for MRPS35 (NM_021821.2,237-255).
ccaggactggcctagtgtt

SEQ ID NO: 286064 - DNA, 19 bp, Homo sapiens
  siRNA target sequence for MRPS35 (NM_021821.2,238-256).
caggactggcctagtgttt

SEQ ID NO: 286065 - DNA, 19 bp, Homo sapiens
  siRNA target sequence for MRPS35 (NM_021821.2,260-278).
cagttgcagcaccatttaa

SEQ ID NO: 286066 - DNA, 19 bp, Homo sapiens
  siRNA target sequence for MRPS35 (NM_021821.2,339-357).
ggcaaaggagggaaatcta

SEQ ID NO: 286067 - DNA, 19 bp, Homo sapiens
  siRNA target sequence for MRPS35 (NM_021821.2,341-359).
caaaggagggaaatctaga

SEQ ID NO: 286068 - DNA, 19 bp, Homo sapiens
  siRNA target sequence for MRPS35 (NM_021821.2,416-434).
gtgaagcccttaaagattt

SEQ ID NO: 286069 - DNA, 19 bp, Homo sapiens
  siRNA target sequence for MRPS35 (NM_021821.2,421-439).
gcccttaaagatttttgca

SEQ ID NO: 286070 - DNA, 19 bp, Homo sapiens
  siRNA target sequence for MRPS35 (NM_021821.2,459-477).
ggacagtgacgagaaatgt

SEQ ID NO: 286071 - DNA, 19 bp, Homo sapiens
  siRNA target sequence for MRPS35 (NM_021821.2,543-561).
ccccagagcacgagtagta

SEQ ID NO: 286072 - DNA, 19 bp, Homo sapiens
  siRNA target sequence for MRPS35 (NM_021821.2,545-563).
ccagagcacgagtagtagt

SEQ ID NO: 286073 - DNA, 19 bp, Homo sapiens
  siRNA target sequence for MRPS35 (NM_021821.2,548-566).
gagcacgagtagtagtctt

SEQ ID NO: 286074 - DNA, 19 bp, Homo sapiens
  siRNA target sequence for MRPS35 (NM_021821.2,562-580).
gtcttaagagtaaagcttt

SEQ ID NO: 286075 - DNA, 19 bp, Homo sapiens
  siRNA target sequence for MRPS35 (NM_021821.2,595-613).
gatgatcacgcaaagaaga

SEQ ID NO: 286076 - DNA, 19 bp, Homo sapiens
  siRNA target sequence for MRPS35 (NM_021821.2,676-694).
gataggtgccctttaagga

SEQ ID NO: 286077 - DNA, 19 bp, Homo sapiens
  siRNA target sequence for MRPS35 (NM_021821.2,686-704).
ctttaaggaggcagaatta

SEQ ID NO: 286078 - DNA, 19 bp, Homo sapiens
  siRNA target sequence for MRPS35 (NM_021821.2,693-711).
gaggcagaattacgattat

SEQ ID NO: 286079 - DNA, 19 bp, Homo sapiens
  siRNA target sequence for MRPS35 (NM_021821.2,696-714).
gcagaattacgattatgca

SEQ ID NO: 286080 - DNA, 19 bp, Homo sapiens
  siRNA target sequence for MRPS35 (NM_021821.2,705-723).
cgattatgcagtgtatcta

SEQ ID NO: 286081 - DNA, 19 bp, Homo sapiens
  siRNA target sequence for MRPS35 (NM_021821.2,717-735).
gtatctactaacagtgtta

SEQ ID NO: 286082 - DNA, 19 bp, Homo sapiens
  siRNA target sequence for MRPS35 (NM_021821.2,738-756).
ccatgagtcttggaatact

SEQ ID NO: 286083 - DNA, 19 bp, Homo sapiens
  siRNA target sequence for MRPS35 (NM_021821.2,787-805).
gacatggaagagtatatat

SEQ ID NO: 286084 - DNA, 19 bp, Homo sapiens
  siRNA target sequence for MRPS35 (NM_021821.2,815-833).
gctcatcagaaagaaatat

SEQ ID NO: 286085 - DNA, 19 bp, Homo sapiens
  siRNA target sequence for MRPS35 (NM_021821.2,894-912).
gctccttggtactaaagaa

SEQ ID NO: 286086 - DNA, 19 bp, Homo sapiens
  siRNA target sequence for MRPS35 (NM_021821.2,921-939).
gtacaaaaagtctgttgtt

SEQ ID NO: 286087 - DNA, 19 bp, Homo sapiens
  siRNA target sequence for MRPS35 (NM_021821.2,988-1006).
gaatccgtgaagagactat

SEQ ID NO: 286088 - DNA, 19 bp, Homo sapiens
  siRNA target sequence for MRPS35 (NM_021821.2,992-1010).
ccgtgaagagactattaaa

SEQ ID NO: 286089 - DNA, 19 bp, Homo sapiens
  siRNA target sequence for MRPS35 (NM_021821.2,993-1011).
cgtgaagagactattaaat

SEQ ID NO: 286090 - DNA, 19 bp, Homo sapiens
  siRNA target sequence for MRPS36 (NM_033281.4,118-136).
caaaccacacactccatta

SEQ ID NO: 286091 - DNA, 19 bp, Homo sapiens
  siRNA target sequence for MRPS36 (NM_033281.4,125-143).
cacactccattaataaggt

SEQ ID NO: 286092 - DNA, 19 bp, Homo sapiens
  siRNA target sequence for MRPS36 (NM_033281.4,127-145).
cactccattaataaggttt

SEQ ID NO: 286093 - DNA, 19 bp, Homo sapiens
  siRNA target sequence for MRPS36 (NM_033281.4,165-183).
ctaaacccaatgtatcaga

SEQ ID NO: 286094 - DNA, 19 bp, Homo sapiens
  siRNA target sequence for MRPS36 (NM_033281.4,255-273).
cagatttgctgatgtatca

SEQ ID NO: 286095 - DNA, 19 bp, Homo sapiens
  siRNA target sequence for MRPS36 (NM_033281.4,279-297).
caccggacactgcagaaat

SEQ ID NO: 286096 - DNA, 19 bp, Homo sapiens
  siRNA target sequence for MRPS5 (NM_031902.3,265-283).
gcgggacggcaggtcattt

SEQ ID NO: 286097 - DNA, 19 bp, Homo sapiens
  siRNA target sequence for MRPS5 (NM_031902.3,266-284).
cgggacggcaggtcattta

SEQ ID NO: 286098 - DNA, 19 bp, Homo sapiens
  siRNA target sequence for MRPS5 (NM_031902.3,267-285).
gggacggcaggtcatttat

SEQ ID NO: 286099 - DNA, 19 bp, Homo sapiens
  siRNA target sequence for MRPS5 (NM_031902.3,268-286).
ggacggcaggtcatttatt

SEQ ID NO: 286100 - DNA, 19 bp, Homo sapiens
  siRNA target sequence for MRPS5 (NM_031902.3,348-366).
ctcggcaatggccatttgt

SEQ ID NO: 286101 - DNA, 19 bp, Homo sapiens
  siRNA target sequence for MRPS5 (NM_031902.3,411-429).
cgtgcactgcagacacaat

SEQ ID NO: 286102 - DNA, 19 bp, Homo sapiens
  siRNA target sequence for MRPS5 (NM_031902.3,453-471).
ctgatgagccagcagtata

SEQ ID NO: 286103 - DNA, 19 bp, Homo sapiens
  siRNA target sequence for MRPS5 (NM_031902.3,461-479).
ccagcagtatagaccatat

SEQ ID NO: 286104 - DNA, 19 bp, Homo sapiens
  siRNA target sequence for MRPS5 (NM_031902.3,474-492).
ccatatagtttcttcacta

SEQ ID NO: 286105 - DNA, 19 bp, Homo sapiens
  siRNA target sequence for MRPS5 (NM_031902.3,512-530).
gtggaaaggcgctttagca

SEQ ID NO: 286106 - DNA, 19 bp, Homo sapiens
  siRNA target sequence for MRPS5 (NM_031902.3,615-633).
ggtgaagggcgttatggtt

SEQ ID NO: 286107 - DNA, 19 bp, Homo sapiens
  siRNA target sequence for MRPS5 (NM_031902.3,616-634).
gtgaagggcgttatggttt

SEQ ID NO: 286108 - DNA, 19 bp, Homo sapiens
  siRNA target sequence for MRPS5 (NM_031902.3,621-639).
gggcgttatggttttctat

SEQ ID NO: 286109 - DNA, 19 bp, Homo sapiens
  siRNA target sequence for MRPS5 (NM_031902.3,681-699).
cagaccattgcccaaagaa

SEQ ID NO: 286110 - DNA, 19 bp, Homo sapiens
  siRNA target sequence for MRPS5 (NM_031902.3,888-906).
gaggtaagaaacgttttca

SEQ ID NO: 286111 - DNA, 19 bp, Homo sapiens
  siRNA target sequence for MRPS5 (NM_031902.3,890-908).
ggtaagaaacgttttcact

SEQ ID NO: 286112 - DNA, 19 bp, Homo sapiens
  siRNA target sequence for MRPS5 (NM_031902.3,891-909).
gtaagaaacgttttcacta

SEQ ID NO: 286113 - DNA, 19 bp, Homo sapiens
  siRNA target sequence for MRPS5 (NM_031902.3,1003-1021).
ctgatcggatggatgcttt

SEQ ID NO: 286114 - DNA, 19 bp, Homo sapiens
  siRNA target sequence for MRPS5 (NM_031902.3,1039-1057).
gagcagttcaccatttgca

SEQ ID NO: 286115 - DNA, 19 bp, Homo sapiens
  siRNA target sequence for MRPS5 (NM_031902.3,1041-1059).
gcagttcaccatttgcatt

SEQ ID NO: 286116 - DNA, 19 bp, Homo sapiens
  siRNA target sequence for MRPS5 (NM_031902.3,1042-1060).
cagttcaccatttgcatta

SEQ ID NO: 286117 - DNA, 19 bp, Homo sapiens
  siRNA target sequence for MRPS5 (NM_031902.3,1055-1073).
gcattatatagaacgatat

SEQ ID NO: 286118 - DNA, 19 bp, Homo sapiens
  siRNA target sequence for MRPS5 (NM_031902.3,1068-1086).
cgatatgaagaccatacaa

SEQ ID NO: 286119 - DNA, 19 bp, Homo sapiens
  siRNA target sequence for MRPS5 (NM_031902.3,1192-1210).
ggctcattggcatcaaaga

SEQ ID NO: 286120 - DNA, 19 bp, Homo sapiens
  siRNA target sequence for MRPS5 (NM_031902.3,1223-1241).
ggtctctgggtccattaat

SEQ ID NO: 286121 - DNA, 19 bp, Homo sapiens
  siRNA target sequence for MRPS5 (NM_031902.3,1224-1242).
gtctctgggtccattaata

SEQ ID NO: 286122 - DNA, 19 bp, Homo sapiens
  siRNA target sequence for MRPS5 (NM_031902.3,1318-1336).
gcctccatgttgtggaaat

SEQ ID NO: 286123 - DNA, 19 bp, Homo sapiens
  siRNA target sequence for MRPS5 (NM_031902.3,1397-1415).
ggatccagagccagaagat

SEQ ID NO: 286124 - DNA, 19 bp, Homo sapiens
  siRNA target sequence for MRPS5 (NM_031902.3,1473-1491).
cgctctgtgtggtctaatt

SEQ ID NO: 286125 - DNA, 19 bp, Homo sapiens
  siRNA target sequence for MRPS6 (NM_032476.2,185-203).
cgctacgagctggctttaa

SEQ ID NO: 286126 - DNA, 19 bp, Homo sapiens
  siRNA target sequence for MRPS6 (NM_032476.2,186-204).
gctacgagctggctttaat

SEQ ID NO: 286127 - DNA, 19 bp, Homo sapiens
  siRNA target sequence for MRPS7 (NM_015971.2,288-306).
gagatggagccgctatagt

SEQ ID NO: 286128 - DNA, 19 bp, Homo sapiens
  siRNA target sequence for MRPS7 (NM_015971.2,296-314).
gccgctatagtcctgaatt

SEQ ID NO: 286129 - DNA, 19 bp, Homo sapiens
  siRNA target sequence for MRPS7 (NM_015971.2,298-316).
cgctatagtcctgaattca

SEQ ID NO: 286130 - DNA, 19 bp, Homo sapiens
  siRNA target sequence for MRPS7 (NM_015971.2,299-317).
gctatagtcctgaattcaa

SEQ ID NO: 286131 - DNA, 19 bp, Homo sapiens
  siRNA target sequence for MRPS7 (NM_015971.2,322-340).
cccttgattgacaaggaat

SEQ ID NO: 286132 - DNA, 19 bp, Homo sapiens
  siRNA target sequence for MRPS7 (NM_015971.2,323-341).
ccttgattgacaaggaata

SEQ ID NO: 286133 - DNA, 19 bp, Homo sapiens
  siRNA target sequence for MRPS7 (NM_015971.2,451-469).
gaagacccagtcatcagta

SEQ ID NO: 286134 - DNA, 19 bp, Homo sapiens
  siRNA target sequence for MRPS7 (NM_015971.2,730-748).
cgcttcctagccatgaagt

SEQ ID NO: 286135 - DNA, 19 bp, Homo sapiens
  siRNA target sequence for MRPS7 (NM_015971.2,756-774).
cactgagtgccgggataaa

SEQ ID NO: 286136 - DNA, 19 bp, Homo sapiens
  siRNA target sequence for MRPS7 (NM_015971.2,758-776).
ctgagtgccgggataaaaa

SEQ ID NO: 286137 - DNA, 19 bp, Homo sapiens
  siRNA target sequence for MRPS7 (NM_015971.2,817-835).
ctgctggaggctttccata

SEQ ID NO: 286138 - DNA, 19 bp, Homo sapiens
  siRNA target sequence for NOLA2 (NM_017838.2,215-233).
cacgcggaagctctacaaa

SEQ ID NO: 286139 - DNA, 19 bp, Homo sapiens
  siRNA target sequence for NOLA2 (NM_017838.2,402-420).
gtctatatcccctctaaga

SEQ ID NO: 286140 - DNA, 19 bp, Homo sapiens
  siRNA target sequence for RPL10L (NM_080746.2,308-326).
caaatacatggtgaaaagt

SEQ ID NO: 286141 - DNA, 19 bp, Homo sapiens
  siRNA target sequence for RPL10L (NM_080746.2,330-348).
ggcagagatggctttcaca

SEQ ID NO: 286142 - DNA, 19 bp, Homo sapiens
  siRNA target sequence for RPL10L (NM_080746.2,331-349).
gcagagatggctttcacat

SEQ ID NO: 286143 - DNA, 19 bp, Homo sapiens
  siRNA target sequence for RPL27 (NM_000988.2,258-276).
gtgaaagtgtataactaca

SEQ ID NO: 286144 - DNA, 19 bp, Homo sapiens
  siRNA target sequence for RPS27L (NM_015920.2,81-99).
ggctagagatttactacat

SEQ ID NO: 286145 - DNA, 19 bp, Homo sapiens
  siRNA target sequence for RPS27L (NM_015920.2,101-119).
cgtccttggaagaggaaaa

SEQ ID NO: 286146 - DNA, 19 bp, Homo sapiens
  siRNA target sequence for RPS27L (NM_015920.2,141-159).
cctagtacaaagtccaaat

SEQ ID NO: 286147 - DNA, 19 bp, Homo sapiens
  siRNA target sequence for RPS27L (NM_015920.2,142-160).
ctagtacaaagtccaaatt

SEQ ID NO: 286148 - DNA, 19 bp, Homo sapiens
  siRNA target sequence for RPS27L (NM_015920.2,184-202).
ccaggttgctacaagatca

SEQ ID NO: 286149 - DNA, 19 bp, Homo sapiens
  siRNA target sequence for RPS27L (NM_015920.2,235-253).
ctttgtgtaggttgttcaa

SEQ ID NO: 286150 - DNA, 19 bp, Homo sapiens
  siRNA target sequence for RPS27L (NM_015920.2,289-307).
ctcacagaagggtgttcat

SEQ ID NO: 286151 - DNA, 19 bp, Homo sapiens
  siRNA target sequence for RPS27L (NM_015920.2,295-313).
gaagggtgttcatttagaa

SEQ ID NO: 286152 - DNA, 19 bp, Homo sapiens
  siRNA target sequence for UBA52 (NM_003333.2,153-171).
gaccagcagcgtctgatat

SEQ ID NO: 286153 - DNA, 19 bp, Homo sapiens
  siRNA target sequence for UBA52 (NM_003333.2,155-173).
ccagcagcgtctgatattt

SEQ ID NO: 286154 - DNA, 19 bp, Homo sapiens
  siRNA target sequence for UBA52 (NM_003333.2,253-271).
gcctgcgaggtggcattat

SEQ ID NO: 286155 - DNA, 19 bp, Homo sapiens
  siRNA target sequence for UBA52 (NM_003333.2,254-272).
cctgcgaggtggcattatt

SEQ ID NO: 286156 - DNA, 19 bp, Homo sapiens
  siRNA target sequence for UBA52 (NM_003333.2,285-303).
cgccagcttgcccagaaat

SEQ ID NO: 286157 - DNA, 19 bp, Homo sapiens
  siRNA target sequence for UBA52 (NM_003333.2,360-378).
gtcaactgccgcaagaaga

SEQ ID NO: 286158 - DNA, 19 bp, Homo sapiens
  siRNA target sequence for 76P (NM_014444.2,378-396).
ccggctcggcacagactat

SEQ ID NO: 286159 - DNA, 19 bp, Homo sapiens
  siRNA target sequence for 76P (NM_014444.2,379-397).
cggctcggcacagactata

SEQ ID NO: 286160 - DNA, 19 bp, Homo sapiens
  siRNA target sequence for 76P (NM_014444.2,380-398).
ggctcggcacagactatat

SEQ ID NO: 286161 - DNA, 19 bp, Homo sapiens
  siRNA target sequence for 76P (NM_014444.2,381-399).
gctcggcacagactatatt

SEQ ID NO: 286162 - DNA, 19 bp, Homo sapiens
  siRNA target sequence for 76P (NM_014444.2,510-528).
cacagggctggattctgtt

SEQ ID NO: 286163 - DNA, 19 bp, Homo sapiens
  siRNA target sequence for 76P (NM_014444.2,541-559).
cgccaagcactgcttgatt

SEQ ID NO: 286164 - DNA, 19 bp, Homo sapiens
  siRNA target sequence for 76P (NM_014444.2,585-603).
ccatctctccatatcacat

SEQ ID NO: 286165 - DNA, 19 bp, Homo sapiens
  siRNA target sequence for 76P (NM_014444.2,593-611).
ccatatcacatgtcaacta

SEQ ID NO: 286166 - DNA, 19 bp, Homo sapiens
  siRNA target sequence for 76P (NM_014444.2,641-659).
cctctgtgatggttgtagt

SEQ ID NO: 286167 - DNA, 19 bp, Homo sapiens
  siRNA target sequence for 76P (NM_014444.2,642-660).
ctctgtgatggttgtagta

SEQ ID NO: 286168 - DNA, 19 bp, Homo sapiens
  siRNA target sequence for 76P (NM_014444.2,644-662).
ctgtgatggttgtagtaga

SEQ ID NO: 286169 - DNA, 19 bp, Homo sapiens
  siRNA target sequence for 76P (NM_014444.2,648-666).
gatggttgtagtagaacaa

SEQ ID NO: 286170 - DNA, 19 bp, Homo sapiens
  siRNA target sequence for 76P (NM_014444.2,776-794).
gtcatggggtcatgtataa

SEQ ID NO: 286171 - DNA, 19 bp, Homo sapiens
  siRNA target sequence for 76P (NM_014444.2,855-873).
caaacaggggccatcttct

SEQ ID NO: 286172 - DNA, 19 bp, Homo sapiens
  siRNA target sequence for 76P (NM_014444.2,863-881).
ggccatcttctggtaatgt

SEQ ID NO: 286173 - DNA, 19 bp, Homo sapiens
  siRNA target sequence for 76P (NM_014444.2,1013-1031).
ccctacgagtggagatttt

SEQ ID NO: 286174 - DNA, 19 bp, Homo sapiens
  siRNA target sequence for 76P (NM_014444.2,1026-1044).
gattttgccatcctacatt

SEQ ID NO: 286175 - DNA, 19 bp, Homo sapiens
  siRNA target sequence for 76P (NM_014444.2,1046-1064).
cagtgagggttgctgaaaa

SEQ ID NO: 286176 - DNA, 19 bp, Homo sapiens
  siRNA target sequence for 76P (NM_014444.2,1052-1070).
gggttgctgaaaaaatcct

SEQ ID NO: 286177 - DNA, 19 bp, Homo sapiens
  siRNA target sequence for 76P (NM_014444.2,1053-1071).
ggttgctgaaaaaatccta

SEQ ID NO: 286178 - DNA, 19 bp, Homo sapiens
  siRNA target sequence for 76P (NM_014444.2,1068-1086).
cctatttgttggagaatct

SEQ ID NO: 286179 - DNA, 19 bp, Homo sapiens
  siRNA target sequence for 76P (NM_014444.2,1119-1137).
gactagaaaaggatccatt

SEQ ID NO: 286180 - DNA, 19 bp, Homo sapiens
  siRNA target sequence for 76P (NM_014444.2,1121-1139).
ctagaaaaggatccatttt

SEQ ID NO: 286181 - DNA, 19 bp, Homo sapiens
  siRNA target sequence for 76P (NM_014444.2,1263-1281).
gaagttgatggtagaagaa

SEQ ID NO: 286182 - DNA, 19 bp, Homo sapiens
  siRNA target sequence for 76P (NM_014444.2,1293-1311).
gggtcagctgaagatcatt

SEQ ID NO: 286183 - DNA, 19 bp, Homo sapiens
  siRNA target sequence for 76P (NM_014444.2,1294-1312).
ggtcagctgaagatcatta

SEQ ID NO: 286184 - DNA, 19 bp, Homo sapiens
  siRNA target sequence for 76P (NM_014444.2,1295-1313).
gtcagctgaagatcattaa

SEQ ID NO: 286185 - DNA, 19 bp, Homo sapiens
  siRNA target sequence for 76P (NM_014444.2,1329-1347).
gggacgtggagaactgttt

SEQ ID NO: 286186 - DNA, 19 bp, Homo sapiens
  siRNA target sequence for 76P (NM_014444.2,1436-1454).
cagcacacaaggtattgct

SEQ ID NO: 286187 - DNA, 19 bp, Homo sapiens
  siRNA target sequence for 76P (NM_014444.2,1717-1735).
cactgctgggccctacaaa

SEQ ID NO: 286188 - DNA, 19 bp, Homo sapiens
  siRNA target sequence for 76P (NM_014444.2,1757-1775).
cgaaccagactgatgcaat

SEQ ID NO: 286189 - DNA, 19 bp, Homo sapiens
  siRNA target sequence for 76P (NM_014444.2,1781-1799).
ggcgcctaagaaatcacat

SEQ ID NO: 286190 - DNA, 19 bp, Homo sapiens
  siRNA target sequence for 76P (NM_014444.2,1800-1818).
ggcatttttggtggataat

SEQ ID NO: 286191 - DNA, 19 bp, Homo sapiens
  siRNA target sequence for 76P (NM_014444.2,1812-1830).
ggataatcttcagtactat

SEQ ID NO: 286192 - DNA, 19 bp, Homo sapiens
  siRNA target sequence for 76P (NM_014444.2,1867-1885).
ctgcttcatcagatcaatt

SEQ ID NO: 286193 - DNA, 19 bp, Homo sapiens
  siRNA target sequence for 76P (NM_014444.2,1881-1899).
caattctacccgagacttt

SEQ ID NO: 286194 - DNA, 19 bp, Homo sapiens
  siRNA target sequence for 76P (NM_014444.2,1921-1939).
gaccacttcctgagcaatt

SEQ ID NO: 286195 - DNA, 19 bp, Homo sapiens
  siRNA target sequence for 76P (NM_014444.2,1944-1962).
ggctcaatcctttatccta

SEQ ID NO: 286196 - DNA, 19 bp, Homo sapiens
  siRNA target sequence for 76P (NM_014444.2,1945-1963).
gctcaatcctttatcctat

SEQ ID NO: 286197 - DNA, 19 bp, Homo sapiens
  siRNA target sequence for 76P (NM_014444.2,1946-1964).
ctcaatcctttatcctatt

SEQ ID NO: 286198 - DNA, 19 bp, Homo sapiens
  siRNA target sequence for 76P (NM_014444.2,1959-1977).
cctattgaaacctgtgttt

SEQ ID NO: 286199 - DNA, 19 bp, Homo sapiens
  siRNA target sequence for 76P (NM_014444.2,2110-2128).
ctcctgttcaagattctct

SEQ ID NO: 286200 - DNA, 19 bp, Homo sapiens
  siRNA target sequence for 76P (NM_014444.2,2129-2147).
ccagtgttcggaatcatca

SEQ ID NO: 286201 - DNA, 19 bp, Homo sapiens
  siRNA target sequence for 76P (NM_014444.2,2132-2150).
gtgttcggaatcatcagat

SEQ ID NO: 286202 - DNA, 19 bp, Homo sapiens
  siRNA target sequence for 76P (NM_014444.2,2137-2155).
cggaatcatcagatcaact

SEQ ID NO: 286203 - DNA, 19 bp, Homo sapiens
  siRNA target sequence for 76P (NM_014444.2,2170-2188).
ctactgttacgactagatt

SEQ ID NO: 286204 - DNA, 19 bp, Homo sapiens
  siRNA target sequence for 76P (NM_014444.2,2173-2191).
ctgttacgactagattata

SEQ ID NO: 286205 - DNA, 19 bp, Homo sapiens
  siRNA target sequence for 76P (NM_014444.2,2182-2200).
ctagattataacaaatact

SEQ ID NO: 286206 - DNA, 19 bp, Homo sapiens
  siRNA target sequence for ACTA1 (NM_001100.2,589-607).
ccacaacgtgcccatttat

SEQ ID NO: 286207 - DNA, 19 bp, Homo sapiens
  siRNA target sequence for ACTA2 (NM_001613.1,642-660).
ggctattccttcgttacta

SEQ ID NO: 286208 - DNA, 19 bp, Homo sapiens
  siRNA target sequence for ACTA2 (NM_001613.1,644-662).
ctattccttcgttactact

SEQ ID NO: 286209 - DNA, 19 bp, Homo sapiens
  siRNA target sequence for ACTA2 (NM_001613.1,692-710).
ggagaaactgtgttatgta

SEQ ID NO: 286210 - DNA, 19 bp, Homo sapiens
  siRNA target sequence for ACTA2 (NM_001613.1,799-817).
ccatcggaaatgaacgttt

SEQ ID NO: 286211 - DNA, 19 bp, Homo sapiens
  siRNA target sequence for ACTC (NM_005159.2,159-177).
ctcctacgtaggtgatgaa

SEQ ID NO: 286212 - DNA, 19 bp, Homo sapiens
  siRNA target sequence for ACTC (NM_005159.2,444-462).
ccgtaccacaggcattgtt

SEQ ID NO: 286213 - DNA, 19 bp, Homo sapiens
  siRNA target sequence for ACTC (NM_005159.2,611-629).
ccactgctgaacgtgaaat

SEQ ID NO: 286214 - DNA, 19 bp, Homo sapiens
  siRNA target sequence for ACTC (NM_005159.2,885-903).
gtatgccaacaatgtctta

SEQ ID NO: 286215 - DNA, 19 bp, Homo sapiens
  siRNA target sequence for ACTC (NM_005159.2,997-1015).
gctccccctgagcgtaaat

SEQ ID NO: 286216 - DNA, 19 bp, Homo sapiens
  siRNA target sequence for ACTC (NM_005159.2,998-1016).
ctccccctgagcgtaaata

SEQ ID NO: 286217 - DNA, 19 bp, Homo sapiens
  siRNA target sequence for ACTC (NM_005159.2,1002-1020).
ccctgagcgtaaatactct

SEQ ID NO: 286218 - DNA, 19 bp, Homo sapiens
  siRNA target sequence for ACTG2 (NM_001615.2,270-288).
gggatcctaactctcaaat

SEQ ID NO: 286219 - DNA, 19 bp, Homo sapiens
  siRNA target sequence for ACTG2 (NM_001615.2,398-416).
cacagaggctcccctaaat

SEQ ID NO: 286220 - DNA, 19 bp, Homo sapiens
  siRNA target sequence for ACTG2 (NM_001615.2,476-494).
catgtacgtcgccattcaa

SEQ ID NO: 286221 - DNA, 19 bp, Homo sapiens
  siRNA target sequence for ACTG2 (NM_001615.2,664-682).
cagagagaggctattcctt

SEQ ID NO: 286222 - DNA, 19 bp, Homo sapiens
  siRNA target sequence for ACTG2 (NM_001615.2,887-905).
catggagtccgctggaatt

SEQ ID NO: 286223 - DNA, 19 bp, Homo sapiens
  siRNA target sequence for ACTG2 (NM_001615.2,945-963).
gacatccgtaaggacttat

SEQ ID NO: 286224 - DNA, 19 bp, Homo sapiens
  siRNA target sequence for ACTG2 (NM_001615.2,947-965).
catccgtaaggacttatat

SEQ ID NO: 286225 - DNA, 19 bp, Homo sapiens
  siRNA target sequence for ACTL7A (NM_006687.2,226-244).
ctgggcactggctactgta

SEQ ID NO: 286226 - DNA, 19 bp, Homo sapiens
  siRNA target sequence for ACTL7A (NM_006687.2,228-246).
gggcactggctactgtaaa

SEQ ID NO: 286227 - DNA, 19 bp, Homo sapiens
  siRNA target sequence for ACTL7A (NM_006687.2,229-247).
ggcactggctactgtaaat

SEQ ID NO: 286228 - DNA, 19 bp, Homo sapiens
  siRNA target sequence for ACTL7A (NM_006687.2,266-284).
caagacccacccacaagat

SEQ ID NO: 286229 - DNA, 19 bp, Homo sapiens
  siRNA target sequence for ACTL7A (NM_006687.2,318-336).
cgccaagactggggataat

SEQ ID NO: 286230 - DNA, 19 bp, Homo sapiens
  siRNA target sequence for ACTL7A (NM_006687.2,428-446).
gggatacagtgcaggatat

SEQ ID NO: 286231 - DNA, 19 bp, Homo sapiens
  siRNA target sequence for ACTL7A (NM_006687.2,430-448).
gatacagtgcaggatatct

SEQ ID NO: 286232 - DNA, 19 bp, Homo sapiens
  siRNA target sequence for ACTL7A (NM_006687.2,490-508).
gagcatgcggtcttggttt

SEQ ID NO: 286233 - DNA, 19 bp, Homo sapiens
  siRNA target sequence for ACTL7A (NM_006687.2,534-552).
caacagagagaaatatgct

SEQ ID NO: 286234 - DNA, 19 bp, Homo sapiens
  siRNA target sequence for ACTL7A (NM_006687.2,684-702).
catctacgagggttatcct

SEQ ID NO: 286235 - DNA, 19 bp, Homo sapiens
  siRNA target sequence for ACTL7A (NM_006687.2,878-896).
ctctcagtgagcatacgat

SEQ ID NO: 286236 - DNA, 19 bp, Homo sapiens
  siRNA target sequence for ACTL7A (NM_006687.2,911-929).
cggatgggaaggagattca

SEQ ID NO: 286237 - DNA, 19 bp, Homo sapiens
  siRNA target sequence for ACTL7A (NM_006687.2,949-967).
ctctgctcggagatgttct

SEQ ID NO: 286238 - DNA, 19 bp, Homo sapiens
  siRNA target sequence for ACTL7A (NM_006687.2,1016-1034).
ccgtgtcctgccttaacaa

SEQ ID NO: 286239 - DNA, 19 bp, Homo sapiens
  siRNA target sequence for ACTL7A (NM_006687.2,1247-1265).
gggtccaccgctttgagta

SEQ ID NO: 286240 - DNA, 19 bp, Homo sapiens
  siRNA target sequence for ACTL7B (NM_006686.2,104-122).
cggccactcagctcaagat

SEQ ID NO: 286241 - DNA, 19 bp, Homo sapiens
  siRNA target sequence for ACTL7B (NM_006686.2,273-291).
cacccgcaagtggacttta

SEQ ID NO: 286242 - DNA, 19 bp, Homo sapiens
  siRNA target sequence for ACTL7B (NM_006686.2,275-293).
cccgcaagtggactttagt

SEQ ID NO: 286243 - DNA, 19 bp, Homo sapiens
  siRNA target sequence for ACTL7B (NM_006686.2,486-504).
gtacgcggagctcatgttt

SEQ ID NO: 286244 - DNA, 19 bp, Homo sapiens
  siRNA target sequence for ACTL7B (NM_006686.2,847-865).
ctcccggacggcaaactca

SEQ ID NO: 286245 - DNA, 19 bp, Homo sapiens
  siRNA target sequence for ACTL7B (NM_006686.2,853-871).
gacggcaaactcatcacta

SEQ ID NO: 286246 - DNA, 19 bp, Homo sapiens
  siRNA target sequence for ACTL7B (NM_006686.2,855-873).
cggcaaactcatcactatt

SEQ ID NO: 286247 - DNA, 19 bp, Homo sapiens
  siRNA target sequence for ACTR10 (NM_018477.1,178-196).
ctggtccaagatgtataat

SEQ ID NO: 286248 - DNA, 19 bp, Homo sapiens
  siRNA target sequence for ACTR10 (NM_018477.1,238-256).
gagttgttcagtataatat

SEQ ID NO: 286249 - DNA, 19 bp, Homo sapiens
  siRNA target sequence for ACTR10 (NM_018477.1,248-266).
gtataatatcaatacagaa

SEQ ID NO: 286250 - DNA, 19 bp, Homo sapiens
  siRNA target sequence for ACTR10 (NM_018477.1,257-275).
caatacagaagaattatat

SEQ ID NO: 286251 - DNA, 19 bp, Homo sapiens
  siRNA target sequence for ACTR10 (NM_018477.1,267-285).
gaattatattcctacctaa

SEQ ID NO: 286252 - DNA, 19 bp, Homo sapiens
  siRNA target sequence for ACTR10 (NM_018477.1,277-295).
cctacctaaaggaattcat

SEQ ID NO: 286253 - DNA, 19 bp, Homo sapiens
  siRNA target sequence for ACTR10 (NM_018477.1,288-306).
gaattcatccacatactat

SEQ ID NO: 286254 - DNA, 19 bp, Homo sapiens
  siRNA target sequence for ACTR10 (NM_018477.1,334-352).
gagaccgccgagttgtgat

SEQ ID NO: 286255 - DNA, 19 bp, Homo sapiens
  siRNA target sequence for ACTR10 (NM_018477.1,336-354).
gaccgccgagttgtgatta

SEQ ID NO: 286256 - DNA, 19 bp, Homo sapiens
  siRNA target sequence for ACTR10 (NM_018477.1,340-358).
gccgagttgtgattatcga

SEQ ID NO: 286257 - DNA, 19 bp, Homo sapiens
  siRNA target sequence for ACTR10 (NM_018477.1,341-359).
ccgagttgtgattatcgaa

SEQ ID NO: 286258 - DNA, 19 bp, Homo sapiens
  siRNA target sequence for ACTR10 (NM_018477.1,342-360).
cgagttgtgattatcgaat

SEQ ID NO: 286259 - DNA, 19 bp, Homo sapiens
  siRNA target sequence for ACTR10 (NM_018477.1,350-368).
gattatcgaatcggtatta

SEQ ID NO: 286260 - DNA, 19 bp, Homo sapiens
  siRNA target sequence for ACTR10 (NM_018477.1,389-407).
gacactcactcgtgttctt

SEQ ID NO: 286261 - DNA, 19 bp, Homo sapiens
  siRNA target sequence for ACTR10 (NM_018477.1,391-409).
cactcactcgtgttctttt

SEQ ID NO: 286262 - DNA, 19 bp, Homo sapiens
  siRNA target sequence for ACTR10 (NM_018477.1,397-415).
ctcgtgttcttttcaaata

SEQ ID NO: 286263 - DNA, 19 bp, Homo sapiens
  siRNA target sequence for ACTR10 (NM_018477.1,465-483).
ctgacgcttggaattaatt

SEQ ID NO: 286264 - DNA, 19 bp, Homo sapiens
  siRNA target sequence for ACTR10 (NM_018477.1,467-485).
gacgcttggaattaattct

SEQ ID NO: 286265 - DNA, 19 bp, Homo sapiens
  siRNA target sequence for ACTR10 (NM_018477.1,491-509).
ggtcctagattgtggatat

SEQ ID NO: 286266 - DNA, 19 bp, Homo sapiens
  siRNA target sequence for ACTR10 (NM_018477.1,492-510).
gtcctagattgtggatata

SEQ ID NO: 286267 - DNA, 19 bp, Homo sapiens
  siRNA target sequence for ACTR10 (NM_018477.1,517-535).
gcctggtgttacccatata

SEQ ID NO: 286268 - DNA, 19 bp, Homo sapiens
  siRNA target sequence for ACTR10 (NM_018477.1,518-536).
cctggtgttacccatatat

SEQ ID NO: 286269 - DNA, 19 bp, Homo sapiens
  siRNA target sequence for ACTR10 (NM_018477.1,521-539).
ggtgttacccatatatgaa

SEQ ID NO: 286270 - DNA, 19 bp, Homo sapiens
  siRNA target sequence for ACTR10 (NM_018477.1,540-558).
ggaatcccagttctaaatt

SEQ ID NO: 286271 - DNA, 19 bp, Homo sapiens
  siRNA target sequence for ACTR10 (NM_018477.1,580-598).
gaggaaaagctcttcacaa

SEQ ID NO: 286272 - DNA, 19 bp, Homo sapiens
  siRNA target sequence for ACTR10 (NM_018477.1,600-618).
gagttggaaactcaactat

SEQ ID NO: 286273 - DNA, 19 bp, Homo sapiens
  siRNA target sequence for ACTR10 (NM_018477.1,714-732).
gcgcgtacttgctttgtaa

SEQ ID NO: 286274 - DNA, 19 bp, Homo sapiens
  siRNA target sequence for ACTR10 (NM_018477.1,716-734).
gcgtacttgctttgtaagt

SEQ ID NO: 286275 - DNA, 19 bp, Homo sapiens
  siRNA target sequence for ACTR10 (NM_018477.1,802-820).
ccccacccccaaatgttga

SEQ ID NO: 286276 - DNA, 19 bp, Homo sapiens
  siRNA target sequence for ACTR10 (NM_018477.1,834-852).
ggagagaagattttacata

SEQ ID NO: 286277 - DNA, 19 bp, Homo sapiens
  siRNA target sequence for ACTR10 (NM_018477.1,911-929).
gcaatcagttgccacttta

SEQ ID NO: 286278 - DNA, 19 bp, Homo sapiens
  siRNA target sequence for ACTR10 (NM_018477.1,912-930).
caatcagttgccactttaa

SEQ ID NO: 286279 - DNA, 19 bp, Homo sapiens
  siRNA target sequence for ACTR10 (NM_018477.1,993-1011).
gtcataggtggcacttcta

SEQ ID NO: 286280 - DNA, 19 bp, Homo sapiens
  siRNA target sequence for ACTR10 (NM_018477.1,1038-1056).
cttgcagaaataaggtatt

SEQ ID NO: 286281 - DNA, 19 bp, Homo sapiens
  siRNA target sequence for ACTR10 (NM_018477.1,1083-1101).
gcacttggcactaagacat

SEQ ID NO: 286282 - DNA, 19 bp, Homo sapiens
  siRNA target sequence for ACTR10 (NM_018477.1,1097-1115).
gacatttcgaattcatact

SEQ ID NO: 286283 - DNA, 19 bp, Homo sapiens
  siRNA target sequence for ACTR10 (NM_018477.1,1116-1134).
ccacctgcaaaagctaatt

SEQ ID NO: 286284 - DNA, 19 bp, Homo sapiens
  siRNA target sequence for ACTR10 (NM_018477.1,1120-1138).
ctgcaaaagctaattgtgt

SEQ ID NO: 286285 - DNA, 19 bp, Homo sapiens
  siRNA target sequence for ACTR10 (NM_018477.1,1156-1174).
ctatttttggagcattaca

SEQ ID NO: 286286 - DNA, 19 bp, Homo sapiens
  siRNA target sequence for ACTR10 (NM_018477.1,1185-1203).
gggagccgttctgtttcaa

SEQ ID NO: 286287 - DNA, 19 bp, Homo sapiens
  siRNA target sequence for ACTR10 (NM_018477.1,1186-1204).
ggagccgttctgtttcaaa

SEQ ID NO: 286288 - DNA, 19 bp, Homo sapiens
  siRNA target sequence for ACTR10 (NM_018477.1,1190-1208).
ccgttctgtttcaaaggaa

SEQ ID NO: 286289 - DNA, 19 bp, Homo sapiens
  siRNA target sequence for ACTR10 (NM_018477.1,1236-1254).
gattggtgttctctcaata

SEQ ID NO: 286290 - DNA, 19 bp, Homo sapiens
  siRNA target sequence for ACTR10 (NM_018477.1,1250-1268).
caataacccacctttggaa

SEQ ID NO: 286291 - DNA, 19 bp, Homo sapiens
  siRNA target sequence for ACTR10 (NM_018477.1,1274-1292).
gtttgatgtcgggaaaact

SEQ ID NO: 286292 - DNA, 19 bp, Homo sapiens
  siRNA target sequence for ACTR10 (NM_018477.1,1291-1309).
ctcaaccacctctgatgaa

SEQ ID NO: 286293 - DNA, 19 bp, Homo sapiens
  siRNA target sequence for ACTR1A (NM_005736.2,102-120).
caacggatccggtgtgatt

SEQ ID NO: 286294 - DNA, 19 bp, Homo sapiens
  siRNA target sequence for ACTR1A (NM_005736.2,105-123).
cggatccggtgtgattaaa

SEQ ID NO: 286295 - DNA, 19 bp, Homo sapiens
  siRNA target sequence for ACTR1A (NM_005736.2,128-146).
gttttgctggtgatcagat

SEQ ID NO: 286296 - DNA, 19 bp, Homo sapiens
  siRNA target sequence for ACTR1A (NM_005736.2,211-229).
cttgaaggcgacatcttca

SEQ ID NO: 286297 - DNA, 19 bp, Homo sapiens
  siRNA target sequence for ACTR1A (NM_005736.2,290-308).
gcatcgtcaaggattggaa

SEQ ID NO: 286298 - DNA, 19 bp, Homo sapiens
  siRNA target sequence for ACTR1A (NM_005736.2,326-344).
ggcaatatgtctattctaa

SEQ ID NO: 286299 - DNA, 19 bp, Homo sapiens
  siRNA target sequence for ACTR1A (NM_005736.2,385-403).
ctgactgaggcgcctttaa

SEQ ID NO: 286300 - DNA, 19 bp, Homo sapiens
  siRNA target sequence for ACTR1A (NM_005736.2,396-414).
gcctttaaacccacgaaaa

SEQ ID NO: 286301 - DNA, 19 bp, Homo sapiens
  siRNA target sequence for ACTR1A (NM_005736.2,421-439).
gaacgagctgccgaagttt

SEQ ID NO: 286302 - DNA, 19 bp, Homo sapiens
  siRNA target sequence for ACTR1A (NM_005736.2,424-442).
cgagctgccgaagttttct

SEQ ID NO: 286303 - DNA, 19 bp, Homo sapiens
  siRNA target sequence for ACTR1A (NM_005736.2,425-443).
gagctgccgaagttttctt

SEQ ID NO: 286304 - DNA, 19 bp, Homo sapiens
  siRNA target sequence for ACTR1A (NM_005736.2,693-711).
gattgtcaaggccataaaa

SEQ ID NO: 286305 - DNA, 19 bp, Homo sapiens
  siRNA target sequence for ACTR1A (NM_005736.2,712-730).
gaaagagcctgttacctat

SEQ ID NO: 286306 - DNA, 19 bp, Homo sapiens
  siRNA target sequence for ACTR1A (NM_005736.2,716-734).
gagcctgttacctatccat

SEQ ID NO: 286307 - DNA, 19 bp, Homo sapiens
  siRNA target sequence for ACTR1A (NM_005736.2,718-736).
gcctgttacctatccataa

SEQ ID NO: 286308 - DNA, 19 bp, Homo sapiens
  siRNA target sequence for ACTR1A (NM_005736.2,753-771).
gacgctagagacagagaaa

SEQ ID NO: 286309 - DNA, 19 bp, Homo sapiens
  siRNA target sequence for ACTR1A (NM_005736.2,764-782).
cagagaaagctcagtacta

SEQ ID NO: 286310 - DNA, 19 bp, Homo sapiens
  siRNA target sequence for ACTR1A (NM_005736.2,931-949).
cgcacgcttttctctaaca

SEQ ID NO: 286311 - DNA, 19 bp, Homo sapiens
  siRNA target sequence for ACTR1A (NM_005736.2,932-950).
gcacgcttttctctaacat

SEQ ID NO: 286312 - DNA, 19 bp, Homo sapiens
  siRNA target sequence for ACTR1A (NM_005736.2,933-951).
cacgcttttctctaacatt

SEQ ID NO: 286313 - DNA, 19 bp, Homo sapiens
  siRNA target sequence for ACTR1A (NM_005736.2,962-980).
gaggctctaccctgttcaa

SEQ ID NO: 286314 - DNA, 19 bp, Homo sapiens
  siRNA target sequence for ACTR1A (NM_005736.2,968-986).
ctaccctgttcaaaggttt

SEQ ID NO: 286315 - DNA, 19 bp, Homo sapiens
  siRNA target sequence for ACTR1A (NM_005736.2,1160-1178).
cccgatccatccacagaaa

SEQ ID NO: 286316 - DNA, 19 bp, Homo sapiens
  siRNA target sequence for ACTR1A (NM_005736.2,1161-1179).
ccgatccatccacagaaaa

SEQ ID NO: 286317 - DNA, 19 bp, Homo sapiens
  siRNA target sequence for ACTR1A (NM_005736.2,1162-1180).
cgatccatccacagaaaaa

SEQ ID NO: 286318 - DNA, 19 bp, Homo sapiens
  siRNA target sequence for ACTR1B (NM_005735.2,78-96).
cggttcgggggtgattaaa

SEQ ID NO: 286319 - DNA, 19 bp, Homo sapiens
  siRNA target sequence for ACTR1B (NM_005735.2,195-213).
cctcttcatcggaccaaaa

SEQ ID NO: 286320 - DNA, 19 bp, Homo sapiens
  siRNA target sequence for ACTR1B (NM_005735.2,198-216).
cttcatcggaccaaaagca

SEQ ID NO: 286321 - DNA, 19 bp, Homo sapiens
  siRNA target sequence for ACTR1B (NM_005735.2,370-388).
ccgctcaacccgagtaaga

SEQ ID NO: 286322 - DNA, 19 bp, Homo sapiens
  siRNA target sequence for ACTR1B (NM_005735.2,371-389).
cgctcaacccgagtaagaa

SEQ ID NO: 286323 - DNA, 19 bp, Homo sapiens
  siRNA target sequence for ACTR1B (NM_005735.2,664-682).
gaggttgtccggacaatca

SEQ ID NO: 286324 - DNA, 19 bp, Homo sapiens
  siRNA target sequence for ACTR1B (NM_005735.2,666-684).
ggttgtccggacaatcaaa

SEQ ID NO: 286325 - DNA, 19 bp, Homo sapiens
  siRNA target sequence for ACTR1B (NM_005735.2,865-883).
gtggccttcgccatacaca

SEQ ID NO: 286326 - DNA, 19 bp, Homo sapiens
  siRNA target sequence for ACTR1B (NM_005735.2,934-952).
ggtggctcaacgcttttca

SEQ ID NO: 286327 - DNA, 19 bp, Homo sapiens
  siRNA target sequence for ACTR1B (NM_005735.2,935-953).
gtggctcaacgcttttcaa

SEQ ID NO: 286328 - DNA, 19 bp, Homo sapiens
  siRNA target sequence for ACTR1B (NM_005735.2,956-974).
gcttcggagaccgattact

SEQ ID NO: 286329 - DNA, 19 bp, Homo sapiens
  siRNA target sequence for ACTR1B (NM_005735.2,968-986).
gattactcagtgaagtgaa

SEQ ID NO: 286330 - DNA, 19 bp, Homo sapiens
  siRNA target sequence for ACTR1B (NM_005735.2,991-1009).
cttgccccaaaggatatca

SEQ ID NO: 286331 - DNA, 19 bp, Homo sapiens
  siRNA target sequence for ACTR1B (NM_005735.2,1003-1021).
gatatcaaaatcaagatct

SEQ ID NO: 286332 - DNA, 19 bp, Homo sapiens
  siRNA target sequence for ACTR1B (NM_005735.2,1038-1056).
gctgtactccacatggatt

SEQ ID NO: 286333 - DNA, 19 bp, Homo sapiens
  siRNA target sequence for ACTR1B (NM_005735.2,1071-1089).
ggcctcgctggacactttt

SEQ ID NO: 286334 - DNA, 19 bp, Homo sapiens
  siRNA target sequence for ACTR1B (NM_005735.2,1125-1143).
ggatggctcccgtgctatt

SEQ ID NO: 286335 - DNA, 19 bp, Homo sapiens
  siRNA target sequence for ACTR1B (NM_005735.2,1139-1157).
ctattcatcgcaaaacttt

SEQ ID NO: 286336 - DNA, 19 bp, Homo sapiens
  siRNA target sequence for ACTR2 (NM_005722.1,1068-1086).
ggtgatgtggaaaaacttt

SEQ ID NO: 286337 - DNA, 19 bp, Homo sapiens
  siRNA target sequence for ACTR3 (NM_005721.3,358-376).
gcacggggtatacaaaact

SEQ ID NO: 286338 - DNA, 19 bp, Homo sapiens
  siRNA target sequence for ACTR3 (NM_005721.3,359-377).
cacggggtatacaaaacta

SEQ ID NO: 286339 - DNA, 19 bp, Homo sapiens
  siRNA target sequence for ACTR3 (NM_005721.3,364-382).
ggtatacaaaactaggata

SEQ ID NO: 286340 - DNA, 19 bp, Homo sapiens
  siRNA target sequence for ACTR3 (NM_005721.3,375-393).
ctaggatatgctggaaata

SEQ ID NO: 286341 - DNA, 19 bp, Homo sapiens
  siRNA target sequence for ACTR3 (NM_005721.3,418-436).
cctgtattgctattaagga

SEQ ID NO: 286342 - DNA, 19 bp, Homo sapiens
  siRNA target sequence for ACTR3 (NM_005721.3,517-535).
caatagaaaaacctacata

SEQ ID NO: 286343 - DNA, 19 bp, Homo sapiens
  siRNA target sequence for ACTR3 (NM_005721.3,547-565).
ggccaatccgccatggtat

SEQ ID NO: 286344 - DNA, 19 bp, Homo sapiens
  siRNA target sequence for ACTR3 (NM_005721.3,548-566).
gccaatccgccatggtata

SEQ ID NO: 286345 - DNA, 19 bp, Homo sapiens
  siRNA target sequence for ACTR3 (NM_005721.3,550-568).
caatccgccatggtatagt

SEQ ID NO: 286346 - DNA, 19 bp, Homo sapiens
  siRNA target sequence for ACTR3 (NM_005721.3,554-572).
ccgccatggtatagttgaa

SEQ ID NO: 286347 - DNA, 19 bp, Homo sapiens
  siRNA target sequence for ACTR3 (NM_005721.3,557-575).
ccatggtatagttgaagat

SEQ ID NO: 286348 - DNA, 19 bp, Homo sapiens
  siRNA target sequence for ACTR3 (NM_005721.3,573-591).
gattgggacttaatggaaa

SEQ ID NO: 286349 - DNA, 19 bp, Homo sapiens
  siRNA target sequence for ACTR3 (NM_005721.3,577-595).
gggacttaatggaaaggtt

SEQ ID NO: 286350 - DNA, 19 bp, Homo sapiens
  siRNA target sequence for ACTR3 (NM_005721.3,578-596).
ggacttaatggaaaggttt

SEQ ID NO: 286351 - DNA, 19 bp, Homo sapiens
  siRNA target sequence for ACTR3 (NM_005721.3,806-824).
gttgaccggtacggtaata

SEQ ID NO: 286352 - DNA, 19 bp, Homo sapiens
  siRNA target sequence for ACTR3 (NM_005721.3,860-878).
ggctgaagggtatgtgatt

SEQ ID NO: 286353 - DNA, 19 bp, Homo sapiens
  siRNA target sequence for ACTR3 (NM_005721.3,873-891).
gtgattggcagctgtatta

SEQ ID NO: 286354 - DNA, 19 bp, Homo sapiens
  siRNA target sequence for ACTR3 (NM_005721.3,875-893).
gattggcagctgtattaaa

SEQ ID NO: 286355 - DNA, 19 bp, Homo sapiens
  siRNA target sequence for ACTR3 (NM_005721.3,879-897).
ggcagctgtattaaacaca

SEQ ID NO: 286356 - DNA, 19 bp, Homo sapiens
  siRNA target sequence for ACTR3 (NM_005721.3,880-898).
gcagctgtattaaacacat

SEQ ID NO: 286357 - DNA, 19 bp, Homo sapiens
  siRNA target sequence for ACTR3 (NM_005721.3,905-923).
cgcaggacgagatataaca

SEQ ID NO: 286358 - DNA, 19 bp, Homo sapiens
  siRNA target sequence for ACTR3 (NM_005721.3,906-924).
gcaggacgagatataacat

SEQ ID NO: 286359 - DNA, 19 bp, Homo sapiens
  siRNA target sequence for ACTR3 (NM_005721.3,907-925).
caggacgagatataacata

SEQ ID NO: 286360 - DNA, 19 bp, Homo sapiens
  siRNA target sequence for ACTR3 (NM_005721.3,941-959).
gctgagagaccgagaagta

SEQ ID NO: 286361 - DNA, 19 bp, Homo sapiens
  siRNA target sequence for ACTR3 (NM_005721.3,946-964).
gagaccgagaagtaggaat

SEQ ID NO: 286362 - DNA, 19 bp, Homo sapiens
  siRNA target sequence for ACTR3 (NM_005721.3,1005-1023).
gagcgctatagttatgtct

SEQ ID NO: 286363 - DNA, 19 bp, Homo sapiens
  siRNA target sequence for ACTR3 (NM_005721.3,1020-1038).
gtctgcccagatttagtaa

SEQ ID NO: 286364 - DNA, 19 bp, Homo sapiens
  siRNA target sequence for ACTR3 (NM_005721.3,1024-1042).
gcccagatttagtaaaaga

SEQ ID NO: 286365 - DNA, 19 bp, Homo sapiens
  siRNA target sequence for ACTR3 (NM_005721.3,1056-1074).
gatacagatgggtcaaaat

SEQ ID NO: 286366 - DNA, 19 bp, Homo sapiens
  siRNA target sequence for ACTR3 (NM_005721.3,1093-1111).
gaatcaatgctatctcaaa

SEQ ID NO: 286367 - DNA, 19 bp, Homo sapiens
  siRNA target sequence for ACTR3 (NM_005721.3,1112-1130).
gaaagagttttctatcgat

SEQ ID NO: 286368 - DNA, 19 bp, Homo sapiens
  siRNA target sequence for ACTR3 (NM_005721.3,1123-1141).
ctatcgatgttggttatga

SEQ ID NO: 286369 - DNA, 19 bp, Homo sapiens
  siRNA target sequence for ACTR3 (NM_005721.3,1257-1275).
cgtcctctctacaagaata

SEQ ID NO: 286370 - DNA, 19 bp, Homo sapiens
  siRNA target sequence for ACTR3 (NM_005721.3,1315-1333).
gacgtcgcttgcaaagaga

SEQ ID NO: 286371 - DNA, 19 bp, Homo sapiens
  siRNA target sequence for ACTR3 (NM_005721.3,1317-1335).
cgtcgcttgcaaagagatt

SEQ ID NO: 286372 - DNA, 19 bp, Homo sapiens
  siRNA target sequence for ACTR3 (NM_005721.3,1320-1338).
cgcttgcaaagagatttga

SEQ ID NO: 286373 - DNA, 19 bp, Homo sapiens
  siRNA target sequence for ACTR3 (NM_005721.3,1321-1339).
gcttgcaaagagatttgaa

SEQ ID NO: 286374 - DNA, 19 bp, Homo sapiens
  siRNA target sequence for ACTR3 (NM_005721.3,1430-1448).
ccacatgcagcgatatgca

SEQ ID NO: 286375 - DNA, 19 bp, Homo sapiens
  siRNA target sequence for ACTR3 (NM_005721.3,1439-1457).
gcgatatgcagtttggttt

SEQ ID NO: 286376 - DNA, 19 bp, Homo sapiens
  siRNA target sequence for ACTR6 (NM_022496.2,65-83).
cgaccttagtgctggataa

SEQ ID NO: 286377 - DNA, 19 bp, Homo sapiens
  siRNA target sequence for ACTR6 (NM_022496.2,66-84).
gaccttagtgctggataat

SEQ ID NO: 286378 - DNA, 19 bp, Homo sapiens
  siRNA target sequence for ACTR6 (NM_022496.2,86-104).
gagcttacaacgccaaaat

SEQ ID NO: 286379 - DNA, 19 bp, Homo sapiens
  siRNA target sequence for ACTR6 (NM_022496.2,105-123).
cggttacagccatgaaaat

SEQ ID NO: 286380 - DNA, 19 bp, Homo sapiens
  siRNA target sequence for ACTR6 (NM_022496.2,107-125).
gttacagccatgaaaatgt

SEQ ID NO: 286381 - DNA, 19 bp, Homo sapiens
  siRNA target sequence for ACTR6 (NM_022496.2,124-142).
gtgtcggttattcctaatt

SEQ ID NO: 286382 - DNA, 19 bp, Homo sapiens
  siRNA target sequence for ACTR6 (NM_022496.2,126-144).
gtcggttattcctaattgt

SEQ ID NO: 286383 - DNA, 19 bp, Homo sapiens
  siRNA target sequence for ACTR6 (NM_022496.2,128-146).
cggttattcctaattgtca

SEQ ID NO: 286384 - DNA, 19 bp, Homo sapiens
  siRNA target sequence for ACTR6 (NM_022496.2,155-173).
caaaaacagcacgtcttaa

SEQ ID NO: 286385 - DNA, 19 bp, Homo sapiens
  siRNA target sequence for ACTR6 (NM_022496.2,182-200).
ctgccaaccagatagatga

SEQ ID NO: 286386 - DNA, 19 bp, Homo sapiens
  siRNA target sequence for ACTR6 (NM_022496.2,184-202).
gccaaccagatagatgaaa

SEQ ID NO: 286387 - DNA, 19 bp, Homo sapiens
  siRNA target sequence for ACTR6 (NM_022496.2,275-293).
gacaagtttgggattacct

SEQ ID NO: 286388 - DNA, 19 bp, Homo sapiens
  siRNA target sequence for ACTR6 (NM_022496.2,347-365).
ctgaaccatactttaactt

SEQ ID NO: 286389 - DNA, 19 bp, Homo sapiens
  siRNA target sequence for ACTR6 (NM_022496.2,368-386).
cttcaattcaagaatcaat

SEQ ID NO: 286390 - DNA, 19 bp, Homo sapiens
  siRNA target sequence for ACTR6 (NM_022496.2,371-389).
caattcaagaatcaatgaa

SEQ ID NO: 286391 - DNA, 19 bp, Homo sapiens
  siRNA target sequence for ACTR6 (NM_022496.2,418-436).
caagcagtattaagagtaa

SEQ ID NO: 286392 - DNA, 19 bp, Homo sapiens
  siRNA target sequence for ACTR6 (NM_022496.2,566-584).
caattattcggataaatgt

SEQ ID NO: 286393 - DNA, 19 bp, Homo sapiens
  siRNA target sequence for ACTR6 (NM_022496.2,586-604).
ggaggaaaactcttaacca

SEQ ID NO: 286394 - DNA, 19 bp, Homo sapiens
  siRNA target sequence for ACTR6 (NM_022496.2,607-625).
catctaaaggagatcatat

SEQ ID NO: 286395 - DNA, 19 bp, Homo sapiens
  siRNA target sequence for ACTR6 (NM_022496.2,610-628).
ctaaaggagatcatatctt

SEQ ID NO: 286396 - DNA, 19 bp, Homo sapiens
  siRNA target sequence for ACTR6 (NM_022496.2,626-644).
cttacaggcagctacatgt

SEQ ID NO: 286397 - DNA, 19 bp, Homo sapiens
  siRNA target sequence for ACTR6 (NM_022496.2,633-651).
gcagctacatgttatggat

SEQ ID NO: 286398 - DNA, 19 bp, Homo sapiens
  siRNA target sequence for ACTR6 (NM_022496.2,656-674).
cacatgtgattaatcaagt

SEQ ID NO: 286399 - DNA, 19 bp, Homo sapiens
  siRNA target sequence for ACTR6 (NM_022496.2,675-693).
gaaagaagatgtatgctat

SEQ ID NO: 286400 - DNA, 19 bp, Homo sapiens
  siRNA target sequence for ACTR6 (NM_022496.2,679-697).
gaagatgtatgctatgtgt

SEQ ID NO: 286401 - DNA, 19 bp, Homo sapiens
  siRNA target sequence for ACTR6 (NM_022496.2,754-772).
gtaatgatagactatgtct

SEQ ID NO: 286402 - DNA, 19 bp, Homo sapiens
  siRNA target sequence for ACTR6 (NM_022496.2,775-793).
cctgacttcagtacaatta

SEQ ID NO: 286403 - DNA, 19 bp, Homo sapiens
  siRNA target sequence for ACTR6 (NM_022496.2,870-888).
ggccaatgagagatttgct

SEQ ID NO: 286404 - DNA, 19 bp, Homo sapiens
  siRNA target sequence for ACTR6 (NM_022496.2,886-904).
gctgttccggaaatactct

SEQ ID NO: 286405 - DNA, 19 bp, Homo sapiens
  siRNA target sequence for ACTR6 (NM_022496.2,889-907).
gttccggaaatactcttta

SEQ ID NO: 286406 - DNA, 19 bp, Homo sapiens
  siRNA target sequence for ACTR6 (NM_022496.2,936-954).
gggaattccagaagctatt

SEQ ID NO: 286407 - DNA, 19 bp, Homo sapiens
  siRNA target sequence for ACTR6 (NM_022496.2,946-964).
gaagctattgtctattcaa

SEQ ID NO: 286408 - DNA, 19 bp, Homo sapiens
  siRNA target sequence for ACTR6 (NM_022496.2,957-975).
ctattcaattcaaaatcta

SEQ ID NO: 286409 - DNA, 19 bp, Homo sapiens
  siRNA target sequence for ACTR6 (NM_022496.2,1012-1030).
gtcttgacaggaggaaatt

SEQ ID NO: 286410 - DNA, 19 bp, Homo sapiens
  siRNA target sequence for ACTR6 (NM_022496.2,1076-1094).
gtcttactccaacagatta

SEQ ID NO: 286411 - DNA, 19 bp, Homo sapiens
  siRNA target sequence for ACTR6 (NM_022496.2,1082-1100).
ctccaacagattatgatgt

SEQ ID NO: 286412 - DNA, 19 bp, Homo sapiens
  siRNA target sequence for ACTR6 (NM_022496.2,1111-1129).
ctgcctgaaaaccctatta

SEQ ID NO: 286413 - DNA, 19 bp, Homo sapiens
  siRNA target sequence for ACTR6 (NM_022496.2,1145-1163).
gtggaaaattgatatcaga

SEQ ID NO: 286414 - DNA, 19 bp, Homo sapiens
  siRNA target sequence for ACTR6 (NM_022496.2,1177-1195).
gaagatatggtggtaacaa

SEQ ID NO: 286415 - DNA, 19 bp, Homo sapiens
  siRNA target sequence for ACTR8 (NM_022899.3,197-215).
cttcatcattgtcatacat

SEQ ID NO: 286416 - DNA, 19 bp, Homo sapiens
  siRNA target sequence for ACTR8 (NM_022899.3,209-227).
catacatccaggttcaaca

SEQ ID NO: 286417 - DNA, 19 bp, Homo sapiens
  siRNA target sequence for ACTR8 (NM_022899.3,213-231).
catccaggttcaacaactt

SEQ ID NO: 286418 - DNA, 19 bp, Homo sapiens
  siRNA target sequence for ACTR8 (NM_022899.3,219-237).
ggttcaacaactttaagga

SEQ ID NO: 286419 - DNA, 19 bp, Homo sapiens
  siRNA target sequence for ACTR8 (NM_022899.3,303-321).
caagggcagcccctataca

SEQ ID NO: 286420 - DNA, 19 bp, Homo sapiens
  siRNA target sequence for ACTR8 (NM_022899.3,336-354).
ctaagggagggactaaata

SEQ ID NO: 286421 - DNA, 19 bp, Homo sapiens
  siRNA target sequence for ACTR8 (NM_022899.3,396-414).
gtggatcaagcaatatggt

SEQ ID NO: 286422 - DNA, 19 bp, Homo sapiens
  siRNA target sequence for ACTR8 (NM_022899.3,402-420).
caagcaatatggtctaaaa

SEQ ID NO: 286423 - DNA, 19 bp, Homo sapiens
  siRNA target sequence for ACTR8 (NM_022899.3,405-423).
gcaatatggtctaaaaaga

SEQ ID NO: 286424 - DNA, 19 bp, Homo sapiens
  siRNA target sequence for ACTR8 (NM_022899.3,406-424).
caatatggtctaaaaagat

SEQ ID NO: 286425 - DNA, 19 bp, Homo sapiens
  siRNA target sequence for ACTR8 (NM_022899.3,422-440).
gatgtccaatggtacaaga

SEQ ID NO: 286426 - DNA, 19 bp, Homo sapiens
  siRNA target sequence for ACTR8 (NM_022899.3,483-501).
cagatgcgacctgcaattt

SEQ ID NO: 286427 - DNA, 19 bp, Homo sapiens
  siRNA target sequence for ACTR8 (NM_022899.3,569-587).
ggccttgtatgttaatcca

SEQ ID NO: 286428 - DNA, 19 bp, Homo sapiens
  siRNA target sequence for ACTR8 (NM_022899.3,585-603).
ccactggactgttacaata

SEQ ID NO: 286429 - DNA, 19 bp, Homo sapiens
  siRNA target sequence for ACTR8 (NM_022899.3,586-604).
cactggactgttacaatat

SEQ ID NO: 286430 - DNA, 19 bp, Homo sapiens
  siRNA target sequence for ACTR8 (NM_022899.3,591-609).
gactgttacaatattcact

SEQ ID NO: 286431 - DNA, 19 bp, Homo sapiens
  siRNA target sequence for ACTR8 (NM_022899.3,617-635).
cagaagaggtcagttaaat

SEQ ID NO: 286432 - DNA, 19 bp, Homo sapiens
  siRNA target sequence for ACTR8 (NM_022899.3,645-663).
ggccctgggggctctctta

SEQ ID NO: 286433 - DNA, 19 bp, Homo sapiens
  siRNA target sequence for ACTR8 (NM_022899.3,667-685).
ctgttctggcagatattga

SEQ ID NO: 286434 - DNA, 19 bp, Homo sapiens
  siRNA target sequence for ACTR8 (NM_022899.3,678-696).
gatattgaagtaatatggt

SEQ ID NO: 286435 - DNA, 19 bp, Homo sapiens
  siRNA target sequence for ACTR8 (NM_022899.3,694-712).
ggtctcatgcgatacaaaa

SEQ ID NO: 286436 - DNA, 19 bp, Homo sapiens
  siRNA target sequence for ACTR8 (NM_022899.3,695-713).
gtctcatgcgatacaaaaa

SEQ ID NO: 286437 - DNA, 19 bp, Homo sapiens
  siRNA target sequence for ACTR8 (NM_022899.3,697-715).
ctcatgcgatacaaaaata

SEQ ID NO: 286438 - DNA, 19 bp, Homo sapiens
  siRNA target sequence for ACTR8 (NM_022899.3,699-717).
catgcgatacaaaaatact

SEQ ID NO: 286439 - DNA, 19 bp, Homo sapiens
  siRNA target sequence for ACTR8 (NM_022899.3,735-753).
gatttaaagtattatagat

SEQ ID NO: 286440 - DNA, 19 bp, Homo sapiens
  siRNA target sequence for ACTR8 (NM_022899.3,769-787).
ctgatatctataataagca

SEQ ID NO: 286441 - DNA, 19 bp, Homo sapiens
  siRNA target sequence for ACTR8 (NM_022899.3,801-819).
ctagtgaatatgatactaa

SEQ ID NO: 286442 - DNA, 19 bp, Homo sapiens
  siRNA target sequence for ACTR8 (NM_022899.3,816-834).
ctaatgaagatgggttttt

SEQ ID NO: 286443 - DNA, 19 bp, Homo sapiens
  siRNA target sequence for ACTR8 (NM_022899.3,950-968).
ggtgtctcatcggaatact

SEQ ID NO: 286444 - DNA, 19 bp, Homo sapiens
  siRNA target sequence for ACTR8 (NM_022899.3,961-979).
ggaatactcggctttgtct

SEQ ID NO: 286445 - DNA, 19 bp, Homo sapiens
  siRNA target sequence for ACTR8 (NM_022899.3,980-998).
ggcatacggaggatctgat

SEQ ID NO: 286446 - DNA, 19 bp, Homo sapiens
  siRNA target sequence for ACTR8 (NM_022899.3,990-1008).
ggatctgatgtgtcaagat

SEQ ID NO: 286447 - DNA, 19 bp, Homo sapiens
  siRNA target sequence for ACTR8 (NM_022899.3,1009-1027).
gtttttactggctaatgca

SEQ ID NO: 286448 - DNA, 19 bp, Homo sapiens
  siRNA target sequence for ACTR8 (NM_022899.3,1035-1053).
gggttcccttacagagaat

SEQ ID NO: 286449 - DNA, 19 bp, Homo sapiens
  siRNA target sequence for ACTR8 (NM_022899.3,1050-1068).
gaatgccagttaacaaata

SEQ ID NO: 286450 - DNA, 19 bp, Homo sapiens
  siRNA target sequence for ACTR8 (NM_022899.3,1088-1106).
gcaacaccttaaagaaact

SEQ ID NO: 286451 - DNA, 19 bp, Homo sapiens
  siRNA target sequence for ACTR8 (NM_022899.3,1089-1107).
caacaccttaaagaaactt

SEQ ID NO: 286452 - DNA, 19 bp, Homo sapiens
  siRNA target sequence for ACTR8 (NM_022899.3,1135-1153).
ggcttcaggaccatgagtt

SEQ ID NO: 286453 - DNA, 19 bp, Homo sapiens
  siRNA target sequence for ACTR8 (NM_022899.3,1136-1154).
gcttcaggaccatgagttt

SEQ ID NO: 286454 - DNA, 19 bp, Homo sapiens
  siRNA target sequence for ACTR8 (NM_022899.3,1157-1175).
gattcgacatcctgattct

SEQ ID NO: 286455 - DNA, 19 bp, Homo sapiens
  siRNA target sequence for ACTR8 (NM_022899.3,1182-1200).
ctgctttaccagtttcgat

SEQ ID NO: 286456 - DNA, 19 bp, Homo sapiens
  siRNA target sequence for ACTR8 (NM_022899.3,1184-1202).
gctttaccagtttcgatta

SEQ ID NO: 286457 - DNA, 19 bp, Homo sapiens
  siRNA target sequence for ACTR8 (NM_022899.3,1220-1238).
ggctccaatggctttgttt

SEQ ID NO: 286458 - DNA, 19 bp, Homo sapiens
  siRNA target sequence for ACTR8 (NM_022899.3,1221-1239).
gctccaatggctttgtttt

SEQ ID NO: 286459 - DNA, 19 bp, Homo sapiens
  siRNA target sequence for ACTR8 (NM_022899.3,1222-1240).
ctccaatggctttgtttta

SEQ ID NO: 286460 - DNA, 19 bp, Homo sapiens
  siRNA target sequence for ACTR8 (NM_022899.3,1235-1253).
gttttaccccgcaactttt

SEQ ID NO: 286461 - DNA, 19 bp, Homo sapiens
  siRNA target sequence for ACTR8 (NM_022899.3,1244-1262).
cgcaacttttggaatcgtt

SEQ ID NO: 286462 - DNA, 19 bp, Homo sapiens
  siRNA target sequence for ACTR8 (NM_022899.3,1255-1273).
gaatcgttggacagaaaat

SEQ ID NO: 286463 - DNA, 19 bp, Homo sapiens
  siRNA target sequence for ACTR8 (NM_022899.3,1310-1328).
ggatcctcacgatgaacat

SEQ ID NO: 286464 - DNA, 19 bp, Homo sapiens
  siRNA target sequence for ACTR8 (NM_022899.3,1315-1333).
ctcacgatgaacattacct

SEQ ID NO: 286465 - DNA, 19 bp, Homo sapiens
  siRNA target sequence for ACTR8 (NM_022899.3,1337-1355).
ggccacacagagcaaacaa

SEQ ID NO: 286466 - DNA, 19 bp, Homo sapiens
  siRNA target sequence for ACTR8 (NM_022899.3,1339-1357).
ccacacagagcaaacaaga

SEQ ID NO: 286467 - DNA, 19 bp, Homo sapiens
  siRNA target sequence for ACTR8 (NM_022899.3,1436-1454).
ctctgatcttccagaaaga

SEQ ID NO: 286468 - DNA, 19 bp, Homo sapiens
  siRNA target sequence for ACTR8 (NM_022899.3,1458-1476).
cattcccaggaggtagatt

SEQ ID NO: 286469 - DNA, 19 bp, Homo sapiens
  siRNA target sequence for ACTR8 (NM_022899.3,1627-1645).
catctgacgacaccaaaaa

SEQ ID NO: 286470 - DNA, 19 bp, Homo sapiens
  siRNA target sequence for ACTR8 (NM_022899.3,1630-1648).
ctgacgacaccaaaaagaa

SEQ ID NO: 286471 - DNA, 19 bp, Homo sapiens
  siRNA target sequence for ACTR8 (NM_022899.3,1675-1693).
gaggtggtttgatgtttca

SEQ ID NO: 286472 - DNA, 19 bp, Homo sapiens
  siRNA target sequence for ACTR8 (NM_022899.3,1677-1695).
ggtggtttgatgtttcata

SEQ ID NO: 286473 - DNA, 19 bp, Homo sapiens
  siRNA target sequence for ACTR8 (NM_022899.3,1748-1766).
caggcgaattattgaaaat

SEQ ID NO: 286474 - DNA, 19 bp, Homo sapiens
  siRNA target sequence for ACTR8 (NM_022899.3,1750-1768).
ggcgaattattgaaaatgt

SEQ ID NO: 286475 - DNA, 19 bp, Homo sapiens
  siRNA target sequence for ACTR8 (NM_022899.3,1830-1848).
gtgttggcttgtttggata

SEQ ID NO: 286476 - DNA, 19 bp, Homo sapiens
  siRNA target sequence for ACTR8 (NM_022899.3,1889-1907).
ctttggtgtccgcatgtta

SEQ ID NO: 286477 - DNA, 19 bp, Homo sapiens
  siRNA target sequence for ACTRT1 (NM_138289.1,306-324).
cgtcttgggacattgtaaa

SEQ ID NO: 286478 - DNA, 19 bp, Homo sapiens
  siRNA target sequence for ACTRT1 (NM_138289.1,307-325).
gtcttgggacattgtaaat

SEQ ID NO: 286479 - DNA, 19 bp, Homo sapiens
  siRNA target sequence for ACTRT1 (NM_138289.1,312-330).
gggacattgtaaattcaat

SEQ ID NO: 286480 - DNA, 19 bp, Homo sapiens
  siRNA target sequence for ACTRT1 (NM_138289.1,344-362).
gacttaatcagaagtactt

SEQ ID NO: 286481 - DNA, 19 bp, Homo sapiens
  siRNA target sequence for ACTRT1 (NM_138289.1,368-386).
ggcaagaagccctgtacaa

SEQ ID NO: 286482 - DNA, 19 bp, Homo sapiens
  siRNA target sequence for ACTRT1 (NM_138289.1,370-388).
caagaagccctgtacaagt

SEQ ID NO: 286483 - DNA, 19 bp, Homo sapiens
  siRNA target sequence for ACTRT1 (NM_138289.1,534-552).
gaatcctagggaaattcga

SEQ ID NO: 286484 - DNA, 19 bp, Homo sapiens
  siRNA target sequence for ACTRT1 (NM_138289.1,539-557).
ctagggaaattcgagaaaa

SEQ ID NO: 286485 - DNA, 19 bp, Homo sapiens
  siRNA target sequence for ACTRT1 (NM_138289.1,542-560).
gggaaattcgagaaaagct

SEQ ID NO: 286486 - DNA, 19 bp, Homo sapiens
  siRNA target sequence for ACTRT1 (NM_138289.1,795-813).
gtttaacttcccttgcata

SEQ ID NO: 286487 - DNA, 19 bp, Homo sapiens
  siRNA target sequence for ACTRT1 (NM_138289.1,823-841).
gccgtggtaaataacatca

SEQ ID NO: 286488 - DNA, 19 bp, Homo sapiens
  siRNA target sequence for ACTRT1 (NM_138289.1,824-842).
ccgtggtaaataacatcaa

SEQ ID NO: 286489 - DNA, 19 bp, Homo sapiens
  siRNA target sequence for ACTRT1 (NM_138289.1,964-982).
caagtgcccgaggttcttt

SEQ ID NO: 286490 - DNA, 19 bp, Homo sapiens
  siRNA target sequence for ACTRT1 (NM_138289.1,969-987).
gcccgaggttctttttgca

SEQ ID NO: 286491 - DNA, 19 bp, Homo sapiens
  siRNA target sequence for ACTRT1 (NM_138289.1,1058-1076).
ctgacatccagaataaact

SEQ ID NO: 286492 - DNA, 19 bp, Homo sapiens
  siRNA target sequence for ACTRT1 (NM_138289.1,1149-1167).
ggaacagctggcttccaaa

SEQ ID NO: 286493 - DNA, 19 bp, Homo sapiens
  siRNA target sequence for ACTRT1 (NM_138289.1,1168-1186).
ggtactcccatcaagatca

SEQ ID NO: 286494 - DNA, 19 bp, Homo sapiens
  siRNA target sequence for ACTRT1 (NM_138289.1,1185-1203).
cacagcttctcctgataga

SEQ ID NO: 286495 - DNA, 19 bp, Homo sapiens
  siRNA target sequence for ACTRT1 (NM_138289.1,1238-1256).
cctctatgagcagtttcaa

SEQ ID NO: 286496 - DNA, 19 bp, Homo sapiens
  siRNA target sequence for ANK1 (NM_000037.2,151-169).
ggtaacttggacaaagctt

SEQ ID NO: 286497 - DNA, 19 bp, Homo sapiens
  siRNA target sequence for ANK1 (NM_000037.2,178-196).
ctgcggaatggggtagata

SEQ ID NO: 286498 - DNA, 19 bp, Homo sapiens
  siRNA target sequence for ANK1 (NM_000037.2,180-198).
gcggaatggggtagatatt

SEQ ID NO: 286499 - DNA, 19 bp, Homo sapiens
  siRNA target sequence for ANK1 (NM_000037.2,181-199).
cggaatggggtagatatta

SEQ ID NO: 286500 - DNA, 19 bp, Homo sapiens
  siRNA target sequence for ANK1 (NM_000037.2,227-245).
gcttgcatctggcttctaa

SEQ ID NO: 286501 - DNA, 19 bp, Homo sapiens
  siRNA target sequence for ANK1 (NM_000037.2,231-249).
gcatctggcttctaaggaa

SEQ ID NO: 286502 - DNA, 19 bp, Homo sapiens
  siRNA target sequence for ANK1 (NM_000037.2,366-384).
ccgggagcttgtcaactat

SEQ ID NO: 286503 - DNA, 19 bp, Homo sapiens
  siRNA target sequence for ANK1 (NM_000037.2,416-434).
gttttacacccctgtacat

SEQ ID NO: 286504 - DNA, 19 bp, Homo sapiens
  siRNA target sequence for ANK1 (NM_000037.2,562-580).
gtcgcgcacctcatcaact

SEQ ID NO: 286505 - DNA, 19 bp, Homo sapiens
  siRNA target sequence for ANK1 (NM_000037.2,767-785).
gaggagccagcgtcaattt

SEQ ID NO: 286506 - DNA, 19 bp, Homo sapiens
  siRNA target sequence for ANK1 (NM_000037.2,769-787).
ggagccagcgtcaatttca

SEQ ID NO: 286507 - DNA, 19 bp, Homo sapiens
  siRNA target sequence for ANK1 (NM_000037.2,865-883).
cggggagcccagatagaaa

SEQ ID NO: 286508 - DNA, 19 bp, Homo sapiens
  siRNA target sequence for ANK1 (NM_000037.2,869-887).
gagcccagatagaaaccaa

SEQ ID NO: 286509 - DNA, 19 bp, Homo sapiens
  siRNA target sequence for ANK1 (NM_000037.2,888-906).
gaccaaggacgaattgaca

SEQ ID NO: 286510 - DNA, 19 bp, Homo sapiens
  siRNA target sequence for ANK1 (NM_000037.2,963-981).
ccacggggcaccaatccaa

SEQ ID NO: 286511 - DNA, 19 bp, Homo sapiens
  siRNA target sequence for ANK1 (NM_000037.2,974-992).
caatccaagccaaaaccaa

SEQ ID NO: 286512 - DNA, 19 bp, Homo sapiens
  siRNA target sequence for ANK1 (NM_000037.2,997-1015).
ggcctgtccccaattcaca

SEQ ID NO: 286513 - DNA, 19 bp, Homo sapiens
  siRNA target sequence for ANK1 (NM_000037.2,998-1016).
gcctgtccccaattcacat

SEQ ID NO: 286514 - DNA, 19 bp, Homo sapiens
  siRNA target sequence for ANK1 (NM_000037.2,1045-1063).
gtccggctcctgttgcaat

SEQ ID NO: 286515 - DNA, 19 bp, Homo sapiens
  siRNA target sequence for ANK1 (NM_000037.2,1059-1077).
gcaatacgacgcagagata

SEQ ID NO: 286516 - DNA, 19 bp, Homo sapiens
  siRNA target sequence for ANK1 (NM_000037.2,1145-1163).
ctaaggtccttctggataa

SEQ ID NO: 286517 - DNA, 19 bp, Homo sapiens
  siRNA target sequence for ANK1 (NM_000037.2,1195-1213).
ggctttacccccttacaca

SEQ ID NO: 286518 - DNA, 19 bp, Homo sapiens
  siRNA target sequence for ANK1 (NM_000037.2,1196-1214).
gctttacccccttacacat

SEQ ID NO: 286519 - DNA, 19 bp, Homo sapiens
  siRNA target sequence for ANK1 (NM_000037.2,1210-1228).
cacatcgcctgcaaaaaga

SEQ ID NO: 286520 - DNA, 19 bp, Homo sapiens
  siRNA target sequence for ANK1 (NM_000037.2,1431-1449).
cacggaagtggccaaatat

SEQ ID NO: 286521 - DNA, 19 bp, Homo sapiens
  siRNA target sequence for ANK1 (NM_000037.2,1433-1451).
cggaagtggccaaatattt

SEQ ID NO: 286522 - DNA, 19 bp, Homo sapiens
  siRNA target sequence for ANK1 (NM_000037.2,1434-1452).
ggaagtggccaaatattta

SEQ ID NO: 286523 - DNA, 19 bp, Homo sapiens
  siRNA target sequence for ANK1 (NM_000037.2,1517-1535).
ctcgcatcggccacacaaa

SEQ ID NO: 286524 - DNA, 19 bp, Homo sapiens
  siRNA target sequence for ANK1 (NM_000037.2,1519-1537).
cgcatcggccacacaaaca

SEQ ID NO: 286525 - DNA, 19 bp, Homo sapiens
  siRNA target sequence for ANK1 (NM_000037.2,1520-1538).
gcatcggccacacaaacat

SEQ ID NO: 286526 - DNA, 19 bp, Homo sapiens
  siRNA target sequence for ANK1 (NM_000037.2,1769-1787).
cgaatgctgccggaaaaaa

SEQ ID NO: 286527 - DNA, 19 bp, Homo sapiens
  siRNA target sequence for ANK1 (NM_000037.2,2406-2424).
caagcgcttgggctacatt

SEQ ID NO: 286528 - DNA, 19 bp, Homo sapiens
  siRNA target sequence for ANK1 (NM_000037.2,2409-2427).
gcgcttgggctacatttct

SEQ ID NO: 286529 - DNA, 19 bp, Homo sapiens
  siRNA target sequence for ANK1 (NM_000037.2,2411-2429).
gcttgggctacatttctgt

SEQ ID NO: 286530 - DNA, 19 bp, Homo sapiens
  siRNA target sequence for ANK1 (NM_000037.2,2482-2500).
gataagcatcgaatgagtt

SEQ ID NO: 286531 - DNA, 19 bp, Homo sapiens
  siRNA target sequence for ANK1 (NM_000037.2,2579-2597).
gggattccagggatgttga

SEQ ID NO: 286532 - DNA, 19 bp, Homo sapiens
  siRNA target sequence for ANK1 (NM_000037.2,2580-2598).
ggattccagggatgttgat

SEQ ID NO: 286533 - DNA, 19 bp, Homo sapiens
  siRNA target sequence for ANK1 (NM_000037.2,2585-2603).
ccagggatgttgatgaaga

SEQ ID NO: 286534 - DNA, 19 bp, Homo sapiens
  siRNA target sequence for ANK1 (NM_000037.2,2712-2730).
gcaggagcaggcatctaaa

SEQ ID NO: 286535 - DNA, 19 bp, Homo sapiens
  siRNA target sequence for ANK1 (NM_000037.2,2771-2789).
ccgagacctcagacaacat

SEQ ID NO: 286536 - DNA, 19 bp, Homo sapiens
  siRNA target sequence for ANK1 (NM_000037.2,2994-3012).
cctggccagcaggatcata

SEQ ID NO: 286537 - DNA, 19 bp, Homo sapiens
  siRNA target sequence for ANK1 (NM_000037.2,3265-3283).
ctgtacttcgtgatcatgt

SEQ ID NO: 286538 - DNA, 19 bp, Homo sapiens
  siRNA target sequence for ANK1 (NM_000037.2,3761-3779).
ccaccctgctgtacaaaga

SEQ ID NO: 286539 - DNA, 19 bp, Homo sapiens
  siRNA target sequence for ANK1 (NM_000037.2,3801-3819).
ggccaaattcgtcatcttt

SEQ ID NO: 286540 - DNA, 19 bp, Homo sapiens
  siRNA target sequence for ANK1 (NM_000037.2,4111-4129).
ctgcgcaaggcgatgaagt

SEQ ID NO: 286541 - DNA, 19 bp, Homo sapiens
  siRNA target sequence for ANK1 (NM_000037.2,4383-4401).
caggatccgagtggaaaat

SEQ ID NO: 286542 - DNA, 19 bp, Homo sapiens
  siRNA target sequence for ANK1 (NM_000037.2,4602-4620).
gtcaccctcccagatgaat

SEQ ID NO: 286543 - DNA, 19 bp, Homo sapiens
  siRNA target sequence for ANK1 (NM_000037.2,4953-4971).
cgacacagtggattcagat

SEQ ID NO: 286544 - DNA, 19 bp, Homo sapiens
  siRNA target sequence for ANK1 (NM_000037.2,5085-5103).
gaatgaagtgtctcttgtt

SEQ ID NO: 286545 - DNA, 19 bp, Homo sapiens
  siRNA target sequence for ANK1 (NM_000037.2,5118-5136).
ggggcaagcccgaatcaca

SEQ ID NO: 286546 - DNA, 19 bp, Homo sapiens
  siRNA target sequence for ANK1 (NM_000037.2,5197-5215).
gcagacggctcgattgtct

SEQ ID NO: 286547 - DNA, 19 bp, Homo sapiens
  siRNA target sequence for ANK1 (NM_000037.2,5261-5279).
cgcaaggtccacactcatt

SEQ ID NO: 286548 - DNA, 19 bp, Homo sapiens
  siRNA target sequence for ANK1 (NM_000037.2,5340-5358).
ggtcctggtgtctgtaagt

SEQ ID NO: 286549 - DNA, 19 bp, Homo sapiens
  siRNA target sequence for ANK1 (NM_020476.1,5660-5678).
gtgagctggaggtcgatat

SEQ ID NO: 286550 - DNA, 19 bp, Homo sapiens
  siRNA target sequence for ANK1 (NM_020476.1,5664-5682).
gctggaggtcgatattgat

SEQ ID NO: 286551 - DNA, 19 bp, Homo sapiens
  siRNA target sequence for ANK1 (NM_020476.1,5665-5683).
ctggaggtcgatattgatt

SEQ ID NO: 286552 - DNA, 19 bp, Homo sapiens
  siRNA target sequence for ANK1 (NM_020476.1,5670-5688).
ggtcgatattgattacttt

SEQ ID NO: 286553 - DNA, 19 bp, Homo sapiens
  siRNA target sequence for ANK1 (NM_020476.1,5671-5689).
gtcgatattgattacttta

SEQ ID NO: 286554 - DNA, 19 bp, Homo sapiens
  siRNA target sequence for ANK2 (NM_001148.2,44-62).
gcgacagtggagagaagtt

SEQ ID NO: 286555 - DNA, 19 bp, Homo sapiens
  siRNA target sequence for ANK2 (NM_001148.2,137-155).
caggcaacctggacaaagt

SEQ ID NO: 286556 - DNA, 19 bp, Homo sapiens
  siRNA target sequence for ANK2 (NM_001148.2,292-310).
gccactaagaagggaaata

SEQ ID NO: 286557 - DNA, 19 bp, Homo sapiens
  siRNA target sequence for ANK2 (NM_001148.2,403-421).
ggctttactcctttataca

SEQ ID NO: 286558 - DNA, 19 bp, Homo sapiens
  siRNA target sequence for ANK2 (NM_001148.2,428-446).
cccaagagaatcacattga

SEQ ID NO: 286559 - DNA, 19 bp, Homo sapiens
  siRNA target sequence for ANK2 (NM_001148.2,429-447).
ccaagagaatcacattgat

SEQ ID NO: 286560 - DNA, 19 bp, Homo sapiens
  siRNA target sequence for ANK2 (NM_001148.2,554-572).
ccatcctcttggagaatga

SEQ ID NO: 286561 - DNA, 19 bp, Homo sapiens
  siRNA target sequence for ANK2 (NM_001148.2,603-621).
gcatattgccgctaggaaa

SEQ ID NO: 286562 - DNA, 19 bp, Homo sapiens
  siRNA target sequence for ANK2 (NM_001148.2,639-657).
cgcacttctgcttcagaat

SEQ ID NO: 286563 - DNA, 19 bp, Homo sapiens
  siRNA target sequence for ANK2 (NM_001148.2,661-679).
cacaatgctgacgtacaat

SEQ ID NO: 286564 - DNA, 19 bp, Homo sapiens
  siRNA target sequence for ANK2 (NM_001148.2,670-688).
gacgtacaatccaagatga

SEQ ID NO: 286565 - DNA, 19 bp, Homo sapiens
  siRNA target sequence for ANK2 (NM_001148.2,736-754).
gcacattacggaaatgtca

SEQ ID NO: 286566 - DNA, 19 bp, Homo sapiens
  siRNA target sequence for ANK2 (NM_001148.2,737-755).
cacattacggaaatgtcaa

SEQ ID NO: 286567 - DNA, 19 bp, Homo sapiens
  siRNA target sequence for ANK2 (NM_001148.2,756-774).
cgtggcaactcttcttcta

SEQ ID NO: 286568 - DNA, 19 bp, Homo sapiens
  siRNA target sequence for ANK2 (NM_001148.2,886-904).
cagatcgatgccaaaacta

SEQ ID NO: 286569 - DNA, 19 bp, Homo sapiens
  siRNA target sequence for ANK2 (NM_001148.2,1142-1160).
gccactaccgtgtaaccaa

SEQ ID NO: 286570 - DNA, 19 bp, Homo sapiens
  siRNA target sequence for ANK2 (NM_001148.2,1151-1169).
gtgtaaccaaactcctttt

SEQ ID NO: 286571 - DNA, 19 bp, Homo sapiens
  siRNA target sequence for ANK2 (NM_001148.2,1157-1175).
ccaaactccttttagacaa

SEQ ID NO: 286572 - DNA, 19 bp, Homo sapiens
  siRNA target sequence for ANK2 (NM_001148.2,1277-1295).
gggcttcaatccaagctat

SEQ ID NO: 286573 - DNA, 19 bp, Homo sapiens
  siRNA target sequence for ANK2 (NM_001148.2,1302-1320).
gtctggcctcacaccaata

SEQ ID NO: 286574 - DNA, 19 bp, Homo sapiens
  siRNA target sequence for ANK2 (NM_001148.2,1406-1424).
gtgagacggcactacacat

SEQ ID NO: 286575 - DNA, 19 bp, Homo sapiens
  siRNA target sequence for ANK2 (NM_001148.2,1582-1600).
ccagatgcggccactacaa

SEQ ID NO: 286576 - DNA, 19 bp, Homo sapiens
  siRNA target sequence for ANK2 (NM_001148.2,1650-1668).
ggcatcagtcctattggaa

SEQ ID NO: 286577 - DNA, 19 bp, Homo sapiens
  siRNA target sequence for ANK2 (NM_001148.2,1675-1693).
gcagcccactccttagcta

SEQ ID NO: 286578 - DNA, 19 bp, Homo sapiens
  siRNA target sequence for ANK2 (NM_001148.2,1690-1708).
gctaccaagaagggtttta

SEQ ID NO: 286579 - DNA, 19 bp, Homo sapiens
  siRNA target sequence for ANK2 (NM_001148.2,1739-1757).
gcctggatgtggcaaaact

SEQ ID NO: 286580 - DNA, 19 bp, Homo sapiens
  siRNA target sequence for ANK2 (NM_001148.2,1770-1788).
ccgtgctgccgcagattct

SEQ ID NO: 286581 - DNA, 19 bp, Homo sapiens
  siRNA target sequence for ANK2 (NM_001148.2,1900-1918).
ggctatactccgttacata

SEQ ID NO: 286582 - DNA, 19 bp, Homo sapiens
  siRNA target sequence for ANK2 (NM_001148.2,1901-1919).
gctatactccgttacatat

SEQ ID NO: 286583 - DNA, 19 bp, Homo sapiens
  siRNA target sequence for ANK2 (NM_001148.2,1972-1990).
gcagagacaaacattgtga

SEQ ID NO: 286584 - DNA, 19 bp, Homo sapiens
  siRNA target sequence for ANK2 (NM_001148.2,2071-2089).
gccaatatccacatgtcaa

SEQ ID NO: 286585 - DNA, 19 bp, Homo sapiens
  siRNA target sequence for ANK2 (NM_001148.2,2094-2112).
gagtggactcacatcctta

SEQ ID NO: 286586 - DNA, 19 bp, Homo sapiens
  siRNA target sequence for ANK2 (NM_001148.2,2124-2142).
ccaggaagataaagtgaat

SEQ ID NO: 286587 - DNA, 19 bp, Homo sapiens
  siRNA target sequence for ANK2 (NM_001148.2,2173-2191).
gatcaggatgctcatacaa

SEQ ID NO: 286588 - DNA, 19 bp, Homo sapiens
  siRNA target sequence for ANK2 (NM_001148.2,2193-2211).
gcttggttacacaccttta

SEQ ID NO: 286589 - DNA, 19 bp, Homo sapiens
  siRNA target sequence for ANK2 (NM_001148.2,2224-2242).
cactatggaaatgtgaaaa

SEQ ID NO: 286590 - DNA, 19 bp, Homo sapiens
  siRNA target sequence for ANK2 (NM_001148.2,2329-2347).
ggtcacacgcacatcatca

SEQ ID NO: 286591 - DNA, 19 bp, Homo sapiens
  siRNA target sequence for ANK2 (NM_001148.2,2402-2420).
ctgccttggcgattgctaa

SEQ ID NO: 286592 - DNA, 19 bp, Homo sapiens
  siRNA target sequence for ANK2 (NM_001148.2,2483-2501).
ccaccacaactattacaga

SEQ ID NO: 286593 - DNA, 19 bp, Homo sapiens
  siRNA target sequence for ANK2 (NM_001148.2,2484-2502).
caccacaactattacagaa

SEQ ID NO: 286594 - DNA, 19 bp, Homo sapiens
  siRNA target sequence for ANK2 (NM_001148.2,2538-2556).
ggttcttgatgtttctgat

SEQ ID NO: 286595 - DNA, 19 bp, Homo sapiens
  siRNA target sequence for ANK2 (NM_001148.2,2579-2597).
ctggtgatgggggagaata

SEQ ID NO: 286596 - DNA, 19 bp, Homo sapiens
  siRNA target sequence for ANK2 (NM_001148.2,2582-2600).
gtgatgggggagaatacct

SEQ ID NO: 286597 - DNA, 19 bp, Homo sapiens
  siRNA target sequence for ANK2 (NM_001148.2,2652-2670).
gttcctggatggtatgaat

SEQ ID NO: 286598 - DNA, 19 bp, Homo sapiens
  siRNA target sequence for ANK2 (NM_001148.2,2781-2799).
ggatgactcagttgtgatt

SEQ ID NO: 286599 - DNA, 19 bp, Homo sapiens
  siRNA target sequence for ANK2 (NM_001148.2,2864-2882).
gcactgagaacttagacaa

SEQ ID NO: 286600 - DNA, 19 bp, Homo sapiens
  siRNA target sequence for ANK2 (NM_001148.2,2878-2896).
gacaacgtggctctttctt

SEQ ID NO: 286601 - DNA, 19 bp, Homo sapiens
  siRNA target sequence for ANK2 (NM_001148.2,2883-2901).
cgtggctctttcttctagt

SEQ ID NO: 286602 - DNA, 19 bp, Homo sapiens
  siRNA target sequence for ANK2 (NM_001148.2,2973-2991).
caatgggctccgaatcatt

SEQ ID NO: 286603 - DNA, 19 bp, Homo sapiens
  siRNA target sequence for ANK2 (NM_001148.2,2979-2997).
gctccgaatcattattcca

SEQ ID NO: 286604 - DNA, 19 bp, Homo sapiens
  siRNA target sequence for ANK2 (NM_001148.2,3125-3143).
gtgctcagttccttggtaa

SEQ ID NO: 286605 - DNA, 19 bp, Homo sapiens
  siRNA target sequence for ANK2 (NM_001148.2,3214-3232).
gggcctcctggaaccaaat

SEQ ID NO: 286606 - DNA, 19 bp, Homo sapiens
  siRNA target sequence for ANK2 (NM_001148.2,3215-3233).
ggcctcctggaaccaaatt

SEQ ID NO: 286607 - DNA, 19 bp, Homo sapiens
  siRNA target sequence for ANK2 (NM_001148.2,3300-3318).
ggtcctgcgcagtgagaat

SEQ ID NO: 286608 - DNA, 19 bp, Homo sapiens
  siRNA target sequence for ANK2 (NM_001148.2,3344-3362).
gtgactacactgaagatga

SEQ ID NO: 286609 - DNA, 19 bp, Homo sapiens
  siRNA target sequence for ANK2 (NM_001148.2,3449-3467).
gagacttcccacagtactt

SEQ ID NO: 286610 - DNA, 19 bp, Homo sapiens
  siRNA target sequence for ANK2 (NM_001148.2,3599-3617).
gcctgcaggctcaacctat

SEQ ID NO: 286611 - DNA, 19 bp, Homo sapiens
  siRNA target sequence for ANK2 (NM_001148.2,3619-3637).
cacagtgagctggttaaga

SEQ ID NO: 286612 - DNA, 19 bp, Homo sapiens
  siRNA target sequence for ANK2 (NM_001148.2,3656-3674).
ctaccttcagccctatagt

SEQ ID NO: 286613 - DNA, 19 bp, Homo sapiens
  siRNA target sequence for ANK2 (NM_001148.2,3743-3761).
caagtgatgtcatgttgaa

SEQ ID NO: 286614 - DNA, 19 bp, Homo sapiens
  siRNA target sequence for ANK2 (NM_001148.2,3775-3793).
gatgcaccaaccttaagat

SEQ ID NO: 286615 - DNA, 19 bp, Homo sapiens
  siRNA target sequence for ANK2 (NM_001148.2,3781-3799).
ccaaccttaagattactat

SEQ ID NO: 286616 - DNA, 19 bp, Homo sapiens
  siRNA target sequence for ANK2 (NM_001148.2,3851-3869).
ctacgccattaacatttgt

SEQ ID NO: 286617 - DNA, 19 bp, Homo sapiens
  siRNA target sequence for ANK2 (NM_001148.2,3909-3927).
gttctggctgatagattgt

SEQ ID NO: 286618 - DNA, 19 bp, Homo sapiens
  siRNA target sequence for ANK2 (NM_001148.2,3939-3957).
ggaatccgttacttttgca

SEQ ID NO: 286619 - DNA, 19 bp, Homo sapiens
  siRNA target sequence for ANK2 (NM_001148.2,3996-4014).
ggccaaatttgtagtgttt

SEQ ID NO: 286620 - DNA, 19 bp, Homo sapiens
  siRNA target sequence for ANK2 (NM_001148.2,4077-4095).
ggataagacccttgaacaa

SEQ ID NO: 286621 - DNA, 19 bp, Homo sapiens
  siRNA target sequence for ANK2 (NM_001148.2,4127-4145).
gggatgtggaggtgttaga

SEQ ID NO: 286622 - DNA, 19 bp, Homo sapiens
  siRNA target sequence for ANK2 (NM_001148.2,4128-4146).
ggatgtggaggtgttagaa

SEQ ID NO: 286623 - DNA, 19 bp, Homo sapiens
  siRNA target sequence for ANK2 (NM_001148.2,4153-4171).
cccatctacgttgattgtt

SEQ ID NO: 286624 - DNA, 19 bp, Homo sapiens
  siRNA target sequence for ANK2 (NM_001148.2,4154-4172).
ccatctacgttgattgttt

SEQ ID NO: 286625 - DNA, 19 bp, Homo sapiens
  siRNA target sequence for ANK2 (NM_001148.2,4173-4191).
cggcaacttggtaccatta

SEQ ID NO: 286626 - DNA, 19 bp, Homo sapiens
  siRNA target sequence for ANK2 (NM_001148.2,4174-4192).
ggcaacttggtaccattaa

SEQ ID NO: 286627 - DNA, 19 bp, Homo sapiens
  siRNA target sequence for ANK2 (NM_001148.2,4201-4219).
ggccagcatcatatattca

SEQ ID NO: 286628 - DNA, 19 bp, Homo sapiens
  siRNA target sequence for ANK2 (NM_001148.2,4203-4221).
ccagcatcatatattcagt

SEQ ID NO: 286629 - DNA, 19 bp, Homo sapiens
  siRNA target sequence for ANK2 (NM_001148.2,4204-4222).
cagcatcatatattcagtt

SEQ ID NO: 286630 - DNA, 19 bp, Homo sapiens
  siRNA target sequence for ANK2 (NM_001148.2,4206-4224).
gcatcatatattcagtttt

SEQ ID NO: 286631 - DNA, 19 bp, Homo sapiens
  siRNA target sequence for ANK2 (NM_001148.2,4285-4303).
ccttgcggacgactatcat

SEQ ID NO: 286632 - DNA, 19 bp, Homo sapiens
  siRNA target sequence for ANK2 (NM_001148.2,4286-4304).
cttgcggacgactatcatt

SEQ ID NO: 286633 - DNA, 19 bp, Homo sapiens
  siRNA target sequence for ANK2 (NM_001148.2,4289-4307).
gcggacgactatcatttat

SEQ ID NO: 286634 - DNA, 19 bp, Homo sapiens
  siRNA target sequence for ANK2 (NM_001148.2,4291-4309).
ggacgactatcatttatga

SEQ ID NO: 286635 - DNA, 19 bp, Homo sapiens
  siRNA target sequence for ANK2 (NM_001148.2,4292-4310).
gacgactatcatttatgaa

SEQ ID NO: 286636 - DNA, 19 bp, Homo sapiens
  siRNA target sequence for ANK2 (NM_001148.2,4331-4349).
gcctggtgcatcaagctat

SEQ ID NO: 286637 - DNA, 19 bp, Homo sapiens
  siRNA target sequence for ANK2 (NM_001148.2,4332-4350).
cctggtgcatcaagctatt

SEQ ID NO: 286638 - DNA, 19 bp, Homo sapiens
  siRNA target sequence for ANK2 (NM_001148.2,4333-4351).
ctggtgcatcaagctattt

SEQ ID NO: 286639 - DNA, 19 bp, Homo sapiens
  siRNA target sequence for ANK2 (NM_001148.2,4336-4354).
gtgcatcaagctatttgca

SEQ ID NO: 286640 - DNA, 19 bp, Homo sapiens
  siRNA target sequence for ANK2 (NM_001148.2,4346-4364).
ctatttgcaacttaaacat

SEQ ID NO: 286641 - DNA, 19 bp, Homo sapiens
  siRNA target sequence for ANK2 (NM_001148.2,4362-4380).
catcactttgccgatttat

SEQ ID NO: 286642 - DNA, 19 bp, Homo sapiens
  siRNA target sequence for ANK2 (NM_001148.2,4371-4389).
gccgatttatacaaaggaa

SEQ ID NO: 286643 - DNA, 19 bp, Homo sapiens
  siRNA target sequence for ANK2 (NM_001148.2,4413-4431).
ggaagagatcgatatgaca

SEQ ID NO: 286644 - DNA, 19 bp, Homo sapiens
  siRNA target sequence for ANK2 (NM_001148.2,4414-4432).
gaagagatcgatatgacat

SEQ ID NO: 286645 - DNA, 19 bp, Homo sapiens
  siRNA target sequence for ANK2 (NM_001148.2,4422-4440).
cgatatgacatcagaaaaa

SEQ ID NO: 286646 - DNA, 19 bp, Homo sapiens
  siRNA target sequence for ANK2 (NM_001148.2,4462-4480).
gaaacatctgtcctgaaaa

SEQ ID NO: 286647 - DNA, 19 bp, Homo sapiens
  siRNA target sequence for ANK2 (NM_001148.2,4466-4484).
catctgtcctgaaaagtca

SEQ ID NO: 286648 - DNA, 19 bp, Homo sapiens
  siRNA target sequence for ANK2 (NM_001148.2,4481-4499).
gtcacctggttaatgaagt

SEQ ID NO: 286649 - DNA, 19 bp, Homo sapiens
  siRNA target sequence for ANK2 (NM_001148.2,4521-4539).
cttgctctctgaagtttct

SEQ ID NO: 286650 - DNA, 19 bp, Homo sapiens
  siRNA target sequence for ANK2 (NM_001148.2,4538-4556).
ctgagatgaaacaagattt

SEQ ID NO: 286651 - DNA, 19 bp, Homo sapiens
  siRNA target sequence for ANK2 (NM_001148.2,4580-4598).
ccacagatgtgtctgataa

SEQ ID NO: 286652 - DNA, 19 bp, Homo sapiens
  siRNA target sequence for ANK2 (NM_001148.2,4594-4612).
gataaggcaggttctatta

SEQ ID NO: 286653 - DNA, 19 bp, Homo sapiens
  siRNA target sequence for ANK2 (NM_001148.2,4783-4801).
gaggaatgggttattgtca

SEQ ID NO: 286654 - DNA, 19 bp, Homo sapiens
  siRNA target sequence for ANK2 (NM_001148.2,4848-4866).
cactgaatatccatgtgta

SEQ ID NO: 286655 - DNA, 19 bp, Homo sapiens
  siRNA target sequence for ANK2 (NM_001148.2,4859-4877).
catgtgtagaagttagaat

SEQ ID NO: 286656 - DNA, 19 bp, Homo sapiens
  siRNA target sequence for ANK2 (NM_001148.2,4918-4936).
gggctagtgaactacctta

SEQ ID NO: 286657 - DNA, 19 bp, Homo sapiens
  siRNA target sequence for ANK2 (NM_001148.2,4977-4995).
gctgcagacagttcaagat

SEQ ID NO: 286658 - DNA, 19 bp, Homo sapiens
  siRNA target sequence for ANK2 (NM_001148.2,4978-4996).
ctgcagacagttcaagata

SEQ ID NO: 286659 - DNA, 19 bp, Homo sapiens
  siRNA target sequence for ANK2 (NM_001148.2,5101-5119).
ccaagcttgggaataaaga

SEQ ID NO: 286660 - DNA, 19 bp, Homo sapiens
  siRNA target sequence for ANK2 (NM_001148.2,5122-5140).
ccagtaagaaggaaattaa

SEQ ID NO: 286661 - DNA, 19 bp, Homo sapiens
  siRNA target sequence for ANK2 (NM_001148.2,5123-5141).
cagtaagaaggaaattaaa

SEQ ID NO: 286662 - DNA, 19 bp, Homo sapiens
  siRNA target sequence for ANK2 (NM_001148.2,5276-5294).
catctcctttgatagaaga

SEQ ID NO: 286663 - DNA, 19 bp, Homo sapiens
  siRNA target sequence for ANK2 (NM_001148.2,5290-5308).
gaagaaactcccattggtt

SEQ ID NO: 286664 - DNA, 19 bp, Homo sapiens
  siRNA target sequence for ANK2 (NM_001148.2,5300-5318).
ccattggttccataaagga

SEQ ID NO: 286665 - DNA, 19 bp, Homo sapiens
  siRNA target sequence for ANK2 (NM_001148.2,5398-5416).
gaggacgtgccaaaaaaga

SEQ ID NO: 286666 - DNA, 19 bp, Homo sapiens
  siRNA target sequence for ANK2 (NM_001148.2,5516-5534).
cctcttccgcaaaaactga

SEQ ID NO: 286667 - DNA, 19 bp, Homo sapiens
  siRNA target sequence for ANK2 (NM_001148.2,5620-5638).
gcgtcatcatcgagtaaaa

SEQ ID NO: 286668 - DNA, 19 bp, Homo sapiens
  siRNA target sequence for ANK2 (NM_001148.2,5622-5640).
gtcatcatcgagtaaaact

SEQ ID NO: 286669 - DNA, 19 bp, Homo sapiens
  siRNA target sequence for ANK2 (NM_001148.2,5656-5674).
gtatcaccctcgacaaaaa

SEQ ID NO: 286670 - DNA, 19 bp, Homo sapiens
  siRNA target sequence for ANK2 (NM_001148.2,5660-5678).
caccctcgacaaaaactga

SEQ ID NO: 286671 - DNA, 19 bp, Homo sapiens
  siRNA target sequence for ANK2 (NM_001148.2,5662-5680).
ccctcgacaaaaactgaaa

SEQ ID NO: 286672 - DNA, 19 bp, Homo sapiens
  siRNA target sequence for ANK2 (NM_001148.2,5769-5787).
ctccgggaggacagaaaaa

SEQ ID NO: 286673 - DNA, 19 bp, Homo sapiens
  siRNA target sequence for ANK2 (NM_001148.2,5771-5789).
ccgggaggacagaaaaaca

SEQ ID NO: 286674 - DNA, 19 bp, Homo sapiens
  siRNA target sequence for ANK2 (NM_001148.2,5856-5874).
gcaccaacctgtatcaaca

SEQ ID NO: 286675 - DNA, 19 bp, Homo sapiens
  siRNA target sequence for ANK2 (NM_001148.2,6011-6029).
caggtcaggacccttctaa

SEQ ID NO: 286676 - DNA, 19 bp, Homo sapiens
  siRNA target sequence for ANK2 (NM_001148.2,6014-6032).
gtcaggacccttctaaaca

SEQ ID NO: 286677 - DNA, 19 bp, Homo sapiens
  siRNA target sequence for ANK2 (NM_001148.2,6016-6034).
caggacccttctaaacata

SEQ ID NO: 286678 - DNA, 19 bp, Homo sapiens
  siRNA target sequence for ANK2 (NM_001148.2,6021-6039).
cccttctaaacataaaact

SEQ ID NO: 286679 - DNA, 19 bp, Homo sapiens
  siRNA target sequence for ANK2 (NM_001148.2,6040-6058).
ggactctttgagcacaaat

SEQ ID NO: 286680 - DNA, 19 bp, Homo sapiens
  siRNA target sequence for ANK2 (NM_001148.2,6073-6091).
cagccacaagagaaaggta

SEQ ID NO: 286681 - DNA, 19 bp, Homo sapiens
  siRNA target sequence for ANK2 (NM_001148.2,6075-6093).
gccacaagagaaaggtaaa

SEQ ID NO: 286682 - DNA, 19 bp, Homo sapiens
  siRNA target sequence for ANK2 (NM_001148.2,6088-6106).
ggtaaagttcgggtagaaa

SEQ ID NO: 286683 - DNA, 19 bp, Homo sapiens
  siRNA target sequence for ANK2 (NM_001148.2,6089-6107).
gtaaagttcgggtagaaaa

SEQ ID NO: 286684 - DNA, 19 bp, Homo sapiens
  siRNA target sequence for ANK2 (NM_001148.2,6149-6167).
cagagaatcagacaatcaa

SEQ ID NO: 286685 - DNA, 19 bp, Homo sapiens
  siRNA target sequence for ANK2 (NM_001148.2,6191-6209).
cgggcacagcagaatccaa

SEQ ID NO: 286686 - DNA, 19 bp, Homo sapiens
  siRNA target sequence for ANK2 (NM_001148.2,6227-6245).
cctccataggagttaagaa

SEQ ID NO: 286687 - DNA, 19 bp, Homo sapiens
  siRNA target sequence for ANK2 (NM_001148.2,6228-6246).
ctccataggagttaagaaa

SEQ ID NO: 286688 - DNA, 19 bp, Homo sapiens
  siRNA target sequence for ANK2 (NM_001148.2,6230-6248).
ccataggagttaagaaaga

SEQ ID NO: 286689 - DNA, 19 bp, Homo sapiens
  siRNA target sequence for ANK2 (NM_001148.2,6336-6354).
gagcgaagtgcccaaagaa

SEQ ID NO: 286690 - DNA, 19 bp, Homo sapiens
  siRNA target sequence for ANK2 (NM_001148.2,6374-6392).
gagacatggatctacagat

SEQ ID NO: 286691 - DNA, 19 bp, Homo sapiens
  siRNA target sequence for ANK2 (NM_001148.2,6390-6408).
gatcagcccagataggaaa

SEQ ID NO: 286692 - DNA, 19 bp, Homo sapiens
  siRNA target sequence for ANK2 (NM_001148.2,6523-6541).
ctcactagtcctttcaaca

SEQ ID NO: 286693 - DNA, 19 bp, Homo sapiens
  siRNA target sequence for ANK2 (NM_001148.2,6530-6548).
gtcctttcaacacaacatt

SEQ ID NO: 286694 - DNA, 19 bp, Homo sapiens
  siRNA target sequence for ANK2 (NM_001148.2,6545-6563).
catttccactcgactacat

SEQ ID NO: 286695 - DNA, 19 bp, Homo sapiens
  siRNA target sequence for ANK2 (NM_001148.2,6672-6690).
ggaggggacccctcagatt

SEQ ID NO: 286696 - DNA, 19 bp, Homo sapiens
  siRNA target sequence for ANK2 (NM_001148.2,6673-6691).
gaggggacccctcagatta

SEQ ID NO: 286697 - DNA, 19 bp, Homo sapiens
  siRNA target sequence for ANK2 (NM_001148.2,6676-6694).
gggacccctcagattagtt

SEQ ID NO: 286698 - DNA, 19 bp, Homo sapiens
  siRNA target sequence for ANK2 (NM_001148.2,6678-6696).
gacccctcagattagttca

SEQ ID NO: 286699 - DNA, 19 bp, Homo sapiens
  siRNA target sequence for ANK2 (NM_001148.2,6692-6710).
gttcagaagaaagctataa

SEQ ID NO: 286700 - DNA, 19 bp, Homo sapiens
  siRNA target sequence for ANK2 (NM_001148.2,6850-6868).
catcccacgaccaaagaca

SEQ ID NO: 286701 - DNA, 19 bp, Homo sapiens
  siRNA target sequence for ANK2 (NM_001148.2,6853-6871).
cccacgaccaaagacatta

SEQ ID NO: 286702 - DNA, 19 bp, Homo sapiens
  siRNA target sequence for ANK2 (NM_001148.2,6855-6873).
cacgaccaaagacattact

SEQ ID NO: 286703 - DNA, 19 bp, Homo sapiens
  siRNA target sequence for ANK2 (NM_001148.2,7001-7019).
gcagctgtagtgtagcatt

SEQ ID NO: 286704 - DNA, 19 bp, Homo sapiens
  siRNA target sequence for ANK2 (NM_001148.2,7002-7020).
cagctgtagtgtagcatta

SEQ ID NO: 286705 - DNA, 19 bp, Homo sapiens
  siRNA target sequence for ANK2 (NM_001148.2,7005-7023).
ctgtagtgtagcattagct

SEQ ID NO: 286706 - DNA, 19 bp, Homo sapiens
  siRNA target sequence for ANK2 (NM_001148.2,7007-7025).
gtagtgtagcattagctaa

SEQ ID NO: 286707 - DNA, 19 bp, Homo sapiens
  siRNA target sequence for ANK2 (NM_001148.2,7010-7028).
gtgtagcattagctaaaga

SEQ ID NO: 286708 - DNA, 19 bp, Homo sapiens
  siRNA target sequence for ANK2 (NM_001148.2,7012-7030).
gtagcattagctaaagaga

SEQ ID NO: 286709 - DNA, 19 bp, Homo sapiens
  siRNA target sequence for ANK2 (NM_001148.2,7069-7087).
ggtcaacgtacctttggta

SEQ ID NO: 286710 - DNA, 19 bp, Homo sapiens
  siRNA target sequence for ANK2 (NM_001148.2,7136-7154).
ccacctcagacgagacaaa

SEQ ID NO: 286711 - DNA, 19 bp, Homo sapiens
  siRNA target sequence for ANK2 (NM_001148.2,7210-7228).
cctcagggagtcattagaa

SEQ ID NO: 286712 - DNA, 19 bp, Homo sapiens
  siRNA target sequence for ANK2 (NM_001148.2,7229-7247).
gtccccaagggttagaact

SEQ ID NO: 286713 - DNA, 19 bp, Homo sapiens
  siRNA target sequence for ANK2 (NM_001148.2,7287-7305).
ggctgatgactcattagca

SEQ ID NO: 286714 - DNA, 19 bp, Homo sapiens
  siRNA target sequence for ANK2 (NM_001148.2,7303-7321).
gcagtgagccacaaagact

SEQ ID NO: 286715 - DNA, 19 bp, Homo sapiens
  siRNA target sequence for ANK2 (NM_001148.2,7334-7352).
gccctgtgctagaagataa

SEQ ID NO: 286716 - DNA, 19 bp, Homo sapiens
  siRNA target sequence for ANK2 (NM_001148.2,7336-7354).
cctgtgctagaagataact

SEQ ID NO: 286717 - DNA, 19 bp, Homo sapiens
  siRNA target sequence for ANK2 (NM_001148.2,7427-7445).
gcagccctgttgaaccaaa

SEQ ID NO: 286718 - DNA, 19 bp, Homo sapiens
  siRNA target sequence for ANK2 (NM_001148.2,7430-7448).
gccctgttgaaccaaagat

SEQ ID NO: 286719 - DNA, 19 bp, Homo sapiens
  siRNA target sequence for ANK2 (NM_001148.2,7699-7717).
ccagctgtgattcatgaat

SEQ ID NO: 286720 - DNA, 19 bp, Homo sapiens
  siRNA target sequence for ANK2 (NM_001148.2,7915-7933).
gtggatgaaccaaaacata

SEQ ID NO: 286721 - DNA, 19 bp, Homo sapiens
  siRNA target sequence for ANK2 (NM_001148.2,7917-7935).
ggatgaaccaaaacataca

SEQ ID NO: 286722 - DNA, 19 bp, Homo sapiens
  siRNA target sequence for ANK2 (NM_001148.2,7960-7978).
gtccctgtgttagtaactt

SEQ ID NO: 286723 - DNA, 19 bp, Homo sapiens
  siRNA target sequence for ANK2 (NM_001148.2,8018-8036).
ctgagttggcacagcttaa

SEQ ID NO: 286724 - DNA, 19 bp, Homo sapiens
  siRNA target sequence for ANK2 (NM_001148.2,8020-8038).
gagttggcacagcttaaaa

SEQ ID NO: 286725 - DNA, 19 bp, Homo sapiens
  siRNA target sequence for ANK2 (NM_001148.2,8129-8147).
cagaagaagtacaattcca

SEQ ID NO: 286726 - DNA, 19 bp, Homo sapiens
  siRNA target sequence for ANK2 (NM_001148.2,8150-8168).
ctgtcgtttccaaacaata

SEQ ID NO: 286727 - DNA, 19 bp, Homo sapiens
  siRNA target sequence for ANK2 (NM_001148.2,8152-8170).
gtcgtttccaaacaatata

SEQ ID NO: 286728 - DNA, 19 bp, Homo sapiens
  siRNA target sequence for ANK2 (NM_001148.2,8283-8301).
caggtcttatgataagcta

SEQ ID NO: 286729 - DNA, 19 bp, Homo sapiens
  siRNA target sequence for ANK2 (NM_001148.2,8285-8303).
ggtcttatgataagctaaa

SEQ ID NO: 286730 - DNA, 19 bp, Homo sapiens
  siRNA target sequence for ANK2 (NM_001148.2,8397-8415).
gagtccgactggtgatgat

SEQ ID NO: 286731 - DNA, 19 bp, Homo sapiens
  siRNA target sequence for ANK2 (NM_001148.2,8422-8440).
gaacagccagtcatctata

SEQ ID NO: 286732 - DNA, 19 bp, Homo sapiens
  siRNA target sequence for ANK2 (NM_001148.2,8461-8479).
ggcactcatgaaaaagaca

SEQ ID NO: 286733 - DNA, 19 bp, Homo sapiens
  siRNA target sequence for ANK2 (NM_001148.2,8605-8623).
gacatatctgccacatctt

SEQ ID NO: 286734 - DNA, 19 bp, Homo sapiens
  siRNA target sequence for ANK2 (NM_001148.2,8614-8632).
gccacatcttctattcaaa

SEQ ID NO: 286735 - DNA, 19 bp, Homo sapiens
  siRNA target sequence for ANK2 (NM_001148.2,8636-8654).
cagaggtcacaaaaactga

SEQ ID NO: 286736 - DNA, 19 bp, Homo sapiens
  siRNA target sequence for ANK2 (NM_001148.2,8688-8706).
ctctcaagactcatccatt

SEQ ID NO: 286737 - DNA, 19 bp, Homo sapiens
  siRNA target sequence for ANK2 (NM_001148.2,8692-8710).
caagactcatccattacta

SEQ ID NO: 286738 - DNA, 19 bp, Homo sapiens
  siRNA target sequence for ANK2 (NM_001148.2,8747-8765).
ctgacctagctgagaatga

SEQ ID NO: 286739 - DNA, 19 bp, Homo sapiens
  siRNA target sequence for ANK2 (NM_001148.2,8772-8790).
ctatgatccacaaatcact

SEQ ID NO: 286740 - DNA, 19 bp, Homo sapiens
  siRNA target sequence for ANK2 (NM_001148.2,8787-8805).
cactagcccttatgaaaat

SEQ ID NO: 286741 - DNA, 19 bp, Homo sapiens
  siRNA target sequence for ANK2 (NM_001148.2,8846-8864).
cccaaacagatgcaaatca

SEQ ID NO: 286742 - DNA, 19 bp, Homo sapiens
  siRNA target sequence for ANK2 (NM_001148.2,8857-8875).
gcaaatcacaccacaagtt

SEQ ID NO: 286743 - DNA, 19 bp, Homo sapiens
  siRNA target sequence for ANK2 (NM_001148.2,8904-8922).
catcacatcccctgttgaa

SEQ ID NO: 286744 - DNA, 19 bp, Homo sapiens
  siRNA target sequence for ANK2 (NM_001148.2,8940-8958).
ctcctctagtggaactgtt

SEQ ID NO: 286745 - DNA, 19 bp, Homo sapiens
  siRNA target sequence for ANK2 (NM_001148.2,8942-8960).
cctctagtggaactgtttt

SEQ ID NO: 286746 - DNA, 19 bp, Homo sapiens
  siRNA target sequence for ANK2 (NM_001148.2,8980-8998).
gagggccaggacataaaaa

SEQ ID NO: 286747 - DNA, 19 bp, Homo sapiens
  siRNA target sequence for ANK2 (NM_001148.2,9053-9071).
catctttcgagcctactat

SEQ ID NO: 286748 - DNA, 19 bp, Homo sapiens
  siRNA target sequence for ANK2 (NM_001148.2,9072-9090).
gtccgctacaacaacagtt

SEQ ID NO: 286749 - DNA, 19 bp, Homo sapiens
  siRNA target sequence for ANK2 (NM_001148.2,9091-9109).
gttggtgaacaaataagca

SEQ ID NO: 286750 - DNA, 19 bp, Homo sapiens
  siRNA target sequence for ANK2 (NM_001148.2,9108-9126).
caaagtcatcatcacaaaa

SEQ ID NO: 286751 - DNA, 19 bp, Homo sapiens
  siRNA target sequence for ANK2 (NM_001148.2,9222-9240).
gatggtagacagacaatca

SEQ ID NO: 286752 - DNA, 19 bp, Homo sapiens
  siRNA target sequence for ANK2 (NM_001148.2,9293-9311).
ccccaacaagtgagcaaaa

SEQ ID NO: 286753 - DNA, 19 bp, Homo sapiens
  siRNA target sequence for ANK2 (NM_001148.2,9351-9369).
ccgaagtggtgccattgat

SEQ ID NO: 286754 - DNA, 19 bp, Homo sapiens
  siRNA target sequence for ANK2 (NM_001148.2,9361-9379).
gccattgatatgaccaaaa

SEQ ID NO: 286755 - DNA, 19 bp, Homo sapiens
  siRNA target sequence for ANK2 (NM_001148.2,9495-9513).
gacatcagctgaatcacta

SEQ ID NO: 286756 - DNA, 19 bp, Homo sapiens
  siRNA target sequence for ANK2 (NM_001148.2,9511-9529).
ctagcactttcagaatcaa

SEQ ID NO: 286757 - DNA, 19 bp, Homo sapiens
  siRNA target sequence for ANK2 (NM_001148.2,9598-9616).
gcttcggatgctcaactta

SEQ ID NO: 286758 - DNA, 19 bp, Homo sapiens
  siRNA target sequence for ANK2 (NM_001148.2,9599-9617).
cttcggatgctcaacttaa

SEQ ID NO: 286759 - DNA, 19 bp, Homo sapiens
  siRNA target sequence for ANK2 (NM_001148.2,9695-9713).
ccgtgcaaacgggtgatat

SEQ ID NO: 286760 - DNA, 19 bp, Homo sapiens
  siRNA target sequence for ANK2 (NM_001148.2,9696-9714).
cgtgcaaacgggtgatata

SEQ ID NO: 286761 - DNA, 19 bp, Homo sapiens
  siRNA target sequence for ANK2 (NM_001148.2,9699-9717).
gcaaacgggtgatatacct

SEQ ID NO: 286762 - DNA, 19 bp, Homo sapiens
  siRNA target sequence for ANK2 (NM_001148.2,9767-9785).
ctgtacaagtccagttaga

SEQ ID NO: 286763 - DNA, 19 bp, Homo sapiens
  siRNA target sequence for ANK2 (NM_001148.2,9775-9793).
gtccagttagatttttcca

SEQ ID NO: 286764 - DNA, 19 bp, Homo sapiens
  siRNA target sequence for ANK2 (NM_001148.2,9794-9812).
cactcaccaggtctgttta

SEQ ID NO: 286765 - DNA, 19 bp, Homo sapiens
  siRNA target sequence for ANK2 (NM_001148.2,9796-9814).
ctcaccaggtctgtttatt

SEQ ID NO: 286766 - DNA, 19 bp, Homo sapiens
  siRNA target sequence for ANK2 (NM_001148.2,9973-9991).
gagtatgagagttcagttt

SEQ ID NO: 286767 - DNA, 19 bp, Homo sapiens
  siRNA target sequence for ANK2 (NM_001148.2,9975-9993).
gtatgagagttcagtttct

SEQ ID NO: 286768 - DNA, 19 bp, Homo sapiens
  siRNA target sequence for ANK2 (NM_001148.2,10029-10047).
ggcggatgaagcaaaacca

SEQ ID NO: 286769 - DNA, 19 bp, Homo sapiens
  siRNA target sequence for ANK2 (NM_001148.2,10030-10048).
gcggatgaagcaaaaccaa

SEQ ID NO: 286770 - DNA, 19 bp, Homo sapiens
  siRNA target sequence for ANK2 (NM_001148.2,10031-10049).
cggatgaagcaaaaccaaa

SEQ ID NO: 286771 - DNA, 19 bp, Homo sapiens
  siRNA target sequence for ANK2 (NM_001148.2,10053-10071).
caaactccctgtcaaagta

SEQ ID NO: 286772 - DNA, 19 bp, Homo sapiens
  siRNA target sequence for ANK2 (NM_001148.2,10154-10172).
caagcatcgcaccagataa

SEQ ID NO: 286773 - DNA, 19 bp, Homo sapiens
  siRNA target sequence for ANK2 (NM_001148.2,10158-10176).
catcgcaccagataataga

SEQ ID NO: 286774 - DNA, 19 bp, Homo sapiens
  siRNA target sequence for ANK2 (NM_001148.2,10195-10213).
gctagttctttggattcaa

SEQ ID NO: 286775 - DNA, 19 bp, Homo sapiens
  siRNA target sequence for ANK2 (NM_001148.2,10274-10292).
gggccgaggaacttgagtt

SEQ ID NO: 286776 - DNA, 19 bp, Homo sapiens
  siRNA target sequence for ANK2 (NM_001148.2,10275-10293).
ggccgaggaacttgagtta

SEQ ID NO: 286777 - DNA, 19 bp, Homo sapiens
  siRNA target sequence for ANK2 (NM_001148.2,10277-10295).
ccgaggaacttgagttaga

SEQ ID NO: 286778 - DNA, 19 bp, Homo sapiens
  siRNA target sequence for ANK2 (NM_001148.2,10310-10328).
ccacaagaccaaagatact

SEQ ID NO: 286779 - DNA, 19 bp, Homo sapiens
  siRNA target sequence for ANK2 (NM_001148.2,10331-10349).
catcccgattgccagttaa

SEQ ID NO: 286780 - DNA, 19 bp, Homo sapiens
  siRNA target sequence for ANK2 (NM_001148.2,10350-10368).
gagcagaagcactacatct

SEQ ID NO: 286781 - DNA, 19 bp, Homo sapiens
  siRNA target sequence for ANK2 (NM_001148.2,10380-10398).
gggcacgagccccacaaaa

SEQ ID NO: 286782 - DNA, 19 bp, Homo sapiens
  siRNA target sequence for ANK2 (NM_001148.2,10382-10400).
gcacgagccccacaaaaga

SEQ ID NO: 286783 - DNA, 19 bp, Homo sapiens
  siRNA target sequence for ANK2 (NM_001148.2,10383-10401).
cacgagccccacaaaagaa

SEQ ID NO: 286784 - DNA, 19 bp, Homo sapiens
  siRNA target sequence for ANK2 (NM_001148.2,10541-10559).
gtgccctggaagtatcagt

SEQ ID NO: 286785 - DNA, 19 bp, Homo sapiens
  siRNA target sequence for ANK2 (NM_001148.2,10544-10562).
ccctggaagtatcagtaat

SEQ ID NO: 286786 - DNA, 19 bp, Homo sapiens
  siRNA target sequence for ANK2 (NM_001148.2,10625-10643).
ccatttgggatgagtctat

SEQ ID NO: 286787 - DNA, 19 bp, Homo sapiens
  siRNA target sequence for ANK2 (NM_001148.2,10640-10658).
ctattgagactctgattga

SEQ ID NO: 286788 - DNA, 19 bp, Homo sapiens
  siRNA target sequence for ANK2 (NM_001148.2,10657-10675).
gaacgcatccctgatgaaa

SEQ ID NO: 286789 - DNA, 19 bp, Homo sapiens
  siRNA target sequence for ANK2 (NM_001148.2,10723-10741).
gaggaaaggctggcttata

SEQ ID NO: 286790 - DNA, 19 bp, Homo sapiens
  siRNA target sequence for ANK2 (NM_001148.2,10918-10936).
gaatgtctcaccaagatca

SEQ ID NO: 286791 - DNA, 19 bp, Homo sapiens
  siRNA target sequence for ANK2 (NM_001148.2,10929-10947).
caagatcaaccgaatggat

SEQ ID NO: 286792 - DNA, 19 bp, Homo sapiens
  siRNA target sequence for ANK2 (NM_001148.2,10932-10950).
gatcaaccgaatggatatt

SEQ ID NO: 286793 - DNA, 19 bp, Homo sapiens
  siRNA target sequence for ANK2 (NM_001148.2,10938-10956).
ccgaatggatattgttcat

SEQ ID NO: 286794 - DNA, 19 bp, Homo sapiens
  siRNA target sequence for ANK2 (NM_001148.2,10984-11002).
caggagcgcatcagtcata

SEQ ID NO: 286795 - DNA, 19 bp, Homo sapiens
  siRNA target sequence for ANK2 (NM_001148.2,10989-11007).
gcgcatcagtcatagttat

SEQ ID NO: 286796 - DNA, 19 bp, Homo sapiens
  siRNA target sequence for ANK2 (NM_001148.2,11025-11043).
cattacactggatcatagt

SEQ ID NO: 286797 - DNA, 19 bp, Homo sapiens
  siRNA target sequence for ANK2 (NM_001148.2,11048-11066).
ggttctcggtacttcaaga

SEQ ID NO: 286798 - DNA, 19 bp, Homo sapiens
  siRNA target sequence for ANK2 (NM_001148.2,11059-11077).
cttcaagaggagttatgca

SEQ ID NO: 286799 - DNA, 19 bp, Homo sapiens
  siRNA target sequence for ANK2 (NM_001148.2,11190-11208).
ggatggcgtccccaaaact

SEQ ID NO: 286800 - DNA, 19 bp, Homo sapiens
  siRNA target sequence for ANK2 (NM_001148.2,11366-11384).
ctcagaaggctatgatagt

SEQ ID NO: 286801 - DNA, 19 bp, Homo sapiens
  siRNA target sequence for ANK2 (NM_001148.2,11481-11499).
ctctcccatcatacaagaa

SEQ ID NO: 286802 - DNA, 19 bp, Homo sapiens
  siRNA target sequence for ANK2 (NM_001148.2,11540-11558).
ggaaaaccagcctcgtaat

SEQ ID NO: 286803 - DNA, 19 bp, Homo sapiens
  siRNA target sequence for ANK2 (NM_001148.2,11541-11559).
gaaaaccagcctcgtaata

SEQ ID NO: 286804 - DNA, 19 bp, Homo sapiens
  siRNA target sequence for ANK2 (NM_001148.2,11582-11600).
ctgagacctgtgaaagact

SEQ ID NO: 286805 - DNA, 19 bp, Homo sapiens
  siRNA target sequence for ANK2 (NM_001148.2,11627-11645).
gagacgatatgcctgaaat

SEQ ID NO: 286806 - DNA, 19 bp, Homo sapiens
  siRNA target sequence for ANK2 (NM_001148.2,11709-11727).
ggttactaggaaaatcatt

SEQ ID NO: 286807 - DNA, 19 bp, Homo sapiens
  siRNA target sequence for ANK2 (NM_001148.2,11815-11833).
gatggctattccaaagtta

SEQ ID NO: 286808 - DNA, 19 bp, Homo sapiens
  siRNA target sequence for ANK2 (NM_001148.2,11818-11836).
ggctattccaaagttataa

SEQ ID NO: 286809 - DNA, 19 bp, Homo sapiens
  siRNA target sequence for ANK2 (NM_001148.2,11830-11848).
gttataaagcgtgttgtat

SEQ ID NO: 286810 - DNA, 19 bp, Homo sapiens
  siRNA target sequence for ARPC1B (NM_005720.2,176-194).
ccatgaggtgcatatctat

SEQ ID NO: 286811 - DNA, 19 bp, Homo sapiens
  siRNA target sequence for ARPC1B (NM_005720.2,183-201).
gtgcatatctatgaaaaga

SEQ ID NO: 286812 - DNA, 19 bp, Homo sapiens
  siRNA target sequence for ARPC1B (NM_005720.2,274-292).
ccgagagtaaccgtattgt

SEQ ID NO: 286813 - DNA, 19 bp, Homo sapiens
  siRNA target sequence for ARPC1B (NM_005720.2,276-294).
gagagtaaccgtattgtga

SEQ ID NO: 286814 - DNA, 19 bp, Homo sapiens
  siRNA target sequence for ARPC1B (NM_005720.2,441-459).
cgtgtgatctccatctgtt

SEQ ID NO: 286815 - DNA, 19 bp, Homo sapiens
  siRNA target sequence for ARPC1B (NM_005720.2,442-460).
gtgtgatctccatctgtta

SEQ ID NO: 286816 - DNA, 19 bp, Homo sapiens
  siRNA target sequence for ARPC1B (NM_005720.2,533-551).
ggactggcaccccaacaat

SEQ ID NO: 286817 - DNA, 19 bp, Homo sapiens
  siRNA target sequence for ARPC1B (NM_005720.2,567-585).
ggctcctgtgacttcaagt

SEQ ID NO: 286818 - DNA, 19 bp, Homo sapiens
  siRNA target sequence for ARPC1B (NM_005720.2,581-599).
caagtgtcggatcttttca

SEQ ID NO: 286819 - DNA, 19 bp, Homo sapiens
  siRNA target sequence for ARPC1B (NM_005720.2,663-681).
ggggaactgatgttcgaat

SEQ ID NO: 286820 - DNA, 19 bp, Homo sapiens
  siRNA target sequence for ARPC1B (NM_005720.2,700-718).
gggtacatggcgtctgttt

SEQ ID NO: 286821 - DNA, 19 bp, Homo sapiens
  siRNA target sequence for ARPC1B (NM_005720.2,1053-1071).
gactcgctgcacaagaaca

SEQ ID NO: 286822 - DNA, 19 bp, Homo sapiens
  siRNA target sequence for ARPC1B (NM_005720.2,1140-1158).
gatggcggcatgagtatct

SEQ ID NO: 286823 - DNA, 19 bp, Homo sapiens
  siRNA target sequence for ARPC2 (NM_005731.2,152-170).
caaaccggaagcagtagaa

SEQ ID NO: 286824 - DNA, 19 bp, Homo sapiens
  siRNA target sequence for ARPC2 (NM_005731.2,156-174).
ccggaagcagtagaagtaa

SEQ ID NO: 286825 - DNA, 19 bp, Homo sapiens
  siRNA target sequence for ARPC2 (NM_005731.2,188-206).
cgatggggtcctctatcat

SEQ ID NO: 286826 - DNA, 19 bp, Homo sapiens
  siRNA target sequence for ARPC2 (NM_005731.2,195-213).
gtcctctatcatatttcaa

SEQ ID NO: 286827 - DNA, 19 bp, Homo sapiens
  siRNA target sequence for ARPC2 (NM_005731.2,197-215).
cctctatcatatttcaaat

SEQ ID NO: 286828 - DNA, 19 bp, Homo sapiens
  siRNA target sequence for ARPC2 (NM_005731.2,216-234).
cctaatggagacaaaacaa

SEQ ID NO: 286829 - DNA, 19 bp, Homo sapiens
  siRNA target sequence for ARPC2 (NM_005731.2,280-298).
cacatggtgctgatgagtt

SEQ ID NO: 286830 - DNA, 19 bp, Homo sapiens
  siRNA target sequence for ARPC2 (NM_005731.2,282-300).
catggtgctgatgagttat

SEQ ID NO: 286831 - DNA, 19 bp, Homo sapiens
  siRNA target sequence for ARPC2 (NM_005731.2,314-332).
cgggagtttcttggtaaat

SEQ ID NO: 286832 - DNA, 19 bp, Homo sapiens
  siRNA target sequence for ARPC2 (NM_005731.2,317-335).
gagtttcttggtaaatcca

SEQ ID NO: 286833 - DNA, 19 bp, Homo sapiens
  siRNA target sequence for ARPC2 (NM_005731.2,336-354).
gaatcaggatacaatgtct

SEQ ID NO: 286834 - DNA, 19 bp, Homo sapiens
  siRNA target sequence for ARPC2 (NM_005731.2,359-377).
gctatatgaccttgaaaat

SEQ ID NO: 286835 - DNA, 19 bp, Homo sapiens
  siRNA target sequence for ARPC2 (NM_005731.2,414-432).
ggcatgttgaagcgaaatt

SEQ ID NO: 286836 - DNA, 19 bp, Homo sapiens
  siRNA target sequence for ARPC2 (NM_005731.2,487-505).
gagagaacagggcagttat

SEQ ID NO: 286837 - DNA, 19 bp, Homo sapiens
  siRNA target sequence for ARPC2 (NM_005731.2,657-675).
gccccacaggtcctcttta

SEQ ID NO: 286838 - DNA, 19 bp, Homo sapiens
  siRNA target sequence for ARPC2 (NM_005731.2,715-733).
ccgctgtgggtgacaacat

SEQ ID NO: 286839 - DNA, 19 bp, Homo sapiens
  siRNA target sequence for ARPC2 (NM_005731.2,716-734).
cgctgtgggtgacaacatt

SEQ ID NO: 286840 - DNA, 19 bp, Homo sapiens
  siRNA target sequence for ARPC2 (NM_005731.2,731-749).
cattggctacattaccttt

SEQ ID NO: 286841 - DNA, 19 bp, Homo sapiens
  siRNA target sequence for ARPC2 (NM_005731.2,842-860).
gtgctctaaggcctatatt

SEQ ID NO: 286842 - DNA, 19 bp, Homo sapiens
  siRNA target sequence for ARPC2 (NM_005731.2,844-862).
gctctaaggcctatattca

SEQ ID NO: 286843 - DNA, 19 bp, Homo sapiens
  siRNA target sequence for ARPC2 (NM_005731.2,950-968).
cacggggaagacgttttca

SEQ ID NO: 286844 - DNA, 19 bp, Homo sapiens
  siRNA target sequence for ARPC3 (NM_005719.2,291-309).
gaccttgatatatataact

SEQ ID NO: 286845 - DNA, 19 bp, Homo sapiens
  siRNA target sequence for ARPC4 (NM_005718.2,285-303).
ggtcagcattgctgtgaaa

SEQ ID NO: 286846 - DNA, 19 bp, Homo sapiens
  siRNA target sequence for ARPC4 (NM_005718.2,313-331).
gagatcgagaagattttgt

SEQ ID NO: 286847 - DNA, 19 bp, Homo sapiens
  siRNA target sequence for ARPC4 (NM_005718.2,360-378).
gcgagcagagaacttcttt

SEQ ID NO: 286848 - DNA, 19 bp, Homo sapiens
  siRNA target sequence for ARPC4 (NM_005718.2,361-379).
cgagcagagaacttcttta

SEQ ID NO: 286849 - DNA, 19 bp, Homo sapiens
  siRNA target sequence for ARPC4 (NM_005718.2,394-412).
cctgtggaggggtatgata

SEQ ID NO: 286850 - DNA, 19 bp, Homo sapiens
  siRNA target sequence for ARPC4 (NM_005718.2,395-413).
ctgtggaggggtatgatat

SEQ ID NO: 286851 - DNA, 19 bp, Homo sapiens
  siRNA target sequence for ARPC4 (NM_005718.2,516-534).
gatgaagctgtcagtcaat

SEQ ID NO: 286852 - DNA, 19 bp, Homo sapiens
  siRNA target sequence for ARPC5 (NM_005717.2,437-455).
gctcatctcttttaaagct

SEQ ID NO: 286853 - DNA, 19 bp, Homo sapiens
  siRNA target sequence for ARPC5 (NM_005717.2,495-513).
ggtgtggatctcctaatga

SEQ ID NO: 286854 - DNA, 19 bp, Homo sapiens
  siRNA target sequence for ARPC5 (NM_005717.2,496-514).
gtgtggatctcctaatgaa

SEQ ID NO: 286855 - DNA, 19 bp, Homo sapiens
  siRNA target sequence for ARPC5 (NM_005717.2,498-516).
gtggatctcctaatgaagt

SEQ ID NO: 286856 - DNA, 19 bp, Homo sapiens
  siRNA target sequence for ARPC5 (NM_005717.2,534-552).
gagagcccgtctgacaata

SEQ ID NO: 286857 - DNA, 19 bp, Homo sapiens
  siRNA target sequence for ARPC5 (NM_005717.2,548-566).
caatagcagtgctatgtta

SEQ ID NO: 286858 - DNA, 19 bp, Homo sapiens
  siRNA target sequence for ARPM1 (NM_032487.2,460-478).
gtttatctacccgaacatt

SEQ ID NO: 286859 - DNA, 19 bp, Homo sapiens
  siRNA target sequence for ARPM1 (NM_032487.2,561-579).
gctcgctgttcatcagtta

SEQ ID NO: 286860 - DNA, 19 bp, Homo sapiens
  siRNA target sequence for ARPM1 (NM_032487.2,586-604).
ggagcgtggtctcattact

SEQ ID NO: 286861 - DNA, 19 bp, Homo sapiens
  siRNA target sequence for ARPM1 (NM_032487.2,587-605).
gagcgtggtctcattactt

SEQ ID NO: 286862 - DNA, 19 bp, Homo sapiens
  siRNA target sequence for ARPM1 (NM_032487.2,589-607).
gcgtggtctcattacttca

SEQ ID NO: 286863 - DNA, 19 bp, Homo sapiens
  siRNA target sequence for ARPM1 (NM_032487.2,590-608).
cgtggtctcattacttcat

SEQ ID NO: 286864 - DNA, 19 bp, Homo sapiens
  siRNA target sequence for ARPM1 (NM_032487.2,630-648).
ggaagcatatctatgacta

SEQ ID NO: 286865 - DNA, 19 bp, Homo sapiens
  siRNA target sequence for ARPM1 (NM_032487.2,675-693).
gcccagtcttgattactga

SEQ ID NO: 286866 - DNA, 19 bp, Homo sapiens
  siRNA target sequence for ARPM1 (NM_032487.2,725-743).
cagatcacggaaatgtttt

SEQ ID NO: 286867 - DNA, 19 bp, Homo sapiens
  siRNA target sequence for ARPM1 (NM_032487.2,755-773).
ggtgttcctgccttctata

SEQ ID NO: 286868 - DNA, 19 bp, Homo sapiens
  siRNA target sequence for ARPM1 (NM_032487.2,756-774).
gtgttcctgccttctatat

SEQ ID NO: 286869 - DNA, 19 bp, Homo sapiens
  siRNA target sequence for ARPM1 (NM_032487.2,978-996).
gtgcttcagacagaaagat

SEQ ID NO: 286870 - DNA, 19 bp, Homo sapiens
  siRNA target sequence for ARPM1 (NM_032487.2,1023-1041).
gttatgtggcaatgaacta

SEQ ID NO: 286871 - DNA, 19 bp, Homo sapiens
  siRNA target sequence for ARPM1 (NM_032487.2,1057-1075).
caagaaacccgattgtcta

SEQ ID NO: 286872 - DNA, 19 bp, Homo sapiens
  siRNA target sequence for ARPM1 (NM_032487.2,1065-1083).
ccgattgtctagagaaagt

SEQ ID NO: 286873 - DNA, 19 bp, Homo sapiens
  siRNA target sequence for ARPM1 (NM_032487.2,1066-1084).
cgattgtctagagaaagtt

SEQ ID NO: 286874 - DNA, 19 bp, Homo sapiens
  siRNA target sequence for ARPM1 (NM_032487.2,1175-1193).
gaggcccctggcattgata

SEQ ID NO: 286875 - DNA, 19 bp, Homo sapiens
  siRNA target sequence for ARPM1 (NM_032487.2,1184-1202).
ggcattgataagatatgct

SEQ ID NO: 286876 - DNA, 19 bp, Homo sapiens
  siRNA target sequence for ARPM1 (NM_032487.2,1297-1315).
caagcggttagttaaggat

SEQ ID NO: 286877 - DNA, 19 bp, Homo sapiens
  siRNA target sequence for ARPM1 (NM_032487.2,1300-1318).
gcggttagttaaggatata

SEQ ID NO: 286878 - DNA, 19 bp, Homo sapiens
  siRNA target sequence for ARPM1 (NM_032487.2,1303-1321).
gttagttaaggatatagca

SEQ ID NO: 286879 - DNA, 19 bp, Homo sapiens
  siRNA target sequence for ARPM1 (NM_032487.2,1339-1357).
caccgctgtgcaagttata

SEQ ID NO: 286880 - DNA, 19 bp, Homo sapiens
  siRNA target sequence for ARPM1 (NM_032487.2,1435-1453).
gatcactgctgcagaattt

SEQ ID NO: 286881 - DNA, 19 bp, Homo sapiens
  siRNA target sequence for ARPM2 (NM_080431.3,817-835).
gtctcgtggacgacatcaa

SEQ ID NO: 286882 - DNA, 19 bp, Homo sapiens
  siRNA target sequence for ARPM2 (NM_080431.3,819-837).
ctcgtggacgacatcaaaa

SEQ ID NO: 286883 - DNA, 19 bp, Homo sapiens
  siRNA target sequence for ARPM2 (NM_080431.3,915-933).
ctgcccgacgggaacatca

SEQ ID NO: 286884 - DNA, 19 bp, Homo sapiens
  siRNA target sequence for ARPM2 (NM_080431.3,918-936).
cccgacgggaacatcatca

SEQ ID NO: 286885 - DNA, 19 bp, Homo sapiens
  siRNA target sequence for BFSP1 (NM_001195.2,363-381).
cgagttccgaagcaagtat

SEQ ID NO: 286886 - DNA, 19 bp, Homo sapiens
  siRNA target sequence for BFSP1 (NM_001195.2,486-504).
ccaatttctgcaagatgat

SEQ ID NO: 286887 - DNA, 19 bp, Homo sapiens
  siRNA target sequence for BFSP1 (NM_001195.2,541-559).
ctggaagttcagacctata

SEQ ID NO: 286888 - DNA, 19 bp, Homo sapiens
  siRNA target sequence for BFSP1 (NM_001195.2,726-744).
gcaggcacagacaacaact

SEQ ID NO: 286889 - DNA, 19 bp, Homo sapiens
  siRNA target sequence for BFSP1 (NM_001195.2,740-758).
caactctggaacaagctat

SEQ ID NO: 286890 - DNA, 19 bp, Homo sapiens
  siRNA target sequence for BFSP1 (NM_001195.2,743-761).
ctctggaacaagctattaa

SEQ ID NO: 286891 - DNA, 19 bp, Homo sapiens
  siRNA target sequence for BFSP1 (NM_001195.2,774-792).
gtgttatgacgatgagatt

SEQ ID NO: 286892 - DNA, 19 bp, Homo sapiens
  siRNA target sequence for BFSP1 (NM_001195.2,776-794).
gttatgacgatgagattca

SEQ ID NO: 286893 - DNA, 19 bp, Homo sapiens
  siRNA target sequence for BFSP1 (NM_001195.2,1028-1046).
gatccggtgggaaagatct

SEQ ID NO: 286894 - DNA, 19 bp, Homo sapiens
  siRNA target sequence for BFSP1 (NM_001195.2,1162-1180).
gatgcaccattaaaaggtt

SEQ ID NO: 286895 - DNA, 19 bp, Homo sapiens
  siRNA target sequence for BFSP1 (NM_001195.2,1195-1213).
ctggtacaggtggtactta

SEQ ID NO: 286896 - DNA, 19 bp, Homo sapiens
  siRNA target sequence for BFSP1 (NM_001195.2,1197-1215).
ggtacaggtggtacttaaa

SEQ ID NO: 286897 - DNA, 19 bp, Homo sapiens
  siRNA target sequence for BFSP1 (NM_001195.2,1216-1234).
gaggaaagtgaatctaagt

SEQ ID NO: 286898 - DNA, 19 bp, Homo sapiens
  siRNA target sequence for BFSP1 (NM_001195.2,1218-1236).
ggaaagtgaatctaagttt

SEQ ID NO: 286899 - DNA, 19 bp, Homo sapiens
  siRNA target sequence for BFSP1 (NM_001195.2,1297-1315).
gatggagggcagataagca

SEQ ID NO: 286900 - DNA, 19 bp, Homo sapiens
  siRNA target sequence for BFSP1 (NM_001195.2,1318-1336).
ggctttgggaaactataca

SEQ ID NO: 286901 - DNA, 19 bp, Homo sapiens
  siRNA target sequence for BFSP1 (NM_001195.2,1437-1455).
cgtggaccctagattctat

SEQ ID NO: 286902 - DNA, 19 bp, Homo sapiens
  siRNA target sequence for BFSP1 (NM_001195.2,1441-1459).
gaccctagattctatgtct

SEQ ID NO: 286903 - DNA, 19 bp, Homo sapiens
  siRNA target sequence for BFSP1 (NM_001195.2,1461-1479).
ctccatcacagctaaaggt

SEQ ID NO: 286904 - DNA, 19 bp, Homo sapiens
  siRNA target sequence for BFSP1 (NM_001195.2,1499-1517).
cggaagactctgtgcttta

SEQ ID NO: 286905 - DNA, 19 bp, Homo sapiens
  siRNA target sequence for BFSP1 (NM_001195.2,1500-1518).
ggaagactctgtgctttat

SEQ ID NO: 286906 - DNA, 19 bp, Homo sapiens
  siRNA target sequence for BFSP1 (NM_001195.2,1547-1565).
cacccaagccccctttaga

SEQ ID NO: 286907 - DNA, 19 bp, Homo sapiens
  siRNA target sequence for BFSP1 (NM_001195.2,1549-1567).
cccaagccccctttagaga

SEQ ID NO: 286908 - DNA, 19 bp, Homo sapiens
  siRNA target sequence for BFSP1 (NM_001195.2,1550-1568).
ccaagccccctttagagaa

SEQ ID NO: 286909 - DNA, 19 bp, Homo sapiens
  siRNA target sequence for BFSP1 (NM_001195.2,1551-1569).
caagccccctttagagaat

SEQ ID NO: 286910 - DNA, 19 bp, Homo sapiens
  siRNA target sequence for BFSP1 (NM_001195.2,1612-1630).
gaccagcagcctatagaca

SEQ ID NO: 286911 - DNA, 19 bp, Homo sapiens
  siRNA target sequence for BFSP1 (NM_001195.2,1841-1859).
ccaaggctttggcctataa

SEQ ID NO: 286912 - DNA, 19 bp, Homo sapiens
  siRNA target sequence for BFSP1 (NM_001195.2,1845-1863).
ggctttggcctataagaca

SEQ ID NO: 286913 - DNA, 19 bp, Homo sapiens
  siRNA target sequence for BFSP1 (NM_001195.2,1899-1917).
ggagagcattcagacatat

SEQ ID NO: 286914 - DNA, 19 bp, Homo sapiens
  siRNA target sequence for BFSP1 (NM_001195.2,1932-1950).
gatcgtggagaccatgatt

SEQ ID NO: 286915 - DNA, 19 bp, Homo sapiens
  siRNA target sequence for BFSP1 (NM_001195.2,1936-1954).
gtggagaccatgattggaa

SEQ ID NO: 286916 - DNA, 19 bp, Homo sapiens
  siRNA target sequence for BFSP2 (NM_003571.2,475-493).
ggctgcctggtggaatata

SEQ ID NO: 286917 - DNA, 19 bp, Homo sapiens
  siRNA target sequence for BFSP2 (NM_003571.2,685-703).
gccggagcagatgacttta

SEQ ID NO: 286918 - DNA, 19 bp, Homo sapiens
  siRNA target sequence for BFSP2 (NM_003571.2,687-705).
cggagcagatgactttaaa

SEQ ID NO: 286919 - DNA, 19 bp, Homo sapiens
  siRNA target sequence for BFSP2 (NM_003571.2,751-769).
gaaattaactctctgtata

SEQ ID NO: 286920 - DNA, 19 bp, Homo sapiens
  siRNA target sequence for BFSP2 (NM_003571.2,761-779).
ctctgtataaagtcattga

SEQ ID NO: 286921 - DNA, 19 bp, Homo sapiens
  siRNA target sequence for BFSP2 (NM_003571.2,772-790).
gtcattgatgaggctaatt

SEQ ID NO: 286922 - DNA, 19 bp, Homo sapiens
  siRNA target sequence for BFSP2 (NM_003571.2,807-825).
ggagagtcaaatagaaagt

SEQ ID NO: 286923 - DNA, 19 bp, Homo sapiens
  siRNA target sequence for BFSP2 (NM_003571.2,832-850).
gaagaacttggctctctat

SEQ ID NO: 286924 - DNA, 19 bp, Homo sapiens
  siRNA target sequence for BFSP2 (NM_003571.2,838-856).
cttggctctctatcaagaa

SEQ ID NO: 286925 - DNA, 19 bp, Homo sapiens
  siRNA target sequence for BFSP2 (NM_003571.2,841-859).
ggctctctatcaagaaact

SEQ ID NO: 286926 - DNA, 19 bp, Homo sapiens
  siRNA target sequence for BFSP2 (NM_003571.2,842-860).
gctctctatcaagaaacta

SEQ ID NO: 286927 - DNA, 19 bp, Homo sapiens
  siRNA target sequence for BFSP2 (NM_003571.2,843-861).
ctctctatcaagaaactat

SEQ ID NO: 286928 - DNA, 19 bp, Homo sapiens
  siRNA target sequence for BFSP2 (NM_003571.2,845-863).
ctctatcaagaaactatga

SEQ ID NO: 286929 - DNA, 19 bp, Homo sapiens
  siRNA target sequence for BFSP2 (NM_003571.2,955-973).
gagacgatcagaattcagt

SEQ ID NO: 286930 - DNA, 19 bp, Homo sapiens
  siRNA target sequence for BFSP2 (NM_003571.2,1014-1032).
cctgctccaagctaagcaa

SEQ ID NO: 286931 - DNA, 19 bp, Homo sapiens
  siRNA target sequence for BFSP2 (NM_003571.2,1093-1111).
gtggagttacacaacactt

SEQ ID NO: 286932 - DNA, 19 bp, Homo sapiens
  siRNA target sequence for CD2AP (NM_012120.1,189-207).
ggaatgttccctgacaatt

SEQ ID NO: 286933 - DNA, 19 bp, Homo sapiens
  siRNA target sequence for CD2AP (NM_012120.1,286-304).
caagtcttgtacaacgaat

SEQ ID NO: 286934 - DNA, 19 bp, Homo sapiens
  siRNA target sequence for CD2AP (NM_012120.1,291-309).
cttgtacaacgaataagca

SEQ ID NO: 286935 - DNA, 19 bp, Homo sapiens
  siRNA target sequence for CD2AP (NM_012120.1,373-391).
ccaagaagcgtcagtgtaa

SEQ ID NO: 286936 - DNA, 19 bp, Homo sapiens
  siRNA target sequence for CD2AP (NM_012120.1,380-398).
gcgtcagtgtaaagttctt

SEQ ID NO: 286937 - DNA, 19 bp, Homo sapiens
  siRNA target sequence for CD2AP (NM_012120.1,382-400).
gtcagtgtaaagttctttt

SEQ ID NO: 286938 - DNA, 19 bp, Homo sapiens
  siRNA target sequence for CD2AP (NM_012120.1,444-462).
ggagatattattgatatta

SEQ ID NO: 286939 - DNA, 19 bp, Homo sapiens
  siRNA target sequence for CD2AP (NM_012120.1,487-505).
ggagtggaaccctgaataa

SEQ ID NO: 286940 - DNA, 19 bp, Homo sapiens
  siRNA target sequence for CD2AP (NM_012120.1,492-510).
ggaaccctgaataacaagt

SEQ ID NO: 286941 - DNA, 19 bp, Homo sapiens
  siRNA target sequence for CD2AP (NM_012120.1,493-511).
gaaccctgaataacaagtt

SEQ ID NO: 286942 - DNA, 19 bp, Homo sapiens
  siRNA target sequence for CD2AP (NM_012120.1,723-741).
gtgaaacttcggacaagaa

SEQ ID NO: 286943 - DNA, 19 bp, Homo sapiens
  siRNA target sequence for CD2AP (NM_012120.1,742-760).
catccagtagtgaaacaga

SEQ ID NO: 286944 - DNA, 19 bp, Homo sapiens
  siRNA target sequence for CD2AP (NM_012120.1,837-855).
gataccgaaggtaaaatta

SEQ ID NO: 286945 - DNA, 19 bp, Homo sapiens
  siRNA target sequence for CD2AP (NM_012120.1,842-860).
cgaaggtaaaattaaagct

SEQ ID NO: 286946 - DNA, 19 bp, Homo sapiens
  siRNA target sequence for CD2AP (NM_012120.1,886-904).
cctatgaaggtactaatga

SEQ ID NO: 286947 - DNA, 19 bp, Homo sapiens
  siRNA target sequence for CD2AP (NM_012120.1,895-913).
gtactaatgaagatgaact

SEQ ID NO: 286948 - DNA, 19 bp, Homo sapiens
  siRNA target sequence for CD2AP (NM_012120.1,924-942).
gagggggagataatccatt

SEQ ID NO: 286949 - DNA, 19 bp, Homo sapiens
  siRNA target sequence for CD2AP (NM_012120.1,932-950).
gataatccatttgataagt

SEQ ID NO: 286950 - DNA, 19 bp, Homo sapiens
  siRNA target sequence for CD2AP (NM_012120.1,973-991).
ggtggaggggcgaacttaa

SEQ ID NO: 286951 - DNA, 19 bp, Homo sapiens
  siRNA target sequence for CD2AP (NM_012120.1,974-992).
gtggaggggcgaacttaat

SEQ ID NO: 286952 - DNA, 19 bp, Homo sapiens
  siRNA target sequence for CD2AP (NM_012120.1,977-995).
gaggggcgaacttaatggt

SEQ ID NO: 286953 - DNA, 19 bp, Homo sapiens
  siRNA target sequence for CD2AP (NM_012120.1,979-997).
ggggcgaacttaatggtaa

SEQ ID NO: 286954 - DNA, 19 bp, Homo sapiens
  siRNA target sequence for CD2AP (NM_012120.1,980-998).
gggcgaacttaatggtaaa

SEQ ID NO: 286955 - DNA, 19 bp, Homo sapiens
  siRNA target sequence for CD2AP (NM_012120.1,982-1000).
gcgaacttaatggtaaaga

SEQ ID NO: 286956 - DNA, 19 bp, Homo sapiens
  siRNA target sequence for CD2AP (NM_012120.1,983-1001).
cgaacttaatggtaaagaa

SEQ ID NO: 286957 - DNA, 19 bp, Homo sapiens
  siRNA target sequence for CD2AP (NM_012120.1,1041-1059).
cttgataaagactttccaa

SEQ ID NO: 286958 - DNA, 19 bp, Homo sapiens
  siRNA target sequence for CD2AP (NM_012120.1,1096-1114).
ctccaaagcctgaactgat

SEQ ID NO: 286959 - DNA, 19 bp, Homo sapiens
  siRNA target sequence for CD2AP (NM_012120.1,1175-1193).
ggaacagaaaccttctaaa

SEQ ID NO: 286960 - DNA, 19 bp, Homo sapiens
  siRNA target sequence for CD2AP (NM_012120.1,1233-1251).
cctaccaaagccagtaatt

SEQ ID NO: 286961 - DNA, 19 bp, Homo sapiens
  siRNA target sequence for CD2AP (NM_012120.1,1277-1295).
cccaaagcgacctgaaaaa

SEQ ID NO: 286962 - DNA, 19 bp, Homo sapiens
  siRNA target sequence for CD2AP (NM_012120.1,1312-1330).
ctcctatagccaagattaa

SEQ ID NO: 286963 - DNA, 19 bp, Homo sapiens
  siRNA target sequence for CD2AP (NM_012120.1,1325-1343).
gattaatggggaagtttct

SEQ ID NO: 286964 - DNA, 19 bp, Homo sapiens
  siRNA target sequence for CD2AP (NM_012120.1,1362-1380).
gaaactgagccagtatcaa

SEQ ID NO: 286965 - DNA, 19 bp, Homo sapiens
  siRNA target sequence for CD2AP (NM_012120.1,1368-1386).
gagccagtatcaaaactaa

SEQ ID NO: 286966 - DNA, 19 bp, Homo sapiens
  siRNA target sequence for CD2AP (NM_012120.1,1372-1390).
cagtatcaaaactaaagct

SEQ ID NO: 286967 - DNA, 19 bp, Homo sapiens
  siRNA target sequence for CD2AP (NM_012120.1,1406-1424).
gccccttagaccaaaatca

SEQ ID NO: 286968 - DNA, 19 bp, Homo sapiens
  siRNA target sequence for CD2AP (NM_012120.1,1408-1426).
cccttagaccaaaatcagt

SEQ ID NO: 286969 - DNA, 19 bp, Homo sapiens
  siRNA target sequence for CD2AP (NM_012120.1,1423-1441).
cagtagactttgattcact

SEQ ID NO: 286970 - DNA, 19 bp, Homo sapiens
  siRNA target sequence for CD2AP (NM_012120.1,1450-1468).
ggacctccaaagaaacaga

SEQ ID NO: 286971 - DNA, 19 bp, Homo sapiens
  siRNA target sequence for CD2AP (NM_012120.1,1508-1526).
gcttcatctcactgcaaat

SEQ ID NO: 286972 - DNA, 19 bp, Homo sapiens
  siRNA target sequence for CD2AP (NM_012120.1,1591-1609).
gccccgaaaaaatcttgaa

SEQ ID NO: 286973 - DNA, 19 bp, Homo sapiens
  siRNA target sequence for CD2AP (NM_012120.1,1593-1611).
cccgaaaaaatcttgaagt

SEQ ID NO: 286974 - DNA, 19 bp, Homo sapiens
  siRNA target sequence for CD2AP (NM_012120.1,1735-1753).
ctttcctgactccattaga

SEQ ID NO: 286975 - DNA, 19 bp, Homo sapiens
  siRNA target sequence for CD2AP (NM_012120.1,1810-1828).
gagcccagattattgaatt

SEQ ID NO: 286976 - DNA, 19 bp, Homo sapiens
  siRNA target sequence for CD2AP (NM_012120.1,1812-1830).
gcccagattattgaattgt

SEQ ID NO: 286977 - DNA, 19 bp, Homo sapiens
  siRNA target sequence for CD2AP (NM_012120.1,1907-1925).
gacaatgagaagtaatcta

SEQ ID NO: 286978 - DNA, 19 bp, Homo sapiens
  siRNA target sequence for CD2AP (NM_012120.1,1909-1927).
caatgagaagtaatctaga

SEQ ID NO: 286979 - DNA, 19 bp, Homo sapiens
  siRNA target sequence for CD2AP (NM_012120.1,1918-1936).
gtaatctagagatggaaat

SEQ ID NO: 286980 - DNA, 19 bp, Homo sapiens
  siRNA target sequence for CTNNA2 (NM_004389.1,66-84).
ggaccccaaaagtttggaa

SEQ ID NO: 286981 - DNA, 19 bp, Homo sapiens
  siRNA target sequence for CTNNA2 (NM_004389.1,163-181).
ggcccatctggtaaaaaga

SEQ ID NO: 286982 - DNA, 19 bp, Homo sapiens
  siRNA target sequence for CTNNA2 (NM_004389.1,264-282).
cgctaaggagagtcaagat

SEQ ID NO: 286983 - DNA, 19 bp, Homo sapiens
  siRNA target sequence for CTNNA2 (NM_004389.1,270-288).
ggagagtcaagatctcaaa

SEQ ID NO: 286984 - DNA, 19 bp, Homo sapiens
  siRNA target sequence for CTNNA2 (NM_004389.1,273-291).
gagtcaagatctcaaagaa

SEQ ID NO: 286985 - DNA, 19 bp, Homo sapiens
  siRNA target sequence for CTNNA2 (NM_004389.1,428-446).
cggtgacacgcttactcat

SEQ ID NO: 286986 - DNA, 19 bp, Homo sapiens
  siRNA target sequence for CTNNA2 (NM_004389.1,511-529).
gaagctgtcaaaaatgcta

SEQ ID NO: 286987 - DNA, 19 bp, Homo sapiens
  siRNA target sequence for CTNNA2 (NM_004389.1,693-711).
cacggcctctcaagcattt

SEQ ID NO: 286988 - DNA, 19 bp, Homo sapiens
  siRNA target sequence for CTNNA2 (NM_004389.1,695-713).
cggcctctcaagcatttct

SEQ ID NO: 286989 - DNA, 19 bp, Homo sapiens
  siRNA target sequence for CTNNA2 (NM_004389.1,737-755).
cgagagccaaccgagatta

SEQ ID NO: 286990 - DNA, 19 bp, Homo sapiens
  siRNA target sequence for CTNNA2 (NM_004389.1,738-756).
gagagccaaccgagattat

SEQ ID NO: 286991 - DNA, 19 bp, Homo sapiens
  siRNA target sequence for CTNNA2 (NM_004389.1,742-760).
gccaaccgagattatgtgt

SEQ ID NO: 286992 - DNA, 19 bp, Homo sapiens
  siRNA target sequence for CTNNA2 (NM_004389.1,743-761).
ccaaccgagattatgtgtt

SEQ ID NO: 286993 - DNA, 19 bp, Homo sapiens
  siRNA target sequence for CTNNA2 (NM_004389.1,747-765).
ccgagattatgtgttcaaa

SEQ ID NO: 286994 - DNA, 19 bp, Homo sapiens
  siRNA target sequence for CTNNA2 (NM_004389.1,859-877).
gctgcggctcttaatgagt

SEQ ID NO: 286995 - DNA, 19 bp, Homo sapiens
  siRNA target sequence for CTNNA2 (NM_004389.1,860-878).
ctgcggctcttaatgagtt

SEQ ID NO: 286996 - DNA, 19 bp, Homo sapiens
  siRNA target sequence for CTNNA2 (NM_004389.1,863-881).
cggctcttaatgagtttga

SEQ ID NO: 286997 - DNA, 19 bp, Homo sapiens
  siRNA target sequence for CTNNA2 (NM_004389.1,865-883).
gctcttaatgagtttgaca

SEQ ID NO: 286998 - DNA, 19 bp, Homo sapiens
  siRNA target sequence for CTNNA2 (NM_004389.1,1063-1081).
ctgctcagcgagtacatga

SEQ ID NO: 286999 - DNA, 19 bp, Homo sapiens
  siRNA target sequence for CTNNA2 (NM_004389.1,1066-1084).
ctcagcgagtacatgaata

SEQ ID NO: 287000 - DNA, 19 bp, Homo sapiens
  siRNA target sequence for CTNNA2 (NM_004389.1,1071-1089).
cgagtacatgaataatact

SEQ ID NO: 287001 - DNA, 19 bp, Homo sapiens
  siRNA target sequence for CTNNA2 (NM_004389.1,1114-1132).
ctcaacattgcgattgata

SEQ ID NO: 287002 - DNA, 19 bp, Homo sapiens
  siRNA target sequence for CTNNA2 (NM_004389.1,1123-1141).
gcgattgataagatgacta

SEQ ID NO: 287003 - DNA, 19 bp, Homo sapiens
  siRNA target sequence for CTNNA2 (NM_004389.1,1177-1195).
gcagtgatggatcacatat

SEQ ID NO: 287004 - DNA, 19 bp, Homo sapiens
  siRNA target sequence for CTNNA2 (NM_004389.1,1223-1241).
ctttgctagttctcattga

SEQ ID NO: 287005 - DNA, 19 bp, Homo sapiens
  siRNA target sequence for CTNNA2 (NM_004389.1,1404-1422).
gtgtccccaggtcatcaat

SEQ ID NO: 287006 - DNA, 19 bp, Homo sapiens
  siRNA target sequence for CTNNA2 (NM_004389.1,1454-1472).
gcaaagttgctcaggataa

SEQ ID NO: 287007 - DNA, 19 bp, Homo sapiens
  siRNA target sequence for CTNNA2 (NM_004389.1,1667-1685).
gggcagctcgagtcataca

SEQ ID NO: 287008 - DNA, 19 bp, Homo sapiens
  siRNA target sequence for CTNNA2 (NM_004389.1,1669-1687).
gcagctcgagtcatacaca

SEQ ID NO: 287009 - DNA, 19 bp, Homo sapiens
  siRNA target sequence for CTNNA2 (NM_004389.1,1670-1688).
cagctcgagtcatacacat

SEQ ID NO: 287010 - DNA, 19 bp, Homo sapiens
  siRNA target sequence for CTNNA2 (NM_004389.1,1737-1755).
ggtgttggaagctacaaaa

SEQ ID NO: 287011 - DNA, 19 bp, Homo sapiens
  siRNA target sequence for CTNNA2 (NM_004389.1,1743-1761).
ggaagctacaaaattgctt

SEQ ID NO: 287012 - DNA, 19 bp, Homo sapiens
  siRNA target sequence for CTNNA2 (NM_004389.1,1776-1794).
gccacgcttcgctgaacaa

SEQ ID NO: 287013 - DNA, 19 bp, Homo sapiens
  siRNA target sequence for CTNNA2 (NM_004389.1,1778-1796).
cacgcttcgctgaacaagt

SEQ ID NO: 287014 - DNA, 19 bp, Homo sapiens
  siRNA target sequence for CTNNA2 (NM_004389.1,1837-1855).
ccgtttgaggagaatgagt

SEQ ID NO: 287015 - DNA, 19 bp, Homo sapiens
  siRNA target sequence for CTNNA2 (NM_004389.1,1885-1903).
ggcgttcgggacatcagaa

SEQ ID NO: 287016 - DNA, 19 bp, Homo sapiens
  siRNA target sequence for CTNNA2 (NM_004389.1,1886-1904).
gcgttcgggacatcagaaa

SEQ ID NO: 287017 - DNA, 19 bp, Homo sapiens
  siRNA target sequence for CTNNA2 (NM_004389.1,1953-1971).
ctttgagcaggaagattat

SEQ ID NO: 287018 - DNA, 19 bp, Homo sapiens
  siRNA target sequence for CTNNA2 (NM_004389.1,2081-2099).
ctgagcaggtggagatatt

SEQ ID NO: 287019 - DNA, 19 bp, Homo sapiens
  siRNA target sequence for CTNNA2 (NM_004389.1,2151-2169).
cggcaatgatatcattgta

SEQ ID NO: 287020 - DNA, 19 bp, Homo sapiens
  siRNA target sequence for CTNNA2 (NM_004389.1,2227-2245).
ggcccattgaaaaatacat

SEQ ID NO: 287021 - DNA, 19 bp, Homo sapiens
  siRNA target sequence for CTNNA2 (NM_004389.1,2368-2386).
caacgaattgccttgtatt

SEQ ID NO: 287022 - DNA, 19 bp, Homo sapiens
  siRNA target sequence for CTNNA2 (NM_004389.1,2474-2492).
gcactttcactacctttta

SEQ ID NO: 287023 - DNA, 19 bp, Homo sapiens
  siRNA target sequence for CTNNA2 (NM_004389.1,2475-2493).
cactttcactaccttttat

SEQ ID NO: 287024 - DNA, 19 bp, Homo sapiens
  siRNA target sequence for CTNNA2 (NM_004389.1,2496-2514).
ggtagattgtgatgtcata

SEQ ID NO: 287025 - DNA, 19 bp, Homo sapiens
  siRNA target sequence for CTNNA2 (NM_004389.1,2520-2538).
gggcagggctagtcaactt

SEQ ID NO: 287026 - DNA, 19 bp, Homo sapiens
  siRNA target sequence for CTNNA2 (NM_004389.1,2521-2539).
ggcagggctagtcaacttt

SEQ ID NO: 287027 - DNA, 19 bp, Homo sapiens
  siRNA target sequence for CTNNA2 (NM_004389.1,2523-2541).
cagggctagtcaactttct

SEQ ID NO: 287028 - DNA, 19 bp, Homo sapiens
  siRNA target sequence for CTNNA2 (NM_004389.1,2612-2630).
gtgccacatcgcttatcca

SEQ ID NO: 287029 - DNA, 19 bp, Homo sapiens
  siRNA target sequence for CTNNA2 (NM_004389.1,2622-2640).
gcttatccaggcagctaaa

SEQ ID NO: 287030 - DNA, 19 bp, Homo sapiens
  siRNA target sequence for CTNNA2 (NM_004389.1,2659-2677).
gtcctcacggtgaaagcat

SEQ ID NO: 287031 - DNA, 19 bp, Homo sapiens
  siRNA target sequence for CTNNA2 (NM_004389.1,2664-2682).
cacggtgaaagcatcctat

SEQ ID NO: 287032 - DNA, 19 bp, Homo sapiens
  siRNA target sequence for CTNNA2 (NM_004389.1,2773-2791).
ccccttgtgaagagagaaa

SEQ ID NO: 287033 - DNA, 19 bp, Homo sapiens
  siRNA target sequence for CTNNA2 (NM_004389.1,2819-2837).
gacgaggttctcagaagaa

SEQ ID NO: 287034 - DNA, 19 bp, Homo sapiens
  siRNA target sequence for CTNNA2 (NM_004389.1,2824-2842).
ggttctcagaagaaacaca

SEQ ID NO: 287035 - DNA, 19 bp, Homo sapiens
  siRNA target sequence for CTNNA2 (NM_004389.1,2847-2865).
gcctgtacaggctttaagt

SEQ ID NO: 287036 - DNA, 19 bp, Homo sapiens
  siRNA target sequence for CTNNA2 (NM_004389.1,2851-2869).
gtacaggctttaagtgaat

SEQ ID NO: 287037 - DNA, 19 bp, Homo sapiens
  siRNA target sequence for CTNNA2 (NM_004389.1,2856-2874).
ggctttaagtgaattcaaa

SEQ ID NO: 287038 - DNA, 19 bp, Homo sapiens
  siRNA target sequence for CYLC2 (NM_001340.1,12-30).
cccaagattccaaagagta

SEQ ID NO: 287039 - DNA, 19 bp, Homo sapiens
  siRNA target sequence for CYLC2 (NM_001340.1,13-31).
ccaagattccaaagagtaa

SEQ ID NO: 287040 - DNA, 19 bp, Homo sapiens
  siRNA target sequence for CYLC2 (NM_001340.1,14-32).
caagattccaaagagtaaa

SEQ ID NO: 287041 - DNA, 19 bp, Homo sapiens
  siRNA target sequence for CYLC2 (NM_001340.1,37-55).
gggccatatgataattaca

SEQ ID NO: 287042 - DNA, 19 bp, Homo sapiens
  siRNA target sequence for CYLC2 (NM_001340.1,38-56).
ggccatatgataattacat

SEQ ID NO: 287043 - DNA, 19 bp, Homo sapiens
  siRNA target sequence for CYLC2 (NM_001340.1,144-162).
gagatcaaaaccttctcaa

SEQ ID NO: 287044 - DNA, 19 bp, Homo sapiens
  siRNA target sequence for CYLC2 (NM_001340.1,166-184).
cgggacaacacggtttcta

SEQ ID NO: 287045 - DNA, 19 bp, Homo sapiens
  siRNA target sequence for CYLC2 (NM_001340.1,167-185).
gggacaacacggtttctat

SEQ ID NO: 287046 - DNA, 19 bp, Homo sapiens
  siRNA target sequence for CYLC2 (NM_001340.1,171-189).
caacacggtttctataatt

SEQ ID NO: 287047 - DNA, 19 bp, Homo sapiens
  siRNA target sequence for CYLC2 (NM_001340.1,174-192).
cacggtttctataattgat

SEQ ID NO: 287048 - DNA, 19 bp, Homo sapiens
  siRNA target sequence for CYLC2 (NM_001340.1,176-194).
cggtttctataattgatga

SEQ ID NO: 287049 - DNA, 19 bp, Homo sapiens
  siRNA target sequence for CYLC2 (NM_001340.1,177-195).
ggtttctataattgatgaa

SEQ ID NO: 287050 - DNA, 19 bp, Homo sapiens
  siRNA target sequence for CYLC2 (NM_001340.1,211-229).
gatcgtagacaaccattat

SEQ ID NO: 287051 - DNA, 19 bp, Homo sapiens
  siRNA target sequence for CYLC2 (NM_001340.1,214-232).
cgtagacaaccattatgga

SEQ ID NO: 287052 - DNA, 19 bp, Homo sapiens
  siRNA target sequence for CYLC2 (NM_001340.1,215-233).
gtagacaaccattatggat

SEQ ID NO: 287053 - DNA, 19 bp, Homo sapiens
  siRNA target sequence for CYLC2 (NM_001340.1,234-252).
gtaccgttctttaatgaga

SEQ ID NO: 287054 - DNA, 19 bp, Homo sapiens
  siRNA target sequence for CYLC2 (NM_001340.1,237-255).
ccgttctttaatgagaatt

SEQ ID NO: 287055 - DNA, 19 bp, Homo sapiens
  siRNA target sequence for CYLC2 (NM_001340.1,238-256).
cgttctttaatgagaattt

SEQ ID NO: 287056 - DNA, 19 bp, Homo sapiens
  siRNA target sequence for CYLC2 (NM_001340.1,261-279).
gagaccatctgtttattta

SEQ ID NO: 287057 - DNA, 19 bp, Homo sapiens
  siRNA target sequence for CYLC2 (NM_001340.1,465-483).
gctagatgcaaagaaagat

SEQ ID NO: 287058 - DNA, 19 bp, Homo sapiens
  siRNA target sequence for CYLC2 (NM_001340.1,638-656).
gtacagagaaagatagcaa

SEQ ID NO: 287059 - DNA, 19 bp, Homo sapiens
  siRNA target sequence for CYLC2 (NM_001340.1,839-857).
gtacagacagtgactcaaa

SEQ ID NO: 287060 - DNA, 19 bp, Homo sapiens
  siRNA target sequence for D10S170 (NM_005436.1,361-379).
gaagaattcattagtaaca

SEQ ID NO: 287061 - DNA, 19 bp, Homo sapiens
  siRNA target sequence for D10S170 (NM_005436.1,547-565).
gtcaacaaactgatgaaga

SEQ ID NO: 287062 - DNA, 19 bp, Homo sapiens
  siRNA target sequence for D10S170 (NM_005436.1,690-708).
gaaaaggatggataagctt

SEQ ID NO: 287063 - DNA, 19 bp, Homo sapiens
  siRNA target sequence for D10S170 (NM_005436.1,720-738).
gcgaatcctgcaggaaaaa

SEQ ID NO: 287064 - DNA, 19 bp, Homo sapiens
  siRNA target sequence for D10S170 (NM_005436.1,721-739).
cgaatcctgcaggaaaaat

SEQ ID NO: 287065 - DNA, 19 bp, Homo sapiens
  siRNA target sequence for D10S170 (NM_005436.1,761-779).
caccatcgcctagagatat

SEQ ID NO: 287066 - DNA, 19 bp, Homo sapiens
  siRNA target sequence for D10S170 (NM_005436.1,763-781).
ccatcgcctagagatatct

SEQ ID NO: 287067 - DNA, 19 bp, Homo sapiens
  siRNA target sequence for D10S170 (NM_005436.1,813-831).
gcgtcacatcaggttttta

SEQ ID NO: 287068 - DNA, 19 bp, Homo sapiens
  siRNA target sequence for D10S170 (NM_005436.1,920-938).
gtcacatgagagaagagaa

SEQ ID NO: 287069 - DNA, 19 bp, Homo sapiens
  siRNA target sequence for D10S170 (NM_005436.1,1029-1047).
ggacgacgaaaggtatttt

SEQ ID NO: 287070 - DNA, 19 bp, Homo sapiens
  siRNA target sequence for D10S170 (NM_005436.1,1030-1048).
gacgacgaaaggtatttta

SEQ ID NO: 287071 - DNA, 19 bp, Homo sapiens
  siRNA target sequence for D10S170 (NM_005436.1,1032-1050).
cgacgaaaggtattttaat

SEQ ID NO: 287072 - DNA, 19 bp, Homo sapiens
  siRNA target sequence for D10S170 (NM_005436.1,1089-1107).
cagcccgatcccttacaca

SEQ ID NO: 287073 - DNA, 19 bp, Homo sapiens
  siRNA target sequence for D10S170 (NM_005436.1,1193-1211).
ctagagctggaatgtctta

SEQ ID NO: 287074 - DNA, 19 bp, Homo sapiens
  siRNA target sequence for D10S170 (NM_005436.1,1198-1216).
gctggaatgtcttattaca

SEQ ID NO: 287075 - DNA, 19 bp, Homo sapiens
  siRNA target sequence for D10S170 (NM_005436.1,1290-1308).
cagtcctgacaaattcaaa

SEQ ID NO: 287076 - DNA, 19 bp, Homo sapiens
  siRNA target sequence for D10S170 (NM_005436.1,1418-1436).
cctactccttcgcaacatt

SEQ ID NO: 287077 - DNA, 19 bp, Homo sapiens
  siRNA target sequence for D10S170 (NM_005436.1,1449-1467).
cctcccagccttaatgcat

SEQ ID NO: 287078 - DNA, 19 bp, Homo sapiens
  siRNA target sequence for D10S170 (NM_005436.1,1464-1482).
gcatgagcttagtctgaat

SEQ ID NO: 287079 - DNA, 19 bp, Homo sapiens
  siRNA target sequence for D10S170 (NM_005436.1,1465-1483).
catgagcttagtctgaatt

SEQ ID NO: 287080 - DNA, 19 bp, Homo sapiens
  siRNA target sequence for D10S170 (NM_005436.1,1536-1554).
ctctggcatatttggatat

SEQ ID NO: 287081 - DNA, 19 bp, Homo sapiens
  siRNA target sequence for D10S170 (NM_005436.1,1571-1589).
ggttatctaggcttcacta

SEQ ID NO: 287082 - DNA, 19 bp, Homo sapiens
  siRNA target sequence for D10S170 (NM_005436.1,1572-1590).
gttatctaggcttcactat

SEQ ID NO: 287083 - DNA, 19 bp, Homo sapiens
  siRNA target sequence for D10S170 (NM_005436.1,1581-1599).
gcttcactatccattgtgt

SEQ ID NO: 287084 - DNA, 19 bp, Homo sapiens
  siRNA target sequence for D10S170 (NM_005436.1,1587-1605).
ctatccattgtgttgtaaa

SEQ ID NO: 287085 - DNA, 19 bp, Homo sapiens
  siRNA target sequence for D10S170 (NM_005436.1,1591-1609).
ccattgtgttgtaaatgtt

SEQ ID NO: 287086 - DNA, 19 bp, Homo sapiens
  siRNA target sequence for D10S170 (NM_005436.1,1644-1662).
cactaaccagacgactttt

SEQ ID NO: 287087 - DNA, 19 bp, Homo sapiens
  siRNA target sequence for D10S170 (NM_005436.1,1668-1686).
cagtgttttacttgaatct

SEQ ID NO: 287088 - DNA, 19 bp, Homo sapiens
  siRNA target sequence for D10S170 (NM_005436.1,1711-1729).
gaaccttcgctgtttggta

SEQ ID NO: 287089 - DNA, 19 bp, Homo sapiens
  siRNA target sequence for D10S170 (NM_005436.1,1718-1736).
cgctgtttggtatttggta

SEQ ID NO: 287090 - DNA, 19 bp, Homo sapiens
  siRNA target sequence for D10S170 (NM_005436.1,1745-1763).
gcagtgtgcaatttttgct

SEQ ID NO: 287091 - DNA, 19 bp, Homo sapiens
  siRNA target sequence for D10S170 (NM_005436.1,1746-1764).
cagtgtgcaatttttgctt

SEQ ID NO: 287092 - DNA, 19 bp, Homo sapiens
  siRNA target sequence for DES (NM_001927.2,749-767).
cctggagcgcagaattgaa

SEQ ID NO: 287093 - DNA, 19 bp, Homo sapiens
  siRNA target sequence for DES (NM_001927.2,750-768).
ctggagcgcagaattgaat

SEQ ID NO: 287094 - DNA, 19 bp, Homo sapiens
  siRNA target sequence for DES (NM_001927.2,752-770).
ggagcgcagaattgaatct

SEQ ID NO: 287095 - DNA, 19 bp, Homo sapiens
  siRNA target sequence for DES (NM_001927.2,780-798).
gagatcgcgttccttaaga

SEQ ID NO: 287096 - DNA, 19 bp, Homo sapiens
  siRNA target sequence for DES (NM_001927.2,782-800).
gatcgcgttccttaagaaa

SEQ ID NO: 287097 - DNA, 19 bp, Homo sapiens
  siRNA target sequence for DES (NM_001927.2,858-876).
gtggagatggacatgtcta

SEQ ID NO: 287098 - DNA, 19 bp, Homo sapiens
  siRNA target sequence for DES (NM_001927.2,926-944).
catcgcggctaagaacatt

SEQ ID NO: 287099 - DNA, 19 bp, Homo sapiens
  siRNA target sequence for DES (NM_001927.2,929-947).
cgcggctaagaacatttct

SEQ ID NO: 287100 - DNA, 19 bp, Homo sapiens
  siRNA target sequence for DES (NM_001927.2,931-949).
cggctaagaacatttctga

SEQ ID NO: 287101 - DNA, 19 bp, Homo sapiens
  siRNA target sequence for DES (NM_001927.2,990-1008).
caggcagccaacaagaaca

SEQ ID NO: 287102 - DNA, 19 bp, Homo sapiens
  siRNA target sequence for DES (NM_001927.2,1066-1084).
cctacacctgcgagattga

SEQ ID NO: 287103 - DNA, 19 bp, Homo sapiens
  siRNA target sequence for DSP (NM_004415.1,386-404).
gcaccagcaggatgtacta

SEQ ID NO: 287104 - DNA, 19 bp, Homo sapiens
  siRNA target sequence for DSP (NM_004415.1,390-408).
cagcaggatgtactattct

SEQ ID NO: 287105 - DNA, 19 bp, Homo sapiens
  siRNA target sequence for DSP (NM_004415.1,614-632).
cccaggccaatgaccaaat

SEQ ID NO: 287106 - DNA, 19 bp, Homo sapiens
  siRNA target sequence for DSP (NM_004415.1,619-637).
gccaatgaccaaatggaaa

SEQ ID NO: 287107 - DNA, 19 bp, Homo sapiens
  siRNA target sequence for DSP (NM_004415.1,674-692).
gccagccctgtgatgctta

SEQ ID NO: 287108 - DNA, 19 bp, Homo sapiens
  siRNA target sequence for DSP (NM_004415.1,809-827).
gctctggctgggatgagtt

SEQ ID NO: 287109 - DNA, 19 bp, Homo sapiens
  siRNA target sequence for DSP (NM_004415.1,973-991).
cgctggcagctggacaaaa

SEQ ID NO: 287110 - DNA, 19 bp, Homo sapiens
  siRNA target sequence for DSP (NM_004415.1,997-1015).
gccgacctgcgcgagaaat

SEQ ID NO: 287111 - DNA, 19 bp, Homo sapiens
  siRNA target sequence for DSP (NM_004415.1,999-1017).
cgacctgcgcgagaaatct

SEQ ID NO: 287112 - DNA, 19 bp, Homo sapiens
  siRNA target sequence for DSP (NM_004415.1,1168-1186).
gactggagcgacaagaaca

SEQ ID NO: 287113 - DNA, 19 bp, Homo sapiens
  siRNA target sequence for DSP (NM_004415.1,1185-1203).
caccaacatcgctcagaaa

SEQ ID NO: 287114 - DNA, 19 bp, Homo sapiens
  siRNA target sequence for DSP (NM_004415.1,1227-1245).
gagtcaactggaagttaaa

SEQ ID NO: 287115 - DNA, 19 bp, Homo sapiens
  siRNA target sequence for DSP (NM_004415.1,1254-1272).
gctcaataagctgaaacaa

SEQ ID NO: 287116 - DNA, 19 bp, Homo sapiens
  siRNA target sequence for DSP (NM_004415.1,1304-1322).
cagcttcagacaaaattga

SEQ ID NO: 287117 - DNA, 19 bp, Homo sapiens
  siRNA target sequence for DSP (NM_004415.1,1368-1386).
gatcaccaagtgcattgat

SEQ ID NO: 287118 - DNA, 19 bp, Homo sapiens
  siRNA target sequence for DSP (NM_004415.1,1373-1391).
ccaagtgcattgatgttca

SEQ ID NO: 287119 - DNA, 19 bp, Homo sapiens
  siRNA target sequence for DSP (NM_004415.1,1379-1397).
gcattgatgttcatctgaa

SEQ ID NO: 287120 - DNA, 19 bp, Homo sapiens
  siRNA target sequence for DSP (NM_004415.1,1433-1451).
cgcagtctactgaagcata

SEQ ID NO: 287121 - DNA, 19 bp, Homo sapiens
  siRNA target sequence for DSP (NM_004415.1,1585-1603).
cagaacttggtaaacaagt

SEQ ID NO: 287122 - DNA, 19 bp, Homo sapiens
  siRNA target sequence for DSP (NM_004415.1,1599-1617).
caagtctaagaagattgta

SEQ ID NO: 287123 - DNA, 19 bp, Homo sapiens
  siRNA target sequence for DSP (NM_004415.1,1630-1648).
cgtaacccagactacagaa

SEQ ID NO: 287124 - DNA, 19 bp, Homo sapiens
  siRNA target sequence for DSP (NM_004415.1,1646-1664).
gaagcaataaacccattat

SEQ ID NO: 287125 - DNA, 19 bp, Homo sapiens
  siRNA target sequence for DSP (NM_004415.1,1649-1667).
gcaataaacccattattct

SEQ ID NO: 287126 - DNA, 19 bp, Homo sapiens
  siRNA target sequence for DSP (NM_004415.1,1670-1688).
gagctctctgtgactacaa

SEQ ID NO: 287127 - DNA, 19 bp, Homo sapiens
  siRNA target sequence for DSP (NM_004415.1,1679-1697).
gtgactacaaacaagatca

SEQ ID NO: 287128 - DNA, 19 bp, Homo sapiens
  siRNA target sequence for DSP (NM_004415.1,1796-1814).
cctctgtggggctgatcat

SEQ ID NO: 287129 - DNA, 19 bp, Homo sapiens
  siRNA target sequence for DSP (NM_004415.1,1839-1857).
ggacctctcttgcaagatt

SEQ ID NO: 287130 - DNA, 19 bp, Homo sapiens
  siRNA target sequence for DSP (NM_004415.1,1850-1868).
gcaagattgagcagtacta

SEQ ID NO: 287131 - DNA, 19 bp, Homo sapiens
  siRNA target sequence for DSP (NM_004415.1,1928-1946).
ggcactactgcatgattga

SEQ ID NO: 287132 - DNA, 19 bp, Homo sapiens
  siRNA target sequence for DSP (NM_004415.1,1932-1950).
ctactgcatgattgacata

SEQ ID NO: 287133 - DNA, 19 bp, Homo sapiens
  siRNA target sequence for DSP (NM_004415.1,1937-1955).
gcatgattgacatagagaa

SEQ ID NO: 287134 - DNA, 19 bp, Homo sapiens
  siRNA target sequence for DSP (NM_004415.1,2015-2033).
cgatagccgaccttgagtt

SEQ ID NO: 287135 - DNA, 19 bp, Homo sapiens
  siRNA target sequence for DSP (NM_004415.1,2016-2034).
gatagccgaccttgagtta

SEQ ID NO: 287136 - DNA, 19 bp, Homo sapiens
  siRNA target sequence for DSP (NM_004415.1,2020-2038).
gccgaccttgagttacatt

SEQ ID NO: 287137 - DNA, 19 bp, Homo sapiens
  siRNA target sequence for DSP (NM_004415.1,2178-2196).
gacagtgaccacaactgaa

SEQ ID NO: 287138 - DNA, 19 bp, Homo sapiens
  siRNA target sequence for DSP (NM_004415.1,2216-2234).
gccaagatgtcaaccataa

SEQ ID NO: 287139 - DNA, 19 bp, Homo sapiens
  siRNA target sequence for DSP (NM_004415.1,2218-2236).
caagatgtcaaccataata

SEQ ID NO: 287140 - DNA, 19 bp, Homo sapiens
  siRNA target sequence for DSP (NM_004415.1,2329-2347).
ggcaggatgactctcaaaa

SEQ ID NO: 287141 - DNA, 19 bp, Homo sapiens
  siRNA target sequence for DSP (NM_004415.1,2411-2429).
gtgtgcagaatgattcaca

SEQ ID NO: 287142 - DNA, 19 bp, Homo sapiens
  siRNA target sequence for DSP (NM_004415.1,2461-2479).
gatatgcttgccaacttca

SEQ ID NO: 287143 - DNA, 19 bp, Homo sapiens
  siRNA target sequence for DSP (NM_004415.1,2493-2511).
gtactgctatttacagaat

SEQ ID NO: 287144 - DNA, 19 bp, Homo sapiens
  siRNA target sequence for DSP (NM_004415.1,2515-2533).
gtatttggactatttcaga

SEQ ID NO: 287145 - DNA, 19 bp, Homo sapiens
  siRNA target sequence for DSP (NM_004415.1,2554-2572).
gttacagatggctacttaa

SEQ ID NO: 287146 - DNA, 19 bp, Homo sapiens
  siRNA target sequence for DSP (NM_004415.1,2560-2578).
gatggctacttaaatagct

SEQ ID NO: 287147 - DNA, 19 bp, Homo sapiens
  siRNA target sequence for DSP (NM_004415.1,2563-2581).
ggctacttaaatagcttat

SEQ ID NO: 287148 - DNA, 19 bp, Homo sapiens
  siRNA target sequence for DSP (NM_004415.1,2747-2765).
cgttgttggccactatgaa

SEQ ID NO: 287149 - DNA, 19 bp, Homo sapiens
  siRNA target sequence for DSP (NM_004415.1,2807-2825).
cacagcagtatccacttta

SEQ ID NO: 287150 - DNA, 19 bp, Homo sapiens
  siRNA target sequence for DSP (NM_004415.1,2811-2829).
gcagtatccactttatgat

SEQ ID NO: 287151 - DNA, 19 bp, Homo sapiens
  siRNA target sequence for DSP (NM_004415.1,2838-2856).
gggcaagttcggtgaaaaa

SEQ ID NO: 287152 - DNA, 19 bp, Homo sapiens
  siRNA target sequence for DSP (NM_004415.1,2840-2858).
gcaagttcggtgaaaaagt

SEQ ID NO: 287153 - DNA, 19 bp, Homo sapiens
  siRNA target sequence for DSP (NM_004415.1,2870-2888).
cagaccgctggcaaaggat

SEQ ID NO: 287154 - DNA, 19 bp, Homo sapiens
  siRNA target sequence for DSP (NM_004415.1,2874-2892).
ccgctggcaaaggatagat

SEQ ID NO: 287155 - DNA, 19 bp, Homo sapiens
  siRNA target sequence for DSP (NM_004415.1,2876-2894).
gctggcaaaggatagataa

SEQ ID NO: 287156 - DNA, 19 bp, Homo sapiens
  siRNA target sequence for DSP (NM_004415.1,2877-2895).
ctggcaaaggatagataaa

SEQ ID NO: 287157 - DNA, 19 bp, Homo sapiens
  siRNA target sequence for DSP (NM_004415.1,2890-2908).
gataaacagatcgacttta

SEQ ID NO: 287158 - DNA, 19 bp, Homo sapiens
  siRNA target sequence for DSP (NM_004415.1,2937-2955).
gcaattgaggaattatcgt

SEQ ID NO: 287159 - DNA, 19 bp, Homo sapiens
  siRNA target sequence for DSP (NM_004415.1,2946-2964).
gaattatcgtgataactat

SEQ ID NO: 287160 - DNA, 19 bp, Homo sapiens
  siRNA target sequence for DSP (NM_004415.1,2973-2991).
ctgcaagtggctctatgat

SEQ ID NO: 287161 - DNA, 19 bp, Homo sapiens
  siRNA target sequence for DSP (NM_004415.1,3001-3019).
cgccaggattccttagaat

SEQ ID NO: 287162 - DNA, 19 bp, Homo sapiens
  siRNA target sequence for DSP (NM_004415.1,3011-3029).
ccttagaatccatgaaatt

SEQ ID NO: 287163 - DNA, 19 bp, Homo sapiens
  siRNA target sequence for DSP (NM_004415.1,3044-3062).
cagtcatgcggtttttgaa

SEQ ID NO: 287164 - DNA, 19 bp, Homo sapiens
  siRNA target sequence for DSP (NM_004415.1,3095-3113).
gcaaacgagacaaatcaga

SEQ ID NO: 287165 - DNA, 19 bp, Homo sapiens
  siRNA target sequence for DSP (NM_004415.1,3133-3151).
gaactttgcgccaattcaa

SEQ ID NO: 287166 - DNA, 19 bp, Homo sapiens
  siRNA target sequence for DSP (NM_004415.1,3136-3154).
ctttgcgccaattcaatta

SEQ ID NO: 287167 - DNA, 19 bp, Homo sapiens
  siRNA target sequence for DSP (NM_004415.1,3140-3158).
gcgccaattcaattaagga

SEQ ID NO: 287168 - DNA, 19 bp, Homo sapiens
  siRNA target sequence for DSP (NM_004415.1,3141-3159).
cgccaattcaattaaggat

SEQ ID NO: 287169 - DNA, 19 bp, Homo sapiens
  siRNA target sequence for DSP (NM_004415.1,3142-3160).
gccaattcaattaaggatt

SEQ ID NO: 287170 - DNA, 19 bp, Homo sapiens
  siRNA target sequence for DSP (NM_004415.1,3143-3161).
ccaattcaattaaggatta

SEQ ID NO: 287171 - DNA, 19 bp, Homo sapiens
  siRNA target sequence for DSP (NM_004415.1,3144-3162).
caattcaattaaggattat

SEQ ID NO: 287172 - DNA, 19 bp, Homo sapiens
  siRNA target sequence for DSP (NM_004415.1,3281-3299).
ctcggtacattgaactact

SEQ ID NO: 287173 - DNA, 19 bp, Homo sapiens
  siRNA target sequence for DSP (NM_004415.1,3283-3301).
cggtacattgaactactta

SEQ ID NO: 287174 - DNA, 19 bp, Homo sapiens
  siRNA target sequence for DSP (NM_004415.1,3315-3333).
ctattacaggttcttaagt

SEQ ID NO: 287175 - DNA, 19 bp, Homo sapiens
  siRNA target sequence for DSP (NM_004415.1,3415-3433).
gatgccaactcggaaaact

SEQ ID NO: 287176 - DNA, 19 bp, Homo sapiens
  siRNA target sequence for DSP (NM_004415.1,3548-3566).
ggaagtcggctaagcaaaa

SEQ ID NO: 287177 - DNA, 19 bp, Homo sapiens
  siRNA target sequence for DSP (NM_004415.1,3549-3567).
gaagtcggctaagcaaaat

SEQ ID NO: 287178 - DNA, 19 bp, Homo sapiens
  siRNA target sequence for DSP (NM_004415.1,3554-3572).
cggctaagcaaaatctaga

SEQ ID NO: 287179 - DNA, 19 bp, Homo sapiens
  siRNA target sequence for DSP (NM_004415.1,3573-3591).
caagtgctacggccaaata

SEQ ID NO: 287180 - DNA, 19 bp, Homo sapiens
  siRNA target sequence for DSP (NM_004415.1,3576-3594).
gtgctacggccaaataaaa

SEQ ID NO: 287181 - DNA, 19 bp, Homo sapiens
  siRNA target sequence for DSP (NM_004415.1,3578-3596).
gctacggccaaataaaaga

SEQ ID NO: 287182 - DNA, 19 bp, Homo sapiens
  siRNA target sequence for DSP (NM_004415.1,3579-3597).
ctacggccaaataaaagaa

SEQ ID NO: 287183 - DNA, 19 bp, Homo sapiens
  siRNA target sequence for DSP (NM_004415.1,3609-3627).
gatcacccgactgacttat

SEQ ID NO: 287184 - DNA, 19 bp, Homo sapiens
  siRNA target sequence for DSP (NM_004415.1,3614-3632).
cccgactgacttatgagat

SEQ ID NO: 287185 - DNA, 19 bp, Homo sapiens
  siRNA target sequence for DSP (NM_004415.1,3615-3633).
ccgactgacttatgagatt

SEQ ID NO: 287186 - DNA, 19 bp, Homo sapiens
  siRNA target sequence for DSP (NM_004415.1,3739-3757).
ggttggcagaaattagagt

SEQ ID NO: 287187 - DNA, 19 bp, Homo sapiens
  siRNA target sequence for DSP (NM_004415.1,3777-3795).
gaaggagtacgagattgaa

SEQ ID NO: 287188 - DNA, 19 bp, Homo sapiens
  siRNA target sequence for DSP (NM_004415.1,3823-3841).
ggcacccggaagagagaat

SEQ ID NO: 287189 - DNA, 19 bp, Homo sapiens
  siRNA target sequence for DSP (NM_004415.1,3824-3842).
gcacccggaagagagaata

SEQ ID NO: 287190 - DNA, 19 bp, Homo sapiens
  siRNA target sequence for DSP (NM_004415.1,3861-3879).
ggtaagaaaccactataat

SEQ ID NO: 287191 - DNA, 19 bp, Homo sapiens
  siRNA target sequence for DSP (NM_004415.1,3914-3932).
cagagattaacattacgaa

SEQ ID NO: 287192 - DNA, 19 bp, Homo sapiens
  siRNA target sequence for DSP (NM_004415.1,4077-4095).
gcgaaggcgagctgaagaa

SEQ ID NO: 287193 - DNA, 19 bp, Homo sapiens
  siRNA target sequence for DSP (NM_004415.1,4113-4131).
ggcctgtggctctgagata

SEQ ID NO: 287194 - DNA, 19 bp, Homo sapiens
  siRNA target sequence for DSP (NM_004415.1,4114-4132).
gcctgtggctctgagataa

SEQ ID NO: 287195 - DNA, 19 bp, Homo sapiens
  siRNA target sequence for DSP (NM_004415.1,4254-4272).
ggagatcgagagactcaaa

SEQ ID NO: 287196 - DNA, 19 bp, Homo sapiens
  siRNA target sequence for DSP (NM_004415.1,4325-4343).
gtaaggtaagaaacaatta

SEQ ID NO: 287197 - DNA, 19 bp, Homo sapiens
  siRNA target sequence for DSP (NM_004415.1,4345-4363).
gatgaggagatcattagct

SEQ ID NO: 287198 - DNA, 19 bp, Homo sapiens
  siRNA target sequence for DSP (NM_004415.1,4351-4369).
gagatcattagcttaaaaa

SEQ ID NO: 287199 - DNA, 19 bp, Homo sapiens
  siRNA target sequence for DSP (NM_004415.1,4448-4466).
gctaccgggctcagataga

SEQ ID NO: 287200 - DNA, 19 bp, Homo sapiens
  siRNA target sequence for DSP (NM_004415.1,4452-4470).
ccgggctcagatagacaat

SEQ ID NO: 287201 - DNA, 19 bp, Homo sapiens
  siRNA target sequence for DSP (NM_004415.1,4454-4472).
gggctcagatagacaatct

SEQ ID NO: 287202 - DNA, 19 bp, Homo sapiens
  siRNA target sequence for DSP (NM_004415.1,4456-4474).
gctcagatagacaatctca

SEQ ID NO: 287203 - DNA, 19 bp, Homo sapiens
  siRNA target sequence for DSP (NM_004415.1,4477-4495).
cgagaaaacaggagcttat

SEQ ID NO: 287204 - DNA, 19 bp, Homo sapiens
  siRNA target sequence for DSP (NM_004415.1,4488-4506).
gagcttatctgaagaaata

SEQ ID NO: 287205 - DNA, 19 bp, Homo sapiens
  siRNA target sequence for DSP (NM_004415.1,4655-4673).
cagaggagagcgtaagata

SEQ ID NO: 287206 - DNA, 19 bp, Homo sapiens
  siRNA target sequence for DSP (NM_004415.1,4657-4675).
gaggagagcgtaagatata

SEQ ID NO: 287207 - DNA, 19 bp, Homo sapiens
  siRNA target sequence for DSP (NM_004415.1,4697-4715).
ccaaaaccatccaggataa

SEQ ID NO: 287208 - DNA, 19 bp, Homo sapiens
  siRNA target sequence for DSP (NM_004415.1,4741-4759).
caactgatcgacaaagaaa

SEQ ID NO: 287209 - DNA, 19 bp, Homo sapiens
  siRNA target sequence for DSP (NM_004415.1,4744-4762).
ctgatcgacaaagaaacaa

SEQ ID NO: 287210 - DNA, 19 bp, Homo sapiens
  siRNA target sequence for DSP (NM_004415.1,4786-4804).
gaaaacgcgagattacaaa

SEQ ID NO: 287211 - DNA, 19 bp, Homo sapiens
  siRNA target sequence for DSP (NM_004415.1,4835-4853).
gtagtgcgacggagacaat

SEQ ID NO: 287212 - DNA, 19 bp, Homo sapiens
  siRNA target sequence for DSP (NM_004415.1,4838-4856).
gtgcgacggagacaataaa

SEQ ID NO: 287213 - DNA, 19 bp, Homo sapiens
  siRNA target sequence for DSP (NM_004415.1,4890-4908).
cctgaggatcgactatgaa

SEQ ID NO: 287214 - DNA, 19 bp, Homo sapiens
  siRNA target sequence for DSP (NM_004415.1,4891-4909).
ctgaggatcgactatgaaa

SEQ ID NO: 287215 - DNA, 19 bp, Homo sapiens
  siRNA target sequence for DSP (NM_004415.1,4928-4946).
ctgtgaaggaccaggatat

SEQ ID NO: 287216 - DNA, 19 bp, Homo sapiens
  siRNA target sequence for DSP (NM_004415.1,4953-4971).
gttccagaactctctgaaa

SEQ ID NO: 287217 - DNA, 19 bp, Homo sapiens
  siRNA target sequence for DSP (NM_004415.1,5136-5154).
ggagcaggcatccattgtt

SEQ ID NO: 287218 - DNA, 19 bp, Homo sapiens
  siRNA target sequence for DSP (NM_004415.1,5137-5155).
gagcaggcatccattgtta

SEQ ID NO: 287219 - DNA, 19 bp, Homo sapiens
  siRNA target sequence for DSP (NM_004415.1,5143-5161).
gcatccattgttaagaaga

SEQ ID NO: 287220 - DNA, 19 bp, Homo sapiens
  siRNA target sequence for DSP (NM_004415.1,5267-5285).
ccctgaggcggcagttact

SEQ ID NO: 287221 - DNA, 19 bp, Homo sapiens
  siRNA target sequence for DSP (NM_004415.1,5289-5307).
ggaacaggaaagtgtcaaa

SEQ ID NO: 287222 - DNA, 19 bp, Homo sapiens
  siRNA target sequence for DSP (NM_004415.1,5341-5359).
gcgatagaagataaaagca

SEQ ID NO: 287223 - DNA, 19 bp, Homo sapiens
  siRNA target sequence for DSP (NM_004415.1,5421-5439).
caaggagcacttgatgtta

SEQ ID NO: 287224 - DNA, 19 bp, Homo sapiens
  siRNA target sequence for DSP (NM_004415.1,5495-5513).
gcgaagcggacagtgataa

SEQ ID NO: 287225 - DNA, 19 bp, Homo sapiens
  siRNA target sequence for DSP (NM_004415.1,5496-5514).
cgaagcggacagtgataaa

SEQ ID NO: 287226 - DNA, 19 bp, Homo sapiens
  siRNA target sequence for DSP (NM_004415.1,5497-5515).
gaagcggacagtgataaaa

SEQ ID NO: 287227 - DNA, 19 bp, Homo sapiens
  siRNA target sequence for DSP (NM_004415.1,5518-5536).
gcaaccatcttggaactaa

SEQ ID NO: 287228 - DNA, 19 bp, Homo sapiens
  siRNA target sequence for DSP (NM_004415.1,5577-5595).
gcaggggctgattaatgat

SEQ ID NO: 287229 - DNA, 19 bp, Homo sapiens
  siRNA target sequence for DSP (NM_004415.1,5582-5600).
ggctgattaatgatttaca

SEQ ID NO: 287230 - DNA, 19 bp, Homo sapiens
  siRNA target sequence for DSP (NM_004415.1,5649-5667).
ggctttagaggcatctaat

SEQ ID NO: 287231 - DNA, 19 bp, Homo sapiens
  siRNA target sequence for DSP (NM_004415.1,5785-5803).
ctgaatcgtgcaaaatcaa

SEQ ID NO: 287232 - DNA, 19 bp, Homo sapiens
  siRNA target sequence for DSP (NM_004415.1,5787-5805).
gaatcgtgcaaaatcaact

SEQ ID NO: 287233 - DNA, 19 bp, Homo sapiens
  siRNA target sequence for DSP (NM_004415.1,5896-5914).
cgcaaggaggaggctatta

SEQ ID NO: 287234 - DNA, 19 bp, Homo sapiens
  siRNA target sequence for DSP (NM_004415.1,6022-6040).
cgtaagctggaggattcta

SEQ ID NO: 287235 - DNA, 19 bp, Homo sapiens
  siRNA target sequence for DSP (NM_004415.1,6068-6086).
cagaacgctcccgatatca

SEQ ID NO: 287236 - DNA, 19 bp, Homo sapiens
  siRNA target sequence for DSP (NM_004415.1,6070-6088).
gaacgctcccgatatcaga

SEQ ID NO: 287237 - DNA, 19 bp, Homo sapiens
  siRNA target sequence for DSP (NM_004415.1,6168-6186).
ctccaagctggtgtttgat

SEQ ID NO: 287238 - DNA, 19 bp, Homo sapiens
  siRNA target sequence for DSP (NM_004415.1,6208-6226).
gcaatgcagctctatgagt

SEQ ID NO: 287239 - DNA, 19 bp, Homo sapiens
  siRNA target sequence for DSP (NM_004415.1,6435-6453).
ggcagctacaggtggtata

SEQ ID NO: 287240 - DNA, 19 bp, Homo sapiens
  siRNA target sequence for DSP (NM_004415.1,6436-6454).
gcagctacaggtggtataa

SEQ ID NO: 287241 - DNA, 19 bp, Homo sapiens
  siRNA target sequence for DSP (NM_004415.1,6437-6455).
cagctacaggtggtataat

SEQ ID NO: 287242 - DNA, 19 bp, Homo sapiens
  siRNA target sequence for DSP (NM_004415.1,6457-6475).
gatccccatcggaatgaga

SEQ ID NO: 287243 - DNA, 19 bp, Homo sapiens
  siRNA target sequence for DSP (NM_004415.1,6520-6538).
gatgaccgtcagcagatat

SEQ ID NO: 287244 - DNA, 19 bp, Homo sapiens
  siRNA target sequence for DSP (NM_004415.1,6525-6543).
ccgtcagcagatatatgca

SEQ ID NO: 287245 - DNA, 19 bp, Homo sapiens
  siRNA target sequence for DSP (NM_004415.1,6608-6626).
ccatcaagaaaaatttgat

SEQ ID NO: 287246 - DNA, 19 bp, Homo sapiens
  siRNA target sequence for DSP (NM_004415.1,6609-6627).
catcaagaaaaatttgatt

SEQ ID NO: 287247 - DNA, 19 bp, Homo sapiens
  siRNA target sequence for DSP (NM_004415.1,6668-6686).
cttcagggggtgtagtaga

SEQ ID NO: 287248 - DNA, 19 bp, Homo sapiens
  siRNA target sequence for DSP (NM_004415.1,6753-6771).
gtatcgatccctgaatgat

SEQ ID NO: 287249 - DNA, 19 bp, Homo sapiens
  siRNA target sequence for DSP (NM_004415.1,6765-6783).
gaatgatccccgagatagt

SEQ ID NO: 287250 - DNA, 19 bp, Homo sapiens
  siRNA target sequence for DSP (NM_004415.1,6773-6791).
cccgagatagtcagaaaaa

SEQ ID NO: 287251 - DNA, 19 bp, Homo sapiens
  siRNA target sequence for DSP (NM_004415.1,6775-6793).
cgagatagtcagaaaaact

SEQ ID NO: 287252 - DNA, 19 bp, Homo sapiens
  siRNA target sequence for DSP (NM_004415.1,6840-6858).
ggaacggtgcagaatcgaa

SEQ ID NO: 287253 - DNA, 19 bp, Homo sapiens
  siRNA target sequence for DSP (NM_004415.1,6849-6867).
cagaatcgaaccacatact

SEQ ID NO: 287254 - DNA, 19 bp, Homo sapiens
  siRNA target sequence for DSP (NM_004415.1,6899-6917).
gcatgtccttccaaggaat

SEQ ID NO: 287255 - DNA, 19 bp, Homo sapiens
  siRNA target sequence for DSP (NM_004415.1,6903-6921).
gtccttccaaggaatcaga

SEQ ID NO: 287256 - DNA, 19 bp, Homo sapiens
  siRNA target sequence for DSP (NM_004415.1,6965-6983).
gaccgtccactgtcaatga

SEQ ID NO: 287257 - DNA, 19 bp, Homo sapiens
  siRNA target sequence for DSP (NM_004415.1,6968-6986).
cgtccactgtcaatgaact

SEQ ID NO: 287258 - DNA, 19 bp, Homo sapiens
  siRNA target sequence for DSP (NM_004415.1,6988-7006).
gaatctggtcagatttctt

SEQ ID NO: 287259 - DNA, 19 bp, Homo sapiens
  siRNA target sequence for DSP (NM_004415.1,7011-7029).
cgaggttggtgagagaatt

SEQ ID NO: 287260 - DNA, 19 bp, Homo sapiens
  siRNA target sequence for DSP (NM_004415.1,7052-7070).
gctgcatagcaggcatata

SEQ ID NO: 287261 - DNA, 19 bp, Homo sapiens
  siRNA target sequence for DSP (NM_004415.1,7060-7078).
gcaggcatatacaatgaga

SEQ ID NO: 287262 - DNA, 19 bp, Homo sapiens
  siRNA target sequence for DSP (NM_004415.1,7098-7116).
catttatgaggccatgaaa

SEQ ID NO: 287263 - DNA, 19 bp, Homo sapiens
  siRNA target sequence for DSP (NM_004415.1,7213-7231).
gtggaggaagcctacaaga

SEQ ID NO: 287264 - DNA, 19 bp, Homo sapiens
  siRNA target sequence for DSP (NM_004415.1,7234-7252).
ggtctggtgggcattgagt

SEQ ID NO: 287265 - DNA, 19 bp, Homo sapiens
  siRNA target sequence for DSP (NM_004415.1,7235-7253).
gtctggtgggcattgagtt

SEQ ID NO: 287266 - DNA, 19 bp, Homo sapiens
  siRNA target sequence for DSP (NM_004415.1,7280-7298).
gagctgtcactgggtataa

SEQ ID NO: 287267 - DNA, 19 bp, Homo sapiens
  siRNA target sequence for DSP (NM_004415.1,7283-7301).
ctgtcactgggtataatga

SEQ ID NO: 287268 - DNA, 19 bp, Homo sapiens
  siRNA target sequence for DSP (NM_004415.1,7304-7322).
ctgaaacaggaaacatcat

SEQ ID NO: 287269 - DNA, 19 bp, Homo sapiens
  siRNA target sequence for DSP (NM_004415.1,7364-7382).
gccacggtattcgcttatt

SEQ ID NO: 287270 - DNA, 19 bp, Homo sapiens
  siRNA target sequence for DSP (NM_004415.1,7365-7383).
ccacggtattcgcttatta

SEQ ID NO: 287271 - DNA, 19 bp, Homo sapiens
  siRNA target sequence for DSP (NM_004415.1,7368-7386).
cggtattcgcttattagaa

SEQ ID NO: 287272 - DNA, 19 bp, Homo sapiens
  siRNA target sequence for DSP (NM_004415.1,7418-7436).
caaaggagagccatcgttt

SEQ ID NO: 287273 - DNA, 19 bp, Homo sapiens
  siRNA target sequence for DSP (NM_004415.1,7438-7456).
ccagttgacatagcatata

SEQ ID NO: 287274 - DNA, 19 bp, Homo sapiens
  siRNA target sequence for DSP (NM_004415.1,7439-7457).
cagttgacatagcatataa

SEQ ID NO: 287275 - DNA, 19 bp, Homo sapiens
  siRNA target sequence for DSP (NM_004415.1,7441-7459).
gttgacatagcatataaga

SEQ ID NO: 287276 - DNA, 19 bp, Homo sapiens
  siRNA target sequence for DSP (NM_004415.1,7451-7469).
catataagaggggctattt

SEQ ID NO: 287277 - DNA, 19 bp, Homo sapiens
  siRNA target sequence for DSP (NM_004415.1,7505-7523).
gtgatgataccaaaggatt

SEQ ID NO: 287278 - DNA, 19 bp, Homo sapiens
  siRNA target sequence for DSP (NM_004415.1,7668-7686).
gcgtagagtggtcatagtt

SEQ ID NO: 287279 - DNA, 19 bp, Homo sapiens
  siRNA target sequence for DSP (NM_004415.1,7670-7688).
gtagagtggtcatagttga

SEQ ID NO: 287280 - DNA, 19 bp, Homo sapiens
  siRNA target sequence for DSP (NM_004415.1,7728-7746).
caagaagggcctaattgat

SEQ ID NO: 287281 - DNA, 19 bp, Homo sapiens
  siRNA target sequence for DSP (NM_004415.1,7731-7749).
gaagggcctaattgattat

SEQ ID NO: 287282 - DNA, 19 bp, Homo sapiens
  siRNA target sequence for DSP (NM_004415.1,7734-7752).
gggcctaattgattatgaa

SEQ ID NO: 287283 - DNA, 19 bp, Homo sapiens
  siRNA target sequence for DSP (NM_004415.1,7735-7753).
ggcctaattgattatgaaa

SEQ ID NO: 287284 - DNA, 19 bp, Homo sapiens
  siRNA target sequence for DSP (NM_004415.1,7827-7845).
ggtggtcctggtagataga

SEQ ID NO: 287285 - DNA, 19 bp, Homo sapiens
  siRNA target sequence for DSP (NM_004415.1,7828-7846).
gtggtcctggtagatagaa

SEQ ID NO: 287286 - DNA, 19 bp, Homo sapiens
  siRNA target sequence for DSP (NM_004415.1,7831-7849).
gtcctggtagatagaaaga

SEQ ID NO: 287287 - DNA, 19 bp, Homo sapiens
  siRNA target sequence for DSP (NM_004415.1,7833-7851).
cctggtagatagaaagaca

SEQ ID NO: 287288 - DNA, 19 bp, Homo sapiens
  siRNA target sequence for DSP (NM_004415.1,8005-8023).
ggtgtcagcgatgatgttt

SEQ ID NO: 287289 - DNA, 19 bp, Homo sapiens
  siRNA target sequence for DSP (NM_004415.1,8006-8024).
gtgtcagcgatgatgtttt

SEQ ID NO: 287290 - DNA, 19 bp, Homo sapiens
  siRNA target sequence for DSP (NM_004415.1,8028-8046).
cagctcccgacatgaatca

SEQ ID NO: 287291 - DNA, 19 bp, Homo sapiens
  siRNA target sequence for DSP (NM_004415.1,8030-8048).
gctcccgacatgaatcagt

SEQ ID NO: 287292 - DNA, 19 bp, Homo sapiens
  siRNA target sequence for DSP (NM_004415.1,8031-8049).
ctcccgacatgaatcagta

SEQ ID NO: 287293 - DNA, 19 bp, Homo sapiens
  siRNA target sequence for DSP (NM_004415.1,8034-8052).
ccgacatgaatcagtaagt

SEQ ID NO: 287294 - DNA, 19 bp, Homo sapiens
  siRNA target sequence for DSP (NM_004415.1,8035-8053).
cgacatgaatcagtaagta

SEQ ID NO: 287295 - DNA, 19 bp, Homo sapiens
  siRNA target sequence for DSP (NM_004415.1,8038-8056).
catgaatcagtaagtaaga

SEQ ID NO: 287296 - DNA, 19 bp, Homo sapiens
  siRNA target sequence for DSP (NM_004415.1,8041-8059).
gaatcagtaagtaagattt

SEQ ID NO: 287297 - DNA, 19 bp, Homo sapiens
  siRNA target sequence for DSP (NM_004415.1,8073-8091).
cgtcaggaatttaaccata

SEQ ID NO: 287298 - DNA, 19 bp, Homo sapiens
  siRNA target sequence for DSP (NM_004415.1,8472-8490).
cctcacgggaggtcttgtt

SEQ ID NO: 287299 - DNA, 19 bp, Homo sapiens
  siRNA target sequence for DSP (NM_004415.1,8497-8515).
gaagtgcatgggaggataa

SEQ ID NO: 287300 - DNA, 19 bp, Homo sapiens
  siRNA target sequence for DSP (NM_004415.1,8529-8547).
catccggaaggggttcata

SEQ ID NO: 287301 - DNA, 19 bp, Homo sapiens
  siRNA target sequence for DSP (NM_004415.1,8532-8550).
ccggaaggggttcatagat

SEQ ID NO: 287302 - DNA, 19 bp, Homo sapiens
  siRNA target sequence for DSP (NM_004415.1,8579-8597).
ccagcagctatgccaaaat

SEQ ID NO: 287303 - DNA, 19 bp, Homo sapiens
  siRNA target sequence for DSP (NM_004415.1,8601-8619).
gacctgccccaaaaccaaa

SEQ ID NO: 287304 - DNA, 19 bp, Homo sapiens
  siRNA target sequence for DSP (NM_004415.1,8606-8624).
gccccaaaaccaaattaaa

SEQ ID NO: 287305 - DNA, 19 bp, Homo sapiens
  siRNA target sequence for DSP (NM_004415.1,8655-8673).
catggtagaagatatcact

SEQ ID NO: 287306 - DNA, 19 bp, Homo sapiens
  siRNA target sequence for DSP (NM_004415.1,8811-8829).
gtcccggagaggaagcttt

SEQ ID NO: 287307 - DNA, 19 bp, Homo sapiens
  siRNA target sequence for DSP (NM_004415.1,8830-8848).
gacgccacagggaattctt

SEQ ID NO: 287308 - DNA, 19 bp, Homo sapiens
  siRNA target sequence for DSP (NM_004415.1,8846-8864).
cttcctactcttattccta

SEQ ID NO: 287309 - DNA, 19 bp, Homo sapiens
  siRNA target sequence for FLJ12785 (NM_024855.2,396-414).
cacagggctgtgttgatca

SEQ ID NO: 287310 - DNA, 19 bp, Homo sapiens
  siRNA target sequence for FLJ12785 (NM_024855.2,410-428).
gatcatcccatagttttga

SEQ ID NO: 287311 - DNA, 19 bp, Homo sapiens
  siRNA target sequence for FLJ12785 (NM_024855.2,439-457).
gtgcaacccactgtattca

SEQ ID NO: 287312 - DNA, 19 bp, Homo sapiens
  siRNA target sequence for FLJ12785 (NM_024855.2,500-518).
cccaaggttgcctatggaa

SEQ ID NO: 287313 - DNA, 19 bp, Homo sapiens
  siRNA target sequence for FLJ12785 (NM_024855.2,501-519).
ccaaggttgcctatggaat

SEQ ID NO: 287314 - DNA, 19 bp, Homo sapiens
  siRNA target sequence for FLJ12785 (NM_024855.2,542-560).
cacaataagccaaagaact

SEQ ID NO: 287315 - DNA, 19 bp, Homo sapiens
  siRNA target sequence for FLJ12785 (NM_024855.2,565-583).
gtgcagtgggctaatcatt

SEQ ID NO: 287316 - DNA, 19 bp, Homo sapiens
  siRNA target sequence for FLJ12785 (NM_024855.2,568-586).
cagtgggctaatcatttca

SEQ ID NO: 287317 - DNA, 19 bp, Homo sapiens
  siRNA target sequence for FLJ12785 (NM_024855.2,616-634).
catcttagaagggagatta

SEQ ID NO: 287318 - DNA, 19 bp, Homo sapiens
  siRNA target sequence for FLJ12785 (NM_024855.2,626-644).
gggagattagatgctaaaa

SEQ ID NO: 287319 - DNA, 19 bp, Homo sapiens
  siRNA target sequence for FLJ12785 (NM_024855.2,627-645).
ggagattagatgctaaaaa

SEQ ID NO: 287320 - DNA, 19 bp, Homo sapiens
  siRNA target sequence for FLJ12785 (NM_024855.2,646-664).
ctgcaagcgcatcaatctt

SEQ ID NO: 287321 - DNA, 19 bp, Homo sapiens
  siRNA target sequence for FLJ12785 (NM_024855.2,774-792).
gctacatcgctgaggatta

SEQ ID NO: 287322 - DNA, 19 bp, Homo sapiens
  siRNA target sequence for FLJ12785 (NM_024855.2,775-793).
ctacatcgctgaggattat

SEQ ID NO: 287323 - DNA, 19 bp, Homo sapiens
  siRNA target sequence for FLJ12785 (NM_024855.2,813-831).
ggcggtgtcctgattatta

SEQ ID NO: 287324 - DNA, 19 bp, Homo sapiens
  siRNA target sequence for FLJ12785 (NM_024855.2,814-832).
gcggtgtcctgattattat

SEQ ID NO: 287325 - DNA, 19 bp, Homo sapiens
  siRNA target sequence for FLJ12785 (NM_024855.2,993-1011).
gtctggaccgactgctata

SEQ ID NO: 287326 - DNA, 19 bp, Homo sapiens
  siRNA target sequence for FLJ12785 (NM_024855.2,1035-1053).
gccagatggatcagtttca

SEQ ID NO: 287327 - DNA, 19 bp, Homo sapiens
  siRNA target sequence for FLJ12785 (NM_024855.2,1037-1055).
cagatggatcagtttcaca

SEQ ID NO: 287328 - DNA, 19 bp, Homo sapiens
  siRNA target sequence for FLJ12785 (NM_024855.2,1039-1057).
gatggatcagtttcacaaa

SEQ ID NO: 287329 - DNA, 19 bp, Homo sapiens
  siRNA target sequence for FLJ12785 (NM_024855.2,1048-1066).
gtttcacaaagctctgata

SEQ ID NO: 287330 - DNA, 19 bp, Homo sapiens
  siRNA target sequence for FLJ12785 (NM_024855.2,1058-1076).
gctctgatagagctgaata

SEQ ID NO: 287331 - DNA, 19 bp, Homo sapiens
  siRNA target sequence for FLJ12785 (NM_024855.2,1311-1329).
ctgttcagcccgtgtttaa

SEQ ID NO: 287332 - DNA, 19 bp, Homo sapiens
  siRNA target sequence for FLJ12785 (NM_024855.2,1313-1331).
gttcagcccgtgtttaact

SEQ ID NO: 287333 - DNA, 19 bp, Homo sapiens
  siRNA target sequence for FLJ12785 (NM_024855.2,1335-1353).
cagcatatcatcagctatt

SEQ ID NO: 287334 - DNA, 19 bp, Homo sapiens
  siRNA target sequence for FLJ12785 (NM_024855.2,1648-1666).
cttgaaccacctagatgat

SEQ ID NO: 287335 - DNA, 19 bp, Homo sapiens
  siRNA target sequence for FLJ12785 (NM_024855.2,1651-1669).
gaaccacctagatgataat

SEQ ID NO: 287336 - DNA, 19 bp, Homo sapiens
  siRNA target sequence for FLJ12785 (NM_024855.2,1654-1672).
ccacctagatgataatgaa

SEQ ID NO: 287337 - DNA, 19 bp, Homo sapiens
  siRNA target sequence for GFAP (NM_002055.2,385-403).
ggctgcggctcgatcaact

SEQ ID NO: 287338 - DNA, 19 bp, Homo sapiens
  siRNA target sequence for GFAP (NM_002055.2,597-615).
gaggagatccggttcttga

SEQ ID NO: 287339 - DNA, 19 bp, Homo sapiens
  siRNA target sequence for GFAP (NM_002055.2,779-797).
gtggtaccgctccaagttt

SEQ ID NO: 287340 - DNA, 19 bp, Homo sapiens
  siRNA target sequence for INA (NM_032727.2,296-314).
cgcaccaacgagtacaaga

SEQ ID NO: 287341 - DNA, 19 bp, Homo sapiens
  siRNA target sequence for INA (NM_032727.2,1204-1222).
caaaatggctcttgacatt

SEQ ID NO: 287342 - DNA, 19 bp, Homo sapiens
  siRNA target sequence for INA (NM_032727.2,1253-1271).
ggcgaggagacacgtttta

SEQ ID NO: 287343 - DNA, 19 bp, Homo sapiens
  siRNA target sequence for INA (NM_032727.2,1256-1274).
gaggagacacgttttagca

SEQ ID NO: 287344 - DNA, 19 bp, Homo sapiens
  siRNA target sequence for INA (NM_032727.2,1272-1290).
gcaccagtgggttaagcat

SEQ ID NO: 287345 - DNA, 19 bp, Homo sapiens
  siRNA target sequence for INA (NM_032727.2,1305-1323).
cacttcccaatccaagtta

SEQ ID NO: 287346 - DNA, 19 bp, Homo sapiens
  siRNA target sequence for INA (NM_032727.2,1349-1367).
gctacaacctccaaagtct

SEQ ID NO: 287347 - DNA, 19 bp, Homo sapiens
  siRNA target sequence for INA (NM_032727.2,1371-1389).
ccactgggctatcacttaa

SEQ ID NO: 287348 - DNA, 19 bp, Homo sapiens
  siRNA target sequence for INA (NM_032727.2,1374-1392).
ctgggctatcacttaagaa

SEQ ID NO: 287349 - DNA, 19 bp, Homo sapiens
  siRNA target sequence for INA (NM_032727.2,1405-1423).
ggaggaggcatctaaggta

SEQ ID NO: 287350 - DNA, 19 bp, Homo sapiens
  siRNA target sequence for INA (NM_032727.2,1421-1439).
gtagcctctaagaaaacct

SEQ ID NO: 287351 - DNA, 19 bp, Homo sapiens
  siRNA target sequence for INA (NM_032727.2,1444-1462).
gataggggaaagttttgaa

SEQ ID NO: 287352 - DNA, 19 bp, Homo sapiens
  siRNA target sequence for INA (NM_032727.2,1500-1518).
ccgagaaatcaaatataga

SEQ ID NO: 287353 - DNA, 19 bp, Homo sapiens
  siRNA target sequence for KRT1 (NM_006121.2,585-603).
gaaagggagcaaatcaagt

SEQ ID NO: 287354 - DNA, 19 bp, Homo sapiens
  siRNA target sequence for KRT1 (NM_006121.2,699-717).
gtagatacctccactagaa

SEQ ID NO: 287355 - DNA, 19 bp, Homo sapiens
  siRNA target sequence for KRT1 (NM_006121.2,707-725).
ctccactagaacccataat

SEQ ID NO: 287356 - DNA, 19 bp, Homo sapiens
  siRNA target sequence for KRT1 (NM_006121.2,709-727).
ccactagaacccataattt

SEQ ID NO: 287357 - DNA, 19 bp, Homo sapiens
  siRNA target sequence for KRT1 (NM_006121.2,710-728).
cactagaacccataattta

SEQ ID NO: 287358 - DNA, 19 bp, Homo sapiens
  siRNA target sequence for KRT1 (NM_006121.2,712-730).
ctagaacccataatttaga

SEQ ID NO: 287359 - DNA, 19 bp, Homo sapiens
  siRNA target sequence for KRT1 (NM_006121.2,732-750).
ccctactttgagtcattca

SEQ ID NO: 287360 - DNA, 19 bp, Homo sapiens
  siRNA target sequence for KRT1 (NM_006121.2,766-784).
ggagagtggaccaactgaa

SEQ ID NO: 287361 - DNA, 19 bp, Homo sapiens
  siRNA target sequence for KRT1 (NM_006121.2,789-807).
gatcaatctcggttggatt

SEQ ID NO: 287362 - DNA, 19 bp, Homo sapiens
  siRNA target sequence for KRT1 (NM_006121.2,837-855).
gaggattaccggaacaagt

SEQ ID NO: 287363 - DNA, 19 bp, Homo sapiens
  siRNA target sequence for KRT1 (NM_006121.2,839-857).
ggattaccggaacaagtat

SEQ ID NO: 287364 - DNA, 19 bp, Homo sapiens
  siRNA target sequence for KRT1 (NM_006121.2,869-887).
caacaagcggacaaatgca

SEQ ID NO: 287365 - DNA, 19 bp, Homo sapiens
  siRNA target sequence for KRT1 (NM_006121.2,875-893).
gcggacaaatgcagagaat

SEQ ID NO: 287366 - DNA, 19 bp, Homo sapiens
  siRNA target sequence for KRT1 (NM_006121.2,1022-1040).
gatgcagactcaaatcagt

SEQ ID NO: 287367 - DNA, 19 bp, Homo sapiens
  siRNA target sequence for KRT1 (NM_006121.2,1028-1046).
gactcaaatcagtgaaact

SEQ ID NO: 287368 - DNA, 19 bp, Homo sapiens
  siRNA target sequence for KRT1 (NM_006121.2,1045-1063).
ctaatgtcatcctctctat

SEQ ID NO: 287369 - DNA, 19 bp, Homo sapiens
  siRNA target sequence for KRT1 (NM_006121.2,1209-1227).
ggggatagtgtgagaaatt

SEQ ID NO: 287370 - DNA, 19 bp, Homo sapiens
  siRNA target sequence for KRT1 (NM_006121.2,1257-1275).
gtgatccagagacttagat

SEQ ID NO: 287371 - DNA, 19 bp, Homo sapiens
  siRNA target sequence for KRT1 (NM_006121.2,1267-1285).
gacttagatctgaaatcga

SEQ ID NO: 287372 - DNA, 19 bp, Homo sapiens
  siRNA target sequence for KRT1 (NM_006121.2,1273-1291).
gatctgaaatcgacaatgt

SEQ ID NO: 287373 - DNA, 19 bp, Homo sapiens
  siRNA target sequence for KRT1 (NM_006121.2,1276-1294).
ctgaaatcgacaatgtcaa

SEQ ID NO: 287374 - DNA, 19 bp, Homo sapiens
  siRNA target sequence for KRT13 (NM_002274.2,207-225).
cgtgagctgtggttttggt

SEQ ID NO: 287375 - DNA, 19 bp, Homo sapiens
  siRNA target sequence for KRT13 (NM_002274.2,561-579).
cctgaccgccaccattgaa

SEQ ID NO: 287376 - DNA, 19 bp, Homo sapiens
  siRNA target sequence for KRT13 (NM_002274.2,566-584).
ccgccaccattgaaaacaa

SEQ ID NO: 287377 - DNA, 19 bp, Homo sapiens
  siRNA target sequence for KRT13 (NM_002274.2,714-732).
gctcactctgtctaagact

SEQ ID NO: 287378 - DNA, 19 bp, Homo sapiens
  siRNA target sequence for KRT13 (NM_002274.2,989-1007).
ccaacactgccatgattca

SEQ ID NO: 287379 - DNA, 19 bp, Homo sapiens
  siRNA target sequence for KRT13 (NM_153490.1,1296-1314).
ccaggacgccaagatgatt

SEQ ID NO: 287380 - DNA, 19 bp, Homo sapiens
  siRNA target sequence for KRT13 (NM_153490.1,1300-1318).
gacgccaagatgattggtt

SEQ ID NO: 287381 - DNA, 19 bp, Homo sapiens
  siRNA target sequence for KRT15 (NM_002275.2,1360-1378).
cagcaatttccacatcaat

SEQ ID NO: 287382 - DNA, 19 bp, Homo sapiens
  siRNA target sequence for KRT20 (NM_019010.1,132-150).
gacgacacccagcgtttat

SEQ ID NO: 287383 - DNA, 19 bp, Homo sapiens
  siRNA target sequence for KRT20 (NM_019010.1,188-206).
ccagacacacggtgaacta

SEQ ID NO: 287384 - DNA, 19 bp, Homo sapiens
  siRNA target sequence for KRT20 (NM_019010.1,283-301).
ctagcgagctacctagaaa

SEQ ID NO: 287385 - DNA, 19 bp, Homo sapiens
  siRNA target sequence for KRT20 (NM_019010.1,287-305).
cgagctacctagaaaaggt

SEQ ID NO: 287386 - DNA, 19 bp, Homo sapiens
  siRNA target sequence for KRT20 (NM_019010.1,321-339).
gtccaactccaaacttgaa

SEQ ID NO: 287387 - DNA, 19 bp, Homo sapiens
  siRNA target sequence for KRT20 (NM_019010.1,329-347).
ccaaacttgaagtgcaaat

SEQ ID NO: 287388 - DNA, 19 bp, Homo sapiens
  siRNA target sequence for KRT20 (NM_019010.1,385-403).
cgcgactacagtgcatatt

SEQ ID NO: 287389 - DNA, 19 bp, Homo sapiens
  siRNA target sequence for KRT20 (NM_019010.1,386-404).
gcgactacagtgcatatta

SEQ ID NO: 287390 - DNA, 19 bp, Homo sapiens
  siRNA target sequence for KRT20 (NM_019010.1,423-441).
gcgaagtcagattaaggat

SEQ ID NO: 287391 - DNA, 19 bp, Homo sapiens
  siRNA target sequence for KRT20 (NM_019010.1,458-476).
ctcggtgtgtcctgcaaat

SEQ ID NO: 287392 - DNA, 19 bp, Homo sapiens
  siRNA target sequence for KRT20 (NM_019010.1,461-479).
ggtgtgtcctgcaaattga

SEQ ID NO: 287393 - DNA, 19 bp, Homo sapiens
  siRNA target sequence for KRT20 (NM_019010.1,462-480).
gtgtgtcctgcaaattgat

SEQ ID NO: 287394 - DNA, 19 bp, Homo sapiens
  siRNA target sequence for KRT20 (NM_019010.1,522-540).
gactgagagaggaatacgt

SEQ ID NO: 287395 - DNA, 19 bp, Homo sapiens
  siRNA target sequence for KRT20 (NM_019010.1,528-546).
gagaggaatacgtctaaca

SEQ ID NO: 287396 - DNA, 19 bp, Homo sapiens
  siRNA target sequence for KRT20 (NM_019010.1,556-574).
gatctccaaggcctgaata

SEQ ID NO: 287397 - DNA, 19 bp, Homo sapiens
  siRNA target sequence for KRT20 (NM_019010.1,640-658).
gacctagctctcctcaaaa

SEQ ID NO: 287398 - DNA, 19 bp, Homo sapiens
  siRNA target sequence for KRT20 (NM_019010.1,883-901).
ggaactgaggttcaactaa

SEQ ID NO: 287399 - DNA, 19 bp, Homo sapiens
  siRNA target sequence for KRT20 (NM_019010.1,1081-1099).
gaacgccagaacaacgaat

SEQ ID NO: 287400 - DNA, 19 bp, Homo sapiens
  siRNA target sequence for KRT20 (NM_019010.1,1086-1104).
ccagaacaacgaataccat

SEQ ID NO: 287401 - DNA, 19 bp, Homo sapiens
  siRNA target sequence for KRT20 (NM_019010.1,1087-1105).
cagaacaacgaataccata

SEQ ID NO: 287402 - DNA, 19 bp, Homo sapiens
  siRNA target sequence for KRT20 (NM_019010.1,1092-1110).
caacgaataccatatcctt

SEQ ID NO: 287403 - DNA, 19 bp, Homo sapiens
  siRNA target sequence for KRT20 (NM_019010.1,1102-1120).
catatccttcttgacataa

SEQ ID NO: 287404 - DNA, 19 bp, Homo sapiens
  siRNA target sequence for KRT20 (NM_019010.1,1107-1125).
ccttcttgacataaagact

SEQ ID NO: 287405 - DNA, 19 bp, Homo sapiens
  siRNA target sequence for KRT20 (NM_019010.1,1124-1142).
ctcgacttgaacaggaaat

SEQ ID NO: 287406 - DNA, 19 bp, Homo sapiens
  siRNA target sequence for KRT20 (NM_019010.1,1168-1186).
ggagaagacgtaaaaacta

SEQ ID NO: 287407 - DNA, 19 bp, Homo sapiens
  siRNA target sequence for KRT20 (NM_019010.1,1205-1223).
ccctggaagagagagatat

SEQ ID NO: 287408 - DNA, 19 bp, Homo sapiens
  siRNA target sequence for KRT20 (NM_019010.1,1207-1225).
ctggaagagagagatataa

SEQ ID NO: 287409 - DNA, 19 bp, Homo sapiens
  siRNA target sequence for KRT20 (NM_019010.1,1245-1263).
gacagtcgtgcaagaagta

SEQ ID NO: 287410 - DNA, 19 bp, Homo sapiens
  siRNA target sequence for KRT20 (NM_019010.1,1247-1265).
cagtcgtgcaagaagtagt

SEQ ID NO: 287411 - DNA, 19 bp, Homo sapiens
  siRNA target sequence for KRT20 (NM_019010.1,1272-1290).
caaggtcgtgtcatctgaa

SEQ ID NO: 287412 - DNA, 19 bp, Homo sapiens
  siRNA target sequence for KRT20 (NM_019010.1,1278-1296).
cgtgtcatctgaagtcaaa

SEQ ID NO: 287413 - DNA, 19 bp, Homo sapiens
  siRNA target sequence for KRT2A (NM_000423.1,534-552).
gcctctcaacgtgaaagtt

SEQ ID NO: 287414 - DNA, 19 bp, Homo sapiens
  siRNA target sequence for KRT2A (NM_000423.1,536-554).
ctctcaacgtgaaagttga

SEQ ID NO: 287415 - DNA, 19 bp, Homo sapiens
  siRNA target sequence for KRT2A (NM_000423.1,585-603).
gcgtgagcagatcaaaact

SEQ ID NO: 287416 - DNA, 19 bp, Homo sapiens
  siRNA target sequence for KRT2A (NM_000423.1,682-700).
gagctgctacaacaaatga

SEQ ID NO: 287417 - DNA, 19 bp, Homo sapiens
  siRNA target sequence for KRT2A (NM_000423.1,684-702).
gctgctacaacaaatgaat

SEQ ID NO: 287418 - DNA, 19 bp, Homo sapiens
  siRNA target sequence for KRT2A (NM_000423.1,750-768).
cgacagcctcaagagatat

SEQ ID NO: 287419 - DNA, 19 bp, Homo sapiens
  siRNA target sequence for KRT2A (NM_000423.1,780-798).
cactgcagaaagaacatca

SEQ ID NO: 287420 - DNA, 19 bp, Homo sapiens
  siRNA target sequence for KRT2A (NM_000423.1,918-936).
ggacaatgcctacatgata

SEQ ID NO: 287421 - DNA, 19 bp, Homo sapiens
  siRNA target sequence for KRT2A (NM_000423.1,919-937).
gacaatgcctacatgataa

SEQ ID NO: 287422 - DNA, 19 bp, Homo sapiens
  siRNA target sequence for KRT2A (NM_000423.1,1558-1576).
gtgacaagcagcaccattt

SEQ ID NO: 287423 - DNA, 19 bp, Homo sapiens
  siRNA target sequence for KRT2A (NM_000423.1,1568-1586).
gcaccatttcatcaaatgt

SEQ ID NO: 287424 - DNA, 19 bp, Homo sapiens
  siRNA target sequence for KRT2A (NM_000423.1,1708-1726).
ggaggaggaggttctatct

SEQ ID NO: 287425 - DNA, 19 bp, Homo sapiens
  siRNA target sequence for KRT2A (NM_000423.1,1946-1964).
ccagcgtgaccttctcttt

SEQ ID NO: 287426 - DNA, 19 bp, Homo sapiens
  siRNA target sequence for KRT2A (NM_000423.1,1950-1968).
cgtgaccttctcttttaga

SEQ ID NO: 287427 - DNA, 19 bp, Homo sapiens
  siRNA target sequence for KRT5 (NM_000424.2,1351-1369).
gagagccgagattgacaat

SEQ ID NO: 287428 - DNA, 19 bp, Homo sapiens
  siRNA target sequence for KRT5 (NM_000424.2,1878-1896).
gctccagcgtcaaatttgt

SEQ ID NO: 287429 - DNA, 19 bp, Homo sapiens
  siRNA target sequence for KRT6A (NM_005554.2,530-548).
ctgaggagcgtgaacagat

SEQ ID NO: 287430 - DNA, 19 bp, Homo sapiens
  siRNA target sequence for KRT9 (NM_000226.1,302-320).
gttttagtgccagtagttt

SEQ ID NO: 287431 - DNA, 19 bp, Homo sapiens
  siRNA target sequence for KRT9 (NM_000226.1,367-385).
ggaggaggctatagtagtt

SEQ ID NO: 287432 - DNA, 19 bp, Homo sapiens
  siRNA target sequence for KRT9 (NM_000226.1,531-549).
catgcaggaactcaattct

SEQ ID NO: 287433 - DNA, 19 bp, Homo sapiens
  siRNA target sequence for KRT9 (NM_000226.1,646-664).
gctgctatccagaagaact

SEQ ID NO: 287434 - DNA, 19 bp, Homo sapiens
  siRNA target sequence for KRT9 (NM_000226.1,647-665).
ctgctatccagaagaacta

SEQ ID NO: 287435 - DNA, 19 bp, Homo sapiens
  siRNA target sequence for KRT9 (NM_000226.1,649-667).
gctatccagaagaactact

SEQ ID NO: 287436 - DNA, 19 bp, Homo sapiens
  siRNA target sequence for KRT9 (NM_000226.1,660-678).
gaactactccccttattat

SEQ ID NO: 287437 - DNA, 19 bp, Homo sapiens
  siRNA target sequence for KRT9 (NM_000226.1,668-686).
ccccttattataacactat

SEQ ID NO: 287438 - DNA, 19 bp, Homo sapiens
  siRNA target sequence for KRT9 (NM_000226.1,671-689).
cttattataacactattga

SEQ ID NO: 287439 - DNA, 19 bp, Homo sapiens
  siRNA target sequence for KRT9 (NM_000226.1,761-779).
gcatgacactggatgactt

SEQ ID NO: 287440 - DNA, 19 bp, Homo sapiens
  siRNA target sequence for KRT9 (NM_000226.1,769-787).
ctggatgacttcaggataa

SEQ ID NO: 287441 - DNA, 19 bp, Homo sapiens
  siRNA target sequence for KRT9 (NM_000226.1,984-1002).
caatgtggagataaacgtt

SEQ ID NO: 287442 - DNA, 19 bp, Homo sapiens
  siRNA target sequence for KRT9 (NM_000226.1,1080-1098).
ggacatcgagaatcaatat

SEQ ID NO: 287443 - DNA, 19 bp, Homo sapiens
  siRNA target sequence for KRT9 (NM_000226.1,1093-1111).
caatatgagactcagataa

SEQ ID NO: 287444 - DNA, 19 bp, Homo sapiens
  siRNA target sequence for KRT9 (NM_000226.1,1300-1318).
caggagcagatcagtaact

SEQ ID NO: 287445 - DNA, 19 bp, Homo sapiens
  siRNA target sequence for KRT9 (NM_000226.1,1334-1352).
ctgacgtccggcaagagat

SEQ ID NO: 287446 - DNA, 19 bp, Homo sapiens
  siRNA target sequence for KRT9 (NM_000226.1,1376-1394).
gccttctgctcagcattaa

SEQ ID NO: 287447 - DNA, 19 bp, Homo sapiens
  siRNA target sequence for KRT9 (NM_000226.1,1860-1878).
ctacggaggcggtgaagaa

SEQ ID NO: 287448 - DNA, 19 bp, Homo sapiens
  siRNA target sequence for KRTHA1 (NM_002277.2,358-376).
gttaccagtcctattttaa

SEQ ID NO: 287449 - DNA, 19 bp, Homo sapiens
  siRNA target sequence for LOC81569 (NM_030812.1,208-226).
cacgggtctggctttttga

SEQ ID NO: 287450 - DNA, 19 bp, Homo sapiens
  siRNA target sequence for LOC81569 (NM_030812.1,414-432).
gcagtacctctggtcattt

SEQ ID NO: 287451 - DNA, 19 bp, Homo sapiens
  siRNA target sequence for LOC81569 (NM_030812.1,502-520).
cctgcggaccgaaagaaga

SEQ ID NO: 287452 - DNA, 19 bp, Homo sapiens
  siRNA target sequence for LOC81569 (NM_030812.1,503-521).
ctgcggaccgaaagaagat

SEQ ID NO: 287453 - DNA, 19 bp, Homo sapiens
  siRNA target sequence for LOC81569 (NM_030812.1,612-630).
cggagtggtggttgattct

SEQ ID NO: 287454 - DNA, 19 bp, Homo sapiens
  siRNA target sequence for LOC81569 (NM_030812.1,793-811).
gccgtgactcagatgaaca

SEQ ID NO: 287455 - DNA, 19 bp, Homo sapiens
  siRNA target sequence for LOC81569 (NM_030812.1,794-812).
ccgtgactcagatgaacaa

SEQ ID NO: 287456 - DNA, 19 bp, Homo sapiens
  siRNA target sequence for LOC81569 (NM_030812.1,815-833).
gctacgtgccgcagaatct

SEQ ID NO: 287457 - DNA, 19 bp, Homo sapiens
  siRNA target sequence for LOC81569 (NM_030812.1,1087-1105).
ctctatcccgggttcacaa

SEQ ID NO: 287458 - DNA, 19 bp, Homo sapiens
  siRNA target sequence for LOC81569 (NM_030812.1,1159-1177).
gtctgggagggttccaata

SEQ ID NO: 287459 - DNA, 19 bp, Homo sapiens
  siRNA target sequence for LOC81569 (NM_030812.1,1161-1179).
ctgggagggttccaataga

SEQ ID NO: 287460 - DNA, 19 bp, Homo sapiens
  siRNA target sequence for LOC81569 (NM_030812.1,1163-1181).
gggagggttccaatagaaa

SEQ ID NO: 287461 - DNA, 19 bp, Homo sapiens
  siRNA target sequence for LOC81569 (NM_030812.1,1165-1183).
gagggttccaatagaaact

SEQ ID NO: 287462 - DNA, 19 bp, Homo sapiens
  siRNA target sequence for LOC81569 (NM_030812.1,1167-1185).
gggttccaatagaaacttt

SEQ ID NO: 287463 - DNA, 19 bp, Homo sapiens
  siRNA target sequence for LOR (NM_000427.1,284-302).
ccggtgggagcgtcaagta

SEQ ID NO: 287464 - DNA, 19 bp, Homo sapiens
  siRNA target sequence for LOR (NM_000427.1,286-304).
ggtgggagcgtcaagtact

SEQ ID NO: 287465 - DNA, 19 bp, Homo sapiens
  siRNA target sequence for MAPT (NM_005910.2,405-423).
gaggaaccgggctctgaaa

SEQ ID NO: 287466 - DNA, 19 bp, Homo sapiens
  siRNA target sequence for MAPT (NM_005910.2,612-630).
cgcatggtcagtaaaagca

SEQ ID NO: 287467 - DNA, 19 bp, Homo sapiens
  siRNA target sequence for MAPT (NM_005910.2,666-684).
ggggctgatggtaaaacga

SEQ ID NO: 287468 - DNA, 19 bp, Homo sapiens
  siRNA target sequence for MAPT (NM_005910.2,667-685).
gggctgatggtaaaacgaa

SEQ ID NO: 287469 - DNA, 19 bp, Homo sapiens
  siRNA target sequence for MAPT (NM_005910.2,1054-1072).
ggaaggtgcagataattaa

SEQ ID NO: 287470 - DNA, 19 bp, Homo sapiens
  siRNA target sequence for MAPT (NM_005910.2,1055-1073).
gaaggtgcagataattaat

SEQ ID NO: 287471 - DNA, 19 bp, Homo sapiens
  siRNA target sequence for MAPT (NM_005910.2,1059-1077).
gtgcagataattaataaga

SEQ ID NO: 287472 - DNA, 19 bp, Homo sapiens
  siRNA target sequence for MAPT (NM_005910.2,1103-1121).
caagtgtggctcaaaggat

SEQ ID NO: 287473 - DNA, 19 bp, Homo sapiens
  siRNA target sequence for MAPT (NM_005910.2,1106-1124).
gtgtggctcaaaggataat

SEQ ID NO: 287474 - DNA, 19 bp, Homo sapiens
  siRNA target sequence for MAPT (NM_005910.2,1144-1162).
gcggcagtgtgcaaatagt

SEQ ID NO: 287475 - DNA, 19 bp, Homo sapiens
  siRNA target sequence for MAPT (NM_005910.2,1146-1164).
ggcagtgtgcaaatagtct

SEQ ID NO: 287476 - DNA, 19 bp, Homo sapiens
  siRNA target sequence for MAPT (NM_005910.2,1147-1165).
gcagtgtgcaaatagtcta

SEQ ID NO: 287477 - DNA, 19 bp, Homo sapiens
  siRNA target sequence for MAPT (NM_005910.2,1193-1211).
ctccaagtgtggctcatta

SEQ ID NO: 287478 - DNA, 19 bp, Homo sapiens
  siRNA target sequence for MAPT (NM_005910.2,1236-1254).
ggtggccaggtggaagtaa

SEQ ID NO: 287479 - DNA, 19 bp, Homo sapiens
  siRNA target sequence for MAPT (NM_005910.2,1237-1255).
gtggccaggtggaagtaaa

SEQ ID NO: 287480 - DNA, 19 bp, Homo sapiens
  siRNA target sequence for MAPT (NM_005910.2,1280-1298).
cagagtccagtcgaagatt

SEQ ID NO: 287481 - DNA, 19 bp, Homo sapiens
  siRNA target sequence for MAPT (NM_005910.2,1299-1317).
gggtccctggacaatatca

SEQ ID NO: 287482 - DNA, 19 bp, Homo sapiens
  siRNA target sequence for MAPT (NM_016835.1,1043-1061).
ggatttcctctccaaagtt

SEQ ID NO: 287483 - DNA, 19 bp, Homo sapiens
  siRNA target sequence for MAPT (NM_016835.1,1142-1160).
gtttcacgtggaaatcaca

SEQ ID NO: 287484 - DNA, 19 bp, Homo sapiens
  siRNA target sequence for MAPT (NM_016835.1,1183-1201).
cgcactcggaggagcattt

SEQ ID NO: 287485 - DNA, 19 bp, Homo sapiens
  siRNA target sequence for MAPT (NM_016835.1,1342-1360).
gccgggtccctcaactcaa

SEQ ID NO: 287486 - DNA, 19 bp, Homo sapiens
  siRNA target sequence for MAPT (NM_016835.1,1343-1361).
ccgggtccctcaactcaaa

SEQ ID NO: 287487 - DNA, 19 bp, Homo sapiens
  siRNA target sequence for MAPT (NM_016835.1,1429-1447).
gttcctctgctaaaacctt

SEQ ID NO: 287488 - DNA, 19 bp, Homo sapiens
  siRNA target sequence for MAPT (NM_016841.1,879-897).
gggaaggtgcaaatagtct

SEQ ID NO: 287489 - DNA, 19 bp, Homo sapiens
  siRNA target sequence for MAPT (NM_016841.1,880-898).
ggaaggtgcaaatagtcta

SEQ ID NO: 287490 - DNA, 19 bp, Homo sapiens
  siRNA target sequence for MSN (NM_002444.1,424-442).
gggcattctcaatgatgat

SEQ ID NO: 287491 - DNA, 19 bp, Homo sapiens
  siRNA target sequence for MSN (NM_002444.1,425-443).
ggcattctcaatgatgata

SEQ ID NO: 287492 - DNA, 19 bp, Homo sapiens
  siRNA target sequence for MSN (NM_002444.1,426-444).
gcattctcaatgatgatat

SEQ ID NO: 287493 - DNA, 19 bp, Homo sapiens
  siRNA target sequence for MSN (NM_002444.1,480-498).
cgtatgctgtccagtctaa

SEQ ID NO: 287494 - DNA, 19 bp, Homo sapiens
  siRNA target sequence for MSN (NM_002444.1,764-782).
gccctgggtctcaacatct

SEQ ID NO: 287495 - DNA, 19 bp, Homo sapiens
  siRNA target sequence for MSN (NM_002444.1,765-783).
ccctgggtctcaacatcta

SEQ ID NO: 287496 - DNA, 19 bp, Homo sapiens
  siRNA target sequence for MSN (NM_002444.1,787-805).
gcagaatgacagactaact

SEQ ID NO: 287497 - DNA, 19 bp, Homo sapiens
  siRNA target sequence for MSN (NM_002444.1,868-886).
catcaagcccattgacaaa

SEQ ID NO: 287498 - DNA, 19 bp, Homo sapiens
  siRNA target sequence for MSN (NM_002444.1,981-999).
gtcgcaagcctgataccat

SEQ ID NO: 287499 - DNA, 19 bp, Homo sapiens
  siRNA target sequence for MSN (NM_002444.1,1057-1075).
gcgtgctatgctggaaaat

SEQ ID NO: 287500 - DNA, 19 bp, Homo sapiens
  siRNA target sequence for MSN (NM_002444.1,1059-1077).
gtgctatgctggaaaatga

SEQ ID NO: 287501 - DNA, 19 bp, Homo sapiens
  siRNA target sequence for MSN (NM_002444.1,1747-1765).
gcgactgggccgagacaaa

SEQ ID NO: 287502 - DNA, 19 bp, Homo sapiens
  siRNA target sequence for MSN (NM_002444.1,1748-1766).
cgactgggccgagacaaat

SEQ ID NO: 287503 - DNA, 19 bp, Homo sapiens
  siRNA target sequence for MSN (NM_002444.1,1749-1767).
gactgggccgagacaaata

SEQ ID NO: 287504 - DNA, 19 bp, Homo sapiens
  siRNA target sequence for MSN (NM_002444.1,1808-1826).
cgcattgacgaatttgagt

SEQ ID NO: 287505 - DNA, 19 bp, Homo sapiens
  siRNA target sequence for MSN (NM_002444.1,1814-1832).
gacgaatttgagtctatgt

SEQ ID NO: 287506 - DNA, 19 bp, Homo sapiens
  siRNA target sequence for NEF3 (NM_005382.1,140-158).
ccgtgtcctcctcctataa

SEQ ID NO: 287507 - DNA, 19 bp, Homo sapiens
  siRNA target sequence for NEF3 (NM_005382.1,764-782).
cggtggagcgcaaagacta

SEQ ID NO: 287508 - DNA, 19 bp, Homo sapiens
  siRNA target sequence for NEF3 (NM_005382.1,800-818).
cgacggcgctgaaggaaat

SEQ ID NO: 287509 - DNA, 19 bp, Homo sapiens
  siRNA target sequence for NEF3 (NM_005382.1,862-880).
gccgaagagtggttcaaat

SEQ ID NO: 287510 - DNA, 19 bp, Homo sapiens
  siRNA target sequence for NEF3 (NM_005382.1,1136-1154).
gtcatttgcgcgaatacca

SEQ ID NO: 287511 - DNA, 19 bp, Homo sapiens
  siRNA target sequence for NEF3 (NM_005382.1,1218-1236).
gggtgaagagactagattt

SEQ ID NO: 287512 - DNA, 19 bp, Homo sapiens
  siRNA target sequence for NEF3 (NM_005382.1,1227-1245).
gactagatttagcacattt

SEQ ID NO: 287513 - DNA, 19 bp, Homo sapiens
  siRNA target sequence for NEF3 (NM_005382.1,1259-1277).
ctgggccactgtatacaca

SEQ ID NO: 287514 - DNA, 19 bp, Homo sapiens
  siRNA target sequence for NEF3 (NM_005382.1,1278-1296).
ccgacccccaatcacaata

SEQ ID NO: 287515 - DNA, 19 bp, Homo sapiens
  siRNA target sequence for NEF3 (NM_005382.1,1279-1297).
cgacccccaatcacaatat

SEQ ID NO: 287516 - DNA, 19 bp, Homo sapiens
  siRNA target sequence for NEF3 (NM_005382.1,1282-1300).
cccccaatcacaatatcca

SEQ ID NO: 287517 - DNA, 19 bp, Homo sapiens
  siRNA target sequence for NEF3 (NM_005382.1,1336-1354).
cttaaggtccaacacaaat

SEQ ID NO: 287518 - DNA, 19 bp, Homo sapiens
  siRNA target sequence for NEF3 (NM_005382.1,1413-1431).
ggccctgacagccattaca

SEQ ID NO: 287519 - DNA, 19 bp, Homo sapiens
  siRNA target sequence for NEF3 (NM_005382.1,2526-2544).
gaaggggggtgataaaagt

SEQ ID NO: 287520 - DNA, 19 bp, Homo sapiens
  siRNA target sequence for NEF3 (NM_005382.1,2564-2582).
ccaaaacggtagaaaaaat

SEQ ID NO: 287521 - DNA, 19 bp, Homo sapiens
  siRNA target sequence for NEF3 (NM_005382.1,2627-2645).
ctgtaaccgtcactcaaaa

SEQ ID NO: 287522 - DNA, 19 bp, Homo sapiens
  siRNA target sequence for NEF3 (NM_005382.1,2674-2692).
gagaaactagtgtctacta

SEQ ID NO: 287523 - DNA, 19 bp, Homo sapiens
  siRNA target sequence for NEF3 (NM_005382.1,2709-2727).
cacttcacacgccatagta

SEQ ID NO: 287524 - DNA, 19 bp, Homo sapiens
  siRNA target sequence for NEF3 (NM_005382.1,2714-2732).
cacacgccatagtaaagga

SEQ ID NO: 287525 - DNA, 19 bp, Homo sapiens
  siRNA target sequence for NEFL (NM_006158.1,648-666).
cttgatggacgaaatctct

SEQ ID NO: 287526 - DNA, 19 bp, Homo sapiens
  siRNA target sequence for NEFL (NM_006158.1,651-669).
gatggacgaaatctctttt

SEQ ID NO: 287527 - DNA, 19 bp, Homo sapiens
  siRNA target sequence for NEFL (NM_006158.1,945-963).
caagaccctggaaatcgaa

SEQ ID NO: 287528 - DNA, 19 bp, Homo sapiens
  siRNA target sequence for NEFL (NM_006158.1,1044-1062).
gcaggacacgatcaacaaa

SEQ ID NO: 287529 - DNA, 19 bp, Homo sapiens
  siRNA target sequence for NEFL (NM_006158.1,1047-1065).
ggacacgatcaacaaatta

SEQ ID NO: 287530 - DNA, 19 bp, Homo sapiens
  siRNA target sequence for NEFL (NM_006158.1,1050-1068).
cacgatcaacaaattagaa

SEQ ID NO: 287531 - DNA, 19 bp, Homo sapiens
  siRNA target sequence for NEFL (NM_006158.1,1072-1090).
gaattgaggaccacaaaga

SEQ ID NO: 287532 - DNA, 19 bp, Homo sapiens
  siRNA target sequence for NEFL (NM_006158.1,1098-1116).
ggcacgatacctaaaagaa

SEQ ID NO: 287533 - DNA, 19 bp, Homo sapiens
  siRNA target sequence for NEFL (NM_006158.1,1192-1210).
gagacccgactcagtttca

SEQ ID NO: 287534 - DNA, 19 bp, Homo sapiens
  siRNA target sequence for PPL (NM_002705.2,142-160).
cagacccggagcatctcta

SEQ ID NO: 287535 - DNA, 19 bp, Homo sapiens
  siRNA target sequence for PPL (NM_002705.2,850-868).
cagtatgagaatttcatca

SEQ ID NO: 287536 - DNA, 19 bp, Homo sapiens
  siRNA target sequence for PPL (NM_002705.2,1752-1770).
cgagctactgcggattgaa

SEQ ID NO: 287537 - DNA, 19 bp, Homo sapiens
  siRNA target sequence for PPL (NM_002705.2,1979-1997).
cacacgagaaccatctgaa

SEQ ID NO: 287538 - DNA, 19 bp, Homo sapiens
  siRNA target sequence for PPL (NM_002705.2,2403-2421).
gaacctgctagatgagata

SEQ ID NO: 287539 - DNA, 19 bp, Homo sapiens
  siRNA target sequence for PPL (NM_002705.2,2479-2497).
gctgtaaaggactatgagt

SEQ ID NO: 287540 - DNA, 19 bp, Homo sapiens
  siRNA target sequence for PPL (NM_002705.2,2524-2542).
ctcgacttggagaatggaa

SEQ ID NO: 287541 - DNA, 19 bp, Homo sapiens
  siRNA target sequence for PPL (NM_002705.2,2611-2629).
gcacttgccgccaagttca

SEQ ID NO: 287542 - DNA, 19 bp, Homo sapiens
  siRNA target sequence for PPL (NM_002705.2,2619-2637).
cgccaagttcactgaagtt

SEQ ID NO: 287543 - DNA, 19 bp, Homo sapiens
  siRNA target sequence for PPL (NM_002705.2,2620-2638).
gccaagttcactgaagttt

SEQ ID NO: 287544 - DNA, 19 bp, Homo sapiens
  siRNA target sequence for PPL (NM_002705.2,2621-2639).
ccaagttcactgaagttta

SEQ ID NO: 287545 - DNA, 19 bp, Homo sapiens
  siRNA target sequence for PPL (NM_002705.2,3483-3501).
cgatctcacccgccaatat

SEQ ID NO: 287546 - DNA, 19 bp, Homo sapiens
  siRNA target sequence for PPL (NM_002705.2,3633-3651).
ccccaaggcggaaagtgaa

SEQ ID NO: 287547 - DNA, 19 bp, Homo sapiens
  siRNA target sequence for PPL (NM_002705.2,3790-3808).
gaagtcattaagtacaaga

SEQ ID NO: 287548 - DNA, 19 bp, Homo sapiens
  siRNA target sequence for PPL (NM_002705.2,3871-3889).
ctgatcgaaaggtgtgatt

SEQ ID NO: 287549 - DNA, 19 bp, Homo sapiens
  siRNA target sequence for PPL (NM_002705.2,4117-4135).
ctctcgcgggtgaaggaaa

SEQ ID NO: 287550 - DNA, 19 bp, Homo sapiens
  siRNA target sequence for PPL (NM_002705.2,4222-4240).
gagctgcggcagattgaca

SEQ ID NO: 287551 - DNA, 19 bp, Homo sapiens
  siRNA target sequence for PPL (NM_002705.2,4396-4414).
gaggcccgtgagaaggtaa

SEQ ID NO: 287552 - DNA, 19 bp, Homo sapiens
  siRNA target sequence for PPL (NM_002705.2,5204-5222).
gggagtcctcagtgataca

SEQ ID NO: 287553 - DNA, 19 bp, Homo sapiens
  siRNA target sequence for PPL (NM_002705.2,5290-5308).
cagtatgaccgctatgtca

SEQ ID NO: 287554 - DNA, 19 bp, Homo sapiens
  siRNA target sequence for SCAM-1 (NM_005775.2,265-283).
ggctccaacacccttaatt

SEQ ID NO: 287555 - DNA, 19 bp, Homo sapiens
  siRNA target sequence for SCAM-1 (NM_005775.2,266-284).
gctccaacacccttaattt

SEQ ID NO: 287556 - DNA, 19 bp, Homo sapiens
  siRNA target sequence for SCAM-1 (NM_005775.2,361-379).
gaccctgcgtggtatcaga

SEQ ID NO: 287557 - DNA, 19 bp, Homo sapiens
  siRNA target sequence for SCAM-1 (NM_005775.2,403-421).
ccctctgcaagcacaaaga

SEQ ID NO: 287558 - DNA, 19 bp, Homo sapiens
  siRNA target sequence for SCAM-1 (NM_005775.2,574-592).
gactggtaccggagaatgt

SEQ ID NO: 287559 - DNA, 19 bp, Homo sapiens
  siRNA target sequence for SCAM-1 (NM_005775.2,755-773).
ctagaagcaccttcaacta

SEQ ID NO: 287560 - DNA, 19 bp, Homo sapiens
  siRNA target sequence for SCAM-1 (NM_005775.2,830-848).
gggaaaaagtagacaatgt

SEQ ID NO: 287561 - DNA, 19 bp, Homo sapiens
  siRNA target sequence for SCAM-1 (NM_005775.2,832-850).
gaaaaagtagacaatgtct

SEQ ID NO: 287562 - DNA, 19 bp, Homo sapiens
  siRNA target sequence for SCAM-1 (NM_005775.2,1006-1024).
gacctgcgggcaattgaga

SEQ ID NO: 287563 - DNA, 19 bp, Homo sapiens
  siRNA target sequence for SCAM-1 (NM_005775.2,1195-1213).
ggtcggagggactttgtct

SEQ ID NO: 287564 - DNA, 19 bp, Homo sapiens
  siRNA target sequence for SCAM-1 (NM_005775.2,1196-1214).
gtcggagggactttgtcta

SEQ ID NO: 287565 - DNA, 19 bp, Homo sapiens
  siRNA target sequence for SCAM-1 (NM_005775.2,1294-1312).
gccaggctcaagtttgact

SEQ ID NO: 287566 - DNA, 19 bp, Homo sapiens
  siRNA target sequence for SCAM-1 (NM_005775.2,1345-1363).
cagaagggtgacattgtct

SEQ ID NO: 287567 - DNA, 19 bp, Homo sapiens
  siRNA target sequence for SCAM-1 (NM_005775.2,2048-2066).
gggacagggtggatgtcat

SEQ ID NO: 287568 - DNA, 19 bp, Homo sapiens
  siRNA target sequence for SCAM-1 (NM_005775.2,2121-2139).
cggaacgttccctggaaat

SEQ ID NO: 287569 - DNA, 19 bp, Homo sapiens
  siRNA target sequence for SCAM-1 (NM_005775.2,2122-2140).
ggaacgttccctggaaatt

SEQ ID NO: 287570 - DNA, 19 bp, Homo sapiens
  siRNA target sequence for SCAM-1 (NM_005775.2,2123-2141).
gaacgttccctggaaatta

SEQ ID NO: 287571 - DNA, 19 bp, Homo sapiens
  siRNA target sequence for SCAM-1 (NM_005775.2,2126-2144).
cgttccctggaaattacgt

SEQ ID NO: 287572 - DNA, 19 bp, Homo sapiens
  siRNA target sequence for SCAM-1 (NM_005775.2,2127-2145).
gttccctggaaattacgtt

SEQ ID NO: 287573 - DNA, 19 bp, Homo sapiens
  siRNA target sequence for VIM (NM_003380.1,725-743).
caccctgcaatctttcaga

SEQ ID NO: 287574 - DNA, 19 bp, Homo sapiens
  siRNA target sequence for VIM (NM_003380.1,1022-1040).
ggctgccaaccggaacaat

SEQ ID NO: 287575 - DNA, 19 bp, Homo sapiens
  siRNA target sequence for VIM (NM_003380.1,1110-1128).
gtggatgcccttaaaggaa

SEQ ID NO: 287576 - DNA, 19 bp, Homo sapiens
  siRNA target sequence for VIM (NM_003380.1,1177-1195).
ccgttgaagctgctaacta

SEQ ID NO: 287577 - DNA, 19 bp, Homo sapiens
  siRNA target sequence for VIM (NM_003380.1,1189-1207).
ctaactaccaagacactat

SEQ ID NO: 287578 - DNA, 19 bp, Homo sapiens
  siRNA target sequence for VIM (NM_003380.1,1385-1403).
gaacctgagggaaactaat

SEQ ID NO: 287579 - DNA, 19 bp, Homo sapiens
  siRNA target sequence for VIM (NM_003380.1,1421-1439).
ggttgatacccactcaaaa

SEQ ID NO: 287580 - DNA, 19 bp, Homo sapiens
  siRNA target sequence for VIM (NM_003380.1,1425-1443).
gatacccactcaaaaagga

SEQ ID NO: 287581 - DNA, 19 bp, Homo sapiens
  siRNA target sequence for VIM (NM_003380.1,1449-1467).
ctgattaagacggttgaaa

SEQ ID NO: 287582 - DNA, 19 bp, Homo sapiens
  siRNA target sequence for VIM (NM_003380.1,1451-1469).
gattaagacggttgaaact

SEQ ID NO: 287583 - DNA, 19 bp, Homo sapiens
  siRNA target sequence for VIM (NM_003380.1,1457-1475).
gacggttgaaactagagat

SEQ ID NO: 287584 - DNA, 19 bp, Homo sapiens
  siRNA target sequence for VIM (NM_003380.1,1471-1489).
gagatggacaggttatcaa

SEQ ID NO: 287585 - DNA, 19 bp, Homo sapiens
  siRNA target sequence for VIM (NM_003380.1,1479-1497).
caggttatcaacgaaactt

SEQ ID NO: 287586 - DNA, 19 bp, Homo sapiens
  siRNA target sequence for VIM (NM_003380.1,1481-1499).
ggttatcaacgaaacttct

SEQ ID NO: 287587 - DNA, 19 bp, Homo sapiens
  siRNA target sequence for ELN (NM_000501.1,242-260).
ccttccccgcagttacctt

SEQ ID NO: 287588 - DNA, 19 bp, Homo sapiens
  siRNA target sequence for ELN (NM_000501.1,243-261).
cttccccgcagttaccttt

SEQ ID NO: 287589 - DNA, 19 bp, Homo sapiens
  siRNA target sequence for ELN (NM_000501.1,852-870).
cgtgcctggggcaattcct

SEQ ID NO: 287590 - DNA, 19 bp, Homo sapiens
  siRNA target sequence for COL11A2 (NM_080679.1,701-719).
gtctgtcaccctcattgtt

SEQ ID NO: 287591 - DNA, 19 bp, Homo sapiens
  siRNA target sequence for COL11A2 (NM_080679.1,757-775).
gtgctcgtccagtattgga

SEQ ID NO: 287592 - DNA, 19 bp, Homo sapiens
  siRNA target sequence for COL11A2 (NM_080679.1,778-796).
cccatggagtgatcatctt

SEQ ID NO: 287593 - DNA, 19 bp, Homo sapiens
  siRNA target sequence for COL11A2 (NM_080679.1,802-820).
cccgtattctggatgaaga

SEQ ID NO: 287594 - DNA, 19 bp, Homo sapiens
  siRNA target sequence for COL11A2 (NM_080679.1,1613-1631).
gggccataggggtgatact

SEQ ID NO: 287595 - DNA, 19 bp, Homo sapiens
  siRNA target sequence for COL11A2 (NM_080679.1,2089-2107).
ggggtctgaagggtcataa

SEQ ID NO: 287596 - DNA, 19 bp, Homo sapiens
  siRNA target sequence for COL11A2 (NM_080679.1,2330-2348).
caaggggtccctaggattt

SEQ ID NO: 287597 - DNA, 19 bp, Homo sapiens
  siRNA target sequence for COL11A2 (NM_080679.1,4462-4480).
gtctgatgcaggaagatga

SEQ ID NO: 287598 - DNA, 19 bp, Homo sapiens
  siRNA target sequence for COL11A2 (NM_080679.1,4690-4708).
gggatgccttccgagtttt

SEQ ID NO: 287599 - DNA, 19 bp, Homo sapiens
  siRNA target sequence for COL11A2 (NM_080679.1,4692-4710).
gatgccttccgagttttct

SEQ ID NO: 287600 - DNA, 19 bp, Homo sapiens
  siRNA target sequence for COL11A2 (NM_080679.1,4932-4950).
gagactagcccctatgtca

SEQ ID NO: 287601 - DNA, 19 bp, Homo sapiens
  siRNA target sequence for COL11A2 (NM_080679.1,4934-4952).
gactagcccctatgtcaaa

SEQ ID NO: 287602 - DNA, 19 bp, Homo sapiens
  siRNA target sequence for COL11A2 (NM_080679.1,4936-4954).
ctagcccctatgtcaaaga

SEQ ID NO: 287603 - DNA, 19 bp, Homo sapiens
  siRNA target sequence for COL11A2 (NM_080679.1,4939-4957).
gcccctatgtcaaagaatt

SEQ ID NO: 287604 - DNA, 19 bp, Homo sapiens
  siRNA target sequence for COL11A2 (NM_080679.1,4941-4959).
ccctatgtcaaagaattca

SEQ ID NO: 287605 - DNA, 19 bp, Homo sapiens
  siRNA target sequence for COL11A2 (NM_080680.1,1078-1096).
cggggacaacccctgatta

SEQ ID NO: 287606 - DNA, 19 bp, Homo sapiens
  siRNA target sequence for COL11A2 (NM_080680.1,1079-1097).
ggggacaacccctgattat

SEQ ID NO: 287607 - DNA, 19 bp, Homo sapiens
  siRNA target sequence for COL11A2 (NM_080680.1,1081-1099).
ggacaacccctgattatca

SEQ ID NO: 287608 - DNA, 19 bp, Homo sapiens
  siRNA target sequence for COL11A2 (NM_080680.1,1202-1220).
gttccaggcagaggaatat

SEQ ID NO: 287609 - DNA, 19 bp, Homo sapiens
  siRNA target sequence for COL11A2 (NM_080680.1,1242-1260).
cctgaagggccctacgatt

SEQ ID NO: 287610 - DNA, 19 bp, Homo sapiens
  siRNA target sequence for COL11A2 (NM_080680.1,1243-1261).
ctgaagggccctacgatta

SEQ ID NO: 287611 - DNA, 19 bp, Homo sapiens
  siRNA target sequence for COL11A2 (NM_080680.1,1245-1263).
gaagggccctacgattaca

SEQ ID NO: 287612 - DNA, 19 bp, Homo sapiens
  siRNA target sequence for COL11A2 (NM_080680.1,1271-1289).
ctatggggatgattatcgt

SEQ ID NO: 287613 - DNA, 19 bp, Homo sapiens
  siRNA target sequence for AMELX (NM_182680.1,175-193).
cacattctcaggctatcaa

SEQ ID NO: 287614 - DNA, 19 bp, Homo sapiens
  siRNA target sequence for AMELX (NM_182680.1,181-199).
ctcaggctatcaatgttga

SEQ ID NO: 287615 - DNA, 19 bp, Homo sapiens
  siRNA target sequence for AMELY (NM_001143.1,191-209).
gtaccagagcatgataaga

SEQ ID NO: 287616 - DNA, 19 bp, Homo sapiens
  siRNA target sequence for BGN (NM_001711.3,260-278).
gacgatgggccattcatga

SEQ ID NO: 287617 - DNA, 19 bp, Homo sapiens
  siRNA target sequence for BGN (NM_001711.3,263-281).
gatgggccattcatgatga

SEQ ID NO: 287618 - DNA, 19 bp, Homo sapiens
  siRNA target sequence for BGN (NM_001711.3,527-545).
ctcgtcctggtgaacaaca

SEQ ID NO: 287619 - DNA, 19 bp, Homo sapiens
  siRNA target sequence for BGN (NM_001711.3,711-729).
gcgggctccggaacatgaa

SEQ ID NO: 287620 - DNA, 19 bp, Homo sapiens
  siRNA target sequence for BGN (NM_001711.3,713-731).
gggctccggaacatgaact

SEQ ID NO: 287621 - DNA, 19 bp, Homo sapiens
  siRNA target sequence for BGN (NM_001711.3,855-873).
ctgagaccctgaatgaact

SEQ ID NO: 287622 - DNA, 19 bp, Homo sapiens
  siRNA target sequence for CHAD (NM_001267.1,439-457).
gcctcaagcaacttatcta

SEQ ID NO: 287623 - DNA, 19 bp, Homo sapiens
  siRNA target sequence for CHAD (NM_001267.1,441-459).
ctcaagcaacttatctact

SEQ ID NO: 287624 - DNA, 19 bp, Homo sapiens
  siRNA target sequence for CHAD (NM_001267.1,955-973).
cgctgaaacacgtccattt

SEQ ID NO: 287625 - DNA, 19 bp, Homo sapiens
  siRNA target sequence for CHAD (NM_001267.1,1030-1048).
ccctcgcccttaccaataa

SEQ ID NO: 287626 - DNA, 19 bp, Homo sapiens
  siRNA target sequence for COL10A1 (NM_000493.2,121-139).
ctgctagtatccttgaact

SEQ ID NO: 287627 - DNA, 19 bp, Homo sapiens
  siRNA target sequence for COL10A1 (NM_000493.2,230-248).
cctacaccataaagagtaa

SEQ ID NO: 287628 - DNA, 19 bp, Homo sapiens
  siRNA target sequence for COL10A1 (NM_000493.2,231-249).
ctacaccataaagagtaaa

SEQ ID NO: 287629 - DNA, 19 bp, Homo sapiens
  siRNA target sequence for COL10A1 (NM_000493.2,534-552).
ccctggaccggctggaatt

SEQ ID NO: 287630 - DNA, 19 bp, Homo sapiens
  siRNA target sequence for COL10A1 (NM_000493.2,539-557).
gaccggctggaatttctgt

SEQ ID NO: 287631 - DNA, 19 bp, Homo sapiens
  siRNA target sequence for COL10A1 (NM_000493.2,871-889).
gggccagaaggcattggaa

SEQ ID NO: 287632 - DNA, 19 bp, Homo sapiens
  siRNA target sequence for COL10A1 (NM_000493.2,872-890).
ggccagaaggcattggaaa

SEQ ID NO: 287633 - DNA, 19 bp, Homo sapiens
  siRNA target sequence for COL10A1 (NM_000493.2,1526-1544).
cagctggcatagcaactaa

SEQ ID NO: 287634 - DNA, 19 bp, Homo sapiens
  siRNA target sequence for COL10A1 (NM_000493.2,1654-1672).
gtcatgcctgagggtttta

SEQ ID NO: 287635 - DNA, 19 bp, Homo sapiens
  siRNA target sequence for COL10A1 (NM_000493.2,1656-1674).
catgcctgagggttttata

SEQ ID NO: 287636 - DNA, 19 bp, Homo sapiens
  siRNA target sequence for COL10A1 (NM_000493.2,1681-1699).
ggccaaaggcccagtcttt

SEQ ID NO: 287637 - DNA, 19 bp, Homo sapiens
  siRNA target sequence for COL10A1 (NM_000493.2,1773-1791).
caaagcttacccagcaata

SEQ ID NO: 287638 - DNA, 19 bp, Homo sapiens
  siRNA target sequence for COL10A1 (NM_000493.2,1793-1811).
gaactcccataccatttga

SEQ ID NO: 287639 - DNA, 19 bp, Homo sapiens
  siRNA target sequence for COL10A1 (NM_000493.2,1798-1816).
cccataccatttgataaaa

SEQ ID NO: 287640 - DNA, 19 bp, Homo sapiens
  siRNA target sequence for COL10A1 (NM_000493.2,1868-1886).
gtcagataccaggaatata

SEQ ID NO: 287641 - DNA, 19 bp, Homo sapiens
  siRNA target sequence for COL10A1 (NM_000493.2,1924-1942).
gtttgggtaggcctgtata

SEQ ID NO: 287642 - DNA, 19 bp, Homo sapiens
  siRNA target sequence for COL10A1 (NM_000493.2,1928-1946).
gggtaggcctgtataagaa

SEQ ID NO: 287643 - DNA, 19 bp, Homo sapiens
  siRNA target sequence for COL10A1 (NM_000493.2,1929-1947).
ggtaggcctgtataagaat

SEQ ID NO: 287644 - DNA, 19 bp, Homo sapiens
  siRNA target sequence for COL10A1 (NM_000493.2,2068-2086).
gagtcaaatggcctatact

SEQ ID NO: 287645 - DNA, 19 bp, Homo sapiens
  siRNA target sequence for COL11A1 (NM_001854.2,332-350).
cctctaggtggaaaacgaa

SEQ ID NO: 287646 - DNA, 19 bp, Homo sapiens
  siRNA target sequence for COL11A1 (NM_001854.2,427-445).
gctccagttgatgtactaa

SEQ ID NO: 287647 - DNA, 19 bp, Homo sapiens
  siRNA target sequence for COL11A1 (NM_001854.2,428-446).
ctccagttgatgtactaaa

SEQ ID NO: 287648 - DNA, 19 bp, Homo sapiens
  siRNA target sequence for COL11A1 (NM_001854.2,448-466).
gcactagattttcacaatt

SEQ ID NO: 287649 - DNA, 19 bp, Homo sapiens
  siRNA target sequence for COL11A1 (NM_001854.2,467-485).
ctccagagggaatatcaaa

SEQ ID NO: 287650 - DNA, 19 bp, Homo sapiens
  siRNA target sequence for COL11A1 (NM_001854.2,533-551).
ctgcttacagagtttcaaa

SEQ ID NO: 287651 - DNA, 19 bp, Homo sapiens
  siRNA target sequence for COL11A1 (NM_001854.2,766-784).
gactatcccctcttcagaa

SEQ ID NO: 287652 - DNA, 19 bp, Homo sapiens
  siRNA target sequence for COL11A1 (NM_001854.2,846-864).
gacaatgattgttgattgt

SEQ ID NO: 287653 - DNA, 19 bp, Homo sapiens
  siRNA target sequence for COL11A1 (NM_001854.2,876-894).
cacgaaaccacttgataga

SEQ ID NO: 287654 - DNA, 19 bp, Homo sapiens
  siRNA target sequence for COL11A1 (NM_001854.2,879-897).
gaaaccacttgatagaagt

SEQ ID NO: 287655 - DNA, 19 bp, Homo sapiens
  siRNA target sequence for COL11A1 (NM_001854.2,902-920).
gagcaattgttgataccaa

SEQ ID NO: 287656 - DNA, 19 bp, Homo sapiens
  siRNA target sequence for COL11A1 (NM_001854.2,918-936).
caatggaatcacggttttt

SEQ ID NO: 287657 - DNA, 19 bp, Homo sapiens
  siRNA target sequence for COL11A1 (NM_001854.2,922-940).
ggaatcacggtttttggaa

SEQ ID NO: 287658 - DNA, 19 bp, Homo sapiens
  siRNA target sequence for COL11A1 (NM_001854.2,1003-1021).
cccaaggcagcatatgact

SEQ ID NO: 287659 - DNA, 19 bp, Homo sapiens
  siRNA target sequence for COL11A1 (NM_001854.2,1018-1036).
gactactgtgagcattata

SEQ ID NO: 287660 - DNA, 19 bp, Homo sapiens
  siRNA target sequence for COL11A1 (NM_001854.2,1103-1121).
caccagaggatataatcga

SEQ ID NO: 287661 - DNA, 19 bp, Homo sapiens
  siRNA target sequence for COL11A1 (NM_001854.2,1105-1123).
ccagaggatataatcgaat

SEQ ID NO: 287662 - DNA, 19 bp, Homo sapiens
  siRNA target sequence for COL11A1 (NM_001854.2,1106-1124).
cagaggatataatcgaata

SEQ ID NO: 287663 - DNA, 19 bp, Homo sapiens
  siRNA target sequence for COL11A1 (NM_001854.2,1111-1129).
gatataatcgaatatgact

SEQ ID NO: 287664 - DNA, 19 bp, Homo sapiens
  siRNA target sequence for COL11A1 (NM_001854.2,1205-1223).
cacagacggaggcaaacat

SEQ ID NO: 287665 - DNA, 19 bp, Homo sapiens
  siRNA target sequence for COL11A1 (NM_001854.2,1216-1234).
gcaaacatcgttgatgatt

SEQ ID NO: 287666 - DNA, 19 bp, Homo sapiens
  siRNA target sequence for COL11A1 (NM_001854.2,1217-1235).
caaacatcgttgatgattt

SEQ ID NO: 287667 - DNA, 19 bp, Homo sapiens
  siRNA target sequence for COL11A1 (NM_001854.2,1228-1246).
gatgattttcaagaataca

SEQ ID NO: 287668 - DNA, 19 bp, Homo sapiens
  siRNA target sequence for COL11A1 (NM_001854.2,1276-1294).
gaagctcctaggcatgttt

SEQ ID NO: 287669 - DNA, 19 bp, Homo sapiens
  siRNA target sequence for COL11A1 (NM_001854.2,1367-1385).
cccagaggaaaaattctga

SEQ ID NO: 287670 - DNA, 19 bp, Homo sapiens
  siRNA target sequence for COL11A1 (NM_001854.2,1416-1434).
cggcagggattctgatctt

SEQ ID NO: 287671 - DNA, 19 bp, Homo sapiens
  siRNA target sequence for COL11A1 (NM_001854.2,1445-1463).
gagatttaggcgaatatga

SEQ ID NO: 287672 - DNA, 19 bp, Homo sapiens
  siRNA target sequence for COL11A1 (NM_001854.2,1534-1552).
ccagcagaaactgatatta

SEQ ID NO: 287673 - DNA, 19 bp, Homo sapiens
  siRNA target sequence for COL11A1 (NM_001854.2,1677-1695).
gggtcctccaggtctacaa

SEQ ID NO: 287674 - DNA, 19 bp, Homo sapiens
  siRNA target sequence for COL11A1 (NM_001854.2,1777-1795).
ggtcctcctggtactatgt

SEQ ID NO: 287675 - DNA, 19 bp, Homo sapiens
  siRNA target sequence for COL11A1 (NM_001854.2,1780-1798).
cctcctggtactatgttga

SEQ ID NO: 287676 - DNA, 19 bp, Homo sapiens
  siRNA target sequence for COL11A1 (NM_001854.2,1783-1801).
cctggtactatgttgatgt

SEQ ID NO: 287677 - DNA, 19 bp, Homo sapiens
  siRNA target sequence for COL11A1 (NM_001854.2,1784-1802).
ctggtactatgttgatgtt

SEQ ID NO: 287678 - DNA, 19 bp, Homo sapiens
  siRNA target sequence for COL11A1 (NM_001854.2,1800-1818).
gttaccgttccgttatggt

SEQ ID NO: 287679 - DNA, 19 bp, Homo sapiens
  siRNA target sequence for COL11A1 (NM_001854.2,2109-2127).
gggagatcgagggtttgat

SEQ ID NO: 287680 - DNA, 19 bp, Homo sapiens
  siRNA target sequence for COL11A1 (NM_001854.2,2573-2591).
cacaaggtcctattggata

SEQ ID NO: 287681 - DNA, 19 bp, Homo sapiens
  siRNA target sequence for COL11A1 (NM_001854.2,2973-2991).
gggtcctcgaggttcaaga

SEQ ID NO: 287682 - DNA, 19 bp, Homo sapiens
  siRNA target sequence for COL11A1 (NM_001854.2,3086-3104).
ctcagggtccagttggatt

SEQ ID NO: 287683 - DNA, 19 bp, Homo sapiens
  siRNA target sequence for COL11A1 (NM_001854.2,3243-3261).
cggtgagactggtccaata

SEQ ID NO: 287684 - DNA, 19 bp, Homo sapiens
  siRNA target sequence for COL11A1 (NM_001854.2,3518-3536).
cagctggcccaattggttt

SEQ ID NO: 287685 - DNA, 19 bp, Homo sapiens
  siRNA target sequence for COL11A1 (NM_001854.2,4674-4692).
gggacatcctggtttaatt

SEQ ID NO: 287686 - DNA, 19 bp, Homo sapiens
  siRNA target sequence for COL11A1 (NM_001854.2,4928-4946).
gtccacctggtgaagtcat

SEQ ID NO: 287687 - DNA, 19 bp, Homo sapiens
  siRNA target sequence for COL11A1 (NM_001854.2,4948-4966).
cagcctttaccaatcttgt

SEQ ID NO: 287688 - DNA, 19 bp, Homo sapiens
  siRNA target sequence for COL11A1 (NM_001854.2,5121-5139).
caatccagcccgaacttgt

SEQ ID NO: 287689 - DNA, 19 bp, Homo sapiens
  siRNA target sequence for COL11A1 (NM_001854.2,5126-5144).
cagcccgaacttgtaaaga

SEQ ID NO: 287690 - DNA, 19 bp, Homo sapiens
  siRNA target sequence for COL11A1 (NM_080629.1,1128-1146).
gaggacagtggctactaaa

SEQ ID NO: 287691 - DNA, 19 bp, Homo sapiens
  siRNA target sequence for COL11A1 (NM_080629.1,1133-1151).
cagtggctactaaatcaaa

SEQ ID NO: 287692 - DNA, 19 bp, Homo sapiens
  siRNA target sequence for COL11A1 (NM_080629.1,1137-1155).
ggctactaaatcaaaggaa

SEQ ID NO: 287693 - DNA, 19 bp, Homo sapiens
  siRNA target sequence for COL11A1 (NM_080629.1,1138-1156).
gctactaaatcaaaggaaa

SEQ ID NO: 287694 - DNA, 19 bp, Homo sapiens
  siRNA target sequence for COL11A1 (NM_080629.1,1167-1185).
gtttacaccccccaaatct

SEQ ID NO: 287695 - DNA, 19 bp, Homo sapiens
  siRNA target sequence for COL12A1 (NM_004370.4,264-282).
ccaattgtgggttacagaa

SEQ ID NO: 287696 - DNA, 19 bp, Homo sapiens
  siRNA target sequence for COL12A1 (NM_004370.4,298-316).
caacggatgggcctactaa

SEQ ID NO: 287697 - DNA, 19 bp, Homo sapiens
  siRNA target sequence for COL12A1 (NM_004370.4,301-319).
cggatgggcctactaaaga

SEQ ID NO: 287698 - DNA, 19 bp, Homo sapiens
  siRNA target sequence for COL12A1 (NM_004370.4,302-320).
ggatgggcctactaaagaa

SEQ ID NO: 287699 - DNA, 19 bp, Homo sapiens
  siRNA target sequence for COL12A1 (NM_004370.4,303-321).
gatgggcctactaaagaat

SEQ ID NO: 287700 - DNA, 19 bp, Homo sapiens
  siRNA target sequence for COL12A1 (NM_004370.4,306-324).
gggcctactaaagaattta

SEQ ID NO: 287701 - DNA, 19 bp, Homo sapiens
  siRNA target sequence for COL12A1 (NM_004370.4,333-351).
gctagtaccactgaaactt

SEQ ID NO: 287702 - DNA, 19 bp, Homo sapiens
  siRNA target sequence for COL12A1 (NM_004370.4,334-352).
ctagtaccactgaaacttt

SEQ ID NO: 287703 - DNA, 19 bp, Homo sapiens
  siRNA target sequence for COL12A1 (NM_004370.4,341-359).
cactgaaactttattgtca

SEQ ID NO: 287704 - DNA, 19 bp, Homo sapiens
  siRNA target sequence for COL12A1 (NM_004370.4,378-396).
gagtatgtggtgacaataa

SEQ ID NO: 287705 - DNA, 19 bp, Homo sapiens
  siRNA target sequence for COL12A1 (NM_004370.4,380-398).
gtatgtggtgacaataact

SEQ ID NO: 287706 - DNA, 19 bp, Homo sapiens
  siRNA target sequence for COL12A1 (NM_004370.4,429-447).
gttataggacaactaacaa

SEQ ID NO: 287707 - DNA, 19 bp, Homo sapiens
  siRNA target sequence for COL12A1 (NM_004370.4,522-540).
gcctggactgatttggttt

SEQ ID NO: 287708 - DNA, 19 bp, Homo sapiens
  siRNA target sequence for COL12A1 (NM_004370.4,641-659).
gacaagagttggagttgtt

SEQ ID NO: 287709 - DNA, 19 bp, Homo sapiens
  siRNA target sequence for COL12A1 (NM_004370.4,657-675).
gttcaatacagctctgata

SEQ ID NO: 287710 - DNA, 19 bp, Homo sapiens
  siRNA target sequence for COL12A1 (NM_004370.4,679-697).
ggactgaatttaacttaaa

SEQ ID NO: 287711 - DNA, 19 bp, Homo sapiens
  siRNA target sequence for COL12A1 (NM_004370.4,767-785).
gacaggggatgccattgat

SEQ ID NO: 287712 - DNA, 19 bp, Homo sapiens
  siRNA target sequence for COL12A1 (NM_004370.4,772-790).
gggatgccattgattattt

SEQ ID NO: 287713 - DNA, 19 bp, Homo sapiens
  siRNA target sequence for COL12A1 (NM_004370.4,773-791).
ggatgccattgattattta

SEQ ID NO: 287714 - DNA, 19 bp, Homo sapiens
  siRNA target sequence for COL12A1 (NM_004370.4,778-796).
ccattgattatttagttaa

SEQ ID NO: 287715 - DNA, 19 bp, Homo sapiens
  siRNA target sequence for COL12A1 (NM_004370.4,838-856).
ctaaagtggcaattattat

SEQ ID NO: 287716 - DNA, 19 bp, Homo sapiens
  siRNA target sequence for COL12A1 (NM_004370.4,895-913).
caagagagcttcgtaatgt

SEQ ID NO: 287717 - DNA, 19 bp, Homo sapiens
  siRNA target sequence for COL12A1 (NM_004370.4,929-947).
ctccttgggcattaaagct

SEQ ID NO: 287718 - DNA, 19 bp, Homo sapiens
  siRNA target sequence for COL12A1 (NM_004370.4,985-1003).
cttcactgaaccatgtttt

SEQ ID NO: 287719 - DNA, 19 bp, Homo sapiens
  siRNA target sequence for COL12A1 (NM_004370.4,1058-1076).
ggtgtgctcaggtgttgat

SEQ ID NO: 287720 - DNA, 19 bp, Homo sapiens
  siRNA target sequence for COL12A1 (NM_004370.4,1080-1098).
caacttggtgaattggtta

SEQ ID NO: 287721 - DNA, 19 bp, Homo sapiens
  siRNA target sequence for COL12A1 (NM_004370.4,1094-1112).
ggttagtggagaagaagtt

SEQ ID NO: 287722 - DNA, 19 bp, Homo sapiens
  siRNA target sequence for COL12A1 (NM_004370.4,1138-1156).
ccatggaagtctcttcaaa

SEQ ID NO: 287723 - DNA, 19 bp, Homo sapiens
  siRNA target sequence for COL12A1 (NM_004370.4,1328-1346).
cgccatgaagggaatgaca

SEQ ID NO: 287724 - DNA, 19 bp, Homo sapiens
  siRNA target sequence for COL12A1 (NM_004370.4,1348-1366).
ccagtgaacccatttcaat

SEQ ID NO: 287725 - DNA, 19 bp, Homo sapiens
  siRNA target sequence for COL12A1 (NM_004370.4,1405-1423).
gctcacgtggtgtggatat

SEQ ID NO: 287726 - DNA, 19 bp, Homo sapiens
  siRNA target sequence for COL12A1 (NM_004370.4,1408-1426).
cacgtggtgtggatataaa

SEQ ID NO: 287727 - DNA, 19 bp, Homo sapiens
  siRNA target sequence for COL12A1 (NM_004370.4,1418-1436).
ggatataaaagccgatatt

SEQ ID NO: 287728 - DNA, 19 bp, Homo sapiens
  siRNA target sequence for COL12A1 (NM_004370.4,1473-1491).
gcaaactttgttaaagtta

SEQ ID NO: 287729 - DNA, 19 bp, Homo sapiens
  siRNA target sequence for COL12A1 (NM_004370.4,1496-1514).
ctttttggaagttcttgta

SEQ ID NO: 287730 - DNA, 19 bp, Homo sapiens
  siRNA target sequence for COL12A1 (NM_004370.4,1533-1551).
ccaaatagggtccagatta

SEQ ID NO: 287731 - DNA, 19 bp, Homo sapiens
  siRNA target sequence for COL12A1 (NM_004370.4,1567-1585).
gccgggatcctcatactga

SEQ ID NO: 287732 - DNA, 19 bp, Homo sapiens
  siRNA target sequence for COL12A1 (NM_004370.4,1575-1593).
cctcatactgagttcactt

SEQ ID NO: 287733 - DNA, 19 bp, Homo sapiens
  siRNA target sequence for COL12A1 (NM_004370.4,1576-1594).
ctcatactgagttcacttt

SEQ ID NO: 287734 - DNA, 19 bp, Homo sapiens
  siRNA target sequence for COL12A1 (NM_004370.4,1604-1622).
caccaaagttgaagatata

SEQ ID NO: 287735 - DNA, 19 bp, Homo sapiens
  siRNA target sequence for COL12A1 (NM_004370.4,1709-1727).
gcctagcaagggatcaaga

SEQ ID NO: 287736 - DNA, 19 bp, Homo sapiens
  siRNA target sequence for COL12A1 (NM_004370.4,1710-1728).
cctagcaagggatcaagaa

SEQ ID NO: 287737 - DNA, 19 bp, Homo sapiens
  siRNA target sequence for COL12A1 (NM_004370.4,1765-1783).
ggaaatcatcagatgcttt

SEQ ID NO: 287738 - DNA, 19 bp, Homo sapiens
  siRNA target sequence for COL12A1 (NM_004370.4,1786-1804).
gagatcctgcgataaaact

SEQ ID NO: 287739 - DNA, 19 bp, Homo sapiens
  siRNA target sequence for COL12A1 (NM_004370.4,1788-1806).
gatcctgcgataaaactga

SEQ ID NO: 287740 - DNA, 19 bp, Homo sapiens
  siRNA target sequence for COL12A1 (NM_004370.4,1794-1812).
gcgataaaactgaggaatt

SEQ ID NO: 287741 - DNA, 19 bp, Homo sapiens
  siRNA target sequence for COL12A1 (NM_004370.4,1845-1863).
gatgccgttcgctcagaat

SEQ ID NO: 287742 - DNA, 19 bp, Homo sapiens
  siRNA target sequence for COL12A1 (NM_004370.4,1849-1867).
ccgttcgctcagaattgga

SEQ ID NO: 287743 - DNA, 19 bp, Homo sapiens
  siRNA target sequence for COL12A1 (NM_004370.4,1855-1873).
gctcagaattggaagctat

SEQ ID NO: 287744 - DNA, 19 bp, Homo sapiens
  siRNA target sequence for COL12A1 (NM_004370.4,1944-1962).
gaactcacacagtctatct

SEQ ID NO: 287745 - DNA, 19 bp, Homo sapiens
  siRNA target sequence for COL12A1 (NM_004370.4,1955-1973).
gtctatctgccttagaatt

SEQ ID NO: 287746 - DNA, 19 bp, Homo sapiens
  siRNA target sequence for COL12A1 (NM_004370.4,1976-1994).
gcaagaattggcagctata

SEQ ID NO: 287747 - DNA, 19 bp, Homo sapiens
  siRNA target sequence for COL12A1 (NM_004370.4,1980-1998).
gaattggcagctataaaga

SEQ ID NO: 287748 - DNA, 19 bp, Homo sapiens
  siRNA target sequence for COL12A1 (NM_004370.4,2158-2176).
cgagcaccagtgttgttct

SEQ ID NO: 287749 - DNA, 19 bp, Homo sapiens
  siRNA target sequence for COL12A1 (NM_004370.4,2283-2301).
ggagcacctcgaaacctaa

SEQ ID NO: 287750 - DNA, 19 bp, Homo sapiens
  siRNA target sequence for COL12A1 (NM_004370.4,2284-2302).
gagcacctcgaaacctaaa

SEQ ID NO: 287751 - DNA, 19 bp, Homo sapiens
  siRNA target sequence for COL12A1 (NM_004370.4,2361-2379).
gttttaagatatcgaatta

SEQ ID NO: 287752 - DNA, 19 bp, Homo sapiens
  siRNA target sequence for COL12A1 (NM_004370.4,2466-2484).
gacacgaaatatgaagtat

SEQ ID NO: 287753 - DNA, 19 bp, Homo sapiens
  siRNA target sequence for COL12A1 (NM_004370.4,2468-2486).
cacgaaatatgaagtatct

SEQ ID NO: 287754 - DNA, 19 bp, Homo sapiens
  siRNA target sequence for COL12A1 (NM_004370.4,2508-2526).
ggacctggtactccattaa

SEQ ID NO: 287755 - DNA, 19 bp, Homo sapiens
  siRNA target sequence for COL12A1 (NM_004370.4,2583-2601).
gaccctacgacgtctacta

SEQ ID NO: 287756 - DNA, 19 bp, Homo sapiens
  siRNA target sequence for COL12A1 (NM_004370.4,2586-2604).
cctacgacgtctactatga

SEQ ID NO: 287757 - DNA, 19 bp, Homo sapiens
  siRNA target sequence for COL12A1 (NM_004370.4,2587-2605).
ctacgacgtctactatgaa

SEQ ID NO: 287758 - DNA, 19 bp, Homo sapiens
  siRNA target sequence for COL12A1 (NM_004370.4,2590-2608).
cgacgtctactatgaaatt

SEQ ID NO: 287759 - DNA, 19 bp, Homo sapiens
  siRNA target sequence for COL12A1 (NM_004370.4,2594-2612).
gtctactatgaaattatct

SEQ ID NO: 287760 - DNA, 19 bp, Homo sapiens
  siRNA target sequence for COL12A1 (NM_004370.4,2617-2635).
gtggggcaccaggaaaagt

SEQ ID NO: 287761 - DNA, 19 bp, Homo sapiens
  siRNA target sequence for COL12A1 (NM_004370.4,2640-2658).
cagtatctcgtcacatata

SEQ ID NO: 287762 - DNA, 19 bp, Homo sapiens
  siRNA target sequence for COL12A1 (NM_004370.4,2666-2684).
ggcagggggtgaaactcaa

SEQ ID NO: 287763 - DNA, 19 bp, Homo sapiens
  siRNA target sequence for COL12A1 (NM_004370.4,2696-2714).
gaggggagatacaaccaat

SEQ ID NO: 287764 - DNA, 19 bp, Homo sapiens
  siRNA target sequence for COL12A1 (NM_004370.4,2741-2759).
gacacaatacgccttatct

SEQ ID NO: 287765 - DNA, 19 bp, Homo sapiens
  siRNA target sequence for COL12A1 (NM_004370.4,2743-2761).
cacaatacgccttatctgt

SEQ ID NO: 287766 - DNA, 19 bp, Homo sapiens
  siRNA target sequence for COL12A1 (NM_004370.4,2830-2848).
gttctcctcaagatttagt

SEQ ID NO: 287767 - DNA, 19 bp, Homo sapiens
  siRNA target sequence for COL12A1 (NM_004370.4,2856-2874).
gacatcactgacacatcaa

SEQ ID NO: 287768 - DNA, 19 bp, Homo sapiens
  siRNA target sequence for COL12A1 (NM_004370.4,2858-2876).
catcactgacacatcaatt

SEQ ID NO: 287769 - DNA, 19 bp, Homo sapiens
  siRNA target sequence for COL12A1 (NM_004370.4,2929-2947).
ggaaatcactttatgatga

SEQ ID NO: 287770 - DNA, 19 bp, Homo sapiens
  siRNA target sequence for COL12A1 (NM_004370.4,2935-2953).
cactttatgatgatgttga

SEQ ID NO: 287771 - DNA, 19 bp, Homo sapiens
  siRNA target sequence for COL12A1 (NM_004370.4,2983-3001).
caattcatacgatgataga

SEQ ID NO: 287772 - DNA, 19 bp, Homo sapiens
  siRNA target sequence for COL12A1 (NM_004370.4,3078-3096).
ggagatgccacaactgaat

SEQ ID NO: 287773 - DNA, 19 bp, Homo sapiens
  siRNA target sequence for COL12A1 (NM_004370.4,3079-3097).
gagatgccacaactgaatt

SEQ ID NO: 287774 - DNA, 19 bp, Homo sapiens
  siRNA target sequence for COL12A1 (NM_004370.4,3172-3190).
cagggaaagtcgtcaacta

SEQ ID NO: 287775 - DNA, 19 bp, Homo sapiens
  siRNA target sequence for COL12A1 (NM_004370.4,3185-3203).
caactaccgtgttgtctat

SEQ ID NO: 287776 - DNA, 19 bp, Homo sapiens
  siRNA target sequence for COL12A1 (NM_004370.4,3220-3238).
ggaagcaaatggttgctaa

SEQ ID NO: 287777 - DNA, 19 bp, Homo sapiens
  siRNA target sequence for COL12A1 (NM_004370.4,3252-3270).
gtcacttcgacagtgttaa

SEQ ID NO: 287778 - DNA, 19 bp, Homo sapiens
  siRNA target sequence for COL12A1 (NM_004370.4,3282-3300).
ccacagaccacatatgaca

SEQ ID NO: 287779 - DNA, 19 bp, Homo sapiens
  siRNA target sequence for COL12A1 (NM_004370.4,3358-3376).
caacagcttctcggtttaa

SEQ ID NO: 287780 - DNA, 19 bp, Homo sapiens
  siRNA target sequence for COL12A1 (NM_004370.4,3381-3399).
cctagaaacctcaaaacat

SEQ ID NO: 287781 - DNA, 19 bp, Homo sapiens
  siRNA target sequence for COL12A1 (NM_004370.4,3513-3531).
gtggttggaccctatgaca

SEQ ID NO: 287782 - DNA, 19 bp, Homo sapiens
  siRNA target sequence for COL12A1 (NM_004370.4,3557-3575).
ggctggtaccacctataaa

SEQ ID NO: 287783 - DNA, 19 bp, Homo sapiens
  siRNA target sequence for COL12A1 (NM_004370.4,3561-3579).
ggtaccacctataaagtaa

SEQ ID NO: 287784 - DNA, 19 bp, Homo sapiens
  siRNA target sequence for COL12A1 (NM_004370.4,3565-3583).
ccacctataaagtaaatgt

SEQ ID NO: 287785 - DNA, 19 bp, Homo sapiens
  siRNA target sequence for COL12A1 (NM_004370.4,3657-3675).
gttatgccaattttatctt

SEQ ID NO: 287786 - DNA, 19 bp, Homo sapiens
  siRNA target sequence for COL12A1 (NM_004370.4,3772-3790).
gtttcatttctcgtattgt

SEQ ID NO: 287787 - DNA, 19 bp, Homo sapiens
  siRNA target sequence for COL12A1 (NM_004370.4,3781-3799).
ctcgtattgtggaagtctt

SEQ ID NO: 287788 - DNA, 19 bp, Homo sapiens
  siRNA target sequence for COL12A1 (NM_004370.4,3803-3821).
cattggccccaaaagagta

SEQ ID NO: 287789 - DNA, 19 bp, Homo sapiens
  siRNA target sequence for COL12A1 (NM_004370.4,3812-3830).
caaaagagtacaaattgct

SEQ ID NO: 287790 - DNA, 19 bp, Homo sapiens
  siRNA target sequence for COL12A1 (NM_004370.4,3911-3929).
ggcaaacttgccgtacaaa

SEQ ID NO: 287791 - DNA, 19 bp, Homo sapiens
  siRNA target sequence for COL12A1 (NM_004370.4,4003-4021).
gacctcgagctcgaaaaat

SEQ ID NO: 287792 - DNA, 19 bp, Homo sapiens
  siRNA target sequence for COL12A1 (NM_004370.4,4093-4111).
gagtggagctgtttgctat

SEQ ID NO: 287793 - DNA, 19 bp, Homo sapiens
  siRNA target sequence for COL12A1 (NM_004370.4,4128-4146).
gatgaagtcgaattaaaga

SEQ ID NO: 287794 - DNA, 19 bp, Homo sapiens
  siRNA target sequence for COL12A1 (NM_004370.4,4131-4149).
gaagtcgaattaaagatga

SEQ ID NO: 287795 - DNA, 19 bp, Homo sapiens
  siRNA target sequence for COL12A1 (NM_004370.4,4215-4233).
gtggatgatctcaccatta

SEQ ID NO: 287796 - DNA, 19 bp, Homo sapiens
  siRNA target sequence for COL12A1 (NM_004370.4,4217-4235).
ggatgatctcaccattaat

SEQ ID NO: 287797 - DNA, 19 bp, Homo sapiens
  siRNA target sequence for COL12A1 (NM_004370.4,4221-4239).
gatctcaccattaatttgt

SEQ ID NO: 287798 - DNA, 19 bp, Homo sapiens
  siRNA target sequence for COL12A1 (NM_004370.4,4268-4286).
ggaagcaccttctaactta

SEQ ID NO: 287799 - DNA, 19 bp, Homo sapiens
  siRNA target sequence for COL12A1 (NM_004370.4,4298-4316).
gcgaacccatcgttctttt

SEQ ID NO: 287800 - DNA, 19 bp, Homo sapiens
  siRNA target sequence for COL12A1 (NM_004370.4,4299-4317).
cgaacccatcgttctttta

SEQ ID NO: 287801 - DNA, 19 bp, Homo sapiens
  siRNA target sequence for COL12A1 (NM_004370.4,4303-4321).
cccatcgttcttttagagt

SEQ ID NO: 287802 - DNA, 19 bp, Homo sapiens
  siRNA target sequence for COL12A1 (NM_004370.4,4339-4357).
ctgacagtgtggatcgata

SEQ ID NO: 287803 - DNA, 19 bp, Homo sapiens
  siRNA target sequence for COL12A1 (NM_004370.4,4341-4359).
gacagtgtggatcgatata

SEQ ID NO: 287804 - DNA, 19 bp, Homo sapiens
  siRNA target sequence for COL12A1 (NM_004370.4,4345-4363).
gtgtggatcgatataaggt

SEQ ID NO: 287805 - DNA, 19 bp, Homo sapiens
  siRNA target sequence for COL12A1 (NM_004370.4,4353-4371).
cgatataaggtggaatact

SEQ ID NO: 287806 - DNA, 19 bp, Homo sapiens
  siRNA target sequence for COL12A1 (NM_004370.4,4354-4372).
gatataaggtggaatacta

SEQ ID NO: 287807 - DNA, 19 bp, Homo sapiens
  siRNA target sequence for COL12A1 (NM_004370.4,4364-4382).
ggaatactatccagtttct

SEQ ID NO: 287808 - DNA, 19 bp, Homo sapiens
  siRNA target sequence for COL12A1 (NM_004370.4,4383-4401).
ggagggaaacgtcaagaat

SEQ ID NO: 287809 - DNA, 19 bp, Homo sapiens
  siRNA target sequence for COL12A1 (NM_004370.4,4392-4410).
cgtcaagaattttatgtga

SEQ ID NO: 287810 - DNA, 19 bp, Homo sapiens
  siRNA target sequence for COL12A1 (NM_004370.4,4426-4444).
gcacagtgctgaaagatct

SEQ ID NO: 287811 - DNA, 19 bp, Homo sapiens
  siRNA target sequence for COL12A1 (NM_004370.4,4619-4637).
ctacatcttgtcatacaaa

SEQ ID NO: 287812 - DNA, 19 bp, Homo sapiens
  siRNA target sequence for COL12A1 (NM_004370.4,4684-4702).
ggccaacagtgaatgacat

SEQ ID NO: 287813 - DNA, 19 bp, Homo sapiens
  siRNA target sequence for COL12A1 (NM_004370.4,4760-4778).
gcacgacctcactagtgaa

SEQ ID NO: 287814 - DNA, 19 bp, Homo sapiens
  siRNA target sequence for COL12A1 (NM_004370.4,4842-4860).
gtgactcacagcactatga

SEQ ID NO: 287815 - DNA, 19 bp, Homo sapiens
  siRNA target sequence for COL12A1 (NM_004370.4,4844-4862).
gactcacagcactatgaat

SEQ ID NO: 287816 - DNA, 19 bp, Homo sapiens
  siRNA target sequence for COL12A1 (NM_004370.4,4881-4899).
cctggaaaagtgcgtaaat

SEQ ID NO: 287817 - DNA, 19 bp, Homo sapiens
  siRNA target sequence for COL12A1 (NM_004370.4,4882-4900).
ctggaaaagtgcgtaaata

SEQ ID NO: 287818 - DNA, 19 bp, Homo sapiens
  siRNA target sequence for COL12A1 (NM_004370.4,5009-5027).
cagcgtttctgcagtacat

SEQ ID NO: 287819 - DNA, 19 bp, Homo sapiens
  siRNA target sequence for COL12A1 (NM_004370.4,5079-5097).
ccagccccaacaaacttaa

SEQ ID NO: 287820 - DNA, 19 bp, Homo sapiens
  siRNA target sequence for COL12A1 (NM_004370.4,5083-5101).
ccccaacaaacttaaagat

SEQ ID NO: 287821 - DNA, 19 bp, Homo sapiens
  siRNA target sequence for COL12A1 (NM_004370.4,5093-5111).
cttaaagattactgaagta

SEQ ID NO: 287822 - DNA, 19 bp, Homo sapiens
  siRNA target sequence for COL12A1 (NM_004370.4,5099-5117).
gattactgaagtaacatca

SEQ ID NO: 287823 - DNA, 19 bp, Homo sapiens
  siRNA target sequence for COL12A1 (NM_004370.4,5157-5175).
gtgtctctctacagaataa

SEQ ID NO: 287824 - DNA, 19 bp, Homo sapiens
  siRNA target sequence for COL12A1 (NM_004370.4,5236-5254).
ctttggtgttcgaaaacct

SEQ ID NO: 287825 - DNA, 19 bp, Homo sapiens
  siRNA target sequence for COL12A1 (NM_004370.4,5345-5363).
gcctatcttaacaacacaa

SEQ ID NO: 287826 - DNA, 19 bp, Homo sapiens
  siRNA target sequence for COL12A1 (NM_004370.4,5380-5398).
cacgaaaccttcaagtgta

SEQ ID NO: 287827 - DNA, 19 bp, Homo sapiens
  siRNA target sequence for COL12A1 (NM_004370.4,5383-5401).
gaaaccttcaagtgtacaa

SEQ ID NO: 287828 - DNA, 19 bp, Homo sapiens
  siRNA target sequence for COL12A1 (NM_004370.4,5443-5461).
gtggtcgtgtgcagaaata

SEQ ID NO: 287829 - DNA, 19 bp, Homo sapiens
  siRNA target sequence for COL12A1 (NM_004370.4,5445-5463).
ggtcgtgtgcagaaatata

SEQ ID NO: 287830 - DNA, 19 bp, Homo sapiens
  siRNA target sequence for COL12A1 (NM_004370.4,5456-5474).
gaaatataggatcacttat

SEQ ID NO: 287831 - DNA, 19 bp, Homo sapiens
  siRNA target sequence for COL12A1 (NM_004370.4,5555-5573).
gccagacactccttacact

SEQ ID NO: 287832 - DNA, 19 bp, Homo sapiens
  siRNA target sequence for COL12A1 (NM_004370.4,5556-5574).
ccagacactccttacacta

SEQ ID NO: 287833 - DNA, 19 bp, Homo sapiens
  siRNA target sequence for COL12A1 (NM_004370.4,5557-5575).
cagacactccttacactat

SEQ ID NO: 287834 - DNA, 19 bp, Homo sapiens
  siRNA target sequence for COL12A1 (NM_004370.4,5559-5577).
gacactccttacactatca

SEQ ID NO: 287835 - DNA, 19 bp, Homo sapiens
  siRNA target sequence for COL12A1 (NM_004370.4,5576-5594).
caccgtatcctctctgtat

SEQ ID NO: 287836 - DNA, 19 bp, Homo sapiens
  siRNA target sequence for COL12A1 (NM_004370.4,5633-5651).
gaccaaacctctaaacact

SEQ ID NO: 287837 - DNA, 19 bp, Homo sapiens
  siRNA target sequence for COL12A1 (NM_004370.4,5641-5659).
ctctaaacactgtaaggaa

SEQ ID NO: 287838 - DNA, 19 bp, Homo sapiens
  siRNA target sequence for COL12A1 (NM_004370.4,5719-5737).
gaaatcctcgtcagtacaa

SEQ ID NO: 287839 - DNA, 19 bp, Homo sapiens
  siRNA target sequence for COL12A1 (NM_004370.4,5728-5746).
gtcagtacaagctcttcta

SEQ ID NO: 287840 - DNA, 19 bp, Homo sapiens
  siRNA target sequence for COL12A1 (NM_004370.4,5823-5841).
cagccagatacctcataca

SEQ ID NO: 287841 - DNA, 19 bp, Homo sapiens
  siRNA target sequence for COL12A1 (NM_004370.4,5877-5895).
gggggacgcacatcagata

SEQ ID NO: 287842 - DNA, 19 bp, Homo sapiens
  siRNA target sequence for COL12A1 (NM_004370.4,5986-6004).
caggacctgtgctgcaata

SEQ ID NO: 287843 - DNA, 19 bp, Homo sapiens
  siRNA target sequence for COL12A1 (NM_004370.4,5999-6017).
gcaatatcgcgttgtgtat

SEQ ID NO: 287844 - DNA, 19 bp, Homo sapiens
  siRNA target sequence for COL12A1 (NM_004370.4,6040-6058).
cctcagaatctatagtagt

SEQ ID NO: 287845 - DNA, 19 bp, Homo sapiens
  siRNA target sequence for COL12A1 (NM_004370.4,6095-6113).
gattccggacacactctat

SEQ ID NO: 287846 - DNA, 19 bp, Homo sapiens
  siRNA target sequence for COL12A1 (NM_004370.4,6273-6291).
cagtacaggatcatctatt

SEQ ID NO: 287847 - DNA, 19 bp, Homo sapiens
  siRNA target sequence for COL12A1 (NM_004370.4,6275-6293).
gtacaggatcatctattct

SEQ ID NO: 287848 - DNA, 19 bp, Homo sapiens
  siRNA target sequence for COL12A1 (NM_004370.4,6295-6313).
ccactgttggtgatccaat

SEQ ID NO: 287849 - DNA, 19 bp, Homo sapiens
  siRNA target sequence for COL12A1 (NM_004370.4,6296-6314).
cactgttggtgatccaatt

SEQ ID NO: 287850 - DNA, 19 bp, Homo sapiens
  siRNA target sequence for COL12A1 (NM_004370.4,6298-6316).
ctgttggtgatccaattga

SEQ ID NO: 287851 - DNA, 19 bp, Homo sapiens
  siRNA target sequence for COL12A1 (NM_004370.4,6309-6327).
ccaattgatgaatatacca

SEQ ID NO: 287852 - DNA, 19 bp, Homo sapiens
  siRNA target sequence for COL12A1 (NM_004370.4,6337-6355).
gcagaagaaacaatgtaat

SEQ ID NO: 287853 - DNA, 19 bp, Homo sapiens
  siRNA target sequence for COL12A1 (NM_004370.4,6372-6390).
cctgacactccatataaaa

SEQ ID NO: 287854 - DNA, 19 bp, Homo sapiens
  siRNA target sequence for COL12A1 (NM_004370.4,6373-6391).
ctgacactccatataaaat

SEQ ID NO: 287855 - DNA, 19 bp, Homo sapiens
  siRNA target sequence for COL12A1 (NM_004370.4,6375-6393).
gacactccatataaaatta

SEQ ID NO: 287856 - DNA, 19 bp, Homo sapiens
  siRNA target sequence for COL12A1 (NM_004370.4,6485-6503).
ctctgacgaatggtataca

SEQ ID NO: 287857 - DNA, 19 bp, Homo sapiens
  siRNA target sequence for COL12A1 (NM_004370.4,6489-6507).
gacgaatggtatacaagat

SEQ ID NO: 287858 - DNA, 19 bp, Homo sapiens
  siRNA target sequence for COL12A1 (NM_004370.4,6613-6631).
catcatataccttacacaa

SEQ ID NO: 287859 - DNA, 19 bp, Homo sapiens
  siRNA target sequence for COL12A1 (NM_004370.4,6616-6634).
catataccttacacaatct

SEQ ID NO: 287860 - DNA, 19 bp, Homo sapiens
  siRNA target sequence for COL12A1 (NM_004370.4,6644-6662).
caccacctacgatgtgaat

SEQ ID NO: 287861 - DNA, 19 bp, Homo sapiens
  siRNA target sequence for COL12A1 (NM_004370.4,6663-6681).
gtttatgctcaatatgatt

SEQ ID NO: 287862 - DNA, 19 bp, Homo sapiens
  siRNA target sequence for COL12A1 (NM_004370.4,6703-6721).
cagatcaaggcactacatt

SEQ ID NO: 287863 - DNA, 19 bp, Homo sapiens
  siRNA target sequence for COL12A1 (NM_004370.4,6708-6726).
caaggcactacattatatt

SEQ ID NO: 287864 - DNA, 19 bp, Homo sapiens
  siRNA target sequence for COL12A1 (NM_004370.4,6711-6729).
ggcactacattatatttaa

SEQ ID NO: 287865 - DNA, 19 bp, Homo sapiens
  siRNA target sequence for COL12A1 (NM_004370.4,6732-6750).
gtaacagatctgaaaactt

SEQ ID NO: 287866 - DNA, 19 bp, Homo sapiens
  siRNA target sequence for COL12A1 (NM_004370.4,6805-6823).
cctcctacaggctaaaact

SEQ ID NO: 287867 - DNA, 19 bp, Homo sapiens
  siRNA target sequence for COL12A1 (NM_004370.4,6806-6824).
ctcctacaggctaaaacta

SEQ ID NO: 287868 - DNA, 19 bp, Homo sapiens
  siRNA target sequence for COL12A1 (NM_004370.4,6912-6930).
gattatggtgtcactgttt

SEQ ID NO: 287869 - DNA, 19 bp, Homo sapiens
  siRNA target sequence for COL12A1 (NM_004370.4,7108-7126).
ggagcattggggacgataa

SEQ ID NO: 287870 - DNA, 19 bp, Homo sapiens
  siRNA target sequence for COL12A1 (NM_004370.4,7109-7127).
gagcattggggacgataat

SEQ ID NO: 287871 - DNA, 19 bp, Homo sapiens
  siRNA target sequence for COL12A1 (NM_004370.4,7111-7129).
gcattggggacgataattt

SEQ ID NO: 287872 - DNA, 19 bp, Homo sapiens
  siRNA target sequence for COL12A1 (NM_004370.4,7112-7130).
cattggggacgataatttt

SEQ ID NO: 287873 - DNA, 19 bp, Homo sapiens
  siRNA target sequence for COL12A1 (NM_004370.4,7116-7134).
ggggacgataattttaaca

SEQ ID NO: 287874 - DNA, 19 bp, Homo sapiens
  siRNA target sequence for COL12A1 (NM_004370.4,7117-7135).
gggacgataattttaacaa

SEQ ID NO: 287875 - DNA, 19 bp, Homo sapiens
  siRNA target sequence for COL12A1 (NM_004370.4,7118-7136).
ggacgataattttaacaaa

SEQ ID NO: 287876 - DNA, 19 bp, Homo sapiens
  siRNA target sequence for COL12A1 (NM_004370.4,7140-7158).
gtaaaattcatcttcaata

SEQ ID NO: 287877 - DNA, 19 bp, Homo sapiens
  siRNA target sequence for COL12A1 (NM_004370.4,7192-7210).
ggattcaggtttcatttgt

SEQ ID NO: 287878 - DNA, 19 bp, Homo sapiens
  siRNA target sequence for COL12A1 (NM_004370.4,7241-7259).
caagctgaacacgtacaat

SEQ ID NO: 287879 - DNA, 19 bp, Homo sapiens
  siRNA target sequence for COL12A1 (NM_004370.4,7245-7263).
ctgaacacgtacaatgaca

SEQ ID NO: 287880 - DNA, 19 bp, Homo sapiens
  siRNA target sequence for COL12A1 (NM_004370.4,7281-7299).
gccctccagaatattaggt

SEQ ID NO: 287881 - DNA, 19 bp, Homo sapiens
  siRNA target sequence for COL12A1 (NM_004370.4,7282-7300).
ccctccagaatattaggta

SEQ ID NO: 287882 - DNA, 19 bp, Homo sapiens
  siRNA target sequence for COL12A1 (NM_004370.4,7323-7341).
ggcaaggccctcacgttta

SEQ ID NO: 287883 - DNA, 19 bp, Homo sapiens
  siRNA target sequence for COL12A1 (NM_004370.4,7336-7354).
cgtttatcaaggagaaagt

SEQ ID NO: 287884 - DNA, 19 bp, Homo sapiens
  siRNA target sequence for COL12A1 (NM_004370.4,7468-7486).
ggttcagtgtctttgtagt

SEQ ID NO: 287885 - DNA, 19 bp, Homo sapiens
  siRNA target sequence for COL12A1 (NM_004370.4,7469-7487).
gttcagtgtctttgtagtt

SEQ ID NO: 287886 - DNA, 19 bp, Homo sapiens
  siRNA target sequence for COL12A1 (NM_004370.4,7493-7511).
ggctgatgtcgactacaat

SEQ ID NO: 287887 - DNA, 19 bp, Homo sapiens
  siRNA target sequence for COL12A1 (NM_004370.4,7540-7558).
gtgaacggcacgtgttcat

SEQ ID NO: 287888 - DNA, 19 bp, Homo sapiens
  siRNA target sequence for COL12A1 (NM_004370.4,7560-7578).
gtggacgactttgaatctt

SEQ ID NO: 287889 - DNA, 19 bp, Homo sapiens
  siRNA target sequence for COL12A1 (NM_004370.4,7566-7584).
gactttgaatcttttgaga

SEQ ID NO: 287890 - DNA, 19 bp, Homo sapiens
  siRNA target sequence for COL12A1 (NM_004370.4,7586-7604).
gatcgaagacaatcttatt

SEQ ID NO: 287891 - DNA, 19 bp, Homo sapiens
  siRNA target sequence for COL12A1 (NM_004370.4,7658-7676).
ctacacctcaccaggtttt

SEQ ID NO: 287892 - DNA, 19 bp, Homo sapiens
  siRNA target sequence for COL12A1 (NM_004370.4,7663-7681).
cctcaccaggttttaaaat

SEQ ID NO: 287893 - DNA, 19 bp, Homo sapiens
  siRNA target sequence for COL12A1 (NM_004370.4,7689-7707).
gcatacaacctgacagaaa

SEQ ID NO: 287894 - DNA, 19 bp, Homo sapiens
  siRNA target sequence for COL12A1 (NM_004370.4,7690-7708).
catacaacctgacagaaaa

SEQ ID NO: 287895 - DNA, 19 bp, Homo sapiens
  siRNA target sequence for COL12A1 (NM_004370.4,7709-7727).
gaattttgcttctgtacaa

SEQ ID NO: 287896 - DNA, 19 bp, Homo sapiens
  siRNA target sequence for COL12A1 (NM_004370.4,7765-7783).
cagcatacaggattcagaa

SEQ ID NO: 287897 - DNA, 19 bp, Homo sapiens
  siRNA target sequence for COL12A1 (NM_004370.4,7827-7845).
ggactccctccttcataca

SEQ ID NO: 287898 - DNA, 19 bp, Homo sapiens
  siRNA target sequence for COL12A1 (NM_004370.4,7833-7851).
cctccttcatacacgatta

SEQ ID NO: 287899 - DNA, 19 bp, Homo sapiens
  siRNA target sequence for COL12A1 (NM_004370.4,7834-7852).
ctccttcatacacgattat

SEQ ID NO: 287900 - DNA, 19 bp, Homo sapiens
  siRNA target sequence for COL12A1 (NM_004370.4,7836-7854).
ccttcatacacgattatat

SEQ ID NO: 287901 - DNA, 19 bp, Homo sapiens
  siRNA target sequence for COL12A1 (NM_004370.4,7837-7855).
cttcatacacgattatatt

SEQ ID NO: 287902 - DNA, 19 bp, Homo sapiens
  siRNA target sequence for COL12A1 (NM_004370.4,7840-7858).
catacacgattatattatt

SEQ ID NO: 287903 - DNA, 19 bp, Homo sapiens
  siRNA target sequence for COL12A1 (NM_004370.4,7883-7901).
cagtgacccttttgcaatt

SEQ ID NO: 287904 - DNA, 19 bp, Homo sapiens
  siRNA target sequence for COL12A1 (NM_004370.4,7953-7971).
ccttctagcaagacgttat

SEQ ID NO: 287905 - DNA, 19 bp, Homo sapiens
  siRNA target sequence for COL12A1 (NM_004370.4,7957-7975).
ctagcaagacgttatcatt

SEQ ID NO: 287906 - DNA, 19 bp, Homo sapiens
  siRNA target sequence for COL12A1 (NM_004370.4,7960-7978).
gcaagacgttatcattctt

SEQ ID NO: 287907 - DNA, 19 bp, Homo sapiens
  siRNA target sequence for COL12A1 (NM_004370.4,7961-7979).
caagacgttatcattcttt

SEQ ID NO: 287908 - DNA, 19 bp, Homo sapiens
  siRNA target sequence for COL12A1 (NM_004370.4,7993-8011).
gaggcgaggtgcaaactgt

SEQ ID NO: 287909 - DNA, 19 bp, Homo sapiens
  siRNA target sequence for COL12A1 (NM_004370.4,7995-8013).
ggcgaggtgcaaactgtta

SEQ ID NO: 287910 - DNA, 19 bp, Homo sapiens
  siRNA target sequence for COL12A1 (NM_004370.4,7997-8015).
cgaggtgcaaactgttaca

SEQ ID NO: 287911 - DNA, 19 bp, Homo sapiens
  siRNA target sequence for COL12A1 (NM_004370.4,7998-8016).
gaggtgcaaactgttacat

SEQ ID NO: 287912 - DNA, 19 bp, Homo sapiens
  siRNA target sequence for COL12A1 (NM_004370.4,8000-8018).
ggtgcaaactgttacattt

SEQ ID NO: 287913 - DNA, 19 bp, Homo sapiens
  siRNA target sequence for COL12A1 (NM_004370.4,8076-8094).
gtgacctcaaaaagtgtta

SEQ ID NO: 287914 - DNA, 19 bp, Homo sapiens
  siRNA target sequence for COL12A1 (NM_004370.4,8158-8176).
ctgatggttatgaaattct

SEQ ID NO: 287915 - DNA, 19 bp, Homo sapiens
  siRNA target sequence for COL12A1 (NM_004370.4,8319-8337).
ccaaattcttgcacatgta

SEQ ID NO: 287916 - DNA, 19 bp, Homo sapiens
  siRNA target sequence for COL12A1 (NM_004370.4,8497-8515).
gacccaatggactctctat

SEQ ID NO: 287917 - DNA, 19 bp, Homo sapiens
  siRNA target sequence for COL12A1 (NM_004370.4,8825-8843).
gcgagcagttgcaagacaa

SEQ ID NO: 287918 - DNA, 19 bp, Homo sapiens
  siRNA target sequence for COL12A1 (NM_004370.4,8839-8857).
gacaagtctgtgaacaatt

SEQ ID NO: 287919 - DNA, 19 bp, Homo sapiens
  siRNA target sequence for COL12A1 (NM_004370.4,8891-8909).
gctgaatcagattccaaat

SEQ ID NO: 287920 - DNA, 19 bp, Homo sapiens
  siRNA target sequence for COL12A1 (NM_004370.4,9231-9249).
cctcctggatactgtgatt

SEQ ID NO: 287921 - DNA, 19 bp, Homo sapiens
  siRNA target sequence for COL12A1 (NM_004370.4,9259-9277).
gtgccagcatcccatacaa

SEQ ID NO: 287922 - DNA, 19 bp, Homo sapiens
  siRNA target sequence for COL15A1 (NM_001855.2,372-390).
cgggcctggtgccaatgtt

SEQ ID NO: 287923 - DNA, 19 bp, Homo sapiens
  siRNA target sequence for COL15A1 (NM_001855.2,648-666).
gaaccgcttcgccatgatt

SEQ ID NO: 287924 - DNA, 19 bp, Homo sapiens
  siRNA target sequence for COL15A1 (NM_001855.2,739-757).
caggctttggcttttgagt

SEQ ID NO: 287925 - DNA, 19 bp, Homo sapiens
  siRNA target sequence for COL15A1 (NM_001855.2,924-942).
cggagtagctgagatctta

SEQ ID NO: 287926 - DNA, 19 bp, Homo sapiens
  siRNA target sequence for COL15A1 (NM_001855.2,966-984).
ctcgcccaaagaagcaaaa

SEQ ID NO: 287927 - DNA, 19 bp, Homo sapiens
  siRNA target sequence for COL15A1 (NM_001855.2,968-986).
cgcccaaagaagcaaaagt

SEQ ID NO: 287928 - DNA, 19 bp, Homo sapiens
  siRNA target sequence for COL15A1 (NM_001855.2,1315-1333).
ggaccaaccctctctatgt

SEQ ID NO: 287929 - DNA, 19 bp, Homo sapiens
  siRNA target sequence for COL15A1 (NM_001855.2,1361-1379).
ctccaggtccagataatga

SEQ ID NO: 287930 - DNA, 19 bp, Homo sapiens
  siRNA target sequence for COL15A1 (NM_001855.2,2399-2417).
ctggaagcacccagctatt

SEQ ID NO: 287931 - DNA, 19 bp, Homo sapiens
  siRNA target sequence for COL15A1 (NM_001855.2,2401-2419).
ggaagcacccagctattga

SEQ ID NO: 287932 - DNA, 19 bp, Homo sapiens
  siRNA target sequence for COL15A1 (NM_001855.2,2402-2420).
gaagcacccagctattgaa

SEQ ID NO: 287933 - DNA, 19 bp, Homo sapiens
  siRNA target sequence for COL15A1 (NM_001855.2,2554-2572).
cacatcaaggtcttgtcta

SEQ ID NO: 287934 - DNA, 19 bp, Homo sapiens
  siRNA target sequence for COL15A1 (NM_001855.2,2935-2953).
ggagatccaggggtcatta

SEQ ID NO: 287935 - DNA, 19 bp, Homo sapiens
  siRNA target sequence for COL15A1 (NM_001855.2,2936-2954).
gagatccaggggtcattat

SEQ ID NO: 287936 - DNA, 19 bp, Homo sapiens
  siRNA target sequence for COL15A1 (NM_001855.2,2999-3017).
cacctggagctgtgattaa

SEQ ID NO: 287937 - DNA, 19 bp, Homo sapiens
  siRNA target sequence for COL15A1 (NM_001855.2,3004-3022).
ggagctgtgattaacatca

SEQ ID NO: 287938 - DNA, 19 bp, Homo sapiens
  siRNA target sequence for COL15A1 (NM_001855.2,3005-3023).
gagctgtgattaacatcaa

SEQ ID NO: 287939 - DNA, 19 bp, Homo sapiens
  siRNA target sequence for COL15A1 (NM_001855.2,3046-3064).
gtccgaccacactgcaaaa

SEQ ID NO: 287940 - DNA, 19 bp, Homo sapiens
  siRNA target sequence for COL15A1 (NM_001855.2,3057-3075).
ctgcaaaatgccagttgat

SEQ ID NO: 287941 - DNA, 19 bp, Homo sapiens
  siRNA target sequence for COL15A1 (NM_001855.2,3200-3218).
ctccacttgatctagctta

SEQ ID NO: 287942 - DNA, 19 bp, Homo sapiens
  siRNA target sequence for COL15A1 (NM_001855.2,3775-3793).
ccaccaaaccctatttcaa

SEQ ID NO: 287943 - DNA, 19 bp, Homo sapiens
  siRNA target sequence for COL15A1 (NM_001855.2,3791-3809).
caagtgccaattatgagaa

SEQ ID NO: 287944 - DNA, 19 bp, Homo sapiens
  siRNA target sequence for COL15A1 (NM_001855.2,3909-3927).
cacctaccgagcattctta

SEQ ID NO: 287945 - DNA, 19 bp, Homo sapiens
  siRNA target sequence for COL15A1 (NM_001855.2,3912-3930).
ctaccgagcattcttatct

SEQ ID NO: 287946 - DNA, 19 bp, Homo sapiens
  siRNA target sequence for COL15A1 (NM_001855.2,3924-3942).
cttatcttcccatttgcaa

SEQ ID NO: 287947 - DNA, 19 bp, Homo sapiens
  siRNA target sequence for COL15A1 (NM_001855.2,3997-4015).
ctcaagggccaagtacttt

SEQ ID NO: 287948 - DNA, 19 bp, Homo sapiens
  siRNA target sequence for COL15A1 (NM_001855.2,4002-4020).
gggccaagtactttttaat

SEQ ID NO: 287949 - DNA, 19 bp, Homo sapiens
  siRNA target sequence for COL15A1 (NM_001855.2,4003-4021).
ggccaagtactttttaata

SEQ ID NO: 287950 - DNA, 19 bp, Homo sapiens
  siRNA target sequence for COL15A1 (NM_001855.2,4043-4061).
gccacggaggtcagttcaa

SEQ ID NO: 287951 - DNA, 19 bp, Homo sapiens
  siRNA target sequence for COL15A1 (NM_001855.2,4044-4062).
ccacggaggtcagttcaat

SEQ ID NO: 287952 - DNA, 19 bp, Homo sapiens
  siRNA target sequence for COL15A1 (NM_001855.2,4045-4063).
cacggaggtcagttcaata

SEQ ID NO: 287953 - DNA, 19 bp, Homo sapiens
  siRNA target sequence for COL15A1 (NM_001855.2,4059-4077).
caatatgcatattccaata

SEQ ID NO: 287954 - DNA, 19 bp, Homo sapiens
  siRNA target sequence for COL15A1 (NM_001855.2,4083-4101).
ctttgatggtcgagacata

SEQ ID NO: 287955 - DNA, 19 bp, Homo sapiens
  siRNA target sequence for COL15A1 (NM_001855.2,4087-4105).
gatggtcgagacataatga

SEQ ID NO: 287956 - DNA, 19 bp, Homo sapiens
  siRNA target sequence for COL15A1 (NM_001855.2,4157-4175).
gcgtccgccttgtggataa

SEQ ID NO: 287957 - DNA, 19 bp, Homo sapiens
  siRNA target sequence for COL15A1 (NM_001855.2,4159-4177).
gtccgccttgtggataact

SEQ ID NO: 287958 - DNA, 19 bp, Homo sapiens
  siRNA target sequence for COL15A1 (NM_001855.2,4162-4180).
cgccttgtggataactact

SEQ ID NO: 287959 - DNA, 19 bp, Homo sapiens
  siRNA target sequence for COL15A1 (NM_001855.2,4269-4287).
ctgtgctaatcggctaatt

SEQ ID NO: 287960 - DNA, 19 bp, Homo sapiens
  siRNA target sequence for COL15A1 (NM_001855.2,4271-4289).
gtgctaatcggctaattgt

SEQ ID NO: 287961 - DNA, 19 bp, Homo sapiens
  siRNA target sequence for COL15A1 (NM_001855.2,4279-4297).
cggctaattgtcctatgta

SEQ ID NO: 287962 - DNA, 19 bp, Homo sapiens
  siRNA target sequence for COL15A1 (NM_001855.2,4280-4298).
ggctaattgtcctatgtat

SEQ ID NO: 287963 - DNA, 19 bp, Homo sapiens
  siRNA target sequence for COL15A1 (NM_001855.2,4288-4306).
gtcctatgtatcgaaaaca

SEQ ID NO: 287964 - DNA, 19 bp, Homo sapiens
  siRNA target sequence for COL15A1 (NM_001855.2,4291-4309).
ctatgtatcgaaaacagtt

SEQ ID NO: 287965 - DNA, 19 bp, Homo sapiens
  siRNA target sequence for COL15A1 (NM_001855.2,4295-4313).
gtatcgaaaacagtttcat

SEQ ID NO: 287966 - DNA, 19 bp, Homo sapiens
  siRNA target sequence for COL16A1 (NM_001856.2,300-318).
cggccatggggcaaataca

SEQ ID NO: 287967 - DNA, 19 bp, Homo sapiens
  siRNA target sequence for COL16A1 (NM_001856.2,412-430).
cgactcagcctcatgaaga

SEQ ID NO: 287968 - DNA, 19 bp, Homo sapiens
  siRNA target sequence for COL16A1 (NM_001856.2,586-604).
cagaagacgtggtatctgt

SEQ ID NO: 287969 - DNA, 19 bp, Homo sapiens
  siRNA target sequence for COL16A1 (NM_001856.2,588-606).
gaagacgtggtatctgttt

SEQ ID NO: 287970 - DNA, 19 bp, Homo sapiens
  siRNA target sequence for COL16A1 (NM_001856.2,591-609).
gacgtggtatctgtttcaa

SEQ ID NO: 287971 - DNA, 19 bp, Homo sapiens
  siRNA target sequence for COL16A1 (NM_001856.2,593-611).
cgtggtatctgtttcaagt

SEQ ID NO: 287972 - DNA, 19 bp, Homo sapiens
  siRNA target sequence for COL16A1 (NM_001856.2,1118-1136).
cccagctgacgggaagaat

SEQ ID NO: 287973 - DNA, 19 bp, Homo sapiens
  siRNA target sequence for COL16A1 (NM_001856.2,1120-1138).
cagctgacgggaagaatca

SEQ ID NO: 287974 - DNA, 19 bp, Homo sapiens
  siRNA target sequence for COL16A1 (NM_001856.2,1309-1327).
ggagcacggggcaatgact

SEQ ID NO: 287975 - DNA, 19 bp, Homo sapiens
  siRNA target sequence for COL16A1 (NM_001856.2,2238-2256).
ctttggcttgccaggaaaa

SEQ ID NO: 287976 - DNA, 19 bp, Homo sapiens
  siRNA target sequence for COL16A1 (NM_001856.2,2505-2523).
cgtgggccgacctggtaaa

SEQ ID NO: 287977 - DNA, 19 bp, Homo sapiens
  siRNA target sequence for COL16A1 (NM_001856.2,2958-2976).
gcagggtccaccaggtatt

SEQ ID NO: 287978 - DNA, 19 bp, Homo sapiens
  siRNA target sequence for COL16A1 (NM_001856.2,3069-3087).
gggatccttaccaattgaa

SEQ ID NO: 287979 - DNA, 19 bp, Homo sapiens
  siRNA target sequence for COL16A1 (NM_001856.2,3071-3089).
gatccttaccaattgaaca

SEQ ID NO: 287980 - DNA, 19 bp, Homo sapiens
  siRNA target sequence for COL16A1 (NM_001856.2,3213-3231).
cgcccagtgctttttgtca

SEQ ID NO: 287981 - DNA, 19 bp, Homo sapiens
  siRNA target sequence for COL16A1 (NM_001856.2,3573-3591).
cgggtcagcgggagagaaa

SEQ ID NO: 287982 - DNA, 19 bp, Homo sapiens
  siRNA target sequence for COL16A1 (NM_001856.2,3879-3897).
cggtctggatggtttggat

SEQ ID NO: 287983 - DNA, 19 bp, Homo sapiens
  siRNA target sequence for COL16A1 (NM_001856.2,3969-3987).
gggctttaaggggaaaaca

SEQ ID NO: 287984 - DNA, 19 bp, Homo sapiens
  siRNA target sequence for COL16A1 (NM_001856.2,4533-4551).
gggagacatggtgaattat

SEQ ID NO: 287985 - DNA, 19 bp, Homo sapiens
  siRNA target sequence for COL16A1 (NM_001856.2,4535-4553).
gagacatggtgaattatga

SEQ ID NO: 287986 - DNA, 19 bp, Homo sapiens
  siRNA target sequence for COL16A1 (NM_001856.2,4555-4573).
gaaatcaagaggttcatca

SEQ ID NO: 287987 - DNA, 19 bp, Homo sapiens
  siRNA target sequence for COL16A1 (NM_001856.2,4565-4583).
ggttcatcagacaagagat

SEQ ID NO: 287988 - DNA, 19 bp, Homo sapiens
  siRNA target sequence for COL16A1 (NM_001856.2,4569-4587).
catcagacaagagatcatt

SEQ ID NO: 287989 - DNA, 19 bp, Homo sapiens
  siRNA target sequence for COL16A1 (NM_001856.2,4600-4618).
gagagaatggcttactaca

SEQ ID NO: 287990 - DNA, 19 bp, Homo sapiens
  siRNA target sequence for COL16A1 (NM_001856.2,4961-4979).
gcaaggctggccactgtaa

SEQ ID NO: 287991 - DNA, 19 bp, Homo sapiens
  siRNA target sequence for COL16A1 (NM_001856.2,4962-4980).
caaggctggccactgtaat

SEQ ID NO: 287992 - DNA, 19 bp, Homo sapiens
  siRNA target sequence for COL18A1 (NM_030582.2,110-128).
ggctttggttcaataatga

SEQ ID NO: 287993 - DNA, 19 bp, Homo sapiens
  siRNA target sequence for COL18A1 (NM_030582.2,324-342).
cgcgccagaggagaacatt

SEQ ID NO: 287994 - DNA, 19 bp, Homo sapiens
  siRNA target sequence for COL18A1 (NM_030582.2,1038-1056).
cggccagtggacacactta

SEQ ID NO: 287995 - DNA, 19 bp, Homo sapiens
  siRNA target sequence for COL18A1 (NM_030582.2,1100-1118).
gtgaggagttccagagaat

SEQ ID NO: 287996 - DNA, 19 bp, Homo sapiens
  siRNA target sequence for COL18A1 (NM_030582.2,1467-1485).
gaccacggtggcttcgtta

SEQ ID NO: 287997 - DNA, 19 bp, Homo sapiens
  siRNA target sequence for COL18A1 (NM_030582.2,3113-3131).
cagggactcctgtttacga

SEQ ID NO: 287998 - DNA, 19 bp, Homo sapiens
  siRNA target sequence for COL18A1 (NM_030582.2,3124-3142).
gtttacgacagcaatgtgt

SEQ ID NO: 287999 - DNA, 19 bp, Homo sapiens
  siRNA target sequence for COL18A1 (NM_030582.2,3245-3263).
ggcagtttccgtttgactt

SEQ ID NO: 288000 - DNA, 19 bp, Homo sapiens
  siRNA target sequence for COL18A1 (NM_030582.2,3791-3809).
cacgagggacggacaatga

SEQ ID NO: 288001 - DNA, 19 bp, Homo sapiens
  siRNA target sequence for COL19A1 (NM_001858.2,218-236).
gccctatcctgagaataga

SEQ ID NO: 288002 - DNA, 19 bp, Homo sapiens
  siRNA target sequence for COL19A1 (NM_001858.2,239-257).
gacatcagctgacatatga

SEQ ID NO: 288003 - DNA, 19 bp, Homo sapiens
  siRNA target sequence for COL19A1 (NM_001858.2,241-259).
catcagctgacatatgaca

SEQ ID NO: 288004 - DNA, 19 bp, Homo sapiens
  siRNA target sequence for COL19A1 (NM_001858.2,374-392).
gagacactatgtataagat

SEQ ID NO: 288005 - DNA, 19 bp, Homo sapiens
  siRNA target sequence for COL19A1 (NM_001858.2,376-394).
gacactatgtataagatat

SEQ ID NO: 288006 - DNA, 19 bp, Homo sapiens
  siRNA target sequence for COL19A1 (NM_001858.2,471-489).
gtttctgtggcaggtttta

SEQ ID NO: 288007 - DNA, 19 bp, Homo sapiens
  siRNA target sequence for COL19A1 (NM_001858.2,510-528).
gatttctatagtagttgat

SEQ ID NO: 288008 - DNA, 19 bp, Homo sapiens
  siRNA target sequence for COL19A1 (NM_001858.2,543-561).
ggtggaatttatgtttcaa

SEQ ID NO: 288009 - DNA, 19 bp, Homo sapiens
  siRNA target sequence for COL19A1 (NM_001858.2,568-586).
gagggagatgtgttgaact

SEQ ID NO: 288010 - DNA, 19 bp, Homo sapiens
  siRNA target sequence for COL19A1 (NM_001858.2,571-589).
ggagatgtgttgaactaca

SEQ ID NO: 288011 - DNA, 19 bp, Homo sapiens
  siRNA target sequence for COL19A1 (NM_001858.2,572-590).
gagatgtgttgaactacat

SEQ ID NO: 288012 - DNA, 19 bp, Homo sapiens
  siRNA target sequence for COL19A1 (NM_001858.2,602-620).
gagaactccgtcctttgtt

SEQ ID NO: 288013 - DNA, 19 bp, Homo sapiens
  siRNA target sequence for COL19A1 (NM_001858.2,633-651).
gcacaaacttggcattagt

SEQ ID NO: 288014 - DNA, 19 bp, Homo sapiens
  siRNA target sequence for COL19A1 (NM_001858.2,634-652).
cacaaacttggcattagta

SEQ ID NO: 288015 - DNA, 19 bp, Homo sapiens
  siRNA target sequence for COL19A1 (NM_001858.2,636-654).
caaacttggcattagtata

SEQ ID NO: 288016 - DNA, 19 bp, Homo sapiens
  siRNA target sequence for COL19A1 (NM_001858.2,640-658).
cttggcattagtatacaat

SEQ ID NO: 288017 - DNA, 19 bp, Homo sapiens
  siRNA target sequence for COL19A1 (NM_001858.2,739-757).
ggacggacagttattgcta

SEQ ID NO: 288018 - DNA, 19 bp, Homo sapiens
  siRNA target sequence for COL19A1 (NM_001858.2,779-797).
ctgtggatattgaacttca

SEQ ID NO: 288019 - DNA, 19 bp, Homo sapiens
  siRNA target sequence for COL19A1 (NM_001858.2,825-843).
cctcatagctcaagaaaca

SEQ ID NO: 288020 - DNA, 19 bp, Homo sapiens
  siRNA target sequence for COL19A1 (NM_001858.2,874-892).
gagcaggatggctttggaa

SEQ ID NO: 288021 - DNA, 19 bp, Homo sapiens
  siRNA target sequence for COL19A1 (NM_001858.2,889-907).
ggaaatattgcatcatcat

SEQ ID NO: 288022 - DNA, 19 bp, Homo sapiens
  siRNA target sequence for COL19A1 (NM_001858.2,993-1011).
gggagaagcaggattacca

SEQ ID NO: 288023 - DNA, 19 bp, Homo sapiens
  siRNA target sequence for COL19A1 (NM_001858.2,1051-1069).
gagccgggtgaaaatggtt

SEQ ID NO: 288024 - DNA, 19 bp, Homo sapiens
  siRNA target sequence for COL19A1 (NM_001858.2,1053-1071).
gccgggtgaaaatggttta

SEQ ID NO: 288025 - DNA, 19 bp, Homo sapiens
  siRNA target sequence for COL19A1 (NM_001858.2,1426-1444).
caaactcttggtggatatt

SEQ ID NO: 288026 - DNA, 19 bp, Homo sapiens
  siRNA target sequence for COL19A1 (NM_001858.2,1438-1456).
ggatattataacaaggata

SEQ ID NO: 288027 - DNA, 19 bp, Homo sapiens
  siRNA target sequence for COL19A1 (NM_001858.2,1452-1470).
ggataacaagggaaatgat

SEQ ID NO: 288028 - DNA, 19 bp, Homo sapiens
  siRNA target sequence for COL19A1 (NM_001858.2,1564-1582).
cctggagagccttttacaa

SEQ ID NO: 288029 - DNA, 19 bp, Homo sapiens
  siRNA target sequence for COL19A1 (NM_001858.2,1656-1674).
cggaccccctggtttaata

SEQ ID NO: 288030 - DNA, 19 bp, Homo sapiens
  siRNA target sequence for COL19A1 (NM_001858.2,1733-1751).
cgccaggagatgttggatt

SEQ ID NO: 288031 - DNA, 19 bp, Homo sapiens
  siRNA target sequence for COL19A1 (NM_001858.2,1772-1790).
caggaaaacaaggcattaa

SEQ ID NO: 288032 - DNA, 19 bp, Homo sapiens
  siRNA target sequence for COL19A1 (NM_001858.2,1880-1898).
caggggaaccaggattaga

SEQ ID NO: 288033 - DNA, 19 bp, Homo sapiens
  siRNA target sequence for COL19A1 (NM_001858.2,2184-2202).
cggtgctttgctcaagaat

SEQ ID NO: 288034 - DNA, 19 bp, Homo sapiens
  siRNA target sequence for COL19A1 (NM_001858.2,2267-2285).
ctggtgagcctggaaagta

SEQ ID NO: 288035 - DNA, 19 bp, Homo sapiens
  siRNA target sequence for COL19A1 (NM_001858.2,2272-2290).
gagcctggaaagtatgatt

SEQ ID NO: 288036 - DNA, 19 bp, Homo sapiens
  siRNA target sequence for COL19A1 (NM_001858.2,2558-2576).
gaccacctggtattccatt

SEQ ID NO: 288037 - DNA, 19 bp, Homo sapiens
  siRNA target sequence for COL19A1 (NM_001858.2,2560-2578).
ccacctggtattccattta

SEQ ID NO: 288038 - DNA, 19 bp, Homo sapiens
  siRNA target sequence for COL19A1 (NM_001858.2,2561-2579).
cacctggtattccatttaa

SEQ ID NO: 288039 - DNA, 19 bp, Homo sapiens
  siRNA target sequence for COL19A1 (NM_001858.2,2564-2582).
ctggtattccatttaatga

SEQ ID NO: 288040 - DNA, 19 bp, Homo sapiens
  siRNA target sequence for COL19A1 (NM_001858.2,2589-2607).
cggcatgagcagtttatat

SEQ ID NO: 288041 - DNA, 19 bp, Homo sapiens
  siRNA target sequence for COL19A1 (NM_001858.2,2591-2609).
gcatgagcagtttatataa

SEQ ID NO: 288042 - DNA, 19 bp, Homo sapiens
  siRNA target sequence for COL19A1 (NM_001858.2,2840-2858).
gaggacctgttggagatat

SEQ ID NO: 288043 - DNA, 19 bp, Homo sapiens
  siRNA target sequence for COL19A1 (NM_001858.2,3146-3164).
cggctgatgcagtttcatt

SEQ ID NO: 288044 - DNA, 19 bp, Homo sapiens
  siRNA target sequence for COL19A1 (NM_001858.2,3261-3279).
gttggctgcccaagcttat

SEQ ID NO: 288045 - DNA, 19 bp, Homo sapiens
  siRNA target sequence for COL19A1 (NM_001858.2,3472-3490).
ggacccagtggaagatgta

SEQ ID NO: 288046 - DNA, 19 bp, Homo sapiens
  siRNA target sequence for COL1A1 (NM_000088.2,229-247).
caatcacctgcgtacagaa

SEQ ID NO: 288047 - DNA, 19 bp, Homo sapiens
  siRNA target sequence for COL1A1 (NM_000088.2,610-628).
cttatggctatgatgagaa

SEQ ID NO: 288048 - DNA, 19 bp, Homo sapiens
  siRNA target sequence for COL1A1 (NM_000088.2,626-644).
gaaatcaaccggaggaatt

SEQ ID NO: 288049 - DNA, 19 bp, Homo sapiens
  siRNA target sequence for COL1A1 (NM_000088.2,2668-2686).
ctggccccattggtaatgt

SEQ ID NO: 288050 - DNA, 19 bp, Homo sapiens
  siRNA target sequence for COL1A1 (NM_000088.2,3761-3779).
ctactaccgggctgatgat

SEQ ID NO: 288051 - DNA, 19 bp, Homo sapiens
  siRNA target sequence for COL1A1 (NM_000088.2,3892-3910).
cctgccgtgacctcaagat

SEQ ID NO: 288052 - DNA, 19 bp, Homo sapiens
  siRNA target sequence for COL1A1 (NM_000088.2,4462-4480).
gtgccccagaccaggaatt

SEQ ID NO: 288053 - DNA, 19 bp, Homo sapiens
  siRNA target sequence for COL1A2 (NM_000089.2,150-168).
gtggatacgcggactttgt

SEQ ID NO: 288054 - DNA, 19 bp, Homo sapiens
  siRNA target sequence for COL1A2 (NM_000089.2,170-188).
gctgcttgcagtaacctta

SEQ ID NO: 288055 - DNA, 19 bp, Homo sapiens
  siRNA target sequence for COL1A2 (NM_000089.2,171-189).
ctgcttgcagtaaccttat

SEQ ID NO: 288056 - DNA, 19 bp, Homo sapiens
  siRNA target sequence for COL1A2 (NM_000089.2,192-210).
ctagcaacatgccaatctt

SEQ ID NO: 288057 - DNA, 19 bp, Homo sapiens
  siRNA target sequence for COL1A2 (NM_000089.2,196-214).
caacatgccaatctttaca

SEQ ID NO: 288058 - DNA, 19 bp, Homo sapiens
  siRNA target sequence for COL1A2 (NM_000089.2,199-217).
catgccaatctttacaaga

SEQ ID NO: 288059 - DNA, 19 bp, Homo sapiens
  siRNA target sequence for COL1A2 (NM_000089.2,208-226).
ctttacaagaggaaactgt

SEQ ID NO: 288060 - DNA, 19 bp, Homo sapiens
  siRNA target sequence for COL1A2 (NM_000089.2,233-251).
gggcccagccggagataga

SEQ ID NO: 288061 - DNA, 19 bp, Homo sapiens
  siRNA target sequence for COL1A2 (NM_000089.2,1495-1513).
ctggttcccctggaaatat

SEQ ID NO: 288062 - DNA, 19 bp, Homo sapiens
  siRNA target sequence for COL1A2 (NM_000089.2,1599-1617).
gagcctggcaacattggat

SEQ ID NO: 288063 - DNA, 19 bp, Homo sapiens
  siRNA target sequence for COL1A2 (NM_000089.2,2980-2998).
gcggttaccctggcaatat

SEQ ID NO: 288064 - DNA, 19 bp, Homo sapiens
  siRNA target sequence for COL1A2 (NM_000089.2,2981-2999).
cggttaccctggcaatatt

SEQ ID NO: 288065 - DNA, 19 bp, Homo sapiens
  siRNA target sequence for COL1A2 (NM_000089.2,3206-3224).
gggacacaatggattgcaa

SEQ ID NO: 288066 - DNA, 19 bp, Homo sapiens
  siRNA target sequence for COL1A2 (NM_000089.2,3469-3487).
gttacgatggagacttcta

SEQ ID NO: 288067 - DNA, 19 bp, Homo sapiens
  siRNA target sequence for COL1A2 (NM_000089.2,3523-3541).
gacccaaggactatgaagt

SEQ ID NO: 288068 - DNA, 19 bp, Homo sapiens
  siRNA target sequence for COL1A2 (NM_000089.2,3572-3590).
gattgagacccttcttact

SEQ ID NO: 288069 - DNA, 19 bp, Homo sapiens
  siRNA target sequence for COL1A2 (NM_000089.2,3691-3709).
gatgcactatggatgctat

SEQ ID NO: 288070 - DNA, 19 bp, Homo sapiens
  siRNA target sequence for COL1A2 (NM_000089.2,3694-3712).
gcactatggatgctatcaa

SEQ ID NO: 288071 - DNA, 19 bp, Homo sapiens
  siRNA target sequence for COL1A2 (NM_000089.2,3695-3713).
cactatggatgctatcaaa

SEQ ID NO: 288072 - DNA, 19 bp, Homo sapiens
  siRNA target sequence for COL1A2 (NM_000089.2,3697-3715).
ctatggatgctatcaaagt

SEQ ID NO: 288073 - DNA, 19 bp, Homo sapiens
  siRNA target sequence for COL1A2 (NM_000089.2,3771-3789).
ccagccaagaactggtata

SEQ ID NO: 288074 - DNA, 19 bp, Homo sapiens
  siRNA target sequence for COL1A2 (NM_000089.2,3774-3792).
gccaagaactggtatagga

SEQ ID NO: 288075 - DNA, 19 bp, Homo sapiens
  siRNA target sequence for COL1A2 (NM_000089.2,3812-3830).
cgtctggctaggagaaact

SEQ ID NO: 288076 - DNA, 19 bp, Homo sapiens
  siRNA target sequence for COL1A2 (NM_000089.2,3837-3855).
gctggcagccagtttgaat

SEQ ID NO: 288077 - DNA, 19 bp, Homo sapiens
  siRNA target sequence for COL1A2 (NM_000089.2,3840-3858).
ggcagccagtttgaatata

SEQ ID NO: 288078 - DNA, 19 bp, Homo sapiens
  siRNA target sequence for COL1A2 (NM_000089.2,3908-3926).
gcgcctgctggccaactat

SEQ ID NO: 288079 - DNA, 19 bp, Homo sapiens
  siRNA target sequence for COL1A2 (NM_000089.2,4007-4025).
cattctacagggctctaat

SEQ ID NO: 288080 - DNA, 19 bp, Homo sapiens
  siRNA target sequence for COL1A2 (NM_000089.2,4063-4081).
cttacactgttcttgtaga

SEQ ID NO: 288081 - DNA, 19 bp, Homo sapiens
  siRNA target sequence for COL1A2 (NM_000089.2,4077-4095).
gtagatggctgctctaaaa

SEQ ID NO: 288082 - DNA, 19 bp, Homo sapiens
  siRNA target sequence for COL1A2 (NM_000089.2,4108-4126).
ggggaaagacaatcattga

SEQ ID NO: 288083 - DNA, 19 bp, Homo sapiens
  siRNA target sequence for COL1A2 (NM_000089.2,4218-4236).
ggcccagtctgtttcaaat

SEQ ID NO: 288084 - DNA, 19 bp, Homo sapiens
  siRNA target sequence for COL27A1 (NM_032888.2,211-229).
cagtcgggcttcatcttta

SEQ ID NO: 288085 - DNA, 19 bp, Homo sapiens
  siRNA target sequence for COL27A1 (NM_032888.2,611-629).
cgcatgcagtccagtttga

SEQ ID NO: 288086 - DNA, 19 bp, Homo sapiens
  siRNA target sequence for COL27A1 (NM_032888.2,663-681).
gacgcaggtcgctcacaat

SEQ ID NO: 288087 - DNA, 19 bp, Homo sapiens
  siRNA target sequence for COL27A1 (NM_032888.2,665-683).
cgcaggtcgctcacaatta

SEQ ID NO: 288088 - DNA, 19 bp, Homo sapiens
  siRNA target sequence for COL27A1 (NM_032888.2,667-685).
caggtcgctcacaattact

SEQ ID NO: 288089 - DNA, 19 bp, Homo sapiens
  siRNA target sequence for COL27A1 (NM_032888.2,669-687).
ggtcgctcacaattactgt

SEQ ID NO: 288090 - DNA, 19 bp, Homo sapiens
  siRNA target sequence for COL27A1 (NM_032888.2,670-688).
gtcgctcacaattactgta

SEQ ID NO: 288091 - DNA, 19 bp, Homo sapiens
  siRNA target sequence for COL27A1 (NM_032888.2,917-935).
caaaccctcaccagcatat

SEQ ID NO: 288092 - DNA, 19 bp, Homo sapiens
  siRNA target sequence for COL27A1 (NM_032888.2,1058-1076).
ctcaaccatcacagaagat

SEQ ID NO: 288093 - DNA, 19 bp, Homo sapiens
  siRNA target sequence for COL27A1 (NM_032888.2,1060-1078).
caaccatcacagaagatca

SEQ ID NO: 288094 - DNA, 19 bp, Homo sapiens
  siRNA target sequence for COL27A1 (NM_032888.2,1177-1195).
ccatcttcatttacaaagt

SEQ ID NO: 288095 - DNA, 19 bp, Homo sapiens
  siRNA target sequence for COL27A1 (NM_032888.2,1814-1832).
cgagcagtggctattcgat

SEQ ID NO: 288096 - DNA, 19 bp, Homo sapiens
  siRNA target sequence for COL27A1 (NM_032888.2,1966-1984).
cctcctgggccttatggaa

SEQ ID NO: 288097 - DNA, 19 bp, Homo sapiens
  siRNA target sequence for COL27A1 (NM_032888.2,1967-1985).
ctcctgggccttatggaaa

SEQ ID NO: 288098 - DNA, 19 bp, Homo sapiens
  siRNA target sequence for COL27A1 (NM_032888.2,2673-2691).
gggcaaagtcggagacaaa

SEQ ID NO: 288099 - DNA, 19 bp, Homo sapiens
  siRNA target sequence for COL27A1 (NM_032888.2,3715-3733).
cggggtcctgaaggaaaat

SEQ ID NO: 288100 - DNA, 19 bp, Homo sapiens
  siRNA target sequence for COL27A1 (NM_032888.2,3771-3789).
gggtgccaagggctatcaa

SEQ ID NO: 288101 - DNA, 19 bp, Homo sapiens
  siRNA target sequence for COL27A1 (NM_032888.2,4755-4773).
gggtccgaagggtgacaaa

SEQ ID NO: 288102 - DNA, 19 bp, Homo sapiens
  siRNA target sequence for COL27A1 (NM_032888.2,4852-4870).
ccagggggtcctatccaat

SEQ ID NO: 288103 - DNA, 19 bp, Homo sapiens
  siRNA target sequence for COL27A1 (NM_032888.2,4853-4871).
cagggggtcctatccaatt

SEQ ID NO: 288104 - DNA, 19 bp, Homo sapiens
  siRNA target sequence for COL27A1 (NM_032888.2,4856-4874).
ggggtcctatccaattgca

SEQ ID NO: 288105 - DNA, 19 bp, Homo sapiens
  siRNA target sequence for COL27A1 (NM_032888.2,4857-4875).
gggtcctatccaattgcaa

SEQ ID NO: 288106 - DNA, 19 bp, Homo sapiens
  siRNA target sequence for COL27A1 (NM_032888.2,4972-4990).
cagggaggagagatcttta

SEQ ID NO: 288107 - DNA, 19 bp, Homo sapiens
  siRNA target sequence for COL27A1 (NM_032888.2,4974-4992).
gggaggagagatctttaaa

SEQ ID NO: 288108 - DNA, 19 bp, Homo sapiens
  siRNA target sequence for COL27A1 (NM_032888.2,5014-5032).
ctcatccagagcattaaga

SEQ ID NO: 288109 - DNA, 19 bp, Homo sapiens
  siRNA target sequence for COL27A1 (NM_032888.2,5111-5129).
cctactgggtggatccaaa

SEQ ID NO: 288110 - DNA, 19 bp, Homo sapiens
  siRNA target sequence for COL2A1 (NM_001844.3,274-292).
gaggtataatgataaggat

SEQ ID NO: 288111 - DNA, 19 bp, Homo sapiens
  siRNA target sequence for COL2A1 (NM_001844.3,477-495).
gagaacctggagacatcaa

SEQ ID NO: 288112 - DNA, 19 bp, Homo sapiens
  siRNA target sequence for COL2A1 (NM_001844.3,486-504).
gagacatcaaggatattgt

SEQ ID NO: 288113 - DNA, 19 bp, Homo sapiens
  siRNA target sequence for COL2A1 (NM_001844.3,1015-1033).
caaaggtcacagaggttat

SEQ ID NO: 288114 - DNA, 19 bp, Homo sapiens
  siRNA target sequence for COL2A1 (NM_001844.3,1378-1396).
cggtaaccctggaacagat

SEQ ID NO: 288115 - DNA, 19 bp, Homo sapiens
  siRNA target sequence for COL2A1 (NM_001844.3,1519-1537).
gacgggtgaacctggtatt

SEQ ID NO: 288116 - DNA, 19 bp, Homo sapiens
  siRNA target sequence for COL2A1 (NM_001844.3,1522-1540).
gggtgaacctggtattgct

SEQ ID NO: 288117 - DNA, 19 bp, Homo sapiens
  siRNA target sequence for COL2A1 (NM_001844.3,1702-1720).
cggtttcccaggtcaagat

SEQ ID NO: 288118 - DNA, 19 bp, Homo sapiens
  siRNA target sequence for COL2A1 (NM_001844.3,4082-4100).
gacgccatgaaggttttct

SEQ ID NO: 288119 - DNA, 19 bp, Homo sapiens
  siRNA target sequence for COL2A1 (NM_001844.3,4421-4439).
cgggcagagggcaatagca

SEQ ID NO: 288120 - DNA, 19 bp, Homo sapiens
  siRNA target sequence for COL2A1 (NM_001844.3,4532-4550).
cgcctccccatcattgaca

SEQ ID NO: 288121 - DNA, 19 bp, Homo sapiens
  siRNA target sequence for COL3A1 (NM_000090.2,160-178).
ctgcttcatcccactatta

SEQ ID NO: 288122 - DNA, 19 bp, Homo sapiens
  siRNA target sequence for COL3A1 (NM_000090.2,162-180).
gcttcatcccactattatt

SEQ ID NO: 288123 - DNA, 19 bp, Homo sapiens
  siRNA target sequence for COL3A1 (NM_000090.2,163-181).
cttcatcccactattattt

SEQ ID NO: 288124 - DNA, 19 bp, Homo sapiens
  siRNA target sequence for COL3A1 (NM_000090.2,293-311).
ccgttctctgcgatgacat

SEQ ID NO: 288125 - DNA, 19 bp, Homo sapiens
  siRNA target sequence for COL3A1 (NM_000090.2,294-312).
cgttctctgcgatgacata

SEQ ID NO: 288126 - DNA, 19 bp, Homo sapiens
  siRNA target sequence for COL3A1 (NM_000090.2,317-335).
gtgacgatcaagaattaga

SEQ ID NO: 288127 - DNA, 19 bp, Homo sapiens
  siRNA target sequence for COL3A1 (NM_000090.2,567-585).
ctattctccccagtatgat

SEQ ID NO: 288128 - DNA, 19 bp, Homo sapiens
  siRNA target sequence for COL3A1 (NM_000090.2,572-590).
ctccccagtatgattcata

SEQ ID NO: 288129 - DNA, 19 bp, Homo sapiens
  siRNA target sequence for COL3A1 (NM_000090.2,663-681).
cggtccccctggtacatct

SEQ ID NO: 288130 - DNA, 19 bp, Homo sapiens
  siRNA target sequence for COL3A1 (NM_000090.2,918-936).
cttcgatggacgaaatgga

SEQ ID NO: 288131 - DNA, 19 bp, Homo sapiens
  siRNA target sequence for COL3A1 (NM_000090.2,1269-1287).
ccctcctgggattaatggt

SEQ ID NO: 288132 - DNA, 19 bp, Homo sapiens
  siRNA target sequence for COL3A1 (NM_000090.2,1464-1482).
cggtgaggctggtattcca

SEQ ID NO: 288133 - DNA, 19 bp, Homo sapiens
  siRNA target sequence for COL3A1 (NM_000090.2,1860-1878).
cggtcctaaaggaaatgat

SEQ ID NO: 288134 - DNA, 19 bp, Homo sapiens
  siRNA target sequence for COL3A1 (NM_000090.2,2472-2490).
cggacttccaggtatagct

SEQ ID NO: 288135 - DNA, 19 bp, Homo sapiens
  siRNA target sequence for COL3A1 (NM_000090.2,3282-3300).
cggtccagctggaaagagt

SEQ ID NO: 288136 - DNA, 19 bp, Homo sapiens
  siRNA target sequence for COL3A1 (NM_000090.2,3758-3776).
gcggttttgccccgtatta

SEQ ID NO: 288137 - DNA, 19 bp, Homo sapiens
  siRNA target sequence for COL3A1 (NM_000090.2,3759-3777).
cggttttgccccgtattat

SEQ ID NO: 288138 - DNA, 19 bp, Homo sapiens
  siRNA target sequence for COL3A1 (NM_000090.2,3824-3842).
cttcactcaagtctgttaa

SEQ ID NO: 288139 - DNA, 19 bp, Homo sapiens
  siRNA target sequence for COL3A1 (NM_000090.2,3868-3886).
cctgatggttctcgtaaaa

SEQ ID NO: 288140 - DNA, 19 bp, Homo sapiens
  siRNA target sequence for COL3A1 (NM_000090.2,3869-3887).
ctgatggttctcgtaaaaa

SEQ ID NO: 288141 - DNA, 19 bp, Homo sapiens
  siRNA target sequence for COL3A1 (NM_000090.2,3881-3899).
gtaaaaaccccgctagaaa

SEQ ID NO: 288142 - DNA, 19 bp, Homo sapiens
  siRNA target sequence for COL3A1 (NM_000090.2,3958-3976).
cctaaccaaggatgcaaat

SEQ ID NO: 288143 - DNA, 19 bp, Homo sapiens
  siRNA target sequence for COL3A1 (NM_000090.2,3959-3977).
ctaaccaaggatgcaaatt

SEQ ID NO: 288144 - DNA, 19 bp, Homo sapiens
  siRNA target sequence for COL3A1 (NM_000090.2,3971-3989).
gcaaattggatgctatcaa

SEQ ID NO: 288145 - DNA, 19 bp, Homo sapiens
  siRNA target sequence for COL3A1 (NM_000090.2,4059-4077).
ctggtggacagattctagt

SEQ ID NO: 288146 - DNA, 19 bp, Homo sapiens
  siRNA target sequence for COL3A1 (NM_000090.2,4109-4127).
ccatggatggtggttttca

SEQ ID NO: 288147 - DNA, 19 bp, Homo sapiens
  siRNA target sequence for COL3A1 (NM_000090.2,4424-4442).
ctgtgagactacctattgt

SEQ ID NO: 288148 - DNA, 19 bp, Homo sapiens
  siRNA target sequence for COL4A1 (NM_001845.2,291-309).
ggggttacaaggtgtcatt

SEQ ID NO: 288149 - DNA, 19 bp, Homo sapiens
  siRNA target sequence for COL4A1 (NM_001845.2,599-617).
gtgatccaggtgagatact

SEQ ID NO: 288150 - DNA, 19 bp, Homo sapiens
  siRNA target sequence for COL4A1 (NM_001845.2,715-733).
gttgggcctccaggattta

SEQ ID NO: 288151 - DNA, 19 bp, Homo sapiens
  siRNA target sequence for COL4A1 (NM_001845.2,780-798).
gggacaaatgggcttaagt

SEQ ID NO: 288152 - DNA, 19 bp, Homo sapiens
  siRNA target sequence for COL4A1 (NM_001845.2,782-800).
gacaaatgggcttaagttt

SEQ ID NO: 288153 - DNA, 19 bp, Homo sapiens
  siRNA target sequence for COL4A1 (NM_001845.2,1050-1068).
cgggtacccaggactcata

SEQ ID NO: 288154 - DNA, 19 bp, Homo sapiens
  siRNA target sequence for COL4A1 (NM_001845.2,1198-1216).
gagccaggcccaaaaggtt

SEQ ID NO: 288155 - DNA, 19 bp, Homo sapiens
  siRNA target sequence for COL4A1 (NM_001845.2,1396-1414).
gggcagcctggctacacaa

SEQ ID NO: 288156 - DNA, 19 bp, Homo sapiens
  siRNA target sequence for COL4A1 (NM_001845.2,1398-1416).
gcagcctggctacacaaat

SEQ ID NO: 288157 - DNA, 19 bp, Homo sapiens
  siRNA target sequence for COL4A1 (NM_001845.2,1401-1419).
gcctggctacacaaatgga

SEQ ID NO: 288158 - DNA, 19 bp, Homo sapiens
  siRNA target sequence for COL4A1 (NM_001845.2,1740-1758).
gcggctcaaaggtgacaaa

SEQ ID NO: 288159 - DNA, 19 bp, Homo sapiens
  siRNA target sequence for COL4A1 (NM_001845.2,1856-1874).
cgggttctgtaggattgaa

SEQ ID NO: 288160 - DNA, 19 bp, Homo sapiens
  siRNA target sequence for COL4A1 (NM_001845.2,1857-1875).
gggttctgtaggattgaaa

SEQ ID NO: 288161 - DNA, 19 bp, Homo sapiens
  siRNA target sequence for COL4A1 (NM_001845.2,2187-2205).
gccaggcattggatttcca

SEQ ID NO: 288162 - DNA, 19 bp, Homo sapiens
  siRNA target sequence for COL4A1 (NM_001845.2,2341-2359).
ctaccgggactcaaaggtt

SEQ ID NO: 288163 - DNA, 19 bp, Homo sapiens
  siRNA target sequence for COL4A1 (NM_001845.2,3720-3738).
cgggagcccaggaattcct

SEQ ID NO: 288164 - DNA, 19 bp, Homo sapiens
  siRNA target sequence for COL4A1 (NM_001845.2,4104-4122).
gggaattaaaggtgatcaa

SEQ ID NO: 288165 - DNA, 19 bp, Homo sapiens
  siRNA target sequence for COL4A1 (NM_001845.2,4177-4195).
ggtccttacgacatcatca

SEQ ID NO: 288166 - DNA, 19 bp, Homo sapiens
  siRNA target sequence for COL4A1 (NM_001845.2,4178-4196).
gtccttacgacatcatcaa

SEQ ID NO: 288167 - DNA, 19 bp, Homo sapiens
  siRNA target sequence for COL4A1 (NM_001845.2,4471-4489).
gtgaccaggcatagtcaaa

SEQ ID NO: 288168 - DNA, 19 bp, Homo sapiens
  siRNA target sequence for COL4A1 (NM_001845.2,4475-4493).
ccaggcatagtcaaacaat

SEQ ID NO: 288169 - DNA, 19 bp, Homo sapiens
  siRNA target sequence for COL4A1 (NM_001845.2,4476-4494).
caggcatagtcaaacaata

SEQ ID NO: 288170 - DNA, 19 bp, Homo sapiens
  siRNA target sequence for COL4A1 (NM_001845.2,4478-4496).
ggcatagtcaaacaataga

SEQ ID NO: 288171 - DNA, 19 bp, Homo sapiens
  siRNA target sequence for COL4A1 (NM_001845.2,4528-4546).
ctttaccacgggtactctt

SEQ ID NO: 288172 - DNA, 19 bp, Homo sapiens
  siRNA target sequence for COL4A1 (NM_001845.2,4708-4726).
gagcccatgcccatgtcaa

SEQ ID NO: 288173 - DNA, 19 bp, Homo sapiens
  siRNA target sequence for COL4A1 (NM_001845.2,4732-4750).
cccatcacgggggaaaaca

SEQ ID NO: 288174 - DNA, 19 bp, Homo sapiens
  siRNA target sequence for COL4A1 (NM_001845.2,4733-4751).
ccatcacgggggaaaacat

SEQ ID NO: 288175 - DNA, 19 bp, Homo sapiens
  siRNA target sequence for COL4A1 (NM_001845.2,4737-4755).
cacgggggaaaacataaga

SEQ ID NO: 288176 - DNA, 19 bp, Homo sapiens
  siRNA target sequence for COL4A1 (NM_001845.2,4749-4767).
cataagaccatttattagt

SEQ ID NO: 288177 - DNA, 19 bp, Homo sapiens
  siRNA target sequence for COL4A1 (NM_001845.2,4858-4876).
ctgtggatcggctactctt

SEQ ID NO: 288178 - DNA, 19 bp, Homo sapiens
  siRNA target sequence for COL4A1 (NM_001845.2,4860-4878).
gtggatcggctactctttt

SEQ ID NO: 288179 - DNA, 19 bp, Homo sapiens
  siRNA target sequence for COL4A1 (NM_001845.2,4862-4880).
ggatcggctactcttttgt

SEQ ID NO: 288180 - DNA, 19 bp, Homo sapiens
  siRNA target sequence for COL4A1 (NM_001845.2,4982-5000).
gccgtgggacctgcaatta

SEQ ID NO: 288181 - DNA, 19 bp, Homo sapiens
  siRNA target sequence for COL4A1 (NM_001845.2,4984-5002).
cgtgggacctgcaattact

SEQ ID NO: 288182 - DNA, 19 bp, Homo sapiens
  siRNA target sequence for COL4A1 (NM_001845.2,4985-5003).
gtgggacctgcaattacta

SEQ ID NO: 288183 - DNA, 19 bp, Homo sapiens
  siRNA target sequence for COL4A1 (NM_001845.2,5108-5126).
gccgctgccaagtctgtat

SEQ ID NO: 288184 - DNA, 19 bp, Homo sapiens
  siRNA target sequence for COL4A2 (NM_001846.1,386-404).
cgggtgtgaagaagtttga

SEQ ID NO: 288185 - DNA, 19 bp, Homo sapiens
  siRNA target sequence for COL4A2 (NM_001846.1,387-405).
gggtgtgaagaagtttgat

SEQ ID NO: 288186 - DNA, 19 bp, Homo sapiens
  siRNA target sequence for COL4A2 (NM_001846.1,627-645).
ccctggtgccgatggaatt

SEQ ID NO: 288187 - DNA, 19 bp, Homo sapiens
  siRNA target sequence for COL4A2 (NM_001846.1,789-807).
gaaaggtgagccttatgca

SEQ ID NO: 288188 - DNA, 19 bp, Homo sapiens
  siRNA target sequence for COL4A2 (NM_001846.1,974-992).
gcaacagaggacttggttt

SEQ ID NO: 288189 - DNA, 19 bp, Homo sapiens
  siRNA target sequence for COL4A2 (NM_001846.1,1731-1749).
ggaatgcagatgtacagaa

SEQ ID NO: 288190 - DNA, 19 bp, Homo sapiens
  siRNA target sequence for COL4A2 (NM_001846.1,1930-1948).
ggagattccagaacaatca

SEQ ID NO: 288191 - DNA, 19 bp, Homo sapiens
  siRNA target sequence for COL4A2 (NM_001846.1,2024-2042).
gcgatgggctcgatggatt

SEQ ID NO: 288192 - DNA, 19 bp, Homo sapiens
  siRNA target sequence for COL4A2 (NM_001846.1,2249-2267).
ggaccccaggacaaataga

SEQ ID NO: 288193 - DNA, 19 bp, Homo sapiens
  siRNA target sequence for COL4A2 (NM_001846.1,2250-2268).
gaccccaggacaaatagat

SEQ ID NO: 288194 - DNA, 19 bp, Homo sapiens
  siRNA target sequence for COL4A2 (NM_001846.1,2253-2271).
cccaggacaaatagattgt

SEQ ID NO: 288195 - DNA, 19 bp, Homo sapiens
  siRNA target sequence for COL4A2 (NM_001846.1,3169-3187).
gctggtgagccaggtttta

SEQ ID NO: 288196 - DNA, 19 bp, Homo sapiens
  siRNA target sequence for COL4A2 (NM_001846.1,3281-3299).
ctatggggctgaaaggata

SEQ ID NO: 288197 - DNA, 19 bp, Homo sapiens
  siRNA target sequence for COL4A2 (NM_001846.1,3303-3321).
gggcgcaaaaggtatccaa

SEQ ID NO: 288198 - DNA, 19 bp, Homo sapiens
  siRNA target sequence for COL4A2 (NM_001846.1,3562-3580).
gacatcggggacactataa

SEQ ID NO: 288199 - DNA, 19 bp, Homo sapiens
  siRNA target sequence for COL4A2 (NM_001846.1,3564-3582).
catcggggacactataaat

SEQ ID NO: 288200 - DNA, 19 bp, Homo sapiens
  siRNA target sequence for COL4A2 (NM_001846.1,3615-3633).
gggcaccactggaatacca

SEQ ID NO: 288201 - DNA, 19 bp, Homo sapiens
  siRNA target sequence for COL4A2 (NM_001846.1,3632-3650).
caggtctgaagggattctt

SEQ ID NO: 288202 - DNA, 19 bp, Homo sapiens
  siRNA target sequence for COL4A2 (NM_001846.1,4635-4653).
cggcttccggggagatgaa

SEQ ID NO: 288203 - DNA, 19 bp, Homo sapiens
  siRNA target sequence for COL4A2 (NM_001846.1,4829-4847).
gatacagcctgctgtactt

SEQ ID NO: 288204 - DNA, 19 bp, Homo sapiens
  siRNA target sequence for COL4A2 (NM_001846.1,5246-5264).
caccattcatcgaatgcaa

SEQ ID NO: 288205 - DNA, 19 bp, Homo sapiens
  siRNA target sequence for COL4A2 (NM_001846.1,5284-5302).
cactactacgccaacaagt

SEQ ID NO: 288206 - DNA, 19 bp, Homo sapiens
  siRNA target sequence for COL4A4 (NM_000092.2,661-679).
ctctgcacatagtactaat

SEQ ID NO: 288207 - DNA, 19 bp, Homo sapiens
  siRNA target sequence for COL4A4 (NM_000092.2,718-736).
gtccctggtcacttatact

SEQ ID NO: 288208 - DNA, 19 bp, Homo sapiens
  siRNA target sequence for COL4A4 (NM_000092.2,720-738).
ccctggtcacttatactca

SEQ ID NO: 288209 - DNA, 19 bp, Homo sapiens
  siRNA target sequence for COL4A4 (NM_000092.2,721-739).
cctggtcacttatactcat

SEQ ID NO: 288210 - DNA, 19 bp, Homo sapiens
  siRNA target sequence for COL4A4 (NM_000092.2,722-740).
ctggtcacttatactcatt

SEQ ID NO: 288211 - DNA, 19 bp, Homo sapiens
  siRNA target sequence for COL4A4 (NM_000092.2,724-742).
ggtcacttatactcattct

SEQ ID NO: 288212 - DNA, 19 bp, Homo sapiens
  siRNA target sequence for COL4A4 (NM_000092.2,1271-1289).
ggcaggtcccacaggatat

SEQ ID NO: 288213 - DNA, 19 bp, Homo sapiens
  siRNA target sequence for COL4A4 (NM_000092.2,1711-1729).
gaccaccaggtgttttggt

SEQ ID NO: 288214 - DNA, 19 bp, Homo sapiens
  siRNA target sequence for COL4A4 (NM_000092.2,2013-2031).
ggatcaagtgtgatatact

SEQ ID NO: 288215 - DNA, 19 bp, Homo sapiens
  siRNA target sequence for COL4A4 (NM_000092.2,2045-2063).
ccccggaccacaaggaata

SEQ ID NO: 288216 - DNA, 19 bp, Homo sapiens
  siRNA target sequence for COL4A4 (NM_000092.2,2046-2064).
cccggaccacaaggaataa

SEQ ID NO: 288217 - DNA, 19 bp, Homo sapiens
  siRNA target sequence for COL4A4 (NM_000092.2,2047-2065).
ccggaccacaaggaataaa

SEQ ID NO: 288218 - DNA, 19 bp, Homo sapiens
  siRNA target sequence for COL4A4 (NM_000092.2,2048-2066).
cggaccacaaggaataaaa

SEQ ID NO: 288219 - DNA, 19 bp, Homo sapiens
  siRNA target sequence for COL4A4 (NM_000092.2,2327-2345).
catggttgtatcaagagtt

SEQ ID NO: 288220 - DNA, 19 bp, Homo sapiens
  siRNA target sequence for COL4A4 (NM_000092.2,2632-2650).
gtcagaaaggtgacacaat

SEQ ID NO: 288221 - DNA, 19 bp, Homo sapiens
  siRNA target sequence for COL4A4 (NM_000092.2,2636-2654).
gaaaggtgacacaatttct

SEQ ID NO: 288222 - DNA, 19 bp, Homo sapiens
  siRNA target sequence for COL4A4 (NM_000092.2,3529-3547).
ccggagatgaaggagaaat

SEQ ID NO: 288223 - DNA, 19 bp, Homo sapiens
  siRNA target sequence for COL4A4 (NM_000092.2,3819-3837).
ccaggtccccctggatttt

SEQ ID NO: 288224 - DNA, 19 bp, Homo sapiens
  siRNA target sequence for COL4A4 (NM_000092.2,3856-3874).
gaggacctaaaggaaacaa

SEQ ID NO: 288225 - DNA, 19 bp, Homo sapiens
  siRNA target sequence for COL4A4 (NM_000092.2,3968-3986).
gggcttgcctggtattcaa

SEQ ID NO: 288226 - DNA, 19 bp, Homo sapiens
  siRNA target sequence for COL4A4 (NM_000092.2,4184-4202).
cggcttgcatggattgaaa

SEQ ID NO: 288227 - DNA, 19 bp, Homo sapiens
  siRNA target sequence for COL4A4 (NM_000092.2,4262-4280).
gggaatacctgggctaaaa

SEQ ID NO: 288228 - DNA, 19 bp, Homo sapiens
  siRNA target sequence for COL4A4 (NM_000092.2,4648-4666).
cgcagggaccacatggatt

SEQ ID NO: 288229 - DNA, 19 bp, Homo sapiens
  siRNA target sequence for COL4A4 (NM_000092.2,4649-4667).
gcagggaccacatggattt

SEQ ID NO: 288230 - DNA, 19 bp, Homo sapiens
  siRNA target sequence for COL4A4 (NM_000092.2,4934-4952).
gcctcccggacgtaaaggt

SEQ ID NO: 288231 - DNA, 19 bp, Homo sapiens
  siRNA target sequence for COL4A4 (NM_000092.2,5111-5129).
gctctggactgggtatagt

SEQ ID NO: 288232 - DNA, 19 bp, Homo sapiens
  siRNA target sequence for COL4A4 (NM_000092.2,5117-5135).
gactgggtatagtctgtta

SEQ ID NO: 288233 - DNA, 19 bp, Homo sapiens
  siRNA target sequence for COL4A4 (NM_000092.2,5119-5137).
ctgggtatagtctgttata

SEQ ID NO: 288234 - DNA, 19 bp, Homo sapiens
  siRNA target sequence for COL4A4 (NM_000092.2,5122-5140).
ggtatagtctgttatacct

SEQ ID NO: 288235 - DNA, 19 bp, Homo sapiens
  siRNA target sequence for COL4A4 (NM_000092.2,5186-5204).
gtcttgccttcccgtattt

SEQ ID NO: 288236 - DNA, 19 bp, Homo sapiens
  siRNA target sequence for COL4A4 (NM_000092.2,5487-5505).
ggagggcaggcccttatgt

SEQ ID NO: 288237 - DNA, 19 bp, Homo sapiens
  siRNA target sequence for COL4A4 (NM_000092.2,5577-5595).
cactttttcgcaaataagt

SEQ ID NO: 288238 - DNA, 19 bp, Homo sapiens
  siRNA target sequence for COL4A4 (NM_000092.2,5579-5597).
ctttttcgcaaataagtat

SEQ ID NO: 288239 - DNA, 19 bp, Homo sapiens
  siRNA target sequence for COL4A4 (NM_000092.2,5650-5668).
caccagacaccttaaaaga

SEQ ID NO: 288240 - DNA, 19 bp, Homo sapiens
  siRNA target sequence for COL4A4 (NM_000092.2,5676-5694).
gcccaacgccagaaaatca

SEQ ID NO: 288241 - DNA, 19 bp, Homo sapiens
  siRNA target sequence for COL4A4 (NM_000092.2,5703-5721).
caggtctgcgtgaagtata

SEQ ID NO: 288242 - DNA, 19 bp, Homo sapiens
  siRNA target sequence for COL4A4 (NM_000092.2,5706-5724).
gtctgcgtgaagtatagct

SEQ ID NO: 288243 - DNA, 19 bp, Homo sapiens
  siRNA target sequence for COL4A5 (NM_000495.3,224-242).
ctggctgccggcttgttct

SEQ ID NO: 288244 - DNA, 19 bp, Homo sapiens
  siRNA target sequence for COL4A5 (NM_000495.3,226-244).
ggctgccggcttgttctta

SEQ ID NO: 288245 - DNA, 19 bp, Homo sapiens
  siRNA target sequence for COL4A5 (NM_000495.3,228-246).
ctgccggcttgttcttact

SEQ ID NO: 288246 - DNA, 19 bp, Homo sapiens
  siRNA target sequence for COL4A5 (NM_000495.3,424-442).
gggacaaaagggtgatgat

SEQ ID NO: 288247 - DNA, 19 bp, Homo sapiens
  siRNA target sequence for COL4A5 (NM_000495.3,667-685).
gggtgaaccaggtagtata

SEQ ID NO: 288248 - DNA, 19 bp, Homo sapiens
  siRNA target sequence for COL4A5 (NM_000495.3,669-687).
gtgaaccaggtagtataat

SEQ ID NO: 288249 - DNA, 19 bp, Homo sapiens
  siRNA target sequence for COL4A5 (NM_000495.3,671-689).
gaaccaggtagtataatta

SEQ ID NO: 288250 - DNA, 19 bp, Homo sapiens
  siRNA target sequence for COL4A5 (NM_000495.3,674-692).
ccaggtagtataattatgt

SEQ ID NO: 288251 - DNA, 19 bp, Homo sapiens
  siRNA target sequence for COL4A5 (NM_000495.3,712-730).
gggtaatccaggatatcca

SEQ ID NO: 288252 - DNA, 19 bp, Homo sapiens
  siRNA target sequence for COL4A5 (NM_000495.3,837-855).
caggacctaaggggaatat

SEQ ID NO: 288253 - DNA, 19 bp, Homo sapiens
  siRNA target sequence for COL4A5 (NM_000495.3,3474-3492).
cagggaaccctggtatcaa

SEQ ID NO: 288254 - DNA, 19 bp, Homo sapiens
  siRNA target sequence for COL4A5 (NM_000495.3,3590-3608).
cctggaccaaaaggtatta

SEQ ID NO: 288255 - DNA, 19 bp, Homo sapiens
  siRNA target sequence for COL4A5 (NM_000495.3,3709-3727).
cggtcaagatggtattcct

SEQ ID NO: 288256 - DNA, 19 bp, Homo sapiens
  siRNA target sequence for COL4A5 (NM_000495.3,3814-3832).
gggtgatggaggattacct

SEQ ID NO: 288257 - DNA, 19 bp, Homo sapiens
  siRNA target sequence for COL4A5 (NM_000495.3,4025-4043).
cctggaaatggaggtatta

SEQ ID NO: 288258 - DNA, 19 bp, Homo sapiens
  siRNA target sequence for COL4A5 (NM_000495.3,4143-4161).
cgggtctcaatggaatgaa

SEQ ID NO: 288259 - DNA, 19 bp, Homo sapiens
  siRNA target sequence for COL4A5 (NM_000495.3,4144-4162).
gggtctcaatggaatgaaa

SEQ ID NO: 288260 - DNA, 19 bp, Homo sapiens
  siRNA target sequence for COL4A5 (NM_000495.3,4243-4261).
gggggaaccgggacttatt

SEQ ID NO: 288261 - DNA, 19 bp, Homo sapiens
  siRNA target sequence for COL4A5 (NM_000495.3,4246-4264).
ggaaccgggacttattggt

SEQ ID NO: 288262 - DNA, 19 bp, Homo sapiens
  siRNA target sequence for COL4A5 (NM_000495.3,4570-4588).
ctctgttgcacatggattt

SEQ ID NO: 288263 - DNA, 19 bp, Homo sapiens
  siRNA target sequence for COL4A5 (NM_000495.3,4669-4687).
cctgtatgtacaaggaaat

SEQ ID NO: 288264 - DNA, 19 bp, Homo sapiens
  siRNA target sequence for COL4A5 (NM_000495.3,4743-4761).
gtaccatgcctttcatgtt

SEQ ID NO: 288265 - DNA, 19 bp, Homo sapiens
  siRNA target sequence for COL4A5 (NM_000495.3,4756-4774).
catgttctgcaacatcaat

SEQ ID NO: 288266 - DNA, 19 bp, Homo sapiens
  siRNA target sequence for COL4A5 (NM_000495.3,5106-5124).
ggggtacctgtaactacta

SEQ ID NO: 288267 - DNA, 19 bp, Homo sapiens
  siRNA target sequence for COL4A5 (NM_000495.3,5107-5125).
gggtacctgtaactactat

SEQ ID NO: 288268 - DNA, 19 bp, Homo sapiens
  siRNA target sequence for COL4A5 (NM_000495.3,5140-5158).
cttttggctggcaactgta

SEQ ID NO: 288269 - DNA, 19 bp, Homo sapiens
  siRNA target sequence for COL4A5 (NM_000495.3,5159-5177).
gatgtgtcagacatgttca

SEQ ID NO: 288270 - DNA, 19 bp, Homo sapiens
  siRNA target sequence for COL4A6 (NM_001847.1,171-189).
gcagcgggagagaagtctt

SEQ ID NO: 288271 - DNA, 19 bp, Homo sapiens
  siRNA target sequence for COL4A6 (NM_001847.1,172-190).
cagcgggagagaagtctta

SEQ ID NO: 288272 - DNA, 19 bp, Homo sapiens
  siRNA target sequence for COL4A6 (NM_001847.1,261-279).
cgacctggaccaattggaa

SEQ ID NO: 288273 - DNA, 19 bp, Homo sapiens
  siRNA target sequence for COL4A6 (NM_001847.1,262-280).
gacctggaccaattggaat

SEQ ID NO: 288274 - DNA, 19 bp, Homo sapiens
  siRNA target sequence for COL4A6 (NM_001847.1,265-283).
ctggaccaattggaattca

SEQ ID NO: 288275 - DNA, 19 bp, Homo sapiens
  siRNA target sequence for COL4A6 (NM_001847.1,308-326).
cactggctctactggttta

SEQ ID NO: 288276 - DNA, 19 bp, Homo sapiens
  siRNA target sequence for COL4A6 (NM_001847.1,319-337).
ctggtttatcgggattgaa

SEQ ID NO: 288277 - DNA, 19 bp, Homo sapiens
  siRNA target sequence for COL4A6 (NM_001847.1,401-419).
gggagttcctggctttctt

SEQ ID NO: 288278 - DNA, 19 bp, Homo sapiens
  siRNA target sequence for COL4A6 (NM_001847.1,562-580).
ctggtcagaaaggatcaaa

SEQ ID NO: 288279 - DNA, 19 bp, Homo sapiens
  siRNA target sequence for COL4A6 (NM_001847.1,841-859).
ctactggagagctggaatt

SEQ ID NO: 288280 - DNA, 19 bp, Homo sapiens
  siRNA target sequence for COL4A6 (NM_001847.1,911-929).
gggttttccaggcataagt

SEQ ID NO: 288281 - DNA, 19 bp, Homo sapiens
  siRNA target sequence for COL4A6 (NM_001847.1,1016-1034).
gggtcccatgggttcagaa

SEQ ID NO: 288282 - DNA, 19 bp, Homo sapiens
  siRNA target sequence for COL4A6 (NM_001847.1,1079-1097).
gggatttcctgggcttaat

SEQ ID NO: 288283 - DNA, 19 bp, Homo sapiens
  siRNA target sequence for COL4A6 (NM_001847.1,1115-1133).
gggtcaaaagggtgacatt

SEQ ID NO: 288284 - DNA, 19 bp, Homo sapiens
  siRNA target sequence for COL4A6 (NM_001847.1,1141-1159).
caggcccagatgttttcat

SEQ ID NO: 288285 - DNA, 19 bp, Homo sapiens
  siRNA target sequence for COL4A6 (NM_001847.1,1352-1370).
cccaggccgtaccacaatt

SEQ ID NO: 288286 - DNA, 19 bp, Homo sapiens
  siRNA target sequence for COL4A6 (NM_001847.1,1431-1449).
cctagtccagaatttgaga

SEQ ID NO: 288287 - DNA, 19 bp, Homo sapiens
  siRNA target sequence for COL4A6 (NM_001847.1,1808-1826).
gggcttccgtggtgtaata

SEQ ID NO: 288288 - DNA, 19 bp, Homo sapiens
  siRNA target sequence for COL4A6 (NM_001847.1,1811-1829).
cttccgtggtgtaatagga

SEQ ID NO: 288289 - DNA, 19 bp, Homo sapiens
  siRNA target sequence for COL4A6 (NM_001847.1,2099-2117).
cggtccatcaggatttcca

SEQ ID NO: 288290 - DNA, 19 bp, Homo sapiens
  siRNA target sequence for COL4A6 (NM_001847.1,2179-2197).
ctgggtcaagtggaagtaa

SEQ ID NO: 288291 - DNA, 19 bp, Homo sapiens
  siRNA target sequence for COL4A6 (NM_001847.1,2474-2492).
cgggaagcctggcttacta

SEQ ID NO: 288292 - DNA, 19 bp, Homo sapiens
  siRNA target sequence for COL4A6 (NM_001847.1,2667-2685).
cctcctggatcaattgtaa

SEQ ID NO: 288293 - DNA, 19 bp, Homo sapiens
  siRNA target sequence for COL4A6 (NM_001847.1,2668-2686).
ctcctggatcaattgtaaa

SEQ ID NO: 288294 - DNA, 19 bp, Homo sapiens
  siRNA target sequence for COL4A6 (NM_001847.1,2670-2688).
cctggatcaattgtaaaga

SEQ ID NO: 288295 - DNA, 19 bp, Homo sapiens
  siRNA target sequence for COL4A6 (NM_001847.1,2730-2748).
ctagtaggactgaaaggaa

SEQ ID NO: 288296 - DNA, 19 bp, Homo sapiens
  siRNA target sequence for COL4A6 (NM_001847.1,2807-2825).
ggggtctgttggattcgta

SEQ ID NO: 288297 - DNA, 19 bp, Homo sapiens
  siRNA target sequence for COL4A6 (NM_001847.1,2812-2830).
ctgttggattcgtaggttt

SEQ ID NO: 288298 - DNA, 19 bp, Homo sapiens
  siRNA target sequence for COL4A6 (NM_001847.1,2822-2840).
cgtaggttttccaggaata

SEQ ID NO: 288299 - DNA, 19 bp, Homo sapiens
  siRNA target sequence for COL4A6 (NM_001847.1,2982-3000).
ccaagacgtccaatgtcaa

SEQ ID NO: 288300 - DNA, 19 bp, Homo sapiens
  siRNA target sequence for COL4A6 (NM_001847.1,3037-3055).
cagccggatccaatggatt

SEQ ID NO: 288301 - DNA, 19 bp, Homo sapiens
  siRNA target sequence for COL4A6 (NM_001847.1,3041-3059).
cggatccaatggatttcct

SEQ ID NO: 288302 - DNA, 19 bp, Homo sapiens
  siRNA target sequence for COL4A6 (NM_001847.1,3134-3152).
cattatcaaaggagttagt

SEQ ID NO: 288303 - DNA, 19 bp, Homo sapiens
  siRNA target sequence for COL4A6 (NM_001847.1,3320-3338).
caacggccagacagttgaa

SEQ ID NO: 288304 - DNA, 19 bp, Homo sapiens
  siRNA target sequence for COL4A6 (NM_001847.1,3323-3341).
cggccagacagttgaaatt

SEQ ID NO: 288305 - DNA, 19 bp, Homo sapiens
  siRNA target sequence for COL4A6 (NM_001847.1,3369-3387).
cctggcgaatctggtttta

SEQ ID NO: 288306 - DNA, 19 bp, Homo sapiens
  siRNA target sequence for COL4A6 (NM_001847.1,3370-3388).
ctggcgaatctggttttaa

SEQ ID NO: 288307 - DNA, 19 bp, Homo sapiens
  siRNA target sequence for COL4A6 (NM_001847.1,3670-3688).
gcactccaggacctagtat

SEQ ID NO: 288308 - DNA, 19 bp, Homo sapiens
  siRNA target sequence for COL4A6 (NM_001847.1,4144-4162).
caggatttcccggaatgaa

SEQ ID NO: 288309 - DNA, 19 bp, Homo sapiens
  siRNA target sequence for COL4A6 (NM_001847.1,4345-4363).
ctggcatccccggtaaaga

SEQ ID NO: 288310 - DNA, 19 bp, Homo sapiens
  siRNA target sequence for COL4A6 (NM_001847.1,4506-4524).
gtgggctacacgttggtaa

SEQ ID NO: 288311 - DNA, 19 bp, Homo sapiens
  siRNA target sequence for COL4A6 (NM_001847.1,4510-4528).
gctacacgttggtaaagca

SEQ ID NO: 288312 - DNA, 19 bp, Homo sapiens
  siRNA target sequence for COL4A6 (NM_001847.1,4583-4601).
ggggtacagcttactgttt

SEQ ID NO: 288313 - DNA, 19 bp, Homo sapiens
  siRNA target sequence for COL4A6 (NM_001847.1,4712-4730).
ctatgccaggcgcaatgat

SEQ ID NO: 288314 - DNA, 19 bp, Homo sapiens
  siRNA target sequence for COL4A6 (NM_001847.1,4716-4734).
gccaggcgcaatgataaat

SEQ ID NO: 288315 - DNA, 19 bp, Homo sapiens
  siRNA target sequence for COL4A6 (NM_001847.1,4720-4738).
ggcgcaatgataaatctta

SEQ ID NO: 288316 - DNA, 19 bp, Homo sapiens
  siRNA target sequence for COL4A6 (NM_001847.1,4722-4740).
cgcaatgataaatcttact

SEQ ID NO: 288317 - DNA, 19 bp, Homo sapiens
  siRNA target sequence for COL4A6 (NM_001847.1,4899-4917).
ctctggattgggtactctt

SEQ ID NO: 288318 - DNA, 19 bp, Homo sapiens
  siRNA target sequence for COL4A6 (NM_001847.1,5038-5056).
gccactactttgcaaacaa

SEQ ID NO: 288319 - DNA, 19 bp, Homo sapiens
  siRNA target sequence for COL4A6 (NM_033641.1,725-743).
gtagtttcaaaggaatgaa

SEQ ID NO: 288320 - DNA, 19 bp, Homo sapiens
  siRNA target sequence for COL5A2 (NM_000393.2,212-230).
gggcaatttgtctcaataa

SEQ ID NO: 288321 - DNA, 19 bp, Homo sapiens
  siRNA target sequence for COL5A2 (NM_000393.2,282-300).
ctcagaatggccagatgta

SEQ ID NO: 288322 - DNA, 19 bp, Homo sapiens
  siRNA target sequence for COL5A2 (NM_000393.2,286-304).
gaatggccagatgtactta

SEQ ID NO: 288323 - DNA, 19 bp, Homo sapiens
  siRNA target sequence for COL5A2 (NM_000393.2,715-733).
cttgagcaggccgttttca

SEQ ID NO: 288324 - DNA, 19 bp, Homo sapiens
  siRNA target sequence for COL5A2 (NM_000393.2,771-789).
ggagtcaagtaggactaat

SEQ ID NO: 288325 - DNA, 19 bp, Homo sapiens
  siRNA target sequence for COL5A2 (NM_000393.2,896-914).
ccaatgggtccgattggtt

SEQ ID NO: 288326 - DNA, 19 bp, Homo sapiens
  siRNA target sequence for COL5A2 (NM_000393.2,1054-1072).
gggtcaccgaggacacaaa

SEQ ID NO: 288327 - DNA, 19 bp, Homo sapiens
  siRNA target sequence for COL5A2 (NM_000393.2,1602-1620).
cagggccacatggtattca

SEQ ID NO: 288328 - DNA, 19 bp, Homo sapiens
  siRNA target sequence for COL5A2 (NM_000393.2,1783-1801).
gggtcctgtaggttcttca

SEQ ID NO: 288329 - DNA, 19 bp, Homo sapiens
  siRNA target sequence for COL5A2 (NM_000393.2,2418-2436).
caccaggtcttcaaggtat

SEQ ID NO: 288330 - DNA, 19 bp, Homo sapiens
  siRNA target sequence for COL5A2 (NM_000393.2,2484-2502).
gaggtggcataggagaaaa

SEQ ID NO: 288331 - DNA, 19 bp, Homo sapiens
  siRNA target sequence for COL5A2 (NM_000393.2,2601-2619).
ctggtcctcgaggtttagt

SEQ ID NO: 288332 - DNA, 19 bp, Homo sapiens
  siRNA target sequence for COL5A2 (NM_000393.2,2670-2688).
caactggagctgttggttt

SEQ ID NO: 288333 - DNA, 19 bp, Homo sapiens
  siRNA target sequence for COL5A2 (NM_000393.2,3112-3130).
gaccgggcagagaggaatt

SEQ ID NO: 288334 - DNA, 19 bp, Homo sapiens
  siRNA target sequence for COL5A2 (NM_000393.2,3114-3132).
ccgggcagagaggaattgt

SEQ ID NO: 288335 - DNA, 19 bp, Homo sapiens
  siRNA target sequence for COL5A2 (NM_000393.2,3115-3133).
cgggcagagaggaattgtt

SEQ ID NO: 288336 - DNA, 19 bp, Homo sapiens
  siRNA target sequence for COL5A2 (NM_000393.2,3457-3475).
gggttctcggggtcctata

SEQ ID NO: 288337 - DNA, 19 bp, Homo sapiens
  siRNA target sequence for COL5A2 (NM_000393.2,3574-3592).
gggccacagaggctttact

SEQ ID NO: 288338 - DNA, 19 bp, Homo sapiens
  siRNA target sequence for COL5A2 (NM_000393.2,3861-3879).
ggcactatgatgaaagcat

SEQ ID NO: 288339 - DNA, 19 bp, Homo sapiens
  siRNA target sequence for COL5A2 (NM_000393.2,3888-3906).
cacttcctgagtttactga

SEQ ID NO: 288340 - DNA, 19 bp, Homo sapiens
  siRNA target sequence for COL5A2 (NM_000393.2,3967-3985).
gtcactcagtagtcagatt

SEQ ID NO: 288341 - DNA, 19 bp, Homo sapiens
  siRNA target sequence for COL5A2 (NM_000393.2,3999-4017).
gccccgatggctcgaaaaa

SEQ ID NO: 288342 - DNA, 19 bp, Homo sapiens
  siRNA target sequence for COL5A2 (NM_000393.2,4002-4020).
ccgatggctcgaaaaagca

SEQ ID NO: 288343 - DNA, 19 bp, Homo sapiens
  siRNA target sequence for COL5A2 (NM_000393.2,4029-4047).
gcacgtgtgatgacctaaa

SEQ ID NO: 288344 - DNA, 19 bp, Homo sapiens
  siRNA target sequence for COL5A2 (NM_000393.2,4033-4051).
gtgtgatgacctaaagctt

SEQ ID NO: 288345 - DNA, 19 bp, Homo sapiens
  siRNA target sequence for COL5A2 (NM_000393.2,4192-4210).
ctggtgggccagtaaatct

SEQ ID NO: 288346 - DNA, 19 bp, Homo sapiens
  siRNA target sequence for COL5A3 (NM_015719.2,267-285).
ggtgaccgggcattcagaa

SEQ ID NO: 288347 - DNA, 19 bp, Homo sapiens
  siRNA target sequence for COL5A3 (NM_015719.2,268-286).
gtgaccgggcattcagaat

SEQ ID NO: 288348 - DNA, 19 bp, Homo sapiens
  siRNA target sequence for COL5A3 (NM_015719.2,378-396).
ggacagccagccaatcagt

SEQ ID NO: 288349 - DNA, 19 bp, Homo sapiens
  siRNA target sequence for COL5A3 (NM_015719.2,405-423).
ctgtccatttatgatgaaa

SEQ ID NO: 288350 - DNA, 19 bp, Homo sapiens
  siRNA target sequence for COL5A3 (NM_015719.2,671-689).
gactttcgagggagacatt

SEQ ID NO: 288351 - DNA, 19 bp, Homo sapiens
  siRNA target sequence for COL5A3 (NM_015719.2,673-691).
ctttcgagggagacattca

SEQ ID NO: 288352 - DNA, 19 bp, Homo sapiens
  siRNA target sequence for COL5A3 (NM_015719.2,1175-1193).
gactcagttccagatcttt

SEQ ID NO: 288353 - DNA, 19 bp, Homo sapiens
  siRNA target sequence for COL5A3 (NM_015719.2,1222-1240).
gagagcccgcagtgattga

SEQ ID NO: 288354 - DNA, 19 bp, Homo sapiens
  siRNA target sequence for COL5A3 (NM_015719.2,1224-1242).
gagcccgcagtgattgaaa

SEQ ID NO: 288355 - DNA, 19 bp, Homo sapiens
  siRNA target sequence for COL5A3 (NM_015719.2,1399-1417).
caccgggcactgtgatcat

SEQ ID NO: 288356 - DNA, 19 bp, Homo sapiens
  siRNA target sequence for COL5A3 (NM_015719.2,1401-1419).
ccgggcactgtgatcatga

SEQ ID NO: 288357 - DNA, 19 bp, Homo sapiens
  siRNA target sequence for COL5A3 (NM_015719.2,1933-1951).
cgggtgtgactggaattga

SEQ ID NO: 288358 - DNA, 19 bp, Homo sapiens
  siRNA target sequence for COL5A3 (NM_015719.2,2006-2024).
gggacagcagggaaaccat

SEQ ID NO: 288359 - DNA, 19 bp, Homo sapiens
  siRNA target sequence for COL5A3 (NM_015719.2,2453-2471).
gccaggcctcccaggttat

SEQ ID NO: 288360 - DNA, 19 bp, Homo sapiens
  siRNA target sequence for COL5A3 (NM_015719.2,2482-2500).
ctggacctaagggatctat

SEQ ID NO: 288361 - DNA, 19 bp, Homo sapiens
  siRNA target sequence for COL5A3 (NM_015719.2,2743-2761).
ctggtcaccaaggtaaaga

SEQ ID NO: 288362 - DNA, 19 bp, Homo sapiens
  siRNA target sequence for COL5A3 (NM_015719.2,3049-3067).
cgggacctactggcttaaa

SEQ ID NO: 288363 - DNA, 19 bp, Homo sapiens
  siRNA target sequence for COL5A3 (NM_015719.2,3338-3356).
cggacacaaggggagtaaa

SEQ ID NO: 288364 - DNA, 19 bp, Homo sapiens
  siRNA target sequence for COL5A3 (NM_015719.2,3347-3365).
ggggagtaaaggcgataaa

SEQ ID NO: 288365 - DNA, 19 bp, Homo sapiens
  siRNA target sequence for COL5A3 (NM_015719.2,3869-3887).
ggggctgcccggagatcta

SEQ ID NO: 288366 - DNA, 19 bp, Homo sapiens
  siRNA target sequence for COL5A3 (NM_015719.2,4793-4811).
ggactcgttcagggttttt

SEQ ID NO: 288367 - DNA, 19 bp, Homo sapiens
  siRNA target sequence for COL5A3 (NM_015719.2,4798-4816).
cgttcagggttttttgcaa

SEQ ID NO: 288368 - DNA, 19 bp, Homo sapiens
  siRNA target sequence for COL5A3 (NM_015719.2,4840-4858).
gcctctatcccgacaagaa

SEQ ID NO: 288369 - DNA, 19 bp, Homo sapiens
  siRNA target sequence for COL5A3 (NM_015719.2,4842-4860).
ctctatcccgacaagaagt

SEQ ID NO: 288370 - DNA, 19 bp, Homo sapiens
  siRNA target sequence for COL5A3 (NM_015719.2,4844-4862).
ctatcccgacaagaagttt

SEQ ID NO: 288371 - DNA, 19 bp, Homo sapiens
  siRNA target sequence for COL5A3 (NM_015719.2,4848-4866).
cccgacaagaagtttgaga

SEQ ID NO: 288372 - DNA, 19 bp, Homo sapiens
  siRNA target sequence for COL5A3 (NM_015719.2,4878-4896).
gcctcctggtccaaggaaa

SEQ ID NO: 288373 - DNA, 19 bp, Homo sapiens
  siRNA target sequence for COL5A3 (NM_015719.2,4923-4941).
cgtcgagggaagaagttct

SEQ ID NO: 288374 - DNA, 19 bp, Homo sapiens
  siRNA target sequence for COL5A3 (NM_015719.2,5192-5210).
gacgaagacccttttcgaa

SEQ ID NO: 288375 - DNA, 19 bp, Homo sapiens
  siRNA target sequence for COL5A3 (NM_015719.2,5194-5212).
cgaagacccttttcgaatt

SEQ ID NO: 288376 - DNA, 19 bp, Homo sapiens
  siRNA target sequence for COL5A3 (NM_015719.2,5218-5236).
cttctcgagcgggatttct

SEQ ID NO: 288377 - DNA, 19 bp, Homo sapiens
  siRNA target sequence for COL5A3 (NM_015719.2,5268-5286).
ggccagacgaaccaaaagt

SEQ ID NO: 288378 - DNA, 19 bp, Homo sapiens
  siRNA target sequence for COL5A3 (NM_015719.2,5269-5287).
gccagacgaaccaaaagtt

SEQ ID NO: 288379 - DNA, 19 bp, Homo sapiens
  siRNA target sequence for COL5A3 (NM_015719.2,5270-5288).
ccagacgaaccaaaagttt

SEQ ID NO: 288380 - DNA, 19 bp, Homo sapiens
  siRNA target sequence for COL6A2 (NM_001849.2,156-174).
cggacactaccgagagaaa

SEQ ID NO: 288381 - DNA, 19 bp, Homo sapiens
  siRNA target sequence for COL6A2 (NM_001849.2,158-176).
gacactaccgagagaaaca

SEQ ID NO: 288382 - DNA, 19 bp, Homo sapiens
  siRNA target sequence for COL6A2 (NM_001849.2,162-180).
ctaccgagagaaacaacaa

SEQ ID NO: 288383 - DNA, 19 bp, Homo sapiens
  siRNA target sequence for COL6A2 (NM_001849.2,201-219).
gccccatccacgtgtactt

SEQ ID NO: 288384 - DNA, 19 bp, Homo sapiens
  siRNA target sequence for COL6A2 (NM_001849.2,973-991).
gggcgttcctggcttcaaa

SEQ ID NO: 288385 - DNA, 19 bp, Homo sapiens
  siRNA target sequence for COL6A2 (NM_001849.2,1243-1261).
gggaagcaaggggtatcaa

SEQ ID NO: 288386 - DNA, 19 bp, Homo sapiens
  siRNA target sequence for COL6A2 (NM_001849.2,2286-2304).
gggacgatgacctcaactt

SEQ ID NO: 288387 - DNA, 19 bp, Homo sapiens
  siRNA target sequence for COL6A2 (NM_001849.2,2601-2619).
ggctgggtgagcagaactt

SEQ ID NO: 288388 - DNA, 19 bp, Homo sapiens
  siRNA target sequence for COL6A2 (NM_001849.2,2783-2801).
gcgctggagaccacacaat

SEQ ID NO: 288389 - DNA, 19 bp, Homo sapiens
  siRNA target sequence for COL6A2 (NM_001849.2,2784-2802).
cgctggagaccacacaata

SEQ ID NO: 288390 - DNA, 19 bp, Homo sapiens
  siRNA target sequence for COL6A2 (NM_001849.2,3065-3083).
cacgagaaggactatgaca

SEQ ID NO: 288391 - DNA, 19 bp, Homo sapiens
  siRNA target sequence for COL6A2 (NM_058174.1,2756-2774).
ctgttcattgacaccttta

SEQ ID NO: 288392 - DNA, 19 bp, Homo sapiens
  siRNA target sequence for COL6A3 (NM_004369.1,277-295).
cccttagtggccgtctttt

SEQ ID NO: 288393 - DNA, 19 bp, Homo sapiens
  siRNA target sequence for COL6A3 (NM_004369.1,358-376).
ggtgcggctgctgatataa

SEQ ID NO: 288394 - DNA, 19 bp, Homo sapiens
  siRNA target sequence for COL6A3 (NM_004369.1,359-377).
gtgcggctgctgatataat

SEQ ID NO: 288395 - DNA, 19 bp, Homo sapiens
  siRNA target sequence for COL6A3 (NM_004369.1,361-379).
gcggctgctgatataatat

SEQ ID NO: 288396 - DNA, 19 bp, Homo sapiens
  siRNA target sequence for COL6A3 (NM_004369.1,362-380).
cggctgctgatataatatt

SEQ ID NO: 288397 - DNA, 19 bp, Homo sapiens
  siRNA target sequence for COL6A3 (NM_004369.1,401-419).
ccattggagaggaacattt

SEQ ID NO: 288398 - DNA, 19 bp, Homo sapiens
  siRNA target sequence for COL6A3 (NM_004369.1,420-438).
ccaacttgttcgagagttt

SEQ ID NO: 288399 - DNA, 19 bp, Homo sapiens
  siRNA target sequence for COL6A3 (NM_004369.1,424-442).
cttgttcgagagtttctat

SEQ ID NO: 288400 - DNA, 19 bp, Homo sapiens
  siRNA target sequence for COL6A3 (NM_004369.1,435-453).
gtttctatatgatgttgta

SEQ ID NO: 288401 - DNA, 19 bp, Homo sapiens
  siRNA target sequence for COL6A3 (NM_004369.1,517-535).
cataccgagttcctgttaa

SEQ ID NO: 288402 - DNA, 19 bp, Homo sapiens
  siRNA target sequence for COL6A3 (NM_004369.1,525-543).
gttcctgttaaatacgtat

SEQ ID NO: 288403 - DNA, 19 bp, Homo sapiens
  siRNA target sequence for COL6A3 (NM_004369.1,529-547).
ctgttaaatacgtatcgta

SEQ ID NO: 288404 - DNA, 19 bp, Homo sapiens
  siRNA target sequence for COL6A3 (NM_004369.1,539-557).
cgtatcgtactaaacaaga

SEQ ID NO: 288405 - DNA, 19 bp, Homo sapiens
  siRNA target sequence for COL6A3 (NM_004369.1,540-558).
gtatcgtactaaacaagaa

SEQ ID NO: 288406 - DNA, 19 bp, Homo sapiens
  siRNA target sequence for COL6A3 (NM_004369.1,568-586).
catatttccaacatgtctt

SEQ ID NO: 288407 - DNA, 19 bp, Homo sapiens
  siRNA target sequence for COL6A3 (NM_004369.1,677-695).
gagtccctcaggttatcgt

SEQ ID NO: 288408 - DNA, 19 bp, Homo sapiens
  siRNA target sequence for COL6A3 (NM_004369.1,683-701).
ctcaggttatcgtagtgtt

SEQ ID NO: 288409 - DNA, 19 bp, Homo sapiens
  siRNA target sequence for COL6A3 (NM_004369.1,685-703).
caggttatcgtagtgttaa

SEQ ID NO: 288410 - DNA, 19 bp, Homo sapiens
  siRNA target sequence for COL6A3 (NM_004369.1,687-705).
ggttatcgtagtgttaact

SEQ ID NO: 288411 - DNA, 19 bp, Homo sapiens
  siRNA target sequence for COL6A3 (NM_004369.1,733-751).
ctgccctcagcggaactta

SEQ ID NO: 288412 - DNA, 19 bp, Homo sapiens
  siRNA target sequence for COL6A3 (NM_004369.1,738-756).
ctcagcggaacttaagtct

SEQ ID NO: 288413 - DNA, 19 bp, Homo sapiens
  siRNA target sequence for COL6A3 (NM_004369.1,748-766).
cttaagtctgctgatgtta

SEQ ID NO: 288414 - DNA, 19 bp, Homo sapiens
  siRNA target sequence for COL6A3 (NM_004369.1,760-778).
gatgttaacgtgtttgcaa

SEQ ID NO: 288415 - DNA, 19 bp, Homo sapiens
  siRNA target sequence for COL6A3 (NM_004369.1,805-823).
gcgttaaaagaaatagcaa

SEQ ID NO: 288416 - DNA, 19 bp, Homo sapiens
  siRNA target sequence for COL6A3 (NM_004369.1,824-842).
gtgaaccgctcaatatgca

SEQ ID NO: 288417 - DNA, 19 bp, Homo sapiens
  siRNA target sequence for COL6A3 (NM_004369.1,826-844).
gaaccgctcaatatgcata

SEQ ID NO: 288418 - DNA, 19 bp, Homo sapiens
  siRNA target sequence for COL6A3 (NM_004369.1,829-847).
ccgctcaatatgcatatgt

SEQ ID NO: 288419 - DNA, 19 bp, Homo sapiens
  siRNA target sequence for COL6A3 (NM_004369.1,846-864).
gttcaacctagagaatttt

SEQ ID NO: 288420 - DNA, 19 bp, Homo sapiens
  siRNA target sequence for COL6A3 (NM_004369.1,867-885).
ctcacttcatgacatagta

SEQ ID NO: 288421 - DNA, 19 bp, Homo sapiens
  siRNA target sequence for COL6A3 (NM_004369.1,941-959).
cggaaacccttaaagacat

SEQ ID NO: 288422 - DNA, 19 bp, Homo sapiens
  siRNA target sequence for COL6A3 (NM_004369.1,991-1009).
cttattgatggatcaaaca

SEQ ID NO: 288423 - DNA, 19 bp, Homo sapiens
  siRNA target sequence for COL6A3 (NM_004369.1,1008-1026).
caacaccggaagtgtcaat

SEQ ID NO: 288424 - DNA, 19 bp, Homo sapiens
  siRNA target sequence for COL6A3 (NM_004369.1,1299-1317).
ggtgctggtcctcataagt

SEQ ID NO: 288425 - DNA, 19 bp, Homo sapiens
  siRNA target sequence for COL6A3 (NM_004369.1,1417-1435).
gagcttcagcacatagcta

SEQ ID NO: 288426 - DNA, 19 bp, Homo sapiens
  siRNA target sequence for COL6A3 (NM_004369.1,1461-1479).
cccggaattccgtagcttt

SEQ ID NO: 288427 - DNA, 19 bp, Homo sapiens
  siRNA target sequence for COL6A3 (NM_004369.1,1494-1512).
gaaattactgccgtacatt

SEQ ID NO: 288428 - DNA, 19 bp, Homo sapiens
  siRNA target sequence for COL6A3 (NM_004369.1,1523-1541).
cccaaaggcacattgtctt

SEQ ID NO: 288429 - DNA, 19 bp, Homo sapiens
  siRNA target sequence for COL6A3 (NM_004369.1,1539-1557).
cttgaaaccgccaaccatt

SEQ ID NO: 288430 - DNA, 19 bp, Homo sapiens
  siRNA target sequence for COL6A3 (NM_004369.1,1647-1665).
ccgagacttcattgctaaa

SEQ ID NO: 288431 - DNA, 19 bp, Homo sapiens
  siRNA target sequence for COL6A3 (NM_004369.1,1829-1847).
cgggctctgctctagactt

SEQ ID NO: 288432 - DNA, 19 bp, Homo sapiens
  siRNA target sequence for COL6A3 (NM_004369.1,1830-1848).
gggctctgctctagacttt

SEQ ID NO: 288433 - DNA, 19 bp, Homo sapiens
  siRNA target sequence for COL6A3 (NM_004369.1,1849-1867).
gttcgtaacaacctattca

SEQ ID NO: 288434 - DNA, 19 bp, Homo sapiens
  siRNA target sequence for COL6A3 (NM_004369.1,1888-1906).
gctgccgaggggattccta

SEQ ID NO: 288435 - DNA, 19 bp, Homo sapiens
  siRNA target sequence for COL6A3 (NM_004369.1,1889-1907).
ctgccgaggggattcctaa

SEQ ID NO: 288436 - DNA, 19 bp, Homo sapiens
  siRNA target sequence for COL6A3 (NM_004369.1,1928-1946).
gtggtaagtccctagatga

SEQ ID NO: 288437 - DNA, 19 bp, Homo sapiens
  siRNA target sequence for COL6A3 (NM_004369.1,1930-1948).
ggtaagtccctagatgaaa

SEQ ID NO: 288438 - DNA, 19 bp, Homo sapiens
  siRNA target sequence for COL6A3 (NM_004369.1,2138-2156).
ctggaacccctgaagttca

SEQ ID NO: 288439 - DNA, 19 bp, Homo sapiens
  siRNA target sequence for COL6A3 (NM_004369.1,2146-2164).
cctgaagttcactcaaaca

SEQ ID NO: 288440 - DNA, 19 bp, Homo sapiens
  siRNA target sequence for COL6A3 (NM_004369.1,2147-2165).
ctgaagttcactcaaacaa

SEQ ID NO: 288441 - DNA, 19 bp, Homo sapiens
  siRNA target sequence for COL6A3 (NM_004369.1,2192-2210).
gatcagccaacgttggaaa

SEQ ID NO: 288442 - DNA, 19 bp, Homo sapiens
  siRNA target sequence for COL6A3 (NM_004369.1,2197-2215).
gccaacgttggaaaaacca

SEQ ID NO: 288443 - DNA, 19 bp, Homo sapiens
  siRNA target sequence for COL6A3 (NM_004369.1,2199-2217).
caacgttggaaaaaccaat

SEQ ID NO: 288444 - DNA, 19 bp, Homo sapiens
  siRNA target sequence for COL6A3 (NM_004369.1,2222-2240).
cttatgtgcgcgactttgt

SEQ ID NO: 288445 - DNA, 19 bp, Homo sapiens
  siRNA target sequence for COL6A3 (NM_004369.1,2227-2245).
gtgcgcgactttgtaatga

SEQ ID NO: 288446 - DNA, 19 bp, Homo sapiens
  siRNA target sequence for COL6A3 (NM_004369.1,2239-2257).
gtaatgaacctagttaaca

SEQ ID NO: 288447 - DNA, 19 bp, Homo sapiens
  siRNA target sequence for COL6A3 (NM_004369.1,2248-2266).
ctagttaacagccttgata

SEQ ID NO: 288448 - DNA, 19 bp, Homo sapiens
  siRNA target sequence for COL6A3 (NM_004369.1,2258-2276).
gccttgatattggaaatga

SEQ ID NO: 288449 - DNA, 19 bp, Homo sapiens
  siRNA target sequence for COL6A3 (NM_004369.1,2277-2295).
caatattcgtgttggttta

SEQ ID NO: 288450 - DNA, 19 bp, Homo sapiens
  siRNA target sequence for COL6A3 (NM_004369.1,2285-2303).
gtgttggtttagtgcaatt

SEQ ID NO: 288451 - DNA, 19 bp, Homo sapiens
  siRNA target sequence for COL6A3 (NM_004369.1,2287-2305).
gttggtttagtgcaattta

SEQ ID NO: 288452 - DNA, 19 bp, Homo sapiens
  siRNA target sequence for COL6A3 (NM_004369.1,2291-2309).
gtttagtgcaatttagtga

SEQ ID NO: 288453 - DNA, 19 bp, Homo sapiens
  siRNA target sequence for COL6A3 (NM_004369.1,2314-2332).
cctgtaacggagttctctt

SEQ ID NO: 288454 - DNA, 19 bp, Homo sapiens
  siRNA target sequence for COL6A3 (NM_004369.1,2346-2364).
gaccaagtcagatatcctt

SEQ ID NO: 288455 - DNA, 19 bp, Homo sapiens
  siRNA target sequence for COL6A3 (NM_004369.1,2417-2435).
cagccctaagctatgtcta

SEQ ID NO: 288456 - DNA, 19 bp, Homo sapiens
  siRNA target sequence for COL6A3 (NM_004369.1,2515-2533).
cagtctgaggactcctatt

SEQ ID NO: 288457 - DNA, 19 bp, Homo sapiens
  siRNA target sequence for COL6A3 (NM_004369.1,2562-2580).
gggcatcctgactttttgt

SEQ ID NO: 288458 - DNA, 19 bp, Homo sapiens
  siRNA target sequence for COL6A3 (NM_004369.1,2585-2603).
gagctagccaggcgaataa

SEQ ID NO: 288459 - DNA, 19 bp, Homo sapiens
  siRNA target sequence for COL6A3 (NM_004369.1,2610-2628).
gcttgagcagattgctttt

SEQ ID NO: 288460 - DNA, 19 bp, Homo sapiens
  siRNA target sequence for COL6A3 (NM_004369.1,2632-2650).
ccaagcctggtgtatctca

SEQ ID NO: 288461 - DNA, 19 bp, Homo sapiens
  siRNA target sequence for COL6A3 (NM_004369.1,2633-2651).
caagcctggtgtatctcat

SEQ ID NO: 288462 - DNA, 19 bp, Homo sapiens
  siRNA target sequence for COL6A3 (NM_004369.1,2700-2718).
cctaaccacatatgttagt

SEQ ID NO: 288463 - DNA, 19 bp, Homo sapiens
  siRNA target sequence for COL6A3 (NM_004369.1,2811-2829).
ccctgttgtccgtgacttt

SEQ ID NO: 288464 - DNA, 19 bp, Homo sapiens
  siRNA target sequence for COL6A3 (NM_004369.1,2815-2833).
gttgtccgtgactttctct

SEQ ID NO: 288465 - DNA, 19 bp, Homo sapiens
  siRNA target sequence for COL6A3 (NM_004369.1,2821-2839).
cgtgactttctctacaaga

SEQ ID NO: 288466 - DNA, 19 bp, Homo sapiens
  siRNA target sequence for COL6A3 (NM_004369.1,2822-2840).
gtgactttctctacaagat

SEQ ID NO: 288467 - DNA, 19 bp, Homo sapiens
  siRNA target sequence for COL6A3 (NM_004369.1,2824-2842).
gactttctctacaagatta

SEQ ID NO: 288468 - DNA, 19 bp, Homo sapiens
  siRNA target sequence for COL6A3 (NM_004369.1,2888-2906).
ctcagtacagcgatgatgt

SEQ ID NO: 288469 - DNA, 19 bp, Homo sapiens
  siRNA target sequence for COL6A3 (NM_004369.1,2910-2928).
ggtggagtcccgttttgat

SEQ ID NO: 288470 - DNA, 19 bp, Homo sapiens
  siRNA target sequence for COL6A3 (NM_004369.1,3152-3170).
gtggggttgtgcctttcat

SEQ ID NO: 288471 - DNA, 19 bp, Homo sapiens
  siRNA target sequence for COL6A3 (NM_004369.1,3277-3295).
cagatagtgaatctcttaa

SEQ ID NO: 288472 - DNA, 19 bp, Homo sapiens
  siRNA target sequence for COL6A3 (NM_004369.1,3323-3341).
cagtttcaggtgaaaagga

SEQ ID NO: 288473 - DNA, 19 bp, Homo sapiens
  siRNA target sequence for COL6A3 (NM_004369.1,3487-3505).
cccgagttctacctgaatt

SEQ ID NO: 288474 - DNA, 19 bp, Homo sapiens
  siRNA target sequence for COL6A3 (NM_004369.1,3489-3507).
cgagttctacctgaattca

SEQ ID NO: 288475 - DNA, 19 bp, Homo sapiens
  siRNA target sequence for COL6A3 (NM_004369.1,3626-3644).
cgggaagcaggataacaga

SEQ ID NO: 288476 - DNA, 19 bp, Homo sapiens
  siRNA target sequence for COL6A3 (NM_004369.1,3950-3968).
gggacgtggtctttctcat

SEQ ID NO: 288477 - DNA, 19 bp, Homo sapiens
  siRNA target sequence for COL6A3 (NM_004369.1,4236-4254).
cctggggagccgcattgaa

SEQ ID NO: 288478 - DNA, 19 bp, Homo sapiens
  siRNA target sequence for COL6A3 (NM_004369.1,4398-4416).
ctcgctgagccccgaatat

SEQ ID NO: 288479 - DNA, 19 bp, Homo sapiens
  siRNA target sequence for COL6A3 (NM_004369.1,4400-4418).
cgctgagccccgaatatgt

SEQ ID NO: 288480 - DNA, 19 bp, Homo sapiens
  siRNA target sequence for COL6A3 (NM_004369.1,4550-4568).
gtgatgctgcagacattgt

SEQ ID NO: 288481 - DNA, 19 bp, Homo sapiens
  siRNA target sequence for COL6A3 (NM_004369.1,4615-4633).
catattcgagattttgtta

SEQ ID NO: 288482 - DNA, 19 bp, Homo sapiens
  siRNA target sequence for COL6A3 (NM_004369.1,4686-4704).
cgtgcagttcagcaatgat

SEQ ID NO: 288483 - DNA, 19 bp, Homo sapiens
  siRNA target sequence for COL6A3 (NM_004369.1,4824-4842).
ggcaagaaacctctttgtt

SEQ ID NO: 288484 - DNA, 19 bp, Homo sapiens
  siRNA target sequence for COL6A3 (NM_004369.1,4825-4843).
gcaagaaacctctttgtta

SEQ ID NO: 288485 - DNA, 19 bp, Homo sapiens
  siRNA target sequence for COL6A3 (NM_004369.1,4826-4844).
caagaaacctctttgttaa

SEQ ID NO: 288486 - DNA, 19 bp, Homo sapiens
  siRNA target sequence for COL6A3 (NM_004369.1,4945-4963).
cgttcctcgggcattgtga

SEQ ID NO: 288487 - DNA, 19 bp, Homo sapiens
  siRNA target sequence for COL6A3 (NM_004369.1,4949-4967).
cctcgggcattgtgagttt

SEQ ID NO: 288488 - DNA, 19 bp, Homo sapiens
  siRNA target sequence for COL6A3 (NM_004369.1,4950-4968).
ctcgggcattgtgagttta

SEQ ID NO: 288489 - DNA, 19 bp, Homo sapiens
  siRNA target sequence for COL6A3 (NM_004369.1,5234-5252).
gttttgtgtctgaaatagt

SEQ ID NO: 288490 - DNA, 19 bp, Homo sapiens
  siRNA target sequence for COL6A3 (NM_004369.1,5290-5308).
gggcttgtccagtacaact

SEQ ID NO: 288491 - DNA, 19 bp, Homo sapiens
  siRNA target sequence for COL6A3 (NM_004369.1,5396-5414).
gaagacacgccaacactaa

SEQ ID NO: 288492 - DNA, 19 bp, Homo sapiens
  siRNA target sequence for COL6A3 (NM_004369.1,5559-5577).
gaggggggtcaaagtgttt

SEQ ID NO: 288493 - DNA, 19 bp, Homo sapiens
  siRNA target sequence for COL6A3 (NM_004369.1,5674-5692).
gaactgagcgagcaagttt

SEQ ID NO: 288494 - DNA, 19 bp, Homo sapiens
  siRNA target sequence for COL6A3 (NM_004369.1,5683-5701).
gagcaagttttggaaactt

SEQ ID NO: 288495 - DNA, 19 bp, Homo sapiens
  siRNA target sequence for COL6A3 (NM_004369.1,5759-5777).
gtaatctggatgtgattct

SEQ ID NO: 288496 - DNA, 19 bp, Homo sapiens
  siRNA target sequence for COL6A3 (NM_004369.1,5778-5796).
ggggtttgatggttctaga

SEQ ID NO: 288497 - DNA, 19 bp, Homo sapiens
  siRNA target sequence for COL6A3 (NM_004369.1,5789-5807).
gttctagagaccagaatgt

SEQ ID NO: 288498 - DNA, 19 bp, Homo sapiens
  siRNA target sequence for COL6A3 (NM_004369.1,6086-6104).
gcgtgaaggtggtcattca

SEQ ID NO: 288499 - DNA, 19 bp, Homo sapiens
  siRNA target sequence for COL6A3 (NM_004369.1,6087-6105).
cgtgaaggtggtcattcat

SEQ ID NO: 288500 - DNA, 19 bp, Homo sapiens
  siRNA target sequence for COL6A3 (NM_004369.1,6090-6108).
gaaggtggtcattcatttt

SEQ ID NO: 288501 - DNA, 19 bp, Homo sapiens
  siRNA target sequence for COL6A3 (NM_004369.1,6125-6143).
gagatctggctgatttaca

SEQ ID NO: 288502 - DNA, 19 bp, Homo sapiens
  siRNA target sequence for COL6A3 (NM_004369.1,6216-6234).
cttggagcggctaatgcat

SEQ ID NO: 288503 - DNA, 19 bp, Homo sapiens
  siRNA target sequence for COL6A3 (NM_004369.1,6245-6263).
ggcgagggtttatgtatga

SEQ ID NO: 288504 - DNA, 19 bp, Homo sapiens
  siRNA target sequence for COL6A3 (NM_004369.1,6288-6306).
ggacttggattatgaacta

SEQ ID NO: 288505 - DNA, 19 bp, Homo sapiens
  siRNA target sequence for COL6A3 (NM_004369.1,6402-6420).
cgggccaaagggtattcct

SEQ ID NO: 288506 - DNA, 19 bp, Homo sapiens
  siRNA target sequence for COL6A3 (NM_004369.1,6564-6582).
gggcgaagtaggagaaatt

SEQ ID NO: 288507 - DNA, 19 bp, Homo sapiens
  siRNA target sequence for COL6A3 (NM_004369.1,6567-6585).
cgaagtaggagaaattgga

SEQ ID NO: 288508 - DNA, 19 bp, Homo sapiens
  siRNA target sequence for COL6A3 (NM_004369.1,7052-7070).
ccggtccactgggaagaaa

SEQ ID NO: 288509 - DNA, 19 bp, Homo sapiens
  siRNA target sequence for COL6A3 (NM_004369.1,7293-7311).
gggacctccagggatagtt

SEQ ID NO: 288510 - DNA, 19 bp, Homo sapiens
  siRNA target sequence for COL6A3 (NM_004369.1,7366-7384).
ggcgactccatcgatcaat

SEQ ID NO: 288511 - DNA, 19 bp, Homo sapiens
  siRNA target sequence for COL6A3 (NM_004369.1,7368-7386).
cgactccatcgatcaatgt

SEQ ID NO: 288512 - DNA, 19 bp, Homo sapiens
  siRNA target sequence for COL6A3 (NM_004369.1,7490-7508).
gagtcaaccaagacacttt

SEQ ID NO: 288513 - DNA, 19 bp, Homo sapiens
  siRNA target sequence for COL6A3 (NM_004369.1,7519-7537).
cgagatgtggtcttgagta

SEQ ID NO: 288514 - DNA, 19 bp, Homo sapiens
  siRNA target sequence for COL6A3 (NM_004369.1,7520-7538).
gagatgtggtcttgagtat

SEQ ID NO: 288515 - DNA, 19 bp, Homo sapiens
  siRNA target sequence for COL6A3 (NM_004369.1,7527-7545).
ggtcttgagtattgtgaat

SEQ ID NO: 288516 - DNA, 19 bp, Homo sapiens
  siRNA target sequence for COL6A3 (NM_004369.1,7655-7673).
cggtcctcctggacaagat

SEQ ID NO: 288517 - DNA, 19 bp, Homo sapiens
  siRNA target sequence for COL6A3 (NM_004369.1,7656-7674).
ggtcctcctggacaagatt

SEQ ID NO: 288518 - DNA, 19 bp, Homo sapiens
  siRNA target sequence for COL6A3 (NM_004369.1,7759-7777).
gtgaggaacggattcctaa

SEQ ID NO: 288519 - DNA, 19 bp, Homo sapiens
  siRNA target sequence for COL6A3 (NM_004369.1,7911-7929).
caacgctttgcagatcaat

SEQ ID NO: 288520 - DNA, 19 bp, Homo sapiens
  siRNA target sequence for COL6A3 (NM_004369.1,7996-8014).
gtcctcacgtgtcatgttt

SEQ ID NO: 288521 - DNA, 19 bp, Homo sapiens
  siRNA target sequence for COL6A3 (NM_004369.1,8034-8052).
cgacccatcctgtggattt

SEQ ID NO: 288522 - DNA, 19 bp, Homo sapiens
  siRNA target sequence for COL6A3 (NM_004369.1,8109-8127).
cgacatggctttcatctta

SEQ ID NO: 288523 - DNA, 19 bp, Homo sapiens
  siRNA target sequence for COL6A3 (NM_004369.1,8358-8376).
cctcagcaggggaatgaca

SEQ ID NO: 288524 - DNA, 19 bp, Homo sapiens
  siRNA target sequence for COL6A3 (NM_004369.1,8397-8415).
cttaggcagtgccattgaa

SEQ ID NO: 288525 - DNA, 19 bp, Homo sapiens
  siRNA target sequence for COL6A3 (NM_004369.1,8451-8469).
cccacgggacctgaaaatt

SEQ ID NO: 288526 - DNA, 19 bp, Homo sapiens
  siRNA target sequence for COL6A3 (NM_004369.1,8453-8471).
cacgggacctgaaaattgt

SEQ ID NO: 288527 - DNA, 19 bp, Homo sapiens
  siRNA target sequence for COL6A3 (NM_004369.1,8624-8642).
caaacgacgtcttcttcaa

SEQ ID NO: 288528 - DNA, 19 bp, Homo sapiens
  siRNA target sequence for COL6A3 (NM_004369.1,8753-8771).
ggaaacagtgtgattggtt

SEQ ID NO: 288529 - DNA, 19 bp, Homo sapiens
  siRNA target sequence for COL6A3 (NM_004369.1,8802-8820).
gaagtttggtcacaaacaa

SEQ ID NO: 288530 - DNA, 19 bp, Homo sapiens
  siRNA target sequence for COL6A3 (NM_004369.1,8830-8848).
ccgaataacgttacttcaa

SEQ ID NO: 288531 - DNA, 19 bp, Homo sapiens
  siRNA target sequence for COL6A3 (NM_004369.1,8832-8850).
gaataacgttacttcaagt

SEQ ID NO: 288532 - DNA, 19 bp, Homo sapiens
  siRNA target sequence for COL6A3 (NM_004369.1,9296-9314).
ccggtccttatttttatga

SEQ ID NO: 288533 - DNA, 19 bp, Homo sapiens
  siRNA target sequence for COL6A3 (NM_004369.1,9399-9417).
cgctgggcagacataccat

SEQ ID NO: 288534 - DNA, 19 bp, Homo sapiens
  siRNA target sequence for COL6A3 (NM_004369.1,9459-9477).
ctaccacggaagtttcagt

SEQ ID NO: 288535 - DNA, 19 bp, Homo sapiens
  siRNA target sequence for COL6A3 (NM_004369.1,9524-9542).
ctagttcaaccatcaatct

SEQ ID NO: 288536 - DNA, 19 bp, Homo sapiens
  siRNA target sequence for COL6A3 (NM_004369.1,9530-9548).
caaccatcaatctaatggt

SEQ ID NO: 288537 - DNA, 19 bp, Homo sapiens
  siRNA target sequence for COL6A3 (NM_004369.1,9564-9582).
ggctctcactgaaacagat

SEQ ID NO: 288538 - DNA, 19 bp, Homo sapiens
  siRNA target sequence for COL6A3 (NM_004369.1,9572-9590).
ctgaaacagatatatgcaa

SEQ ID NO: 288539 - DNA, 19 bp, Homo sapiens
  siRNA target sequence for COL6A3 (NM_004369.1,9653-9671).
ccaaaagctgtgcaagatt

SEQ ID NO: 288540 - DNA, 19 bp, Homo sapiens
  siRNA target sequence for COL6A3 (NM_004369.1,9702-9720).
caaatttggatcacagaaa

SEQ ID NO: 288541 - DNA, 19 bp, Homo sapiens
  siRNA target sequence for COL7A1 (NM_000094.2,197-215).
cctttacgccgctgacatt

SEQ ID NO: 288542 - DNA, 19 bp, Homo sapiens
  siRNA target sequence for COL7A1 (NM_000094.2,205-223).
ccgctgacattgtgttctt

SEQ ID NO: 288543 - DNA, 19 bp, Homo sapiens
  siRNA target sequence for COL7A1 (NM_000094.2,241-259).
ccattggccgcagcaattt

SEQ ID NO: 288544 - DNA, 19 bp, Homo sapiens
  siRNA target sequence for COL7A1 (NM_000094.2,451-469).
gcacaggggctgcaattct

SEQ ID NO: 288545 - DNA, 19 bp, Homo sapiens
  siRNA target sequence for COL7A1 (NM_000094.2,591-609).
gggcagggggtcaagctat

SEQ ID NO: 288546 - DNA, 19 bp, Homo sapiens
  siRNA target sequence for COL7A1 (NM_000094.2,592-610).
ggcagggggtcaagctatt

SEQ ID NO: 288547 - DNA, 19 bp, Homo sapiens
  siRNA target sequence for COL7A1 (NM_000094.2,593-611).
gcagggggtcaagctattt

SEQ ID NO: 288548 - DNA, 19 bp, Homo sapiens
  siRNA target sequence for COL7A1 (NM_000094.2,596-614).
gggggtcaagctatttgct

SEQ ID NO: 288549 - DNA, 19 bp, Homo sapiens
  siRNA target sequence for COL7A1 (NM_000094.2,1004-1022).
gtaccaagtgactgtgatt

SEQ ID NO: 288550 - DNA, 19 bp, Homo sapiens
  siRNA target sequence for COL7A1 (NM_000094.2,1422-1440).
cgtggctaccggttggaat

SEQ ID NO: 288551 - DNA, 19 bp, Homo sapiens
  siRNA target sequence for COL7A1 (NM_000094.2,1702-1720).
cccagtaccgcatcattgt

SEQ ID NO: 288552 - DNA, 19 bp, Homo sapiens
  siRNA target sequence for COL7A1 (NM_000094.2,2323-2341).
gactggagccagatactga

SEQ ID NO: 288553 - DNA, 19 bp, Homo sapiens
  siRNA target sequence for COL7A1 (NM_000094.2,2328-2346).
gagccagatactgagtata

SEQ ID NO: 288554 - DNA, 19 bp, Homo sapiens
  siRNA target sequence for COL7A1 (NM_000094.2,2545-2563).
ccatgaggcaccagatact

SEQ ID NO: 288555 - DNA, 19 bp, Homo sapiens
  siRNA target sequence for COL7A1 (NM_000094.2,3001-3019).
cgatcgactcggtgacttt

SEQ ID NO: 288556 - DNA, 19 bp, Homo sapiens
  siRNA target sequence for COL7A1 (NM_000094.2,3156-3174).
cctggcgtctcttacatct

SEQ ID NO: 288557 - DNA, 19 bp, Homo sapiens
  siRNA target sequence for COL7A1 (NM_000094.2,3157-3175).
ctggcgtctcttacatctt

SEQ ID NO: 288558 - DNA, 19 bp, Homo sapiens
  siRNA target sequence for COL7A1 (NM_000094.2,3159-3177).
ggcgtctcttacatcttct

SEQ ID NO: 288559 - DNA, 19 bp, Homo sapiens
  siRNA target sequence for COL7A1 (NM_000094.2,3601-3619).
ccttgagaggtgacatatt

SEQ ID NO: 288560 - DNA, 19 bp, Homo sapiens
  siRNA target sequence for COL7A1 (NM_000094.2,3649-3667).
ggcttaatgtggtgatgtt

SEQ ID NO: 288561 - DNA, 19 bp, Homo sapiens
  siRNA target sequence for COL7A1 (NM_000094.2,4508-4526).
gggacctcctggagctatt

SEQ ID NO: 288562 - DNA, 19 bp, Homo sapiens
  siRNA target sequence for COL7A1 (NM_000094.2,5039-5057).
cccgggtttgcctggaaaa

SEQ ID NO: 288563 - DNA, 19 bp, Homo sapiens
  siRNA target sequence for COL7A1 (NM_000094.2,5610-5628).
cctggcctgaatggaaaaa

SEQ ID NO: 288564 - DNA, 19 bp, Homo sapiens
  siRNA target sequence for COL7A1 (NM_000094.2,7183-7201).
caggacccaaaggtttcaa

SEQ ID NO: 288565 - DNA, 19 bp, Homo sapiens
  siRNA target sequence for COL7A1 (NM_000094.2,7289-7307).
cggtgctcctggtgttgtt

SEQ ID NO: 288566 - DNA, 19 bp, Homo sapiens
  siRNA target sequence for COL7A1 (NM_000094.2,8536-8554).
cacgacccctccctagtta

SEQ ID NO: 288567 - DNA, 19 bp, Homo sapiens
  siRNA target sequence for COL7A1 (NM_000094.2,8646-8664).
gatgagtactctgaatact

SEQ ID NO: 288568 - DNA, 19 bp, Homo sapiens
  siRNA target sequence for COL7A1 (NM_000094.2,8806-8824).
cctgtcacccttttgtcta

SEQ ID NO: 288569 - DNA, 19 bp, Homo sapiens
  siRNA target sequence for COL8A1 (NM_001850.3,347-365).
gccgctgccacctcaaatt

SEQ ID NO: 288570 - DNA, 19 bp, Homo sapiens
  siRNA target sequence for COL8A1 (NM_001850.3,374-392).
gatgccaccacaaattcca

SEQ ID NO: 288571 - DNA, 19 bp, Homo sapiens
  siRNA target sequence for COL8A1 (NM_001850.3,379-397).
caccacaaattccacaata

SEQ ID NO: 288572 - DNA, 19 bp, Homo sapiens
  siRNA target sequence for COL8A1 (NM_001850.3,498-516).
cacctaccccaatatatga

SEQ ID NO: 288573 - DNA, 19 bp, Homo sapiens
  siRNA target sequence for COL8A1 (NM_001850.3,504-522).
ccccaatatatgaaggaaa

SEQ ID NO: 288574 - DNA, 19 bp, Homo sapiens
  siRNA target sequence for COL8A1 (NM_001850.3,506-524).
ccaatatatgaaggaaatt

SEQ ID NO: 288575 - DNA, 19 bp, Homo sapiens
  siRNA target sequence for COL8A1 (NM_001850.3,950-968).
ccttcggggtcctaaagga

SEQ ID NO: 288576 - DNA, 19 bp, Homo sapiens
  siRNA target sequence for COL8A1 (NM_001850.3,988-1006).
caggtgcgccaggtgtaaa

SEQ ID NO: 288577 - DNA, 19 bp, Homo sapiens
  siRNA target sequence for COL8A1 (NM_001850.3,1176-1194).
gggatacccggaattggaa

SEQ ID NO: 288578 - DNA, 19 bp, Homo sapiens
  siRNA target sequence for COL8A1 (NM_001850.3,1177-1195).
ggatacccggaattggaaa

SEQ ID NO: 288579 - DNA, 19 bp, Homo sapiens
  siRNA target sequence for COL8A1 (NM_001850.3,1370-1388).
ggagaaaggaccaataggt

SEQ ID NO: 288580 - DNA, 19 bp, Homo sapiens
  siRNA target sequence for COL8A1 (NM_001850.3,1448-1466).
gggccctccaggtgctatt

SEQ ID NO: 288581 - DNA, 19 bp, Homo sapiens
  siRNA target sequence for COL8A1 (NM_001850.3,1708-1726).
caggggatcagggtttaca

SEQ ID NO: 288582 - DNA, 19 bp, Homo sapiens
  siRNA target sequence for COL8A1 (NM_001850.3,1850-1868).
cggagtggcaggacttcat

SEQ ID NO: 288583 - DNA, 19 bp, Homo sapiens
  siRNA target sequence for COL8A1 (NM_001850.3,1990-2008).
gagagtatctgccagatat

SEQ ID NO: 288584 - DNA, 19 bp, Homo sapiens
  siRNA target sequence for COL8A1 (NM_001850.3,2187-2205).
ccgcagacaggcatcttca

SEQ ID NO: 288585 - DNA, 19 bp, Homo sapiens
  siRNA target sequence for COL8A1 (NM_001850.3,2265-2283).
gtgtgggttgctctattca

SEQ ID NO: 288586 - DNA, 19 bp, Homo sapiens
  siRNA target sequence for COL8A1 (NM_001850.3,2269-2287).
gggttgctctattcaagaa

SEQ ID NO: 288587 - DNA, 19 bp, Homo sapiens
  siRNA target sequence for COL8A1 (NM_001850.3,2306-2324).
cacgtacgacgagtacaaa

SEQ ID NO: 288588 - DNA, 19 bp, Homo sapiens
  siRNA target sequence for COL8A1 (NM_001850.3,2308-2326).
cgtacgacgagtacaaaaa

SEQ ID NO: 288589 - DNA, 19 bp, Homo sapiens
  siRNA target sequence for COL9A1 (NM_001851.2,235-253).
gattccctgtcaattccaa

SEQ ID NO: 288590 - DNA, 19 bp, Homo sapiens
  siRNA target sequence for COL9A1 (NM_001851.2,239-257).
ccctgtcaattccaattct

SEQ ID NO: 288591 - DNA, 19 bp, Homo sapiens
  siRNA target sequence for COL9A1 (NM_001851.2,270-288).
gaactctgtccaaagatca

SEQ ID NO: 288592 - DNA, 19 bp, Homo sapiens
  siRNA target sequence for COL9A1 (NM_001851.2,332-350).
gttccaggtagataaagca

SEQ ID NO: 288593 - DNA, 19 bp, Homo sapiens
  siRNA target sequence for COL9A1 (NM_001851.2,342-360).
gataaagcagcatctagaa

SEQ ID NO: 288594 - DNA, 19 bp, Homo sapiens
  siRNA target sequence for COL9A1 (NM_001851.2,423-441).
gtagacttcaggattccaa

SEQ ID NO: 288595 - DNA, 19 bp, Homo sapiens
  siRNA target sequence for COL9A1 (NM_001851.2,434-452).
gattccaactaggaattta

SEQ ID NO: 288596 - DNA, 19 bp, Homo sapiens
  siRNA target sequence for COL9A1 (NM_001851.2,462-480).
ggactgcctgaagaatact

SEQ ID NO: 288597 - DNA, 19 bp, Homo sapiens
  siRNA target sequence for COL9A1 (NM_001851.2,488-506).
gacgacgtttcgaatgact

SEQ ID NO: 288598 - DNA, 19 bp, Homo sapiens
  siRNA target sequence for COL9A1 (NM_001851.2,564-582).
gagcaagttggcataaaga

SEQ ID NO: 288599 - DNA, 19 bp, Homo sapiens
  siRNA target sequence for COL9A1 (NM_001851.2,567-585).
caagttggcataaagatta

SEQ ID NO: 288600 - DNA, 19 bp, Homo sapiens
  siRNA target sequence for COL9A1 (NM_001851.2,581-599).
gattaatggccaaacacaa

SEQ ID NO: 288601 - DNA, 19 bp, Homo sapiens
  siRNA target sequence for COL9A1 (NM_001851.2,590-608).
ccaaacacaatctgttgta

SEQ ID NO: 288602 - DNA, 19 bp, Homo sapiens
  siRNA target sequence for COL9A1 (NM_001851.2,643-661).
cagcagccttttcgaattt

SEQ ID NO: 288603 - DNA, 19 bp, Homo sapiens
  siRNA target sequence for COL9A1 (NM_001851.2,645-663).
gcagccttttcgaatttgt

SEQ ID NO: 288604 - DNA, 19 bp, Homo sapiens
  siRNA target sequence for COL9A1 (NM_001851.2,675-693).
gattcccagtggcataaga

SEQ ID NO: 288605 - DNA, 19 bp, Homo sapiens
  siRNA target sequence for COL9A1 (NM_001851.2,679-697).
cccagtggcataagatcat

SEQ ID NO: 288606 - DNA, 19 bp, Homo sapiens
  siRNA target sequence for COL9A1 (NM_001851.2,712-730).
ggagtagtgctactctttt

SEQ ID NO: 288607 - DNA, 19 bp, Homo sapiens
  siRNA target sequence for COL9A1 (NM_001851.2,715-733).
gtagtgctactctttttgt

SEQ ID NO: 288608 - DNA, 19 bp, Homo sapiens
  siRNA target sequence for COL9A1 (NM_001851.2,718-736).
gtgctactctttttgttga

SEQ ID NO: 288609 - DNA, 19 bp, Homo sapiens
  siRNA target sequence for COL9A1 (NM_001851.2,746-764).
gattgaatctttacctata

SEQ ID NO: 288610 - DNA, 19 bp, Homo sapiens
  siRNA target sequence for COL9A1 (NM_001851.2,769-787).
caagaggcccaattgacat

SEQ ID NO: 288611 - DNA, 19 bp, Homo sapiens
  siRNA target sequence for COL9A1 (NM_001851.2,772-790).
gaggcccaattgacattga

SEQ ID NO: 288612 - DNA, 19 bp, Homo sapiens
  siRNA target sequence for COL9A1 (NM_001851.2,852-870).
caatggatgctgatccatt

SEQ ID NO: 288613 - DNA, 19 bp, Homo sapiens
  siRNA target sequence for COL9A1 (NM_001851.2,856-874).
ggatgctgatccattgtga

SEQ ID NO: 288614 - DNA, 19 bp, Homo sapiens
  siRNA target sequence for COL9A1 (NM_001851.2,1110-1128).
cctggcgctgatggattaa

SEQ ID NO: 288615 - DNA, 19 bp, Homo sapiens
  siRNA target sequence for COL9A1 (NM_001851.2,1423-1441).
caggcatgaggggtcataa

SEQ ID NO: 288616 - DNA, 19 bp, Homo sapiens
  siRNA target sequence for COL9A1 (NM_001851.2,2051-2069).
cccaggcctaccaggtaaa

SEQ ID NO: 288617 - DNA, 19 bp, Homo sapiens
  siRNA target sequence for COL9A1 (NM_001851.2,2053-2071).
caggcctaccaggtaaact

SEQ ID NO: 288618 - DNA, 19 bp, Homo sapiens
  siRNA target sequence for COL9A1 (NM_001851.2,2252-2270).
gggatctgcaggtaatcct

SEQ ID NO: 288619 - DNA, 19 bp, Homo sapiens
  siRNA target sequence for COL9A1 (NM_001851.2,2416-2434).
cgacagatcagcacattaa

SEQ ID NO: 288620 - DNA, 19 bp, Homo sapiens
  siRNA target sequence for COL9A1 (NM_001851.2,2443-2461).
gcatgagagtcatacaaga

SEQ ID NO: 288621 - DNA, 19 bp, Homo sapiens
  siRNA target sequence for COL9A1 (NM_001851.2,2447-2465).
gagagtcatacaagaacat

SEQ ID NO: 288622 - DNA, 19 bp, Homo sapiens
  siRNA target sequence for COL9A1 (NM_001851.2,2472-2490).
gagatggctgccagtctta

SEQ ID NO: 288623 - DNA, 19 bp, Homo sapiens
  siRNA target sequence for COL9A1 (NM_001851.2,2877-2895).
ggtcagcgagcatttaaca

SEQ ID NO: 288624 - DNA, 19 bp, Homo sapiens
  siRNA target sequence for COL9A1 (NM_001851.2,2878-2896).
gtcagcgagcatttaacaa

SEQ ID NO: 288625 - DNA, 19 bp, Homo sapiens
  siRNA target sequence for COL9A2 (NM_001852.3,128-146).
ctcgctctggcgcagatta

SEQ ID NO: 288626 - DNA, 19 bp, Homo sapiens
  siRNA target sequence for COL9A2 (NM_001852.3,130-148).
cgctctggcgcagattaga

SEQ ID NO: 288627 - DNA, 19 bp, Homo sapiens
  siRNA target sequence for COL9A2 (NM_001852.3,211-229).
cggcatcgacggtgacaat

SEQ ID NO: 288628 - DNA, 19 bp, Homo sapiens
  siRNA target sequence for COL9A2 (NM_001852.3,310-328).
cgggattgatggtttaact

SEQ ID NO: 288629 - DNA, 19 bp, Homo sapiens
  siRNA target sequence for COL9A2 (NM_001852.3,601-619).
ctgtccacccggaatgaaa

SEQ ID NO: 288630 - DNA, 19 bp, Homo sapiens
  siRNA target sequence for COL9A2 (NM_001852.3,913-931).
cgagggcagcccaggtatt

SEQ ID NO: 288631 - DNA, 19 bp, Homo sapiens
  siRNA target sequence for COL9A2 (NM_001852.3,1189-1207).
gcctcgaggagaaattggt

SEQ ID NO: 288632 - DNA, 19 bp, Homo sapiens
  siRNA target sequence for COL9A3 (NM_001853.2,1612-1630).
ctgtgtggggggatgatca

SEQ ID NO: 288633 - DNA, 19 bp, Homo sapiens
  siRNA target sequence for COL9A3 (NM_001853.2,1622-1640).
ggatgatcagcgaacaaat

SEQ ID NO: 288634 - DNA, 19 bp, Homo sapiens
  siRNA target sequence for COL9A3 (NM_001853.2,1623-1641).
gatgatcagcgaacaaatt

SEQ ID NO: 288635 - DNA, 19 bp, Homo sapiens
  siRNA target sequence for KAL1 (NM_000216.1,349-367).
cacttccagaacaatggtt

SEQ ID NO: 288636 - DNA, 19 bp, Homo sapiens
  siRNA target sequence for KAL1 (NM_000216.1,445-463).
caccagtgccaaagctttt

SEQ ID NO: 288637 - DNA, 19 bp, Homo sapiens
  siRNA target sequence for KAL1 (NM_000216.1,447-465).
ccagtgccaaagcttttgt

SEQ ID NO: 288638 - DNA, 19 bp, Homo sapiens
  siRNA target sequence for KAL1 (NM_000216.1,549-567).
ctgtccggctcctgagaaa

SEQ ID NO: 288639 - DNA, 19 bp, Homo sapiens
  siRNA target sequence for KAL1 (NM_000216.1,599-617).
gctgcgaagttgacaatga

SEQ ID NO: 288640 - DNA, 19 bp, Homo sapiens
  siRNA target sequence for KAL1 (NM_000216.1,707-725).
ccagaaaagagttacgatt

SEQ ID NO: 288641 - DNA, 19 bp, Homo sapiens
  siRNA target sequence for KAL1 (NM_000216.1,742-760).
ggacagctggaggttaagt

SEQ ID NO: 288642 - DNA, 19 bp, Homo sapiens
  siRNA target sequence for KAL1 (NM_000216.1,754-772).
gttaagtggtcctcgaaat

SEQ ID NO: 288643 - DNA, 19 bp, Homo sapiens
  siRNA target sequence for KAL1 (NM_000216.1,761-779).
ggtcctcgaaattcaatat

SEQ ID NO: 288644 - DNA, 19 bp, Homo sapiens
  siRNA target sequence for KAL1 (NM_000216.1,762-780).
gtcctcgaaattcaatatt

SEQ ID NO: 288645 - DNA, 19 bp, Homo sapiens
  siRNA target sequence for KAL1 (NM_000216.1,767-785).
cgaaattcaatatttctat

SEQ ID NO: 288646 - DNA, 19 bp, Homo sapiens
  siRNA target sequence for KAL1 (NM_000216.1,793-811).
gtgatctatgtggtacaaa

SEQ ID NO: 288647 - DNA, 19 bp, Homo sapiens
  siRNA target sequence for KAL1 (NM_000216.1,881-899).
cagacgagcgagttcaact

SEQ ID NO: 288648 - DNA, 19 bp, Homo sapiens
  siRNA target sequence for KAL1 (NM_000216.1,892-910).
gttcaactgactgacataa

SEQ ID NO: 288649 - DNA, 19 bp, Homo sapiens
  siRNA target sequence for KAL1 (NM_000216.1,1070-1088).
ggagtgtgaccgtcactat

SEQ ID NO: 288650 - DNA, 19 bp, Homo sapiens
  siRNA target sequence for KAL1 (NM_000216.1,1071-1089).
gagtgtgaccgtcactata

SEQ ID NO: 288651 - DNA, 19 bp, Homo sapiens
  siRNA target sequence for KAL1 (NM_000216.1,1073-1091).
gtgtgaccgtcactatagt

SEQ ID NO: 288652 - DNA, 19 bp, Homo sapiens
  siRNA target sequence for KAL1 (NM_000216.1,1075-1093).
gtgaccgtcactatagttt

SEQ ID NO: 288653 - DNA, 19 bp, Homo sapiens
  siRNA target sequence for KAL1 (NM_000216.1,1152-1170).
gatggtcagcagtaagtct

SEQ ID NO: 288654 - DNA, 19 bp, Homo sapiens
  siRNA target sequence for KAL1 (NM_000216.1,1200-1218).
gactacggatgggtttcaa

SEQ ID NO: 288655 - DNA, 19 bp, Homo sapiens
  siRNA target sequence for KAL1 (NM_000216.1,1202-1220).
ctacggatgggtttcaaaa

SEQ ID NO: 288656 - DNA, 19 bp, Homo sapiens
  siRNA target sequence for KAL1 (NM_000216.1,1242-1260).
ccagccagactgtgactat

SEQ ID NO: 288657 - DNA, 19 bp, Homo sapiens
  siRNA target sequence for KAL1 (NM_000216.1,1245-1263).
gccagactgtgactatgtt

SEQ ID NO: 288658 - DNA, 19 bp, Homo sapiens
  siRNA target sequence for KAL1 (NM_000216.1,1247-1265).
cagactgtgactatgttgt

SEQ ID NO: 288659 - DNA, 19 bp, Homo sapiens
  siRNA target sequence for KAL1 (NM_000216.1,1267-1285).
gaattgcaagccataacgt

SEQ ID NO: 288660 - DNA, 19 bp, Homo sapiens
  siRNA target sequence for KAL1 (NM_000216.1,1313-1331).
caaaggtgtcccttcactt

SEQ ID NO: 288661 - DNA, 19 bp, Homo sapiens
  siRNA target sequence for KAL1 (NM_000216.1,1468-1486).
caactgcaagttaaagtct

SEQ ID NO: 288662 - DNA, 19 bp, Homo sapiens
  siRNA target sequence for KAL1 (NM_000216.1,1508-1526).
ccactgtcaaccgatatca

SEQ ID NO: 288663 - DNA, 19 bp, Homo sapiens
  siRNA target sequence for KAL1 (NM_000216.1,1511-1529).
ctgtcaaccgatatcatgt

SEQ ID NO: 288664 - DNA, 19 bp, Homo sapiens
  siRNA target sequence for KAL1 (NM_000216.1,1546-1564).
gcgtgtgcccacaacagaa

SEQ ID NO: 288665 - DNA, 19 bp, Homo sapiens
  siRNA target sequence for KAL1 (NM_000216.1,1569-1587).
cggatcagaggcatcatct

SEQ ID NO: 288666 - DNA, 19 bp, Homo sapiens
  siRNA target sequence for KAL1 (NM_000216.1,1588-1606).
ggcatgacccacgaaaatt

SEQ ID NO: 288667 - DNA, 19 bp, Homo sapiens
  siRNA target sequence for KAL1 (NM_000216.1,1593-1611).
gacccacgaaaattacata

SEQ ID NO: 288668 - DNA, 19 bp, Homo sapiens
  siRNA target sequence for KAL1 (NM_000216.1,1595-1613).
cccacgaaaattacataat

SEQ ID NO: 288669 - DNA, 19 bp, Homo sapiens
  siRNA target sequence for KAL1 (NM_000216.1,1647-1665).
ggtgactgtccaaccaata

SEQ ID NO: 288670 - DNA, 19 bp, Homo sapiens
  siRNA target sequence for KAL1 (NM_000216.1,1661-1679).
caatacggccaaaaagtca

SEQ ID NO: 288671 - DNA, 19 bp, Homo sapiens
  siRNA target sequence for KAL1 (NM_000216.1,1682-1700).
ccaaggcagaagctgtttt

SEQ ID NO: 288672 - DNA, 19 bp, Homo sapiens
  siRNA target sequence for KAL1 (NM_000216.1,1712-1730).
caccatgctctgctcttaa

SEQ ID NO: 288673 - DNA, 19 bp, Homo sapiens
  siRNA target sequence for KAL1 (NM_000216.1,1761-1779).
gggcgaagcaggtcatgtt

SEQ ID NO: 288674 - DNA, 19 bp, Homo sapiens
  siRNA target sequence for KAL1 (NM_000216.1,1839-1857).
gaacatcaccggtcacttt

SEQ ID NO: 288675 - DNA, 19 bp, Homo sapiens
  siRNA target sequence for KAL1 (NM_000216.1,1890-1908).
gcccatgactgggtttcaa

SEQ ID NO: 288676 - DNA, 19 bp, Homo sapiens
  siRNA target sequence for KAL1 (NM_000216.1,1892-1910).
ccatgactgggtttcaagt

SEQ ID NO: 288677 - DNA, 19 bp, Homo sapiens
  siRNA target sequence for KAL1 (NM_000216.1,1949-1967).
gcctacccaacagcattat

SEQ ID NO: 288678 - DNA, 19 bp, Homo sapiens
  siRNA target sequence for KAL1 (NM_000216.1,2005-2023).
ctaacagtgcccaatctga

SEQ ID NO: 288679 - DNA, 19 bp, Homo sapiens
  siRNA target sequence for KAL1 (NM_000216.1,2128-2146).
gcacacagatctcatctta

SEQ ID NO: 288680 - DNA, 19 bp, Homo sapiens
  siRNA target sequence for KAL1 (NM_000216.1,2153-2171).
gtcatccacatcattacaa

SEQ ID NO: 288681 - DNA, 19 bp, Homo sapiens
  siRNA target sequence for LAMA4 (NM_002290.2,364-382).
ggacgacaacgcttttcct

SEQ ID NO: 288682 - DNA, 19 bp, Homo sapiens
  siRNA target sequence for LAMA4 (NM_002290.2,365-383).
gacgacaacgcttttcctt

SEQ ID NO: 288683 - DNA, 19 bp, Homo sapiens
  siRNA target sequence for LAMA4 (NM_002290.2,367-385).
cgacaacgcttttcctttt

SEQ ID NO: 288684 - DNA, 19 bp, Homo sapiens
  siRNA target sequence for LAMA4 (NM_002290.2,502-520).
caccctgtcgggagaatgt

SEQ ID NO: 288685 - DNA, 19 bp, Homo sapiens
  siRNA target sequence for LAMA4 (NM_002290.2,504-522).
ccctgtcgggagaatgtgt

SEQ ID NO: 288686 - DNA, 19 bp, Homo sapiens
  siRNA target sequence for LAMA4 (NM_002290.2,519-537).
gtgtgccctgcgactgtaa

SEQ ID NO: 288687 - DNA, 19 bp, Homo sapiens
  siRNA target sequence for LAMA4 (NM_002290.2,530-548).
gactgtaatggcaattcca

SEQ ID NO: 288688 - DNA, 19 bp, Homo sapiens
  siRNA target sequence for LAMA4 (NM_002290.2,540-558).
gcaattccaacgagtgttt

SEQ ID NO: 288689 - DNA, 19 bp, Homo sapiens
  siRNA target sequence for LAMA4 (NM_002290.2,559-577).
ggacggctcaggatactgt

SEQ ID NO: 288690 - DNA, 19 bp, Homo sapiens
  siRNA target sequence for LAMA4 (NM_002290.2,581-599).
cactgccagcggaacacaa

SEQ ID NO: 288691 - DNA, 19 bp, Homo sapiens
  siRNA target sequence for LAMA4 (NM_002290.2,630-648).
gttatatcggagattccat

SEQ ID NO: 288692 - DNA, 19 bp, Homo sapiens
  siRNA target sequence for LAMA4 (NM_002290.2,691-709).
gccccacttggccaatttt

SEQ ID NO: 288693 - DNA, 19 bp, Homo sapiens
  siRNA target sequence for LAMA4 (NM_002290.2,734-752).
ggagctgttcggtgcattt

SEQ ID NO: 288694 - DNA, 19 bp, Homo sapiens
  siRNA target sequence for LAMA4 (NM_002290.2,737-755).
gctgttcggtgcatttgta

SEQ ID NO: 288695 - DNA, 19 bp, Homo sapiens
  siRNA target sequence for LAMA4 (NM_002290.2,738-756).
ctgttcggtgcatttgtaa

SEQ ID NO: 288696 - DNA, 19 bp, Homo sapiens
  siRNA target sequence for LAMA4 (NM_002290.2,743-761).
cggtgcatttgtaacgaaa

SEQ ID NO: 288697 - DNA, 19 bp, Homo sapiens
  siRNA target sequence for LAMA4 (NM_002290.2,745-763).
gtgcatttgtaacgaaaat

SEQ ID NO: 288698 - DNA, 19 bp, Homo sapiens
  siRNA target sequence for LAMA4 (NM_002290.2,747-765).
gcatttgtaacgaaaatta

SEQ ID NO: 288699 - DNA, 19 bp, Homo sapiens
  siRNA target sequence for LAMA4 (NM_002290.2,748-766).
catttgtaacgaaaattat

SEQ ID NO: 288700 - DNA, 19 bp, Homo sapiens
  siRNA target sequence for LAMA4 (NM_002290.2,786-804).
gatgtgctcccggttacta

SEQ ID NO: 288701 - DNA, 19 bp, Homo sapiens
  siRNA target sequence for LAMA4 (NM_002290.2,791-809).
gctcccggttactatggaa

SEQ ID NO: 288702 - DNA, 19 bp, Homo sapiens
  siRNA target sequence for LAMA4 (NM_002290.2,792-810).
ctcccggttactatggaaa

SEQ ID NO: 288703 - DNA, 19 bp, Homo sapiens
  siRNA target sequence for LAMA4 (NM_002290.2,902-920).
ggccagtgtaggaattgct

SEQ ID NO: 288704 - DNA, 19 bp, Homo sapiens
  siRNA target sequence for LAMA4 (NM_002290.2,903-921).
gccagtgtaggaattgctt

SEQ ID NO: 288705 - DNA, 19 bp, Homo sapiens
  siRNA target sequence for LAMA4 (NM_002290.2,924-942).
gcaacaccaccggattcaa

SEQ ID NO: 288706 - DNA, 19 bp, Homo sapiens
  siRNA target sequence for LAMA4 (NM_002290.2,1032-1050).
gtgtaaccggagaatgctt

SEQ ID NO: 288707 - DNA, 19 bp, Homo sapiens
  siRNA target sequence for LAMA4 (NM_002290.2,1182-1200).
ctcataggcacgtgaatga

SEQ ID NO: 288708 - DNA, 19 bp, Homo sapiens
  siRNA target sequence for LAMA4 (NM_002290.2,1184-1202).
cataggcacgtgaatgaaa

SEQ ID NO: 288709 - DNA, 19 bp, Homo sapiens
  siRNA target sequence for LAMA4 (NM_002290.2,1253-1271).
caatacgccctaagaaaga

SEQ ID NO: 288710 - DNA, 19 bp, Homo sapiens
  siRNA target sequence for LAMA4 (NM_002290.2,1312-1330).
gtctgacgtagaggaatta

SEQ ID NO: 288711 - DNA, 19 bp, Homo sapiens
  siRNA target sequence for LAMA4 (NM_002290.2,1356-1374).
gaaaaggacaacttgttca

SEQ ID NO: 288712 - DNA, 19 bp, Homo sapiens
  siRNA target sequence for LAMA4 (NM_002290.2,1415-1433).
gtagagcaagcccatgata

SEQ ID NO: 288713 - DNA, 19 bp, Homo sapiens
  siRNA target sequence for LAMA4 (NM_002290.2,1418-1436).
gagcaagcccatgatatga

SEQ ID NO: 288714 - DNA, 19 bp, Homo sapiens
  siRNA target sequence for LAMA4 (NM_002290.2,1426-1444).
ccatgatatgagggataaa

SEQ ID NO: 288715 - DNA, 19 bp, Homo sapiens
  siRNA target sequence for LAMA4 (NM_002290.2,1437-1455).
gggataaaatccaagagat

SEQ ID NO: 288716 - DNA, 19 bp, Homo sapiens
  siRNA target sequence for LAMA4 (NM_002290.2,1459-1477).
caacaagatgctctattat

SEQ ID NO: 288717 - DNA, 19 bp, Homo sapiens
  siRNA target sequence for LAMA4 (NM_002290.2,1537-1555).
gatgcttgaagagattaga

SEQ ID NO: 288718 - DNA, 19 bp, Homo sapiens
  siRNA target sequence for LAMA4 (NM_002290.2,1600-1618).
ggcagatgaggcttacgaa

SEQ ID NO: 288719 - DNA, 19 bp, Homo sapiens
  siRNA target sequence for LAMA4 (NM_002290.2,1690-1708).
gcagctggatgactacaat

SEQ ID NO: 288720 - DNA, 19 bp, Homo sapiens
  siRNA target sequence for LAMA4 (NM_002290.2,1694-1712).
ctggatgactacaatgcta

SEQ ID NO: 288721 - DNA, 19 bp, Homo sapiens
  siRNA target sequence for LAMA4 (NM_002290.2,1761-1779).
gggatgccgaagacatgaa

SEQ ID NO: 288722 - DNA, 19 bp, Homo sapiens
  siRNA target sequence for LAMA4 (NM_002290.2,1798-1816).
gcagcgggaccatgagaaa

SEQ ID NO: 288723 - DNA, 19 bp, Homo sapiens
  siRNA target sequence for LAMA4 (NM_002290.2,1885-1903).
gacaacacctcgtctaact

SEQ ID NO: 288724 - DNA, 19 bp, Homo sapiens
  siRNA target sequence for LAMA4 (NM_002290.2,1887-1905).
caacacctcgtctaactct

SEQ ID NO: 288725 - DNA, 19 bp, Homo sapiens
  siRNA target sequence for LAMA4 (NM_002290.2,1893-1911).
ctcgtctaactctttcaga

SEQ ID NO: 288726 - DNA, 19 bp, Homo sapiens
  siRNA target sequence for LAMA4 (NM_002290.2,1913-1931).
cttgatgatataataaaga

SEQ ID NO: 288727 - DNA, 19 bp, Homo sapiens
  siRNA target sequence for LAMA4 (NM_002290.2,1962-1980).
gagccaaaagtgaactaca

SEQ ID NO: 288728 - DNA, 19 bp, Homo sapiens
  siRNA target sequence for LAMA4 (NM_002290.2,1966-1984).
caaaagtgaactacaagta

SEQ ID NO: 288729 - DNA, 19 bp, Homo sapiens
  siRNA target sequence for LAMA4 (NM_002290.2,2001-2019).
gtaacctcagccatgattt

SEQ ID NO: 288730 - DNA, 19 bp, Homo sapiens
  siRNA target sequence for LAMA4 (NM_002290.2,2050-2068).
ccttcaacaagaagctaat

SEQ ID NO: 288731 - DNA, 19 bp, Homo sapiens
  siRNA target sequence for LAMA4 (NM_002290.2,2119-2137).
ggctttggatgcatcaaat

SEQ ID NO: 288732 - DNA, 19 bp, Homo sapiens
  siRNA target sequence for LAMA4 (NM_002290.2,2125-2143).
ggatgcatcaaatgtctat

SEQ ID NO: 288733 - DNA, 19 bp, Homo sapiens
  siRNA target sequence for LAMA4 (NM_002290.2,2202-2220).
ccactgaccgaatttatga

SEQ ID NO: 288734 - DNA, 19 bp, Homo sapiens
  siRNA target sequence for LAMA4 (NM_002290.2,2222-2240).
gcggtgagtgggattgata

SEQ ID NO: 288735 - DNA, 19 bp, Homo sapiens
  siRNA target sequence for LAMA4 (NM_002290.2,2224-2242).
ggtgagtgggattgatact

SEQ ID NO: 288736 - DNA, 19 bp, Homo sapiens
  siRNA target sequence for LAMA4 (NM_002290.2,2229-2247).
gtgggattgatactcaaat

SEQ ID NO: 288737 - DNA, 19 bp, Homo sapiens
  siRNA target sequence for LAMA4 (NM_002290.2,2231-2249).
gggattgatactcaaatca

SEQ ID NO: 288738 - DNA, 19 bp, Homo sapiens
  siRNA target sequence for LAMA4 (NM_002290.2,2232-2250).
ggattgatactcaaatcat

SEQ ID NO: 288739 - DNA, 19 bp, Homo sapiens
  siRNA target sequence for LAMA4 (NM_002290.2,2268-2286).
gtgagaacctcctcaatca

SEQ ID NO: 288740 - DNA, 19 bp, Homo sapiens
  siRNA target sequence for LAMA4 (NM_002290.2,2520-2538).
cccccatggccaacaatct

SEQ ID NO: 288741 - DNA, 19 bp, Homo sapiens
  siRNA target sequence for LAMA4 (NM_002290.2,2521-2539).
ccccatggccaacaatcta

SEQ ID NO: 288742 - DNA, 19 bp, Homo sapiens
  siRNA target sequence for LAMA4 (NM_002290.2,2541-2559).
ccaactggtcacagaatct

SEQ ID NO: 288743 - DNA, 19 bp, Homo sapiens
  siRNA target sequence for LAMA4 (NM_002290.2,2678-2696).
cgacctgcaagcaacgttt

SEQ ID NO: 288744 - DNA, 19 bp, Homo sapiens
  siRNA target sequence for LAMA4 (NM_002290.2,2811-2829).
ccagtatggatgacttaaa

SEQ ID NO: 288745 - DNA, 19 bp, Homo sapiens
  siRNA target sequence for LAMA4 (NM_002290.2,2841-2859).
ctctgagcctgtacatgaa

SEQ ID NO: 288746 - DNA, 19 bp, Homo sapiens
  siRNA target sequence for LAMA4 (NM_002290.2,2886-2904).
ccgagactgcagatcagtt

SEQ ID NO: 288747 - DNA, 19 bp, Homo sapiens
  siRNA target sequence for LAMA4 (NM_002290.2,2888-2906).
gagactgcagatcagttta

SEQ ID NO: 288748 - DNA, 19 bp, Homo sapiens
  siRNA target sequence for LAMA4 (NM_002290.2,2908-2926).
cctgtacctcggaagcaaa

SEQ ID NO: 288749 - DNA, 19 bp, Homo sapiens
  siRNA target sequence for LAMA4 (NM_002290.2,2947-2965).
gggtcttgcaatcaaaaat

SEQ ID NO: 288750 - DNA, 19 bp, Homo sapiens
  siRNA target sequence for LAMA4 (NM_002290.2,3036-3054).
gttcctggcctgcttactt

SEQ ID NO: 288751 - DNA, 19 bp, Homo sapiens
  siRNA target sequence for LAMA4 (NM_002290.2,3218-3236).
ggagtgccttccaacttca

SEQ ID NO: 288752 - DNA, 19 bp, Homo sapiens
  siRNA target sequence for LAMA4 (NM_002290.2,3219-3237).
gagtgccttccaacttcaa

SEQ ID NO: 288753 - DNA, 19 bp, Homo sapiens
  siRNA target sequence for LAMA4 (NM_002290.2,3288-3306).
ccactttgaataatgatgt

SEQ ID NO: 288754 - DNA, 19 bp, Homo sapiens
  siRNA target sequence for LAMA4 (NM_002290.2,3302-3320).
gatgtgatcagcttgtaca

SEQ ID NO: 288755 - DNA, 19 bp, Homo sapiens
  siRNA target sequence for LAMA4 (NM_002290.2,3319-3337).
caactttaagcacatctat

SEQ ID NO: 288756 - DNA, 19 bp, Homo sapiens
  siRNA target sequence for LAMA4 (NM_002290.2,3396-3414).
gtcgggctgccagttactt

SEQ ID NO: 288757 - DNA, 19 bp, Homo sapiens
  siRNA target sequence for LAMA4 (NM_002290.2,3398-3416).
cgggctgccagttacttct

SEQ ID NO: 288758 - DNA, 19 bp, Homo sapiens
  siRNA target sequence for LAMA4 (NM_002290.2,3475-3493).
ggtgactcgctttgacata

SEQ ID NO: 288759 - DNA, 19 bp, Homo sapiens
  siRNA target sequence for LAMA4 (NM_002290.2,3510-3528).
ctgacaacggccttattct

SEQ ID NO: 288760 - DNA, 19 bp, Homo sapiens
  siRNA target sequence for LAMA4 (NM_002290.2,3527-3545).
ctcctgatggtcaatggaa

SEQ ID NO: 288761 - DNA, 19 bp, Homo sapiens
  siRNA target sequence for LAMA4 (NM_002290.2,3535-3553).
ggtcaatggaagtatgttt

SEQ ID NO: 288762 - DNA, 19 bp, Homo sapiens
  siRNA target sequence for LAMA4 (NM_002290.2,3576-3594).
gttacctacatgtgttcta

SEQ ID NO: 288763 - DNA, 19 bp, Homo sapiens
  siRNA target sequence for LAMA4 (NM_002290.2,3622-3640).
gcatcttgaagatacgtta

SEQ ID NO: 288764 - DNA, 19 bp, Homo sapiens
  siRNA target sequence for LAMA4 (NM_002290.2,3623-3641).
catcttgaagatacgttaa

SEQ ID NO: 288765 - DNA, 19 bp, Homo sapiens
  siRNA target sequence for LAMA4 (NM_002290.2,3636-3654).
cgttaaagaaagctcaaat

SEQ ID NO: 288766 - DNA, 19 bp, Homo sapiens
  siRNA target sequence for LAMA4 (NM_002290.2,3648-3666).
ctcaaattaatgatgcaaa

SEQ ID NO: 288767 - DNA, 19 bp, Homo sapiens
  siRNA target sequence for LAMA4 (NM_002290.2,3671-3689).
catgagatctcaatcattt

SEQ ID NO: 288768 - DNA, 19 bp, Homo sapiens
  siRNA target sequence for LAMA4 (NM_002290.2,3836-3854).
cttcccctagatatcaact

SEQ ID NO: 288769 - DNA, 19 bp, Homo sapiens
  siRNA target sequence for LAMA4 (NM_002290.2,3839-3857).
cccctagatatcaacttca

SEQ ID NO: 288770 - DNA, 19 bp, Homo sapiens
  siRNA target sequence for LAMA4 (NM_002290.2,3923-3941).
ctgggagttggttatggat

SEQ ID NO: 288771 - DNA, 19 bp, Homo sapiens
  siRNA target sequence for LAMA4 (NM_002290.2,3942-3960).
gcccagaagactcacttat

SEQ ID NO: 288772 - DNA, 19 bp, Homo sapiens
  siRNA target sequence for LAMA4 (NM_002290.2,3943-3961).
cccagaagactcacttata

SEQ ID NO: 288773 - DNA, 19 bp, Homo sapiens
  siRNA target sequence for LAMA4 (NM_002290.2,3944-3962).
ccagaagactcacttatat

SEQ ID NO: 288774 - DNA, 19 bp, Homo sapiens
  siRNA target sequence for LAMA4 (NM_002290.2,3979-3997).
caatggacagagcttcatt

SEQ ID NO: 288775 - DNA, 19 bp, Homo sapiens
  siRNA target sequence for LAMA4 (NM_002290.2,4028-4046).
ggctttgaaggaggtttta

SEQ ID NO: 288776 - DNA, 19 bp, Homo sapiens
  siRNA target sequence for LAMA4 (NM_002290.2,4051-4069).
ccgaacattacaaccaaat

SEQ ID NO: 288777 - DNA, 19 bp, Homo sapiens
  siRNA target sequence for LAMA4 (NM_002290.2,4061-4079).
caaccaaatgggttactat

SEQ ID NO: 288778 - DNA, 19 bp, Homo sapiens
  siRNA target sequence for LAMA4 (NM_002290.2,4131-4149).
ctgtcatcatggatgtaaa

SEQ ID NO: 288779 - DNA, 19 bp, Homo sapiens
  siRNA target sequence for LAMA4 (NM_002290.2,4156-4174).
caaagttcagtcagtagat

SEQ ID NO: 288780 - DNA, 19 bp, Homo sapiens
  siRNA target sequence for LAMA4 (NM_002290.2,4167-4185).
cagtagataagcagtacaa

SEQ ID NO: 288781 - DNA, 19 bp, Homo sapiens
  siRNA target sequence for LAMA4 (NM_002290.2,4215-4233).
ctgtctcacccacaagata

SEQ ID NO: 288782 - DNA, 19 bp, Homo sapiens
  siRNA target sequence for LAMA4 (NM_002290.2,4224-4242).
ccacaagatatgaactgat

SEQ ID NO: 288783 - DNA, 19 bp, Homo sapiens
  siRNA target sequence for LAMA4 (NM_002290.2,4225-4243).
cacaagatatgaactgata

SEQ ID NO: 288784 - DNA, 19 bp, Homo sapiens
  siRNA target sequence for LAMA4 (NM_002290.2,4227-4245).
caagatatgaactgatagt

SEQ ID NO: 288785 - DNA, 19 bp, Homo sapiens
  siRNA target sequence for LAMA4 (NM_002290.2,4230-4248).
gatatgaactgatagtaga

SEQ ID NO: 288786 - DNA, 19 bp, Homo sapiens
  siRNA target sequence for LAMA4 (NM_002290.2,4238-4256).
ctgatagtagataaaagca

SEQ ID NO: 288787 - DNA, 19 bp, Homo sapiens
  siRNA target sequence for LAMA4 (NM_002290.2,4259-4277).
gttgggagtaagaatccta

SEQ ID NO: 288788 - DNA, 19 bp, Homo sapiens
  siRNA target sequence for LAMA4 (NM_002290.2,4264-4282).
gagtaagaatcctaccaaa

SEQ ID NO: 288789 - DNA, 19 bp, Homo sapiens
  siRNA target sequence for LAMA4 (NM_002290.2,4327-4345).
cggtggctcaccaatcagt

SEQ ID NO: 288790 - DNA, 19 bp, Homo sapiens
  siRNA target sequence for LAMA4 (NM_002290.2,4344-4362).
gtgctcagtatgctaattt

SEQ ID NO: 288791 - DNA, 19 bp, Homo sapiens
  siRNA target sequence for LAMA4 (NM_002290.2,4411-4429).
ggaggttgaagatttccaa

SEQ ID NO: 288792 - DNA, 19 bp, Homo sapiens
  siRNA target sequence for LAMA4 (NM_002290.2,4444-4462).
ggtccacacttctctttat

SEQ ID NO: 288793 - DNA, 19 bp, Homo sapiens
  siRNA target sequence for LAMA4 (NM_002290.2,4525-4543).
gcctaaagcaagtcagaat

SEQ ID NO: 288794 - DNA, 19 bp, Homo sapiens
  siRNA target sequence for LAMA4 (NM_002290.2,4526-4544).
cctaaagcaagtcagaata

SEQ ID NO: 288795 - DNA, 19 bp, Homo sapiens
  siRNA target sequence for LAMA4 (NM_002290.2,4527-4545).
ctaaagcaagtcagaataa

SEQ ID NO: 288796 - DNA, 19 bp, Homo sapiens
  siRNA target sequence for LAMA4 (NM_002290.2,4579-4597).
ggatcctgttgctctgaaa

SEQ ID NO: 288797 - DNA, 19 bp, Homo sapiens
  siRNA target sequence for LAMA4 (NM_002290.2,4607-4625).
cggaatactccaagaaact

SEQ ID NO: 288798 - DNA, 19 bp, Homo sapiens
  siRNA target sequence for LAMA4 (NM_002290.2,4642-4660).
caacagccctagagcaata

SEQ ID NO: 288799 - DNA, 19 bp, Homo sapiens
  siRNA target sequence for LAMA4 (NM_002290.2,4663-4681).
gcacgcctatcaatatgga

SEQ ID NO: 288800 - DNA, 19 bp, Homo sapiens
  siRNA target sequence for LAMA4 (NM_002290.2,4689-4707).
ccaacagccgccaagagtt

SEQ ID NO: 288801 - DNA, 19 bp, Homo sapiens
  siRNA target sequence for LAMA4 (NM_002290.2,4690-4708).
caacagccgccaagagttt

SEQ ID NO: 288802 - DNA, 19 bp, Homo sapiens
  siRNA target sequence for LAMA4 (NM_002290.2,4693-4711).
cagccgccaagagtttgaa

SEQ ID NO: 288803 - DNA, 19 bp, Homo sapiens
  siRNA target sequence for LAMA4 (NM_002290.2,4695-4713).
gccgccaagagtttgaaca

SEQ ID NO: 288804 - DNA, 19 bp, Homo sapiens
  siRNA target sequence for LAMA4 (NM_002290.2,4699-4717).
ccaagagtttgaacactta

SEQ ID NO: 288805 - DNA, 19 bp, Homo sapiens
  siRNA target sequence for LAMA4 (NM_002290.2,4734-4752).
ccaaatctcagttttccat

SEQ ID NO: 288806 - DNA, 19 bp, Homo sapiens
  siRNA target sequence for LAMA4 (NM_002290.2,4735-4753).
caaatctcagttttccatt

SEQ ID NO: 288807 - DNA, 19 bp, Homo sapiens
  siRNA target sequence for LAMA4 (NM_002290.2,4770-4788).
cctcccatggcatgatctt

SEQ ID NO: 288808 - DNA, 19 bp, Homo sapiens
  siRNA target sequence for LAMA4 (NM_002290.2,4778-4796).
ggcatgatcttctatgtct

SEQ ID NO: 288809 - DNA, 19 bp, Homo sapiens
  siRNA target sequence for LAMA4 (NM_002290.2,4836-4854).
cccatggccgcttggttta

SEQ ID NO: 288810 - DNA, 19 bp, Homo sapiens
  siRNA target sequence for LAMA4 (NM_002290.2,4838-4856).
catggccgcttggtttaca

SEQ ID NO: 288811 - DNA, 19 bp, Homo sapiens
  siRNA target sequence for LAMA4 (NM_002290.2,4841-4859).
ggccgcttggtttacatgt

SEQ ID NO: 288812 - DNA, 19 bp, Homo sapiens
  siRNA target sequence for LAMA4 (NM_002290.2,4844-4862).
cgcttggtttacatgttta

SEQ ID NO: 288813 - DNA, 19 bp, Homo sapiens
  siRNA target sequence for LAMA4 (NM_002290.2,4858-4876).
gtttaatgttggtcacaaa

SEQ ID NO: 288814 - DNA, 19 bp, Homo sapiens
  siRNA target sequence for LAMA4 (NM_002290.2,4916-4934).
ctgtggcatgatgtgatat

SEQ ID NO: 288815 - DNA, 19 bp, Homo sapiens
  siRNA target sequence for LAMA4 (NM_002290.2,4918-4936).
gtggcatgatgtgatattt

SEQ ID NO: 288816 - DNA, 19 bp, Homo sapiens
  siRNA target sequence for LAMA4 (NM_002290.2,4920-4938).
ggcatgatgtgatatttat

SEQ ID NO: 288817 - DNA, 19 bp, Homo sapiens
  siRNA target sequence for LAMA4 (NM_002290.2,4950-4968).
gcagtggccgactggtaat

SEQ ID NO: 288818 - DNA, 19 bp, Homo sapiens
  siRNA target sequence for LAMA4 (NM_002290.2,4951-4969).
cagtggccgactggtaatt

SEQ ID NO: 288819 - DNA, 19 bp, Homo sapiens
  siRNA target sequence for LAMA4 (NM_002290.2,4974-4992).
gtctccgagtcctagaaga

SEQ ID NO: 288820 - DNA, 19 bp, Homo sapiens
  siRNA target sequence for LAMA4 (NM_002290.2,4976-4994).
ctccgagtcctagaagaaa

SEQ ID NO: 288821 - DNA, 19 bp, Homo sapiens
  siRNA target sequence for LAMA4 (NM_002290.2,4980-4998).
gagtcctagaagaaagtct

SEQ ID NO: 288822 - DNA, 19 bp, Homo sapiens
  siRNA target sequence for LAMA4 (NM_002290.2,5009-5027).
gaagctacctggaaaatca

SEQ ID NO: 288823 - DNA, 19 bp, Homo sapiens
  siRNA target sequence for LAMA4 (NM_002290.2,5081-5099).
cagattaactccatctaca

SEQ ID NO: 288824 - DNA, 19 bp, Homo sapiens
  siRNA target sequence for LAMA4 (NM_002290.2,5167-5185).
cagtgtgaccccttgcttt

SEQ ID NO: 288825 - DNA, 19 bp, Homo sapiens
  siRNA target sequence for LAMA4 (NM_002290.2,5193-5211).
ccatggaaacaggaactta

SEQ ID NO: 288826 - DNA, 19 bp, Homo sapiens
  siRNA target sequence for LAMA4 (NM_002290.2,5226-5244).
gaggatacgtggttctaga

SEQ ID NO: 288827 - DNA, 19 bp, Homo sapiens
  siRNA target sequence for LAMA4 (NM_002290.2,5233-5251).
cgtggttctagatgaatct

SEQ ID NO: 288828 - DNA, 19 bp, Homo sapiens
  siRNA target sequence for LAMA4 (NM_002290.2,5234-5252).
gtggttctagatgaatctt

SEQ ID NO: 288829 - DNA, 19 bp, Homo sapiens
  siRNA target sequence for LAMA4 (NM_002290.2,5333-5351).
gtcaatggggagtacctaa

SEQ ID NO: 288830 - DNA, 19 bp, Homo sapiens
  siRNA target sequence for LAMA4 (NM_002290.2,5335-5353).
caatggggagtacctaaat

SEQ ID NO: 288831 - DNA, 19 bp, Homo sapiens
  siRNA target sequence for LAMA4 (NM_002290.2,5340-5358).
gggagtacctaaatgttca

SEQ ID NO: 288832 - DNA, 19 bp, Homo sapiens
  siRNA target sequence for LAMA4 (NM_002290.2,5370-5388).
gacaggtcatagtgaaagt

SEQ ID NO: 288833 - DNA, 19 bp, Homo sapiens
  siRNA target sequence for LAMA4 (NM_002290.2,5532-5550).
ccctgaatccaaaaccaat

SEQ ID NO: 288834 - DNA, 19 bp, Homo sapiens
  siRNA target sequence for LAMA4 (NM_002290.2,5533-5551).
cctgaatccaaaaccaatt

SEQ ID NO: 288835 - DNA, 19 bp, Homo sapiens
  siRNA target sequence for LAMA4 (NM_002290.2,5634-5652).
gctgcatacgccactttgt

SEQ ID NO: 288836 - DNA, 19 bp, Homo sapiens
  siRNA target sequence for LAMA4 (NM_002290.2,5637-5655).
gcatacgccactttgtgat

SEQ ID NO: 288837 - DNA, 19 bp, Homo sapiens
  siRNA target sequence for LAMA4 (NM_002290.2,5638-5656).
catacgccactttgtgatt

SEQ ID NO: 288838 - DNA, 19 bp, Homo sapiens
  siRNA target sequence for LAMA4 (NM_002290.2,5665-5683).
cccagtgagcttcagtaaa

SEQ ID NO: 288839 - DNA, 19 bp, Homo sapiens
  siRNA target sequence for LUM (NM_002345.2,146-164).
gtctaagtgcatttactct

SEQ ID NO: 288840 - DNA, 19 bp, Homo sapiens
  siRNA target sequence for LUM (NM_002345.2,188-206).
ccagtggccagtactatga

SEQ ID NO: 288841 - DNA, 19 bp, Homo sapiens
  siRNA target sequence for LUM (NM_002345.2,194-212).
gccagtactatgattatga

SEQ ID NO: 288842 - DNA, 19 bp, Homo sapiens
  siRNA target sequence for LUM (NM_002345.2,211-229).
gattttcccctatcaattt

SEQ ID NO: 288843 - DNA, 19 bp, Homo sapiens
  siRNA target sequence for LUM (NM_002345.2,263-281).
gtaactgccctgaaagcta

SEQ ID NO: 288844 - DNA, 19 bp, Homo sapiens
  siRNA target sequence for LUM (NM_002345.2,299-317).
gtgatgagctgaaattgaa

SEQ ID NO: 288845 - DNA, 19 bp, Homo sapiens
  siRNA target sequence for LUM (NM_002345.2,338-356).
ctggaatcaagtatcttta

SEQ ID NO: 288846 - DNA, 19 bp, Homo sapiens
  siRNA target sequence for LUM (NM_002345.2,341-359).
gaatcaagtatctttacct

SEQ ID NO: 288847 - DNA, 19 bp, Homo sapiens
  siRNA target sequence for LUM (NM_002345.2,466-484).
gggagagttttctctaaat

SEQ ID NO: 288848 - DNA, 19 bp, Homo sapiens
  siRNA target sequence for LUM (NM_002345.2,568-586).
cagcttactcataacaaga

SEQ ID NO: 288849 - DNA, 19 bp, Homo sapiens
  siRNA target sequence for LUM (NM_002345.2,571-589).
cttactcataacaagatca

SEQ ID NO: 288850 - DNA, 19 bp, Homo sapiens
  siRNA target sequence for LUM (NM_002345.2,686-704).
gtcttaaatcactcgaata

SEQ ID NO: 288851 - DNA, 19 bp, Homo sapiens
  siRNA target sequence for LUM (NM_002345.2,705-723).
ccttgacttgagcttcaat

SEQ ID NO: 288852 - DNA, 19 bp, Homo sapiens
  siRNA target sequence for LUM (NM_002345.2,711-729).
cttgagcttcaatcagata

SEQ ID NO: 288853 - DNA, 19 bp, Homo sapiens
  siRNA target sequence for LUM (NM_002345.2,752-770).
ctgtctctcttctaactct

SEQ ID NO: 288854 - DNA, 19 bp, Homo sapiens
  siRNA target sequence for LUM (NM_002345.2,763-781).
ctaactctctacttagaca

SEQ ID NO: 288855 - DNA, 19 bp, Homo sapiens
  siRNA target sequence for LUM (NM_002345.2,767-785).
ctctctacttagacaacaa

SEQ ID NO: 288856 - DNA, 19 bp, Homo sapiens
  siRNA target sequence for LUM (NM_002345.2,794-812).
gcaacatccctgatgagta

SEQ ID NO: 288857 - DNA, 19 bp, Homo sapiens
  siRNA target sequence for LUM (NM_002345.2,808-826).
gagtatttcaagcgtttta

SEQ ID NO: 288858 - DNA, 19 bp, Homo sapiens
  siRNA target sequence for LUM (NM_002345.2,834-852).
gcagtatctgcgtttatct

SEQ ID NO: 288859 - DNA, 19 bp, Homo sapiens
  siRNA target sequence for LUM (NM_002345.2,874-892).
ggaatacctggaaattctt

SEQ ID NO: 288860 - DNA, 19 bp, Homo sapiens
  siRNA target sequence for LUM (NM_002345.2,875-893).
gaatacctggaaattcttt

SEQ ID NO: 288861 - DNA, 19 bp, Homo sapiens
  siRNA target sequence for LUM (NM_002345.2,945-963).
cataccaactgtcaatgaa

SEQ ID NO: 288862 - DNA, 19 bp, Homo sapiens
  siRNA target sequence for LUM (NM_002345.2,1000-1018).
gagaagtttgacataaaga

SEQ ID NO: 288863 - DNA, 19 bp, Homo sapiens
  siRNA target sequence for LUM (NM_002345.2,1100-1118).
gtcttccaccggatatgta

SEQ ID NO: 288864 - DNA, 19 bp, Homo sapiens
  siRNA target sequence for MAGP2 (NM_003480.1,281-299).
ccctgggggtcaatagtca

SEQ ID NO: 288865 - DNA, 19 bp, Homo sapiens
  siRNA target sequence for MAGP2 (NM_003480.1,322-340).
gcgactccagaaacattca

SEQ ID NO: 288866 - DNA, 19 bp, Homo sapiens
  siRNA target sequence for MAGP2 (NM_003480.1,360-378).
gaatgatcccgctacagat

SEQ ID NO: 288867 - DNA, 19 bp, Homo sapiens
  siRNA target sequence for MAGP2 (NM_003480.1,364-382).
gatcccgctacagatgaaa

SEQ ID NO: 288868 - DNA, 19 bp, Homo sapiens
  siRNA target sequence for MAGP2 (NM_003480.1,368-386).
ccgctacagatgaaacagt

SEQ ID NO: 288869 - DNA, 19 bp, Homo sapiens
  siRNA target sequence for MAGP2 (NM_003480.1,410-428).
caccttccacagatgactt

SEQ ID NO: 288870 - DNA, 19 bp, Homo sapiens
  siRNA target sequence for MAGP2 (NM_003480.1,524-542).
gcattcatcagttatgctt

SEQ ID NO: 288871 - DNA, 19 bp, Homo sapiens
  siRNA target sequence for MAGP2 (NM_003480.1,534-552).
gttatgcttcaccagttta

SEQ ID NO: 288872 - DNA, 19 bp, Homo sapiens
  siRNA target sequence for MAGP2 (NM_003480.1,545-563).
ccagtttacgacgtatgta

SEQ ID NO: 288873 - DNA, 19 bp, Homo sapiens
  siRNA target sequence for MAGP2 (NM_003480.1,548-566).
gtttacgacgtatgtacat

SEQ ID NO: 288874 - DNA, 19 bp, Homo sapiens
  siRNA target sequence for MAGP2 (NM_003480.1,557-575).
gtatgtacatcgtcaacaa

SEQ ID NO: 288875 - DNA, 19 bp, Homo sapiens
  siRNA target sequence for MAGP2 (NM_003480.1,599-617).
gtaaggaacacgaagctat

SEQ ID NO: 288876 - DNA, 19 bp, Homo sapiens
  siRNA target sequence for MAGP2 (NM_003480.1,603-621).
ggaacacgaagctatgaaa

SEQ ID NO: 288877 - DNA, 19 bp, Homo sapiens
  siRNA target sequence for MAGP2 (NM_003480.1,662-680).
gactccgtcgctccaatta

SEQ ID NO: 288878 - DNA, 19 bp, Homo sapiens
  siRNA target sequence for MATN1 (NM_002379.2,639-657).
cagcgttcggcctgttgaa

SEQ ID NO: 288879 - DNA, 19 bp, Homo sapiens
  siRNA target sequence for MATN1 (NM_002379.2,641-659).
gcgttcggcctgttgaatt

SEQ ID NO: 288880 - DNA, 19 bp, Homo sapiens
  siRNA target sequence for MATN1 (NM_002379.2,642-660).
cgttcggcctgttgaattt

SEQ ID NO: 288881 - DNA, 19 bp, Homo sapiens
  siRNA target sequence for MATN1 (NM_002379.2,646-664).
cggcctgttgaatttgaga

SEQ ID NO: 288882 - DNA, 19 bp, Homo sapiens
  siRNA target sequence for MATN1 (NM_002379.2,725-743).
gggtgggcatggtcaacta

SEQ ID NO: 288883 - DNA, 19 bp, Homo sapiens
  siRNA target sequence for MATN1 (NM_002379.2,726-744).
ggtgggcatggtcaactat

SEQ ID NO: 288884 - DNA, 19 bp, Homo sapiens
  siRNA target sequence for MATN1 (NM_002379.2,1264-1282).
ggcaagacctgcaatgtct

SEQ ID NO: 288885 - DNA, 19 bp, Homo sapiens
  siRNA target sequence for MATN1 (NM_002379.2,1507-1525).
gcggctgtgcggaatatgt

SEQ ID NO: 288886 - DNA, 19 bp, Homo sapiens
  siRNA target sequence for MATN1 (NM_002379.2,1561-1579).
ctcaagtacctcattgaca

SEQ ID NO: 288887 - DNA, 19 bp, Homo sapiens
  siRNA target sequence for MATN1 (NM_002379.2,1648-1666).
cggagccaggactacatta

SEQ ID NO: 288888 - DNA, 19 bp, Homo sapiens
  siRNA target sequence for MATN1 (NM_002379.2,1649-1667).
ggagccaggactacattaa

SEQ ID NO: 288889 - DNA, 19 bp, Homo sapiens
  siRNA target sequence for MATN1 (NM_002379.2,1650-1668).
gagccaggactacattaat

SEQ ID NO: 288890 - DNA, 19 bp, Homo sapiens
  siRNA target sequence for MATN1 (NM_002379.2,1653-1671).
ccaggactacattaatgat

SEQ ID NO: 288891 - DNA, 19 bp, Homo sapiens
  siRNA target sequence for MATN1 (NM_002379.2,1690-1708).
gacctcggctttaagatgt

SEQ ID NO: 288892 - DNA, 19 bp, Homo sapiens
  siRNA target sequence for MATN1 (NM_002379.2,1692-1710).
cctcggctttaagatgttt

SEQ ID NO: 288893 - DNA, 19 bp, Homo sapiens
  siRNA target sequence for MATN1 (NM_002379.2,1766-1784).
ctgtggcagagcactactt

SEQ ID NO: 288894 - DNA, 19 bp, Homo sapiens
  siRNA target sequence for MATN3 (NM_002381.2,278-296).
gcggtgcaggtgtttgcaa

SEQ ID NO: 288895 - DNA, 19 bp, Homo sapiens
  siRNA target sequence for MATN3 (NM_002381.2,374-392).
cttttgtctcccggataat

SEQ ID NO: 288896 - DNA, 19 bp, Homo sapiens
  siRNA target sequence for MATN3 (NM_002381.2,430-448).
gcagtggtgaactatgcta

SEQ ID NO: 288897 - DNA, 19 bp, Homo sapiens
  siRNA target sequence for MATN3 (NM_002381.2,601-619).
gctcgagagccctcttcta

SEQ ID NO: 288898 - DNA, 19 bp, Homo sapiens
  siRNA target sequence for MATN3 (NM_002381.2,602-620).
ctcgagagccctcttctaa

SEQ ID NO: 288899 - DNA, 19 bp, Homo sapiens
  siRNA target sequence for MATN3 (NM_002381.2,624-642).
ccctaaggtggccatcatt

SEQ ID NO: 288900 - DNA, 19 bp, Homo sapiens
  siRNA target sequence for MATN3 (NM_002381.2,630-648).
ggtggccatcattgttaca

SEQ ID NO: 288901 - DNA, 19 bp, Homo sapiens
  siRNA target sequence for MATN3 (NM_002381.2,633-651).
ggccatcattgttacagat

SEQ ID NO: 288902 - DNA, 19 bp, Homo sapiens
  siRNA target sequence for MATN3 (NM_002381.2,772-790).
cccctagaggagcatgttt

SEQ ID NO: 288903 - DNA, 19 bp, Homo sapiens
  siRNA target sequence for MATN3 (NM_002381.2,775-793).
ctagaggagcatgttttct

SEQ ID NO: 288904 - DNA, 19 bp, Homo sapiens
  siRNA target sequence for MATN3 (NM_002381.2,804-822).
ctatggggtcattgagaaa

SEQ ID NO: 288905 - DNA, 19 bp, Homo sapiens
  siRNA target sequence for MATN3 (NM_002381.2,808-826).
ggggtcattgagaaacttt

SEQ ID NO: 288906 - DNA, 19 bp, Homo sapiens
  siRNA target sequence for MATN3 (NM_002381.2,817-835).
gagaaactttcctctagat

SEQ ID NO: 288907 - DNA, 19 bp, Homo sapiens
  siRNA target sequence for MATN3 (NM_002381.2,939-957).
ccaaggatacaccttgaat

SEQ ID NO: 288908 - DNA, 19 bp, Homo sapiens
  siRNA target sequence for MATN3 (NM_002381.2,1035-1053).
cagaagtggctcttatcat

SEQ ID NO: 288909 - DNA, 19 bp, Homo sapiens
  siRNA target sequence for MATN3 (NM_002381.2,1061-1079).
gctatgaaggttatacctt

SEQ ID NO: 288910 - DNA, 19 bp, Homo sapiens
  siRNA target sequence for MATN3 (NM_002381.2,1166-1184).
cagggtcccatcattgtga

SEQ ID NO: 288911 - DNA, 19 bp, Homo sapiens
  siRNA target sequence for MATN3 (NM_002381.2,1172-1190).
cccatcattgtgaatgcta

SEQ ID NO: 288912 - DNA, 19 bp, Homo sapiens
  siRNA target sequence for MATN3 (NM_002381.2,1173-1191).
ccatcattgtgaatgctat

SEQ ID NO: 288913 - DNA, 19 bp, Homo sapiens
  siRNA target sequence for MATN3 (NM_002381.2,1298-1316).
cctaccactgtgattgcta

SEQ ID NO: 288914 - DNA, 19 bp, Homo sapiens
  siRNA target sequence for MATN3 (NM_002381.2,1366-1384).
gaagcacgaagacttgttt

SEQ ID NO: 288915 - DNA, 19 bp, Homo sapiens
  siRNA target sequence for MATN3 (NM_002381.2,1431-1449).
caaggtcagctcgtatctt

SEQ ID NO: 288916 - DNA, 19 bp, Homo sapiens
  siRNA target sequence for MATN3 (NM_002381.2,1437-1455).
cagctcgtatcttcaaaga

SEQ ID NO: 288917 - DNA, 19 bp, Homo sapiens
  siRNA target sequence for MATN3 (NM_002381.2,1439-1457).
gctcgtatcttcaaagact

SEQ ID NO: 288918 - DNA, 19 bp, Homo sapiens
  siRNA target sequence for MATN3 (NM_002381.2,1454-1472).
gactgaacactaaacttga

SEQ ID NO: 288919 - DNA, 19 bp, Homo sapiens
  siRNA target sequence for MATN3 (NM_002381.2,1474-1492).
gacattttggagaagttga

SEQ ID NO: 288920 - DNA, 19 bp, Homo sapiens
  siRNA target sequence for MEPE (NM_020203.1,63-81).
gtgtgggactactcctttt

SEQ ID NO: 288921 - DNA, 19 bp, Homo sapiens
  siRNA target sequence for MEPE (NM_020203.1,65-83).
gtgggactactccttttca

SEQ ID NO: 288922 - DNA, 19 bp, Homo sapiens
  siRNA target sequence for MEPE (NM_020203.1,93-111).
gggcagcaccaacatttca

SEQ ID NO: 288923 - DNA, 19 bp, Homo sapiens
  siRNA target sequence for MEPE (NM_020203.1,113-131).
ccacagactgagaaaacta

SEQ ID NO: 288924 - DNA, 19 bp, Homo sapiens
  siRNA target sequence for MEPE (NM_020203.1,191-209).
caccatttgggcaagagaa

SEQ ID NO: 288925 - DNA, 19 bp, Homo sapiens
  siRNA target sequence for MEPE (NM_020203.1,199-217).
gggcaagagaataaatcaa

SEQ ID NO: 288926 - DNA, 19 bp, Homo sapiens
  siRNA target sequence for MEPE (NM_020203.1,220-238).
gctatcatctaaagaaaat

SEQ ID NO: 288927 - DNA, 19 bp, Homo sapiens
  siRNA target sequence for MEPE (NM_020203.1,284-302).
gagaataagggaagtagta

SEQ ID NO: 288928 - DNA, 19 bp, Homo sapiens
  siRNA target sequence for MEPE (NM_020203.1,292-310).
gggaagtagtaaatctcaa

SEQ ID NO: 288929 - DNA, 19 bp, Homo sapiens
  siRNA target sequence for MEPE (NM_020203.1,344-362).
gaatatagtatcagtaaca

SEQ ID NO: 288930 - DNA, 19 bp, Homo sapiens
  siRNA target sequence for MEPE (NM_020203.1,355-373).
cagtaacaaagagaatact

SEQ ID NO: 288931 - DNA, 19 bp, Homo sapiens
  siRNA target sequence for MEPE (NM_020203.1,382-400).
cctgaggatgtcaatttat

SEQ ID NO: 288932 - DNA, 19 bp, Homo sapiens
  siRNA target sequence for MEPE (NM_020203.1,387-405).
ggatgtcaatttatcctaa

SEQ ID NO: 288933 - DNA, 19 bp, Homo sapiens
  siRNA target sequence for MEPE (NM_020203.1,402-420).
ctaagtcaactgggaataa

SEQ ID NO: 288934 - DNA, 19 bp, Homo sapiens
  siRNA target sequence for MEPE (NM_020203.1,444-462).
ctatcagcaaactacatga

SEQ ID NO: 288935 - DNA, 19 bp, Homo sapiens
  siRNA target sequence for MEPE (NM_020203.1,478-496).
cgcagctctcatcagaaat

SEQ ID NO: 288936 - DNA, 19 bp, Homo sapiens
  siRNA target sequence for MEPE (NM_020203.1,480-498).
cagctctcatcagaaataa

SEQ ID NO: 288937 - DNA, 19 bp, Homo sapiens
  siRNA target sequence for MEPE (NM_020203.1,516-534).
ggccagtgactgcgattaa

SEQ ID NO: 288938 - DNA, 19 bp, Homo sapiens
  siRNA target sequence for MEPE (NM_020203.1,517-535).
gccagtgactgcgattaaa

SEQ ID NO: 288939 - DNA, 19 bp, Homo sapiens
  siRNA target sequence for MEPE (NM_020203.1,519-537).
cagtgactgcgattaaact

SEQ ID NO: 288940 - DNA, 19 bp, Homo sapiens
  siRNA target sequence for MEPE (NM_020203.1,559-577).
gaacacacctaggaatgtt

SEQ ID NO: 288941 - DNA, 19 bp, Homo sapiens
  siRNA target sequence for MEPE (NM_020203.1,562-580).
cacacctaggaatgttcta

SEQ ID NO: 288942 - DNA, 19 bp, Homo sapiens
  siRNA target sequence for MEPE (NM_020203.1,564-582).
cacctaggaatgttctaaa

SEQ ID NO: 288943 - DNA, 19 bp, Homo sapiens
  siRNA target sequence for MEPE (NM_020203.1,566-584).
cctaggaatgttctaaaca

SEQ ID NO: 288944 - DNA, 19 bp, Homo sapiens
  siRNA target sequence for MEPE (NM_020203.1,570-588).
ggaatgttctaaacataat

SEQ ID NO: 288945 - DNA, 19 bp, Homo sapiens
  siRNA target sequence for MEPE (NM_020203.1,589-607).
cccagcaagtatgaattat

SEQ ID NO: 288946 - DNA, 19 bp, Homo sapiens
  siRNA target sequence for MEPE (NM_020203.1,593-611).
gcaagtatgaattatgcta

SEQ ID NO: 288947 - DNA, 19 bp, Homo sapiens
  siRNA target sequence for MEPE (NM_020203.1,594-612).
caagtatgaattatgctaa

SEQ ID NO: 288948 - DNA, 19 bp, Homo sapiens
  siRNA target sequence for MEPE (NM_020203.1,614-632).
gcacactcgaaggataaaa

SEQ ID NO: 288949 - DNA, 19 bp, Homo sapiens
  siRNA target sequence for MEPE (NM_020203.1,678-696).
gcaaaagcacccatcgtat

SEQ ID NO: 288950 - DNA, 19 bp, Homo sapiens
  siRNA target sequence for MEPE (NM_020203.1,679-697).
caaaagcacccatcgtatt

SEQ ID NO: 288951 - DNA, 19 bp, Homo sapiens
  siRNA target sequence for MEPE (NM_020203.1,684-702).
gcacccatcgtattcaaca

SEQ ID NO: 288952 - DNA, 19 bp, Homo sapiens
  siRNA target sequence for MEPE (NM_020203.1,763-781).
cagcggttatacagatctt

SEQ ID NO: 288953 - DNA, 19 bp, Homo sapiens
  siRNA target sequence for MEPE (NM_020203.1,765-783).
gcggttatacagatcttca

SEQ ID NO: 288954 - DNA, 19 bp, Homo sapiens
  siRNA target sequence for MEPE (NM_020203.1,818-836).
ggggacggccaacctttta

SEQ ID NO: 288955 - DNA, 19 bp, Homo sapiens
  siRNA target sequence for MEPE (NM_020203.1,819-837).
gggacggccaaccttttaa

SEQ ID NO: 288956 - DNA, 19 bp, Homo sapiens
  siRNA target sequence for MEPE (NM_020203.1,838-856).
ggacattcctggtaaagga

SEQ ID NO: 288957 - DNA, 19 bp, Homo sapiens
  siRNA target sequence for MEPE (NM_020203.1,872-890).
gacctagaaggcaaagata

SEQ ID NO: 288958 - DNA, 19 bp, Homo sapiens
  siRNA target sequence for MEPE (NM_020203.1,921-939).
ctgagagtactcatcttga

SEQ ID NO: 288959 - DNA, 19 bp, Homo sapiens
  siRNA target sequence for MEPE (NM_020203.1,1052-1070).
gtagagggcagcaacgata

SEQ ID NO: 288960 - DNA, 19 bp, Homo sapiens
  siRNA target sequence for MEPE (NM_020203.1,1055-1073).
gagggcagcaacgatatca

SEQ ID NO: 288961 - DNA, 19 bp, Homo sapiens
  siRNA target sequence for MEPE (NM_020203.1,1072-1090).
catgggtagtaccaatttt

SEQ ID NO: 288962 - DNA, 19 bp, Homo sapiens
  siRNA target sequence for MEPE (NM_020203.1,1147-1165).
ccaagggaaggttgagttt

SEQ ID NO: 288963 - DNA, 19 bp, Homo sapiens
  siRNA target sequence for MEPE (NM_020203.1,1176-1194).
ctgcaccctcaaaagagaa

SEQ ID NO: 288964 - DNA, 19 bp, Homo sapiens
  siRNA target sequence for MEPE (NM_020203.1,1220-1238).
gctgaaagtaccaactata

SEQ ID NO: 288965 - DNA, 19 bp, Homo sapiens
  siRNA target sequence for MEPE (NM_020203.1,1269-1287).
ccagaaagggtgtagatca

SEQ ID NO: 288966 - DNA, 19 bp, Homo sapiens
  siRNA target sequence for MEPE (NM_020203.1,1296-1314).
ggaaccaagcaaccttaaa

SEQ ID NO: 288967 - DNA, 19 bp, Homo sapiens
  siRNA target sequence for MEPE (NM_020203.1,1297-1315).
gaaccaagcaaccttaaat

SEQ ID NO: 288968 - DNA, 19 bp, Homo sapiens
  siRNA target sequence for MEPE (NM_020203.1,1364-1382).
ccttctcgtggtcttgata

SEQ ID NO: 288969 - DNA, 19 bp, Homo sapiens
  siRNA target sequence for MEPE (NM_020203.1,1368-1386).
ctcgtggtcttgataatga

SEQ ID NO: 288970 - DNA, 19 bp, Homo sapiens
  siRNA target sequence for MEPE (NM_020203.1,1373-1391).
ggtcttgataatgaaatca

SEQ ID NO: 288971 - DNA, 19 bp, Homo sapiens
  siRNA target sequence for MEPE (NM_020203.1,1396-1414).
cgaaatggattcctttaat

SEQ ID NO: 288972 - DNA, 19 bp, Homo sapiens
  siRNA target sequence for MEPE (NM_020203.1,1415-1433).
ggccccagtcatgagaata

SEQ ID NO: 288973 - DNA, 19 bp, Homo sapiens
  siRNA target sequence for MEPE (NM_020203.1,1418-1436).
cccagtcatgagaatataa

SEQ ID NO: 288974 - DNA, 19 bp, Homo sapiens
  siRNA target sequence for MEPE (NM_020203.1,1419-1437).
ccagtcatgagaatataat

SEQ ID NO: 288975 - DNA, 19 bp, Homo sapiens
  siRNA target sequence for MEPE (NM_020203.1,1446-1464).
gcagaaaatatcattatgt

SEQ ID NO: 288976 - DNA, 19 bp, Homo sapiens
  siRNA target sequence for MEPE (NM_020203.1,1447-1465).
cagaaaatatcattatgta

SEQ ID NO: 288977 - DNA, 19 bp, Homo sapiens
  siRNA target sequence for MEPE (NM_020203.1,1527-1545).
gtagacaaccccattccaa

SEQ ID NO: 288978 - DNA, 19 bp, Homo sapiens
  siRNA target sequence for MFAP1 (NM_005926.1,176-194).
gtcccagttcgcaatgaga

SEQ ID NO: 288979 - DNA, 19 bp, Homo sapiens
  siRNA target sequence for MFAP1 (NM_005926.1,230-248).
cgttatgtgtccggaaaaa

SEQ ID NO: 288980 - DNA, 19 bp, Homo sapiens
  siRNA target sequence for MFAP1 (NM_005926.1,341-359).
gaacaggaggaggattcat

SEQ ID NO: 288981 - DNA, 19 bp, Homo sapiens
  siRNA target sequence for MFAP1 (NM_005926.1,371-389).
cggctacggcgtttacaga

SEQ ID NO: 288982 - DNA, 19 bp, Homo sapiens
  siRNA target sequence for MFAP1 (NM_005926.1,380-398).
cgtttacagaaccgtatta

SEQ ID NO: 288983 - DNA, 19 bp, Homo sapiens
  siRNA target sequence for MFAP1 (NM_005926.1,388-406).
gaaccgtattagtgaagat

SEQ ID NO: 288984 - DNA, 19 bp, Homo sapiens
  siRNA target sequence for MFAP1 (NM_005926.1,417-435).
gattggctcgacatcgaaa

SEQ ID NO: 288985 - DNA, 19 bp, Homo sapiens
  siRNA target sequence for MFAP1 (NM_005926.1,421-439).
ggctcgacatcgaaaaata

SEQ ID NO: 288986 - DNA, 19 bp, Homo sapiens
  siRNA target sequence for MFAP1 (NM_005926.1,423-441).
ctcgacatcgaaaaatagt

SEQ ID NO: 288987 - DNA, 19 bp, Homo sapiens
  siRNA target sequence for MFAP1 (NM_005926.1,742-760).
ccgagtgacagttcaagaa

SEQ ID NO: 288988 - DNA, 19 bp, Homo sapiens
  siRNA target sequence for MFAP1 (NM_005926.1,762-780).
gtgaagccgaagcattgaa

SEQ ID NO: 288989 - DNA, 19 bp, Homo sapiens
  siRNA target sequence for MFAP1 (NM_005926.1,767-785).
gccgaagcattgaaacaga

SEQ ID NO: 288990 - DNA, 19 bp, Homo sapiens
  siRNA target sequence for MFAP1 (NM_005926.1,904-922).
ggatgcactcaatactgat

SEQ ID NO: 288991 - DNA, 19 bp, Homo sapiens
  siRNA target sequence for MFAP1 (NM_005926.1,954-972).
ggaaagttcgagagctaaa

SEQ ID NO: 288992 - DNA, 19 bp, Homo sapiens
  siRNA target sequence for MFAP1 (NM_005926.1,955-973).
gaaagttcgagagctaaaa

SEQ ID NO: 288993 - DNA, 19 bp, Homo sapiens
  siRNA target sequence for MFAP1 (NM_005926.1,962-980).
cgagagctaaaaagaatca

SEQ ID NO: 288994 - DNA, 19 bp, Homo sapiens
  siRNA target sequence for MFAP1 (NM_005926.1,1114-1132).
gggcaaatacaagttctta

SEQ ID NO: 288995 - DNA, 19 bp, Homo sapiens
  siRNA target sequence for MFAP1 (NM_005926.1,1181-1199).
gtatacaagagagatttca

SEQ ID NO: 288996 - DNA, 19 bp, Homo sapiens
  siRNA target sequence for MFAP1 (NM_005926.1,1205-1223).
cctaccctggaggatcatt

SEQ ID NO: 288997 - DNA, 19 bp, Homo sapiens
  siRNA target sequence for MFAP1 (NM_005926.1,1206-1224).
ctaccctggaggatcattt

SEQ ID NO: 288998 - DNA, 19 bp, Homo sapiens
  siRNA target sequence for MFAP1 (NM_005926.1,1271-1289).
cgctcaggtcgcaccaaat

SEQ ID NO: 288999 - DNA, 19 bp, Homo sapiens
  siRNA target sequence for MFAP1 (NM_005926.1,1272-1290).
gctcaggtcgcaccaaata

SEQ ID NO: 289000 - DNA, 19 bp, Homo sapiens
  siRNA target sequence for MFAP1 (NM_005926.1,1293-1311).
ctcaccttgtggatcaaga

SEQ ID NO: 289001 - DNA, 19 bp, Homo sapiens
  siRNA target sequence for MFAP1 (NM_005926.1,1295-1313).
caccttgtggatcaagata

SEQ ID NO: 289002 - DNA, 19 bp, Homo sapiens
  siRNA target sequence for MFAP1 (NM_005926.1,1310-1328).
gataccacctcctttgact

SEQ ID NO: 289003 - DNA, 19 bp, Homo sapiens
  siRNA target sequence for MFAP1 (NM_005926.1,1350-1368).
cccagaacacaaagttctt

SEQ ID NO: 289004 - DNA, 19 bp, Homo sapiens
  siRNA target sequence for MFAP1 (NM_005926.1,1383-1401).
ctggggtacgagatgtatt

SEQ ID NO: 289005 - DNA, 19 bp, Homo sapiens
  siRNA target sequence for MFAP2 (NM_002403.2,196-214).
gtccagtacacccactata

SEQ ID NO: 289006 - DNA, 19 bp, Homo sapiens
  siRNA target sequence for MFAP2 (NM_002403.2,225-243).
cgacaacccagactactat

SEQ ID NO: 289007 - DNA, 19 bp, Homo sapiens
  siRNA target sequence for MFAP2 (NM_002403.2,228-246).
caacccagactactatgat

SEQ ID NO: 289008 - DNA, 19 bp, Homo sapiens
  siRNA target sequence for MFAP2 (NM_002403.2,231-249).
cccagactactatgattat

SEQ ID NO: 289009 - DNA, 19 bp, Homo sapiens
  siRNA target sequence for MFAP2 (NM_002403.2,233-251).
cagactactatgattatca

SEQ ID NO: 289010 - DNA, 19 bp, Homo sapiens
  siRNA target sequence for MFAP2 (NM_002403.2,266-284).
ggccctccgaggaacagtt

SEQ ID NO: 289011 - DNA, 19 bp, Homo sapiens
  siRNA target sequence for MFAP2 (NM_002403.2,478-496).
cgccgtgtgtacgtcatta

SEQ ID NO: 289012 - DNA, 19 bp, Homo sapiens
  siRNA target sequence for MFAP2 (NM_002403.2,479-497).
gccgtgtgtacgtcattaa

SEQ ID NO: 289013 - DNA, 19 bp, Homo sapiens
  siRNA target sequence for MFAP2 (NM_002403.2,481-499).
cgtgtgtacgtcattaaca

SEQ ID NO: 289014 - DNA, 19 bp, Homo sapiens
  siRNA target sequence for MFAP3 (NM_005927.3,479-497).
gaagctacattgttgctta

SEQ ID NO: 289015 - DNA, 19 bp, Homo sapiens
  siRNA target sequence for MFAP3 (NM_005927.3,551-569).
ggacttcgaccaaatggtt

SEQ ID NO: 289016 - DNA, 19 bp, Homo sapiens
  siRNA target sequence for MFAP3 (NM_005927.3,552-570).
gacttcgaccaaatggttt

SEQ ID NO: 289017 - DNA, 19 bp, Homo sapiens
  siRNA target sequence for MFAP3 (NM_005927.3,566-584).
ggtttcactggaagcaaat

SEQ ID NO: 289018 - DNA, 19 bp, Homo sapiens
  siRNA target sequence for MFAP3 (NM_005927.3,579-597).
gcaaatcgtagttcttaca

SEQ ID NO: 289019 - DNA, 19 bp, Homo sapiens
  siRNA target sequence for MFAP3 (NM_005927.3,580-598).
caaatcgtagttcttacaa

SEQ ID NO: 289020 - DNA, 19 bp, Homo sapiens
  siRNA target sequence for MFAP3 (NM_005927.3,634-652).
gttcccactcggatgatga

SEQ ID NO: 289021 - DNA, 19 bp, Homo sapiens
  siRNA target sequence for MFAP3 (NM_005927.3,669-687).
gagggaactagcgtttcaa

SEQ ID NO: 289022 - DNA, 19 bp, Homo sapiens
  siRNA target sequence for MFAP3 (NM_005927.3,671-689).
gggaactagcgtttcaatt

SEQ ID NO: 289023 - DNA, 19 bp, Homo sapiens
  siRNA target sequence for MFAP3 (NM_005927.3,673-691).
gaactagcgtttcaattga

SEQ ID NO: 289024 - DNA, 19 bp, Homo sapiens
  siRNA target sequence for MFAP3 (NM_005927.3,723-741).
gtccattggcacaattcaa

SEQ ID NO: 289025 - DNA, 19 bp, Homo sapiens
  siRNA target sequence for MFAP3 (NM_005927.3,775-793).
gaaagtggttggtttctga

SEQ ID NO: 289026 - DNA, 19 bp, Homo sapiens
  siRNA target sequence for MFAP3 (NM_005927.3,790-808).
ctgataacttcctaaacat

SEQ ID NO: 289027 - DNA, 19 bp, Homo sapiens
  siRNA target sequence for MFAP3 (NM_005927.3,828-846).
gaccgtgggctctatacct

SEQ ID NO: 289028 - DNA, 19 bp, Homo sapiens
  siRNA target sequence for MFAP3 (NM_005927.3,851-869).
cgtcacctctccaattcgt

SEQ ID NO: 289029 - DNA, 19 bp, Homo sapiens
  siRNA target sequence for MFAP3 (NM_005927.3,880-898).
ctgtcaccctacgtgttat

SEQ ID NO: 289030 - DNA, 19 bp, Homo sapiens
  siRNA target sequence for MFAP3 (NM_005927.3,882-900).
gtcaccctacgtgttatct

SEQ ID NO: 289031 - DNA, 19 bp, Homo sapiens
  siRNA target sequence for MFAP3 (NM_005927.3,917-935).
gagtgtctattacatgatt

SEQ ID NO: 289032 - DNA, 19 bp, Homo sapiens
  siRNA target sequence for MFAP3 (NM_005927.3,940-958).
gcctgattgcctttacaat

SEQ ID NO: 289033 - DNA, 19 bp, Homo sapiens
  siRNA target sequence for MFAP3 (NM_005927.3,942-960).
ctgattgcctttacaatca

SEQ ID NO: 289034 - DNA, 19 bp, Homo sapiens
  siRNA target sequence for MFAP3 (NM_005927.3,944-962).
gattgcctttacaatcaca

SEQ ID NO: 289035 - DNA, 19 bp, Homo sapiens
  siRNA target sequence for MFAP3 (NM_005927.3,955-973).
caatcacactcatcttgaa

SEQ ID NO: 289036 - DNA, 19 bp, Homo sapiens
  siRNA target sequence for MFAP3 (NM_005927.3,1073-1091).
ctttgagattgcaaaacgt

SEQ ID NO: 289037 - DNA, 19 bp, Homo sapiens
  siRNA target sequence for MFAP3 (NM_005927.3,1125-1143).
ctcgccaaagtcacacaat

SEQ ID NO: 289038 - DNA, 19 bp, Homo sapiens
  siRNA target sequence for MFAP3 (NM_005927.3,1127-1145).
cgccaaagtcacacaattt

SEQ ID NO: 289039 - DNA, 19 bp, Homo sapiens
  siRNA target sequence for MFAP3 (NM_005927.3,1157-1175).
gtttgctcgttatattgaa

SEQ ID NO: 289040 - DNA, 19 bp, Homo sapiens
  siRNA target sequence for MFAP3 (NM_005927.3,1200-1218).
ccacctcttattctaaact

SEQ ID NO: 289041 - DNA, 19 bp, Homo sapiens
  siRNA target sequence for MFAP3 (NM_005927.3,1312-1330).
ctcaaggtggcatctatgt

SEQ ID NO: 289042 - DNA, 19 bp, Homo sapiens
  siRNA target sequence for MFAP3 (NM_005927.3,1314-1332).
caaggtggcatctatgtca

SEQ ID NO: 289043 - DNA, 19 bp, Homo sapiens
  siRNA target sequence for MFAP3 (NM_005927.3,1318-1336).
gtggcatctatgtcattaa

SEQ ID NO: 289044 - DNA, 19 bp, Homo sapiens
  siRNA target sequence for MFAP3 (NM_005927.3,1341-1359).
gagatgggacggagtaatt

SEQ ID NO: 289045 - DNA, 19 bp, Homo sapiens
  siRNA target sequence for MFAP3 (NM_005927.3,1343-1361).
gatgggacggagtaattca

SEQ ID NO: 289046 - DNA, 19 bp, Homo sapiens
  siRNA target sequence for MFAP3 (NM_005927.3,1441-1459).
cagaaaccaaaagtattga

SEQ ID NO: 289047 - DNA, 19 bp, Homo sapiens
  siRNA target sequence for MFAP3 (NM_005927.3,1447-1465).
ccaaaagtattgatacaga

SEQ ID NO: 289048 - DNA, 19 bp, Homo sapiens
  siRNA target sequence for MFAP3 (NM_005927.3,1491-1509).
ccacctgatgatataggat

SEQ ID NO: 289049 - DNA, 19 bp, Homo sapiens
  siRNA target sequence for MFAP3 (NM_005927.3,1506-1524).
ggatctgcagaatctaact

SEQ ID NO: 289050 - DNA, 19 bp, Homo sapiens
  siRNA target sequence for MFAP3 (NM_005927.3,1512-1530).
gcagaatctaactgtaact

SEQ ID NO: 289051 - DNA, 19 bp, Homo sapiens
  siRNA target sequence for MFAP3 (NM_005927.3,1513-1531).
cagaatctaactgtaacta

SEQ ID NO: 289052 - DNA, 19 bp, Homo sapiens
  siRNA target sequence for MFAP3 (NM_005927.3,1515-1533).
gaatctaactgtaactaca

SEQ ID NO: 289053 - DNA, 19 bp, Homo sapiens
  siRNA target sequence for OPTC (NM_014359.2,229-247).
gcgattcctttgaagttct

SEQ ID NO: 289054 - DNA, 19 bp, Homo sapiens
  siRNA target sequence for OPTC (NM_014359.2,278-296).
caactatggtgaagtcatt

SEQ ID NO: 289055 - DNA, 19 bp, Homo sapiens
  siRNA target sequence for OPTC (NM_014359.2,293-311).
cattgacctgagcaactat

SEQ ID NO: 289056 - DNA, 19 bp, Homo sapiens
  siRNA target sequence for OPTC (NM_014359.2,434-452).
gatgaccagacctactaca

SEQ ID NO: 289057 - DNA, 19 bp, Homo sapiens
  siRNA target sequence for OPTC (NM_014359.2,515-533).
cctcggttcctctgtgtat

SEQ ID NO: 289058 - DNA, 19 bp, Homo sapiens
  siRNA target sequence for OPTC (NM_014359.2,516-534).
ctcggttcctctgtgtatt

SEQ ID NO: 289059 - DNA, 19 bp, Homo sapiens
  siRNA target sequence for OPTC (NM_014359.2,526-544).
ctgtgtattgcgatgacat

SEQ ID NO: 289060 - DNA, 19 bp, Homo sapiens
  siRNA target sequence for OPTC (NM_014359.2,620-638).
cagggccgaagacttcaaa

SEQ ID NO: 289061 - DNA, 19 bp, Homo sapiens
  siRNA target sequence for OPTC (NM_014359.2,639-657).
gggctgacaaagttgaaga

SEQ ID NO: 289062 - DNA, 19 bp, Homo sapiens
  siRNA target sequence for OPTC (NM_014359.2,678-696).
ctcatttcctccatcgata

SEQ ID NO: 289063 - DNA, 19 bp, Homo sapiens
  siRNA target sequence for OPTC (NM_014359.2,680-698).
catttcctccatcgataat

SEQ ID NO: 289064 - DNA, 19 bp, Homo sapiens
  siRNA target sequence for OPTC (NM_014359.2,791-809).
cctggatgtccgcctaaat

SEQ ID NO: 289065 - DNA, 19 bp, Homo sapiens
  siRNA target sequence for PRELP (NM_002725.2,308-326).
ccaggccctccatctatct

SEQ ID NO: 289066 - DNA, 19 bp, Homo sapiens
  siRNA target sequence for PRELP (NM_002725.2,309-327).
caggccctccatctatctt

SEQ ID NO: 289067 - DNA, 19 bp, Homo sapiens
  siRNA target sequence for PRELP (NM_002725.2,426-444).
gcatccattacctctatct

SEQ ID NO: 289068 - DNA, 19 bp, Homo sapiens
  siRNA target sequence for PRELP (NM_002725.2,493-511).
cacaggcctgcgatggatt

SEQ ID NO: 289069 - DNA, 19 bp, Homo sapiens
  siRNA target sequence for PRELP (NM_002725.2,495-513).
caggcctgcgatggattaa

SEQ ID NO: 289070 - DNA, 19 bp, Homo sapiens
  siRNA target sequence for PRELP (NM_002725.2,498-516).
gcctgcgatggattaacct

SEQ ID NO: 289071 - DNA, 19 bp, Homo sapiens
  siRNA target sequence for PRELP (NM_002725.2,523-541).
caaccgaatccgcaagata

SEQ ID NO: 289072 - DNA, 19 bp, Homo sapiens
  siRNA target sequence for PRELP (NM_002725.2,885-903).
ccatccctaacggatactt

SEQ ID NO: 289073 - DNA, 19 bp, Homo sapiens
  siRNA target sequence for PRELP (NM_002725.2,890-908).
cctaacggatacttcaaga

SEQ ID NO: 289074 - DNA, 19 bp, Homo sapiens
  siRNA target sequence for PRELP (NM_002725.2,923-941).
gccttcattcggcttaact

SEQ ID NO: 289075 - DNA, 19 bp, Homo sapiens
  siRNA target sequence for PRELP (NM_002725.2,924-942).
ccttcattcggcttaacta

SEQ ID NO: 289076 - DNA, 19 bp, Homo sapiens
  siRNA target sequence for PRELP (NM_002725.2,965-983).
ctccccaagaactccttta

SEQ ID NO: 289077 - DNA, 19 bp, Homo sapiens
  siRNA target sequence for PRELP (NM_002725.2,967-985).
ccccaagaactcctttaat

SEQ ID NO: 289078 - DNA, 19 bp, Homo sapiens
  siRNA target sequence for PRELP (NM_002725.2,1217-1235).
ccgctggacctcatgatgt

SEQ ID NO: 289079 - DNA, 19 bp, Homo sapiens
  siRNA target sequence for TECTA (NM_005422.1,75-93).
ggagctcatgtatccattt

SEQ ID NO: 289080 - DNA, 19 bp, Homo sapiens
  siRNA target sequence for TECTA (NM_005422.1,88-106).
ccattttggcagaatgaca

SEQ ID NO: 289081 - DNA, 19 bp, Homo sapiens
  siRNA target sequence for TECTA (NM_005422.1,131-149).
gaagctcatctgagattaa

SEQ ID NO: 289082 - DNA, 19 bp, Homo sapiens
  siRNA target sequence for TECTA (NM_005422.1,182-200).
cttaccgcactgtctatgt

SEQ ID NO: 289083 - DNA, 19 bp, Homo sapiens
  siRNA target sequence for TECTA (NM_005422.1,186-204).
ccgcactgtctatgtcaat

SEQ ID NO: 289084 - DNA, 19 bp, Homo sapiens
  siRNA target sequence for TECTA (NM_005422.1,187-205).
cgcactgtctatgtcaata

SEQ ID NO: 289085 - DNA, 19 bp, Homo sapiens
  siRNA target sequence for TECTA (NM_005422.1,188-206).
gcactgtctatgtcaataa

SEQ ID NO: 289086 - DNA, 19 bp, Homo sapiens
  siRNA target sequence for TECTA (NM_005422.1,201-219).
caataacaacggagttgtt

SEQ ID NO: 289087 - DNA, 19 bp, Homo sapiens
  siRNA target sequence for TECTA (NM_005422.1,210-228).
cggagttgtttccttcaat

SEQ ID NO: 289088 - DNA, 19 bp, Homo sapiens
  siRNA target sequence for TECTA (NM_005422.1,243-261).
gttcacgccagaatccttt

SEQ ID NO: 289089 - DNA, 19 bp, Homo sapiens
  siRNA target sequence for TECTA (NM_005422.1,317-335).
gaattcgaggcgagatcta

SEQ ID NO: 289090 - DNA, 19 bp, Homo sapiens
  siRNA target sequence for TECTA (NM_005422.1,352-370).
gagcctgccatcttgaaaa

SEQ ID NO: 289091 - DNA, 19 bp, Homo sapiens
  siRNA target sequence for TECTA (NM_005422.1,389-407).
ggaagtacttcaaagacat

SEQ ID NO: 289092 - DNA, 19 bp, Homo sapiens
  siRNA target sequence for TECTA (NM_005422.1,446-464).
gggaggaagtcacgtttta

SEQ ID NO: 289093 - DNA, 19 bp, Homo sapiens
  siRNA target sequence for TECTA (NM_005422.1,511-529).
gtgtccgatggctcctata

SEQ ID NO: 289094 - DNA, 19 bp, Homo sapiens
  siRNA target sequence for TECTA (NM_005422.1,515-533).
ccgatggctcctatacatt

SEQ ID NO: 289095 - DNA, 19 bp, Homo sapiens
  siRNA target sequence for TECTA (NM_005422.1,517-535).
gatggctcctatacattca

SEQ ID NO: 289096 - DNA, 19 bp, Homo sapiens
  siRNA target sequence for TECTA (NM_005422.1,536-554).
ccctcttcaattattacga

SEQ ID NO: 289097 - DNA, 19 bp, Homo sapiens
  siRNA target sequence for TECTA (NM_005422.1,537-555).
cctcttcaattattacgaa

SEQ ID NO: 289098 - DNA, 19 bp, Homo sapiens
  siRNA target sequence for TECTA (NM_005422.1,538-556).
ctcttcaattattacgaaa

SEQ ID NO: 289099 - DNA, 19 bp, Homo sapiens
  siRNA target sequence for TECTA (NM_005422.1,641-659).
gaaacctcaccaatttctt

SEQ ID NO: 289100 - DNA, 19 bp, Homo sapiens
  siRNA target sequence for TECTA (NM_005422.1,680-698).
cccccgagatcgtgaatat

SEQ ID NO: 289101 - DNA, 19 bp, Homo sapiens
  siRNA target sequence for TECTA (NM_005422.1,705-723).
gaccacaaacgtcaatgtt

SEQ ID NO: 289102 - DNA, 19 bp, Homo sapiens
  siRNA target sequence for TECTA (NM_005422.1,724-742).
ccaggccgctgggcattta

SEQ ID NO: 289103 - DNA, 19 bp, Homo sapiens
  siRNA target sequence for TECTA (NM_005422.1,729-747).
ccgctgggcatttaaagtt

SEQ ID NO: 289104 - DNA, 19 bp, Homo sapiens
  siRNA target sequence for TECTA (NM_005422.1,732-750).
ctgggcatttaaagttgat

SEQ ID NO: 289105 - DNA, 19 bp, Homo sapiens
  siRNA target sequence for TECTA (NM_005422.1,782-800).
cctcaaggggacaattcct

SEQ ID NO: 289106 - DNA, 19 bp, Homo sapiens
  siRNA target sequence for TECTA (NM_005422.1,802-820).
cggcgaggggaggtgtttt

SEQ ID NO: 289107 - DNA, 19 bp, Homo sapiens
  siRNA target sequence for TECTA (NM_005422.1,848-866).
gccgctgtctggatttcaa

SEQ ID NO: 289108 - DNA, 19 bp, Homo sapiens
  siRNA target sequence for TECTA (NM_005422.1,850-868).
cgctgtctggatttcaaca

SEQ ID NO: 289109 - DNA, 19 bp, Homo sapiens
  siRNA target sequence for TECTA (NM_005422.1,851-869).
gctgtctggatttcaacaa

SEQ ID NO: 289110 - DNA, 19 bp, Homo sapiens
  siRNA target sequence for TECTA (NM_005422.1,981-999).
gccacactaccacactttt

SEQ ID NO: 289111 - DNA, 19 bp, Homo sapiens
  siRNA target sequence for TECTA (NM_005422.1,1263-1281).
ccagagtggcatatctact

SEQ ID NO: 289112 - DNA, 19 bp, Homo sapiens
  siRNA target sequence for TECTA (NM_005422.1,1292-1310).
cagattttgggctcttagt

SEQ ID NO: 289113 - DNA, 19 bp, Homo sapiens
  siRNA target sequence for TECTA (NM_005422.1,1376-1394).
gactctgtggaaactataa

SEQ ID NO: 289114 - DNA, 19 bp, Homo sapiens
  siRNA target sequence for TECTA (NM_005422.1,1539-1557).
cactgaagccctctacttt

SEQ ID NO: 289115 - DNA, 19 bp, Homo sapiens
  siRNA target sequence for TECTA (NM_005422.1,1726-1744).
caagcccttggcattccaa

SEQ ID NO: 289116 - DNA, 19 bp, Homo sapiens
  siRNA target sequence for TECTA (NM_005422.1,2047-2065).
gtctactgcttcaacaaga

SEQ ID NO: 289117 - DNA, 19 bp, Homo sapiens
  siRNA target sequence for TECTA (NM_005422.1,2236-2254).
cgcccagagtacttggaaa

SEQ ID NO: 289118 - DNA, 19 bp, Homo sapiens
  siRNA target sequence for TECTA (NM_005422.1,2240-2258).
cagagtacttggaaatcga

SEQ ID NO: 289119 - DNA, 19 bp, Homo sapiens
  siRNA target sequence for TECTA (NM_005422.1,2351-2369).
gggcttcggaagtcaagtt

SEQ ID NO: 289120 - DNA, 19 bp, Homo sapiens
  siRNA target sequence for TECTA (NM_005422.1,2353-2371).
gcttcggaagtcaagttga

SEQ ID NO: 289121 - DNA, 19 bp, Homo sapiens
  siRNA target sequence for TECTA (NM_005422.1,2354-2372).
cttcggaagtcaagttgaa

SEQ ID NO: 289122 - DNA, 19 bp, Homo sapiens
  siRNA target sequence for TECTA (NM_005422.1,2405-2423).
cttcggggaagctggaaat

SEQ ID NO: 289123 - DNA, 19 bp, Homo sapiens
  siRNA target sequence for TECTA (NM_005422.1,2412-2430).
gaagctggaaatttatcga

SEQ ID NO: 289124 - DNA, 19 bp, Homo sapiens
  siRNA target sequence for TECTA (NM_005422.1,2483-2501).
cagacataggtctattgta

SEQ ID NO: 289125 - DNA, 19 bp, Homo sapiens
  siRNA target sequence for TECTA (NM_005422.1,2485-2503).
gacataggtctattgtaca

SEQ ID NO: 289126 - DNA, 19 bp, Homo sapiens
  siRNA target sequence for TECTA (NM_005422.1,2507-2525).
ggctgtccaccacatactt

SEQ ID NO: 289127 - DNA, 19 bp, Homo sapiens
  siRNA target sequence for TECTA (NM_005422.1,2540-2558).
gcttgtgcggcttctacaa

SEQ ID NO: 289128 - DNA, 19 bp, Homo sapiens
  siRNA target sequence for TECTA (NM_005422.1,2541-2559).
cttgtgcggcttctacaat

SEQ ID NO: 289129 - DNA, 19 bp, Homo sapiens
  siRNA target sequence for TECTA (NM_005422.1,2676-2694).
gctgaaggcctgcaacaat

SEQ ID NO: 289130 - DNA, 19 bp, Homo sapiens
  siRNA target sequence for TECTA (NM_005422.1,2918-2936).
cctggcggacctatgactt

SEQ ID NO: 289131 - DNA, 19 bp, Homo sapiens
  siRNA target sequence for TECTA (NM_005422.1,2971-2989).
gaggagtgcatcacatgta

SEQ ID NO: 289132 - DNA, 19 bp, Homo sapiens
  siRNA target sequence for TECTA (NM_005422.1,3163-3181).
ctggactgccagatcttct

SEQ ID NO: 289133 - DNA, 19 bp, Homo sapiens
  siRNA target sequence for TECTA (NM_005422.1,3172-3190).
cagatcttctgctattgca

SEQ ID NO: 289134 - DNA, 19 bp, Homo sapiens
  siRNA target sequence for TECTA (NM_005422.1,3256-3274).
gaaggtggcctgtactact

SEQ ID NO: 289135 - DNA, 19 bp, Homo sapiens
  siRNA target sequence for TECTA (NM_005422.1,3576-3594).
gctggggcaagggaagata

SEQ ID NO: 289136 - DNA, 19 bp, Homo sapiens
  siRNA target sequence for TECTA (NM_005422.1,3580-3598).
gggcaagggaagataaata

SEQ ID NO: 289137 - DNA, 19 bp, Homo sapiens
  siRNA target sequence for TECTA (NM_005422.1,3581-3599).
ggcaagggaagataaatat

SEQ ID NO: 289138 - DNA, 19 bp, Homo sapiens
  siRNA target sequence for TECTA (NM_005422.1,3774-3792).
gcttgcatcgagtgtcaat

SEQ ID NO: 289139 - DNA, 19 bp, Homo sapiens
  siRNA target sequence for TECTA (NM_005422.1,3779-3797).
catcgagtgtcaatgagtt

SEQ ID NO: 289140 - DNA, 19 bp, Homo sapiens
  siRNA target sequence for TECTA (NM_005422.1,4118-4136).
ctccaaacagccattacga

SEQ ID NO: 289141 - DNA, 19 bp, Homo sapiens
  siRNA target sequence for TECTA (NM_005422.1,4281-4299).
ctactccgatggcaaatat

SEQ ID NO: 289142 - DNA, 19 bp, Homo sapiens
  siRNA target sequence for TECTA (NM_005422.1,4286-4304).
ccgatggcaaatattacga

SEQ ID NO: 289143 - DNA, 19 bp, Homo sapiens
  siRNA target sequence for TECTA (NM_005422.1,4357-4375).
cgtcgcaacgtgattcagt

SEQ ID NO: 289144 - DNA, 19 bp, Homo sapiens
  siRNA target sequence for TECTA (NM_005422.1,4609-4627).
cccaacctcaccatcattt

SEQ ID NO: 289145 - DNA, 19 bp, Homo sapiens
  siRNA target sequence for TECTA (NM_005422.1,4628-4646).
cgcccgtctacttctacat

SEQ ID NO: 289146 - DNA, 19 bp, Homo sapiens
  siRNA target sequence for TECTA (NM_005422.1,4629-4647).
gcccgtctacttctacatt

SEQ ID NO: 289147 - DNA, 19 bp, Homo sapiens
  siRNA target sequence for TECTA (NM_005422.1,4630-4648).
cccgtctacttctacatta

SEQ ID NO: 289148 - DNA, 19 bp, Homo sapiens
  siRNA target sequence for TECTA (NM_005422.1,4726-4744).
ggtttggcaaccaaaatct

SEQ ID NO: 289149 - DNA, 19 bp, Homo sapiens
  siRNA target sequence for TECTA (NM_005422.1,4727-4745).
gtttggcaaccaaaatcta

SEQ ID NO: 289150 - DNA, 19 bp, Homo sapiens
  siRNA target sequence for TECTA (NM_005422.1,4778-4796).
gcccagacatccagatata

SEQ ID NO: 289151 - DNA, 19 bp, Homo sapiens
  siRNA target sequence for TECTA (NM_005422.1,4780-4798).
ccagacatccagatatact

SEQ ID NO: 289152 - DNA, 19 bp, Homo sapiens
  siRNA target sequence for TECTA (NM_005422.1,4781-4799).
cagacatccagatatacta

SEQ ID NO: 289153 - DNA, 19 bp, Homo sapiens
  siRNA target sequence for TECTA (NM_005422.1,4783-4801).
gacatccagatatactaca

SEQ ID NO: 289154 - DNA, 19 bp, Homo sapiens
  siRNA target sequence for TECTA (NM_005422.1,4789-4807).
cagatatactacaatggtt

SEQ ID NO: 289155 - DNA, 19 bp, Homo sapiens
  siRNA target sequence for TECTA (NM_005422.1,4804-4822).
ggtttcaacgtcattaaaa

SEQ ID NO: 289156 - DNA, 19 bp, Homo sapiens
  siRNA target sequence for TECTA (NM_005422.1,4805-4823).
gtttcaacgtcattaaaat

SEQ ID NO: 289157 - DNA, 19 bp, Homo sapiens
  siRNA target sequence for TECTA (NM_005422.1,4875-4893).
caacggggacctaacagat

SEQ ID NO: 289158 - DNA, 19 bp, Homo sapiens
  siRNA target sequence for TECTA (NM_005422.1,4878-4896).
cggggacctaacagatgat

SEQ ID NO: 289159 - DNA, 19 bp, Homo sapiens
  siRNA target sequence for TECTA (NM_005422.1,4879-4897).
ggggacctaacagatgatt

SEQ ID NO: 289160 - DNA, 19 bp, Homo sapiens
  siRNA target sequence for TECTA (NM_005422.1,4880-4898).
gggacctaacagatgatta

SEQ ID NO: 289161 - DNA, 19 bp, Homo sapiens
  siRNA target sequence for TECTA (NM_005422.1,4881-4899).
ggacctaacagatgattat

SEQ ID NO: 289162 - DNA, 19 bp, Homo sapiens
  siRNA target sequence for TECTA (NM_005422.1,4885-4903).
ctaacagatgattatgtga

SEQ ID NO: 289163 - DNA, 19 bp, Homo sapiens
  siRNA target sequence for TECTA (NM_005422.1,5224-5242).
cgctccttcgggatcctta

SEQ ID NO: 289164 - DNA, 19 bp, Homo sapiens
  siRNA target sequence for TECTA (NM_005422.1,5362-5380).
gagccacccccctatggaa

SEQ ID NO: 289165 - DNA, 19 bp, Homo sapiens
  siRNA target sequence for TECTA (NM_005422.1,5364-5382).
gccacccccctatggaaat

SEQ ID NO: 289166 - DNA, 19 bp, Homo sapiens
  siRNA target sequence for TECTA (NM_005422.1,5365-5383).
ccacccccctatggaaata

SEQ ID NO: 289167 - DNA, 19 bp, Homo sapiens
  siRNA target sequence for TECTA (NM_005422.1,5366-5384).
cacccccctatggaaataa

SEQ ID NO: 289168 - DNA, 19 bp, Homo sapiens
  siRNA target sequence for TECTA (NM_005422.1,5368-5386).
cccccctatggaaataact

SEQ ID NO: 289169 - DNA, 19 bp, Homo sapiens
  siRNA target sequence for TECTA (NM_005422.1,5385-5403).
ctcacatgacattatcgat

SEQ ID NO: 289170 - DNA, 19 bp, Homo sapiens
  siRNA target sequence for TECTA (NM_005422.1,5417-5435).
gcaaagcagcccaaatgga

SEQ ID NO: 289171 - DNA, 19 bp, Homo sapiens
  siRNA target sequence for TECTA (NM_005422.1,5485-5503).
ggcgtgaggatcaatgaca

SEQ ID NO: 289172 - DNA, 19 bp, Homo sapiens
  siRNA target sequence for TECTA (NM_005422.1,5516-5534).
gcatcgagggggaagattt

SEQ ID NO: 289173 - DNA, 19 bp, Homo sapiens
  siRNA target sequence for TECTA (NM_005422.1,5661-5679).
cagggaccgcacgatcaat

SEQ ID NO: 289174 - DNA, 19 bp, Homo sapiens
  siRNA target sequence for TECTA (NM_005422.1,5663-5681).
gggaccgcacgatcaatgt

SEQ ID NO: 289175 - DNA, 19 bp, Homo sapiens
  siRNA target sequence for TECTA (NM_005422.1,5693-5711).
gtgcttatgagctggatat

SEQ ID NO: 289176 - DNA, 19 bp, Homo sapiens
  siRNA target sequence for TECTA (NM_005422.1,5695-5713).
gcttatgagctggatatca

SEQ ID NO: 289177 - DNA, 19 bp, Homo sapiens
  siRNA target sequence for TECTA (NM_005422.1,5696-5714).
cttatgagctggatatcaa

SEQ ID NO: 289178 - DNA, 19 bp, Homo sapiens
  siRNA target sequence for TECTA (NM_005422.1,5701-5719).
gagctggatatcaagatct

SEQ ID NO: 289179 - DNA, 19 bp, Homo sapiens
  siRNA target sequence for TECTA (NM_005422.1,5739-5757).
gcctatgctaagtgtaatt

SEQ ID NO: 289180 - DNA, 19 bp, Homo sapiens
  siRNA target sequence for TECTA (NM_005422.1,5740-5758).
cctatgctaagtgtaatta

SEQ ID NO: 289181 - DNA, 19 bp, Homo sapiens
  siRNA target sequence for TECTA (NM_005422.1,5864-5882).
ctcgagatgtgctgtatgt

SEQ ID NO: 289182 - DNA, 19 bp, Homo sapiens
  siRNA target sequence for TECTA (NM_005422.1,5899-5917).
ggagctgacgccacacatt

SEQ ID NO: 289183 - DNA, 19 bp, Homo sapiens
  siRNA target sequence for TECTA (NM_005422.1,5902-5920).
gctgacgccacacatttaa

SEQ ID NO: 289184 - DNA, 19 bp, Homo sapiens
  siRNA target sequence for TECTA (NM_005422.1,5907-5925).
cgccacacatttaatccta

SEQ ID NO: 289185 - DNA, 19 bp, Homo sapiens
  siRNA target sequence for TECTA (NM_005422.1,5948-5966).
cacccacccgagatagcaa

SEQ ID NO: 289186 - DNA, 19 bp, Homo sapiens
  siRNA target sequence for TECTA (NM_005422.1,5957-5975).
gagatagcaatgataagct

SEQ ID NO: 289187 - DNA, 19 bp, Homo sapiens
  siRNA target sequence for TECTA (NM_005422.1,5968-5986).
gataagctccgatatttca

SEQ ID NO: 289188 - DNA, 19 bp, Homo sapiens
  siRNA target sequence for TECTA (NM_005422.1,5976-5994).
ccgatatttcatcattgaa

SEQ ID NO: 289189 - DNA, 19 bp, Homo sapiens
  siRNA target sequence for TECTA (NM_005422.1,5999-6017).
ggtgtcagaacctcaaaga

SEQ ID NO: 289190 - DNA, 19 bp, Homo sapiens
  siRNA target sequence for TECTA (NM_005422.1,6000-6018).
gtgtcagaacctcaaagat

SEQ ID NO: 289191 - DNA, 19 bp, Homo sapiens
  siRNA target sequence for TECTA (NM_005422.1,6067-6085).
cacgtcaccgtctttaaat

SEQ ID NO: 289192 - DNA, 19 bp, Homo sapiens
  siRNA target sequence for TECTA (NM_005422.1,6092-6110).
gggattacgacgaagttca

SEQ ID NO: 289193 - DNA, 19 bp, Homo sapiens
  siRNA target sequence for TECTA (NM_005422.1,6128-6146).
cactctgcgactcagaaaa

SEQ ID NO: 289194 - DNA, 19 bp, Homo sapiens
  siRNA target sequence for TECTA (NM_005422.1,6130-6148).
ctctgcgactcagaaaagt

SEQ ID NO: 289195 - DNA, 19 bp, Homo sapiens
  siRNA target sequence for TECTA (NM_005422.1,6147-6165).
gtactcctgtaaaatcact

SEQ ID NO: 289196 - DNA, 19 bp, Homo sapiens
  siRNA target sequence for TECTA (NM_005422.1,6207-6225).
gcccaaagaacagatcatt

SEQ ID NO: 289197 - DNA, 19 bp, Homo sapiens
  siRNA target sequence for TECTA (NM_005422.1,6208-6226).
cccaaagaacagatcattt

SEQ ID NO: 289198 - DNA, 19 bp, Homo sapiens
  siRNA target sequence for TECTA (NM_005422.1,6274-6292).
ggagggtgtgagcagattt

SEQ ID NO: 289199 - DNA, 19 bp, Homo sapiens
  siRNA target sequence for TECTA (NM_005422.1,6357-6375).
gagctgcagagcctctaat

SEQ ID NO: 289200 - DNA, 19 bp, Homo sapiens
  siRNA target sequence for TECTA (NM_005422.1,6398-6416).
ggacgcttcttctcatcat

SEQ ID NO: 289201 - DNA, 19 bp, Homo sapiens
  siRNA target sequence for TECTA (NM_005422.1,6401-6419).
cgcttcttctcatcatgat

SEQ ID NO: 289202 - DNA, 19 bp, Homo sapiens
  siRNA target sequence for TECTA (NM_005422.1,6428-6446).
cattatggcattttgtcta

SEQ ID NO: 289203 - DNA, 19 bp, Homo sapiens
  siRNA target sequence for TECTA (NM_005422.1,6435-6453).
gcattttgtctataaatca

SEQ ID NO: 289204 - DNA, 19 bp, Homo sapiens
  siRNA target sequence for TFPI2 (NM_006528.2,182-200).
gtctcctgcccctagacta

SEQ ID NO: 289205 - DNA, 19 bp, Homo sapiens
  siRNA target sequence for TFPI2 (NM_006528.2,215-233).
ccctacttctccgttacta

SEQ ID NO: 289206 - DNA, 19 bp, Homo sapiens
  siRNA target sequence for TFPI2 (NM_006528.2,217-235).
ctacttctccgttactact

SEQ ID NO: 289207 - DNA, 19 bp, Homo sapiens
  siRNA target sequence for TFPI2 (NM_006528.2,286-304).
ggcaacgccaacaatttct

SEQ ID NO: 289208 - DNA, 19 bp, Homo sapiens
  siRNA target sequence for TFPI2 (NM_006528.2,329-347).
cttgctggaggatagaaaa

SEQ ID NO: 289209 - DNA, 19 bp, Homo sapiens
  siRNA target sequence for TFPI2 (NM_006528.2,431-449).
ccatgacatgtgaaaaatt

SEQ ID NO: 289210 - DNA, 19 bp, Homo sapiens
  siRNA target sequence for TFPI2 (NM_006528.2,466-484).
caccggaaccggattgaga

SEQ ID NO: 289211 - DNA, 19 bp, Homo sapiens
  siRNA target sequence for TFPI2 (NM_006528.2,494-512).
cagatgaagctacttgtat

SEQ ID NO: 289212 - DNA, 19 bp, Homo sapiens
  siRNA target sequence for TFPI2 (NM_006528.2,581-599).
ccaatgtgactcgctatta

SEQ ID NO: 289213 - DNA, 19 bp, Homo sapiens
  siRNA target sequence for TFPI2 (NM_006528.2,582-600).
caatgtgactcgctattat

SEQ ID NO: 289214 - DNA, 19 bp, Homo sapiens
  siRNA target sequence for TFPI2 (NM_006528.2,746-764).
ccagtagaatccggaaaat

SEQ ID NO: 289215 - DNA, 19 bp, Homo sapiens
  siRNA target sequence for TNR (NM_003285.1,142-160).
cttctgggctccatgatca

SEQ ID NO: 289216 - DNA, 19 bp, Homo sapiens
  siRNA target sequence for TNR (NM_003285.1,276-294).
caaccacgtgtacaacatt

SEQ ID NO: 289217 - DNA, 19 bp, Homo sapiens
  siRNA target sequence for TNR (NM_003285.1,552-570).
caactgctgccaagaaagt

SEQ ID NO: 289218 - DNA, 19 bp, Homo sapiens
  siRNA target sequence for TNR (NM_003285.1,578-596).
caggacaactggactatat

SEQ ID NO: 289219 - DNA, 19 bp, Homo sapiens
  siRNA target sequence for TNR (NM_003285.1,610-628).
ggccacggcaactttagct

SEQ ID NO: 289220 - DNA, 19 bp, Homo sapiens
  siRNA target sequence for TNR (NM_003285.1,611-629).
gccacggcaactttagctt

SEQ ID NO: 289221 - DNA, 19 bp, Homo sapiens
  siRNA target sequence for TNR (NM_003285.1,612-630).
ccacggcaactttagcttt

SEQ ID NO: 289222 - DNA, 19 bp, Homo sapiens
  siRNA target sequence for TNR (NM_003285.1,658-676).
ggctggtttggcaagaatt

SEQ ID NO: 289223 - DNA, 19 bp, Homo sapiens
  siRNA target sequence for TNR (NM_003285.1,910-928).
gccaacggtacctgtttat

SEQ ID NO: 289224 - DNA, 19 bp, Homo sapiens
  siRNA target sequence for TNR (NM_003285.1,1133-1151).
cagtgacggaatatgtgat

SEQ ID NO: 289225 - DNA, 19 bp, Homo sapiens
  siRNA target sequence for TNR (NM_003285.1,1331-1349).
ctcctcaagggctacaatt

SEQ ID NO: 289226 - DNA, 19 bp, Homo sapiens
  siRNA target sequence for TNR (NM_003285.1,1413-1431).
gtgggaaatcagcttcatt

SEQ ID NO: 289227 - DNA, 19 bp, Homo sapiens
  siRNA target sequence for TNR (NM_003285.1,1440-1458).
caatgaagggggagtgatt

SEQ ID NO: 289228 - DNA, 19 bp, Homo sapiens
  siRNA target sequence for TNR (NM_003285.1,1472-1490).
gcgatgttacgtcctttaa

SEQ ID NO: 289229 - DNA, 19 bp, Homo sapiens
  siRNA target sequence for TNR (NM_003285.1,1512-1530).
ggaggaatacattgtcaat

SEQ ID NO: 289230 - DNA, 19 bp, Homo sapiens
  siRNA target sequence for TNR (NM_003285.1,1575-1593).
cagcgtctccacagtcatt

SEQ ID NO: 289231 - DNA, 19 bp, Homo sapiens
  siRNA target sequence for TNR (NM_003285.1,1661-1679).
ctcgagccaaagtcgattt

SEQ ID NO: 289232 - DNA, 19 bp, Homo sapiens
  siRNA target sequence for TNR (NM_003285.1,1664-1682).
gagccaaagtcgatttcat

SEQ ID NO: 289233 - DNA, 19 bp, Homo sapiens
  siRNA target sequence for TNR (NM_003285.1,1668-1686).
caaagtcgatttcattctt

SEQ ID NO: 289234 - DNA, 19 bp, Homo sapiens
  siRNA target sequence for TNR (NM_003285.1,1741-1759).
cctcccctgagccaatact

SEQ ID NO: 289235 - DNA, 19 bp, Homo sapiens
  siRNA target sequence for TNR (NM_003285.1,1837-1855).
gccaccactcagttcacaa

SEQ ID NO: 289236 - DNA, 19 bp, Homo sapiens
  siRNA target sequence for TNR (NM_003285.1,1912-1930).
gacctcgagtgggataaca

SEQ ID NO: 289237 - DNA, 19 bp, Homo sapiens
  siRNA target sequence for TNR (NM_003285.1,1970-1988).
ccctggcgggtgagcaata

SEQ ID NO: 289238 - DNA, 19 bp, Homo sapiens
  siRNA target sequence for TNR (NM_003285.1,1971-1989).
cctggcgggtgagcaatat

SEQ ID NO: 289239 - DNA, 19 bp, Homo sapiens
  siRNA target sequence for TNR (NM_003285.1,1974-1992).
ggcgggtgagcaatatcat

SEQ ID NO: 289240 - DNA, 19 bp, Homo sapiens
  siRNA target sequence for TNR (NM_003285.1,1976-1994).
cgggtgagcaatatcatga

SEQ ID NO: 289241 - DNA, 19 bp, Homo sapiens
  siRNA target sequence for TNR (NM_003285.1,2062-2080).
gagtatggagttggaatat

SEQ ID NO: 289242 - DNA, 19 bp, Homo sapiens
  siRNA target sequence for TNR (NM_003285.1,2075-2093).
gaatatctgccgtcatgaa

SEQ ID NO: 289243 - DNA, 19 bp, Homo sapiens
  siRNA target sequence for TNR (NM_003285.1,2221-2239).
gaccactaccgaattacct

SEQ ID NO: 289244 - DNA, 19 bp, Homo sapiens
  siRNA target sequence for TNR (NM_003285.1,2223-2241).
ccactaccgaattaccttt

SEQ ID NO: 289245 - DNA, 19 bp, Homo sapiens
  siRNA target sequence for TNR (NM_003285.1,2224-2242).
cactaccgaattaccttta

SEQ ID NO: 289246 - DNA, 19 bp, Homo sapiens
  siRNA target sequence for TNR (NM_003285.1,2283-2301).
ggacaggacctcatacaca

SEQ ID NO: 289247 - DNA, 19 bp, Homo sapiens
  siRNA target sequence for TNR (NM_003285.1,2289-2307).
gacctcatacacactaaca

SEQ ID NO: 289248 - DNA, 19 bp, Homo sapiens
  siRNA target sequence for TNR (NM_003285.1,2291-2309).
cctcatacacactaacaga

SEQ ID NO: 289249 - DNA, 19 bp, Homo sapiens
  siRNA target sequence for TNR (NM_003285.1,2292-2310).
ctcatacacactaacagat

SEQ ID NO: 289250 - DNA, 19 bp, Homo sapiens
  siRNA target sequence for TNR (NM_003285.1,2320-2338).
ggggcagagtacatcattt

SEQ ID NO: 289251 - DNA, 19 bp, Homo sapiens
  siRNA target sequence for TNR (NM_003285.1,2438-2456).
cctcctccagtgtgaacat

SEQ ID NO: 289252 - DNA, 19 bp, Homo sapiens
  siRNA target sequence for TNR (NM_003285.1,2478-2496).
cccagcagacagactcatt

SEQ ID NO: 289253 - DNA, 19 bp, Homo sapiens
  siRNA target sequence for TNR (NM_003285.1,2584-2602).
caaccagccacagagtata

SEQ ID NO: 289254 - DNA, 19 bp, Homo sapiens
  siRNA target sequence for TNR (NM_003285.1,2588-2606).
cagccacagagtatattgt

SEQ ID NO: 289255 - DNA, 19 bp, Homo sapiens
  siRNA target sequence for TNR (NM_003285.1,2590-2608).
gccacagagtatattgtga

SEQ ID NO: 289256 - DNA, 19 bp, Homo sapiens
  siRNA target sequence for TNR (NM_003285.1,2591-2609).
ccacagagtatattgtgaa

SEQ ID NO: 289257 - DNA, 19 bp, Homo sapiens
  siRNA target sequence for TNR (NM_003285.1,2657-2675).
ccatcaccacaggaattga

SEQ ID NO: 289258 - DNA, 19 bp, Homo sapiens
  siRNA target sequence for TNR (NM_003285.1,2658-2676).
catcaccacaggaattgat

SEQ ID NO: 289259 - DNA, 19 bp, Homo sapiens
  siRNA target sequence for TNR (NM_003285.1,2669-2687).
gaattgatcccccaaaaga

SEQ ID NO: 289260 - DNA, 19 bp, Homo sapiens
  siRNA target sequence for TNR (NM_003285.1,2754-2772).
cgattactaccgagtatca

SEQ ID NO: 289261 - DNA, 19 bp, Homo sapiens
  siRNA target sequence for TNR (NM_003285.1,2755-2773).
gattactaccgagtatcat

SEQ ID NO: 289262 - DNA, 19 bp, Homo sapiens
  siRNA target sequence for TNR (NM_003285.1,2760-2778).
ctaccgagtatcatatcga

SEQ ID NO: 289263 - DNA, 19 bp, Homo sapiens
  siRNA target sequence for TNR (NM_003285.1,2815-2833).
cccaacactgtgacagaat

SEQ ID NO: 289264 - DNA, 19 bp, Homo sapiens
  siRNA target sequence for TNR (NM_003285.1,2816-2834).
ccaacactgtgacagaatt

SEQ ID NO: 289265 - DNA, 19 bp, Homo sapiens
  siRNA target sequence for TNR (NM_003285.1,2853-2871).
cccagctaccgaatacgaa

SEQ ID NO: 289266 - DNA, 19 bp, Homo sapiens
  siRNA target sequence for TNR (NM_003285.1,2854-2872).
ccagctaccgaatacgaaa

SEQ ID NO: 289267 - DNA, 19 bp, Homo sapiens
  siRNA target sequence for TNR (NM_003285.1,2855-2873).
cagctaccgaatacgaaat

SEQ ID NO: 289268 - DNA, 19 bp, Homo sapiens
  siRNA target sequence for TNR (NM_003285.1,2857-2875).
gctaccgaatacgaaatca

SEQ ID NO: 289269 - DNA, 19 bp, Homo sapiens
  siRNA target sequence for TNR (NM_003285.1,2902-2920).
gaaagcgagcgcatctgta

SEQ ID NO: 289270 - DNA, 19 bp, Homo sapiens
  siRNA target sequence for TNR (NM_003285.1,2907-2925).
cgagcgcatctgtactctt

SEQ ID NO: 289271 - DNA, 19 bp, Homo sapiens
  siRNA target sequence for TNR (NM_003285.1,2943-2961).
caaccctgtggatctgatt

SEQ ID NO: 289272 - DNA, 19 bp, Homo sapiens
  siRNA target sequence for TNR (NM_003285.1,2952-2970).
ggatctgattgctaccaat

SEQ ID NO: 289273 - DNA, 19 bp, Homo sapiens
  siRNA target sequence for TNR (NM_003285.1,2953-2971).
gatctgattgctaccaata

SEQ ID NO: 289274 - DNA, 19 bp, Homo sapiens
  siRNA target sequence for TNR (NM_003285.1,2956-2974).
ctgattgctaccaatatca

SEQ ID NO: 289275 - DNA, 19 bp, Homo sapiens
  siRNA target sequence for TNR (NM_003285.1,2958-2976).
gattgctaccaatatcact

SEQ ID NO: 289276 - DNA, 19 bp, Homo sapiens
  siRNA target sequence for TNR (NM_003285.1,3021-3039).
ggagaactacgtcattgtt

SEQ ID NO: 289277 - DNA, 19 bp, Homo sapiens
  siRNA target sequence for TNR (NM_003285.1,3027-3045).
ctacgtcattgttcttaca

SEQ ID NO: 289278 - DNA, 19 bp, Homo sapiens
  siRNA target sequence for TNR (NM_003285.1,3271-3289).
cccagggcagagattgaaa

SEQ ID NO: 289279 - DNA, 19 bp, Homo sapiens
  siRNA target sequence for TNR (NM_003285.1,3280-3298).
gagattgaaaattatgtct

SEQ ID NO: 289280 - DNA, 19 bp, Homo sapiens
  siRNA target sequence for TNR (NM_003285.1,3323-3341).
gccgcaaggagctgattgt

SEQ ID NO: 289281 - DNA, 19 bp, Homo sapiens
  siRNA target sequence for TNR (NM_003285.1,3555-3573).
ggagctgagccagaaatta

SEQ ID NO: 289282 - DNA, 19 bp, Homo sapiens
  siRNA target sequence for TNR (NM_003285.1,3574-3592).
caagtgtactgtgatatga

SEQ ID NO: 289283 - DNA, 19 bp, Homo sapiens
  siRNA target sequence for TNR (NM_003285.1,3633-3651).
gaatggccaaactgatttt

SEQ ID NO: 289284 - DNA, 19 bp, Homo sapiens
  siRNA target sequence for TNR (NM_003285.1,3712-3730).
gggctggacaatatacaca

SEQ ID NO: 289285 - DNA, 19 bp, Homo sapiens
  siRNA target sequence for TNR (NM_003285.1,3876-3894).
ggactccctcagctatcat

SEQ ID NO: 289286 - DNA, 19 bp, Homo sapiens
  siRNA target sequence for TNR (NM_003285.1,3967-3985).
ggagcatggtggtataaga

SEQ ID NO: 289287 - DNA, 19 bp, Homo sapiens
  siRNA target sequence for TNR (NM_003285.1,4039-4057).
ggcatcaactggtaccatt

SEQ ID NO: 289288 - DNA, 19 bp, Homo sapiens
  siRNA target sequence for MYBPH (NM_004997.1,71-89).
gaggagaccgcatctgaat

SEQ ID NO: 289289 - DNA, 19 bp, Homo sapiens
  siRNA target sequence for MYBPH (NM_004997.1,118-136).
cggagaagtggcagtatca

SEQ ID NO: 289290 - DNA, 19 bp, Homo sapiens
  siRNA target sequence for MYBPH (NM_004997.1,792-810).
ccaaggcagtcattgacat

SEQ ID NO: 289291 - DNA, 19 bp, Homo sapiens
  siRNA target sequence for MYBPH (NM_004997.1,1044-1062).
gggtcttctcagaaaacct

SEQ ID NO: 289292 - DNA, 19 bp, Homo sapiens
  siRNA target sequence for MYBPH (NM_004997.1,1131-1149).
ccaaacctaaagggtttat

SEQ ID NO: 289293 - DNA, 19 bp, Homo sapiens
  siRNA target sequence for MYBPH (NM_004997.1,1132-1150).
caaacctaaagggtttatt

SEQ ID NO: 289294 - DNA, 19 bp, Homo sapiens
  siRNA target sequence for MYBPH (NM_004997.1,1329-1347).
gcgtctgcaccctagagat

SEQ ID NO: 289295 - DNA, 19 bp, Homo sapiens
  siRNA target sequence for MYBPH (NM_004997.1,1351-1369).
gaaacccagcccctttgat

SEQ ID NO: 289296 - DNA, 19 bp, Homo sapiens
  siRNA target sequence for MYOM1 (NM_003803.1,362-380).
ggcagtctgtggtttccaa

SEQ ID NO: 289297 - DNA, 19 bp, Homo sapiens
  siRNA target sequence for MYOM1 (NM_003803.1,384-402).
ggccacatccgctcttcaa

SEQ ID NO: 289298 - DNA, 19 bp, Homo sapiens
  siRNA target sequence for MYOM1 (NM_003803.1,426-444).
gtcaaggaaagttgtgatt

SEQ ID NO: 289299 - DNA, 19 bp, Homo sapiens
  siRNA target sequence for MYOM1 (NM_003803.1,467-485).
ccctgaggaaaacattaga

SEQ ID NO: 289300 - DNA, 19 bp, Homo sapiens
  siRNA target sequence for MYOM1 (NM_003803.1,529-547).
ctccatgctcctgagttta

SEQ ID NO: 289301 - DNA, 19 bp, Homo sapiens
  siRNA target sequence for MYOM1 (NM_003803.1,532-550).
catgctcctgagtttatca

SEQ ID NO: 289302 - DNA, 19 bp, Homo sapiens
  siRNA target sequence for MYOM1 (NM_003803.1,535-553).
gctcctgagtttatcatta

SEQ ID NO: 289303 - DNA, 19 bp, Homo sapiens
  siRNA target sequence for MYOM1 (NM_003803.1,536-554).
ctcctgagtttatcattaa

SEQ ID NO: 289304 - DNA, 19 bp, Homo sapiens
  siRNA target sequence for MYOM1 (NM_003803.1,625-643).
cctcgtgtcacgtggtata

SEQ ID NO: 289305 - DNA, 19 bp, Homo sapiens
  siRNA target sequence for MYOM1 (NM_003803.1,626-644).
ctcgtgtcacgtggtataa

SEQ ID NO: 289306 - DNA, 19 bp, Homo sapiens
  siRNA target sequence for MYOM1 (NM_003803.1,628-646).
cgtgtcacgtggtataaaa

SEQ ID NO: 289307 - DNA, 19 bp, Homo sapiens
  siRNA target sequence for MYOM1 (NM_003803.1,677-695).
ctggaaagtatattattga

SEQ ID NO: 289308 - DNA, 19 bp, Homo sapiens
  siRNA target sequence for MYOM1 (NM_003803.1,711-729).
gcacactctggagattaat

SEQ ID NO: 289309 - DNA, 19 bp, Homo sapiens
  siRNA target sequence for MYOM1 (NM_003803.1,762-780).
ggcctcggcgatgaatgtt

SEQ ID NO: 289310 - DNA, 19 bp, Homo sapiens
  siRNA target sequence for MYOM1 (NM_003803.1,763-781).
gcctcggcgatgaatgtta

SEQ ID NO: 289311 - DNA, 19 bp, Homo sapiens
  siRNA target sequence for MYOM1 (NM_003803.1,764-782).
cctcggcgatgaatgttaa

SEQ ID NO: 289312 - DNA, 19 bp, Homo sapiens
  siRNA target sequence for MYOM1 (NM_003803.1,765-783).
ctcggcgatgaatgttaaa

SEQ ID NO: 289313 - DNA, 19 bp, Homo sapiens
  siRNA target sequence for MYOM1 (NM_003803.1,768-786).
ggcgatgaatgttaaagga

SEQ ID NO: 289314 - DNA, 19 bp, Homo sapiens
  siRNA target sequence for MYOM1 (NM_003803.1,787-805).
gagctttcggcatatgctt

SEQ ID NO: 289315 - DNA, 19 bp, Homo sapiens
  siRNA target sequence for MYOM1 (NM_003803.1,821-839).
ggtataagggagagtttga

SEQ ID NO: 289316 - DNA, 19 bp, Homo sapiens
  siRNA target sequence for MYOM1 (NM_003803.1,822-840).
gtataagggagagtttgat

SEQ ID NO: 289317 - DNA, 19 bp, Homo sapiens
  siRNA target sequence for MYOM1 (NM_003803.1,886-904).
ggtgtgaccccatatggtt

SEQ ID NO: 289318 - DNA, 19 bp, Homo sapiens
  siRNA target sequence for MYOM1 (NM_003803.1,887-905).
gtgtgaccccatatggtta

SEQ ID NO: 289319 - DNA, 19 bp, Homo sapiens
  siRNA target sequence for MYOM1 (NM_003803.1,891-909).
gaccccatatggttatgca

SEQ ID NO: 289320 - DNA, 19 bp, Homo sapiens
  siRNA target sequence for MYOM1 (NM_003803.1,921-939).
gatccactttgatgacaaa

SEQ ID NO: 289321 - DNA, 19 bp, Homo sapiens
  siRNA target sequence for MYOM1 (NM_003803.1,994-1012).
gtcatcactcctgaaatta

SEQ ID NO: 289322 - DNA, 19 bp, Homo sapiens
  siRNA target sequence for MYOM1 (NM_003803.1,999-1017).
cactcctgaaattaaacat

SEQ ID NO: 289323 - DNA, 19 bp, Homo sapiens
  siRNA target sequence for MYOM1 (NM_003803.1,1067-1085).
caaaatgggtgcaaacact

SEQ ID NO: 289324 - DNA, 19 bp, Homo sapiens
  siRNA target sequence for MYOM1 (NM_003803.1,1099-1117).
cgggcaacgctgacatttt

SEQ ID NO: 289325 - DNA, 19 bp, Homo sapiens
  siRNA target sequence for MYOM1 (NM_003803.1,1157-1175).
gtgtacggatgggagaata

SEQ ID NO: 289326 - DNA, 19 bp, Homo sapiens
  siRNA target sequence for MYOM1 (NM_003803.1,1314-1332).
cgatggagggagtcctatt

SEQ ID NO: 289327 - DNA, 19 bp, Homo sapiens
  siRNA target sequence for MYOM1 (NM_003803.1,1325-1343).
gtcctattctcggatattt

SEQ ID NO: 289328 - DNA, 19 bp, Homo sapiens
  siRNA target sequence for MYOM1 (NM_003803.1,1336-1354).
ggatattttattgataagt

SEQ ID NO: 289329 - DNA, 19 bp, Homo sapiens
  siRNA target sequence for MYOM1 (NM_003803.1,1431-1449).
gatcgaaggtcgttcctat

SEQ ID NO: 289330 - DNA, 19 bp, Homo sapiens
  siRNA target sequence for MYOM1 (NM_003803.1,1435-1453).
gaaggtcgttcctatatct

SEQ ID NO: 289331 - DNA, 19 bp, Homo sapiens
  siRNA target sequence for MYOM1 (NM_003803.1,1699-1717).
ggtcatgagggcattatgt

SEQ ID NO: 289332 - DNA, 19 bp, Homo sapiens
  siRNA target sequence for MYOM1 (NM_003803.1,1700-1718).
gtcatgagggcattatgta

SEQ ID NO: 289333 - DNA, 19 bp, Homo sapiens
  siRNA target sequence for MYOM1 (NM_003803.1,1702-1720).
catgagggcattatgtact

SEQ ID NO: 289334 - DNA, 19 bp, Homo sapiens
  siRNA target sequence for MYOM1 (NM_003803.1,1816-1834).
gaggggaaatcctactgtt

SEQ ID NO: 289335 - DNA, 19 bp, Homo sapiens
  siRNA target sequence for MYOM1 (NM_003803.1,1836-1854).
ccgtgtccgctgttctaat

SEQ ID NO: 289336 - DNA, 19 bp, Homo sapiens
  siRNA target sequence for MYOM1 (NM_003803.1,1837-1855).
cgtgtccgctgttctaatt

SEQ ID NO: 289337 - DNA, 19 bp, Homo sapiens
  siRNA target sequence for MYOM1 (NM_003803.1,1895-1913).
ctgtggtaggggacaaact

SEQ ID NO: 289338 - DNA, 19 bp, Homo sapiens
  siRNA target sequence for MYOM1 (NM_003803.1,1899-1917).
ggtaggggacaaacttgat

SEQ ID NO: 289339 - DNA, 19 bp, Homo sapiens
  siRNA target sequence for MYOM1 (NM_003803.1,1900-1918).
gtaggggacaaacttgata

SEQ ID NO: 289340 - DNA, 19 bp, Homo sapiens
  siRNA target sequence for MYOM1 (NM_003803.1,1980-1998).
gtgggaggagtccaaagat

SEQ ID NO: 289341 - DNA, 19 bp, Homo sapiens
  siRNA target sequence for MYOM1 (NM_003803.1,2007-2025).
gctggtcgggtactacata

SEQ ID NO: 289342 - DNA, 19 bp, Homo sapiens
  siRNA target sequence for MYOM1 (NM_003803.1,2155-2173).
gctggacttagtgaatatt

SEQ ID NO: 289343 - DNA, 19 bp, Homo sapiens
  siRNA target sequence for MYOM1 (NM_003803.1,2238-2256).
cacctgtcttgaaagtttt

SEQ ID NO: 289344 - DNA, 19 bp, Homo sapiens
  siRNA target sequence for MYOM1 (NM_003803.1,2331-2349).
ctatcgcgaggtcattgat

SEQ ID NO: 289345 - DNA, 19 bp, Homo sapiens
  siRNA target sequence for MYOM1 (NM_003803.1,2347-2365).
gatggggtaccaggaaaat

SEQ ID NO: 289346 - DNA, 19 bp, Homo sapiens
  siRNA target sequence for MYOM1 (NM_003803.1,2350-2368).
ggggtaccaggaaaatgga

SEQ ID NO: 289347 - DNA, 19 bp, Homo sapiens
  siRNA target sequence for MYOM1 (NM_003803.1,2398-2416).
gaggcatacaagattagca

SEQ ID NO: 289348 - DNA, 19 bp, Homo sapiens
  siRNA target sequence for MYOM1 (NM_003803.1,2486-2504).
ccgcagtaagcgaatgctt

SEQ ID NO: 289349 - DNA, 19 bp, Homo sapiens
  siRNA target sequence for MYOM1 (NM_003803.1,2495-2513).
gcgaatgcttcaaatgtga

SEQ ID NO: 289350 - DNA, 19 bp, Homo sapiens
  siRNA target sequence for MYOM1 (NM_003803.1,2633-2651).
gttacttcgtggacttgaa

SEQ ID NO: 289351 - DNA, 19 bp, Homo sapiens
  siRNA target sequence for MYOM1 (NM_003803.1,2683-2701).
ctcaatgaggcggctatta

SEQ ID NO: 289352 - DNA, 19 bp, Homo sapiens
  siRNA target sequence for MYOM1 (NM_003803.1,2685-2703).
caatgaggcggctattaaa

SEQ ID NO: 289353 - DNA, 19 bp, Homo sapiens
  siRNA target sequence for MYOM1 (NM_003803.1,2756-2774).
gtgttcgagccataaacca

SEQ ID NO: 289354 - DNA, 19 bp, Homo sapiens
  siRNA target sequence for MYOM1 (NM_003803.1,2869-2887).
ggagtcatttcattgaact

SEQ ID NO: 289355 - DNA, 19 bp, Homo sapiens
  siRNA target sequence for MYOM1 (NM_003803.1,2870-2888).
gagtcatttcattgaactt

SEQ ID NO: 289356 - DNA, 19 bp, Homo sapiens
  siRNA target sequence for MYOM1 (NM_003803.1,2924-2942).
cctggtccaaagattatgt

SEQ ID NO: 289357 - DNA, 19 bp, Homo sapiens
  siRNA target sequence for MYOM1 (NM_003803.1,2952-2970).
ggactctccacgattggaa

SEQ ID NO: 289358 - DNA, 19 bp, Homo sapiens
  siRNA target sequence for MYOM1 (NM_003803.1,3055-3073).
gacactgatggaatagcat

SEQ ID NO: 289359 - DNA, 19 bp, Homo sapiens
  siRNA target sequence for MYOM1 (NM_003803.1,3071-3089).
catcaagctacttaataga

SEQ ID NO: 289360 - DNA, 19 bp, Homo sapiens
  siRNA target sequence for MYOM1 (NM_003803.1,3074-3092).
caagctacttaatagatga

SEQ ID NO: 289361 - DNA, 19 bp, Homo sapiens
  siRNA target sequence for MYOM1 (NM_003803.1,3091-3109).
gaggaagaattgaaacgtt

SEQ ID NO: 289362 - DNA, 19 bp, Homo sapiens
  siRNA target sequence for MYOM1 (NM_003803.1,3138-3156).
cccaactgtcccagttaaa

SEQ ID NO: 289363 - DNA, 19 bp, Homo sapiens
  siRNA target sequence for MYOM1 (NM_003803.1,3158-3176).
cagagttggcagttgaaat

SEQ ID NO: 289364 - DNA, 19 bp, Homo sapiens
  siRNA target sequence for MYOM1 (NM_003803.1,3187-3205).
ggccaggtccggttttgga

SEQ ID NO: 289365 - DNA, 19 bp, Homo sapiens
  siRNA target sequence for MYOM1 (NM_003803.1,3224-3242).
ctggcaatgccaaagtcaa

SEQ ID NO: 289366 - DNA, 19 bp, Homo sapiens
  siRNA target sequence for MYOM1 (NM_003803.1,3275-3293).
gcccgaaatataaaatgca

SEQ ID NO: 289367 - DNA, 19 bp, Homo sapiens
  siRNA target sequence for MYOM1 (NM_003803.1,3276-3294).
cccgaaatataaaatgcat

SEQ ID NO: 289368 - DNA, 19 bp, Homo sapiens
  siRNA target sequence for MYOM1 (NM_003803.1,3277-3295).
ccgaaatataaaatgcata

SEQ ID NO: 289369 - DNA, 19 bp, Homo sapiens
  siRNA target sequence for MYOM1 (NM_003803.1,3291-3309).
gcatattgaccgaaacact

SEQ ID NO: 289370 - DNA, 19 bp, Homo sapiens
  siRNA target sequence for MYOM1 (NM_003803.1,3308-3326).
ctggcatcatcgaaatgtt

SEQ ID NO: 289371 - DNA, 19 bp, Homo sapiens
  siRNA target sequence for MYOM1 (NM_003803.1,3412-3430).
ctcgttggagatgttttca

SEQ ID NO: 289372 - DNA, 19 bp, Homo sapiens
  siRNA target sequence for MYOM1 (NM_003803.1,3414-3432).
cgttggagatgttttcaaa

SEQ ID NO: 289373 - DNA, 19 bp, Homo sapiens
  siRNA target sequence for MYOM1 (NM_003803.1,3451-3469).
gaattccagcggcaagaat

SEQ ID NO: 289374 - DNA, 19 bp, Homo sapiens
  siRNA target sequence for MYOM1 (NM_003803.1,3485-3503).
gtcctcactttgttgagta

SEQ ID NO: 289375 - DNA, 19 bp, Homo sapiens
  siRNA target sequence for MYOM1 (NM_003803.1,3487-3505).
cctcactttgttgagtatt

SEQ ID NO: 289376 - DNA, 19 bp, Homo sapiens
  siRNA target sequence for MYOM1 (NM_003803.1,3488-3506).
ctcactttgttgagtattt

SEQ ID NO: 289377 - DNA, 19 bp, Homo sapiens
  siRNA target sequence for MYOM1 (NM_003803.1,3548-3566).
gcaaggtggcaaatattaa

SEQ ID NO: 289378 - DNA, 19 bp, Homo sapiens
  siRNA target sequence for MYOM1 (NM_003803.1,3641-3659).
gtatatgtaccctgcttat

SEQ ID NO: 289379 - DNA, 19 bp, Homo sapiens
  siRNA target sequence for MYOM1 (NM_003803.1,3655-3673).
cttataacagagttttcca

SEQ ID NO: 289380 - DNA, 19 bp, Homo sapiens
  siRNA target sequence for MYOM1 (NM_003803.1,3686-3704).
ggatttatgaagttatcct

SEQ ID NO: 289381 - DNA, 19 bp, Homo sapiens
  siRNA target sequence for MYOM1 (NM_003803.1,3763-3781).
gaactgatgatggaagtat

SEQ ID NO: 289382 - DNA, 19 bp, Homo sapiens
  siRNA target sequence for MYOM1 (NM_003803.1,3771-3789).
gatggaagtatgcaaaaaa

SEQ ID NO: 289383 - DNA, 19 bp, Homo sapiens
  siRNA target sequence for MYOM1 (NM_003803.1,3830-3848).
ccgagggcatccaactgta

SEQ ID NO: 289384 - DNA, 19 bp, Homo sapiens
  siRNA target sequence for MYOM1 (NM_003803.1,3914-3932).
ggtactcagacagagttaa

SEQ ID NO: 289385 - DNA, 19 bp, Homo sapiens
  siRNA target sequence for MYOM1 (NM_003803.1,3973-3991).
gagcccaccccgaatgaca

SEQ ID NO: 289386 - DNA, 19 bp, Homo sapiens
  siRNA target sequence for MYOM1 (NM_003803.1,4053-4071).
ctctggacaagcatacgat

SEQ ID NO: 289387 - DNA, 19 bp, Homo sapiens
  siRNA target sequence for MYOM1 (NM_003803.1,4110-4128).
cattgccgagaaaaatcgt

SEQ ID NO: 289388 - DNA, 19 bp, Homo sapiens
  siRNA target sequence for MYOM1 (NM_003803.1,4170-4188).
ggaggggaaggcccttaat

SEQ ID NO: 289389 - DNA, 19 bp, Homo sapiens
  siRNA target sequence for MYOM1 (NM_003803.1,4174-4192).
gggaaggcccttaatctca

SEQ ID NO: 289390 - DNA, 19 bp, Homo sapiens
  siRNA target sequence for MYOM1 (NM_003803.1,4291-4309).
gggaggaccgcgtacttca

SEQ ID NO: 289391 - DNA, 19 bp, Homo sapiens
  siRNA target sequence for MYOM1 (NM_003803.1,4328-4346).
ccgctgactcgggcaaata

SEQ ID NO: 289392 - DNA, 19 bp, Homo sapiens
  siRNA target sequence for MYOM1 (NM_003803.1,4353-4371).
ggttgtgaagaacaagtat

SEQ ID NO: 289393 - DNA, 19 bp, Homo sapiens
  siRNA target sequence for MYOM2 (NM_003970.1,97-115).
gaccagtcctaccgtaata

SEQ ID NO: 289394 - DNA, 19 bp, Homo sapiens
  siRNA target sequence for MYOM2 (NM_003970.1,99-117).
ccagtcctaccgtaatatt

SEQ ID NO: 289395 - DNA, 19 bp, Homo sapiens
  siRNA target sequence for MYOM2 (NM_003970.1,102-120).
gtcctaccgtaatattcaa

SEQ ID NO: 289396 - DNA, 19 bp, Homo sapiens
  siRNA target sequence for MYOM2 (NM_003970.1,125-143).
ggtacctgctggacgaata

SEQ ID NO: 289397 - DNA, 19 bp, Homo sapiens
  siRNA target sequence for MYOM2 (NM_003970.1,135-153).
ggacgaatatgcgtcaaaa

SEQ ID NO: 289398 - DNA, 19 bp, Homo sapiens
  siRNA target sequence for MYOM2 (NM_003970.1,136-154).
gacgaatatgcgtcaaaaa

SEQ ID NO: 289399 - DNA, 19 bp, Homo sapiens
  siRNA target sequence for MYOM2 (NM_003970.1,570-588).
cttcaccgtgcaaggattt

SEQ ID NO: 289400 - DNA, 19 bp, Homo sapiens
  siRNA target sequence for MYOM2 (NM_003970.1,638-656).
cggctgaaccgggaaagta

SEQ ID NO: 289401 - DNA, 19 bp, Homo sapiens
  siRNA target sequence for MYOM2 (NM_003970.1,640-658).
gctgaaccgggaaagtaca

SEQ ID NO: 289402 - DNA, 19 bp, Homo sapiens
  siRNA target sequence for MYOM2 (NM_003970.1,712-730).
gacgacactgcgacatact

SEQ ID NO: 289403 - DNA, 19 bp, Homo sapiens
  siRNA target sequence for MYOM2 (NM_003970.1,714-732).
cgacactgcgacatactca

SEQ ID NO: 289404 - DNA, 19 bp, Homo sapiens
  siRNA target sequence for MYOM2 (NM_003970.1,797-815).
ggggagacgaggaaccatt

SEQ ID NO: 289405 - DNA, 19 bp, Homo sapiens
  siRNA target sequence for MYOM2 (NM_003970.1,823-841).
gtgggactcccgattggat

SEQ ID NO: 289406 - DNA, 19 bp, Homo sapiens
  siRNA target sequence for MYOM2 (NM_003970.1,843-861).
gcccctgtcatcgatgatt

SEQ ID NO: 289407 - DNA, 19 bp, Homo sapiens
  siRNA target sequence for MYOM2 (NM_003970.1,871-889).
cacttcgacgtccagtttt

SEQ ID NO: 289408 - DNA, 19 bp, Homo sapiens
  siRNA target sequence for MYOM2 (NM_003970.1,1283-1301).
gccccgtcatgggctattt

SEQ ID NO: 289409 - DNA, 19 bp, Homo sapiens
  siRNA target sequence for MYOM2 (NM_003970.1,1284-1302).
ccccgtcatgggctatttt

SEQ ID NO: 289410 - DNA, 19 bp, Homo sapiens
  siRNA target sequence for MYOM2 (NM_003970.1,1286-1304).
ccgtcatgggctattttgt

SEQ ID NO: 289411 - DNA, 19 bp, Homo sapiens
  siRNA target sequence for MYOM2 (NM_003970.1,1313-1331).
gtgaagtaggaacgaataa

SEQ ID NO: 289412 - DNA, 19 bp, Homo sapiens
  siRNA target sequence for MYOM2 (NM_003970.1,1348-1366).
gatgcaccggtgaaaatct

SEQ ID NO: 289413 - DNA, 19 bp, Homo sapiens
  siRNA target sequence for MYOM2 (NM_003970.1,1354-1372).
ccggtgaaaatctgcaaat

SEQ ID NO: 289414 - DNA, 19 bp, Homo sapiens
  siRNA target sequence for MYOM2 (NM_003970.1,1355-1373).
cggtgaaaatctgcaaata

SEQ ID NO: 289415 - DNA, 19 bp, Homo sapiens
  siRNA target sequence for MYOM2 (NM_003970.1,1502-1520).
ggttacaagccgttcattt

SEQ ID NO: 289416 - DNA, 19 bp, Homo sapiens
  siRNA target sequence for MYOM2 (NM_003970.1,1608-1626).
cgagatcagcagaaactat

SEQ ID NO: 289417 - DNA, 19 bp, Homo sapiens
  siRNA target sequence for MYOM2 (NM_003970.1,1666-1684).
gacccgctcatgtacttca

SEQ ID NO: 289418 - DNA, 19 bp, Homo sapiens
  siRNA target sequence for MYOM2 (NM_003970.1,1751-1769).
cgagatatgccgtgtttga

SEQ ID NO: 289419 - DNA, 19 bp, Homo sapiens
  siRNA target sequence for MYOM2 (NM_003970.1,1773-1791).
catggaagggaagtcttat

SEQ ID NO: 289420 - DNA, 19 bp, Homo sapiens
  siRNA target sequence for MYOM2 (NM_003970.1,1831-1849).
gaaccttcggagataacgt

SEQ ID NO: 289421 - DNA, 19 bp, Homo sapiens
  siRNA target sequence for MYOM2 (NM_003970.1,1941-1959).
gtgggaccgacctaagcat

SEQ ID NO: 289422 - DNA, 19 bp, Homo sapiens
  siRNA target sequence for MYOM2 (NM_003970.1,2056-2074).
gtggtgcacggcttaacca

SEQ ID NO: 289423 - DNA, 19 bp, Homo sapiens
  siRNA target sequence for MYOM2 (NM_003970.1,2075-2093).
cgggagagcagtacatctt

SEQ ID NO: 289424 - DNA, 19 bp, Homo sapiens
  siRNA target sequence for MYOM2 (NM_003970.1,2137-2155).
caggaatcagacgtcataa

SEQ ID NO: 289425 - DNA, 19 bp, Homo sapiens
  siRNA target sequence for MYOM2 (NM_003970.1,2237-2255).
gctggaaggtcccgaaatt

SEQ ID NO: 289426 - DNA, 19 bp, Homo sapiens
  siRNA target sequence for MYOM2 (NM_003970.1,2241-2259).
gaaggtcccgaaattcagt

SEQ ID NO: 289427 - DNA, 19 bp, Homo sapiens
  siRNA target sequence for MYOM2 (NM_003970.1,2286-2304).
cctggacaagcgtgaagtt

SEQ ID NO: 289428 - DNA, 19 bp, Homo sapiens
  siRNA target sequence for MYOM2 (NM_003970.1,2340-2358).
cagcaaaccgacaatccta

SEQ ID NO: 289429 - DNA, 19 bp, Homo sapiens
  siRNA target sequence for MYOM2 (NM_003970.1,2381-2399).
gctcactctacgagttcaa

SEQ ID NO: 289430 - DNA, 19 bp, Homo sapiens
  siRNA target sequence for MYOM2 (NM_003970.1,2382-2400).
ctcactctacgagttcaaa

SEQ ID NO: 289431 - DNA, 19 bp, Homo sapiens
  siRNA target sequence for MYOM2 (NM_003970.1,2443-2461).
cccagtgagcacttcaagt

SEQ ID NO: 289432 - DNA, 19 bp, Homo sapiens
  siRNA target sequence for MYOM2 (NM_003970.1,2571-2589).
cagccctgtttctggatat

SEQ ID NO: 289433 - DNA, 19 bp, Homo sapiens
  siRNA target sequence for MYOM2 (NM_003970.1,2576-2594).
ctgtttctggatatttcgt

SEQ ID NO: 289434 - DNA, 19 bp, Homo sapiens
  siRNA target sequence for MYOM2 (NM_003970.1,2703-2721).
cagggtccgggcagtcaat

SEQ ID NO: 289435 - DNA, 19 bp, Homo sapiens
  siRNA target sequence for MYOM2 (NM_003970.1,2707-2725).
gtccgggcagtcaatgcaa

SEQ ID NO: 289436 - DNA, 19 bp, Homo sapiens
  siRNA target sequence for MYOM2 (NM_003970.1,2709-2727).
ccgggcagtcaatgcaaat

SEQ ID NO: 289437 - DNA, 19 bp, Homo sapiens
  siRNA target sequence for MYOM2 (NM_003970.1,2938-2956).
cactccaagctgtacttaa

SEQ ID NO: 289438 - DNA, 19 bp, Homo sapiens
  siRNA target sequence for MYOM2 (NM_003970.1,2991-3009).
cgtgtctgtaagtgataca

SEQ ID NO: 289439 - DNA, 19 bp, Homo sapiens
  siRNA target sequence for MYOM2 (NM_003970.1,3012-3030).
cggagtgtcctccagtttt

SEQ ID NO: 289440 - DNA, 19 bp, Homo sapiens
  siRNA target sequence for MYOM2 (NM_003970.1,3060-3078).
gatggcattgagcaatgaa

SEQ ID NO: 289441 - DNA, 19 bp, Homo sapiens
  siRNA target sequence for MYOM2 (NM_003970.1,3063-3081).
ggcattgagcaatgaaata

SEQ ID NO: 289442 - DNA, 19 bp, Homo sapiens
  siRNA target sequence for MYOM2 (NM_003970.1,3100-3118).
ctgaaatcggaattagctt

SEQ ID NO: 289443 - DNA, 19 bp, Homo sapiens
  siRNA target sequence for MYOM2 (NM_003970.1,3107-3125).
cggaattagcttatgagat

SEQ ID NO: 289444 - DNA, 19 bp, Homo sapiens
  siRNA target sequence for MYOM2 (NM_003970.1,3109-3127).
gaattagcttatgagattt

SEQ ID NO: 289445 - DNA, 19 bp, Homo sapiens
  siRNA target sequence for MYOM2 (NM_003970.1,3156-3174).
ccaggctgagcacttatca

SEQ ID NO: 289446 - DNA, 19 bp, Homo sapiens
  siRNA target sequence for MYOM2 (NM_003970.1,3178-3196).
gatgccagctaccgattta

SEQ ID NO: 289447 - DNA, 19 bp, Homo sapiens
  siRNA target sequence for MYOM2 (NM_003970.1,3181-3199).
gccagctaccgatttatta

SEQ ID NO: 289448 - DNA, 19 bp, Homo sapiens
  siRNA target sequence for MYOM2 (NM_003970.1,3185-3203).
gctaccgatttattattaa

SEQ ID NO: 289449 - DNA, 19 bp, Homo sapiens
  siRNA target sequence for MYOM2 (NM_003970.1,3222-3240).
cagcgagatacacagaatt

SEQ ID NO: 289450 - DNA, 19 bp, Homo sapiens
  siRNA target sequence for MYOM2 (NM_003970.1,3273-3291).
ggtgatggatcgatttagt

SEQ ID NO: 289451 - DNA, 19 bp, Homo sapiens
  siRNA target sequence for MYOM2 (NM_003970.1,3274-3292).
gtgatggatcgatttagta

SEQ ID NO: 289452 - DNA, 19 bp, Homo sapiens
  siRNA target sequence for MYOM2 (NM_003970.1,3276-3294).
gatggatcgatttagtatt

SEQ ID NO: 289453 - DNA, 19 bp, Homo sapiens
  siRNA target sequence for MYOM2 (NM_003970.1,3279-3297).
ggatcgatttagtattgaa

SEQ ID NO: 289454 - DNA, 19 bp, Homo sapiens
  siRNA target sequence for MYOM2 (NM_003970.1,3280-3298).
gatcgatttagtattgaaa

SEQ ID NO: 289455 - DNA, 19 bp, Homo sapiens
  siRNA target sequence for MYOM2 (NM_003970.1,3308-3326).
cctacactgtgcagattca

SEQ ID NO: 289456 - DNA, 19 bp, Homo sapiens
  siRNA target sequence for MYOM2 (NM_003970.1,3673-3691).
gatgtgtccatccttgaaa

SEQ ID NO: 289457 - DNA, 19 bp, Homo sapiens
  siRNA target sequence for MYOM2 (NM_003970.1,3790-3808).
cgacttcagtgtttcatga

SEQ ID NO: 289458 - DNA, 19 bp, Homo sapiens
  siRNA target sequence for MYOM2 (NM_003970.1,3793-3811).
cttcagtgtttcatgaagt

SEQ ID NO: 289459 - DNA, 19 bp, Homo sapiens
  siRNA target sequence for MYOM2 (NM_003970.1,3839-3857).
ggtgtcacaaagatgctaa

SEQ ID NO: 289460 - DNA, 19 bp, Homo sapiens
  siRNA target sequence for MYOM2 (NM_003970.1,3844-3862).
cacaaagatgctaagatct

SEQ ID NO: 289461 - DNA, 19 bp, Homo sapiens
  siRNA target sequence for MYOM2 (NM_003970.1,3905-3923).
cttggctgcagatatgtga

SEQ ID NO: 289462 - DNA, 19 bp, Homo sapiens
  siRNA target sequence for MYOM2 (NM_003970.1,3999-4017).
cctgtccggacaagctttt

SEQ ID NO: 289463 - DNA, 19 bp, Homo sapiens
  siRNA target sequence for MYOM2 (NM_003970.1,4002-4020).
gtccggacaagcttttgat

SEQ ID NO: 289464 - DNA, 19 bp, Homo sapiens
  siRNA target sequence for MYOM2 (NM_003970.1,4004-4022).
ccggacaagcttttgatga

SEQ ID NO: 289465 - DNA, 19 bp, Homo sapiens
  siRNA target sequence for MYOM2 (NM_003970.1,4005-4023).
cggacaagcttttgatgaa

SEQ ID NO: 289466 - DNA, 19 bp, Homo sapiens
  siRNA target sequence for MYOM2 (NM_003970.1,4248-4266).
cgtcagcatgaccatcaaa

SEQ ID NO: 289467 - DNA, 19 bp, Homo sapiens
  siRNA target sequence for TCAP (NM_003673.2,202-220).
gctcgccctggctgatgat

SEQ ID NO: 289468 - DNA, 19 bp, Homo sapiens
  siRNA target sequence for TTID (NM_006790.1,564-582).
gcttcctcagctccatatt

SEQ ID NO: 289469 - DNA, 19 bp, Homo sapiens
  siRNA target sequence for TTID (NM_006790.1,584-602).
ccatcacagcctgattaca

SEQ ID NO: 289470 - DNA, 19 bp, Homo sapiens
  siRNA target sequence for TTID (NM_006790.1,585-603).
catcacagcctgattacaa

SEQ ID NO: 289471 - DNA, 19 bp, Homo sapiens
  siRNA target sequence for TTID (NM_006790.1,596-614).
gattacaatagcagtaaaa

SEQ ID NO: 289472 - DNA, 19 bp, Homo sapiens
  siRNA target sequence for TTID (NM_006790.1,618-636).
cttccgctatggattccaa

SEQ ID NO: 289473 - DNA, 19 bp, Homo sapiens
  siRNA target sequence for TTID (NM_006790.1,622-640).
cgctatggattccaactat

SEQ ID NO: 289474 - DNA, 19 bp, Homo sapiens
  siRNA target sequence for TTID (NM_006790.1,624-642).
ctatggattccaactatca

SEQ ID NO: 289475 - DNA, 19 bp, Homo sapiens
  siRNA target sequence for TTID (NM_006790.1,657-675).
gccaacctataaatgcaaa

SEQ ID NO: 289476 - DNA, 19 bp, Homo sapiens
  siRNA target sequence for TTID (NM_006790.1,681-699).
cccaaactgcaaatgctaa

SEQ ID NO: 289477 - DNA, 19 bp, Homo sapiens
  siRNA target sequence for TTID (NM_006790.1,711-729).
gaactcctgatcatgaaat

SEQ ID NO: 289478 - DNA, 19 bp, Homo sapiens
  siRNA target sequence for TTID (NM_006790.1,787-805).
cacccttcttcataatgga

SEQ ID NO: 289479 - DNA, 19 bp, Homo sapiens
  siRNA target sequence for TTID (NM_006790.1,803-821).
ggaaatcaacgtctaacat

SEQ ID NO: 289480 - DNA, 19 bp, Homo sapiens
  siRNA target sequence for TTID (NM_006790.1,804-822).
gaaatcaacgtctaacata

SEQ ID NO: 289481 - DNA, 19 bp, Homo sapiens
  siRNA target sequence for TTID (NM_006790.1,832-850).
gatggctcgcagattgcta

SEQ ID NO: 289482 - DNA, 19 bp, Homo sapiens
  siRNA target sequence for TTID (NM_006790.1,944-962).
gttcctacatcacaagtaa

SEQ ID NO: 289483 - DNA, 19 bp, Homo sapiens
  siRNA target sequence for TTID (NM_006790.1,947-965).
cctacatcacaagtaagaa

SEQ ID NO: 289484 - DNA, 19 bp, Homo sapiens
  siRNA target sequence for TTID (NM_006790.1,956-974).
caagtaagaagtagatcaa

SEQ ID NO: 289485 - DNA, 19 bp, Homo sapiens
  siRNA target sequence for TTID (NM_006790.1,976-994).
ctcaaggggagatgtgaat

SEQ ID NO: 289486 - DNA, 19 bp, Homo sapiens
  siRNA target sequence for TTID (NM_006790.1,978-996).
caaggggagatgtgaatga

SEQ ID NO: 289487 - DNA, 19 bp, Homo sapiens
  siRNA target sequence for TTID (NM_006790.1,1024-1042).
cccaccacgtttcattcaa

SEQ ID NO: 289488 - DNA, 19 bp, Homo sapiens
  siRNA target sequence for TTID (NM_006790.1,1026-1044).
caccacgtttcattcaagt

SEQ ID NO: 289489 - DNA, 19 bp, Homo sapiens
  siRNA target sequence for TTID (NM_006790.1,1129-1147).
gtatctaaatggaagaaca

SEQ ID NO: 289490 - DNA, 19 bp, Homo sapiens
  siRNA target sequence for TTID (NM_006790.1,1180-1198).
gtctgagaagggtcttcat

SEQ ID NO: 289491 - DNA, 19 bp, Homo sapiens
  siRNA target sequence for TTID (NM_006790.1,1200-1218).
cactcatctttgaagtagt

SEQ ID NO: 289492 - DNA, 19 bp, Homo sapiens
  siRNA target sequence for TTID (NM_006790.1,1320-1338).
gagcaccaatgtttatcta

SEQ ID NO: 289493 - DNA, 19 bp, Homo sapiens
  siRNA target sequence for TTID (NM_006790.1,1322-1340).
gcaccaatgtttatctaca

SEQ ID NO: 289494 - DNA, 19 bp, Homo sapiens
  siRNA target sequence for TTID (NM_006790.1,1323-1341).
caccaatgtttatctacaa

SEQ ID NO: 289495 - DNA, 19 bp, Homo sapiens
  siRNA target sequence for TTID (NM_006790.1,1370-1388).
gattcagtgaaactagaat

SEQ ID NO: 289496 - DNA, 19 bp, Homo sapiens
  siRNA target sequence for TTID (NM_006790.1,1390-1408).
ccagatctcggctatacct

SEQ ID NO: 289497 - DNA, 19 bp, Homo sapiens
  siRNA target sequence for TTID (NM_006790.1,1456-1474).
cactgaccgaataagctta

SEQ ID NO: 289498 - DNA, 19 bp, Homo sapiens
  siRNA target sequence for TTID (NM_006790.1,1458-1476).
ctgaccgaataagcttata

SEQ ID NO: 289499 - DNA, 19 bp, Homo sapiens
  siRNA target sequence for TTID (NM_006790.1,1462-1480).
ccgaataagcttatatcaa

SEQ ID NO: 289500 - DNA, 19 bp, Homo sapiens
  siRNA target sequence for TTID (NM_006790.1,1500-1518).
ctttactgataaaagatgt

SEQ ID NO: 289501 - DNA, 19 bp, Homo sapiens
  siRNA target sequence for TTID (NM_006790.1,1545-1563).
ctgtgtcagcagttaatga

SEQ ID NO: 289502 - DNA, 19 bp, Homo sapiens
  siRNA target sequence for TTID (NM_006790.1,1566-1584).
ctggagtgactacatgtaa

SEQ ID NO: 289503 - DNA, 19 bp, Homo sapiens
  siRNA target sequence for TTID (NM_006790.1,1643-1661).
cgggttcgaccaacattca

SEQ ID NO: 289504 - DNA, 19 bp, Homo sapiens
  siRNA target sequence for TTID (NM_006790.1,1649-1667).
cgaccaacattcagcaaat

SEQ ID NO: 289505 - DNA, 19 bp, Homo sapiens
  siRNA target sequence for TTID (NM_006790.1,1673-1691).
gcacttaatgggaaaggtt

SEQ ID NO: 289506 - DNA, 19 bp, Homo sapiens
  siRNA target sequence for TTID (NM_006790.1,1732-1750).
gcgtttggcagctcaatct

SEQ ID NO: 289507 - DNA, 19 bp, Homo sapiens
  siRNA target sequence for TTID (NM_006790.1,1743-1761).
ctcaatctggactctatga

SEQ ID NO: 289508 - DNA, 19 bp, Homo sapiens
  siRNA target sequence for CRYAA (NM_000394.2,130-148).
cggctgttcgaccagtttt

SEQ ID NO: 289509 - DNA, 19 bp, Homo sapiens
  siRNA target sequence for CRYAA (NM_000394.2,151-169).
ggcgagggcctttttgagt

SEQ ID NO: 289510 - DNA, 19 bp, Homo sapiens
  siRNA target sequence for CRYAA (NM_000394.2,152-170).
gcgagggcctttttgagta

SEQ ID NO: 289511 - DNA, 19 bp, Homo sapiens
  siRNA target sequence for CRYAA (NM_000394.2,153-171).
cgagggcctttttgagtat

SEQ ID NO: 289512 - DNA, 19 bp, Homo sapiens
  siRNA target sequence for CRYAA (NM_000394.2,263-281).
gatccgaccgggacaagtt

SEQ ID NO: 289513 - DNA, 19 bp, Homo sapiens
  siRNA target sequence for CRYAA (NM_000394.2,272-290).
gggacaagttcgtcatctt

SEQ ID NO: 289514 - DNA, 19 bp, Homo sapiens
  siRNA target sequence for CRYAB (NM_001885.1,316-334).
gattgaggtgcatggaaaa

SEQ ID NO: 289515 - DNA, 19 bp, Homo sapiens
  siRNA target sequence for CRYAB (NM_001885.1,372-390).
gggagttccacaggaaata

SEQ ID NO: 289516 - DNA, 19 bp, Homo sapiens
  siRNA target sequence for CRYAB (NM_001885.1,407-425).
gtagaccctctcaccatta

SEQ ID NO: 289517 - DNA, 19 bp, Homo sapiens
  siRNA target sequence for CRYAB (NM_001885.1,410-428).
gaccctctcaccattactt

SEQ ID NO: 289518 - DNA, 19 bp, Homo sapiens
  siRNA target sequence for CRYAB (NM_001885.1,504-522).
ccatcacccgtgaagagaa

SEQ ID NO: 289519 - DNA, 19 bp, Homo sapiens
  siRNA target sequence for CRYBA1 (NM_005208.3,88-106).
cctggggccatggaagata

SEQ ID NO: 289520 - DNA, 19 bp, Homo sapiens
  siRNA target sequence for CRYBA1 (NM_005208.3,93-111).
ggccatggaagataaccat

SEQ ID NO: 289521 - DNA, 19 bp, Homo sapiens
  siRNA target sequence for CRYBA1 (NM_005208.3,112-130).
ctatgatcaggagaacttt

SEQ ID NO: 289522 - DNA, 19 bp, Homo sapiens
  siRNA target sequence for CRYBA1 (NM_005208.3,216-234).
gtggcgcctggattggtta

SEQ ID NO: 289523 - DNA, 19 bp, Homo sapiens
  siRNA target sequence for CRYBA1 (NM_005208.3,219-237).
gcgcctggattggttatga

SEQ ID NO: 289524 - DNA, 19 bp, Homo sapiens
  siRNA target sequence for CRYBA1 (NM_005208.3,312-330).
gtaatgcctaccacattga

SEQ ID NO: 289525 - DNA, 19 bp, Homo sapiens
  siRNA target sequence for CRYBA1 (NM_005208.3,349-367).
ccccatctgttcagctaat

SEQ ID NO: 289526 - DNA, 19 bp, Homo sapiens
  siRNA target sequence for CRYBA1 (NM_005208.3,352-370).
catctgttcagctaatcat

SEQ ID NO: 289527 - DNA, 19 bp, Homo sapiens
  siRNA target sequence for CRYBA1 (NM_005208.3,357-375).
gttcagctaatcataagga

SEQ ID NO: 289528 - DNA, 19 bp, Homo sapiens
  siRNA target sequence for CRYBA1 (NM_005208.3,376-394).
gtctaagatgaccatcttt

SEQ ID NO: 289529 - DNA, 19 bp, Homo sapiens
  siRNA target sequence for CRYBA1 (NM_005208.3,378-396).
ctaagatgaccatctttga

SEQ ID NO: 289530 - DNA, 19 bp, Homo sapiens
  siRNA target sequence for CRYBA1 (NM_005208.3,455-473).
gccatgggctggttcaaca

SEQ ID NO: 289531 - DNA, 19 bp, Homo sapiens
  siRNA target sequence for CRYBA1 (NM_005208.3,481-499).
cggctccatgaagatacaa

SEQ ID NO: 289532 - DNA, 19 bp, Homo sapiens
  siRNA target sequence for CRYBA1 (NM_005208.3,482-500).
ggctccatgaagatacaaa

SEQ ID NO: 289533 - DNA, 19 bp, Homo sapiens
  siRNA target sequence for CRYBA1 (NM_005208.3,507-525).
cctgggtttgctaccaata

SEQ ID NO: 289534 - DNA, 19 bp, Homo sapiens
  siRNA target sequence for CRYBA1 (NM_005208.3,508-526).
ctgggtttgctaccaatat

SEQ ID NO: 289535 - DNA, 19 bp, Homo sapiens
  siRNA target sequence for CRYBA1 (NM_005208.3,517-535).
ctaccaatatcctggatat

SEQ ID NO: 289536 - DNA, 19 bp, Homo sapiens
  siRNA target sequence for CRYBA1 (NM_005208.3,530-548).
ggatatcgtgggtatcagt

SEQ ID NO: 289537 - DNA, 19 bp, Homo sapiens
  siRNA target sequence for CRYBA1 (NM_005208.3,531-549).
gatatcgtgggtatcagta

SEQ ID NO: 289538 - DNA, 19 bp, Homo sapiens
  siRNA target sequence for CRYBA1 (NM_005208.3,536-554).
cgtgggtatcagtatatct

SEQ ID NO: 289539 - DNA, 19 bp, Homo sapiens
  siRNA target sequence for CRYBA1 (NM_005208.3,537-555).
gtgggtatcagtatatctt

SEQ ID NO: 289540 - DNA, 19 bp, Homo sapiens
  siRNA target sequence for CRYBA1 (NM_005208.3,618-636).
cttcgcagatccaatcgat

SEQ ID NO: 289541 - DNA, 19 bp, Homo sapiens
  siRNA target sequence for CRYBA2 (NM_005209.1,166-184).
gctcggtcaaggtggaaaa

SEQ ID NO: 289542 - DNA, 19 bp, Homo sapiens
  siRNA target sequence for CRYBA2 (NM_005209.1,189-207).
gtttgggtggcctttgagt

SEQ ID NO: 289543 - DNA, 19 bp, Homo sapiens
  siRNA target sequence for CRYBA2 (NM_005209.1,344-362).
cagccgtgtgacactgttt

SEQ ID NO: 289544 - DNA, 19 bp, Homo sapiens
  siRNA target sequence for CRYBA2 (NM_005209.1,504-522).
cgaggctaccagtatgtgt

SEQ ID NO: 289545 - DNA, 19 bp, Homo sapiens
  siRNA target sequence for CRYBA2 (NM_005209.1,537-555).
cacagcggagagttctgta

SEQ ID NO: 289546 - DNA, 19 bp, Homo sapiens
  siRNA target sequence for CRYBA2 (NM_005209.1,541-559).
gcggagagttctgtactta

SEQ ID NO: 289547 - DNA, 19 bp, Homo sapiens
  siRNA target sequence for CRYBA4 (NM_001886.1,164-182).
ctgtgcgatctttgaaagt

SEQ ID NO: 289548 - DNA, 19 bp, Homo sapiens
  siRNA target sequence for CRYBA4 (NM_001886.1,244-262).
gaacgaggcgaatatccaa

SEQ ID NO: 289549 - DNA, 19 bp, Homo sapiens
  siRNA target sequence for CRYBA4 (NM_001886.1,395-413).
gagagctgagcgatgacta

SEQ ID NO: 289550 - DNA, 19 bp, Homo sapiens
  siRNA target sequence for CRYBA4 (NM_001886.1,400-418).
ctgagcgatgactatcctt

SEQ ID NO: 289551 - DNA, 19 bp, Homo sapiens
  siRNA target sequence for CRYBA4 (NM_001886.1,500-518).
cgggctaccgaggatttca

SEQ ID NO: 289552 - DNA, 19 bp, Homo sapiens
  siRNA target sequence for CRYBA4 (NM_001886.1,502-520).
ggctaccgaggatttcagt

SEQ ID NO: 289553 - DNA, 19 bp, Homo sapiens
  siRNA target sequence for CRYBA4 (NM_001886.1,503-521).
gctaccgaggatttcagta

SEQ ID NO: 289554 - DNA, 19 bp, Homo sapiens
  siRNA target sequence for CRYBA4 (NM_001886.1,504-522).
ctaccgaggatttcagtat

SEQ ID NO: 289555 - DNA, 19 bp, Homo sapiens
  siRNA target sequence for CRYBA4 (NM_001886.1,540-558).
ccattccggtgactacaaa

SEQ ID NO: 289556 - DNA, 19 bp, Homo sapiens
  siRNA target sequence for CRYBA4 (NM_001886.1,545-563).
ccggtgactacaaacattt

SEQ ID NO: 289557 - DNA, 19 bp, Homo sapiens
  siRNA target sequence for CRYBB1 (NM_001887.3,281-299).
ggccgtcgagcagaattct

SEQ ID NO: 289558 - DNA, 19 bp, Homo sapiens
  siRNA target sequence for CRYBB1 (NM_001887.3,298-316).
ctcgggggagtgctcaaat

SEQ ID NO: 289559 - DNA, 19 bp, Homo sapiens
  siRNA target sequence for CRYBB1 (NM_001887.3,300-318).
cgggggagtgctcaaatct

SEQ ID NO: 289560 - DNA, 19 bp, Homo sapiens
  siRNA target sequence for CRYBB1 (NM_001887.3,337-355).
ccgtgtgcgcagcatcatt

SEQ ID NO: 289561 - DNA, 19 bp, Homo sapiens
  siRNA target sequence for CRYBB1 (NM_001887.3,341-359).
gtgcgcagcatcattgtct

SEQ ID NO: 289562 - DNA, 19 bp, Homo sapiens
  siRNA target sequence for CRYBB1 (NM_001887.3,503-521).
gatgcccaggagcacaaaa

SEQ ID NO: 289563 - DNA, 19 bp, Homo sapiens
  siRNA target sequence for CRYBB1 (NM_001887.3,506-524).
gcccaggagcacaaaatct

SEQ ID NO: 289564 - DNA, 19 bp, Homo sapiens
  siRNA target sequence for CRYBB2 (NM_000496.1,323-341).
gccaagagcacaagatcat

SEQ ID NO: 289565 - DNA, 19 bp, Homo sapiens
  siRNA target sequence for CRYBB3 (NM_004076.3,140-158).
gctacaaggtgatcttgta

SEQ ID NO: 289566 - DNA, 19 bp, Homo sapiens
  siRNA target sequence for CRYBB3 (NM_004076.3,348-366).
gtccaacagccgtgatagt

SEQ ID NO: 289567 - DNA, 19 bp, Homo sapiens
  siRNA target sequence for CRYBB3 (NM_004076.3,378-396).
gtccctccggcctctgaat

SEQ ID NO: 289568 - DNA, 19 bp, Homo sapiens
  siRNA target sequence for CRYBB3 (NM_004076.3,384-402).
ccggcctctgaatattgat

SEQ ID NO: 289569 - DNA, 19 bp, Homo sapiens
  siRNA target sequence for CRYBB3 (NM_004076.3,385-403).
cggcctctgaatattgata

SEQ ID NO: 289570 - DNA, 19 bp, Homo sapiens
  siRNA target sequence for CRYBB3 (NM_004076.3,449-467).
gccgcaagatggagatagt

SEQ ID NO: 289571 - DNA, 19 bp, Homo sapiens
  siRNA target sequence for CRYBB3 (NM_004076.3,542-560).
cgtgggttggctatgagtt

SEQ ID NO: 289572 - DNA, 19 bp, Homo sapiens
  siRNA target sequence for CRYGA (NM_014617.2,126-144).
ctacgaggaccgagacttt

SEQ ID NO: 289573 - DNA, 19 bp, Homo sapiens
  siRNA target sequence for CRYGA (NM_014617.2,148-166).
ggtcgctgctacaattgca

SEQ ID NO: 289574 - DNA, 19 bp, Homo sapiens
  siRNA target sequence for CRYGA (NM_014617.2,149-167).
gtcgctgctacaattgcat

SEQ ID NO: 289575 - DNA, 19 bp, Homo sapiens
  siRNA target sequence for CRYGA (NM_014617.2,290-308).
gcaagtaccccgactatca

SEQ ID NO: 289576 - DNA, 19 bp, Homo sapiens
  siRNA target sequence for CRYGA (NM_014617.2,334-352).
gtccaatcctgccgtataa

SEQ ID NO: 289577 - DNA, 19 bp, Homo sapiens
  siRNA target sequence for CRYGA (NM_014617.2,336-354).
ccaatcctgccgtataatt

SEQ ID NO: 289578 - DNA, 19 bp, Homo sapiens
  siRNA target sequence for CRYGA (NM_014617.2,397-415).
gactaccgaggccttatgt

SEQ ID NO: 289579 - DNA, 19 bp, Homo sapiens
  siRNA target sequence for CRYGA (NM_014617.2,399-417).
ctaccgaggccttatgtct

SEQ ID NO: 289580 - DNA, 19 bp, Homo sapiens
  siRNA target sequence for CRYGA (NM_014617.2,437-455).
cctgtgttccagaactgtt

SEQ ID NO: 289581 - DNA, 19 bp, Homo sapiens
  siRNA target sequence for CRYGA (NM_014617.2,456-474).
ccgtctccctgagatctat

SEQ ID NO: 289582 - DNA, 19 bp, Homo sapiens
  siRNA target sequence for CRYGA (NM_014617.2,457-475).
cgtctccctgagatctatt

SEQ ID NO: 289583 - DNA, 19 bp, Homo sapiens
  siRNA target sequence for CRYGA (NM_014617.2,592-610).
gccaaagtcggctctttga

SEQ ID NO: 289584 - DNA, 19 bp, Homo sapiens
  siRNA target sequence for CRYGA (NM_014617.2,594-612).
caaagtcggctctttgaga

SEQ ID NO: 289585 - DNA, 19 bp, Homo sapiens
  siRNA target sequence for CRYGA (NM_014617.2,611-629).
gacgggtcaccgatttgta

SEQ ID NO: 289586 - DNA, 19 bp, Homo sapiens
  siRNA target sequence for CRYGA (NM_014617.2,613-631).
cgggtcaccgatttgtact

SEQ ID NO: 289587 - DNA, 19 bp, Homo sapiens
  siRNA target sequence for CRYGB (NM_005210.2,293-311).
ctggcgcttacagaatgaa

SEQ ID NO: 289588 - DNA, 19 bp, Homo sapiens
  siRNA target sequence for CRYGB (NM_005210.2,295-313).
ggcgcttacagaatgaaga

SEQ ID NO: 289589 - DNA, 19 bp, Homo sapiens
  siRNA target sequence for CRYGB (NM_005210.2,312-330).
gatctacgacagagatgaa

SEQ ID NO: 289590 - DNA, 19 bp, Homo sapiens
  siRNA target sequence for CRYGB (NM_005210.2,388-406).
cacctcactgaaattcact

SEQ ID NO: 289591 - DNA, 19 bp, Homo sapiens
  siRNA target sequence for CRYGB (NM_005210.2,489-507).
gtacaggaggtttcttgat

SEQ ID NO: 289592 - DNA, 19 bp, Homo sapiens
  siRNA target sequence for CRYGB (NM_005210.2,523-541).
gccaaagttggctctctta

SEQ ID NO: 289593 - DNA, 19 bp, Homo sapiens
  siRNA target sequence for CRYGB (NM_005210.2,525-543).
caaagttggctctcttaga

SEQ ID NO: 289594 - DNA, 19 bp, Homo sapiens
  siRNA target sequence for CRYGB (NM_005210.2,538-556).
cttagacgagtcatggatt

SEQ ID NO: 289595 - DNA, 19 bp, Homo sapiens
  siRNA target sequence for CRYGB (NM_005210.2,542-560).
gacgagtcatggatttgta

SEQ ID NO: 289596 - DNA, 19 bp, Homo sapiens
  siRNA target sequence for CRYGB (NM_005210.2,544-562).
cgagtcatggatttgtact

SEQ ID NO: 289597 - DNA, 19 bp, Homo sapiens
  siRNA target sequence for CRYGD (NM_006891.2,312-330).
gaggccagatgatagagtt

SEQ ID NO: 289598 - DNA, 19 bp, Homo sapiens
  siRNA target sequence for CRYGD (NM_006891.2,358-376).
ccgcttccgcttcaatgaa

SEQ ID NO: 289599 - DNA, 19 bp, Homo sapiens
  siRNA target sequence for CRYGD (NM_006891.2,359-377).
cgcttccgcttcaatgaaa

SEQ ID NO: 289600 - DNA, 19 bp, Homo sapiens
  siRNA target sequence for CRYGD (NM_006891.2,360-378).
gcttccgcttcaatgaaat

SEQ ID NO: 289601 - DNA, 19 bp, Homo sapiens
  siRNA target sequence for CRYGD (NM_006891.2,452-470).
ctgatgccaggggactata

SEQ ID NO: 289602 - DNA, 19 bp, Homo sapiens
  siRNA target sequence for CRYGD (NM_006891.2,511-529).
ctctctgaggagagtcata

SEQ ID NO: 289603 - DNA, 19 bp, Homo sapiens
  siRNA target sequence for CRYGD (NM_006891.2,515-533).
ctgaggagagtcatagatt

SEQ ID NO: 289604 - DNA, 19 bp, Homo sapiens
  siRNA target sequence for CRYGS (NM_017541.2,69-87).
ccaagattactttctatga

SEQ ID NO: 289605 - DNA, 19 bp, Homo sapiens
  siRNA target sequence for CRYGS (NM_017541.2,186-204).
gcacctgggctgtttatga

SEQ ID NO: 289606 - DNA, 19 bp, Homo sapiens
  siRNA target sequence for CRYGS (NM_017541.2,187-205).
cacctgggctgtttatgaa

SEQ ID NO: 289607 - DNA, 19 bp, Homo sapiens
  siRNA target sequence for CRYGS (NM_017541.2,218-236).
gctgggtacatgtacatct

SEQ ID NO: 289608 - DNA, 19 bp, Homo sapiens
  siRNA target sequence for CRYGS (NM_017541.2,219-237).
ctgggtacatgtacatctt

SEQ ID NO: 289609 - DNA, 19 bp, Homo sapiens
  siRNA target sequence for CRYGS (NM_017541.2,295-313).
ctcctgcagagctgttcat

SEQ ID NO: 289610 - DNA, 19 bp, Homo sapiens
  siRNA target sequence for CRYGS (NM_017541.2,317-335).
cctagtggaggccagtata

SEQ ID NO: 289611 - DNA, 19 bp, Homo sapiens
  siRNA target sequence for CRYGS (NM_017541.2,318-336).
ctagtggaggccagtataa

SEQ ID NO: 289612 - DNA, 19 bp, Homo sapiens
  siRNA target sequence for CRYGS (NM_017541.2,326-344).
ggccagtataagattcaga

SEQ ID NO: 289613 - DNA, 19 bp, Homo sapiens
  siRNA target sequence for CRYGS (NM_017541.2,454-472).
gggtgtctggattttctat

SEQ ID NO: 289614 - DNA, 19 bp, Homo sapiens
  siRNA target sequence for CRYGS (NM_017541.2,552-570).
ccccagctgtccagtcttt

SEQ ID NO: 289615 - DNA, 19 bp, Homo sapiens
  siRNA target sequence for LIM2 (NM_030657.2,606-624).
cgttcttcgcagggatttt

SEQ ID NO: 289616 - DNA, 19 bp, Homo sapiens
  siRNA target sequence for LIM2 (NM_030657.2,635-653).
gcctaccgggtgcatgaat

SEQ ID NO: 289617 - DNA, 19 bp, Homo sapiens
  siRNA target sequence for AMBN (NM_016519.2,182-200).
caccgggtatggctagttt

SEQ ID NO: 289618 - DNA, 19 bp, Homo sapiens
  siRNA target sequence for AMBN (NM_016519.2,184-202).
ccgggtatggctagtttga

SEQ ID NO: 289619 - DNA, 19 bp, Homo sapiens
  siRNA target sequence for AMBN (NM_016519.2,709-727).
ccacaaggttcaacaattt

SEQ ID NO: 289620 - DNA, 19 bp, Homo sapiens
  siRNA target sequence for AMBN (NM_016519.2,729-747).
ccaaatagcccgtttgatt

SEQ ID NO: 289621 - DNA, 19 bp, Homo sapiens
  siRNA target sequence for AMBN (NM_016519.2,753-771).
cggaccaatgccacaaaat

SEQ ID NO: 289622 - DNA, 19 bp, Homo sapiens
  siRNA target sequence for AMBN (NM_016519.2,754-772).
ggaccaatgccacaaaata

SEQ ID NO: 289623 - DNA, 19 bp, Homo sapiens
  siRNA target sequence for AMBN (NM_016519.2,758-776).
caatgccacaaaataaaca

SEQ ID NO: 289624 - DNA, 19 bp, Homo sapiens
  siRNA target sequence for AMBN (NM_016519.2,782-800).
cactttatccaggaatgtt

SEQ ID NO: 289625 - DNA, 19 bp, Homo sapiens
  siRNA target sequence for AMBN (NM_016519.2,784-802).
ctttatccaggaatgttgt

SEQ ID NO: 289626 - DNA, 19 bp, Homo sapiens
  siRNA target sequence for AMBN (NM_016519.2,798-816).
gttgtacgtgccttttgga

SEQ ID NO: 289627 - DNA, 19 bp, Homo sapiens
  siRNA target sequence for AMBN (NM_016519.2,807-825).
gccttttggagcaaatcaa

SEQ ID NO: 289628 - DNA, 19 bp, Homo sapiens
  siRNA target sequence for AMBN (NM_016519.2,808-826).
ccttttggagcaaatcaat

SEQ ID NO: 289629 - DNA, 19 bp, Homo sapiens
  siRNA target sequence for AMBN (NM_016519.2,894-912).
ggcctatggagccatgttt

SEQ ID NO: 289630 - DNA, 19 bp, Homo sapiens
  siRNA target sequence for AMBN (NM_016519.2,1139-1157).
ctctccctaaggatgacat

SEQ ID NO: 289631 - DNA, 19 bp, Homo sapiens
  siRNA target sequence for AMBN (NM_016519.2,1229-1247).
cactgatgacccctgaatt

SEQ ID NO: 289632 - DNA, 19 bp, Homo sapiens
  siRNA target sequence for AMBN (NM_016519.2,1283-1301).
ccacatccgtggatttcca

SEQ ID NO: 289633 - DNA, 19 bp, Homo sapiens
  siRNA target sequence for AMBN (NM_016519.2,1323-1341).
cacgatggccccaaactct

SEQ ID NO: 289634 - DNA, 19 bp, Homo sapiens
  siRNA target sequence for AMBN (NM_016519.2,1333-1351).
ccaaactctctgcaaacat

SEQ ID NO: 289635 - DNA, 19 bp, Homo sapiens
  siRNA target sequence for ENAM (NM_031889.1,299-317).
caggcttggaacctctttt

SEQ ID NO: 289636 - DNA, 19 bp, Homo sapiens
  siRNA target sequence for ENAM (NM_031889.1,302-320).
gcttggaacctcttttcct

SEQ ID NO: 289637 - DNA, 19 bp, Homo sapiens
  siRNA target sequence for ENAM (NM_031889.1,310-328).
cctcttttcctaaactaga

SEQ ID NO: 289638 - DNA, 19 bp, Homo sapiens
  siRNA target sequence for ENAM (NM_031889.1,311-329).
ctcttttcctaaactagat

SEQ ID NO: 289639 - DNA, 19 bp, Homo sapiens
  siRNA target sequence for ENAM (NM_031889.1,413-431).
gccccgaatgcctggattt

SEQ ID NO: 289640 - DNA, 19 bp, Homo sapiens
  siRNA target sequence for ENAM (NM_031889.1,414-432).
ccccgaatgcctggattta

SEQ ID NO: 289641 - DNA, 19 bp, Homo sapiens
  siRNA target sequence for ENAM (NM_031889.1,417-435).
cgaatgcctggatttagca

SEQ ID NO: 289642 - DNA, 19 bp, Homo sapiens
  siRNA target sequence for ENAM (NM_031889.1,422-440).
gcctggatttagcagtaaa

SEQ ID NO: 289643 - DNA, 19 bp, Homo sapiens
  siRNA target sequence for ENAM (NM_031889.1,423-441).
cctggatttagcagtaaaa

SEQ ID NO: 289644 - DNA, 19 bp, Homo sapiens
  siRNA target sequence for ENAM (NM_031889.1,436-454).
gtaaaagtgaggagatgat

SEQ ID NO: 289645 - DNA, 19 bp, Homo sapiens
  siRNA target sequence for ENAM (NM_031889.1,446-464).
ggagatgatgcggtataat

SEQ ID NO: 289646 - DNA, 19 bp, Homo sapiens
  siRNA target sequence for ENAM (NM_031889.1,449-467).
gatgatgcggtataatcaa

SEQ ID NO: 289647 - DNA, 19 bp, Homo sapiens
  siRNA target sequence for ENAM (NM_031889.1,456-474).
cggtataatcaattcaact

SEQ ID NO: 289648 - DNA, 19 bp, Homo sapiens
  siRNA target sequence for ENAM (NM_031889.1,521-539).
cggtctccctcagcaattt

SEQ ID NO: 289649 - DNA, 19 bp, Homo sapiens
  siRNA target sequence for ENAM (NM_031889.1,606-624).
gcacccaaacgtcataaca

SEQ ID NO: 289650 - DNA, 19 bp, Homo sapiens
  siRNA target sequence for ENAM (NM_031889.1,607-625).
cacccaaacgtcataacaa

SEQ ID NO: 289651 - DNA, 19 bp, Homo sapiens
  siRNA target sequence for ENAM (NM_031889.1,609-627).
cccaaacgtcataacaaga

SEQ ID NO: 289652 - DNA, 19 bp, Homo sapiens
  siRNA target sequence for ENAM (NM_031889.1,701-719).
gcagccatcacataatcaa

SEQ ID NO: 289653 - DNA, 19 bp, Homo sapiens
  siRNA target sequence for ENAM (NM_031889.1,753-771).
gcattcccaccatttggaa

SEQ ID NO: 289654 - DNA, 19 bp, Homo sapiens
  siRNA target sequence for ENAM (NM_031889.1,818-836).
gttaccaccaccaggttat

SEQ ID NO: 289655 - DNA, 19 bp, Homo sapiens
  siRNA target sequence for ENAM (NM_031889.1,842-860).
cccaccaatcagcaatgaa

SEQ ID NO: 289656 - DNA, 19 bp, Homo sapiens
  siRNA target sequence for ENAM (NM_031889.1,868-886).
ggaatccttactttggata

SEQ ID NO: 289657 - DNA, 19 bp, Homo sapiens
  siRNA target sequence for ENAM (NM_031889.1,906-924).
gggggtcgccctccttatt

SEQ ID NO: 289658 - DNA, 19 bp, Homo sapiens
  siRNA target sequence for ENAM (NM_031889.1,907-925).
ggggtcgccctccttatta

SEQ ID NO: 289659 - DNA, 19 bp, Homo sapiens
  siRNA target sequence for ENAM (NM_031889.1,908-926).
gggtcgccctccttattat

SEQ ID NO: 289660 - DNA, 19 bp, Homo sapiens
  siRNA target sequence for ENAM (NM_031889.1,909-927).
ggtcgccctccttattatt

SEQ ID NO: 289661 - DNA, 19 bp, Homo sapiens
  siRNA target sequence for ENAM (NM_031889.1,913-931).
gccctccttattattcaga

SEQ ID NO: 289662 - DNA, 19 bp, Homo sapiens
  siRNA target sequence for ENAM (NM_031889.1,1023-1041).
gtcactgagacgaattcta

SEQ ID NO: 289663 - DNA, 19 bp, Homo sapiens
  siRNA target sequence for ENAM (NM_031889.1,1222-1240).
caaatattcgtgaaaatca

SEQ ID NO: 289664 - DNA, 19 bp, Homo sapiens
  siRNA target sequence for ENAM (NM_031889.1,1242-1260).
ccatatcctaatataagaa

SEQ ID NO: 289665 - DNA, 19 bp, Homo sapiens
  siRNA target sequence for ENAM (NM_031889.1,1314-1332).
cagaataggcctttttaca

SEQ ID NO: 289666 - DNA, 19 bp, Homo sapiens
  siRNA target sequence for ENAM (NM_031889.1,1353-1371).
ggtcctcggtggaacttct

SEQ ID NO: 289667 - DNA, 19 bp, Homo sapiens
  siRNA target sequence for ENAM (NM_031889.1,1354-1372).
gtcctcggtggaacttctt

SEQ ID NO: 289668 - DNA, 19 bp, Homo sapiens
  siRNA target sequence for ENAM (NM_031889.1,1359-1377).
cggtggaacttctttgctt

SEQ ID NO: 289669 - DNA, 19 bp, Homo sapiens
  siRNA target sequence for ENAM (NM_031889.1,1370-1388).
ctttgcttgggaacgtaaa

SEQ ID NO: 289670 - DNA, 19 bp, Homo sapiens
  siRNA target sequence for ENAM (NM_031889.1,1375-1393).
cttgggaacgtaaacaagt

SEQ ID NO: 289671 - DNA, 19 bp, Homo sapiens
  siRNA target sequence for ENAM (NM_031889.1,1404-1422).
ggaaatccagtttatcaca

SEQ ID NO: 289672 - DNA, 19 bp, Homo sapiens
  siRNA target sequence for ENAM (NM_031889.1,1405-1423).
gaaatccagtttatcacaa

SEQ ID NO: 289673 - DNA, 19 bp, Homo sapiens
  siRNA target sequence for ENAM (NM_031889.1,1410-1428).
ccagtttatcacaaagctt

SEQ ID NO: 289674 - DNA, 19 bp, Homo sapiens
  siRNA target sequence for ENAM (NM_031889.1,1411-1429).
cagtttatcacaaagctta

SEQ ID NO: 289675 - DNA, 19 bp, Homo sapiens
  siRNA target sequence for ENAM (NM_031889.1,1425-1443).
gcttaccctcctacttcaa

SEQ ID NO: 289676 - DNA, 19 bp, Homo sapiens
  siRNA target sequence for ENAM (NM_031889.1,1514-1532).
ccctgtaggaactactgtt

SEQ ID NO: 289677 - DNA, 19 bp, Homo sapiens
  siRNA target sequence for ENAM (NM_031889.1,1556-1574).
ccctgttgttcgcaatgaa

SEQ ID NO: 289678 - DNA, 19 bp, Homo sapiens
  siRNA target sequence for ENAM (NM_031889.1,1557-1575).
cctgttgttcgcaatgaaa

SEQ ID NO: 289679 - DNA, 19 bp, Homo sapiens
  siRNA target sequence for ENAM (NM_031889.1,1595-1613).
gaagcccctgggtccaaaa

SEQ ID NO: 289680 - DNA, 19 bp, Homo sapiens
  siRNA target sequence for ENAM (NM_031889.1,1604-1622).
gggtccaaaagaacaaata

SEQ ID NO: 289681 - DNA, 19 bp, Homo sapiens
  siRNA target sequence for ENAM (NM_031889.1,1702-1720).
ctcactctgagggttatat

SEQ ID NO: 289682 - DNA, 19 bp, Homo sapiens
  siRNA target sequence for ENAM (NM_031889.1,1829-1847).
gcccaaagggattgtttta

SEQ ID NO: 289683 - DNA, 19 bp, Homo sapiens
  siRNA target sequence for ENAM (NM_031889.1,1852-1870).
caagaaggatgccatatga

SEQ ID NO: 289684 - DNA, 19 bp, Homo sapiens
  siRNA target sequence for ENAM (NM_031889.1,1858-1876).
ggatgccatatgaatcaga

SEQ ID NO: 289685 - DNA, 19 bp, Homo sapiens
  siRNA target sequence for ENAM (NM_031889.1,1862-1880).
gccatatgaatcagaaact

SEQ ID NO: 289686 - DNA, 19 bp, Homo sapiens
  siRNA target sequence for ENAM (NM_031889.1,1875-1893).
gaaactaatcagtcagaat

SEQ ID NO: 289687 - DNA, 19 bp, Homo sapiens
  siRNA target sequence for ENAM (NM_031889.1,1906-1924).
catatcagcctgctgtata

SEQ ID NO: 289688 - DNA, 19 bp, Homo sapiens
  siRNA target sequence for ENAM (NM_031889.1,2058-2076).
ggttctagaggaagtgttt

SEQ ID NO: 289689 - DNA, 19 bp, Homo sapiens
  siRNA target sequence for ENAM (NM_031889.1,2062-2080).
ctagaggaagtgttttcta

SEQ ID NO: 289690 - DNA, 19 bp, Homo sapiens
  siRNA target sequence for ENAM (NM_031889.1,2151-2169).
gatgattctcccaatacta

SEQ ID NO: 289691 - DNA, 19 bp, Homo sapiens
  siRNA target sequence for ENAM (NM_031889.1,2162-2180).
caatactatggggcaaaaa

SEQ ID NO: 289692 - DNA, 19 bp, Homo sapiens
  siRNA target sequence for ENAM (NM_031889.1,2185-2203).
gtccactctaccccataaa

SEQ ID NO: 289693 - DNA, 19 bp, Homo sapiens
  siRNA target sequence for ENAM (NM_031889.1,2323-2341).
caacagttaggcactatga

SEQ ID NO: 289694 - DNA, 19 bp, Homo sapiens
  siRNA target sequence for ENAM (NM_031889.1,2333-2351).
gcactatgaaggtgaacaa

SEQ ID NO: 289695 - DNA, 19 bp, Homo sapiens
  siRNA target sequence for ENAM (NM_031889.1,2359-2377).
caaatcagccaaaggaata

SEQ ID NO: 289696 - DNA, 19 bp, Homo sapiens
  siRNA target sequence for ENAM (NM_031889.1,2379-2397).
cttccctattctttagata

SEQ ID NO: 289697 - DNA, 19 bp, Homo sapiens
  siRNA target sequence for ENAM (NM_031889.1,2384-2402).
ctattctttagataatcca

SEQ ID NO: 289698 - DNA, 19 bp, Homo sapiens
  siRNA target sequence for ENAM (NM_031889.1,2409-2427).
ccaagggaggatttttatt

SEQ ID NO: 289699 - DNA, 19 bp, Homo sapiens
  siRNA target sequence for ENAM (NM_031889.1,2443-2461).
catggagcccggatgagaa

SEQ ID NO: 289700 - DNA, 19 bp, Homo sapiens
  siRNA target sequence for ENAM (NM_031889.1,2446-2464).
ggagcccggatgagaattt

SEQ ID NO: 289701 - DNA, 19 bp, Homo sapiens
  siRNA target sequence for ENAM (NM_031889.1,2447-2465).
gagcccggatgagaatttt

SEQ ID NO: 289702 - DNA, 19 bp, Homo sapiens
  siRNA target sequence for ENAM (NM_031889.1,2450-2468).
cccggatgagaattttcca

SEQ ID NO: 289703 - DNA, 19 bp, Homo sapiens
  siRNA target sequence for ENAM (NM_031889.1,2457-2475).
gagaattttccatcatata

SEQ ID NO: 289704 - DNA, 19 bp, Homo sapiens
  siRNA target sequence for ENAM (NM_031889.1,2488-2506).
ctatgccaccacctataga

SEQ ID NO: 289705 - DNA, 19 bp, Homo sapiens
  siRNA target sequence for ENAM (NM_031889.1,2509-2527).
gcaggggctactacgttaa

SEQ ID NO: 289706 - DNA, 19 bp, Homo sapiens
  siRNA target sequence for ENAM (NM_031889.1,2510-2528).
caggggctactacgttaat

SEQ ID NO: 289707 - DNA, 19 bp, Homo sapiens
  siRNA target sequence for ENAM (NM_031889.1,2512-2530).
ggggctactacgttaataa

SEQ ID NO: 289708 - DNA, 19 bp, Homo sapiens
  siRNA target sequence for ENAM (NM_031889.1,2513-2531).
gggctactacgttaataat

SEQ ID NO: 289709 - DNA, 19 bp, Homo sapiens
  siRNA target sequence for ENAM (NM_031889.1,2610-2628).
gaaagaaggccgtatttta

SEQ ID NO: 289710 - DNA, 19 bp, Homo sapiens
  siRNA target sequence for ENAM (NM_031889.1,2639-2657).
ctgggatcaggcaacacat

SEQ ID NO: 289711 - DNA, 19 bp, Homo sapiens
  siRNA target sequence for ENAM (NM_031889.1,2641-2659).
gggatcaggcaacacattt

SEQ ID NO: 289712 - DNA, 19 bp, Homo sapiens
  siRNA target sequence for ENAM (NM_031889.1,2642-2660).
ggatcaggcaacacattta

SEQ ID NO: 289713 - DNA, 19 bp, Homo sapiens
  siRNA target sequence for ENAM (NM_031889.1,2694-2712).
ggtaaccagccctattaca

SEQ ID NO: 289714 - DNA, 19 bp, Homo sapiens
  siRNA target sequence for ENAM (NM_031889.1,2768-2786).
gaactatggcatgcaaata

SEQ ID NO: 289715 - DNA, 19 bp, Homo sapiens
  siRNA target sequence for ENAM (NM_031889.1,2845-2863).
gttacccatcaggtcaaaa

SEQ ID NO: 289716 - DNA, 19 bp, Homo sapiens
  siRNA target sequence for ENAM (NM_031889.1,2938-2956).
cactagctctacaagacta

SEQ ID NO: 289717 - DNA, 19 bp, Homo sapiens
  siRNA target sequence for ENAM (NM_031889.1,3008-3026).
gtatacagacggtagtcat

SEQ ID NO: 289718 - DNA, 19 bp, Homo sapiens
  siRNA target sequence for ENAM (NM_031889.1,3013-3031).
cagacggtagtcataccaa

SEQ ID NO: 289719 - DNA, 19 bp, Homo sapiens
  siRNA target sequence for ENAM (NM_031889.1,3140-3158).
gaggaacacaccatgttct

SEQ ID NO: 289720 - DNA, 19 bp, Homo sapiens
  siRNA target sequence for ENAM (NM_031889.1,3142-3160).
ggaacacaccatgttctat

SEQ ID NO: 289721 - DNA, 19 bp, Homo sapiens
  siRNA target sequence for ENAM (NM_031889.1,3143-3161).
gaacacaccatgttctata

SEQ ID NO: 289722 - DNA, 19 bp, Homo sapiens
  siRNA target sequence for ENAM (NM_031889.1,3151-3169).
catgttctataaagaatca

SEQ ID NO: 289723 - DNA, 19 bp, Homo sapiens
  siRNA target sequence for ENAM (NM_031889.1,3201-3219).
gaagccagttcccttcaat

SEQ ID NO: 289724 - DNA, 19 bp, Homo sapiens
  siRNA target sequence for ENAM (NM_031889.1,3204-3222).
gccagttcccttcaatcaa

SEQ ID NO: 289725 - DNA, 19 bp, Homo sapiens
  siRNA target sequence for ENAM (NM_031889.1,3224-3242).
gaatacaccttgtctcaaa

SEQ ID NO: 289726 - DNA, 19 bp, Homo sapiens
  siRNA target sequence for ENAM (NM_031889.1,3256-3274).
gagatgggaacaacattct

SEQ ID NO: 289727 - DNA, 19 bp, Homo sapiens
  siRNA target sequence for ENAM (NM_031889.1,3299-3317).
gctcaatgaaagaactgtt

SEQ ID NO: 289728 - DNA, 19 bp, Homo sapiens
  siRNA target sequence for ENAM (NM_031889.1,3427-3445).
catctaacattctgcattt

SEQ ID NO: 289729 - DNA, 19 bp, Homo sapiens
  siRNA target sequence for ENAM (NM_031889.1,3452-3470).
ctttggctccaaattagca

SEQ ID NO: 289730 - DNA, 19 bp, Homo sapiens
  siRNA target sequence for ENAM (NM_031889.1,3538-3556).
caattacgcctactgaaaa

SEQ ID NO: 289731 - DNA, 19 bp, Homo sapiens
  siRNA target sequence for ENAM (NM_031889.1,3544-3562).
cgcctactgaaaatcctaa

SEQ ID NO: 289732 - DNA, 19 bp, Homo sapiens
  siRNA target sequence for ENAM (NM_031889.1,3579-3597).
gctactgaggaacaattta

SEQ ID NO: 289733 - DNA, 19 bp, Homo sapiens
  siRNA target sequence for ENAM (NM_031889.1,3630-3648).
gaacacagtccatttgaat

SEQ ID NO: 289734 - DNA, 19 bp, Homo sapiens
  siRNA target sequence for ENAM (NM_031889.1,3680-3698).
ggtacaagactgcttacta

SEQ ID NO: 289735 - DNA, 19 bp, Homo sapiens
  siRNA target sequence for TUFT1 (NM_020127.1,169-187).
gagatgaacttgaacacat

SEQ ID NO: 289736 - DNA, 19 bp, Homo sapiens
  siRNA target sequence for TUFT1 (NM_020127.1,279-297).
ggacatgaggagatcatta

SEQ ID NO: 289737 - DNA, 19 bp, Homo sapiens
  siRNA target sequence for TUFT1 (NM_020127.1,280-298).
gacatgaggagatcattaa

SEQ ID NO: 289738 - DNA, 19 bp, Homo sapiens
  siRNA target sequence for TUFT1 (NM_020127.1,313-331).
ggaggtctggagacaagat

SEQ ID NO: 289739 - DNA, 19 bp, Homo sapiens
  siRNA target sequence for TUFT1 (NM_020127.1,329-347).
gatgattcacgagaagaat

SEQ ID NO: 289740 - DNA, 19 bp, Homo sapiens
  siRNA target sequence for TUFT1 (NM_020127.1,836-854).
ggaacttcggagcaacaat

SEQ ID NO: 289741 - DNA, 19 bp, Homo sapiens
  siRNA target sequence for TUFT1 (NM_020127.1,960-978).
cggaaagtccggcaaatga

SEQ ID NO: 289742 - DNA, 19 bp, Homo sapiens
  siRNA target sequence for TUFT1 (NM_020127.1,961-979).
ggaaagtccggcaaatgat

SEQ ID NO: 289743 - DNA, 19 bp, Homo sapiens
  siRNA target sequence for TUFT1 (NM_020127.1,962-980).
gaaagtccggcaaatgata

SEQ ID NO: 289744 - DNA, 19 bp, Homo sapiens
  siRNA target sequence for TUFT1 (NM_020127.1,1090-1108).
ggatggaacacctgataga

SEQ ID NO: 289745 - DNA, 19 bp, Homo sapiens
  siRNA target sequence for TUFT1 (NM_020127.1,1168-1186).
gcagtattaggatatccaa

SEQ ID NO: 289746 - DNA, 19 bp, Homo sapiens
  siRNA target sequence for KRTHA6 (NM_003771.3,133-151).
gctgcagggtacatctctt

SEQ ID NO: 289747 - DNA, 19 bp, Homo sapiens
  siRNA target sequence for KRTHA6 (NM_003771.3,379-397).
gagtggtacgagtttcaga

SEQ ID NO: 289748 - DNA, 19 bp, Homo sapiens
  siRNA target sequence for KRTHA6 (NM_003771.3,490-508).
ctggtcctgcagattgata

SEQ ID NO: 289749 - DNA, 19 bp, Homo sapiens
  siRNA target sequence for KRTHA6 (NM_003771.3,758-776).
ctcccccagtggatctcaa

SEQ ID NO: 289750 - DNA, 19 bp, Homo sapiens
  siRNA target sequence for KRTHA6 (NM_003771.3,763-781).
ccagtggatctcaacaaga

SEQ ID NO: 289751 - DNA, 19 bp, Homo sapiens
  siRNA target sequence for KRTHA6 (NM_003771.3,979-997).
cacagcatgcggaattcct

SEQ ID NO: 289752 - DNA, 19 bp, Homo sapiens
  siRNA target sequence for KRTHA6 (NM_003771.3,1232-1250).
cggcatgcaagcctgttat

SEQ ID NO: 289753 - DNA, 19 bp, Homo sapiens
  siRNA target sequence for KRTHA6 (NM_003771.3,1233-1251).
ggcatgcaagcctgttatt

SEQ ID NO: 289754 - DNA, 19 bp, Homo sapiens
  siRNA target sequence for KRTHA6 (NM_003771.3,1238-1256).
gcaagcctgttattagagt

SEQ ID NO: 289755 - DNA, 19 bp, Homo sapiens
  siRNA target sequence for KRTHB2 (NM_033033.3,426-444).
cactggcactggagataga

SEQ ID NO: 289756 - DNA, 19 bp, Homo sapiens
  siRNA target sequence for KRTHB2 (NM_033033.3,503-521).
cgtttcgcatctttcatca

SEQ ID NO: 289757 - DNA, 19 bp, Homo sapiens
  siRNA target sequence for KRTHB2 (NM_033033.3,757-775).
gcgtccctgtgttgagaat

SEQ ID NO: 289758 - DNA, 19 bp, Homo sapiens
  siRNA target sequence for KRTHB2 (NM_033033.3,759-777).
gtccctgtgttgagaatga

SEQ ID NO: 289759 - DNA, 19 bp, Homo sapiens
  siRNA target sequence for KRTHB2 (NM_033033.3,763-781).
ctgtgttgagaatgagttt

SEQ ID NO: 289760 - DNA, 19 bp, Homo sapiens
  siRNA target sequence for KRTHB2 (NM_033033.3,1117-1135).
cgagatcctggaaatgaat

SEQ ID NO: 289761 - DNA, 19 bp, Homo sapiens
  siRNA target sequence for KRTHB2 (NM_033033.3,1157-1175).
caagaaaccgagaatgtca

SEQ ID NO: 289762 - DNA, 19 bp, Homo sapiens
  siRNA target sequence for KRTHB4 (NM_033045.2,184-202).
ggccttggcagctttggta

SEQ ID NO: 289763 - DNA, 19 bp, Homo sapiens
  siRNA target sequence for KRTHB4 (NM_033045.2,917-935).
ccctaactcaggaaattga

SEQ ID NO: 289764 - DNA, 19 bp, Homo sapiens
  siRNA target sequence for KRTHB4 (NM_033045.2,947-965).
cgctttacatggaggaaat

SEQ ID NO: 289765 - DNA, 19 bp, Homo sapiens
  siRNA target sequence for KRTHB4 (NM_033045.2,1032-1050).
gaaccttgatgggatcatt

SEQ ID NO: 289766 - DNA, 19 bp, Homo sapiens
  siRNA target sequence for AF053356_CDS3 (NM_023948.3,523-541).
gacgcagagggatatgtga

SEQ ID NO: 289767 - DNA, 19 bp, Homo sapiens
  siRNA target sequence for AF053356_CDS3 (NM_023948.3,545-563).
cccagtcttgcattgacat

SEQ ID NO: 289768 - DNA, 19 bp, Homo sapiens
  siRNA target sequence for AF053356_CDS3 (NM_023948.3,546-564).
ccagtcttgcattgacatt

SEQ ID NO: 289769 - DNA, 19 bp, Homo sapiens
  siRNA target sequence for AF053356_CDS3 (NM_023948.3,658-676).
gtgggacgcaaggacatta

SEQ ID NO: 289770 - DNA, 19 bp, Homo sapiens
  siRNA target sequence for ARVCF (NM_001670.1,730-748).
cccactaggcccttttgca

SEQ ID NO: 289771 - DNA, 19 bp, Homo sapiens
  siRNA target sequence for ARVCF (NM_001670.1,1675-1693).
gtggaacctgtcatcctat

SEQ ID NO: 289772 - DNA, 19 bp, Homo sapiens
  siRNA target sequence for ARVCF (NM_001670.1,2778-2796).
gtggtaccttgcagaaaga

SEQ ID NO: 289773 - DNA, 19 bp, Homo sapiens
  siRNA target sequence for ARVCF (NM_001670.1,2908-2926).
ccttgagggcgagaaaact

SEQ ID NO: 289774 - DNA, 19 bp, Homo sapiens
  siRNA target sequence for ARVCF (NM_001670.1,2925-2943).
ctggcagccgggatgtgat

SEQ ID NO: 289775 - DNA, 19 bp, Homo sapiens
  siRNA target sequence for BFAR (NM_016561.1,163-181).
cctcagaaaagctatgtga

SEQ ID NO: 289776 - DNA, 19 bp, Homo sapiens
  siRNA target sequence for BFAR (NM_016561.1,263-281).
gctacgacatcctggttaa

SEQ ID NO: 289777 - DNA, 19 bp, Homo sapiens
  siRNA target sequence for BFAR (NM_016561.1,335-353).
ggtgggcatcttcaaagaa

SEQ ID NO: 289778 - DNA, 19 bp, Homo sapiens
  siRNA target sequence for BFAR (NM_016561.1,625-643).
gtcctgctcgtctatcact

SEQ ID NO: 289779 - DNA, 19 bp, Homo sapiens
  siRNA target sequence for BFAR (NM_016561.1,751-769).
ctttacagggaaaggtttt

SEQ ID NO: 289780 - DNA, 19 bp, Homo sapiens
  siRNA target sequence for BFAR (NM_016561.1,759-777).
ggaaaggtttttatctgaa

SEQ ID NO: 289781 - DNA, 19 bp, Homo sapiens
  siRNA target sequence for BFAR (NM_016561.1,781-799).
gtaaatggaaggttgcttt

SEQ ID NO: 289782 - DNA, 19 bp, Homo sapiens
  siRNA target sequence for BFAR (NM_016561.1,824-842).
ccaagacgccctataccat

SEQ ID NO: 289783 - DNA, 19 bp, Homo sapiens
  siRNA target sequence for BFAR (NM_016561.1,825-843).
caagacgccctataccata

SEQ ID NO: 289784 - DNA, 19 bp, Homo sapiens
  siRNA target sequence for BFAR (NM_016561.1,828-846).
gacgccctataccatagaa

SEQ ID NO: 289785 - DNA, 19 bp, Homo sapiens
  siRNA target sequence for BFAR (NM_016561.1,830-848).
cgccctataccatagaaaa

SEQ ID NO: 289786 - DNA, 19 bp, Homo sapiens
  siRNA target sequence for BFAR (NM_016561.1,832-850).
ccctataccatagaaaaca

SEQ ID NO: 289787 - DNA, 19 bp, Homo sapiens
  siRNA target sequence for BFAR (NM_016561.1,876-894).
ggagctagaacgtgtcaaa

SEQ ID NO: 289788 - DNA, 19 bp, Homo sapiens
  siRNA target sequence for BFAR (NM_016561.1,880-898).
ctagaacgtgtcaaagcat

SEQ ID NO: 289789 - DNA, 19 bp, Homo sapiens
  siRNA target sequence for BFAR (NM_016561.1,953-971).
ggtccctgttcctgctata

SEQ ID NO: 289790 - DNA, 19 bp, Homo sapiens
  siRNA target sequence for BFAR (NM_016561.1,1144-1162).
gagttcctggtcaaatact

SEQ ID NO: 289791 - DNA, 19 bp, Homo sapiens
  siRNA target sequence for BFAR (NM_016561.1,1223-1241).
ggacatcacggtttctcat

SEQ ID NO: 289792 - DNA, 19 bp, Homo sapiens
  siRNA target sequence for BFAR (NM_016561.1,1239-1257).
catcatcaatgctatgtta

SEQ ID NO: 289793 - DNA, 19 bp, Homo sapiens
  siRNA target sequence for BFAR (NM_016561.1,1295-1313).
ggtcgagaagtgaactgaa

SEQ ID NO: 289794 - DNA, 19 bp, Homo sapiens
  siRNA target sequence for BFAR (NM_016561.1,1434-1452).
gtactttaacccaattatt

SEQ ID NO: 289795 - DNA, 19 bp, Homo sapiens
  siRNA target sequence for C21orf29 (NM_144991.2,203-221).
gcgggatcaggatagttca

SEQ ID NO: 289796 - DNA, 19 bp, Homo sapiens
  siRNA target sequence for C21orf29 (NM_144991.2,593-611).
gcctcccggtggacataat

SEQ ID NO: 289797 - DNA, 19 bp, Homo sapiens
  siRNA target sequence for C21orf29 (NM_144991.2,829-847).
gataacgaggtgctaaaat

SEQ ID NO: 289798 - DNA, 19 bp, Homo sapiens
  siRNA target sequence for C21orf29 (NM_144991.2,840-858).
gctaaaatatccctatgaa

SEQ ID NO: 289799 - DNA, 19 bp, Homo sapiens
  siRNA target sequence for C21orf29 (NM_144991.2,912-930).
cgcccagttctggtttgat

SEQ ID NO: 289800 - DNA, 19 bp, Homo sapiens
  siRNA target sequence for C21orf29 (NM_144991.2,935-953).
gccggaagggcctgtatct

SEQ ID NO: 289801 - DNA, 19 bp, Homo sapiens
  siRNA target sequence for C21orf29 (NM_144991.2,937-955).
cggaagggcctgtatctgt

SEQ ID NO: 289802 - DNA, 19 bp, Homo sapiens
  siRNA target sequence for C21orf29 (NM_144991.2,1112-1130).
ccacatccgccgtctacaa

SEQ ID NO: 289803 - DNA, 19 bp, Homo sapiens
  siRNA target sequence for C21orf29 (NM_144991.2,1202-1220).
ccatcgggaaaaagatctt

SEQ ID NO: 289804 - DNA, 19 bp, Homo sapiens
  siRNA target sequence for C21orf29 (NM_144991.2,1781-1799).
cgcaggcctttgtcaagtt

SEQ ID NO: 289805 - DNA, 19 bp, Homo sapiens
  siRNA target sequence for C21orf29 (NM_144991.2,1822-1840).
gctctggactgggagtttt

SEQ ID NO: 289806 - DNA, 19 bp, Homo sapiens
  siRNA target sequence for C21orf29 (NM_144991.2,1823-1841).
ctctggactgggagttttt

SEQ ID NO: 289807 - DNA, 19 bp, Homo sapiens
  siRNA target sequence for C21orf29 (NM_144991.2,1842-1860).
ctcggtgggagaagattat

SEQ ID NO: 289808 - DNA, 19 bp, Homo sapiens
  siRNA target sequence for C21orf29 (NM_144991.2,1844-1862).
cggtgggagaagattattt

SEQ ID NO: 289809 - DNA, 19 bp, Homo sapiens
  siRNA target sequence for C21orf29 (NM_144991.2,2008-2026).
ggtgcctacctcatctact

SEQ ID NO: 289810 - DNA, 19 bp, Homo sapiens
  siRNA target sequence for CAV1 (NM_001753.3,281-299).
gtctgggggcaaatacgta

SEQ ID NO: 289811 - DNA, 19 bp, Homo sapiens
  siRNA target sequence for CAV1 (NM_001753.3,333-351).
cgggaacagggcaacatct

SEQ ID NO: 289812 - DNA, 19 bp, Homo sapiens
  siRNA target sequence for CAV1 (NM_001753.3,334-352).
gggaacagggcaacatcta

SEQ ID NO: 289813 - DNA, 19 bp, Homo sapiens
  siRNA target sequence for CAV1 (NM_001753.3,462-480).
gacgtggtcaagattgact

SEQ ID NO: 289814 - DNA, 19 bp, Homo sapiens
  siRNA target sequence for CAV1 (NM_001753.3,464-482).
cgtggtcaagattgacttt

SEQ ID NO: 289815 - DNA, 19 bp, Homo sapiens
  siRNA target sequence for CAV1 (NM_001753.3,517-535).
gttttgacggcatttggaa

SEQ ID NO: 289816 - DNA, 19 bp, Homo sapiens
  siRNA target sequence for CAV1 (NM_001753.3,550-568).
ccttcactgtgacgaaata

SEQ ID NO: 289817 - DNA, 19 bp, Homo sapiens
  siRNA target sequence for CAV1 (NM_001753.3,558-576).
gtgacgaaatactggtttt

SEQ ID NO: 289818 - DNA, 19 bp, Homo sapiens
  siRNA target sequence for CAV1 (NM_001753.3,683-701).
gagcttcctgattgagatt

SEQ ID NO: 289819 - DNA, 19 bp, Homo sapiens
  siRNA target sequence for CAV1 (NM_001753.3,704-722).
gtgcatcagccgtgtctat

SEQ ID NO: 289820 - DNA, 19 bp, Homo sapiens
  siRNA target sequence for CAV1 (NM_001753.3,740-758).
cgtctgtgacccactcttt

SEQ ID NO: 289821 - DNA, 19 bp, Homo sapiens
  siRNA target sequence for CLDN1 (NM_021101.3,580-598).
cattgggggtgcgatattt

SEQ ID NO: 289822 - DNA, 19 bp, Homo sapiens
  siRNA target sequence for CLDN1 (NM_021101.3,602-620).
cttgcaggtctggctattt

SEQ ID NO: 289823 - DNA, 19 bp, Homo sapiens
  siRNA target sequence for CLDN1 (NM_021101.3,632-650).
gcatggtatggcaatagaa

SEQ ID NO: 289824 - DNA, 19 bp, Homo sapiens
  siRNA target sequence for CLDN1 (NM_021101.3,633-651).
catggtatggcaatagaat

SEQ ID NO: 289825 - DNA, 19 bp, Homo sapiens
  siRNA target sequence for CLDN1 (NM_021101.3,642-660).
gcaatagaatcgttcaaga

SEQ ID NO: 289826 - DNA, 19 bp, Homo sapiens
  siRNA target sequence for CLDN1 (NM_021101.3,648-666).
gaatcgttcaagaattcta

SEQ ID NO: 289827 - DNA, 19 bp, Homo sapiens
  siRNA target sequence for CLDN1 (NM_021101.3,804-822).
caccaaggccctatccaaa

SEQ ID NO: 289828 - DNA, 19 bp, Homo sapiens
  siRNA target sequence for CLDN1 (NM_021101.3,830-848).
ccttccagcgggaaagact

SEQ ID NO: 289829 - DNA, 19 bp, Homo sapiens
  siRNA target sequence for CLDN1 (NM_021101.3,831-849).
cttccagcgggaaagacta

SEQ ID NO: 289830 - DNA, 19 bp, Homo sapiens
  siRNA target sequence for CLDN10 (NM_006984.3,56-74).
gcacggcttcggagatcat

SEQ ID NO: 289831 - DNA, 19 bp, Homo sapiens
  siRNA target sequence for CLDN10 (NM_006984.3,154-172).
gacggcacggtcatcacaa

SEQ ID NO: 289832 - DNA, 19 bp, Homo sapiens
  siRNA target sequence for CLDN10 (NM_006984.3,260-278).
cgctggacggttatataca

SEQ ID NO: 289833 - DNA, 19 bp, Homo sapiens
  siRNA target sequence for CLDN10 (NM_006984.3,281-299).
catgtagaggacttatgat

SEQ ID NO: 289834 - DNA, 19 bp, Homo sapiens
  siRNA target sequence for CLDN10 (NM_006984.3,315-333).
gggcttctttggttccata

SEQ ID NO: 289835 - DNA, 19 bp, Homo sapiens
  siRNA target sequence for CLDN10 (NM_006984.3,374-392).
ccgataaagccaaagctaa

SEQ ID NO: 289836 - DNA, 19 bp, Homo sapiens
  siRNA target sequence for CLDN10 (NM_006984.3,405-423).
ggctgggattgtattcata

SEQ ID NO: 289837 - DNA, 19 bp, Homo sapiens
  siRNA target sequence for CLDN10 (NM_006984.3,449-467).
gatgttccctatatgcaaa

SEQ ID NO: 289838 - DNA, 19 bp, Homo sapiens
  siRNA target sequence for CLDN10 (NM_006984.3,474-492).
cacaacggaattctttgat

SEQ ID NO: 289839 - DNA, 19 bp, Homo sapiens
  siRNA target sequence for CLDN10 (NM_006984.3,486-504).
ctttgatcctctctttgtt

SEQ ID NO: 289840 - DNA, 19 bp, Homo sapiens
  siRNA target sequence for CLDN10 (NM_006984.3,496-514).
ctctttgttgagcaaaagt

SEQ ID NO: 289841 - DNA, 19 bp, Homo sapiens
  siRNA target sequence for CLDN10 (NM_006984.3,507-525).
gcaaaagtatgaattagga

SEQ ID NO: 289842 - DNA, 19 bp, Homo sapiens
  siRNA target sequence for CLDN10 (NM_006984.3,526-544).
gccgctctgtttattggat

SEQ ID NO: 289843 - DNA, 19 bp, Homo sapiens
  siRNA target sequence for CLDN10 (NM_006984.3,550-568).
ggagcctcactgtgcataa

SEQ ID NO: 289844 - DNA, 19 bp, Homo sapiens
  siRNA target sequence for CLDN10 (NM_006984.3,551-569).
gagcctcactgtgcataat

SEQ ID NO: 289845 - DNA, 19 bp, Homo sapiens
  siRNA target sequence for CLDN10 (NM_006984.3,564-582).
cataattggtggtgtcata

SEQ ID NO: 289846 - DNA, 19 bp, Homo sapiens
  siRNA target sequence for CLDN10 (NM_006984.3,651-669).
gtcttctcggacaaagtat

SEQ ID NO: 289847 - DNA, 19 bp, Homo sapiens
  siRNA target sequence for CLDN10 (NM_006984.3,653-671).
cttctcggacaaagtatca

SEQ ID NO: 289848 - DNA, 19 bp, Homo sapiens
  siRNA target sequence for CLDN10 (NM_006984.3,666-684).
gtatcatggtggagaagat

SEQ ID NO: 289849 - DNA, 19 bp, Homo sapiens
  siRNA target sequence for CLDN10 (NM_182848.2,294-312).
gctaccacgtccaatgagt

SEQ ID NO: 289850 - DNA, 19 bp, Homo sapiens
  siRNA target sequence for CLDN10 (NM_182848.2,327-345).
cgagcctcctcggtgataa

SEQ ID NO: 289851 - DNA, 19 bp, Homo sapiens
  siRNA target sequence for CLDN10 (NM_182848.2,346-364).
cagccacttgggtttacca

SEQ ID NO: 289852 - DNA, 19 bp, Homo sapiens
  siRNA target sequence for CLDN10 (NM_182848.2,388-406).
gtaacgcgttgggttcttt

SEQ ID NO: 289853 - DNA, 19 bp, Homo sapiens
  siRNA target sequence for CLDN10 (NM_182848.2,393-411).
gcgttgggttctttccatt

SEQ ID NO: 289854 - DNA, 19 bp, Homo sapiens
  siRNA target sequence for CLDN10 (NM_182848.2,407-425).
ccattgccgaccgcatttt

SEQ ID NO: 289855 - DNA, 19 bp, Homo sapiens
  siRNA target sequence for CLDN10 (NM_182848.2,408-426).
cattgccgaccgcatttta

SEQ ID NO: 289856 - DNA, 19 bp, Homo sapiens
  siRNA target sequence for CLDN10 (NM_182848.2,412-430).
gccgaccgcattttactat

SEQ ID NO: 289857 - DNA, 19 bp, Homo sapiens
  siRNA target sequence for CLDN10 (NM_182848.2,414-432).
cgaccgcattttactatct

SEQ ID NO: 289858 - DNA, 19 bp, Homo sapiens
  siRNA target sequence for CLDN10 (NM_182848.2,415-433).
gaccgcattttactatctt

SEQ ID NO: 289859 - DNA, 19 bp, Homo sapiens
  siRNA target sequence for CLDN10 (NM_182848.2,417-435).
ccgcattttactatcttca

SEQ ID NO: 289860 - DNA, 19 bp, Homo sapiens
  siRNA target sequence for CLDN10 (NM_182848.2,418-436).
cgcattttactatcttcaa

SEQ ID NO: 289861 - DNA, 19 bp, Homo sapiens
  siRNA target sequence for CLDN10 (NM_182848.2,419-437).
gcattttactatcttcaaa

SEQ ID NO: 289862 - DNA, 19 bp, Homo sapiens
  siRNA target sequence for CLDN10 (NM_182848.2,431-449).
cttcaaagtagcaggttat

SEQ ID NO: 289863 - DNA, 19 bp, Homo sapiens
  siRNA target sequence for CLDN11 (NM_005602.4,524-542).
cccggtgtggctaagtaca

SEQ ID NO: 289864 - DNA, 19 bp, Homo sapiens
  siRNA target sequence for CLDN12 (NM_012129.2,324-342).
gagaagaacctgactgttt

SEQ ID NO: 289865 - DNA, 19 bp, Homo sapiens
  siRNA target sequence for CLDN12 (NM_012129.2,382-400).
gcagtgactgcctgatgta

SEQ ID NO: 289866 - DNA, 19 bp, Homo sapiens
  siRNA target sequence for CLDN12 (NM_012129.2,393-411).
ctgatgtacgacactactt

SEQ ID NO: 289867 - DNA, 19 bp, Homo sapiens
  siRNA target sequence for CLDN12 (NM_012129.2,402-420).
gacactacttggtactcat

SEQ ID NO: 289868 - DNA, 19 bp, Homo sapiens
  siRNA target sequence for CLDN12 (NM_012129.2,538-556).
cggtgcccaacatcaaact

SEQ ID NO: 289869 - DNA, 19 bp, Homo sapiens
  siRNA target sequence for CLDN12 (NM_012129.2,593-611).
ggtggctgggctgctattt

SEQ ID NO: 289870 - DNA, 19 bp, Homo sapiens
  siRNA target sequence for CLDN12 (NM_012129.2,746-764).
gtttatgacttcccttata

SEQ ID NO: 289871 - DNA, 19 bp, Homo sapiens
  siRNA target sequence for CLDN12 (NM_012129.2,776-794).
gtattgtacatgcaaatct

SEQ ID NO: 289872 - DNA, 19 bp, Homo sapiens
  siRNA target sequence for CLDN12 (NM_012129.2,827-845).
ccatccacccagtatgcat

SEQ ID NO: 289873 - DNA, 19 bp, Homo sapiens
  siRNA target sequence for CLDN12 (NM_012129.2,828-846).
catccacccagtatgcata

SEQ ID NO: 289874 - DNA, 19 bp, Homo sapiens
  siRNA target sequence for CLDN12 (NM_012129.2,831-849).
ccacccagtatgcatactt

SEQ ID NO: 289875 - DNA, 19 bp, Homo sapiens
  siRNA target sequence for CLDN12 (NM_012129.2,836-854).
cagtatgcatacttactca

SEQ ID NO: 289876 - DNA, 19 bp, Homo sapiens
  siRNA target sequence for CLDN14 (NM_012130.2,598-616).
gcccagcggcatgaagttt

SEQ ID NO: 289877 - DNA, 19 bp, Homo sapiens
  siRNA target sequence for CLDN14 (NM_012130.2,782-800).
ccagctgcctacaaagaca

SEQ ID NO: 289878 - DNA, 19 bp, Homo sapiens
  siRNA target sequence for CLDN15 (NM_014343.1,259-277).
cgatggctgtggaaacctt

SEQ ID NO: 289879 - DNA, 19 bp, Homo sapiens
  siRNA target sequence for CLDN15 (NM_014343.1,260-278).
gatggctgtggaaaccttt

SEQ ID NO: 289880 - DNA, 19 bp, Homo sapiens
  siRNA target sequence for CLDN15 (NM_014343.1,461-479).
ggccctctctgggtatatt

SEQ ID NO: 289881 - DNA, 19 bp, Homo sapiens
  siRNA target sequence for CLDN15 (NM_014343.1,661-679).
cctggtacgccttcaacat

SEQ ID NO: 289882 - DNA, 19 bp, Homo sapiens
  siRNA target sequence for CLDN15 (NM_138429.1,431-449).
cttgtccggctgatgtcta

SEQ ID NO: 289883 - DNA, 19 bp, Homo sapiens
  siRNA target sequence for CLDN15 (NM_138429.1,434-452).
gtccggctgatgtctataa

SEQ ID NO: 289884 - DNA, 19 bp, Homo sapiens
  siRNA target sequence for CLDN17 (NM_012131.1,90-108).
gagagtatcagcttttgtt

SEQ ID NO: 289885 - DNA, 19 bp, Homo sapiens
  siRNA target sequence for CLDN17 (NM_012131.1,145-163).
gggctctggatgaattgca

SEQ ID NO: 289886 - DNA, 19 bp, Homo sapiens
  siRNA target sequence for CLDN17 (NM_012131.1,146-164).
ggctctggatgaattgcat

SEQ ID NO: 289887 - DNA, 19 bp, Homo sapiens
  siRNA target sequence for CLDN17 (NM_012131.1,176-194).
gggtccggttgcaatgcaa

SEQ ID NO: 289888 - DNA, 19 bp, Homo sapiens
  siRNA target sequence for CLDN17 (NM_012131.1,181-199).
cggttgcaatgcaagttct

SEQ ID NO: 289889 - DNA, 19 bp, Homo sapiens
  siRNA target sequence for CLDN17 (NM_012131.1,182-200).
ggttgcaatgcaagttcta

SEQ ID NO: 289890 - DNA, 19 bp, Homo sapiens
  siRNA target sequence for CLDN17 (NM_012131.1,183-201).
gttgcaatgcaagttctat

SEQ ID NO: 289891 - DNA, 19 bp, Homo sapiens
  siRNA target sequence for CLDN17 (NM_012131.1,187-205).
caatgcaagttctatagct

SEQ ID NO: 289892 - DNA, 19 bp, Homo sapiens
  siRNA target sequence for CLDN17 (NM_012131.1,273-291).
cttgatcgccctgcttatt

SEQ ID NO: 289893 - DNA, 19 bp, Homo sapiens
  siRNA target sequence for CLDN17 (NM_012131.1,336-354).
gagggccaaagcatacctt

SEQ ID NO: 289894 - DNA, 19 bp, Homo sapiens
  siRNA target sequence for CLDN17 (NM_012131.1,386-404).
cgggcatcttcgttctgat

SEQ ID NO: 289895 - DNA, 19 bp, Homo sapiens
  siRNA target sequence for CLDN17 (NM_012131.1,413-431).
gctggacagccaatataat

SEQ ID NO: 289896 - DNA, 19 bp, Homo sapiens
  siRNA target sequence for CLDN17 (NM_012131.1,416-434).
ggacagccaatataatcat

SEQ ID NO: 289897 - DNA, 19 bp, Homo sapiens
  siRNA target sequence for CLDN17 (NM_012131.1,483-501).
gggagcagcacttttcctt

SEQ ID NO: 289898 - DNA, 19 bp, Homo sapiens
  siRNA target sequence for CLDN17 (NM_012131.1,538-556).
ggtctgctttgtggatttt

SEQ ID NO: 289899 - DNA, 19 bp, Homo sapiens
  siRNA target sequence for CLDN17 (NM_012131.1,622-640).
gataagcgaagaaatacga

SEQ ID NO: 289900 - DNA, 19 bp, Homo sapiens
  siRNA target sequence for CLDN18 (NM_016369.1,193-211).
gaatgcaggccctatttca

SEQ ID NO: 289901 - DNA, 19 bp, Homo sapiens
  siRNA target sequence for CLDN18 (NM_016369.1,242-260).
cagtgcgagccctgatgat

SEQ ID NO: 289902 - DNA, 19 bp, Homo sapiens
  siRNA target sequence for CLDN18 (NM_016369.1,368-386).
cctccgggatcatgttcat

SEQ ID NO: 289903 - DNA, 19 bp, Homo sapiens
  siRNA target sequence for CLDN18 (NM_016369.1,369-387).
ctccgggatcatgttcatt

SEQ ID NO: 289904 - DNA, 19 bp, Homo sapiens
  siRNA target sequence for CLDN18 (NM_016369.1,371-389).
ccgggatcatgttcattgt

SEQ ID NO: 289905 - DNA, 19 bp, Homo sapiens
  siRNA target sequence for CLDN18 (NM_016369.1,428-446).
ccaacatgctggtgactaa

SEQ ID NO: 289906 - DNA, 19 bp, Homo sapiens
  siRNA target sequence for CLDN18 (NM_016369.1,502-520).
gttcagaccaggtacacat

SEQ ID NO: 289907 - DNA, 19 bp, Homo sapiens
  siRNA target sequence for CLDN18 (NM_016369.1,507-525).
gaccaggtacacatttggt

SEQ ID NO: 289908 - DNA, 19 bp, Homo sapiens
  siRNA target sequence for CLDN18 (NM_016369.1,551-569).
ctggaggcctcacactaat

SEQ ID NO: 289909 - DNA, 19 bp, Homo sapiens
  siRNA target sequence for CLDN18 (NM_016369.1,624-642).
ctacaaagccgtttcttat

SEQ ID NO: 289910 - DNA, 19 bp, Homo sapiens
  siRNA target sequence for CLDN18 (NM_016369.1,627-645).
caaagccgtttcttatcat

SEQ ID NO: 289911 - DNA, 19 bp, Homo sapiens
  siRNA target sequence for CLDN18 (NM_016369.1,703-721).
gggtccaacaccaaaaaca

SEQ ID NO: 289912 - DNA, 19 bp, Homo sapiens
  siRNA target sequence for CLDN18 (NM_016369.1,751-769).
gaggacgaggtacaatctt

SEQ ID NO: 289913 - DNA, 19 bp, Homo sapiens
  siRNA target sequence for CLDN18 (NM_016369.1,753-771).
ggacgaggtacaatcttat

SEQ ID NO: 289914 - DNA, 19 bp, Homo sapiens
  siRNA target sequence for CLDN18 (NM_016369.1,756-774).
cgaggtacaatcttatcct

SEQ ID NO: 289915 - DNA, 19 bp, Homo sapiens
  siRNA target sequence for CLDN18 (NM_016369.1,757-775).
gaggtacaatcttatcctt

SEQ ID NO: 289916 - DNA, 19 bp, Homo sapiens
  siRNA target sequence for CLDN19 (NM_148960.1,297-315).
gcaggcgacgccatcatca

SEQ ID NO: 289917 - DNA, 19 bp, Homo sapiens
  siRNA target sequence for CLDN19 (NM_148960.1,810-828).
gcccgagaaccagttgtta

SEQ ID NO: 289918 - DNA, 19 bp, Homo sapiens
  siRNA target sequence for CLDN2 (NM_020384.2,780-798).
gtgcctgacagcatgaaat

SEQ ID NO: 289919 - DNA, 19 bp, Homo sapiens
  siRNA target sequence for CLDN2 (NM_020384.2,782-800).
gcctgacagcatgaaattt

SEQ ID NO: 289920 - DNA, 19 bp, Homo sapiens
  siRNA target sequence for CLDN2 (NM_020384.2,892-910).
gaaatcgctccaactacta

SEQ ID NO: 289921 - DNA, 19 bp, Homo sapiens
  siRNA target sequence for CLDN2 (NM_020384.2,961-979).
gtcaacctcccaaagtcaa

SEQ ID NO: 289922 - DNA, 19 bp, Homo sapiens
  siRNA target sequence for CLDN5 (NM_003277.2,834-852).
ggcgtgctctacctgtttt

SEQ ID NO: 289923 - DNA, 19 bp, Homo sapiens
  siRNA target sequence for CLDN5 (NM_003277.2,880-898).
gctggttcgccaacattgt

SEQ ID NO: 289924 - DNA, 19 bp, Homo sapiens
  siRNA target sequence for CLDN5 (NM_003277.2,1096-1114).
ccggcgactacgacaagaa

SEQ ID NO: 289925 - DNA, 19 bp, Homo sapiens
  siRNA target sequence for CLDN5 (NM_003277.2,1099-1117).
gcgactacgacaagaagaa

SEQ ID NO: 289926 - DNA, 19 bp, Homo sapiens
  siRNA target sequence for CLDN6 (NM_021195.3,671-689).
gagtaccctaccaagaatt

SEQ ID NO: 289927 - DNA, 19 bp, Homo sapiens
  siRNA target sequence for CLDN7 (NM_001307.3,532-550).
gcgggtgacaacatcatca

SEQ ID NO: 289928 - DNA, 19 bp, Homo sapiens
  siRNA target sequence for CLDN7 (NM_001307.3,662-680).
ccactcgagccctaatggt

SEQ ID NO: 289929 - DNA, 19 bp, Homo sapiens
  siRNA target sequence for CLDN7 (NM_001307.3,782-800).
ccatgggtggaggcataat

SEQ ID NO: 289930 - DNA, 19 bp, Homo sapiens
  siRNA target sequence for CLDN7 (NM_001307.3,787-805).
ggtggaggcataattttca

SEQ ID NO: 289931 - DNA, 19 bp, Homo sapiens
  siRNA target sequence for CLDN7 (NM_001307.3,788-806).
gtggaggcataattttcat

SEQ ID NO: 289932 - DNA, 19 bp, Homo sapiens
  siRNA target sequence for CLDN7 (NM_001307.3,840-858).
ctggtatggccatcagatt

SEQ ID NO: 289933 - DNA, 19 bp, Homo sapiens
  siRNA target sequence for CLDN7 (NM_001307.3,885-903).
ccctaccaacattaagtat

SEQ ID NO: 289934 - DNA, 19 bp, Homo sapiens
  siRNA target sequence for CLDN7 (NM_001307.3,887-905).
ctaccaacattaagtatga

SEQ ID NO: 289935 - DNA, 19 bp, Homo sapiens
  siRNA target sequence for CLDN8 (NM_012132.3,112-130).
ggcaacccatgccttagaa

SEQ ID NO: 289936 - DNA, 19 bp, Homo sapiens
  siRNA target sequence for CLDN8 (NM_012132.3,199-217).
gagagtgtcggccttcatt

SEQ ID NO: 289937 - DNA, 19 bp, Homo sapiens
  siRNA target sequence for CLDN8 (NM_012132.3,203-221).
gtgtcggccttcattgaaa

SEQ ID NO: 289938 - DNA, 19 bp, Homo sapiens
  siRNA target sequence for CLDN8 (NM_012132.3,291-309).
ggatgcagtgcaaaatcta

SEQ ID NO: 289939 - DNA, 19 bp, Homo sapiens
  siRNA target sequence for CLDN8 (NM_012132.3,292-310).
gatgcagtgcaaaatctat

SEQ ID NO: 289940 - DNA, 19 bp, Homo sapiens
  siRNA target sequence for CLDN8 (NM_012132.3,295-313).
gcagtgcaaaatctatgat

SEQ ID NO: 289941 - DNA, 19 bp, Homo sapiens
  siRNA target sequence for CLDN8 (NM_012132.3,400-418).
ggccatccttggcatgaaa

SEQ ID NO: 289942 - DNA, 19 bp, Homo sapiens
  siRNA target sequence for CLDN8 (NM_012132.3,401-419).
gccatccttggcatgaaat

SEQ ID NO: 289943 - DNA, 19 bp, Homo sapiens
  siRNA target sequence for CLDN8 (NM_012132.3,429-447).
gcacgggggacaatgagaa

SEQ ID NO: 289944 - DNA, 19 bp, Homo sapiens
  siRNA target sequence for CLDN8 (NM_012132.3,467-485).
ctgacggctggaatcatct

SEQ ID NO: 289945 - DNA, 19 bp, Homo sapiens
  siRNA target sequence for CLDN8 (NM_012132.3,546-564).
gagatttctataactcaat

SEQ ID NO: 289946 - DNA, 19 bp, Homo sapiens
  siRNA target sequence for CLDN8 (NM_012132.3,553-571).
ctataactcaatagtgaat

SEQ ID NO: 289947 - DNA, 19 bp, Homo sapiens
  siRNA target sequence for CLDN8 (NM_012132.3,568-586).
gaatgttgcccaaaaacgt

SEQ ID NO: 289948 - DNA, 19 bp, Homo sapiens
  siRNA target sequence for CLDN8 (NM_012132.3,596-614).
gaagctctctacttaggat

SEQ ID NO: 289949 - DNA, 19 bp, Homo sapiens
  siRNA target sequence for CLDN8 (NM_012132.3,621-639).
cggcactggtgctgattgt

SEQ ID NO: 289950 - DNA, 19 bp, Homo sapiens
  siRNA target sequence for CLDN8 (NM_012132.3,622-640).
ggcactggtgctgattgtt

SEQ ID NO: 289951 - DNA, 19 bp, Homo sapiens
  siRNA target sequence for CLDN8 (NM_012132.3,662-680).
gttttttgttgcaacgaaa

SEQ ID NO: 289952 - DNA, 19 bp, Homo sapiens
  siRNA target sequence for CLDN8 (NM_012132.3,716-734).
cgcacaacccaaaaaagtt

SEQ ID NO: 289953 - DNA, 19 bp, Homo sapiens
  siRNA target sequence for CLDN8 (NM_012132.3,717-735).
gcacaacccaaaaaagtta

SEQ ID NO: 289954 - DNA, 19 bp, Homo sapiens
  siRNA target sequence for CLDN8 (NM_012132.3,720-738).
caacccaaaaaagttatca

SEQ ID NO: 289955 - DNA, 19 bp, Homo sapiens
  siRNA target sequence for CLDN8 (NM_012132.3,732-750).
gttatcacaccggaaagaa

SEQ ID NO: 289956 - DNA, 19 bp, Homo sapiens
  siRNA target sequence for CLDN9 (NM_020982.1,5-23).
cttcgaccggcttagaact

SEQ ID NO: 289957 - DNA, 19 bp, Homo sapiens
  siRNA target sequence for CLDN9 (NM_020982.1,509-527).
cggctgcactgcttatgct

SEQ ID NO: 289958 - DNA, 19 bp, Homo sapiens
  siRNA target sequence for CLTC (NM_004859.1,178-196).
ccagattctgccaattcgt

SEQ ID NO: 289959 - DNA, 19 bp, Homo sapiens
  siRNA target sequence for CLTC (NM_004859.1,179-197).
cagattctgccaattcgtt

SEQ ID NO: 289960 - DNA, 19 bp, Homo sapiens
  siRNA target sequence for CLTC (NM_004859.1,239-257).
gcaaacattggcttcagta

SEQ ID NO: 289961 - DNA, 19 bp, Homo sapiens
  siRNA target sequence for CLTC (NM_004859.1,249-267).
gcttcagtaccctgactat

SEQ ID NO: 289962 - DNA, 19 bp, Homo sapiens
  siRNA target sequence for CLTC (NM_004859.1,269-287).
gagtctgacaaattcatct

SEQ ID NO: 289963 - DNA, 19 bp, Homo sapiens
  siRNA target sequence for CLTC (NM_004859.1,315-333).
cccaggtggtaatcattga

SEQ ID NO: 289964 - DNA, 19 bp, Homo sapiens
  siRNA target sequence for CLTC (NM_004859.1,316-334).
ccaggtggtaatcattgat

SEQ ID NO: 289965 - DNA, 19 bp, Homo sapiens
  siRNA target sequence for CLTC (NM_004859.1,317-335).
caggtggtaatcattgata

SEQ ID NO: 289966 - DNA, 19 bp, Homo sapiens
  siRNA target sequence for CLTC (NM_004859.1,320-338).
gtggtaatcattgatatga

SEQ ID NO: 289967 - DNA, 19 bp, Homo sapiens
  siRNA target sequence for CLTC (NM_004859.1,344-362).
ccaagtaatccaattcgaa

SEQ ID NO: 289968 - DNA, 19 bp, Homo sapiens
  siRNA target sequence for CLTC (NM_004859.1,353-371).
ccaattcgaagaccaattt

SEQ ID NO: 289969 - DNA, 19 bp, Homo sapiens
  siRNA target sequence for CLTC (NM_004859.1,403-421).
caaagtaattgcactgaaa

SEQ ID NO: 289970 - DNA, 19 bp, Homo sapiens
  siRNA target sequence for CLTC (NM_004859.1,520-538).
gaatacggttgctcttgtt

SEQ ID NO: 289971 - DNA, 19 bp, Homo sapiens
  siRNA target sequence for CLTC (NM_004859.1,540-558).
cggataatgcagtttatca

SEQ ID NO: 289972 - DNA, 19 bp, Homo sapiens
  siRNA target sequence for CLTC (NM_004859.1,614-632).
cttgcagggtgccagatta

SEQ ID NO: 289973 - DNA, 19 bp, Homo sapiens
  siRNA target sequence for CLTC (NM_004859.1,617-635).
gcagggtgccagattatca

SEQ ID NO: 289974 - DNA, 19 bp, Homo sapiens
  siRNA target sequence for CLTC (NM_004859.1,618-636).
cagggtgccagattatcaa

SEQ ID NO: 289975 - DNA, 19 bp, Homo sapiens
  siRNA target sequence for CLTC (NM_004859.1,620-638).
gggtgccagattatcaatt

SEQ ID NO: 289976 - DNA, 19 bp, Homo sapiens
  siRNA target sequence for CLTC (NM_004859.1,640-658).
ccgtacagatgcaaaacaa

SEQ ID NO: 289977 - DNA, 19 bp, Homo sapiens
  siRNA target sequence for CLTC (NM_004859.1,641-659).
cgtacagatgcaaaacaaa

SEQ ID NO: 289978 - DNA, 19 bp, Homo sapiens
  siRNA target sequence for CLTC (NM_004859.1,707-725).
ggagctatgcagctatatt

SEQ ID NO: 289979 - DNA, 19 bp, Homo sapiens
  siRNA target sequence for CLTC (NM_004859.1,711-729).
ctatgcagctatattctgt

SEQ ID NO: 289980 - DNA, 19 bp, Homo sapiens
  siRNA target sequence for CLTC (NM_004859.1,768-786).
ctagctttgcacagtttaa

SEQ ID NO: 289981 - DNA, 19 bp, Homo sapiens
  siRNA target sequence for CLTC (NM_004859.1,801-819).
cagaagaatcaacgttatt

SEQ ID NO: 289982 - DNA, 19 bp, Homo sapiens
  siRNA target sequence for CLTC (NM_004859.1,853-871).
gttacatattattgaagtt

SEQ ID NO: 289983 - DNA, 19 bp, Homo sapiens
  siRNA target sequence for CLTC (NM_004859.1,1002-1020).
ccaagtatggttatatcca

SEQ ID NO: 289984 - DNA, 19 bp, Homo sapiens
  siRNA target sequence for CLTC (NM_004859.1,1040-1058).
ggtacctgcatctacatga

SEQ ID NO: 289985 - DNA, 19 bp, Homo sapiens
  siRNA target sequence for CLTC (NM_004859.1,1041-1059).
gtacctgcatctacatgaa

SEQ ID NO: 289986 - DNA, 19 bp, Homo sapiens
  siRNA target sequence for CLTC (NM_004859.1,1047-1065).
gcatctacatgaatagaat

SEQ ID NO: 289987 - DNA, 19 bp, Homo sapiens
  siRNA target sequence for CLTC (NM_004859.1,1068-1086).
gtggagaaacaatttttgt

SEQ ID NO: 289988 - DNA, 19 bp, Homo sapiens
  siRNA target sequence for CLTC (NM_004859.1,1112-1130).
ggaataattggagtaaaca

SEQ ID NO: 289989 - DNA, 19 bp, Homo sapiens
  siRNA target sequence for CLTC (NM_004859.1,1179-1197).
cttacatcaccaatgttct

SEQ ID NO: 289990 - DNA, 19 bp, Homo sapiens
  siRNA target sequence for CLTC (NM_004859.1,1189-1207).
caatgttctacaaaatcct

SEQ ID NO: 289991 - DNA, 19 bp, Homo sapiens
  siRNA target sequence for CLTC (NM_004859.1,1219-1237).
gagaatggctgtacgtaat

SEQ ID NO: 289992 - DNA, 19 bp, Homo sapiens
  siRNA target sequence for CLTC (NM_004859.1,1221-1239).
gaatggctgtacgtaataa

SEQ ID NO: 289993 - DNA, 19 bp, Homo sapiens
  siRNA target sequence for CLTC (NM_004859.1,1225-1243).
ggctgtacgtaataactta

SEQ ID NO: 289994 - DNA, 19 bp, Homo sapiens
  siRNA target sequence for CLTC (NM_004859.1,1240-1258).
cttagccggtgctgaagaa

SEQ ID NO: 289995 - DNA, 19 bp, Homo sapiens
  siRNA target sequence for CLTC (NM_004859.1,1412-1430).
ctacttcagtactttggta

SEQ ID NO: 289996 - DNA, 19 bp, Homo sapiens
  siRNA target sequence for CLTC (NM_004859.1,1442-1460).
cagggacagctcaacaaat

SEQ ID NO: 289997 - DNA, 19 bp, Homo sapiens
  siRNA target sequence for CLTC (NM_004859.1,1446-1464).
gacagctcaacaaatacga

SEQ ID NO: 289998 - DNA, 19 bp, Homo sapiens
  siRNA target sequence for CLTC (NM_004859.1,1463-1481).
gaatccttagagctttgta

SEQ ID NO: 289999 - DNA, 19 bp, Homo sapiens
  siRNA target sequence for CLTC (NM_004859.1,1510-1528).
gcttttggagaaatggtta

SEQ ID NO: 290000 - DNA, 19 bp, Homo sapiens
  siRNA target sequence for CLTC (NM_004859.1,1561-1579).
gggtgatcttgtgaaatct

SEQ ID NO: 290001 - DNA, 19 bp, Homo sapiens
  siRNA target sequence for CLTC (NM_004859.1,1563-1581).
gtgatcttgtgaaatctgt

SEQ ID NO: 290002 - DNA, 19 bp, Homo sapiens
  siRNA target sequence for CLTC (NM_004859.1,1585-1603).
ccctacattggcacttagt

SEQ ID NO: 290003 - DNA, 19 bp, Homo sapiens
  siRNA target sequence for CLTC (NM_004859.1,1614-1632).
gggctaacgtcccaaataa

SEQ ID NO: 290004 - DNA, 19 bp, Homo sapiens
  siRNA target sequence for CLTC (NM_004859.1,1617-1635).
ctaacgtcccaaataaagt

SEQ ID NO: 290005 - DNA, 19 bp, Homo sapiens
  siRNA target sequence for CLTC (NM_004859.1,1765-1783).
gtttgcccaaatgttagtt

SEQ ID NO: 290006 - DNA, 19 bp, Homo sapiens
  siRNA target sequence for CLTC (NM_004859.1,1807-1825).
catcacacagattgtagat

SEQ ID NO: 290007 - DNA, 19 bp, Homo sapiens
  siRNA target sequence for CLTC (NM_004859.1,1820-1838).
gtagatgtctttatggaat

SEQ ID NO: 290008 - DNA, 19 bp, Homo sapiens
  siRNA target sequence for CLTC (NM_004859.1,1964-1982).
gctattctaggcaatcaga

SEQ ID NO: 290009 - DNA, 19 bp, Homo sapiens
  siRNA target sequence for CLTC (NM_004859.1,2041-2059).
gcagcgtgcattagaacat

SEQ ID NO: 290010 - DNA, 19 bp, Homo sapiens
  siRNA target sequence for CLTC (NM_004859.1,2042-2060).
cagcgtgcattagaacatt

SEQ ID NO: 290011 - DNA, 19 bp, Homo sapiens
  siRNA target sequence for CLTC (NM_004859.1,2045-2063).
cgtgcattagaacatttca

SEQ ID NO: 290012 - DNA, 19 bp, Homo sapiens
  siRNA target sequence for CLTC (NM_004859.1,2092-2110).
ggttcacacccatcttctt

SEQ ID NO: 290013 - DNA, 19 bp, Homo sapiens
  siRNA target sequence for CLTC (NM_004859.1,2093-2111).
gttcacacccatcttctta

SEQ ID NO: 290014 - DNA, 19 bp, Homo sapiens
  siRNA target sequence for CLTC (NM_004859.1,2115-2133).
ctgagtggttagtcaacta

SEQ ID NO: 290015 - DNA, 19 bp, Homo sapiens
  siRNA target sequence for CLTC (NM_004859.1,2117-2135).
gagtggttagtcaactact

SEQ ID NO: 290016 - DNA, 19 bp, Homo sapiens
  siRNA target sequence for CLTC (NM_004859.1,2119-2137).
gtggttagtcaactacttt

SEQ ID NO: 290017 - DNA, 19 bp, Homo sapiens
  siRNA target sequence for CLTC (NM_004859.1,2150-2168).
gtagaagactccctagaat

SEQ ID NO: 290018 - DNA, 19 bp, Homo sapiens
  siRNA target sequence for CLTC (NM_004859.1,2190-2208).
ccaacatccgtcagaatct

SEQ ID NO: 290019 - DNA, 19 bp, Homo sapiens
  siRNA target sequence for CLTC (NM_004859.1,2198-2216).
cgtcagaatctgcagattt

SEQ ID NO: 290020 - DNA, 19 bp, Homo sapiens
  siRNA target sequence for CLTC (NM_004859.1,2224-2242).
ggtggcttctaaatatcat

SEQ ID NO: 290021 - DNA, 19 bp, Homo sapiens
  siRNA target sequence for CLTC (NM_004859.1,2227-2245).
ggcttctaaatatcatgaa

SEQ ID NO: 290022 - DNA, 19 bp, Homo sapiens
  siRNA target sequence for CLTC (NM_004859.1,2229-2247).
cttctaaatatcatgaaca

SEQ ID NO: 290023 - DNA, 19 bp, Homo sapiens
  siRNA target sequence for CLTC (NM_004859.1,2260-2278).
gtctctgattgaacttttt

SEQ ID NO: 290024 - DNA, 19 bp, Homo sapiens
  siRNA target sequence for CLTC (NM_004859.1,2292-2310).
gttttgaaggtctctttta

SEQ ID NO: 290025 - DNA, 19 bp, Homo sapiens
  siRNA target sequence for CLTC (NM_004859.1,2315-2333).
ctgggatccattgttaact

SEQ ID NO: 290026 - DNA, 19 bp, Homo sapiens
  siRNA target sequence for CLTC (NM_004859.1,2317-2335).
gggatccattgttaacttt

SEQ ID NO: 290027 - DNA, 19 bp, Homo sapiens
  siRNA target sequence for CLTC (NM_004859.1,2318-2336).
ggatccattgttaacttta

SEQ ID NO: 290028 - DNA, 19 bp, Homo sapiens
  siRNA target sequence for CLTC (NM_004859.1,2342-2360).
gacccagatgtgcacttta

SEQ ID NO: 290029 - DNA, 19 bp, Homo sapiens
  siRNA target sequence for CLTC (NM_004859.1,2344-2362).
cccagatgtgcactttaaa

SEQ ID NO: 290030 - DNA, 19 bp, Homo sapiens
  siRNA target sequence for CLTC (NM_004859.1,2379-2397).
gcaagactgggcaaatcaa

SEQ ID NO: 290031 - DNA, 19 bp, Homo sapiens
  siRNA target sequence for CLTC (NM_004859.1,2383-2401).
gactgggcaaatcaaagaa

SEQ ID NO: 290032 - DNA, 19 bp, Homo sapiens
  siRNA target sequence for CLTC (NM_004859.1,2388-2406).
ggcaaatcaaagaagtaga

SEQ ID NO: 290033 - DNA, 19 bp, Homo sapiens
  siRNA target sequence for CLTC (NM_004859.1,2445-2463).
gagtcaagaattttcttaa

SEQ ID NO: 290034 - DNA, 19 bp, Homo sapiens
  siRNA target sequence for CLTC (NM_004859.1,2601-2619).
gtcgacttcctgtagttat

SEQ ID NO: 290035 - DNA, 19 bp, Homo sapiens
  siRNA target sequence for CLTC (NM_004859.1,2622-2640).
gaggattacttgatgttga

SEQ ID NO: 290036 - DNA, 19 bp, Homo sapiens
  siRNA target sequence for CLTC (NM_004859.1,2678-2696).
gtaagaggtcaattctcta

SEQ ID NO: 290037 - DNA, 19 bp, Homo sapiens
  siRNA target sequence for CLTC (NM_004859.1,2804-2822).
gccttagccaaaatctaca

SEQ ID NO: 290038 - DNA, 19 bp, Homo sapiens
  siRNA target sequence for CLTC (NM_004859.1,2805-2823).
ccttagccaaaatctacat

SEQ ID NO: 290039 - DNA, 19 bp, Homo sapiens
  siRNA target sequence for CLTC (NM_004859.1,2806-2824).
cttagccaaaatctacata

SEQ ID NO: 290040 - DNA, 19 bp, Homo sapiens
  siRNA target sequence for CLTC (NM_004859.1,2836-2854).
caacccggagagatttctt

SEQ ID NO: 290041 - DNA, 19 bp, Homo sapiens
  siRNA target sequence for CLTC (NM_004859.1,2856-2874).
gtgaaaatccctactatga

SEQ ID NO: 290042 - DNA, 19 bp, Homo sapiens
  siRNA target sequence for CLTC (NM_004859.1,2877-2895).
gtcgcgttgttggaaagta

SEQ ID NO: 290043 - DNA, 19 bp, Homo sapiens
  siRNA target sequence for CLTC (NM_004859.1,2879-2897).
cgcgttgttggaaagtatt

SEQ ID NO: 290044 - DNA, 19 bp, Homo sapiens
  siRNA target sequence for CLTC (NM_004859.1,2881-2899).
cgttgttggaaagtattgt

SEQ ID NO: 290045 - DNA, 19 bp, Homo sapiens
  siRNA target sequence for CLTC (NM_004859.1,2945-2963).
caatgtgatctggaactta

SEQ ID NO: 290046 - DNA, 19 bp, Homo sapiens
  siRNA target sequence for CLTC (NM_004859.1,3010-3028).
cctggtacgtcgaaaggat

SEQ ID NO: 290047 - DNA, 19 bp, Homo sapiens
  siRNA target sequence for CLTC (NM_004859.1,3020-3038).
cgaaaggatccagaattgt

SEQ ID NO: 290048 - DNA, 19 bp, Homo sapiens
  siRNA target sequence for CLTC (NM_004859.1,3125-3143).
cctgaagaagtgtcagtaa

SEQ ID NO: 290049 - DNA, 19 bp, Homo sapiens
  siRNA target sequence for CLTC (NM_004859.1,3131-3149).
gaagtgtcagtaactgtaa

SEQ ID NO: 290050 - DNA, 19 bp, Homo sapiens
  siRNA target sequence for CLTC (NM_004859.1,3287-3305).
cgtgttatggagtatatta

SEQ ID NO: 290051 - DNA, 19 bp, Homo sapiens
  siRNA target sequence for CLTC (NM_004859.1,3288-3306).
gtgttatggagtatattaa

SEQ ID NO: 290052 - DNA, 19 bp, Homo sapiens
  siRNA target sequence for CLTC (NM_004859.1,3307-3325).
ccgcctggataattatgat

SEQ ID NO: 290053 - DNA, 19 bp, Homo sapiens
  siRNA target sequence for CLTC (NM_004859.1,3388-3406).
ccggaaatttgatgtcaat

SEQ ID NO: 290054 - DNA, 19 bp, Homo sapiens
  siRNA target sequence for CLTC (NM_004859.1,3391-3409).
gaaatttgatgtcaatact

SEQ ID NO: 290055 - DNA, 19 bp, Homo sapiens
  siRNA target sequence for CLTC (NM_004859.1,3593-3611).
gttcaggctgccaatacta

SEQ ID NO: 290056 - DNA, 19 bp, Homo sapiens
  siRNA target sequence for CLTC (NM_004859.1,3715-3733).
ccgccttgcagagttagaa

SEQ ID NO: 290057 - DNA, 19 bp, Homo sapiens
  siRNA target sequence for CLTC (NM_004859.1,3742-3760).
caatggaccaaataatgct

SEQ ID NO: 290058 - DNA, 19 bp, Homo sapiens
  siRNA target sequence for CLTC (NM_004859.1,3747-3765).
gaccaaataatgctcatat

SEQ ID NO: 290059 - DNA, 19 bp, Homo sapiens
  siRNA target sequence for CLTC (NM_004859.1,3777-3795).
gtgaccgttgttatgatga

SEQ ID NO: 290060 - DNA, 19 bp, Homo sapiens
  siRNA target sequence for CLTC (NM_004859.1,3779-3797).
gaccgttgttatgatgaaa

SEQ ID NO: 290061 - DNA, 19 bp, Homo sapiens
  siRNA target sequence for CLTC (NM_004859.1,3810-3828).
ctgctaagttgttgtacaa

SEQ ID NO: 290062 - DNA, 19 bp, Homo sapiens
  siRNA target sequence for CLTC (NM_004859.1,3817-3835).
gttgttgtacaataatgtt

SEQ ID NO: 290063 - DNA, 19 bp, Homo sapiens
  siRNA target sequence for CLTC (NM_004859.1,3823-3841).
gtacaataatgtttccaat

SEQ ID NO: 290064 - DNA, 19 bp, Homo sapiens
  siRNA target sequence for CLTC (NM_004859.1,3980-3998).
cagatgtgtggacttcata

SEQ ID NO: 290065 - DNA, 19 bp, Homo sapiens
  siRNA target sequence for CLTC (NM_004859.1,3985-4003).
gtgtggacttcatattgtt

SEQ ID NO: 290066 - DNA, 19 bp, Homo sapiens
  siRNA target sequence for CLTC (NM_004859.1,3987-4005).
gtggacttcatattgttgt

SEQ ID NO: 290067 - DNA, 19 bp, Homo sapiens
  siRNA target sequence for CLTC (NM_004859.1,3990-4008).
gacttcatattgttgtaca

SEQ ID NO: 290068 - DNA, 19 bp, Homo sapiens
  siRNA target sequence for CLTC (NM_004859.1,4022-4040).
gaagaacttatcaactact

SEQ ID NO: 290069 - DNA, 19 bp, Homo sapiens
  siRNA target sequence for CLTC (NM_004859.1,4104-4122).
gagctcacatgggaatgtt

SEQ ID NO: 290070 - DNA, 19 bp, Homo sapiens
  siRNA target sequence for CLTC (NM_004859.1,4106-4124).
gctcacatgggaatgttta

SEQ ID NO: 290071 - DNA, 19 bp, Homo sapiens
  siRNA target sequence for CLTC (NM_004859.1,4125-4143).
ctgaattagctattctata

SEQ ID NO: 290072 - DNA, 19 bp, Homo sapiens
  siRNA target sequence for CLTC (NM_004859.1,4127-4145).
gaattagctattctatact

SEQ ID NO: 290073 - DNA, 19 bp, Homo sapiens
  siRNA target sequence for CLTC (NM_004859.1,4133-4151).
gctattctatactctaaat

SEQ ID NO: 290074 - DNA, 19 bp, Homo sapiens
  siRNA target sequence for CLTC (NM_004859.1,4216-4234).
gctaagagctgcagaacaa

SEQ ID NO: 290075 - DNA, 19 bp, Homo sapiens
  siRNA target sequence for CLTC (NM_004859.1,4258-4276).
gtttttgtatgacaagtat

SEQ ID NO: 290076 - DNA, 19 bp, Homo sapiens
  siRNA target sequence for CLTC (NM_004859.1,4292-4310).
gccataattaccatgatga

SEQ ID NO: 290077 - DNA, 19 bp, Homo sapiens
  siRNA target sequence for CLTC (NM_004859.1,4293-4311).
ccataattaccatgatgaa

SEQ ID NO: 290078 - DNA, 19 bp, Homo sapiens
  siRNA target sequence for CLTC (NM_004859.1,4339-4357).
gcaattcaaagatatcatt

SEQ ID NO: 290079 - DNA, 19 bp, Homo sapiens
  siRNA target sequence for CLTC (NM_004859.1,4364-4382).
gttgccaatgtggaactat

SEQ ID NO: 290080 - DNA, 19 bp, Homo sapiens
  siRNA target sequence for CLTC (NM_004859.1,4368-4386).
ccaatgtggaactatacta

SEQ ID NO: 290081 - DNA, 19 bp, Homo sapiens
  siRNA target sequence for CLTC (NM_004859.1,4389-4407).
gagcaatacagttctactt

SEQ ID NO: 290082 - DNA, 19 bp, Homo sapiens
  siRNA target sequence for CLTC (NM_004859.1,4414-4432).
caagcctctgttgttaaat

SEQ ID NO: 290083 - DNA, 19 bp, Homo sapiens
  siRNA target sequence for CLTC (NM_004859.1,4466-4484).
cacactcgtgcagtcaatt

SEQ ID NO: 290084 - DNA, 19 bp, Homo sapiens
  siRNA target sequence for CLTC (NM_004859.1,4468-4486).
cactcgtgcagtcaattat

SEQ ID NO: 290085 - DNA, 19 bp, Homo sapiens
  siRNA target sequence for CLTC (NM_004859.1,4470-4488).
ctcgtgcagtcaattattt

SEQ ID NO: 290086 - DNA, 19 bp, Homo sapiens
  siRNA target sequence for CLTC (NM_004859.1,4472-4490).
cgtgcagtcaattatttca

SEQ ID NO: 290087 - DNA, 19 bp, Homo sapiens
  siRNA target sequence for CLTC (NM_004859.1,4529-4547).
cgttcagttcagaaccata

SEQ ID NO: 290088 - DNA, 19 bp, Homo sapiens
  siRNA target sequence for CLTC (NM_004859.1,4540-4558).
gaaccataacaacaaatct

SEQ ID NO: 290089 - DNA, 19 bp, Homo sapiens
  siRNA target sequence for CLTC (NM_004859.1,4569-4587).
cattgaacaatctttttat

SEQ ID NO: 290090 - DNA, 19 bp, Homo sapiens
  siRNA target sequence for CLTC (NM_004859.1,4604-4622).
caggctctgcgaacatcaa

SEQ ID NO: 290091 - DNA, 19 bp, Homo sapiens
  siRNA target sequence for CLTC (NM_004859.1,4606-4624).
ggctctgcgaacatcaata

SEQ ID NO: 290092 - DNA, 19 bp, Homo sapiens
  siRNA target sequence for CLTC (NM_004859.1,4608-4626).
ctctgcgaacatcaataga

SEQ ID NO: 290093 - DNA, 19 bp, Homo sapiens
  siRNA target sequence for CLTC (NM_004859.1,4654-4672).
gcttgctcagcgtttggaa

SEQ ID NO: 290094 - DNA, 19 bp, Homo sapiens
  siRNA target sequence for CLTC (NM_004859.1,4669-4687).
ggaaaaacatgaactcatt

SEQ ID NO: 290095 - DNA, 19 bp, Homo sapiens
  siRNA target sequence for CLTC (NM_004859.1,4767-4785).
gcctttacaaggatgcaat

SEQ ID NO: 290096 - DNA, 19 bp, Homo sapiens
  siRNA target sequence for CLTC (NM_004859.1,4787-4805).
cagtatgcttctgaatcta

SEQ ID NO: 290097 - DNA, 19 bp, Homo sapiens
  siRNA target sequence for CLTC (NM_004859.1,4793-4811).
gcttctgaatctaaagata

SEQ ID NO: 290098 - DNA, 19 bp, Homo sapiens
  siRNA target sequence for CLTC (NM_004859.1,4797-4815).
ctgaatctaaagatactga

SEQ ID NO: 290099 - DNA, 19 bp, Homo sapiens
  siRNA target sequence for CLTC (NM_004859.1,4826-4844).
gaactcctgcagtggtttt

SEQ ID NO: 290100 - DNA, 19 bp, Homo sapiens
  siRNA target sequence for CLTC (NM_004859.1,5054-5072).
gagacacaacccattgttt

SEQ ID NO: 290101 - DNA, 19 bp, Homo sapiens
  siRNA target sequence for CLTC (NM_004859.1,5056-5074).
gacacaacccattgtttat

SEQ ID NO: 290102 - DNA, 19 bp, Homo sapiens
  siRNA target sequence for CLTC (NM_004859.1,5130-5148).
caccttttggttatggtta

SEQ ID NO: 290103 - DNA, 19 bp, Homo sapiens
  siRNA target sequence for COL21A1 (NM_030820.2,203-221).
cactatattacatttctct

SEQ ID NO: 290104 - DNA, 19 bp, Homo sapiens
  siRNA target sequence for COL21A1 (NM_030820.2,233-251).
gtgctgcttcttcagaatt

SEQ ID NO: 290105 - DNA, 19 bp, Homo sapiens
  siRNA target sequence for COL21A1 (NM_030820.2,290-308).
cgtactgctccgacagatt

SEQ ID NO: 290106 - DNA, 19 bp, Homo sapiens
  siRNA target sequence for COL21A1 (NM_030820.2,291-309).
gtactgctccgacagattt

SEQ ID NO: 290107 - DNA, 19 bp, Homo sapiens
  siRNA target sequence for COL21A1 (NM_030820.2,296-314).
gctccgacagatttagttt

SEQ ID NO: 290108 - DNA, 19 bp, Homo sapiens
  siRNA target sequence for COL21A1 (NM_030820.2,297-315).
ctccgacagatttagtttt

SEQ ID NO: 290109 - DNA, 19 bp, Homo sapiens
  siRNA target sequence for COL21A1 (NM_030820.2,299-317).
ccgacagatttagttttca

SEQ ID NO: 290110 - DNA, 19 bp, Homo sapiens
  siRNA target sequence for COL21A1 (NM_030820.2,300-318).
cgacagatttagttttcat

SEQ ID NO: 290111 - DNA, 19 bp, Homo sapiens
  siRNA target sequence for COL21A1 (NM_030820.2,303-321).
cagatttagttttcatctt

SEQ ID NO: 290112 - DNA, 19 bp, Homo sapiens
  siRNA target sequence for COL21A1 (NM_030820.2,316-334).
catcttagatggctcttat

SEQ ID NO: 290113 - DNA, 19 bp, Homo sapiens
  siRNA target sequence for COL21A1 (NM_030820.2,319-337).
cttagatggctcttatagt

SEQ ID NO: 290114 - DNA, 19 bp, Homo sapiens
  siRNA target sequence for COL21A1 (NM_030820.2,372-390).
ggcttgtcaatatcacaaa

SEQ ID NO: 290115 - DNA, 19 bp, Homo sapiens
  siRNA target sequence for COL21A1 (NM_030820.2,398-416).
gacatagggccgaagttta

SEQ ID NO: 290116 - DNA, 19 bp, Homo sapiens
  siRNA target sequence for COL21A1 (NM_030820.2,400-418).
catagggccgaagtttatt

SEQ ID NO: 290117 - DNA, 19 bp, Homo sapiens
  siRNA target sequence for COL21A1 (NM_030820.2,405-423).
ggccgaagtttattcaagt

SEQ ID NO: 290118 - DNA, 19 bp, Homo sapiens
  siRNA target sequence for COL21A1 (NM_030820.2,406-424).
gccgaagtttattcaagtt

SEQ ID NO: 290119 - DNA, 19 bp, Homo sapiens
  siRNA target sequence for COL21A1 (NM_030820.2,426-444).
gagtggttcaatatagtga

SEQ ID NO: 290120 - DNA, 19 bp, Homo sapiens
  siRNA target sequence for COL21A1 (NM_030820.2,460-478).
gattcctctcggaagctat

SEQ ID NO: 290121 - DNA, 19 bp, Homo sapiens
  siRNA target sequence for COL21A1 (NM_030820.2,464-482).
cctctcggaagctatgatt

SEQ ID NO: 290122 - DNA, 19 bp, Homo sapiens
  siRNA target sequence for COL21A1 (NM_030820.2,504-522).
cagtggaatccatactcta

SEQ ID NO: 290123 - DNA, 19 bp, Homo sapiens
  siRNA target sequence for COL21A1 (NM_030820.2,508-526).
ggaatccatactctactta

SEQ ID NO: 290124 - DNA, 19 bp, Homo sapiens
  siRNA target sequence for COL21A1 (NM_030820.2,559-577).
gtttgcgctcgattacctt

SEQ ID NO: 290125 - DNA, 19 bp, Homo sapiens
  siRNA target sequence for COL21A1 (NM_030820.2,582-600).
ccaagtcctcacgatttct

SEQ ID NO: 290126 - DNA, 19 bp, Homo sapiens
  siRNA target sequence for COL21A1 (NM_030820.2,588-606).
cctcacgatttctgactaa

SEQ ID NO: 290127 - DNA, 19 bp, Homo sapiens
  siRNA target sequence for COL21A1 (NM_030820.2,591-609).
cacgatttctgactaagat

SEQ ID NO: 290128 - DNA, 19 bp, Homo sapiens
  siRNA target sequence for COL21A1 (NM_030820.2,753-771).
cttcgtctacttatgtgtt

SEQ ID NO: 290129 - DNA, 19 bp, Homo sapiens
  siRNA target sequence for COL21A1 (NM_030820.2,784-802).
ctatattgcaatatccaaa

SEQ ID NO: 290130 - DNA, 19 bp, Homo sapiens
  siRNA target sequence for COL21A1 (NM_030820.2,844-862).
ctgtccaacacgaattcca

SEQ ID NO: 290131 - DNA, 19 bp, Homo sapiens
  siRNA target sequence for COL21A1 (NM_030820.2,863-881).
gtggcagctcgtgatgaaa

SEQ ID NO: 290132 - DNA, 19 bp, Homo sapiens
  siRNA target sequence for COL21A1 (NM_030820.2,1029-1047).
ctccatcatatgtatttgt

SEQ ID NO: 290133 - DNA, 19 bp, Homo sapiens
  siRNA target sequence for COL21A1 (NM_030820.2,1046-1064).
gtgtctactcaaagattta

SEQ ID NO: 290134 - DNA, 19 bp, Homo sapiens
  siRNA target sequence for COL21A1 (NM_030820.2,1048-1066).
gtctactcaaagatttaaa

SEQ ID NO: 290135 - DNA, 19 bp, Homo sapiens
  siRNA target sequence for COL21A1 (NM_030820.2,1116-1134).
cacaaatagcagttacctt

SEQ ID NO: 290136 - DNA, 19 bp, Homo sapiens
  siRNA target sequence for COL21A1 (NM_030820.2,1142-1160).
gtggacaaaatcttattat

SEQ ID NO: 290137 - DNA, 19 bp, Homo sapiens
  siRNA target sequence for COL21A1 (NM_030820.2,1164-1182).
caacaaccagcgtaattaa

SEQ ID NO: 290138 - DNA, 19 bp, Homo sapiens
  siRNA target sequence for COL21A1 (NM_030820.2,1185-1203).
gctcacaagtggttacctt

SEQ ID NO: 290139 - DNA, 19 bp, Homo sapiens
  siRNA target sequence for COL21A1 (NM_030820.2,1205-1223).
gctaaccctcaagttaaga

SEQ ID NO: 290140 - DNA, 19 bp, Homo sapiens
  siRNA target sequence for COL21A1 (NM_030820.2,1247-1265).
caaattcgtctcttagtaa

SEQ ID NO: 290141 - DNA, 19 bp, Homo sapiens
  siRNA target sequence for COL21A1 (NM_030820.2,1271-1289).
caagatgtgactttgtata

SEQ ID NO: 290142 - DNA, 19 bp, Homo sapiens
  siRNA target sequence for COL21A1 (NM_030820.2,1325-1343).
ccagttttagggatcttga

SEQ ID NO: 290143 - DNA, 19 bp, Homo sapiens
  siRNA target sequence for COL21A1 (NM_030820.2,1326-1344).
cagttttagggatcttgat

SEQ ID NO: 290144 - DNA, 19 bp, Homo sapiens
  siRNA target sequence for COL21A1 (NM_030820.2,1328-1346).
gttttagggatcttgatca

SEQ ID NO: 290145 - DNA, 19 bp, Homo sapiens
  siRNA target sequence for COL21A1 (NM_030820.2,1349-1367).
gggcaaacccaaattggaa

SEQ ID NO: 290146 - DNA, 19 bp, Homo sapiens
  siRNA target sequence for COL21A1 (NM_030820.2,1394-1412).
cagtttgatgtccaaaagt

SEQ ID NO: 290147 - DNA, 19 bp, Homo sapiens
  siRNA target sequence for COL21A1 (NM_030820.2,1406-1424).
caaaagttgcgaatctact

SEQ ID NO: 290148 - DNA, 19 bp, Homo sapiens
  siRNA target sequence for COL21A1 (NM_030820.2,1498-1516).
cagtgatgtaggttcaact

SEQ ID NO: 290149 - DNA, 19 bp, Homo sapiens
  siRNA target sequence for COL21A1 (NM_030820.2,2024-2042).
cctggaaaccgaggattaa

SEQ ID NO: 290150 - DNA, 19 bp, Homo sapiens
  siRNA target sequence for COL21A1 (NM_030820.2,2025-2043).
ctggaaaccgaggattaat

SEQ ID NO: 290151 - DNA, 19 bp, Homo sapiens
  siRNA target sequence for COL21A1 (NM_030820.2,2142-2160).
ctggaacaccgggatctaa

SEQ ID NO: 290152 - DNA, 19 bp, Homo sapiens
  siRNA target sequence for COL21A1 (NM_030820.2,2260-2278).
gggtttacccgggattcaa

SEQ ID NO: 290153 - DNA, 19 bp, Homo sapiens
  siRNA target sequence for COL21A1 (NM_030820.2,2426-2444).
gtccgaggtgccattggat

SEQ ID NO: 290154 - DNA, 19 bp, Homo sapiens
  siRNA target sequence for COL21A1 (NM_030820.2,2545-2563).
gcccggaagagagttttca

SEQ ID NO: 290155 - DNA, 19 bp, Homo sapiens
  siRNA target sequence for COL21A1 (NM_030820.2,2553-2571).
gagagttttcagaacaatt

SEQ ID NO: 290156 - DNA, 19 bp, Homo sapiens
  siRNA target sequence for COL21A1 (NM_030820.2,2555-2573).
gagttttcagaacaattta

SEQ ID NO: 290157 - DNA, 19 bp, Homo sapiens
  siRNA target sequence for COL21A1 (NM_030820.2,2567-2585).
caatttattcgacaagttt

SEQ ID NO: 290158 - DNA, 19 bp, Homo sapiens
  siRNA target sequence for COL21A1 (NM_030820.2,2893-2911).
ccctcctggaataagcaaa

SEQ ID NO: 290159 - DNA, 19 bp, Homo sapiens
  siRNA target sequence for COL21A1 (NM_030820.2,2998-3016).
catctgcgacccatcacta

SEQ ID NO: 290160 - DNA, 19 bp, Homo sapiens
  siRNA target sequence for COL21A1 (NM_030820.2,3003-3021).
gcgacccatcactatgttt

SEQ ID NO: 290161 - DNA, 19 bp, Homo sapiens
  siRNA target sequence for COL21A1 (NM_030820.2,3004-3022).
cgacccatcactatgtttt

SEQ ID NO: 290162 - DNA, 19 bp, Homo sapiens
  siRNA target sequence for COL21A1 (NM_030820.2,3005-3023).
gacccatcactatgtttta

SEQ ID NO: 290163 - DNA, 19 bp, Homo sapiens
  siRNA target sequence for COL21A1 (NM_030820.2,3007-3025).
cccatcactatgttttagt

SEQ ID NO: 290164 - DNA, 19 bp, Homo sapiens
  siRNA target sequence for CTNNA1 (NM_001903.1,14-32).
gtccatgcaggcaacataa

SEQ ID NO: 290165 - DNA, 19 bp, Homo sapiens
  siRNA target sequence for CTNNA1 (NM_001903.1,20-38).
gcaggcaacataaacttca

SEQ ID NO: 290166 - DNA, 19 bp, Homo sapiens
  siRNA target sequence for CTNNA1 (NM_001903.1,34-52).
cttcaagtgggatcctaaa

SEQ ID NO: 290167 - DNA, 19 bp, Homo sapiens
  siRNA target sequence for CTNNA1 (NM_001903.1,40-58).
gtgggatcctaaaagtcta

SEQ ID NO: 290168 - DNA, 19 bp, Homo sapiens
  siRNA target sequence for CTNNA1 (NM_001903.1,110-128).
gttacaacccttgtaaaca

SEQ ID NO: 290169 - DNA, 19 bp, Homo sapiens
  siRNA target sequence for CTNNA1 (NM_001903.1,118-136).
ccttgtaaacaccaatagt

SEQ ID NO: 290170 - DNA, 19 bp, Homo sapiens
  siRNA target sequence for CTNNA1 (NM_001903.1,140-158).
gggccctctaataagaaga

SEQ ID NO: 290171 - DNA, 19 bp, Homo sapiens
  siRNA target sequence for CTNNA1 (NM_001903.1,429-447).
ctgacatggcagatgtcta

SEQ ID NO: 290172 - DNA, 19 bp, Homo sapiens
  siRNA target sequence for CTNNA1 (NM_001903.1,438-456).
cagatgtctacaaattact

SEQ ID NO: 290173 - DNA, 19 bp, Homo sapiens
  siRNA target sequence for CTNNA1 (NM_001903.1,504-522).
ctggcaatgaacaagactt

SEQ ID NO: 290174 - DNA, 19 bp, Homo sapiens
  siRNA target sequence for CTNNA1 (NM_001903.1,554-572).
gtggataagctgaacatta

SEQ ID NO: 290175 - DNA, 19 bp, Homo sapiens
  siRNA target sequence for CTNNA1 (NM_001903.1,655-673).
cgttccgatcctctatact

SEQ ID NO: 290176 - DNA, 19 bp, Homo sapiens
  siRNA target sequence for CTNNA1 (NM_001903.1,699-717).
ctgatgtcgcagcctataa

SEQ ID NO: 290177 - DNA, 19 bp, Homo sapiens
  siRNA target sequence for CTNNA1 (NM_001903.1,840-858).
catatgcactcaataactt

SEQ ID NO: 290178 - DNA, 19 bp, Homo sapiens
  siRNA target sequence for CTNNA1 (NM_001903.1,845-863).
gcactcaataactttgaca

SEQ ID NO: 290179 - DNA, 19 bp, Homo sapiens
  siRNA target sequence for CTNNA1 (NM_001903.1,925-943).
gcgtctggaaagcatcatt

SEQ ID NO: 290180 - DNA, 19 bp, Homo sapiens
  siRNA target sequence for CTNNA1 (NM_001903.1,926-944).
cgtctggaaagcatcatta

SEQ ID NO: 290181 - DNA, 19 bp, Homo sapiens
  siRNA target sequence for CTNNA1 (NM_001903.1,1060-1078).
gggcaatgctggacgtaaa

SEQ ID NO: 290182 - DNA, 19 bp, Homo sapiens
  siRNA target sequence for CTNNA1 (NM_001903.1,1062-1080).
gcaatgctggacgtaaaga

SEQ ID NO: 290183 - DNA, 19 bp, Homo sapiens
  siRNA target sequence for CTNNA1 (NM_001903.1,1067-1085).
gctggacgtaaagaaagaa

SEQ ID NO: 290184 - DNA, 19 bp, Homo sapiens
  siRNA target sequence for CTNNA1 (NM_001903.1,1094-1112).
ctcaattctgcaatagata

SEQ ID NO: 290185 - DNA, 19 bp, Homo sapiens
  siRNA target sequence for CTNNA1 (NM_001903.1,1162-1180).
catggaccacgtttcagat

SEQ ID NO: 290186 - DNA, 19 bp, Homo sapiens
  siRNA target sequence for CTNNA1 (NM_001903.1,1165-1183).
ggaccacgtttcagattct

SEQ ID NO: 290187 - DNA, 19 bp, Homo sapiens
  siRNA target sequence for CTNNA1 (NM_001903.1,1166-1184).
gaccacgtttcagattctt

SEQ ID NO: 290188 - DNA, 19 bp, Homo sapiens
  siRNA target sequence for CTNNA1 (NM_001903.1,1194-1212).
ccaatgttccacttttggt

SEQ ID NO: 290189 - DNA, 19 bp, Homo sapiens
  siRNA target sequence for CTNNA1 (NM_001903.1,1195-1213).
caatgttccacttttggta

SEQ ID NO: 290190 - DNA, 19 bp, Homo sapiens
  siRNA target sequence for CTNNA1 (NM_001903.1,1341-1359).
gtgtaaagcttgttcgaat

SEQ ID NO: 290191 - DNA, 19 bp, Homo sapiens
  siRNA target sequence for CTNNA1 (NM_001903.1,1503-1521).
cagatgctgtcgatgacat

SEQ ID NO: 290192 - DNA, 19 bp, Homo sapiens
  siRNA target sequence for CTNNA1 (NM_001903.1,1505-1523).
gatgctgtcgatgacatta

SEQ ID NO: 290193 - DNA, 19 bp, Homo sapiens
  siRNA target sequence for CTNNA1 (NM_001903.1,1508-1526).
gctgtcgatgacattactt

SEQ ID NO: 290194 - DNA, 19 bp, Homo sapiens
  siRNA target sequence for CTNNA1 (NM_001903.1,1524-1542).
cttccattgatgacttctt

SEQ ID NO: 290195 - DNA, 19 bp, Homo sapiens
  siRNA target sequence for CTNNA1 (NM_001903.1,1540-1558).
cttggctgtctcagagaat

SEQ ID NO: 290196 - DNA, 19 bp, Homo sapiens
  siRNA target sequence for CTNNA1 (NM_001903.1,1624-1642).
ccgcacagctggtgcaatt

SEQ ID NO: 290197 - DNA, 19 bp, Homo sapiens
  siRNA target sequence for CTNNA1 (NM_001903.1,1750-1768).
cacagtcatgccacgtttt

SEQ ID NO: 290198 - DNA, 19 bp, Homo sapiens
  siRNA target sequence for CTNNA1 (NM_001903.1,1764-1782).
gttttactgagcaagtaga

SEQ ID NO: 290199 - DNA, 19 bp, Homo sapiens
  siRNA target sequence for CTNNA1 (NM_001903.1,1848-1866).
cttcccgcctggtatatga

SEQ ID NO: 290200 - DNA, 19 bp, Homo sapiens
  siRNA target sequence for CTNNA1 (NM_001903.1,2191-2209).
ctttacccgaggtaaagga

SEQ ID NO: 290201 - DNA, 19 bp, Homo sapiens
  siRNA target sequence for CTNNA1 (NM_001903.1,2202-2220).
gtaaaggaccactcaaaaa

SEQ ID NO: 290202 - DNA, 19 bp, Homo sapiens
  siRNA target sequence for CTNNA1 (NM_001903.1,2207-2225).
ggaccactcaaaaatacat

SEQ ID NO: 290203 - DNA, 19 bp, Homo sapiens
  siRNA target sequence for CTNNA1 (NM_001903.1,2515-2533).
ctacgtcgcctctaccaaa

SEQ ID NO: 290204 - DNA, 19 bp, Homo sapiens
  siRNA target sequence for CTNNA1 (NM_001903.1,2521-2539).
cgcctctaccaaataccaa

SEQ ID NO: 290205 - DNA, 19 bp, Homo sapiens
  siRNA target sequence for CTNND2 (NM_001332.2,262-280).
cggggatggctctgaaaca

SEQ ID NO: 290206 - DNA, 19 bp, Homo sapiens
  siRNA target sequence for CTNND2 (NM_001332.2,295-313).
catcctcgcctcagtcaaa

SEQ ID NO: 290207 - DNA, 19 bp, Homo sapiens
  siRNA target sequence for CTNND2 (NM_001332.2,298-316).
cctcgcctcagtcaaagaa

SEQ ID NO: 290208 - DNA, 19 bp, Homo sapiens
  siRNA target sequence for CTNND2 (NM_001332.2,460-478).
gtcacaagatggtcaaaaa

SEQ ID NO: 290209 - DNA, 19 bp, Homo sapiens
  siRNA target sequence for CTNND2 (NM_001332.2,511-529).
gctggtggactcctgtatt

SEQ ID NO: 290210 - DNA, 19 bp, Homo sapiens
  siRNA target sequence for CTNND2 (NM_001332.2,512-530).
ctggtggactcctgtatta

SEQ ID NO: 290211 - DNA, 19 bp, Homo sapiens
  siRNA target sequence for CTNND2 (NM_001332.2,515-533).
gtggactcctgtattaggt

SEQ ID NO: 290212 - DNA, 19 bp, Homo sapiens
  siRNA target sequence for CTNND2 (NM_001332.2,608-626).
gcacttcagctcaattcca

SEQ ID NO: 290213 - DNA, 19 bp, Homo sapiens
  siRNA target sequence for CTNND2 (NM_001332.2,651-669).
cggccagctaccatagcaa

SEQ ID NO: 290214 - DNA, 19 bp, Homo sapiens
  siRNA target sequence for CTNND2 (NM_001332.2,1325-1343).
ggttcccgagcctcataca

SEQ ID NO: 290215 - DNA, 19 bp, Homo sapiens
  siRNA target sequence for CTNND2 (NM_001332.2,1418-1436).
gaagaccgcgtctatcaga

SEQ ID NO: 290216 - DNA, 19 bp, Homo sapiens
  siRNA target sequence for CTNND2 (NM_001332.2,1654-1672).
ccgacagctgcagtattgt

SEQ ID NO: 290217 - DNA, 19 bp, Homo sapiens
  siRNA target sequence for CTNND2 (NM_001332.2,1735-1753).
caggtccccgtccattgat

SEQ ID NO: 290218 - DNA, 19 bp, Homo sapiens
  siRNA target sequence for CTNND2 (NM_001332.2,1740-1758).
ccccgtccattgatagcat

SEQ ID NO: 290219 - DNA, 19 bp, Homo sapiens
  siRNA target sequence for CTNND2 (NM_001332.2,1747-1765).
cattgatagcattcagaaa

SEQ ID NO: 290220 - DNA, 19 bp, Homo sapiens
  siRNA target sequence for CTNND2 (NM_001332.2,1794-1812).
cggaactgccggaagtgat

SEQ ID NO: 290221 - DNA, 19 bp, Homo sapiens
  siRNA target sequence for CTNND2 (NM_001332.2,1795-1813).
ggaactgccggaagtgatt

SEQ ID NO: 290222 - DNA, 19 bp, Homo sapiens
  siRNA target sequence for CTNND2 (NM_001332.2,1799-1817).
ctgccggaagtgattcaga

SEQ ID NO: 290223 - DNA, 19 bp, Homo sapiens
  siRNA target sequence for CTNND2 (NM_001332.2,2140-2158).
ctcatgcgatgcactcaaa

SEQ ID NO: 290224 - DNA, 19 bp, Homo sapiens
  siRNA target sequence for CTNND2 (NM_001332.2,2142-2160).
catgcgatgcactcaaaat

SEQ ID NO: 290225 - DNA, 19 bp, Homo sapiens
  siRNA target sequence for CTNND2 (NM_001332.2,2151-2169).
cactcaaaatgccaatcat

SEQ ID NO: 290226 - DNA, 19 bp, Homo sapiens
  siRNA target sequence for CTNND2 (NM_001332.2,2213-2231).
cactcaggctgggaaaatt

SEQ ID NO: 290227 - DNA, 19 bp, Homo sapiens
  siRNA target sequence for CTNND2 (NM_001332.2,2290-2308).
caccgggtgcctaaggaat

SEQ ID NO: 290228 - DNA, 19 bp, Homo sapiens
  siRNA target sequence for CTNND2 (NM_001332.2,2293-2311).
cgggtgcctaaggaatgtt

SEQ ID NO: 290229 - DNA, 19 bp, Homo sapiens
  siRNA target sequence for CTNND2 (NM_001332.2,2294-2312).
gggtgcctaaggaatgtta

SEQ ID NO: 290230 - DNA, 19 bp, Homo sapiens
  siRNA target sequence for CTNND2 (NM_001332.2,2296-2314).
gtgcctaaggaatgttagt

SEQ ID NO: 290231 - DNA, 19 bp, Homo sapiens
  siRNA target sequence for CTNND2 (NM_001332.2,2403-2421).
gcagtgagatcgatagcaa

SEQ ID NO: 290232 - DNA, 19 bp, Homo sapiens
  siRNA target sequence for CTNND2 (NM_001332.2,2414-2432).
gatagcaagaccgttgaaa

SEQ ID NO: 290233 - DNA, 19 bp, Homo sapiens
  siRNA target sequence for CTNND2 (NM_001332.2,2635-2653).
ctgtgctgaaccaccaaaa

SEQ ID NO: 290234 - DNA, 19 bp, Homo sapiens
  siRNA target sequence for CTNND2 (NM_001332.2,2665-2683).
gctgtggcacccatcaata

SEQ ID NO: 290235 - DNA, 19 bp, Homo sapiens
  siRNA target sequence for CTNND2 (NM_001332.2,2670-2688).
ggcacccatcaatagtcaa

SEQ ID NO: 290236 - DNA, 19 bp, Homo sapiens
  siRNA target sequence for CTNND2 (NM_001332.2,2671-2689).
gcacccatcaatagtcaaa

SEQ ID NO: 290237 - DNA, 19 bp, Homo sapiens
  siRNA target sequence for CTNND2 (NM_001332.2,2775-2793).
gctggaagtggtcagtata

SEQ ID NO: 290238 - DNA, 19 bp, Homo sapiens
  siRNA target sequence for CTNND2 (NM_001332.2,2778-2796).
ggaagtggtcagtatatat

SEQ ID NO: 290239 - DNA, 19 bp, Homo sapiens
  siRNA target sequence for CTNND2 (NM_001332.2,2799-2817).
gagccgctgtccgaaaaga

SEQ ID NO: 290240 - DNA, 19 bp, Homo sapiens
  siRNA target sequence for CTNND2 (NM_001332.2,2801-2819).
gccgctgtccgaaaagaga

SEQ ID NO: 290241 - DNA, 19 bp, Homo sapiens
  siRNA target sequence for CTNND2 (NM_001332.2,2802-2820).
ccgctgtccgaaaagagaa

SEQ ID NO: 290242 - DNA, 19 bp, Homo sapiens
  siRNA target sequence for CTNND2 (NM_001332.2,2840-2858).
gagctgctccgaatagaca

SEQ ID NO: 290243 - DNA, 19 bp, Homo sapiens
  siRNA target sequence for CTNND2 (NM_001332.2,2842-2860).
gctgctccgaatagacaat

SEQ ID NO: 290244 - DNA, 19 bp, Homo sapiens
  siRNA target sequence for CTNND2 (NM_001332.2,2902-2920).
ggccttggacgtcagaaat

SEQ ID NO: 290245 - DNA, 19 bp, Homo sapiens
  siRNA target sequence for CTNND2 (NM_001332.2,2903-2921).
gccttggacgtcagaaata

SEQ ID NO: 290246 - DNA, 19 bp, Homo sapiens
  siRNA target sequence for CTNND2 (NM_001332.2,2904-2922).
ccttggacgtcagaaataa

SEQ ID NO: 290247 - DNA, 19 bp, Homo sapiens
  siRNA target sequence for CTNND2 (NM_001332.2,3039-3057).
gcacactgcacgaagtgat

SEQ ID NO: 290248 - DNA, 19 bp, Homo sapiens
  siRNA target sequence for CTNND2 (NM_001332.2,3096-3114).
ccggtggcatcgagaagtt

SEQ ID NO: 290249 - DNA, 19 bp, Homo sapiens
  siRNA target sequence for CTNND2 (NM_001332.2,3118-3136).
cggcatctccaaaagcaaa

SEQ ID NO: 290250 - DNA, 19 bp, Homo sapiens
  siRNA target sequence for CTNND2 (NM_001332.2,3237-3255).
ggtcacaataccactttgt

SEQ ID NO: 290251 - DNA, 19 bp, Homo sapiens
  siRNA target sequence for CTNND2 (NM_001332.2,3481-3499).
catgacagctcaaaacact

SEQ ID NO: 290252 - DNA, 19 bp, Homo sapiens
  siRNA target sequence for CTNND2 (NM_001332.2,3500-3518).
ggaatttcaactttgtata

SEQ ID NO: 290253 - DNA, 19 bp, Homo sapiens
  siRNA target sequence for CTNND2 (NM_001332.2,3514-3532).
gtataggaattcttatggt

SEQ ID NO: 290254 - DNA, 19 bp, Homo sapiens
  siRNA target sequence for CTNND2 (NM_001332.2,3612-3630).
cctaccagccatttcagaa

SEQ ID NO: 290255 - DNA, 19 bp, Homo sapiens
  siRNA target sequence for CTNND2 (NM_001332.2,3726-3744).
ccggcaactacgttgactt

SEQ ID NO: 290256 - DNA, 19 bp, Homo sapiens
  siRNA target sequence for DCTN3 (NM_007234.3,297-315).
ctagcagaggagcagttta

SEQ ID NO: 290257 - DNA, 19 bp, Homo sapiens
  siRNA target sequence for DCTN3 (NM_007234.3,489-507).
gaggaatacaacaagacta

SEQ ID NO: 290258 - DNA, 19 bp, Homo sapiens
  siRNA target sequence for DCTN3 (NM_007234.3,497-515).
caacaagactacaatgctt

SEQ ID NO: 290259 - DNA, 19 bp, Homo sapiens
  siRNA target sequence for DJ473B4 (NM_019556.1,214-232).
gttagtggaaggaaatctt

SEQ ID NO: 290260 - DNA, 19 bp, Homo sapiens
  siRNA target sequence for DJ473B4 (NM_019556.1,225-243).
gaaatcttcctgttttcgt

SEQ ID NO: 290261 - DNA, 19 bp, Homo sapiens
  siRNA target sequence for DJ473B4 (NM_019556.1,247-265).
ccccacggagctcatattt

SEQ ID NO: 290262 - DNA, 19 bp, Homo sapiens
  siRNA target sequence for DJ473B4 (NM_019556.1,249-267).
ccacggagctcatatttta

SEQ ID NO: 290263 - DNA, 19 bp, Homo sapiens
  siRNA target sequence for DJ473B4 (NM_019556.1,282-300).
caacacataagcaagtgtt

SEQ ID NO: 290264 - DNA, 19 bp, Homo sapiens
  siRNA target sequence for DJ473B4 (NM_019556.1,305-323).
ctgtacaatccctatgagt

SEQ ID NO: 290265 - DNA, 19 bp, Homo sapiens
  siRNA target sequence for DJ473B4 (NM_019556.1,315-333).
cctatgagtttgccttaaa

SEQ ID NO: 290266 - DNA, 19 bp, Homo sapiens
  siRNA target sequence for DJ473B4 (NM_019556.1,326-344).
gccttaaagttcaaagttt

SEQ ID NO: 290267 - DNA, 19 bp, Homo sapiens
  siRNA target sequence for DJ473B4 (NM_019556.1,421-439).
gattcgtcatcgagatgtt

SEQ ID NO: 290268 - DNA, 19 bp, Homo sapiens
  siRNA target sequence for DJ473B4 (NM_019556.1,444-462).
cctgtcactatggtgtaat

SEQ ID NO: 290269 - DNA, 19 bp, Homo sapiens
  siRNA target sequence for DJ473B4 (NM_019556.1,451-469).
ctatggtgtaatagacaaa

SEQ ID NO: 290270 - DNA, 19 bp, Homo sapiens
  siRNA target sequence for DJ473B4 (NM_019556.1,751-769).
cctccacttaagtgtgaat

SEQ ID NO: 290271 - DNA, 19 bp, Homo sapiens
  siRNA target sequence for DJ473B4 (NM_019556.1,754-772).
ccacttaagtgtgaatcaa

SEQ ID NO: 290272 - DNA, 19 bp, Homo sapiens
  siRNA target sequence for DJ473B4 (NM_019556.1,755-773).
cacttaagtgtgaatcaaa

SEQ ID NO: 290273 - DNA, 19 bp, Homo sapiens
  siRNA target sequence for DJ473B4 (NM_019556.1,762-780).
gtgtgaatcaaaaattagt

SEQ ID NO: 290274 - DNA, 19 bp, Homo sapiens
  siRNA target sequence for DJ473B4 (NM_019556.1,805-823).
cacaatggccatacttaga

SEQ ID NO: 290275 - DNA, 19 bp, Homo sapiens
  siRNA target sequence for DRP2 (NM_001939.1,382-400).
gctgaccagttccatcata

SEQ ID NO: 290276 - DNA, 19 bp, Homo sapiens
  siRNA target sequence for DRP2 (NM_001939.1,488-506).
cctgcctaagcctaaagct

SEQ ID NO: 290277 - DNA, 19 bp, Homo sapiens
  siRNA target sequence for DRP2 (NM_001939.1,540-558).
ggaaccaccagccatgaat

SEQ ID NO: 290278 - DNA, 19 bp, Homo sapiens
  siRNA target sequence for DRP2 (NM_001939.1,555-573).
gaatctgtgttggaatgaa

SEQ ID NO: 290279 - DNA, 19 bp, Homo sapiens
  siRNA target sequence for DRP2 (NM_001939.1,755-773).
cggcctttatggaagaagt

SEQ ID NO: 290280 - DNA, 19 bp, Homo sapiens
  siRNA target sequence for DRP2 (NM_001939.1,849-867).
gttagaggagcctcattct

SEQ ID NO: 290281 - DNA, 19 bp, Homo sapiens
  siRNA target sequence for DRP2 (NM_001939.1,892-910).
cagcggatccagaatctca

SEQ ID NO: 290282 - DNA, 19 bp, Homo sapiens
  siRNA target sequence for DRP2 (NM_001939.1,978-996).
ggaccagcaccgtcacatt

SEQ ID NO: 290283 - DNA, 19 bp, Homo sapiens
  siRNA target sequence for DRP2 (NM_001939.1,1011-1029).
gcagctcttggagattcaa

SEQ ID NO: 290284 - DNA, 19 bp, Homo sapiens
  siRNA target sequence for DRP2 (NM_001939.1,1030-1048).
ggggcaatggaggaactaa

SEQ ID NO: 290285 - DNA, 19 bp, Homo sapiens
  siRNA target sequence for DRP2 (NM_001939.1,1101-1119).
ggatctcttcattgattca

SEQ ID NO: 290286 - DNA, 19 bp, Homo sapiens
  siRNA target sequence for DRP2 (NM_001939.1,1126-1144).
gagcacatccaggctatta

SEQ ID NO: 290287 - DNA, 19 bp, Homo sapiens
  siRNA target sequence for DRP2 (NM_001939.1,1209-1227).
ccaacttgccatttctgat

SEQ ID NO: 290288 - DNA, 19 bp, Homo sapiens
  siRNA target sequence for DRP2 (NM_001939.1,1223-1241).
ctgatgtgcacttgtcaat

SEQ ID NO: 290289 - DNA, 19 bp, Homo sapiens
  siRNA target sequence for DRP2 (NM_001939.1,1231-1249).
cacttgtcaatggagaatt

SEQ ID NO: 290290 - DNA, 19 bp, Homo sapiens
  siRNA target sequence for DRP2 (NM_001939.1,1266-1284).
gatcaacgtccgatggaaa

SEQ ID NO: 290291 - DNA, 19 bp, Homo sapiens
  siRNA target sequence for DRP2 (NM_001939.1,1269-1287).
caacgtccgatggaaacaa

SEQ ID NO: 290292 - DNA, 19 bp, Homo sapiens
  siRNA target sequence for DRP2 (NM_001939.1,1400-1418).
caatttcacccaataaagt

SEQ ID NO: 290293 - DNA, 19 bp, Homo sapiens
  siRNA target sequence for DRP2 (NM_001939.1,1465-1483).
cccaagatgacagagttat

SEQ ID NO: 290294 - DNA, 19 bp, Homo sapiens
  siRNA target sequence for DRP2 (NM_001939.1,1466-1484).
ccaagatgacagagttata

SEQ ID NO: 290295 - DNA, 19 bp, Homo sapiens
  siRNA target sequence for DRP2 (NM_001939.1,1490-1508).
ccctagctgatctgaacaa

SEQ ID NO: 290296 - DNA, 19 bp, Homo sapiens
  siRNA target sequence for DRP2 (NM_001939.1,1509-1527).
cattaagttctcagcttat

SEQ ID NO: 290297 - DNA, 19 bp, Homo sapiens
  siRNA target sequence for DRP2 (NM_001939.1,1567-1585).
cgcttggacctggtaactt

SEQ ID NO: 290298 - DNA, 19 bp, Homo sapiens
  siRNA target sequence for DRP2 (NM_001939.1,1568-1586).
gcttggacctggtaacttt

SEQ ID NO: 290299 - DNA, 19 bp, Homo sapiens
  siRNA target sequence for DRP2 (NM_001939.1,1569-1587).
cttggacctggtaacttta

SEQ ID NO: 290300 - DNA, 19 bp, Homo sapiens
  siRNA target sequence for DRP2 (NM_001939.1,1573-1591).
gacctggtaactttaacca

SEQ ID NO: 290301 - DNA, 19 bp, Homo sapiens
  siRNA target sequence for DRP2 (NM_001939.1,1648-1666).
gtggtagaggtcattcact

SEQ ID NO: 290302 - DNA, 19 bp, Homo sapiens
  siRNA target sequence for DRP2 (NM_001939.1,1667-1685).
gcctgactgccttatatga

SEQ ID NO: 290303 - DNA, 19 bp, Homo sapiens
  siRNA target sequence for DRP2 (NM_001939.1,1673-1691).
ctgccttatatgaacgttt

SEQ ID NO: 290304 - DNA, 19 bp, Homo sapiens
  siRNA target sequence for DRP2 (NM_001939.1,1788-1806).
gatgcgggcattgtctttt

SEQ ID NO: 290305 - DNA, 19 bp, Homo sapiens
  siRNA target sequence for DRP2 (NM_001939.1,1831-1849).
ggcacggaagtgaaggaaa

SEQ ID NO: 290306 - DNA, 19 bp, Homo sapiens
  siRNA target sequence for DRP2 (NM_001939.1,1999-2017).
cgtagttgcttccgtttta

SEQ ID NO: 290307 - DNA, 19 bp, Homo sapiens
  siRNA target sequence for DRP2 (NM_001939.1,2319-2337).
ggactttgccacaacctta

SEQ ID NO: 290308 - DNA, 19 bp, Homo sapiens
  siRNA target sequence for DRP2 (NM_001939.1,2350-2368).
cgctccaagcattatttca

SEQ ID NO: 290309 - DNA, 19 bp, Homo sapiens
  siRNA target sequence for DRP2 (NM_001939.1,2836-2854).
cgtatccttcggcaacata

SEQ ID NO: 290310 - DNA, 19 bp, Homo sapiens
  siRNA target sequence for DRP2 (NM_001939.1,2837-2855).
gtatccttcggcaacataa

SEQ ID NO: 290311 - DNA, 19 bp, Homo sapiens
  siRNA target sequence for DRP2 (NM_001939.1,2946-2964).
gccacccaccgaatcagat

SEQ ID NO: 290312 - DNA, 19 bp, Homo sapiens
  siRNA target sequence for DRP2 (NM_001939.1,3144-3162).
cagtgtgcgaagttctgat

SEQ ID NO: 290313 - DNA, 19 bp, Homo sapiens
  siRNA target sequence for EVPL (NM_001988.1,1404-1422).
cggtataagctggtagata

SEQ ID NO: 290314 - DNA, 19 bp, Homo sapiens
  siRNA target sequence for EVPL (NM_001988.1,1405-1423).
ggtataagctggtagataa

SEQ ID NO: 290315 - DNA, 19 bp, Homo sapiens
  siRNA target sequence for EVPL (NM_001988.1,1707-1725).
gacctgggacagatagaga

SEQ ID NO: 290316 - DNA, 19 bp, Homo sapiens
  siRNA target sequence for EVPL (NM_001988.1,1863-1881).
gagtgcgaggcgtttctgt

SEQ ID NO: 290317 - DNA, 19 bp, Homo sapiens
  siRNA target sequence for EVPL (NM_001988.1,1924-1942).
ccctcaacagcgtgaagaa

SEQ ID NO: 290318 - DNA, 19 bp, Homo sapiens
  siRNA target sequence for EVPL (NM_001988.1,1926-1944).
ctcaacagcgtgaagaaca

SEQ ID NO: 290319 - DNA, 19 bp, Homo sapiens
  siRNA target sequence for EVPL (NM_001988.1,2675-2693).
ccttgcaaaggcctatact

SEQ ID NO: 290320 - DNA, 19 bp, Homo sapiens
  siRNA target sequence for EVPL (NM_001988.1,2782-2800).
gaaggacccatgatgcaaa

SEQ ID NO: 290321 - DNA, 19 bp, Homo sapiens
  siRNA target sequence for EVPL (NM_001988.1,5466-5484).
ctctccatcggctctatca

SEQ ID NO: 290322 - DNA, 19 bp, Homo sapiens
  siRNA target sequence for EVPL (NM_001988.1,6029-6047).
ctacgagaaggatttgaca

SEQ ID NO: 290323 - DNA, 19 bp, Homo sapiens
  siRNA target sequence for FLJ13646 (NM_024584.2,186-204).
cggatctgaacaagcatat

SEQ ID NO: 290324 - DNA, 19 bp, Homo sapiens
  siRNA target sequence for FLJ13646 (NM_024584.2,187-205).
ggatctgaacaagcatata

SEQ ID NO: 290325 - DNA, 19 bp, Homo sapiens
  siRNA target sequence for FLJ13646 (NM_024584.2,249-267).
gggagctacaccgagaaaa

SEQ ID NO: 290326 - DNA, 19 bp, Homo sapiens
  siRNA target sequence for FLJ13646 (NM_024584.2,251-269).
gagctacaccgagaaaagt

SEQ ID NO: 290327 - DNA, 19 bp, Homo sapiens
  siRNA target sequence for FLJ13646 (NM_024584.2,253-271).
gctacaccgagaaaagtta

SEQ ID NO: 290328 - DNA, 19 bp, Homo sapiens
  siRNA target sequence for FLJ13646 (NM_024584.2,302-320).
gaatacctgactaacaaaa

SEQ ID NO: 290329 - DNA, 19 bp, Homo sapiens
  siRNA target sequence for FLJ13646 (NM_024584.2,307-325).
cctgactaacaaaactgaa

SEQ ID NO: 290330 - DNA, 19 bp, Homo sapiens
  siRNA target sequence for FLJ13646 (NM_024584.2,504-522).
gggacattgctatattaaa

SEQ ID NO: 290331 - DNA, 19 bp, Homo sapiens
  siRNA target sequence for FLJ13646 (NM_024584.2,591-609).
caaagacacgggaagtaca

SEQ ID NO: 290332 - DNA, 19 bp, Homo sapiens
  siRNA target sequence for FLJ13646 (NM_024584.2,633-651).
gattactggagaaacaact

SEQ ID NO: 290333 - DNA, 19 bp, Homo sapiens
  siRNA target sequence for FLJ13646 (NM_024584.2,690-708).
gaagagagcttaatatgaa

SEQ ID NO: 290334 - DNA, 19 bp, Homo sapiens
  siRNA target sequence for FLJ13646 (NM_024584.2,727-745).
ggcagcaaagcggtttatt

SEQ ID NO: 290335 - DNA, 19 bp, Homo sapiens
  siRNA target sequence for FLJ13646 (NM_024584.2,737-755).
cggtttatttttgaatact

SEQ ID NO: 290336 - DNA, 19 bp, Homo sapiens
  siRNA target sequence for FLJ13646 (NM_024584.2,793-811).
ggaattactgcagctaatt

SEQ ID NO: 290337 - DNA, 19 bp, Homo sapiens
  siRNA target sequence for FLJ13646 (NM_024584.2,923-941).
caaggaagtcataatcagt

SEQ ID NO: 290338 - DNA, 19 bp, Homo sapiens
  siRNA target sequence for FLJ13646 (NM_024584.2,932-950).
cataatcagtgcctaaata

SEQ ID NO: 290339 - DNA, 19 bp, Homo sapiens
  siRNA target sequence for FLJ13646 (NM_024584.2,990-1008).
gcaccaaatcaaggattaa

SEQ ID NO: 290340 - DNA, 19 bp, Homo sapiens
  siRNA target sequence for FLJ13646 (NM_024584.2,994-1012).
caaatcaaggattaatcca

SEQ ID NO: 290341 - DNA, 19 bp, Homo sapiens
  siRNA target sequence for FLJ32214 (NM_152473.1,527-545).
gatggaagtcctaagataa

SEQ ID NO: 290342 - DNA, 19 bp, Homo sapiens
  siRNA target sequence for FLJ32214 (NM_152473.1,531-549).
gaagtcctaagataactta

SEQ ID NO: 290343 - DNA, 19 bp, Homo sapiens
  siRNA target sequence for FLJ32214 (NM_152473.1,571-589).
cctctacacttgcattaat

SEQ ID NO: 290344 - DNA, 19 bp, Homo sapiens
  siRNA target sequence for FLJ32214 (NM_152473.1,572-590).
ctctacacttgcattaata

SEQ ID NO: 290345 - DNA, 19 bp, Homo sapiens
  siRNA target sequence for FLJ32214 (NM_152473.1,595-613).
ccaacatacgggagaatgt

SEQ ID NO: 290346 - DNA, 19 bp, Homo sapiens
  siRNA target sequence for FLJ32214 (NM_152473.1,639-657).
ggataggtgtgaccattta

SEQ ID NO: 290347 - DNA, 19 bp, Homo sapiens
  siRNA target sequence for FLJ32214 (NM_152473.1,644-662).
ggtgtgaccatttataaca

SEQ ID NO: 290348 - DNA, 19 bp, Homo sapiens
  siRNA target sequence for FLJ32214 (NM_152473.1,714-732).
gtgcggccataggaatgat

SEQ ID NO: 290349 - DNA, 19 bp, Homo sapiens
  siRNA target sequence for FLJ32214 (NM_152473.1,737-755).
ccatggggagggttcactt

SEQ ID NO: 290350 - DNA, 19 bp, Homo sapiens
  siRNA target sequence for FLJ32214 (NM_152473.1,738-756).
catggggagggttcactta

SEQ ID NO: 290351 - DNA, 19 bp, Homo sapiens
  siRNA target sequence for FLJ32214 (NM_152473.1,747-765).
ggttcacttatcatgatgt

SEQ ID NO: 290352 - DNA, 19 bp, Homo sapiens
  siRNA target sequence for FLJ32214 (NM_152473.1,794-812).
gacaacatagctaagagta

SEQ ID NO: 290353 - DNA, 19 bp, Homo sapiens
  siRNA target sequence for FLJ32214 (NM_152473.1,803-821).
gctaagagtaccagagata

SEQ ID NO: 290354 - DNA, 19 bp, Homo sapiens
  siRNA target sequence for FLJ32214 (NM_152473.1,835-853).
caaggcctccatagattct

SEQ ID NO: 290355 - DNA, 19 bp, Homo sapiens
  siRNA target sequence for FLJ32214 (NM_152473.1,844-862).
catagattctctagcaaat

SEQ ID NO: 290356 - DNA, 19 bp, Homo sapiens
  siRNA target sequence for FLJ32214 (NM_152473.1,923-941).
gcagtgatcagtaaatcct

SEQ ID NO: 290357 - DNA, 19 bp, Homo sapiens
  siRNA target sequence for FLJ32214 (NM_152473.1,966-984).
gggcgatagaggaggatat

SEQ ID NO: 290358 - DNA, 19 bp, Homo sapiens
  siRNA target sequence for FLJ32214 (NM_152473.1,967-985).
ggcgatagaggaggatata

SEQ ID NO: 290359 - DNA, 19 bp, Homo sapiens
  siRNA target sequence for FLJ32214 (NM_152473.1,968-986).
gcgatagaggaggatataa

SEQ ID NO: 290360 - DNA, 19 bp, Homo sapiens
  siRNA target sequence for FLJ32214 (NM_152473.1,1004-1022).
gttacgtggctccataact

SEQ ID NO: 290361 - DNA, 19 bp, Homo sapiens
  siRNA target sequence for FLJ32214 (NM_152473.1,1034-1052).
gattcagcagggtccattt

SEQ ID NO: 290362 - DNA, 19 bp, Homo sapiens
  siRNA target sequence for FLJ32214 (NM_152473.1,1105-1123).
gggaccagctgcacttaat

SEQ ID NO: 290363 - DNA, 19 bp, Homo sapiens
  siRNA target sequence for HSPG2 (NM_005529.2,173-191).
caaatgcgctggacacatt

SEQ ID NO: 290364 - DNA, 19 bp, Homo sapiens
  siRNA target sequence for HSPG2 (NM_005529.2,186-204).
cacattcgtacctttctga

SEQ ID NO: 290365 - DNA, 19 bp, Homo sapiens
  siRNA target sequence for HSPG2 (NM_005529.2,293-311).
cgagccctggtgaatttca

SEQ ID NO: 290366 - DNA, 19 bp, Homo sapiens
  siRNA target sequence for HSPG2 (NM_005529.2,400-418).
gtcggagtacttgaaaatt

SEQ ID NO: 290367 - DNA, 19 bp, Homo sapiens
  siRNA target sequence for HSPG2 (NM_005529.2,457-475).
gctggatggctgggttttt

SEQ ID NO: 290368 - DNA, 19 bp, Homo sapiens
  siRNA target sequence for HSPG2 (NM_005529.2,758-776).
ggtatcagccccacattct

SEQ ID NO: 290369 - DNA, 19 bp, Homo sapiens
  siRNA target sequence for HSPG2 (NM_005529.2,1066-1084).
gcgctgcgatggtgacttt

SEQ ID NO: 290370 - DNA, 19 bp, Homo sapiens
  siRNA target sequence for HSPG2 (NM_005529.2,1068-1086).
gctgcgatggtgactttga

SEQ ID NO: 290371 - DNA, 19 bp, Homo sapiens
  siRNA target sequence for HSPG2 (NM_005529.2,1087-1105).
ctgtgaggaccgaactgat

SEQ ID NO: 290372 - DNA, 19 bp, Homo sapiens
  siRNA target sequence for HSPG2 (NM_005529.2,1422-1440).
gccgtggcacactgatcat

SEQ ID NO: 290373 - DNA, 19 bp, Homo sapiens
  siRNA target sequence for HSPG2 (NM_005529.2,1560-1578).
gccctgacggccacttcta

SEQ ID NO: 290374 - DNA, 19 bp, Homo sapiens
  siRNA target sequence for HSPG2 (NM_005529.2,1833-1851).
gggctctgcctgaacagtt

SEQ ID NO: 290375 - DNA, 19 bp, Homo sapiens
  siRNA target sequence for HSPG2 (NM_005529.2,2359-2377).
ctcctgtgaccctgtgtat

SEQ ID NO: 290376 - DNA, 19 bp, Homo sapiens
  siRNA target sequence for HSPG2 (NM_005529.2,2484-2502).
cctgcccttgcccatacat

SEQ ID NO: 290377 - DNA, 19 bp, Homo sapiens
  siRNA target sequence for HSPG2 (NM_005529.2,2504-2522).
gatgcctcccgcagattct

SEQ ID NO: 290378 - DNA, 19 bp, Homo sapiens
  siRNA target sequence for HSPG2 (NM_005529.2,2658-2676).
ccgtcaaccaggagattgt

SEQ ID NO: 290379 - DNA, 19 bp, Homo sapiens
  siRNA target sequence for HSPG2 (NM_005529.2,2714-2732).
gaggcctgccgctgtaaga

SEQ ID NO: 290380 - DNA, 19 bp, Homo sapiens
  siRNA target sequence for HSPG2 (NM_005529.2,2719-2737).
ctgccgctgtaagaacaat

SEQ ID NO: 290381 - DNA, 19 bp, Homo sapiens
  siRNA target sequence for HSPG2 (NM_005529.2,2746-2764).
gcgcttgtgcaatgaatgt

SEQ ID NO: 290382 - DNA, 19 bp, Homo sapiens
  siRNA target sequence for HSPG2 (NM_005529.2,2840-2858).
cactgcaccagctcttcat

SEQ ID NO: 290383 - DNA, 19 bp, Homo sapiens
  siRNA target sequence for HSPG2 (NM_005529.2,3137-3155).
gtgctgcaaggtaacaaca

SEQ ID NO: 290384 - DNA, 19 bp, Homo sapiens
  siRNA target sequence for HSPG2 (NM_005529.2,3140-3158).
ctgcaaggtaacaacatca

SEQ ID NO: 290385 - DNA, 19 bp, Homo sapiens
  siRNA target sequence for HSPG2 (NM_005529.2,4189-4207).
gctctcttttggcaacttt

SEQ ID NO: 290386 - DNA, 19 bp, Homo sapiens
  siRNA target sequence for HSPG2 (NM_005529.2,4236-4254).
ggcagctgccggagacata

SEQ ID NO: 290387 - DNA, 19 bp, Homo sapiens
  siRNA target sequence for HSPG2 (NM_005529.2,4719-4737).
gccactgcgagctatgtga

SEQ ID NO: 290388 - DNA, 19 bp, Homo sapiens
  siRNA target sequence for HSPG2 (NM_005529.2,4721-4739).
cactgcgagctatgtgaat

SEQ ID NO: 290389 - DNA, 19 bp, Homo sapiens
  siRNA target sequence for HSPG2 (NM_005529.2,4725-4743).
gcgagctatgtgaatgcaa

SEQ ID NO: 290390 - DNA, 19 bp, Homo sapiens
  siRNA target sequence for HSPG2 (NM_005529.2,4726-4744).
cgagctatgtgaatgcaat

SEQ ID NO: 290391 - DNA, 19 bp, Homo sapiens
  siRNA target sequence for HSPG2 (NM_005529.2,5089-5107).
ccatcctgctcgaagcata

SEQ ID NO: 290392 - DNA, 19 bp, Homo sapiens
  siRNA target sequence for HSPG2 (NM_005529.2,5565-5583).
gcaccggctccaacatgtt

SEQ ID NO: 290393 - DNA, 19 bp, Homo sapiens
  siRNA target sequence for HSPG2 (NM_005529.2,5596-5614).
gggcacagccactctacat

SEQ ID NO: 290394 - DNA, 19 bp, Homo sapiens
  siRNA target sequence for HSPG2 (NM_005529.2,5598-5616).
gcacagccactctacatgt

SEQ ID NO: 290395 - DNA, 19 bp, Homo sapiens
  siRNA target sequence for HSPG2 (NM_005529.2,5825-5843).
gatcaggcccagtacttgt

SEQ ID NO: 290396 - DNA, 19 bp, Homo sapiens
  siRNA target sequence for HSPG2 (NM_005529.2,6419-6437).
cccaaggaggcctccatta

SEQ ID NO: 290397 - DNA, 19 bp, Homo sapiens
  siRNA target sequence for HSPG2 (NM_005529.2,6785-6803).
gtcaggatcgagtcttcat

SEQ ID NO: 290398 - DNA, 19 bp, Homo sapiens
  siRNA target sequence for HSPG2 (NM_005529.2,7006-7024).
catcacggtcacagtaact

SEQ ID NO: 290399 - DNA, 19 bp, Homo sapiens
  siRNA target sequence for HSPG2 (NM_005529.2,7733-7751).
cacaccatcacctggtata

SEQ ID NO: 290400 - DNA, 19 bp, Homo sapiens
  siRNA target sequence for HSPG2 (NM_005529.2,8015-8033).
ccccaggctatcatcacat

SEQ ID NO: 290401 - DNA, 19 bp, Homo sapiens
  siRNA target sequence for HSPG2 (NM_005529.2,8087-8105).
ctgcggttgcaccaaatgt

SEQ ID NO: 290402 - DNA, 19 bp, Homo sapiens
  siRNA target sequence for HSPG2 (NM_005529.2,9511-9529).
gttggagcagcggacatat

SEQ ID NO: 290403 - DNA, 19 bp, Homo sapiens
  siRNA target sequence for HSPG2 (NM_005529.2,9579-9597).
cagatgcgggcacttatgt

SEQ ID NO: 290404 - DNA, 19 bp, Homo sapiens
  siRNA target sequence for HSPG2 (NM_005529.2,9581-9599).
gatgcgggcacttatgtgt

SEQ ID NO: 290405 - DNA, 19 bp, Homo sapiens
  siRNA target sequence for HSPG2 (NM_005529.2,9928-9946).
cgtggagagcccaccatat

SEQ ID NO: 290406 - DNA, 19 bp, Homo sapiens
  siRNA target sequence for HSPG2 (NM_005529.2,10422-10440).
gctgccaagggacgtatat

SEQ ID NO: 290407 - DNA, 19 bp, Homo sapiens
  siRNA target sequence for HSPG2 (NM_005529.2,10423-10441).
ctgccaagggacgtatata

SEQ ID NO: 290408 - DNA, 19 bp, Homo sapiens
  siRNA target sequence for HSPG2 (NM_005529.2,10506-10524).
cctcggtgctcatcaacat

SEQ ID NO: 290409 - DNA, 19 bp, Homo sapiens
  siRNA target sequence for HSPG2 (NM_005529.2,10556-10574).
cacgccgtggagttcgaat

SEQ ID NO: 290410 - DNA, 19 bp, Homo sapiens
  siRNA target sequence for HSPG2 (NM_005529.2,10687-10705).
ggctgatgcgggacagtat

SEQ ID NO: 290411 - DNA, 19 bp, Homo sapiens
  siRNA target sequence for HSPG2 (NM_005529.2,11440-11458).
gggtggctatcctgactat

SEQ ID NO: 290412 - DNA, 19 bp, Homo sapiens
  siRNA target sequence for HSPG2 (NM_005529.2,11901-11919).
gcctggacgtggagttcaa

SEQ ID NO: 290413 - DNA, 19 bp, Homo sapiens
  siRNA target sequence for HSPG2 (NM_005529.2,12096-12114).
ctgcagagcgtctcaacaa

SEQ ID NO: 290414 - DNA, 19 bp, Homo sapiens
  siRNA target sequence for HSPG2 (NM_005529.2,12277-12295).
gggcgaggtgtcagtgaat

SEQ ID NO: 290415 - DNA, 19 bp, Homo sapiens
  siRNA target sequence for HSPG2 (NM_005529.2,12337-12355).
gggcatcgggcaatgctat

SEQ ID NO: 290416 - DNA, 19 bp, Homo sapiens
  siRNA target sequence for HSPG2 (NM_005529.2,12407-12425).
cccgctggcgagtatgagt

SEQ ID NO: 290417 - DNA, 19 bp, Homo sapiens
  siRNA target sequence for HSPG2 (NM_005529.2,12601-12619).
gtccgactggcatcttgaa

SEQ ID NO: 290418 - DNA, 19 bp, Homo sapiens
  siRNA target sequence for HSPG2 (NM_005529.2,12645-12663).
ggcagtacggagcctattt

SEQ ID NO: 290419 - DNA, 19 bp, Homo sapiens
  siRNA target sequence for HSPG2 (NM_005529.2,12809-12827).
caaggcaaggacttcatca

SEQ ID NO: 290420 - DNA, 19 bp, Homo sapiens
  siRNA target sequence for HUMCYT2A (NM_015848.1,760-778).
gcagctagattcacttcta

SEQ ID NO: 290421 - DNA, 19 bp, Homo sapiens
  siRNA target sequence for HUMCYT2A (NM_015848.1,1258-1276).
gaggctacgggctgagatt

SEQ ID NO: 290422 - DNA, 19 bp, Homo sapiens
  siRNA target sequence for HUMCYT2A (NM_015848.1,1261-1279).
gctacgggctgagattgaa

SEQ ID NO: 290423 - DNA, 19 bp, Homo sapiens
  siRNA target sequence for HUMCYT2A (NM_015848.1,1262-1280).
ctacgggctgagattgaaa

SEQ ID NO: 290424 - DNA, 19 bp, Homo sapiens
  siRNA target sequence for HUMCYT2A (NM_015848.1,1390-1408).
cctacagaaggctaaggat

SEQ ID NO: 290425 - DNA, 19 bp, Homo sapiens
  siRNA target sequence for HUMCYT2A (NM_015848.1,1534-1552).
gagtgccgtgtgcatttca

SEQ ID NO: 290426 - DNA, 19 bp, Homo sapiens
  siRNA target sequence for HUMCYT2A (NM_015848.1,1590-1608).
gcagtagccgtggagtttt

SEQ ID NO: 290427 - DNA, 19 bp, Homo sapiens
  siRNA target sequence for HUMCYT2A (NM_015848.1,1591-1609).
cagtagccgtggagttttt

SEQ ID NO: 290428 - DNA, 19 bp, Homo sapiens
  siRNA target sequence for ITGBL1 (NM_004791.1,230-248).
caggcttcaggaacttctt

SEQ ID NO: 290429 - DNA, 19 bp, Homo sapiens
  siRNA target sequence for ITGBL1 (NM_004791.1,527-545).
cctgtgcaggccatggtaa

SEQ ID NO: 290430 - DNA, 19 bp, Homo sapiens
  siRNA target sequence for ITGBL1 (NM_004791.1,567-585).
gtgtgaccagggatggtat

SEQ ID NO: 290431 - DNA, 19 bp, Homo sapiens
  siRNA target sequence for ITGBL1 (NM_004791.1,597-615).
ccagtacccaactaactgt

SEQ ID NO: 290432 - DNA, 19 bp, Homo sapiens
  siRNA target sequence for ITGBL1 (NM_004791.1,663-681).
catcatctgctctaatgca

SEQ ID NO: 290433 - DNA, 19 bp, Homo sapiens
  siRNA target sequence for ITGBL1 (NM_004791.1,672-690).
ctctaatgcaggtacatgt

SEQ ID NO: 290434 - DNA, 19 bp, Homo sapiens
  siRNA target sequence for ITGBL1 (NM_004791.1,702-720).
gtgtaagtgtgataattca

SEQ ID NO: 290435 - DNA, 19 bp, Homo sapiens
  siRNA target sequence for ITGBL1 (NM_004791.1,704-722).
gtaagtgtgataattcaga

SEQ ID NO: 290436 - DNA, 19 bp, Homo sapiens
  siRNA target sequence for ITGBL1 (NM_004791.1,730-748).
ggacttgtgtatggtaaat

SEQ ID NO: 290437 - DNA, 19 bp, Homo sapiens
  siRNA target sequence for ITGBL1 (NM_004791.1,731-749).
gacttgtgtatggtaaatt

SEQ ID NO: 290438 - DNA, 19 bp, Homo sapiens
  siRNA target sequence for ITGBL1 (NM_004791.1,803-821).
gaggccatgggaagtgtta

SEQ ID NO: 290439 - DNA, 19 bp, Homo sapiens
  siRNA target sequence for ITGBL1 (NM_004791.1,847-865).
ggttggcatggagataaat

SEQ ID NO: 290440 - DNA, 19 bp, Homo sapiens
  siRNA target sequence for ITGBL1 (NM_004791.1,868-886).
gaattccagtgcgatatca

SEQ ID NO: 290441 - DNA, 19 bp, Homo sapiens
  siRNA target sequence for ITGBL1 (NM_004791.1,968-986).
gtacctgtcacgatgttga

SEQ ID NO: 290442 - DNA, 19 bp, Homo sapiens
  siRNA target sequence for ITGBL1 (NM_004791.1,1051-1069).
gctgtctatgaccgatatt

SEQ ID NO: 290443 - DNA, 19 bp, Homo sapiens
  siRNA target sequence for ITGBL1 (NM_004791.1,1085-1103).
caggtcatggacagtgtaa

SEQ ID NO: 290444 - DNA, 19 bp, Homo sapiens
  siRNA target sequence for ITGBL1 (NM_004791.1,1087-1105).
ggtcatggacagtgtaatt

SEQ ID NO: 290445 - DNA, 19 bp, Homo sapiens
  siRNA target sequence for ITGBL1 (NM_004791.1,1226-1244).
ctgggaggggtaaatgtga

SEQ ID NO: 290446 - DNA, 19 bp, Homo sapiens
  siRNA target sequence for ITGBL1 (NM_004791.1,1282-1300).
cgggtgtatggcaagactt

SEQ ID NO: 290447 - DNA, 19 bp, Homo sapiens
  siRNA target sequence for ITGBL1 (NM_004791.1,1348-1366).
ggaggccacggcacatgtt

SEQ ID NO: 290448 - DNA, 19 bp, Homo sapiens
  siRNA target sequence for ITGBL1 (NM_004791.1,1414-1432).
caacatccgcggaagtgta

SEQ ID NO: 290449 - DNA, 19 bp, Homo sapiens
  siRNA target sequence for ITGBL1 (NM_004791.1,1417-1435).
catccgcggaagtgtaaca

SEQ ID NO: 290450 - DNA, 19 bp, Homo sapiens
  siRNA target sequence for ITGBL1 (NM_004791.1,1491-1509).
ggggaagggttcttgtcat

SEQ ID NO: 290451 - DNA, 19 bp, Homo sapiens
  siRNA target sequence for ITGBL1 (NM_004791.1,1531-1549).
gctgaagagtggtatattt

SEQ ID NO: 290452 - DNA, 19 bp, Homo sapiens
  siRNA target sequence for ITGBL1 (NM_004791.1,1575-1593).
cagagactgcgacaaacat

SEQ ID NO: 290453 - DNA, 19 bp, Homo sapiens
  siRNA target sequence for ITGBL1 (NM_004791.1,1577-1595).
gagactgcgacaaacatga

SEQ ID NO: 290454 - DNA, 19 bp, Homo sapiens
  siRNA target sequence for ITGBL1 (NM_004791.1,1587-1605).
caaacatgatggtctcatt

SEQ ID NO: 290455 - DNA, 19 bp, Homo sapiens
  siRNA target sequence for ITGBL1 (NM_004791.1,1591-1609).
catgatggtctcatttgta

SEQ ID NO: 290456 - DNA, 19 bp, Homo sapiens
  siRNA target sequence for IVL (NM_005547.1,67-85).
gttcctcctccagtcaata

SEQ ID NO: 290457 - DNA, 19 bp, Homo sapiens
  siRNA target sequence for IVL (NM_005547.1,155-173).
cagtggaggtcccatcaaa

SEQ ID NO: 290458 - DNA, 19 bp, Homo sapiens
  siRNA target sequence for IVL (NM_005547.1,321-339).
gcttaagcaggagaaaaca

SEQ ID NO: 290459 - DNA, 19 bp, Homo sapiens
  siRNA target sequence for IVL (NM_005547.1,1542-1560).
gcagcaggacggacaacta

SEQ ID NO: 290460 - DNA, 19 bp, Homo sapiens
  siRNA target sequence for IVL (NM_005547.1,1543-1561).
cagcaggacggacaactaa

SEQ ID NO: 290461 - DNA, 19 bp, Homo sapiens
  siRNA target sequence for IVL (NM_005547.1,1545-1563).
gcaggacggacaactaaaa

SEQ ID NO: 290462 - DNA, 19 bp, Homo sapiens
  siRNA target sequence for IVL (NM_005547.1,1548-1566).
ggacggacaactaaaacat

SEQ ID NO: 290463 - DNA, 19 bp, Homo sapiens
  siRNA target sequence for IVL (NM_005547.1,1646-1664).
caggccaggtccaagacat

SEQ ID NO: 290464 - DNA, 19 bp, Homo sapiens
  siRNA target sequence for IVL (NM_005547.1,1679-1697).
ccacaaagggagaagtatt

SEQ ID NO: 290465 - DNA, 19 bp, Homo sapiens
  siRNA target sequence for K6HF (NM_004693.1,416-434).
ctcttcacctgcaaatcga

SEQ ID NO: 290466 - DNA, 19 bp, Homo sapiens
  siRNA target sequence for K6HF (NM_004693.1,604-622).
ctagagcccctctttgatt

SEQ ID NO: 290467 - DNA, 19 bp, Homo sapiens
  siRNA target sequence for K6HF (NM_004693.1,609-627).
gcccctctttgattcctat

SEQ ID NO: 290468 - DNA, 19 bp, Homo sapiens
  siRNA target sequence for K6HF (NM_004693.1,613-631).
ctctttgattcctatacca

SEQ ID NO: 290469 - DNA, 19 bp, Homo sapiens
  siRNA target sequence for K6HF (NM_004693.1,850-868).
cccgaggagatcaacttca

SEQ ID NO: 290470 - DNA, 19 bp, Homo sapiens
  siRNA target sequence for K6HF (NM_004693.1,980-998).
ccgaggtcaaagcacaata

SEQ ID NO: 290471 - DNA, 19 bp, Homo sapiens
  siRNA target sequence for K6HF (NM_004693.1,1613-1631).
gtggttctagcgtcaagtt

SEQ ID NO: 290472 - DNA, 19 bp, Homo sapiens
  siRNA target sequence for KRT12 (NM_000223.1,87-105).
ctcctcgcagagtgtgata

SEQ ID NO: 290473 - DNA, 19 bp, Homo sapiens
  siRNA target sequence for KRT12 (NM_000223.1,288-306).
cctgggtggaggtagcttt

SEQ ID NO: 290474 - DNA, 19 bp, Homo sapiens
  siRNA target sequence for KRT12 (NM_000223.1,341-359).
gaggtggctctctaggtat

SEQ ID NO: 290475 - DNA, 19 bp, Homo sapiens
  siRNA target sequence for KRT12 (NM_000223.1,344-362).
gtggctctctaggtattct

SEQ ID NO: 290476 - DNA, 19 bp, Homo sapiens
  siRNA target sequence for KRT12 (NM_000223.1,382-400).
cttctttctggatcagaaa

SEQ ID NO: 290477 - DNA, 19 bp, Homo sapiens
  siRNA target sequence for KRT12 (NM_000223.1,411-429).
gcaaaatcttaatgataga

SEQ ID NO: 290478 - DNA, 19 bp, Homo sapiens
  siRNA target sequence for KRT12 (NM_000223.1,412-430).
caaaatcttaatgatagat

SEQ ID NO: 290479 - DNA, 19 bp, Homo sapiens
  siRNA target sequence for KRT12 (NM_000223.1,418-436).
cttaatgatagattagctt

SEQ ID NO: 290480 - DNA, 19 bp, Homo sapiens
  siRNA target sequence for KRT12 (NM_000223.1,457-475).
gctctagaagaggctaata

SEQ ID NO: 290481 - DNA, 19 bp, Homo sapiens
  siRNA target sequence for KRT12 (NM_000223.1,541-559).
cagagcgattacagcaaat

SEQ ID NO: 290482 - DNA, 19 bp, Homo sapiens
  siRNA target sequence for KRT12 (NM_000223.1,543-561).
gagcgattacagcaaatat

SEQ ID NO: 290483 - DNA, 19 bp, Homo sapiens
  siRNA target sequence for KRT12 (NM_000223.1,546-564).
cgattacagcaaatattat

SEQ ID NO: 290484 - DNA, 19 bp, Homo sapiens
  siRNA target sequence for KRT12 (NM_000223.1,582-600).
caggaataagatcatttca

SEQ ID NO: 290485 - DNA, 19 bp, Homo sapiens
  siRNA target sequence for KRT12 (NM_000223.1,862-880).
ggcgaggtcagcgtagaaa

SEQ ID NO: 290486 - DNA, 19 bp, Homo sapiens
  siRNA target sequence for KRT12 (NM_000223.1,863-881).
gcgaggtcagcgtagaaat

SEQ ID NO: 290487 - DNA, 19 bp, Homo sapiens
  siRNA target sequence for KRT12 (NM_000223.1,908-926).
ccaggctcctcaatgatat

SEQ ID NO: 290488 - DNA, 19 bp, Homo sapiens
  siRNA target sequence for KRT12 (NM_000223.1,1000-1018).
gagctccgtaaggagatta

SEQ ID NO: 290489 - DNA, 19 bp, Homo sapiens
  siRNA target sequence for KRT12 (NM_000223.1,1003-1021).
ctccgtaaggagattagca

SEQ ID NO: 290490 - DNA, 19 bp, Homo sapiens
  siRNA target sequence for KRT12 (NM_000223.1,1066-1084).
ctgcgtcgcgcctttcaga

SEQ ID NO: 290491 - DNA, 19 bp, Homo sapiens
  siRNA target sequence for KRT12 (NM_000223.1,1147-1165).
gaagccgagggcgattact

SEQ ID NO: 290492 - DNA, 19 bp, Homo sapiens
  siRNA target sequence for KRT12 (NM_000223.1,1394-1412).
caactgattcctctaaaga

SEQ ID NO: 290493 - DNA, 19 bp, Homo sapiens
  siRNA target sequence for KRT12 (NM_000223.1,1414-1432).
ccaaccaaaacccgaaaaa

SEQ ID NO: 290494 - DNA, 19 bp, Homo sapiens
  siRNA target sequence for KRT12 (NM_000223.1,1415-1433).
caaccaaaacccgaaaaat

SEQ ID NO: 290495 - DNA, 19 bp, Homo sapiens
  siRNA target sequence for KRT4 (NM_002272.1,656-674).
ctcagggggaacaaaagca

SEQ ID NO: 290496 - DNA, 19 bp, Homo sapiens
  siRNA target sequence for KRT4 (NM_002272.1,939-957).
cggaagagcgcgaacagat

SEQ ID NO: 290497 - DNA, 19 bp, Homo sapiens
  siRNA target sequence for KRT4 (NM_002272.1,1069-1087).
cacctccagcaaaaacctt

SEQ ID NO: 290498 - DNA, 19 bp, Homo sapiens
  siRNA target sequence for KRT4 (NM_002272.1,1133-1151).
gataccttgggcaatgaca

SEQ ID NO: 290499 - DNA, 19 bp, Homo sapiens
  siRNA target sequence for KRT4 (NM_002272.1,1326-1344).
gtcttaatgacgagatcaa

SEQ ID NO: 290500 - DNA, 19 bp, Homo sapiens
  siRNA target sequence for KRT4 (NM_002272.1,1404-1422).
cgtccgtggtcctttccat

SEQ ID NO: 290501 - DNA, 19 bp, Homo sapiens
  siRNA target sequence for KRT4 (NM_002272.1,1704-1722).
gtgagaatgcccttaaaga

SEQ ID NO: 290502 - DNA, 19 bp, Homo sapiens
  siRNA target sequence for KRT4 (NM_002272.1,1948-1966).
catcagcggaggattagga

SEQ ID NO: 290503 - DNA, 19 bp, Homo sapiens
  siRNA target sequence for KRT7 (NM_005556.2,769-787).
ggtggatgccctgaatgat

SEQ ID NO: 290504 - DNA, 19 bp, Homo sapiens
  siRNA target sequence for KRT7 (NM_005556.2,1038-1056).
cccggaatgagatttcaga

SEQ ID NO: 290505 - DNA, 19 bp, Homo sapiens
  siRNA target sequence for KRT7 (NM_005556.2,1349-1367).
gtgggagccgtgaatatct

SEQ ID NO: 290506 - DNA, 19 bp, Homo sapiens
  siRNA target sequence for KRT7 (NM_005556.2,1360-1378).
gaatatctctgtgatgaat

SEQ ID NO: 290507 - DNA, 19 bp, Homo sapiens
  siRNA target sequence for KRT7 (NM_005556.2,1475-1493).
gggctcctgaaggcttatt

SEQ ID NO: 290508 - DNA, 19 bp, Homo sapiens
  siRNA target sequence for KRTHA7 (NM_003770.3,404-422).
ctttgtctctcctatcgat

SEQ ID NO: 290509 - DNA, 19 bp, Homo sapiens
  siRNA target sequence for KRTHA7 (NM_003770.3,610-628).
gtggggcctacggcaaaaa

SEQ ID NO: 290510 - DNA, 19 bp, Homo sapiens
  siRNA target sequence for KRTHA7 (NM_003770.3,1674-1692).
gcccgagttaggagattga

SEQ ID NO: 290511 - DNA, 19 bp, Homo sapiens
  siRNA target sequence for KRTHB5 (NM_002283.2,885-903).
cctgaggcgcctctatgaa

SEQ ID NO: 290512 - DNA, 19 bp, Homo sapiens
  siRNA target sequence for KRTHB5 (NM_002283.2,935-953).
cagacacctcggtcatagt

SEQ ID NO: 290513 - DNA, 19 bp, Homo sapiens
  siRNA target sequence for KRTHB5 (NM_002283.2,937-955).
gacacctcggtcatagtca

SEQ ID NO: 290514 - DNA, 19 bp, Homo sapiens
  siRNA target sequence for KRTHB6 (NM_002284.2,1311-1329).
gcgtcggctcggtgaatgt

SEQ ID NO: 290515 - DNA, 19 bp, Homo sapiens
  siRNA target sequence for LAD1 (NM_005558.3,994-1012).
gaggctggtgtctgagaaa

SEQ ID NO: 290516 - DNA, 19 bp, Homo sapiens
  siRNA target sequence for LAD1 (NM_005558.3,998-1016).
ctggtgtctgagaaagctt

SEQ ID NO: 290517 - DNA, 19 bp, Homo sapiens
  siRNA target sequence for LAD1 (NM_005558.3,1250-1268).
gtcacactccaggtgaaaa

SEQ ID NO: 290518 - DNA, 19 bp, Homo sapiens
  siRNA target sequence for LAD1 (NM_005558.3,1474-1492).
ggccatacggagatcagaa

SEQ ID NO: 290519 - DNA, 19 bp, Homo sapiens
  siRNA target sequence for LAD1 (NM_005558.3,1477-1495).
catacggagatcagaatct

SEQ ID NO: 290520 - DNA, 19 bp, Homo sapiens
  siRNA target sequence for LAD1 (NM_005558.3,1515-1533).
cttgcactgagttattcgt

SEQ ID NO: 290521 - DNA, 19 bp, Homo sapiens
  siRNA target sequence for LAD1 (NM_005558.3,1554-1572).
gcaagcgccacctctttga

SEQ ID NO: 290522 - DNA, 19 bp, Homo sapiens
  siRNA target sequence for LAD1 (NM_005558.3,1611-1629).
ccagccggaaggagaactt

SEQ ID NO: 290523 - DNA, 19 bp, Homo sapiens
  siRNA target sequence for LAMA1 (NM_005559.2,321-339).
ccagagaacgccatccaat

SEQ ID NO: 290524 - DNA, 19 bp, Homo sapiens
  siRNA target sequence for LAMA1 (NM_005559.2,322-340).
cagagaacgccatccaata

SEQ ID NO: 290525 - DNA, 19 bp, Homo sapiens
  siRNA target sequence for LAMA1 (NM_005559.2,348-366).
ccatagatggcaccaataa

SEQ ID NO: 290526 - DNA, 19 bp, Homo sapiens
  siRNA target sequence for LAMA1 (NM_005559.2,439-457).
ggtctttcaagttgcatat

SEQ ID NO: 290527 - DNA, 19 bp, Homo sapiens
  siRNA target sequence for LAMA1 (NM_005559.2,535-553).
cccctggcagtattatgca

SEQ ID NO: 290528 - DNA, 19 bp, Homo sapiens
  siRNA target sequence for LAMA1 (NM_005559.2,568-586).
gtgtttgtctcgttacaat

SEQ ID NO: 290529 - DNA, 19 bp, Homo sapiens
  siRNA target sequence for LAMA1 (NM_005559.2,574-592).
gtctcgttacaatataact

SEQ ID NO: 290530 - DNA, 19 bp, Homo sapiens
  siRNA target sequence for LAMA1 (NM_005559.2,610-628).
cacctacagggctgatgat

SEQ ID NO: 290531 - DNA, 19 bp, Homo sapiens
  siRNA target sequence for LAMA1 (NM_005559.2,710-728).
ccaagcgctgacgatcttt

SEQ ID NO: 290532 - DNA, 19 bp, Homo sapiens
  siRNA target sequence for LAMA1 (NM_005559.2,722-740).
gatctttcacccaagttgt

SEQ ID NO: 290533 - DNA, 19 bp, Homo sapiens
  siRNA target sequence for LAMA1 (NM_005559.2,748-766).
cacttctgcacgatatatt

SEQ ID NO: 290534 - DNA, 19 bp, Homo sapiens
  siRNA target sequence for LAMA1 (NM_005559.2,773-791).
cgcttgcaacgcattagaa

SEQ ID NO: 290535 - DNA, 19 bp, Homo sapiens
  siRNA target sequence for LAMA1 (NM_005559.2,792-810).
cgctcaatgcagatctcat

SEQ ID NO: 290536 - DNA, 19 bp, Homo sapiens
  siRNA target sequence for LAMA1 (NM_005559.2,819-837).
gccaccgggaacctaaaga

SEQ ID NO: 290537 - DNA, 19 bp, Homo sapiens
  siRNA target sequence for LAMA1 (NM_005559.2,820-838).
ccaccgggaacctaaagaa

SEQ ID NO: 290538 - DNA, 19 bp, Homo sapiens
  siRNA target sequence for LAMA1 (NM_005559.2,836-854).
gaactggatcctattgtta

SEQ ID NO: 290539 - DNA, 19 bp, Homo sapiens
  siRNA target sequence for LAMA1 (NM_005559.2,856-874).
cagacgctattattattca

SEQ ID NO: 290540 - DNA, 19 bp, Homo sapiens
  siRNA target sequence for LAMA1 (NM_005559.2,965-983).
caatgtgagcataatactt

SEQ ID NO: 290541 - DNA, 19 bp, Homo sapiens
  siRNA target sequence for LAMA1 (NM_005559.2,1045-1063).
cgtgtcctccggcaataca

SEQ ID NO: 290542 - DNA, 19 bp, Homo sapiens
  siRNA target sequence for LAMA1 (NM_005559.2,1070-1088).
gcatgtaattgtcacaata

SEQ ID NO: 290543 - DNA, 19 bp, Homo sapiens
  siRNA target sequence for LAMA1 (NM_005559.2,1219-1237).
ctgtattgatggatattat

SEQ ID NO: 290544 - DNA, 19 bp, Homo sapiens
  siRNA target sequence for LAMA1 (NM_005559.2,1365-1383).
caggtcagtgcccatgtaa

SEQ ID NO: 290545 - DNA, 19 bp, Homo sapiens
  siRNA target sequence for LAMA1 (NM_005559.2,1374-1392).
gcccatgtaaggaaggtta

SEQ ID NO: 290546 - DNA, 19 bp, Homo sapiens
  siRNA target sequence for LAMA1 (NM_005559.2,1375-1393).
cccatgtaaggaaggttat

SEQ ID NO: 290547 - DNA, 19 bp, Homo sapiens
  siRNA target sequence for LAMA1 (NM_005559.2,1376-1394).
ccatgtaaggaaggttata

SEQ ID NO: 290548 - DNA, 19 bp, Homo sapiens
  siRNA target sequence for LAMA1 (NM_005559.2,1413-1431).
gctgccaacttggctataa

SEQ ID NO: 290549 - DNA, 19 bp, Homo sapiens
  siRNA target sequence for LAMA1 (NM_005559.2,1416-1434).
gccaacttggctataagga

SEQ ID NO: 290550 - DNA, 19 bp, Homo sapiens
  siRNA target sequence for LAMA1 (NM_005559.2,1646-1664).
cctgttggtcaggtaaaca

SEQ ID NO: 290551 - DNA, 19 bp, Homo sapiens
  siRNA target sequence for LAMA1 (NM_005559.2,1652-1670).
ggtcaggtaaacagtatgt

SEQ ID NO: 290552 - DNA, 19 bp, Homo sapiens
  siRNA target sequence for LAMA1 (NM_005559.2,1809-1827).
ccgaggcctaccttggaaa

SEQ ID NO: 290553 - DNA, 19 bp, Homo sapiens
  siRNA target sequence for LAMA1 (NM_005559.2,1810-1828).
cgaggcctaccttggaaat

SEQ ID NO: 290554 - DNA, 19 bp, Homo sapiens
  siRNA target sequence for LAMA1 (NM_005559.2,1815-1833).
cctaccttggaaataagct

SEQ ID NO: 290555 - DNA, 19 bp, Homo sapiens
  siRNA target sequence for LAMA1 (NM_005559.2,1844-1862).
ggcggattcctgaaataca

SEQ ID NO: 290556 - DNA, 19 bp, Homo sapiens
  siRNA target sequence for LAMA1 (NM_005559.2,1861-1879).
cacggtgtcctacgatatt

SEQ ID NO: 290557 - DNA, 19 bp, Homo sapiens
  siRNA target sequence for LAMA1 (NM_005559.2,1911-1929).
cgcatgctgacgtcatcat

SEQ ID NO: 290558 - DNA, 19 bp, Homo sapiens
  siRNA target sequence for LAMA1 (NM_005559.2,1933-1951).
gggaaacggactcacttta

SEQ ID NO: 290559 - DNA, 19 bp, Homo sapiens
  siRNA target sequence for LAMA1 (NM_005559.2,1934-1952).
ggaaacggactcactttaa

SEQ ID NO: 290560 - DNA, 19 bp, Homo sapiens
  siRNA target sequence for LAMA1 (NM_005559.2,1982-2000).
ccttatgaagagtacctaa

SEQ ID NO: 290561 - DNA, 19 bp, Homo sapiens
  siRNA target sequence for LAMA1 (NM_005559.2,1983-2001).
cttatgaagagtacctaaa

SEQ ID NO: 290562 - DNA, 19 bp, Homo sapiens
  siRNA target sequence for LAMA1 (NM_005559.2,1996-2014).
cctaaacgtggttagactt

SEQ ID NO: 290563 - DNA, 19 bp, Homo sapiens
  siRNA target sequence for LAMA1 (NM_005559.2,2041-2059).
cagcaaaaggcagattgat

SEQ ID NO: 290564 - DNA, 19 bp, Homo sapiens
  siRNA target sequence for LAMA1 (NM_005559.2,2164-2182).
ggacatagccagctctaat

SEQ ID NO: 290565 - DNA, 19 bp, Homo sapiens
  siRNA target sequence for LAMA1 (NM_005559.2,2746-2764).
gtgtgctgacgggttctat

SEQ ID NO: 290566 - DNA, 19 bp, Homo sapiens
  siRNA target sequence for LAMA1 (NM_005559.2,2896-2914).
gtgcttgcatggctattat

SEQ ID NO: 290567 - DNA, 19 bp, Homo sapiens
  siRNA target sequence for LAMA1 (NM_005559.2,3158-3176).
ggtgtgaagtgtgaagaat

SEQ ID NO: 290568 - DNA, 19 bp, Homo sapiens
  siRNA target sequence for LAMA1 (NM_005559.2,3212-3230).
gggtgccaggcctgcaatt

SEQ ID NO: 290569 - DNA, 19 bp, Homo sapiens
  siRNA target sequence for LAMA1 (NM_005559.2,3238-3256).
cgtggggtcgactcatcat

SEQ ID NO: 290570 - DNA, 19 bp, Homo sapiens
  siRNA target sequence for LAMA1 (NM_005559.2,3470-3488).
ggtcctcagtgcaacgaat

SEQ ID NO: 290571 - DNA, 19 bp, Homo sapiens
  siRNA target sequence for LAMA1 (NM_005559.2,3633-3651).
gtgtggtttctcagagtaa

SEQ ID NO: 290572 - DNA, 19 bp, Homo sapiens
  siRNA target sequence for LAMA1 (NM_005559.2,3635-3653).
gtggtttctcagagtaact

SEQ ID NO: 290573 - DNA, 19 bp, Homo sapiens
  siRNA target sequence for LAMA1 (NM_005559.2,3638-3656).
gtttctcagagtaacttga

SEQ ID NO: 290574 - DNA, 19 bp, Homo sapiens
  siRNA target sequence for LAMA1 (NM_005559.2,3663-3681).
cgaccgagggggtttacta

SEQ ID NO: 290575 - DNA, 19 bp, Homo sapiens
  siRNA target sequence for LAMA1 (NM_005559.2,3731-3749).
cgtgcagagccgttttact

SEQ ID NO: 290576 - DNA, 19 bp, Homo sapiens
  siRNA target sequence for LAMA1 (NM_005559.2,3817-3835).
ggccttctattctttggat

SEQ ID NO: 290577 - DNA, 19 bp, Homo sapiens
  siRNA target sequence for LAMA1 (NM_005559.2,3836-3854).
ggcgtcggcacctccaatt

SEQ ID NO: 290578 - DNA, 19 bp, Homo sapiens
  siRNA target sequence for LAMA1 (NM_005559.2,3837-3855).
gcgtcggcacctccaattt

SEQ ID NO: 290579 - DNA, 19 bp, Homo sapiens
  siRNA target sequence for LAMA1 (NM_005559.2,3859-3877).
gcctcaagttctcatcaaa

SEQ ID NO: 290580 - DNA, 19 bp, Homo sapiens
  siRNA target sequence for LAMA1 (NM_005559.2,3885-3903).
ggatcagaaagcaagtcat

SEQ ID NO: 290581 - DNA, 19 bp, Homo sapiens
  siRNA target sequence for LAMA1 (NM_005559.2,4007-4025).
gtcacgcgagaggatttta

SEQ ID NO: 290582 - DNA, 19 bp, Homo sapiens
  siRNA target sequence for LAMA1 (NM_005559.2,4012-4030).
gcgagaggattttatgtct

SEQ ID NO: 290583 - DNA, 19 bp, Homo sapiens
  siRNA target sequence for LAMA1 (NM_005559.2,4027-4045).
gtctgtcctcagcgatatt

SEQ ID NO: 290584 - DNA, 19 bp, Homo sapiens
  siRNA target sequence for LAMA1 (NM_005559.2,4029-4047).
ctgtcctcagcgatattga

SEQ ID NO: 290585 - DNA, 19 bp, Homo sapiens
  siRNA target sequence for LAMA1 (NM_005559.2,4031-4049).
gtcctcagcgatattgagt

SEQ ID NO: 290586 - DNA, 19 bp, Homo sapiens
  siRNA target sequence for LAMA1 (NM_005559.2,4054-4072).
cctcatcaaggcatcgtat

SEQ ID NO: 290587 - DNA, 19 bp, Homo sapiens
  siRNA target sequence for LAMA1 (NM_005559.2,4065-4083).
catcgtatggtcaaggatt

SEQ ID NO: 290588 - DNA, 19 bp, Homo sapiens
  siRNA target sequence for LAMA1 (NM_005559.2,4068-4086).
cgtatggtcaaggattaca

SEQ ID NO: 290589 - DNA, 19 bp, Homo sapiens
  siRNA target sequence for LAMA1 (NM_005559.2,4095-4113).
gaatctcagacatttcaat

SEQ ID NO: 290590 - DNA, 19 bp, Homo sapiens
  siRNA target sequence for LAMA1 (NM_005559.2,4352-4370).
ctgaactgtggcgataaca

SEQ ID NO: 290591 - DNA, 19 bp, Homo sapiens
  siRNA target sequence for LAMA1 (NM_005559.2,4354-4372).
gaactgtggcgataacaca

SEQ ID NO: 290592 - DNA, 19 bp, Homo sapiens
  siRNA target sequence for LAMA1 (NM_005559.2,4465-4483).
ccctcctgccagttttagt

SEQ ID NO: 290593 - DNA, 19 bp, Homo sapiens
  siRNA target sequence for LAMA1 (NM_005559.2,4563-4581).
ggtgctcctcaagctatta

SEQ ID NO: 290594 - DNA, 19 bp, Homo sapiens
  siRNA target sequence for LAMA1 (NM_005559.2,4719-4737).
gtgaaccgaggcacattct

SEQ ID NO: 290595 - DNA, 19 bp, Homo sapiens
  siRNA target sequence for LAMA1 (NM_005559.2,4721-4739).
gaaccgaggcacattctga

SEQ ID NO: 290596 - DNA, 19 bp, Homo sapiens
  siRNA target sequence for LAMA1 (NM_005559.2,4778-4796).
ggtgtgctgctgaatgact

SEQ ID NO: 290597 - DNA, 19 bp, Homo sapiens
  siRNA target sequence for LAMA1 (NM_005559.2,4852-4870).
cccatatggaattttgtca

SEQ ID NO: 290598 - DNA, 19 bp, Homo sapiens
  siRNA target sequence for LAMA1 (NM_005559.2,4853-4871).
ccatatggaattttgtcaa

SEQ ID NO: 290599 - DNA, 19 bp, Homo sapiens
  siRNA target sequence for LAMA1 (NM_005559.2,5149-5167).
cctactacccaattctact

SEQ ID NO: 290600 - DNA, 19 bp, Homo sapiens
  siRNA target sequence for LAMA1 (NM_005559.2,5180-5198).
caacagaatggtacatctt

SEQ ID NO: 290601 - DNA, 19 bp, Homo sapiens
  siRNA target sequence for LAMA1 (NM_005559.2,5189-5207).
ggtacatctttgctagaaa

SEQ ID NO: 290602 - DNA, 19 bp, Homo sapiens
  siRNA target sequence for LAMA1 (NM_005559.2,5227-5245).
cacacagttgcaccaaaat

SEQ ID NO: 290603 - DNA, 19 bp, Homo sapiens
  siRNA target sequence for LAMA1 (NM_005559.2,5342-5360).
gcaagccacgtcctttcaa

SEQ ID NO: 290604 - DNA, 19 bp, Homo sapiens
  siRNA target sequence for LAMA1 (NM_005559.2,5353-5371).
cctttcaaagcacaacaat

SEQ ID NO: 290605 - DNA, 19 bp, Homo sapiens
  siRNA target sequence for LAMA1 (NM_005559.2,5440-5458).
gctcatggtcaatgctaat

SEQ ID NO: 290606 - DNA, 19 bp, Homo sapiens
  siRNA target sequence for LAMA1 (NM_005559.2,5599-5617).
ggatcaccaggataagcta

SEQ ID NO: 290607 - DNA, 19 bp, Homo sapiens
  siRNA target sequence for LAMA1 (NM_005559.2,5603-5621).
caccaggataagctacttt

SEQ ID NO: 290608 - DNA, 19 bp, Homo sapiens
  siRNA target sequence for LAMA1 (NM_005559.2,5609-5627).
gataagctacttttatggt

SEQ ID NO: 290609 - DNA, 19 bp, Homo sapiens
  siRNA target sequence for LAMA1 (NM_005559.2,5728-5746).
ccagagactagcagatgtt

SEQ ID NO: 290610 - DNA, 19 bp, Homo sapiens
  siRNA target sequence for LAMA1 (NM_005559.2,5747-5765).
ctgtacagtggccttgaaa

SEQ ID NO: 290611 - DNA, 19 bp, Homo sapiens
  siRNA target sequence for LAMA1 (NM_005559.2,5796-5814).
gtgcagcctatgtccatta

SEQ ID NO: 290612 - DNA, 19 bp, Homo sapiens
  siRNA target sequence for LAMA1 (NM_005559.2,5802-5820).
cctatgtccattacaacat

SEQ ID NO: 290613 - DNA, 19 bp, Homo sapiens
  siRNA target sequence for LAMA1 (NM_005559.2,5818-5836).
catccagagcctgattgaa

SEQ ID NO: 290614 - DNA, 19 bp, Homo sapiens
  siRNA target sequence for LAMA1 (NM_005559.2,5932-5950).
gcgcagctccagatttcta

SEQ ID NO: 290615 - DNA, 19 bp, Homo sapiens
  siRNA target sequence for LAMA1 (NM_005559.2,5933-5951).
cgcagctccagatttctaa

SEQ ID NO: 290616 - DNA, 19 bp, Homo sapiens
  siRNA target sequence for LAMA1 (NM_005559.2,6079-6097).
gatacttagagcaattcct

SEQ ID NO: 290617 - DNA, 19 bp, Homo sapiens
  siRNA target sequence for LAMA1 (NM_005559.2,6087-6105).
gagcaattcctaaaggtat

SEQ ID NO: 290618 - DNA, 19 bp, Homo sapiens
  siRNA target sequence for LAMA1 (NM_005559.2,6307-6325).
caaagacgtggaaattcaa

SEQ ID NO: 290619 - DNA, 19 bp, Homo sapiens
  siRNA target sequence for LAMA1 (NM_005559.2,6344-6362).
cggttgaagcctttgaaga

SEQ ID NO: 290620 - DNA, 19 bp, Homo sapiens
  siRNA target sequence for LAMA1 (NM_005559.2,6345-6363).
ggttgaagcctttgaagat

SEQ ID NO: 290621 - DNA, 19 bp, Homo sapiens
  siRNA target sequence for LAMA1 (NM_005559.2,6389-6407).
ctatcagaaattaaactgt

SEQ ID NO: 290622 - DNA, 19 bp, Homo sapiens
  siRNA target sequence for LAMA1 (NM_005559.2,6478-6496).
ggcctaccagcctcagatt

SEQ ID NO: 290623 - DNA, 19 bp, Homo sapiens
  siRNA target sequence for LAMA1 (NM_005559.2,6505-6523).
caactacaataccttaaca

SEQ ID NO: 290624 - DNA, 19 bp, Homo sapiens
  siRNA target sequence for LAMA1 (NM_005559.2,6508-6526).
ctacaataccttaacacta

SEQ ID NO: 290625 - DNA, 19 bp, Homo sapiens
  siRNA target sequence for LAMA1 (NM_005559.2,6546-6564).
ccgataatcttctcttcta

SEQ ID NO: 290626 - DNA, 19 bp, Homo sapiens
  siRNA target sequence for LAMA1 (NM_005559.2,6573-6591).
gcagcaccgcttctgattt

SEQ ID NO: 290627 - DNA, 19 bp, Homo sapiens
  siRNA target sequence for LAMA1 (NM_005559.2,6669-6687).
cagactttcccattgatga

SEQ ID NO: 290628 - DNA, 19 bp, Homo sapiens
  siRNA target sequence for LAMA1 (NM_005559.2,6706-6724).
ccatgtagccagatttgga

SEQ ID NO: 290629 - DNA, 19 bp, Homo sapiens
  siRNA target sequence for LAMA1 (NM_005559.2,6707-6725).
catgtagccagatttggaa

SEQ ID NO: 290630 - DNA, 19 bp, Homo sapiens
  siRNA target sequence for LAMA1 (NM_005559.2,6795-6813).
ctgggacagctaatgttct

SEQ ID NO: 290631 - DNA, 19 bp, Homo sapiens
  siRNA target sequence for LAMA1 (NM_005559.2,6814-6832).
ggatgtaaacaattcaaca

SEQ ID NO: 290632 - DNA, 19 bp, Homo sapiens
  siRNA target sequence for LAMA1 (NM_005559.2,6848-6866).
ggtcttggaggacaaatca

SEQ ID NO: 290633 - DNA, 19 bp, Homo sapiens
  siRNA target sequence for LAMA1 (NM_005559.2,6849-6867).
gtcttggaggacaaatcaa

SEQ ID NO: 290634 - DNA, 19 bp, Homo sapiens
  siRNA target sequence for LAMA1 (NM_005559.2,6878-6896).
gctgtgaaggttactcatt

SEQ ID NO: 290635 - DNA, 19 bp, Homo sapiens
  siRNA target sequence for LAMA1 (NM_005559.2,6937-6955).
cataggcctatggaactat

SEQ ID NO: 290636 - DNA, 19 bp, Homo sapiens
  siRNA target sequence for LAMA1 (NM_005559.2,6942-6960).
gcctatggaactatattga

SEQ ID NO: 290637 - DNA, 19 bp, Homo sapiens
  siRNA target sequence for LAMA1 (NM_005559.2,6943-6961).
cctatggaactatattgaa

SEQ ID NO: 290638 - DNA, 19 bp, Homo sapiens
  siRNA target sequence for LAMA1 (NM_005559.2,7064-7082).
gctaccgtgacccagataa

SEQ ID NO: 290639 - DNA, 19 bp, Homo sapiens
  siRNA target sequence for LAMA1 (NM_005559.2,7065-7083).
ctaccgtgacccagataat

SEQ ID NO: 290640 - DNA, 19 bp, Homo sapiens
  siRNA target sequence for LAMA1 (NM_005559.2,7068-7086).
ccgtgacccagataatcat

SEQ ID NO: 290641 - DNA, 19 bp, Homo sapiens
  siRNA target sequence for LAMA1 (NM_005559.2,7129-7147).
gggttcatacggcacaaaa

SEQ ID NO: 290642 - DNA, 19 bp, Homo sapiens
  siRNA target sequence for LAMA1 (NM_005559.2,7131-7149).
gttcatacggcacaaaaga

SEQ ID NO: 290643 - DNA, 19 bp, Homo sapiens
  siRNA target sequence for LAMA1 (NM_005559.2,7134-7152).
catacggcacaaaagactt

SEQ ID NO: 290644 - DNA, 19 bp, Homo sapiens
  siRNA target sequence for LAMA1 (NM_005559.2,7172-7190).
cgtggcagagtgaaggtta

SEQ ID NO: 290645 - DNA, 19 bp, Homo sapiens
  siRNA target sequence for LAMA1 (NM_005559.2,7175-7193).
ggcagagtgaaggttatga

SEQ ID NO: 290646 - DNA, 19 bp, Homo sapiens
  siRNA target sequence for LAMA1 (NM_005559.2,7227-7245).
cagacagacgttataacaa

SEQ ID NO: 290647 - DNA, 19 bp, Homo sapiens
  siRNA target sequence for LAMA1 (NM_005559.2,7290-7308).
gagtgctagcagttatcga

SEQ ID NO: 290648 - DNA, 19 bp, Homo sapiens
  siRNA target sequence for LAMA1 (NM_005559.2,7310-7328).
gcctataacaccagtaata

SEQ ID NO: 290649 - DNA, 19 bp, Homo sapiens
  siRNA target sequence for LAMA1 (NM_005559.2,7436-7454).
ggtgtcaccaccaaaagct

SEQ ID NO: 290650 - DNA, 19 bp, Homo sapiens
  siRNA target sequence for LAMA1 (NM_005559.2,7499-7517).
gacttactcagaaattcct

SEQ ID NO: 290651 - DNA, 19 bp, Homo sapiens
  siRNA target sequence for LAMA1 (NM_005559.2,7544-7562).
gagcccatccggagtgtta

SEQ ID NO: 290652 - DNA, 19 bp, Homo sapiens
  siRNA target sequence for LAMA1 (NM_005559.2,7570-7588).
gaaaggcggctacattgaa

SEQ ID NO: 290653 - DNA, 19 bp, Homo sapiens
  siRNA target sequence for LAMA1 (NM_005559.2,7586-7604).
gaattgccacccaaatctt

SEQ ID NO: 290654 - DNA, 19 bp, Homo sapiens
  siRNA target sequence for LAMA1 (NM_005559.2,7591-7609).
gccacccaaatctttgtca

SEQ ID NO: 290655 - DNA, 19 bp, Homo sapiens
  siRNA target sequence for LAMA1 (NM_005559.2,7617-7635).
cagaatggctggtaacatt

SEQ ID NO: 290656 - DNA, 19 bp, Homo sapiens
  siRNA target sequence for LAMA1 (NM_005559.2,7753-7771).
cattgaggtacatgtcaat

SEQ ID NO: 290657 - DNA, 19 bp, Homo sapiens
  siRNA target sequence for LAMA1 (NM_005559.2,7859-7877).
gtcaggaatcggagaatta

SEQ ID NO: 290658 - DNA, 19 bp, Homo sapiens
  siRNA target sequence for LAMA1 (NM_005559.2,7918-7936).
gttgggcacattagtagaa

SEQ ID NO: 290659 - DNA, 19 bp, Homo sapiens
  siRNA target sequence for LAMA1 (NM_005559.2,7931-7949).
gtagaaagcaggacgataa

SEQ ID NO: 290660 - DNA, 19 bp, Homo sapiens
  siRNA target sequence for LAMA1 (NM_005559.2,7992-8010).
ggacgtcactgctcacaat

SEQ ID NO: 290661 - DNA, 19 bp, Homo sapiens
  siRNA target sequence for LAMA1 (NM_005559.2,7996-8014).
gtcactgctcacaatgaga

SEQ ID NO: 290662 - DNA, 19 bp, Homo sapiens
  siRNA target sequence for LAMA1 (NM_005559.2,8031-8049).
gtatcaaaaacctgatctt

SEQ ID NO: 290663 - DNA, 19 bp, Homo sapiens
  siRNA target sequence for LAMA1 (NM_005559.2,8041-8059).
cctgatcttcaatttggaa

SEQ ID NO: 290664 - DNA, 19 bp, Homo sapiens
  siRNA target sequence for LAMA1 (NM_005559.2,8237-8255).
cagtttggtctcacacaaa

SEQ ID NO: 290665 - DNA, 19 bp, Homo sapiens
  siRNA target sequence for LAMA1 (NM_005559.2,8333-8351).
gcctccagcggcctgattt

SEQ ID NO: 290666 - DNA, 19 bp, Homo sapiens
  siRNA target sequence for LAMA1 (NM_005559.2,8334-8352).
cctccagcggcctgattta

SEQ ID NO: 290667 - DNA, 19 bp, Homo sapiens
  siRNA target sequence for LAMA1 (NM_005559.2,8340-8358).
gcggcctgatttactacat

SEQ ID NO: 290668 - DNA, 19 bp, Homo sapiens
  siRNA target sequence for LAMA1 (NM_005559.2,8488-8506).
cacggtcaagacagactat

SEQ ID NO: 290669 - DNA, 19 bp, Homo sapiens
  siRNA target sequence for LAMA1 (NM_005559.2,8490-8508).
cggtcaagacagactatgt

SEQ ID NO: 290670 - DNA, 19 bp, Homo sapiens
  siRNA target sequence for LAMA1 (NM_005559.2,8624-8642).
cagtaccaggccaggaaaa

SEQ ID NO: 290671 - DNA, 19 bp, Homo sapiens
  siRNA target sequence for LAMA1 (NM_005559.2,8630-8648).
caggccaggaaaattggaa

SEQ ID NO: 290672 - DNA, 19 bp, Homo sapiens
  siRNA target sequence for LAMA1 (NM_005559.2,8678-8696).
ggggatgtgacggttaaca

SEQ ID NO: 290673 - DNA, 19 bp, Homo sapiens
  siRNA target sequence for LAMA1 (NM_005559.2,8790-8808).
gatatgcagctcttgtcaa

SEQ ID NO: 290674 - DNA, 19 bp, Homo sapiens
  siRNA target sequence for LAMA1 (NM_005559.2,8825-8843).
cagtcagatgtgaacatca

SEQ ID NO: 290675 - DNA, 19 bp, Homo sapiens
  siRNA target sequence for LAMA1 (NM_005559.2,8970-8988).
ggataacagctgcatatga

SEQ ID NO: 290676 - DNA, 19 bp, Homo sapiens
  siRNA target sequence for LAMA1 (NM_005559.2,9055-9073).
ccgtatcactctgattgtt

SEQ ID NO: 290677 - DNA, 19 bp, Homo sapiens
  siRNA target sequence for LAMA1 (NM_005559.2,9082-9100).
cgcagttggcgctgaaagt

SEQ ID NO: 290678 - DNA, 19 bp, Homo sapiens
  siRNA target sequence for LAMA1 (NM_005559.2,9161-9179).
gctggtgtgaagcaaaaat

SEQ ID NO: 290679 - DNA, 19 bp, Homo sapiens
  siRNA target sequence for LAMA1 (NM_005559.2,9216-9234).
ggaagctagctctgattaa

SEQ ID NO: 290680 - DNA, 19 bp, Homo sapiens
  siRNA target sequence for LAMA1 (NM_005559.2,9281-9299).
cacggagttttccttcatt

SEQ ID NO: 290681 - DNA, 19 bp, Homo sapiens
  siRNA target sequence for LAMA2 (NM_000426.2,200-218).
cttatcacgaccaatgcaa

SEQ ID NO: 290682 - DNA, 19 bp, Homo sapiens
  siRNA target sequence for LAMA2 (NM_000426.2,205-223).
cacgaccaatgcaacatgt

SEQ ID NO: 290683 - DNA, 19 bp, Homo sapiens
  siRNA target sequence for LAMA2 (NM_000426.2,236-254).
cctgaaatgtactgcaaat

SEQ ID NO: 290684 - DNA, 19 bp, Homo sapiens
  siRNA target sequence for LAMA2 (NM_000426.2,247-265).
ctgcaaattggtagaacat

SEQ ID NO: 290685 - DNA, 19 bp, Homo sapiens
  siRNA target sequence for LAMA2 (NM_000426.2,295-313).
gtgtcgaatctgcaatcaa

SEQ ID NO: 290686 - DNA, 19 bp, Homo sapiens
  siRNA target sequence for LAMA2 (NM_000426.2,331-349).
ccagagacacccgattaca

SEQ ID NO: 290687 - DNA, 19 bp, Homo sapiens
  siRNA target sequence for LAMA2 (NM_000426.2,332-350).
cagagacacccgattacaa

SEQ ID NO: 290688 - DNA, 19 bp, Homo sapiens
  siRNA target sequence for LAMA2 (NM_000426.2,338-356).
cacccgattacaaatgcta

SEQ ID NO: 290689 - DNA, 19 bp, Homo sapiens
  siRNA target sequence for LAMA2 (NM_000426.2,378-396).
ggcagagtcccagtattaa

SEQ ID NO: 290690 - DNA, 19 bp, Homo sapiens
  siRNA target sequence for LAMA2 (NM_000426.2,402-420).
gaatcgaataccattatgt

SEQ ID NO: 290691 - DNA, 19 bp, Homo sapiens
  siRNA target sequence for LAMA2 (NM_000426.2,451-469).
ccagatcgcgtatgtgatt

SEQ ID NO: 290692 - DNA, 19 bp, Homo sapiens
  siRNA target sequence for LAMA2 (NM_000426.2,572-590).
gagtgcctaacgctttaca

SEQ ID NO: 290693 - DNA, 19 bp, Homo sapiens
  siRNA target sequence for LAMA2 (NM_000426.2,574-592).
gtgcctaacgctttacaat

SEQ ID NO: 290694 - DNA, 19 bp, Homo sapiens
  siRNA target sequence for LAMA2 (NM_000426.2,576-594).
gcctaacgctttacaatat

SEQ ID NO: 290695 - DNA, 19 bp, Homo sapiens
  siRNA target sequence for LAMA2 (NM_000426.2,604-622).
cactgggccaccgtcatat

SEQ ID NO: 290696 - DNA, 19 bp, Homo sapiens
  siRNA target sequence for LAMA2 (NM_000426.2,635-653).
gaggtcatctgcacttcat

SEQ ID NO: 290697 - DNA, 19 bp, Homo sapiens
  siRNA target sequence for LAMA2 (NM_000426.2,661-679).
caagatacaccccttagaa

SEQ ID NO: 290698 - DNA, 19 bp, Homo sapiens
  siRNA target sequence for LAMA2 (NM_000426.2,735-753).
ctccagaactgctagaatt

SEQ ID NO: 290699 - DNA, 19 bp, Homo sapiens
  siRNA target sequence for LAMA2 (NM_000426.2,737-755).
ccagaactgctagaattta

SEQ ID NO: 290700 - DNA, 19 bp, Homo sapiens
  siRNA target sequence for LAMA2 (NM_000426.2,765-783).
gctatattcgcctgagatt

SEQ ID NO: 290701 - DNA, 19 bp, Homo sapiens
  siRNA target sequence for LAMA2 (NM_000426.2,766-784).
ctatattcgcctgagattt

SEQ ID NO: 290702 - DNA, 19 bp, Homo sapiens
  siRNA target sequence for LAMA2 (NM_000426.2,787-805).
gaggatccgcacactgaat

SEQ ID NO: 290703 - DNA, 19 bp, Homo sapiens
  siRNA target sequence for LAMA2 (NM_000426.2,798-816).
cactgaatgctgacttgat

SEQ ID NO: 290704 - DNA, 19 bp, Homo sapiens
  siRNA target sequence for LAMA2 (NM_000426.2,814-832).
gatgatgtttgctcacaaa

SEQ ID NO: 290705 - DNA, 19 bp, Homo sapiens
  siRNA target sequence for LAMA2 (NM_000426.2,842-860).
gaaattgaccccattgtca

SEQ ID NO: 290706 - DNA, 19 bp, Homo sapiens
  siRNA target sequence for LAMA2 (NM_000426.2,851-869).
cccattgtcaccagaagat

SEQ ID NO: 290707 - DNA, 19 bp, Homo sapiens
  siRNA target sequence for LAMA2 (NM_000426.2,941-959).
cttgatccagcgacaaata

SEQ ID NO: 290708 - DNA, 19 bp, Homo sapiens
  siRNA target sequence for LAMA2 (NM_000426.2,1050-1068).
cttttctaactaaaactga

SEQ ID NO: 290709 - DNA, 19 bp, Homo sapiens
  siRNA target sequence for LAMA2 (NM_000426.2,1103-1121).
gaatgctattatgatgaaa

SEQ ID NO: 290710 - DNA, 19 bp, Homo sapiens
  siRNA target sequence for LAMA2 (NM_000426.2,1107-1125).
gctattatgatgaaaatgt

SEQ ID NO: 290711 - DNA, 19 bp, Homo sapiens
  siRNA target sequence for LAMA2 (NM_000426.2,1175-1193).
ggtgtctgcattaattgta

SEQ ID NO: 290712 - DNA, 19 bp, Homo sapiens
  siRNA target sequence for LAMA2 (NM_000426.2,1249-1267).
caaaggggtatctccaaat

SEQ ID NO: 290713 - DNA, 19 bp, Homo sapiens
  siRNA target sequence for LAMA2 (NM_000426.2,1256-1274).
gtatctccaaattatccaa

SEQ ID NO: 290714 - DNA, 19 bp, Homo sapiens
  siRNA target sequence for LAMA2 (NM_000426.2,1276-1294).
gccatgccagccatgtcat

SEQ ID NO: 290715 - DNA, 19 bp, Homo sapiens
  siRNA target sequence for LAMA2 (NM_000426.2,1287-1305).
catgtcattgcgatccaat

SEQ ID NO: 290716 - DNA, 19 bp, Homo sapiens
  siRNA target sequence for LAMA2 (NM_000426.2,1292-1310).
cattgcgatccaattggtt

SEQ ID NO: 290717 - DNA, 19 bp, Homo sapiens
  siRNA target sequence for LAMA2 (NM_000426.2,1297-1315).
cgatccaattggttcctta

SEQ ID NO: 290718 - DNA, 19 bp, Homo sapiens
  siRNA target sequence for LAMA2 (NM_000426.2,1298-1316).
gatccaattggttccttaa

SEQ ID NO: 290719 - DNA, 19 bp, Homo sapiens
  siRNA target sequence for LAMA2 (NM_000426.2,1467-1485).
ggttagggagcaaaaatga

SEQ ID NO: 290720 - DNA, 19 bp, Homo sapiens
  siRNA target sequence for LAMA2 (NM_000426.2,1535-1553).
gactgtagtcgttgcaaat

SEQ ID NO: 290721 - DNA, 19 bp, Homo sapiens
  siRNA target sequence for LAMA2 (NM_000426.2,1554-1572).
ccggcttcttcaatttgca

SEQ ID NO: 290722 - DNA, 19 bp, Homo sapiens
  siRNA target sequence for LAMA2 (NM_000426.2,1555-1573).
cggcttcttcaatttgcaa

SEQ ID NO: 290723 - DNA, 19 bp, Homo sapiens
  siRNA target sequence for LAMA2 (NM_000426.2,1591-1609).
ctgcgatgagtgtttctgt

SEQ ID NO: 290724 - DNA, 19 bp, Homo sapiens
  siRNA target sequence for LAMA2 (NM_000426.2,1645-1663).
gacctatggcaaaatacaa

SEQ ID NO: 290725 - DNA, 19 bp, Homo sapiens
  siRNA target sequence for LAMA2 (NM_000426.2,1742-1760).
cagcagatcagcatcagta

SEQ ID NO: 290726 - DNA, 19 bp, Homo sapiens
  siRNA target sequence for LAMA2 (NM_000426.2,1841-1859).
gtaggaggacagttgacat

SEQ ID NO: 290727 - DNA, 19 bp, Homo sapiens
  siRNA target sequence for LAMA2 (NM_000426.2,1855-1873).
gacatttaccatatcatat

SEQ ID NO: 290728 - DNA, 19 bp, Homo sapiens
  siRNA target sequence for LAMA2 (NM_000426.2,1907-1925).
gttctccagcttatgatta

SEQ ID NO: 290729 - DNA, 19 bp, Homo sapiens
  siRNA target sequence for LAMA2 (NM_000426.2,1978-1996).
gcacccatctgaagaacat

SEQ ID NO: 290730 - DNA, 19 bp, Homo sapiens
  siRNA target sequence for LAMA2 (NM_000426.2,1979-1997).
cacccatctgaagaacata

SEQ ID NO: 290731 - DNA, 19 bp, Homo sapiens
  siRNA target sequence for LAMA2 (NM_000426.2,1988-2006).
gaagaacatactaatgtat

SEQ ID NO: 290732 - DNA, 19 bp, Homo sapiens
  siRNA target sequence for LAMA2 (NM_000426.2,2031-2049).
ccatacatggcacacattt

SEQ ID NO: 290733 - DNA, 19 bp, Homo sapiens
  siRNA target sequence for LAMA2 (NM_000426.2,2052-2070).
cagtccgtagaaaggaatt

SEQ ID NO: 290734 - DNA, 19 bp, Homo sapiens
  siRNA target sequence for LAMA2 (NM_000426.2,2054-2072).
gtccgtagaaaggaattta

SEQ ID NO: 290735 - DNA, 19 bp, Homo sapiens
  siRNA target sequence for LAMA2 (NM_000426.2,2057-2075).
cgtagaaaggaatttatga

SEQ ID NO: 290736 - DNA, 19 bp, Homo sapiens
  siRNA target sequence for LAMA2 (NM_000426.2,2078-2096).
gtgcttgcgaatttgaaga

SEQ ID NO: 290737 - DNA, 19 bp, Homo sapiens
  siRNA target sequence for LAMA2 (NM_000426.2,2102-2120).
ctcctacaaatcacataca

SEQ ID NO: 290738 - DNA, 19 bp, Homo sapiens
  siRNA target sequence for LAMA2 (NM_000426.2,2224-2242).
gtgcccaccagggtatact

SEQ ID NO: 290739 - DNA, 19 bp, Homo sapiens
  siRNA target sequence for LAMA2 (NM_000426.2,2268-2286).
ctaggcacaggcgagttaa

SEQ ID NO: 290740 - DNA, 19 bp, Homo sapiens
  siRNA target sequence for LAMA2 (NM_000426.2,2278-2296).
gcgagttaacggcactatt

SEQ ID NO: 290741 - DNA, 19 bp, Homo sapiens
  siRNA target sequence for LAMA2 (NM_000426.2,2279-2297).
cgagttaacggcactattt

SEQ ID NO: 290742 - DNA, 19 bp, Homo sapiens
  siRNA target sequence for LAMA2 (NM_000426.2,2280-2298).
gagttaacggcactatttt

SEQ ID NO: 290743 - DNA, 19 bp, Homo sapiens
  siRNA target sequence for LAMA2 (NM_000426.2,2361-2379).
gagaatgcctgaactgtaa

SEQ ID NO: 290744 - DNA, 19 bp, Homo sapiens
  siRNA target sequence for LAMA2 (NM_000426.2,2390-2408).
ggtggcccatattgtgata

SEQ ID NO: 290745 - DNA, 19 bp, Homo sapiens
  siRNA target sequence for LAMA2 (NM_000426.2,2397-2415).
catattgtgataaatgtct

SEQ ID NO: 290746 - DNA, 19 bp, Homo sapiens
  siRNA target sequence for LAMA2 (NM_000426.2,2425-2443).
ctatggcgagcctactaaa

SEQ ID NO: 290747 - DNA, 19 bp, Homo sapiens
  siRNA target sequence for LAMA2 (NM_000426.2,2429-2447).
ggcgagcctactaaaggaa

SEQ ID NO: 290748 - DNA, 19 bp, Homo sapiens
  siRNA target sequence for LAMA2 (NM_000426.2,2469-2487).
gtgcctgtccactcaatat

SEQ ID NO: 290749 - DNA, 19 bp, Homo sapiens
  siRNA target sequence for LAMA2 (NM_000426.2,2480-2498).
ctcaatatcccatccaata

SEQ ID NO: 290750 - DNA, 19 bp, Homo sapiens
  siRNA target sequence for LAMA2 (NM_000426.2,2525-2543).
cggagtcttggattgatct

SEQ ID NO: 290751 - DNA, 19 bp, Homo sapiens
  siRNA target sequence for LAMA2 (NM_000426.2,2639-2657).
ccatgccaatgcaatgaca

SEQ ID NO: 290752 - DNA, 19 bp, Homo sapiens
  siRNA target sequence for LAMA2 (NM_000426.2,2640-2658).
catgccaatgcaatgacaa

SEQ ID NO: 290753 - DNA, 19 bp, Homo sapiens
  siRNA target sequence for LAMA2 (NM_000426.2,2649-2667).
gcaatgacaaccttgactt

SEQ ID NO: 290754 - DNA, 19 bp, Homo sapiens
  siRNA target sequence for LAMA2 (NM_000426.2,2699-2717).
ggctcctgtctgatatgta

SEQ ID NO: 290755 - DNA, 19 bp, Homo sapiens
  siRNA target sequence for LAMA2 (NM_000426.2,2700-2718).
gctcctgtctgatatgtaa

SEQ ID NO: 290756 - DNA, 19 bp, Homo sapiens
  siRNA target sequence for LAMA2 (NM_000426.2,2704-2722).
ctgtctgatatgtaaacca

SEQ ID NO: 290757 - DNA, 19 bp, Homo sapiens
  siRNA target sequence for LAMA2 (NM_000426.2,2774-2792).
gcagttgatgcgaagaact

SEQ ID NO: 290758 - DNA, 19 bp, Homo sapiens
  siRNA target sequence for LAMA2 (NM_000426.2,2882-2900).
ggtcagagatgtgacaaat

SEQ ID NO: 290759 - DNA, 19 bp, Homo sapiens
  siRNA target sequence for LAMA2 (NM_000426.2,2909-2927).
gggacctttggcctacaat

SEQ ID NO: 290760 - DNA, 19 bp, Homo sapiens
  siRNA target sequence for LAMA2 (NM_000426.2,2911-2929).
gacctttggcctacaatca

SEQ ID NO: 290761 - DNA, 19 bp, Homo sapiens
  siRNA target sequence for LAMA2 (NM_000426.2,3045-3063).
gtgcccacggctatttcaa

SEQ ID NO: 290762 - DNA, 19 bp, Homo sapiens
  siRNA target sequence for LAMA2 (NM_000426.2,3047-3065).
gcccacggctatttcaact

SEQ ID NO: 290763 - DNA, 19 bp, Homo sapiens
  siRNA target sequence for LAMA2 (NM_000426.2,3048-3066).
cccacggctatttcaactt

SEQ ID NO: 290764 - DNA, 19 bp, Homo sapiens
  siRNA target sequence for LAMA2 (NM_000426.2,3096-3114).
gttctcatctgggtaataa

SEQ ID NO: 290765 - DNA, 19 bp, Homo sapiens
  siRNA target sequence for LAMA2 (NM_000426.2,3245-3263).
ggatccttggatttccaat

SEQ ID NO: 290766 - DNA, 19 bp, Homo sapiens
  siRNA target sequence for LAMA2 (NM_000426.2,3285-3303).
gcaactgtcatccaaaatt

SEQ ID NO: 290767 - DNA, 19 bp, Homo sapiens
  siRNA target sequence for LAMA2 (NM_000426.2,3304-3322).
ctctggtgcaaaatgtaca

SEQ ID NO: 290768 - DNA, 19 bp, Homo sapiens
  siRNA target sequence for LAMA2 (NM_000426.2,3399-3417).
cctgtgattcagagactaa

SEQ ID NO: 290769 - DNA, 19 bp, Homo sapiens
  siRNA target sequence for LAMA2 (NM_000426.2,3441-3459).
ctgggcagtgcacttgtaa

SEQ ID NO: 290770 - DNA, 19 bp, Homo sapiens
  siRNA target sequence for LAMA2 (NM_000426.2,3450-3468).
gcacttgtaaggtgaatgt

SEQ ID NO: 290771 - DNA, 19 bp, Homo sapiens
  siRNA target sequence for LAMA2 (NM_000426.2,3508-3526).
cggactcgatgccaagaat

SEQ ID NO: 290772 - DNA, 19 bp, Homo sapiens
  siRNA target sequence for LAMA2 (NM_000426.2,3826-3844).
cgaggctcgggaagaaaca

SEQ ID NO: 290773 - DNA, 19 bp, Homo sapiens
  siRNA target sequence for LAMA2 (NM_000426.2,3855-3873).
catataatcctcaagtgat

SEQ ID NO: 290774 - DNA, 19 bp, Homo sapiens
  siRNA target sequence for LAMA2 (NM_000426.2,3890-3908).
cctactcatgctagaatta

SEQ ID NO: 290775 - DNA, 19 bp, Homo sapiens
  siRNA target sequence for LAMA2 (NM_000426.2,3929-3947).
cctctgattggccaattga

SEQ ID NO: 290776 - DNA, 19 bp, Homo sapiens
  siRNA target sequence for LAMA2 (NM_000426.2,3941-3959).
caattgacaaggcatgaaa

SEQ ID NO: 290777 - DNA, 19 bp, Homo sapiens
  siRNA target sequence for LAMA2 (NM_000426.2,4017-4035).
ctgtgacccgagaagactt

SEQ ID NO: 290778 - DNA, 19 bp, Homo sapiens
  siRNA target sequence for LAMA2 (NM_000426.2,4096-4114).
gcgacaaagcaggatttct

SEQ ID NO: 290779 - DNA, 19 bp, Homo sapiens
  siRNA target sequence for LAMA2 (NM_000426.2,4098-4116).
gacaaagcaggatttctga

SEQ ID NO: 290780 - DNA, 19 bp, Homo sapiens
  siRNA target sequence for LAMA2 (NM_000426.2,4142-4160).
ggacgtggaacaacaatga

SEQ ID NO: 290781 - DNA, 19 bp, Homo sapiens
  siRNA target sequence for LAMA2 (NM_000426.2,4226-4244).
gcatgcttgccgggatttt

SEQ ID NO: 290782 - DNA, 19 bp, Homo sapiens
  siRNA target sequence for LAMA2 (NM_000426.2,4227-4245).
catgcttgccgggatttta

SEQ ID NO: 290783 - DNA, 19 bp, Homo sapiens
  siRNA target sequence for LAMA2 (NM_000426.2,4231-4249).
cttgccgggattttatcga

SEQ ID NO: 290784 - DNA, 19 bp, Homo sapiens
  siRNA target sequence for LAMA2 (NM_000426.2,4350-4368).
cgatatgccagaattgtca

SEQ ID NO: 290785 - DNA, 19 bp, Homo sapiens
  siRNA target sequence for LAMA2 (NM_000426.2,4351-4369).
gatatgccagaattgtcaa

SEQ ID NO: 290786 - DNA, 19 bp, Homo sapiens
  siRNA target sequence for LAMA2 (NM_000426.2,4356-4374).
gccagaattgtcaacatca

SEQ ID NO: 290787 - DNA, 19 bp, Homo sapiens
  siRNA target sequence for LAMA2 (NM_000426.2,4404-4422).
ctcttggatactatggaat

SEQ ID NO: 290788 - DNA, 19 bp, Homo sapiens
  siRNA target sequence for LAMA2 (NM_000426.2,4573-4591).
gtgtgcccctggctatact

SEQ ID NO: 290789 - DNA, 19 bp, Homo sapiens
  siRNA target sequence for LAMA2 (NM_000426.2,4851-4869).
cgctgcctgcgccatataa

SEQ ID NO: 290790 - DNA, 19 bp, Homo sapiens
  siRNA target sequence for LAMA2 (NM_000426.2,4852-4870).
gctgcctgcgccatataaa

SEQ ID NO: 290791 - DNA, 19 bp, Homo sapiens
  siRNA target sequence for LAMA2 (NM_000426.2,4853-4871).
ctgcctgcgccatataaaa

SEQ ID NO: 290792 - DNA, 19 bp, Homo sapiens
  siRNA target sequence for LAMA2 (NM_000426.2,4857-4875).
ctgcgccatataaaatgct

SEQ ID NO: 290793 - DNA, 19 bp, Homo sapiens
  siRNA target sequence for LAMA2 (NM_000426.2,4873-4891).
gctgtatggtcttgaaaat

SEQ ID NO: 290794 - DNA, 19 bp, Homo sapiens
  siRNA target sequence for LAMA2 (NM_000426.2,4874-4892).
ctgtatggtcttgaaaata

SEQ ID NO: 290795 - DNA, 19 bp, Homo sapiens
  siRNA target sequence for LAMA2 (NM_000426.2,4932-4950).
ccccagagaggcttattca

SEQ ID NO: 290796 - DNA, 19 bp, Homo sapiens
  siRNA target sequence for LAMA2 (NM_000426.2,4974-4992).
cactcgtgaccgaaatgaa

SEQ ID NO: 290797 - DNA, 19 bp, Homo sapiens
  siRNA target sequence for LAMA2 (NM_000426.2,4999-5017).
gctgaccagggctaccaaa

SEQ ID NO: 290798 - DNA, 19 bp, Homo sapiens
  siRNA target sequence for LAMA2 (NM_000426.2,5170-5188).
cgaggcctttgagagaaat

SEQ ID NO: 290799 - DNA, 19 bp, Homo sapiens
  siRNA target sequence for LAMA2 (NM_000426.2,5175-5193).
cctttgagagaaatttgga

SEQ ID NO: 290800 - DNA, 19 bp, Homo sapiens
  siRNA target sequence for LAMA2 (NM_000426.2,5207-5225).
gagattgaccagatgatta

SEQ ID NO: 290801 - DNA, 19 bp, Homo sapiens
  siRNA target sequence for LAMA2 (NM_000426.2,5386-5404).
caaaaacaaagttgatgat

SEQ ID NO: 290802 - DNA, 19 bp, Homo sapiens
  siRNA target sequence for LAMA2 (NM_000426.2,5402-5420).
gatgcttgggaccttttga

SEQ ID NO: 290803 - DNA, 19 bp, Homo sapiens
  siRNA target sequence for LAMA2 (NM_000426.2,5517-5535).
gcggcaaacgacaaattga

SEQ ID NO: 290804 - DNA, 19 bp, Homo sapiens
  siRNA target sequence for LAMA2 (NM_000426.2,5618-5636).
gaagacatccaaactaaat

SEQ ID NO: 290805 - DNA, 19 bp, Homo sapiens
  siRNA target sequence for LAMA2 (NM_000426.2,5643-5661).
ctatgtctgaggagcttaa

SEQ ID NO: 290806 - DNA, 19 bp, Homo sapiens
  siRNA target sequence for LAMA2 (NM_000426.2,5649-5667).
ctgaggagcttaatgataa

SEQ ID NO: 290807 - DNA, 19 bp, Homo sapiens
  siRNA target sequence for LAMA2 (NM_000426.2,5675-5693).
gacctctcccaagaaataa

SEQ ID NO: 290808 - DNA, 19 bp, Homo sapiens
  siRNA target sequence for LAMA2 (NM_000426.2,5733-5751).
gccacgcagctcagttgaa

SEQ ID NO: 290809 - DNA, 19 bp, Homo sapiens
  siRNA target sequence for LAMA2 (NM_000426.2,5734-5752).
ccacgcagctcagttgaat

SEQ ID NO: 290810 - DNA, 19 bp, Homo sapiens
  siRNA target sequence for LAMA2 (NM_000426.2,5824-5842).
caaagcttacagcaatatt

SEQ ID NO: 290811 - DNA, 19 bp, Homo sapiens
  siRNA target sequence for LAMA2 (NM_000426.2,5829-5847).
cttacagcaatattaagga

SEQ ID NO: 290812 - DNA, 19 bp, Homo sapiens
  siRNA target sequence for LAMA2 (NM_000426.2,5895-5913).
cacatgaagctacaaaact

SEQ ID NO: 290813 - DNA, 19 bp, Homo sapiens
  siRNA target sequence for LAMA2 (NM_000426.2,5919-5937).
caggtcctcggggtttatt

SEQ ID NO: 290814 - DNA, 19 bp, Homo sapiens
  siRNA target sequence for LAMA2 (NM_000426.2,5921-5939).
ggtcctcggggtttattaa

SEQ ID NO: 290815 - DNA, 19 bp, Homo sapiens
  siRNA target sequence for LAMA2 (NM_000426.2,5970-5988).
gcttcaggattcttaacga

SEQ ID NO: 290816 - DNA, 19 bp, Homo sapiens
  siRNA target sequence for LAMA2 (NM_000426.2,6077-6095).
ggggatctcttgagaactt

SEQ ID NO: 290817 - DNA, 19 bp, Homo sapiens
  siRNA target sequence for LAMA2 (NM_000426.2,6080-6098).
gatctcttgagaactttga

SEQ ID NO: 290818 - DNA, 19 bp, Homo sapiens
  siRNA target sequence for LAMA2 (NM_000426.2,6115-6133).
gttatcagctattccaaat

SEQ ID NO: 290819 - DNA, 19 bp, Homo sapiens
  siRNA target sequence for LAMA2 (NM_000426.2,6180-6198).
ccaacgacacagctaaaga

SEQ ID NO: 290820 - DNA, 19 bp, Homo sapiens
  siRNA target sequence for LAMA2 (NM_000426.2,6184-6202).
cgacacagctaaagatgta

SEQ ID NO: 290821 - DNA, 19 bp, Homo sapiens
  siRNA target sequence for LAMA2 (NM_000426.2,6197-6215).
gatgtactggcacagatta

SEQ ID NO: 290822 - DNA, 19 bp, Homo sapiens
  siRNA target sequence for LAMA2 (NM_000426.2,6361-6379).
ggaagctgaccggctaata

SEQ ID NO: 290823 - DNA, 19 bp, Homo sapiens
  siRNA target sequence for LAMA2 (NM_000426.2,6365-6383).
gctgaccggctaatagata

SEQ ID NO: 290824 - DNA, 19 bp, Homo sapiens
  siRNA target sequence for LAMA2 (NM_000426.2,6366-6384).
ctgaccggctaatagataa

SEQ ID NO: 290825 - DNA, 19 bp, Homo sapiens
  siRNA target sequence for LAMA2 (NM_000426.2,6371-6389).
cggctaatagataaactca

SEQ ID NO: 290826 - DNA, 19 bp, Homo sapiens
  siRNA target sequence for LAMA2 (NM_000426.2,6372-6390).
ggctaatagataaactcaa

SEQ ID NO: 290827 - DNA, 19 bp, Homo sapiens
  siRNA target sequence for LAMA2 (NM_000426.2,6400-6418).
ggaacttgaggataaccta

SEQ ID NO: 290828 - DNA, 19 bp, Homo sapiens
  siRNA target sequence for LAMA2 (NM_000426.2,6404-6422).
cttgaggataacctaaaga

SEQ ID NO: 290829 - DNA, 19 bp, Homo sapiens
  siRNA target sequence for LAMA2 (NM_000426.2,6434-6452).
gagataaaggaattgataa

SEQ ID NO: 290830 - DNA, 19 bp, Homo sapiens
  siRNA target sequence for LAMA2 (NM_000426.2,6461-6479).
cggaaacaagccaattcta

SEQ ID NO: 290831 - DNA, 19 bp, Homo sapiens
  siRNA target sequence for LAMA2 (NM_000426.2,6470-6488).
gccaattctatcaaagtat

SEQ ID NO: 290832 - DNA, 19 bp, Homo sapiens
  siRNA target sequence for LAMA2 (NM_000426.2,6500-6518).
ggaggtgactgcattcgaa

SEQ ID NO: 290833 - DNA, 19 bp, Homo sapiens
  siRNA target sequence for LAMA2 (NM_000426.2,6504-6522).
gtgactgcattcgaacata

SEQ ID NO: 290834 - DNA, 19 bp, Homo sapiens
  siRNA target sequence for LAMA2 (NM_000426.2,6506-6524).
gactgcattcgaacataca

SEQ ID NO: 290835 - DNA, 19 bp, Homo sapiens
  siRNA target sequence for LAMA2 (NM_000426.2,6584-6602).
gctgataacctcctctttt

SEQ ID NO: 290836 - DNA, 19 bp, Homo sapiens
  siRNA target sequence for LAMA2 (NM_000426.2,6585-6603).
ctgataacctcctctttta

SEQ ID NO: 290837 - DNA, 19 bp, Homo sapiens
  siRNA target sequence for LAMA2 (NM_000426.2,6687-6705).
gagttggacgtgtagagta

SEQ ID NO: 290838 - DNA, 19 bp, Homo sapiens
  siRNA target sequence for LAMA2 (NM_000426.2,6698-6716).
gtagagtacccagatttga

SEQ ID NO: 290839 - DNA, 19 bp, Homo sapiens
  siRNA target sequence for LAMA2 (NM_000426.2,6706-6724).
cccagatttgactattgat

SEQ ID NO: 290840 - DNA, 19 bp, Homo sapiens
  siRNA target sequence for LAMA2 (NM_000426.2,6715-6733).
gactattgatgactcatat

SEQ ID NO: 290841 - DNA, 19 bp, Homo sapiens
  siRNA target sequence for LAMA2 (NM_000426.2,6739-6757).
ccgtatcgtagcatcaaga

SEQ ID NO: 290842 - DNA, 19 bp, Homo sapiens
  siRNA target sequence for LAMA2 (NM_000426.2,6740-6758).
cgtatcgtagcatcaagaa

SEQ ID NO: 290843 - DNA, 19 bp, Homo sapiens
  siRNA target sequence for LAMA2 (NM_000426.2,6846-6864).
cagggtacacgattctaga

SEQ ID NO: 290844 - DNA, 19 bp, Homo sapiens
  siRNA target sequence for LAMA2 (NM_000426.2,6849-6867).
ggtacacgattctagatgt

SEQ ID NO: 290845 - DNA, 19 bp, Homo sapiens
  siRNA target sequence for LAMA2 (NM_000426.2,6894-6912).
gtggcctgactgggaaatt

SEQ ID NO: 290846 - DNA, 19 bp, Homo sapiens
  siRNA target sequence for LAMA2 (NM_000426.2,6896-6914).
ggcctgactgggaaattaa

SEQ ID NO: 290847 - DNA, 19 bp, Homo sapiens
  siRNA target sequence for LAMA2 (NM_000426.2,6897-6915).
gcctgactgggaaattaaa

SEQ ID NO: 290848 - DNA, 19 bp, Homo sapiens
  siRNA target sequence for LAMA2 (NM_000426.2,6923-6941).
gatgctgtacgtgtgatta

SEQ ID NO: 290849 - DNA, 19 bp, Homo sapiens
  siRNA target sequence for LAMA2 (NM_000426.2,6970-6988).
ctttgacaacaaacctata

SEQ ID NO: 290850 - DNA, 19 bp, Homo sapiens
  siRNA target sequence for LAMA2 (NM_000426.2,6974-6992).
gacaacaaacctataggtt

SEQ ID NO: 290851 - DNA, 19 bp, Homo sapiens
  siRNA target sequence for LAMA2 (NM_000426.2,6996-7014).
ggaatttccgagaaaaaga

SEQ ID NO: 290852 - DNA, 19 bp, Homo sapiens
  siRNA target sequence for LAMA2 (NM_000426.2,7059-7077).
gtgaggggactattcaatt

SEQ ID NO: 290853 - DNA, 19 bp, Homo sapiens
  siRNA target sequence for LAMA2 (NM_000426.2,7063-7081).
ggggactattcaatttgat

SEQ ID NO: 290854 - DNA, 19 bp, Homo sapiens
  siRNA target sequence for LAMA2 (NM_000426.2,7079-7097).
gatggagaaggttatgcat

SEQ ID NO: 290855 - DNA, 19 bp, Homo sapiens
  siRNA target sequence for LAMA2 (NM_000426.2,7115-7133).
cgctggtaccccaacatct

SEQ ID NO: 290856 - DNA, 19 bp, Homo sapiens
  siRNA target sequence for LAMA2 (NM_000426.2,7144-7162).
gttcaagttcagaacattt

SEQ ID NO: 290857 - DNA, 19 bp, Homo sapiens
  siRNA target sequence for LAMA2 (NM_000426.2,7164-7182).
cttcgagtgctcttctgat

SEQ ID NO: 290858 - DNA, 19 bp, Homo sapiens
  siRNA target sequence for LAMA2 (NM_000426.2,7167-7185).
cgagtgctcttctgatgta

SEQ ID NO: 290859 - DNA, 19 bp, Homo sapiens
  siRNA target sequence for LAMA2 (NM_000426.2,7194-7212).
cacgagacctgagagattt

SEQ ID NO: 290860 - DNA, 19 bp, Homo sapiens
  siRNA target sequence for LAMA2 (NM_000426.2,7196-7214).
cgagacctgagagatttca

SEQ ID NO: 290861 - DNA, 19 bp, Homo sapiens
  siRNA target sequence for LAMA2 (NM_000426.2,7197-7215).
gagacctgagagatttcat

SEQ ID NO: 290862 - DNA, 19 bp, Homo sapiens
  siRNA target sequence for LAMA2 (NM_000426.2,7199-7217).
gacctgagagatttcatga

SEQ ID NO: 290863 - DNA, 19 bp, Homo sapiens
  siRNA target sequence for LAMA2 (NM_000426.2,7230-7248).
ctgatgggcacataaaagt

SEQ ID NO: 290864 - DNA, 19 bp, Homo sapiens
  siRNA target sequence for LAMA2 (NM_000426.2,7236-7254).
ggcacataaaagtcagtta

SEQ ID NO: 290865 - DNA, 19 bp, Homo sapiens
  siRNA target sequence for LAMA2 (NM_000426.2,7240-7258).
cataaaagtcagttacgat

SEQ ID NO: 290866 - DNA, 19 bp, Homo sapiens
  siRNA target sequence for LAMA2 (NM_000426.2,7324-7342).
cactctgtcaagaattcaa

SEQ ID NO: 290867 - DNA, 19 bp, Homo sapiens
  siRNA target sequence for LAMA2 (NM_000426.2,7326-7344).
ctctgtcaagaattcaaaa

SEQ ID NO: 290868 - DNA, 19 bp, Homo sapiens
  siRNA target sequence for LAMA2 (NM_000426.2,7351-7369).
caatatatcaattgtagat

SEQ ID NO: 290869 - DNA, 19 bp, Homo sapiens
  siRNA target sequence for LAMA2 (NM_000426.2,7377-7395).
ctaatcaggaggagaatat

SEQ ID NO: 290870 - DNA, 19 bp, Homo sapiens
  siRNA target sequence for LAMA2 (NM_000426.2,7401-7419).
cttcgtcttctggaaacaa

SEQ ID NO: 290871 - DNA, 19 bp, Homo sapiens
  siRNA target sequence for LAMA2 (NM_000426.2,7404-7422).
cgtcttctggaaacaactt

SEQ ID NO: 290872 - DNA, 19 bp, Homo sapiens
  siRNA target sequence for LAMA2 (NM_000426.2,7405-7423).
gtcttctggaaacaacttt

SEQ ID NO: 290873 - DNA, 19 bp, Homo sapiens
  siRNA target sequence for LAMA2 (NM_000426.2,7527-7545).
ccggctgcctcaaagatat

SEQ ID NO: 290874 - DNA, 19 bp, Homo sapiens
  siRNA target sequence for LAMA2 (NM_000426.2,7528-7546).
cggctgcctcaaagatatt

SEQ ID NO: 290875 - DNA, 19 bp, Homo sapiens
  siRNA target sequence for LAMA2 (NM_000426.2,7531-7549).
ctgcctcaaagatattgaa

SEQ ID NO: 290876 - DNA, 19 bp, Homo sapiens
  siRNA target sequence for LAMA2 (NM_000426.2,7554-7572).
caagaactccgtacaatat

SEQ ID NO: 290877 - DNA, 19 bp, Homo sapiens
  siRNA target sequence for LAMA2 (NM_000426.2,7557-7575).
gaactccgtacaatatact

SEQ ID NO: 290878 - DNA, 19 bp, Homo sapiens
  siRNA target sequence for LAMA2 (NM_000426.2,7576-7594).
cagtagtcccgattatgtt

SEQ ID NO: 290879 - DNA, 19 bp, Homo sapiens
  siRNA target sequence for LAMA2 (NM_000426.2,7608-7626).
gatgttccctggagaatgt

SEQ ID NO: 290880 - DNA, 19 bp, Homo sapiens
  siRNA target sequence for LAMA2 (NM_000426.2,7668-7686).
cccctgtgccaattgatgt

SEQ ID NO: 290881 - DNA, 19 bp, Homo sapiens
  siRNA target sequence for LAMA2 (NM_000426.2,7669-7687).
ccctgtgccaattgatgta

SEQ ID NO: 290882 - DNA, 19 bp, Homo sapiens
  siRNA target sequence for LAMA2 (NM_000426.2,7720-7738).
gaatgagtccggcatcatt

SEQ ID NO: 290883 - DNA, 19 bp, Homo sapiens
  siRNA target sequence for LAMA2 (NM_000426.2,7724-7742).
gagtccggcatcattcttt

SEQ ID NO: 290884 - DNA, 19 bp, Homo sapiens
  siRNA target sequence for LAMA2 (NM_000426.2,7789-7807).
gactggacaggcctattat

SEQ ID NO: 290885 - DNA, 19 bp, Homo sapiens
  siRNA target sequence for LAMA2 (NM_000426.2,7856-7874).
gcacgaacaatgaggaaaa

SEQ ID NO: 290886 - DNA, 19 bp, Homo sapiens
  siRNA target sequence for LAMA2 (NM_000426.2,7857-7875).
cacgaacaatgaggaaaat

SEQ ID NO: 290887 - DNA, 19 bp, Homo sapiens
  siRNA target sequence for LAMA2 (NM_000426.2,7884-7902).
gaccagagccgaatctgtt

SEQ ID NO: 290888 - DNA, 19 bp, Homo sapiens
  siRNA target sequence for LAMA2 (NM_000426.2,7887-7905).
cagagccgaatctgtttca

SEQ ID NO: 290889 - DNA, 19 bp, Homo sapiens
  siRNA target sequence for LAMA2 (NM_000426.2,7936-7954).
gcgaactagaggcatcttt

SEQ ID NO: 290890 - DNA, 19 bp, Homo sapiens
  siRNA target sequence for LAMA2 (NM_000426.2,7937-7955).
cgaactagaggcatcttta

SEQ ID NO: 290891 - DNA, 19 bp, Homo sapiens
  siRNA target sequence for LAMA2 (NM_000426.2,7941-7959).
ctagaggcatctttacagt

SEQ ID NO: 290892 - DNA, 19 bp, Homo sapiens
  siRNA target sequence for LAMA2 (NM_000426.2,8003-8021).
gaacagcctatcgaagtta

SEQ ID NO: 290893 - DNA, 19 bp, Homo sapiens
  siRNA target sequence for LAMA2 (NM_000426.2,8006-8024).
cagcctatcgaagttaaaa

SEQ ID NO: 290894 - DNA, 19 bp, Homo sapiens
  siRNA target sequence for LAMA2 (NM_000426.2,8037-8055).
ggggtgctccacctgaatt

SEQ ID NO: 290895 - DNA, 19 bp, Homo sapiens
  siRNA target sequence for LAMA2 (NM_000426.2,8038-8056).
gggtgctccacctgaattt

SEQ ID NO: 290896 - DNA, 19 bp, Homo sapiens
  siRNA target sequence for LAMA2 (NM_000426.2,8040-8058).
gtgctccacctgaatttca

SEQ ID NO: 290897 - DNA, 19 bp, Homo sapiens
  siRNA target sequence for LAMA2 (NM_000426.2,8065-8083).
cccactcagaaatattcct

SEQ ID NO: 290898 - DNA, 19 bp, Homo sapiens
  siRNA target sequence for LAMA2 (NM_000426.2,8123-8141).
gtccccatggactttgcaa

SEQ ID NO: 290899 - DNA, 19 bp, Homo sapiens
  siRNA target sequence for LAMA2 (NM_000426.2,8172-8190).
gtcgctgtgcccatcagaa

SEQ ID NO: 290900 - DNA, 19 bp, Homo sapiens
  siRNA target sequence for LAMA2 (NM_000426.2,8211-8229).
gagcagctccagctgaaat

SEQ ID NO: 290901 - DNA, 19 bp, Homo sapiens
  siRNA target sequence for LAMA2 (NM_000426.2,8216-8234).
gctccagctgaaatagtta

SEQ ID NO: 290902 - DNA, 19 bp, Homo sapiens
  siRNA target sequence for LAMA2 (NM_000426.2,8298-8316).
cttgtgctgcagaatcaga

SEQ ID NO: 290903 - DNA, 19 bp, Homo sapiens
  siRNA target sequence for LAMA2 (NM_000426.2,8342-8360).
cagttcgggctttcaagaa

SEQ ID NO: 290904 - DNA, 19 bp, Homo sapiens
  siRNA target sequence for LAMA2 (NM_000426.2,8347-8365).
cgggctttcaagaaacagt

SEQ ID NO: 290905 - DNA, 19 bp, Homo sapiens
  siRNA target sequence for LAMA2 (NM_000426.2,8362-8380).
cagtcacattgcaattgca

SEQ ID NO: 290906 - DNA, 19 bp, Homo sapiens
  siRNA target sequence for LAMA2 (NM_000426.2,8364-8382).
gtcacattgcaattgcatt

SEQ ID NO: 290907 - DNA, 19 bp, Homo sapiens
  siRNA target sequence for LAMA2 (NM_000426.2,8445-8463).
ccggcttgcttttttacat

SEQ ID NO: 290908 - DNA, 19 bp, Homo sapiens
  siRNA target sequence for LAMA2 (NM_000426.2,8469-8487).
gcatcaatcatgctgattt

SEQ ID NO: 290909 - DNA, 19 bp, Homo sapiens
  siRNA target sequence for LAMA2 (NM_000426.2,8495-8513).
gttcagctgagaaatggat

SEQ ID NO: 290910 - DNA, 19 bp, Homo sapiens
  siRNA target sequence for LAMA2 (NM_000426.2,8516-8534).
ccctacttcagctatgact

SEQ ID NO: 290911 - DNA, 19 bp, Homo sapiens
  siRNA target sequence for LAMA2 (NM_000426.2,8556-8574).
ccatgatccccaccaaaat

SEQ ID NO: 290912 - DNA, 19 bp, Homo sapiens
  siRNA target sequence for LAMA2 (NM_000426.2,8560-8578).
gatccccaccaaaatcaat

SEQ ID NO: 290913 - DNA, 19 bp, Homo sapiens
  siRNA target sequence for LAMA2 (NM_000426.2,8563-8581).
ccccaccaaaatcaatgat

SEQ ID NO: 290914 - DNA, 19 bp, Homo sapiens
  siRNA target sequence for LAMA2 (NM_000426.2,8583-8601).
gccagtggcacaagattaa

SEQ ID NO: 290915 - DNA, 19 bp, Homo sapiens
  siRNA target sequence for LAMA2 (NM_000426.2,8591-8609).
cacaagattaagataatga

SEQ ID NO: 290916 - DNA, 19 bp, Homo sapiens
  siRNA target sequence for LAMA2 (NM_000426.2,8692-8710).
cgtgggaatgctgtatgtt

SEQ ID NO: 290917 - DNA, 19 bp, Homo sapiens
  siRNA target sequence for LAMA2 (NM_000426.2,8712-8730).
gtgggttacccatcaacta

SEQ ID NO: 290918 - DNA, 19 bp, Homo sapiens
  siRNA target sequence for LAMA2 (NM_000426.2,8714-8732).
gggttacccatcaactaca

SEQ ID NO: 290919 - DNA, 19 bp, Homo sapiens
  siRNA target sequence for LAMA2 (NM_000426.2,8731-8749).
cactacccgaagaattggt

SEQ ID NO: 290920 - DNA, 19 bp, Homo sapiens
  siRNA target sequence for LAMA2 (NM_000426.2,8747-8765).
ggtccagtgacctatagca

SEQ ID NO: 290921 - DNA, 19 bp, Homo sapiens
  siRNA target sequence for LAMA2 (NM_000426.2,8840-8858).
gttgggacatgttttgcaa

SEQ ID NO: 290922 - DNA, 19 bp, Homo sapiens
  siRNA target sequence for LAMA2 (NM_000426.2,8923-8941).
gggattggaccttcttgta

SEQ ID NO: 290923 - DNA, 19 bp, Homo sapiens
  siRNA target sequence for LAMA2 (NM_000426.2,8925-8943).
gattggaccttcttgtaga

SEQ ID NO: 290924 - DNA, 19 bp, Homo sapiens
  siRNA target sequence for LAMA2 (NM_000426.2,8929-8947).
ggaccttcttgtagaattt

SEQ ID NO: 290925 - DNA, 19 bp, Homo sapiens
  siRNA target sequence for LAMA2 (NM_000426.2,8948-8966).
gaattccgcacaactacaa

SEQ ID NO: 290926 - DNA, 19 bp, Homo sapiens
  siRNA target sequence for LAMA2 (NM_000426.2,8964-8982).
caacgactggagttcttct

SEQ ID NO: 290927 - DNA, 19 bp, Homo sapiens
  siRNA target sequence for LAMA2 (NM_000426.2,8975-8993).
gttcttctggggatcagta

SEQ ID NO: 290928 - DNA, 19 bp, Homo sapiens
  siRNA target sequence for LAMA2 (NM_000426.2,8984-9002).
gggatcagtagtcaaaaaa

SEQ ID NO: 290929 - DNA, 19 bp, Homo sapiens
  siRNA target sequence for LAMA2 (NM_000426.2,8985-9003).
ggatcagtagtcaaaaaat

SEQ ID NO: 290930 - DNA, 19 bp, Homo sapiens
  siRNA target sequence for LAMA2 (NM_000426.2,9013-9031).
gggtattgaaatgattgat

SEQ ID NO: 290931 - DNA, 19 bp, Homo sapiens
  siRNA target sequence for LAMA2 (NM_000426.2,9135-9153).
ctgccaacaagatcaaaca

SEQ ID NO: 290932 - DNA, 19 bp, Homo sapiens
  siRNA target sequence for LAMA2 (NM_000426.2,9213-9231).
ctacatcagctgacacaaa

SEQ ID NO: 290933 - DNA, 19 bp, Homo sapiens
  siRNA target sequence for LAMA2 (NM_000426.2,9228-9246).
caaatgaccctgtgtttgt

SEQ ID NO: 290934 - DNA, 19 bp, Homo sapiens
  siRNA target sequence for LAMA2 (NM_000426.2,9342-9360).
gcaagccactggaggttaa

SEQ ID NO: 290935 - DNA, 19 bp, Homo sapiens
  siRNA target sequence for LAMA3 (NM_000227.2,147-165).
gagttatgtggagtttaga

SEQ ID NO: 290936 - DNA, 19 bp, Homo sapiens
  siRNA target sequence for LAMA3 (NM_000227.2,176-194).
gttgtagccctggatacta

SEQ ID NO: 290937 - DNA, 19 bp, Homo sapiens
  siRNA target sequence for LAMA3 (NM_000227.2,187-205).
ggatactatcgggatcata

SEQ ID NO: 290938 - DNA, 19 bp, Homo sapiens
  siRNA target sequence for LAMA3 (NM_000227.2,188-206).
gatactatcgggatcataa

SEQ ID NO: 290939 - DNA, 19 bp, Homo sapiens
  siRNA target sequence for LAMA3 (NM_000227.2,198-216).
ggatcataaaggcttgtat

SEQ ID NO: 290940 - DNA, 19 bp, Homo sapiens
  siRNA target sequence for LAMA3 (NM_000227.2,237-255).
caattgcaacggacattca

SEQ ID NO: 290941 - DNA, 19 bp, Homo sapiens
  siRNA target sequence for LAMA3 (NM_000227.2,242-260).
gcaacggacattcaaatca

SEQ ID NO: 290942 - DNA, 19 bp, Homo sapiens
  siRNA target sequence for LAMA3 (NM_000227.2,243-261).
caacggacattcaaatcaa

SEQ ID NO: 290943 - DNA, 19 bp, Homo sapiens
  siRNA target sequence for LAMA3 (NM_000227.2,267-285).
ggatggctcaggcatatgt

SEQ ID NO: 290944 - DNA, 19 bp, Homo sapiens
  siRNA target sequence for LAMA3 (NM_000227.2,788-806).
ggaatcagttgctcaacta

SEQ ID NO: 290945 - DNA, 19 bp, Homo sapiens
  siRNA target sequence for LAMA3 (NM_000227.2,922-940).
gcacaaacattaaacaaca

SEQ ID NO: 290946 - DNA, 19 bp, Homo sapiens
  siRNA target sequence for LAMA3 (NM_000227.2,943-961).
gttaatcgggcaacacaaa

SEQ ID NO: 290947 - DNA, 19 bp, Homo sapiens
  siRNA target sequence for LAMA3 (NM_000227.2,965-983).
caaaagaactggatgtgaa

SEQ ID NO: 290948 - DNA, 19 bp, Homo sapiens
  siRNA target sequence for LAMA3 (NM_000227.2,999-1017).
ccggaatgtgcacattctt

SEQ ID NO: 290949 - DNA, 19 bp, Homo sapiens
  siRNA target sequence for LAMA3 (NM_000227.2,1000-1018).
cggaatgtgcacattcttt

SEQ ID NO: 290950 - DNA, 19 bp, Homo sapiens
  siRNA target sequence for LAMA3 (NM_000227.2,1056-1074).
cgtgccttcaggtgacttt

SEQ ID NO: 290951 - DNA, 19 bp, Homo sapiens
  siRNA target sequence for LAMA3 (NM_000227.2,1117-1135).
cggaacaggaactttggaa

SEQ ID NO: 290952 - DNA, 19 bp, Homo sapiens
  siRNA target sequence for LAMA3 (NM_000227.2,1212-1230).
ccaccagggggagaacaat

SEQ ID NO: 290953 - DNA, 19 bp, Homo sapiens
  siRNA target sequence for LAMA3 (NM_000227.2,1227-1245).
caatgggcttgctaacagt

SEQ ID NO: 290954 - DNA, 19 bp, Homo sapiens
  siRNA target sequence for LAMA3 (NM_000227.2,1242-1260).
cagtatccgggattcttta

SEQ ID NO: 290955 - DNA, 19 bp, Homo sapiens
  siRNA target sequence for LAMA3 (NM_000227.2,1244-1262).
gtatccgggattctttaaa

SEQ ID NO: 290956 - DNA, 19 bp, Homo sapiens
  siRNA target sequence for LAMA3 (NM_000227.2,1248-1266).
ccgggattctttaaatgaa

SEQ ID NO: 290957 - DNA, 19 bp, Homo sapiens
  siRNA target sequence for LAMA3 (NM_000227.2,1360-1378).
gctttgggagccattcaga

SEQ ID NO: 290958 - DNA, 19 bp, Homo sapiens
  siRNA target sequence for LAMA3 (NM_000227.2,1370-1388).
ccattcagagacaagtgaa

SEQ ID NO: 290959 - DNA, 19 bp, Homo sapiens
  siRNA target sequence for LAMA3 (NM_000227.2,1371-1389).
cattcagagacaagtgaaa

SEQ ID NO: 290960 - DNA, 19 bp, Homo sapiens
  siRNA target sequence for LAMA3 (NM_000227.2,1407-1425).
gagtgatttcaccaagtat

SEQ ID NO: 290961 - DNA, 19 bp, Homo sapiens
  siRNA target sequence for LAMA3 (NM_000227.2,1409-1427).
gtgatttcaccaagtatct

SEQ ID NO: 290962 - DNA, 19 bp, Homo sapiens
  siRNA target sequence for LAMA3 (NM_000227.2,1529-1547).
caagacaagaactaagtga

SEQ ID NO: 290963 - DNA, 19 bp, Homo sapiens
  siRNA target sequence for LAMA3 (NM_000227.2,1537-1555).
gaactaagtgacaaagtaa

SEQ ID NO: 290964 - DNA, 19 bp, Homo sapiens
  siRNA target sequence for LAMA3 (NM_000227.2,1703-1721).
ccaccgcctacgagaacat

SEQ ID NO: 290965 - DNA, 19 bp, Homo sapiens
  siRNA target sequence for LAMA3 (NM_000227.2,1762-1780).
gctgccagtgcatctgaat

SEQ ID NO: 290966 - DNA, 19 bp, Homo sapiens
  siRNA target sequence for LAMA3 (NM_000227.2,1783-1801).
gccctccagacagtgataa

SEQ ID NO: 290967 - DNA, 19 bp, Homo sapiens
  siRNA target sequence for LAMA3 (NM_000227.2,1784-1802).
ccctccagacagtgataaa

SEQ ID NO: 290968 - DNA, 19 bp, Homo sapiens
  siRNA target sequence for LAMA3 (NM_000227.2,1788-1806).
ccagacagtgataaaggaa

SEQ ID NO: 290969 - DNA, 19 bp, Homo sapiens
  siRNA target sequence for LAMA3 (NM_000227.2,1835-1853).
gttccaacagtgataaact

SEQ ID NO: 290970 - DNA, 19 bp, Homo sapiens
  siRNA target sequence for LAMA3 (NM_000227.2,1838-1856).
ccaacagtgataaactgtt

SEQ ID NO: 290971 - DNA, 19 bp, Homo sapiens
  siRNA target sequence for LAMA3 (NM_000227.2,1844-1862).
gtgataaactgttaaatga

SEQ ID NO: 290972 - DNA, 19 bp, Homo sapiens
  siRNA target sequence for LAMA3 (NM_000227.2,1957-1975).
gtgatagacaccaatctca

SEQ ID NO: 290973 - DNA, 19 bp, Homo sapiens
  siRNA target sequence for LAMA3 (NM_000227.2,2039-2057).
caaagagcatggtcagaaa

SEQ ID NO: 290974 - DNA, 19 bp, Homo sapiens
  siRNA target sequence for LAMA3 (NM_000227.2,2144-2162).
cacagaacgaagacttcaa

SEQ ID NO: 290975 - DNA, 19 bp, Homo sapiens
  siRNA target sequence for LAMA3 (NM_000227.2,2170-2188).
ctgactgatgcagataact

SEQ ID NO: 290976 - DNA, 19 bp, Homo sapiens
  siRNA target sequence for LAMA3 (NM_000227.2,2221-2239).
ctttggcgcaagattgaaa

SEQ ID NO: 290977 - DNA, 19 bp, Homo sapiens
  siRNA target sequence for LAMA3 (NM_000227.2,2225-2243).
ggcgcaagattgaaagtat

SEQ ID NO: 290978 - DNA, 19 bp, Homo sapiens
  siRNA target sequence for LAMA3 (NM_000227.2,2227-2245).
cgcaagattgaaagtatca

SEQ ID NO: 290979 - DNA, 19 bp, Homo sapiens
  siRNA target sequence for LAMA3 (NM_000227.2,2280-2298).
caacatggacagaatacga

SEQ ID NO: 290980 - DNA, 19 bp, Homo sapiens
  siRNA target sequence for LAMA3 (NM_000227.2,2287-2305).
gacagaatacgagaactaa

SEQ ID NO: 290981 - DNA, 19 bp, Homo sapiens
  siRNA target sequence for LAMA3 (NM_000227.2,2289-2307).
cagaatacgagaactaatt

SEQ ID NO: 290982 - DNA, 19 bp, Homo sapiens
  siRNA target sequence for LAMA3 (NM_000227.2,2291-2309).
gaatacgagaactaattca

SEQ ID NO: 290983 - DNA, 19 bp, Homo sapiens
  siRNA target sequence for LAMA3 (NM_000227.2,2345-2363).
ccatgaggttcaatggtaa

SEQ ID NO: 290984 - DNA, 19 bp, Homo sapiens
  siRNA target sequence for LAMA3 (NM_000227.2,2346-2364).
catgaggttcaatggtaaa

SEQ ID NO: 290985 - DNA, 19 bp, Homo sapiens
  siRNA target sequence for LAMA3 (NM_000227.2,2349-2367).
gaggttcaatggtaaatct

SEQ ID NO: 290986 - DNA, 19 bp, Homo sapiens
  siRNA target sequence for LAMA3 (NM_000227.2,2441-2459).
ggcccaactcaagagaaaa

SEQ ID NO: 290987 - DNA, 19 bp, Homo sapiens
  siRNA target sequence for LAMA3 (NM_000227.2,2442-2460).
gcccaactcaagagaaaat

SEQ ID NO: 290988 - DNA, 19 bp, Homo sapiens
  siRNA target sequence for LAMA3 (NM_000227.2,2461-2479).
gggggtactgagaatatgt

SEQ ID NO: 290989 - DNA, 19 bp, Homo sapiens
  siRNA target sequence for LAMA3 (NM_000227.2,2463-2481).
gggtactgagaatatgttt

SEQ ID NO: 290990 - DNA, 19 bp, Homo sapiens
  siRNA target sequence for LAMA3 (NM_000227.2,2465-2483).
gtactgagaatatgtttgt

SEQ ID NO: 290991 - DNA, 19 bp, Homo sapiens
  siRNA target sequence for LAMA3 (NM_000227.2,2621-2639).
ctaaggaggcagttatgga

SEQ ID NO: 290992 - DNA, 19 bp, Homo sapiens
  siRNA target sequence for LAMA3 (NM_000227.2,2632-2650).
gttatggatcgggtgaaat

SEQ ID NO: 290993 - DNA, 19 bp, Homo sapiens
  siRNA target sequence for LAMA3 (NM_000227.2,2665-2683).
cagtttgcaaggcttaatt

SEQ ID NO: 290994 - DNA, 19 bp, Homo sapiens
  siRNA target sequence for LAMA3 (NM_000227.2,2717-2735).
cacccggagtctatgacat

SEQ ID NO: 290995 - DNA, 19 bp, Homo sapiens
  siRNA target sequence for LAMA3 (NM_000227.2,2731-2749).
gacatggatggtagaaata

SEQ ID NO: 290996 - DNA, 19 bp, Homo sapiens
  siRNA target sequence for LAMA3 (NM_000227.2,2821-2839).
cttcccagtcgactaagtt

SEQ ID NO: 290997 - DNA, 19 bp, Homo sapiens
  siRNA target sequence for LAMA3 (NM_000227.2,2843-2861).
ctccatacaaaggttgtat

SEQ ID NO: 290998 - DNA, 19 bp, Homo sapiens
  siRNA target sequence for LAMA3 (NM_000227.2,2850-2868).
caaaggttgtattgaatta

SEQ ID NO: 290999 - DNA, 19 bp, Homo sapiens
  siRNA target sequence for LAMA3 (NM_000227.2,2855-2873).
gttgtattgaattagatga

SEQ ID NO: 291000 - DNA, 19 bp, Homo sapiens
  siRNA target sequence for LAMA3 (NM_000227.2,2894-2912).
gcttgtacaacttcaaaaa

SEQ ID NO: 291001 - DNA, 19 bp, Homo sapiens
  siRNA target sequence for LAMA3 (NM_000227.2,3099-3117).
ggatcgcttcatatctcta

SEQ ID NO: 291002 - DNA, 19 bp, Homo sapiens
  siRNA target sequence for LAMA3 (NM_000227.2,3100-3118).
gatcgcttcatatctctaa

SEQ ID NO: 291003 - DNA, 19 bp, Homo sapiens
  siRNA target sequence for LAMA3 (NM_000227.2,3103-3121).
cgcttcatatctctaaata

SEQ ID NO: 291004 - DNA, 19 bp, Homo sapiens
  siRNA target sequence for LAMA3 (NM_000227.2,3135-3153).
gctcatggtgagatacaaa

SEQ ID NO: 291005 - DNA, 19 bp, Homo sapiens
  siRNA target sequence for LAMA3 (NM_000227.2,3142-3160).
gtgagatacaaactgaatt

SEQ ID NO: 291006 - DNA, 19 bp, Homo sapiens
  siRNA target sequence for LAMA3 (NM_000227.2,3146-3164).
gatacaaactgaattcaga

SEQ ID NO: 291007 - DNA, 19 bp, Homo sapiens
  siRNA target sequence for LAMA3 (NM_000227.2,3182-3200).
gagttggagacgccataaa

SEQ ID NO: 291008 - DNA, 19 bp, Homo sapiens
  siRNA target sequence for LAMA3 (NM_000227.2,3184-3202).
gttggagacgccataaaca

SEQ ID NO: 291009 - DNA, 19 bp, Homo sapiens
  siRNA target sequence for LAMA3 (NM_000227.2,3204-3222).
cggcagagaccattcgatt

SEQ ID NO: 291010 - DNA, 19 bp, Homo sapiens
  siRNA target sequence for LAMA3 (NM_000227.2,3209-3227).
gagaccattcgattcagat

SEQ ID NO: 291011 - DNA, 19 bp, Homo sapiens
  siRNA target sequence for LAMA3 (NM_000227.2,3213-3231).
ccattcgattcagatcaaa

SEQ ID NO: 291012 - DNA, 19 bp, Homo sapiens
  siRNA target sequence for LAMA3 (NM_000227.2,3267-3285).
ggacgttcaaaacactata

SEQ ID NO: 291013 - DNA, 19 bp, Homo sapiens
  siRNA target sequence for LAMA3 (NM_000227.2,3268-3286).
gacgttcaaaacactataa

SEQ ID NO: 291014 - DNA, 19 bp, Homo sapiens
  siRNA target sequence for LAMA3 (NM_000227.2,3270-3288).
cgttcaaaacactataatt

SEQ ID NO: 291015 - DNA, 19 bp, Homo sapiens
  siRNA target sequence for LAMA3 (NM_000227.2,3326-3344).
gaggaattccaattgcaat

SEQ ID NO: 291016 - DNA, 19 bp, Homo sapiens
  siRNA target sequence for LAMA3 (NM_000227.2,3340-3358).
gcaatcagggaaagattta

SEQ ID NO: 291017 - DNA, 19 bp, Homo sapiens
  siRNA target sequence for LAMA3 (NM_000227.2,3378-3396).
ccgaggctgcatgaaaaat

SEQ ID NO: 291018 - DNA, 19 bp, Homo sapiens
  siRNA target sequence for LAMA3 (NM_000227.2,3382-3400).
ggctgcatgaaaaatttga

SEQ ID NO: 291019 - DNA, 19 bp, Homo sapiens
  siRNA target sequence for LAMA3 (NM_000227.2,3407-3425).
ccagtggtgtcgttagatt

SEQ ID NO: 291020 - DNA, 19 bp, Homo sapiens
  siRNA target sequence for LAMA3 (NM_000227.2,3410-3428).
gtggtgtcgttagattgaa

SEQ ID NO: 291021 - DNA, 19 bp, Homo sapiens
  siRNA target sequence for LAMA3 (NM_000227.2,3415-3433).
gtcgttagattgaatgata

SEQ ID NO: 291022 - DNA, 19 bp, Homo sapiens
  siRNA target sequence for LAMA3 (NM_000227.2,3417-3435).
cgttagattgaatgatact

SEQ ID NO: 291023 - DNA, 19 bp, Homo sapiens
  siRNA target sequence for LAMA3 (NM_000227.2,3434-3452).
ctgtgggagtaaccaaaaa

SEQ ID NO: 291024 - DNA, 19 bp, Homo sapiens
  siRNA target sequence for LAMA3 (NM_000227.2,3549-3567).
ccaggcctcatttggattt

SEQ ID NO: 291025 - DNA, 19 bp, Homo sapiens
  siRNA target sequence for LAMA3 (NM_000227.2,3553-3571).
gcctcatttggatttcaga

SEQ ID NO: 291026 - DNA, 19 bp, Homo sapiens
  siRNA target sequence for LAMA3 (NM_000227.2,3577-3595).
caacccagtggcatattat

SEQ ID NO: 291027 - DNA, 19 bp, Homo sapiens
  siRNA target sequence for LAMA3 (NM_000227.2,3581-3599).
ccagtggcatattattaga

SEQ ID NO: 291028 - DNA, 19 bp, Homo sapiens
  siRNA target sequence for LAMA3 (NM_000227.2,3582-3600).
cagtggcatattattagat

SEQ ID NO: 291029 - DNA, 19 bp, Homo sapiens
  siRNA target sequence for LAMA3 (NM_000227.2,3584-3602).
gtggcatattattagatca

SEQ ID NO: 291030 - DNA, 19 bp, Homo sapiens
  siRNA target sequence for LAMA3 (NM_000227.2,3587-3605).
gcatattattagatcatca

SEQ ID NO: 291031 - DNA, 19 bp, Homo sapiens
  siRNA target sequence for LAMA3 (NM_000227.2,3632-3650).
ctctggaagatggttacat

SEQ ID NO: 291032 - DNA, 19 bp, Homo sapiens
  siRNA target sequence for LAMA3 (NM_000227.2,3667-3685).
gatagcggcagcccaattt

SEQ ID NO: 291033 - DNA, 19 bp, Homo sapiens
  siRNA target sequence for LAMA3 (NM_000227.2,3673-3691).
ggcagcccaatttttaaat

SEQ ID NO: 291034 - DNA, 19 bp, Homo sapiens
  siRNA target sequence for LAMA3 (NM_000227.2,3692-3710).
ctccacagacgtatatgga

SEQ ID NO: 291035 - DNA, 19 bp, Homo sapiens
  siRNA target sequence for LAMA3 (NM_000227.2,3699-3717).
gacgtatatggatggttta

SEQ ID NO: 291036 - DNA, 19 bp, Homo sapiens
  siRNA target sequence for LAMA3 (NM_000227.2,3701-3719).
cgtatatggatggtttact

SEQ ID NO: 291037 - DNA, 19 bp, Homo sapiens
  siRNA target sequence for LAMA3 (NM_000227.2,3712-3730).
ggtttactgcattatgtat

SEQ ID NO: 291038 - DNA, 19 bp, Homo sapiens
  siRNA target sequence for LAMA3 (NM_000227.2,3718-3736).
ctgcattatgtatctgtaa

SEQ ID NO: 291039 - DNA, 19 bp, Homo sapiens
  siRNA target sequence for LAMA3 (NM_000227.2,3749-3767).
ctggactacggcttctcat

SEQ ID NO: 291040 - DNA, 19 bp, Homo sapiens
  siRNA target sequence for LAMA3 (NM_000227.2,3791-3809).
gcaaaaggctaaaacacat

SEQ ID NO: 291041 - DNA, 19 bp, Homo sapiens
  siRNA target sequence for LAMA3 (NM_000227.2,3845-3863).
gcaattttgagggttgtat

SEQ ID NO: 291042 - DNA, 19 bp, Homo sapiens
  siRNA target sequence for LAMA3 (NM_000227.2,3846-3864).
caattttgagggttgtatt

SEQ ID NO: 291043 - DNA, 19 bp, Homo sapiens
  siRNA target sequence for LAMA3 (NM_000227.2,3871-3889).
gtttttgtccagaggttat

SEQ ID NO: 291044 - DNA, 19 bp, Homo sapiens
  siRNA target sequence for LAMA3 (NM_000227.2,3907-3925).
ctagatttgaccagtaact

SEQ ID NO: 291045 - DNA, 19 bp, Homo sapiens
  siRNA target sequence for LAMA3 (NM_000227.2,3949-3967).
ggaggctgcagtttaaaca

SEQ ID NO: 291046 - DNA, 19 bp, Homo sapiens
  siRNA target sequence for LAMA3 (NM_000227.2,3950-3968).
gaggctgcagtttaaacaa

SEQ ID NO: 291047 - DNA, 19 bp, Homo sapiens
  siRNA target sequence for LAMA3 (NM_000227.2,3973-3991).
ccttttctaatgttgctta

SEQ ID NO: 291048 - DNA, 19 bp, Homo sapiens
  siRNA target sequence for LAMA3 (NM_000227.2,3994-4012).
ggttctaccaggtttaaca

SEQ ID NO: 291049 - DNA, 19 bp, Homo sapiens
  siRNA target sequence for LAMA3 (NM_000227.2,4011-4029).
caagaccaagacttttcgt

SEQ ID NO: 291050 - DNA, 19 bp, Homo sapiens
  siRNA target sequence for LAMA3 (NM_000227.2,4016-4034).
ccaagacttttcgtatcaa

SEQ ID NO: 291051 - DNA, 19 bp, Homo sapiens
  siRNA target sequence for LAMA3 (NM_000227.2,4110-4128).
caagacccaggccaatcat

SEQ ID NO: 291052 - DNA, 19 bp, Homo sapiens
  siRNA target sequence for LAMA3 (NM_000227.2,4154-4172).
ccaccagccacttgctatt

SEQ ID NO: 291053 - DNA, 19 bp, Homo sapiens
  siRNA target sequence for LAMA3 (NM_000227.2,4194-4212).
gaaacccaggtcacagttt

SEQ ID NO: 291054 - DNA, 19 bp, Homo sapiens
  siRNA target sequence for LAMA3 (NM_000227.2,4216-4234).
gtggacatgcagacaacat

SEQ ID NO: 291055 - DNA, 19 bp, Homo sapiens
  siRNA target sequence for LAMA3 (NM_000227.2,4255-4273).
cacacgggcactaagaact

SEQ ID NO: 291056 - DNA, 19 bp, Homo sapiens
  siRNA target sequence for LAMA3 (NM_000227.2,4261-4279).
ggcactaagaactccttta

SEQ ID NO: 291057 - DNA, 19 bp, Homo sapiens
  siRNA target sequence for LAMA3 (NM_000227.2,4274-4292).
cctttatggctctttatct

SEQ ID NO: 291058 - DNA, 19 bp, Homo sapiens
  siRNA target sequence for LAMA3 (NM_000227.2,4478-4496).
gcatcagagcgccagttta

SEQ ID NO: 291059 - DNA, 19 bp, Homo sapiens
  siRNA target sequence for LAMA3 (NM_000227.2,4549-4567).
gtgggatgcctgaagaact

SEQ ID NO: 291060 - DNA, 19 bp, Homo sapiens
  siRNA target sequence for LAMA3 (NM_000227.2,4576-4594).
gattcaaaacccttgtata

SEQ ID NO: 291061 - DNA, 19 bp, Homo sapiens
  siRNA target sequence for LAMA3 (NM_000227.2,4704-4722).
ggggccagaatttaagctt

SEQ ID NO: 291062 - DNA, 19 bp, Homo sapiens
  siRNA target sequence for LAMA3 (NM_000227.2,4745-4763).
gtctcactgggatcctaat

SEQ ID NO: 291063 - DNA, 19 bp, Homo sapiens
  siRNA target sequence for LAMA3 (NM_000227.2,4751-4769).
ctgggatcctaatacacat

SEQ ID NO: 291064 - DNA, 19 bp, Homo sapiens
  siRNA target sequence for LAMA3 (NM_000227.2,4784-4802).
ggaagcacttatgtgttta

SEQ ID NO: 291065 - DNA, 19 bp, Homo sapiens
  siRNA target sequence for LAMA3 (NM_000227.2,5021-5039).
gaggtgctccagccaattt

SEQ ID NO: 291066 - DNA, 19 bp, Homo sapiens
  siRNA target sequence for LAMA3 (NM_000227.2,5023-5041).
ggtgctccagccaatttga

SEQ ID NO: 291067 - DNA, 19 bp, Homo sapiens
  siRNA target sequence for LAMA3 (NM_000227.2,5081-5099).
gtctgaggaatattcatgt

SEQ ID NO: 291068 - DNA, 19 bp, Homo sapiens
  siRNA target sequence for LAMA3 (NM_000227.2,5085-5103).
gaggaatattcatgtcaat

SEQ ID NO: 291069 - DNA, 19 bp, Homo sapiens
  siRNA target sequence for LAMA3 (NM_000227.2,5142-5160).
ggggcctgtcagtctgaat

SEQ ID NO: 291070 - DNA, 19 bp, Homo sapiens
  siRNA target sequence for LAMA3 (NM_198129.1,223-241).
gccttcacccgacttactt

SEQ ID NO: 291071 - DNA, 19 bp, Homo sapiens
  siRNA target sequence for LAMA3 (NM_198129.1,225-243).
cttcacccgacttacttca

SEQ ID NO: 291072 - DNA, 19 bp, Homo sapiens
  siRNA target sequence for LAMA3 (NM_198129.1,381-399).
ggccagttctgtgactatt

SEQ ID NO: 291073 - DNA, 19 bp, Homo sapiens
  siRNA target sequence for LAMA3 (NM_198129.1,391-409).
gtgactattgcaattctga

SEQ ID NO: 291074 - DNA, 19 bp, Homo sapiens
  siRNA target sequence for LAMA3 (NM_198129.1,543-561).
gtggcctatattttaatca

SEQ ID NO: 291075 - DNA, 19 bp, Homo sapiens
  siRNA target sequence for LAMA3 (NM_198129.1,545-563).
ggcctatattttaatcaaa

SEQ ID NO: 291076 - DNA, 19 bp, Homo sapiens
  siRNA target sequence for LAMA3 (NM_198129.1,588-606).
ctttgggtcttggaaagat

SEQ ID NO: 291077 - DNA, 19 bp, Homo sapiens
  siRNA target sequence for LAMA3 (NM_198129.1,639-657).
caatattttgctcattcta

SEQ ID NO: 291078 - DNA, 19 bp, Homo sapiens
  siRNA target sequence for LAMA3 (NM_198129.1,708-726).
cgggatgatgatgtacttt

SEQ ID NO: 291079 - DNA, 19 bp, Homo sapiens
  siRNA target sequence for LAMA3 (NM_198129.1,733-751).
ctgaatattcccgtattgt

SEQ ID NO: 291080 - DNA, 19 bp, Homo sapiens
  siRNA target sequence for LAMA3 (NM_198129.1,743-761).
ccgtattgtacctttggaa

SEQ ID NO: 291081 - DNA, 19 bp, Homo sapiens
  siRNA target sequence for LAMA3 (NM_198129.1,770-788).
ggttgtggtgtccttgata

SEQ ID NO: 291082 - DNA, 19 bp, Homo sapiens
  siRNA target sequence for LAMA3 (NM_198129.1,793-811).
gtcgtccaggtgcaaaaaa

SEQ ID NO: 291083 - DNA, 19 bp, Homo sapiens
  siRNA target sequence for LAMA3 (NM_198129.1,829-847).
ccctgagggagtttaccaa

SEQ ID NO: 291084 - DNA, 19 bp, Homo sapiens
  siRNA target sequence for LAMA3 (NM_198129.1,857-875).
catccgcttgcgttttctt

SEQ ID NO: 291085 - DNA, 19 bp, Homo sapiens
  siRNA target sequence for LAMA3 (NM_198129.1,860-878).
ccgcttgcgttttcttaga

SEQ ID NO: 291086 - DNA, 19 bp, Homo sapiens
  siRNA target sequence for LAMA3 (NM_198129.1,861-879).
cgcttgcgttttcttagaa

SEQ ID NO: 291087 - DNA, 19 bp, Homo sapiens
  siRNA target sequence for LAMA3 (NM_198129.1,928-946).
ctgtcactcggcggtatta

SEQ ID NO: 291088 - DNA, 19 bp, Homo sapiens
  siRNA target sequence for LAMA3 (NM_198129.1,1082-1100).
ctgctgcacagggtacaat

SEQ ID NO: 291089 - DNA, 19 bp, Homo sapiens
  siRNA target sequence for LAMA3 (NM_198129.1,1084-1102).
gctgcacagggtacaatca

SEQ ID NO: 291090 - DNA, 19 bp, Homo sapiens
  siRNA target sequence for LAMA3 (NM_198129.1,1206-1224).
cagcaggcaagcttgaata

SEQ ID NO: 291091 - DNA, 19 bp, Homo sapiens
  siRNA target sequence for LAMA3 (NM_198129.1,1220-1238).
gaatacccagggcatctat

SEQ ID NO: 291092 - DNA, 19 bp, Homo sapiens
  siRNA target sequence for LAMA3 (NM_198129.1,1242-1260).
ggtggaggggtctgcatta

SEQ ID NO: 291093 - DNA, 19 bp, Homo sapiens
  siRNA target sequence for LAMA3 (NM_198129.1,1245-1263).
ggaggggtctgcattaact

SEQ ID NO: 291094 - DNA, 19 bp, Homo sapiens
  siRNA target sequence for LAMA3 (NM_198129.1,1274-1292).
cacagctggagtaaactgt

SEQ ID NO: 291095 - DNA, 19 bp, Homo sapiens
  siRNA target sequence for LAMA3 (NM_198129.1,1414-1432).
gtcactgcaagccaaattt

SEQ ID NO: 291096 - DNA, 19 bp, Homo sapiens
  siRNA target sequence for LAMA3 (NM_198129.1,1445-1463).
ctgtgagaagtgtgcaatt

SEQ ID NO: 291097 - DNA, 19 bp, Homo sapiens
  siRNA target sequence for LAMA3 (NM_198129.1,1456-1474).
gtgcaattggatactacaa

SEQ ID NO: 291098 - DNA, 19 bp, Homo sapiens
  siRNA target sequence for LAMA3 (NM_198129.1,1458-1476).
gcaattggatactacaatt

SEQ ID NO: 291099 - DNA, 19 bp, Homo sapiens
  siRNA target sequence for LAMA3 (NM_198129.1,1486-1504).
gcttgagaattcccatttt

SEQ ID NO: 291100 - DNA, 19 bp, Homo sapiens
  siRNA target sequence for LAMA3 (NM_198129.1,1632-1650).
gagggccctcgatgtgata

SEQ ID NO: 291101 - DNA, 19 bp, Homo sapiens
  siRNA target sequence for LAMA3 (NM_198129.1,1651-1669).
cctgccgctctggtttcta

SEQ ID NO: 291102 - DNA, 19 bp, Homo sapiens
  siRNA target sequence for LAMA3 (NM_198129.1,1656-1674).
cgctctggtttctactcat

SEQ ID NO: 291103 - DNA, 19 bp, Homo sapiens
  siRNA target sequence for LAMA3 (NM_198129.1,1854-1872).
ggtaccatcaactccaatt

SEQ ID NO: 291104 - DNA, 19 bp, Homo sapiens
  siRNA target sequence for LAMA3 (NM_198129.1,1882-1900).
gccaatgcaagcttcatgt

SEQ ID NO: 291105 - DNA, 19 bp, Homo sapiens
  siRNA target sequence for LAMA3 (NM_198129.1,1883-1901).
ccaatgcaagcttcatgtt

SEQ ID NO: 291106 - DNA, 19 bp, Homo sapiens
  siRNA target sequence for LAMA3 (NM_198129.1,1899-1917).
gttgaaggtcctacttgta

SEQ ID NO: 291107 - DNA, 19 bp, Homo sapiens
  siRNA target sequence for LAMA3 (NM_198129.1,1915-1933).
gtagccgctgcaaactgtt

SEQ ID NO: 291108 - DNA, 19 bp, Homo sapiens
  siRNA target sequence for LAMA3 (NM_198129.1,1918-1936).
gccgctgcaaactgttata

SEQ ID NO: 291109 - DNA, 19 bp, Homo sapiens
  siRNA target sequence for LAMA3 (NM_198129.1,1919-1937).
ccgctgcaaactgttatat

SEQ ID NO: 291110 - DNA, 19 bp, Homo sapiens
  siRNA target sequence for LAMA3 (NM_198129.1,1920-1938).
cgctgcaaactgttatatt

SEQ ID NO: 291111 - DNA, 19 bp, Homo sapiens
  siRNA target sequence for LAMA3 (NM_198129.1,1963-1981).
gtggatgttcagaatgcaa

SEQ ID NO: 291112 - DNA, 19 bp, Homo sapiens
  siRNA target sequence for LAMA3 (NM_198129.1,2233-2251).
ggcctgaaaacaactacta

SEQ ID NO: 291113 - DNA, 19 bp, Homo sapiens
  siRNA target sequence for LAMA3 (NM_198129.1,2234-2252).
gcctgaaaacaactactat

SEQ ID NO: 291114 - DNA, 19 bp, Homo sapiens
  siRNA target sequence for LAMA3 (NM_198129.1,2235-2253).
cctgaaaacaactactatt

SEQ ID NO: 291115 - DNA, 19 bp, Homo sapiens
  siRNA target sequence for LAMA3 (NM_198129.1,2236-2254).
ctgaaaacaactactattt

SEQ ID NO: 291116 - DNA, 19 bp, Homo sapiens
  siRNA target sequence for LAMA3 (NM_198129.1,2351-2369).
gtttagctggagaggatat

SEQ ID NO: 291117 - DNA, 19 bp, Homo sapiens
  siRNA target sequence for LAMA3 (NM_198129.1,2378-2396).
gacctcagtacagaatgat

SEQ ID NO: 291118 - DNA, 19 bp, Homo sapiens
  siRNA target sequence for LAMA3 (NM_198129.1,2381-2399).
ctcagtacagaatgatgta

SEQ ID NO: 291119 - DNA, 19 bp, Homo sapiens
  siRNA target sequence for LAMA3 (NM_198129.1,2390-2408).
gaatgatgtaagaataaca

SEQ ID NO: 291120 - DNA, 19 bp, Homo sapiens
  siRNA target sequence for LAMA3 (NM_198129.1,2423-2441).
gtcaagtggctccttgttt

SEQ ID NO: 291121 - DNA, 19 bp, Homo sapiens
  siRNA target sequence for LAMA3 (NM_198129.1,2431-2449).
gctccttgtttcgtgttat

SEQ ID NO: 291122 - DNA, 19 bp, Homo sapiens
  siRNA target sequence for LAMA3 (NM_198129.1,2445-2463).
gttattctgagatacgtta

SEQ ID NO: 291123 - DNA, 19 bp, Homo sapiens
  siRNA target sequence for LAMA3 (NM_198129.1,2478-2496).
gcagtatctggccatataa

SEQ ID NO: 291124 - DNA, 19 bp, Homo sapiens
  siRNA target sequence for LAMA3 (NM_198129.1,2481-2499).
gtatctggccatataacta

SEQ ID NO: 291125 - DNA, 19 bp, Homo sapiens
  siRNA target sequence for LAMA3 (NM_198129.1,2485-2503).
ctggccatataactattta

SEQ ID NO: 291126 - DNA, 19 bp, Homo sapiens
  siRNA target sequence for LAMA3 (NM_198129.1,2576-2594).
ccctggaaatggttttgca

SEQ ID NO: 291127 - DNA, 19 bp, Homo sapiens
  siRNA target sequence for LAMA3 (NM_198129.1,2592-2610).
gcagacccattttcaatca

SEQ ID NO: 291128 - DNA, 19 bp, Homo sapiens
  siRNA target sequence for LAMA3 (NM_198129.1,2672-2690).
gctccccagggactactat

SEQ ID NO: 291129 - DNA, 19 bp, Homo sapiens
  siRNA target sequence for LAMA3 (NM_198129.1,2955-2973).
gtggttgtggtcgagtatt

SEQ ID NO: 291130 - DNA, 19 bp, Homo sapiens
  siRNA target sequence for LAMA3 (NM_198129.1,2958-2976).
gttgtggtcgagtattcca

SEQ ID NO: 291131 - DNA, 19 bp, Homo sapiens
  siRNA target sequence for LAMA3 (NM_198129.1,3036-3054).
gcaggccaggtgaacattt

SEQ ID NO: 291132 - DNA, 19 bp, Homo sapiens
  siRNA target sequence for LAMA3 (NM_198129.1,3039-3057).
ggccaggtgaacatttaca

SEQ ID NO: 291133 - DNA, 19 bp, Homo sapiens
  siRNA target sequence for LAMA3 (NM_198129.1,3104-3122).
gagccgcatcgccatgtat

SEQ ID NO: 291134 - DNA, 19 bp, Homo sapiens
  siRNA target sequence for LAMA3 (NM_198129.1,3106-3124).
gccgcatcgccatgtatga

SEQ ID NO: 291135 - DNA, 19 bp, Homo sapiens
  siRNA target sequence for LAMA3 (NM_198129.1,3190-3208).
gtatcatacctattgaaga

SEQ ID NO: 291136 - DNA, 19 bp, Homo sapiens
  siRNA target sequence for LAMA3 (NM_198129.1,3253-3271).
gttatgggcgatttgtcaa

SEQ ID NO: 291137 - DNA, 19 bp, Homo sapiens
  siRNA target sequence for LAMA3 (NM_198129.1,3258-3276).
gggcgatttgtcaatcaaa

SEQ ID NO: 291138 - DNA, 19 bp, Homo sapiens
  siRNA target sequence for LAMA3 (NM_198129.1,3260-3278).
gcgatttgtcaatcaaagt

SEQ ID NO: 291139 - DNA, 19 bp, Homo sapiens
  siRNA target sequence for LAMA3 (NM_198129.1,3290-3308).
ctccttggcccatgaaact

SEQ ID NO: 291140 - DNA, 19 bp, Homo sapiens
  siRNA target sequence for LAMA3 (NM_198129.1,3309-3327).
cctccaacagcattaattt

SEQ ID NO: 291141 - DNA, 19 bp, Homo sapiens
  siRNA target sequence for LAMA3 (NM_198129.1,3313-3331).
caacagcattaattttgga

SEQ ID NO: 291142 - DNA, 19 bp, Homo sapiens
  siRNA target sequence for LAMA3 (NM_198129.1,3368-3386).
gcagtcgtcaccttctgtt

SEQ ID NO: 291143 - DNA, 19 bp, Homo sapiens
  siRNA target sequence for LAMA3 (NM_198129.1,3371-3389).
gtcgtcaccttctgttgat

SEQ ID NO: 291144 - DNA, 19 bp, Homo sapiens
  siRNA target sequence for LAMA3 (NM_198129.1,3373-3391).
cgtcaccttctgttgatgt

SEQ ID NO: 291145 - DNA, 19 bp, Homo sapiens
  siRNA target sequence for LAMA3 (NM_198129.1,3459-3477).
ggccgatacgtctttgtca

SEQ ID NO: 291146 - DNA, 19 bp, Homo sapiens
  siRNA target sequence for LAMA3 (NM_198129.1,3460-3478).
gccgatacgtctttgtcat

SEQ ID NO: 291147 - DNA, 19 bp, Homo sapiens
  siRNA target sequence for LAMA3 (NM_198129.1,3606-3624).
gccgaaggccagattgagt

SEQ ID NO: 291148 - DNA, 19 bp, Homo sapiens
  siRNA target sequence for LAMA3 (NM_198129.1,3683-3701).
ggttttggtccgtgttcta

SEQ ID NO: 291149 - DNA, 19 bp, Homo sapiens
  siRNA target sequence for LAMA3 (NM_198129.1,3719-3737).
ctatgactaccaaatactt

SEQ ID NO: 291150 - DNA, 19 bp, Homo sapiens
  siRNA target sequence for LAMA3 (NM_198129.1,3764-3782).
cgagtttatcaccaattgt

SEQ ID NO: 291151 - DNA, 19 bp, Homo sapiens
  siRNA target sequence for LAMA3 (NM_198129.1,3810-3828).
cagacagcctccagattct

SEQ ID NO: 291152 - DNA, 19 bp, Homo sapiens
  siRNA target sequence for LAMA3 (NM_198129.1,4258-4276).
gatgtgcttccgggtttta

SEQ ID NO: 291153 - DNA, 19 bp, Homo sapiens
  siRNA target sequence for LAMA3 (NM_198129.1,4353-4371).
gcttgcctctgcaaggaaa

SEQ ID NO: 291154 - DNA, 19 bp, Homo sapiens
  siRNA target sequence for LAMA3 (NM_198129.1,4354-4372).
cttgcctctgcaaggaaaa

SEQ ID NO: 291155 - DNA, 19 bp, Homo sapiens
  siRNA target sequence for LAMA3 (NM_198129.1,4401-4419).
cgagaaggctcattccatt

SEQ ID NO: 291156 - DNA, 19 bp, Homo sapiens
  siRNA target sequence for LAMA3 (NM_198129.1,4491-4509).
cataagcgaaggactaagt

SEQ ID NO: 291157 - DNA, 19 bp, Homo sapiens
  siRNA target sequence for LAMA3 (NM_198129.1,4504-4522).
ctaagtttgtggatatgct

SEQ ID NO: 291158 - DNA, 19 bp, Homo sapiens
  siRNA target sequence for LAMA3 (NM_198129.1,4663-4681).
gggacaaggtttcttcata

SEQ ID NO: 291159 - DNA, 19 bp, Homo sapiens
  siRNA target sequence for LAMA3 (NM_198129.1,4845-4863).
gtggtcgagggaaacttca

SEQ ID NO: 291160 - DNA, 19 bp, Homo sapiens
  siRNA target sequence for LAMA3 (NM_198129.1,5028-5046).
gcacttgctgtggaaatct

SEQ ID NO: 291161 - DNA, 19 bp, Homo sapiens
  siRNA target sequence for LAMB1 (NM_002291.1,347-365).
ccagttgctagctttcagt

SEQ ID NO: 291162 - DNA, 19 bp, Homo sapiens
  siRNA target sequence for LAMB1 (NM_002291.1,348-366).
cagttgctagctttcagtt

SEQ ID NO: 291163 - DNA, 19 bp, Homo sapiens
  siRNA target sequence for LAMB1 (NM_002291.1,571-589).
gcaattcccaagatcctta

SEQ ID NO: 291164 - DNA, 19 bp, Homo sapiens
  siRNA target sequence for LAMB1 (NM_002291.1,572-590).
caattcccaagatccttat

SEQ ID NO: 291165 - DNA, 19 bp, Homo sapiens
  siRNA target sequence for LAMB1 (NM_002291.1,611-629).
cagccatctcattgaaaat

SEQ ID NO: 291166 - DNA, 19 bp, Homo sapiens
  siRNA target sequence for LAMB1 (NM_002291.1,645-663).
gctccaaaccgccttaaga

SEQ ID NO: 291167 - DNA, 19 bp, Homo sapiens
  siRNA target sequence for LAMB1 (NM_002291.1,646-664).
ctccaaaccgccttaagat

SEQ ID NO: 291168 - DNA, 19 bp, Homo sapiens
  siRNA target sequence for LAMB1 (NM_002291.1,648-666).
ccaaaccgccttaagattt

SEQ ID NO: 291169 - DNA, 19 bp, Homo sapiens
  siRNA target sequence for LAMB1 (NM_002291.1,721-739).
cagaattccattttactca

SEQ ID NO: 291170 - DNA, 19 bp, Homo sapiens
  siRNA target sequence for LAMB1 (NM_002291.1,811-829).
cctggggtgtgtatagata

SEQ ID NO: 291171 - DNA, 19 bp, Homo sapiens
  siRNA target sequence for LAMB1 (NM_002291.1,814-832).
ggggtgtgtatagatactt

SEQ ID NO: 291172 - DNA, 19 bp, Homo sapiens
  siRNA target sequence for LAMB1 (NM_002291.1,851-869).
ctcgtttccaggcatttca

SEQ ID NO: 291173 - DNA, 19 bp, Homo sapiens
  siRNA target sequence for LAMB1 (NM_002291.1,868-886).
caactggccccatgaaaaa

SEQ ID NO: 291174 - DNA, 19 bp, Homo sapiens
  siRNA target sequence for LAMB1 (NM_002291.1,871-889).
ctggccccatgaaaaaagt

SEQ ID NO: 291175 - DNA, 19 bp, Homo sapiens
  siRNA target sequence for LAMB1 (NM_002291.1,947-965).
ggtgatatttcgtgcttta

SEQ ID NO: 291176 - DNA, 19 bp, Homo sapiens
  siRNA target sequence for LAMB1 (NM_002291.1,950-968).
gatatttcgtgctttagat

SEQ ID NO: 291177 - DNA, 19 bp, Homo sapiens
  siRNA target sequence for LAMB1 (NM_002291.1,997-1015).
gcccaaggatacagaattt

SEQ ID NO: 291178 - DNA, 19 bp, Homo sapiens
  siRNA target sequence for LAMB1 (NM_002291.1,998-1016).
cccaaggatacagaattta

SEQ ID NO: 291179 - DNA, 19 bp, Homo sapiens
  siRNA target sequence for LAMB1 (NM_002291.1,1027-1045).
ccaacttgagaatcaagtt

SEQ ID NO: 291180 - DNA, 19 bp, Homo sapiens
  siRNA target sequence for LAMB1 (NM_002291.1,1106-1124).
gtattattatgcagtttat

SEQ ID NO: 291181 - DNA, 19 bp, Homo sapiens
  siRNA target sequence for LAMB1 (NM_002291.1,1177-1195).
cccctgtggatggattcaa

SEQ ID NO: 291182 - DNA, 19 bp, Homo sapiens
  siRNA target sequence for LAMB1 (NM_002291.1,1178-1196).
ccctgtggatggattcaat

SEQ ID NO: 291183 - DNA, 19 bp, Homo sapiens
  siRNA target sequence for LAMB1 (NM_002291.1,1322-1340).
caacgcctgtaaaaaatgt

SEQ ID NO: 291184 - DNA, 19 bp, Homo sapiens
  siRNA target sequence for LAMB1 (NM_002291.1,1357-1375).
ccatctcttgtcactttga

SEQ ID NO: 291185 - DNA, 19 bp, Homo sapiens
  siRNA target sequence for LAMB1 (NM_002291.1,1461-1479).
cagtgcaagccgttttact

SEQ ID NO: 291186 - DNA, 19 bp, Homo sapiens
  siRNA target sequence for LAMB1 (NM_002291.1,1495-1513).
gggacatccgagatcctaa

SEQ ID NO: 291187 - DNA, 19 bp, Homo sapiens
  siRNA target sequence for LAMB1 (NM_002291.1,1496-1514).
ggacatccgagatcctaat

SEQ ID NO: 291188 - DNA, 19 bp, Homo sapiens
  siRNA target sequence for LAMB1 (NM_002291.1,1497-1515).
gacatccgagatcctaatt

SEQ ID NO: 291189 - DNA, 19 bp, Homo sapiens
  siRNA target sequence for LAMB1 (NM_002291.1,1502-1520).
ccgagatcctaatttctgt

SEQ ID NO: 291190 - DNA, 19 bp, Homo sapiens
  siRNA target sequence for LAMB1 (NM_002291.1,1536-1554).
gacccagctggctctcaaa

SEQ ID NO: 291191 - DNA, 19 bp, Homo sapiens
  siRNA target sequence for LAMB1 (NM_002291.1,1571-1589).
cagctatactgatttttct

SEQ ID NO: 291192 - DNA, 19 bp, Homo sapiens
  siRNA target sequence for LAMB1 (NM_002291.1,1610-1628).
gtgtcggtgtaaattaaat

SEQ ID NO: 291193 - DNA, 19 bp, Homo sapiens
  siRNA target sequence for LAMB1 (NM_002291.1,1612-1630).
gtcggtgtaaattaaatgt

SEQ ID NO: 291194 - DNA, 19 bp, Homo sapiens
  siRNA target sequence for LAMB1 (NM_002291.1,1659-1677).
gaaggcttctatgatttaa

SEQ ID NO: 291195 - DNA, 19 bp, Homo sapiens
  siRNA target sequence for LAMB1 (NM_002291.1,1689-1707).
ccatttggttgtaaatctt

SEQ ID NO: 291196 - DNA, 19 bp, Homo sapiens
  siRNA target sequence for LAMB1 (NM_002291.1,1737-1755).
ggagggaatccttgtgatt

SEQ ID NO: 291197 - DNA, 19 bp, Homo sapiens
  siRNA target sequence for LAMB1 (NM_002291.1,1821-1839).
gagcactggggcttaagca

SEQ ID NO: 291198 - DNA, 19 bp, Homo sapiens
  siRNA target sequence for LAMB1 (NM_002291.1,1828-1846).
ggggcttaagcaatgattt

SEQ ID NO: 291199 - DNA, 19 bp, Homo sapiens
  siRNA target sequence for LAMB1 (NM_002291.1,1875-1893).
cttgggggagccttaaaca

SEQ ID NO: 291200 - DNA, 19 bp, Homo sapiens
  siRNA target sequence for LAMB1 (NM_002291.1,1878-1896).
gggggagccttaaacaaca

SEQ ID NO: 291201 - DNA, 19 bp, Homo sapiens
  siRNA target sequence for LAMB1 (NM_002291.1,1881-1899).
ggagccttaaacaacagtt

SEQ ID NO: 291202 - DNA, 19 bp, Homo sapiens
  siRNA target sequence for LAMB1 (NM_002291.1,1964-1982).
ggaacctggttactacttt

SEQ ID NO: 291203 - DNA, 19 bp, Homo sapiens
  siRNA target sequence for LAMB1 (NM_002291.1,2042-2060).
catagtggagcggcaatat

SEQ ID NO: 291204 - DNA, 19 bp, Homo sapiens
  siRNA target sequence for LAMB1 (NM_002291.1,2110-2128).
ctgaaggggcttatttgga

SEQ ID NO: 291205 - DNA, 19 bp, Homo sapiens
  siRNA target sequence for LAMB1 (NM_002291.1,2135-2153).
cattgacaacataccatat

SEQ ID NO: 291206 - DNA, 19 bp, Homo sapiens
  siRNA target sequence for LAMB1 (NM_002291.1,2139-2157).
gacaacataccatattcca

SEQ ID NO: 291207 - DNA, 19 bp, Homo sapiens
  siRNA target sequence for LAMB1 (NM_002291.1,2252-2270).
cagcagccgatgtggtaat

SEQ ID NO: 291208 - DNA, 19 bp, Homo sapiens
  siRNA target sequence for LAMB1 (NM_002291.1,2257-2275).
gccgatgtggtaataccat

SEQ ID NO: 291209 - DNA, 19 bp, Homo sapiens
  siRNA target sequence for LAMB1 (NM_002291.1,2288-2306).
caaccaggtggtgtcatta

SEQ ID NO: 291210 - DNA, 19 bp, Homo sapiens
  siRNA target sequence for LAMB1 (NM_002291.1,2291-2309).
ccaggtggtgtcattatca

SEQ ID NO: 291211 - DNA, 19 bp, Homo sapiens
  siRNA target sequence for LAMB1 (NM_002291.1,2308-2326).
caccaggctcaagatatgt

SEQ ID NO: 291212 - DNA, 19 bp, Homo sapiens
  siRNA target sequence for LAMB1 (NM_002291.1,2391-2409).
cagtacacctcctctgata

SEQ ID NO: 291213 - DNA, 19 bp, Homo sapiens
  siRNA target sequence for LAMB1 (NM_002291.1,2424-2442).
ccctacacgctgatcgatt

SEQ ID NO: 291214 - DNA, 19 bp, Homo sapiens
  siRNA target sequence for LAMB1 (NM_002291.1,2429-2447).
cacgctgatcgattctctt

SEQ ID NO: 291215 - DNA, 19 bp, Homo sapiens
  siRNA target sequence for LAMB1 (NM_002291.1,2432-2450).
gctgatcgattctcttgtt

SEQ ID NO: 291216 - DNA, 19 bp, Homo sapiens
  siRNA target sequence for LAMB1 (NM_002291.1,2448-2466).
gttctcatgccatactgta

SEQ ID NO: 291217 - DNA, 19 bp, Homo sapiens
  siRNA target sequence for LAMB1 (NM_002291.1,2451-2469).
ctcatgccatactgtaaat

SEQ ID NO: 291218 - DNA, 19 bp, Homo sapiens
  siRNA target sequence for LAMB1 (NM_002291.1,2542-2560).
gataccgatgtctagagaa

SEQ ID NO: 291219 - DNA, 19 bp, Homo sapiens
  siRNA target sequence for LAMB1 (NM_002291.1,2564-2582).
cagaagcgttgtgaaaaca

SEQ ID NO: 291220 - DNA, 19 bp, Homo sapiens
  siRNA target sequence for LAMB1 (NM_002291.1,2590-2608).
cagatgtttgcagaaacat

SEQ ID NO: 291221 - DNA, 19 bp, Homo sapiens
  siRNA target sequence for LAMB1 (NM_002291.1,2592-2610).
gatgtttgcagaaacatca

SEQ ID NO: 291222 - DNA, 19 bp, Homo sapiens
  siRNA target sequence for LAMB1 (NM_002291.1,2660-2678).
cgaccctcagggttcgtta

SEQ ID NO: 291223 - DNA, 19 bp, Homo sapiens
  siRNA target sequence for LAMB1 (NM_002291.1,2661-2679).
gaccctcagggttcgttaa

SEQ ID NO: 291224 - DNA, 19 bp, Homo sapiens
  siRNA target sequence for LAMB1 (NM_002291.1,2663-2681).
ccctcagggttcgttaagt

SEQ ID NO: 291225 - DNA, 19 bp, Homo sapiens
  siRNA target sequence for LAMB1 (NM_002291.1,2664-2682).
cctcagggttcgttaagtt

SEQ ID NO: 291226 - DNA, 19 bp, Homo sapiens
  siRNA target sequence for LAMB1 (NM_002291.1,2858-2876).
ctgtttccagggagtgtat

SEQ ID NO: 291227 - DNA, 19 bp, Homo sapiens
  siRNA target sequence for LAMB1 (NM_002291.1,3002-3020).
caccatgggtcataactgt

SEQ ID NO: 291228 - DNA, 19 bp, Homo sapiens
  siRNA target sequence for LAMB1 (NM_002291.1,3025-3043).
ggtgcttggctggttacta

SEQ ID NO: 291229 - DNA, 19 bp, Homo sapiens
  siRNA target sequence for LAMB1 (NM_002291.1,3026-3044).
gtgcttggctggttactat

SEQ ID NO: 291230 - DNA, 19 bp, Homo sapiens
  siRNA target sequence for LAMB1 (NM_002291.1,3041-3059).
ctatggcgaccccatcatt

SEQ ID NO: 291231 - DNA, 19 bp, Homo sapiens
  siRNA target sequence for LAMB1 (NM_002291.1,3134-3152).
ctaccaagatcctgttact

SEQ ID NO: 291232 - DNA, 19 bp, Homo sapiens
  siRNA target sequence for LAMB1 (NM_002291.1,3216-3234).
ggatactttggcaatccat

SEQ ID NO: 291233 - DNA, 19 bp, Homo sapiens
  siRNA target sequence for LAMB1 (NM_002291.1,3262-3280).
gccagtgtcacaacaacat

SEQ ID NO: 291234 - DNA, 19 bp, Homo sapiens
  siRNA target sequence for LAMB1 (NM_002291.1,3263-3281).
ccagtgtcacaacaacatt

SEQ ID NO: 291235 - DNA, 19 bp, Homo sapiens
  siRNA target sequence for LAMB1 (NM_002291.1,3368-3386).
ctgccggtttggatactat

SEQ ID NO: 291236 - DNA, 19 bp, Homo sapiens
  siRNA target sequence for LAMB1 (NM_002291.1,3409-3427).
gtcgaaagtgtgtctgtaa

SEQ ID NO: 291237 - DNA, 19 bp, Homo sapiens
  siRNA target sequence for LAMB1 (NM_002291.1,3412-3430).
gaaagtgtgtctgtaatta

SEQ ID NO: 291238 - DNA, 19 bp, Homo sapiens
  siRNA target sequence for LAMB1 (NM_002291.1,3439-3457).
ccgtgcaagagcactgtaa

SEQ ID NO: 291239 - DNA, 19 bp, Homo sapiens
  siRNA target sequence for LAMB1 (NM_002291.1,3534-3552).
cgctgtgcgcccaatacct

SEQ ID NO: 291240 - DNA, 19 bp, Homo sapiens
  siRNA target sequence for LAMB1 (NM_002291.1,3608-3626).
cttcgggccatcttgcaat

SEQ ID NO: 291241 - DNA, 19 bp, Homo sapiens
  siRNA target sequence for LAMB1 (NM_002291.1,3613-3631).
ggccatcttgcaatgagtt

SEQ ID NO: 291242 - DNA, 19 bp, Homo sapiens
  siRNA target sequence for LAMB1 (NM_002291.1,3738-3756).
gaccccaggggcattgaga

SEQ ID NO: 291243 - DNA, 19 bp, Homo sapiens
  siRNA target sequence for LAMB1 (NM_002291.1,4009-4027).
ggaaagtcagcgagataaa

SEQ ID NO: 291244 - DNA, 19 bp, Homo sapiens
  siRNA target sequence for LAMB1 (NM_002291.1,4010-4028).
gaaagtcagcgagataaaa

SEQ ID NO: 291245 - DNA, 19 bp, Homo sapiens
  siRNA target sequence for LAMB1 (NM_002291.1,4131-4149).
caagtagaagtgaaattat

SEQ ID NO: 291246 - DNA, 19 bp, Homo sapiens
  siRNA target sequence for LAMB1 (NM_002291.1,4280-4298).
gggtgccttggatagcatt

SEQ ID NO: 291247 - DNA, 19 bp, Homo sapiens
  siRNA target sequence for LAMB1 (NM_002291.1,4284-4302).
gccttggatagcattacca

SEQ ID NO: 291248 - DNA, 19 bp, Homo sapiens
  siRNA target sequence for LAMB1 (NM_002291.1,4285-4303).
ccttggatagcattaccaa

SEQ ID NO: 291249 - DNA, 19 bp, Homo sapiens
  siRNA target sequence for LAMB1 (NM_002291.1,4289-4307).
ggatagcattaccaagtat

SEQ ID NO: 291250 - DNA, 19 bp, Homo sapiens
  siRNA target sequence for LAMB1 (NM_002291.1,4290-4308).
gatagcattaccaagtatt

SEQ ID NO: 291251 - DNA, 19 bp, Homo sapiens
  siRNA target sequence for LAMB1 (NM_002291.1,4399-4417).
gagtagaagacgtgatgat

SEQ ID NO: 291252 - DNA, 19 bp, Homo sapiens
  siRNA target sequence for LAMB1 (NM_002291.1,4550-4568).
ctgttccgagactgaatgt

SEQ ID NO: 291253 - DNA, 19 bp, Homo sapiens
  siRNA target sequence for LAMB1 (NM_002291.1,4624-4642).
gtggtggtctggttactgt

SEQ ID NO: 291254 - DNA, 19 bp, Homo sapiens
  siRNA target sequence for LAMB1 (NM_002291.1,4792-4810).
caaatgctaccaaagaaaa

SEQ ID NO: 291255 - DNA, 19 bp, Homo sapiens
  siRNA target sequence for LAMB1 (NM_002291.1,4961-4979).
cttgacagaagatatacgt

SEQ ID NO: 291256 - DNA, 19 bp, Homo sapiens
  siRNA target sequence for LAMB1 (NM_002291.1,4999-5017).
ctcaagtagaggttattct

SEQ ID NO: 291257 - DNA, 19 bp, Homo sapiens
  siRNA target sequence for LAMB1 (NM_002291.1,5044-5062).
gagctgagatgttgttaga

SEQ ID NO: 291258 - DNA, 19 bp, Homo sapiens
  siRNA target sequence for LAMB1 (NM_002291.1,5103-5121).
gtcactgcagatatggtaa

SEQ ID NO: 291259 - DNA, 19 bp, Homo sapiens
  siRNA target sequence for LAMB1 (NM_002291.1,5211-5229).
ctgttaacttcgattgagt

SEQ ID NO: 291260 - DNA, 19 bp, Homo sapiens
  siRNA target sequence for LAMB1 (NM_002291.1,5245-5263).
ctgaggaaaccttgttcaa

SEQ ID NO: 291261 - DNA, 19 bp, Homo sapiens
  siRNA target sequence for LAMB1 (NM_002291.1,5274-5292).
cgcatcagcgagttagaga

SEQ ID NO: 291262 - DNA, 19 bp, Homo sapiens
  siRNA target sequence for LAMB1 (NM_002291.1,5313-5331).
cggaaagctgcccaaaact

SEQ ID NO: 291263 - DNA, 19 bp, Homo sapiens
  siRNA target sequence for LAMB1 (NM_002291.1,5330-5348).
ctccggggaggcagaatat

SEQ ID NO: 291264 - DNA, 19 bp, Homo sapiens
  siRNA target sequence for LAMB1 (NM_002291.1,5482-5500).
gaaggaaagccgaaatgct

SEQ ID NO: 291265 - DNA, 19 bp, Homo sapiens
  siRNA target sequence for LAMB1 (NM_002291.1,5582-5600).
caatcaaagatacttagaa

SEQ ID NO: 291266 - DNA, 19 bp, Homo sapiens
  siRNA target sequence for LAMB1 (NM_002291.1,5639-5657).
ccgttcactcctaaaggat

SEQ ID NO: 291267 - DNA, 19 bp, Homo sapiens
  siRNA target sequence for LAMB1 (NM_002291.1,5640-5658).
cgttcactcctaaaggata

SEQ ID NO: 291268 - DNA, 19 bp, Homo sapiens
  siRNA target sequence for LAMB2 (NM_002292.2,537-555).
gtcacctgcaggacgaaaa

SEQ ID NO: 291269 - DNA, 19 bp, Homo sapiens
  siRNA target sequence for LAMB2 (NM_002292.2,612-630).
gccatcgcatccagaatgt

SEQ ID NO: 291270 - DNA, 19 bp, Homo sapiens
  siRNA target sequence for LAMB2 (NM_002292.2,613-631).
ccatcgcatccagaatgta

SEQ ID NO: 291271 - DNA, 19 bp, Homo sapiens
  siRNA target sequence for LAMB2 (NM_002292.2,669-687).
ggcagtcagagaatggtat

SEQ ID NO: 291272 - DNA, 19 bp, Homo sapiens
  siRNA target sequence for LAMB2 (NM_002292.2,824-842).
cgatatttctcctatgact

SEQ ID NO: 291273 - DNA, 19 bp, Homo sapiens
  siRNA target sequence for LAMB2 (NM_002292.2,879-897).
cacggcactgggatgatgt

SEQ ID NO: 291274 - DNA, 19 bp, Homo sapiens
  siRNA target sequence for LAMB2 (NM_002292.2,907-925).
gtcccgctactcagagatt

SEQ ID NO: 291275 - DNA, 19 bp, Homo sapiens
  siRNA target sequence for LAMB2 (NM_002292.2,909-927).
cccgctactcagagattga

SEQ ID NO: 291276 - DNA, 19 bp, Homo sapiens
  siRNA target sequence for LAMB2 (NM_002292.2,1096-1114).
ccgagagaagtactactat

SEQ ID NO: 291277 - DNA, 19 bp, Homo sapiens
  siRNA target sequence for LAMB2 (NM_002292.2,1460-1478).
ctctgtcggcccttcttct

SEQ ID NO: 291278 - DNA, 19 bp, Homo sapiens
  siRNA target sequence for LAMB2 (NM_002292.2,1514-1532).
gtgtgccgctcctgtgatt

SEQ ID NO: 291279 - DNA, 19 bp, Homo sapiens
  siRNA target sequence for LAMB2 (NM_002292.2,1606-1624).
ccagtgtcgctgcaaagaa

SEQ ID NO: 291280 - DNA, 19 bp, Homo sapiens
  siRNA target sequence for LAMB2 (NM_002292.2,1873-1891).
cgtgggtggtgctttggat

SEQ ID NO: 291281 - DNA, 19 bp, Homo sapiens
  siRNA target sequence for LAMB2 (NM_002292.2,1983-2001).
ccttcctggaccacctaat

SEQ ID NO: 291282 - DNA, 19 bp, Homo sapiens
  siRNA target sequence for LAMB2 (NM_002292.2,1984-2002).
cttcctggaccacctaatt

SEQ ID NO: 291283 - DNA, 19 bp, Homo sapiens
  siRNA target sequence for LAMB2 (NM_002292.2,2145-2163).
cgaaggctatggactatga

SEQ ID NO: 291284 - DNA, 19 bp, Homo sapiens
  siRNA target sequence for LAMB2 (NM_002292.2,2202-2220).
gggcagagttggaactgat

SEQ ID NO: 291285 - DNA, 19 bp, Homo sapiens
  siRNA target sequence for LAMB2 (NM_002292.2,2205-2223).
cagagttggaactgattgt

SEQ ID NO: 291286 - DNA, 19 bp, Homo sapiens
  siRNA target sequence for LAMB2 (NM_002292.2,2306-2324).
ccacatgccaggtacttga

SEQ ID NO: 291287 - DNA, 19 bp, Homo sapiens
  siRNA target sequence for LAMB2 (NM_002292.2,2314-2332).
caggtacttgatatttcct

SEQ ID NO: 291288 - DNA, 19 bp, Homo sapiens
  siRNA target sequence for LAMB2 (NM_002292.2,2558-2576).
ctggtgcccagcaagactt

SEQ ID NO: 291289 - DNA, 19 bp, Homo sapiens
  siRNA target sequence for LAMB2 (NM_002292.2,2999-3017).
gggggtgagcactgtgaaa

SEQ ID NO: 291290 - DNA, 19 bp, Homo sapiens
  siRNA target sequence for LAMB2 (NM_002292.2,3530-3548).
cgctgtgcccccaacttct

SEQ ID NO: 291291 - DNA, 19 bp, Homo sapiens
  siRNA target sequence for LAMB2 (NM_002292.2,3715-3733).
gtgccatgcctgtgattgt

SEQ ID NO: 291292 - DNA, 19 bp, Homo sapiens
  siRNA target sequence for LAMB2 (NM_002292.2,3732-3750).
gtgactctcgtggaataga

SEQ ID NO: 291293 - DNA, 19 bp, Homo sapiens
  siRNA target sequence for LAMB2 (NM_002292.2,3734-3752).
gactctcgtggaatagata

SEQ ID NO: 291294 - DNA, 19 bp, Homo sapiens
  siRNA target sequence for LAMB2 (NM_002292.2,4203-4221).
gagataggcttgcacttaa

SEQ ID NO: 291295 - DNA, 19 bp, Homo sapiens
  siRNA target sequence for LAMB2 (NM_002292.2,4253-4271).
gacttgctcaaacattcaa

SEQ ID NO: 291296 - DNA, 19 bp, Homo sapiens
  siRNA target sequence for LAMB2 (NM_002292.2,4328-4346).
gaacgtcgtgccaatacct

SEQ ID NO: 291297 - DNA, 19 bp, Homo sapiens
  siRNA target sequence for LAMB2 (NM_002292.2,4496-4514).
ctgagcctgacagacataa

SEQ ID NO: 291298 - DNA, 19 bp, Homo sapiens
  siRNA target sequence for LAMB2 (NM_002292.2,4498-4516).
gagcctgacagacataaat

SEQ ID NO: 291299 - DNA, 19 bp, Homo sapiens
  siRNA target sequence for LAMB2 (NM_002292.2,4781-4799).
ctggacaaggctaatgctt

SEQ ID NO: 291300 - DNA, 19 bp, Homo sapiens
  siRNA target sequence for LAMB2 (NM_002292.2,4819-4837).
ggccaaccaggaacttcaa

SEQ ID NO: 291301 - DNA, 19 bp, Homo sapiens
  siRNA target sequence for LAMB2 (NM_002292.2,4878-4896).
gggctgatcctgatagcat

SEQ ID NO: 291302 - DNA, 19 bp, Homo sapiens
  siRNA target sequence for LAMB2 (NM_002292.2,4879-4897).
ggctgatcctgatagcatt

SEQ ID NO: 291303 - DNA, 19 bp, Homo sapiens
  siRNA target sequence for LAMB2 (NM_002292.2,5011-5029).
gatcctggcacgtactgta

SEQ ID NO: 291304 - DNA, 19 bp, Homo sapiens
  siRNA target sequence for LAMB2 (NM_002292.2,5299-5317).
ggaggctctgaaattgaaa

SEQ ID NO: 291305 - DNA, 19 bp, Homo sapiens
  siRNA target sequence for LAMB2 (NM_002292.2,5548-5566).
gcggctacaggaattggaa

SEQ ID NO: 291306 - DNA, 19 bp, Homo sapiens
  siRNA target sequence for LAMB2 (NM_002292.2,5645-5663).
gtgcttcaagccatcaact

SEQ ID NO: 291307 - DNA, 19 bp, Homo sapiens
  siRNA target sequence for LAMB3 (NM_000228.1,296-314).
ggcagcctcacaactacta

SEQ ID NO: 291308 - DNA, 19 bp, Homo sapiens
  siRNA target sequence for LAMB3 (NM_000228.1,298-316).
cagcctcacaactactaca

SEQ ID NO: 291309 - DNA, 19 bp, Homo sapiens
  siRNA target sequence for LAMB3 (NM_000228.1,315-333).
cagtcaccgagtagagaat

SEQ ID NO: 291310 - DNA, 19 bp, Homo sapiens
  siRNA target sequence for LAMB3 (NM_000228.1,317-335).
gtcaccgagtagagaatgt

SEQ ID NO: 291311 - DNA, 19 bp, Homo sapiens
  siRNA target sequence for LAMB3 (NM_000228.1,609-627).
gcctcagaggcctaatgca

SEQ ID NO: 291312 - DNA, 19 bp, Homo sapiens
  siRNA target sequence for LAMB3 (NM_000228.1,618-636).
gcctaatgcacgcctaaat

SEQ ID NO: 291313 - DNA, 19 bp, Homo sapiens
  siRNA target sequence for LAMB3 (NM_000228.1,637-655).
ggggggaaggtccaactta

SEQ ID NO: 291314 - DNA, 19 bp, Homo sapiens
  siRNA target sequence for LAMB3 (NM_000228.1,638-656).
gggggaaggtccaacttaa

SEQ ID NO: 291315 - DNA, 19 bp, Homo sapiens
  siRNA target sequence for LAMB3 (NM_000228.1,641-659).
ggaaggtccaacttaacct

SEQ ID NO: 291316 - DNA, 19 bp, Homo sapiens
  siRNA target sequence for LAMB3 (NM_000228.1,642-660).
gaaggtccaacttaacctt

SEQ ID NO: 291317 - DNA, 19 bp, Homo sapiens
  siRNA target sequence for LAMB3 (NM_000228.1,648-666).
ccaacttaaccttatggat

SEQ ID NO: 291318 - DNA, 19 bp, Homo sapiens
  siRNA target sequence for LAMB3 (NM_000228.1,649-667).
caacttaaccttatggatt

SEQ ID NO: 291319 - DNA, 19 bp, Homo sapiens
  siRNA target sequence for LAMB3 (NM_000228.1,678-696).
gattccagcaactcaaagt

SEQ ID NO: 291320 - DNA, 19 bp, Homo sapiens
  siRNA target sequence for LAMB3 (NM_000228.1,682-700).
ccagcaactcaaagtcaaa

SEQ ID NO: 291321 - DNA, 19 bp, Homo sapiens
  siRNA target sequence for LAMB3 (NM_000228.1,715-733).
ggggagatcacaaacttga

SEQ ID NO: 291322 - DNA, 19 bp, Homo sapiens
  siRNA target sequence for LAMB3 (NM_000228.1,725-743).
caaacttgagagtcaattt

SEQ ID NO: 291323 - DNA, 19 bp, Homo sapiens
  siRNA target sequence for LAMB3 (NM_000228.1,780-798).
ccctcccagcgcctactat

SEQ ID NO: 291324 - DNA, 19 bp, Homo sapiens
  siRNA target sequence for LAMB3 (NM_000228.1,955-973).
cgctgtgcacccttctaca

SEQ ID NO: 291325 - DNA, 19 bp, Homo sapiens
  siRNA target sequence for LAMB3 (NM_000228.1,959-977).
gtgcacccttctacaacaa

SEQ ID NO: 291326 - DNA, 19 bp, Homo sapiens
  siRNA target sequence for LAMB3 (NM_000228.1,1150-1168).
cggtgtcagctgcactatt

SEQ ID NO: 291327 - DNA, 19 bp, Homo sapiens
  siRNA target sequence for LAMB3 (NM_000228.1,1449-1467).
cgtggtgggtcccaaatgt

SEQ ID NO: 291328 - DNA, 19 bp, Homo sapiens
  siRNA target sequence for LAMB3 (NM_000228.1,1864-1882).
caggccctgcgctttggta

SEQ ID NO: 291329 - DNA, 19 bp, Homo sapiens
  siRNA target sequence for LAMB3 (NM_000228.1,1946-1964).
cccggatcctagatgcaaa

SEQ ID NO: 291330 - DNA, 19 bp, Homo sapiens
  siRNA target sequence for LAMB3 (NM_000228.1,2153-2171).
gtctccttactatgtatca

SEQ ID NO: 291331 - DNA, 19 bp, Homo sapiens
  siRNA target sequence for LAMB3 (NM_000228.1,2155-2173).
ctccttactatgtatcaga

SEQ ID NO: 291332 - DNA, 19 bp, Homo sapiens
  siRNA target sequence for LAMB3 (NM_000228.1,2555-2573).
ccggtggggccttcttgat

SEQ ID NO: 291333 - DNA, 19 bp, Homo sapiens
  siRNA target sequence for LAMB3 (NM_000228.1,2738-2756).
gacgcacacggctcctaat

SEQ ID NO: 291334 - DNA, 19 bp, Homo sapiens
  siRNA target sequence for LAMB3 (NM_000228.1,2741-2759).
gcacacggctcctaatcca

SEQ ID NO: 291335 - DNA, 19 bp, Homo sapiens
  siRNA target sequence for LAMB3 (NM_000228.1,2761-2779).
caggtccgggacttcctaa

SEQ ID NO: 291336 - DNA, 19 bp, Homo sapiens
  siRNA target sequence for LAMB3 (NM_000228.1,3098-3116).
gctcccttcggcttatcca

SEQ ID NO: 291337 - DNA, 19 bp, Homo sapiens
  siRNA target sequence for LAMB3 (NM_000228.1,3301-3319).
gcccaagagggatttgaga

SEQ ID NO: 291338 - DNA, 19 bp, Homo sapiens
  siRNA target sequence for LAMB3 (NM_000228.1,3307-3325).
gagggatttgagagaataa

SEQ ID NO: 291339 - DNA, 19 bp, Homo sapiens
  siRNA target sequence for LAMB3 (NM_000228.1,3309-3327).
gggatttgagagaataaaa

SEQ ID NO: 291340 - DNA, 19 bp, Homo sapiens
  siRNA target sequence for LAMC1 (NM_002293.2,736-754).
cctatgtgcgtctcaagtt

SEQ ID NO: 291341 - DNA, 19 bp, Homo sapiens
  siRNA target sequence for LAMC1 (NM_002293.2,814-832).
ggattccttaccagtacta

SEQ ID NO: 291342 - DNA, 19 bp, Homo sapiens
  siRNA target sequence for LAMC1 (NM_002293.2,897-915).
gagcagcaggccttgtgta

SEQ ID NO: 291343 - DNA, 19 bp, Homo sapiens
  siRNA target sequence for LAMC1 (NM_002293.2,905-923).
ggccttgtgtactgatgaa

SEQ ID NO: 291344 - DNA, 19 bp, Homo sapiens
  siRNA target sequence for LAMC1 (NM_002293.2,906-924).
gccttgtgtactgatgaat

SEQ ID NO: 291345 - DNA, 19 bp, Homo sapiens
  siRNA target sequence for LAMC1 (NM_002293.2,950-968).
gggcaacgtggccttttct

SEQ ID NO: 291346 - DNA, 19 bp, Homo sapiens
  siRNA target sequence for LAMC1 (NM_002293.2,979-997).
gaaggcccagcgcctataa

SEQ ID NO: 291347 - DNA, 19 bp, Homo sapiens
  siRNA target sequence for LAMC1 (NM_002293.2,988-1006).
gcgcctataactttgacaa

SEQ ID NO: 291348 - DNA, 19 bp, Homo sapiens
  siRNA target sequence for LAMC1 (NM_002293.2,989-1007).
cgcctataactttgacaat

SEQ ID NO: 291349 - DNA, 19 bp, Homo sapiens
  siRNA target sequence for LAMC1 (NM_002293.2,1035-1053).
gccactgacatcagagtaa

SEQ ID NO: 291350 - DNA, 19 bp, Homo sapiens
  siRNA target sequence for LAMC1 (NM_002293.2,1088-1106).
gtttaacgatcccaaagtt

SEQ ID NO: 291351 - DNA, 19 bp, Homo sapiens
  siRNA target sequence for LAMC1 (NM_002293.2,1104-1122).
gttctcaagtcctattatt

SEQ ID NO: 291352 - DNA, 19 bp, Homo sapiens
  siRNA target sequence for LAMC1 (NM_002293.2,1141-1159).
ctgtaggtggcagatgtaa

SEQ ID NO: 291353 - DNA, 19 bp, Homo sapiens
  siRNA target sequence for LAMC1 (NM_002293.2,1168-1186).
gacacgcaagcgagtgtat

SEQ ID NO: 291354 - DNA, 19 bp, Homo sapiens
  siRNA target sequence for LAMC1 (NM_002293.2,1170-1188).
cacgcaagcgagtgtatga

SEQ ID NO: 291355 - DNA, 19 bp, Homo sapiens
  siRNA target sequence for LAMC1 (NM_002293.2,1181-1199).
gtgtatgaagaacgaattt

SEQ ID NO: 291356 - DNA, 19 bp, Homo sapiens
  siRNA target sequence for LAMC1 (NM_002293.2,1200-1218).
gataagctggtgtgtaatt

SEQ ID NO: 291357 - DNA, 19 bp, Homo sapiens
  siRNA target sequence for LAMC1 (NM_002293.2,1220-1238).
caaacataacacatatgga

SEQ ID NO: 291358 - DNA, 19 bp, Homo sapiens
  siRNA target sequence for LAMC1 (NM_002293.2,1315-1333).
gcctgccctgtgattgcaa

SEQ ID NO: 291359 - DNA, 19 bp, Homo sapiens
  siRNA target sequence for LAMC1 (NM_002293.2,1316-1334).
cctgccctgtgattgcaat

SEQ ID NO: 291360 - DNA, 19 bp, Homo sapiens
  siRNA target sequence for LAMC1 (NM_002293.2,1336-1354).
gtcgatcccaggaatgcta

SEQ ID NO: 291361 - DNA, 19 bp, Homo sapiens
  siRNA target sequence for LAMC1 (NM_002293.2,1359-1377).
gaccctgaactctatcgtt

SEQ ID NO: 291362 - DNA, 19 bp, Homo sapiens
  siRNA target sequence for LAMC1 (NM_002293.2,1403-1421).
caactgccaggataacaca

SEQ ID NO: 291363 - DNA, 19 bp, Homo sapiens
  siRNA target sequence for LAMC1 (NM_002293.2,1441-1459).
ggtgccgagagaacttctt

SEQ ID NO: 291364 - DNA, 19 bp, Homo sapiens
  siRNA target sequence for LAMC1 (NM_002293.2,1460-1478).
ccgccttggcaacaatgaa

SEQ ID NO: 291365 - DNA, 19 bp, Homo sapiens
  siRNA target sequence for LAMC1 (NM_002293.2,1515-1533).
ctaagcacacagtgtgata

SEQ ID NO: 291366 - DNA, 19 bp, Homo sapiens
  siRNA target sequence for LAMC1 (NM_002293.2,1519-1537).
gcacacagtgtgatagtta

SEQ ID NO: 291367 - DNA, 19 bp, Homo sapiens
  siRNA target sequence for LAMC1 (NM_002293.2,1684-1702).
gatgtgtttgcaaagacaa

SEQ ID NO: 291368 - DNA, 19 bp, Homo sapiens
  siRNA target sequence for LAMC1 (NM_002293.2,1710-1728).
ggcttcaattgtgaaagat

SEQ ID NO: 291369 - DNA, 19 bp, Homo sapiens
  siRNA target sequence for LAMC1 (NM_002293.2,1846-1864).
cctctacctttcagattga

SEQ ID NO: 291370 - DNA, 19 bp, Homo sapiens
  siRNA target sequence for LAMC1 (NM_002293.2,1998-2016).
ggcaagcaggtgttgagtt

SEQ ID NO: 291371 - DNA, 19 bp, Homo sapiens
  siRNA target sequence for LAMC1 (NM_002293.2,1999-2017).
gcaagcaggtgttgagtta

SEQ ID NO: 291372 - DNA, 19 bp, Homo sapiens
  siRNA target sequence for LAMC1 (NM_002293.2,2000-2018).
caagcaggtgttgagttat

SEQ ID NO: 291373 - DNA, 19 bp, Homo sapiens
  siRNA target sequence for LAMC1 (NM_002293.2,2098-2116).
ctggcttaagagtatctgt

SEQ ID NO: 291374 - DNA, 19 bp, Homo sapiens
  siRNA target sequence for LAMC1 (NM_002293.2,2126-2144).
cgctcagggcaattcctat

SEQ ID NO: 291375 - DNA, 19 bp, Homo sapiens
  siRNA target sequence for LAMC1 (NM_002293.2,2218-2236).
ccccttttgaatttcagaa

SEQ ID NO: 291376 - DNA, 19 bp, Homo sapiens
  siRNA target sequence for LAMC1 (NM_002293.2,2264-2282).
gatacgtgggacatacagt

SEQ ID NO: 291377 - DNA, 19 bp, Homo sapiens
  siRNA target sequence for LAMC1 (NM_002293.2,2570-2588).
gtactatggagattcaact

SEQ ID NO: 291378 - DNA, 19 bp, Homo sapiens
  siRNA target sequence for LAMC1 (NM_002293.2,2621-2639).
gtgtcctggaggttcaagt

SEQ ID NO: 291379 - DNA, 19 bp, Homo sapiens
  siRNA target sequence for LAMC1 (NM_002293.2,2691-2709).
ggcaccactggtaagagat

SEQ ID NO: 291380 - DNA, 19 bp, Homo sapiens
  siRNA target sequence for LAMC1 (NM_002293.2,2737-2755).
gagaccccctgggtagaaa

SEQ ID NO: 291381 - DNA, 19 bp, Homo sapiens
  siRNA target sequence for LAMC1 (NM_002293.2,2847-2865).
ctgaagtgcatctataaca

SEQ ID NO: 291382 - DNA, 19 bp, Homo sapiens
  siRNA target sequence for LAMC1 (NM_002293.2,2849-2867).
gaagtgcatctataacact

SEQ ID NO: 291383 - DNA, 19 bp, Homo sapiens
  siRNA target sequence for LAMC1 (NM_002293.2,2886-2904).
cggtgcaaagacggatttt

SEQ ID NO: 291384 - DNA, 19 bp, Homo sapiens
  siRNA target sequence for LAMC1 (NM_002293.2,2887-2905).
ggtgcaaagacggattttt

SEQ ID NO: 291385 - DNA, 19 bp, Homo sapiens
  siRNA target sequence for LAMC1 (NM_002293.2,2888-2906).
gtgcaaagacggatttttt

SEQ ID NO: 291386 - DNA, 19 bp, Homo sapiens
  siRNA target sequence for LAMC1 (NM_002293.2,2891-2909).
caaagacggattttttgga

SEQ ID NO: 291387 - DNA, 19 bp, Homo sapiens
  siRNA target sequence for LAMC1 (NM_002293.2,2942-2960).
caaagcctgcaattgcaat

SEQ ID NO: 291388 - DNA, 19 bp, Homo sapiens
  siRNA target sequence for LAMC1 (NM_002293.2,3004-3022).
cggggcagtgtgaatgttt

SEQ ID NO: 291389 - DNA, 19 bp, Homo sapiens
  siRNA target sequence for LAMC1 (NM_002293.2,3055-3073).
gtgaccctggattctacaa

SEQ ID NO: 291390 - DNA, 19 bp, Homo sapiens
  siRNA target sequence for LAMC1 (NM_002293.2,3397-3415).
cttgttaccggctggtaaa

SEQ ID NO: 291391 - DNA, 19 bp, Homo sapiens
  siRNA target sequence for LAMC1 (NM_002293.2,3400-3418).
gttaccggctggtaaagga

SEQ ID NO: 291392 - DNA, 19 bp, Homo sapiens
  siRNA target sequence for LAMC1 (NM_002293.2,3406-3424).
ggctggtaaaggataaggt

SEQ ID NO: 291393 - DNA, 19 bp, Homo sapiens
  siRNA target sequence for LAMC1 (NM_002293.2,3416-3434).
ggataaggttgctgatcat

SEQ ID NO: 291394 - DNA, 19 bp, Homo sapiens
  siRNA target sequence for LAMC1 (NM_002293.2,3417-3435).
gataaggttgctgatcata

SEQ ID NO: 291395 - DNA, 19 bp, Homo sapiens
  siRNA target sequence for LAMC1 (NM_002293.2,3458-3476).
gagtctcatagcaaacctt

SEQ ID NO: 291396 - DNA, 19 bp, Homo sapiens
  siRNA target sequence for LAMC1 (NM_002293.2,3507-3525).
gccttcgaggatagactaa

SEQ ID NO: 291397 - DNA, 19 bp, Homo sapiens
  siRNA target sequence for LAMC1 (NM_002293.2,3508-3526).
ccttcgaggatagactaaa

SEQ ID NO: 291398 - DNA, 19 bp, Homo sapiens
  siRNA target sequence for LAMC1 (NM_002293.2,3512-3530).
cgaggatagactaaaggaa

SEQ ID NO: 291399 - DNA, 19 bp, Homo sapiens
  siRNA target sequence for LAMC1 (NM_002293.2,3566-3584).
ccaggatgtcaaagatgtt

SEQ ID NO: 291400 - DNA, 19 bp, Homo sapiens
  siRNA target sequence for LAMC1 (NM_002293.2,3579-3597).
gatgttgaccagaatttga

SEQ ID NO: 291401 - DNA, 19 bp, Homo sapiens
  siRNA target sequence for LAMC1 (NM_002293.2,3603-3621).
cgcctacagagagtgaata

SEQ ID NO: 291402 - DNA, 19 bp, Homo sapiens
  siRNA target sequence for LAMC1 (NM_002293.2,3604-3622).
gcctacagagagtgaataa

SEQ ID NO: 291403 - DNA, 19 bp, Homo sapiens
  siRNA target sequence for LAMC1 (NM_002293.2,3634-3652).
gccaaattagccgtttaca

SEQ ID NO: 291404 - DNA, 19 bp, Homo sapiens
  siRNA target sequence for LAMC1 (NM_002293.2,3653-3671).
gaatatccggaataccatt

SEQ ID NO: 291405 - DNA, 19 bp, Homo sapiens
  siRNA target sequence for LAMC1 (NM_002293.2,3700-3718).
cgcgtgcccatgtagagaa

SEQ ID NO: 291406 - DNA, 19 bp, Homo sapiens
  siRNA target sequence for LAMC1 (NM_002293.2,3721-3739).
cagagcggttgattgaaat

SEQ ID NO: 291407 - DNA, 19 bp, Homo sapiens
  siRNA target sequence for LAMC1 (NM_002293.2,3789-3807).
gtcactcagccagaatcta

SEQ ID NO: 291408 - DNA, 19 bp, Homo sapiens
  siRNA target sequence for LAMC1 (NM_002293.2,3805-3823).
ctacaggggacccaaacaa

SEQ ID NO: 291409 - DNA, 19 bp, Homo sapiens
  siRNA target sequence for LAMC1 (NM_002293.2,3854-3872).
gcttgctgaacgtcataaa

SEQ ID NO: 291410 - DNA, 19 bp, Homo sapiens
  siRNA target sequence for LAMC1 (NM_002293.2,3919-3937).
cgtcaactgaggcatacaa

SEQ ID NO: 291411 - DNA, 19 bp, Homo sapiens
  siRNA target sequence for LAMC1 (NM_002293.2,3973-3991).
cagcatttgagattgaaga

SEQ ID NO: 291412 - DNA, 19 bp, Homo sapiens
  siRNA target sequence for LAMC1 (NM_002293.2,4008-4026).
gaacaagcgaagaacatct

SEQ ID NO: 291413 - DNA, 19 bp, Homo sapiens
  siRNA target sequence for LAMC1 (NM_002293.2,4085-4103).
caaagctgtggagatctat

SEQ ID NO: 291414 - DNA, 19 bp, Homo sapiens
  siRNA target sequence for LAMC1 (NM_002293.2,4152-4170).
gaagcaaataacataaaga

SEQ ID NO: 291415 - DNA, 19 bp, Homo sapiens
  siRNA target sequence for LAMC1 (NM_002293.2,4191-4209).
caactgattgaccagaaat

SEQ ID NO: 291416 - DNA, 19 bp, Homo sapiens
  siRNA target sequence for LAMC1 (NM_002293.2,4194-4212).
ctgattgaccagaaattaa

SEQ ID NO: 291417 - DNA, 19 bp, Homo sapiens
  siRNA target sequence for LAMC1 (NM_002293.2,4224-4242).
gacctcagagaagatatga

SEQ ID NO: 291418 - DNA, 19 bp, Homo sapiens
  siRNA target sequence for LAMC1 (NM_002293.2,4364-4382).
gggacgggataccttacaa

SEQ ID NO: 291419 - DNA, 19 bp, Homo sapiens
  siRNA target sequence for LAMC1 (NM_002293.2,4366-4384).
gacgggataccttacaaga

SEQ ID NO: 291420 - DNA, 19 bp, Homo sapiens
  siRNA target sequence for LAMC1 (NM_002293.2,4403-4421).
caacctgaaagattttgat

SEQ ID NO: 291421 - DNA, 19 bp, Homo sapiens
  siRNA target sequence for LAMC1 (NM_002293.2,4670-4688).
ggataatgaggtgaacaat

SEQ ID NO: 291422 - DNA, 19 bp, Homo sapiens
  siRNA target sequence for LAMC1 (NM_002293.2,4671-4689).
gataatgaggtgaacaata

SEQ ID NO: 291423 - DNA, 19 bp, Homo sapiens
  siRNA target sequence for LAMC1 (NM_002293.2,4831-4849).
ctagcctcctcagcattat

SEQ ID NO: 291424 - DNA, 19 bp, Homo sapiens
  siRNA target sequence for LAMC1 (NM_002293.2,4834-4852).
gcctcctcagcattattaa

SEQ ID NO: 291425 - DNA, 19 bp, Homo sapiens
  siRNA target sequence for LAMC1 (NM_002293.2,4887-4905).
gtggacctgaataagctaa

SEQ ID NO: 291426 - DNA, 19 bp, Homo sapiens
  siRNA target sequence for LAMC1 (NM_002293.2,4952-4970).
cagcgatcttgataggaaa

SEQ ID NO: 291427 - DNA, 19 bp, Homo sapiens
  siRNA target sequence for LAMC1 (NM_002293.2,4956-4974).
gatcttgataggaaagtgt

SEQ ID NO: 291428 - DNA, 19 bp, Homo sapiens
  siRNA target sequence for LAMC1 (NM_002293.2,5029-5047).
gagatatcgaggagatcat

SEQ ID NO: 291429 - DNA, 19 bp, Homo sapiens
  siRNA target sequence for LAMC1 (NM_002293.2,5088-5106).
ccatctggctgcttcaaca

SEQ ID NO: 291430 - DNA, 19 bp, Homo sapiens
  siRNA target sequence for LAMC1 (NM_002293.2,5102-5120).
caacaccccgtccattgaa

SEQ ID NO: 291431 - DNA, 19 bp, Homo sapiens
  siRNA target sequence for LAMC3 (NM_006059.2,466-484).
gcctagggaaggcttatga

SEQ ID NO: 291432 - DNA, 19 bp, Homo sapiens
  siRNA target sequence for LAMC3 (NM_006059.2,468-486).
ctagggaaggcttatgaga

SEQ ID NO: 291433 - DNA, 19 bp, Homo sapiens
  siRNA target sequence for LAMC3 (NM_006059.2,826-844).
cgtttggggacgacatctt

SEQ ID NO: 291434 - DNA, 19 bp, Homo sapiens
  siRNA target sequence for LAMC3 (NM_006059.2,857-875).
ggtgctccagtcctactat

SEQ ID NO: 291435 - DNA, 19 bp, Homo sapiens
  siRNA target sequence for LAMC3 (NM_006059.2,860-878).
gctccagtcctactattat

SEQ ID NO: 291436 - DNA, 19 bp, Homo sapiens
  siRNA target sequence for LAMC3 (NM_006059.2,1441-1459).
gcccctgcaaagagaatgt

SEQ ID NO: 291437 - DNA, 19 bp, Homo sapiens
  siRNA target sequence for LAMC3 (NM_006059.2,2666-2684).
ccctcgacccgcagacaaa

SEQ ID NO: 291438 - DNA, 19 bp, Homo sapiens
  siRNA target sequence for LAMC3 (NM_006059.2,2667-2685).
cctcgacccgcagacaaat

SEQ ID NO: 291439 - DNA, 19 bp, Homo sapiens
  siRNA target sequence for LAMC3 (NM_006059.2,2670-2688).
cgacccgcagacaaatgca

SEQ ID NO: 291440 - DNA, 19 bp, Homo sapiens
  siRNA target sequence for LAMC3 (NM_006059.2,2671-2689).
gacccgcagacaaatgcat

SEQ ID NO: 291441 - DNA, 19 bp, Homo sapiens
  siRNA target sequence for LAMC3 (NM_006059.2,2944-2962).
ggtgccagctgggtttctt

SEQ ID NO: 291442 - DNA, 19 bp, Homo sapiens
  siRNA target sequence for LAMC3 (NM_006059.2,3060-3078).
ggcttcgagggctacaaat

SEQ ID NO: 291443 - DNA, 19 bp, Homo sapiens
  siRNA target sequence for LAMC3 (NM_006059.2,3062-3080).
cttcgagggctacaaatgt

SEQ ID NO: 291444 - DNA, 19 bp, Homo sapiens
  siRNA target sequence for LAMC3 (NM_006059.2,3084-3102).
cgctgccacgacaacttct

SEQ ID NO: 291445 - DNA, 19 bp, Homo sapiens
  siRNA target sequence for LAMC3 (NM_006059.2,3236-3254).
ctggggaccactagacatt

SEQ ID NO: 291446 - DNA, 19 bp, Homo sapiens
  siRNA target sequence for LAMC3 (NM_006059.2,3238-3256).
ggggaccactagacattct

SEQ ID NO: 291447 - DNA, 19 bp, Homo sapiens
  siRNA target sequence for LAMC3 (NM_006059.2,3534-3552).
cccagtcagccgaccaaat

SEQ ID NO: 291448 - DNA, 19 bp, Homo sapiens
  siRNA target sequence for LAMC3 (NM_006059.2,3994-4012).
cgacgctacggcaaacaga

SEQ ID NO: 291449 - DNA, 19 bp, Homo sapiens
  siRNA target sequence for LAMC3 (NM_006059.2,3995-4013).
gacgctacggcaaacagaa

SEQ ID NO: 291450 - DNA, 19 bp, Homo sapiens
  siRNA target sequence for LCMR1 (NM_153450.1,28-46).
gaatttcacggcactgttt

SEQ ID NO: 291451 - DNA, 19 bp, Homo sapiens
  siRNA target sequence for LCMR1 (NM_153450.1,255-273).
caggcagcacgaatctgat

SEQ ID NO: 291452 - DNA, 19 bp, Homo sapiens
  siRNA target sequence for LCMR1 (NM_153450.1,290-308).
gaacaagcctataataaat

SEQ ID NO: 291453 - DNA, 19 bp, Homo sapiens
  siRNA target sequence for LCMR1 (NM_153450.1,399-417).
gcctccgctctctcattga

SEQ ID NO: 291454 - DNA, 19 bp, Homo sapiens
  siRNA target sequence for LCMR1 (NM_153450.1,401-419).
ctccgctctctcattgaga

SEQ ID NO: 291455 - DNA, 19 bp, Homo sapiens
  siRNA target sequence for LCMR1 (NM_153450.1,416-434).
gagaagccccctattctca

SEQ ID NO: 291456 - DNA, 19 bp, Homo sapiens
  siRNA target sequence for LCMR1 (NM_153450.1,435-453).
gtagctctttcaatcctat

SEQ ID NO: 291457 - DNA, 19 bp, Homo sapiens
  siRNA target sequence for LCMR1 (NM_153450.1,506-524).
cagtgtcgtctgatgcata

SEQ ID NO: 291458 - DNA, 19 bp, Homo sapiens
  siRNA target sequence for LCMR1 (NM_153450.1,508-526).
gtgtcgtctgatgcatatt

SEQ ID NO: 291459 - DNA, 19 bp, Homo sapiens
  siRNA target sequence for LMNB1 (NM_005573.2,737-755).
gaaggaatctgatcttaat

SEQ ID NO: 291460 - DNA, 19 bp, Homo sapiens
  siRNA target sequence for LMNB1 (NM_005573.2,764-782).
gatcaagcttcgagaatat

SEQ ID NO: 291461 - DNA, 19 bp, Homo sapiens
  siRNA target sequence for LMNB1 (NM_005573.2,783-801).
gaagcagcactgaattcga

SEQ ID NO: 291462 - DNA, 19 bp, Homo sapiens
  siRNA target sequence for LMNB1 (NM_005573.2,917-935).
gttagcagatgaaacttta

SEQ ID NO: 291463 - DNA, 19 bp, Homo sapiens
  siRNA target sequence for LMNB1 (NM_005573.2,921-939).
gcagatgaaactttactta

SEQ ID NO: 291464 - DNA, 19 bp, Homo sapiens
  siRNA target sequence for LMNB1 (NM_005573.2,942-960).
gtagatttggagaatcgtt

SEQ ID NO: 291465 - DNA, 19 bp, Homo sapiens
  siRNA target sequence for LMNB1 (NM_005573.2,986-1004).
gtttcgcaaaagcatgtat

SEQ ID NO: 291466 - DNA, 19 bp, Homo sapiens
  siRNA target sequence for LMNB1 (NM_005573.2,1058-1076).
ggattctgggcgtcaaatt

SEQ ID NO: 291467 - DNA, 19 bp, Homo sapiens
  siRNA target sequence for LMNB1 (NM_005573.2,1063-1081).
ctgggcgtcaaattgagta

SEQ ID NO: 291468 - DNA, 19 bp, Homo sapiens
  siRNA target sequence for LMNB1 (NM_005573.2,1066-1084).
ggcgtcaaattgagtatga

SEQ ID NO: 291469 - DNA, 19 bp, Homo sapiens
  siRNA target sequence for LMNB1 (NM_005573.2,1096-1114).
cgcaagcccttcatgagat

SEQ ID NO: 291470 - DNA, 19 bp, Homo sapiens
  siRNA target sequence for LMNB1 (NM_005573.2,1131-1149).
gcccaagtgaggctgtata

SEQ ID NO: 291471 - DNA, 19 bp, Homo sapiens
  siRNA target sequence for LMNB1 (NM_005573.2,1166-1184).
gacttaccatgccaaactt

SEQ ID NO: 291472 - DNA, 19 bp, Homo sapiens
  siRNA target sequence for LMNB1 (NM_005573.2,1168-1186).
cttaccatgccaaacttga

SEQ ID NO: 291473 - DNA, 19 bp, Homo sapiens
  siRNA target sequence for LMNB1 (NM_005573.2,1172-1190).
ccatgccaaacttgagaat

SEQ ID NO: 291474 - DNA, 19 bp, Homo sapiens
  siRNA target sequence for LMNB1 (NM_005573.2,1307-1325).
gtctagagcatgtttggaa

SEQ ID NO: 291475 - DNA, 19 bp, Homo sapiens
  siRNA target sequence for LMNB1 (NM_005573.2,1407-1425).
gcggaaataagggatcaaa

SEQ ID NO: 291476 - DNA, 19 bp, Homo sapiens
  siRNA target sequence for LMNB1 (NM_005573.2,1408-1426).
cggaaataagggatcaaat

SEQ ID NO: 291477 - DNA, 19 bp, Homo sapiens
  siRNA target sequence for LMNB1 (NM_005573.2,1587-1605).
cgtagtgtacgtacaacta

SEQ ID NO: 291478 - DNA, 19 bp, Homo sapiens
  siRNA target sequence for LMNB1 (NM_005573.2,1635-1653).
gaatcagaggcgagtagta

SEQ ID NO: 291479 - DNA, 19 bp, Homo sapiens
  siRNA target sequence for LMNB1 (NM_005573.2,1641-1659).
gaggcgagtagtagtgtta

SEQ ID NO: 291480 - DNA, 19 bp, Homo sapiens
  siRNA target sequence for LMNB1 (NM_005573.2,1645-1663).
cgagtagtagtgttagcat

SEQ ID NO: 291481 - DNA, 19 bp, Homo sapiens
  siRNA target sequence for LMNB1 (NM_005573.2,1696-1714).
gcatcgaagaaattgatgt

SEQ ID NO: 291482 - DNA, 19 bp, Homo sapiens
  siRNA target sequence for LMNB1 (NM_005573.2,1697-1715).
catcgaagaaattgatgtt

SEQ ID NO: 291483 - DNA, 19 bp, Homo sapiens
  siRNA target sequence for LMNB1 (NM_005573.2,1795-1813).
gagacacatcagtcagtta

SEQ ID NO: 291484 - DNA, 19 bp, Homo sapiens
  siRNA target sequence for LMNB1 (NM_005573.2,1797-1815).
gacacatcagtcagttata

SEQ ID NO: 291485 - DNA, 19 bp, Homo sapiens
  siRNA target sequence for LMNB1 (NM_005573.2,1799-1817).
cacatcagtcagttataaa

SEQ ID NO: 291486 - DNA, 19 bp, Homo sapiens
  siRNA target sequence for LMNB1 (NM_005573.2,1801-1819).
catcagtcagttataaata

SEQ ID NO: 291487 - DNA, 19 bp, Homo sapiens
  siRNA target sequence for LMNB1 (NM_005573.2,1842-1860).
gcaggccagactgttacaa

SEQ ID NO: 291488 - DNA, 19 bp, Homo sapiens
  siRNA target sequence for LMNB1 (NM_005573.2,1930-1948).
ggggcactggcgaagatgt

SEQ ID NO: 291489 - DNA, 19 bp, Homo sapiens
  siRNA target sequence for LMNB1 (NM_005573.2,1933-1951).
gcactggcgaagatgtgaa

SEQ ID NO: 291490 - DNA, 19 bp, Homo sapiens
  siRNA target sequence for LMNB1 (NM_005573.2,1938-1956).
ggcgaagatgtgaaggtta

SEQ ID NO: 291491 - DNA, 19 bp, Homo sapiens
  siRNA target sequence for LMNB1 (NM_005573.2,1944-1962).
gatgtgaaggttatattga

SEQ ID NO: 291492 - DNA, 19 bp, Homo sapiens
  siRNA target sequence for LMNB1 (NM_005573.2,1979-1997).
ggaggttgctcaaagaagt

SEQ ID NO: 291493 - DNA, 19 bp, Homo sapiens
  siRNA target sequence for LMNB1 (NM_005573.2,1980-1998).
gaggttgctcaaagaagta

SEQ ID NO: 291494 - DNA, 19 bp, Homo sapiens
  siRNA target sequence for LOC126147 (NM_145807.1,751-769).
cgacgctgccggttcaact

SEQ ID NO: 291495 - DNA, 19 bp, Homo sapiens
  siRNA target sequence for LOC126147 (NM_145807.1,880-898).
cctagccagcctatcttca

SEQ ID NO: 291496 - DNA, 19 bp, Homo sapiens
  siRNA target sequence for LOC126147 (NM_145807.1,972-990).
gcagtgcacctgcaagtta

SEQ ID NO: 291497 - DNA, 19 bp, Homo sapiens
  siRNA target sequence for LOC126147 (NM_145807.1,1120-1138).
gaccctcagtgtcaaaact

SEQ ID NO: 291498 - DNA, 19 bp, Homo sapiens
  siRNA target sequence for LOC126147 (NM_145807.1,1132-1150).
caaaactactgcaatatgt

SEQ ID NO: 291499 - DNA, 19 bp, Homo sapiens
  siRNA target sequence for LOC126147 (NM_145807.1,1264-1282).
cgcgtgctggccgtttaca

SEQ ID NO: 291500 - DNA, 19 bp, Homo sapiens
  siRNA target sequence for LOC126147 (NM_145807.1,1265-1283).
gcgtgctggccgtttacaa

SEQ ID NO: 291501 - DNA, 19 bp, Homo sapiens
  siRNA target sequence for MAP1A (NM_002373.3,389-407).
gagttctccgagtatgtct

SEQ ID NO: 291502 - DNA, 19 bp, Homo sapiens
  siRNA target sequence for MAP1A (NM_002373.3,429-447).
ccccatttgacctactaga

SEQ ID NO: 291503 - DNA, 19 bp, Homo sapiens
  siRNA target sequence for MAP1A (NM_002373.3,575-593).
cgcaagtcctgtttttgga

SEQ ID NO: 291504 - DNA, 19 bp, Homo sapiens
  siRNA target sequence for MAP1A (NM_002373.3,576-594).
gcaagtcctgtttttggaa

SEQ ID NO: 291505 - DNA, 19 bp, Homo sapiens
  siRNA target sequence for MAP1A (NM_002373.3,605-623).
cacttggaccgcattgact

SEQ ID NO: 291506 - DNA, 19 bp, Homo sapiens
  siRNA target sequence for MAP1A (NM_002373.3,716-734).
cagggctctagcagttaca

SEQ ID NO: 291507 - DNA, 19 bp, Homo sapiens
  siRNA target sequence for MAP1A (NM_002373.3,823-841).
gaaagccaagcgtagcatt

SEQ ID NO: 291508 - DNA, 19 bp, Homo sapiens
  siRNA target sequence for MAP1A (NM_002373.3,886-904).
ccaggctgagcctctatat

SEQ ID NO: 291509 - DNA, 19 bp, Homo sapiens
  siRNA target sequence for MAP1A (NM_002373.3,889-907).
ggctgagcctctatatcgt

SEQ ID NO: 291510 - DNA, 19 bp, Homo sapiens
  siRNA target sequence for MAP1A (NM_002373.3,1097-1115).
ccctaccttacctctatca

SEQ ID NO: 291511 - DNA, 19 bp, Homo sapiens
  siRNA target sequence for MAP1A (NM_002373.3,1099-1117).
ctaccttacctctatcact

SEQ ID NO: 291512 - DNA, 19 bp, Homo sapiens
  siRNA target sequence for MAP1A (NM_002373.3,1550-1568).
cgaaagctgatcaaagaca

SEQ ID NO: 291513 - DNA, 19 bp, Homo sapiens
  siRNA target sequence for MAP1A (NM_002373.3,1582-1600).
gcaccttaaagaaaagata

SEQ ID NO: 291514 - DNA, 19 bp, Homo sapiens
  siRNA target sequence for MAP1A (NM_002373.3,1733-1751).
cctgagctcaagaagattt

SEQ ID NO: 291515 - DNA, 19 bp, Homo sapiens
  siRNA target sequence for MAP1A (NM_002373.3,1784-1802).
gtacgtaagaccctctata

SEQ ID NO: 291516 - DNA, 19 bp, Homo sapiens
  siRNA target sequence for MAP1A (NM_002373.3,2003-2021).
gctttgctggctgaacaaa

SEQ ID NO: 291517 - DNA, 19 bp, Homo sapiens
  siRNA target sequence for MAP1A (NM_002373.3,2359-2377).
ggaggtacacccttcagat

SEQ ID NO: 291518 - DNA, 19 bp, Homo sapiens
  siRNA target sequence for MAP1A (NM_002373.3,2383-2401).
ggaagaggacgcgacaaaa

SEQ ID NO: 291519 - DNA, 19 bp, Homo sapiens
  siRNA target sequence for MAP1A (NM_002373.3,2397-2415).
caaaagctgagggttttta

SEQ ID NO: 291520 - DNA, 19 bp, Homo sapiens
  siRNA target sequence for MAP1A (NM_002373.3,2429-2447).
caggaacccttgaaggtaa

SEQ ID NO: 291521 - DNA, 19 bp, Homo sapiens
  siRNA target sequence for MAP1A (NM_002373.3,2512-2530).
ggagacctcgttattccta

SEQ ID NO: 291522 - DNA, 19 bp, Homo sapiens
  siRNA target sequence for MAP1A (NM_002373.3,2556-2574).
ccactgagcatgtctctta

SEQ ID NO: 291523 - DNA, 19 bp, Homo sapiens
  siRNA target sequence for MAP1A (NM_002373.3,2663-2681).
gctccacccagatttcata

SEQ ID NO: 291524 - DNA, 19 bp, Homo sapiens
  siRNA target sequence for MAP1A (NM_002373.3,2669-2687).
cccagatttcatacaagta

SEQ ID NO: 291525 - DNA, 19 bp, Homo sapiens
  siRNA target sequence for MAP1A (NM_002373.3,2671-2689).
cagatttcatacaagtaca

SEQ ID NO: 291526 - DNA, 19 bp, Homo sapiens
  siRNA target sequence for MAP1A (NM_002373.3,2798-2816).
ctcacctaccccactaaca

SEQ ID NO: 291527 - DNA, 19 bp, Homo sapiens
  siRNA target sequence for MAP1A (NM_002373.3,2802-2820).
cctaccccactaacatagt

SEQ ID NO: 291528 - DNA, 19 bp, Homo sapiens
  siRNA target sequence for MAP1A (NM_002373.3,2854-2872).
ctcggccacttcaatcact

SEQ ID NO: 291529 - DNA, 19 bp, Homo sapiens
  siRNA target sequence for MAP1A (NM_002373.3,2873-2891).
gagtgtgacaaactttctt

SEQ ID NO: 291530 - DNA, 19 bp, Homo sapiens
  siRNA target sequence for MAP1A (NM_002373.3,2998-3016).
cccttcctcccgtactgaa

SEQ ID NO: 291531 - DNA, 19 bp, Homo sapiens
  siRNA target sequence for MAP1A (NM_002373.3,3021-3039).
cgcagggcttggactatgt

SEQ ID NO: 291532 - DNA, 19 bp, Homo sapiens
  siRNA target sequence for MAP1A (NM_002373.3,3427-3445).
gtctgagccccaagacttt

SEQ ID NO: 291533 - DNA, 19 bp, Homo sapiens
  siRNA target sequence for MAP1A (NM_002373.3,3429-3447).
ctgagccccaagactttca

SEQ ID NO: 291534 - DNA, 19 bp, Homo sapiens
  siRNA target sequence for MAP1A (NM_002373.3,3619-3637).
gcttacaggctgtaccatt

SEQ ID NO: 291535 - DNA, 19 bp, Homo sapiens
  siRNA target sequence for MAP1A (NM_002373.3,3624-3642).
caggctgtaccattcaact

SEQ ID NO: 291536 - DNA, 19 bp, Homo sapiens
  siRNA target sequence for MAP1A (NM_002373.3,3627-3645).
gctgtaccattcaactgtt

SEQ ID NO: 291537 - DNA, 19 bp, Homo sapiens
  siRNA target sequence for MAP1A (NM_002373.3,3643-3661).
gttgccagcacaggataaa

SEQ ID NO: 291538 - DNA, 19 bp, Homo sapiens
  siRNA target sequence for MAP1A (NM_002373.3,3647-3665).
ccagcacaggataaagcaa

SEQ ID NO: 291539 - DNA, 19 bp, Homo sapiens
  siRNA target sequence for MAP1A (NM_002373.3,3651-3669).
cacaggataaagcaatagt

SEQ ID NO: 291540 - DNA, 19 bp, Homo sapiens
  siRNA target sequence for MAP1A (NM_002373.3,3653-3671).
caggataaagcaatagtct

SEQ ID NO: 291541 - DNA, 19 bp, Homo sapiens
  siRNA target sequence for MAP1A (NM_002373.3,3730-3748).
cggaggtttgaggacttta

SEQ ID NO: 291542 - DNA, 19 bp, Homo sapiens
  siRNA target sequence for MAP1A (NM_002373.3,3903-3921).
cagaacagtacctacacaa

SEQ ID NO: 291543 - DNA, 19 bp, Homo sapiens
  siRNA target sequence for MAP1A (NM_002373.3,4046-4064).
ctccagtttggggaactaa

SEQ ID NO: 291544 - DNA, 19 bp, Homo sapiens
  siRNA target sequence for MAP1A (NM_002373.3,4051-4069).
gtttggggaactaaacctt

SEQ ID NO: 291545 - DNA, 19 bp, Homo sapiens
  siRNA target sequence for MAP1A (NM_002373.3,4297-4315).
gatcacaagccctgatgaa

SEQ ID NO: 291546 - DNA, 19 bp, Homo sapiens
  siRNA target sequence for MAP1A (NM_002373.3,4305-4323).
gccctgatgaacacattct

SEQ ID NO: 291547 - DNA, 19 bp, Homo sapiens
  siRNA target sequence for MAP1A (NM_002373.3,4344-4362).
ccaagagtcctgagtcttt

SEQ ID NO: 291548 - DNA, 19 bp, Homo sapiens
  siRNA target sequence for MAP1A (NM_002373.3,4508-4526).
gtggtagagccgaaggata

SEQ ID NO: 291549 - DNA, 19 bp, Homo sapiens
  siRNA target sequence for MAP1A (NM_002373.3,4523-4541).
gatacagccatctatcaga

SEQ ID NO: 291550 - DNA, 19 bp, Homo sapiens
  siRNA target sequence for MAP1A (NM_002373.3,4544-4562).
gatgaggctctgcatgtaa

SEQ ID NO: 291551 - DNA, 19 bp, Homo sapiens
  siRNA target sequence for MAP1A (NM_002373.3,4551-4569).
ctctgcatgtaaagaatga

SEQ ID NO: 291552 - DNA, 19 bp, Homo sapiens
  siRNA target sequence for MAP1A (NM_002373.3,4608-4626).
gcagagacttagagcaaaa

SEQ ID NO: 291553 - DNA, 19 bp, Homo sapiens
  siRNA target sequence for MAP1A (NM_002373.3,4609-4627).
cagagacttagagcaaaaa

SEQ ID NO: 291554 - DNA, 19 bp, Homo sapiens
  siRNA target sequence for MAP1A (NM_002373.3,4880-4898).
gtcagaagtgttgaacata

SEQ ID NO: 291555 - DNA, 19 bp, Homo sapiens
  siRNA target sequence for MAP1A (NM_002373.3,4910-4928).
gacacggtcgctgaaatga

SEQ ID NO: 291556 - DNA, 19 bp, Homo sapiens
  siRNA target sequence for MAP1A (NM_002373.3,5121-5139).
gcctagtgcaggaggataa

SEQ ID NO: 291557 - DNA, 19 bp, Homo sapiens
  siRNA target sequence for MAP1A (NM_002373.3,5122-5140).
cctagtgcaggaggataaa

SEQ ID NO: 291558 - DNA, 19 bp, Homo sapiens
  siRNA target sequence for MAP1A (NM_002373.3,5123-5141).
ctagtgcaggaggataaaa

SEQ ID NO: 291559 - DNA, 19 bp, Homo sapiens
  siRNA target sequence for MAP1A (NM_002373.3,5135-5153).
gataaaaccaggaaaccaa

SEQ ID NO: 291560 - DNA, 19 bp, Homo sapiens
  siRNA target sequence for MAP1A (NM_002373.3,5442-5460).
ccttggaacaggacacata

SEQ ID NO: 291561 - DNA, 19 bp, Homo sapiens
  siRNA target sequence for MAP1A (NM_002373.3,5683-5701).
gcgctggcttgctgaatca

SEQ ID NO: 291562 - DNA, 19 bp, Homo sapiens
  siRNA target sequence for MAP1A (NM_002373.3,5846-5864).
ctcatgccacacatgaaga

SEQ ID NO: 291563 - DNA, 19 bp, Homo sapiens
  siRNA target sequence for MAP1A (NM_002373.3,6006-6024).
ggggcacagccgagtatga

SEQ ID NO: 291564 - DNA, 19 bp, Homo sapiens
  siRNA target sequence for MAP1A (NM_002373.3,6008-6026).
ggcacagccgagtatgaca

SEQ ID NO: 291565 - DNA, 19 bp, Homo sapiens
  siRNA target sequence for MAP1A (NM_002373.3,6157-6175).
ctcacacagctcaaaggta

SEQ ID NO: 291566 - DNA, 19 bp, Homo sapiens
  siRNA target sequence for MAP1A (NM_002373.3,6173-6191).
gtaccagaggccagcaaaa

SEQ ID NO: 291567 - DNA, 19 bp, Homo sapiens
  siRNA target sequence for MAP1A (NM_002373.3,6597-6615).
cccctcttaatggtaacat

SEQ ID NO: 291568 - DNA, 19 bp, Homo sapiens
  siRNA target sequence for MAP1A (NM_002373.3,6783-6801).
cattatggccagaaactga

SEQ ID NO: 291569 - DNA, 19 bp, Homo sapiens
  siRNA target sequence for MAP1A (NM_002373.3,7003-7021).
cagaacccggcatgatgaa

SEQ ID NO: 291570 - DNA, 19 bp, Homo sapiens
  siRNA target sequence for MAP1A (NM_002373.3,7005-7023).
gaacccggcatgatgaata

SEQ ID NO: 291571 - DNA, 19 bp, Homo sapiens
  siRNA target sequence for MAP1A (NM_002373.3,7008-7026).
cccggcatgatgaatacct

SEQ ID NO: 291572 - DNA, 19 bp, Homo sapiens
  siRNA target sequence for MAP1A (NM_002373.3,7159-7177).
ggctaccacgcctgtgatt

SEQ ID NO: 291573 - DNA, 19 bp, Homo sapiens
  siRNA target sequence for MAP1A (NM_002373.3,7160-7178).
gctaccacgcctgtgattt

SEQ ID NO: 291574 - DNA, 19 bp, Homo sapiens
  siRNA target sequence for MAP1A (NM_002373.3,7492-7510).
cccagccaaggctgaaaat

SEQ ID NO: 291575 - DNA, 19 bp, Homo sapiens
  siRNA target sequence for MAP1A (NM_002373.3,7744-7762).
gcccccatccatagatgat

SEQ ID NO: 291576 - DNA, 19 bp, Homo sapiens
  siRNA target sequence for MAP1A (NM_002373.3,7745-7763).
cccccatccatagatgata

SEQ ID NO: 291577 - DNA, 19 bp, Homo sapiens
  siRNA target sequence for MAP1A (NM_002373.3,7896-7914).
cctcacagtcagattctga

SEQ ID NO: 291578 - DNA, 19 bp, Homo sapiens
  siRNA target sequence for MAP1A (NM_002373.3,8257-8275).
ctcacccacccctggtaaa

SEQ ID NO: 291579 - DNA, 19 bp, Homo sapiens
  siRNA target sequence for MAP1A (NM_002373.3,8431-8449).
ctctggtgcccctgtatat

SEQ ID NO: 291580 - DNA, 19 bp, Homo sapiens
  siRNA target sequence for MAP1A (NM_002373.3,8433-8451).
ctggtgcccctgtatatgt

SEQ ID NO: 291581 - DNA, 19 bp, Homo sapiens
  siRNA target sequence for MAP1A (NM_002373.3,8458-8476).
cgcctacatcccgaatcat

SEQ ID NO: 291582 - DNA, 19 bp, Homo sapiens
  siRNA target sequence for MAP1A (NM_002373.3,8459-8477).
gcctacatcccgaatcatt

SEQ ID NO: 291583 - DNA, 19 bp, Homo sapiens
  siRNA target sequence for MAP1A (NM_002373.3,8672-8690).
cgtgagtggtaccaacaaa

SEQ ID NO: 291584 - DNA, 19 bp, Homo sapiens
  siRNA target sequence for MAP1A (NM_002373.3,8677-8695).
gtggtaccaacaaactcat

SEQ ID NO: 291585 - DNA, 19 bp, Homo sapiens
  siRNA target sequence for MAP1A (NM_002373.3,8768-8786).
cctgcctgcaagattgagt

SEQ ID NO: 291586 - DNA, 19 bp, Homo sapiens
  siRNA target sequence for MAP1B (NM_005909.2,419-437).
gggacacaaacctgattga

SEQ ID NO: 291587 - DNA, 19 bp, Homo sapiens
  siRNA target sequence for MAP1B (NM_005909.2,425-443).
caaacctgattgaatgcaa

SEQ ID NO: 291588 - DNA, 19 bp, Homo sapiens
  siRNA target sequence for MAP1B (NM_005909.2,475-493).
cgacactctgcaagattct

SEQ ID NO: 291589 - DNA, 19 bp, Homo sapiens
  siRNA target sequence for MAP1B (NM_005909.2,528-546).
ccgaagtgacgttttagaa

SEQ ID NO: 291590 - DNA, 19 bp, Homo sapiens
  siRNA target sequence for MAP1B (NM_005909.2,555-573).
cctgatcaacccttctgat

SEQ ID NO: 291591 - DNA, 19 bp, Homo sapiens
  siRNA target sequence for MAP1B (NM_005909.2,584-602).
gcaccgaggtgcgcttaat

SEQ ID NO: 291592 - DNA, 19 bp, Homo sapiens
  siRNA target sequence for MAP1B (NM_005909.2,587-605).
ccgaggtgcgcttaatgat

SEQ ID NO: 291593 - DNA, 19 bp, Homo sapiens
  siRNA target sequence for MAP1B (NM_005909.2,589-607).
gaggtgcgcttaatgatca

SEQ ID NO: 291594 - DNA, 19 bp, Homo sapiens
  siRNA target sequence for MAP1B (NM_005909.2,639-657).
gaccgggcagtgctttgaa

SEQ ID NO: 291595 - DNA, 19 bp, Homo sapiens
  siRNA target sequence for MAP1B (NM_005909.2,642-660).
cgggcagtgctttgaaaat

SEQ ID NO: 291596 - DNA, 19 bp, Homo sapiens
  siRNA target sequence for MAP1B (NM_005909.2,730-748).
gagatcggggagttactaa

SEQ ID NO: 291597 - DNA, 19 bp, Homo sapiens
  siRNA target sequence for MAP1B (NM_005909.2,763-781).
gccaacaaagccagcttaa

SEQ ID NO: 291598 - DNA, 19 bp, Homo sapiens
  siRNA target sequence for MAP1B (NM_005909.2,799-817).
gaaggggactggaagaact

SEQ ID NO: 291599 - DNA, 19 bp, Homo sapiens
  siRNA target sequence for MAP1B (NM_005909.2,819-837).
caatcttgacagacacaat

SEQ ID NO: 291600 - DNA, 19 bp, Homo sapiens
  siRNA target sequence for MAP1B (NM_005909.2,862-880).
ctcaattcagcttctatct

SEQ ID NO: 291601 - DNA, 19 bp, Homo sapiens
  siRNA target sequence for MAP1B (NM_005909.2,902-920).
ctgagtttaccgagtatct

SEQ ID NO: 291602 - DNA, 19 bp, Homo sapiens
  siRNA target sequence for MAP1B (NM_005909.2,904-922).
gagtttaccgagtatctct

SEQ ID NO: 291603 - DNA, 19 bp, Homo sapiens
  siRNA target sequence for MAP1B (NM_005909.2,912-930).
cgagtatctctcagaatca

SEQ ID NO: 291604 - DNA, 19 bp, Homo sapiens
  siRNA target sequence for MAP1B (NM_005909.2,941-959).
catctccctttgacatctt

SEQ ID NO: 291605 - DNA, 19 bp, Homo sapiens
  siRNA target sequence for MAP1B (NM_005909.2,968-986).
ccacatcgggtggatttct

SEQ ID NO: 291606 - DNA, 19 bp, Homo sapiens
  siRNA target sequence for MAP1B (NM_005909.2,971-989).
catcgggtggatttctgaa

SEQ ID NO: 291607 - DNA, 19 bp, Homo sapiens
  siRNA target sequence for MAP1B (NM_005909.2,995-1013).
ccaagccctgctgttatat

SEQ ID NO: 291608 - DNA, 19 bp, Homo sapiens
  siRNA target sequence for MAP1B (NM_005909.2,996-1014).
caagccctgctgttatatt

SEQ ID NO: 291609 - DNA, 19 bp, Homo sapiens
  siRNA target sequence for MAP1B (NM_005909.2,1029-1047).
gggcgattctgccttgttt

SEQ ID NO: 291610 - DNA, 19 bp, Homo sapiens
  siRNA target sequence for MAP1B (NM_005909.2,1058-1076).
gtttcaatatgctcatcaa

SEQ ID NO: 291611 - DNA, 19 bp, Homo sapiens
  siRNA target sequence for MAP1B (NM_005909.2,1107-1125).
gaagctcatccgacactta

SEQ ID NO: 291612 - DNA, 19 bp, Homo sapiens
  siRNA target sequence for MAP1B (NM_005909.2,1165-1183).
gacaatttgcctggaataa

SEQ ID NO: 291613 - DNA, 19 bp, Homo sapiens
  siRNA target sequence for MAP1B (NM_005909.2,1233-1251).
gggctccaccacaaatagt

SEQ ID NO: 291614 - DNA, 19 bp, Homo sapiens
  siRNA target sequence for MAP1B (NM_005909.2,1235-1253).
gctccaccacaaatagtga

SEQ ID NO: 291615 - DNA, 19 bp, Homo sapiens
  siRNA target sequence for MAP1B (NM_005909.2,1266-1284).
cctcatctcccctgactta

SEQ ID NO: 291616 - DNA, 19 bp, Homo sapiens
  siRNA target sequence for MAP1B (NM_005909.2,1275-1293).
ccctgacttaggagttgta

SEQ ID NO: 291617 - DNA, 19 bp, Homo sapiens
  siRNA target sequence for MAP1B (NM_005909.2,1325-1343).
cagagccaaacatcaagat

SEQ ID NO: 291618 - DNA, 19 bp, Homo sapiens
  siRNA target sequence for MAP1B (NM_005909.2,1373-1391).
ctctccagtacctaaacaa

SEQ ID NO: 291619 - DNA, 19 bp, Homo sapiens
  siRNA target sequence for MAP1B (NM_005909.2,1469-1487).
gagtaggtaaacttgagat

SEQ ID NO: 291620 - DNA, 19 bp, Homo sapiens
  siRNA target sequence for MAP1B (NM_005909.2,1485-1503).
gatgtatgtgcttaatcca

SEQ ID NO: 291621 - DNA, 19 bp, Homo sapiens
  siRNA target sequence for MAP1B (NM_005909.2,1597-1615).
gtagatctcccgatttcct

SEQ ID NO: 291622 - DNA, 19 bp, Homo sapiens
  siRNA target sequence for MAP1B (NM_005909.2,1605-1623).
cccgatttcctacttaact

SEQ ID NO: 291623 - DNA, 19 bp, Homo sapiens
  siRNA target sequence for MAP1B (NM_005909.2,1627-1645).
gtctcatctttgattgtgt

SEQ ID NO: 291624 - DNA, 19 bp, Homo sapiens
  siRNA target sequence for MAP1B (NM_005909.2,1734-1752).
gctcaaacatctagacttt

SEQ ID NO: 291625 - DNA, 19 bp, Homo sapiens
  siRNA target sequence for MAP1B (NM_005909.2,1836-1854).
ggctgatagccgagaaagt

SEQ ID NO: 291626 - DNA, 19 bp, Homo sapiens
  siRNA target sequence for MAP1B (NM_005909.2,1889-1907).
ccgtgcgcaaggagtcaaa

SEQ ID NO: 291627 - DNA, 19 bp, Homo sapiens
  siRNA target sequence for MAP1B (NM_005909.2,1890-1908).
cgtgcgcaaggagtcaaaa

SEQ ID NO: 291628 - DNA, 19 bp, Homo sapiens
  siRNA target sequence for MAP1B (NM_005909.2,1893-1911).
gcgcaaggagtcaaaagaa

SEQ ID NO: 291629 - DNA, 19 bp, Homo sapiens
  siRNA target sequence for MAP1B (NM_005909.2,1916-1934).
cccctgaggtcacaaaagt

SEQ ID NO: 291630 - DNA, 19 bp, Homo sapiens
  siRNA target sequence for MAP1B (NM_005909.2,2215-2233).
gacaaaacacctatcaaga

SEQ ID NO: 291631 - DNA, 19 bp, Homo sapiens
  siRNA target sequence for MAP1B (NM_005909.2,2428-2446).
cctaaagacgcaaagaaat

SEQ ID NO: 291632 - DNA, 19 bp, Homo sapiens
  siRNA target sequence for MAP1B (NM_005909.2,2436-2454).
cgcaaagaaatcatctact

SEQ ID NO: 291633 - DNA, 19 bp, Homo sapiens
  siRNA target sequence for MAP1B (NM_005909.2,2698-2716).
gagaggtcccttatgtcat

SEQ ID NO: 291634 - DNA, 19 bp, Homo sapiens
  siRNA target sequence for MAP1B (NM_005909.2,2895-2913).
ccctgatgagggaatcact

SEQ ID NO: 291635 - DNA, 19 bp, Homo sapiens
  siRNA target sequence for MAP1B (NM_005909.2,2896-2914).
cctgatgagggaatcacta

SEQ ID NO: 291636 - DNA, 19 bp, Homo sapiens
  siRNA target sequence for MAP1B (NM_005909.2,2980-2998).
gtagacgacattgaaaaat

SEQ ID NO: 291637 - DNA, 19 bp, Homo sapiens
  siRNA target sequence for MAP1B (NM_005909.2,3015-3033).
cggttttgaagaatcttca

SEQ ID NO: 291638 - DNA, 19 bp, Homo sapiens
  siRNA target sequence for MAP1B (NM_005909.2,3032-3050).
cagagactggagactatga

SEQ ID NO: 291639 - DNA, 19 bp, Homo sapiens
  siRNA target sequence for MAP1B (NM_005909.2,3095-3113).
gggaggaacacgtatgtgt

SEQ ID NO: 291640 - DNA, 19 bp, Homo sapiens
  siRNA target sequence for MAP1B (NM_005909.2,3319-3337).
gaatatgagccggaaaaaa

SEQ ID NO: 291641 - DNA, 19 bp, Homo sapiens
  siRNA target sequence for MAP1B (NM_005909.2,3456-3474).
ccgagaacctgcatcttca

SEQ ID NO: 291642 - DNA, 19 bp, Homo sapiens
  siRNA target sequence for MAP1B (NM_005909.2,3457-3475).
cgagaacctgcatcttcaa

SEQ ID NO: 291643 - DNA, 19 bp, Homo sapiens
  siRNA target sequence for MAP1B (NM_005909.2,3458-3476).
gagaacctgcatcttcaat

SEQ ID NO: 291644 - DNA, 19 bp, Homo sapiens
  siRNA target sequence for MAP1B (NM_005909.2,3510-3528).
cgaggccaccgcttctgat

SEQ ID NO: 291645 - DNA, 19 bp, Homo sapiens
  siRNA target sequence for MAP1B (NM_005909.2,3546-3564).
ccagcctgaggaattcact

SEQ ID NO: 291646 - DNA, 19 bp, Homo sapiens
  siRNA target sequence for MAP1B (NM_005909.2,3574-3592).
ggctacactcagtctacta

SEQ ID NO: 291647 - DNA, 19 bp, Homo sapiens
  siRNA target sequence for MAP1B (NM_005909.2,3575-3593).
gctacactcagtctactat

SEQ ID NO: 291648 - DNA, 19 bp, Homo sapiens
  siRNA target sequence for MAP1B (NM_005909.2,3576-3594).
ctacactcagtctactatt

SEQ ID NO: 291649 - DNA, 19 bp, Homo sapiens
  siRNA target sequence for MAP1B (NM_005909.2,3581-3599).
ctcagtctactattgagat

SEQ ID NO: 291650 - DNA, 19 bp, Homo sapiens
  siRNA target sequence for MAP1B (NM_005909.2,3683-3701).
ccccttctcaggaattcgt

SEQ ID NO: 291651 - DNA, 19 bp, Homo sapiens
  siRNA target sequence for MAP1B (NM_005909.2,3684-3702).
cccttctcaggaattcgta

SEQ ID NO: 291652 - DNA, 19 bp, Homo sapiens
  siRNA target sequence for MAP1B (NM_005909.2,3685-3703).
ccttctcaggaattcgtaa

SEQ ID NO: 291653 - DNA, 19 bp, Homo sapiens
  siRNA target sequence for MAP1B (NM_005909.2,3686-3704).
cttctcaggaattcgtaaa

SEQ ID NO: 291654 - DNA, 19 bp, Homo sapiens
  siRNA target sequence for MAP1B (NM_005909.2,3689-3707).
ctcaggaattcgtaaatat

SEQ ID NO: 291655 - DNA, 19 bp, Homo sapiens
  siRNA target sequence for MAP1B (NM_005909.2,3691-3709).
caggaattcgtaaatatca

SEQ ID NO: 291656 - DNA, 19 bp, Homo sapiens
  siRNA target sequence for MAP1B (NM_005909.2,3708-3726).
caccaaatatgaatcttca

SEQ ID NO: 291657 - DNA, 19 bp, Homo sapiens
  siRNA target sequence for MAP1B (NM_005909.2,3729-3747).
gtattctcaggaatactct

SEQ ID NO: 291658 - DNA, 19 bp, Homo sapiens
  siRNA target sequence for MAP1B (NM_005909.2,3767-3785).
cgctcaacggattttctga

SEQ ID NO: 291659 - DNA, 19 bp, Homo sapiens
  siRNA target sequence for MAP1B (NM_005909.2,3876-3894).
cagcagatctgctttacgt

SEQ ID NO: 291660 - DNA, 19 bp, Homo sapiens
  siRNA target sequence for MAP1B (NM_005909.2,4012-4030).
ccatcacccttagaaaaga

SEQ ID NO: 291661 - DNA, 19 bp, Homo sapiens
  siRNA target sequence for MAP1B (NM_005909.2,4040-4058).
gtgaacgtagtgtgaactt

SEQ ID NO: 291662 - DNA, 19 bp, Homo sapiens
  siRNA target sequence for MAP1B (NM_005909.2,4063-4081).
ctgacgcccaatgagatta

SEQ ID NO: 291663 - DNA, 19 bp, Homo sapiens
  siRNA target sequence for MAP1B (NM_005909.2,4067-4085).
cgcccaatgagattaaagt

SEQ ID NO: 291664 - DNA, 19 bp, Homo sapiens
  siRNA target sequence for MAP1B (NM_005909.2,4125-4143).
gacccaagaagtagttgaa

SEQ ID NO: 291665 - DNA, 19 bp, Homo sapiens
  siRNA target sequence for MAP1B (NM_005909.2,4214-4232).
ctggtcacacaccttacta

SEQ ID NO: 291666 - DNA, 19 bp, Homo sapiens
  siRNA target sequence for MAP1B (NM_005909.2,4240-4258).
cctactgacgagaaatcca

SEQ ID NO: 291667 - DNA, 19 bp, Homo sapiens
  siRNA target sequence for MAP1B (NM_005909.2,4297-4315).
gttccagtgagttttgaat

SEQ ID NO: 291668 - DNA, 19 bp, Homo sapiens
  siRNA target sequence for MAP1B (NM_005909.2,4436-4454).
gatccgagtctgcttatga

SEQ ID NO: 291669 - DNA, 19 bp, Homo sapiens
  siRNA target sequence for MAP1B (NM_005909.2,4440-4458).
cgagtctgcttatgaaagt

SEQ ID NO: 291670 - DNA, 19 bp, Homo sapiens
  siRNA target sequence for MAP1B (NM_005909.2,4441-4459).
gagtctgcttatgaaagtt

SEQ ID NO: 291671 - DNA, 19 bp, Homo sapiens
  siRNA target sequence for MAP1B (NM_005909.2,4447-4465).
gcttatgaaagttttctaa

SEQ ID NO: 291672 - DNA, 19 bp, Homo sapiens
  siRNA target sequence for MAP1B (NM_005909.2,4568-4586).
cttctactagtctttacca

SEQ ID NO: 291673 - DNA, 19 bp, Homo sapiens
  siRNA target sequence for MAP1B (NM_005909.2,4574-4592).
ctagtctttaccaagacaa

SEQ ID NO: 291674 - DNA, 19 bp, Homo sapiens
  siRNA target sequence for MAP1B (NM_005909.2,4614-4632).
ctttgcaccaataaaagaa

SEQ ID NO: 291675 - DNA, 19 bp, Homo sapiens
  siRNA target sequence for MAP1B (NM_005909.2,4633-4651).
gactttggccaagaaaaga

SEQ ID NO: 291676 - DNA, 19 bp, Homo sapiens
  siRNA target sequence for MAP1B (NM_005909.2,4768-4786).
gacactaagatgtccattt

SEQ ID NO: 291677 - DNA, 19 bp, Homo sapiens
  siRNA target sequence for MAP1B (NM_005909.2,4772-4790).
ctaagatgtccatttctga

SEQ ID NO: 291678 - DNA, 19 bp, Homo sapiens
  siRNA target sequence for MAP1B (NM_005909.2,4962-4980).
cccacattccacagaagta

SEQ ID NO: 291679 - DNA, 19 bp, Homo sapiens
  siRNA target sequence for MAP1B (NM_005909.2,5019-5037).
cacattccaggaaacagaa

SEQ ID NO: 291680 - DNA, 19 bp, Homo sapiens
  siRNA target sequence for MAP1B (NM_005909.2,5060-5078).
gcccaagaccgatgtcaat

SEQ ID NO: 291681 - DNA, 19 bp, Homo sapiens
  siRNA target sequence for MAP1B (NM_005909.2,5061-5079).
cccaagaccgatgtcaatt

SEQ ID NO: 291682 - DNA, 19 bp, Homo sapiens
  siRNA target sequence for MAP1B (NM_005909.2,5114-5132).
ccaggacacccgttcaaga

SEQ ID NO: 291683 - DNA, 19 bp, Homo sapiens
  siRNA target sequence for MAP1B (NM_005909.2,5115-5133).
caggacacccgttcaagat

SEQ ID NO: 291684 - DNA, 19 bp, Homo sapiens
  siRNA target sequence for MAP1B (NM_005909.2,5117-5135).
ggacacccgttcaagatca

SEQ ID NO: 291685 - DNA, 19 bp, Homo sapiens
  siRNA target sequence for MAP1B (NM_005909.2,5143-5161).
gaacagtcctcaatgtcta

SEQ ID NO: 291686 - DNA, 19 bp, Homo sapiens
  siRNA target sequence for MAP1B (NM_005909.2,5183-5201).
ctgagcaatcccttgctat

SEQ ID NO: 291687 - DNA, 19 bp, Homo sapiens
  siRNA target sequence for MAP1B (NM_005909.2,5240-5258).
gtgcaggcgtgcttcacat

SEQ ID NO: 291688 - DNA, 19 bp, Homo sapiens
  siRNA target sequence for MAP1B (NM_005909.2,5347-5365).
ccgtcctacacccaagata

SEQ ID NO: 291689 - DNA, 19 bp, Homo sapiens
  siRNA target sequence for MAP1B (NM_005909.2,5351-5369).
cctacacccaagataatga

SEQ ID NO: 291690 - DNA, 19 bp, Homo sapiens
  siRNA target sequence for MAP1B (NM_005909.2,5352-5370).
ctacacccaagataatgat

SEQ ID NO: 291691 - DNA, 19 bp, Homo sapiens
  siRNA target sequence for MAP1B (NM_005909.2,5355-5373).
cacccaagataatgatctt

SEQ ID NO: 291692 - DNA, 19 bp, Homo sapiens
  siRNA target sequence for MAP1B (NM_005909.2,5489-5507).
ccagagatatgtccttata

SEQ ID NO: 291693 - DNA, 19 bp, Homo sapiens
  siRNA target sequence for MAP1B (NM_005909.2,5490-5508).
cagagatatgtccttatat

SEQ ID NO: 291694 - DNA, 19 bp, Homo sapiens
  siRNA target sequence for MAP1B (NM_005909.2,5522-5540).
ctgaaaaagtgcaaagtct

SEQ ID NO: 291695 - DNA, 19 bp, Homo sapiens
  siRNA target sequence for MAP1B (NM_005909.2,5548-5566).
gagaagctctctccaaaat

SEQ ID NO: 291696 - DNA, 19 bp, Homo sapiens
  siRNA target sequence for MAP1B (NM_005909.2,5593-5611).
gagtcctctcctttatatt

SEQ ID NO: 291697 - DNA, 19 bp, Homo sapiens
  siRNA target sequence for MAP1B (NM_005909.2,5672-5690).
cctcttctccaccaataga

SEQ ID NO: 291698 - DNA, 19 bp, Homo sapiens
  siRNA target sequence for MAP1B (NM_005909.2,5715-5733).
cttccgtgcctcagtgtta

SEQ ID NO: 291699 - DNA, 19 bp, Homo sapiens
  siRNA target sequence for MAP1B (NM_005909.2,5720-5738).
gtgcctcagtgttattcga

SEQ ID NO: 291700 - DNA, 19 bp, Homo sapiens
  siRNA target sequence for MAP1B (NM_005909.2,5722-5740).
gcctcagtgttattcgata

SEQ ID NO: 291701 - DNA, 19 bp, Homo sapiens
  siRNA target sequence for MAP1B (NM_005909.2,5726-5744).
cagtgttattcgatacaat

SEQ ID NO: 291702 - DNA, 19 bp, Homo sapiens
  siRNA target sequence for MAP1B (NM_005909.2,5730-5748).
gttattcgatacaatgcaa

SEQ ID NO: 291703 - DNA, 19 bp, Homo sapiens
  siRNA target sequence for MAP1B (NM_005909.2,5751-5769).
ccatctagccttgaataga

SEQ ID NO: 291704 - DNA, 19 bp, Homo sapiens
  siRNA target sequence for MAP1B (NM_005909.2,5808-5826).
gaagacacctggtgacttt

SEQ ID NO: 291705 - DNA, 19 bp, Homo sapiens
  siRNA target sequence for MAP1B (NM_005909.2,5813-5831).
cacctggtgactttagcta

SEQ ID NO: 291706 - DNA, 19 bp, Homo sapiens
  siRNA target sequence for MAP1B (NM_005909.2,5946-5964).
gatagagagaaccacaaaa

SEQ ID NO: 291707 - DNA, 19 bp, Homo sapiens
  siRNA target sequence for MAP1B (NM_005909.2,6022-6040).
gaagatggtgactattcct

SEQ ID NO: 291708 - DNA, 19 bp, Homo sapiens
  siRNA target sequence for MAP1B (NM_005909.2,6073-6091).
gaagagggtgggtactcat

SEQ ID NO: 291709 - DNA, 19 bp, Homo sapiens
  siRNA target sequence for MAP1B (NM_005909.2,6079-6097).
ggtgggtactcatatgaca

SEQ ID NO: 291710 - DNA, 19 bp, Homo sapiens
  siRNA target sequence for MAP1B (NM_005909.2,6080-6098).
gtgggtactcatatgacat

SEQ ID NO: 291711 - DNA, 19 bp, Homo sapiens
  siRNA target sequence for MAP1B (NM_005909.2,6082-6100).
gggtactcatatgacataa

SEQ ID NO: 291712 - DNA, 19 bp, Homo sapiens
  siRNA target sequence for MAP1B (NM_005909.2,6084-6102).
gtactcatatgacataagt

SEQ ID NO: 291713 - DNA, 19 bp, Homo sapiens
  siRNA target sequence for MAP1B (NM_005909.2,6129-6147).
gagtggttacagctatgaa

SEQ ID NO: 291714 - DNA, 19 bp, Homo sapiens
  siRNA target sequence for MAP1B (NM_005909.2,6131-6149).
gtggttacagctatgaaaa

SEQ ID NO: 291715 - DNA, 19 bp, Homo sapiens
  siRNA target sequence for MAP1B (NM_005909.2,6228-6246).
ggaccccagctactcttat

SEQ ID NO: 291716 - DNA, 19 bp, Homo sapiens
  siRNA target sequence for MAP1B (NM_005909.2,6231-6249).
ccccagctactcttatgaa

SEQ ID NO: 291717 - DNA, 19 bp, Homo sapiens
  siRNA target sequence for MAP1B (NM_005909.2,6232-6250).
cccagctactcttatgaaa

SEQ ID NO: 291718 - DNA, 19 bp, Homo sapiens
  siRNA target sequence for MAP1B (NM_005909.2,6273-6291).
ccctgagtctgaaggttat

SEQ ID NO: 291719 - DNA, 19 bp, Homo sapiens
  siRNA target sequence for MAP1B (NM_005909.2,6277-6295).
gagtctgaaggttattcct

SEQ ID NO: 291720 - DNA, 19 bp, Homo sapiens
  siRNA target sequence for MAP1B (NM_005909.2,6279-6297).
gtctgaaggttattcctat

SEQ ID NO: 291721 - DNA, 19 bp, Homo sapiens
  siRNA target sequence for MAP1B (NM_005909.2,6293-6311).
cctatgagacatctacaaa

SEQ ID NO: 291722 - DNA, 19 bp, Homo sapiens
  siRNA target sequence for MAP1B (NM_005909.2,6325-6343).
cctgatacttccacatact

SEQ ID NO: 291723 - DNA, 19 bp, Homo sapiens
  siRNA target sequence for MAP1B (NM_005909.2,6376-6394).
cctcaggcatccacatatt

SEQ ID NO: 291724 - DNA, 19 bp, Homo sapiens
  siRNA target sequence for MAP1B (NM_005909.2,6449-6467).
cccgtcaggatgtcgattt

SEQ ID NO: 291725 - DNA, 19 bp, Homo sapiens
  siRNA target sequence for MAP1B (NM_005909.2,6450-6468).
ccgtcaggatgtcgattta

SEQ ID NO: 291726 - DNA, 19 bp, Homo sapiens
  siRNA target sequence for MAP1B (NM_005909.2,6451-6469).
cgtcaggatgtcgatttat

SEQ ID NO: 291727 - DNA, 19 bp, Homo sapiens
  siRNA target sequence for MAP1B (NM_005909.2,6546-6564).
gtggtttgccagtgaagaa

SEQ ID NO: 291728 - DNA, 19 bp, Homo sapiens
  siRNA target sequence for MAP1B (NM_005909.2,6580-6598).
gaaaagcccctcactcaat

SEQ ID NO: 291729 - DNA, 19 bp, Homo sapiens
  siRNA target sequence for MAP1B (NM_005909.2,6636-6654).
gggccgacagtgtgatgaa

SEQ ID NO: 291730 - DNA, 19 bp, Homo sapiens
  siRNA target sequence for MAP1B (NM_005909.2,6637-6655).
ggccgacagtgtgatgaaa

SEQ ID NO: 291731 - DNA, 19 bp, Homo sapiens
  siRNA target sequence for MAP1B (NM_005909.2,6740-6758).
cggccgatgccaatatcga

SEQ ID NO: 291732 - DNA, 19 bp, Homo sapiens
  siRNA target sequence for MAP1B (NM_005909.2,7023-7041).
cttggcagcttcaccaaaa

SEQ ID NO: 291733 - DNA, 19 bp, Homo sapiens
  siRNA target sequence for MAP1B (NM_005909.2,7026-7044).
ggcagcttcaccaaaacca

SEQ ID NO: 291734 - DNA, 19 bp, Homo sapiens
  siRNA target sequence for MAP1B (NM_005909.2,7042-7060).
ccagcgggcttgaaagaat

SEQ ID NO: 291735 - DNA, 19 bp, Homo sapiens
  siRNA target sequence for MAP1B (NM_005909.2,7053-7071).
gaaagaatcctcggataaa

SEQ ID NO: 291736 - DNA, 19 bp, Homo sapiens
  siRNA target sequence for MAP1B (NM_005909.2,7057-7075).
gaatcctcggataaagtgt

SEQ ID NO: 291737 - DNA, 19 bp, Homo sapiens
  siRNA target sequence for MAP1B (NM_005909.2,7079-7097).
gggtggcttctcctaagaa

SEQ ID NO: 291738 - DNA, 19 bp, Homo sapiens
  siRNA target sequence for MAP1B (NM_005909.2,7312-7330).
cctaaccacagcaatagta

SEQ ID NO: 291739 - DNA, 19 bp, Homo sapiens
  siRNA target sequence for MAP1B (NM_005909.2,7317-7335).
ccacagcaatagtaagaat

SEQ ID NO: 291740 - DNA, 19 bp, Homo sapiens
  siRNA target sequence for MAP1B (NM_005909.2,7320-7338).
cagcaatagtaagaatgtt

SEQ ID NO: 291741 - DNA, 19 bp, Homo sapiens
  siRNA target sequence for MAP1B (NM_005909.2,7421-7439).
ctgtcctggacgctttgtt

SEQ ID NO: 291742 - DNA, 19 bp, Homo sapiens
  siRNA target sequence for MAP1B (NM_005909.2,7540-7558).
cagcaagatctcaacatca

SEQ ID NO: 291743 - DNA, 19 bp, Homo sapiens
  siRNA target sequence for MAP1B (NM_005909.2,7580-7598).
cagtggttatgcaagatga

SEQ ID NO: 291744 - DNA, 19 bp, Homo sapiens
  siRNA target sequence for MAP1B (NM_005909.2,7607-7625).
ctgcatgcaagattgaact

SEQ ID NO: 291745 - DNA, 19 bp, Homo sapiens
  siRNA target sequence for MAP4 (NM_002375.2,281-299).
gttggaaaaacagactata

SEQ ID NO: 291746 - DNA, 19 bp, Homo sapiens
  siRNA target sequence for MAP4 (NM_002375.2,327-345).
ccgggaactcagagtcaaa

SEQ ID NO: 291747 - DNA, 19 bp, Homo sapiens
  siRNA target sequence for MAP4 (NM_002375.2,349-367).
gaaaccgtgctcagaaact

SEQ ID NO: 291748 - DNA, 19 bp, Homo sapiens
  siRNA target sequence for MAP4 (NM_002375.2,377-395).
gaagatactccatcttcta

SEQ ID NO: 291749 - DNA, 19 bp, Homo sapiens
  siRNA target sequence for MAP4 (NM_002375.2,428-446).
gtagaagggagcgatacta

SEQ ID NO: 291750 - DNA, 19 bp, Homo sapiens
  siRNA target sequence for MAP4 (NM_002375.2,461-479).
gaattccttgaagagaaaa

SEQ ID NO: 291751 - DNA, 19 bp, Homo sapiens
  siRNA target sequence for MAP4 (NM_002375.2,514-532).
gccagaagataccaacttt

SEQ ID NO: 291752 - DNA, 19 bp, Homo sapiens
  siRNA target sequence for MAP4 (NM_002375.2,566-584).
cagactgatccctttaaga

SEQ ID NO: 291753 - DNA, 19 bp, Homo sapiens
  siRNA target sequence for MAP4 (NM_002375.2,570-588).
ctgatccctttaagatgta

SEQ ID NO: 291754 - DNA, 19 bp, Homo sapiens
  siRNA target sequence for MAP4 (NM_002375.2,625-643).
cagtgcgacagctgatact

SEQ ID NO: 291755 - DNA, 19 bp, Homo sapiens
  siRNA target sequence for MAP4 (NM_002375.2,855-873).
ggccaccagcacaagcatt

SEQ ID NO: 291756 - DNA, 19 bp, Homo sapiens
  siRNA target sequence for MAP4 (NM_002375.2,900-918).
ctgacatggcaccatctaa

SEQ ID NO: 291757 - DNA, 19 bp, Homo sapiens
  siRNA target sequence for MAP4 (NM_002375.2,970-988).
ggtggcattggctaaagat

SEQ ID NO: 291758 - DNA, 19 bp, Homo sapiens
  siRNA target sequence for MAP4 (NM_002375.2,971-989).
gtggcattggctaaagata

SEQ ID NO: 291759 - DNA, 19 bp, Homo sapiens
  siRNA target sequence for MAP4 (NM_002375.2,996-1014).
cacccaccaaattagatgt

SEQ ID NO: 291760 - DNA, 19 bp, Homo sapiens
  siRNA target sequence for MAP4 (NM_002375.2,1036-1054).
gccatccatggaatcagat

SEQ ID NO: 291761 - DNA, 19 bp, Homo sapiens
  siRNA target sequence for MAP4 (NM_002375.2,1050-1068).
cagatatggccctagtcaa

SEQ ID NO: 291762 - DNA, 19 bp, Homo sapiens
  siRNA target sequence for MAP4 (NM_002375.2,1115-1133).
gtcagatggcccacagaaa

SEQ ID NO: 291763 - DNA, 19 bp, Homo sapiens
  siRNA target sequence for MAP4 (NM_002375.2,1157-1175).
gtggtactgcccacagaaa

SEQ ID NO: 291764 - DNA, 19 bp, Homo sapiens
  siRNA target sequence for MAP4 (NM_002375.2,1159-1177).
ggtactgcccacagaaaca

SEQ ID NO: 291765 - DNA, 19 bp, Homo sapiens
  siRNA target sequence for MAP4 (NM_002375.2,1377-1395).
ccaaggatttggtattact

SEQ ID NO: 291766 - DNA, 19 bp, Homo sapiens
  siRNA target sequence for MAP4 (NM_002375.2,1387-1405).
ggtattactctcagaaata

SEQ ID NO: 291767 - DNA, 19 bp, Homo sapiens
  siRNA target sequence for MAP4 (NM_002375.2,1412-1430).
gcacaggctaatgacatta

SEQ ID NO: 291768 - DNA, 19 bp, Homo sapiens
  siRNA target sequence for MAP4 (NM_002375.2,1413-1431).
cacaggctaatgacattat

SEQ ID NO: 291769 - DNA, 19 bp, Homo sapiens
  siRNA target sequence for MAP4 (NM_002375.2,1415-1433).
caggctaatgacattatat

SEQ ID NO: 291770 - DNA, 19 bp, Homo sapiens
  siRNA target sequence for MAP4 (NM_002375.2,1518-1536).
cggaaaccaacgtgatctt

SEQ ID NO: 291771 - DNA, 19 bp, Homo sapiens
  siRNA target sequence for MAP4 (NM_002375.2,1520-1538).
gaaaccaacgtgatcttga

SEQ ID NO: 291772 - DNA, 19 bp, Homo sapiens
  siRNA target sequence for MAP4 (NM_002375.2,1543-1561).
ggataaagcactaccttta

SEQ ID NO: 291773 - DNA, 19 bp, Homo sapiens
  siRNA target sequence for MAP4 (NM_002375.2,1631-1649).
gtggctccgtccacagtaa

SEQ ID NO: 291774 - DNA, 19 bp, Homo sapiens
  siRNA target sequence for MAP4 (NM_002375.2,1672-1690).
catgtctccactatcagaa

SEQ ID NO: 291775 - DNA, 19 bp, Homo sapiens
  siRNA target sequence for MAP4 (NM_002375.2,1742-1760).
gttctcatcaagaacgtat

SEQ ID NO: 291776 - DNA, 19 bp, Homo sapiens
  siRNA target sequence for MAP4 (NM_002375.2,1906-1924).
ggcaacaccagttccaatt

SEQ ID NO: 291777 - DNA, 19 bp, Homo sapiens
  siRNA target sequence for MAP4 (NM_002375.2,1907-1925).
gcaacaccagttccaatta

SEQ ID NO: 291778 - DNA, 19 bp, Homo sapiens
  siRNA target sequence for MAP4 (NM_002375.2,1908-1926).
caacaccagttccaattaa

SEQ ID NO: 291779 - DNA, 19 bp, Homo sapiens
  siRNA target sequence for MAP4 (NM_002375.2,1913-1931).
ccagttccaattaaagaca

SEQ ID NO: 291780 - DNA, 19 bp, Homo sapiens
  siRNA target sequence for MAP4 (NM_002375.2,2007-2025).
ctgcacctactttcatgat

SEQ ID NO: 291781 - DNA, 19 bp, Homo sapiens
  siRNA target sequence for MAP4 (NM_002375.2,2009-2027).
gcacctactttcatgattt

SEQ ID NO: 291782 - DNA, 19 bp, Homo sapiens
  siRNA target sequence for MAP4 (NM_002375.2,2350-2368).
caccattggtgggttgaat

SEQ ID NO: 291783 - DNA, 19 bp, Homo sapiens
  siRNA target sequence for MAP4 (NM_002375.2,2352-2370).
ccattggtgggttgaataa

SEQ ID NO: 291784 - DNA, 19 bp, Homo sapiens
  siRNA target sequence for MAP4 (NM_002375.2,2565-2583).
gcactcagactgttgcaaa

SEQ ID NO: 291785 - DNA, 19 bp, Homo sapiens
  siRNA target sequence for MAP4 (NM_002375.2,2656-2674).
gcccactgccattaagact

SEQ ID NO: 291786 - DNA, 19 bp, Homo sapiens
  siRNA target sequence for MAP4 (NM_002375.2,2850-2868).
cctccacaactcctttcat

SEQ ID NO: 291787 - DNA, 19 bp, Homo sapiens
  siRNA target sequence for MAP4 (NM_002375.2,2851-2869).
ctccacaactcctttcata

SEQ ID NO: 291788 - DNA, 19 bp, Homo sapiens
  siRNA target sequence for MAP4 (NM_002375.2,3054-3072).
cccgaaagcctgaatctaa

SEQ ID NO: 291789 - DNA, 19 bp, Homo sapiens
  siRNA target sequence for MAP4 (NM_002375.2,3055-3073).
ccgaaagcctgaatctaat

SEQ ID NO: 291790 - DNA, 19 bp, Homo sapiens
  siRNA target sequence for MAP4 (NM_002375.2,3187-3205).
caaggacaatattaagcat

SEQ ID NO: 291791 - DNA, 19 bp, Homo sapiens
  siRNA target sequence for MAP4 (NM_002375.2,3273-3291).
gtgggtctaaggctaacat

SEQ ID NO: 291792 - DNA, 19 bp, Homo sapiens
  siRNA target sequence for MAP4 (NM_002375.2,3276-3294).
ggtctaaggctaacatcaa

SEQ ID NO: 291793 - DNA, 19 bp, Homo sapiens
  siRNA target sequence for MAP4 (NM_002375.2,3330-3348).
gtcagaagttgaacttcaa

SEQ ID NO: 291794 - DNA, 19 bp, Homo sapiens
  siRNA target sequence for MAP4 (NM_002375.2,3367-3385).
ggtgggatccctcgataat

SEQ ID NO: 291795 - DNA, 19 bp, Homo sapiens
  siRNA target sequence for MAP7 (NM_003980.2,168-186).
cacccgacagctacaaagt

SEQ ID NO: 291796 - DNA, 19 bp, Homo sapiens
  siRNA target sequence for MAP7 (NM_003980.2,177-195).
gctacaaagtgcaagataa

SEQ ID NO: 291797 - DNA, 19 bp, Homo sapiens
  siRNA target sequence for MAP7 (NM_003980.2,224-242).
gcaatttcaggacaaaata

SEQ ID NO: 291798 - DNA, 19 bp, Homo sapiens
  siRNA target sequence for MAP7 (NM_003980.2,274-292).
gcctgtgttacgtgttgat

SEQ ID NO: 291799 - DNA, 19 bp, Homo sapiens
  siRNA target sequence for MAP7 (NM_003980.2,527-545).
gtacggcgcacaatggaaa

SEQ ID NO: 291800 - DNA, 19 bp, Homo sapiens
  siRNA target sequence for MAP7 (NM_003980.2,629-647).
ccagacaggcggtcagttt

SEQ ID NO: 291801 - DNA, 19 bp, Homo sapiens
  siRNA target sequence for MAP7 (NM_003980.2,671-689).
gttgatcccgtcattagca

SEQ ID NO: 291802 - DNA, 19 bp, Homo sapiens
  siRNA target sequence for MAP7 (NM_003980.2,762-780).
gggagagcagcgttgttaa

SEQ ID NO: 291803 - DNA, 19 bp, Homo sapiens
  siRNA target sequence for MAP7 (NM_003980.2,766-784).
gagcagcgttgttaacaga

SEQ ID NO: 291804 - DNA, 19 bp, Homo sapiens
  siRNA target sequence for MAP7 (NM_003980.2,884-902).
gctgcacactctagaaatt

SEQ ID NO: 291805 - DNA, 19 bp, Homo sapiens
  siRNA target sequence for MAP7 (NM_003980.2,887-905).
gcacactctagaaattcga

SEQ ID NO: 291806 - DNA, 19 bp, Homo sapiens
  siRNA target sequence for MAP7 (NM_003980.2,888-906).
cacactctagaaattcgat

SEQ ID NO: 291807 - DNA, 19 bp, Homo sapiens
  siRNA target sequence for MAP7 (NM_003980.2,948-966).
ctcgcaggaggatcattca

SEQ ID NO: 291808 - DNA, 19 bp, Homo sapiens
  siRNA target sequence for MAP7 (NM_003980.2,965-983).
catggcacagcgagctata

SEQ ID NO: 291809 - DNA, 19 bp, Homo sapiens
  siRNA target sequence for MAP7 (NM_003980.2,968-986).
ggcacagcgagctataaaa

SEQ ID NO: 291810 - DNA, 19 bp, Homo sapiens
  siRNA target sequence for MAP7 (NM_003980.2,969-987).
gcacagcgagctataaaaa

SEQ ID NO: 291811 - DNA, 19 bp, Homo sapiens
  siRNA target sequence for MAP7 (NM_003980.2,970-988).
cacagcgagctataaaaaa

SEQ ID NO: 291812 - DNA, 19 bp, Homo sapiens
  siRNA target sequence for MAP7 (NM_003980.2,1027-1045).
cacccgaagggctgtatct

SEQ ID NO: 291813 - DNA, 19 bp, Homo sapiens
  siRNA target sequence for MAP7 (NM_003980.2,1035-1053).
gggctgtatctccatctaa

SEQ ID NO: 291814 - DNA, 19 bp, Homo sapiens
  siRNA target sequence for MAP7 (NM_003980.2,1036-1054).
ggctgtatctccatctaat

SEQ ID NO: 291815 - DNA, 19 bp, Homo sapiens
  siRNA target sequence for MAP7 (NM_003980.2,1147-1165).
gccacccggctcagtcaaa

SEQ ID NO: 291816 - DNA, 19 bp, Homo sapiens
  siRNA target sequence for MAP7 (NM_003980.2,1277-1295).
gccaatgagccctcactaa

SEQ ID NO: 291817 - DNA, 19 bp, Homo sapiens
  siRNA target sequence for MAP7 (NM_003980.2,1847-1865).
caggaacgagagaagcatt

SEQ ID NO: 291818 - DNA, 19 bp, Homo sapiens
  siRNA target sequence for MAP7 (NM_003980.2,1904-1922).
cgacttgaggagattatga

SEQ ID NO: 291819 - DNA, 19 bp, Homo sapiens
  siRNA target sequence for MAP7 (NM_003980.2,1905-1923).
gacttgaggagattatgaa

SEQ ID NO: 291820 - DNA, 19 bp, Homo sapiens
  siRNA target sequence for MAP7 (NM_003980.2,2017-2035).
gtctgcacttccatgtaca

SEQ ID NO: 291821 - DNA, 19 bp, Homo sapiens
  siRNA target sequence for MAP7 (NM_003980.2,2113-2131).
gagcactcccgatttggaa

SEQ ID NO: 291822 - DNA, 19 bp, Homo sapiens
  siRNA target sequence for MAP7 (NM_003980.2,2115-2133).
gcactcccgatttggaaaa

SEQ ID NO: 291823 - DNA, 19 bp, Homo sapiens
  siRNA target sequence for MAP7 (NM_003980.2,2116-2134).
cactcccgatttggaaaaa

SEQ ID NO: 291824 - DNA, 19 bp, Homo sapiens
  siRNA target sequence for MAP7 (NM_003980.2,2151-2169).
gtgtatctgttcagaatga

SEQ ID NO: 291825 - DNA, 19 bp, Homo sapiens
  siRNA target sequence for MAP7 (NM_003980.2,2191-2209).
cttacccattggatctaaa

SEQ ID NO: 291826 - DNA, 19 bp, Homo sapiens
  siRNA target sequence for MAP7 (NM_003980.2,2262-2280).
caattttggcctttgatga

SEQ ID NO: 291827 - DNA, 19 bp, Homo sapiens
  siRNA target sequence for MBP (NM_002385.1,243-261).
ctgggctgtgcaacatgta

SEQ ID NO: 291828 - DNA, 19 bp, Homo sapiens
  siRNA target sequence for MBP (NM_002385.1,245-263).
gggctgtgcaacatgtaca

SEQ ID NO: 291829 - DNA, 19 bp, Homo sapiens
  siRNA target sequence for MBP (NM_002385.1,246-264).
ggctgtgcaacatgtacaa

SEQ ID NO: 291830 - DNA, 19 bp, Homo sapiens
  siRNA target sequence for MBP (NM_002385.1,344-362).
cccgtagtccacttcttca

SEQ ID NO: 291831 - DNA, 19 bp, Homo sapiens
  siRNA target sequence for MBP (NM_002385.1,345-363).
ccgtagtccacttcttcaa

SEQ ID NO: 291832 - DNA, 19 bp, Homo sapiens
  siRNA target sequence for MBP (NM_002385.1,347-365).
gtagtccacttcttcaaga

SEQ ID NO: 291833 - DNA, 19 bp, Homo sapiens
  siRNA target sequence for MBP (NM_002385.1,443-461).
ggcagagcgtccgactata

SEQ ID NO: 291834 - DNA, 19 bp, Homo sapiens
  siRNA target sequence for MBP (NM_002385.1,444-462).
gcagagcgtccgactataa

SEQ ID NO: 291835 - DNA, 19 bp, Homo sapiens
  siRNA target sequence for MBP (NM_002385.1,445-463).
cagagcgtccgactataaa

SEQ ID NO: 291836 - DNA, 19 bp, Homo sapiens
  siRNA target sequence for MBP (NM_002385.1,465-483).
cggctcacaagggattcaa

SEQ ID NO: 291837 - DNA, 19 bp, Homo sapiens
  siRNA target sequence for MBP (NM_002385.1,495-513).
cccagggcacgctttccaa

SEQ ID NO: 291838 - DNA, 19 bp, Homo sapiens
  siRNA target sequence for MBP (NM_002385.1,499-517).
gggcacgctttccaaaatt

SEQ ID NO: 291839 - DNA, 19 bp, Homo sapiens
  siRNA target sequence for MEGF10 (NM_032446.1,221-239).
ctcatgcctgagctttatt

SEQ ID NO: 291840 - DNA, 19 bp, Homo sapiens
  siRNA target sequence for MEGF10 (NM_032446.1,266-284).
gacagcatcacctctgaat

SEQ ID NO: 291841 - DNA, 19 bp, Homo sapiens
  siRNA target sequence for MEGF10 (NM_032446.1,271-289).
catcacctctgaatcttga

SEQ ID NO: 291842 - DNA, 19 bp, Homo sapiens
  siRNA target sequence for MEGF10 (NM_032446.1,285-303).
cttgaagaccctaatgtgt

SEQ ID NO: 291843 - DNA, 19 bp, Homo sapiens
  siRNA target sequence for MEGF10 (NM_032446.1,304-322).
gtagccactgggaaagcta

SEQ ID NO: 291844 - DNA, 19 bp, Homo sapiens
  siRNA target sequence for MEGF10 (NM_032446.1,349-367).
cacatccctttgatcaaat

SEQ ID NO: 291845 - DNA, 19 bp, Homo sapiens
  siRNA target sequence for MEGF10 (NM_032446.1,354-372).
ccctttgatcaaatttact

SEQ ID NO: 291846 - DNA, 19 bp, Homo sapiens
  siRNA target sequence for MEGF10 (NM_032446.1,376-394).
cgagctgcactgacattct

SEQ ID NO: 291847 - DNA, 19 bp, Homo sapiens
  siRNA target sequence for MEGF10 (NM_032446.1,387-405).
gacattctaaactggttta

SEQ ID NO: 291848 - DNA, 19 bp, Homo sapiens
  siRNA target sequence for MEGF10 (NM_032446.1,444-462).
cgacatggggagaagacta

SEQ ID NO: 291849 - DNA, 19 bp, Homo sapiens
  siRNA target sequence for MEGF10 (NM_032446.1,545-563).
ccatggtcgctgtattgct

SEQ ID NO: 291850 - DNA, 19 bp, Homo sapiens
  siRNA target sequence for MEGF10 (NM_032446.1,652-670).
gccggtgccagtgcaaaaa

SEQ ID NO: 291851 - DNA, 19 bp, Homo sapiens
  siRNA target sequence for MEGF10 (NM_032446.1,750-768).
gagcagggcacctatggta

SEQ ID NO: 291852 - DNA, 19 bp, Homo sapiens
  siRNA target sequence for MEGF10 (NM_032446.1,908-926).
gcagagatgcccttgtcaa

SEQ ID NO: 291853 - DNA, 19 bp, Homo sapiens
  siRNA target sequence for MEGF10 (NM_032446.1,911-929).
gagatgcccttgtcaaaat

SEQ ID NO: 291854 - DNA, 19 bp, Homo sapiens
  siRNA target sequence for MEGF10 (NM_032446.1,1014-1032).
ggtcgctttggaaagaact

SEQ ID NO: 291855 - DNA, 19 bp, Homo sapiens
  siRNA target sequence for MEGF10 (NM_032446.1,1182-1200).
gtcaacggagggaagtgtt

SEQ ID NO: 291856 - DNA, 19 bp, Homo sapiens
  siRNA target sequence for MEGF10 (NM_032446.1,1274-1292).
ggggctctacggcatcaaa

SEQ ID NO: 291857 - DNA, 19 bp, Homo sapiens
  siRNA target sequence for MEGF10 (NM_032446.1,1275-1293).
gggctctacggcatcaaat

SEQ ID NO: 291858 - DNA, 19 bp, Homo sapiens
  siRNA target sequence for MEGF10 (NM_032446.1,1277-1295).
gctctacggcatcaaatgt

SEQ ID NO: 291859 - DNA, 19 bp, Homo sapiens
  siRNA target sequence for MEGF10 (NM_032446.1,1376-1394).
gtcaggactctactgtaat

SEQ ID NO: 291860 - DNA, 19 bp, Homo sapiens
  siRNA target sequence for MEGF10 (NM_032446.1,1539-1557).
ggaacctatgggataaact

SEQ ID NO: 291861 - DNA, 19 bp, Homo sapiens
  siRNA target sequence for MEGF10 (NM_032446.1,1562-1580).
ctctcgctgtggctgtaaa

SEQ ID NO: 291862 - DNA, 19 bp, Homo sapiens
  siRNA target sequence for MEGF10 (NM_032446.1,1599-1617).
cctgtggacgggtcttgta

SEQ ID NO: 291863 - DNA, 19 bp, Homo sapiens
  siRNA target sequence for MEGF10 (NM_032446.1,1641-1659).
gtggactgctccatcagat

SEQ ID NO: 291864 - DNA, 19 bp, Homo sapiens
  siRNA target sequence for MEGF10 (NM_032446.1,1948-1966).
ccctgccctgctactgtaa

SEQ ID NO: 291865 - DNA, 19 bp, Homo sapiens
  siRNA target sequence for MEGF10 (NM_032446.1,2042-2060).
gatctgctcccctggtttt

SEQ ID NO: 291866 - DNA, 19 bp, Homo sapiens
  siRNA target sequence for MEGF10 (NM_032446.1,2045-2063).
ctgctcccctggtttttat

SEQ ID NO: 291867 - DNA, 19 bp, Homo sapiens
  siRNA target sequence for MEGF10 (NM_032446.1,2180-2198).
gtgtcccagtggcagattt

SEQ ID NO: 291868 - DNA, 19 bp, Homo sapiens
  siRNA target sequence for MEGF10 (NM_032446.1,2345-2363).
cacgtgcaactgccataat

SEQ ID NO: 291869 - DNA, 19 bp, Homo sapiens
  siRNA target sequence for MEGF10 (NM_032446.1,2472-2490).
ctgatatgccaatgtcaaa

SEQ ID NO: 291870 - DNA, 19 bp, Homo sapiens
  siRNA target sequence for MEGF10 (NM_032446.1,2496-2514).
gctgactgcgaccacattt

SEQ ID NO: 291871 - DNA, 19 bp, Homo sapiens
  siRNA target sequence for MEGF10 (NM_032446.1,2527-2545).
cttgccgcactggattcat

SEQ ID NO: 291872 - DNA, 19 bp, Homo sapiens
  siRNA target sequence for MEGF10 (NM_032446.1,2593-2611).
gctgtcgccagatatgtga

SEQ ID NO: 291873 - DNA, 19 bp, Homo sapiens
  siRNA target sequence for MEGF10 (NM_032446.1,2594-2612).
ctgtcgccagatatgtgat

SEQ ID NO: 291874 - DNA, 19 bp, Homo sapiens
  siRNA target sequence for MEGF10 (NM_032446.1,2599-2617).
gccagatatgtgattgtct

SEQ ID NO: 291875 - DNA, 19 bp, Homo sapiens
  siRNA target sequence for MEGF10 (NM_032446.1,2816-2834).
cctactggcattgttcatt

SEQ ID NO: 291876 - DNA, 19 bp, Homo sapiens
  siRNA target sequence for MEGF10 (NM_032446.1,2817-2835).
ctactggcattgttcatta

SEQ ID NO: 291877 - DNA, 19 bp, Homo sapiens
  siRNA target sequence for MEGF10 (NM_032446.1,2869-2887).
gcatgccagcagttaccta

SEQ ID NO: 291878 - DNA, 19 bp, Homo sapiens
  siRNA target sequence for MEGF10 (NM_032446.1,2903-2921).
ggtcgtcaatgcagattat

SEQ ID NO: 291879 - DNA, 19 bp, Homo sapiens
  siRNA target sequence for MEGF10 (NM_032446.1,2904-2922).
gtcgtcaatgcagattata

SEQ ID NO: 291880 - DNA, 19 bp, Homo sapiens
  siRNA target sequence for MEGF10 (NM_032446.1,2961-2979).
gctaatagccactacttca

SEQ ID NO: 291881 - DNA, 19 bp, Homo sapiens
  siRNA target sequence for MEGF10 (NM_032446.1,3016-3034).
catcccctcacgtcaacaa

SEQ ID NO: 291882 - DNA, 19 bp, Homo sapiens
  siRNA target sequence for MEGF10 (NM_032446.1,3047-3065).
gactgtcacgaagtcaaaa

SEQ ID NO: 291883 - DNA, 19 bp, Homo sapiens
  siRNA target sequence for MEGF10 (NM_032446.1,3143-3161).
gccggctgactggaaacat

SEQ ID NO: 291884 - DNA, 19 bp, Homo sapiens
  siRNA target sequence for MEGF10 (NM_032446.1,3173-3191).
caacgagctcggtgctttt

SEQ ID NO: 291885 - DNA, 19 bp, Homo sapiens
  siRNA target sequence for MEGF10 (NM_032446.1,3315-3333).
gtacttatcccgaaaagct

SEQ ID NO: 291886 - DNA, 19 bp, Homo sapiens
  siRNA target sequence for MEGF10 (NM_032446.1,3379-3397).
ccccatatgcagagatcaa

SEQ ID NO: 291887 - DNA, 19 bp, Homo sapiens
  siRNA target sequence for MEGF10 (NM_032446.1,3381-3399).
ccatatgcagagatcaata

SEQ ID NO: 291888 - DNA, 19 bp, Homo sapiens
  siRNA target sequence for MEGF10 (NM_032446.1,3382-3400).
catatgcagagatcaataa

SEQ ID NO: 291889 - DNA, 19 bp, Homo sapiens
  siRNA target sequence for MEGF10 (NM_032446.1,3387-3405).
gcagagatcaataactcaa

SEQ ID NO: 291890 - DNA, 19 bp, Homo sapiens
  siRNA target sequence for MEGF10 (NM_032446.1,3409-3427).
cagccaacaggaatgtcta

SEQ ID NO: 291891 - DNA, 19 bp, Homo sapiens
  siRNA target sequence for MEGF10 (NM_032446.1,3450-3468).
gttgtccaaggagtattca

SEQ ID NO: 291892 - DNA, 19 bp, Homo sapiens
  siRNA target sequence for MEGF10 (NM_032446.1,3481-3499).
gtctctcccaggatccata

SEQ ID NO: 291893 - DNA, 19 bp, Homo sapiens
  siRNA target sequence for MEGF10 (NM_032446.1,3515-3533).
cagtcacatcccttgtcat

SEQ ID NO: 291894 - DNA, 19 bp, Homo sapiens
  siRNA target sequence for MEGF10 (NM_032446.1,3517-3535).
gtcacatcccttgtcatta

SEQ ID NO: 291895 - DNA, 19 bp, Homo sapiens
  siRNA target sequence for MEGF10 (NM_032446.1,3546-3564).
ccagtccgagacagttcat

SEQ ID NO: 291896 - DNA, 19 bp, Homo sapiens
  siRNA target sequence for MGC26706 (NM_152581.1,98-116).
gagaatcacgcccagaata

SEQ ID NO: 291897 - DNA, 19 bp, Homo sapiens
  siRNA target sequence for MGC26706 (NM_152581.1,100-118).
gaatcacgcccagaataaa

SEQ ID NO: 291898 - DNA, 19 bp, Homo sapiens
  siRNA target sequence for MGC26706 (NM_152581.1,145-163).
gaggttcgaagctgagtat

SEQ ID NO: 291899 - DNA, 19 bp, Homo sapiens
  siRNA target sequence for MGC26706 (NM_152581.1,147-165).
ggttcgaagctgagtatgt

SEQ ID NO: 291900 - DNA, 19 bp, Homo sapiens
  siRNA target sequence for MGC26706 (NM_152581.1,155-173).
gctgagtatgtgacagata

SEQ ID NO: 291901 - DNA, 19 bp, Homo sapiens
  siRNA target sequence for MGC26706 (NM_152581.1,209-227).
ctacaacaagatgataact

SEQ ID NO: 291902 - DNA, 19 bp, Homo sapiens
  siRNA target sequence for MGC26706 (NM_152581.1,221-239).
gataactgggttgaaagtt

SEQ ID NO: 291903 - DNA, 19 bp, Homo sapiens
  siRNA target sequence for MGC26706 (NM_152581.1,226-244).
ctgggttgaaagttactta

SEQ ID NO: 291904 - DNA, 19 bp, Homo sapiens
  siRNA target sequence for MGC26706 (NM_152581.1,229-247).
ggttgaaagttacttatct

SEQ ID NO: 291905 - DNA, 19 bp, Homo sapiens
  siRNA target sequence for MGC26706 (NM_152581.1,254-272).
cataatattgtagatgaaa

SEQ ID NO: 291906 - DNA, 19 bp, Homo sapiens
  siRNA target sequence for MGC26706 (NM_152581.1,280-298).
gatgctcgatgagagtttt

SEQ ID NO: 291907 - DNA, 19 bp, Homo sapiens
  siRNA target sequence for MGC26706 (NM_152581.1,318-336).
ctgtcaatgaccttaatga

SEQ ID NO: 291908 - DNA, 19 bp, Homo sapiens
  siRNA target sequence for MGC26706 (NM_152581.1,348-366).
ccagatggttattggaaat

SEQ ID NO: 291909 - DNA, 19 bp, Homo sapiens
  siRNA target sequence for MGC26706 (NM_152581.1,349-367).
cagatggttattggaaatt

SEQ ID NO: 291910 - DNA, 19 bp, Homo sapiens
  siRNA target sequence for MGC26706 (NM_152581.1,361-379).
ggaaattggtgttatttat

SEQ ID NO: 291911 - DNA, 19 bp, Homo sapiens
  siRNA target sequence for MGC26706 (NM_152581.1,398-416).
gaaggtaacaaattgttct

SEQ ID NO: 291912 - DNA, 19 bp, Homo sapiens
  siRNA target sequence for MGC26706 (NM_152581.1,421-439).
cagggtgaagtatcatgta

SEQ ID NO: 291913 - DNA, 19 bp, Homo sapiens
  siRNA target sequence for MGC26706 (NM_152581.1,423-441).
gggtgaagtatcatgtaaa

SEQ ID NO: 291914 - DNA, 19 bp, Homo sapiens
  siRNA target sequence for MGC26706 (NM_152581.1,480-498).
cattctggttggaacgtta

SEQ ID NO: 291915 - DNA, 19 bp, Homo sapiens
  siRNA target sequence for MGC26706 (NM_152581.1,484-502).
ctggttggaacgttatgct

SEQ ID NO: 291916 - DNA, 19 bp, Homo sapiens
  siRNA target sequence for MGC26706 (NM_152581.1,486-504).
ggttggaacgttatgctaa

SEQ ID NO: 291917 - DNA, 19 bp, Homo sapiens
  siRNA target sequence for MGC26706 (NM_152581.1,548-566).
gaaactggaataaatagca

SEQ ID NO: 291918 - DNA, 19 bp, Homo sapiens
  siRNA target sequence for MGC26706 (NM_152581.1,575-593).
gactttgtacgctttatca

SEQ ID NO: 291919 - DNA, 19 bp, Homo sapiens
  siRNA target sequence for MGC26706 (NM_152581.1,581-599).
gtacgctttatcatcaact

SEQ ID NO: 291920 - DNA, 19 bp, Homo sapiens
  siRNA target sequence for MGC26706 (NM_152581.1,592-610).
catcaactgctttaaggtt

SEQ ID NO: 291921 - DNA, 19 bp, Homo sapiens
  siRNA target sequence for MGC26706 (NM_152581.1,617-635).
cctaaatacctctcaaaaa

SEQ ID NO: 291922 - DNA, 19 bp, Homo sapiens
  siRNA target sequence for MGC26706 (NM_152581.1,618-636).
ctaaatacctctcaaaaat

SEQ ID NO: 291923 - DNA, 19 bp, Homo sapiens
  siRNA target sequence for MGC26706 (NM_152581.1,707-725).
gcagtgagcttgttgaagt

SEQ ID NO: 291924 - DNA, 19 bp, Homo sapiens
  siRNA target sequence for MGC26706 (NM_152581.1,740-758).
gaagtccaggactatgtca

SEQ ID NO: 291925 - DNA, 19 bp, Homo sapiens
  siRNA target sequence for MGC26706 (NM_152581.1,748-766).
ggactatgtcagtgtagaa

SEQ ID NO: 291926 - DNA, 19 bp, Homo sapiens
  siRNA target sequence for MGC26706 (NM_152581.1,794-812).
gatcctttcaagtatagct

SEQ ID NO: 291927 - DNA, 19 bp, Homo sapiens
  siRNA target sequence for MGC26706 (NM_152581.1,810-828).
gctatccaccactagtaga

SEQ ID NO: 291928 - DNA, 19 bp, Homo sapiens
  siRNA target sequence for MGC26706 (NM_152581.1,819-837).
cactagtagatgatgactt

SEQ ID NO: 291929 - DNA, 19 bp, Homo sapiens
  siRNA target sequence for MGC26706 (NM_152581.1,1099-1117).
gtactttggaagtacagaa

SEQ ID NO: 291930 - DNA, 19 bp, Homo sapiens
  siRNA target sequence for MGC26706 (NM_152581.1,1120-1138).
cggagagaagaaaacctta

SEQ ID NO: 291931 - DNA, 19 bp, Homo sapiens
  siRNA target sequence for MGC26706 (NM_152581.1,1142-1160).
gtgttgacaaatgtaacta

SEQ ID NO: 291932 - DNA, 19 bp, Homo sapiens
  siRNA target sequence for MGC26706 (NM_152581.1,1207-1225).
cagagtcaagccaagcaat

SEQ ID NO: 291933 - DNA, 19 bp, Homo sapiens
  siRNA target sequence for MGC26706 (NM_152581.1,1211-1229).
gtcaagccaagcaatagca

SEQ ID NO: 291934 - DNA, 19 bp, Homo sapiens
  siRNA target sequence for MGC26706 (NM_152581.1,1239-1257).
cgggtgcatcagtggatat

SEQ ID NO: 291935 - DNA, 19 bp, Homo sapiens
  siRNA target sequence for MGC26706 (NM_152581.1,1240-1258).
gggtgcatcagtggatata

SEQ ID NO: 291936 - DNA, 19 bp, Homo sapiens
  siRNA target sequence for MGC26706 (NM_152581.1,1242-1260).
gtgcatcagtggatatagt

SEQ ID NO: 291937 - DNA, 19 bp, Homo sapiens
  siRNA target sequence for MGC26706 (NM_152581.1,1245-1263).
catcagtggatatagttgt

SEQ ID NO: 291938 - DNA, 19 bp, Homo sapiens
  siRNA target sequence for MGC26706 (NM_152581.1,1269-1287).
cccatgggggtttaacagt

SEQ ID NO: 291939 - DNA, 19 bp, Homo sapiens
  siRNA target sequence for MGC26706 (NM_152581.1,1290-1308).
ctgcccaagaccgttttct

SEQ ID NO: 291940 - DNA, 19 bp, Homo sapiens
  siRNA target sequence for MGC26706 (NM_152581.1,1294-1312).
ccaagaccgttttctgata

SEQ ID NO: 291941 - DNA, 19 bp, Homo sapiens
  siRNA target sequence for MGC26706 (NM_152581.1,1295-1313).
caagaccgttttctgataa

SEQ ID NO: 291942 - DNA, 19 bp, Homo sapiens
  siRNA target sequence for MGC26706 (NM_152581.1,1341-1359).
gcacaggcccagcagaatt

SEQ ID NO: 291943 - DNA, 19 bp, Homo sapiens
  siRNA target sequence for MGC26706 (NM_152581.1,1355-1373).
gaattaactcagttttgga

SEQ ID NO: 291944 - DNA, 19 bp, Homo sapiens
  siRNA target sequence for MGC26706 (NM_152581.1,1467-1485).
ctttcaatatgtcagataa

SEQ ID NO: 291945 - DNA, 19 bp, Homo sapiens
  siRNA target sequence for MGC26706 (NM_152581.1,1488-1506).
ccagtgaagatatatgtct

SEQ ID NO: 291946 - DNA, 19 bp, Homo sapiens
  siRNA target sequence for MGC26706 (NM_152581.1,1489-1507).
cagtgaagatatatgtcta

SEQ ID NO: 291947 - DNA, 19 bp, Homo sapiens
  siRNA target sequence for MGC26706 (NM_152581.1,1511-1529).
ctcagtcgtttactagaaa

SEQ ID NO: 291948 - DNA, 19 bp, Homo sapiens
  siRNA target sequence for MGC26706 (NM_152581.1,1515-1533).
gtcgtttactagaaagcaa

SEQ ID NO: 291949 - DNA, 19 bp, Homo sapiens
  siRNA target sequence for MGC26706 (NM_152581.1,1517-1535).
cgtttactagaaagcaata

SEQ ID NO: 291950 - DNA, 19 bp, Homo sapiens
  siRNA target sequence for MPZ (NM_000530.3,129-147).
cccaggccatcgtggttta

SEQ ID NO: 291951 - DNA, 19 bp, Homo sapiens
  siRNA target sequence for MPZ (NM_000530.3,131-149).
caggccatcgtggtttaca

SEQ ID NO: 291952 - DNA, 19 bp, Homo sapiens
  siRNA target sequence for MPZ (NM_000530.3,298-316).
caagggacaaccctacatt

SEQ ID NO: 291953 - DNA, 19 bp, Homo sapiens
  siRNA target sequence for MPZ (NM_000530.3,373-391).
ggatggctccattgtcata

SEQ ID NO: 291954 - DNA, 19 bp, Homo sapiens
  siRNA target sequence for MPZ (NM_000530.3,377-395).
ggctccattgtcatacaca

SEQ ID NO: 291955 - DNA, 19 bp, Homo sapiens
  siRNA target sequence for MPZ (NM_000530.3,378-396).
gctccattgtcatacacaa

SEQ ID NO: 291956 - DNA, 19 bp, Homo sapiens
  siRNA target sequence for MYOC (NM_000261.1,155-173).
ggccgatgccagtatacct

SEQ ID NO: 291957 - DNA, 19 bp, Homo sapiens
  siRNA target sequence for MYOC (NM_000261.1,230-248).
gtcatccataacttacaga

SEQ ID NO: 291958 - DNA, 19 bp, Homo sapiens
  siRNA target sequence for MYOC (NM_000261.1,623-641).
gaagtttctacgtggaatt

SEQ ID NO: 291959 - DNA, 19 bp, Homo sapiens
  siRNA target sequence for MYOC (NM_000261.1,633-651).
cgtggaatttggacacttt

SEQ ID NO: 291960 - DNA, 19 bp, Homo sapiens
  siRNA target sequence for MYOC (NM_000261.1,667-685).
gaagtccgagctaactgaa

SEQ ID NO: 291961 - DNA, 19 bp, Homo sapiens
  siRNA target sequence for MYOC (NM_000261.1,670-688).
gtccgagctaactgaagtt

SEQ ID NO: 291962 - DNA, 19 bp, Homo sapiens
  siRNA target sequence for MYOC (NM_000261.1,750-768).
ccggatgtggagaactagt

SEQ ID NO: 291963 - DNA, 19 bp, Homo sapiens
  siRNA target sequence for MYOC (NM_000261.1,752-770).
ggatgtggagaactagttt

SEQ ID NO: 291964 - DNA, 19 bp, Homo sapiens
  siRNA target sequence for MYOC (NM_000261.1,900-918).
cggatgtccgccaggtttt

SEQ ID NO: 291965 - DNA, 19 bp, Homo sapiens
  siRNA target sequence for MYOC (NM_000261.1,957-975).
cttctaaggttcacatact

SEQ ID NO: 291966 - DNA, 19 bp, Homo sapiens
  siRNA target sequence for MYOC (NM_000261.1,1014-1032).
cggggagcctctatttcca

SEQ ID NO: 291967 - DNA, 19 bp, Homo sapiens
  siRNA target sequence for MYOC (NM_000261.1,1040-1058).
gagtccagaactgtcataa

SEQ ID NO: 291968 - DNA, 19 bp, Homo sapiens
  siRNA target sequence for MYOC (NM_000261.1,1042-1060).
gtccagaactgtcataaga

SEQ ID NO: 291969 - DNA, 19 bp, Homo sapiens
  siRNA target sequence for MYOC (NM_000261.1,1120-1138).
cggacagttcccgtattct

SEQ ID NO: 291970 - DNA, 19 bp, Homo sapiens
  siRNA target sequence for MYOC (NM_000261.1,1121-1139).
ggacagttcccgtattctt

SEQ ID NO: 291971 - DNA, 19 bp, Homo sapiens
  siRNA target sequence for MYOC (NM_000261.1,1179-1197).
caggcctctgggtcattta

SEQ ID NO: 291972 - DNA, 19 bp, Homo sapiens
  siRNA target sequence for MYOC (NM_000261.1,1234-1252).
caaactgaacccagagaat

SEQ ID NO: 291973 - DNA, 19 bp, Homo sapiens
  siRNA target sequence for MYOC (NM_000261.1,1361-1379).
gctaccgtcaactttgctt

SEQ ID NO: 291974 - DNA, 19 bp, Homo sapiens
  siRNA target sequence for MYOC (NM_000261.1,1365-1383).
ccgtcaactttgcttatga

SEQ ID NO: 291975 - DNA, 19 bp, Homo sapiens
  siRNA target sequence for MYOC (NM_000261.1,1367-1385).
gtcaactttgcttatgaca

SEQ ID NO: 291976 - DNA, 19 bp, Homo sapiens
  siRNA target sequence for MYOC (NM_000261.1,1419-1437).
cattcaagaaccgctataa

SEQ ID NO: 291977 - DNA, 19 bp, Homo sapiens
  siRNA target sequence for MYOC (NM_000261.1,1495-1513).
cttgaacatggtcacttat

SEQ ID NO: 291978 - DNA, 19 bp, Homo sapiens
  siRNA target sequence for NF2 (NM_000268.2,513-531).
cgccgagatggagttcaat

SEQ ID NO: 291979 - DNA, 19 bp, Homo sapiens
  siRNA target sequence for NF2 (NM_000268.2,514-532).
gccgagatggagttcaatt

SEQ ID NO: 291980 - DNA, 19 bp, Homo sapiens
  siRNA target sequence for NF2 (NM_000268.2,591-609).
ccgagaaacctggttcttt

SEQ ID NO: 291981 - DNA, 19 bp, Homo sapiens
  siRNA target sequence for NF2 (NM_000268.2,610-628).
ggactgcagtacacaatca

SEQ ID NO: 291982 - DNA, 19 bp, Homo sapiens
  siRNA target sequence for NF2 (NM_000268.2,754-772).
caggagatcacacaacatt

SEQ ID NO: 291983 - DNA, 19 bp, Homo sapiens
  siRNA target sequence for NF2 (NM_000268.2,756-774).
ggagatcacacaacattta

SEQ ID NO: 291984 - DNA, 19 bp, Homo sapiens
  siRNA target sequence for NF2 (NM_000268.2,757-775).
gagatcacacaacatttat

SEQ ID NO: 291985 - DNA, 19 bp, Homo sapiens
  siRNA target sequence for NF2 (NM_000268.2,892-910).
gttcacaagcggggatttt

SEQ ID NO: 291986 - DNA, 19 bp, Homo sapiens
  siRNA target sequence for NF2 (NM_000268.2,927-945).
gcttccaaaaagggtaata

SEQ ID NO: 291987 - DNA, 19 bp, Homo sapiens
  siRNA target sequence for NF2 (NM_000268.2,1075-1093).
ggtgtgaactactttgcaa

SEQ ID NO: 291988 - DNA, 19 bp, Homo sapiens
  siRNA target sequence for NF2 (NM_000268.2,1076-1094).
gtgtgaactactttgcaat

SEQ ID NO: 291989 - DNA, 19 bp, Homo sapiens
  siRNA target sequence for NF2 (NM_000268.2,1135-1153).
gccctggggcttcacattt

SEQ ID NO: 291990 - DNA, 19 bp, Homo sapiens
  siRNA target sequence for NF2 (NM_000268.2,1185-1203).
ctccttcccgtggaatgaa

SEQ ID NO: 291991 - DNA, 19 bp, Homo sapiens
  siRNA target sequence for NF2 (NM_000268.2,1187-1205).
ccttcccgtggaatgaaat

SEQ ID NO: 291992 - DNA, 19 bp, Homo sapiens
  siRNA target sequence for NF2 (NM_000268.2,1221-1239).
cagtgacaaggagtttact

SEQ ID NO: 291993 - DNA, 19 bp, Homo sapiens
  siRNA target sequence for NF2 (NM_000268.2,1225-1243).
gacaaggagtttactatta

SEQ ID NO: 291994 - DNA, 19 bp, Homo sapiens
  siRNA target sequence for NF2 (NM_000268.2,1230-1248).
ggagtttactattaaacca

SEQ ID NO: 291995 - DNA, 19 bp, Homo sapiens
  siRNA target sequence for NF2 (NM_000268.2,1264-1282).
gatgtcttcaagtttaact

SEQ ID NO: 291996 - DNA, 19 bp, Homo sapiens
  siRNA target sequence for NF2 (NM_000268.2,1284-1302).
ctcaaagcttcgtgttaat

SEQ ID NO: 291997 - DNA, 19 bp, Homo sapiens
  siRNA target sequence for NF2 (NM_000268.2,1286-1304).
caaagcttcgtgttaataa

SEQ ID NO: 291998 - DNA, 19 bp, Homo sapiens
  siRNA target sequence for NF2 (NM_000268.2,1306-1324).
ctgattctccagctatgta

SEQ ID NO: 291999 - DNA, 19 bp, Homo sapiens
  siRNA target sequence for NF2 (NM_000268.2,1322-1340).
gtatcgggaaccatgatct

SEQ ID NO: 292000 - DNA, 19 bp, Homo sapiens
  siRNA target sequence for NF2 (NM_000268.2,1326-1344).
cgggaaccatgatctattt

SEQ ID NO: 292001 - DNA, 19 bp, Homo sapiens
  siRNA target sequence for NF2 (NM_000268.2,1327-1345).
gggaaccatgatctattta

SEQ ID NO: 292002 - DNA, 19 bp, Homo sapiens
  siRNA target sequence for NF2 (NM_000268.2,1328-1346).
ggaaccatgatctatttat

SEQ ID NO: 292003 - DNA, 19 bp, Homo sapiens
  siRNA target sequence for NF2 (NM_000268.2,1361-1379).
ccgattctttggaagttca

SEQ ID NO: 292004 - DNA, 19 bp, Homo sapiens
  siRNA target sequence for NF2 (NM_000268.2,1869-1887).
gcccatgaacccaattcca

SEQ ID NO: 292005 - DNA, 19 bp, Homo sapiens
  siRNA target sequence for NF2 (NM_000268.2,1938-1956).
gtctttcgacttcaaagat

SEQ ID NO: 292006 - DNA, 19 bp, Homo sapiens
  siRNA target sequence for NF2 (NM_000268.2,2065-2083).
gccttgaaactgaaagaga

SEQ ID NO: 292007 - DNA, 19 bp, Homo sapiens
  siRNA target sequence for NF2 (NM_000268.2,2183-2201).
cccgagtggccttctttga

SEQ ID NO: 292008 - DNA, 19 bp, Homo sapiens
  siRNA target sequence for NF2 (NM_181827.1,667-685).
gggctagaactcgatgaaa

SEQ ID NO: 292009 - DNA, 19 bp, Homo sapiens
  siRNA target sequence for NF2 (NM_181827.1,669-687).
gctagaactcgatgaaact

SEQ ID NO: 292010 - DNA, 19 bp, Homo sapiens
  siRNA target sequence for NF2 (NM_181828.1,533-551).
gcgaggtactggatcatga

SEQ ID NO: 292011 - DNA, 19 bp, Homo sapiens
  siRNA target sequence for NMP200 (NM_014502.3,209-227).
ctaatctgctccatctcta

SEQ ID NO: 292012 - DNA, 19 bp, Homo sapiens
  siRNA target sequence for NMP200 (NM_014502.3,214-232).
ctgctccatctctaacgaa

SEQ ID NO: 292013 - DNA, 19 bp, Homo sapiens
  siRNA target sequence for NMP200 (NM_014502.3,235-253).
gccggagcacccatgtgta

SEQ ID NO: 292014 - DNA, 19 bp, Homo sapiens
  siRNA target sequence for NMP200 (NM_014502.3,236-254).
ccggagcacccatgtgtat

SEQ ID NO: 292015 - DNA, 19 bp, Homo sapiens
  siRNA target sequence for NMP200 (NM_014502.3,256-274).
ccctgtctctaatcatgtt

SEQ ID NO: 292016 - DNA, 19 bp, Homo sapiens
  siRNA target sequence for NMP200 (NM_014502.3,257-275).
cctgtctctaatcatgttt

SEQ ID NO: 292017 - DNA, 19 bp, Homo sapiens
  siRNA target sequence for NMP200 (NM_014502.3,258-276).
ctgtctctaatcatgttta

SEQ ID NO: 292018 - DNA, 19 bp, Homo sapiens
  siRNA target sequence for NMP200 (NM_014502.3,286-304).
gctcatcgagaagtacatt

SEQ ID NO: 292019 - DNA, 19 bp, Homo sapiens
  siRNA target sequence for NMP200 (NM_014502.3,315-333).
gtaccgaccccatcaacaa

SEQ ID NO: 292020 - DNA, 19 bp, Homo sapiens
  siRNA target sequence for NMP200 (NM_014502.3,352-370).
gcagctcatcgacatcaaa

SEQ ID NO: 292021 - DNA, 19 bp, Homo sapiens
  siRNA target sequence for NMP200 (NM_014502.3,355-373).
gctcatcgacatcaaagtt

SEQ ID NO: 292022 - DNA, 19 bp, Homo sapiens
  siRNA target sequence for NMP200 (NM_014502.3,668-686).
gcgggtgagccaatggatt

SEQ ID NO: 292023 - DNA, 19 bp, Homo sapiens
  siRNA target sequence for NMP200 (NM_014502.3,669-687).
cgggtgagccaatggattt

SEQ ID NO: 292024 - DNA, 19 bp, Homo sapiens
  siRNA target sequence for NMP200 (NM_014502.3,701-719).
ggaatgaccccagagatta

SEQ ID NO: 292025 - DNA, 19 bp, Homo sapiens
  siRNA target sequence for NMP200 (NM_014502.3,803-821).
ccagaagagctcagcaaat

SEQ ID NO: 292026 - DNA, 19 bp, Homo sapiens
  siRNA target sequence for NMP200 (NM_014502.3,938-956).
gtcgttgtgtttgacaaaa

SEQ ID NO: 292027 - DNA, 19 bp, Homo sapiens
  siRNA target sequence for NMP200 (NM_014502.3,978-996).
ccctcaaaggccataccaa

SEQ ID NO: 292028 - DNA, 19 bp, Homo sapiens
  siRNA target sequence for NMP200 (NM_014502.3,1055-1073).
gatgccactatcaggattt

SEQ ID NO: 292029 - DNA, 19 bp, Homo sapiens
  siRNA target sequence for NMP200 (NM_014502.3,1058-1076).
gccactatcaggatttggt

SEQ ID NO: 292030 - DNA, 19 bp, Homo sapiens
  siRNA target sequence for NMP200 (NM_014502.3,1081-1099).
ccccaatgcctcttgtgta

SEQ ID NO: 292031 - DNA, 19 bp, Homo sapiens
  siRNA target sequence for NMP200 (NM_014502.3,1336-1354).
cttgaaggaacgtactaat

SEQ ID NO: 292032 - DNA, 19 bp, Homo sapiens
  siRNA target sequence for NMP200 (NM_014502.3,1397-1415).
gccttctctgagaatggtt

SEQ ID NO: 292033 - DNA, 19 bp, Homo sapiens
  siRNA target sequence for NMP200 (NM_014502.3,1398-1416).
ccttctctgagaatggtta

SEQ ID NO: 292034 - DNA, 19 bp, Homo sapiens
  siRNA target sequence for NMP200 (NM_014502.3,1458-1476).
gggatctgcgcaagcttaa

SEQ ID NO: 292035 - DNA, 19 bp, Homo sapiens
  siRNA target sequence for NMP200 (NM_014502.3,1460-1478).
gatctgcgcaagcttaaga

SEQ ID NO: 292036 - DNA, 19 bp, Homo sapiens
  siRNA target sequence for NMP200 (NM_014502.3,1492-1510).
gcagctggataacaacttt

SEQ ID NO: 292037 - DNA, 19 bp, Homo sapiens
  siRNA target sequence for NMP200 (NM_014502.3,1563-1581).
gcacggatgtccagatcta

SEQ ID NO: 292038 - DNA, 19 bp, Homo sapiens
  siRNA target sequence for NMP200 (NM_014502.3,1566-1584).
cggatgtccagatctacat

SEQ ID NO: 292039 - DNA, 19 bp, Homo sapiens
  siRNA target sequence for NMP200 (NM_014502.3,1652-1670).
gggcatcacgccaagttca

SEQ ID NO: 292040 - DNA, 19 bp, Homo sapiens
  siRNA target sequence for NMP200 (NM_014502.3,1653-1671).
ggcatcacgccaagttcat

SEQ ID NO: 292041 - DNA, 19 bp, Homo sapiens
  siRNA target sequence for NMP200 (NM_014502.3,1663-1681).
caagttcatcgcttcaaca

SEQ ID NO: 292042 - DNA, 19 bp, Homo sapiens
  siRNA target sequence for NTN1 (NM_004822.1,262-280).
catcccggactttgtcaat

SEQ ID NO: 292043 - DNA, 19 bp, Homo sapiens
  siRNA target sequence for NTN1 (NM_004822.1,645-663).
cgcagtgccgcaagatgta

SEQ ID NO: 292044 - DNA, 19 bp, Homo sapiens
  siRNA target sequence for NTN1 (NM_004822.1,1118-1136).
gagtgcgtggcctgtaact

SEQ ID NO: 292045 - DNA, 19 bp, Homo sapiens
  siRNA target sequence for NTN1 (NM_004822.1,1641-1659).
ggaagttcacggtgaacat

SEQ ID NO: 292046 - DNA, 19 bp, Homo sapiens
  siRNA target sequence for NTN1 (NM_004822.1,1813-1831).
cggcatcgtggccgataaa

SEQ ID NO: 292047 - DNA, 19 bp, Homo sapiens
  siRNA target sequence for NTN4 (NM_021229.2,575-593).
gctttggggcgaaaactct

SEQ ID NO: 292048 - DNA, 19 bp, Homo sapiens
  siRNA target sequence for NTN4 (NM_021229.2,601-619).
caccacctgcggtcagaat

SEQ ID NO: 292049 - DNA, 19 bp, Homo sapiens
  siRNA target sequence for NTN4 (NM_021229.2,626-644).
gaactgtactgcttctaca

SEQ ID NO: 292050 - DNA, 19 bp, Homo sapiens
  siRNA target sequence for NTN4 (NM_021229.2,666-684).
gtcggcagcccaaatgtga

SEQ ID NO: 292051 - DNA, 19 bp, Homo sapiens
  siRNA target sequence for NTN4 (NM_021229.2,826-844).
ctacttcactcacctaatt

SEQ ID NO: 292052 - DNA, 19 bp, Homo sapiens
  siRNA target sequence for NTN4 (NM_021229.2,936-954).
ctaactgctccgctacatt

SEQ ID NO: 292053 - DNA, 19 bp, Homo sapiens
  siRNA target sequence for NTN4 (NM_021229.2,976-994).
caagaagggcgctatttgt

SEQ ID NO: 292054 - DNA, 19 bp, Homo sapiens
  siRNA target sequence for NTN4 (NM_021229.2,979-997).
gaagggcgctatttgtact

SEQ ID NO: 292055 - DNA, 19 bp, Homo sapiens
  siRNA target sequence for NTN4 (NM_021229.2,982-1000).
gggcgctatttgtacttct

SEQ ID NO: 292056 - DNA, 19 bp, Homo sapiens
  siRNA target sequence for NTN4 (NM_021229.2,983-1001).
ggcgctatttgtacttcta

SEQ ID NO: 292057 - DNA, 19 bp, Homo sapiens
  siRNA target sequence for NTN4 (NM_021229.2,984-1002).
gcgctatttgtacttctaa

SEQ ID NO: 292058 - DNA, 19 bp, Homo sapiens
  siRNA target sequence for NTN4 (NM_021229.2,985-1003).
cgctatttgtacttctaaa

SEQ ID NO: 292059 - DNA, 19 bp, Homo sapiens
  siRNA target sequence for NTN4 (NM_021229.2,986-1004).
gctatttgtacttctaaat

SEQ ID NO: 292060 - DNA, 19 bp, Homo sapiens
  siRNA target sequence for NTN4 (NM_021229.2,1024-1042).
cactggaggagaggttatt

SEQ ID NO: 292061 - DNA, 19 bp, Homo sapiens
  siRNA target sequence for NTN4 (NM_021229.2,1078-1096).
cccttacagtgccaaagtt

SEQ ID NO: 292062 - DNA, 19 bp, Homo sapiens
  siRNA target sequence for NTN4 (NM_021229.2,1174-1192).
gaacgaagagcctcaacat

SEQ ID NO: 292063 - DNA, 19 bp, Homo sapiens
  siRNA target sequence for NTN4 (NM_021229.2,1316-1334).
gtccatgggaagtgtatgt

SEQ ID NO: 292064 - DNA, 19 bp, Homo sapiens
  siRNA target sequence for NTN4 (NM_021229.2,1318-1336).
ccatgggaagtgtatgtgt

SEQ ID NO: 292065 - DNA, 19 bp, Homo sapiens
  siRNA target sequence for NTN4 (NM_021229.2,1367-1385).
cactgtgccccgttataca

SEQ ID NO: 292066 - DNA, 19 bp, Homo sapiens
  siRNA target sequence for NTN4 (NM_021229.2,1369-1387).
ctgtgccccgttatacaat

SEQ ID NO: 292067 - DNA, 19 bp, Homo sapiens
  siRNA target sequence for NTN4 (NM_021229.2,1371-1389).
gtgccccgttatacaatga

SEQ ID NO: 292068 - DNA, 19 bp, Homo sapiens
  siRNA target sequence for NTN4 (NM_021229.2,1475-1493).
cacttcgacgttaatgtgt

SEQ ID NO: 292069 - DNA, 19 bp, Homo sapiens
  siRNA target sequence for NTN4 (NM_021229.2,1496-1514).
gaggcatcagggaatcgta

SEQ ID NO: 292070 - DNA, 19 bp, Homo sapiens
  siRNA target sequence for NTN4 (NM_021229.2,1543-1561).
caacacagaaggacagtat

SEQ ID NO: 292071 - DNA, 19 bp, Homo sapiens
  siRNA target sequence for NTN4 (NM_021229.2,1765-1783).
ctggggcttcggagactat

SEQ ID NO: 292072 - DNA, 19 bp, Homo sapiens
  siRNA target sequence for NTN4 (NM_021229.2,1886-1904).
cgtcccgtgcacaataaga

SEQ ID NO: 292073 - DNA, 19 bp, Homo sapiens
  siRNA target sequence for NTN4 (NM_021229.2,1938-1956).
ggttttctgcacttctaca

SEQ ID NO: 292074 - DNA, 19 bp, Homo sapiens
  siRNA target sequence for NTN4 (NM_021229.2,1949-1967).
cttctacactcaggtaaat

SEQ ID NO: 292075 - DNA, 19 bp, Homo sapiens
  siRNA target sequence for NTN4 (NM_021229.2,1978-1996).
ggaacagacattaggaaat

SEQ ID NO: 292076 - DNA, 19 bp, Homo sapiens
  siRNA target sequence for NTN4 (NM_021229.2,2013-2031).
gaatgaaatattcatatgt

SEQ ID NO: 292077 - DNA, 19 bp, Homo sapiens
  siRNA target sequence for NTN4 (NM_021229.2,2070-2088).
ctcatgttgaggtcaatgt

SEQ ID NO: 292078 - DNA, 19 bp, Homo sapiens
  siRNA target sequence for NTN4 (NM_021229.2,2072-2090).
catgttgaggtcaatgtga

SEQ ID NO: 292079 - DNA, 19 bp, Homo sapiens
  siRNA target sequence for NTN4 (NM_021229.2,2101-2119).
ggtcttaaaatctaccaaa

SEQ ID NO: 292080 - DNA, 19 bp, Homo sapiens
  siRNA target sequence for NTN4 (NM_021229.2,2192-2210).
ctcaatcctggtttggaat

SEQ ID NO: 292081 - DNA, 19 bp, Homo sapiens
  siRNA target sequence for NTN4 (NM_021229.2,2238-2256).
gaacaggcaaactaattgt

SEQ ID NO: 292082 - DNA, 19 bp, Homo sapiens
  siRNA target sequence for NUMA1 (NM_006185.1,599-617).
gggactgggaacagtttga

SEQ ID NO: 292083 - DNA, 19 bp, Homo sapiens
  siRNA target sequence for NUMA1 (NM_006185.1,632-650).
ctgagttggctgtcattct

SEQ ID NO: 292084 - DNA, 19 bp, Homo sapiens
  siRNA target sequence for NUMA1 (NM_006185.1,670-688).
gaggacgggctaaacctta

SEQ ID NO: 292085 - DNA, 19 bp, Homo sapiens
  siRNA target sequence for NUMA1 (NM_006185.1,672-690).
ggacgggctaaaccttaat

SEQ ID NO: 292086 - DNA, 19 bp, Homo sapiens
  siRNA target sequence for NUMA1 (NM_006185.1,863-881).
cttctcccatgggtgatat

SEQ ID NO: 292087 - DNA, 19 bp, Homo sapiens
  siRNA target sequence for NUMA1 (NM_006185.1,1178-1196).
gccagatggatcgcaaaat

SEQ ID NO: 292088 - DNA, 19 bp, Homo sapiens
  siRNA target sequence for NUMA1 (NM_006185.1,2029-2047).
gagcgagaggcctccttaa

SEQ ID NO: 292089 - DNA, 19 bp, Homo sapiens
  siRNA target sequence for NUMA1 (NM_006185.1,2298-2316).
gcggtctgagcagcaaaaa

SEQ ID NO: 292090 - DNA, 19 bp, Homo sapiens
  siRNA target sequence for NUMA1 (NM_006185.1,2399-2417).
ccaagggcagccttgaaga

SEQ ID NO: 292091 - DNA, 19 bp, Homo sapiens
  siRNA target sequence for NUMA1 (NM_006185.1,2451-2469).
gcagcagcgttgtatctct

SEQ ID NO: 292092 - DNA, 19 bp, Homo sapiens
  siRNA target sequence for NUMA1 (NM_006185.1,2553-2571).
ggggctggaggctcgatta

SEQ ID NO: 292093 - DNA, 19 bp, Homo sapiens
  siRNA target sequence for NUMA1 (NM_006185.1,2666-2684).
gtgagcagctcgtcaaaga

SEQ ID NO: 292094 - DNA, 19 bp, Homo sapiens
  siRNA target sequence for NUMA1 (NM_006185.1,2755-2773).
gaacagctgatgactttga

SEQ ID NO: 292095 - DNA, 19 bp, Homo sapiens
  siRNA target sequence for NUMA1 (NM_006185.1,2842-2860).
cacagcgagctccagataa

SEQ ID NO: 292096 - DNA, 19 bp, Homo sapiens
  siRNA target sequence for NUMA1 (NM_006185.1,3053-3071).
cagcctcccgggagttagt

SEQ ID NO: 292097 - DNA, 19 bp, Homo sapiens
  siRNA target sequence for NUMA1 (NM_006185.1,3055-3073).
gcctcccgggagttagtca

SEQ ID NO: 292098 - DNA, 19 bp, Homo sapiens
  siRNA target sequence for NUMA1 (NM_006185.1,3056-3074).
cctcccgggagttagtcaa

SEQ ID NO: 292099 - DNA, 19 bp, Homo sapiens
  siRNA target sequence for NUMA1 (NM_006185.1,3861-3879).
ccacagcaaggctgaagat

SEQ ID NO: 292100 - DNA, 19 bp, Homo sapiens
  siRNA target sequence for NUMA1 (NM_006185.1,4228-4246).
gagctgggccaagaattga

SEQ ID NO: 292101 - DNA, 19 bp, Homo sapiens
  siRNA target sequence for NUMA1 (NM_006185.1,5029-5047).
caggcagctgagcactata

SEQ ID NO: 292102 - DNA, 19 bp, Homo sapiens
  siRNA target sequence for NUMA1 (NM_006185.1,5033-5051).
cagctgagcactataagct

SEQ ID NO: 292103 - DNA, 19 bp, Homo sapiens
  siRNA target sequence for NUMA1 (NM_006185.1,5058-5076).
ggagaaagccaaaacacat

SEQ ID NO: 292104 - DNA, 19 bp, Homo sapiens
  siRNA target sequence for NUMA1 (NM_006185.1,5363-5381).
cccagctggacttgagtat

SEQ ID NO: 292105 - DNA, 19 bp, Homo sapiens
  siRNA target sequence for NUMA1 (NM_006185.1,5364-5382).
ccagctggacttgagtatt

SEQ ID NO: 292106 - DNA, 19 bp, Homo sapiens
  siRNA target sequence for NUMA1 (NM_006185.1,5698-5716).
ccagacagcgccaactcat

SEQ ID NO: 292107 - DNA, 19 bp, Homo sapiens
  siRNA target sequence for NUMA1 (NM_006185.1,5707-5725).
gccaactcatcgttctaca

SEQ ID NO: 292108 - DNA, 19 bp, Homo sapiens
  siRNA target sequence for NUMA1 (NM_006185.1,5793-5811).
cctgggttctcccgattat

SEQ ID NO: 292109 - DNA, 19 bp, Homo sapiens
  siRNA target sequence for NUMA1 (NM_006185.1,6211-6229).
ggaactcctgagtctaaga

SEQ ID NO: 292110 - DNA, 19 bp, Homo sapiens
  siRNA target sequence for NUMA1 (NM_006185.1,6212-6230).
gaactcctgagtctaagaa

SEQ ID NO: 292111 - DNA, 19 bp, Homo sapiens
  siRNA target sequence for NUMA1 (NM_006185.1,6320-6338).
ctccagcttctactaaaca

SEQ ID NO: 292112 - DNA, 19 bp, Homo sapiens
  siRNA target sequence for ODF1 (NM_024410.2,171-189).
gagatgcatcgacgaattt

SEQ ID NO: 292113 - DNA, 19 bp, Homo sapiens
  siRNA target sequence for ODF1 (NM_024410.2,197-215).
ggtgcctgtgcgacttgta

SEQ ID NO: 292114 - DNA, 19 bp, Homo sapiens
  siRNA target sequence for ODF1 (NM_024410.2,198-216).
gtgcctgtgcgacttgtat

SEQ ID NO: 292115 - DNA, 19 bp, Homo sapiens
  siRNA target sequence for ODF1 (NM_024410.2,200-218).
gcctgtgcgacttgtatat

SEQ ID NO: 292116 - DNA, 19 bp, Homo sapiens
  siRNA target sequence for ODF1 (NM_024410.2,253-271).
ccgtactgcttgtgctatt

SEQ ID NO: 292117 - DNA, 19 bp, Homo sapiens
  siRNA target sequence for ODF1 (NM_024410.2,314-332).
gttgcctgtgtgattataa

SEQ ID NO: 292118 - DNA, 19 bp, Homo sapiens
  siRNA target sequence for ODF1 (NM_024410.2,317-335).
gcctgtgtgattataagct

SEQ ID NO: 292119 - DNA, 19 bp, Homo sapiens
  siRNA target sequence for ODF1 (NM_024410.2,318-336).
cctgtgtgattataagctt

SEQ ID NO: 292120 - DNA, 19 bp, Homo sapiens
  siRNA target sequence for ODF1 (NM_024410.2,319-337).
ctgtgtgattataagcttt

SEQ ID NO: 292121 - DNA, 19 bp, Homo sapiens
  siRNA target sequence for ODF1 (NM_024410.2,570-588).
cgactgccttggatcgaaa

SEQ ID NO: 292122 - DNA, 19 bp, Homo sapiens
  siRNA target sequence for ODF1 (NM_024410.2,571-589).
gactgccttggatcgaaaa

SEQ ID NO: 292123 - DNA, 19 bp, Homo sapiens
  siRNA target sequence for ODF1 (NM_024410.2,575-593).
gccttggatcgaaaaagta

SEQ ID NO: 292124 - DNA, 19 bp, Homo sapiens
  siRNA target sequence for ODF1 (NM_024410.2,577-595).
cttggatcgaaaaagtaca

SEQ ID NO: 292125 - DNA, 19 bp, Homo sapiens
  siRNA target sequence for ODF1 (NM_024410.2,639-657).
ggatgagaaggatgtaaca

SEQ ID NO: 292126 - DNA, 19 bp, Homo sapiens
  siRNA target sequence for ODF1 (NM_024410.2,771-789).
cccgtgcagcccatatgat

SEQ ID NO: 292127 - DNA, 19 bp, Homo sapiens
  siRNA target sequence for ODF2 (NM_002540.3,588-606).
gaaggaccgctcttcaact

SEQ ID NO: 292128 - DNA, 19 bp, Homo sapiens
  siRNA target sequence for ODF2 (NM_002540.3,605-623).
ctccccccttacatgttca

SEQ ID NO: 292129 - DNA, 19 bp, Homo sapiens
  siRNA target sequence for ODF2 (NM_002540.3,640-658).
cctgtccacgtccacataa

SEQ ID NO: 292130 - DNA, 19 bp, Homo sapiens
  siRNA target sequence for ODF2 (NM_002540.3,641-659).
ctgtccacgtccacataaa

SEQ ID NO: 292131 - DNA, 19 bp, Homo sapiens
  siRNA target sequence for ODF2 (NM_002540.3,679-697).
gcgaccagcagccagaaat

SEQ ID NO: 292132 - DNA, 19 bp, Homo sapiens
  siRNA target sequence for ODF2 (NM_002540.3,739-757).
cggagtgtccgggtgaaaa

SEQ ID NO: 292133 - DNA, 19 bp, Homo sapiens
  siRNA target sequence for ODF2 (NM_002540.3,743-761).
gtgtccgggtgaaaaccaa

SEQ ID NO: 292134 - DNA, 19 bp, Homo sapiens
  siRNA target sequence for ODF2 (NM_002540.3,786-804).
cacgccaccatcttcagaa

SEQ ID NO: 292135 - DNA, 19 bp, Homo sapiens
  siRNA target sequence for ODF2 (NM_002540.3,815-833).
cagtgatgcggttaagtga

SEQ ID NO: 292136 - DNA, 19 bp, Homo sapiens
  siRNA target sequence for ODF2 (NM_002540.3,955-973).
cgccagatggccaaaaggt

SEQ ID NO: 292137 - DNA, 19 bp, Homo sapiens
  siRNA target sequence for ODF2 (NM_002540.3,1043-1061).
cggtgttgaggcacaacat

SEQ ID NO: 292138 - DNA, 19 bp, Homo sapiens
  siRNA target sequence for ODF2 (NM_002540.3,1080-1098).
gaaggacttcaccatactt

SEQ ID NO: 292139 - DNA, 19 bp, Homo sapiens
  siRNA target sequence for ODF2 (NM_002540.3,1516-1534).
gcctctgagctttctaaat

SEQ ID NO: 292140 - DNA, 19 bp, Homo sapiens
  siRNA target sequence for ODF2 (NM_002540.3,1520-1538).
ctgagctttctaaatccat

SEQ ID NO: 292141 - DNA, 19 bp, Homo sapiens
  siRNA target sequence for ODF2 (NM_002540.3,1604-1622).
gcatgcagattaagaatct

SEQ ID NO: 292142 - DNA, 19 bp, Homo sapiens
  siRNA target sequence for ODF2 (NM_002540.3,1628-1646).
gcagcgggaatcagcataa

SEQ ID NO: 292143 - DNA, 19 bp, Homo sapiens
  siRNA target sequence for ODF2 (NM_002540.3,1794-1812).
cgctgacaaggatctttat

SEQ ID NO: 292144 - DNA, 19 bp, Homo sapiens
  siRNA target sequence for ODF2 (NM_002540.3,1813-1831).
gtcgctgaagctttatcca

SEQ ID NO: 292145 - DNA, 19 bp, Homo sapiens
  siRNA target sequence for ODF2 (NM_002540.3,1851-1869).
ccgctacaaccaagttgta

SEQ ID NO: 292146 - DNA, 19 bp, Homo sapiens
  siRNA target sequence for ODF2 (NM_002540.3,1852-1870).
cgctacaaccaagttgtaa

SEQ ID NO: 292147 - DNA, 19 bp, Homo sapiens
  siRNA target sequence for ODF2 (NM_002540.3,1853-1871).
gctacaaccaagttgtaaa

SEQ ID NO: 292148 - DNA, 19 bp, Homo sapiens
  siRNA target sequence for ODF2 (NM_002540.3,1914-1932).
ccgggtaacagatcttgta

SEQ ID NO: 292149 - DNA, 19 bp, Homo sapiens
  siRNA target sequence for ODF2 (NM_002540.3,1915-1933).
cgggtaacagatcttgtaa

SEQ ID NO: 292150 - DNA, 19 bp, Homo sapiens
  siRNA target sequence for ODF2 (NM_002540.3,1998-2016).
ccgtcagactgctgagtat

SEQ ID NO: 292151 - DNA, 19 bp, Homo sapiens
  siRNA target sequence for ODF2 (NM_002540.3,1999-2017).
cgtcagactgctgagtatt

SEQ ID NO: 292152 - DNA, 19 bp, Homo sapiens
  siRNA target sequence for ODF2 (NM_002540.3,2062-2080).
ccaatggaggacaaactca

SEQ ID NO: 292153 - DNA, 19 bp, Homo sapiens
  siRNA target sequence for ODF2 (NM_002540.3,2124-2142).
gaactatgaggggatgatt

SEQ ID NO: 292154 - DNA, 19 bp, Homo sapiens
  siRNA target sequence for ODF2 (NM_002540.3,2134-2152).
gggatgattgacaactata

SEQ ID NO: 292155 - DNA, 19 bp, Homo sapiens
  siRNA target sequence for ODF2 (NM_002540.3,2172-2190).
cagattggaggctgatgaa

SEQ ID NO: 292156 - DNA, 19 bp, Homo sapiens
  siRNA target sequence for ODF2 (NM_002540.3,2202-2220).
gctagaacgctgtgacaaa

SEQ ID NO: 292157 - DNA, 19 bp, Homo sapiens
  siRNA target sequence for ODF2 (NM_002540.3,2369-2387).
gctatgagcggaagaacat

SEQ ID NO: 292158 - DNA, 19 bp, Homo sapiens
  siRNA target sequence for ODF2 (NM_002540.3,2537-2555).
cgaccagtgcccagaatat

SEQ ID NO: 292159 - DNA, 19 bp, Homo sapiens
  siRNA target sequence for ODF2 (NM_002540.3,2540-2558).
ccagtgcccagaatatcga

SEQ ID NO: 292160 - DNA, 19 bp, Homo sapiens
  siRNA target sequence for ODF2 (NM_002540.3,2902-2920).
gtccagttcctcaaatcat

SEQ ID NO: 292161 - DNA, 19 bp, Homo sapiens
  siRNA target sequence for ODF2 (NM_002540.3,2938-2956).
ggggatggtccctattcca

SEQ ID NO: 292162 - DNA, 19 bp, Homo sapiens
  siRNA target sequence for ODF2 (NM_153437.1,326-344).
cgagtctcacgcagaaaaa

SEQ ID NO: 292163 - DNA, 19 bp, Homo sapiens
  siRNA target sequence for ODF2 (NM_153437.1,329-347).
gtctcacgcagaaaaaggt

SEQ ID NO: 292164 - DNA, 19 bp, Homo sapiens
  siRNA target sequence for ODF2 (NM_153437.1,365-383).
gcgcacccagtgtaactgt

SEQ ID NO: 292165 - DNA, 19 bp, Homo sapiens
  siRNA target sequence for OSF-2 (NM_006475.1,37-55).
ctctactattgctgcttat

SEQ ID NO: 292166 - DNA, 19 bp, Homo sapiens
  siRNA target sequence for OSF-2 (NM_006475.1,42-60).
ctattgctgcttattgtta

SEQ ID NO: 292167 - DNA, 19 bp, Homo sapiens
  siRNA target sequence for OSF-2 (NM_006475.1,64-82).
ctataaacgccaacaatca

SEQ ID NO: 292168 - DNA, 19 bp, Homo sapiens
  siRNA target sequence for OSF-2 (NM_006475.1,123-141).
gaccaaggcccaaatgtct

SEQ ID NO: 292169 - DNA, 19 bp, Homo sapiens
  siRNA target sequence for OSF-2 (NM_006475.1,163-181).
gcaccaaaaagaaatactt

SEQ ID NO: 292170 - DNA, 19 bp, Homo sapiens
  siRNA target sequence for OSF-2 (NM_006475.1,190-208).
gtaagaactggtataaaaa

SEQ ID NO: 292171 - DNA, 19 bp, Homo sapiens
  siRNA target sequence for OSF-2 (NM_006475.1,344-362).
cacaacgcagcgctattct

SEQ ID NO: 292172 - DNA, 19 bp, Homo sapiens
  siRNA target sequence for OSF-2 (NM_006475.1,346-364).
caacgcagcgctattctga

SEQ ID NO: 292173 - DNA, 19 bp, Homo sapiens
  siRNA target sequence for OSF-2 (NM_006475.1,398-416).
gggatccttcacttacttt

SEQ ID NO: 292174 - DNA, 19 bp, Homo sapiens
  siRNA target sequence for OSF-2 (NM_006475.1,432-450).
gcttgggacaacttggatt

SEQ ID NO: 292175 - DNA, 19 bp, Homo sapiens
  siRNA target sequence for OSF-2 (NM_006475.1,438-456).
gacaacttggattctgata

SEQ ID NO: 292176 - DNA, 19 bp, Homo sapiens
  siRNA target sequence for OSF-2 (NM_006475.1,473-491).
gagcaacgtgaatgttgaa

SEQ ID NO: 292177 - DNA, 19 bp, Homo sapiens
  siRNA target sequence for OSF-2 (NM_006475.1,475-493).
gcaacgtgaatgttgaatt

SEQ ID NO: 292178 - DNA, 19 bp, Homo sapiens
  siRNA target sequence for OSF-2 (NM_006475.1,476-494).
caacgtgaatgttgaatta

SEQ ID NO: 292179 - DNA, 19 bp, Homo sapiens
  siRNA target sequence for OSF-2 (NM_006475.1,533-551).
gttgaccaaggacttaaaa

SEQ ID NO: 292180 - DNA, 19 bp, Homo sapiens
  siRNA target sequence for OSF-2 (NM_006475.1,545-563).
cttaaaaaatggcatgatt

SEQ ID NO: 292181 - DNA, 19 bp, Homo sapiens
  siRNA target sequence for OSF-2 (NM_006475.1,556-574).
gcatgattattccttcaat

SEQ ID NO: 292182 - DNA, 19 bp, Homo sapiens
  siRNA target sequence for OSF-2 (NM_006475.1,567-585).
ccttcaatgtataacaatt

SEQ ID NO: 292183 - DNA, 19 bp, Homo sapiens
  siRNA target sequence for OSF-2 (NM_006475.1,596-614).
cattaaccattatcctaat

SEQ ID NO: 292184 - DNA, 19 bp, Homo sapiens
  siRNA target sequence for OSF-2 (NM_006475.1,617-635).
ggttgtcactgttaattgt

SEQ ID NO: 292185 - DNA, 19 bp, Homo sapiens
  siRNA target sequence for OSF-2 (NM_006475.1,652-670).
ggaaccagattgcaacaaa

SEQ ID NO: 292186 - DNA, 19 bp, Homo sapiens
  siRNA target sequence for OSF-2 (NM_006475.1,653-671).
gaaccagattgcaacaaat

SEQ ID NO: 292187 - DNA, 19 bp, Homo sapiens
  siRNA target sequence for OSF-2 (NM_006475.1,690-708).
gaccgtgtgcttacacaaa

SEQ ID NO: 292188 - DNA, 19 bp, Homo sapiens
  siRNA target sequence for OSF-2 (NM_006475.1,692-710).
ccgtgtgcttacacaaatt

SEQ ID NO: 292189 - DNA, 19 bp, Homo sapiens
  siRNA target sequence for OSF-2 (NM_006475.1,696-714).
gtgcttacacaaattggta

SEQ ID NO: 292190 - DNA, 19 bp, Homo sapiens
  siRNA target sequence for OSF-2 (NM_006475.1,712-730).
gtacctcaattcaagactt

SEQ ID NO: 292191 - DNA, 19 bp, Homo sapiens
  siRNA target sequence for OSF-2 (NM_006475.1,715-733).
cctcaattcaagacttcat

SEQ ID NO: 292192 - DNA, 19 bp, Homo sapiens
  siRNA target sequence for OSF-2 (NM_006475.1,718-736).
caattcaagacttcattga

SEQ ID NO: 292193 - DNA, 19 bp, Homo sapiens
  siRNA target sequence for OSF-2 (NM_006475.1,771-789).
gccatcacatcggacatat

SEQ ID NO: 292194 - DNA, 19 bp, Homo sapiens
  siRNA target sequence for OSF-2 (NM_006475.1,772-790).
ccatcacatcggacatatt

SEQ ID NO: 292195 - DNA, 19 bp, Homo sapiens
  siRNA target sequence for OSF-2 (NM_006475.1,832-850).
ccaccaatgaggcttttga

SEQ ID NO: 292196 - DNA, 19 bp, Homo sapiens
  siRNA target sequence for OSF-2 (NM_006475.1,858-876).
ccacgaggtgtcctagaaa

SEQ ID NO: 292197 - DNA, 19 bp, Homo sapiens
  siRNA target sequence for OSF-2 (NM_006475.1,897-915).
gcttccgaagctcttatga

SEQ ID NO: 292198 - DNA, 19 bp, Homo sapiens
  siRNA target sequence for OSF-2 (NM_006475.1,914-932).
gaagtaccacatcttaaat

SEQ ID NO: 292199 - DNA, 19 bp, Homo sapiens
  siRNA target sequence for OSF-2 (NM_006475.1,917-935).
gtaccacatcttaaatact

SEQ ID NO: 292200 - DNA, 19 bp, Homo sapiens
  siRNA target sequence for OSF-2 (NM_006475.1,960-978).
ggaggagcagtctttgaga

SEQ ID NO: 292201 - DNA, 19 bp, Homo sapiens
  siRNA target sequence for OSF-2 (NM_006475.1,1006-1024).
gatgtgacggtgacagtat

SEQ ID NO: 292202 - DNA, 19 bp, Homo sapiens
  siRNA target sequence for OSF-2 (NM_006475.1,1013-1031).
cggtgacagtataacagta

SEQ ID NO: 292203 - DNA, 19 bp, Homo sapiens
  siRNA target sequence for OSF-2 (NM_006475.1,1015-1033).
gtgacagtataacagtaaa

SEQ ID NO: 292204 - DNA, 19 bp, Homo sapiens
  siRNA target sequence for OSF-2 (NM_006475.1,1078-1096).
gtgtgatccatttgattga

SEQ ID NO: 292205 - DNA, 19 bp, Homo sapiens
  siRNA target sequence for OSF-2 (NM_006475.1,1100-1118).
ggtcctaattcctgattct

SEQ ID NO: 292206 - DNA, 19 bp, Homo sapiens
  siRNA target sequence for OSF-2 (NM_006475.1,1117-1135).
ctgccaaacaagttattga

SEQ ID NO: 292207 - DNA, 19 bp, Homo sapiens
  siRNA target sequence for OSF-2 (NM_006475.1,1156-1174).
ccaccttcacggatcttgt

SEQ ID NO: 292208 - DNA, 19 bp, Homo sapiens
  siRNA target sequence for OSF-2 (NM_006475.1,1166-1184).
ggatcttgtggcccaatta

SEQ ID NO: 292209 - DNA, 19 bp, Homo sapiens
  siRNA target sequence for OSF-2 (NM_006475.1,1226-1244).
gctggcacctgtgaataat

SEQ ID NO: 292210 - DNA, 19 bp, Homo sapiens
  siRNA target sequence for OSF-2 (NM_006475.1,1231-1249).
cacctgtgaataatgcatt

SEQ ID NO: 292211 - DNA, 19 bp, Homo sapiens
  siRNA target sequence for OSF-2 (NM_006475.1,1277-1295).
gcgcctccttaaattaatt

SEQ ID NO: 292212 - DNA, 19 bp, Homo sapiens
  siRNA target sequence for OSF-2 (NM_006475.1,1326-1344).
ggccttaatgagctttaca

SEQ ID NO: 292213 - DNA, 19 bp, Homo sapiens
  siRNA target sequence for OSF-2 (NM_006475.1,1377-1395).
cagctcagagtcttcgtat

SEQ ID NO: 292214 - DNA, 19 bp, Homo sapiens
  siRNA target sequence for OSF-2 (NM_006475.1,1379-1397).
gctcagagtcttcgtatat

SEQ ID NO: 292215 - DNA, 19 bp, Homo sapiens
  siRNA target sequence for OSF-2 (NM_006475.1,1382-1400).
cagagtcttcgtatatcgt

SEQ ID NO: 292216 - DNA, 19 bp, Homo sapiens
  siRNA target sequence for OSF-2 (NM_006475.1,1404-1422).
gctgtctgcattgaaaatt

SEQ ID NO: 292217 - DNA, 19 bp, Homo sapiens
  siRNA target sequence for OSF-2 (NM_006475.1,1453-1471).
gaaacggtgcgattcacat

SEQ ID NO: 292218 - DNA, 19 bp, Homo sapiens
  siRNA target sequence for OSF-2 (NM_006475.1,1504-1522).
ccctccatgaaaagttaaa

SEQ ID NO: 292219 - DNA, 19 bp, Homo sapiens
  siRNA target sequence for OSF-2 (NM_006475.1,1544-1562).
cttcctcagcctacttgaa

SEQ ID NO: 292220 - DNA, 19 bp, Homo sapiens
  siRNA target sequence for OSF-2 (NM_006475.1,1597-1615).
gagactggacattatttgt

SEQ ID NO: 292221 - DNA, 19 bp, Homo sapiens
  siRNA target sequence for OSF-2 (NM_006475.1,1616-1634).
gccaaccaatgatgctttt

SEQ ID NO: 292222 - DNA, 19 bp, Homo sapiens
  siRNA target sequence for OSF-2 (NM_006475.1,1617-1635).
ccaaccaatgatgctttta

SEQ ID NO: 292223 - DNA, 19 bp, Homo sapiens
  siRNA target sequence for OSF-2 (NM_006475.1,1743-1761).
gaacctggtgttactaaca

SEQ ID NO: 292224 - DNA, 19 bp, Homo sapiens
  siRNA target sequence for OSF-2 (NM_006475.1,1749-1767).
ggtgttactaacattttaa

SEQ ID NO: 292225 - DNA, 19 bp, Homo sapiens
  siRNA target sequence for OSF-2 (NM_006475.1,1850-1868).
catcatgacaacaaatggt

SEQ ID NO: 292226 - DNA, 19 bp, Homo sapiens
  siRNA target sequence for OSF-2 (NM_006475.1,1861-1879).
caaatggtgtaattcatgt

SEQ ID NO: 292227 - DNA, 19 bp, Homo sapiens
  siRNA target sequence for OSF-2 (NM_006475.1,1867-1885).
gtgtaattcatgttgtaga

SEQ ID NO: 292228 - DNA, 19 bp, Homo sapiens
  siRNA target sequence for OSF-2 (NM_006475.1,1909-1927).
cacctgttggaaatgatca

SEQ ID NO: 292229 - DNA, 19 bp, Homo sapiens
  siRNA target sequence for OSF-2 (NM_006475.1,1926-1944).
caactgctggaaatactta

SEQ ID NO: 292230 - DNA, 19 bp, Homo sapiens
  siRNA target sequence for OSF-2 (NM_006475.1,2003-2021).
ccccgtgactgtctataca

SEQ ID NO: 292231 - DNA, 19 bp, Homo sapiens
  siRNA target sequence for OSF-2 (NM_006475.1,2004-2022).
cccgtgactgtctatacaa

SEQ ID NO: 292232 - DNA, 19 bp, Homo sapiens
  siRNA target sequence for OSF-2 (NM_006475.1,2071-2089).
gcagtcttcagcctattat

SEQ ID NO: 292233 - DNA, 19 bp, Homo sapiens
  siRNA target sequence for OSF-2 (NM_006475.1,2074-2092).
gtcttcagcctattatcaa

SEQ ID NO: 292234 - DNA, 19 bp, Homo sapiens
  siRNA target sequence for OSF-2 (NM_006475.1,2097-2115).
gaaggacccacactaacaa

SEQ ID NO: 292235 - DNA, 19 bp, Homo sapiens
  siRNA target sequence for OSF-2 (NM_006475.1,2101-2119).
gacccacactaacaaaagt

SEQ ID NO: 292236 - DNA, 19 bp, Homo sapiens
  siRNA target sequence for OSF-2 (NM_006475.1,2103-2121).
cccacactaacaaaagtca

SEQ ID NO: 292237 - DNA, 19 bp, Homo sapiens
  siRNA target sequence for OSF-2 (NM_006475.1,2137-2155).
ctgaattcagactgattaa

SEQ ID NO: 292238 - DNA, 19 bp, Homo sapiens
  siRNA target sequence for OSF-2 (NM_006475.1,2257-2275).
cacgagaagaacgaatcat

SEQ ID NO: 292239 - DNA, 19 bp, Homo sapiens
  siRNA target sequence for OSF-2 (NM_006475.1,2259-2277).
cgagaagaacgaatcatta

SEQ ID NO: 292240 - DNA, 19 bp, Homo sapiens
  siRNA target sequence for OSF-2 (NM_006475.1,2365-2383).
ccaaggtcaccaaattcat

SEQ ID NO: 292241 - DNA, 19 bp, Homo sapiens
  siRNA target sequence for OSF-2 (NM_006475.1,2369-2387).
ggtcaccaaattcattgaa

SEQ ID NO: 292242 - DNA, 19 bp, Homo sapiens
  siRNA target sequence for OSF-2 (NM_006475.1,2484-2502).
ggttctagaagacgattaa

SEQ ID NO: 292243 - DNA, 19 bp, Homo sapiens
  siRNA target sequence for PKP3 (NM_007183.1,960-978).
gacgtgcatgggttcaaca

SEQ ID NO: 292244 - DNA, 19 bp, Homo sapiens
  siRNA target sequence for PKP3 (NM_007183.1,1006-1024).
gactcagcagcggttttga

SEQ ID NO: 292245 - DNA, 19 bp, Homo sapiens
  siRNA target sequence for PKP3 (NM_007183.1,1015-1033).
gcggttttgatgacattga

SEQ ID NO: 292246 - DNA, 19 bp, Homo sapiens
  siRNA target sequence for PKP3 (NM_007183.1,1225-1243).
ccatgcgcaacctcatcta

SEQ ID NO: 292247 - DNA, 19 bp, Homo sapiens
  siRNA target sequence for PKP3 (NM_007183.1,2028-2046).
gagcaggagcgtattctga

SEQ ID NO: 292248 - DNA, 19 bp, Homo sapiens
  siRNA target sequence for PKP3 (NM_007183.1,2282-2300).
ccgagacctgctgtatttt

SEQ ID NO: 292249 - DNA, 19 bp, Homo sapiens
  siRNA target sequence for PKP3 (NM_007183.1,2305-2323).
gactccgaaagctcatctt

SEQ ID NO: 292250 - DNA, 19 bp, Homo sapiens
  siRNA target sequence for PKP3 (NM_007183.1,2310-2328).
cgaaagctcatcttcatca

SEQ ID NO: 292251 - DNA, 19 bp, Homo sapiens
  siRNA target sequence for PKP3 (NM_007183.1,2389-2407).
ccaacctgtggcagtacaa

SEQ ID NO: 292252 - DNA, 19 bp, Homo sapiens
  siRNA target sequence for PKP4 (NM_003628.2,325-343).
gttgccagtcagctagaaa

SEQ ID NO: 292253 - DNA, 19 bp, Homo sapiens
  siRNA target sequence for PKP4 (NM_003628.2,328-346).
gccagtcagctagaaagat

SEQ ID NO: 292254 - DNA, 19 bp, Homo sapiens
  siRNA target sequence for PKP4 (NM_003628.2,330-348).
cagtcagctagaaagatgt

SEQ ID NO: 292255 - DNA, 19 bp, Homo sapiens
  siRNA target sequence for PKP4 (NM_003628.2,428-446).
caaatactggtgtaagcaa

SEQ ID NO: 292256 - DNA, 19 bp, Homo sapiens
  siRNA target sequence for PKP4 (NM_003628.2,463-481).
gctgtccagcccaacaact

SEQ ID NO: 292257 - DNA, 19 bp, Homo sapiens
  siRNA target sequence for PKP4 (NM_003628.2,464-482).
ctgtccagcccaacaacta

SEQ ID NO: 292258 - DNA, 19 bp, Homo sapiens
  siRNA target sequence for PKP4 (NM_003628.2,529-547).
cagacatctctccatgaaa

SEQ ID NO: 292259 - DNA, 19 bp, Homo sapiens
  siRNA target sequence for PKP4 (NM_003628.2,552-570).
gggatcattgggtaactca

SEQ ID NO: 292260 - DNA, 19 bp, Homo sapiens
  siRNA target sequence for PKP4 (NM_003628.2,553-571).
ggatcattgggtaactcaa

SEQ ID NO: 292261 - DNA, 19 bp, Homo sapiens
  siRNA target sequence for PKP4 (NM_003628.2,561-579).
gggtaactcaagaagttca

SEQ ID NO: 292262 - DNA, 19 bp, Homo sapiens
  siRNA target sequence for PKP4 (NM_003628.2,670-688).
cagcattcattcataggat

SEQ ID NO: 292263 - DNA, 19 bp, Homo sapiens
  siRNA target sequence for PKP4 (NM_003628.2,765-783).
catgagaagagttagttca

SEQ ID NO: 292264 - DNA, 19 bp, Homo sapiens
  siRNA target sequence for PKP4 (NM_003628.2,794-812).
gagcacagtctccttctta

SEQ ID NO: 292265 - DNA, 19 bp, Homo sapiens
  siRNA target sequence for PKP4 (NM_003628.2,907-925).
ctgaaccccagtgcatatt

SEQ ID NO: 292266 - DNA, 19 bp, Homo sapiens
  siRNA target sequence for PKP4 (NM_003628.2,978-996).
cgcctccccaacagctata

SEQ ID NO: 292267 - DNA, 19 bp, Homo sapiens
  siRNA target sequence for PKP4 (NM_003628.2,1043-1061).
gaccaacccctcaatacca

SEQ ID NO: 292268 - DNA, 19 bp, Homo sapiens
  siRNA target sequence for PKP4 (NM_003628.2,1365-1383).
cttgcacattactcctata

SEQ ID NO: 292269 - DNA, 19 bp, Homo sapiens
  siRNA target sequence for PKP4 (NM_003628.2,1368-1386).
gcacattactcctatatat

SEQ ID NO: 292270 - DNA, 19 bp, Homo sapiens
  siRNA target sequence for PKP4 (NM_003628.2,1516-1534).
caacgaagtacccttacat

SEQ ID NO: 292271 - DNA, 19 bp, Homo sapiens
  siRNA target sequence for PKP4 (NM_003628.2,1582-1600).
ccctacaggcctatacaat

SEQ ID NO: 292272 - DNA, 19 bp, Homo sapiens
  siRNA target sequence for PKP4 (NM_003628.2,1603-1621).
cgagtgcaagagtgcaatt

SEQ ID NO: 292273 - DNA, 19 bp, Homo sapiens
  siRNA target sequence for PKP4 (NM_003628.2,1604-1622).
gagtgcaagagtgcaatta

SEQ ID NO: 292274 - DNA, 19 bp, Homo sapiens
  siRNA target sequence for PKP4 (NM_003628.2,1661-1679).
ccacaagatccccatcaat

SEQ ID NO: 292275 - DNA, 19 bp, Homo sapiens
  siRNA target sequence for PKP4 (NM_003628.2,1662-1680).
cacaagatccccatcaata

SEQ ID NO: 292276 - DNA, 19 bp, Homo sapiens
  siRNA target sequence for PKP4 (NM_003628.2,1664-1682).
caagatccccatcaataga

SEQ ID NO: 292277 - DNA, 19 bp, Homo sapiens
  siRNA target sequence for PKP4 (NM_003628.2,1755-1773).
gcaccagttcccatctgtt

SEQ ID NO: 292278 - DNA, 19 bp, Homo sapiens
  siRNA target sequence for PKP4 (NM_003628.2,1806-1824).
gtgctttggtgacaacaaa

SEQ ID NO: 292279 - DNA, 19 bp, Homo sapiens
  siRNA target sequence for PKP4 (NM_003628.2,1814-1832).
gtgacaacaaagtgaagat

SEQ ID NO: 292280 - DNA, 19 bp, Homo sapiens
  siRNA target sequence for PKP4 (NM_003628.2,1830-1848).
gatggaggtgtgtaggtta

SEQ ID NO: 292281 - DNA, 19 bp, Homo sapiens
  siRNA target sequence for PKP4 (NM_003628.2,1939-1957).
ggcaagtctacagatgaaa

SEQ ID NO: 292282 - DNA, 19 bp, Homo sapiens
  siRNA target sequence for PKP4 (NM_003628.2,1998-2016).
gttgcgactgttgagaaaa

SEQ ID NO: 292283 - DNA, 19 bp, Homo sapiens
  siRNA target sequence for PKP4 (NM_003628.2,2001-2019).
gcgactgttgagaaaatct

SEQ ID NO: 292284 - DNA, 19 bp, Homo sapiens
  siRNA target sequence for PKP4 (NM_003628.2,2002-2020).
cgactgttgagaaaatcta

SEQ ID NO: 292285 - DNA, 19 bp, Homo sapiens
  siRNA target sequence for PKP4 (NM_003628.2,2003-2021).
gactgttgagaaaatctat

SEQ ID NO: 292286 - DNA, 19 bp, Homo sapiens
  siRNA target sequence for PKP4 (NM_003628.2,2040-2058).
gcttgttacaggagttctt

SEQ ID NO: 292287 - DNA, 19 bp, Homo sapiens
  siRNA target sequence for PKP4 (NM_003628.2,2041-2059).
cttgttacaggagttcttt

SEQ ID NO: 292288 - DNA, 19 bp, Homo sapiens
  siRNA target sequence for PKP4 (NM_003628.2,2053-2071).
gttctttggaatttatcct

SEQ ID NO: 292289 - DNA, 19 bp, Homo sapiens
  siRNA target sequence for PKP4 (NM_003628.2,2072-2090).
catgtgatgctgtaaaaat

SEQ ID NO: 292290 - DNA, 19 bp, Homo sapiens
  siRNA target sequence for PKP4 (NM_003628.2,2107-2125).
gctctctcaaccttaacaa

SEQ ID NO: 292291 - DNA, 19 bp, Homo sapiens
  siRNA target sequence for PKP4 (NM_003628.2,2110-2128).
ctctcaaccttaacaaaca

SEQ ID NO: 292292 - DNA, 19 bp, Homo sapiens
  siRNA target sequence for PKP4 (NM_003628.2,2112-2130).
ctcaaccttaacaaacact

SEQ ID NO: 292293 - DNA, 19 bp, Homo sapiens
  siRNA target sequence for PKP4 (NM_003628.2,2118-2136).
cttaacaaacactgtgatt

SEQ ID NO: 292294 - DNA, 19 bp, Homo sapiens
  siRNA target sequence for PKP4 (NM_003628.2,2143-2161).
cattctggatggaataact

SEQ ID NO: 292295 - DNA, 19 bp, Homo sapiens
  siRNA target sequence for PKP4 (NM_003628.2,2150-2168).
gatggaataactcttcttt

SEQ ID NO: 292296 - DNA, 19 bp, Homo sapiens
  siRNA target sequence for PKP4 (NM_003628.2,2219-2237).
cgacaggttgcctaaggaa

SEQ ID NO: 292297 - DNA, 19 bp, Homo sapiens
  siRNA target sequence for PKP4 (NM_003628.2,2292-2310).
ggtagactcactgttgtat

SEQ ID NO: 292298 - DNA, 19 bp, Homo sapiens
  siRNA target sequence for PKP4 (NM_003628.2,2430-2448).
gggactgaacgaattggat

SEQ ID NO: 292299 - DNA, 19 bp, Homo sapiens
  siRNA target sequence for PKP4 (NM_003628.2,2449-2467).
gacttactaggaaaagagt

SEQ ID NO: 292300 - DNA, 19 bp, Homo sapiens
  siRNA target sequence for PKP4 (NM_003628.2,2464-2482).
gagtctcccagcaaagact

SEQ ID NO: 292301 - DNA, 19 bp, Homo sapiens
  siRNA target sequence for PKP4 (NM_003628.2,2523-2541).
gaggactccgcaagaagat

SEQ ID NO: 292302 - DNA, 19 bp, Homo sapiens
  siRNA target sequence for PKP4 (NM_003628.2,2525-2543).
ggactccgcaagaagatca

SEQ ID NO: 292303 - DNA, 19 bp, Homo sapiens
  siRNA target sequence for PKP4 (NM_003628.2,2606-2624).
ggcacccatcggtggtaaa

SEQ ID NO: 292304 - DNA, 19 bp, Homo sapiens
  siRNA target sequence for PKP4 (NM_003628.2,2607-2625).
gcacccatcggtggtaaaa

SEQ ID NO: 292305 - DNA, 19 bp, Homo sapiens
  siRNA target sequence for PKP4 (NM_003628.2,2610-2628).
cccatcggtggtaaaacca

SEQ ID NO: 292306 - DNA, 19 bp, Homo sapiens
  siRNA target sequence for PKP4 (NM_003628.2,2611-2629).
ccatcggtggtaaaaccat

SEQ ID NO: 292307 - DNA, 19 bp, Homo sapiens
  siRNA target sequence for PKP4 (NM_003628.2,2612-2630).
catcggtggtaaaaccata

SEQ ID NO: 292308 - DNA, 19 bp, Homo sapiens
  siRNA target sequence for PKP4 (NM_003628.2,2615-2633).
cggtggtaaaaccatatct

SEQ ID NO: 292309 - DNA, 19 bp, Homo sapiens
  siRNA target sequence for PKP4 (NM_003628.2,2617-2635).
gtggtaaaaccatatctga

SEQ ID NO: 292310 - DNA, 19 bp, Homo sapiens
  siRNA target sequence for PKP4 (NM_003628.2,2634-2652).
gactcttctagcagaaagt

SEQ ID NO: 292311 - DNA, 19 bp, Homo sapiens
  siRNA target sequence for PKP4 (NM_003628.2,2776-2794).
gagcttctgagaatggata

SEQ ID NO: 292312 - DNA, 19 bp, Homo sapiens
  siRNA target sequence for PKP4 (NM_003628.2,2790-2808).
ggataacgatagagttgtt

SEQ ID NO: 292313 - DNA, 19 bp, Homo sapiens
  siRNA target sequence for PKP4 (NM_003628.2,2791-2809).
gataacgatagagttgttt

SEQ ID NO: 292314 - DNA, 19 bp, Homo sapiens
  siRNA target sequence for PKP4 (NM_003628.2,2818-2836).
gcaacagccttgaggaata

SEQ ID NO: 292315 - DNA, 19 bp, Homo sapiens
  siRNA target sequence for PKP4 (NM_003628.2,2819-2837).
caacagccttgaggaatat

SEQ ID NO: 292316 - DNA, 19 bp, Homo sapiens
  siRNA target sequence for PKP4 (NM_003628.2,2829-2847).
gaggaatatggcactagat

SEQ ID NO: 292317 - DNA, 19 bp, Homo sapiens
  siRNA target sequence for PKP4 (NM_003628.2,2831-2849).
ggaatatggcactagatgt

SEQ ID NO: 292318 - DNA, 19 bp, Homo sapiens
  siRNA target sequence for PKP4 (NM_003628.2,2832-2850).
gaatatggcactagatgtt

SEQ ID NO: 292319 - DNA, 19 bp, Homo sapiens
  siRNA target sequence for PKP4 (NM_003628.2,3052-3070).
ggcaggggcgacagatcat

SEQ ID NO: 292320 - DNA, 19 bp, Homo sapiens
  siRNA target sequence for PKP4 (NM_003628.2,3054-3072).
caggggcgacagatcatct

SEQ ID NO: 292321 - DNA, 19 bp, Homo sapiens
  siRNA target sequence for PKP4 (NM_003628.2,3094-3112).
gcccaggtcttgaatacat

SEQ ID NO: 292322 - DNA, 19 bp, Homo sapiens
  siRNA target sequence for PKP4 (NM_003628.2,3097-3115).
caggtcttgaatacattat

SEQ ID NO: 292323 - DNA, 19 bp, Homo sapiens
  siRNA target sequence for PKP4 (NM_003628.2,3124-3142).
cgggacctccggagcattt

SEQ ID NO: 292324 - DNA, 19 bp, Homo sapiens
  siRNA target sequence for PKP4 (NM_003628.2,3125-3143).
gggacctccggagcattta

SEQ ID NO: 292325 - DNA, 19 bp, Homo sapiens
  siRNA target sequence for PKP4 (NM_003628.2,3126-3144).
ggacctccggagcatttat

SEQ ID NO: 292326 - DNA, 19 bp, Homo sapiens
  siRNA target sequence for PKP4 (NM_003628.2,3127-3145).
gacctccggagcatttata

SEQ ID NO: 292327 - DNA, 19 bp, Homo sapiens
  siRNA target sequence for PKP4 (NM_003628.2,3129-3147).
cctccggagcatttataaa

SEQ ID NO: 292328 - DNA, 19 bp, Homo sapiens
  siRNA target sequence for PKP4 (NM_003628.2,3130-3148).
ctccggagcatttataaaa

SEQ ID NO: 292329 - DNA, 19 bp, Homo sapiens
  siRNA target sequence for PKP4 (NM_003628.2,3158-3176).
ggaatcagaaccattttat

SEQ ID NO: 292330 - DNA, 19 bp, Homo sapiens
  siRNA target sequence for PKP4 (NM_003628.2,3195-3213).
ggagcgagaccgattcaaa

SEQ ID NO: 292331 - DNA, 19 bp, Homo sapiens
  siRNA target sequence for PKP4 (NM_003628.2,3196-3214).
gagcgagaccgattcaaat

SEQ ID NO: 292332 - DNA, 19 bp, Homo sapiens
  siRNA target sequence for PKP4 (NM_003628.2,3200-3218).
gagaccgattcaaatcaca

SEQ ID NO: 292333 - DNA, 19 bp, Homo sapiens
  siRNA target sequence for PKP4 (NM_003628.2,3312-3330).
ccctcgctctgaatacgat

SEQ ID NO: 292334 - DNA, 19 bp, Homo sapiens
  siRNA target sequence for PKP4 (NM_003628.2,3313-3331).
cctcgctctgaatacgata

SEQ ID NO: 292335 - DNA, 19 bp, Homo sapiens
  siRNA target sequence for PKP4 (NM_003628.2,3340-3358).
ccacctatgcagtattaca

SEQ ID NO: 292336 - DNA, 19 bp, Homo sapiens
  siRNA target sequence for PKP4 (NM_003628.2,3364-3382).
caaggggatgccacacata

SEQ ID NO: 292337 - DNA, 19 bp, Homo sapiens
  siRNA target sequence for PKP4 (NM_003628.2,3404-3422).
gcaaaccttcaccaattta

SEQ ID NO: 292338 - DNA, 19 bp, Homo sapiens
  siRNA target sequence for PKP4 (NM_003628.2,3461-3479).
gacggctacagcatcaaca

SEQ ID NO: 292339 - DNA, 19 bp, Homo sapiens
  siRNA target sequence for PKP4 (NM_003628.2,3480-3498).
gctgtattatagtcaagat

SEQ ID NO: 292340 - DNA, 19 bp, Homo sapiens
  siRNA target sequence for PKP4 (NM_003628.2,3520-3538).
gatgcatacagattgtatt

SEQ ID NO: 292341 - DNA, 19 bp, Homo sapiens
  siRNA target sequence for PKP4 (NM_003628.2,3524-3542).
catacagattgtatttgca

SEQ ID NO: 292342 - DNA, 19 bp, Homo sapiens
  siRNA target sequence for PKP4 (NM_003628.2,3540-3558).
gcagtctcctcatagctat

SEQ ID NO: 292343 - DNA, 19 bp, Homo sapiens
  siRNA target sequence for PKP4 (NM_003628.2,3543-3561).
gtctcctcatagctatgaa

SEQ ID NO: 292344 - DNA, 19 bp, Homo sapiens
  siRNA target sequence for PKP4 (NM_003628.2,3588-3606).
ctttccagcttctactgat

SEQ ID NO: 292345 - DNA, 19 bp, Homo sapiens
  siRNA target sequence for PKP4 (NM_003628.2,3595-3613).
gcttctactgattactcaa

SEQ ID NO: 292346 - DNA, 19 bp, Homo sapiens
  siRNA target sequence for PKP4 (NM_003628.2,3632-3650).
cgaccacaaattatgtaga

SEQ ID NO: 292347 - DNA, 19 bp, Homo sapiens
  siRNA target sequence for PKP4 (NM_003628.2,3635-3653).
ccacaaattatgtagactt

SEQ ID NO: 292348 - DNA, 19 bp, Homo sapiens
  siRNA target sequence for PKP4 (NM_003628.2,3651-3669).
cttttattccactaaacga

SEQ ID NO: 292349 - DNA, 19 bp, Homo sapiens
  siRNA target sequence for PKP4 (NM_003628.2,3659-3677).
ccactaaacgaccttctta

SEQ ID NO: 292350 - DNA, 19 bp, Homo sapiens
  siRNA target sequence for PKP4 (NM_003628.2,3674-3692).
cttatagagcagaacagta

SEQ ID NO: 292351 - DNA, 19 bp, Homo sapiens
  siRNA target sequence for PKP4 (NM_003628.2,3754-3772).
ctaaccttgttcagattga

SEQ ID NO: 292352 - DNA, 19 bp, Homo sapiens
  siRNA target sequence for PLP1 (NM_000533.2,257-275).
ctaattgagacctatttct

SEQ ID NO: 292353 - DNA, 19 bp, Homo sapiens
  siRNA target sequence for PLP1 (NM_000533.2,405-423).
gcgcagtcaggcagatctt

SEQ ID NO: 292354 - DNA, 19 bp, Homo sapiens
  siRNA target sequence for PLP1 (NM_000533.2,406-424).
cgcagtcaggcagatcttt

SEQ ID NO: 292355 - DNA, 19 bp, Homo sapiens
  siRNA target sequence for PLP1 (NM_000533.2,526-544).
ggagcgggtgtgtcattgt

SEQ ID NO: 292356 - DNA, 19 bp, Homo sapiens
  siRNA target sequence for PLP1 (NM_000533.2,527-545).
gagcgggtgtgtcattgtt

SEQ ID NO: 292357 - DNA, 19 bp, Homo sapiens
  siRNA target sequence for PLP1 (NM_000533.2,561-579).
gacatcccgacaagtttgt

SEQ ID NO: 292358 - DNA, 19 bp, Homo sapiens
  siRNA target sequence for PLP1 (NM_000533.2,761-779).
gctttccctggcaaggttt

SEQ ID NO: 292359 - DNA, 19 bp, Homo sapiens
  siRNA target sequence for PNN (NM_002687.2,88-106).
gcggtcgccgtgagaactt

SEQ ID NO: 292360 - DNA, 19 bp, Homo sapiens
  siRNA target sequence for PNN (NM_002687.2,89-107).
cggtcgccgtgagaacttt

SEQ ID NO: 292361 - DNA, 19 bp, Homo sapiens
  siRNA target sequence for PNN (NM_002687.2,144-162).
gaacgtggatgagaacatt

SEQ ID NO: 292362 - DNA, 19 bp, Homo sapiens
  siRNA target sequence for PNN (NM_002687.2,242-260).
gtagaggacgtggtagttt

SEQ ID NO: 292363 - DNA, 19 bp, Homo sapiens
  siRNA target sequence for PNN (NM_002687.2,270-288).
gcgtggattctcagatagt

SEQ ID NO: 292364 - DNA, 19 bp, Homo sapiens
  siRNA target sequence for PNN (NM_002687.2,295-313).
ggacccccagccaaacaga

SEQ ID NO: 292365 - DNA, 19 bp, Homo sapiens
  siRNA target sequence for PNN (NM_002687.2,452-470).
gcacacgtagagaccttat

SEQ ID NO: 292366 - DNA, 19 bp, Homo sapiens
  siRNA target sequence for PNN (NM_002687.2,455-473).
cacgtagagaccttatcca

SEQ ID NO: 292367 - DNA, 19 bp, Homo sapiens
  siRNA target sequence for PNN (NM_002687.2,463-481).
gaccttatccaggatcaaa

SEQ ID NO: 292368 - DNA, 19 bp, Homo sapiens
  siRNA target sequence for PNN (NM_002687.2,465-483).
ccttatccaggatcaaaat

SEQ ID NO: 292369 - DNA, 19 bp, Homo sapiens
  siRNA target sequence for PNN (NM_002687.2,502-520).
caaaggaaccggcgaatat

SEQ ID NO: 292370 - DNA, 19 bp, Homo sapiens
  siRNA target sequence for PNN (NM_002687.2,593-611).
gccaggaaattgaacaaaa

SEQ ID NO: 292371 - DNA, 19 bp, Homo sapiens
  siRNA target sequence for PNN (NM_002687.2,676-694).
gagaggcgtgctaaacaga

SEQ ID NO: 292372 - DNA, 19 bp, Homo sapiens
  siRNA target sequence for PNN (NM_002687.2,830-848).
gtccagctacccaaaaact

SEQ ID NO: 292373 - DNA, 19 bp, Homo sapiens
  siRNA target sequence for PNN (NM_002687.2,832-850).
ccagctacccaaaaactaa

SEQ ID NO: 292374 - DNA, 19 bp, Homo sapiens
  siRNA target sequence for PNN (NM_002687.2,886-904).
gaaggtagacgcatcgaat

SEQ ID NO: 292375 - DNA, 19 bp, Homo sapiens
  siRNA target sequence for PNN (NM_002687.2,931-949).
gctaggcctagaagacaat

SEQ ID NO: 292376 - DNA, 19 bp, Homo sapiens
  siRNA target sequence for PNN (NM_002687.2,935-953).
ggcctagaagacaatcaat

SEQ ID NO: 292377 - DNA, 19 bp, Homo sapiens
  siRNA target sequence for PNN (NM_002687.2,1221-1239).
ggatagtcagcctgaagaa

SEQ ID NO: 292378 - DNA, 19 bp, Homo sapiens
  siRNA target sequence for PNN (NM_002687.2,1266-1284).
gaatgtcaaacatgtaatt

SEQ ID NO: 292379 - DNA, 19 bp, Homo sapiens
  siRNA target sequence for PNN (NM_002687.2,1286-1304).
ctgaccaggaggtaatgga

SEQ ID NO: 292380 - DNA, 19 bp, Homo sapiens
  siRNA target sequence for PNN (NM_002687.2,1291-1309).
caggaggtaatggaaacta

SEQ ID NO: 292381 - DNA, 19 bp, Homo sapiens
  siRNA target sequence for PNN (NM_002687.2,1302-1320).
ggaaactaatcgagttgaa

SEQ ID NO: 292382 - DNA, 19 bp, Homo sapiens
  siRNA target sequence for PNN (NM_002687.2,1303-1321).
gaaactaatcgagttgaaa

SEQ ID NO: 292383 - DNA, 19 bp, Homo sapiens
  siRNA target sequence for PNN (NM_002687.2,1307-1325).
ctaatcgagttgaaagtgt

SEQ ID NO: 292384 - DNA, 19 bp, Homo sapiens
  siRNA target sequence for PNN (NM_002687.2,1359-1377).
ggaaccagaaatggaattt

SEQ ID NO: 292385 - DNA, 19 bp, Homo sapiens
  siRNA target sequence for PNN (NM_002687.2,1384-1402).
gagccagataaagaatgta

SEQ ID NO: 292386 - DNA, 19 bp, Homo sapiens
  siRNA target sequence for PNN (NM_002687.2,1587-1605).
gcctgaggatttgtcatta

SEQ ID NO: 292387 - DNA, 19 bp, Homo sapiens
  siRNA target sequence for PNN (NM_002687.2,1617-1635).
gccaacaccccaagttact

SEQ ID NO: 292388 - DNA, 19 bp, Homo sapiens
  siRNA target sequence for PNN (NM_002687.2,1654-1672).
ctacctgagaggaaggatt

SEQ ID NO: 292389 - DNA, 19 bp, Homo sapiens
  siRNA target sequence for PNN (NM_002687.2,1769-1787).
gtagaggtcgagctagaaa

SEQ ID NO: 292390 - DNA, 19 bp, Homo sapiens
  siRNA target sequence for PNN (NM_002687.2,1772-1790).
gaggtcgagctagaaataa

SEQ ID NO: 292391 - DNA, 19 bp, Homo sapiens
  siRNA target sequence for PNN (NM_002687.2,1998-2016).
gggacataatagagataga

SEQ ID NO: 292392 - DNA, 19 bp, Homo sapiens
  siRNA target sequence for PNN (NM_002687.2,2000-2018).
gacataatagagatagaaa

SEQ ID NO: 292393 - DNA, 19 bp, Homo sapiens
  siRNA target sequence for PNN (NM_002687.2,2038-2056).
cggaagagaagggatactt

SEQ ID NO: 292394 - DNA, 19 bp, Homo sapiens
  siRNA target sequence for PNN (NM_002687.2,2040-2058).
gaagagaagggatacttca

SEQ ID NO: 292395 - DNA, 19 bp, Homo sapiens
  siRNA target sequence for PNN (NM_002687.2,2139-2157).
cgacagaaagaggtctata

SEQ ID NO: 292396 - DNA, 19 bp, Homo sapiens
  siRNA target sequence for PNN (NM_002687.2,2140-2158).
gacagaaagaggtctatat

SEQ ID NO: 292397 - DNA, 19 bp, Homo sapiens
  siRNA target sequence for PNN (NM_002687.2,2144-2162).
gaaagaggtctatatcaga

SEQ ID NO: 292398 - DNA, 19 bp, Homo sapiens
  siRNA target sequence for PRPH (NM_006262.2,64-82).
ggtccaccgccctcactat

SEQ ID NO: 292399 - DNA, 19 bp, Homo sapiens
  siRNA target sequence for PRPH (NM_006262.2,640-658).
ctagagcgcaagattgagt

SEQ ID NO: 292400 - DNA, 19 bp, Homo sapiens
  siRNA target sequence for PRPH (NM_006262.2,657-675).
gtctctgatggatgagatt

SEQ ID NO: 292401 - DNA, 19 bp, Homo sapiens
  siRNA target sequence for PRPH (NM_006262.2,949-967).
cgccagatccagagtctaa

SEQ ID NO: 292402 - DNA, 19 bp, Homo sapiens
  siRNA target sequence for PRPH (NM_006262.2,1089-1107).
ggagctgcgacagctaaaa

SEQ ID NO: 292403 - DNA, 19 bp, Homo sapiens
  siRNA target sequence for PRPH (NM_006262.2,1224-1242).
cgtgcccgtccattctttt

SEQ ID NO: 292404 - DNA, 19 bp, Homo sapiens
  siRNA target sequence for PRPH (NM_006262.2,1301-1319).
gccggaagacggttctgat

SEQ ID NO: 292405 - DNA, 19 bp, Homo sapiens
  siRNA target sequence for SPON2 (NM_012445.1,897-915).
gacacggtgaccgagataa

SEQ ID NO: 292406 - DNA, 19 bp, Homo sapiens
  siRNA target sequence for SPON2 (NM_012445.1,1055-1073).
cagggacaatgagattgta

SEQ ID NO: 292407 - DNA, 19 bp, Homo sapiens
  siRNA target sequence for SPON2 (NM_012445.1,1243-1261).
ctgagtgcgtccctgataa

SEQ ID NO: 292408 - DNA, 19 bp, Homo sapiens
  siRNA target sequence for SPON2 (NM_012445.1,1245-1263).
gagtgcgtccctgataact

SEQ ID NO: 292409 - DNA, 19 bp, Homo sapiens
  siRNA target sequence for TEKT1 (NM_053285.1,157-175).
ggcacattgctaacaagaa

SEQ ID NO: 292410 - DNA, 19 bp, Homo sapiens
  siRNA target sequence for TEKT1 (NM_053285.1,236-254).
gaggcttgtggatgaaatt

SEQ ID NO: 292411 - DNA, 19 bp, Homo sapiens
  siRNA target sequence for TEKT1 (NM_053285.1,274-292).
ctcaaagcgatgtgaacaa

SEQ ID NO: 292412 - DNA, 19 bp, Homo sapiens
  siRNA target sequence for TEKT1 (NM_053285.1,276-294).
caaagcgatgtgaacaaga

SEQ ID NO: 292413 - DNA, 19 bp, Homo sapiens
  siRNA target sequence for TEKT1 (NM_053285.1,335-353).
ggagttagatgacaaactt

SEQ ID NO: 292414 - DNA, 19 bp, Homo sapiens
  siRNA target sequence for TEKT1 (NM_053285.1,356-374).
gcagcttgtgaatgtaact

SEQ ID NO: 292415 - DNA, 19 bp, Homo sapiens
  siRNA target sequence for TEKT1 (NM_053285.1,373-391).
ctgatgatctactcatata

SEQ ID NO: 292416 - DNA, 19 bp, Homo sapiens
  siRNA target sequence for TEKT1 (NM_053285.1,378-396).
gatctactcatatataaga

SEQ ID NO: 292417 - DNA, 19 bp, Homo sapiens
  siRNA target sequence for TEKT1 (NM_053285.1,381-399).
ctactcatatataagatca

SEQ ID NO: 292418 - DNA, 19 bp, Homo sapiens
  siRNA target sequence for TEKT1 (NM_053285.1,604-622).
gctctgccaagtacaatct

SEQ ID NO: 292419 - DNA, 19 bp, Homo sapiens
  siRNA target sequence for TEKT1 (NM_053285.1,652-670).
ccctgaccatagatgatat

SEQ ID NO: 292420 - DNA, 19 bp, Homo sapiens
  siRNA target sequence for TEKT1 (NM_053285.1,1096-1114).
gtcgtgatgtcgcacaata

SEQ ID NO: 292421 - DNA, 19 bp, Homo sapiens
  siRNA target sequence for TEKT1 (NM_053285.1,1098-1116).
cgtgatgtcgcacaatata

SEQ ID NO: 292422 - DNA, 19 bp, Homo sapiens
  siRNA target sequence for TEKT1 (NM_053285.1,1107-1125).
gcacaatataggctaatga

SEQ ID NO: 292423 - DNA, 19 bp, Homo sapiens
  siRNA target sequence for TEKT1 (NM_053285.1,1108-1126).
cacaatataggctaatgaa

SEQ ID NO: 292424 - DNA, 19 bp, Homo sapiens
  siRNA target sequence for TEKT1 (NM_053285.1,1152-1170).
gtcgcaagattgaaggaaa

SEQ ID NO: 292425 - DNA, 19 bp, Homo sapiens
  siRNA target sequence for TEKT2 (NM_014466.2,170-188).
cccgactggcacactaaca

SEQ ID NO: 292426 - DNA, 19 bp, Homo sapiens
  siRNA target sequence for TEKT2 (NM_014466.2,222-240).
gagatgcttcccatcagat

SEQ ID NO: 292427 - DNA, 19 bp, Homo sapiens
  siRNA target sequence for TEKT2 (NM_014466.2,283-301).
gaccatttgggatgaacat

SEQ ID NO: 292428 - DNA, 19 bp, Homo sapiens
  siRNA target sequence for TEKT2 (NM_014466.2,362-380).
gacaagtgtctgacagatt

SEQ ID NO: 292429 - DNA, 19 bp, Homo sapiens
  siRNA target sequence for TEKT2 (NM_014466.2,364-382).
caagtgtctgacagattta

SEQ ID NO: 292430 - DNA, 19 bp, Homo sapiens
  siRNA target sequence for TEKT2 (NM_014466.2,367-385).
gtgtctgacagatttagat

SEQ ID NO: 292431 - DNA, 19 bp, Homo sapiens
  siRNA target sequence for TEKT2 (NM_014466.2,526-544).
ggaggatgagctgcataaa

SEQ ID NO: 292432 - DNA, 19 bp, Homo sapiens
  siRNA target sequence for TEKT2 (NM_014466.2,648-666).
ccgaccatcggggcaaaat

SEQ ID NO: 292433 - DNA, 19 bp, Homo sapiens
  siRNA target sequence for TEKT2 (NM_014466.2,707-725).
ctcagatccccaaacatct

SEQ ID NO: 292434 - DNA, 19 bp, Homo sapiens
  siRNA target sequence for TEKT2 (NM_014466.2,785-803).
gacttcagtcggttcaaca

SEQ ID NO: 292435 - DNA, 19 bp, Homo sapiens
  siRNA target sequence for TEKT2 (NM_014466.2,810-828).
gagcggaggctgagatgaa

SEQ ID NO: 292436 - DNA, 19 bp, Homo sapiens
  siRNA target sequence for TEKT2 (NM_014466.2,847-865).
ggaggccactgctctaact

SEQ ID NO: 292437 - DNA, 19 bp, Homo sapiens
  siRNA target sequence for TEKT2 (NM_014466.2,850-868).
ggccactgctctaactatt

SEQ ID NO: 292438 - DNA, 19 bp, Homo sapiens
  siRNA target sequence for TEKT2 (NM_014466.2,853-871).
cactgctctaactattgct

SEQ ID NO: 292439 - DNA, 19 bp, Homo sapiens
  siRNA target sequence for TEKT2 (NM_014466.2,898-916).
gagagttgcaacggaattt

SEQ ID NO: 292440 - DNA, 19 bp, Homo sapiens
  siRNA target sequence for TEKT2 (NM_014466.2,1382-1400).
ctgagtccactcaaaagct

SEQ ID NO: 292441 - DNA, 19 bp, Homo sapiens
  siRNA target sequence for TEKT3 (NM_031898.1,102-120).
ggaacgtgtaggttgtact

SEQ ID NO: 292442 - DNA, 19 bp, Homo sapiens
  siRNA target sequence for TEKT3 (NM_031898.1,103-121).
gaacgtgtaggttgtactt

SEQ ID NO: 292443 - DNA, 19 bp, Homo sapiens
  siRNA target sequence for TEKT3 (NM_031898.1,106-124).
cgtgtaggttgtactttaa

SEQ ID NO: 292444 - DNA, 19 bp, Homo sapiens
  siRNA target sequence for TEKT3 (NM_031898.1,109-127).
gtaggttgtactttaacga

SEQ ID NO: 292445 - DNA, 19 bp, Homo sapiens
  siRNA target sequence for TEKT3 (NM_031898.1,116-134).
gtactttaacgacaactta

SEQ ID NO: 292446 - DNA, 19 bp, Homo sapiens
  siRNA target sequence for TEKT3 (NM_031898.1,149-167).
caacaccaaccaactttct

SEQ ID NO: 292447 - DNA, 19 bp, Homo sapiens
  siRNA target sequence for TEKT3 (NM_031898.1,205-223).
cgctttccccactccaatt

SEQ ID NO: 292448 - DNA, 19 bp, Homo sapiens
  siRNA target sequence for TEKT3 (NM_031898.1,316-334).
cagagggtgtccgagaata

SEQ ID NO: 292449 - DNA, 19 bp, Homo sapiens
  siRNA target sequence for TEKT3 (NM_031898.1,393-411).
ctggtacaggtccaattta

SEQ ID NO: 292450 - DNA, 19 bp, Homo sapiens
  siRNA target sequence for TEKT3 (NM_031898.1,402-420).
gtccaatttaaccaactat

SEQ ID NO: 292451 - DNA, 19 bp, Homo sapiens
  siRNA target sequence for TEKT3 (NM_031898.1,428-446).
ccaacacttcccgacataa

SEQ ID NO: 292452 - DNA, 19 bp, Homo sapiens
  siRNA target sequence for TEKT3 (NM_031898.1,429-447).
caacacttcccgacataat

SEQ ID NO: 292453 - DNA, 19 bp, Homo sapiens
  siRNA target sequence for TEKT3 (NM_031898.1,473-491).
ctcgcctgattcaagacaa

SEQ ID NO: 292454 - DNA, 19 bp, Homo sapiens
  siRNA target sequence for TEKT3 (NM_031898.1,475-493).
cgcctgattcaagacaaat

SEQ ID NO: 292455 - DNA, 19 bp, Homo sapiens
  siRNA target sequence for TEKT3 (NM_031898.1,476-494).
gcctgattcaagacaaata

SEQ ID NO: 292456 - DNA, 19 bp, Homo sapiens
  siRNA target sequence for TEKT3 (NM_031898.1,477-495).
cctgattcaagacaaatat

SEQ ID NO: 292457 - DNA, 19 bp, Homo sapiens
  siRNA target sequence for TEKT3 (NM_031898.1,480-498).
gattcaagacaaatatcaa

SEQ ID NO: 292458 - DNA, 19 bp, Homo sapiens
  siRNA target sequence for TEKT3 (NM_031898.1,638-656).
gactggagcgggctttgat

SEQ ID NO: 292459 - DNA, 19 bp, Homo sapiens
  siRNA target sequence for TEKT3 (NM_031898.1,678-696).
ggtagcccgagaatgtcta

SEQ ID NO: 292460 - DNA, 19 bp, Homo sapiens
  siRNA target sequence for TEKT3 (NM_031898.1,679-697).
gtagcccgagaatgtctat

SEQ ID NO: 292461 - DNA, 19 bp, Homo sapiens
  siRNA target sequence for TEKT3 (NM_031898.1,683-701).
cccgagaatgtctatttca

SEQ ID NO: 292462 - DNA, 19 bp, Homo sapiens
  siRNA target sequence for TEKT3 (NM_031898.1,684-702).
ccgagaatgtctatttcat

SEQ ID NO: 292463 - DNA, 19 bp, Homo sapiens
  siRNA target sequence for TEKT3 (NM_031898.1,692-710).
gtctatttcatcgagaaaa

SEQ ID NO: 292464 - DNA, 19 bp, Homo sapiens
  siRNA target sequence for TEKT3 (NM_031898.1,694-712).
ctatttcatcgagaaaaga

SEQ ID NO: 292465 - DNA, 19 bp, Homo sapiens
  siRNA target sequence for TEKT3 (NM_031898.1,726-744).
cctagttcacgatgaagtt

SEQ ID NO: 292466 - DNA, 19 bp, Homo sapiens
  siRNA target sequence for TEKT3 (NM_031898.1,754-772).
ctgctgacggaagttgata

SEQ ID NO: 292467 - DNA, 19 bp, Homo sapiens
  siRNA target sequence for TEKT3 (NM_031898.1,756-774).
gctgacggaagttgatact

SEQ ID NO: 292468 - DNA, 19 bp, Homo sapiens
  siRNA target sequence for TEKT3 (NM_031898.1,757-775).
ctgacggaagttgatacta

SEQ ID NO: 292469 - DNA, 19 bp, Homo sapiens
  siRNA target sequence for TEKT3 (NM_031898.1,761-779).
cggaagttgatactattct

SEQ ID NO: 292470 - DNA, 19 bp, Homo sapiens
  siRNA target sequence for TEKT3 (NM_031898.1,778-796).
ctgtgttgtcaagaaagaa

SEQ ID NO: 292471 - DNA, 19 bp, Homo sapiens
  siRNA target sequence for TEKT3 (NM_031898.1,991-1009).
gagtcctgggccaaattta

SEQ ID NO: 292472 - DNA, 19 bp, Homo sapiens
  siRNA target sequence for TEKT3 (NM_031898.1,995-1013).
cctgggccaaatttacaga

SEQ ID NO: 292473 - DNA, 19 bp, Homo sapiens
  siRNA target sequence for TEKT3 (NM_031898.1,1044-1062).
ggcagcttccgctaagcta

SEQ ID NO: 292474 - DNA, 19 bp, Homo sapiens
  siRNA target sequence for TEKT3 (NM_031898.1,1045-1063).
gcagcttccgctaagctaa

SEQ ID NO: 292475 - DNA, 19 bp, Homo sapiens
  siRNA target sequence for TEKT3 (NM_031898.1,1049-1067).
cttccgctaagctaagaga

SEQ ID NO: 292476 - DNA, 19 bp, Homo sapiens
  siRNA target sequence for TEKT3 (NM_031898.1,1064-1082).
gagacgacattgaaaacct

SEQ ID NO: 292477 - DNA, 19 bp, Homo sapiens
  siRNA target sequence for TEKT3 (NM_031898.1,1087-1105).
gttgtgactgccaatgaga

SEQ ID NO: 292478 - DNA, 19 bp, Homo sapiens
  siRNA target sequence for TEKT3 (NM_031898.1,1098-1116).
caatgagatgtggaatcaa

SEQ ID NO: 292479 - DNA, 19 bp, Homo sapiens
  siRNA target sequence for TEKT3 (NM_031898.1,1107-1125).
gtggaatcaattcaacaaa

SEQ ID NO: 292480 - DNA, 19 bp, Homo sapiens
  siRNA target sequence for TEKT3 (NM_031898.1,1221-1239).
gactgaaatgaccatagaa

SEQ ID NO: 292481 - DNA, 19 bp, Homo sapiens
  siRNA target sequence for TEKT3 (NM_031898.1,1308-1326).
cacaagacggccgaacatt

SEQ ID NO: 292482 - DNA, 19 bp, Homo sapiens
  siRNA target sequence for TEKT3 (NM_031898.1,1310-1328).
caagacggccgaacattga

SEQ ID NO: 292483 - DNA, 19 bp, Homo sapiens
  siRNA target sequence for TEKT3 (NM_031898.1,1313-1331).
gacggccgaacattgagtt

SEQ ID NO: 292484 - DNA, 19 bp, Homo sapiens
  siRNA target sequence for TEKT3 (NM_031898.1,1345-1363).
gctcagctacgccttgtta

SEQ ID NO: 292485 - DNA, 19 bp, Homo sapiens
  siRNA target sequence for TEKT3 (NM_031898.1,1346-1364).
ctcagctacgccttgttaa

SEQ ID NO: 292486 - DNA, 19 bp, Homo sapiens
  siRNA target sequence for TEKT3 (NM_031898.1,1437-1455).
gtcgctggtccacatcaaa

SEQ ID NO: 292487 - DNA, 19 bp, Homo sapiens
  siRNA target sequence for TEKT3 (NM_031898.1,1467-1485).
gtatgacctggctgtcaaa

SEQ ID NO: 292488 - DNA, 19 bp, Homo sapiens
  siRNA target sequence for THOC1 (NM_005131.1,51-69).
gcgcggacgcggtttacga

SEQ ID NO: 292489 - DNA, 19 bp, Homo sapiens
  siRNA target sequence for THOC1 (NM_005131.1,52-70).
cgcggacgcggtttacgaa

SEQ ID NO: 292490 - DNA, 19 bp, Homo sapiens
  siRNA target sequence for THOC1 (NM_005131.1,222-240).
gaaaacgttttagctatta

SEQ ID NO: 292491 - DNA, 19 bp, Homo sapiens
  siRNA target sequence for THOC1 (NM_005131.1,227-245).
cgttttagctattatttct

SEQ ID NO: 292492 - DNA, 19 bp, Homo sapiens
  siRNA target sequence for THOC1 (NM_005131.1,235-253).
ctattatttctcttgctat

SEQ ID NO: 292493 - DNA, 19 bp, Homo sapiens
  siRNA target sequence for THOC1 (NM_005131.1,250-268).
ctattgggggagtaactga

SEQ ID NO: 292494 - DNA, 19 bp, Homo sapiens
  siRNA target sequence for THOC1 (NM_005131.1,256-274).
ggggagtaactgaaggtat

SEQ ID NO: 292495 - DNA, 19 bp, Homo sapiens
  siRNA target sequence for THOC1 (NM_005131.1,257-275).
gggagtaactgaaggtatt

SEQ ID NO: 292496 - DNA, 19 bp, Homo sapiens
  siRNA target sequence for THOC1 (NM_005131.1,261-279).
gtaactgaaggtatttgta

SEQ ID NO: 292497 - DNA, 19 bp, Homo sapiens
  siRNA target sequence for THOC1 (NM_005131.1,280-298).
ccgcatctacaccttttgt

SEQ ID NO: 292498 - DNA, 19 bp, Homo sapiens
  siRNA target sequence for THOC1 (NM_005131.1,281-299).
cgcatctacaccttttgta

SEQ ID NO: 292499 - DNA, 19 bp, Homo sapiens
  siRNA target sequence for THOC1 (NM_005131.1,302-320).
gttgggagatgttttggat

SEQ ID NO: 292500 - DNA, 19 bp, Homo sapiens
  siRNA target sequence for THOC1 (NM_005131.1,332-350).
ggatcagtgtgacacaata

SEQ ID NO: 292501 - DNA, 19 bp, Homo sapiens
  siRNA target sequence for THOC1 (NM_005131.1,336-354).
cagtgtgacacaatattca

SEQ ID NO: 292502 - DNA, 19 bp, Homo sapiens
  siRNA target sequence for THOC1 (NM_005131.1,455-473).
gtctaaatcccagaataca

SEQ ID NO: 292503 - DNA, 19 bp, Homo sapiens
  siRNA target sequence for THOC1 (NM_005131.1,483-501).
ggacggattcagctctttt

SEQ ID NO: 292504 - DNA, 19 bp, Homo sapiens
  siRNA target sequence for THOC1 (NM_005131.1,484-502).
gacggattcagctcttttt

SEQ ID NO: 292505 - DNA, 19 bp, Homo sapiens
  siRNA target sequence for THOC1 (NM_005131.1,525-543).
gagaaatcaggtcttaact

SEQ ID NO: 292506 - DNA, 19 bp, Homo sapiens
  siRNA target sequence for THOC1 (NM_005131.1,685-703).
caacgtgctctattccaat

SEQ ID NO: 292507 - DNA, 19 bp, Homo sapiens
  siRNA target sequence for THOC1 (NM_005131.1,688-706).
cgtgctctattccaattga

SEQ ID NO: 292508 - DNA, 19 bp, Homo sapiens
  siRNA target sequence for THOC1 (NM_005131.1,689-707).
gtgctctattccaattgat

SEQ ID NO: 292509 - DNA, 19 bp, Homo sapiens
  siRNA target sequence for THOC1 (NM_005131.1,691-709).
gctctattccaattgatta

SEQ ID NO: 292510 - DNA, 19 bp, Homo sapiens
  siRNA target sequence for THOC1 (NM_005131.1,705-723).
gattacaacctgtatcgaa

SEQ ID NO: 292511 - DNA, 19 bp, Homo sapiens
  siRNA target sequence for THOC1 (NM_005131.1,762-780).
caatgctatgagaagattt

SEQ ID NO: 292512 - DNA, 19 bp, Homo sapiens
  siRNA target sequence for THOC1 (NM_005131.1,846-864).
gatactcaggcctcaagaa

SEQ ID NO: 292513 - DNA, 19 bp, Homo sapiens
  siRNA target sequence for THOC1 (NM_005131.1,986-1004).
gtatctcattttattccaa

SEQ ID NO: 292514 - DNA, 19 bp, Homo sapiens
  siRNA target sequence for THOC1 (NM_005131.1,1013-1031).
ggggcaggtcaaattcaaa

SEQ ID NO: 292515 - DNA, 19 bp, Homo sapiens
  siRNA target sequence for THOC1 (NM_005131.1,1058-1076).
gcaatcactttggattgaa

SEQ ID NO: 292516 - DNA, 19 bp, Homo sapiens
  siRNA target sequence for THOC1 (NM_005131.1,1065-1083).
ctttggattgaagatacta

SEQ ID NO: 292517 - DNA, 19 bp, Homo sapiens
  siRNA target sequence for THOC1 (NM_005131.1,1069-1087).
ggattgaagatactacaaa

SEQ ID NO: 292518 - DNA, 19 bp, Homo sapiens
  siRNA target sequence for THOC1 (NM_005131.1,1142-1160).
gatggtagagcatatatta

SEQ ID NO: 292519 - DNA, 19 bp, Homo sapiens
  siRNA target sequence for THOC1 (NM_005131.1,1235-1253).
caaacctacgagaataatt

SEQ ID NO: 292520 - DNA, 19 bp, Homo sapiens
  siRNA target sequence for THOC1 (NM_005131.1,1325-1343).
gttaacaaggctttggaat

SEQ ID NO: 292521 - DNA, 19 bp, Homo sapiens
  siRNA target sequence for THOC1 (NM_005131.1,1395-1413).
cccactttggaggaattct

SEQ ID NO: 292522 - DNA, 19 bp, Homo sapiens
  siRNA target sequence for THOC1 (NM_005131.1,1396-1414).
ccactttggaggaattctt

SEQ ID NO: 292523 - DNA, 19 bp, Homo sapiens
  siRNA target sequence for THOC1 (NM_005131.1,1519-1537).
ggagaagccctcacttctt

SEQ ID NO: 292524 - DNA, 19 bp, Homo sapiens
  siRNA target sequence for THOC1 (NM_005131.1,1779-1797).
gctccctacttggaaatga

SEQ ID NO: 292525 - DNA, 19 bp, Homo sapiens
  siRNA target sequence for THOC1 (NM_005131.1,1896-1914).
gcaacacctgagaatctga

SEQ ID NO: 292526 - DNA, 19 bp, Homo sapiens
  siRNA target sequence for THOC1 (NM_005131.1,1944-1962).
gaccttgcagaaagtctaa

SEQ ID NO: 292527 - DNA, 19 bp, Homo sapiens
  siRNA target sequence for THOC1 (NM_005131.1,1957-1975).
gtctaactaatgacaatga

SEQ ID NO: 292528 - DNA, 19 bp, Homo sapiens
  siRNA target sequence for UPK1B (NM_006952.2,61-79).
caaagacaactcaactgtt

SEQ ID NO: 292529 - DNA, 19 bp, Homo sapiens
  siRNA target sequence for UPK1B (NM_006952.2,204-222).
ccgacaacgatgacatcta

SEQ ID NO: 292530 - DNA, 19 bp, Homo sapiens
  siRNA target sequence for UPK1B (NM_006952.2,205-223).
cgacaacgatgacatctat

SEQ ID NO: 292531 - DNA, 19 bp, Homo sapiens
  siRNA target sequence for UPK1B (NM_006952.2,228-246).
ctgcctggatcggcatatt

SEQ ID NO: 292532 - DNA, 19 bp, Homo sapiens
  siRNA target sequence for UPK1B (NM_006952.2,231-249).
cctggatcggcatatttgt

SEQ ID NO: 292533 - DNA, 19 bp, Homo sapiens
  siRNA target sequence for UPK1B (NM_006952.2,355-373).
ctttgaagtggcatcttgt

SEQ ID NO: 292534 - DNA, 19 bp, Homo sapiens
  siRNA target sequence for UPK1B (NM_006952.2,359-377).
gaagtggcatcttgtatca

SEQ ID NO: 292535 - DNA, 19 bp, Homo sapiens
  siRNA target sequence for UPK1B (NM_006952.2,431-449).
ctagagaggtaccaaaaca

SEQ ID NO: 292536 - DNA, 19 bp, Homo sapiens
  siRNA target sequence for UPK1B (NM_006952.2,448-466).
caacagccctccaaacaat

SEQ ID NO: 292537 - DNA, 19 bp, Homo sapiens
  siRNA target sequence for UPK1B (NM_006952.2,575-593).
gccttccggactgagaata

SEQ ID NO: 292538 - DNA, 19 bp, Homo sapiens
  siRNA target sequence for UPK1B (NM_006952.2,576-594).
ccttccggactgagaataa

SEQ ID NO: 292539 - DNA, 19 bp, Homo sapiens
  siRNA target sequence for UPK1B (NM_006952.2,577-595).
cttccggactgagaataat

SEQ ID NO: 292540 - DNA, 19 bp, Homo sapiens
  siRNA target sequence for UPK1B (NM_006952.2,617-635).
cgtcaatgctgtgttatga

SEQ ID NO: 292541 - DNA, 19 bp, Homo sapiens
  siRNA target sequence for UPK1B (NM_006952.2,624-642).
gctgtgttatgaacaatct

SEQ ID NO: 292542 - DNA, 19 bp, Homo sapiens
  siRNA target sequence for UPK1B (NM_006952.2,655-673).
caacctggaggcttgtaaa

SEQ ID NO: 292543 - DNA, 19 bp, Homo sapiens
  siRNA target sequence for UPK1B (NM_006952.2,658-676).
cctggaggcttgtaaacta

SEQ ID NO: 292544 - DNA, 19 bp, Homo sapiens
  siRNA target sequence for UPK1B (NM_006952.2,684-702).
ctggtttttatcacaatca

SEQ ID NO: 292545 - DNA, 19 bp, Homo sapiens
  siRNA target sequence for UPK1B (NM_006952.2,697-715).
caatcagggctgctatgaa

SEQ ID NO: 292546 - DNA, 19 bp, Homo sapiens
  siRNA target sequence for UPK1B (NM_006952.2,772-790).
cattctctgctggactttt

SEQ ID NO: 292547 - DNA, 19 bp, Homo sapiens
  siRNA target sequence for USH2A (NM_007123.3,444-462).
gttgatctttgcctatttt

SEQ ID NO: 292548 - DNA, 19 bp, Homo sapiens
  siRNA target sequence for USH2A (NM_007123.3,479-497).
ctgagtcacgaggtctttt

SEQ ID NO: 292549 - DNA, 19 bp, Homo sapiens
  siRNA target sequence for USH2A (NM_007123.3,543-561).
gccaacccaagcagtatgt

SEQ ID NO: 292550 - DNA, 19 bp, Homo sapiens
  siRNA target sequence for USH2A (NM_007123.3,567-585).
cccagaccgaagcactttt

SEQ ID NO: 292551 - DNA, 19 bp, Homo sapiens
  siRNA target sequence for USH2A (NM_007123.3,568-586).
ccagaccgaagcacttttt

SEQ ID NO: 292552 - DNA, 19 bp, Homo sapiens
  siRNA target sequence for USH2A (NM_007123.3,623-641).
gtacccagcggttttgtat

SEQ ID NO: 292553 - DNA, 19 bp, Homo sapiens
  siRNA target sequence for USH2A (NM_007123.3,646-664).
gattgcccatacagatctt

SEQ ID NO: 292554 - DNA, 19 bp, Homo sapiens
  siRNA target sequence for USH2A (NM_007123.3,710-728).
gcatcacaccagacaagaa

SEQ ID NO: 292555 - DNA, 19 bp, Homo sapiens
  siRNA target sequence for USH2A (NM_007123.3,716-734).
caccagacaagaatgatct

SEQ ID NO: 292556 - DNA, 19 bp, Homo sapiens
  siRNA target sequence for USH2A (NM_007123.3,739-757).
cctaacgcccatagcaatt

SEQ ID NO: 292557 - DNA, 19 bp, Homo sapiens
  siRNA target sequence for USH2A (NM_007123.3,752-770).
gcaattctgcaagttttat

SEQ ID NO: 292558 - DNA, 19 bp, Homo sapiens
  siRNA target sequence for USH2A (NM_007123.3,819-837).
gatggcatcatttacctta

SEQ ID NO: 292559 - DNA, 19 bp, Homo sapiens
  siRNA target sequence for USH2A (NM_007123.3,854-872).
ctgagcaacaaggtgtaat

SEQ ID NO: 292560 - DNA, 19 bp, Homo sapiens
  siRNA target sequence for USH2A (NM_007123.3,856-874).
gagcaacaaggtgtaatgt

SEQ ID NO: 292561 - DNA, 19 bp, Homo sapiens
  siRNA target sequence for USH2A (NM_007123.3,858-876).
gcaacaaggtgtaatgtgt

SEQ ID NO: 292562 - DNA, 19 bp, Homo sapiens
  siRNA target sequence for USH2A (NM_007123.3,964-982).
ggtttgcaacctccaataa

SEQ ID NO: 292563 - DNA, 19 bp, Homo sapiens
  siRNA target sequence for USH2A (NM_007123.3,969-987).
gcaacctccaataaaagta

SEQ ID NO: 292564 - DNA, 19 bp, Homo sapiens
  siRNA target sequence for USH2A (NM_007123.3,970-988).
caacctccaataaaagtaa

SEQ ID NO: 292565 - DNA, 19 bp, Homo sapiens
  siRNA target sequence for USH2A (NM_007123.3,973-991).
cctccaataaaagtaatga

SEQ ID NO: 292566 - DNA, 19 bp, Homo sapiens
  siRNA target sequence for USH2A (NM_007123.3,1014-1032).
gaaatggattcatcttagt

SEQ ID NO: 292567 - DNA, 19 bp, Homo sapiens
  siRNA target sequence for USH2A (NM_007123.3,1072-1090).
ggcgtggagaaggatcata

SEQ ID NO: 292568 - DNA, 19 bp, Homo sapiens
  siRNA target sequence for USH2A (NM_007123.3,1074-1092).
cgtggagaaggatcataca

SEQ ID NO: 292569 - DNA, 19 bp, Homo sapiens
  siRNA target sequence for USH2A (NM_007123.3,1083-1101).
ggatcatacacctttcaat

SEQ ID NO: 292570 - DNA, 19 bp, Homo sapiens
  siRNA target sequence for USH2A (NM_007123.3,1087-1105).
catacacctttcaatgcaa

SEQ ID NO: 292571 - DNA, 19 bp, Homo sapiens
  siRNA target sequence for USH2A (NM_007123.3,1098-1116).
caatgcaagaactctaagt

SEQ ID NO: 292572 - DNA, 19 bp, Homo sapiens
  siRNA target sequence for USH2A (NM_007123.3,1182-1200).
gtttgtcggaagaatgcaa

SEQ ID NO: 292573 - DNA, 19 bp, Homo sapiens
  siRNA target sequence for USH2A (NM_007123.3,1193-1211).
gaatgcaagattttcgatt

SEQ ID NO: 292574 - DNA, 19 bp, Homo sapiens
  siRNA target sequence for USH2A (NM_007123.3,1216-1234).
caagtggcacttacaaaca

SEQ ID NO: 292575 - DNA, 19 bp, Homo sapiens
  siRNA target sequence for USH2A (NM_007123.3,1335-1353).
gcggtactgcattcctaat

SEQ ID NO: 292576 - DNA, 19 bp, Homo sapiens
  siRNA target sequence for USH2A (NM_007123.3,1438-1456).
ggtacttcatgggtttcaa

SEQ ID NO: 292577 - DNA, 19 bp, Homo sapiens
  siRNA target sequence for USH2A (NM_007123.3,1439-1457).
gtacttcatgggtttcaaa

SEQ ID NO: 292578 - DNA, 19 bp, Homo sapiens
  siRNA target sequence for USH2A (NM_007123.3,1520-1538).
gacagtatcaggtgtttta

SEQ ID NO: 292579 - DNA, 19 bp, Homo sapiens
  siRNA target sequence for USH2A (NM_007123.3,1522-1540).
cagtatcaggtgttttata

SEQ ID NO: 292580 - DNA, 19 bp, Homo sapiens
  siRNA target sequence for USH2A (NM_007123.3,1524-1542).
gtatcaggtgttttatatt

SEQ ID NO: 292581 - DNA, 19 bp, Homo sapiens
  siRNA target sequence for USH2A (NM_007123.3,1561-1579).
ccacaaccaacggaaataa

SEQ ID NO: 292582 - DNA, 19 bp, Homo sapiens
  siRNA target sequence for USH2A (NM_007123.3,1564-1582).
caaccaacggaaataagga

SEQ ID NO: 292583 - DNA, 19 bp, Homo sapiens
  siRNA target sequence for USH2A (NM_007123.3,1614-1632).
ggaggactggcaatatttt

SEQ ID NO: 292584 - DNA, 19 bp, Homo sapiens
  siRNA target sequence for USH2A (NM_007123.3,1736-1754).
gcaatgtcacatttagcat

SEQ ID NO: 292585 - DNA, 19 bp, Homo sapiens
  siRNA target sequence for USH2A (NM_007123.3,1756-1774).
ctgacacctggaccaaatt

SEQ ID NO: 292586 - DNA, 19 bp, Homo sapiens
  siRNA target sequence for USH2A (NM_007123.3,1777-1795).
cgtcctggatacaataact

SEQ ID NO: 292587 - DNA, 19 bp, Homo sapiens
  siRNA target sequence for USH2A (NM_007123.3,1797-1815).
ctataataccccatctctt

SEQ ID NO: 292588 - DNA, 19 bp, Homo sapiens
  siRNA target sequence for USH2A (NM_007123.3,1811-1829).
ctcttcaagagttcgtaaa

SEQ ID NO: 292589 - DNA, 19 bp, Homo sapiens
  siRNA target sequence for USH2A (NM_007123.3,1824-1842).
cgtaaaagccacgcaaata

SEQ ID NO: 292590 - DNA, 19 bp, Homo sapiens
  siRNA target sequence for USH2A (NM_007123.3,1833-1851).
cacgcaaataaggtttcat

SEQ ID NO: 292591 - DNA, 19 bp, Homo sapiens
  siRNA target sequence for USH2A (NM_007123.3,1835-1853).
cgcaaataaggtttcattt

SEQ ID NO: 292592 - DNA, 19 bp, Homo sapiens
  siRNA target sequence for USH2A (NM_007123.3,1912-1930).
gtggacgaaatcaccatta

SEQ ID NO: 292593 - DNA, 19 bp, Homo sapiens
  siRNA target sequence for USH2A (NM_007123.3,1914-1932).
ggacgaaatcaccattagt

SEQ ID NO: 292594 - DNA, 19 bp, Homo sapiens
  siRNA target sequence for USH2A (NM_007123.3,1948-1966).
catggtcatgccgataact

SEQ ID NO: 292595 - DNA, 19 bp, Homo sapiens
  siRNA target sequence for USH2A (NM_007123.3,1960-1978).
gataactgcgacacaacaa

SEQ ID NO: 292596 - DNA, 19 bp, Homo sapiens
  siRNA target sequence for USH2A (NM_007123.3,2013-2031).
cttcactgaaggacttcat

SEQ ID NO: 292597 - DNA, 19 bp, Homo sapiens
  siRNA target sequence for USH2A (NM_007123.3,2038-2056).
cgctgcttgcctctttata

SEQ ID NO: 292598 - DNA, 19 bp, Homo sapiens
  siRNA target sequence for USH2A (NM_007123.3,2039-2057).
gctgcttgcctctttataa

SEQ ID NO: 292599 - DNA, 19 bp, Homo sapiens
  siRNA target sequence for USH2A (NM_007123.3,2071-2089).
cgccaaggtgatcaagttt

SEQ ID NO: 292600 - DNA, 19 bp, Homo sapiens
  siRNA target sequence for USH2A (NM_007123.3,2086-2104).
gtttacgctttcaattgta

SEQ ID NO: 292601 - DNA, 19 bp, Homo sapiens
  siRNA target sequence for USH2A (NM_007123.3,2129-2147).
ccaaaagctgccattacaa

SEQ ID NO: 292602 - DNA, 19 bp, Homo sapiens
  siRNA target sequence for USH2A (NM_007123.3,2203-2221).
gatgattgtgagcataaca

SEQ ID NO: 292603 - DNA, 19 bp, Homo sapiens
  siRNA target sequence for USH2A (NM_007123.3,2237-2255).
gtgagctgtgcaaggatta

SEQ ID NO: 292604 - DNA, 19 bp, Homo sapiens
  siRNA target sequence for USH2A (NM_007123.3,2241-2259).
gctgtgcaaggattacttt

SEQ ID NO: 292605 - DNA, 19 bp, Homo sapiens
  siRNA target sequence for USH2A (NM_007123.3,2281-2299).
ccttcggccatagatgttt

SEQ ID NO: 292606 - DNA, 19 bp, Homo sapiens
  siRNA target sequence for USH2A (NM_007123.3,2285-2303).
cggccatagatgtttgcaa

SEQ ID NO: 292607 - DNA, 19 bp, Homo sapiens
  siRNA target sequence for USH2A (NM_007123.3,2328-2346).
cactagaaatggtagcatt

SEQ ID NO: 292608 - DNA, 19 bp, Homo sapiens
  siRNA target sequence for USH2A (NM_007123.3,2342-2360).
gcattctttgtgatcagat

SEQ ID NO: 292609 - DNA, 19 bp, Homo sapiens
  siRNA target sequence for USH2A (NM_007123.3,2362-2380).
ggaggacagtgtaattgta

SEQ ID NO: 292610 - DNA, 19 bp, Homo sapiens
  siRNA target sequence for USH2A (NM_007123.3,2365-2383).
ggacagtgtaattgtaaga

SEQ ID NO: 292611 - DNA, 19 bp, Homo sapiens
  siRNA target sequence for USH2A (NM_007123.3,2414-2432).
gccagaatggattctacaa

SEQ ID NO: 292612 - DNA, 19 bp, Homo sapiens
  siRNA target sequence for USH2A (NM_007123.3,2423-2441).
gattctacaatctacaaga

SEQ ID NO: 292613 - DNA, 19 bp, Homo sapiens
  siRNA target sequence for USH2A (NM_007123.3,2464-2482).
ccctgtaactgcaatacct

SEQ ID NO: 292614 - DNA, 19 bp, Homo sapiens
  siRNA target sequence for USH2A (NM_007123.3,2491-2509).
gtggatggagatattacct

SEQ ID NO: 292615 - DNA, 19 bp, Homo sapiens
  siRNA target sequence for USH2A (NM_007123.3,2532-2550).
caagtgcaaagcaaacgtt

SEQ ID NO: 292616 - DNA, 19 bp, Homo sapiens
  siRNA target sequence for USH2A (NM_007123.3,2554-2572).
gggcttaggtgtgatcatt

SEQ ID NO: 292617 - DNA, 19 bp, Homo sapiens
  siRNA target sequence for USH2A (NM_007123.3,2566-2584).
gatcattgcaattttggat

SEQ ID NO: 292618 - DNA, 19 bp, Homo sapiens
  siRNA target sequence for USH2A (NM_007123.3,2595-2613).
ccgaagctttaatgatgtt

SEQ ID NO: 292619 - DNA, 19 bp, Homo sapiens
  siRNA target sequence for USH2A (NM_007123.3,2640-2658).
ccatggctcagtgaacaaa

SEQ ID NO: 292620 - DNA, 19 bp, Homo sapiens
  siRNA target sequence for USH2A (NM_007123.3,2644-2662).
ggctcagtgaacaaattct

SEQ ID NO: 292621 - DNA, 19 bp, Homo sapiens
  siRNA target sequence for USH2A (NM_007123.3,2677-2695).
gggcagtgtgagtgcaaaa

SEQ ID NO: 292622 - DNA, 19 bp, Homo sapiens
  siRNA target sequence for USH2A (NM_007123.3,2678-2696).
ggcagtgtgagtgcaaaaa

SEQ ID NO: 292623 - DNA, 19 bp, Homo sapiens
  siRNA target sequence for USH2A (NM_007123.3,2723-2741).
cctgcagagaaaactttta

SEQ ID NO: 292624 - DNA, 19 bp, Homo sapiens
  siRNA target sequence for USH2A (NM_007123.3,2743-2761).
gggttagatgtcaccaatt

SEQ ID NO: 292625 - DNA, 19 bp, Homo sapiens
  siRNA target sequence for USH2A (NM_007123.3,2745-2763).
gttagatgtcaccaattgt

SEQ ID NO: 292626 - DNA, 19 bp, Homo sapiens
  siRNA target sequence for USH2A (NM_007123.3,2800-2818).
gggactgtctgtaatgcta

SEQ ID NO: 292627 - DNA, 19 bp, Homo sapiens
  siRNA target sequence for USH2A (NM_007123.3,2801-2819).
ggactgtctgtaatgctaa

SEQ ID NO: 292628 - DNA, 19 bp, Homo sapiens
  siRNA target sequence for USH2A (NM_007123.3,2851-2869).
gaagggagacagtgcaata

SEQ ID NO: 292629 - DNA, 19 bp, Homo sapiens
  siRNA target sequence for USH2A (NM_007123.3,2873-2891).
gtttggagggaaacttcta

SEQ ID NO: 292630 - DNA, 19 bp, Homo sapiens
  siRNA target sequence for USH2A (NM_007123.3,2886-2904).
cttctacctacggcaaaat

SEQ ID NO: 292631 - DNA, 19 bp, Homo sapiens
  siRNA target sequence for USH2A (NM_007123.3,2889-2907).
ctacctacggcaaaataat

SEQ ID NO: 292632 - DNA, 19 bp, Homo sapiens
  siRNA target sequence for USH2A (NM_007123.3,2892-2910).
cctacggcaaaataattct

SEQ ID NO: 292633 - DNA, 19 bp, Homo sapiens
  siRNA target sequence for USH2A (NM_007123.3,2935-2953).
gataagactgggacaataa

SEQ ID NO: 292634 - DNA, 19 bp, Homo sapiens
  siRNA target sequence for USH2A (NM_007123.3,2973-2991).
caaatcaacaggacaatgt

SEQ ID NO: 292635 - DNA, 19 bp, Homo sapiens
  siRNA target sequence for USH2A (NM_007123.3,3011-3029).
caggtcttcgctgtaatca

SEQ ID NO: 292636 - DNA, 19 bp, Homo sapiens
  siRNA target sequence for USH2A (NM_007123.3,3037-3055).
cctcacaggtacaatttga

SEQ ID NO: 292637 - DNA, 19 bp, Homo sapiens
  siRNA target sequence for USH2A (NM_007123.3,3048-3066).
caatttgaccattgacaat

SEQ ID NO: 292638 - DNA, 19 bp, Homo sapiens
  siRNA target sequence for USH2A (NM_007123.3,3079-3097).
cagatgtgtgagtgtgatt

SEQ ID NO: 292639 - DNA, 19 bp, Homo sapiens
  siRNA target sequence for USH2A (NM_007123.3,3188-3206).
gtcaaccaggtttttatat

SEQ ID NO: 292640 - DNA, 19 bp, Homo sapiens
  siRNA target sequence for USH2A (NM_007123.3,3235-3253).
ccatgctcatgccatacaa

SEQ ID NO: 292641 - DNA, 19 bp, Homo sapiens
  siRNA target sequence for USH2A (NM_007123.3,3254-3272).
ctggtgcagttaatcacat

SEQ ID NO: 292642 - DNA, 19 bp, Homo sapiens
  siRNA target sequence for USH2A (NM_007123.3,3337-3355).
caatgcaaagaccattact

SEQ ID NO: 292643 - DNA, 19 bp, Homo sapiens
  siRNA target sequence for USH2A (NM_007123.3,3405-3423).
ctcaggagccttgaatgaa

SEQ ID NO: 292644 - DNA, 19 bp, Homo sapiens
  siRNA target sequence for USH2A (NM_007123.3,3445-3463).
cagtgtttctgtaaacaat

SEQ ID NO: 292645 - DNA, 19 bp, Homo sapiens
  siRNA target sequence for USH2A (NM_007123.3,3506-3524).
gccacttggatgtcaacaa

SEQ ID NO: 292646 - DNA, 19 bp, Homo sapiens
  siRNA target sequence for USH2A (NM_007123.3,3563-3581).
cgcccagaggacaagttca

SEQ ID NO: 292647 - DNA, 19 bp, Homo sapiens
  siRNA target sequence for USH2A (NM_007123.3,3584-3602).
gttcttctgctatcaatct

SEQ ID NO: 292648 - DNA, 19 bp, Homo sapiens
  siRNA target sequence for USH2A (NM_007123.3,3631-3649).
gcccactggcttacttaca

SEQ ID NO: 292649 - DNA, 19 bp, Homo sapiens
  siRNA target sequence for USH2A (NM_007123.3,3633-3651).
ccactggcttacttacagt

SEQ ID NO: 292650 - DNA, 19 bp, Homo sapiens
  siRNA target sequence for USH2A (NM_007123.3,3634-3652).
cactggcttacttacagtt

SEQ ID NO: 292651 - DNA, 19 bp, Homo sapiens
  siRNA target sequence for USH2A (NM_007123.3,3636-3654).
ctggcttacttacagttta

SEQ ID NO: 292652 - DNA, 19 bp, Homo sapiens
  siRNA target sequence for USH2A (NM_007123.3,3638-3656).
ggcttacttacagtttact

SEQ ID NO: 292653 - DNA, 19 bp, Homo sapiens
  siRNA target sequence for USH2A (NM_007123.3,3650-3668).
gtttactcagggatggttt

SEQ ID NO: 292654 - DNA, 19 bp, Homo sapiens
  siRNA target sequence for USH2A (NM_007123.3,3664-3682).
ggttttgaaatctacacaa

SEQ ID NO: 292655 - DNA, 19 bp, Homo sapiens
  siRNA target sequence for USH2A (NM_007123.3,3687-3705).
ggatcaatacccatacagt

SEQ ID NO: 292656 - DNA, 19 bp, Homo sapiens
  siRNA target sequence for USH2A (NM_007123.3,3688-3706).
gatcaatacccatacagta

SEQ ID NO: 292657 - DNA, 19 bp, Homo sapiens
  siRNA target sequence for USH2A (NM_007123.3,3698-3716).
catacagtattcaatactt

SEQ ID NO: 292658 - DNA, 19 bp, Homo sapiens
  siRNA target sequence for USH2A (NM_007123.3,3723-3741).
cacagacctgttaccatat

SEQ ID NO: 292659 - DNA, 19 bp, Homo sapiens
  siRNA target sequence for USH2A (NM_007123.3,3727-3745).
gacctgttaccatatacca

SEQ ID NO: 292660 - DNA, 19 bp, Homo sapiens
  siRNA target sequence for USH2A (NM_007123.3,3729-3747).
cctgttaccatataccaaa

SEQ ID NO: 292661 - DNA, 19 bp, Homo sapiens
  siRNA target sequence for USH2A (NM_007123.3,3744-3762).
caaatattcctattacatt

SEQ ID NO: 292662 - DNA, 19 bp, Homo sapiens
  siRNA target sequence for USH2A (NM_007123.3,3771-3789).
caatgtgcatggttcaaca

SEQ ID NO: 292663 - DNA, 19 bp, Homo sapiens
  siRNA target sequence for USH2A (NM_007123.3,3794-3812).
gtgtagctgtcacttacaa

SEQ ID NO: 292664 - DNA, 19 bp, Homo sapiens
  siRNA target sequence for USH2A (NM_007123.3,3796-3814).
gtagctgtcacttacaaga

SEQ ID NO: 292665 - DNA, 19 bp, Homo sapiens
  siRNA target sequence for USH2A (NM_007123.3,3799-3817).
gctgtcacttacaagacaa

SEQ ID NO: 292666 - DNA, 19 bp, Homo sapiens
  siRNA target sequence for USH2A (NM_007123.3,3804-3822).
cacttacaagacaaaacca

SEQ ID NO: 292667 - DNA, 19 bp, Homo sapiens
  siRNA target sequence for USH2A (NM_007123.3,3829-3847).
ccagagggaaacttgactt

SEQ ID NO: 292668 - DNA, 19 bp, Homo sapiens
  siRNA target sequence for USH2A (NM_007123.3,3891-3909).
ctggacaacactctcaaat

SEQ ID NO: 292669 - DNA, 19 bp, Homo sapiens
  siRNA target sequence for USH2A (NM_007123.3,3893-3911).
ggacaacactctcaaatca

SEQ ID NO: 292670 - DNA, 19 bp, Homo sapiens
  siRNA target sequence for USH2A (NM_007123.3,3894-3912).
gacaacactctcaaatcaa

SEQ ID NO: 292671 - DNA, 19 bp, Homo sapiens
  siRNA target sequence for USH2A (NM_007123.3,3910-3928).
caatctggtcccatagaga

SEQ ID NO: 292672 - DNA, 19 bp, Homo sapiens
  siRNA target sequence for USH2A (NM_007123.3,3914-3932).
ctggtcccatagagaaata

SEQ ID NO: 292673 - DNA, 19 bp, Homo sapiens
  siRNA target sequence for USH2A (NM_007123.3,3916-3934).
ggtcccatagagaaatata

SEQ ID NO: 292674 - DNA, 19 bp, Homo sapiens
  siRNA target sequence for USH2A (NM_007123.3,3917-3935).
gtcccatagagaaatatat

SEQ ID NO: 292675 - DNA, 19 bp, Homo sapiens
  siRNA target sequence for USH2A (NM_007123.3,4028-4046).
ccaagtacgatttttctgt

SEQ ID NO: 292676 - DNA, 19 bp, Homo sapiens
  siRNA target sequence for USH2A (NM_007123.3,4121-4139).
gactaagtccacctaagat

SEQ ID NO: 292677 - DNA, 19 bp, Homo sapiens
  siRNA target sequence for USH2A (NM_007123.3,4178-4196).
ctccaccagcggaactaaa

SEQ ID NO: 292678 - DNA, 19 bp, Homo sapiens
  siRNA target sequence for USH2A (NM_007123.3,4183-4201).
ccagcggaactaaatggaa

SEQ ID NO: 292679 - DNA, 19 bp, Homo sapiens
  siRNA target sequence for USH2A (NM_007123.3,4184-4202).
cagcggaactaaatggaat

SEQ ID NO: 292680 - DNA, 19 bp, Homo sapiens
  siRNA target sequence for USH2A (NM_007123.3,4186-4204).
gcggaactaaatggaataa

SEQ ID NO: 292681 - DNA, 19 bp, Homo sapiens
  siRNA target sequence for USH2A (NM_007123.3,4227-4245).
gagaagactgagatctact

SEQ ID NO: 292682 - DNA, 19 bp, Homo sapiens
  siRNA target sequence for USH2A (NM_007123.3,4229-4247).
gaagactgagatctactaa

SEQ ID NO: 292683 - DNA, 19 bp, Homo sapiens
  siRNA target sequence for USH2A (NM_007123.3,4232-4250).
gactgagatctactaaaga

SEQ ID NO: 292684 - DNA, 19 bp, Homo sapiens
  siRNA target sequence for USH2A (NM_007123.3,4342-4360).
cctcctcaaacaatgacaa

SEQ ID NO: 292685 - DNA, 19 bp, Homo sapiens
  siRNA target sequence for USH2A (NM_007123.3,4374-4392).
ggagccatacaccaagtat

SEQ ID NO: 292686 - DNA, 19 bp, Homo sapiens
  siRNA target sequence for USH2A (NM_007123.3,4400-4418).
gagtcttagctgtgaatat

SEQ ID NO: 292687 - DNA, 19 bp, Homo sapiens
  siRNA target sequence for USH2A (NM_007123.3,4462-4480).
gaatcagcacctgtattca

SEQ ID NO: 292688 - DNA, 19 bp, Homo sapiens
  siRNA target sequence for USH2A (NM_007123.3,4506-4524).
ctcttcgtactctctcaat

SEQ ID NO: 292689 - DNA, 19 bp, Homo sapiens
  siRNA target sequence for USH2A (NM_007123.3,4508-4526).
cttcgtactctctcaatat

SEQ ID NO: 292690 - DNA, 19 bp, Homo sapiens
  siRNA target sequence for USH2A (NM_007123.3,4574-4592).
ggtatgacatcaatatgct

SEQ ID NO: 292691 - DNA, 19 bp, Homo sapiens
  siRNA target sequence for USH2A (NM_007123.3,4575-4593).
gtatgacatcaatatgctt

SEQ ID NO: 292692 - DNA, 19 bp, Homo sapiens
  siRNA target sequence for USH2A (NM_007123.3,4659-4677).
ccaagaactatcttacact

SEQ ID NO: 292693 - DNA, 19 bp, Homo sapiens
  siRNA target sequence for USH2A (NM_007123.3,4684-4702).
ggactgaaaccttatagga

SEQ ID NO: 292694 - DNA, 19 bp, Homo sapiens
  siRNA target sequence for USH2A (NM_007123.3,4685-4703).
gactgaaaccttataggat

SEQ ID NO: 292695 - DNA, 19 bp, Homo sapiens
  siRNA target sequence for USH2A (NM_007123.3,4689-4707).
gaaaccttataggatatat

SEQ ID NO: 292696 - DNA, 19 bp, Homo sapiens
  siRNA target sequence for USH2A (NM_007123.3,4693-4711).
ccttataggatatatgagt

SEQ ID NO: 292697 - DNA, 19 bp, Homo sapiens
  siRNA target sequence for USH2A (NM_007123.3,4694-4712).
cttataggatatatgagtt

SEQ ID NO: 292698 - DNA, 19 bp, Homo sapiens
  siRNA target sequence for USH2A (NM_007123.3,4757-4775).
cgggagcaggacaaacttt

SEQ ID NO: 292699 - DNA, 19 bp, Homo sapiens
  siRNA target sequence for USH2A (NM_007123.3,4758-4776).
gggagcaggacaaacttta

SEQ ID NO: 292700 - DNA, 19 bp, Homo sapiens
  siRNA target sequence for USH2A (NM_007123.3,4802-4820).
cacctctggttaaaggaat

SEQ ID NO: 292701 - DNA, 19 bp, Homo sapiens
  siRNA target sequence for USH2A (NM_007123.3,4816-4834).
ggaatcaacagcacaacaa

SEQ ID NO: 292702 - DNA, 19 bp, Homo sapiens
  siRNA target sequence for USH2A (NM_007123.3,4817-4835).
gaatcaacagcacaacaat

SEQ ID NO: 292703 - DNA, 19 bp, Homo sapiens
  siRNA target sequence for USH2A (NM_007123.3,4821-4839).
caacagcacaacaatccat

SEQ ID NO: 292704 - DNA, 19 bp, Homo sapiens
  siRNA target sequence for USH2A (NM_007123.3,4847-4865).
ggtttccacctgaagaact

SEQ ID NO: 292705 - DNA, 19 bp, Homo sapiens
  siRNA target sequence for USH2A (NM_007123.3,4943-4961).
gaatccgtttcataggaaa

SEQ ID NO: 292706 - DNA, 19 bp, Homo sapiens
  siRNA target sequence for USH2A (NM_007123.3,4983-5001).
ctccactcacccagtcaat

SEQ ID NO: 292707 - DNA, 19 bp, Homo sapiens
  siRNA target sequence for USH2A (NM_007123.3,4986-5004).
cactcacccagtcaataca

SEQ ID NO: 292708 - DNA, 19 bp, Homo sapiens
  siRNA target sequence for VAPA (NM_003574.4,325-343).
ccgcccacagacctcaaat

SEQ ID NO: 292709 - DNA, 19 bp, Homo sapiens
  siRNA target sequence for VAPA (NM_003574.4,350-368).
gccccttcacagatgtagt

SEQ ID NO: 292710 - DNA, 19 bp, Homo sapiens
  siRNA target sequence for VAPA (NM_003574.4,359-377).
cagatgtagtcactacaaa

SEQ ID NO: 292711 - DNA, 19 bp, Homo sapiens
  siRNA target sequence for VAPA (NM_003574.4,367-385).
gtcactacaaatcttaaat

SEQ ID NO: 292712 - DNA, 19 bp, Homo sapiens
  siRNA target sequence for VAPA (NM_003574.4,379-397).
cttaaattgcgaaatccat

SEQ ID NO: 292713 - DNA, 19 bp, Homo sapiens
  siRNA target sequence for VAPA (NM_003574.4,388-406).
cgaaatccatcggatagaa

SEQ ID NO: 292714 - DNA, 19 bp, Homo sapiens
  siRNA target sequence for VAPA (NM_003574.4,389-407).
gaaatccatcggatagaaa

SEQ ID NO: 292715 - DNA, 19 bp, Homo sapiens
  siRNA target sequence for VAPA (NM_003574.4,481-499).
gggtcaactgtgactgttt

SEQ ID NO: 292716 - DNA, 19 bp, Homo sapiens
  siRNA target sequence for VAPA (NM_003574.4,507-525).
gctacagccctttgactat

SEQ ID NO: 292717 - DNA, 19 bp, Homo sapiens
  siRNA target sequence for VAPA (NM_003574.4,520-538).
gactatgatccgaatgaaa

SEQ ID NO: 292718 - DNA, 19 bp, Homo sapiens
  siRNA target sequence for VAPA (NM_003574.4,577-595).
ccaccaaacacttcagata

SEQ ID NO: 292719 - DNA, 19 bp, Homo sapiens
  siRNA target sequence for VAPA (NM_003574.4,613-631).
gaggcaaaacctgatgaat

SEQ ID NO: 292720 - DNA, 19 bp, Homo sapiens
  siRNA target sequence for VAPA (NM_003574.4,622-640).
cctgatgaattaatggatt

SEQ ID NO: 292721 - DNA, 19 bp, Homo sapiens
  siRNA target sequence for VAPA (NM_003574.4,642-660).
caaattgagatgcgtattt

SEQ ID NO: 292722 - DNA, 19 bp, Homo sapiens
  siRNA target sequence for VAPA (NM_003574.4,709-727).
gctccgactgtcacttcaa

SEQ ID NO: 292723 - DNA, 19 bp, Homo sapiens
  siRNA target sequence for VAPA (NM_003574.4,710-728).
ctccgactgtcacttcaat

SEQ ID NO: 292724 - DNA, 19 bp, Homo sapiens
  siRNA target sequence for VAPA (NM_003574.4,752-770).
caacacctgccagttatca

SEQ ID NO: 292725 - DNA, 19 bp, Homo sapiens
  siRNA target sequence for VAPA (NM_003574.4,844-862).
gctgttccactgaatgcat

SEQ ID NO: 292726 - DNA, 19 bp, Homo sapiens
  siRNA target sequence for VAPA (NM_003574.4,889-907).
ccacacagtgtttcactta

SEQ ID NO: 292727 - DNA, 19 bp, Homo sapiens
  siRNA target sequence for VAPA (NM_003574.4,890-908).
cacacagtgtttcacttaa

SEQ ID NO: 292728 - DNA, 19 bp, Homo sapiens
  siRNA target sequence for VAPA (NM_003574.4,904-922).
cttaatgataccgaaacaa

SEQ ID NO: 292729 - DNA, 19 bp, Homo sapiens
  siRNA target sequence for VAPA (NM_003574.4,1020-1038).
ggtagcacattcggataaa

SEQ ID NO: 292730 - DNA, 19 bp, Homo sapiens
  siRNA target sequence for VAPA (NM_003574.4,1112-1130).
cagccattttcattggatt

SEQ ID NO: 292731 - DNA, 19 bp, Homo sapiens
  siRNA target sequence for VAPA (NM_003574.4,1115-1133).
ccattttcattggattctt

SEQ ID NO: 292732 - DNA, 19 bp, Homo sapiens
  siRNA target sequence for VAPA (NM_003574.4,1127-1145).
gattctttctagggaaatt

SEQ ID NO: 292733 - DNA, 19 bp, Homo sapiens
  siRNA target sequence for VAPB (NM_004738.3,305-323).
ccgcagcacgagctcaaat

SEQ ID NO: 292734 - DNA, 19 bp, Homo sapiens
  siRNA target sequence for VAPB (NM_004738.3,306-324).
cgcagcacgagctcaaatt

SEQ ID NO: 292735 - DNA, 19 bp, Homo sapiens
  siRNA target sequence for VAPB (NM_004738.3,330-348).
gtcccttcaccgatgttgt

SEQ ID NO: 292736 - DNA, 19 bp, Homo sapiens
  siRNA target sequence for VAPB (NM_004738.3,344-362).
gttgtcaccaccaacctaa

SEQ ID NO: 292737 - DNA, 19 bp, Homo sapiens
  siRNA target sequence for VAPB (NM_004738.3,374-392).
ccgacagaccgaaatgtgt

SEQ ID NO: 292738 - DNA, 19 bp, Homo sapiens
  siRNA target sequence for VAPB (NM_004738.3,384-402).
gaaatgtgtgttttaaggt

SEQ ID NO: 292739 - DNA, 19 bp, Homo sapiens
  siRNA target sequence for VAPB (NM_004738.3,454-472).
cgatgcaggggcctcaatt

SEQ ID NO: 292740 - DNA, 19 bp, Homo sapiens
  siRNA target sequence for VAPB (NM_004738.3,455-473).
gatgcaggggcctcaatta

SEQ ID NO: 292741 - DNA, 19 bp, Homo sapiens
  siRNA target sequence for VAPB (NM_004738.3,459-477).
caggggcctcaattaatgt

SEQ ID NO: 292742 - DNA, 19 bp, Homo sapiens
  siRNA target sequence for VAPB (NM_004738.3,463-481).
ggcctcaattaatgtatct

SEQ ID NO: 292743 - DNA, 19 bp, Homo sapiens
  siRNA target sequence for VAPB (NM_004738.3,484-502).
gatgttacagcctttcgat

SEQ ID NO: 292744 - DNA, 19 bp, Homo sapiens
  siRNA target sequence for VAPB (NM_004738.3,487-505).
gttacagcctttcgattat

SEQ ID NO: 292745 - DNA, 19 bp, Homo sapiens
  siRNA target sequence for VAPB (NM_004738.3,602-620).
ccggaagaccttatggatt

SEQ ID NO: 292746 - DNA, 19 bp, Homo sapiens
  siRNA target sequence for VAPB (NM_004738.3,605-623).
gaagaccttatggattcaa

SEQ ID NO: 292747 - DNA, 19 bp, Homo sapiens
  siRNA target sequence for VAPB (NM_004738.3,655-673).
gaatgataaaccacatgat

SEQ ID NO: 292748 - DNA, 19 bp, Homo sapiens
  siRNA target sequence for VAPB (NM_004738.3,665-683).
ccacatgatgtagaaataa

SEQ ID NO: 292749 - DNA, 19 bp, Homo sapiens
  siRNA target sequence for VAPB (NM_004738.3,668-686).
catgatgtagaaataaata

SEQ ID NO: 292750 - DNA, 19 bp, Homo sapiens
  siRNA target sequence for VAPB (NM_004738.3,762-780).
ccgaagttaagaaggttat

SEQ ID NO: 292751 - DNA, 19 bp, Homo sapiens
  siRNA target sequence for VAPB (NM_004738.3,886-904).
cagccccatttcagcatta

SEQ ID NO: 292752 - DNA, 19 bp, Homo sapiens
  siRNA target sequence for VAPB (NM_004738.3,964-982).
ctttatcgttggtgtaatt

SEQ ID NO: 292753 - DNA, 19 bp, Homo sapiens
  siRNA target sequence for VIL2 (NM_003379.3,225-243).
gatcaggtggtaaagacta

SEQ ID NO: 292754 - DNA, 19 bp, Homo sapiens
  siRNA target sequence for VIL2 (NM_003379.3,251-269).
ccgggaagtgtggtacttt

SEQ ID NO: 292755 - DNA, 19 bp, Homo sapiens
  siRNA target sequence for VIL2 (NM_003379.3,271-289).
gcctccactatgtggataa

SEQ ID NO: 292756 - DNA, 19 bp, Homo sapiens
  siRNA target sequence for VIL2 (NM_003379.3,272-290).
cctccactatgtggataat

SEQ ID NO: 292757 - DNA, 19 bp, Homo sapiens
  siRNA target sequence for VIL2 (NM_003379.3,278-296).
ctatgtggataataaagga

SEQ ID NO: 292758 - DNA, 19 bp, Homo sapiens
  siRNA target sequence for VIL2 (NM_003379.3,284-302).
ggataataaaggatttcct

SEQ ID NO: 292759 - DNA, 19 bp, Homo sapiens
  siRNA target sequence for VIL2 (NM_003379.3,460-478).
gaatccttagcgatgagat

SEQ ID NO: 292760 - DNA, 19 bp, Homo sapiens
  siRNA target sequence for VIL2 (NM_003379.3,465-483).
cttagcgatgagatctact

SEQ ID NO: 292761 - DNA, 19 bp, Homo sapiens
  siRNA target sequence for VIL2 (NM_003379.3,538-556).
gggactacaacaaagaagt

SEQ ID NO: 292762 - DNA, 19 bp, Homo sapiens
  siRNA target sequence for VIL2 (NM_003379.3,605-623).
gatggaccagcacaaactt

SEQ ID NO: 292763 - DNA, 19 bp, Homo sapiens
  siRNA target sequence for VIL2 (NM_003379.3,671-689).
ccgtgggatgctcaaagat

SEQ ID NO: 292764 - DNA, 19 bp, Homo sapiens
  siRNA target sequence for VIL2 (NM_003379.3,672-690).
cgtgggatgctcaaagata

SEQ ID NO: 292765 - DNA, 19 bp, Homo sapiens
  siRNA target sequence for VIL2 (NM_003379.3,673-691).
gtgggatgctcaaagataa

SEQ ID NO: 292766 - DNA, 19 bp, Homo sapiens
  siRNA target sequence for VIL2 (NM_003379.3,795-813).
gatgcccttggactgaata

SEQ ID NO: 292767 - DNA, 19 bp, Homo sapiens
  siRNA target sequence for VIL2 (NM_003379.3,991-1009).
gcaaccatgagttgtatat

SEQ ID NO: 292768 - DNA, 19 bp, Homo sapiens
  siRNA target sequence for VIL2 (NM_003379.3,1191-1209).
gactatgaggagaagacaa

SEQ ID NO: 292769 - DNA, 19 bp, Homo sapiens
  siRNA target sequence for VIL2 (NM_003379.3,1350-1368).
caggcggtggatcagataa

SEQ ID NO: 292770 - DNA, 19 bp, Homo sapiens
  siRNA target sequence for VIL2 (NM_003379.3,1353-1371).
gcggtggatcagataaaga

SEQ ID NO: 292771 - DNA, 19 bp, Homo sapiens
  siRNA target sequence for PI15 (NM_015886.1,543-561).
gtaccgtcgtcctactcaa

SEQ ID NO: 292772 - DNA, 19 bp, Homo sapiens
  siRNA target sequence for PI15 (NM_015886.1,548-566).
gtcgtcctactcaattcca

SEQ ID NO: 292773 - DNA, 19 bp, Homo sapiens
  siRNA target sequence for PI15 (NM_015886.1,663-681).
gctacatttcgcagaatga

SEQ ID NO: 292774 - DNA, 19 bp, Homo sapiens
  siRNA target sequence for PI15 (NM_015886.1,682-700).
catgatcgccattcttgat

SEQ ID NO: 292775 - DNA, 19 bp, Homo sapiens
  siRNA target sequence for PI15 (NM_015886.1,688-706).
cgccattcttgattatcat

SEQ ID NO: 292776 - DNA, 19 bp, Homo sapiens
  siRNA target sequence for PI15 (NM_015886.1,689-707).
gccattcttgattatcata

SEQ ID NO: 292777 - DNA, 19 bp, Homo sapiens
  siRNA target sequence for PI15 (NM_015886.1,690-708).
ccattcttgattatcataa

SEQ ID NO: 292778 - DNA, 19 bp, Homo sapiens
  siRNA target sequence for PI15 (NM_015886.1,710-728).
caagttcggggcaaagtgt

SEQ ID NO: 292779 - DNA, 19 bp, Homo sapiens
  siRNA target sequence for PI15 (NM_015886.1,727-745).
gttcccaccggcagcaaat

SEQ ID NO: 292780 - DNA, 19 bp, Homo sapiens
  siRNA target sequence for PI15 (NM_015886.1,732-750).
caccggcagcaaatatgga

SEQ ID NO: 292781 - DNA, 19 bp, Homo sapiens
  siRNA target sequence for PI15 (NM_015886.1,734-752).
ccggcagcaaatatggaat

SEQ ID NO: 292782 - DNA, 19 bp, Homo sapiens
  siRNA target sequence for PI15 (NM_015886.1,735-753).
cggcagcaaatatggaata

SEQ ID NO: 292783 - DNA, 19 bp, Homo sapiens
  siRNA target sequence for PI15 (NM_015886.1,757-775).
ggtttgggatgaaaatctt

SEQ ID NO: 292784 - DNA, 19 bp, Homo sapiens
  siRNA target sequence for PI15 (NM_015886.1,821-839).
ggaccttcttacttactga

SEQ ID NO: 292785 - DNA, 19 bp, Homo sapiens
  siRNA target sequence for PI15 (NM_015886.1,861-879).
ctgtacgcactggaagata

SEQ ID NO: 292786 - DNA, 19 bp, Homo sapiens
  siRNA target sequence for PI15 (NM_015886.1,898-916).
ggtcaagccatggtatgat

SEQ ID NO: 292787 - DNA, 19 bp, Homo sapiens
  siRNA target sequence for PI15 (NM_015886.1,958-976).
ccccagatgtcctatgaga

SEQ ID NO: 292788 - DNA, 19 bp, Homo sapiens
  siRNA target sequence for PI15 (NM_015886.1,959-977).
cccagatgtcctatgagat

SEQ ID NO: 292789 - DNA, 19 bp, Homo sapiens
  siRNA target sequence for PI15 (NM_015886.1,984-1002).
gtcccatgtgcacacatta

SEQ ID NO: 292790 - DNA, 19 bp, Homo sapiens
  siRNA target sequence for PI15 (NM_015886.1,986-1004).
cccatgtgcacacattata

SEQ ID NO: 292791 - DNA, 19 bp, Homo sapiens
  siRNA target sequence for PI15 (NM_015886.1,1012-1030).
ggtttgggccacttccaat

SEQ ID NO: 292792 - DNA, 19 bp, Homo sapiens
  siRNA target sequence for PI15 (NM_015886.1,1032-1050).
ggataggatgcgcaattca

SEQ ID NO: 292793 - DNA, 19 bp, Homo sapiens
  siRNA target sequence for PI15 (NM_015886.1,1033-1051).
gataggatgcgcaattcat

SEQ ID NO: 292794 - DNA, 19 bp, Homo sapiens
  siRNA target sequence for PI15 (NM_015886.1,1037-1055).
ggatgcgcaattcatactt

SEQ ID NO: 292795 - DNA, 19 bp, Homo sapiens
  siRNA target sequence for PI15 (NM_015886.1,1086-1104).
ggcgacgtgcagtttactt

SEQ ID NO: 292796 - DNA, 19 bp, Homo sapiens
  siRNA target sequence for PI15 (NM_015886.1,1091-1109).
cgtgcagtttacttggtat

SEQ ID NO: 292797 - DNA, 19 bp, Homo sapiens
  siRNA target sequence for PI15 (NM_015886.1,1095-1113).
cagtttacttggtatgcaa

SEQ ID NO: 292798 - DNA, 19 bp, Homo sapiens
  siRNA target sequence for PI15 (NM_015886.1,1119-1137).
ccccaaagggcaattggat

SEQ ID NO: 292799 - DNA, 19 bp, Homo sapiens
  siRNA target sequence for PI15 (NM_015886.1,1120-1138).
cccaaagggcaattggatt

SEQ ID NO: 292800 - DNA, 19 bp, Homo sapiens
  siRNA target sequence for PI15 (NM_015886.1,1135-1153).
gattggagaagcaccatat

SEQ ID NO: 292801 - DNA, 19 bp, Homo sapiens
  siRNA target sequence for PI15 (NM_015886.1,1157-1175).
gtaggggtaccatgttcat

SEQ ID NO: 292802 - DNA, 19 bp, Homo sapiens
  siRNA target sequence for PI15 (NM_015886.1,1173-1191).
catcttgtcctccaagtta

SEQ ID NO: 292803 - DNA, 19 bp, Homo sapiens
  siRNA target sequence for PI15 (NM_015886.1,1195-1213).
gggatcttgtactgacaat

SEQ ID NO: 292804 - DNA, 19 bp, Homo sapiens
  siRNA target sequence for PI15 (NM_015886.1,1197-1215).
gatcttgtactgacaatct

SEQ ID NO: 292805 - DNA, 19 bp, Homo sapiens
  siRNA target sequence for PI15 (NM_015886.1,1223-1241).
ccaggagttacgtcaaact

SEQ ID NO: 292806 - DNA, 19 bp, Homo sapiens
  siRNA target sequence for PI15 (NM_015886.1,1224-1242).
caggagttacgtcaaacta

SEQ ID NO: 292807 - DNA, 19 bp, Homo sapiens
  siRNA target sequence for PI15 (NM_015886.1,1240-1258).
ctacctgtactggtttaaa

SEQ ID NO: 292808 - DNA, 19 bp, Homo sapiens
  siRNA target sequence for CIDE-3 (NM_022094.2,439-457).
ccctggcaggggatacagt

SEQ ID NO: 292809 - DNA, 19 bp, Homo sapiens
  siRNA target sequence for ECG2 (NM_032566.1,145-163).
gtggactgcagcatttaca

SEQ ID NO: 292810 - DNA, 19 bp, Homo sapiens
  siRNA target sequence for ECG2 (NM_032566.1,189-207).
ctgccccatcacataccta

SEQ ID NO: 292811 - DNA, 19 bp, Homo sapiens
  siRNA target sequence for ECG2 (NM_032566.1,233-251).
cctatgggaatgaatgtca

SEQ ID NO: 292812 - DNA, 19 bp, Homo sapiens
  siRNA target sequence for ECG2 (NM_032566.1,255-273).
gtgtaccgagagcttgaaa

SEQ ID NO: 292813 - DNA, 19 bp, Homo sapiens
  siRNA target sequence for ECG2 (NM_032566.1,275-293).
gtaatggaagagttcagtt

SEQ ID NO: 292814 - DNA, 19 bp, Homo sapiens
  siRNA target sequence for FKSG28 (NM_030929.3,845-863).
gatcgtgtcacatccatat

SEQ ID NO: 292815 - DNA, 19 bp, Homo sapiens
  siRNA target sequence for FKSG28 (NM_030929.3,1143-1161).
cctgaccagctgaactcta

SEQ ID NO: 292816 - DNA, 19 bp, Homo sapiens
  siRNA target sequence for FKSG28 (NM_030929.3,1170-1188).
ccccagctgcgatcactaa

SEQ ID NO: 292817 - DNA, 19 bp, Homo sapiens
  siRNA target sequence for FKSG28 (NM_030929.3,1171-1189).
cccagctgcgatcactaaa

SEQ ID NO: 292818 - DNA, 19 bp, Homo sapiens
  siRNA target sequence for ITIH2 (NM_002216.1,71-89).
gactcacgtgctttttcat

SEQ ID NO: 292819 - DNA, 19 bp, Homo sapiens
  siRNA target sequence for ITIH2 (NM_002216.1,73-91).
ctcacgtgctttttcatct

SEQ ID NO: 292820 - DNA, 19 bp, Homo sapiens
  siRNA target sequence for ITIH2 (NM_002216.1,116-134).
gcttcgaaatccccataaa

SEQ ID NO: 292821 - DNA, 19 bp, Homo sapiens
  siRNA target sequence for ITIH2 (NM_002216.1,120-138).
cgaaatccccataaatgga

SEQ ID NO: 292822 - DNA, 19 bp, Homo sapiens
  siRNA target sequence for ITIH2 (NM_002216.1,126-144).
ccccataaatggactttct

SEQ ID NO: 292823 - DNA, 19 bp, Homo sapiens
  siRNA target sequence for ITIH2 (NM_002216.1,179-197).
ccccaggcaaatttcaatt

SEQ ID NO: 292824 - DNA, 19 bp, Homo sapiens
  siRNA target sequence for ITIH2 (NM_002216.1,201-219).
ggcagagaaccggagatat

SEQ ID NO: 292825 - DNA, 19 bp, Homo sapiens
  siRNA target sequence for ITIH2 (NM_002216.1,203-221).
cagagaaccggagatatca

SEQ ID NO: 292826 - DNA, 19 bp, Homo sapiens
  siRNA target sequence for ITIH2 (NM_002216.1,205-223).
gagaaccggagatatcaga

SEQ ID NO: 292827 - DNA, 19 bp, Homo sapiens
  siRNA target sequence for ITIH2 (NM_002216.1,232-250).
ccaggagaatcggaagaaa

SEQ ID NO: 292828 - DNA, 19 bp, Homo sapiens
  siRNA target sequence for ITIH2 (NM_002216.1,252-270).
gatggaagaggttgatcaa

SEQ ID NO: 292829 - DNA, 19 bp, Homo sapiens
  siRNA target sequence for ITIH2 (NM_002216.1,261-279).
ggttgatcaagtaactctt

SEQ ID NO: 292830 - DNA, 19 bp, Homo sapiens
  siRNA target sequence for ITIH2 (NM_002216.1,265-283).
gatcaagtaactctttata

SEQ ID NO: 292831 - DNA, 19 bp, Homo sapiens
  siRNA target sequence for ITIH2 (NM_002216.1,292-310).
gtccagtctactattactt

SEQ ID NO: 292832 - DNA, 19 bp, Homo sapiens
  siRNA target sequence for ITIH2 (NM_002216.1,356-374).
ccccgcagcctcagaatgt

SEQ ID NO: 292833 - DNA, 19 bp, Homo sapiens
  siRNA target sequence for ITIH2 (NM_002216.1,428-446).
ctgtggacggcaagacatt

SEQ ID NO: 292834 - DNA, 19 bp, Homo sapiens
  siRNA target sequence for ITIH2 (NM_002216.1,430-448).
gtggacggcaagacattta

SEQ ID NO: 292835 - DNA, 19 bp, Homo sapiens
  siRNA target sequence for ITIH2 (NM_002216.1,441-459).
gacatttaggagctctatt

SEQ ID NO: 292836 - DNA, 19 bp, Homo sapiens
  siRNA target sequence for ITIH2 (NM_002216.1,443-461).
catttaggagctctattaa

SEQ ID NO: 292837 - DNA, 19 bp, Homo sapiens
  siRNA target sequence for ITIH2 (NM_002216.1,470-488).
ctgtgggccgagctcttta

SEQ ID NO: 292838 - DNA, 19 bp, Homo sapiens
  siRNA target sequence for ITIH2 (NM_002216.1,474-492).
gggccgagctctttatgca

SEQ ID NO: 292839 - DNA, 19 bp, Homo sapiens
  siRNA target sequence for ITIH2 (NM_002216.1,528-546).
gaggagcagcgctcttgat

SEQ ID NO: 292840 - DNA, 19 bp, Homo sapiens
  siRNA target sequence for ITIH2 (NM_002216.1,530-548).
ggagcagcgctcttgatat

SEQ ID NO: 292841 - DNA, 19 bp, Homo sapiens
  siRNA target sequence for ITIH2 (NM_002216.1,533-551).
gcagcgctcttgatatgga

SEQ ID NO: 292842 - DNA, 19 bp, Homo sapiens
  siRNA target sequence for ITIH2 (NM_002216.1,534-552).
cagcgctcttgatatggaa

SEQ ID NO: 292843 - DNA, 19 bp, Homo sapiens
  siRNA target sequence for ITIH2 (NM_002216.1,536-554).
gcgctcttgatatggaaaa

SEQ ID NO: 292844 - DNA, 19 bp, Homo sapiens
  siRNA target sequence for ITIH2 (NM_002216.1,538-556).
gctcttgatatggaaaact

SEQ ID NO: 292845 - DNA, 19 bp, Homo sapiens
  siRNA target sequence for ITIH2 (NM_002216.1,539-557).
ctcttgatatggaaaactt

SEQ ID NO: 292846 - DNA, 19 bp, Homo sapiens
  siRNA target sequence for ITIH2 (NM_002216.1,670-688).
ggacggctggccaaacact

SEQ ID NO: 292847 - DNA, 19 bp, Homo sapiens
  siRNA target sequence for ITIH2 (NM_002216.1,671-689).
gacggctggccaaacactt

SEQ ID NO: 292848 - DNA, 19 bp, Homo sapiens
  siRNA target sequence for ITIH2 (NM_002216.1,674-692).
ggctggccaaacacttaga

SEQ ID NO: 292849 - DNA, 19 bp, Homo sapiens
  siRNA target sequence for ITIH2 (NM_002216.1,766-784).
gatggtgttccggtcattt

SEQ ID NO: 292850 - DNA, 19 bp, Homo sapiens
  siRNA target sequence for ITIH2 (NM_002216.1,888-906).
gctgtatgacgtgaaaaga

SEQ ID NO: 292851 - DNA, 19 bp, Homo sapiens
  siRNA target sequence for ITIH2 (NM_002216.1,927-945).
ggaggtgtttaatggatat

SEQ ID NO: 292852 - DNA, 19 bp, Homo sapiens
  siRNA target sequence for ITIH2 (NM_002216.1,1019-1037).
gctccatgtggggagttaa

SEQ ID NO: 292853 - DNA, 19 bp, Homo sapiens
  siRNA target sequence for ITIH2 (NM_002216.1,1020-1038).
ctccatgtggggagttaaa

SEQ ID NO: 292854 - DNA, 19 bp, Homo sapiens
  siRNA target sequence for ITIH2 (NM_002216.1,1026-1044).
gtggggagttaaaatgaaa

SEQ ID NO: 292855 - DNA, 19 bp, Homo sapiens
  siRNA target sequence for ITIH2 (NM_002216.1,1058-1076).
caatgaagaccatattgga

SEQ ID NO: 292856 - DNA, 19 bp, Homo sapiens
  siRNA target sequence for ITIH2 (NM_002216.1,1125-1143).
cattcgaacttggagaaat

SEQ ID NO: 292857 - DNA, 19 bp, Homo sapiens
  siRNA target sequence for ITIH2 (NM_002216.1,1129-1147).
cgaacttggagaaatgatt

SEQ ID NO: 292858 - DNA, 19 bp, Homo sapiens
  siRNA target sequence for ITIH2 (NM_002216.1,1187-1205).
ggtatattgagaaaatcca

SEQ ID NO: 292859 - DNA, 19 bp, Homo sapiens
  siRNA target sequence for ITIH2 (NM_002216.1,1235-1253).
cactcctacgggcaatctt

SEQ ID NO: 292860 - DNA, 19 bp, Homo sapiens
  siRNA target sequence for ITIH2 (NM_002216.1,1237-1255).
ctcctacgggcaatcttca

SEQ ID NO: 292861 - DNA, 19 bp, Homo sapiens
  siRNA target sequence for ITIH2 (NM_002216.1,1239-1257).
cctacgggcaatcttcatt

SEQ ID NO: 292862 - DNA, 19 bp, Homo sapiens
  siRNA target sequence for ITIH2 (NM_002216.1,1240-1258).
ctacgggcaatcttcattt

SEQ ID NO: 292863 - DNA, 19 bp, Homo sapiens
  siRNA target sequence for ITIH2 (NM_002216.1,1269-1287).
caataacttgggactgtta

SEQ ID NO: 292864 - DNA, 19 bp, Homo sapiens
  siRNA target sequence for ITIH2 (NM_002216.1,1296-1314).
ctccgtctcgctgatcatt

SEQ ID NO: 292865 - DNA, 19 bp, Homo sapiens
  siRNA target sequence for ITIH2 (NM_002216.1,1298-1316).
ccgtctcgctgatcatttt

SEQ ID NO: 292866 - DNA, 19 bp, Homo sapiens
  siRNA target sequence for ITIH2 (NM_002216.1,1302-1320).
ctcgctgatcattttggtt

SEQ ID NO: 292867 - DNA, 19 bp, Homo sapiens
  siRNA target sequence for ITIH2 (NM_002216.1,1333-1351).
ccaacagtgggcgaactaa

SEQ ID NO: 292868 - DNA, 19 bp, Homo sapiens
  siRNA target sequence for ITIH2 (NM_002216.1,1334-1352).
caacagtgggcgaactaaa

SEQ ID NO: 292869 - DNA, 19 bp, Homo sapiens
  siRNA target sequence for ITIH2 (NM_002216.1,1337-1355).
cagtgggcgaactaaaact

SEQ ID NO: 292870 - DNA, 19 bp, Homo sapiens
  siRNA target sequence for ITIH2 (NM_002216.1,1339-1357).
gtgggcgaactaaaactgt

SEQ ID NO: 292871 - DNA, 19 bp, Homo sapiens
  siRNA target sequence for ITIH2 (NM_002216.1,1393-1411).
gacaatatctccttgttca

SEQ ID NO: 292872 - DNA, 19 bp, Homo sapiens
  siRNA target sequence for ITIH2 (NM_002216.1,1432-1450).
gtggactatgattttttga

SEQ ID NO: 292873 - DNA, 19 bp, Homo sapiens
  siRNA target sequence for ITIH2 (NM_002216.1,1550-1568).
cattgctccggaatgttca

SEQ ID NO: 292874 - DNA, 19 bp, Homo sapiens
  siRNA target sequence for ITIH2 (NM_002216.1,1558-1576).
cggaatgttcagttcaact

SEQ ID NO: 292875 - DNA, 19 bp, Homo sapiens
  siRNA target sequence for ITIH2 (NM_002216.1,1572-1590).
caactatccccatacatca

SEQ ID NO: 292876 - DNA, 19 bp, Homo sapiens
  siRNA target sequence for ITIH2 (NM_002216.1,1591-1609).
gtcacggacgtcactcaaa

SEQ ID NO: 292877 - DNA, 19 bp, Homo sapiens
  siRNA target sequence for ITIH2 (NM_002216.1,1595-1613).
cggacgtcactcaaaacaa

SEQ ID NO: 292878 - DNA, 19 bp, Homo sapiens
  siRNA target sequence for ITIH2 (NM_002216.1,1597-1615).
gacgtcactcaaaacaatt

SEQ ID NO: 292879 - DNA, 19 bp, Homo sapiens
  siRNA target sequence for ITIH2 (NM_002216.1,1604-1622).
ctcaaaacaatttccataa

SEQ ID NO: 292880 - DNA, 19 bp, Homo sapiens
  siRNA target sequence for ITIH2 (NM_002216.1,1641-1659).
gattgtggtggcaggaaaa

SEQ ID NO: 292881 - DNA, 19 bp, Homo sapiens
  siRNA target sequence for ITIH2 (NM_002216.1,1666-1684).
cctgctaaattggatcaaa

SEQ ID NO: 292882 - DNA, 19 bp, Homo sapiens
  siRNA target sequence for ITIH2 (NM_002216.1,1667-1685).
ctgctaaattggatcaaat

SEQ ID NO: 292883 - DNA, 19 bp, Homo sapiens
  siRNA target sequence for ITIH2 (NM_002216.1,1670-1688).
ctaaattggatcaaataga

SEQ ID NO: 292884 - DNA, 19 bp, Homo sapiens
  siRNA target sequence for ITIH2 (NM_002216.1,1681-1699).
caaatagagagcgttatca

SEQ ID NO: 292885 - DNA, 19 bp, Homo sapiens
  siRNA target sequence for ITIH2 (NM_002216.1,1709-1727).
cggctaacacgcagttagt

SEQ ID NO: 292886 - DNA, 19 bp, Homo sapiens
  siRNA target sequence for ITIH2 (NM_002216.1,1711-1729).
gctaacacgcagttagtct

SEQ ID NO: 292887 - DNA, 19 bp, Homo sapiens
  siRNA target sequence for ITIH2 (NM_002216.1,1712-1730).
ctaacacgcagttagtctt

SEQ ID NO: 292888 - DNA, 19 bp, Homo sapiens
  siRNA target sequence for ITIH2 (NM_002216.1,1749-1767).
ggacgacttgcaggatttt

SEQ ID NO: 292889 - DNA, 19 bp, Homo sapiens
  siRNA target sequence for ITIH2 (NM_002216.1,1753-1771).
gacttgcaggattttctat

SEQ ID NO: 292890 - DNA, 19 bp, Homo sapiens
  siRNA target sequence for ITIH2 (NM_002216.1,1758-1776).
gcaggattttctatcgaaa

SEQ ID NO: 292891 - DNA, 19 bp, Homo sapiens
  siRNA target sequence for ITIH2 (NM_002216.1,1783-1801).
catgcagatcccgatttca

SEQ ID NO: 292892 - DNA, 19 bp, Homo sapiens
  siRNA target sequence for ITIH2 (NM_002216.1,1795-1813).
gatttcaccaggaaactgt

SEQ ID NO: 292893 - DNA, 19 bp, Homo sapiens
  siRNA target sequence for ITIH2 (NM_002216.1,1868-1886).
ctgccgccaagagaagaat

SEQ ID NO: 292894 - DNA, 19 bp, Homo sapiens
  siRNA target sequence for ITIH2 (NM_002216.1,1872-1890).
cgccaagagaagaattaca

SEQ ID NO: 292895 - DNA, 19 bp, Homo sapiens
  siRNA target sequence for ITIH2 (NM_002216.1,1912-1930).
ctagaccaccacattgtga

SEQ ID NO: 292896 - DNA, 19 bp, Homo sapiens
  siRNA target sequence for ITIH2 (NM_002216.1,2062-2080).
ccgtcttgggccaatcctt

SEQ ID NO: 292897 - DNA, 19 bp, Homo sapiens
  siRNA target sequence for ITIH2 (NM_002216.1,2178-2196).
catcatttatctaccaaaa

SEQ ID NO: 292898 - DNA, 19 bp, Homo sapiens
  siRNA target sequence for ITIH2 (NM_002216.1,2311-2329).
cccaacaatggaaaactaa

SEQ ID NO: 292899 - DNA, 19 bp, Homo sapiens
  siRNA target sequence for ITIH2 (NM_002216.1,2452-2470).
gctcaagtcacgaatcaga

SEQ ID NO: 292900 - DNA, 19 bp, Homo sapiens
  siRNA target sequence for ITIH2 (NM_002216.1,2562-2580).
gaagcatcccgtcaatgtt

SEQ ID NO: 292901 - DNA, 19 bp, Homo sapiens
  siRNA target sequence for ITIH2 (NM_002216.1,2602-2620).
ccccctacaaacaagttct

SEQ ID NO: 292902 - DNA, 19 bp, Homo sapiens
  siRNA target sequence for ITIH2 (NM_002216.1,2624-2642).
ctaaagcccacggactaat

SEQ ID NO: 292903 - DNA, 19 bp, Homo sapiens
  siRNA target sequence for ITIH2 (NM_002216.1,2636-2654).
gactaataggccagttcat

SEQ ID NO: 292904 - DNA, 19 bp, Homo sapiens
  siRNA target sequence for ITIH2 (NM_002216.1,2775-2793).
cagaacggatctagtgttt

SEQ ID NO: 292905 - DNA, 19 bp, Homo sapiens
  siRNA target sequence for ITIH2 (NM_002216.1,2848-2866).
gggcattacaaggattact

SEQ ID NO: 292906 - DNA, 19 bp, Homo sapiens
  siRNA target sequence for ITIH2 (NM_002216.1,2849-2867).
ggcattacaaggattactt

SEQ ID NO: 292907 - DNA, 19 bp, Homo sapiens
  siRNA target sequence for ITIH3 (NM_002217.1,132-150).
ggcatcgaggtctacagta

SEQ ID NO: 292908 - DNA, 19 bp, Homo sapiens
  siRNA target sequence for ITIH3 (NM_002217.1,137-155).
cgaggtctacagtaccaaa

SEQ ID NO: 292909 - DNA, 19 bp, Homo sapiens
  siRNA target sequence for ITIH3 (NM_002217.1,138-156).
gaggtctacagtaccaaaa

SEQ ID NO: 292910 - DNA, 19 bp, Homo sapiens
  siRNA target sequence for ITIH3 (NM_002217.1,173-191).
ctcccgttttgctcacaat

SEQ ID NO: 292911 - DNA, 19 bp, Homo sapiens
  siRNA target sequence for ITIH3 (NM_002217.1,178-196).
gttttgctcacaatgttgt

SEQ ID NO: 292912 - DNA, 19 bp, Homo sapiens
  siRNA target sequence for ITIH3 (NM_002217.1,226-244).
cggccaaggaggtttcctt

SEQ ID NO: 292913 - DNA, 19 bp, Homo sapiens
  siRNA target sequence for ITIH3 (NM_002217.1,292-310).
ccatcgacggtgttaccta

SEQ ID NO: 292914 - DNA, 19 bp, Homo sapiens
  siRNA target sequence for ITIH3 (NM_002217.1,307-325).
cctaccctgggaatgtcaa

SEQ ID NO: 292915 - DNA, 19 bp, Homo sapiens
  siRNA target sequence for ITIH3 (NM_002217.1,536-554).
gcaactggtcaaacacttt

SEQ ID NO: 292916 - DNA, 19 bp, Homo sapiens
  siRNA target sequence for ITIH3 (NM_002217.1,540-558).
ctggtcaaacactttgaga

SEQ ID NO: 292917 - DNA, 19 bp, Homo sapiens
  siRNA target sequence for ITIH3 (NM_002217.1,784-802).
ctggcaacgtgcagatagt

SEQ ID NO: 292918 - DNA, 19 bp, Homo sapiens
  siRNA target sequence for ITIH3 (NM_002217.1,788-806).
caacgtgcagatagtcaat

SEQ ID NO: 292919 - DNA, 19 bp, Homo sapiens
  siRNA target sequence for ITIH3 (NM_002217.1,808-826).
gctacttcgtgcacttctt

SEQ ID NO: 292920 - DNA, 19 bp, Homo sapiens
  siRNA target sequence for ITIH3 (NM_002217.1,889-907).
ccatggctggtcggaaatt

SEQ ID NO: 292921 - DNA, 19 bp, Homo sapiens
  siRNA target sequence for ITIH3 (NM_002217.1,954-972).
gaggaagactatctgaatt

SEQ ID NO: 292922 - DNA, 19 bp, Homo sapiens
  siRNA target sequence for ITIH3 (NM_002217.1,1066-1084).
gcatggaggataaaggaat

SEQ ID NO: 292923 - DNA, 19 bp, Homo sapiens
  siRNA target sequence for ITIH3 (NM_002217.1,1212-1230).
gagagcagacccgaaaaaa

SEQ ID NO: 292924 - DNA, 19 bp, Homo sapiens
  siRNA target sequence for ITIH3 (NM_002217.1,1217-1235).
cagacccgaaaaaatccaa

SEQ ID NO: 292925 - DNA, 19 bp, Homo sapiens
  siRNA target sequence for ITIH3 (NM_002217.1,1223-1241).
cgaaaaaatccaagagaat

SEQ ID NO: 292926 - DNA, 19 bp, Homo sapiens
  siRNA target sequence for ITIH3 (NM_002217.1,1260-1278).
ggcaagttccccttgtata

SEQ ID NO: 292927 - DNA, 19 bp, Homo sapiens
  siRNA target sequence for ITIH3 (NM_002217.1,1285-1303).
gctttggcaacaatctgaa

SEQ ID NO: 292928 - DNA, 19 bp, Homo sapiens
  siRNA target sequence for ITIH3 (NM_002217.1,1286-1304).
ctttggcaacaatctgaat

SEQ ID NO: 292929 - DNA, 19 bp, Homo sapiens
  siRNA target sequence for ITIH3 (NM_002217.1,1290-1308).
ggcaacaatctgaattata

SEQ ID NO: 292930 - DNA, 19 bp, Homo sapiens
  siRNA target sequence for ITIH3 (NM_002217.1,1382-1400).
gcagttgcagggcttctat

SEQ ID NO: 292931 - DNA, 19 bp, Homo sapiens
  siRNA target sequence for ITIH3 (NM_002217.1,1530-1548).
gtggacgaggacatgaaca

SEQ ID NO: 292932 - DNA, 19 bp, Homo sapiens
  siRNA target sequence for ITIH3 (NM_002217.1,1918-1936).
gctaccagcctcctcaaaa

SEQ ID NO: 292933 - DNA, 19 bp, Homo sapiens
  siRNA target sequence for ITIH3 (NM_002217.1,1929-1947).
cctcaaaacccctactact

SEQ ID NO: 292934 - DNA, 19 bp, Homo sapiens
  siRNA target sequence for ITIH3 (NM_002217.1,1957-1975).
gggatccccacttcatcat

SEQ ID NO: 292935 - DNA, 19 bp, Homo sapiens
  siRNA target sequence for ITIH3 (NM_002217.1,2032-2050).
cagtgctgcgccttattca

SEQ ID NO: 292936 - DNA, 19 bp, Homo sapiens
  siRNA target sequence for ITIH3 (NM_002217.1,2262-2280).
gatgggctgtccatgatga

SEQ ID NO: 292937 - DNA, 19 bp, Homo sapiens
  siRNA target sequence for ITIH3 (NM_002217.1,2362-2380).
ctgtccaccgtgactttct

SEQ ID NO: 292938 - DNA, 19 bp, Homo sapiens
  siRNA target sequence for ITIH3 (NM_002217.1,2447-2465).
ccaaccctttgactttaaa

SEQ ID NO: 292939 - DNA, 19 bp, Homo sapiens
  siRNA target sequence for ITIH3 (NM_002217.1,2621-2639).
cggagaagggctgattgat

SEQ ID NO: 292940 - DNA, 19 bp, Homo sapiens
  siRNA target sequence for ITIH3 (NM_002217.1,2641-2659).
gtgtccacactgactacat

SEQ ID NO: 292941 - DNA, 19 bp, Homo sapiens
  siRNA target sequence for ITIH4 (NM_002218.3,57-75).
ccgtacctgcagcaaagtt

SEQ ID NO: 292942 - DNA, 19 bp, Homo sapiens
  siRNA target sequence for ITIH4 (NM_002218.3,110-128).
ctactactgccgaaaagaa

SEQ ID NO: 292943 - DNA, 19 bp, Homo sapiens
  siRNA target sequence for ITIH4 (NM_002218.3,207-225).
ggtcaatagggccaatact

SEQ ID NO: 292944 - DNA, 19 bp, Homo sapiens
  siRNA target sequence for ITIH4 (NM_002218.3,275-293).
ccaacttctccatgatcat

SEQ ID NO: 292945 - DNA, 19 bp, Homo sapiens
  siRNA target sequence for ITIH4 (NM_002218.3,305-323).
cctacccagggatcatcaa

SEQ ID NO: 292946 - DNA, 19 bp, Homo sapiens
  siRNA target sequence for ITIH4 (NM_002218.3,439-457).
gctcccaatgccaagatca

SEQ ID NO: 292947 - DNA, 19 bp, Homo sapiens
  siRNA target sequence for ITIH4 (NM_002218.3,744-762).
cctcattatccgctatgat

SEQ ID NO: 292948 - DNA, 19 bp, Homo sapiens
  siRNA target sequence for ITIH4 (NM_002218.3,914-932).
cccgggaagccctaatcaa

SEQ ID NO: 292949 - DNA, 19 bp, Homo sapiens
  siRNA target sequence for ITIH4 (NM_002218.3,972-990).
catcgtcttcagtacagaa

SEQ ID NO: 292950 - DNA, 19 bp, Homo sapiens
  siRNA target sequence for ITIH4 (NM_002218.3,1077-1095).
gggagggaccaacatcaat

SEQ ID NO: 292951 - DNA, 19 bp, Homo sapiens
  siRNA target sequence for ITIH4 (NM_002218.3,1199-1217).
ccactgtgggggagactaa

SEQ ID NO: 292952 - DNA, 19 bp, Homo sapiens
  siRNA target sequence for ITIH4 (NM_002218.3,1220-1238).
ccaggagcatccagaataa

SEQ ID NO: 292953 - DNA, 19 bp, Homo sapiens
  siRNA target sequence for ITIH4 (NM_002218.3,1223-1241).
ggagcatccagaataacgt

SEQ ID NO: 292954 - DNA, 19 bp, Homo sapiens
  siRNA target sequence for ITIH4 (NM_002218.3,1239-1257).
cgtgcgggaagctgtaagt

SEQ ID NO: 292955 - DNA, 19 bp, Homo sapiens
  siRNA target sequence for ITIH4 (NM_002218.3,1434-1452).
cttcgagtacccaagcaat

SEQ ID NO: 292956 - DNA, 19 bp, Homo sapiens
  siRNA target sequence for ITIH4 (NM_002218.3,1462-1480).
gaggtcactcagaacaact

SEQ ID NO: 292957 - DNA, 19 bp, Homo sapiens
  siRNA target sequence for ITIH4 (NM_002218.3,1576-1594).
cctacacagaacatcactt

SEQ ID NO: 292958 - DNA, 19 bp, Homo sapiens
  siRNA target sequence for ITIH4 (NM_002218.3,1632-1650).
gttccagagccccaagtat

SEQ ID NO: 292959 - DNA, 19 bp, Homo sapiens
  siRNA target sequence for ITIH4 (NM_002218.3,1755-1773).
ccaagcgctgaatttatca

SEQ ID NO: 292960 - DNA, 19 bp, Homo sapiens
  siRNA target sequence for ITIH4 (NM_002218.3,1789-1807).
gtcacgcctctcacatcta

SEQ ID NO: 292961 - DNA, 19 bp, Homo sapiens
  siRNA target sequence for ITIH4 (NM_002218.3,1794-1812).
gcctctcacatctatggta

SEQ ID NO: 292962 - DNA, 19 bp, Homo sapiens
  siRNA target sequence for ITIH4 (NM_002218.3,1858-1876).
cccatggaaggcgaaagta

SEQ ID NO: 292963 - DNA, 19 bp, Homo sapiens
  siRNA target sequence for ITIH4 (NM_002218.3,1860-1878).
catggaaggcgaaagtaga

SEQ ID NO: 292964 - DNA, 19 bp, Homo sapiens
  siRNA target sequence for ITIH4 (NM_002218.3,1891-1909).
cactcaggttccactttct

SEQ ID NO: 292965 - DNA, 19 bp, Homo sapiens
  siRNA target sequence for ITIH4 (NM_002218.3,1895-1913).
caggttccactttcttcaa

SEQ ID NO: 292966 - DNA, 19 bp, Homo sapiens
  siRNA target sequence for ITIH4 (NM_002218.3,1897-1915).
ggttccactttcttcaaat

SEQ ID NO: 292967 - DNA, 19 bp, Homo sapiens
  siRNA target sequence for ITIH4 (NM_002218.3,1996-2014).
gctggctcccggatgaatt

SEQ ID NO: 292968 - DNA, 19 bp, Homo sapiens
  siRNA target sequence for ITIH4 (NM_002218.3,1997-2015).
ctggctcccggatgaattt

SEQ ID NO: 292969 - DNA, 19 bp, Homo sapiens
  siRNA target sequence for ITIH4 (NM_002218.3,1999-2017).
ggctcccggatgaatttca

SEQ ID NO: 292970 - DNA, 19 bp, Homo sapiens
  siRNA target sequence for ITIH4 (NM_002218.3,2156-2174).
ctgtgtctcgtgtcatgaa

SEQ ID NO: 292971 - DNA, 19 bp, Homo sapiens
  siRNA target sequence for ITIH4 (NM_002218.3,2158-2176).
gtgtctcgtgtcatgaata

SEQ ID NO: 292972 - DNA, 19 bp, Homo sapiens
  siRNA target sequence for ITIH4 (NM_002218.3,2162-2180).
ctcgtgtcatgaatatgaa

SEQ ID NO: 292973 - DNA, 19 bp, Homo sapiens
  siRNA target sequence for ITIH4 (NM_002218.3,2164-2182).
cgtgtcatgaatatgaaaa

SEQ ID NO: 292974 - DNA, 19 bp, Homo sapiens
  siRNA target sequence for ITIH4 (NM_002218.3,2478-2496).
gaaggagacgctattctca

SEQ ID NO: 292975 - DNA, 19 bp, Homo sapiens
  siRNA target sequence for ITIH4 (NM_002218.3,2544-2562).
gctcagtgacccagacaaa

SEQ ID NO: 292976 - DNA, 19 bp, Homo sapiens
  siRNA target sequence for ITIH4 (NM_002218.3,2653-2671).
gggacccttggccagtttt

SEQ ID NO: 292977 - DNA, 19 bp, Homo sapiens
  siRNA target sequence for ITIH4 (NM_002218.3,2654-2672).
ggacccttggccagtttta

SEQ ID NO: 292978 - DNA, 19 bp, Homo sapiens
  siRNA target sequence for ITIH4 (NM_002218.3,2759-2777).
gagagcgcaggctggatta

SEQ ID NO: 292979 - DNA, 19 bp, Homo sapiens
  siRNA target sequence for KRTHB3 (NM_002282.2,84-102).
ggttccgccctggaaactt

SEQ ID NO: 292980 - DNA, 19 bp, Homo sapiens
  siRNA target sequence for OL-64 (NM_173850.2,865-883).
gagcttctcaccaaggaat

SEQ ID NO: 292981 - DNA, 19 bp, Homo sapiens
  siRNA target sequence for OL-64 (NM_173850.2,867-885).
gcttctcaccaaggaatta

SEQ ID NO: 292982 - DNA, 19 bp, Homo sapiens
  siRNA target sequence for OL-64 (NM_173850.2,868-886).
cttctcaccaaggaattat

SEQ ID NO: 292983 - DNA, 19 bp, Homo sapiens
  siRNA target sequence for OL-64 (NM_173850.2,1094-1112).
caggggttcaacttcagaa

SEQ ID NO: 292984 - DNA, 19 bp, Homo sapiens
  siRNA target sequence for OL-64 (NM_173850.2,1130-1148).
cttcatgagggcttccatt

SEQ ID NO: 292985 - DNA, 19 bp, Homo sapiens
  siRNA target sequence for OL-64 (NM_173850.2,1200-1218).
ggaacacgctgttcattga

SEQ ID NO: 292986 - DNA, 19 bp, Homo sapiens
  siRNA target sequence for OL-64 (NM_173850.2,1228-1246).
gcagccacagcgtaagttt

SEQ ID NO: 292987 - DNA, 19 bp, Homo sapiens
  siRNA target sequence for OL-64 (NM_173850.2,1229-1247).
cagccacagcgtaagtttt

SEQ ID NO: 292988 - DNA, 19 bp, Homo sapiens
  siRNA target sequence for OL-64 (NM_173850.2,1286-1304).
cttaccaactttcagaatt

SEQ ID NO: 292989 - DNA, 19 bp, Homo sapiens
  siRNA target sequence for OL-64 (NM_173850.2,1324-1342).
gatcaatgactttatcagt

SEQ ID NO: 292990 - DNA, 19 bp, Homo sapiens
  siRNA target sequence for OL-64 (NM_173850.2,1431-1449).
ccaggtggaaacatgagtt

SEQ ID NO: 292991 - DNA, 19 bp, Homo sapiens
  siRNA target sequence for OL-64 (NM_173850.2,1522-1540).
ccgtagtggcatataccaa

SEQ ID NO: 292992 - DNA, 19 bp, Homo sapiens
  siRNA target sequence for OL-64 (NM_173850.2,1577-1595).
gaaataccctaccagaaaa

SEQ ID NO: 292993 - DNA, 19 bp, Homo sapiens
  siRNA target sequence for OL-64 (NM_173850.2,1585-1603).
ctaccagaaaaatatcaca

SEQ ID NO: 292994 - DNA, 19 bp, Homo sapiens
  siRNA target sequence for OL-64 (NM_173850.2,1674-1692).
ccagatggaaaacattact

SEQ ID NO: 292995 - DNA, 19 bp, Homo sapiens
  siRNA target sequence for OL-64 (NM_173850.2,1935-1953).
caccactcgtcgtcaagat

SEQ ID NO: 292996 - DNA, 19 bp, Homo sapiens
  siRNA target sequence for OL-64 (NM_173850.2,1938-1956).
cactcgtcgtcaagataga

SEQ ID NO: 292997 - DNA, 19 bp, Homo sapiens
  siRNA target sequence for OL-64 (NM_173850.2,1940-1958).
ctcgtcgtcaagatagaca

SEQ ID NO: 292998 - DNA, 19 bp, Homo sapiens
  siRNA target sequence for OL-64 (NM_173850.2,1942-1960).
cgtcgtcaagatagacaaa

SEQ ID NO: 292999 - DNA, 19 bp, Homo sapiens
  siRNA target sequence for OL-64 (NM_173850.2,1961-1979).
ccctatctgctgctgattt

SEQ ID NO: 293000 - DNA, 19 bp, Homo sapiens
  siRNA target sequence for OL-64 (NM_173850.2,2005-2023).
cttcctgggaaagattgtt

SEQ ID NO: 293001 - DNA, 19 bp, Homo sapiens
  siRNA target sequence for OL-64 (NM_173850.2,2021-2039).
gttaaccctattggaaaat

SEQ ID NO: 293002 - DNA, 19 bp, Homo sapiens
  siRNA target sequence for PZP (NM_002864.1,32-50).
gcggaaagacagacttctt

SEQ ID NO: 293003 - DNA, 19 bp, Homo sapiens
  siRNA target sequence for PZP (NM_002864.1,58-76).
gtcttgtgctacttcttat

SEQ ID NO: 293004 - DNA, 19 bp, Homo sapiens
  siRNA target sequence for PZP (NM_002864.1,103-121).
ctacagaaccgcagtatat

SEQ ID NO: 293005 - DNA, 19 bp, Homo sapiens
  siRNA target sequence for PZP (NM_002864.1,258-276).
gtggcggagaaggacttat

SEQ ID NO: 293006 - DNA, 19 bp, Homo sapiens
  siRNA target sequence for PZP (NM_002864.1,351-369).
gggcctacgcaagatttca

SEQ ID NO: 293007 - DNA, 19 bp, Homo sapiens
  siRNA target sequence for PZP (NM_002864.1,428-446).
caaacccatgtataaacca

SEQ ID NO: 293008 - DNA, 19 bp, Homo sapiens
  siRNA target sequence for PZP (NM_002864.1,494-512).
ccctcgaaatgaactgatt

SEQ ID NO: 293009 - DNA, 19 bp, Homo sapiens
  siRNA target sequence for PZP (NM_002864.1,504-522).
gaactgattccactgatat

SEQ ID NO: 293010 - DNA, 19 bp, Homo sapiens
  siRNA target sequence for PZP (NM_002864.1,509-527).
gattccactgatatacctt

SEQ ID NO: 293011 - DNA, 19 bp, Homo sapiens
  siRNA target sequence for PZP (NM_002864.1,530-548).
gaacccaagaagaaatcga

SEQ ID NO: 293012 - DNA, 19 bp, Homo sapiens
  siRNA target sequence for PZP (NM_002864.1,572-590).
gctagaagctggcatcaat

SEQ ID NO: 293013 - DNA, 19 bp, Homo sapiens
  siRNA target sequence for PZP (NM_002864.1,706-724).
ccaagtttgaggtcaaagt

SEQ ID NO: 293014 - DNA, 19 bp, Homo sapiens
  siRNA target sequence for PZP (NM_002864.1,707-725).
caagtttgaggtcaaagtt

SEQ ID NO: 293015 - DNA, 19 bp, Homo sapiens
  siRNA target sequence for PZP (NM_002864.1,723-741).
gttcaggtgccaaagataa

SEQ ID NO: 293016 - DNA, 19 bp, Homo sapiens
  siRNA target sequence for PZP (NM_002864.1,728-746).
ggtgccaaagataatcagt

SEQ ID NO: 293017 - DNA, 19 bp, Homo sapiens
  siRNA target sequence for PZP (NM_002864.1,732-750).
ccaaagataatcagtatca

SEQ ID NO: 293018 - DNA, 19 bp, Homo sapiens
  siRNA target sequence for PZP (NM_002864.1,774-792).
gtctgtggagaatacactt

SEQ ID NO: 293019 - DNA, 19 bp, Homo sapiens
  siRNA target sequence for PZP (NM_002864.1,820-838).
ctgtgagcctgtgtagaaa

SEQ ID NO: 293020 - DNA, 19 bp, Homo sapiens
  siRNA target sequence for PZP (NM_002864.1,844-862).
ctcgtgttcttaattgtga

SEQ ID NO: 293021 - DNA, 19 bp, Homo sapiens
  siRNA target sequence for PZP (NM_002864.1,870-888).
gaggtctgtgaggaattca

SEQ ID NO: 293022 - DNA, 19 bp, Homo sapiens
  siRNA target sequence for PZP (NM_002864.1,911-929).
ctgcatcacccaacaagta

SEQ ID NO: 293023 - DNA, 19 bp, Homo sapiens
  siRNA target sequence for PZP (NM_002864.1,1033-1051).
ggatcagtgaaatcacaaa

SEQ ID NO: 293024 - DNA, 19 bp, Homo sapiens
  siRNA target sequence for PZP (NM_002864.1,1052-1070).
cattgtatccaaactcaaa

SEQ ID NO: 293025 - DNA, 19 bp, Homo sapiens
  siRNA target sequence for PZP (NM_002864.1,1150-1168).
ccatccccaataaactctt

SEQ ID NO: 293026 - DNA, 19 bp, Homo sapiens
  siRNA target sequence for PZP (NM_002864.1,1179-1197).
gtgaatgacgccaattatt

SEQ ID NO: 293027 - DNA, 19 bp, Homo sapiens
  siRNA target sequence for PZP (NM_002864.1,1223-1241).
gggtcttgcacagttttca

SEQ ID NO: 293028 - DNA, 19 bp, Homo sapiens
  siRNA target sequence for PZP (NM_002864.1,1230-1248).
gcacagttttcaatcaata

SEQ ID NO: 293029 - DNA, 19 bp, Homo sapiens
  siRNA target sequence for PZP (NM_002864.1,1252-1270).
ccagtatctcggttaataa

SEQ ID NO: 293030 - DNA, 19 bp, Homo sapiens
  siRNA target sequence for PZP (NM_002864.1,1253-1271).
cagtatctcggttaataaa

SEQ ID NO: 293031 - DNA, 19 bp, Homo sapiens
  siRNA target sequence for PZP (NM_002864.1,1272-1290).
ctttttgtccgggttttca

SEQ ID NO: 293032 - DNA, 19 bp, Homo sapiens
  siRNA target sequence for PZP (NM_002864.1,1293-1311).
gtgcatcccaacttgtgtt

SEQ ID NO: 293033 - DNA, 19 bp, Homo sapiens
  siRNA target sequence for PZP (NM_002864.1,1295-1313).
gcatcccaacttgtgtttt

SEQ ID NO: 293034 - DNA, 19 bp, Homo sapiens
  siRNA target sequence for PZP (NM_002864.1,1299-1317).
cccaacttgtgttttcact

SEQ ID NO: 293035 - DNA, 19 bp, Homo sapiens
  siRNA target sequence for PZP (NM_002864.1,1301-1319).
caacttgtgttttcactat

SEQ ID NO: 293036 - DNA, 19 bp, Homo sapiens
  siRNA target sequence for PZP (NM_002864.1,1376-1394).
cttaagtggaagttacatt

SEQ ID NO: 293037 - DNA, 19 bp, Homo sapiens
  siRNA target sequence for PZP (NM_002864.1,1428-1446).
ggccacacggagactatca

SEQ ID NO: 293038 - DNA, 19 bp, Homo sapiens
  siRNA target sequence for PZP (NM_002864.1,1439-1457).
gactatcacggcacactat

SEQ ID NO: 293039 - DNA, 19 bp, Homo sapiens
  siRNA target sequence for PZP (NM_002864.1,1448-1466).
ggcacactatacactgaat

SEQ ID NO: 293040 - DNA, 19 bp, Homo sapiens
  siRNA target sequence for PZP (NM_002864.1,1449-1467).
gcacactatacactgaata

SEQ ID NO: 293041 - DNA, 19 bp, Homo sapiens
  siRNA target sequence for PZP (NM_002864.1,1581-1599).
ggcagttttgccttatcct

SEQ ID NO: 293042 - DNA, 19 bp, Homo sapiens
  siRNA target sequence for PZP (NM_002864.1,1623-1641).
cccattgcacgaatgttca

SEQ ID NO: 293043 - DNA, 19 bp, Homo sapiens
  siRNA target sequence for PZP (NM_002864.1,1624-1642).
ccattgcacgaatgttcat

SEQ ID NO: 293044 - DNA, 19 bp, Homo sapiens
  siRNA target sequence for PZP (NM_002864.1,1892-1910).
ggatctcaccaattttcct

SEQ ID NO: 293045 - DNA, 19 bp, Homo sapiens
  siRNA target sequence for PZP (NM_002864.1,1900-1918).
ccaattttcctgacaatgt

SEQ ID NO: 293046 - DNA, 19 bp, Homo sapiens
  siRNA target sequence for PZP (NM_002864.1,1948-1966).
gtccccgtcctttcttcat

SEQ ID NO: 293047 - DNA, 19 bp, Homo sapiens
  siRNA target sequence for PZP (NM_002864.1,1979-1997).
catctatgttcccttatca

SEQ ID NO: 293048 - DNA, 19 bp, Homo sapiens
  siRNA target sequence for PZP (NM_002864.1,1982-2000).
ctatgttcccttatcaagt

SEQ ID NO: 293049 - DNA, 19 bp, Homo sapiens
  siRNA target sequence for PZP (NM_002864.1,2042-2060).
gaaggtgttcactaactca

SEQ ID NO: 293050 - DNA, 19 bp, Homo sapiens
  siRNA target sequence for PZP (NM_002864.1,2045-2063).
ggtgttcactaactcaaaa

SEQ ID NO: 293051 - DNA, 19 bp, Homo sapiens
  siRNA target sequence for PZP (NM_002864.1,2110-2128).
gagcagtaggtcaaggata

SEQ ID NO: 293052 - DNA, 19 bp, Homo sapiens
  siRNA target sequence for PZP (NM_002864.1,2113-2131).
cagtaggtcaaggatacta

SEQ ID NO: 293053 - DNA, 19 bp, Homo sapiens
  siRNA target sequence for PZP (NM_002864.1,2169-2187).
cctcaattaggcacatata

SEQ ID NO: 293054 - DNA, 19 bp, Homo sapiens
  siRNA target sequence for PZP (NM_002864.1,2170-2188).
ctcaattaggcacatataa

SEQ ID NO: 293055 - DNA, 19 bp, Homo sapiens
  siRNA target sequence for PZP (NM_002864.1,2192-2210).
gatacccttaaataatgaa

SEQ ID NO: 293056 - DNA, 19 bp, Homo sapiens
  siRNA target sequence for PZP (NM_002864.1,2196-2214).
cccttaaataatgaacaaa

SEQ ID NO: 293057 - DNA, 19 bp, Homo sapiens
  siRNA target sequence for PZP (NM_002864.1,2232-2250).
gaaacggtgcgaagctatt

SEQ ID NO: 293058 - DNA, 19 bp, Homo sapiens
  siRNA target sequence for PZP (NM_002864.1,2623-2641).
cagtgactcctaaaactct

SEQ ID NO: 293059 - DNA, 19 bp, Homo sapiens
  siRNA target sequence for PZP (NM_002864.1,2714-2732).
ggtccctgagattaaaaga

SEQ ID NO: 293060 - DNA, 19 bp, Homo sapiens
  siRNA target sequence for PZP (NM_002864.1,2807-2825).
ctgtgcctcaggtgctaat

SEQ ID NO: 293061 - DNA, 19 bp, Homo sapiens
  siRNA target sequence for PZP (NM_002864.1,2809-2827).
gtgcctcaggtgctaatgt

SEQ ID NO: 293062 - DNA, 19 bp, Homo sapiens
  siRNA target sequence for PZP (NM_002864.1,2843-2861).
cttgaagctcccatcaaat

SEQ ID NO: 293063 - DNA, 19 bp, Homo sapiens
  siRNA target sequence for PZP (NM_002864.1,2898-2916).
ctgggtgacatattaggtt

SEQ ID NO: 293064 - DNA, 19 bp, Homo sapiens
  siRNA target sequence for PZP (NM_002864.1,2996-3014).
catctatgtcttgaactat

SEQ ID NO: 293065 - DNA, 19 bp, Homo sapiens
  siRNA target sequence for PZP (NM_002864.1,3347-3365).
cctctccgcctatgttact

SEQ ID NO: 293066 - DNA, 19 bp, Homo sapiens
  siRNA target sequence for PZP (NM_002864.1,3348-3366).
ctctccgcctatgttacta

SEQ ID NO: 293067 - DNA, 19 bp, Homo sapiens
  siRNA target sequence for PZP (NM_002864.1,3350-3368).
ctccgcctatgttactatt

SEQ ID NO: 293068 - DNA, 19 bp, Homo sapiens
  siRNA target sequence for PZP (NM_002864.1,3364-3382).
ctattgcccttctggaaat

SEQ ID NO: 293069 - DNA, 19 bp, Homo sapiens
  siRNA target sequence for PZP (NM_002864.1,3431-3449).
ggagtcagcctggaatgta

SEQ ID NO: 293070 - DNA, 19 bp, Homo sapiens
  siRNA target sequence for PZP (NM_002864.1,3463-3481).
cccatgggagccatgtcta

SEQ ID NO: 293071 - DNA, 19 bp, Homo sapiens
  siRNA target sequence for PZP (NM_002864.1,3531-3549).
cagaatagagaaatactga

SEQ ID NO: 293072 - DNA, 19 bp, Homo sapiens
  siRNA target sequence for PZP (NM_002864.1,3624-3642).
gtggggcatctttaccaaa

SEQ ID NO: 293073 - DNA, 19 bp, Homo sapiens
  siRNA target sequence for PZP (NM_002864.1,3897-3915).
cagaccttttctacaaatt

SEQ ID NO: 293074 - DNA, 19 bp, Homo sapiens
  siRNA target sequence for PZP (NM_002864.1,3976-3994).
gagaatatgtcataacagt

SEQ ID NO: 293075 - DNA, 19 bp, Homo sapiens
  siRNA target sequence for PZP (NM_002864.1,3978-3996).
gaatatgtcataacagtaa

SEQ ID NO: 293076 - DNA, 19 bp, Homo sapiens
  siRNA target sequence for PZP (NM_002864.1,4058-4076).
ggactccccatttgcttta

SEQ ID NO: 293077 - DNA, 19 bp, Homo sapiens
  siRNA target sequence for PZP (NM_002864.1,4059-4077).
gactccccatttgctttaa

SEQ ID NO: 293078 - DNA, 19 bp, Homo sapiens
  siRNA target sequence for PZP (NM_002864.1,4199-4217).
gatggtatctggttttatt

SEQ ID NO: 293079 - DNA, 19 bp, Homo sapiens
  siRNA target sequence for PZP (NM_002864.1,4283-4301).
caaccatgtcctcatttat

SEQ ID NO: 293080 - DNA, 19 bp, Homo sapiens
  siRNA target sequence for PZP (NM_002864.1,4377-4395).
ccagcaattgttaaagtct

SEQ ID NO: 293081 - DNA, 19 bp, Homo sapiens
  siRNA target sequence for RECK (NM_021111.1,189-207).
gcgggtgcattgtgttgta

SEQ ID NO: 293082 - DNA, 19 bp, Homo sapiens
  siRNA target sequence for RECK (NM_021111.1,190-208).
cgggtgcattgtgttgtaa

SEQ ID NO: 293083 - DNA, 19 bp, Homo sapiens
  siRNA target sequence for RECK (NM_021111.1,224-242).
ccaaatgtgccgtgatgta

SEQ ID NO: 293084 - DNA, 19 bp, Homo sapiens
  siRNA target sequence for RECK (NM_021111.1,225-243).
caaatgtgccgtgatgtat

SEQ ID NO: 293085 - DNA, 19 bp, Homo sapiens
  siRNA target sequence for RECK (NM_021111.1,251-269).
gattttctcctcaaaaagt

SEQ ID NO: 293086 - DNA, 19 bp, Homo sapiens
  siRNA target sequence for RECK (NM_021111.1,268-286).
gtgaatcccgactaaaaca

SEQ ID NO: 293087 - DNA, 19 bp, Homo sapiens
  siRNA target sequence for RECK (NM_021111.1,274-292).
cccgactaaaacatctgtt

SEQ ID NO: 293088 - DNA, 19 bp, Homo sapiens
  siRNA target sequence for RECK (NM_021111.1,293-311).
gcagcgagccccagattat

SEQ ID NO: 293089 - DNA, 19 bp, Homo sapiens
  siRNA target sequence for RECK (NM_021111.1,294-312).
cagcgagccccagattatt

SEQ ID NO: 293090 - DNA, 19 bp, Homo sapiens
  siRNA target sequence for RECK (NM_021111.1,355-373).
ctttgccaggtgtgtttaa

SEQ ID NO: 293091 - DNA, 19 bp, Homo sapiens
  siRNA target sequence for RECK (NM_021111.1,360-378).
ccaggtgtgtttaagaagt

SEQ ID NO: 293092 - DNA, 19 bp, Homo sapiens
  siRNA target sequence for RECK (NM_021111.1,446-464).
gcaggcatcttcaaagaat

SEQ ID NO: 293093 - DNA, 19 bp, Homo sapiens
  siRNA target sequence for RECK (NM_021111.1,536-554).
ctcggtttgttgcagttat

SEQ ID NO: 293094 - DNA, 19 bp, Homo sapiens
  siRNA target sequence for RECK (NM_021111.1,539-557).
ggtttgttgcagttatgca

SEQ ID NO: 293095 - DNA, 19 bp, Homo sapiens
  siRNA target sequence for RECK (NM_021111.1,555-573).
gcaggtcatcacacaaact

SEQ ID NO: 293096 - DNA, 19 bp, Homo sapiens
  siRNA target sequence for RECK (NM_021111.1,655-673).
cctctattagtccacaatt

SEQ ID NO: 293097 - DNA, 19 bp, Homo sapiens
  siRNA target sequence for RECK (NM_021111.1,656-674).
ctctattagtccacaatta

SEQ ID NO: 293098 - DNA, 19 bp, Homo sapiens
  siRNA target sequence for RECK (NM_021111.1,658-676).
ctattagtccacaattaat

SEQ ID NO: 293099 - DNA, 19 bp, Homo sapiens
  siRNA target sequence for RECK (NM_021111.1,678-696).
cattgtgtgaacaattata

SEQ ID NO: 293100 - DNA, 19 bp, Homo sapiens
  siRNA target sequence for RECK (NM_021111.1,715-733).
ggaacccaacggatagttt

SEQ ID NO: 293101 - DNA, 19 bp, Homo sapiens
  siRNA target sequence for RECK (NM_021111.1,716-734).
gaacccaacggatagttta

SEQ ID NO: 293102 - DNA, 19 bp, Homo sapiens
  siRNA target sequence for RECK (NM_021111.1,719-737).
cccaacggatagtttatat

SEQ ID NO: 293103 - DNA, 19 bp, Homo sapiens
  siRNA target sequence for RECK (NM_021111.1,720-738).
ccaacggatagtttatatt

SEQ ID NO: 293104 - DNA, 19 bp, Homo sapiens
  siRNA target sequence for RECK (NM_021111.1,826-844).
gtctcatcgagggttgtaa

SEQ ID NO: 293105 - DNA, 19 bp, Homo sapiens
  siRNA target sequence for RECK (NM_021111.1,828-846).
ctcatcgagggttgtaaga

SEQ ID NO: 293106 - DNA, 19 bp, Homo sapiens
  siRNA target sequence for RECK (NM_021111.1,942-960).
ggcctcgatggggctaaat

SEQ ID NO: 293107 - DNA, 19 bp, Homo sapiens
  siRNA target sequence for RECK (NM_021111.1,943-961).
gcctcgatggggctaaatt

SEQ ID NO: 293108 - DNA, 19 bp, Homo sapiens
  siRNA target sequence for RECK (NM_021111.1,1002-1020).
ctctgcactaaactttaca

SEQ ID NO: 293109 - DNA, 19 bp, Homo sapiens
  siRNA target sequence for RECK (NM_021111.1,1064-1082).
cttttgtgaatataatcca

SEQ ID NO: 293110 - DNA, 19 bp, Homo sapiens
  siRNA target sequence for RECK (NM_021111.1,1083-1101).
gtggaagtgtccatgttga

SEQ ID NO: 293111 - DNA, 19 bp, Homo sapiens
  siRNA target sequence for RECK (NM_021111.1,1129-1147).
gccagttgggctgtagaaa

SEQ ID NO: 293112 - DNA, 19 bp, Homo sapiens
  siRNA target sequence for RECK (NM_021111.1,1138-1156).
gctgtagaaaccttactta

SEQ ID NO: 293113 - DNA, 19 bp, Homo sapiens
  siRNA target sequence for RECK (NM_021111.1,1148-1166).
ccttacttactgtactaat

SEQ ID NO: 293114 - DNA, 19 bp, Homo sapiens
  siRNA target sequence for RECK (NM_021111.1,1224-1242).
gccatgaatgacatgaagt

SEQ ID NO: 293115 - DNA, 19 bp, Homo sapiens
  siRNA target sequence for RECK (NM_021111.1,1225-1243).
ccatgaatgacatgaagtt

SEQ ID NO: 293116 - DNA, 19 bp, Homo sapiens
  siRNA target sequence for RECK (NM_021111.1,1265-1283).
gatgccatttatcaatata

SEQ ID NO: 293117 - DNA, 19 bp, Homo sapiens
  siRNA target sequence for RECK (NM_021111.1,1277-1295).
caatatacctgttcttgat

SEQ ID NO: 293118 - DNA, 19 bp, Homo sapiens
  siRNA target sequence for RECK (NM_021111.1,1284-1302).
cctgttcttgatattaaaa

SEQ ID NO: 293119 - DNA, 19 bp, Homo sapiens
  siRNA target sequence for RECK (NM_021111.1,1316-1334).
gatgtggaaagcaatagct

SEQ ID NO: 293120 - DNA, 19 bp, Homo sapiens
  siRNA target sequence for RECK (NM_021111.1,1343-1361).
gcagattaaaccttgtcat

SEQ ID NO: 293121 - DNA, 19 bp, Homo sapiens
  siRNA target sequence for RECK (NM_021111.1,1344-1362).
cagattaaaccttgtcata

SEQ ID NO: 293122 - DNA, 19 bp, Homo sapiens
  siRNA target sequence for RECK (NM_021111.1,1363-1381).
gtaaatctcggggaagtat

SEQ ID NO: 293123 - DNA, 19 bp, Homo sapiens
  siRNA target sequence for RECK (NM_021111.1,1371-1389).
cggggaagtattatttgca

SEQ ID NO: 293124 - DNA, 19 bp, Homo sapiens
  siRNA target sequence for RECK (NM_021111.1,1453-1471).
cagctgaaagtatttgtga

SEQ ID NO: 293125 - DNA, 19 bp, Homo sapiens
  siRNA target sequence for RECK (NM_021111.1,1472-1490).
gcttctgtcacctacagat

SEQ ID NO: 293126 - DNA, 19 bp, Homo sapiens
  siRNA target sequence for RECK (NM_021111.1,1480-1498).
cacctacagatgatctgaa

SEQ ID NO: 293127 - DNA, 19 bp, Homo sapiens
  siRNA target sequence for RECK (NM_021111.1,1483-1501).
ctacagatgatctgaagaa

SEQ ID NO: 293128 - DNA, 19 bp, Homo sapiens
  siRNA target sequence for RECK (NM_021111.1,1488-1506).
gatgatctgaagaattgta

SEQ ID NO: 293129 - DNA, 19 bp, Homo sapiens
  siRNA target sequence for RECK (NM_021111.1,1504-1522).
gtatacctttggatacata

SEQ ID NO: 293130 - DNA, 19 bp, Homo sapiens
  siRNA target sequence for RECK (NM_021111.1,1523-1541).
cctcaggccaagtacttta

SEQ ID NO: 293131 - DNA, 19 bp, Homo sapiens
  siRNA target sequence for RECK (NM_021111.1,1526-1544).
caggccaagtactttaggt

SEQ ID NO: 293132 - DNA, 19 bp, Homo sapiens
  siRNA target sequence for RECK (NM_021111.1,1528-1546).
ggccaagtactttaggtaa

SEQ ID NO: 293133 - DNA, 19 bp, Homo sapiens
  siRNA target sequence for RECK (NM_021111.1,1534-1552).
gtactttaggtaacattgt

SEQ ID NO: 293134 - DNA, 19 bp, Homo sapiens
  siRNA target sequence for RECK (NM_021111.1,1595-1613).
caatgagctctgtgaagta

SEQ ID NO: 293135 - DNA, 19 bp, Homo sapiens
  siRNA target sequence for RECK (NM_021111.1,1608-1626).
gaagtaaaccgaaaaggat

SEQ ID NO: 293136 - DNA, 19 bp, Homo sapiens
  siRNA target sequence for RECK (NM_021111.1,1645-1663).
gtcttccatacttttgtgt

SEQ ID NO: 293137 - DNA, 19 bp, Homo sapiens
  siRNA target sequence for RECK (NM_021111.1,1701-1719).
gtccgtcaagggacactaa

SEQ ID NO: 293138 - DNA, 19 bp, Homo sapiens
  siRNA target sequence for RECK (NM_021111.1,1705-1723).
gtcaagggacactaatcca

SEQ ID NO: 293139 - DNA, 19 bp, Homo sapiens
  siRNA target sequence for RECK (NM_021111.1,1746-1764).
gttggttgttataaaatct

SEQ ID NO: 293140 - DNA, 19 bp, Homo sapiens
  siRNA target sequence for RECK (NM_021111.1,1774-1792).
gacaaagtggactcttaga

SEQ ID NO: 293141 - DNA, 19 bp, Homo sapiens
  siRNA target sequence for RECK (NM_021111.1,1776-1794).
caaagtggactcttagaaa

SEQ ID NO: 293142 - DNA, 19 bp, Homo sapiens
  siRNA target sequence for RECK (NM_021111.1,1798-1816).
gtatggaaatgcactgtat

SEQ ID NO: 293143 - DNA, 19 bp, Homo sapiens
  siRNA target sequence for RECK (NM_021111.1,1860-1878).
catggaacatcctttagta

SEQ ID NO: 293144 - DNA, 19 bp, Homo sapiens
  siRNA target sequence for RECK (NM_021111.1,1881-1899).
gactgcaatgtctgttctt

SEQ ID NO: 293145 - DNA, 19 bp, Homo sapiens
  siRNA target sequence for RECK (NM_021111.1,2071-2089).
gcctccaagaccatcagtt

SEQ ID NO: 293146 - DNA, 19 bp, Homo sapiens
  siRNA target sequence for RECK (NM_021111.1,2072-2090).
cctccaagaccatcagttt

SEQ ID NO: 293147 - DNA, 19 bp, Homo sapiens
  siRNA target sequence for RECK (NM_021111.1,2108-2126).
gtcaaaggatccatgtaat

SEQ ID NO: 293148 - DNA, 19 bp, Homo sapiens
  siRNA target sequence for RECK (NM_021111.1,2114-2132).
ggatccatgtaatcctaat

SEQ ID NO: 293149 - DNA, 19 bp, Homo sapiens
  siRNA target sequence for RECK (NM_021111.1,2176-2194).
gcctgacgacttttgataa

SEQ ID NO: 293150 - DNA, 19 bp, Homo sapiens
  siRNA target sequence for RECK (NM_021111.1,2177-2195).
cctgacgacttttgataaa

SEQ ID NO: 293151 - DNA, 19 bp, Homo sapiens
  siRNA target sequence for RECK (NM_021111.1,2178-2196).
ctgacgacttttgataaat

SEQ ID NO: 293152 - DNA, 19 bp, Homo sapiens
  siRNA target sequence for RECK (NM_021111.1,2199-2217).
ggatgtagccagtatgagt

SEQ ID NO: 293153 - DNA, 19 bp, Homo sapiens
  siRNA target sequence for RECK (NM_021111.1,2285-2303).
caacaatctctgcacttta

SEQ ID NO: 293154 - DNA, 19 bp, Homo sapiens
  siRNA target sequence for RECK (NM_021111.1,2424-2442).
cgcgtggcagtcgattact

SEQ ID NO: 293155 - DNA, 19 bp, Homo sapiens
  siRNA target sequence for RECK (NM_021111.1,2425-2443).
gcgtggcagtcgattacta

SEQ ID NO: 293156 - DNA, 19 bp, Homo sapiens
  siRNA target sequence for RECK (NM_021111.1,2426-2444).
cgtggcagtcgattactat

SEQ ID NO: 293157 - DNA, 19 bp, Homo sapiens
  siRNA target sequence for RECK (NM_021111.1,2556-2574).
ggtgcttgttgcccattat

SEQ ID NO: 293158 - DNA, 19 bp, Homo sapiens
  siRNA target sequence for RECK (NM_021111.1,2575-2593).
gtgctgggatgttaagagt

SEQ ID NO: 293159 - DNA, 19 bp, Homo sapiens
  siRNA target sequence for RECK (NM_021111.1,2577-2595).
gctgggatgttaagagttt

SEQ ID NO: 293160 - DNA, 19 bp, Homo sapiens
  siRNA target sequence for RECK (NM_021111.1,2753-2771).
cattcccgtcgatcactat

SEQ ID NO: 293161 - DNA, 19 bp, Homo sapiens
  siRNA target sequence for RECK (NM_021111.1,2757-2775).
cccgtcgatcactatccaa

SEQ ID NO: 293162 - DNA, 19 bp, Homo sapiens
  siRNA target sequence for RECK (NM_021111.1,2758-2776).
ccgtcgatcactatccaaa

SEQ ID NO: 293163 - DNA, 19 bp, Homo sapiens
  siRNA target sequence for RECK (NM_021111.1,2759-2777).
cgtcgatcactatccaaaa

SEQ ID NO: 293164 - DNA, 19 bp, Homo sapiens
  siRNA target sequence for RECK (NM_021111.1,2762-2780).
cgatcactatccaaaagct

SEQ ID NO: 293165 - DNA, 19 bp, Homo sapiens
  siRNA target sequence for RECK (NM_021111.1,2773-2791).
caaaagctctgcagattga

SEQ ID NO: 293166 - DNA, 19 bp, Homo sapiens
  siRNA target sequence for RECK (NM_021111.1,2786-2804).
gattgaagcctgcaataaa

SEQ ID NO: 293167 - DNA, 19 bp, Homo sapiens
  siRNA target sequence for SERPINA1 (NM_000295.2,1100-1118).
gaactcacccacgatatca

SEQ ID NO: 293168 - DNA, 19 bp, Homo sapiens
  siRNA target sequence for SERPINA1 (NM_000295.2,1103-1121).
ctcacccacgatatcatca

SEQ ID NO: 293169 - DNA, 19 bp, Homo sapiens
  siRNA target sequence for SERPINA1 (NM_000295.2,1150-1168).
gtctgccagcttacattta

SEQ ID NO: 293170 - DNA, 19 bp, Homo sapiens
  siRNA target sequence for SERPINA10 (NM_016186.1,689-707).
cttgccaaggagacttcaa

SEQ ID NO: 293171 - DNA, 19 bp, Homo sapiens
  siRNA target sequence for SERPINA10 (NM_016186.1,822-840).
cgactgaaacccagatcaa

SEQ ID NO: 293172 - DNA, 19 bp, Homo sapiens
  siRNA target sequence for SERPINA10 (NM_016186.1,962-980).
gccttcatccacaaggatt

SEQ ID NO: 293173 - DNA, 19 bp, Homo sapiens
  siRNA target sequence for SERPINA10 (NM_016186.1,983-1001).
gatgtcaaagagactttct

SEQ ID NO: 293174 - DNA, 19 bp, Homo sapiens
  siRNA target sequence for SERPINA10 (NM_016186.1,1029-1047).
cagagtgcgtgcctatgaa

SEQ ID NO: 293175 - DNA, 19 bp, Homo sapiens
  siRNA target sequence for SERPINA10 (NM_016186.1,1031-1049).
gagtgcgtgcctatgaatt

SEQ ID NO: 293176 - DNA, 19 bp, Homo sapiens
  siRNA target sequence for SERPINA10 (NM_016186.1,1068-1086).
ccaaaaggctcatgaatca

SEQ ID NO: 293177 - DNA, 19 bp, Homo sapiens
  siRNA target sequence for SERPINA10 (NM_016186.1,1069-1087).
caaaaggctcatgaatcat

SEQ ID NO: 293178 - DNA, 19 bp, Homo sapiens
  siRNA target sequence for SERPINA10 (NM_016186.1,1074-1092).
ggctcatgaatcattacat

SEQ ID NO: 293179 - DNA, 19 bp, Homo sapiens
  siRNA target sequence for SERPINA10 (NM_016186.1,1075-1093).
gctcatgaatcattacatt

SEQ ID NO: 293180 - DNA, 19 bp, Homo sapiens
  siRNA target sequence for SERPINA10 (NM_016186.1,1076-1094).
ctcatgaatcattacatta

SEQ ID NO: 293181 - DNA, 19 bp, Homo sapiens
  siRNA target sequence for SERPINA10 (NM_016186.1,1230-1248).
ctttccacctggacaagta

SEQ ID NO: 293182 - DNA, 19 bp, Homo sapiens
  siRNA target sequence for SERPINA10 (NM_016186.1,1306-1324).
caagaattttcgttgtcat

SEQ ID NO: 293183 - DNA, 19 bp, Homo sapiens
  siRNA target sequence for SERPINA10 (NM_016186.1,1479-1497).
cgaagttcaagctagatca

SEQ ID NO: 293184 - DNA, 19 bp, Homo sapiens
  siRNA target sequence for SERPINA10 (NM_016186.1,1486-1504).
caagctagatcagaagtat

SEQ ID NO: 293185 - DNA, 19 bp, Homo sapiens
  siRNA target sequence for SERPINA10 (NM_016186.1,1554-1572).
cctttgctgaccttagtga

SEQ ID NO: 293186 - DNA, 19 bp, Homo sapiens
  siRNA target sequence for SERPINA10 (NM_016186.1,1555-1573).
ctttgctgaccttagtgaa

SEQ ID NO: 293187 - DNA, 19 bp, Homo sapiens
  siRNA target sequence for SERPINA10 (NM_016186.1,1597-1615).
ccaagtatccagggtttta

SEQ ID NO: 293188 - DNA, 19 bp, Homo sapiens
  siRNA target sequence for SERPINA10 (NM_016186.1,1606-1624).
cagggttttacaaagaaca

SEQ ID NO: 293189 - DNA, 19 bp, Homo sapiens
  siRNA target sequence for SERPINA10 (NM_016186.1,1693-1711).
catgcctcctgtcatcaaa

SEQ ID NO: 293190 - DNA, 19 bp, Homo sapiens
  siRNA target sequence for SERPINA10 (NM_016186.1,1712-1730).
gtggaccggccatttcatt

SEQ ID NO: 293191 - DNA, 19 bp, Homo sapiens
  siRNA target sequence for SERPINA10 (NM_016186.1,1715-1733).
gaccggccatttcatttca

SEQ ID NO: 293192 - DNA, 19 bp, Homo sapiens
  siRNA target sequence for SERPINA11 (NM_175739.2,227-245).
cctttatggagtactcttt

SEQ ID NO: 293193 - DNA, 19 bp, Homo sapiens
  siRNA target sequence for SERPINA11 (NM_175739.2,405-423).
ccgagtcagaacatcttct

SEQ ID NO: 293194 - DNA, 19 bp, Homo sapiens
  siRNA target sequence for SERPINA11 (NM_175739.2,406-424).
cgagtcagaacatcttctt

SEQ ID NO: 293195 - DNA, 19 bp, Homo sapiens
  siRNA target sequence for SERPINA11 (NM_175739.2,616-634).
gtgccctcttcgtcaagaa

SEQ ID NO: 293196 - DNA, 19 bp, Homo sapiens
  siRNA target sequence for SERPINA11 (NM_175739.2,726-744).
gcccaggcgaggatcaaca

SEQ ID NO: 293197 - DNA, 19 bp, Homo sapiens
  siRNA target sequence for SERPINA11 (NM_175739.2,768-786).
gggaaggttgtagacataa

SEQ ID NO: 293198 - DNA, 19 bp, Homo sapiens
  siRNA target sequence for SERPINA11 (NM_175739.2,769-787).
ggaaggttgtagacataat

SEQ ID NO: 293199 - DNA, 19 bp, Homo sapiens
  siRNA target sequence for SERPINA11 (NM_175739.2,819-837).
ctggtgaaccacattttct

SEQ ID NO: 293200 - DNA, 19 bp, Homo sapiens
  siRNA target sequence for SERPINA11 (NM_175739.2,1101-1119).
cactcactccagaaaaggt

SEQ ID NO: 293201 - DNA, 19 bp, Homo sapiens
  siRNA target sequence for SERPINA11 (NM_175739.2,1117-1135).
ggtggatagaggtgttcat

SEQ ID NO: 293202 - DNA, 19 bp, Homo sapiens
  siRNA target sequence for SERPINA11 (NM_175739.2,1128-1146).
gtgttcatccccagatttt

SEQ ID NO: 293203 - DNA, 19 bp, Homo sapiens
  siRNA target sequence for SERPINA11 (NM_175739.2,1159-1177).
cctacaatctggaaaccat

SEQ ID NO: 293204 - DNA, 19 bp, Homo sapiens
  siRNA target sequence for SERPINA11 (NM_175739.2,1183-1201).
cgaagatgggcatccaaaa

SEQ ID NO: 293205 - DNA, 19 bp, Homo sapiens
  siRNA target sequence for SERPINA11 (NM_175739.2,1249-1267).
ccctgcaggtttctaaagt

SEQ ID NO: 293206 - DNA, 19 bp, Homo sapiens
  siRNA target sequence for SERPINA3 (NM_001085.2,707-725).
cagtcaaggttctacttga

SEQ ID NO: 293207 - DNA, 19 bp, Homo sapiens
  siRNA target sequence for SERPINA3 (NM_001085.2,748-766).
gcccatgatgagtttgcat

SEQ ID NO: 293208 - DNA, 19 bp, Homo sapiens
  siRNA target sequence for SERPINA3 (NM_001085.2,763-781).
gcatcacctgactatacct

SEQ ID NO: 293209 - DNA, 19 bp, Homo sapiens
  siRNA target sequence for SERPINA3 (NM_001085.2,764-782).
catcacctgactatacctt

SEQ ID NO: 293210 - DNA, 19 bp, Homo sapiens
  siRNA target sequence for SERPINA3 (NM_001085.2,955-973).
gctctacctgccaaagttt

SEQ ID NO: 293211 - DNA, 19 bp, Homo sapiens
  siRNA target sequence for SERPINB1 (NM_030666.2,95-113).
ggcgttgagtgagaacaat

SEQ ID NO: 293212 - DNA, 19 bp, Homo sapiens
  siRNA target sequence for SERPINB1 (NM_030666.2,230-248).
ggttgaagaggttcattca

SEQ ID NO: 293213 - DNA, 19 bp, Homo sapiens
  siRNA target sequence for SERPINB1 (NM_030666.2,231-249).
gttgaagaggttcattcaa

SEQ ID NO: 293214 - DNA, 19 bp, Homo sapiens
  siRNA target sequence for SERPINB1 (NM_030666.2,263-281).
gaatgctgatatcaacaaa

SEQ ID NO: 293215 - DNA, 19 bp, Homo sapiens
  siRNA target sequence for SERPINB1 (NM_030666.2,278-296).
caaacgtggagcgtcttat

SEQ ID NO: 293216 - DNA, 19 bp, Homo sapiens
  siRNA target sequence for SERPINB1 (NM_030666.2,285-303).
ggagcgtcttatattctga

SEQ ID NO: 293217 - DNA, 19 bp, Homo sapiens
  siRNA target sequence for SERPINB1 (NM_030666.2,286-304).
gagcgtcttatattctgaa

SEQ ID NO: 293218 - DNA, 19 bp, Homo sapiens
  siRNA target sequence for SERPINB1 (NM_030666.2,300-318).
ctgaaacttgctaatagat

SEQ ID NO: 293219 - DNA, 19 bp, Homo sapiens
  siRNA target sequence for SERPINB1 (NM_030666.2,302-320).
gaaacttgctaatagatta

SEQ ID NO: 293220 - DNA, 19 bp, Homo sapiens
  siRNA target sequence for SERPINB1 (NM_030666.2,329-347).
gaaaacttacaatttcctt

SEQ ID NO: 293221 - DNA, 19 bp, Homo sapiens
  siRNA target sequence for SERPINB1 (NM_030666.2,359-377).
ggtttcgactcagaaaaca

SEQ ID NO: 293222 - DNA, 19 bp, Homo sapiens
  siRNA target sequence for SERPINB1 (NM_030666.2,360-378).
gtttcgactcagaaaacat

SEQ ID NO: 293223 - DNA, 19 bp, Homo sapiens
  siRNA target sequence for SERPINB1 (NM_030666.2,423-441).
gatgcaaggaagaccataa

SEQ ID NO: 293224 - DNA, 19 bp, Homo sapiens
  siRNA target sequence for SERPINB1 (NM_030666.2,469-487).
gaaaaattccggaactgtt

SEQ ID NO: 293225 - DNA, 19 bp, Homo sapiens
  siRNA target sequence for SERPINB1 (NM_030666.2,489-507).
gcttcgggcatggttgata

SEQ ID NO: 293226 - DNA, 19 bp, Homo sapiens
  siRNA target sequence for SERPINB1 (NM_030666.2,490-508).
cttcgggcatggttgataa

SEQ ID NO: 293227 - DNA, 19 bp, Homo sapiens
  siRNA target sequence for SERPINB1 (NM_030666.2,493-511).
cgggcatggttgataacat

SEQ ID NO: 293228 - DNA, 19 bp, Homo sapiens
  siRNA target sequence for SERPINB1 (NM_030666.2,495-513).
ggcatggttgataacatga

SEQ ID NO: 293229 - DNA, 19 bp, Homo sapiens
  siRNA target sequence for SERPINB1 (NM_030666.2,586-604).
cgaatgcaccattcagatt

SEQ ID NO: 293230 - DNA, 19 bp, Homo sapiens
  siRNA target sequence for SERPINB1 (NM_030666.2,595-613).
cattcagattgaataagaa

SEQ ID NO: 293231 - DNA, 19 bp, Homo sapiens
  siRNA target sequence for SERPINB1 (NM_030666.2,766-784).
cgggcctgaagaagattga

SEQ ID NO: 293232 - DNA, 19 bp, Homo sapiens
  siRNA target sequence for SERPINB1 (NM_030666.2,806-824).
gttgcatgagtggactaaa

SEQ ID NO: 293233 - DNA, 19 bp, Homo sapiens
  siRNA target sequence for SERPINB1 (NM_030666.2,809-827).
gcatgagtggactaaacct

SEQ ID NO: 293234 - DNA, 19 bp, Homo sapiens
  siRNA target sequence for SERPINB1 (NM_030666.2,815-833).
gtggactaaacctgagaat

SEQ ID NO: 293235 - DNA, 19 bp, Homo sapiens
  siRNA target sequence for SERPINB1 (NM_030666.2,826-844).
ctgagaatctcgatttcat

SEQ ID NO: 293236 - DNA, 19 bp, Homo sapiens
  siRNA target sequence for SERPINB1 (NM_030666.2,830-848).
gaatctcgatttcattgaa

SEQ ID NO: 293237 - DNA, 19 bp, Homo sapiens
  siRNA target sequence for SERPINB1 (NM_030666.2,836-854).
cgatttcattgaagttaat

SEQ ID NO: 293238 - DNA, 19 bp, Homo sapiens
  siRNA target sequence for SERPINB1 (NM_030666.2,918-936).
ggtgtgcaggatctcttta

SEQ ID NO: 293239 - DNA, 19 bp, Homo sapiens
  siRNA target sequence for SERPINB1 (NM_030666.2,921-939).
gtgcaggatctctttaaca

SEQ ID NO: 293240 - DNA, 19 bp, Homo sapiens
  siRNA target sequence for SERPINB1 (NM_030666.2,923-941).
gcaggatctctttaacagt

SEQ ID NO: 293241 - DNA, 19 bp, Homo sapiens
  siRNA target sequence for SERPINB1 (NM_030666.2,965-983).
gtcaggagccagagatatt

SEQ ID NO: 293242 - DNA, 19 bp, Homo sapiens
  siRNA target sequence for SERPINB1 (NM_030666.2,1054-1072).
cagcaggcatcgcaacttt

SEQ ID NO: 293243 - DNA, 19 bp, Homo sapiens
  siRNA target sequence for SERPINB1 (NM_030666.2,1056-1074).
gcaggcatcgcaactttct

SEQ ID NO: 293244 - DNA, 19 bp, Homo sapiens
  siRNA target sequence for SERPINB1 (NM_030666.2,1065-1083).
gcaactttctgcatgttga

SEQ ID NO: 293245 - DNA, 19 bp, Homo sapiens
  siRNA target sequence for SERPINB1 (NM_030666.2,1079-1097).
gttgatgcccgaagaaaat

SEQ ID NO: 293246 - DNA, 19 bp, Homo sapiens
  siRNA target sequence for SERPINB1 (NM_030666.2,1085-1103).
gcccgaagaaaatttcact

SEQ ID NO: 293247 - DNA, 19 bp, Homo sapiens
  siRNA target sequence for SERPINB1 (NM_030666.2,1154-1172).
cctattcttggggagattt

SEQ ID NO: 293248 - DNA, 19 bp, Homo sapiens
  siRNA target sequence for SERPINB1 (NM_030666.2,1155-1173).
ctattcttggggagatttt

SEQ ID NO: 293249 - DNA, 19 bp, Homo sapiens
  siRNA target sequence for SERPINB11 (NM_080475.1,92-110).
cttcgctgagtctgcttta

SEQ ID NO: 293250 - DNA, 19 bp, Homo sapiens
  siRNA target sequence for SERPINB11 (NM_080475.1,168-186).
ggtgcttcattttagtcat

SEQ ID NO: 293251 - DNA, 19 bp, Homo sapiens
  siRNA target sequence for SERPINB11 (NM_080475.1,169-187).
gtgcttcattttagtcata

SEQ ID NO: 293252 - DNA, 19 bp, Homo sapiens
  siRNA target sequence for SERPINB11 (NM_080475.1,171-189).
gcttcattttagtcatact

SEQ ID NO: 293253 - DNA, 19 bp, Homo sapiens
  siRNA target sequence for SERPINB11 (NM_080475.1,184-202).
catactgtagactcattaa

SEQ ID NO: 293254 - DNA, 19 bp, Homo sapiens
  siRNA target sequence for SERPINB11 (NM_080475.1,335-353).
caaagacgatggcatttca

SEQ ID NO: 293255 - DNA, 19 bp, Homo sapiens
  siRNA target sequence for SERPINB11 (NM_080475.1,345-363).
ggcatttcatcagcaatat

SEQ ID NO: 293256 - DNA, 19 bp, Homo sapiens
  siRNA target sequence for SERPINB11 (NM_080475.1,368-386).
gctgttctgagaaatggta

SEQ ID NO: 293257 - DNA, 19 bp, Homo sapiens
  siRNA target sequence for SERPINB11 (NM_080475.1,396-414).
gttgcaaactgtggatttt

SEQ ID NO: 293258 - DNA, 19 bp, Homo sapiens
  siRNA target sequence for SERPINB11 (NM_080475.1,481-499).
gtcgcaaatctctttggaa

SEQ ID NO: 293259 - DNA, 19 bp, Homo sapiens
  siRNA target sequence for SERPINB11 (NM_080475.1,577-595).
caagtaagagagacagtta

SEQ ID NO: 293260 - DNA, 19 bp, Homo sapiens
  siRNA target sequence for SERPINB11 (NM_080475.1,684-702).
gccgcagatgcaagttctt

SEQ ID NO: 293261 - DNA, 19 bp, Homo sapiens
  siRNA target sequence for SERPINB11 (NM_080475.1,686-704).
cgcagatgcaagttcttga

SEQ ID NO: 293262 - DNA, 19 bp, Homo sapiens
  siRNA target sequence for SERPINB11 (NM_080475.1,700-718).
cttgagctgccctacgtta

SEQ ID NO: 293263 - DNA, 19 bp, Homo sapiens
  siRNA target sequence for SERPINB11 (NM_080475.1,703-721).
gagctgccctacgttaaca

SEQ ID NO: 293264 - DNA, 19 bp, Homo sapiens
  siRNA target sequence for SERPINB11 (NM_080475.1,708-726).
gccctacgttaacaacaaa

SEQ ID NO: 293265 - DNA, 19 bp, Homo sapiens
  siRNA target sequence for SERPINB11 (NM_080475.1,709-727).
ccctacgttaacaacaaat

SEQ ID NO: 293266 - DNA, 19 bp, Homo sapiens
  siRNA target sequence for SERPINB11 (NM_080475.1,710-728).
cctacgttaacaacaaatt

SEQ ID NO: 293267 - DNA, 19 bp, Homo sapiens
  siRNA target sequence for SERPINB11 (NM_080475.1,711-729).
ctacgttaacaacaaatta

SEQ ID NO: 293268 - DNA, 19 bp, Homo sapiens
  siRNA target sequence for SERPINB11 (NM_080475.1,720-738).
caacaaattaagcatgatt

SEQ ID NO: 293269 - DNA, 19 bp, Homo sapiens
  siRNA target sequence for SERPINB11 (NM_080475.1,745-763).
cttccagtaggcatagcta

SEQ ID NO: 293270 - DNA, 19 bp, Homo sapiens
  siRNA target sequence for SERPINB11 (NM_080475.1,751-769).
gtaggcatagctaatctga

SEQ ID NO: 293271 - DNA, 19 bp, Homo sapiens
  siRNA target sequence for SERPINB11 (NM_080475.1,761-779).
ctaatctgaaacagataga

SEQ ID NO: 293272 - DNA, 19 bp, Homo sapiens
  siRNA target sequence for SERPINB11 (NM_080475.1,789-807).
gaattcggggacgtttcat

SEQ ID NO: 293273 - DNA, 19 bp, Homo sapiens
  siRNA target sequence for SERPINB11 (NM_080475.1,808-826).
gagtggacaagctcttcta

SEQ ID NO: 293274 - DNA, 19 bp, Homo sapiens
  siRNA target sequence for SERPINB11 (NM_080475.1,812-830).
ggacaagctcttctaacat

SEQ ID NO: 293275 - DNA, 19 bp, Homo sapiens
  siRNA target sequence for SERPINB11 (NM_080475.1,815-833).
caagctcttctaacatgat

SEQ ID NO: 293276 - DNA, 19 bp, Homo sapiens
  siRNA target sequence for SERPINB11 (NM_080475.1,886-904).
gagctaaattccctgttaa

SEQ ID NO: 293277 - DNA, 19 bp, Homo sapiens
  siRNA target sequence for SERPINB11 (NM_080475.1,914-932).
gggtgacagatctcttcaa

SEQ ID NO: 293278 - DNA, 19 bp, Homo sapiens
  siRNA target sequence for SERPINB11 (NM_080475.1,936-954).
ggtcaaagctgatctttct

SEQ ID NO: 293279 - DNA, 19 bp, Homo sapiens
  siRNA target sequence for SERPINB11 (NM_080475.1,969-987).
caagggcctatatttatca

SEQ ID NO: 293280 - DNA, 19 bp, Homo sapiens
  siRNA target sequence for SERPINB11 (NM_080475.1,1052-1070).
gggacagcatcgctgtaaa

SEQ ID NO: 293281 - DNA, 19 bp, Homo sapiens
  siRNA target sequence for SERPINB11 (NM_080475.1,1053-1071).
ggacagcatcgctgtaaaa

SEQ ID NO: 293282 - DNA, 19 bp, Homo sapiens
  siRNA target sequence for SERPINB11 (NM_080475.1,1054-1072).
gacagcatcgctgtaaaaa

SEQ ID NO: 293283 - DNA, 19 bp, Homo sapiens
  siRNA target sequence for SERPINB11 (NM_080475.1,1135-1153).
cataccaacacgatcctat

SEQ ID NO: 293284 - DNA, 19 bp, Homo sapiens
  siRNA target sequence for SERPINB11 (NM_080475.1,1140-1158).
caacacgatcctattctgt

SEQ ID NO: 293285 - DNA, 19 bp, Homo sapiens
  siRNA target sequence for SERPINB13 (NM_012397.2,126-144).
cactcgacttgggtttgat

SEQ ID NO: 293286 - DNA, 19 bp, Homo sapiens
  siRNA target sequence for SERPINB13 (NM_012397.2,128-146).
ctcgacttgggtttgatct

SEQ ID NO: 293287 - DNA, 19 bp, Homo sapiens
  siRNA target sequence for SERPINB13 (NM_012397.2,172-190).
gatggcaacatcttctttt

SEQ ID NO: 293288 - DNA, 19 bp, Homo sapiens
  siRNA target sequence for SERPINB13 (NM_012397.2,336-354).
cacagaagcagtacatcaa

SEQ ID NO: 293289 - DNA, 19 bp, Homo sapiens
  siRNA target sequence for SERPINB13 (NM_012397.2,717-735).
gagcacaagtaaatctgta

SEQ ID NO: 293290 - DNA, 19 bp, Homo sapiens
  siRNA target sequence for SERPINB13 (NM_012397.2,725-743).
gtaaatctgtacagatgat

SEQ ID NO: 293291 - DNA, 19 bp, Homo sapiens
  siRNA target sequence for SERPINB13 (NM_012397.2,744-762).
gacacagagccattccttt

SEQ ID NO: 293292 - DNA, 19 bp, Homo sapiens
  siRNA target sequence for SERPINB13 (NM_012397.2,783-801).
cttgcaggccaaaattcta

SEQ ID NO: 293293 - DNA, 19 bp, Homo sapiens
  siRNA target sequence for SERPINB13 (NM_012397.2,799-817).
ctagggattccatataaaa

SEQ ID NO: 293294 - DNA, 19 bp, Homo sapiens
  siRNA target sequence for SERPINB13 (NM_012397.2,819-837).
caacgacctaagcatgttt

SEQ ID NO: 293295 - DNA, 19 bp, Homo sapiens
  siRNA target sequence for SERPINB13 (NM_012397.2,914-932).
ctagtccagggcatatgga

SEQ ID NO: 293296 - DNA, 19 bp, Homo sapiens
  siRNA target sequence for SERPINB13 (NM_012397.2,969-987).
ggtggaggacggttacgat

SEQ ID NO: 293297 - DNA, 19 bp, Homo sapiens
  siRNA target sequence for SERPINB13 (NM_012397.2,1073-1091).
ggttgtacgcccagaagtt

SEQ ID NO: 293298 - DNA, 19 bp, Homo sapiens
  siRNA target sequence for SERPINB13 (NM_012397.2,1089-1107).
gttcctgcacagttccttt

SEQ ID NO: 293299 - DNA, 19 bp, Homo sapiens
  siRNA target sequence for SERPINB13 (NM_012397.2,1103-1121).
cctttgtggcagtaactga

SEQ ID NO: 293300 - DNA, 19 bp, Homo sapiens
  siRNA target sequence for SERPINB13 (NM_012397.2,1146-1164).
caccggcataggctttact

SEQ ID NO: 293301 - DNA, 19 bp, Homo sapiens
  siRNA target sequence for SERPINB13 (NM_012397.2,1148-1166).
ccggcataggctttactgt

SEQ ID NO: 293302 - DNA, 19 bp, Homo sapiens
  siRNA target sequence for SERPINB13 (NM_012397.2,1248-1266).
cctcttcttcggcagattt

SEQ ID NO: 293303 - DNA, 19 bp, Homo sapiens
  siRNA target sequence for SERPINB13 (NM_012397.2,1249-1267).
ctcttcttcggcagatttt

SEQ ID NO: 293304 - DNA, 19 bp, Homo sapiens
  siRNA target sequence for SERPINB3 (NM_006919.1,385-403).
cggagaaaaaacgtatcta

SEQ ID NO: 293305 - DNA, 19 bp, Homo sapiens
  siRNA target sequence for SERPINB3 (NM_006919.1,387-405).
gagaaaaaacgtatctatt

SEQ ID NO: 293306 - DNA, 19 bp, Homo sapiens
  siRNA target sequence for SERPINB3 (NM_006919.1,557-575).
ggtaatattggcagcaata

SEQ ID NO: 293307 - DNA, 19 bp, Homo sapiens
  siRNA target sequence for SERPINB3 (NM_006919.1,568-586).
cagcaataccacattggtt

SEQ ID NO: 293308 - DNA, 19 bp, Homo sapiens
  siRNA target sequence for SERPINB3 (NM_006919.1,726-744).
cctcgctggaggatgtaca

SEQ ID NO: 293309 - DNA, 19 bp, Homo sapiens
  siRNA target sequence for SERPINB3 (NM_006919.1,779-797).
gatctaagcatgattgtgt

SEQ ID NO: 293310 - DNA, 19 bp, Homo sapiens
  siRNA target sequence for SERPINB3 (NM_006919.1,794-812).
gtgttgctgccaaatgaaa

SEQ ID NO: 293311 - DNA, 19 bp, Homo sapiens
  siRNA target sequence for SERPINB4 (NM_002974.1,120-138).
ctgttccaacagttcagaa

SEQ ID NO: 293312 - DNA, 19 bp, Homo sapiens
  siRNA target sequence for SERPINB4 (NM_002974.1,242-260).
ggttcttcactttgatcaa

SEQ ID NO: 293313 - DNA, 19 bp, Homo sapiens
  siRNA target sequence for SERPINB4 (NM_002974.1,307-325).
ggtcaggaaatgttcatca

SEQ ID NO: 293314 - DNA, 19 bp, Homo sapiens
  siRNA target sequence for SERPINB4 (NM_002974.1,342-360).
ctgactgaattcaacaaat

SEQ ID NO: 293315 - DNA, 19 bp, Homo sapiens
  siRNA target sequence for SERPINB4 (NM_002974.1,356-374).
caaatccactgatgcatat

SEQ ID NO: 293316 - DNA, 19 bp, Homo sapiens
  siRNA target sequence for SERPINB4 (NM_002974.1,526-544).
gggtggaaagtcaaacgaa

SEQ ID NO: 293317 - DNA, 19 bp, Homo sapiens
  siRNA target sequence for SERPINB4 (NM_002974.1,527-545).
ggtggaaagtcaaacgaat

SEQ ID NO: 293318 - DNA, 19 bp, Homo sapiens
  siRNA target sequence for SERPINB4 (NM_002974.1,530-548).
ggaaagtcaaacgaatgaa

SEQ ID NO: 293319 - DNA, 19 bp, Homo sapiens
  siRNA target sequence for SERPINB4 (NM_002974.1,531-549).
gaaagtcaaacgaatgaaa

SEQ ID NO: 293320 - DNA, 19 bp, Homo sapiens
  siRNA target sequence for SERPINB4 (NM_002974.1,606-624).
gtgaacgcaatctatttca

SEQ ID NO: 293321 - DNA, 19 bp, Homo sapiens
  siRNA target sequence for SERPINB4 (NM_002974.1,708-726).
cagatgatgaggcaataca

SEQ ID NO: 293322 - DNA, 19 bp, Homo sapiens
  siRNA target sequence for SERPINB4 (NM_002974.1,761-779).
ggccaaggtcctggaaata

SEQ ID NO: 293323 - DNA, 19 bp, Homo sapiens
  siRNA target sequence for SERPINB4 (NM_002974.1,764-782).
caaggtcctggaaatacca

SEQ ID NO: 293324 - DNA, 19 bp, Homo sapiens
  siRNA target sequence for SERPINB4 (NM_002974.1,791-809).
caaagatctaagcatgatt

SEQ ID NO: 293325 - DNA, 19 bp, Homo sapiens
  siRNA target sequence for SERPINB4 (NM_002974.1,815-833).
gctgccaaatgaaatcgat

SEQ ID NO: 293326 - DNA, 19 bp, Homo sapiens
  siRNA target sequence for SERPINB4 (NM_002974.1,1038-1056).
cacggtctctcagtatcta

SEQ ID NO: 293327 - DNA, 19 bp, Homo sapiens
  siRNA target sequence for SERPINB4 (NM_002974.1,1040-1058).
cggtctctcagtatctaaa

SEQ ID NO: 293328 - DNA, 19 bp, Homo sapiens
  siRNA target sequence for SERPINB4 (NM_002974.1,1042-1060).
gtctctcagtatctaaagt

SEQ ID NO: 293329 - DNA, 19 bp, Homo sapiens
  siRNA target sequence for SERPINB4 (NM_002974.1,1120-1138).
ctgtagtagtagtcgaatt

SEQ ID NO: 293330 - DNA, 19 bp, Homo sapiens
  siRNA target sequence for SERPINB4 (NM_002974.1,1122-1140).
gtagtagtagtcgaattat

SEQ ID NO: 293331 - DNA, 19 bp, Homo sapiens
  siRNA target sequence for SERPINB4 (NM_002974.1,1125-1143).
gtagtagtcgaattatcat

SEQ ID NO: 293332 - DNA, 19 bp, Homo sapiens
  siRNA target sequence for SERPINB5 (NM_002639.1,82-100).
gccctgcaactagcaaatt

SEQ ID NO: 293333 - DNA, 19 bp, Homo sapiens
  siRNA target sequence for SERPINB5 (NM_002639.1,110-128).
ccgttgatctgttcaaaca

SEQ ID NO: 293334 - DNA, 19 bp, Homo sapiens
  siRNA target sequence for SERPINB5 (NM_002639.1,111-129).
cgttgatctgttcaaacaa

SEQ ID NO: 293335 - DNA, 19 bp, Homo sapiens
  siRNA target sequence for SERPINB5 (NM_002639.1,296-314).
catcggatgtaaacaaact

SEQ ID NO: 293336 - DNA, 19 bp, Homo sapiens
  siRNA target sequence for SERPINB5 (NM_002639.1,320-338).
ccttttactcactgaaact

SEQ ID NO: 293337 - DNA, 19 bp, Homo sapiens
  siRNA target sequence for SERPINB5 (NM_002639.1,345-363).
gcggctctacgtagacaaa

SEQ ID NO: 293338 - DNA, 19 bp, Homo sapiens
  siRNA target sequence for SERPINB5 (NM_002639.1,346-364).
cggctctacgtagacaaat

SEQ ID NO: 293339 - DNA, 19 bp, Homo sapiens
  siRNA target sequence for SERPINB5 (NM_002639.1,348-366).
gctctacgtagacaaatct

SEQ ID NO: 293340 - DNA, 19 bp, Homo sapiens
  siRNA target sequence for SERPINB5 (NM_002639.1,354-372).
cgtagacaaatctctgaat

SEQ ID NO: 293341 - DNA, 19 bp, Homo sapiens
  siRNA target sequence for SERPINB5 (NM_002639.1,428-446).
ctgttgacttcaaagataa

SEQ ID NO: 293342 - DNA, 19 bp, Homo sapiens
  siRNA target sequence for SERPINB5 (NM_002639.1,458-476).
cgaaaggtcagatcaacaa

SEQ ID NO: 293343 - DNA, 19 bp, Homo sapiens
  siRNA target sequence for SERPINB5 (NM_002639.1,463-481).
ggtcagatcaacaactcaa

SEQ ID NO: 293344 - DNA, 19 bp, Homo sapiens
  siRNA target sequence for SERPINB5 (NM_002639.1,464-482).
gtcagatcaacaactcaat

SEQ ID NO: 293345 - DNA, 19 bp, Homo sapiens
  siRNA target sequence for SERPINB5 (NM_002639.1,537-555).
cgaccagaccaaaatcctt

SEQ ID NO: 293346 - DNA, 19 bp, Homo sapiens
  siRNA target sequence for SERPINB5 (NM_002639.1,558-576).
ggttaatgctgcctacttt

SEQ ID NO: 293347 - DNA, 19 bp, Homo sapiens
  siRNA target sequence for SERPINB5 (NM_002639.1,683-701).
cgttctgtatgggaaacat

SEQ ID NO: 293348 - DNA, 19 bp, Homo sapiens
  siRNA target sequence for SERPINB5 (NM_002639.1,694-712).
ggaaacattgacagtatca

SEQ ID NO: 293349 - DNA, 19 bp, Homo sapiens
  siRNA target sequence for SERPINB5 (NM_002639.1,695-713).
gaaacattgacagtatcaa

SEQ ID NO: 293350 - DNA, 19 bp, Homo sapiens
  siRNA target sequence for SERPINB5 (NM_002639.1,799-817).
ggcttggagaagattgaaa

SEQ ID NO: 293351 - DNA, 19 bp, Homo sapiens
  siRNA target sequence for SERPINB5 (NM_002639.1,882-900).
caaactctccattccaaaa

SEQ ID NO: 293352 - DNA, 19 bp, Homo sapiens
  siRNA target sequence for SERPINB5 (NM_002639.1,1008-1026).
gggagtggccctatcaaat

SEQ ID NO: 293353 - DNA, 19 bp, Homo sapiens
  siRNA target sequence for SERPINB5 (NM_002639.1,1010-1028).
gagtggccctatcaaatgt

SEQ ID NO: 293354 - DNA, 19 bp, Homo sapiens
  siRNA target sequence for SERPINB5 (NM_002639.1,1012-1030).
gtggccctatcaaatgtta

SEQ ID NO: 293355 - DNA, 19 bp, Homo sapiens
  siRNA target sequence for SERPINB5 (NM_002639.1,1032-1050).
ccacaaagtgtgcttagaa

SEQ ID NO: 293356 - DNA, 19 bp, Homo sapiens
  siRNA target sequence for SERPINB5 (NM_002639.1,1033-1051).
cacaaagtgtgcttagaaa

SEQ ID NO: 293357 - DNA, 19 bp, Homo sapiens
  siRNA target sequence for SERPINB5 (NM_002639.1,1126-1144).
gaccatccctttatttaca

SEQ ID NO: 293358 - DNA, 19 bp, Homo sapiens
  siRNA target sequence for SERPINB7 (NM_003784.1,383-401).
gcaaatgcagagttttgct

SEQ ID NO: 293359 - DNA, 19 bp, Homo sapiens
  siRNA target sequence for SERPINB7 (NM_003784.1,490-508).
ccgcttgggcgctcaagat

SEQ ID NO: 293360 - DNA, 19 bp, Homo sapiens
  siRNA target sequence for SERPINB7 (NM_003784.1,492-510).
gcttgggcgctcaagatga

SEQ ID NO: 293361 - DNA, 19 bp, Homo sapiens
  siRNA target sequence for SERPINB7 (NM_003784.1,511-529).
ctccctctctcagattgat

SEQ ID NO: 293362 - DNA, 19 bp, Homo sapiens
  siRNA target sequence for SERPINB7 (NM_003784.1,513-531).
ccctctctcagattgataa

SEQ ID NO: 293363 - DNA, 19 bp, Homo sapiens
  siRNA target sequence for SERPINB7 (NM_003784.1,515-533).
ctctctcagattgataagt

SEQ ID NO: 293364 - DNA, 19 bp, Homo sapiens
  siRNA target sequence for SERPINB7 (NM_003784.1,532-550).
gttgcttcatgttaacact

SEQ ID NO: 293365 - DNA, 19 bp, Homo sapiens
  siRNA target sequence for SERPINB7 (NM_003784.1,547-565).
cactgcctcaggatatgga

SEQ ID NO: 293366 - DNA, 19 bp, Homo sapiens
  siRNA target sequence for SERPINB7 (NM_003784.1,588-606).
ggctccagtctcaactgaa

SEQ ID NO: 293367 - DNA, 19 bp, Homo sapiens
  siRNA target sequence for SERPINB7 (NM_003784.1,597-615).
ctcaactgaaaagagtttt

SEQ ID NO: 293368 - DNA, 19 bp, Homo sapiens
  siRNA target sequence for SERPINB7 (NM_003784.1,630-648).
catcccacaaggattatga

SEQ ID NO: 293369 - DNA, 19 bp, Homo sapiens
  siRNA target sequence for SERPINB7 (NM_003784.1,633-651).
cccacaaggattatgatct

SEQ ID NO: 293370 - DNA, 19 bp, Homo sapiens
  siRNA target sequence for SERPINB7 (NM_003784.1,695-713).
cataaggactacattgagt

SEQ ID NO: 293371 - DNA, 19 bp, Homo sapiens
  siRNA target sequence for SERPINB7 (NM_003784.1,706-724).
cattgagtgtgccgaaaaa

SEQ ID NO: 293372 - DNA, 19 bp, Homo sapiens
  siRNA target sequence for SERPINB7 (NM_003784.1,743-761).
gagcgagttgactttacga

SEQ ID NO: 293373 - DNA, 19 bp, Homo sapiens
  siRNA target sequence for SERPINB7 (NM_003784.1,745-763).
gcgagttgactttacgaat

SEQ ID NO: 293374 - DNA, 19 bp, Homo sapiens
  siRNA target sequence for SERPINB7 (NM_003784.1,749-767).
gttgactttacgaatcatt

SEQ ID NO: 293375 - DNA, 19 bp, Homo sapiens
  siRNA target sequence for SERPINB7 (NM_003784.1,770-788).
gaagacactagacgtaata

SEQ ID NO: 293376 - DNA, 19 bp, Homo sapiens
  siRNA target sequence for SERPINB7 (NM_003784.1,773-791).
gacactagacgtaatatta

SEQ ID NO: 293377 - DNA, 19 bp, Homo sapiens
  siRNA target sequence for SERPINB7 (NM_003784.1,855-873).
gctcatctgctgtaatggt

SEQ ID NO: 293378 - DNA, 19 bp, Homo sapiens
  siRNA target sequence for SERPINB7 (NM_003784.1,922-940).
caagagcgaaaccataaat

SEQ ID NO: 293379 - DNA, 19 bp, Homo sapiens
  siRNA target sequence for SERPINB7 (NM_003784.1,989-1007).
catcaggaacggaagttca

SEQ ID NO: 293380 - DNA, 19 bp, Homo sapiens
  siRNA target sequence for SERPINB7 (NM_003784.1,1022-1040).
gaggacccatcaatgaaga

SEQ ID NO: 293381 - DNA, 19 bp, Homo sapiens
  siRNA target sequence for SERPINB7 (NM_003784.1,1024-1042).
ggacccatcaatgaagatt

SEQ ID NO: 293382 - DNA, 19 bp, Homo sapiens
  siRNA target sequence for SERPINB7 (NM_003784.1,1117-1135).
caaactgacctttcagaat

SEQ ID NO: 293383 - DNA, 19 bp, Homo sapiens
  siRNA target sequence for SERPINB7 (NM_003784.1,1121-1139).
ctgacctttcagaatctaa

SEQ ID NO: 293384 - DNA, 19 bp, Homo sapiens
  siRNA target sequence for SERPINB7 (NM_003784.1,1158-1176).
ggcgaatgacctctaagta

SEQ ID NO: 293385 - DNA, 19 bp, Homo sapiens
  siRNA target sequence for SERPINB7 (NM_003784.1,1159-1177).
gcgaatgacctctaagtat

SEQ ID NO: 293386 - DNA, 19 bp, Homo sapiens
  siRNA target sequence for SERPINB7 (NM_003784.1,1161-1179).
gaatgacctctaagtatgt

SEQ ID NO: 293387 - DNA, 19 bp, Homo sapiens
  siRNA target sequence for SERPINB7 (NM_003784.1,1170-1188).
ctaagtatgttgaggtatt

SEQ ID NO: 293388 - DNA, 19 bp, Homo sapiens
  siRNA target sequence for SERPINB7 (NM_003784.1,1194-1212).
ctcagttcaagatagagaa

SEQ ID NO: 293389 - DNA, 19 bp, Homo sapiens
  siRNA target sequence for SERPINB7 (NM_003784.1,1201-1219).
caagatagagaagaattat

SEQ ID NO: 293390 - DNA, 19 bp, Homo sapiens
  siRNA target sequence for SERPINB7 (NM_003784.1,1239-1257).
gagccctagggctgaaaga

SEQ ID NO: 293391 - DNA, 19 bp, Homo sapiens
  siRNA target sequence for SERPINB7 (NM_003784.1,1241-1259).
gccctagggctgaaagata

SEQ ID NO: 293392 - DNA, 19 bp, Homo sapiens
  siRNA target sequence for SERPINB7 (NM_003784.1,1242-1260).
ccctagggctgaaagatat

SEQ ID NO: 293393 - DNA, 19 bp, Homo sapiens
  siRNA target sequence for SERPINB7 (NM_003784.1,1249-1267).
gctgaaagatatctttgat

SEQ ID NO: 293394 - DNA, 19 bp, Homo sapiens
  siRNA target sequence for SERPINB7 (NM_003784.1,1303-1321).
gggtcgtctgtatatatca

SEQ ID NO: 293395 - DNA, 19 bp, Homo sapiens
  siRNA target sequence for SERPINB7 (NM_003784.1,1327-1345).
gatgcacaaatcttacata

SEQ ID NO: 293396 - DNA, 19 bp, Homo sapiens
  siRNA target sequence for SERPINB7 (NM_003784.1,1376-1394).
gctgccacaggaagtaata

SEQ ID NO: 293397 - DNA, 19 bp, Homo sapiens
  siRNA target sequence for SERPINB7 (NM_003784.1,1383-1401).
caggaagtaatattgtaga

SEQ ID NO: 293398 - DNA, 19 bp, Homo sapiens
  siRNA target sequence for SERPINB7 (NM_003784.1,1442-1460).
ccattcctatttgttatca

SEQ ID NO: 293399 - DNA, 19 bp, Homo sapiens
  siRNA target sequence for SERPINB7 (NM_003784.1,1477-1495).
cttattcagtggcaaagtt

SEQ ID NO: 293400 - DNA, 19 bp, Homo sapiens
  siRNA target sequence for SERPINF1 (NM_002615.3,451-469).
gcgaacagaatccatcatt

SEQ ID NO: 293401 - DNA, 19 bp, Homo sapiens
  siRNA target sequence for SERPINF1 (NM_002615.3,453-471).
gaacagaatccatcattca

SEQ ID NO: 293402 - DNA, 19 bp, Homo sapiens
  siRNA target sequence for SERPINF1 (NM_002615.3,479-497).
ctctactatgacttgatca

SEQ ID NO: 293403 - DNA, 19 bp, Homo sapiens
  siRNA target sequence for SERPINF1 (NM_002615.3,506-524).
gacatccatggtacctata

SEQ ID NO: 293404 - DNA, 19 bp, Homo sapiens
  siRNA target sequence for SERPINF1 (NM_002615.3,573-591).
cctcccggatcgtctttga

SEQ ID NO: 293405 - DNA, 19 bp, Homo sapiens
  siRNA target sequence for SERPINF1 (NM_002615.3,579-597).
ggatcgtctttgagaagaa

SEQ ID NO: 293406 - DNA, 19 bp, Homo sapiens
  siRNA target sequence for SERPINF1 (NM_002615.3,592-610).
gaagaagctgcgcataaaa

SEQ ID NO: 293407 - DNA, 19 bp, Homo sapiens
  siRNA target sequence for SERPINF1 (NM_002615.3,620-638).
gtggcacctctggaaaagt

SEQ ID NO: 293408 - DNA, 19 bp, Homo sapiens
  siRNA target sequence for SERPINF1 (NM_002615.3,736-754).
caggtccacaaaggaaatt

SEQ ID NO: 293409 - DNA, 19 bp, Homo sapiens
  siRNA target sequence for SERPINF1 (NM_002615.3,837-855).
ccctcgaggatttctactt

SEQ ID NO: 293410 - DNA, 19 bp, Homo sapiens
  siRNA target sequence for SERPINF1 (NM_002615.3,891-909).
cggaccctaaggctgtttt

SEQ ID NO: 293411 - DNA, 19 bp, Homo sapiens
  siRNA target sequence for SERPINF1 (NM_002615.3,963-981).
ccggaagcatgagtatcat

SEQ ID NO: 293412 - DNA, 19 bp, Homo sapiens
  siRNA target sequence for SERPINF1 (NM_002615.3,969-987).
gcatgagtatcatcttctt

SEQ ID NO: 293413 - DNA, 19 bp, Homo sapiens
  siRNA target sequence for SERPINF1 (NM_002615.3,1041-1059).
ccgagttcattcatgacat

SEQ ID NO: 293414 - DNA, 19 bp, Homo sapiens
  siRNA target sequence for SERPINF1 (NM_002615.3,1042-1060).
cgagttcattcatgacata

SEQ ID NO: 293415 - DNA, 19 bp, Homo sapiens
  siRNA target sequence for SERPINF1 (NM_002615.3,1101-1119).
ccaagctgaagctgagtta

SEQ ID NO: 293416 - DNA, 19 bp, Homo sapiens
  siRNA target sequence for SERPINF1 (NM_002615.3,1153-1171).
gaagctgcaatccttgttt

SEQ ID NO: 293417 - DNA, 19 bp, Homo sapiens
  siRNA target sequence for SERPINF1 (NM_002615.3,1156-1174).
gctgcaatccttgtttgat

SEQ ID NO: 293418 - DNA, 19 bp, Homo sapiens
  siRNA target sequence for SERPINF1 (NM_002615.3,1157-1175).
ctgcaatccttgtttgatt

SEQ ID NO: 293419 - DNA, 19 bp, Homo sapiens
  siRNA target sequence for SERPINF1 (NM_002615.3,1178-1196).
ccagactttagcaagatca

SEQ ID NO: 293420 - DNA, 19 bp, Homo sapiens
  siRNA target sequence for SERPINF1 (NM_002615.3,1311-1329).
cgctggactatcaccttaa

SEQ ID NO: 293421 - DNA, 19 bp, Homo sapiens
  siRNA target sequence for SERPINF2 (NM_000934.1,932-950).
ccacccactttgaatggaa

SEQ ID NO: 293422 - DNA, 19 bp, Homo sapiens
  siRNA target sequence for SERPINF2 (NM_000934.1,1032-1050).
gcctaagctgtatctgaaa

SEQ ID NO: 293423 - DNA, 19 bp, Homo sapiens
  siRNA target sequence for SERPINF2 (NM_000934.1,1428-1446).
gcttttcggccctgactta

SEQ ID NO: 293424 - DNA, 19 bp, Homo sapiens
  siRNA target sequence for SERPING1 (NM_000062.1,111-129).
ggatagagcctcctcaaat

SEQ ID NO: 293425 - DNA, 19 bp, Homo sapiens
  siRNA target sequence for SERPING1 (NM_000062.1,193-211).
gtcgcaacaacagttatct

SEQ ID NO: 293426 - DNA, 19 bp, Homo sapiens
  siRNA target sequence for SERPING1 (NM_000062.1,428-446).
gcccaggacctgttactct

SEQ ID NO: 293427 - DNA, 19 bp, Homo sapiens
  siRNA target sequence for SERPING1 (NM_000062.1,456-474).
cttggagagtcattcaaca

SEQ ID NO: 293428 - DNA, 19 bp, Homo sapiens
  siRNA target sequence for SERPING1 (NM_000062.1,479-497).
ccgtgttgggggatgcttt

SEQ ID NO: 293429 - DNA, 19 bp, Homo sapiens
  siRNA target sequence for SERPING1 (NM_000062.1,800-818).
gccccagagtcctaagcaa

SEQ ID NO: 293430 - DNA, 19 bp, Homo sapiens
  siRNA target sequence for SERPING1 (NM_000062.1,919-937).
cttgtcctcctcaatgcta

SEQ ID NO: 293431 - DNA, 19 bp, Homo sapiens
  siRNA target sequence for SERPING1 (NM_000062.1,986-1004).
gaatggaaccctttcactt

SEQ ID NO: 293432 - DNA, 19 bp, Homo sapiens
  siRNA target sequence for SERPING1 (NM_000062.1,1146-1164).
cctgaaacatcgtcttgaa

SEQ ID NO: 293433 - DNA, 19 bp, Homo sapiens
  siRNA target sequence for SERPING1 (NM_000062.1,1236-1254).
gcccactctcctaacacta

SEQ ID NO: 293434 - DNA, 19 bp, Homo sapiens
  siRNA target sequence for SERPING1 (NM_000062.1,1250-1268).
cactaccccgcatcaaagt

SEQ ID NO: 293435 - DNA, 19 bp, Homo sapiens
  siRNA target sequence for SERPING1 (NM_000062.1,1252-1270).
ctaccccgcatcaaagtga

SEQ ID NO: 293436 - DNA, 19 bp, Homo sapiens
  siRNA target sequence for SERPING1 (NM_000062.1,1271-1289).
cgaccagccaggatatgct

SEQ ID NO: 293437 - DNA, 19 bp, Homo sapiens
  siRNA target sequence for SERPING1 (NM_000062.1,1277-1295).
gccaggatatgctctcaat

SEQ ID NO: 293438 - DNA, 19 bp, Homo sapiens
  siRNA target sequence for SERPING1 (NM_000062.1,1288-1306).
ctctcaatcatggagaaat

SEQ ID NO: 293439 - DNA, 19 bp, Homo sapiens
  siRNA target sequence for SERPINI1 (NM_005025.1,160-178).
gctgacttgtcagtgaata

SEQ ID NO: 293440 - DNA, 19 bp, Homo sapiens
  siRNA target sequence for SERPINI1 (NM_005025.1,220-238).
ctcttctctccattgagta

SEQ ID NO: 293441 - DNA, 19 bp, Homo sapiens
  siRNA target sequence for SERPINI1 (NM_005025.1,299-317).
gccactcaatgggatatga

SEQ ID NO: 293442 - DNA, 19 bp, Homo sapiens
  siRNA target sequence for SERPINI1 (NM_005025.1,309-327).
gggatatgacagcctaaaa

SEQ ID NO: 293443 - DNA, 19 bp, Homo sapiens
  siRNA target sequence for SERPINI1 (NM_005025.1,355-373).
gagttttcaaacatggtaa

SEQ ID NO: 293444 - DNA, 19 bp, Homo sapiens
  siRNA target sequence for SERPINI1 (NM_005025.1,377-395).
ctaaagagagccaatatgt

SEQ ID NO: 293445 - DNA, 19 bp, Homo sapiens
  siRNA target sequence for SERPINI1 (NM_005025.1,498-516).
ggacttcagtcaaaatgta

SEQ ID NO: 293446 - DNA, 19 bp, Homo sapiens
  siRNA target sequence for SERPINI1 (NM_005025.1,514-532).
gtagccgtggccaactaca

SEQ ID NO: 293447 - DNA, 19 bp, Homo sapiens
  siRNA target sequence for SERPINI1 (NM_005025.1,519-537).
cgtggccaactacatcaat

SEQ ID NO: 293448 - DNA, 19 bp, Homo sapiens
  siRNA target sequence for SERPINI1 (NM_005025.1,520-538).
gtggccaactacatcaata

SEQ ID NO: 293449 - DNA, 19 bp, Homo sapiens
  siRNA target sequence for SERPINI1 (NM_005025.1,608-626).
cttatctggccctcattaa

SEQ ID NO: 293450 - DNA, 19 bp, Homo sapiens
  siRNA target sequence for SERPINI1 (NM_005025.1,619-637).
ctcattaatgctgtctatt

SEQ ID NO: 293451 - DNA, 19 bp, Homo sapiens
  siRNA target sequence for SERPINI1 (NM_005025.1,656-674).
cgcagtttaggcctgaaaa

SEQ ID NO: 293452 - DNA, 19 bp, Homo sapiens
  siRNA target sequence for SERPINI1 (NM_005025.1,717-735).
ccaaattccaatgatgtat

SEQ ID NO: 293453 - DNA, 19 bp, Homo sapiens
  siRNA target sequence for SERPINI1 (NM_005025.1,878-896).
ctctggagccattagtcaa

SEQ ID NO: 293454 - DNA, 19 bp, Homo sapiens
  siRNA target sequence for SERPINI1 (NM_005025.1,1002-1020).
gaaggctcttggaataact

SEQ ID NO: 293455 - DNA, 19 bp, Homo sapiens
  siRNA target sequence for SERPINI1 (NM_005025.1,1098-1116).
gtccttcctagaggttaat

SEQ ID NO: 293456 - DNA, 19 bp, Homo sapiens
  siRNA target sequence for SERPINI1 (NM_005025.1,1147-1165).
ggaatgattgcaattagta

SEQ ID NO: 293457 - DNA, 19 bp, Homo sapiens
  siRNA target sequence for SERPINI1 (NM_005025.1,1174-1192).
gtgctgtatcctcaagtta

SEQ ID NO: 293458 - DNA, 19 bp, Homo sapiens
  siRNA target sequence for SERPINI1 (NM_005025.1,1176-1194).
gctgtatcctcaagttatt

SEQ ID NO: 293459 - DNA, 19 bp, Homo sapiens
  siRNA target sequence for SERPINI1 (NM_005025.1,1232-1250).
gaactggtacaattctatt

SEQ ID NO: 293460 - DNA, 19 bp, Homo sapiens
  siRNA target sequence for SERPINI1 (NM_005025.1,1261-1279).
gtcatgcatcctgaaacaa

SEQ ID NO: 293461 - DNA, 19 bp, Homo sapiens
  siRNA target sequence for SERPINI1 (NM_005025.1,1267-1285).
catcctgaaacaatgaaca

SEQ ID NO: 293462 - DNA, 19 bp, Homo sapiens
  siRNA target sequence for SERPINI1 (NM_005025.1,1270-1288).
cctgaaacaatgaacacaa

SEQ ID NO: 293463 - DNA, 19 bp, Homo sapiens
  siRNA target sequence for SERPINI1 (NM_005025.1,1292-1310).
gacatgatttcgaagaact

SEQ ID NO: 293464 - DNA, 19 bp, Homo sapiens
  siRNA target sequence for SERPINI2 (NM_006217.2,139-157).
gaggtttccttatctcata

SEQ ID NO: 293465 - DNA, 19 bp, Homo sapiens
  siRNA target sequence for SERPINI2 (NM_006217.2,152-170).
ctcataaggacaacattat

SEQ ID NO: 293466 - DNA, 19 bp, Homo sapiens
  siRNA target sequence for SERPINI2 (NM_006217.2,369-387).
ccttcaagaaggattcact

SEQ ID NO: 293467 - DNA, 19 bp, Homo sapiens
  siRNA target sequence for SERPINI2 (NM_006217.2,384-402).
cactgtgaaagaacagtat

SEQ ID NO: 293468 - DNA, 19 bp, Homo sapiens
  siRNA target sequence for SERPINI2 (NM_006217.2,406-424).
catggcaacaaggaatttt

SEQ ID NO: 293469 - DNA, 19 bp, Homo sapiens
  siRNA target sequence for SERPINI2 (NM_006217.2,528-546).
gttttcaggggaagaattt

SEQ ID NO: 293470 - DNA, 19 bp, Homo sapiens
  siRNA target sequence for SERPINI2 (NM_006217.2,562-580).
cttgtcctggtgaatgcta

SEQ ID NO: 293471 - DNA, 19 bp, Homo sapiens
  siRNA target sequence for SERPINI2 (NM_006217.2,622-640).
gacacacagctgataaatt

SEQ ID NO: 293472 - DNA, 19 bp, Homo sapiens
  siRNA target sequence for SERPINI2 (NM_006217.2,628-646).
cagctgataaattttacta

SEQ ID NO: 293473 - DNA, 19 bp, Homo sapiens
  siRNA target sequence for SERPINI2 (NM_006217.2,706-724).
ggttatttttctgaatctt

SEQ ID NO: 293474 - DNA, 19 bp, Homo sapiens
  siRNA target sequence for SERPINI2 (NM_006217.2,726-744).
cctgaactaccaagtttta

SEQ ID NO: 293475 - DNA, 19 bp, Homo sapiens
  siRNA target sequence for SERPINI2 (NM_006217.2,922-940).
gacttcaaagacgttttgt

SEQ ID NO: 293476 - DNA, 19 bp, Homo sapiens
  siRNA target sequence for SERPINI2 (NM_006217.2,948-966).
gaacataaccgagatattt

SEQ ID NO: 293477 - DNA, 19 bp, Homo sapiens
  siRNA target sequence for SERPINI2 (NM_006217.2,951-969).
cataaccgagatatttagt

SEQ ID NO: 293478 - DNA, 19 bp, Homo sapiens
  siRNA target sequence for SERPINI2 (NM_006217.2,975-993).
ctgcgacctttctggaata

SEQ ID NO: 293479 - DNA, 19 bp, Homo sapiens
  siRNA target sequence for SERPINI2 (NM_006217.2,1019-1037).
cccaagtgacgcaaaaagt

SEQ ID NO: 293480 - DNA, 19 bp, Homo sapiens
  siRNA target sequence for SERPINI2 (NM_006217.2,1021-1039).
caagtgacgcaaaaagttt

SEQ ID NO: 293481 - DNA, 19 bp, Homo sapiens
  siRNA target sequence for SERPINI2 (NM_006217.2,1076-1094).
catcaactggcatacacat

SEQ ID NO: 293482 - DNA, 19 bp, Homo sapiens
  siRNA target sequence for SERPINI2 (NM_006217.2,1111-1129).
ctggctcaaagccaattta

SEQ ID NO: 293483 - DNA, 19 bp, Homo sapiens
  siRNA target sequence for SERPINI2 (NM_006217.2,1113-1131).
ggctcaaagccaatttata

SEQ ID NO: 293484 - DNA, 19 bp, Homo sapiens
  siRNA target sequence for SERPINI2 (NM_006217.2,1207-1225).
cctgacacccaggagataa

SEQ ID NO: 293485 - DNA, 19 bp, Homo sapiens
  siRNA target sequence for SERPINI2 (NM_006217.2,1208-1226).
ctgacacccaggagataaa

SEQ ID NO: 293486 - DNA, 19 bp, Homo sapiens
  siRNA target sequence for SLPI (NM_003064.2,146-164).
cagtgccttagatacaaga

SEQ ID NO: 293487 - DNA, 19 bp, Homo sapiens
  siRNA target sequence for SLPI (NM_003064.2,148-166).
gtgccttagatacaagaaa

SEQ ID NO: 293488 - DNA, 19 bp, Homo sapiens
  siRNA target sequence for SLPI (NM_003064.2,282-300).
ggaagtgcccagtgactta

SEQ ID NO: 293489 - DNA, 19 bp, Homo sapiens
  siRNA target sequence for SLPI (NM_003064.2,293-311).
gtgacttatggccaatgtt

SEQ ID NO: 293490 - DNA, 19 bp, Homo sapiens
  siRNA target sequence for SLPI (NM_003064.2,297-315).
cttatggccaatgtttgat

SEQ ID NO: 293491 - DNA, 19 bp, Homo sapiens
  siRNA target sequence for SLPI (NM_003064.2,302-320).
ggccaatgtttgatgctta

SEQ ID NO: 293492 - DNA, 19 bp, Homo sapiens
  siRNA target sequence for SLPI (NM_003064.2,303-321).
gccaatgtttgatgcttaa

SEQ ID NO: 293493 - DNA, 19 bp, Homo sapiens
  siRNA target sequence for SLPI (NM_003064.2,397-415).
ctgcgtttcccctgtgaaa

SEQ ID NO: 293494 - DNA, 19 bp, Homo sapiens
  siRNA target sequence for SPINK1 (NM_003122.1,105-123).
gagtctatctggtaacact

SEQ ID NO: 293495 - DNA, 19 bp, Homo sapiens
  siRNA target sequence for SPINK1 (NM_003122.1,140-158).
gaagagaggccaaatgtta

SEQ ID NO: 293496 - DNA, 19 bp, Homo sapiens
  siRNA target sequence for SPINK1 (NM_003122.1,143-161).
gagaggccaaatgttacaa

SEQ ID NO: 293497 - DNA, 19 bp, Homo sapiens
  siRNA target sequence for SPINK1 (NM_003122.1,173-191).
gatgcaccaagatatatga

SEQ ID NO: 293498 - DNA, 19 bp, Homo sapiens
  siRNA target sequence for SPINK1 (NM_003122.1,198-216).
ctgtgggactgatggaaat

SEQ ID NO: 293499 - DNA, 19 bp, Homo sapiens
  siRNA target sequence for SPINK1 (NM_003122.1,223-241).
cccaatgaatgcgtgttat

SEQ ID NO: 293500 - DNA, 19 bp, Homo sapiens
  siRNA target sequence for SPINK1 (NM_003122.1,225-243).
caatgaatgcgtgttatgt

SEQ ID NO: 293501 - DNA, 19 bp, Homo sapiens
  siRNA target sequence for SPINK1 (NM_003122.1,253-271).
cggaaacgccagacttcta

SEQ ID NO: 293502 - DNA, 19 bp, Homo sapiens
  siRNA target sequence for SPINK2 (NM_021114.1,125-143).
ctctctgatccctcaattt

SEQ ID NO: 293503 - DNA, 19 bp, Homo sapiens
  siRNA target sequence for SPINK2 (NM_021114.1,227-245).
cagtgacatgtccacttat

SEQ ID NO: 293504 - DNA, 19 bp, Homo sapiens
  siRNA target sequence for SPINK2 (NM_021114.1,275-293).
cagggaaggtggtcataat

SEQ ID NO: 293505 - DNA, 19 bp, Homo sapiens
  siRNA target sequence for SPINK2 (NM_021114.1,277-295).
gggaaggtggtcataatat

SEQ ID NO: 293506 - DNA, 19 bp, Homo sapiens
  siRNA target sequence for SPINK2 (NM_021114.1,283-301).
gtggtcataatattaaaat

SEQ ID NO: 293507 - DNA, 19 bp, Homo sapiens
  siRNA target sequence for SPINK4 (NM_014471.1,180-198).
gatgggctcacatatacga

SEQ ID NO: 293508 - DNA, 19 bp, Homo sapiens
  siRNA target sequence for SPINK4 (NM_014471.1,185-203).
gctcacatatacgaatgaa

SEQ ID NO: 293509 - DNA, 19 bp, Homo sapiens
  siRNA target sequence for SPINK4 (NM_014471.1,186-204).
ctcacatatacgaatgaat

SEQ ID NO: 293510 - DNA, 19 bp, Homo sapiens
  siRNA target sequence for SPINK5 (NM_006846.1,79-97).
ggctctttgcctcatacaa

SEQ ID NO: 293511 - DNA, 19 bp, Homo sapiens
  siRNA target sequence for SPINK5 (NM_006846.1,81-99).
ctctttgcctcatacaaga

SEQ ID NO: 293512 - DNA, 19 bp, Homo sapiens
  siRNA target sequence for SPINK5 (NM_006846.1,124-142).
ggaaatgtgccatgaattt

SEQ ID NO: 293513 - DNA, 19 bp, Homo sapiens
  siRNA target sequence for SPINK5 (NM_006846.1,172-190).
ctgtccccaggataagaaa

SEQ ID NO: 293514 - DNA, 19 bp, Homo sapiens
  siRNA target sequence for SPINK5 (NM_006846.1,174-192).
gtccccaggataagaaatt

SEQ ID NO: 293515 - DNA, 19 bp, Homo sapiens
  siRNA target sequence for SPINK5 (NM_006846.1,176-194).
ccccaggataagaaatttt

SEQ ID NO: 293516 - DNA, 19 bp, Homo sapiens
  siRNA target sequence for SPINK5 (NM_006846.1,178-196).
ccaggataagaaatttttt

SEQ ID NO: 293517 - DNA, 19 bp, Homo sapiens
  siRNA target sequence for SPINK5 (NM_006846.1,197-215).
caaagtcttgatggaataa

SEQ ID NO: 293518 - DNA, 19 bp, Homo sapiens
  siRNA target sequence for SPINK5 (NM_006846.1,206-224).
gatggaataatgttcatca

SEQ ID NO: 293519 - DNA, 19 bp, Homo sapiens
  siRNA target sequence for SPINK5 (NM_006846.1,209-227).
ggaataatgttcatcaata

SEQ ID NO: 293520 - DNA, 19 bp, Homo sapiens
  siRNA target sequence for SPINK5 (NM_006846.1,277-295).
gagggccaggcatttagca

SEQ ID NO: 293521 - DNA, 19 bp, Homo sapiens
  siRNA target sequence for SPINK5 (NM_006846.1,316-334).
cccaacagagctgaattgt

SEQ ID NO: 293522 - DNA, 19 bp, Homo sapiens
  siRNA target sequence for SPINK5 (NM_006846.1,318-336).
caacagagctgaattgtga

SEQ ID NO: 293523 - DNA, 19 bp, Homo sapiens
  siRNA target sequence for SPINK5 (NM_006846.1,463-481).
gtcccaaattggtgtaaaa

SEQ ID NO: 293524 - DNA, 19 bp, Homo sapiens
  siRNA target sequence for SPINK5 (NM_006846.1,466-484).
ccaaattggtgtaaaaagt

SEQ ID NO: 293525 - DNA, 19 bp, Homo sapiens
  siRNA target sequence for SPINK5 (NM_006846.1,564-582).
gatgcacaagggaaaatga

SEQ ID NO: 293526 - DNA, 19 bp, Homo sapiens
  siRNA target sequence for SPINK5 (NM_006846.1,631-649).
gtgtgctgagctgttttta

SEQ ID NO: 293527 - DNA, 19 bp, Homo sapiens
  siRNA target sequence for SPINK5 (NM_006846.1,670-688).
gcgagagggtgaaactaga

SEQ ID NO: 293528 - DNA, 19 bp, Homo sapiens
  siRNA target sequence for SPINK5 (NM_006846.1,671-689).
cgagagggtgaaactagaa

SEQ ID NO: 293529 - DNA, 19 bp, Homo sapiens
  siRNA target sequence for SPINK5 (NM_006846.1,676-694).
gggtgaaactagaattcga

SEQ ID NO: 293530 - DNA, 19 bp, Homo sapiens
  siRNA target sequence for SPINK5 (NM_006846.1,709-727).
ggatttttgcaaggaatat

SEQ ID NO: 293531 - DNA, 19 bp, Homo sapiens
  siRNA target sequence for SPINK5 (NM_006846.1,799-817).
gatgcatggcaacaaatgt

SEQ ID NO: 293532 - DNA, 19 bp, Homo sapiens
  siRNA target sequence for SPINK5 (NM_006846.1,862-880).
cagtaaaacagatcaaaat

SEQ ID NO: 293533 - DNA, 19 bp, Homo sapiens
  siRNA target sequence for SPINK5 (NM_006846.1,933-951).
gcagtcaatatcaaaatca

SEQ ID NO: 293534 - DNA, 19 bp, Homo sapiens
  siRNA target sequence for SPINK5 (NM_006846.1,1085-1103).
gaagcacgagctagaaaca

SEQ ID NO: 293535 - DNA, 19 bp, Homo sapiens
  siRNA target sequence for SPINK5 (NM_006846.1,1343-1361).
gaggagttgtgtagtgaat

SEQ ID NO: 293536 - DNA, 19 bp, Homo sapiens
  siRNA target sequence for SPINK5 (NM_006846.1,1375-1393).
gaaaaacggacggcttttt

SEQ ID NO: 293537 - DNA, 19 bp, Homo sapiens
  siRNA target sequence for SPINK5 (NM_006846.1,1573-1591).
caccagggagcataatcct

SEQ ID NO: 293538 - DNA, 19 bp, Homo sapiens
  siRNA target sequence for SPINK5 (NM_006846.1,1744-1762).
cagtgaatatcgtcattat

SEQ ID NO: 293539 - DNA, 19 bp, Homo sapiens
  siRNA target sequence for SPINK5 (NM_006846.1,1748-1766).
gaatatcgtcattatgtga

SEQ ID NO: 293540 - DNA, 19 bp, Homo sapiens
  siRNA target sequence for SPINK5 (NM_006846.1,1895-1913).
gaacccagagcaaaagtca

SEQ ID NO: 293541 - DNA, 19 bp, Homo sapiens
  siRNA target sequence for SPINK5 (NM_006846.1,2155-2173).
ggacgaatgtgctgagtat

SEQ ID NO: 293542 - DNA, 19 bp, Homo sapiens
  siRNA target sequence for SPINK5 (NM_006846.1,2231-2249).
gatgctgatggcaaatcgt

SEQ ID NO: 293543 - DNA, 19 bp, Homo sapiens
  siRNA target sequence for SPINK5 (NM_006846.1,2237-2255).
gatggcaaatcgtacaaca

SEQ ID NO: 293544 - DNA, 19 bp, Homo sapiens
  siRNA target sequence for SPINK5 (NM_006846.1,2241-2259).
gcaaatcgtacaacaatca

SEQ ID NO: 293545 - DNA, 19 bp, Homo sapiens
  siRNA target sequence for SPINK5 (NM_006846.1,2265-2283).
ccatgtgtaaagcaaaatt

SEQ ID NO: 293546 - DNA, 19 bp, Homo sapiens
  siRNA target sequence for SPINK5 (NM_006846.1,2369-2387).
gagtttagaagccaaatga

SEQ ID NO: 293547 - DNA, 19 bp, Homo sapiens
  siRNA target sequence for SPINK5 (NM_006846.1,2461-2479).
gtgtactatgtgtaaggaa

SEQ ID NO: 293548 - DNA, 19 bp, Homo sapiens
  siRNA target sequence for SPINK5 (NM_006846.1,2581-2599).
ggatctgtgtcgtgaattt

SEQ ID NO: 293549 - DNA, 19 bp, Homo sapiens
  siRNA target sequence for SPINK5 (NM_006846.1,2585-2603).
ctgtgtcgtgaatttcgaa

SEQ ID NO: 293550 - DNA, 19 bp, Homo sapiens
  siRNA target sequence for SPINK5 (NM_006846.1,2707-2725).
ctttgatcgagaagctaat

SEQ ID NO: 293551 - DNA, 19 bp, Homo sapiens
  siRNA target sequence for SPINK5 (NM_006846.1,2711-2729).
gatcgagaagctaatgaaa

SEQ ID NO: 293552 - DNA, 19 bp, Homo sapiens
  siRNA target sequence for SPINK5 (NM_006846.1,2757-2775).
gtagcaagccctcaaataa

SEQ ID NO: 293553 - DNA, 19 bp, Homo sapiens
  siRNA target sequence for SPINK5 (NM_006846.1,2793-2811).
gtgaatttcgaaactatat

SEQ ID NO: 293554 - DNA, 19 bp, Homo sapiens
  siRNA target sequence for SPINK5 (NM_006846.1,2806-2824).
ctatataaggaacaatgaa

SEQ ID NO: 293555 - DNA, 19 bp, Homo sapiens
  siRNA target sequence for SPINK5 (NM_006846.1,2827-2845).
catctgccctagagagaat

SEQ ID NO: 293556 - DNA, 19 bp, Homo sapiens
  siRNA target sequence for SPINK5 (NM_006846.1,2858-2876).
ggtgctgatggaaagttct

SEQ ID NO: 293557 - DNA, 19 bp, Homo sapiens
  siRNA target sequence for SPINK5 (NM_006846.1,2859-2877).
gtgctgatggaaagttcta

SEQ ID NO: 293558 - DNA, 19 bp, Homo sapiens
  siRNA target sequence for SPINK5 (NM_006846.1,2956-2974).
ccatgttagagcttctcaa

SEQ ID NO: 293559 - DNA, 19 bp, Homo sapiens
  siRNA target sequence for SPINK5 (NM_006846.1,3012-3030).
ctgagatgtgcaaagacta

SEQ ID NO: 293560 - DNA, 19 bp, Homo sapiens
  siRNA target sequence for SPINK5 (NM_006846.1,3021-3039).
gcaaagactaccgagtatt

SEQ ID NO: 293561 - DNA, 19 bp, Homo sapiens
  siRNA target sequence for SPINK5 (NM_006846.1,3056-3074).
ctttgtccaaaggatttaa

SEQ ID NO: 293562 - DNA, 19 bp, Homo sapiens
  siRNA target sequence for SPINK5 (NM_006846.1,3092-3110).
gatggccaaacctacaaca

SEQ ID NO: 293563 - DNA, 19 bp, Homo sapiens
  siRNA target sequence for SPINK5 (NM_006846.1,3139-3157).
gatacgccaaacaaataca

SEQ ID NO: 293564 - DNA, 19 bp, Homo sapiens
  siRNA target sequence for SPINLW1 (NM_020398.2,36-54).
ggatcttctggacttttga

SEQ ID NO: 293565 - DNA, 19 bp, Homo sapiens
  siRNA target sequence for SPINLW1 (NM_020398.2,99-117).
ggtctgactgattggttat

SEQ ID NO: 293566 - DNA, 19 bp, Homo sapiens
  siRNA target sequence for SPINLW1 (NM_020398.2,100-118).
gtctgactgattggttatt

SEQ ID NO: 293567 - DNA, 19 bp, Homo sapiens
  siRNA target sequence for SPINLW1 (NM_020398.2,187-205).
gacaatgccaggacaacaa

SEQ ID NO: 293568 - DNA, 19 bp, Homo sapiens
  siRNA target sequence for SPINLW1 (NM_020398.2,238-256).
gtttagatctcaaacaaga

SEQ ID NO: 293569 - DNA, 19 bp, Homo sapiens
  siRNA target sequence for SPINLW1 (NM_020398.2,282-300).
ggcccctgcctggcttatt

SEQ ID NO: 293570 - DNA, 19 bp, Homo sapiens
  siRNA target sequence for SPINLW1 (NM_020398.2,303-321).
cttcattggtggtatgaca

SEQ ID NO: 293571 - DNA, 19 bp, Homo sapiens
  siRNA target sequence for SPINLW1 (NM_020398.2,334-352).
cttgctccatgtttgtcta

SEQ ID NO: 293572 - DNA, 19 bp, Homo sapiens
  siRNA target sequence for SPINLW1 (NM_020398.2,355-373).
gtggctgccagggaaacaa

SEQ ID NO: 293573 - DNA, 19 bp, Homo sapiens
  siRNA target sequence for SPINLW1 (NM_020398.2,357-375).
ggctgccagggaaacaata

SEQ ID NO: 293574 - DNA, 19 bp, Homo sapiens
  siRNA target sequence for SPINLW1 (NM_020398.2,358-376).
gctgccagggaaacaataa

SEQ ID NO: 293575 - DNA, 19 bp, Homo sapiens
  siRNA target sequence for SPINLW1 (NM_020398.2,363-381).
cagggaaacaataacaact

SEQ ID NO: 293576 - DNA, 19 bp, Homo sapiens
  siRNA target sequence for SPINT1 (NM_003710.2,702-720).
cctgggcaggcatagactt

SEQ ID NO: 293577 - DNA, 19 bp, Homo sapiens
  siRNA target sequence for SPINT1 (NM_003710.2,1027-1045).
gatctgcaagagtttcgtt

SEQ ID NO: 293578 - DNA, 19 bp, Homo sapiens
  siRNA target sequence for SPINT1 (NM_003710.2,1030-1048).
ctgcaagagtttcgtttat

SEQ ID NO: 293579 - DNA, 19 bp, Homo sapiens
  siRNA target sequence for SPINT1 (NM_003710.2,1033-1051).
caagagtttcgtttatgga

SEQ ID NO: 293580 - DNA, 19 bp, Homo sapiens
  siRNA target sequence for SPINT1 (NM_003710.2,1253-1271).
gacgaggctgcctgtgaaa

SEQ ID NO: 293581 - DNA, 19 bp, Homo sapiens
  siRNA target sequence for SPINT1 (NM_003710.2,1492-1510).
ctccaagaaggatgtgttt

SEQ ID NO: 293582 - DNA, 19 bp, Homo sapiens
  siRNA target sequence for SPINT1 (NM_003710.2,1610-1628).
ggttactgcttcttcaaga

SEQ ID NO: 293583 - DNA, 19 bp, Homo sapiens
  siRNA target sequence for SPINT1 (NM_003710.2,1710-1728).
cggagcacctggtctataa

SEQ ID NO: 293584 - DNA, 19 bp, Homo sapiens
  siRNA target sequence for SPINT2 (NM_021102.1,453-471).
gcctaggtggtggtacaat

SEQ ID NO: 293585 - DNA, 19 bp, Homo sapiens
  siRNA target sequence for SPINT2 (NM_021102.1,455-473).
ctaggtggtggtacaatgt

SEQ ID NO: 293586 - DNA, 19 bp, Homo sapiens
  siRNA target sequence for SPINT2 (NM_021102.1,512-530).
gtgacggaaacagcaataa

SEQ ID NO: 293587 - DNA, 19 bp, Homo sapiens
  siRNA target sequence for SPINT2 (NM_021102.1,514-532).
gacggaaacagcaataatt

SEQ ID NO: 293588 - DNA, 19 bp, Homo sapiens
  siRNA target sequence for SPINT2 (NM_021102.1,518-536).
gaaacagcaataattacct

SEQ ID NO: 293589 - DNA, 19 bp, Homo sapiens
  siRNA target sequence for SPINT2 (NM_021102.1,661-679).
gaccactccagcgatatgt

SEQ ID NO: 293590 - DNA, 19 bp, Homo sapiens
  siRNA target sequence for SPINT2 (NM_021102.1,664-682).
cactccagcgatatgttca

SEQ ID NO: 293591 - DNA, 19 bp, Homo sapiens
  siRNA target sequence for SPINT2 (NM_021102.1,668-686).
ccagcgatatgttcaacta

SEQ ID NO: 293592 - DNA, 19 bp, Homo sapiens
  siRNA target sequence for SPINT2 (NM_021102.1,669-687).
cagcgatatgttcaactat

SEQ ID NO: 293593 - DNA, 19 bp, Homo sapiens
  siRNA target sequence for SPINT2 (NM_021102.1,671-689).
gcgatatgttcaactatga

SEQ ID NO: 293594 - DNA, 19 bp, Homo sapiens
  siRNA target sequence for SPINT2 (NM_021102.1,672-690).
cgatatgttcaactatgaa

SEQ ID NO: 293595 - DNA, 19 bp, Homo sapiens
  siRNA target sequence for SPINT2 (NM_021102.1,770-788).
cctgcaataacttcatcta

SEQ ID NO: 293596 - DNA, 19 bp, Homo sapiens
  siRNA target sequence for SPINT2 (NM_021102.1,1007-1025).
ggagctccggagatgacaa

SEQ ID NO: 293597 - DNA, 19 bp, Homo sapiens
  siRNA target sequence for UNC5D (NM_080872.1,191-209).
gggacactgcctcatttca

SEQ ID NO: 293598 - DNA, 19 bp, Homo sapiens
  siRNA target sequence for UNC5D (NM_080872.1,208-226).
catagaggagccagatgat

SEQ ID NO: 293599 - DNA, 19 bp, Homo sapiens
  siRNA target sequence for UNC5D (NM_080872.1,215-233).
gagccagatgatgcttata

SEQ ID NO: 293600 - DNA, 19 bp, Homo sapiens
  siRNA target sequence for UNC5D (NM_080872.1,238-256).
caagagcaaccctattgca

SEQ ID NO: 293601 - DNA, 19 bp, Homo sapiens
  siRNA target sequence for UNC5D (NM_080872.1,273-291).
ggccagccatgcagatatt

SEQ ID NO: 293602 - DNA, 19 bp, Homo sapiens
  siRNA target sequence for UNC5D (NM_080872.1,306-324).
gcgagtgggtccatcagaa

SEQ ID NO: 293603 - DNA, 19 bp, Homo sapiens
  siRNA target sequence for UNC5D (NM_080872.1,371-389).
gtccgcgaagtgttcatca

SEQ ID NO: 293604 - DNA, 19 bp, Homo sapiens
  siRNA target sequence for UNC5D (NM_080872.1,373-391).
ccgcgaagtgttcatcaat

SEQ ID NO: 293605 - DNA, 19 bp, Homo sapiens
  siRNA target sequence for UNC5D (NM_080872.1,375-393).
gcgaagtgttcatcaatgt

SEQ ID NO: 293606 - DNA, 19 bp, Homo sapiens
  siRNA target sequence for UNC5D (NM_080872.1,377-395).
gaagtgttcatcaatgtta

SEQ ID NO: 293607 - DNA, 19 bp, Homo sapiens
  siRNA target sequence for UNC5D (NM_080872.1,380-398).
gtgttcatcaatgttacta

SEQ ID NO: 293608 - DNA, 19 bp, Homo sapiens
  siRNA target sequence for UNC5D (NM_080872.1,492-510).
ctgtgcgcatagcctattt

SEQ ID NO: 293609 - DNA, 19 bp, Homo sapiens
  siRNA target sequence for UNC5D (NM_080872.1,503-521).
gcctatttacggaaaaact

SEQ ID NO: 293610 - DNA, 19 bp, Homo sapiens
  siRNA target sequence for UNC5D (NM_080872.1,504-522).
cctatttacggaaaaactt

SEQ ID NO: 293611 - DNA, 19 bp, Homo sapiens
  siRNA target sequence for UNC5D (NM_080872.1,634-652).
gcccattgactctgaacaa

SEQ ID NO: 293612 - DNA, 19 bp, Homo sapiens
  siRNA target sequence for UNC5D (NM_080872.1,645-663).
ctgaacaagacgagaacat

SEQ ID NO: 293613 - DNA, 19 bp, Homo sapiens
  siRNA target sequence for UNC5D (NM_080872.1,675-693).
ctgaccataacctgatcat

SEQ ID NO: 293614 - DNA, 19 bp, Homo sapiens
  siRNA target sequence for UNC5D (NM_080872.1,677-695).
gaccataacctgatcatca

SEQ ID NO: 293615 - DNA, 19 bp, Homo sapiens
  siRNA target sequence for UNC5D (NM_080872.1,707-725).
ctctcggactcaggaaatt

SEQ ID NO: 293616 - DNA, 19 bp, Homo sapiens
  siRNA target sequence for UNC5D (NM_080872.1,1000-1018).
cagtccagagtgtgaacat

SEQ ID NO: 293617 - DNA, 19 bp, Homo sapiens
  siRNA target sequence for UNC5D (NM_080872.1,1002-1020).
gtccagagtgtgaacattt

SEQ ID NO: 293618 - DNA, 19 bp, Homo sapiens
  siRNA target sequence for UNC5D (NM_080872.1,1112-1130).
ctttgcatcctagataaaa

SEQ ID NO: 293619 - DNA, 19 bp, Homo sapiens
  siRNA target sequence for UNC5D (NM_080872.1,1170-1188).
ccagcgacattgctttgta

SEQ ID NO: 293620 - DNA, 19 bp, Homo sapiens
  siRNA target sequence for UNC5D (NM_080872.1,1271-1289).
ggcgtggacgtcattgact

SEQ ID NO: 293621 - DNA, 19 bp, Homo sapiens
  siRNA target sequence for UNC5D (NM_080872.1,1468-1486).
ccctttgtcggacatcaaa

SEQ ID NO: 293622 - DNA, 19 bp, Homo sapiens
  siRNA target sequence for UNC5D (NM_080872.1,1470-1488).
ctttgtcggacatcaaagt

SEQ ID NO: 293623 - DNA, 19 bp, Homo sapiens
  siRNA target sequence for UNC5D (NM_080872.1,1474-1492).
gtcggacatcaaagtgaaa

SEQ ID NO: 293624 - DNA, 19 bp, Homo sapiens
  siRNA target sequence for UNC5D (NM_080872.1,1476-1494).
cggacatcaaagtgaaagt

SEQ ID NO: 293625 - DNA, 19 bp, Homo sapiens
  siRNA target sequence for UNC5D (NM_080872.1,1540-1558).
gtaccacggcaagaatcat

SEQ ID NO: 293626 - DNA, 19 bp, Homo sapiens
  siRNA target sequence for UNC5D (NM_080872.1,1700-1718).
cgcttagtaatgccaaata

SEQ ID NO: 293627 - DNA, 19 bp, Homo sapiens
  siRNA target sequence for UNC5D (NM_080872.1,1702-1720).
cttagtaatgccaaataca

SEQ ID NO: 293628 - DNA, 19 bp, Homo sapiens
  siRNA target sequence for UNC5D (NM_080872.1,1719-1737).
caggggtgagcttactcat

SEQ ID NO: 293629 - DNA, 19 bp, Homo sapiens
  siRNA target sequence for UNC5D (NM_080872.1,1854-1872).
gtggtcctccagacatgat

SEQ ID NO: 293630 - DNA, 19 bp, Homo sapiens
  siRNA target sequence for UNC5D (NM_080872.1,1920-1938).
gttctgagcattggaatat

SEQ ID NO: 293631 - DNA, 19 bp, Homo sapiens
  siRNA target sequence for UNC5D (NM_080872.1,1984-2002).
gtcagtggaagatgaatct

SEQ ID NO: 293632 - DNA, 19 bp, Homo sapiens
  siRNA target sequence for UNC5D (NM_080872.1,1988-2006).
gtggaagatgaatctacat

SEQ ID NO: 293633 - DNA, 19 bp, Homo sapiens
  siRNA target sequence for UNC5D (NM_080872.1,2269-2287).
caaagggaatacctttagt

SEQ ID NO: 293634 - DNA, 19 bp, Homo sapiens
  siRNA target sequence for UNC5D (NM_080872.1,2492-2510).
ctccaagtgcagacatcaa

SEQ ID NO: 293635 - DNA, 19 bp, Homo sapiens
  siRNA target sequence for UNC5D (NM_080872.1,2525-2543).
cgagaaaccatcactttct

SEQ ID NO: 293636 - DNA, 19 bp, Homo sapiens
  siRNA target sequence for UNC5D (NM_080872.1,2608-2626).
catcagacagcggatttgt

SEQ ID NO: 293637 - DNA, 19 bp, Homo sapiens
  siRNA target sequence for UNC5D (NM_080872.1,2617-2635).
gcggatttgtgctacattt

SEQ ID NO: 293638 - DNA, 19 bp, Homo sapiens
  siRNA target sequence for UNC5D (NM_080872.1,2827-2845).
cacgaaactctcaaacatt

SEQ ID NO: 293639 - DNA, 19 bp, Homo sapiens
  siRNA target sequence for UNC5D (NM_080872.1,2864-2882).
gaagccgacttcaactaca

SEQ ID NO: 293640 - DNA, 19 bp, Homo sapiens
  siRNA target sequence for UNC5D (NM_080872.1,2875-2893).
caactacagcaggcaaaat

SEQ ID NO: 293641 - DNA, 19 bp, Homo sapiens
  siRNA target sequence for UNC5D (NM_080872.1,2878-2896).
ctacagcaggcaaaatgga

SEQ ID NO: 293642 - DNA, 19 bp, Homo sapiens
  siRNA target sequence for WFDC10A (NM_080753.2,191-209).
ccagcagcagcctaaacta

SEQ ID NO: 293643 - DNA, 19 bp, Homo sapiens
  siRNA target sequence for WFDC10A (NM_080753.2,192-210).
cagcagcagcctaaactat

SEQ ID NO: 293644 - DNA, 19 bp, Homo sapiens
  siRNA target sequence for WFDC10A (NM_080753.2,197-215).
gcagcctaaactatatcta

SEQ ID NO: 293645 - DNA, 19 bp, Homo sapiens
  siRNA target sequence for WFDC10A (NM_080753.2,198-216).
cagcctaaactatatctat

SEQ ID NO: 293646 - DNA, 19 bp, Homo sapiens
  siRNA target sequence for WFDC10A (NM_080753.2,207-225).
ctatatctatgcaaacact

SEQ ID NO: 293647 - DNA, 19 bp, Homo sapiens
  siRNA target sequence for WFDC10A (NM_080753.2,241-259).
gagattgtcaagcaaataa

SEQ ID NO: 293648 - DNA, 19 bp, Homo sapiens
  siRNA target sequence for WFDC12 (NM_080869.1,86-104).
gagttaaagagggtataga

SEQ ID NO: 293649 - DNA, 19 bp, Homo sapiens
  siRNA target sequence for WFDC12 (NM_080869.1,260-278).
gaaacaaggatgaagatgt

SEQ ID NO: 293650 - DNA, 19 bp, Homo sapiens
  siRNA target sequence for WFDC2 (NM_006103.2,272-290).
ccccaggtgaacattaact

SEQ ID NO: 293651 - DNA, 19 bp, Homo sapiens
  siRNA target sequence for WFDC2 (NM_006103.2,273-291).
cccaggtgaacattaactt

SEQ ID NO: 293652 - DNA, 19 bp, Homo sapiens
  siRNA target sequence for WFDC2 (NM_006103.2,274-292).
ccaggtgaacattaacttt

SEQ ID NO: 293653 - DNA, 19 bp, Homo sapiens
  siRNA target sequence for WFDC2 (NM_006103.2,337-355).
gtgtcctggccagatgaaa

SEQ ID NO: 293654 - DNA, 19 bp, Homo sapiens
  siRNA target sequence for WFDC2 (NM_080735.1,30-48).
gctgcaggtacaagttaat

SEQ ID NO: 293655 - DNA, 19 bp, Homo sapiens
  siRNA target sequence for WFDC3 (NM_080614.1,211-229).
ctgtgccagggtgatgaat

SEQ ID NO: 293656 - DNA, 19 bp, Homo sapiens
  siRNA target sequence for WFDC3 (NM_080614.1,370-388).
ccaggtgtaaagaaatgct

SEQ ID NO: 293657 - DNA, 19 bp, Homo sapiens
  siRNA target sequence for WFDC3 (NM_080614.1,411-429).
ctgtgtagtcccaatctct

SEQ ID NO: 293658 - DNA, 19 bp, Homo sapiens
  siRNA target sequence for WFDC3 (NM_080614.1,413-431).
gtgtagtcccaatctctaa

SEQ ID NO: 293659 - DNA, 19 bp, Homo sapiens
  siRNA target sequence for WFDC3 (NM_080614.1,510-528).
ctgtccccaggggcataaa

SEQ ID NO: 293660 - DNA, 19 bp, Homo sapiens
  siRNA target sequence for WFDC3 (NM_080614.1,514-532).
ccccaggggcataaatgct

SEQ ID NO: 293661 - DNA, 19 bp, Homo sapiens
  siRNA target sequence for WFDC3 (NM_080614.1,584-602).
gcggtgattgtccaaaagt

SEQ ID NO: 293662 - DNA, 19 bp, Homo sapiens
  siRNA target sequence for WFDC3 (NM_080614.1,585-603).
cggtgattgtccaaaagtt

SEQ ID NO: 293663 - DNA, 19 bp, Homo sapiens
  siRNA target sequence for WFDC3 (NM_080614.1,587-605).
gtgattgtccaaaagttct

SEQ ID NO: 293664 - DNA, 19 bp, Homo sapiens
  siRNA target sequence for WFDC3 (NM_080614.1,744-762).
gaggtctgattccgaatta

SEQ ID NO: 293665 - DNA, 19 bp, Homo sapiens
  siRNA target sequence for WFDC3 (NM_080614.1,749-767).
ctgattccgaattagagat

SEQ ID NO: 293666 - DNA, 19 bp, Homo sapiens
  siRNA target sequence for WFDC5 (NM_145652.2,378-396).
cagactgctcgggcaaaaa

SEQ ID NO: 293667 - DNA, 19 bp, Homo sapiens
  siRNA target sequence for WFDC8 (NM_130896.1,82-100).
gtggactgtccgaactgaa

SEQ ID NO: 293668 - DNA, 19 bp, Homo sapiens
  siRNA target sequence for WFDC8 (NM_130896.1,224-242).
gggttatgtcccaaagaga

SEQ ID NO: 293669 - DNA, 19 bp, Homo sapiens
  siRNA target sequence for WFDC8 (NM_130896.1,269-287).
gactcatgtaacacagatt

SEQ ID NO: 293670 - DNA, 19 bp, Homo sapiens
  siRNA target sequence for WFDC8 (NM_130896.1,339-357).
gcatggatccctttcaaga

SEQ ID NO: 293671 - DNA, 19 bp, Homo sapiens
  siRNA target sequence for WFDC8 (NM_130896.1,374-392).
gtgaggcatggaaactgta

SEQ ID NO: 293672 - DNA, 19 bp, Homo sapiens
  siRNA target sequence for WFDC8 (NM_130896.1,400-418).
ggcacagcgctggcatttt

SEQ ID NO: 293673 - DNA, 19 bp, Homo sapiens
  siRNA target sequence for WFDC8 (NM_130896.1,402-420).
cacagcgctggcattttga

SEQ ID NO: 293674 - DNA, 19 bp, Homo sapiens
  siRNA target sequence for WFDC8 (NM_130896.1,502-520).
cagaacggcctgcatgtta

SEQ ID NO: 293675 - DNA, 19 bp, Homo sapiens
  siRNA target sequence for WFDC8 (NM_130896.1,504-522).
gaacggcctgcatgttaat

SEQ ID NO: 293676 - DNA, 19 bp, Homo sapiens
  siRNA target sequence for WFDC8 (NM_130896.1,507-525).
cggcctgcatgttaattgt

SEQ ID NO: 293677 - DNA, 19 bp, Homo sapiens
  siRNA target sequence for WFDC8 (NM_130896.1,508-526).
ggcctgcatgttaattgtt

SEQ ID NO: 293678 - DNA, 19 bp, Homo sapiens
  siRNA target sequence for WFDC8 (NM_130896.1,509-527).
gcctgcatgttaattgtta

SEQ ID NO: 293679 - DNA, 19 bp, Homo sapiens
  siRNA target sequence for WFDC8 (NM_130896.1,568-586).
ggagtgtccaccttcatgt

SEQ ID NO: 293680 - DNA, 19 bp, Homo sapiens
  siRNA target sequence for WFDC8 (NM_130896.1,607-625).
ccagacagacaaatgttgt

SEQ ID NO: 293681 - DNA, 19 bp, Homo sapiens
  siRNA target sequence for WFDC8 (NM_130896.1,652-670).
cagggcctggacagtcaaa

SEQ ID NO: 293682 - DNA, 19 bp, Homo sapiens
  siRNA target sequence for WFDC8 (NM_130896.1,654-672).
gggcctggacagtcaaaaa

SEQ ID NO: 293683 - DNA, 19 bp, Homo sapiens
  siRNA target sequence for WFDC8 (NM_130896.1,660-678).
ggacagtcaaaaaaggttt

SEQ ID NO: 293684 - DNA, 19 bp, Homo sapiens
  siRNA target sequence for WFDC8 (NM_130896.1,683-701).
ccacgcaagcccttgctat

SEQ ID NO: 293685 - DNA, 19 bp, Homo sapiens
  siRNA target sequence for AHSG (NM_001622.1,170-188).
ctctggtggctatagacta

SEQ ID NO: 293686 - DNA, 19 bp, Homo sapiens
  siRNA target sequence for AHSG (NM_001622.1,175-193).
gtggctatagactacatca

SEQ ID NO: 293687 - DNA, 19 bp, Homo sapiens
  siRNA target sequence for AHSG (NM_001622.1,177-195).
ggctatagactacatcaat

SEQ ID NO: 293688 - DNA, 19 bp, Homo sapiens
  siRNA target sequence for AHSG (NM_001622.1,179-197).
ctatagactacatcaatca

SEQ ID NO: 293689 - DNA, 19 bp, Homo sapiens
  siRNA target sequence for AHSG (NM_001622.1,222-240).
caccttgaaccagattgat

SEQ ID NO: 293690 - DNA, 19 bp, Homo sapiens
  siRNA target sequence for AHSG (NM_001622.1,225-243).
cttgaaccagattgatgaa

SEQ ID NO: 293691 - DNA, 19 bp, Homo sapiens
  siRNA target sequence for AHSG (NM_001622.1,376-394).
gtcgaaggagactgtgatt

SEQ ID NO: 293692 - DNA, 19 bp, Homo sapiens
  siRNA target sequence for AHSG (NM_001622.1,416-434).
gcaagttttccgtggtata

SEQ ID NO: 293693 - DNA, 19 bp, Homo sapiens
  siRNA target sequence for AHSG (NM_001622.1,426-444).
cgtggtatacgcaaaatgt

SEQ ID NO: 293694 - DNA, 19 bp, Homo sapiens
  siRNA target sequence for AHSG (NM_001622.1,429-447).
ggtatacgcaaaatgtgat

SEQ ID NO: 293695 - DNA, 19 bp, Homo sapiens
  siRNA target sequence for AHSG (NM_001622.1,570-588).
gaacaacggctccaatttt

SEQ ID NO: 293696 - DNA, 19 bp, Homo sapiens
  siRNA target sequence for AHSG (NM_001622.1,665-683).
ctgactgtgttgctaaaga

SEQ ID NO: 293697 - DNA, 19 bp, Homo sapiens
  siRNA target sequence for AHSG (NM_001622.1,708-726).
cctgctggcagaaaagcaa

SEQ ID NO: 293698 - DNA, 19 bp, Homo sapiens
  siRNA target sequence for AHSG (NM_001622.1,709-727).
ctgctggcagaaaagcaat

SEQ ID NO: 293699 - DNA, 19 bp, Homo sapiens
  siRNA target sequence for AHSG (NM_001622.1,1127-1145).
ggaggatcagacacttcaa

SEQ ID NO: 293700 - DNA, 19 bp, Homo sapiens
  siRNA target sequence for BIRC4 (NM_001167.2,269-287).
ggcacgagcagggtttctt

SEQ ID NO: 293701 - DNA, 19 bp, Homo sapiens
  siRNA target sequence for BIRC4 (NM_001167.2,270-288).
gcacgagcagggtttcttt

SEQ ID NO: 293702 - DNA, 19 bp, Homo sapiens
  siRNA target sequence for BIRC4 (NM_001167.2,273-291).
cgagcagggtttctttata

SEQ ID NO: 293703 - DNA, 19 bp, Homo sapiens
  siRNA target sequence for BIRC4 (NM_001167.2,303-321).
gataccgtgcggtgcttta

SEQ ID NO: 293704 - DNA, 19 bp, Homo sapiens
  siRNA target sequence for BIRC4 (NM_001167.2,308-326).
cgtgcggtgctttagttgt

SEQ ID NO: 293705 - DNA, 19 bp, Homo sapiens
  siRNA target sequence for BIRC4 (NM_001167.2,311-329).
gcggtgctttagttgtcat

SEQ ID NO: 293706 - DNA, 19 bp, Homo sapiens
  siRNA target sequence for BIRC4 (NM_001167.2,327-345).
catgcagctgtagatagat

SEQ ID NO: 293707 - DNA, 19 bp, Homo sapiens
  siRNA target sequence for BIRC4 (NM_001167.2,400-418).
gatttatcaacggctttta

SEQ ID NO: 293708 - DNA, 19 bp, Homo sapiens
  siRNA target sequence for BIRC4 (NM_001167.2,432-450).
gccacgcagtctacaaatt

SEQ ID NO: 293709 - DNA, 19 bp, Homo sapiens
  siRNA target sequence for BIRC4 (NM_001167.2,434-452).
cacgcagtctacaaattct

SEQ ID NO: 293710 - DNA, 19 bp, Homo sapiens
  siRNA target sequence for BIRC4 (NM_001167.2,461-479).
gaatggtcagtacaaagtt

SEQ ID NO: 293711 - DNA, 19 bp, Homo sapiens
  siRNA target sequence for BIRC4 (NM_001167.2,530-548).
gacacatgcagactatctt

SEQ ID NO: 293712 - DNA, 19 bp, Homo sapiens
  siRNA target sequence for BIRC4 (NM_001167.2,558-576).
gggcaggttgtagatatat

SEQ ID NO: 293713 - DNA, 19 bp, Homo sapiens
  siRNA target sequence for BIRC4 (NM_001167.2,570-588).
gatatatcagacaccatat

SEQ ID NO: 293714 - DNA, 19 bp, Homo sapiens
  siRNA target sequence for BIRC4 (NM_001167.2,593-611).
gaggaaccctgccatgtat

SEQ ID NO: 293715 - DNA, 19 bp, Homo sapiens
  siRNA target sequence for BIRC4 (NM_001167.2,596-614).
gaaccctgccatgtatagt

SEQ ID NO: 293716 - DNA, 19 bp, Homo sapiens
  siRNA target sequence for BIRC4 (NM_001167.2,662-680).
cctaaccccaagagagtta

SEQ ID NO: 293717 - DNA, 19 bp, Homo sapiens
  siRNA target sequence for BIRC4 (NM_001167.2,682-700).
caagtgctggactctacta

SEQ ID NO: 293718 - DNA, 19 bp, Homo sapiens
  siRNA target sequence for BIRC4 (NM_001167.2,695-713).
ctactacacaggtattggt

SEQ ID NO: 293719 - DNA, 19 bp, Homo sapiens
  siRNA target sequence for BIRC4 (NM_001167.2,825-843).
cggaatcttaatattcgaa

SEQ ID NO: 293720 - DNA, 19 bp, Homo sapiens
  siRNA target sequence for BIRC4 (NM_001167.2,924-942).
gaagcacggatctttactt

SEQ ID NO: 293721 - DNA, 19 bp, Homo sapiens
  siRNA target sequence for BIRC4 (NM_001167.2,1000-1018).
ctttaggtgaaggtgataa

SEQ ID NO: 293722 - DNA, 19 bp, Homo sapiens
  siRNA target sequence for BIRC4 (NM_001167.2,1008-1026).
gaaggtgataaagtaaagt

SEQ ID NO: 293723 - DNA, 19 bp, Homo sapiens
  siRNA target sequence for BIRC4 (NM_001167.2,1036-1054).
gtggaggagggctaactga

SEQ ID NO: 293724 - DNA, 19 bp, Homo sapiens
  siRNA target sequence for BIRC4 (NM_001167.2,1038-1056).
ggaggagggctaactgatt

SEQ ID NO: 293725 - DNA, 19 bp, Homo sapiens
  siRNA target sequence for BIRC4 (NM_001167.2,1042-1060).
gagggctaactgattggaa

SEQ ID NO: 293726 - DNA, 19 bp, Homo sapiens
  siRNA target sequence for BIRC4 (NM_001167.2,1185-1203).
gtaagaactactgagaaaa

SEQ ID NO: 293727 - DNA, 19 bp, Homo sapiens
  siRNA target sequence for BIRC4 (NM_001167.2,1210-1228).
cactaactagaagaattga

SEQ ID NO: 293728 - DNA, 19 bp, Homo sapiens
  siRNA target sequence for BIRC4 (NM_001167.2,1269-1287).
cgaatggggttcagtttca

SEQ ID NO: 293729 - DNA, 19 bp, Homo sapiens
  siRNA target sequence for BIRC4 (NM_001167.2,1414-1432).
cttcattacagaaagagat

SEQ ID NO: 293730 - DNA, 19 bp, Homo sapiens
  siRNA target sequence for BIRC4 (NM_001167.2,1424-1442).
gaaagagattagtactgaa

SEQ ID NO: 293731 - DNA, 19 bp, Homo sapiens
  siRNA target sequence for BIRC4 (NM_001167.2,1574-1592).
catgtgctacacagtcatt

SEQ ID NO: 293732 - DNA, 19 bp, Homo sapiens
  siRNA target sequence for BIRC4 (NM_001167.2,1579-1597).
gctacacagtcattacttt

SEQ ID NO: 293733 - DNA, 19 bp, Homo sapiens
  siRNA target sequence for BIRC4 (NM_001167.2,1587-1605).
gtcattactttcaagcaaa

SEQ ID NO: 293734 - DNA, 19 bp, Homo sapiens
  siRNA target sequence for BIRC5 (NM_001168.1,95-113).
gaccaccgcatctctacat

SEQ ID NO: 293735 - DNA, 19 bp, Homo sapiens
  siRNA target sequence for BIRC5 (NM_001168.1,101-119).
cgcatctctacattcaaga

SEQ ID NO: 293736 - DNA, 19 bp, Homo sapiens
  siRNA target sequence for BIRC5 (NM_001168.1,102-120).
gcatctctacattcaagaa

SEQ ID NO: 293737 - DNA, 19 bp, Homo sapiens
  siRNA target sequence for BIRC5 (NM_001168.1,263-281).
gaccccatagaggaacata

SEQ ID NO: 293738 - DNA, 19 bp, Homo sapiens
  siRNA target sequence for BIRC5 (NM_001168.1,265-283).
ccccatagaggaacataaa

SEQ ID NO: 293739 - DNA, 19 bp, Homo sapiens
  siRNA target sequence for BIRC5 (NM_001168.1,266-284).
cccatagaggaacataaaa

SEQ ID NO: 293740 - DNA, 19 bp, Homo sapiens
  siRNA target sequence for BIRC5 (NM_001168.1,292-310).
gtccggttgcgctttcctt

SEQ ID NO: 293741 - DNA, 19 bp, Homo sapiens
  siRNA target sequence for CAST (NM_001750.4,312-330).
cccaagcaggcatcagata

SEQ ID NO: 293742 - DNA, 19 bp, Homo sapiens
  siRNA target sequence for CAST (NM_001750.4,314-332).
caagcaggcatcagataca

SEQ ID NO: 293743 - DNA, 19 bp, Homo sapiens
  siRNA target sequence for CAST (NM_001750.4,322-340).
catcagatacaggaagtaa

SEQ ID NO: 293744 - DNA, 19 bp, Homo sapiens
  siRNA target sequence for CAST (NM_001750.4,337-355).
gtaacgatgctcacaataa

SEQ ID NO: 293745 - DNA, 19 bp, Homo sapiens
  siRNA target sequence for CAST (NM_001750.4,415-433).
ctaaaccacaagacatgat

SEQ ID NO: 293746 - DNA, 19 bp, Homo sapiens
  siRNA target sequence for CAST (NM_001750.4,449-467).
gagtgttgctggtatcact

SEQ ID NO: 293747 - DNA, 19 bp, Homo sapiens
  siRNA target sequence for CAST (NM_001750.4,456-474).
gctggtatcactgcaatat

SEQ ID NO: 293748 - DNA, 19 bp, Homo sapiens
  siRNA target sequence for CAST (NM_001750.4,479-497).
caagccgggtgacaagaaa

SEQ ID NO: 293749 - DNA, 19 bp, Homo sapiens
  siRNA target sequence for CAST (NM_001750.4,523-541).
ctgtgccagttgaatctaa

SEQ ID NO: 293750 - DNA, 19 bp, Homo sapiens
  siRNA target sequence for CAST (NM_001750.4,569-587).
catggatgctgctttggat

SEQ ID NO: 293751 - DNA, 19 bp, Homo sapiens
  siRNA target sequence for CAST (NM_001750.4,580-598).
ctttggatgacttaataga

SEQ ID NO: 293752 - DNA, 19 bp, Homo sapiens
  siRNA target sequence for CAST (NM_001750.4,590-608).
cttaatagatactttagga

SEQ ID NO: 293753 - DNA, 19 bp, Homo sapiens
  siRNA target sequence for CAST (NM_001750.4,652-670).
cagaagtttcagatccaat

SEQ ID NO: 293754 - DNA, 19 bp, Homo sapiens
  siRNA target sequence for CAST (NM_001750.4,657-675).
gtttcagatccaatgagtt

SEQ ID NO: 293755 - DNA, 19 bp, Homo sapiens
  siRNA target sequence for CAST (NM_001750.4,708-726).
gtcacaattcctccaaaat

SEQ ID NO: 293756 - DNA, 19 bp, Homo sapiens
  siRNA target sequence for CAST (NM_001750.4,804-822).
gctatagacgccttgtcat

SEQ ID NO: 293757 - DNA, 19 bp, Homo sapiens
  siRNA target sequence for CAST (NM_001750.4,875-893).
ggaatctacagaagtttta

SEQ ID NO: 293758 - DNA, 19 bp, Homo sapiens
  siRNA target sequence for CAST (NM_001750.4,876-894).
gaatctacagaagttttaa

SEQ ID NO: 293759 - DNA, 19 bp, Homo sapiens
  siRNA target sequence for CAST (NM_001750.4,962-980).
ggatacaatgagtgatcaa

SEQ ID NO: 293760 - DNA, 19 bp, Homo sapiens
  siRNA target sequence for CAST (NM_001750.4,1031-1049).
gctcgacctccgctcaatt

SEQ ID NO: 293761 - DNA, 19 bp, Homo sapiens
  siRNA target sequence for CAST (NM_001750.4,1032-1050).
ctcgacctccgctcaatta

SEQ ID NO: 293762 - DNA, 19 bp, Homo sapiens
  siRNA target sequence for CAST (NM_001750.4,1037-1055).
cctccgctcaattaaggaa

SEQ ID NO: 293763 - DNA, 19 bp, Homo sapiens
  siRNA target sequence for CAST (NM_001750.4,1056-1074).
gtcgatgaggcaaaagcta

SEQ ID NO: 293764 - DNA, 19 bp, Homo sapiens
  siRNA target sequence for CAST (NM_001750.4,1058-1076).
cgatgaggcaaaagctaaa

SEQ ID NO: 293765 - DNA, 19 bp, Homo sapiens
  siRNA target sequence for CAST (NM_001750.4,1118-1136).
cccatctgagtacagatta

SEQ ID NO: 293766 - DNA, 19 bp, Homo sapiens
  siRNA target sequence for CAST (NM_001750.4,1119-1137).
ccatctgagtacagattaa

SEQ ID NO: 293767 - DNA, 19 bp, Homo sapiens
  siRNA target sequence for CAST (NM_001750.4,1120-1138).
catctgagtacagattaaa

SEQ ID NO: 293768 - DNA, 19 bp, Homo sapiens
  siRNA target sequence for CAST (NM_001750.4,1191-1209).
cccaagcctcggagtgaat

SEQ ID NO: 293769 - DNA, 19 bp, Homo sapiens
  siRNA target sequence for CAST (NM_001750.4,1193-1211).
caagcctcggagtgaatca

SEQ ID NO: 293770 - DNA, 19 bp, Homo sapiens
  siRNA target sequence for CAST (NM_001750.4,1196-1214).
gcctcggagtgaatcagaa

SEQ ID NO: 293771 - DNA, 19 bp, Homo sapiens
  siRNA target sequence for CAST (NM_001750.4,1267-1285).
catctaagccaactgaaaa

SEQ ID NO: 293772 - DNA, 19 bp, Homo sapiens
  siRNA target sequence for CAST (NM_001750.4,1338-1356).
cggacctccatgtgtagta

SEQ ID NO: 293773 - DNA, 19 bp, Homo sapiens
  siRNA target sequence for CAST (NM_001750.4,1340-1358).
gacctccatgtgtagtata

SEQ ID NO: 293774 - DNA, 19 bp, Homo sapiens
  siRNA target sequence for CAST (NM_001750.4,1470-1488).
cctgtgatggataaagtca

SEQ ID NO: 293775 - DNA, 19 bp, Homo sapiens
  siRNA target sequence for CAST (NM_001750.4,1546-1564).
ctcctgattatagattaga

SEQ ID NO: 293776 - DNA, 19 bp, Homo sapiens
  siRNA target sequence for CAST (NM_001750.4,1598-1616).
gccaaaagagtctaaggaa

SEQ ID NO: 293777 - DNA, 19 bp, Homo sapiens
  siRNA target sequence for CAST (NM_001750.4,1624-1642).
cacccatgagtgaagactt

SEQ ID NO: 293778 - DNA, 19 bp, Homo sapiens
  siRNA target sequence for CAST (NM_001750.4,1670-1688).
ctctggtccacaaaatgct

SEQ ID NO: 293779 - DNA, 19 bp, Homo sapiens
  siRNA target sequence for CAST (NM_001750.4,1680-1698).
caaaatgcttcatctctta

SEQ ID NO: 293780 - DNA, 19 bp, Homo sapiens
  siRNA target sequence for CAST (NM_001750.4,1928-1946).
caagcttggagaaagagat

SEQ ID NO: 293781 - DNA, 19 bp, Homo sapiens
  siRNA target sequence for CAST (NM_001750.4,1969-1987).
gacatctcctggatgataa

SEQ ID NO: 293782 - DNA, 19 bp, Homo sapiens
  siRNA target sequence for CAST (NM_001750.4,2011-2029).
cacctacaaagaaatcaga

SEQ ID NO: 293783 - DNA, 19 bp, Homo sapiens
  siRNA target sequence for CAST (NM_001750.4,2178-2196).
ggaggtaaagcgaaggatt

SEQ ID NO: 293784 - DNA, 19 bp, Homo sapiens
  siRNA target sequence for CAST (NM_173060.1,165-183).
cagaaaccaaggctgtaaa

SEQ ID NO: 293785 - DNA, 19 bp, Homo sapiens
  siRNA target sequence for CAST (NM_173061.1,146-164).
ccacagtgtggcacgataa

SEQ ID NO: 293786 - DNA, 19 bp, Homo sapiens
  siRNA target sequence for CAST (NM_173061.1,155-173).
ggcacgataagctttgtga

SEQ ID NO: 293787 - DNA, 19 bp, Homo sapiens
  siRNA target sequence for CAST (NM_173061.1,191-209).
caagagaagcagttcgtat

SEQ ID NO: 293788 - DNA, 19 bp, Homo sapiens
  siRNA target sequence for CAST (NM_173061.1,194-212).
gagaagcagttcgtatctt

SEQ ID NO: 293789 - DNA, 19 bp, Homo sapiens
  siRNA target sequence for CST1 (NM_001898.2,267-285).
cgtccgctgcgggtactaa

SEQ ID NO: 293790 - DNA, 19 bp, Homo sapiens
  siRNA target sequence for CST11 (NM_080830.2,64-82).
gctcctgttggccattcta

SEQ ID NO: 293791 - DNA, 19 bp, Homo sapiens
  siRNA target sequence for CST11 (NM_080830.2,65-83).
ctcctgttggccattctat

SEQ ID NO: 293792 - DNA, 19 bp, Homo sapiens
  siRNA target sequence for CST11 (NM_080830.2,70-88).
gttggccattctattgact

SEQ ID NO: 293793 - DNA, 19 bp, Homo sapiens
  siRNA target sequence for CST11 (NM_080830.2,231-249).
ggatcttccgagtccttaa

SEQ ID NO: 293794 - DNA, 19 bp, Homo sapiens
  siRNA target sequence for CST11 (NM_080830.2,232-250).
gatcttccgagtccttaaa

SEQ ID NO: 293795 - DNA, 19 bp, Homo sapiens
  siRNA target sequence for CST11 (NM_080830.2,308-326).
cagtacaaaattttgaaca

SEQ ID NO: 293796 - DNA, 19 bp, Homo sapiens
  siRNA target sequence for CST3 (NM_000099.2,243-261).
cgtcggcgagtacaacaaa

SEQ ID NO: 293797 - DNA, 19 bp, Homo sapiens
  siRNA target sequence for CST4 (NM_001899.2,146-164).
cccaggtggcatctatgat

SEQ ID NO: 293798 - DNA, 19 bp, Homo sapiens
  siRNA target sequence for CST5 (NM_001900.2,166-184).
gtacaacaaggtcattaat

SEQ ID NO: 293799 - DNA, 19 bp, Homo sapiens
  siRNA target sequence for CST5 (NM_001900.2,245-263).
ggggtgaactactacttca

SEQ ID NO: 293800 - DNA, 19 bp, Homo sapiens
  siRNA target sequence for CST5 (NM_001900.2,246-264).
gggtgaactactacttcaa

SEQ ID NO: 293801 - DNA, 19 bp, Homo sapiens
  siRNA target sequence for CST5 (NM_001900.2,247-265).
ggtgaactactacttcaat

SEQ ID NO: 293802 - DNA, 19 bp, Homo sapiens
  siRNA target sequence for CST5 (NM_001900.2,388-406).
ggaggataaaatttccatt

SEQ ID NO: 293803 - DNA, 19 bp, Homo sapiens
  siRNA target sequence for CST6 (NM_001323.2,218-236).
ccgtggccagctacaacat

SEQ ID NO: 293804 - DNA, 19 bp, Homo sapiens
  siRNA target sequence for CST6 (NM_001323.2,262-280).
cgagacacgcacatcatca

SEQ ID NO: 293805 - DNA, 19 bp, Homo sapiens
  siRNA target sequence for CST7 (NM_003650.2,381-399).
gccaggatttcctaaaaca

SEQ ID NO: 293806 - DNA, 19 bp, Homo sapiens
  siRNA target sequence for CST7 (NM_003650.2,382-400).
ccaggatttcctaaaacaa

SEQ ID NO: 293807 - DNA, 19 bp, Homo sapiens
  siRNA target sequence for CST7 (NM_003650.2,383-401).
caggatttcctaaaacaat

SEQ ID NO: 293808 - DNA, 19 bp, Homo sapiens
  siRNA target sequence for CST7 (NM_003650.2,464-482).
gcacgaacgacatgttctt

SEQ ID NO: 293809 - DNA, 19 bp, Homo sapiens
  siRNA target sequence for CST7 (NM_003650.2,467-485).
cgaacgacatgttcttgtt

SEQ ID NO: 293810 - DNA, 19 bp, Homo sapiens
  siRNA target sequence for CST7 (NM_003650.2,503-521).
caagggccctagttcagat

SEQ ID NO: 293811 - DNA, 19 bp, Homo sapiens
  siRNA target sequence for CST7 (NM_003650.2,506-524).
gggccctagttcagatagt

SEQ ID NO: 293812 - DNA, 19 bp, Homo sapiens
  siRNA target sequence for CST7 (NM_003650.2,508-526).
gccctagttcagatagtga

SEQ ID NO: 293813 - DNA, 19 bp, Homo sapiens
  siRNA target sequence for CST7 (NM_003650.2,509-527).
ccctagttcagatagtgaa

SEQ ID NO: 293814 - DNA, 19 bp, Homo sapiens
  siRNA target sequence for CST8 (NM_005492.2,415-433).
gccaggaaagacccaaaaa

SEQ ID NO: 293815 - DNA, 19 bp, Homo sapiens
  siRNA target sequence for CST8 (NM_005492.2,536-554).
gcgaggacaagtatgtctt

SEQ ID NO: 293816 - DNA, 19 bp, Homo sapiens
  siRNA target sequence for CST8 (NM_005492.2,582-600).
gcttcaggtcacaaatctt

SEQ ID NO: 293817 - DNA, 19 bp, Homo sapiens
  siRNA target sequence for CST8 (NM_005492.2,648-666).
gcctttaagcactaatgaa

SEQ ID NO: 293818 - DNA, 19 bp, Homo sapiens
  siRNA target sequence for CST8 (NM_005492.2,649-667).
cctttaagcactaatgaaa

SEQ ID NO: 293819 - DNA, 19 bp, Homo sapiens
  siRNA target sequence for CST8 (NM_005492.2,650-668).
ctttaagcactaatgaaat

SEQ ID NO: 293820 - DNA, 19 bp, Homo sapiens
  siRNA target sequence for CST8 (NM_005492.2,736-754).
ccctggaatggtgaattca

SEQ ID NO: 293821 - DNA, 19 bp, Homo sapiens
  siRNA target sequence for CST9L (NM_080610.1,304-322).
cccagatcctgctgatcta

SEQ ID NO: 293822 - DNA, 19 bp, Homo sapiens
  siRNA target sequence for CST9L (NM_080610.1,352-370).
gtgatgaacacaatgtcat

SEQ ID NO: 293823 - DNA, 19 bp, Homo sapiens
  siRNA target sequence for CST9L (NM_080610.1,448-466).
gactggggcacatcttgaa

SEQ ID NO: 293824 - DNA, 19 bp, Homo sapiens
  siRNA target sequence for CST9L (NM_080610.1,453-471).
gggcacatcttgaattcct

SEQ ID NO: 293825 - DNA, 19 bp, Homo sapiens
  siRNA target sequence for CST9L (NM_080610.1,488-506).
gtccaagactgtattctca

SEQ ID NO: 293826 - DNA, 19 bp, Homo sapiens
  siRNA target sequence for CSTA (NM_005213.2,205-223).
ggaacaaattactacatta

SEQ ID NO: 293827 - DNA, 19 bp, Homo sapiens
  siRNA target sequence for CSTA (NM_005213.2,209-227).
caaattactacattaaggt

SEQ ID NO: 293828 - DNA, 19 bp, Homo sapiens
  siRNA target sequence for CSTA (NM_005213.2,229-247).
cgagcaggtgataataaat

SEQ ID NO: 293829 - DNA, 19 bp, Homo sapiens
  siRNA target sequence for CSTA (NM_005213.2,232-250).
gcaggtgataataaatata

SEQ ID NO: 293830 - DNA, 19 bp, Homo sapiens
  siRNA target sequence for CSTA (NM_005213.2,272-290).
gtcttcccggacaaaatga

SEQ ID NO: 293831 - DNA, 19 bp, Homo sapiens
  siRNA target sequence for CSTB (NM_000100.2,257-275).
gggacaaactacttcatca

SEQ ID NO: 293832 - DNA, 19 bp, Homo sapiens
  siRNA target sequence for CSTB (NM_000100.2,305-323).
cacctgcgagtgttccaat

SEQ ID NO: 293833 - DNA, 19 bp, Homo sapiens
  siRNA target sequence for CSTB (NM_000100.2,344-362).
cccttgaccttatctaact

SEQ ID NO: 293834 - DNA, 19 bp, Homo sapiens
  siRNA target sequence for CSTB (NM_000100.2,383-401).
catgatgagctgacctatt

SEQ ID NO: 293835 - DNA, 19 bp, Homo sapiens
  siRNA target sequence for ICEBERG (NM_021571.2,7-25).
gaccaactcttgcgtaaaa

SEQ ID NO: 293836 - DNA, 19 bp, Homo sapiens
  siRNA target sequence for ICEBERG (NM_021571.2,10-28).
caactcttgcgtaaaaaga

SEQ ID NO: 293837 - DNA, 19 bp, Homo sapiens
  siRNA target sequence for ICEBERG (NM_021571.2,18-36).
gcgtaaaaagagaagaatt

SEQ ID NO: 293838 - DNA, 19 bp, Homo sapiens
  siRNA target sequence for ICEBERG (NM_021571.2,72-90).
cttgctggattgcctatta

SEQ ID NO: 293839 - DNA, 19 bp, Homo sapiens
  siRNA target sequence for ICEBERG (NM_021571.2,85-103).
ctattagaggatgaagtta

SEQ ID NO: 293840 - DNA, 19 bp, Homo sapiens
  siRNA target sequence for KNG (NM_000893.2,244-262).
ccaggctgctactaagttt

SEQ ID NO: 293841 - DNA, 19 bp, Homo sapiens
  siRNA target sequence for KNG (NM_000893.2,245-263).
caggctgctactaagttta

SEQ ID NO: 293842 - DNA, 19 bp, Homo sapiens
  siRNA target sequence for KNG (NM_000893.2,274-292).
cacagtccgaggaaattga

SEQ ID NO: 293843 - DNA, 19 bp, Homo sapiens
  siRNA target sequence for KNG (NM_000893.2,276-294).
cagtccgaggaaattgact

SEQ ID NO: 293844 - DNA, 19 bp, Homo sapiens
  siRNA target sequence for KNG (NM_000893.2,295-313).
gcaatgacaaggatttatt

SEQ ID NO: 293845 - DNA, 19 bp, Homo sapiens
  siRNA target sequence for KNG (NM_000893.2,415-433).
ctgacacgttttattcctt

SEQ ID NO: 293846 - DNA, 19 bp, Homo sapiens
  siRNA target sequence for KNG (NM_000893.2,421-439).
cgttttattccttcaagta

SEQ ID NO: 293847 - DNA, 19 bp, Homo sapiens
  siRNA target sequence for KNG (NM_000893.2,453-471).
ggggattgtcctgttcaaa

SEQ ID NO: 293848 - DNA, 19 bp, Homo sapiens
  siRNA target sequence for KNG (NM_000893.2,641-659).
cggctgtgtgcatcctata

SEQ ID NO: 293849 - DNA, 19 bp, Homo sapiens
  siRNA target sequence for KNG (NM_000893.2,644-662).
ctgtgtgcatcctatatca

SEQ ID NO: 293850 - DNA, 19 bp, Homo sapiens
  siRNA target sequence for KNG (NM_000893.2,690-708).
ctgagacacggcattcagt

SEQ ID NO: 293851 - DNA, 19 bp, Homo sapiens
  siRNA target sequence for KNG (NM_000893.2,694-712).
gacacggcattcagtactt

SEQ ID NO: 293852 - DNA, 19 bp, Homo sapiens
  siRNA target sequence for KNG (NM_000893.2,696-714).
cacggcattcagtacttta

SEQ ID NO: 293853 - DNA, 19 bp, Homo sapiens
  siRNA target sequence for KNG (NM_000893.2,699-717).
ggcattcagtactttaaca

SEQ ID NO: 293854 - DNA, 19 bp, Homo sapiens
  siRNA target sequence for KNG (NM_000893.2,737-755).
cctcttcatgcttaatgaa

SEQ ID NO: 293855 - DNA, 19 bp, Homo sapiens
  siRNA target sequence for KNG (NM_000893.2,786-804).
ggattgaactttcgaatta

SEQ ID NO: 293856 - DNA, 19 bp, Homo sapiens
  siRNA target sequence for KNG (NM_000893.2,809-827).
ctcaattgtgcaaacgaat

SEQ ID NO: 293857 - DNA, 19 bp, Homo sapiens
  siRNA target sequence for KNG (NM_000893.2,818-836).
gcaaacgaattgttccaaa

SEQ ID NO: 293858 - DNA, 19 bp, Homo sapiens
  siRNA target sequence for KNG (NM_000893.2,823-841).
cgaattgttccaaagagaa

SEQ ID NO: 293859 - DNA, 19 bp, Homo sapiens
  siRNA target sequence for KNG (NM_000893.2,863-881).
ctgcaagtccctttggaat

SEQ ID NO: 293860 - DNA, 19 bp, Homo sapiens
  siRNA target sequence for KNG (NM_000893.2,889-907).
ccggtgaatgtacagataa

SEQ ID NO: 293861 - DNA, 19 bp, Homo sapiens
  siRNA target sequence for KNG (NM_000893.2,898-916).
gtacagataatgcatacat

SEQ ID NO: 293862 - DNA, 19 bp, Homo sapiens
  siRNA target sequence for KNG (NM_000893.2,903-921).
gataatgcatacatcgata

SEQ ID NO: 293863 - DNA, 19 bp, Homo sapiens
  siRNA target sequence for KNG (NM_000893.2,917-935).
cgatattcagctacgaatt

SEQ ID NO: 293864 - DNA, 19 bp, Homo sapiens
  siRNA target sequence for KNG (NM_000893.2,984-1002).
caaccacctaccaagattt

SEQ ID NO: 293865 - DNA, 19 bp, Homo sapiens
  siRNA target sequence for KNG (NM_000893.2,1007-1025).
gggctgccccagagatata

SEQ ID NO: 293866 - DNA, 19 bp, Homo sapiens
  siRNA target sequence for KNG (NM_000893.2,1084-1102).
cagagaataacgcaacttt

SEQ ID NO: 293867 - DNA, 19 bp, Homo sapiens
  siRNA target sequence for KNG (NM_000893.2,1088-1106).
gaataacgcaactttctat

SEQ ID NO: 293868 - DNA, 19 bp, Homo sapiens
  siRNA target sequence for KNG (NM_000893.2,1145-1163).
ggtggctggcaagaaatat

SEQ ID NO: 293869 - DNA, 19 bp, Homo sapiens
  siRNA target sequence for KNG (NM_000893.2,1146-1164).
gtggctggcaagaaatatt

SEQ ID NO: 293870 - DNA, 19 bp, Homo sapiens
  siRNA target sequence for KNG (NM_000893.2,1249-1267).
gccaaagcctagattgcaa

SEQ ID NO: 293871 - DNA, 19 bp, Homo sapiens
  siRNA target sequence for KNG (NM_000893.2,1260-1278).
gattgcaacgctgaagttt

SEQ ID NO: 293872 - DNA, 19 bp, Homo sapiens
  siRNA target sequence for KNG (NM_000893.2,1264-1282).
gcaacgctgaagtttatgt

SEQ ID NO: 293873 - DNA, 19 bp, Homo sapiens
  siRNA target sequence for KNG (NM_000893.2,1321-1339).
gtcaaccactgggaatgat

SEQ ID NO: 293874 - DNA, 19 bp, Homo sapiens
  siRNA target sequence for KNG (NM_000893.2,1323-1341).
caaccactgggaatgatct

SEQ ID NO: 293875 - DNA, 19 bp, Homo sapiens
  siRNA target sequence for KNG (NM_000893.2,1384-1402).
cacgaataggggaaataaa

SEQ ID NO: 293876 - DNA, 19 bp, Homo sapiens
  siRNA target sequence for TIMP2 (NM_003255.2,402-420).
ccgcaacaggcgttttgca

SEQ ID NO: 293877 - DNA, 19 bp, Homo sapiens
  siRNA target sequence for TIMP2 (NM_003255.2,404-422).
gcaacaggcgttttgcaat

SEQ ID NO: 293878 - DNA, 19 bp, Homo sapiens
  siRNA target sequence for TIMP2 (NM_003255.2,418-436).
gcaatgcagatgtagtgat

SEQ ID NO: 293879 - DNA, 19 bp, Homo sapiens
  siRNA target sequence for TIMP2 (NM_003255.2,505-523).
ggatccagtatgagatcaa

SEQ ID NO: 293880 - DNA, 19 bp, Homo sapiens
  siRNA target sequence for TIMP2 (NM_003255.2,555-573).
gatatagagtttatctaca

SEQ ID NO: 293881 - DNA, 19 bp, Homo sapiens
  siRNA target sequence for TIMP4 (NM_003256.1,185-203).
ccactcggcacttgtgatt

SEQ ID NO: 293882 - DNA, 19 bp, Homo sapiens
  siRNA target sequence for TIMP4 (NM_003256.1,198-216).
gtgattcgggccaaaatct

SEQ ID NO: 293883 - DNA, 19 bp, Homo sapiens
  siRNA target sequence for TIMP4 (NM_003256.1,248-266).
ccctgctgacactgaaaaa

SEQ ID NO: 293884 - DNA, 19 bp, Homo sapiens
  siRNA target sequence for TIMP4 (NM_003256.1,269-287).
gctccggtatgaaatcaaa

SEQ ID NO: 293885 - DNA, 19 bp, Homo sapiens
  siRNA target sequence for TIMP4 (NM_003256.1,273-291).
cggtatgaaatcaaacaga

SEQ ID NO: 293886 - DNA, 19 bp, Homo sapiens
  siRNA target sequence for TIMP4 (NM_003256.1,323-341).
ggatgttcagtatatctat

SEQ ID NO: 293887 - DNA, 19 bp, Homo sapiens
  siRNA target sequence for TIMP4 (NM_003256.1,324-342).
gatgttcagtatatctata

SEQ ID NO: 293888 - DNA, 19 bp, Homo sapiens
  siRNA target sequence for TIMP4 (NM_003256.1,362-380).
ctgtggtgtgaaactagaa

SEQ ID NO: 293889 - DNA, 19 bp, Homo sapiens
  siRNA target sequence for TIMP4 (NM_003256.1,634-652).
ctcagcattatgtctgtat

SEQ ID NO: 293890 - DNA, 19 bp, Homo sapiens
  siRNA target sequence for CD109 (NM_133493.1,225-243).
ccggaggaaatgtgactat

SEQ ID NO: 293891 - DNA, 19 bp, Homo sapiens
  siRNA target sequence for CD109 (NM_133493.1,226-244).
cggaggaaatgtgactatt

SEQ ID NO: 293892 - DNA, 19 bp, Homo sapiens
  siRNA target sequence for CD109 (NM_133493.1,363-381).
cttttaagacacttactct

SEQ ID NO: 293893 - DNA, 19 bp, Homo sapiens
  siRNA target sequence for CD109 (NM_133493.1,437-455).
cgtacccaggatgagattt

SEQ ID NO: 293894 - DNA, 19 bp, Homo sapiens
  siRNA target sequence for CD109 (NM_133493.1,468-486).
gtacccgcttatcatttga

SEQ ID NO: 293895 - DNA, 19 bp, Homo sapiens
  siRNA target sequence for CD109 (NM_133493.1,493-511).
gagaatatctgtcttcatt

SEQ ID NO: 293896 - DNA, 19 bp, Homo sapiens
  siRNA target sequence for CD109 (NM_133493.1,501-519).
ctgtcttcattcaaacaga

SEQ ID NO: 293897 - DNA, 19 bp, Homo sapiens
  siRNA target sequence for CD109 (NM_133493.1,516-534).
cagacaaggccttatacaa

SEQ ID NO: 293898 - DNA, 19 bp, Homo sapiens
  siRNA target sequence for CD109 (NM_133493.1,537-555).
caaagcaagaagtgaagtt

SEQ ID NO: 293899 - DNA, 19 bp, Homo sapiens
  siRNA target sequence for CD109 (NM_133493.1,548-566).
gtgaagtttcgcattgtta

SEQ ID NO: 293900 - DNA, 19 bp, Homo sapiens
  siRNA target sequence for CD109 (NM_133493.1,550-568).
gaagtttcgcattgttaca

SEQ ID NO: 293901 - DNA, 19 bp, Homo sapiens
  siRNA target sequence for CD109 (NM_133493.1,563-581).
gttacactcttctcagatt

SEQ ID NO: 293902 - DNA, 19 bp, Homo sapiens
  siRNA target sequence for CD109 (NM_133493.1,586-604).
gccttacaaaacctcttta

SEQ ID NO: 293903 - DNA, 19 bp, Homo sapiens
  siRNA target sequence for CD109 (NM_133493.1,613-631).
cattaaggaccccaaatca

SEQ ID NO: 293904 - DNA, 19 bp, Homo sapiens
  siRNA target sequence for CD109 (NM_133493.1,620-638).
gaccccaaatcaaatttga

SEQ ID NO: 293905 - DNA, 19 bp, Homo sapiens
  siRNA target sequence for CD109 (NM_133493.1,646-664).
gtggttgtcacaacaaagt

SEQ ID NO: 293906 - DNA, 19 bp, Homo sapiens
  siRNA target sequence for CD109 (NM_133493.1,648-666).
ggttgtcacaacaaagtga

SEQ ID NO: 293907 - DNA, 19 bp, Homo sapiens
  siRNA target sequence for CD109 (NM_133493.1,652-670).
gtcacaacaaagtgatctt

SEQ ID NO: 293908 - DNA, 19 bp, Homo sapiens
  siRNA target sequence for CD109 (NM_133493.1,671-689).
ggagtcatttccaaaactt

SEQ ID NO: 293909 - DNA, 19 bp, Homo sapiens
  siRNA target sequence for CD109 (NM_133493.1,717-735).
gtgactggtctattcaagt

SEQ ID NO: 293910 - DNA, 19 bp, Homo sapiens
  siRNA target sequence for CD109 (NM_133493.1,807-825).
ctttgcagacaccattata

SEQ ID NO: 293911 - DNA, 19 bp, Homo sapiens
  siRNA target sequence for CD109 (NM_133493.1,811-829).
gcagacaccattatattgt

SEQ ID NO: 293912 - DNA, 19 bp, Homo sapiens
  siRNA target sequence for CD109 (NM_133493.1,814-832).
gacaccattatattgttct

SEQ ID NO: 293913 - DNA, 19 bp, Homo sapiens
  siRNA target sequence for CD109 (NM_133493.1,819-837).
cattatattgttctatgaa

SEQ ID NO: 293914 - DNA, 19 bp, Homo sapiens
  siRNA target sequence for CD109 (NM_133493.1,859-877).
catcacggcaaagtataca

SEQ ID NO: 293915 - DNA, 19 bp, Homo sapiens
  siRNA target sequence for CD109 (NM_133493.1,862-880).
cacggcaaagtatacatat

SEQ ID NO: 293916 - DNA, 19 bp, Homo sapiens
  siRNA target sequence for CD109 (NM_133493.1,896-914).
ggagacgtaacgcttacat

SEQ ID NO: 293917 - DNA, 19 bp, Homo sapiens
  siRNA target sequence for CD109 (NM_133493.1,897-915).
gagacgtaacgcttacatt

SEQ ID NO: 293918 - DNA, 19 bp, Homo sapiens
  siRNA target sequence for CD109 (NM_133493.1,899-917).
gacgtaacgcttacatttt

SEQ ID NO: 293919 - DNA, 19 bp, Homo sapiens
  siRNA target sequence for CD109 (NM_133493.1,901-919).
cgtaacgcttacattttta

SEQ ID NO: 293920 - DNA, 19 bp, Homo sapiens
  siRNA target sequence for CD109 (NM_133493.1,974-992).
ggatctgcaaacttctctt

SEQ ID NO: 293921 - DNA, 19 bp, Homo sapiens
  siRNA target sequence for CD109 (NM_133493.1,975-993).
gatctgcaaacttctcttt

SEQ ID NO: 293922 - DNA, 19 bp, Homo sapiens
  siRNA target sequence for CD109 (NM_133493.1,981-999).
caaacttctcttttaatga

SEQ ID NO: 293923 - DNA, 19 bp, Homo sapiens
  siRNA target sequence for CD109 (NM_133493.1,1043-1061).
gaatacctggatctatctt

SEQ ID NO: 293924 - DNA, 19 bp, Homo sapiens
  siRNA target sequence for CD109 (NM_133493.1,1067-1085).
ggaccagtagaaattttaa

SEQ ID NO: 293925 - DNA, 19 bp, Homo sapiens
  siRNA target sequence for CD109 (NM_133493.1,1138-1156).
gttcttcaagcaacatgat

SEQ ID NO: 293926 - DNA, 19 bp, Homo sapiens
  siRNA target sequence for CD109 (NM_133493.1,1151-1169).
catgattacatcattgagt

SEQ ID NO: 293927 - DNA, 19 bp, Homo sapiens
  siRNA target sequence for CD109 (NM_133493.1,1154-1172).
gattacatcattgagtttt

SEQ ID NO: 293928 - DNA, 19 bp, Homo sapiens
  siRNA target sequence for CD109 (NM_133493.1,1166-1184).
gagttttttgattatacta

SEQ ID NO: 293929 - DNA, 19 bp, Homo sapiens
  siRNA target sequence for CD109 (NM_133493.1,1243-1261).
caaccaactgactcttgaa

SEQ ID NO: 293930 - DNA, 19 bp, Homo sapiens
  siRNA target sequence for CD109 (NM_133493.1,1293-1311).
cacagagaaactatactga

SEQ ID NO: 293931 - DNA, 19 bp, Homo sapiens
  siRNA target sequence for CD109 (NM_133493.1,1321-1339).
cggatctaacagtggaaat

SEQ ID NO: 293932 - DNA, 19 bp, Homo sapiens
  siRNA target sequence for CD109 (NM_133493.1,1323-1341).
gatctaacagtggaaatca

SEQ ID NO: 293933 - DNA, 19 bp, Homo sapiens
  siRNA target sequence for CD109 (NM_133493.1,1447-1465).
ctatttccttggtagtaaa

SEQ ID NO: 293934 - DNA, 19 bp, Homo sapiens
  siRNA target sequence for CD109 (NM_133493.1,1470-1488).
gcatggcagttcatagtct

SEQ ID NO: 293935 - DNA, 19 bp, Homo sapiens
  siRNA target sequence for CD109 (NM_133493.1,1474-1492).
ggcagttcatagtctgttt

SEQ ID NO: 293936 - DNA, 19 bp, Homo sapiens
  siRNA target sequence for CD109 (NM_133493.1,1476-1494).
cagttcatagtctgtttaa

SEQ ID NO: 293937 - DNA, 19 bp, Homo sapiens
  siRNA target sequence for CD109 (NM_133493.1,1513-1531).
catccaactaaaaacaaga

SEQ ID NO: 293938 - DNA, 19 bp, Homo sapiens
  siRNA target sequence for CD109 (NM_133493.1,1516-1534).
ccaactaaaaacaagagat

SEQ ID NO: 293939 - DNA, 19 bp, Homo sapiens
  siRNA target sequence for CD109 (NM_133493.1,1547-1565).
gtgggatcgccttttgagt

SEQ ID NO: 293940 - DNA, 19 bp, Homo sapiens
  siRNA target sequence for CD109 (NM_133493.1,1575-1593).
gtggcaacaaacgattgaa

SEQ ID NO: 293941 - DNA, 19 bp, Homo sapiens
  siRNA target sequence for CD109 (NM_133493.1,1587-1605).
gattgaaggagttaagcta

SEQ ID NO: 293942 - DNA, 19 bp, Homo sapiens
  siRNA target sequence for CD109 (NM_133493.1,1594-1612).
ggagttaagctatatggta

SEQ ID NO: 293943 - DNA, 19 bp, Homo sapiens
  siRNA target sequence for CD109 (NM_133493.1,1627-1645).
gttggtggctgtaggaaaa

SEQ ID NO: 293944 - DNA, 19 bp, Homo sapiens
  siRNA target sequence for CD109 (NM_133493.1,1630-1648).
ggtggctgtaggaaaacaa

SEQ ID NO: 293945 - DNA, 19 bp, Homo sapiens
  siRNA target sequence for CD109 (NM_133493.1,1698-1716).
cctgtgtaattgtgtatta

SEQ ID NO: 293946 - DNA, 19 bp, Homo sapiens
  siRNA target sequence for CD109 (NM_133493.1,1699-1717).
ctgtgtaattgtgtattat

SEQ ID NO: 293947 - DNA, 19 bp, Homo sapiens
  siRNA target sequence for CD109 (NM_133493.1,1793-1811).
ctatattggagtaaagtga

SEQ ID NO: 293948 - DNA, 19 bp, Homo sapiens
  siRNA target sequence for CD109 (NM_133493.1,1875-1893).
ggattgtagctgttgacaa

SEQ ID NO: 293949 - DNA, 19 bp, Homo sapiens
  siRNA target sequence for CD109 (NM_133493.1,1876-1894).
gattgtagctgttgacaaa

SEQ ID NO: 293950 - DNA, 19 bp, Homo sapiens
  siRNA target sequence for CD109 (NM_133493.1,1943-1961).
gtccatgagttggaacttt

SEQ ID NO: 293951 - DNA, 19 bp, Homo sapiens
  siRNA target sequence for CD109 (NM_133493.1,1945-1963).
ccatgagttggaactttat

SEQ ID NO: 293952 - DNA, 19 bp, Homo sapiens
  siRNA target sequence for CD109 (NM_133493.1,1946-1964).
catgagttggaactttata

SEQ ID NO: 293953 - DNA, 19 bp, Homo sapiens
  siRNA target sequence for CD109 (NM_133493.1,1949-1967).
gagttggaactttataaca

SEQ ID NO: 293954 - DNA, 19 bp, Homo sapiens
  siRNA target sequence for CD109 (NM_133493.1,1951-1969).
gttggaactttataacaca

SEQ ID NO: 293955 - DNA, 19 bp, Homo sapiens
  siRNA target sequence for CD109 (NM_133493.1,1982-2000).
ggcatgttcatgaattctt

SEQ ID NO: 293956 - DNA, 19 bp, Homo sapiens
  siRNA target sequence for CD109 (NM_133493.1,2028-2046).
gggtattgacagatgcaaa

SEQ ID NO: 293957 - DNA, 19 bp, Homo sapiens
  siRNA target sequence for CD109 (NM_133493.1,2042-2060).
gcaaacctcacgaaggatt

SEQ ID NO: 293958 - DNA, 19 bp, Homo sapiens
  siRNA target sequence for CD109 (NM_133493.1,2043-2061).
caaacctcacgaaggatta

SEQ ID NO: 293959 - DNA, 19 bp, Homo sapiens
  siRNA target sequence for CD109 (NM_133493.1,2047-2065).
cctcacgaaggattatatt

SEQ ID NO: 293960 - DNA, 19 bp, Homo sapiens
  siRNA target sequence for CD109 (NM_133493.1,2050-2068).
cacgaaggattatattgat

SEQ ID NO: 293961 - DNA, 19 bp, Homo sapiens
  siRNA target sequence for CD109 (NM_133493.1,2162-2180).
ccacatgtccgaaagcatt

SEQ ID NO: 293962 - DNA, 19 bp, Homo sapiens
  siRNA target sequence for CD109 (NM_133493.1,2215-2233).
gggttacaggatttaccaa

SEQ ID NO: 293963 - DNA, 19 bp, Homo sapiens
  siRNA target sequence for CD109 (NM_133493.1,2221-2239).
caggatttaccaagaattt

SEQ ID NO: 293964 - DNA, 19 bp, Homo sapiens
  siRNA target sequence for CD109 (NM_133493.1,2230-2248).
ccaagaatttgaagtaact

SEQ ID NO: 293965 - DNA, 19 bp, Homo sapiens
  siRNA target sequence for CD109 (NM_133493.1,2243-2261).
gtaactgtacctgattcta

SEQ ID NO: 293966 - DNA, 19 bp, Homo sapiens
  siRNA target sequence for CD109 (NM_133493.1,2273-2291).
gtggctactggttttgtga

SEQ ID NO: 293967 - DNA, 19 bp, Homo sapiens
  siRNA target sequence for CD109 (NM_133493.1,2302-2320).
cctgggtcttggactaaca

SEQ ID NO: 293968 - DNA, 19 bp, Homo sapiens
  siRNA target sequence for CD109 (NM_133493.1,2303-2321).
ctgggtcttggactaacaa

SEQ ID NO: 293969 - DNA, 19 bp, Homo sapiens
  siRNA target sequence for CD109 (NM_133493.1,2305-2323).
gggtcttggactaacaact

SEQ ID NO: 293970 - DNA, 19 bp, Homo sapiens
  siRNA target sequence for CD109 (NM_133493.1,2306-2324).
ggtcttggactaacaacta

SEQ ID NO: 293971 - DNA, 19 bp, Homo sapiens
  siRNA target sequence for CD109 (NM_133493.1,2342-2360).
gccttccaaccatttttca

SEQ ID NO: 293972 - DNA, 19 bp, Homo sapiens
  siRNA target sequence for CD109 (NM_133493.1,2442-2460).
ccactgaggttaaggtaat

SEQ ID NO: 293973 - DNA, 19 bp, Homo sapiens
  siRNA target sequence for CD109 (NM_133493.1,2445-2463).
ctgaggttaaggtaatcat

SEQ ID NO: 293974 - DNA, 19 bp, Homo sapiens
  siRNA target sequence for CD109 (NM_133493.1,2455-2473).
ggtaatcattgagaaaagt

SEQ ID NO: 293975 - DNA, 19 bp, Homo sapiens
  siRNA target sequence for CD109 (NM_133493.1,2483-2501).
gatattctaatgacttcaa

SEQ ID NO: 293976 - DNA, 19 bp, Homo sapiens
  siRNA target sequence for CD109 (NM_133493.1,2489-2507).
ctaatgacttcaaatgaaa

SEQ ID NO: 293977 - DNA, 19 bp, Homo sapiens
  siRNA target sequence for CD109 (NM_133493.1,2551-2569).
ggatggggcaactgttctt

SEQ ID NO: 293978 - DNA, 19 bp, Homo sapiens
  siRNA target sequence for CD109 (NM_133493.1,2552-2570).
gatggggcaactgttcttt

SEQ ID NO: 293979 - DNA, 19 bp, Homo sapiens
  siRNA target sequence for CD109 (NM_133493.1,2608-2626).
cacagtcacagctctttca

SEQ ID NO: 293980 - DNA, 19 bp, Homo sapiens
  siRNA target sequence for CD109 (NM_133493.1,2642-2660).
gctgtcacccagatgattt

SEQ ID NO: 293981 - DNA, 19 bp, Homo sapiens
  siRNA target sequence for CD109 (NM_133493.1,2681-2699).
gaaaaatcatattcacaat

SEQ ID NO: 293982 - DNA, 19 bp, Homo sapiens
  siRNA target sequence for CD109 (NM_133493.1,2758-2776).
ctcatttcctcctaataca

SEQ ID NO: 293983 - DNA, 19 bp, Homo sapiens
  siRNA target sequence for CD109 (NM_133493.1,2879-2897).
gaacagaacatgataaatt

SEQ ID NO: 293984 - DNA, 19 bp, Homo sapiens
  siRNA target sequence for CD109 (NM_133493.1,2921-2939).
gattatctgactaaaaaga

SEQ ID NO: 293985 - DNA, 19 bp, Homo sapiens
  siRNA target sequence for CD109 (NM_133493.1,2976-2994).
catttatgaggcaaggtta

SEQ ID NO: 293986 - DNA, 19 bp, Homo sapiens
  siRNA target sequence for CD109 (NM_133493.1,3036-3054).
gtgcttttgggaattatga

SEQ ID NO: 293987 - DNA, 19 bp, Homo sapiens
  siRNA target sequence for CD109 (NM_133493.1,3107-3125).
gccgatccttacatagata

SEQ ID NO: 293988 - DNA, 19 bp, Homo sapiens
  siRNA target sequence for CD109 (NM_133493.1,3108-3126).
ccgatccttacatagatat

SEQ ID NO: 293989 - DNA, 19 bp, Homo sapiens
  siRNA target sequence for CD109 (NM_133493.1,3109-3127).
cgatccttacatagatatt

SEQ ID NO: 293990 - DNA, 19 bp, Homo sapiens
  siRNA target sequence for CD109 (NM_133493.1,3128-3146).
gatcagaatgtgttacaca

SEQ ID NO: 293991 - DNA, 19 bp, Homo sapiens
  siRNA target sequence for CD109 (NM_133493.1,3139-3157).
gttacacagaacatacact

SEQ ID NO: 293992 - DNA, 19 bp, Homo sapiens
  siRNA target sequence for CD109 (NM_133493.1,3159-3177).
ggcttaaaggacatcagaa

SEQ ID NO: 293993 - DNA, 19 bp, Homo sapiens
  siRNA target sequence for CD109 (NM_133493.1,3200-3218).
ccaggaagagtgattcata

SEQ ID NO: 293994 - DNA, 19 bp, Homo sapiens
  siRNA target sequence for CD109 (NM_133493.1,3223-3241).
gcttcaaggtggcaataaa

SEQ ID NO: 293995 - DNA, 19 bp, Homo sapiens
  siRNA target sequence for CD109 (NM_133493.1,3252-3270).
cacttacagcctatattgt

SEQ ID NO: 293996 - DNA, 19 bp, Homo sapiens
  siRNA target sequence for CD109 (NM_133493.1,3254-3272).
cttacagcctatattgtaa

SEQ ID NO: 293997 - DNA, 19 bp, Homo sapiens
  siRNA target sequence for CD109 (NM_133493.1,3295-3313).
gtatcagcctaacattgat

SEQ ID NO: 293998 - DNA, 19 bp, Homo sapiens
  siRNA target sequence for CD109 (NM_133493.1,3314-3332).
gtgcaagagtctatccatt

SEQ ID NO: 293999 - DNA, 19 bp, Homo sapiens
  siRNA target sequence for CD109 (NM_133493.1,3380-3398).
gcccttataacttatgcat

SEQ ID NO: 294000 - DNA, 19 bp, Homo sapiens
  siRNA target sequence for CD109 (NM_133493.1,3381-3399).
cccttataacttatgcatt

SEQ ID NO: 294001 - DNA, 19 bp, Homo sapiens
  siRNA target sequence for CD109 (NM_133493.1,3417-3435).
ctaaagcgaaggaagcttt

SEQ ID NO: 294002 - DNA, 19 bp, Homo sapiens
  siRNA target sequence for CD109 (NM_133493.1,3487-3505).
gtcatcagagtccaaactt

SEQ ID NO: 294003 - DNA, 19 bp, Homo sapiens
  siRNA target sequence for CD109 (NM_133493.1,3522-3540).
cacgctccctggatattga

SEQ ID NO: 294004 - DNA, 19 bp, Homo sapiens
  siRNA target sequence for CD109 (NM_133493.1,3525-3543).
gctccctggatattgaagt

SEQ ID NO: 294005 - DNA, 19 bp, Homo sapiens
  siRNA target sequence for CD109 (NM_133493.1,3559-3577).
gctctcacacttcttacaa

SEQ ID NO: 294006 - DNA, 19 bp, Homo sapiens
  siRNA target sequence for CD109 (NM_133493.1,3560-3578).
ctctcacacttcttacaat

SEQ ID NO: 294007 - DNA, 19 bp, Homo sapiens
  siRNA target sequence for CD109 (NM_133493.1,3562-3580).
ctcacacttcttacaattt

SEQ ID NO: 294008 - DNA, 19 bp, Homo sapiens
  siRNA target sequence for CD109 (NM_133493.1,3564-3582).
cacacttcttacaatttca

SEQ ID NO: 294009 - DNA, 19 bp, Homo sapiens
  siRNA target sequence for CD109 (NM_133493.1,3588-3606).
ctgagggaatcccaattat

SEQ ID NO: 294010 - DNA, 19 bp, Homo sapiens
  siRNA target sequence for CD109 (NM_133493.1,3613-3631).
gctaagcaggcaaagaaat

SEQ ID NO: 294011 - DNA, 19 bp, Homo sapiens
  siRNA target sequence for CD109 (NM_133493.1,3696-3714).
cagccctaatgaatacaga

SEQ ID NO: 294012 - DNA, 19 bp, Homo sapiens
  siRNA target sequence for CD109 (NM_133493.1,3698-3716).
gccctaatgaatacagaaa

SEQ ID NO: 294013 - DNA, 19 bp, Homo sapiens
  siRNA target sequence for CD109 (NM_133493.1,3849-3867).
ccgcaaatggttttggatt

SEQ ID NO: 294014 - DNA, 19 bp, Homo sapiens
  siRNA target sequence for CD109 (NM_133493.1,3918-3936).
ctagaagacgaagatctat

SEQ ID NO: 294015 - DNA, 19 bp, Homo sapiens
  siRNA target sequence for CD109 (NM_133493.1,3924-3942).
gacgaagatctatccaaaa

SEQ ID NO: 294016 - DNA, 19 bp, Homo sapiens
  siRNA target sequence for CD109 (NM_133493.1,4004-4022).
gatttgaatgtgtgtacaa

SEQ ID NO: 294017 - DNA, 19 bp, Homo sapiens
  siRNA target sequence for CD109 (NM_133493.1,4009-4027).
gaatgtgtgtacaagcttt

SEQ ID NO: 294018 - DNA, 19 bp, Homo sapiens
  siRNA target sequence for CD109 (NM_133493.1,4041-4059).
ggagtggcatggctcttat

SEQ ID NO: 294019 - DNA, 19 bp, Homo sapiens
  siRNA target sequence for CD109 (NM_133493.1,4145-4163).
ggaaaactcaacctctatt

SEQ ID NO: 294020 - DNA, 19 bp, Homo sapiens
  siRNA target sequence for CD109 (NM_133493.1,4153-4171).
caacctctatttagattct

SEQ ID NO: 294021 - DNA, 19 bp, Homo sapiens
  siRNA target sequence for CD109 (NM_133493.1,4245-4263).
cagtgtccatagtggatta

SEQ ID NO: 294022 - DNA, 19 bp, Homo sapiens
  siRNA target sequence for CD109 (NM_133493.1,4249-4267).
gtccatagtggattactat

SEQ ID NO: 294023 - DNA, 19 bp, Homo sapiens
  siRNA target sequence for CD109 (NM_133493.1,4278-4296).
gacaggcggtgagaagtta

SEQ ID NO: 294024 - DNA, 19 bp, Homo sapiens
  siRNA target sequence for CD109 (NM_133493.1,4371-4389).
cttcaggctcccatcatca

SEQ ID NO: 294025 - DNA, 19 bp, Homo sapiens
  siRNA target sequence for CD109 (NM_133493.1,4424-4442).
ctgtactttatggaacttt

SEQ ID NO: 294026 - DNA, 19 bp, Homo sapiens
  siRNA target sequence for FLJ25179 (NM_144670.1,93-111).
gccagggctgtgtctatgt

SEQ ID NO: 294027 - DNA, 19 bp, Homo sapiens
  siRNA target sequence for FLJ25179 (NM_144670.1,110-128).
gtgcagacggtgttgagat

SEQ ID NO: 294028 - DNA, 19 bp, Homo sapiens
  siRNA target sequence for FLJ25179 (NM_144670.1,113-131).
cagacggtgttgagataca

SEQ ID NO: 294029 - DNA, 19 bp, Homo sapiens
  siRNA target sequence for FLJ25179 (NM_144670.1,115-133).
gacggtgttgagatacaat

SEQ ID NO: 294030 - DNA, 19 bp, Homo sapiens
  siRNA target sequence for FLJ25179 (NM_144670.1,117-135).
cggtgttgagatacaatat

SEQ ID NO: 294031 - DNA, 19 bp, Homo sapiens
  siRNA target sequence for FLJ25179 (NM_144670.1,118-136).
ggtgttgagatacaatatt

SEQ ID NO: 294032 - DNA, 19 bp, Homo sapiens
  siRNA target sequence for FLJ25179 (NM_144670.1,167-185).
cttagtgtggaaataggaa

SEQ ID NO: 294033 - DNA, 19 bp, Homo sapiens
  siRNA target sequence for FLJ25179 (NM_144670.1,219-237).
ccttgactctcactattca

SEQ ID NO: 294034 - DNA, 19 bp, Homo sapiens
  siRNA target sequence for FLJ25179 (NM_144670.1,253-271).
gagccgtagctcttccaat

SEQ ID NO: 294035 - DNA, 19 bp, Homo sapiens
  siRNA target sequence for FLJ25179 (NM_144670.1,255-273).
gccgtagctcttccaatat

SEQ ID NO: 294036 - DNA, 19 bp, Homo sapiens
  siRNA target sequence for FLJ25179 (NM_144670.1,316-334).
ggagggcaccaatcagtta

SEQ ID NO: 294037 - DNA, 19 bp, Homo sapiens
  siRNA target sequence for FLJ25179 (NM_144670.1,474-492).
caaccatcaaggtctatga

SEQ ID NO: 294038 - DNA, 19 bp, Homo sapiens
  siRNA target sequence for FLJ25179 (NM_144670.1,516-534).
caacaattcagtattctga

SEQ ID NO: 294039 - DNA, 19 bp, Homo sapiens
  siRNA target sequence for SPP2 (NM_006944.1,55-73).
gctcttggaatgaactact

SEQ ID NO: 294040 - DNA, 19 bp, Homo sapiens
  siRNA target sequence for SPP2 (NM_006944.1,136-154).
gcctctgtggtaaaagtga

SEQ ID NO: 294041 - DNA, 19 bp, Homo sapiens
  siRNA target sequence for SPP2 (NM_006944.1,137-155).
cctctgtggtaaaagtgaa

SEQ ID NO: 294042 - DNA, 19 bp, Homo sapiens
  siRNA target sequence for SPP2 (NM_006944.1,178-196).
ctgtttcgggcattcagaa

SEQ ID NO: 294043 - DNA, 19 bp, Homo sapiens
  siRNA target sequence for SPP2 (NM_006944.1,217-235).
gtcctagatgagaacaact

SEQ ID NO: 294044 - DNA, 19 bp, Homo sapiens
  siRNA target sequence for SPP2 (NM_006944.1,432-450).
cagcagcgaagagatgatt

SEQ ID NO: 294045 - DNA, 19 bp, Homo sapiens
  siRNA target sequence for SPP2 (NM_006944.1,509-527).
cagacgagtccataagtga

SEQ ID NO: 294046 - DNA, 19 bp, Homo sapiens
  siRNA target sequence for SPP2 (NM_006944.1,514-532).
gagtccataagtgaacaat

SEQ ID NO: 294047 - DNA, 19 bp, Homo sapiens
  siRNA target sequence for SPP2 (NM_006944.1,516-534).
gtccataagtgaacaattt

SEQ ID NO: 294048 - DNA, 19 bp, Homo sapiens
  siRNA target sequence for SPP2 (NM_006944.1,541-559).
cggtcacttgggatcatga

SEQ ID NO: 294049 - DNA, 19 bp, Homo sapiens
  siRNA target sequence for SPP2 (NM_006944.1,601-619).
cggcacagagcaagaataa

SEQ ID NO: 294050 - DNA, 19 bp, Homo sapiens
  siRNA target sequence for SPP2 (NM_006944.1,604-622).
cacagagcaagaataaata

SEQ ID NO: 294051 - DNA, 19 bp, Homo sapiens
  siRNA target sequence for VIP (NM_015692.1,2255-2273).
cttccccgaaacatggatt

SEQ ID NO: 294052 - DNA, 19 bp, Homo sapiens
  siRNA target sequence for VIP (NM_015692.1,2266-2284).
catggatttggcattgtct

SEQ ID NO: 294053 - DNA, 19 bp, Homo sapiens
  siRNA target sequence for VIP (NM_015692.1,2488-2506).
cgctcagtgtctacaacta

SEQ ID NO: 294054 - DNA, 19 bp, Homo sapiens
  siRNA target sequence for VIP (NM_015692.1,2583-2601).
cgccatgtgaccaagaaga

SEQ ID NO: 294055 - DNA, 19 bp, Homo sapiens
  siRNA target sequence for VIP (NM_015692.1,2677-2695).
cggccaaagcccttgctta

SEQ ID NO: 294056 - DNA, 19 bp, Homo sapiens
  siRNA target sequence for VIP (NM_015692.1,2691-2709).
gcttacggagacacaaatt

SEQ ID NO: 294057 - DNA, 19 bp, Homo sapiens
  siRNA target sequence for VIP (NM_015692.1,2878-2896).
ccacccccaacaagtatga

SEQ ID NO: 294058 - DNA, 19 bp, Homo sapiens
  siRNA target sequence for VIP (NM_015692.1,2921-2939).
gcgcctcacccgctttgat

SEQ ID NO: 294059 - DNA, 19 bp, Homo sapiens
  siRNA target sequence for VIP (NM_015692.1,2923-2941).
gcctcacccgctttgatgt

SEQ ID NO: 294060 - DNA, 19 bp, Homo sapiens
  siRNA target sequence for VIP (NM_015692.1,2942-2960).
ggctgtgcgagctcacaat

SEQ ID NO: 294061 - DNA, 19 bp, Homo sapiens
  siRNA target sequence for VIP (NM_015692.1,2944-2962).
ctgtgcgagctcacaatga

SEQ ID NO: 294062 - DNA, 19 bp, Homo sapiens
  siRNA target sequence for VIP (NM_015692.1,2964-2982).
gcccgtgtggccttgtctt

SEQ ID NO: 294063 - DNA, 19 bp, Homo sapiens
  siRNA target sequence for VIP (NM_015692.1,3105-3123).
ctctcctgggatgaattca

SEQ ID NO: 294064 - DNA, 19 bp, Homo sapiens
  siRNA target sequence for VIP (NM_015692.1,3142-3160).
ggcgtggtggccttatcca

SEQ ID NO: 294065 - DNA, 19 bp, Homo sapiens
  siRNA target sequence for VIP (NM_015692.1,3234-3252).
cagttcattggcttttcca

SEQ ID NO: 294066 - DNA, 19 bp, Homo sapiens
  siRNA target sequence for VIP (NM_015692.1,3475-3493).
cacccaacgtctttgtctt

SEQ ID NO: 294067 - DNA, 19 bp, Homo sapiens
  siRNA target sequence for VIP (NM_015692.1,3482-3500).
cgtctttgtcttgaagtat

SEQ ID NO: 294068 - DNA, 19 bp, Homo sapiens
  siRNA target sequence for VIP (NM_015692.1,3485-3503).
ctttgtcttgaagtatctt

SEQ ID NO: 294069 - DNA, 19 bp, Homo sapiens
  siRNA target sequence for VIP (NM_015692.1,3544-3562).
ccaccgactacctagtaca

SEQ ID NO: 294070 - DNA, 19 bp, Homo sapiens
  siRNA target sequence for VIP (NM_015692.1,3675-3693).
gcacaggctcgcagcttta

SEQ ID NO: 294071 - DNA, 19 bp, Homo sapiens
  siRNA target sequence for VIP (NM_015692.1,3676-3694).
cacaggctcgcagctttat

SEQ ID NO: 294072 - DNA, 19 bp, Homo sapiens
  siRNA target sequence for VIP (NM_015692.1,4083-4101).
gtggacaagggcacattct

SEQ ID NO: 294073 - DNA, 19 bp, Homo sapiens
  siRNA target sequence for VIP (NM_015692.1,4286-4304).
gcaggccttggctgaatat

SEQ ID NO: 294074 - DNA, 19 bp, Homo sapiens
  siRNA target sequence for VIP (NM_015692.1,4296-4314).
gctgaatatgccatcttgt

SEQ ID NO: 294075 - DNA, 19 bp, Homo sapiens
  siRNA target sequence for VIP (NM_015692.1,4474-4492).
gctgcctgatgcagattga

SEQ ID NO: 294076 - DNA, 19 bp, Homo sapiens
  siRNA target sequence for VIP (NM_015692.1,4627-4645).
ccccagctgacgatgatga

SEQ ID NO: 294077 - DNA, 19 bp, Homo sapiens
  siRNA target sequence for VIP (NM_015692.1,4837-4855).
gacgccgagtgctcttcta

SEQ ID NO: 294078 - DNA, 19 bp, Homo sapiens
  siRNA target sequence for VIP (NM_015692.1,4839-4857).
cgccgagtgctcttctact

SEQ ID NO: 294079 - DNA, 19 bp, Homo sapiens
  siRNA target sequence for VIP (NM_015692.1,4840-4858).
gccgagtgctcttctactt

SEQ ID NO: 294080 - DNA, 19 bp, Homo sapiens
  siRNA target sequence for VIP (NM_015692.1,4841-4859).
ccgagtgctcttctacttt

SEQ ID NO: 294081 - DNA, 19 bp, Homo sapiens
  siRNA target sequence for VIP (NM_015692.1,4843-4861).
gagtgctcttctactttga

SEQ ID NO: 294082 - DNA, 19 bp, Homo sapiens
  siRNA target sequence for VIP (NM_015692.1,5632-5650).
gggaggagggtttatggat

SEQ ID NO: 294083 - DNA, 19 bp, Homo sapiens
  siRNA target sequence for VIP (NM_015692.1,5640-5658).
ggtttatggatgtcaaaca

SEQ ID NO: 294084 - DNA, 19 bp, Homo sapiens
  siRNA target sequence for DEFB126 (NM_030931.2,38-56).
cccttgcagtttttatgct

SEQ ID NO: 294085 - DNA, 19 bp, Homo sapiens
  siRNA target sequence for DEFB126 (NM_030931.2,63-81).
ccaattggtctcaggtaat

SEQ ID NO: 294086 - DNA, 19 bp, Homo sapiens
  siRNA target sequence for DEFB126 (NM_030931.2,64-82).
caattggtctcaggtaatt

SEQ ID NO: 294087 - DNA, 19 bp, Homo sapiens
  siRNA target sequence for DEFB126 (NM_030931.2,74-92).
caggtaattggtatgtgaa

SEQ ID NO: 294088 - DNA, 19 bp, Homo sapiens
  siRNA target sequence for DEFB126 (NM_030931.2,98-116).
gtctaaacgacgttggaat

SEQ ID NO: 294089 - DNA, 19 bp, Homo sapiens
  siRNA target sequence for DEFB126 (NM_030931.2,100-118).
ctaaacgacgttggaattt

SEQ ID NO: 294090 - DNA, 19 bp, Homo sapiens
  siRNA target sequence for DEFB126 (NM_030931.2,165-183).
ggcaatgtgcggcaaacaa

SEQ ID NO: 294091 - DNA, 19 bp, Homo sapiens
  siRNA target sequence for DEFB126 (NM_030931.2,166-184).
gcaatgtgcggcaaacaaa

SEQ ID NO: 294092 - DNA, 19 bp, Homo sapiens
  siRNA target sequence for DEFB126 (NM_030931.2,202-220).
gctgacagacgtgctaatt

SEQ ID NO: 294093 - DNA, 19 bp, Homo sapiens
  siRNA target sequence for DEFB126 (NM_030931.2,203-221).
ctgacagacgtgctaatta

SEQ ID NO: 294094 - DNA, 19 bp, Homo sapiens
  siRNA target sequence for DEFB126 (NM_030931.2,207-225).
cagacgtgctaattatcct

SEQ ID NO: 294095 - DNA, 19 bp, Homo sapiens
  siRNA target sequence for DEFB126 (NM_030931.2,212-230).
gtgctaattatcctgtttt

SEQ ID NO: 294096 - DNA, 19 bp, Homo sapiens
  siRNA target sequence for CDKN1C (NM_000076.1,316-334).
ggaccttcccagtactagt

SEQ ID NO: 294097 - DNA, 19 bp, Homo sapiens
  siRNA target sequence for CDKN1C (NM_000076.1,1069-1087).
ctctgatctccgatttctt

SEQ ID NO: 294098 - DNA, 19 bp, Homo sapiens
  siRNA target sequence for CDKN2C (NM_001262.2,1262-1280).
ggggacctagagcaactta

SEQ ID NO: 294099 - DNA, 19 bp, Homo sapiens
  siRNA target sequence for CDKN2C (NM_001262.2,1264-1282).
ggacctagagcaacttact

SEQ ID NO: 294100 - DNA, 19 bp, Homo sapiens
  siRNA target sequence for CDKN2C (NM_001262.2,1267-1285).
cctagagcaacttactagt

SEQ ID NO: 294101 - DNA, 19 bp, Homo sapiens
  siRNA target sequence for CDKN2C (NM_001262.2,1268-1286).
ctagagcaacttactagtt

SEQ ID NO: 294102 - DNA, 19 bp, Homo sapiens
  siRNA target sequence for CDKN2C (NM_001262.2,1281-1299).
ctagtttgttgcaaaataa

SEQ ID NO: 294103 - DNA, 19 bp, Homo sapiens
  siRNA target sequence for CDKN2C (NM_001262.2,1306-1324).
cgtcaatgcacaaaatgga

SEQ ID NO: 294104 - DNA, 19 bp, Homo sapiens
  siRNA target sequence for CDKN2C (NM_001262.2,1338-1356).
cgctgcaggttatgaaact

SEQ ID NO: 294105 - DNA, 19 bp, Homo sapiens
  siRNA target sequence for CDKN2C (NM_001262.2,1375-1393).
caggagactgctacttaga

SEQ ID NO: 294106 - DNA, 19 bp, Homo sapiens
  siRNA target sequence for CDKN2C (NM_001262.2,1384-1402).
gctacttagaggtgctaat

SEQ ID NO: 294107 - DNA, 19 bp, Homo sapiens
  siRNA target sequence for CDKN2C (NM_001262.2,1394-1412).
ggtgctaatcccgatttga

SEQ ID NO: 294108 - DNA, 19 bp, Homo sapiens
  siRNA target sequence for CDKN2C (NM_001262.2,1395-1413).
gtgctaatcccgatttgaa

SEQ ID NO: 294109 - DNA, 19 bp, Homo sapiens
  siRNA target sequence for CDKN2C (NM_001262.2,1422-1440).
ctggtttcgctgtcattca

SEQ ID NO: 294110 - DNA, 19 bp, Homo sapiens
  siRNA target sequence for CDKN2C (NM_001262.2,1425-1443).
gtttcgctgtcattcatga

SEQ ID NO: 294111 - DNA, 19 bp, Homo sapiens
  siRNA target sequence for CDKN2C (NM_001262.2,1486-1504).
ggagtttcaagctgatgtt

SEQ ID NO: 294112 - DNA, 19 bp, Homo sapiens
  siRNA target sequence for CDKN2C (NM_001262.2,1625-1643).
ggggacaccgcctgtgatt

SEQ ID NO: 294113 - DNA, 19 bp, Homo sapiens
  siRNA target sequence for CDKN2C (NM_001262.2,1626-1644).
gggacaccgcctgtgattt

SEQ ID NO: 294114 - DNA, 19 bp, Homo sapiens
  siRNA target sequence for CDKN2C (NM_001262.2,1696-1714).
ggctgggggagccacaaat

SEQ ID NO: 294115 - DNA, 19 bp, Homo sapiens
  siRNA target sequence for PKIA (NM_006823.2,527-545).
gactgatgtggaaactaca

SEQ ID NO: 294116 - DNA, 19 bp, Homo sapiens
  siRNA target sequence for PKIA (NM_006823.2,629-647).
caatgaattagccttgaaa

SEQ ID NO: 294117 - DNA, 19 bp, Homo sapiens
  siRNA target sequence for PKIA (NM_006823.2,652-670).
caggtcttgatatcaacaa

SEQ ID NO: 294118 - DNA, 19 bp, Homo sapiens
  siRNA target sequence for PKIA (NM_006823.2,687-705).
gatgcacaacgaagttcta

SEQ ID NO: 294119 - DNA, 19 bp, Homo sapiens
  siRNA target sequence for PKIB (NM_032471.4,434-452).
gtctggggtcgccaatttt

SEQ ID NO: 294120 - DNA, 19 bp, Homo sapiens
  siRNA target sequence for PKIB (NM_032471.4,443-461).
cgccaattttgcatcttca

SEQ ID NO: 294121 - DNA, 19 bp, Homo sapiens
  siRNA target sequence for PKIB (NM_032471.4,514-532).
cagacggaacctcagattt

SEQ ID NO: 294122 - DNA, 19 bp, Homo sapiens
  siRNA target sequence for DNAJC3 (NM_006260.2,102-120).
gtacgaaggtgctgaatgt

SEQ ID NO: 294123 - DNA, 19 bp, Homo sapiens
  siRNA target sequence for DNAJC3 (NM_006260.2,179-197).
gacagctagctgatgcttt

SEQ ID NO: 294124 - DNA, 19 bp, Homo sapiens
  siRNA target sequence for DNAJC3 (NM_006260.2,183-201).
gctagctgatgctttatct

SEQ ID NO: 294125 - DNA, 19 bp, Homo sapiens
  siRNA target sequence for DNAJC3 (NM_006260.2,228-246).
ccctgataactatattgct

SEQ ID NO: 294126 - DNA, 19 bp, Homo sapiens
  siRNA target sequence for DNAJC3 (NM_006260.2,229-247).
cctgataactatattgctt

SEQ ID NO: 294127 - DNA, 19 bp, Homo sapiens
  siRNA target sequence for DNAJC3 (NM_006260.2,253-271).
cggagggctactgtctttt

SEQ ID NO: 294128 - DNA, 19 bp, Homo sapiens
  siRNA target sequence for DNAJC3 (NM_006260.2,258-276).
ggctactgtctttttagct

SEQ ID NO: 294129 - DNA, 19 bp, Homo sapiens
  siRNA target sequence for DNAJC3 (NM_006260.2,259-277).
gctactgtctttttagcta

SEQ ID NO: 294130 - DNA, 19 bp, Homo sapiens
  siRNA target sequence for DNAJC3 (NM_006260.2,295-313).
gcacttcctgatttaacta

SEQ ID NO: 294131 - DNA, 19 bp, Homo sapiens
  siRNA target sequence for DNAJC3 (NM_006260.2,296-314).
cacttcctgatttaactaa

SEQ ID NO: 294132 - DNA, 19 bp, Homo sapiens
  siRNA target sequence for DNAJC3 (NM_006260.2,302-320).
ctgatttaactaaagtgat

SEQ ID NO: 294133 - DNA, 19 bp, Homo sapiens
  siRNA target sequence for DNAJC3 (NM_006260.2,359-377).
gaggtcacttattactcaa

SEQ ID NO: 294134 - DNA, 19 bp, Homo sapiens
  siRNA target sequence for DNAJC3 (NM_006260.2,362-380).
gtcacttattactcaaaca

SEQ ID NO: 294135 - DNA, 19 bp, Homo sapiens
  siRNA target sequence for DNAJC3 (NM_006260.2,418-436).
gtgctcaaatctaatccaa

SEQ ID NO: 294136 - DNA, 19 bp, Homo sapiens
  siRNA target sequence for DNAJC3 (NM_006260.2,489-507).
gcagcgtttgcgttcacaa

SEQ ID NO: 294137 - DNA, 19 bp, Homo sapiens
  siRNA target sequence for DNAJC3 (NM_006260.2,600-618).
ggaacttcgagctgaatgt

SEQ ID NO: 294138 - DNA, 19 bp, Homo sapiens
  siRNA target sequence for DNAJC3 (NM_006260.2,632-650).
gagaacctaggaaagctat

SEQ ID NO: 294139 - DNA, 19 bp, Homo sapiens
  siRNA target sequence for DNAJC3 (NM_006260.2,634-652).
gaacctaggaaagctataa

SEQ ID NO: 294140 - DNA, 19 bp, Homo sapiens
  siRNA target sequence for DNAJC3 (NM_006260.2,638-656).
ctaggaaagctataagtga

SEQ ID NO: 294141 - DNA, 19 bp, Homo sapiens
  siRNA target sequence for DNAJC3 (NM_006260.2,664-682).
gctgcgtcaaagttgaaga

SEQ ID NO: 294142 - DNA, 19 bp, Homo sapiens
  siRNA target sequence for DNAJC3 (NM_006260.2,697-715).
gcgttttataaaataagca

SEQ ID NO: 294143 - DNA, 19 bp, Homo sapiens
  siRNA target sequence for DNAJC3 (NM_006260.2,755-773).
gtgaagttcgggaatgtct

SEQ ID NO: 294144 - DNA, 19 bp, Homo sapiens
  siRNA target sequence for DNAJC3 (NM_006260.2,757-775).
gaagttcgggaatgtctta

SEQ ID NO: 294145 - DNA, 19 bp, Homo sapiens
  siRNA target sequence for DNAJC3 (NM_006260.2,764-782).
gggaatgtcttaaacttga

SEQ ID NO: 294146 - DNA, 19 bp, Homo sapiens
  siRNA target sequence for DNAJC3 (NM_006260.2,781-799).
gaccaggatcataaaaggt

SEQ ID NO: 294147 - DNA, 19 bp, Homo sapiens
  siRNA target sequence for DNAJC3 (NM_006260.2,797-815).
ggtgttttgcacactataa

SEQ ID NO: 294148 - DNA, 19 bp, Homo sapiens
  siRNA target sequence for DNAJC3 (NM_006260.2,805-823).
gcacactataaacaagtaa

SEQ ID NO: 294149 - DNA, 19 bp, Homo sapiens
  siRNA target sequence for DNAJC3 (NM_006260.2,886-904).
gctaccagcaaatatgaat

SEQ ID NO: 294150 - DNA, 19 bp, Homo sapiens
  siRNA target sequence for DNAJC3 (NM_006260.2,912-930).
gaaaacagagccaagcatt

SEQ ID NO: 294151 - DNA, 19 bp, Homo sapiens
  siRNA target sequence for DNAJC3 (NM_006260.2,921-939).
gccaagcattgctgaatat

SEQ ID NO: 294152 - DNA, 19 bp, Homo sapiens
  siRNA target sequence for DNAJC3 (NM_006260.2,981-999).
ggacgagaagcctgttgaa

SEQ ID NO: 294153 - DNA, 19 bp, Homo sapiens
  siRNA target sequence for DNAJC3 (NM_006260.2,987-1005).
gaagcctgttgaagctatt

SEQ ID NO: 294154 - DNA, 19 bp, Homo sapiens
  siRNA target sequence for DNAJC3 (NM_006260.2,997-1015).
gaagctattagggtttgtt

SEQ ID NO: 294155 - DNA, 19 bp, Homo sapiens
  siRNA target sequence for DNAJC3 (NM_006260.2,1063-1081).
cgagcagaggcctatttga

SEQ ID NO: 294156 - DNA, 19 bp, Homo sapiens
  siRNA target sequence for DNAJC3 (NM_006260.2,1064-1082).
gagcagaggcctatttgat

SEQ ID NO: 294157 - DNA, 19 bp, Homo sapiens
  siRNA target sequence for DNAJC3 (NM_006260.2,1067-1085).
cagaggcctatttgataga

SEQ ID NO: 294158 - DNA, 19 bp, Homo sapiens
  siRNA target sequence for DNAJC3 (NM_006260.2,1073-1091).
cctatttgatagaggaaat

SEQ ID NO: 294159 - DNA, 19 bp, Homo sapiens
  siRNA target sequence for DNAJC3 (NM_006260.2,1080-1098).
gatagaggaaatgtatgat

SEQ ID NO: 294160 - DNA, 19 bp, Homo sapiens
  siRNA target sequence for DNAJC3 (NM_006260.2,1194-1212).
gtcgcagaaacgagattat

SEQ ID NO: 294161 - DNA, 19 bp, Homo sapiens
  siRNA target sequence for DNAJC3 (NM_006260.2,1196-1214).
cgcagaaacgagattatta

SEQ ID NO: 294162 - DNA, 19 bp, Homo sapiens
  siRNA target sequence for DNAJC3 (NM_006260.2,1197-1215).
gcagaaacgagattattat

SEQ ID NO: 294163 - DNA, 19 bp, Homo sapiens
  siRNA target sequence for DNAJC3 (NM_006260.2,1198-1216).
cagaaacgagattattata

SEQ ID NO: 294164 - DNA, 19 bp, Homo sapiens
  siRNA target sequence for DNAJC3 (NM_006260.2,1285-1303).
cagtggcacccagataact

SEQ ID NO: 294165 - DNA, 19 bp, Homo sapiens
  siRNA target sequence for DNAJC3 (NM_006260.2,1374-1392).
ctctgatccagaaatgaga

SEQ ID NO: 294166 - DNA, 19 bp, Homo sapiens
  siRNA target sequence for DNAJC3 (NM_006260.2,1398-1416).
gtttgacgacggagaagat

SEQ ID NO: 294167 - DNA, 19 bp, Homo sapiens
  siRNA target sequence for DNAJC3 (NM_006260.2,1503-1521).
ctcaggcggaccatttaga

SEQ ID NO: 294168 - DNA, 19 bp, Homo sapiens
  siRNA target sequence for DNAJC3 (NM_006260.2,1505-1523).
caggcggaccatttagatt

SEQ ID NO: 294169 - DNA, 19 bp, Homo sapiens
  siRNA target sequence for DNAJC3 (NM_006260.2,1507-1525).
ggcggaccatttagattta

SEQ ID NO: 294170 - DNA, 19 bp, Homo sapiens
  siRNA target sequence for DNAJC3 (NM_006260.2,1508-1526).
gcggaccatttagatttaa

SEQ ID NO: 294171 - DNA, 19 bp, Homo sapiens
  siRNA target sequence for DNAJC3 (NM_006260.2,1509-1527).
cggaccatttagatttaaa

SEQ ID NO: 294172 - DNA, 19 bp, Homo sapiens
  siRNA target sequence for DNAJC3 (NM_006260.2,1510-1528).
ggaccatttagatttaaat

SEQ ID NO: 294173 - DNA, 19 bp, Homo sapiens
  siRNA target sequence for MBIP (NM_016586.1,136-154).
cgagaggtgctctacgaaa

SEQ ID NO: 294174 - DNA, 19 bp, Homo sapiens
  siRNA target sequence for MBIP (NM_016586.1,137-155).
gagaggtgctctacgaaat

SEQ ID NO: 294175 - DNA, 19 bp, Homo sapiens
  siRNA target sequence for MBIP (NM_016586.1,141-159).
ggtgctctacgaaatcttt

SEQ ID NO: 294176 - DNA, 19 bp, Homo sapiens
  siRNA target sequence for MBIP (NM_016586.1,207-225).
ggtgaaaattacaatcgat

SEQ ID NO: 294177 - DNA, 19 bp, Homo sapiens
  siRNA target sequence for MBIP (NM_016586.1,256-274).
cagcctgcattgctcttta

SEQ ID NO: 294178 - DNA, 19 bp, Homo sapiens
  siRNA target sequence for MBIP (NM_016586.1,275-293).
gtgcacttgaacaacacat

SEQ ID NO: 294179 - DNA, 19 bp, Homo sapiens
  siRNA target sequence for MBIP (NM_016586.1,416-434).
ccattggcgacctacaaga

SEQ ID NO: 294180 - DNA, 19 bp, Homo sapiens
  siRNA target sequence for MBIP (NM_016586.1,444-462).
gcacaaagaaagtgattta

SEQ ID NO: 294181 - DNA, 19 bp, Homo sapiens
  siRNA target sequence for MBIP (NM_016586.1,445-463).
cacaaagaaagtgatttaa

SEQ ID NO: 294182 - DNA, 19 bp, Homo sapiens
  siRNA target sequence for MBIP (NM_016586.1,477-495).
gacacagatccattttgat

SEQ ID NO: 294183 - DNA, 19 bp, Homo sapiens
  siRNA target sequence for MBIP (NM_016586.1,510-528).
gataaaggctggaaaagca

SEQ ID NO: 294184 - DNA, 19 bp, Homo sapiens
  siRNA target sequence for MBIP (NM_016586.1,537-555).
cagacgaatatctgcattt

SEQ ID NO: 294185 - DNA, 19 bp, Homo sapiens
  siRNA target sequence for MBIP (NM_016586.1,591-609).
cgtcagggaattttgcaat

SEQ ID NO: 294186 - DNA, 19 bp, Homo sapiens
  siRNA target sequence for MBIP (NM_016586.1,641-659).
caagaactgatgcgatttt

SEQ ID NO: 294187 - DNA, 19 bp, Homo sapiens
  siRNA target sequence for MBIP (NM_016586.1,662-680).
ccccttaccccggatttaa

SEQ ID NO: 294188 - DNA, 19 bp, Homo sapiens
  siRNA target sequence for MBIP (NM_016586.1,663-681).
cccttaccccggatttaaa

SEQ ID NO: 294189 - DNA, 19 bp, Homo sapiens
  siRNA target sequence for MBIP (NM_016586.1,698-716).
ctagagttgtgaatacata

SEQ ID NO: 294190 - DNA, 19 bp, Homo sapiens
  siRNA target sequence for MBIP (NM_016586.1,788-806).
gtaatcaggctgtagaaga

SEQ ID NO: 294191 - DNA, 19 bp, Homo sapiens
  siRNA target sequence for MBIP (NM_016586.1,802-820).
gaagaacgactacaaaata

SEQ ID NO: 294192 - DNA, 19 bp, Homo sapiens
  siRNA target sequence for MBIP (NM_016586.1,826-844).
gcccacttgcggttacaga

SEQ ID NO: 294193 - DNA, 19 bp, Homo sapiens
  siRNA target sequence for MBIP (NM_016586.1,863-881).
gagacatttatcagagaat

SEQ ID NO: 294194 - DNA, 19 bp, Homo sapiens
  siRNA target sequence for MBIP (NM_016586.1,990-1008).
ctattcactggctgaactt

SEQ ID NO: 294195 - DNA, 19 bp, Homo sapiens
  siRNA target sequence for PPP1R1B (NM_032192.2,643-661).
gagaggggcaccatctcaa

SEQ ID NO: 294196 - DNA, 19 bp, Homo sapiens
  siRNA target sequence for PPP1R1B (NM_032192.2,735-753).
ctgcagtctatcagcaatt

SEQ ID NO: 294197 - DNA, 19 bp, Homo sapiens
  siRNA target sequence for PPP1R1B (NM_032192.2,738-756).
cagtctatcagcaatttga

SEQ ID NO: 294198 - DNA, 19 bp, Homo sapiens
  siRNA target sequence for PPP1R1B (NM_032192.2,801-819).
cgggagctgggttatccaa

SEQ ID NO: 294199 - DNA, 19 bp, Homo sapiens
  siRNA target sequence for PPP1R1B (NM_032192.2,1013-1031).
ggaagacccagcactaagt

SEQ ID NO: 294200 - DNA, 19 bp, Homo sapiens
  siRNA target sequence for SOCS1 (NM_003745.1,377-395).
gacgcctgcggattctact

SEQ ID NO: 294201 - DNA, 19 bp, Homo sapiens
  siRNA target sequence for SOCS1 (NM_003745.1,473-491).
cgccagcggaactgctttt

SEQ ID NO: 294202 - DNA, 19 bp, Homo sapiens
  siRNA target sequence for SOCS1 (NM_003745.1,528-546).
gcatccgcgtgcactttca

SEQ ID NO: 294203 - DNA, 19 bp, Homo sapiens
  siRNA target sequence for PPP1R1A (NM_006741.2,373-391).
ccacggcaacggaagaaga

SEQ ID NO: 294204 - DNA, 19 bp, Homo sapiens
  siRNA target sequence for PPP1R1A (NM_006741.2,374-392).
cacggcaacggaagaagat

SEQ ID NO: 294205 - DNA, 19 bp, Homo sapiens
  siRNA target sequence for PPP1R1A (NM_006741.2,398-416).
ggatcacacccacaatgaa

SEQ ID NO: 294206 - DNA, 19 bp, Homo sapiens
  siRNA target sequence for PPP1R1A (NM_006741.2,399-417).
gatcacacccacaatgaaa

SEQ ID NO: 294207 - DNA, 19 bp, Homo sapiens
  siRNA target sequence for C7orf16 (NM_006658.2,175-193).
ctcgttgcagccacttaga

SEQ ID NO: 294208 - DNA, 19 bp, Homo sapiens
  siRNA target sequence for C7orf16 (NM_006658.2,178-196).
gttgcagccacttagatga

SEQ ID NO: 294209 - DNA, 19 bp, Homo sapiens
  siRNA target sequence for C7orf16 (NM_006658.2,181-199).
gcagccacttagatgatct

SEQ ID NO: 294210 - DNA, 19 bp, Homo sapiens
  siRNA target sequence for C7orf16 (NM_006658.2,185-203).
ccacttagatgatctttca

SEQ ID NO: 294211 - DNA, 19 bp, Homo sapiens
  siRNA target sequence for C7orf16 (NM_006658.2,202-220).
cagaccagttcattaagga

SEQ ID NO: 294212 - DNA, 19 bp, Homo sapiens
  siRNA target sequence for C7orf16 (NM_006658.2,338-356).
cataccaggtgtgttttca

SEQ ID NO: 294213 - DNA, 19 bp, Homo sapiens
  siRNA target sequence for CABIN1 (NM_012295.2,159-177).
ccaccattgaggatgatca

SEQ ID NO: 294214 - DNA, 19 bp, Homo sapiens
  siRNA target sequence for CABIN1 (NM_012295.2,162-180).
ccattgaggatgatcatga

SEQ ID NO: 294215 - DNA, 19 bp, Homo sapiens
  siRNA target sequence for CABIN1 (NM_012295.2,329-347).
ctgcgggaggcagtttcat

SEQ ID NO: 294216 - DNA, 19 bp, Homo sapiens
  siRNA target sequence for CABIN1 (NM_012295.2,374-392).
caccctgggctgatactga

SEQ ID NO: 294217 - DNA, 19 bp, Homo sapiens
  siRNA target sequence for CABIN1 (NM_012295.2,494-512).
gatgtcaacctctggtata

SEQ ID NO: 294218 - DNA, 19 bp, Homo sapiens
  siRNA target sequence for CABIN1 (NM_012295.2,497-515).
gtcaacctctggtataaga

SEQ ID NO: 294219 - DNA, 19 bp, Homo sapiens
  siRNA target sequence for CABIN1 (NM_012295.2,549-567).
ccctggctcgccatgcttt

SEQ ID NO: 294220 - DNA, 19 bp, Homo sapiens
  siRNA target sequence for CABIN1 (NM_012295.2,600-618).
ggccctgtttggataacct

SEQ ID NO: 294221 - DNA, 19 bp, Homo sapiens
  siRNA target sequence for CABIN1 (NM_012295.2,602-620).
ccctgtttggataacctaa

SEQ ID NO: 294222 - DNA, 19 bp, Homo sapiens
  siRNA target sequence for CABIN1 (NM_012295.2,603-621).
cctgtttggataacctaat

SEQ ID NO: 294223 - DNA, 19 bp, Homo sapiens
  siRNA target sequence for CABIN1 (NM_012295.2,753-771).
ggaaggactctctcagaat

SEQ ID NO: 294224 - DNA, 19 bp, Homo sapiens
  siRNA target sequence for CABIN1 (NM_012295.2,768-786).
gaatgttcctcaaatgtga

SEQ ID NO: 294225 - DNA, 19 bp, Homo sapiens
  siRNA target sequence for CABIN1 (NM_012295.2,845-863).
gccttggggctgcgaaaaa

SEQ ID NO: 294226 - DNA, 19 bp, Homo sapiens
  siRNA target sequence for CABIN1 (NM_012295.2,846-864).
ccttggggctgcgaaaaaa

SEQ ID NO: 294227 - DNA, 19 bp, Homo sapiens
  siRNA target sequence for CABIN1 (NM_012295.2,955-973).
cttgctggccatgtacaat

SEQ ID NO: 294228 - DNA, 19 bp, Homo sapiens
  siRNA target sequence for CABIN1 (NM_012295.2,958-976).
gctggccatgtacaatcat

SEQ ID NO: 294229 - DNA, 19 bp, Homo sapiens
  siRNA target sequence for CABIN1 (NM_012295.2,1010-1028).
ggcaaaaggattgatttgt

SEQ ID NO: 294230 - DNA, 19 bp, Homo sapiens
  siRNA target sequence for CABIN1 (NM_012295.2,1230-1248).
ctgggggagataaatccaa

SEQ ID NO: 294231 - DNA, 19 bp, Homo sapiens
  siRNA target sequence for CABIN1 (NM_012295.2,1378-1396).
cttgccgtccaggttaaga

SEQ ID NO: 294232 - DNA, 19 bp, Homo sapiens
  siRNA target sequence for CABIN1 (NM_012295.2,1411-1429).
ggaggaagatgattccttt

SEQ ID NO: 294233 - DNA, 19 bp, Homo sapiens
  siRNA target sequence for CABIN1 (NM_012295.2,1462-1480).
ggaaagcttcccaagcatt

SEQ ID NO: 294234 - DNA, 19 bp, Homo sapiens
  siRNA target sequence for CABIN1 (NM_012295.2,2095-2113).
ggctgaacgaagagacatt

SEQ ID NO: 294235 - DNA, 19 bp, Homo sapiens
  siRNA target sequence for CABIN1 (NM_012295.2,2097-2115).
ctgaacgaagagacattgt

SEQ ID NO: 294236 - DNA, 19 bp, Homo sapiens
  siRNA target sequence for CABIN1 (NM_012295.2,2099-2117).
gaacgaagagacattgtca

SEQ ID NO: 294237 - DNA, 19 bp, Homo sapiens
  siRNA target sequence for CABIN1 (NM_012295.2,2303-2321).
cacctggagtttatgactt

SEQ ID NO: 294238 - DNA, 19 bp, Homo sapiens
  siRNA target sequence for CABIN1 (NM_012295.2,2380-2398).
ggactatcggcagtgtttt

SEQ ID NO: 294239 - DNA, 19 bp, Homo sapiens
  siRNA target sequence for CABIN1 (NM_012295.2,2537-2555).
ggtagcatcctgaaggtat

SEQ ID NO: 294240 - DNA, 19 bp, Homo sapiens
  siRNA target sequence for CABIN1 (NM_012295.2,2594-2612).
ctcatccaggtcattgact

SEQ ID NO: 294241 - DNA, 19 bp, Homo sapiens
  siRNA target sequence for CABIN1 (NM_012295.2,2662-2680).
gctaccctggatcattcta

SEQ ID NO: 294242 - DNA, 19 bp, Homo sapiens
  siRNA target sequence for CABIN1 (NM_012295.2,2836-2854).
ctggtgctgcaattcagat

SEQ ID NO: 294243 - DNA, 19 bp, Homo sapiens
  siRNA target sequence for CABIN1 (NM_012295.2,2856-2874).
gggctctgctgcgattcta

SEQ ID NO: 294244 - DNA, 19 bp, Homo sapiens
  siRNA target sequence for CABIN1 (NM_012295.2,2859-2877).
ctctgctgcgattctatgt

SEQ ID NO: 294245 - DNA, 19 bp, Homo sapiens
  siRNA target sequence for CABIN1 (NM_012295.2,3029-3047).
gcccagcaggtggatctta

SEQ ID NO: 294246 - DNA, 19 bp, Homo sapiens
  siRNA target sequence for CABIN1 (NM_012295.2,3051-3069).
gggaggatgcactgttcat

SEQ ID NO: 294247 - DNA, 19 bp, Homo sapiens
  siRNA target sequence for CABIN1 (NM_012295.2,3053-3071).
gaggatgcactgttcatgt

SEQ ID NO: 294248 - DNA, 19 bp, Homo sapiens
  siRNA target sequence for CABIN1 (NM_012295.2,3055-3073).
ggatgcactgttcatgttt

SEQ ID NO: 294249 - DNA, 19 bp, Homo sapiens
  siRNA target sequence for CABIN1 (NM_012295.2,3060-3078).
cactgttcatgtttgagta

SEQ ID NO: 294250 - DNA, 19 bp, Homo sapiens
  siRNA target sequence for CABIN1 (NM_012295.2,3062-3080).
ctgttcatgtttgagtatt

SEQ ID NO: 294251 - DNA, 19 bp, Homo sapiens
  siRNA target sequence for CABIN1 (NM_012295.2,3088-3106).
caagacccttcctgaattt

SEQ ID NO: 294252 - DNA, 19 bp, Homo sapiens
  siRNA target sequence for CABIN1 (NM_012295.2,3098-3116).
cctgaatttgacagctata

SEQ ID NO: 294253 - DNA, 19 bp, Homo sapiens
  siRNA target sequence for CABIN1 (NM_012295.2,3101-3119).
gaatttgacagctataaga

SEQ ID NO: 294254 - DNA, 19 bp, Homo sapiens
  siRNA target sequence for CABIN1 (NM_012295.2,3220-3238).
ctacattgagggaacttca

SEQ ID NO: 294255 - DNA, 19 bp, Homo sapiens
  siRNA target sequence for CABIN1 (NM_012295.2,3223-3241).
cattgagggaacttcaact

SEQ ID NO: 294256 - DNA, 19 bp, Homo sapiens
  siRNA target sequence for CABIN1 (NM_012295.2,3282-3300).
cagtggtgaacgagcttta

SEQ ID NO: 294257 - DNA, 19 bp, Homo sapiens
  siRNA target sequence for CABIN1 (NM_012295.2,3284-3302).
gtggtgaacgagctttact

SEQ ID NO: 294258 - DNA, 19 bp, Homo sapiens
  siRNA target sequence for CABIN1 (NM_012295.2,3308-3326).
ctggctgattatcatttca

SEQ ID NO: 294259 - DNA, 19 bp, Homo sapiens
  siRNA target sequence for CABIN1 (NM_012295.2,3379-3397).
ctgccccaataggtttgat

SEQ ID NO: 294260 - DNA, 19 bp, Homo sapiens
  siRNA target sequence for CABIN1 (NM_012295.2,3547-3565).
gtccctatggattgagtat

SEQ ID NO: 294261 - DNA, 19 bp, Homo sapiens
  siRNA target sequence for CABIN1 (NM_012295.2,3591-3609).
cattcgcctcacgtcaatt

SEQ ID NO: 294262 - DNA, 19 bp, Homo sapiens
  siRNA target sequence for CABIN1 (NM_012295.2,3978-3996).
cagaggtcctggtcaactt

SEQ ID NO: 294263 - DNA, 19 bp, Homo sapiens
  siRNA target sequence for CABIN1 (NM_012295.2,4045-4063).
cacacccaaagcttcagaa

SEQ ID NO: 294264 - DNA, 19 bp, Homo sapiens
  siRNA target sequence for CABIN1 (NM_012295.2,4185-4203).
ctccgattgaccacgatta

SEQ ID NO: 294265 - DNA, 19 bp, Homo sapiens
  siRNA target sequence for CABIN1 (NM_012295.2,4188-4206).
cgattgaccacgattacgt

SEQ ID NO: 294266 - DNA, 19 bp, Homo sapiens
  siRNA target sequence for CABIN1 (NM_012295.2,4193-4211).
gaccacgattacgtcaaat

SEQ ID NO: 294267 - DNA, 19 bp, Homo sapiens
  siRNA target sequence for CABIN1 (NM_012295.2,4195-4213).
ccacgattacgtcaaatgt

SEQ ID NO: 294268 - DNA, 19 bp, Homo sapiens
  siRNA target sequence for CABIN1 (NM_012295.2,4196-4214).
cacgattacgtcaaatgta

SEQ ID NO: 294269 - DNA, 19 bp, Homo sapiens
  siRNA target sequence for CABIN1 (NM_012295.2,4290-4308).
caacgcaggacttctttaa

SEQ ID NO: 294270 - DNA, 19 bp, Homo sapiens
  siRNA target sequence for CABIN1 (NM_012295.2,4293-4311).
cgcaggacttctttaatga

SEQ ID NO: 294271 - DNA, 19 bp, Homo sapiens
  siRNA target sequence for CABIN1 (NM_012295.2,4383-4401).
caggagcgacgggtaaaga

SEQ ID NO: 294272 - DNA, 19 bp, Homo sapiens
  siRNA target sequence for CABIN1 (NM_012295.2,4386-4404).
gagcgacgggtaaagatct

SEQ ID NO: 294273 - DNA, 19 bp, Homo sapiens
  siRNA target sequence for CABIN1 (NM_012295.2,4389-4407).
cgacgggtaaagatcttca

SEQ ID NO: 294274 - DNA, 19 bp, Homo sapiens
  siRNA target sequence for CABIN1 (NM_012295.2,4691-4709).
cgcttcccccagcactata

SEQ ID NO: 294275 - DNA, 19 bp, Homo sapiens
  siRNA target sequence for CABIN1 (NM_012295.2,4692-4710).
gcttcccccagcactataa

SEQ ID NO: 294276 - DNA, 19 bp, Homo sapiens
  siRNA target sequence for CABIN1 (NM_012295.2,4797-4815).
gtatcccgtggcaacaact

SEQ ID NO: 294277 - DNA, 19 bp, Homo sapiens
  siRNA target sequence for CABIN1 (NM_012295.2,5358-5376).
gcggggagcggaaggataa

SEQ ID NO: 294278 - DNA, 19 bp, Homo sapiens
  siRNA target sequence for CABIN1 (NM_012295.2,5359-5377).
cggggagcggaaggataaa

SEQ ID NO: 294279 - DNA, 19 bp, Homo sapiens
  siRNA target sequence for CABIN1 (NM_012295.2,5361-5379).
gggagcggaaggataaaga

SEQ ID NO: 294280 - DNA, 19 bp, Homo sapiens
  siRNA target sequence for CABIN1 (NM_012295.2,5924-5942).
gacagccgagagaacttct

SEQ ID NO: 294281 - DNA, 19 bp, Homo sapiens
  siRNA target sequence for CABIN1 (NM_012295.2,6035-6053).
ctagctgccgccacaacta

SEQ ID NO: 294282 - DNA, 19 bp, Homo sapiens
  siRNA target sequence for CABIN1 (NM_012295.2,6038-6056).
gctgccgccacaactatta

SEQ ID NO: 294283 - DNA, 19 bp, Homo sapiens
  siRNA target sequence for CABIN1 (NM_012295.2,6039-6057).
ctgccgccacaactattat

SEQ ID NO: 294284 - DNA, 19 bp, Homo sapiens
  siRNA target sequence for CABIN1 (NM_012295.2,6041-6059).
gccgccacaactattatca

SEQ ID NO: 294285 - DNA, 19 bp, Homo sapiens
  siRNA target sequence for CABIN1 (NM_012295.2,6770-6788).
gacgactacatggacattt

SEQ ID NO: 294286 - DNA, 19 bp, Homo sapiens
  siRNA target sequence for I-4 (NM_025210.1,246-264).
gcagtctggagggactatt

SEQ ID NO: 294287 - DNA, 19 bp, Homo sapiens
  siRNA target sequence for I-4 (NM_025210.1,251-269).
ctggagggactattcaaga

SEQ ID NO: 294288 - DNA, 19 bp, Homo sapiens
  siRNA target sequence for I-4 (NM_025210.1,254-272).
gagggactattcaagatgt

SEQ ID NO: 294289 - DNA, 19 bp, Homo sapiens
  siRNA target sequence for I-4 (NM_025210.1,289-307).
caaaagtgggacgaatcaa

SEQ ID NO: 294290 - DNA, 19 bp, Homo sapiens
  siRNA target sequence for I-4 (NM_025210.1,325-343).
cgcgcaacgtacagagatt

SEQ ID NO: 294291 - DNA, 19 bp, Homo sapiens
  siRNA target sequence for I-4 (NM_025210.1,326-344).
gcgcaacgtacagagatta

SEQ ID NO: 294292 - DNA, 19 bp, Homo sapiens
  siRNA target sequence for I-4 (NM_025210.1,329-347).
caacgtacagagattacga

SEQ ID NO: 294293 - DNA, 19 bp, Homo sapiens
  siRNA target sequence for I-4 (NM_025210.1,338-356).
gagattacgatttaatgaa

SEQ ID NO: 294294 - DNA, 19 bp, Homo sapiens
  siRNA target sequence for I-4 (NM_025210.1,381-399).
catgagtgtgcaagataat

SEQ ID NO: 294295 - DNA, 19 bp, Homo sapiens
  siRNA target sequence for I-4 (NM_025210.1,559-577).
cggcagttcgaaatgagaa

SEQ ID NO: 294296 - DNA, 19 bp, Homo sapiens
  siRNA target sequence for I-4 (NM_025210.1,586-604).
cactacaacgaagaattga

SEQ ID NO: 294297 - DNA, 19 bp, Homo sapiens
  siRNA target sequence for I-4 (NM_025210.1,594-612).
cgaagaattgaacatcaaa

SEQ ID NO: 294298 - DNA, 19 bp, Homo sapiens
  siRNA target sequence for I-4 (NM_025210.1,696-714).
gactgctgcggaagaatca

SEQ ID NO: 294299 - DNA, 19 bp, Homo sapiens
  siRNA target sequence for PPP1R11 (NM_021959.1,274-292).
ccggagccttaccatcaaa

SEQ ID NO: 294300 - DNA, 19 bp, Homo sapiens
  siRNA target sequence for PPP1R11 (NM_170781.1,258-276).
caaccgagcccgatgattt

SEQ ID NO: 294301 - DNA, 19 bp, Homo sapiens
  siRNA target sequence for PPP1R11 (NM_170781.1,298-316).
gcaaggattatattttcct

SEQ ID NO: 294302 - DNA, 19 bp, Homo sapiens
  siRNA target sequence for ANP32E (NM_030920.2,478-496).
ggctaatgtggaactaagt

SEQ ID NO: 294303 - DNA, 19 bp, Homo sapiens
  siRNA target sequence for ANP32E (NM_030920.2,479-497).
gctaatgtggaactaagtt

SEQ ID NO: 294304 - DNA, 19 bp, Homo sapiens
  siRNA target sequence for ANP32E (NM_030920.2,506-524).
cggcttcccagcttaaata

SEQ ID NO: 294305 - DNA, 19 bp, Homo sapiens
  siRNA target sequence for ANP32E (NM_030920.2,507-525).
ggcttcccagcttaaataa

SEQ ID NO: 294306 - DNA, 19 bp, Homo sapiens
  siRNA target sequence for ANP32E (NM_030920.2,508-526).
gcttcccagcttaaataaa

SEQ ID NO: 294307 - DNA, 19 bp, Homo sapiens
  siRNA target sequence for ANP32E (NM_030920.2,539-557).
gagcttagtgataatataa

SEQ ID NO: 294308 - DNA, 19 bp, Homo sapiens
  siRNA target sequence for ANP32E (NM_030920.2,541-559).
gcttagtgataatataatt

SEQ ID NO: 294309 - DNA, 19 bp, Homo sapiens
  siRNA target sequence for ANP32E (NM_030920.2,572-590).
gaagtcctggcagagaaat

SEQ ID NO: 294310 - DNA, 19 bp, Homo sapiens
  siRNA target sequence for ANP32E (NM_030920.2,599-617).
cttacctacctcaatctga

SEQ ID NO: 294311 - DNA, 19 bp, Homo sapiens
  siRNA target sequence for ANP32E (NM_030920.2,743-761).
ctactgcagcaaatcacat

SEQ ID NO: 294312 - DNA, 19 bp, Homo sapiens
  siRNA target sequence for ANP32E (NM_030920.2,751-769).
gcaaatcacatacttagat

SEQ ID NO: 294313 - DNA, 19 bp, Homo sapiens
  siRNA target sequence for ANP32E (NM_030920.2,759-777).
catacttagatggatttga

SEQ ID NO: 294314 - DNA, 19 bp, Homo sapiens
  siRNA target sequence for ANP32E (NM_030920.2,864-882).
ctggtccaccggaaggata

SEQ ID NO: 294315 - DNA, 19 bp, Homo sapiens
  siRNA target sequence for ANP32E (NM_030920.2,867-885).
gtccaccggaaggatatga

SEQ ID NO: 294316 - DNA, 19 bp, Homo sapiens
  siRNA target sequence for ANP32E (NM_030920.2,981-999).
gcctctcatacttaatgaa

SEQ ID NO: 294317 - DNA, 19 bp, Homo sapiens
  siRNA target sequence for ANP32E (NM_030920.2,982-1000).
cctctcatacttaatgaaa

SEQ ID NO: 294318 - DNA, 19 bp, Homo sapiens
  siRNA target sequence for SNCB (NM_003085.2,256-274).
gcttcagtggctgaaaaaa

SEQ ID NO: 294319 - DNA, 19 bp, Homo sapiens
  siRNA target sequence for SNCB (NM_003085.2,357-375).
ggaggaattccctactgat

SEQ ID NO: 294320 - DNA, 19 bp, Homo sapiens
  siRNA target sequence for GPS1 (NM_004127.3,66-84).
ctgccggttcaggtgttta

SEQ ID NO: 294321 - DNA, 19 bp, Homo sapiens
  siRNA target sequence for GPS1 (NM_004127.3,69-87).
ccggttcaggtgtttaact

SEQ ID NO: 294322 - DNA, 19 bp, Homo sapiens
  siRNA target sequence for GPS1 (NM_004127.3,70-88).
cggttcaggtgtttaactt

SEQ ID NO: 294323 - DNA, 19 bp, Homo sapiens
  siRNA target sequence for GPS1 (NM_004127.3,230-248).
cgaacggctgcagttcatt

SEQ ID NO: 294324 - DNA, 19 bp, Homo sapiens
  siRNA target sequence for GPS1 (NM_004127.3,299-317).
cttcgtgcagagaaccttt

SEQ ID NO: 294325 - DNA, 19 bp, Homo sapiens
  siRNA target sequence for GPS1 (NM_004127.3,313-331).
cctttaacgtggacatgta

SEQ ID NO: 294326 - DNA, 19 bp, Homo sapiens
  siRNA target sequence for GPS1 (NM_004127.3,507-525).
ggcaactccatcaaagaga

SEQ ID NO: 294327 - DNA, 19 bp, Homo sapiens
  siRNA target sequence for GPS1 (NM_004127.3,675-693).
gtctacttgcagaattggt

SEQ ID NO: 294328 - DNA, 19 bp, Homo sapiens
  siRNA target sequence for GPS1 (NM_004127.3,1161-1179).
cgtgccctcatccagtatt

SEQ ID NO: 294329 - DNA, 19 bp, Homo sapiens
  siRNA target sequence for GPS1 (NM_004127.3,1191-1209).
gtgtcagccgacatgcata

SEQ ID NO: 294330 - DNA, 19 bp, Homo sapiens
  siRNA target sequence for GPS1 (NM_004127.3,1195-1213).
cagccgacatgcataggat

SEQ ID NO: 294331 - DNA, 19 bp, Homo sapiens
  siRNA target sequence for GPS1 (NM_004127.3,1215-1233).
gcggcagccttcaatacca

SEQ ID NO: 294332 - DNA, 19 bp, Homo sapiens
  siRNA target sequence for GPS1 (NM_004127.3,1341-1359).
cgcagcaccacctttgaga

SEQ ID NO: 294333 - DNA, 19 bp, Homo sapiens
  siRNA target sequence for GPS1 (NM_004127.3,1429-1447).
gcaaccagatccatgtcaa

SEQ ID NO: 294334 - DNA, 19 bp, Homo sapiens
  siRNA target sequence for GPS2 (NM_004489.3,2686-2704).
cgctgcaccggcacattat

SEQ ID NO: 294335 - DNA, 19 bp, Homo sapiens
  siRNA target sequence for GPS2 (NM_004489.3,2688-2706).
ctgcaccggcacattatga

SEQ ID NO: 294336 - DNA, 19 bp, Homo sapiens
  siRNA target sequence for GPS2 (NM_004489.3,2898-2916).
ctgcagctcaagaaagttt

SEQ ID NO: 294337 - DNA, 19 bp, Homo sapiens
  siRNA target sequence for GPS2 (NM_004489.3,3078-3096).
gacagagccaaacaaatgt

SEQ ID NO: 294338 - DNA, 19 bp, Homo sapiens
  siRNA target sequence for GPS2 (NM_004489.3,3289-3307).
cagtgcagtacctatctca

SEQ ID NO: 294339 - DNA, 19 bp, Homo sapiens
  siRNA target sequence for GPS2 (NM_004489.3,3378-3396).
ggtgccctgtccttgcaaa

SEQ ID NO: 294340 - DNA, 19 bp, Homo sapiens
  siRNA target sequence for GPS2 (NM_004489.3,3382-3400).
ccctgtccttgcaaaagca

SEQ ID NO: 294341 - DNA, 19 bp, Homo sapiens
  siRNA target sequence for GPS2 (NM_032442.1,301-319).
gagcggctccattgagatt

SEQ ID NO: 294342 - DNA, 19 bp, Homo sapiens
  siRNA target sequence for GPS2 (NM_032442.1,576-594).
gggccgtcgtggaccttta

SEQ ID NO: 294343 - DNA, 19 bp, Homo sapiens
  siRNA target sequence for GPS2 (NM_032442.1,577-595).
ggccgtcgtggacctttat

SEQ ID NO: 294344 - DNA, 19 bp, Homo sapiens
  siRNA target sequence for GPS2 (NM_032442.1,715-733).
ggggacctctgcagatgaa

SEQ ID NO: 294345 - DNA, 19 bp, Homo sapiens
  siRNA target sequence for GPS2 (NM_032442.1,781-799).
cagccttgagtcgcataat

SEQ ID NO: 294346 - DNA, 19 bp, Homo sapiens
  siRNA target sequence for GPS2 (NM_032442.1,783-801).
gccttgagtcgcataatga

SEQ ID NO: 294347 - DNA, 19 bp, Homo sapiens
  siRNA target sequence for GPS2 (NM_032442.1,785-803).
cttgagtcgcataatgact

SEQ ID NO: 294348 - DNA, 19 bp, Homo sapiens
  siRNA target sequence for GPS2 (NM_032442.1,976-994).
gtgcgggaccctcatcaaa

SEQ ID NO: 294349 - DNA, 19 bp, Homo sapiens
  siRNA target sequence for GPS2 (NM_032442.1,978-996).
gcgggaccctcatcaaact

SEQ ID NO: 294350 - DNA, 19 bp, Homo sapiens
  siRNA target sequence for GPS2 (NM_032442.1,980-998).
gggaccctcatcaaactca

SEQ ID NO: 294351 - DNA, 19 bp, Homo sapiens
  siRNA target sequence for GPS2 (NM_032442.1,1033-1051).
cctggatgaattcaacaat

SEQ ID NO: 294352 - DNA, 19 bp, Homo sapiens
  siRNA target sequence for GPS2 (NM_032442.1,1073-1091).
ccccttcgggacaatgaga

SEQ ID NO: 294353 - DNA, 19 bp, Homo sapiens
  siRNA target sequence for GPS2 (NM_032442.1,1074-1092).
cccttcgggacaatgagat

SEQ ID NO: 294354 - DNA, 19 bp, Homo sapiens
  siRNA target sequence for GPS2 (NM_032442.1,1104-1122).
gtatcgacaagcttgttga

SEQ ID NO: 294355 - DNA, 19 bp, Homo sapiens
  siRNA target sequence for GPS2 (NM_032442.1,1109-1127).
gacaagcttgttgataagt

SEQ ID NO: 294356 - DNA, 19 bp, Homo sapiens
  siRNA target sequence for GPS2 (NM_032442.1,1267-1285).
ggagtactgcgaattcagt

SEQ ID NO: 294357 - DNA, 19 bp, Homo sapiens
  siRNA target sequence for GPS2 (NM_032442.1,1338-1356).
ctgccctacacttcttcat

SEQ ID NO: 294358 - DNA, 19 bp, Homo sapiens
  siRNA target sequence for GPS2 (NM_032442.1,1340-1358).
gccctacacttcttcatta

SEQ ID NO: 294359 - DNA, 19 bp, Homo sapiens
  siRNA target sequence for GPS2 (NM_032442.1,1351-1369).
cttcattaatggtatcgat

SEQ ID NO: 294360 - DNA, 19 bp, Homo sapiens
  siRNA target sequence for GPS2 (NM_032442.1,1442-1460).
gtgaccatcgtccacaata

SEQ ID NO: 294361 - DNA, 19 bp, Homo sapiens
  siRNA target sequence for GPS2 (NM_032442.1,1446-1464).
ccatcgtccacaataacaa

SEQ ID NO: 294362 - DNA, 19 bp, Homo sapiens
  siRNA target sequence for GPS2 (NM_032442.1,1942-1960).
cgggactctccacttcttt

SEQ ID NO: 294363 - DNA, 19 bp, Homo sapiens
  siRNA target sequence for GPS2 (NM_032442.1,2181-2199).
gtaacgcagtcatcactaa

SEQ ID NO: 294364 - DNA, 19 bp, Homo sapiens
  siRNA target sequence for GPS2 (NM_032442.1,2227-2245).
ctgtcgcagcgagtttaat

SEQ ID NO: 294365 - DNA, 19 bp, Homo sapiens
  siRNA target sequence for GPS2 (NM_032442.1,2229-2247).
gtcgcagcgagtttaatga

SEQ ID NO: 294366 - DNA, 19 bp, Homo sapiens
  siRNA target sequence for GPS2 (NM_032442.1,2278-2296).
ggatggagagctgtttgaa

SEQ ID NO: 294367 - DNA, 19 bp, Homo sapiens
  siRNA target sequence for GPS2 (NM_032442.1,2341-2359).
ggctggagtgactgctatt

SEQ ID NO: 294368 - DNA, 19 bp, Homo sapiens
  siRNA target sequence for GPS2 (NM_032442.1,2388-2406).
ccatgacagacattgacta

SEQ ID NO: 294369 - DNA, 19 bp, Homo sapiens
  siRNA target sequence for GPS2 (NM_032442.1,2452-2470).
cacgatgcgcaacaattat

SEQ ID NO: 294370 - DNA, 19 bp, Homo sapiens
  siRNA target sequence for GPS2 (NM_032442.1,2531-2549).
ggcgacctgcactacttca

SEQ ID NO: 294371 - DNA, 19 bp, Homo sapiens
  siRNA target sequence for GPS2 (NM_032442.1,2532-2550).
gcgacctgcactacttcat

SEQ ID NO: 294372 - DNA, 19 bp, Homo sapiens
  siRNA target sequence for GPS2 (NM_032442.1,2741-2759).
caccgattccacagtactt

SEQ ID NO: 294373 - DNA, 19 bp, Homo sapiens
  siRNA target sequence for GPS2 (NM_032442.1,2822-2840).
catggccttgtcttcagta

SEQ ID NO: 294374 - DNA, 19 bp, Homo sapiens
  siRNA target sequence for GPS2 (NM_032442.1,2851-2869).
gagggctgaggaagtcttt

SEQ ID NO: 294375 - DNA, 19 bp, Homo sapiens
  siRNA target sequence for GPS2 (NM_032442.1,3058-3076).
gctccagaggatgaactat

SEQ ID NO: 294376 - DNA, 19 bp, Homo sapiens
  siRNA target sequence for GPS2 (NM_032442.1,3236-3254).
cgcggtgtgtcaattgtca

SEQ ID NO: 294377 - DNA, 19 bp, Homo sapiens
  siRNA target sequence for GPS2 (NM_032442.1,3365-3383).
cagaatgaagtgggtatta

SEQ ID NO: 294378 - DNA, 19 bp, Homo sapiens
  siRNA target sequence for GPS2 (NM_032442.1,3367-3385).
gaatgaagtgggtattata

SEQ ID NO: 294379 - DNA, 19 bp, Homo sapiens
  siRNA target sequence for GPS2 (NM_032442.1,3520-3538).
ggtgcaggtgcggatagat

SEQ ID NO: 294380 - DNA, 19 bp, Homo sapiens
  siRNA target sequence for GPS2 (NM_032442.1,3521-3539).
gtgcaggtgcggatagatt

SEQ ID NO: 294381 - DNA, 19 bp, Homo sapiens
  siRNA target sequence for GPS2 (NM_032442.1,3526-3544).
ggtgcggatagatttccta

SEQ ID NO: 294382 - DNA, 19 bp, Homo sapiens
  siRNA target sequence for GPS2 (NM_032442.1,3527-3545).
gtgcggatagatttcctaa

SEQ ID NO: 294383 - DNA, 19 bp, Homo sapiens
  siRNA target sequence for GPS2 (NM_032442.1,3591-3609).
cgcctgagaggctcaactt

SEQ ID NO: 294384 - DNA, 19 bp, Homo sapiens
  siRNA target sequence for GPS2 (NM_032442.1,3671-3689).
cacaacggtctcaagatct

SEQ ID NO: 294385 - DNA, 19 bp, Homo sapiens
  siRNA target sequence for GPS2 (NM_032442.1,3764-3782).
gggctgcatcttcatgtta

SEQ ID NO: 294386 - DNA, 19 bp, Homo sapiens
  siRNA target sequence for GPS2 (NM_032442.1,3765-3783).
ggctgcatcttcatgttaa

SEQ ID NO: 294387 - DNA, 19 bp, Homo sapiens
  siRNA target sequence for GPS2 (NM_032442.1,3766-3784).
gctgcatcttcatgttaat

SEQ ID NO: 294388 - DNA, 19 bp, Homo sapiens
  siRNA target sequence for GPS2 (NM_032442.1,3943-3961).
catggtggacggtatcaaa

SEQ ID NO: 294389 - DNA, 19 bp, Homo sapiens
  siRNA target sequence for GPS2 (NM_032442.1,3987-4005).
ctgccgctagtcctctaaa

SEQ ID NO: 294390 - DNA, 19 bp, Homo sapiens
  siRNA target sequence for GPS2 (NM_032442.1,3989-4007).
gccgctagtcctctaaaga

SEQ ID NO: 294391 - DNA, 19 bp, Homo sapiens
  siRNA target sequence for GPS2 (NM_032442.1,4029-4047).
gctctcgcttccaagaact

SEQ ID NO: 294392 - DNA, 19 bp, Homo sapiens
  siRNA target sequence for GPS2 (NM_032442.1,4051-4069).
gctgcttcccgaagattat

SEQ ID NO: 294393 - DNA, 19 bp, Homo sapiens
  siRNA target sequence for GPS2 (NM_032442.1,4055-4073).
cttcccgaagattatttca

SEQ ID NO: 294394 - DNA, 19 bp, Homo sapiens
  siRNA target sequence for GPS2 (NM_032442.1,4195-4213).
gttcaacctcagagtgaat

SEQ ID NO: 294395 - DNA, 19 bp, Homo sapiens
  siRNA target sequence for GPS2 (NM_032442.1,4229-4247).
gggacactaaccaagaagt

SEQ ID NO: 294396 - DNA, 19 bp, Homo sapiens
  siRNA target sequence for GPS2 (NM_032442.1,4433-4451).
ctttccccctcccttcaat

SEQ ID NO: 294397 - DNA, 19 bp, Homo sapiens
  siRNA target sequence for GPS2 (NM_032442.1,4438-4456).
cccctcccttcaatatgct

SEQ ID NO: 294398 - DNA, 19 bp, Homo sapiens
  siRNA target sequence for OAZ1 (NM_004152.2,332-350).
cagagggatcacaatcttt

SEQ ID NO: 294399 - DNA, 19 bp, Homo sapiens
  siRNA target sequence for OAZ1 (NM_004152.2,343-361).
caatctttcagctaactta

SEQ ID NO: 294400 - DNA, 19 bp, Homo sapiens
  siRNA target sequence for OAZ1 (NM_004152.2,370-388).
cgatgatcggctgaatgta

SEQ ID NO: 294401 - DNA, 19 bp, Homo sapiens
  siRNA target sequence for OAZ1 (NM_004152.2,447-465).
cagacgccaaacgcattaa

SEQ ID NO: 294402 - DNA, 19 bp, Homo sapiens
  siRNA target sequence for OAZ1 (NM_004152.2,449-467).
gacgccaaacgcattaact

SEQ ID NO: 294403 - DNA, 19 bp, Homo sapiens
  siRNA target sequence for OAZ1 (NM_004152.2,582-600).
gagccgaccatgtcttcat

SEQ ID NO: 294404 - DNA, 19 bp, Homo sapiens
  siRNA target sequence for OAZ1 (NM_004152.2,584-602).
gccgaccatgtcttcattt

SEQ ID NO: 294405 - DNA, 19 bp, Homo sapiens
  siRNA target sequence for PSMF1 (NM_006814.2,236-254).
ctcgtctgcttcttgcatt

SEQ ID NO: 294406 - DNA, 19 bp, Homo sapiens
  siRNA target sequence for PSMF1 (NM_006814.2,298-316).
ccagccgggtcccaatgat

SEQ ID NO: 294407 - DNA, 19 bp, Homo sapiens
  siRNA target sequence for PSMF1 (NM_006814.2,303-321).
cgggtcccaatgataagaa

SEQ ID NO: 294408 - DNA, 19 bp, Homo sapiens
  siRNA target sequence for PSMF1 (NM_006814.2,305-323).
ggtcccaatgataagaagt

SEQ ID NO: 294409 - DNA, 19 bp, Homo sapiens
  siRNA target sequence for PSMF1 (NM_006814.2,335-353).
ccagctgggtggaacaaca

SEQ ID NO: 294410 - DNA, 19 bp, Homo sapiens
  siRNA target sequence for PSMF1 (NM_006814.2,338-356).
gctgggtggaacaacaata

SEQ ID NO: 294411 - DNA, 19 bp, Homo sapiens
  siRNA target sequence for PSMF1 (NM_006814.2,368-386).
gtcctccggtatgagtata

SEQ ID NO: 294412 - DNA, 19 bp, Homo sapiens
  siRNA target sequence for PSMF1 (NM_006814.2,373-391).
ccggtatgagtataaggat

SEQ ID NO: 294413 - DNA, 19 bp, Homo sapiens
  siRNA target sequence for PSMF1 (NM_006814.2,493-511).
cttggatgattatatcgat

SEQ ID NO: 294414 - DNA, 19 bp, Homo sapiens
  siRNA target sequence for PSMF1 (NM_006814.2,560-578).
cttcggtctcgtattgtgt

SEQ ID NO: 294415 - DNA, 19 bp, Homo sapiens
  siRNA target sequence for PSMF1 (NM_006814.2,570-588).
gtattgtgtctggaatcat

SEQ ID NO: 294416 - DNA, 19 bp, Homo sapiens
  siRNA target sequence for PSMF1 (NM_006814.2,819-837).
gcttcccaagagcacttat

SEQ ID NO: 294417 - DNA, 19 bp, Homo sapiens
  siRNA target sequence for RNH (NM_002939.2,2702-2720).
ctggtcctgtacgacattt

SEQ ID NO: 294418 - DNA, 19 bp, Homo sapiens
  siRNA target sequence for RNH (NM_002939.2,2705-2723).
gtcctgtacgacatttact

SEQ ID NO: 294419 - DNA, 19 bp, Homo sapiens
  siRNA target sequence for ARRB1 (NM_004041.2,127-145).
gtggatcctgagtatctca

SEQ ID NO: 294420 - DNA, 19 bp, Homo sapiens
  siRNA target sequence for ARRB1 (NM_004041.2,129-147).
ggatcctgagtatctcaaa

SEQ ID NO: 294421 - DNA, 19 bp, Homo sapiens
  siRNA target sequence for ARRB1 (NM_004041.2,148-166).
gagcggagagtctatgtga

SEQ ID NO: 294422 - DNA, 19 bp, Homo sapiens
  siRNA target sequence for ARRB1 (NM_004041.2,301-319).
caggaacgcctcatcaaga

SEQ ID NO: 294423 - DNA, 19 bp, Homo sapiens
  siRNA target sequence for ARRB1 (NM_004041.2,442-460).
gccttctgcgcggagaatt

SEQ ID NO: 294424 - DNA, 19 bp, Homo sapiens
  siRNA target sequence for ARRB1 (NM_004041.2,443-461).
ccttctgcgcggagaattt

SEQ ID NO: 294425 - DNA, 19 bp, Homo sapiens
  siRNA target sequence for ARRB1 (NM_004041.2,471-489).
gatccacaagcggaattct

SEQ ID NO: 294426 - DNA, 19 bp, Homo sapiens
  siRNA target sequence for ARRB1 (NM_004041.2,501-519).
catccggaaggttcagtat

SEQ ID NO: 294427 - DNA, 19 bp, Homo sapiens
  siRNA target sequence for ARRB1 (NM_004041.2,824-842).
cccccttcctagccaataa

SEQ ID NO: 294428 - DNA, 19 bp, Homo sapiens
  siRNA target sequence for ARRB1 (NM_004041.2,939-957).
gatcctggggatcattgtt

SEQ ID NO: 294429 - DNA, 19 bp, Homo sapiens
  siRNA target sequence for ARRB1 (NM_004041.2,948-966).
gatcattgtttcctacaaa

SEQ ID NO: 294430 - DNA, 19 bp, Homo sapiens
  siRNA target sequence for ARRB1 (NM_004041.2,1101-1119).
gaacgagacgccagtagat

SEQ ID NO: 294431 - DNA, 19 bp, Homo sapiens
  siRNA target sequence for ARRB1 (NM_004041.2,1107-1125).
gacgccagtagataccaat

SEQ ID NO: 294432 - DNA, 19 bp, Homo sapiens
  siRNA target sequence for ARRB1 (NM_004041.2,1121-1139).
ccaatctcatagaacttga

SEQ ID NO: 294433 - DNA, 19 bp, Homo sapiens
  siRNA target sequence for ARRB1 (NM_004041.2,1237-1255).
ccacagctcaacaacagat

SEQ ID NO: 294434 - DNA, 19 bp, Homo sapiens
  siRNA target sequence for ATPIF1 (NM_016311.3,164-182).
cggatcagtccgagaatgt

SEQ ID NO: 294435 - DNA, 19 bp, Homo sapiens
  siRNA target sequence for ATPIF1 (NM_016311.3,240-258).
ggctgaagaggaacgatat

SEQ ID NO: 294436 - DNA, 19 bp, Homo sapiens
  siRNA target sequence for ATPIF1 (NM_016311.3,303-321).
ccatgaagaagaaatcgtt

SEQ ID NO: 294437 - DNA, 19 bp, Homo sapiens
  siRNA target sequence for ATPIF1 (NM_016311.3,313-331).
gaaatcgttcatcataaga

SEQ ID NO: 294438 - DNA, 19 bp, Homo sapiens
  siRNA target sequence for ATPIF1 (NM_016311.3,364-382).
cgccataagcagaagatca

SEQ ID NO: 294439 - DNA, 19 bp, Homo sapiens
  siRNA target sequence for ATPIF1 (NM_016311.3,365-383).
gccataagcagaagatcaa

SEQ ID NO: 294440 - DNA, 19 bp, Homo sapiens
  siRNA target sequence for ATPIF1 (NM_016311.3,366-384).
ccataagcagaagatcaaa

SEQ ID NO: 294441 - DNA, 19 bp, Homo sapiens
  siRNA target sequence for ATPIF1 (NM_016311.3,381-399).
caaaatgctaaaacatgat

SEQ ID NO: 294442 - DNA, 19 bp, Homo sapiens
  siRNA target sequence for ATPIF1 (NM_178190.1,262-280).
cgacattacaggttatgct

SEQ ID NO: 294443 - DNA, 19 bp, Homo sapiens
  siRNA target sequence for ATPIF1 (NM_178190.1,263-281).
gacattacaggttatgctt

SEQ ID NO: 294444 - DNA, 19 bp, Homo sapiens
  siRNA target sequence for NF1 (NM_000267.1,262-280).
cgacgagcagcttccaata

SEQ ID NO: 294445 - DNA, 19 bp, Homo sapiens
  siRNA target sequence for NF1 (NM_000267.1,322-340).
gcacaacaaggaatgtcta

SEQ ID NO: 294446 - DNA, 19 bp, Homo sapiens
  siRNA target sequence for NF1 (NM_000267.1,323-341).
cacaacaaggaatgtctaa

SEQ ID NO: 294447 - DNA, 19 bp, Homo sapiens
  siRNA target sequence for NF1 (NM_000267.1,378-396).
gcggcctcactactatttt

SEQ ID NO: 294448 - DNA, 19 bp, Homo sapiens
  siRNA target sequence for NF1 (NM_000267.1,379-397).
cggcctcactactatttta

SEQ ID NO: 294449 - DNA, 19 bp, Homo sapiens
  siRNA target sequence for NF1 (NM_000267.1,381-399).
gcctcactactattttaaa

SEQ ID NO: 294450 - DNA, 19 bp, Homo sapiens
  siRNA target sequence for NF1 (NM_000267.1,383-401).
ctcactactattttaaaga

SEQ ID NO: 294451 - DNA, 19 bp, Homo sapiens
  siRNA target sequence for NF1 (NM_000267.1,452-470).
ctctctcagttgattatat

SEQ ID NO: 294452 - DNA, 19 bp, Homo sapiens
  siRNA target sequence for NF1 (NM_000267.1,456-474).
ctcagttgattatattgga

SEQ ID NO: 294453 - DNA, 19 bp, Homo sapiens
  siRNA target sequence for NF1 (NM_000267.1,458-476).
cagttgattatattggata

SEQ ID NO: 294454 - DNA, 19 bp, Homo sapiens
  siRNA target sequence for NF1 (NM_000267.1,489-507).
gtcttgctgggcaaccaaa

SEQ ID NO: 294455 - DNA, 19 bp, Homo sapiens
  siRNA target sequence for NF1 (NM_000267.1,531-549).
cgatgctggtcaaacagtt

SEQ ID NO: 294456 - DNA, 19 bp, Homo sapiens
  siRNA target sequence for NF1 (NM_000267.1,655-673).
caacttcaatgcagtcttt

SEQ ID NO: 294457 - DNA, 19 bp, Homo sapiens
  siRNA target sequence for NF1 (NM_000267.1,658-676).
cttcaatgcagtctttagt

SEQ ID NO: 294458 - DNA, 19 bp, Homo sapiens
  siRNA target sequence for NF1 (NM_000267.1,688-706).
caggttacaggaattaact

SEQ ID NO: 294459 - DNA, 19 bp, Homo sapiens
  siRNA target sequence for NF1 (NM_000267.1,690-708).
ggttacaggaattaactgt

SEQ ID NO: 294460 - DNA, 19 bp, Homo sapiens
  siRNA target sequence for NF1 (NM_000267.1,691-709).
gttacaggaattaactgtt

SEQ ID NO: 294461 - DNA, 19 bp, Homo sapiens
  siRNA target sequence for NF1 (NM_000267.1,760-778).
caatgtggattgtgcaaaa

SEQ ID NO: 294462 - DNA, 19 bp, Homo sapiens
  siRNA target sequence for NF1 (NM_000267.1,834-852).
cgcagttagcagttataaa

SEQ ID NO: 294463 - DNA, 19 bp, Homo sapiens
  siRNA target sequence for NF1 (NM_000267.1,836-854).
cagttagcagttataaata

SEQ ID NO: 294464 - DNA, 19 bp, Homo sapiens
  siRNA target sequence for NF1 (NM_000267.1,873-891).
ggaactgggtagaaaatta

SEQ ID NO: 294465 - DNA, 19 bp, Homo sapiens
  siRNA target sequence for NF1 (NM_000267.1,917-935).
cagatcccacagactgata

SEQ ID NO: 294466 - DNA, 19 bp, Homo sapiens
  siRNA target sequence for NF1 (NM_000267.1,1007-1025).
gtttggccactacaaatca

SEQ ID NO: 294467 - DNA, 19 bp, Homo sapiens
  siRNA target sequence for NF1 (NM_000267.1,1365-1383).
gtataagccctcacaacaa

SEQ ID NO: 294468 - DNA, 19 bp, Homo sapiens
  siRNA target sequence for NF1 (NM_000267.1,1465-1483).
caccaattccgcattggat

SEQ ID NO: 294469 - DNA, 19 bp, Homo sapiens
  siRNA target sequence for NF1 (NM_000267.1,1480-1498).
ggattggtggcctaagatt

SEQ ID NO: 294470 - DNA, 19 bp, Homo sapiens
  siRNA target sequence for NF1 (NM_000267.1,1516-1534).
ctcggttgaacttcgaaat

SEQ ID NO: 294471 - DNA, 19 bp, Homo sapiens
  siRNA target sequence for NF1 (NM_000267.1,1518-1536).
cggttgaacttcgaaatat

SEQ ID NO: 294472 - DNA, 19 bp, Homo sapiens
  siRNA target sequence for NF1 (NM_000267.1,1520-1538).
gttgaacttcgaaatatgt

SEQ ID NO: 294473 - DNA, 19 bp, Homo sapiens
  siRNA target sequence for NF1 (NM_000267.1,1577-1595).
gcacacccagcaatacgaa

SEQ ID NO: 294474 - DNA, 19 bp, Homo sapiens
  siRNA target sequence for NF1 (NM_000267.1,1592-1610).
cgaatggcaccgagtctta

SEQ ID NO: 294475 - DNA, 19 bp, Homo sapiens
  siRNA target sequence for NF1 (NM_000267.1,1625-1643).
gtaacaagccttaaattta

SEQ ID NO: 294476 - DNA, 19 bp, Homo sapiens
  siRNA target sequence for NF1 (NM_000267.1,1660-1678).
cctggagacaagaagctat

SEQ ID NO: 294477 - DNA, 19 bp, Homo sapiens
  siRNA target sequence for NF1 (NM_000267.1,1666-1684).
gacaagaagctataagtat

SEQ ID NO: 294478 - DNA, 19 bp, Homo sapiens
  siRNA target sequence for NF1 (NM_000267.1,1668-1686).
caagaagctataagtatct

SEQ ID NO: 294479 - DNA, 19 bp, Homo sapiens
  siRNA target sequence for NF1 (NM_000267.1,1674-1692).
gctataagtatcttctctt

SEQ ID NO: 294480 - DNA, 19 bp, Homo sapiens
  siRNA target sequence for NF1 (NM_000267.1,1693-1711).
gtccatggtgaaactaatt

SEQ ID NO: 294481 - DNA, 19 bp, Homo sapiens
  siRNA target sequence for NF1 (NM_000267.1,1770-1788).
gcagtacagcagaattaat

SEQ ID NO: 294482 - DNA, 19 bp, Homo sapiens
  siRNA target sequence for NF1 (NM_000267.1,1816-1834).
gtcacacatgccagagatt

SEQ ID NO: 294483 - DNA, 19 bp, Homo sapiens
  siRNA target sequence for NF1 (NM_000267.1,2007-2025).
ggttgcgggaaatattgat

SEQ ID NO: 294484 - DNA, 19 bp, Homo sapiens
  siRNA target sequence for NF1 (NM_000267.1,2095-2113).
cggggtaggatgtgatatt

SEQ ID NO: 294485 - DNA, 19 bp, Homo sapiens
  siRNA target sequence for NF1 (NM_000267.1,2098-2116).
ggtaggatgtgatattcct

SEQ ID NO: 294486 - DNA, 19 bp, Homo sapiens
  siRNA target sequence for NF1 (NM_000267.1,2140-2158).
gtccatggatcatgaagaa

SEQ ID NO: 294487 - DNA, 19 bp, Homo sapiens
  siRNA target sequence for NF1 (NM_000267.1,2146-2164).
ggatcatgaagaattacta

SEQ ID NO: 294488 - DNA, 19 bp, Homo sapiens
  siRNA target sequence for NF1 (NM_000267.1,2764-2782).
cctccagcagagaagcaat

SEQ ID NO: 294489 - DNA, 19 bp, Homo sapiens
  siRNA target sequence for NF1 (NM_000267.1,2765-2783).
ctccagcagagaagcaatt

SEQ ID NO: 294490 - DNA, 19 bp, Homo sapiens
  siRNA target sequence for NF1 (NM_000267.1,2814-2832).
gtccagtcagtgaacgtaa

SEQ ID NO: 294491 - DNA, 19 bp, Homo sapiens
  siRNA target sequence for NF1 (NM_000267.1,2823-2841).
gtgaacgtaagggttctat

SEQ ID NO: 294492 - DNA, 19 bp, Homo sapiens
  siRNA target sequence for NF1 (NM_000267.1,2828-2846).
cgtaagggttctatgattt

SEQ ID NO: 294493 - DNA, 19 bp, Homo sapiens
  siRNA target sequence for NF1 (NM_000267.1,2897-2915).
gatcggctgttgtccttaa

SEQ ID NO: 294494 - DNA, 19 bp, Homo sapiens
  siRNA target sequence for NF1 (NM_000267.1,2901-2919).
ggctgttgtccttaatggt

SEQ ID NO: 294495 - DNA, 19 bp, Homo sapiens
  siRNA target sequence for NF1 (NM_000267.1,2945-2963).
caaatacggaccaatgtta

SEQ ID NO: 294496 - DNA, 19 bp, Homo sapiens
  siRNA target sequence for NF1 (NM_000267.1,3092-3110).
gtagaacaaaccatagcta

SEQ ID NO: 294497 - DNA, 19 bp, Homo sapiens
  siRNA target sequence for NF1 (NM_000267.1,3521-3539).
cttaaatacttcacattat

SEQ ID NO: 294498 - DNA, 19 bp, Homo sapiens
  siRNA target sequence for NF1 (NM_000267.1,3730-3748).
ccagacaagagctacattt

SEQ ID NO: 294499 - DNA, 19 bp, Homo sapiens
  siRNA target sequence for NF1 (NM_000267.1,3793-3811).
cacacttgcagaaacagta

SEQ ID NO: 294500 - DNA, 19 bp, Homo sapiens
  siRNA target sequence for NF1 (NM_000267.1,3816-3834).
ctgatcggtttgagagatt

SEQ ID NO: 294501 - DNA, 19 bp, Homo sapiens
  siRNA target sequence for NF1 (NM_000267.1,4068-4086).
cattctgtttcaaggtata

SEQ ID NO: 294502 - DNA, 19 bp, Homo sapiens
  siRNA target sequence for NF1 (NM_000267.1,4072-4090).
ctgtttcaaggtatatggt

SEQ ID NO: 294503 - DNA, 19 bp, Homo sapiens
  siRNA target sequence for NF1 (NM_000267.1,4081-4099).
ggtatatggtgctacctat

SEQ ID NO: 294504 - DNA, 19 bp, Homo sapiens
  siRNA target sequence for NF1 (NM_000267.1,4111-4129).
cctggatcctttattacga

SEQ ID NO: 294505 - DNA, 19 bp, Homo sapiens
  siRNA target sequence for NF1 (NM_000267.1,4112-4130).
ctggatcctttattacgaa

SEQ ID NO: 294506 - DNA, 19 bp, Homo sapiens
  siRNA target sequence for NF1 (NM_000267.1,4114-4132).
ggatcctttattacgaatt

SEQ ID NO: 294507 - DNA, 19 bp, Homo sapiens
  siRNA target sequence for NF1 (NM_000267.1,4118-4136).
cctttattacgaattgtga

SEQ ID NO: 294508 - DNA, 19 bp, Homo sapiens
  siRNA target sequence for NF1 (NM_000267.1,4143-4161).
cctctgattggcaacatgt

SEQ ID NO: 294509 - DNA, 19 bp, Homo sapiens
  siRNA target sequence for NF1 (NM_000267.1,4153-4171).
gcaacatgttagctttgaa

SEQ ID NO: 294510 - DNA, 19 bp, Homo sapiens
  siRNA target sequence for NF1 (NM_000267.1,4229-4247).
cttcagatgactgaaaagt

SEQ ID NO: 294511 - DNA, 19 bp, Homo sapiens
  siRNA target sequence for NF1 (NM_000267.1,4299-4317).
gtgtgtgccactgtttata

SEQ ID NO: 294512 - DNA, 19 bp, Homo sapiens
  siRNA target sequence for NF1 (NM_000267.1,4439-4457).
ccaccacctagaatcgaaa

SEQ ID NO: 294513 - DNA, 19 bp, Homo sapiens
  siRNA target sequence for NF1 (NM_000267.1,4574-4592).
cgcaggtttttccttgata

SEQ ID NO: 294514 - DNA, 19 bp, Homo sapiens
  siRNA target sequence for NF1 (NM_000267.1,4973-4991).
gttgcacggaggttcaaaa

SEQ ID NO: 294515 - DNA, 19 bp, Homo sapiens
  siRNA target sequence for NF1 (NM_000267.1,4995-5013).
gtcaaatcaatggtgattt

SEQ ID NO: 294516 - DNA, 19 bp, Homo sapiens
  siRNA target sequence for NF1 (NM_000267.1,5007-5025).
gtgatttgctgatatacca

SEQ ID NO: 294517 - DNA, 19 bp, Homo sapiens
  siRNA target sequence for NF1 (NM_000267.1,5094-5112).
ggcctagcaatcgctttaa

SEQ ID NO: 294518 - DNA, 19 bp, Homo sapiens
  siRNA target sequence for NF1 (NM_000267.1,5095-5113).
gcctagcaatcgctttaaa

SEQ ID NO: 294519 - DNA, 19 bp, Homo sapiens
  siRNA target sequence for NF1 (NM_000267.1,5096-5114).
cctagcaatcgctttaaaa

SEQ ID NO: 294520 - DNA, 19 bp, Homo sapiens
  siRNA target sequence for NF1 (NM_000267.1,5125-5143).
ctctaagtggtttgttgtt

SEQ ID NO: 294521 - DNA, 19 bp, Homo sapiens
  siRNA target sequence for NF1 (NM_000267.1,5164-5182).
caacgtctccgcagtctat

SEQ ID NO: 294522 - DNA, 19 bp, Homo sapiens
  siRNA target sequence for NF1 (NM_000267.1,5170-5188).
ctccgcagtctatatctat

SEQ ID NO: 294523 - DNA, 19 bp, Homo sapiens
  siRNA target sequence for NF1 (NM_000267.1,5172-5190).
ccgcagtctatatctataa

SEQ ID NO: 294524 - DNA, 19 bp, Homo sapiens
  siRNA target sequence for NF1 (NM_000267.1,5208-5226).
gggagtacaccaagtatca

SEQ ID NO: 294525 - DNA, 19 bp, Homo sapiens
  siRNA target sequence for NF1 (NM_000267.1,5209-5227).
ggagtacaccaagtatcat

SEQ ID NO: 294526 - DNA, 19 bp, Homo sapiens
  siRNA target sequence for NF1 (NM_000267.1,5243-5261).
ggcctcaaaggtagcaaaa

SEQ ID NO: 294527 - DNA, 19 bp, Homo sapiens
  siRNA target sequence for NF1 (NM_000267.1,5299-5317).
gcacatagagcatgaacaa

SEQ ID NO: 294528 - DNA, 19 bp, Homo sapiens
  siRNA target sequence for NF1 (NM_000267.1,5331-5349).
ctgccaccttggctttaga

SEQ ID NO: 294529 - DNA, 19 bp, Homo sapiens
  siRNA target sequence for NF1 (NM_000267.1,5400-5418).
ccaaagtttctattaaagt

SEQ ID NO: 294530 - DNA, 19 bp, Homo sapiens
  siRNA target sequence for NF1 (NM_000267.1,5442-5460).
cttcagcagagcgaacaaa

SEQ ID NO: 294531 - DNA, 19 bp, Homo sapiens
  siRNA target sequence for NF1 (NM_000267.1,5464-5482).
cctagggcaatcagtcttt

SEQ ID NO: 294532 - DNA, 19 bp, Homo sapiens
  siRNA target sequence for NF1 (NM_000267.1,5468-5486).
gggcaatcagtctttctaa

SEQ ID NO: 294533 - DNA, 19 bp, Homo sapiens
  siRNA target sequence for NF1 (NM_000267.1,5469-5487).
ggcaatcagtctttctaaa

SEQ ID NO: 294534 - DNA, 19 bp, Homo sapiens
  siRNA target sequence for NF1 (NM_000267.1,5475-5493).
cagtctttctaaatgacat

SEQ ID NO: 294535 - DNA, 19 bp, Homo sapiens
  siRNA target sequence for NF1 (NM_000267.1,5699-5717).
cctgggacactgctcaata

SEQ ID NO: 294536 - DNA, 19 bp, Homo sapiens
  siRNA target sequence for NF1 (NM_000267.1,5710-5728).
gctcaatatcgcattactt

SEQ ID NO: 294537 - DNA, 19 bp, Homo sapiens
  siRNA target sequence for NF1 (NM_000267.1,5711-5729).
ctcaatatcgcattactta

SEQ ID NO: 294538 - DNA, 19 bp, Homo sapiens
  siRNA target sequence for NF1 (NM_000267.1,5713-5731).
caatatcgcattacttaat

SEQ ID NO: 294539 - DNA, 19 bp, Homo sapiens
  siRNA target sequence for NF1 (NM_000267.1,5737-5755).
cagttctgacccgagttta

SEQ ID NO: 294540 - DNA, 19 bp, Homo sapiens
  siRNA target sequence for NF1 (NM_000267.1,5757-5775).
ggtcagctgcctataatct

SEQ ID NO: 294541 - DNA, 19 bp, Homo sapiens
  siRNA target sequence for NF1 (NM_000267.1,5760-5778).
cagctgcctataatcttct

SEQ ID NO: 294542 - DNA, 19 bp, Homo sapiens
  siRNA target sequence for NF1 (NM_000267.1,5783-5801).
gccttaacttgtaccttta

SEQ ID NO: 294543 - DNA, 19 bp, Homo sapiens
  siRNA target sequence for NF1 (NM_000267.1,5784-5802).
ccttaacttgtacctttaa

SEQ ID NO: 294544 - DNA, 19 bp, Homo sapiens
  siRNA target sequence for NF1 (NM_000267.1,5785-5803).
cttaacttgtacctttaat

SEQ ID NO: 294545 - DNA, 19 bp, Homo sapiens
  siRNA target sequence for NF1 (NM_000267.1,5828-5846).
gagacatcaggtttatgta

SEQ ID NO: 294546 - DNA, 19 bp, Homo sapiens
  siRNA target sequence for NF1 (NM_000267.1,5852-5870).
gccaacaacaccctcttta

SEQ ID NO: 294547 - DNA, 19 bp, Homo sapiens
  siRNA target sequence for NF1 (NM_000267.1,5905-5923).
gccacacctcacgttagaa

SEQ ID NO: 294548 - DNA, 19 bp, Homo sapiens
  siRNA target sequence for NF1 (NM_000267.1,5906-5924).
ccacacctcacgttagaat

SEQ ID NO: 294549 - DNA, 19 bp, Homo sapiens
  siRNA target sequence for NF1 (NM_000267.1,5907-5925).
cacacctcacgttagaatt

SEQ ID NO: 294550 - DNA, 19 bp, Homo sapiens
  siRNA target sequence for NF1 (NM_000267.1,5909-5927).
cacctcacgttagaatttt

SEQ ID NO: 294551 - DNA, 19 bp, Homo sapiens
  siRNA target sequence for NF1 (NM_000267.1,5914-5932).
cacgttagaatttttggaa

SEQ ID NO: 294552 - DNA, 19 bp, Homo sapiens
  siRNA target sequence for NF1 (NM_000267.1,5952-5970).
gcaaatctagtattgaatt

SEQ ID NO: 294553 - DNA, 19 bp, Homo sapiens
  siRNA target sequence for NF1 (NM_000267.1,5958-5976).
ctagtattgaattgaaaca

SEQ ID NO: 294554 - DNA, 19 bp, Homo sapiens
  siRNA target sequence for NF1 (NM_000267.1,5995-6013).
gactccatggctgtcaaat

SEQ ID NO: 294555 - DNA, 19 bp, Homo sapiens
  siRNA target sequence for NF1 (NM_000267.1,6007-6025).
gtcaaatctagttcgtttt

SEQ ID NO: 294556 - DNA, 19 bp, Homo sapiens
  siRNA target sequence for NF1 (NM_000267.1,6017-6035).
gttcgtttttgcaagcata

SEQ ID NO: 294557 - DNA, 19 bp, Homo sapiens
  siRNA target sequence for NF1 (NM_000267.1,6021-6039).
gtttttgcaagcataatga

SEQ ID NO: 294558 - DNA, 19 bp, Homo sapiens
  siRNA target sequence for NF1 (NM_000267.1,6044-6062).
gccaaacgacaaagagtta

SEQ ID NO: 294559 - DNA, 19 bp, Homo sapiens
  siRNA target sequence for NF1 (NM_000267.1,6057-6075).
gagttactgctattcttga

SEQ ID NO: 294560 - DNA, 19 bp, Homo sapiens
  siRNA target sequence for NF1 (NM_000267.1,6116-6134).
ccatctattcaagcaaaaa

SEQ ID NO: 294561 - DNA, 19 bp, Homo sapiens
  siRNA target sequence for NF1 (NM_000267.1,6159-6177).
cagatctgcttgatgttgt

SEQ ID NO: 294562 - DNA, 19 bp, Homo sapiens
  siRNA target sequence for NF1 (NM_000267.1,6179-6197).
ctagacagtttcatcaaaa

SEQ ID NO: 294563 - DNA, 19 bp, Homo sapiens
  siRNA target sequence for NF1 (NM_000267.1,6207-6225).
caggtggcttgggatcaat

SEQ ID NO: 294564 - DNA, 19 bp, Homo sapiens
  siRNA target sequence for NF1 (NM_000267.1,6209-6227).
ggtggcttgggatcaataa

SEQ ID NO: 294565 - DNA, 19 bp, Homo sapiens
  siRNA target sequence for NF1 (NM_000267.1,6210-6228).
gtggcttgggatcaataaa

SEQ ID NO: 294566 - DNA, 19 bp, Homo sapiens
  siRNA target sequence for NF1 (NM_000267.1,6283-6301).
ggtttcaagcaaggttatt

SEQ ID NO: 294567 - DNA, 19 bp, Homo sapiens
  siRNA target sequence for NF1 (NM_000267.1,6345-6363).
ctcctactttagaacaaca

SEQ ID NO: 294568 - DNA, 19 bp, Homo sapiens
  siRNA target sequence for NF1 (NM_000267.1,6362-6380).
catcttatgtgggatgata

SEQ ID NO: 294569 - DNA, 19 bp, Homo sapiens
  siRNA target sequence for NF1 (NM_000267.1,6515-6533).
catggactggtcattaata

SEQ ID NO: 294570 - DNA, 19 bp, Homo sapiens
  siRNA target sequence for NF1 (NM_000267.1,6580-6598).
gaccaagcaagttttgaga

SEQ ID NO: 294571 - DNA, 19 bp, Homo sapiens
  siRNA target sequence for NF1 (NM_000267.1,6603-6621).
gtctgacagagttctcatt

SEQ ID NO: 294572 - DNA, 19 bp, Homo sapiens
  siRNA target sequence for NF1 (NM_000267.1,6759-6777).
cagtcacagaagctttgtt

SEQ ID NO: 294573 - DNA, 19 bp, Homo sapiens
  siRNA target sequence for NF1 (NM_000267.1,6896-6914).
gttgtctttgggtgtatta

SEQ ID NO: 294574 - DNA, 19 bp, Homo sapiens
  siRNA target sequence for NF1 (NM_000267.1,6899-6917).
gtctttgggtgtattagca

SEQ ID NO: 294575 - DNA, 19 bp, Homo sapiens
  siRNA target sequence for NF1 (NM_000267.1,6923-6941).
gtgtctcatgggcagataa

SEQ ID NO: 294576 - DNA, 19 bp, Homo sapiens
  siRNA target sequence for NF1 (NM_000267.1,6943-6961).
gcagataatccgtattctt

SEQ ID NO: 294577 - DNA, 19 bp, Homo sapiens
  siRNA target sequence for NF1 (NM_000267.1,6944-6962).
cagataatccgtattctta

SEQ ID NO: 294578 - DNA, 19 bp, Homo sapiens
  siRNA target sequence for NF1 (NM_000267.1,6997-7015).
cacttacaacagtcaagtt

SEQ ID NO: 294579 - DNA, 19 bp, Homo sapiens
  siRNA target sequence for NF1 (NM_000267.1,7003-7021).
caacagtcaagttctgata

SEQ ID NO: 294580 - DNA, 19 bp, Homo sapiens
  siRNA target sequence for NF1 (NM_000267.1,7006-7024).
cagtcaagttctgatagaa

SEQ ID NO: 294581 - DNA, 19 bp, Homo sapiens
  siRNA target sequence for NF1 (NM_000267.1,7031-7049).
gtaatagcactaaccaaat

SEQ ID NO: 294582 - DNA, 19 bp, Homo sapiens
  siRNA target sequence for NF1 (NM_000267.1,7045-7063).
caaattacagccacttctt

SEQ ID NO: 294583 - DNA, 19 bp, Homo sapiens
  siRNA target sequence for NF1 (NM_000267.1,7146-7164).
caggtaccgcacttcttga

SEQ ID NO: 294584 - DNA, 19 bp, Homo sapiens
  siRNA target sequence for NF1 (NM_000267.1,7171-7189).
cctgcatactttagatagt

SEQ ID NO: 294585 - DNA, 19 bp, Homo sapiens
  siRNA target sequence for NF1 (NM_000267.1,7184-7202).
gatagtctccgtatattca

SEQ ID NO: 294586 - DNA, 19 bp, Homo sapiens
  siRNA target sequence for NF1 (NM_000267.1,7190-7208).
ctccgtatattcaatgaca

SEQ ID NO: 294587 - DNA, 19 bp, Homo sapiens
  siRNA target sequence for NF1 (NM_000267.1,7212-7230).
gtccagaggaagtatttat

SEQ ID NO: 294588 - DNA, 19 bp, Homo sapiens
  siRNA target sequence for NF1 (NM_000267.1,7255-7273).
gcactgcaagcaaatggat

SEQ ID NO: 294589 - DNA, 19 bp, Homo sapiens
  siRNA target sequence for NF1 (NM_000267.1,7274-7292).
cattttgttggactcaatt

SEQ ID NO: 294590 - DNA, 19 bp, Homo sapiens
  siRNA target sequence for NF1 (NM_000267.1,7286-7304).
ctcaatttcaactctaact

SEQ ID NO: 294591 - DNA, 19 bp, Homo sapiens
  siRNA target sequence for NF1 (NM_000267.1,7367-7385).
gcaagaacagtcagaattt

SEQ ID NO: 294592 - DNA, 19 bp, Homo sapiens
  siRNA target sequence for NF1 (NM_000267.1,7456-7474).
ggcctacttagcagcttta

SEQ ID NO: 294593 - DNA, 19 bp, Homo sapiens
  siRNA target sequence for NF1 (NM_000267.1,7458-7476).
cctacttagcagctttact

SEQ ID NO: 294594 - DNA, 19 bp, Homo sapiens
  siRNA target sequence for NF1 (NM_000267.1,7459-7477).
ctacttagcagctttactt

SEQ ID NO: 294595 - DNA, 19 bp, Homo sapiens
  siRNA target sequence for NF1 (NM_000267.1,7500-7518).
gtcgctgcagcctaaaaca

SEQ ID NO: 294596 - DNA, 19 bp, Homo sapiens
  siRNA target sequence for NF1 (NM_000267.1,7525-7543).
gtcacttcttcttactgat

SEQ ID NO: 294597 - DNA, 19 bp, Homo sapiens
  siRNA target sequence for NF1 (NM_000267.1,7586-7604).
catggtgacccttcctata

SEQ ID NO: 294598 - DNA, 19 bp, Homo sapiens
  siRNA target sequence for NF1 (NM_000267.1,7589-7607).
ggtgacccttcctatagga

SEQ ID NO: 294599 - DNA, 19 bp, Homo sapiens
  siRNA target sequence for NF1 (NM_000267.1,7596-7614).
cttcctataggacactaaa

SEQ ID NO: 294600 - DNA, 19 bp, Homo sapiens
  siRNA target sequence for NF1 (NM_000267.1,7599-7617).
cctataggacactaaagga

SEQ ID NO: 294601 - DNA, 19 bp, Homo sapiens
  siRNA target sequence for NF1 (NM_000267.1,7733-7751).
ccttctcaggccaacacta

SEQ ID NO: 294602 - DNA, 19 bp, Homo sapiens
  siRNA target sequence for NF1 (NM_000267.1,7805-7823).
gctcctaaaaggcaagaaa

SEQ ID NO: 294603 - DNA, 19 bp, Homo sapiens
  siRNA target sequence for NF1 (NM_000267.1,7908-7926).
cacaacagcacccacattt

SEQ ID NO: 294604 - DNA, 19 bp, Homo sapiens
  siRNA target sequence for NF1 (NM_000267.1,7913-7931).
cagcacccacatttacgta

SEQ ID NO: 294605 - DNA, 19 bp, Homo sapiens
  siRNA target sequence for NF1 (NM_000267.1,7918-7936).
cccacatttacgtaaagtt

SEQ ID NO: 294606 - DNA, 19 bp, Homo sapiens
  siRNA target sequence for NF1 (NM_000267.1,7919-7937).
ccacatttacgtaaagttt

SEQ ID NO: 294607 - DNA, 19 bp, Homo sapiens
  siRNA target sequence for NF1 (NM_000267.1,7993-8011).
ccaggcgctgcttcttact

SEQ ID NO: 294608 - DNA, 19 bp, Homo sapiens
  siRNA target sequence for NF1 (NM_000267.1,7996-8014).
ggcgctgcttcttactgtt

SEQ ID NO: 294609 - DNA, 19 bp, Homo sapiens
  siRNA target sequence for NF1 (NM_000267.1,8015-8033).
ctagctacactggtaaaat

SEQ ID NO: 294610 - DNA, 19 bp, Homo sapiens
  siRNA target sequence for NF1 (NM_000267.1,8018-8036).
gctacactggtaaaatata

SEQ ID NO: 294611 - DNA, 19 bp, Homo sapiens
  siRNA target sequence for NF1 (NM_000267.1,8038-8056).
cacagatgagtttgatcaa

SEQ ID NO: 294612 - DNA, 19 bp, Homo sapiens
  siRNA target sequence for NF1 (NM_000267.1,8047-8065).
gtttgatcaacgaattctt

SEQ ID NO: 294613 - DNA, 19 bp, Homo sapiens
  siRNA target sequence for NF1 (NM_000267.1,8057-8075).
cgaattctttatgaatact

SEQ ID NO: 294614 - DNA, 19 bp, Homo sapiens
  siRNA target sequence for NF1 (NM_000267.1,8090-8108).
gttgtgtttcccaaagtct

SEQ ID NO: 294615 - DNA, 19 bp, Homo sapiens
  siRNA target sequence for NF1 (NM_000267.1,8111-8129).
cctgttgtgcataatttgt

SEQ ID NO: 294616 - DNA, 19 bp, Homo sapiens
  siRNA target sequence for NF1 (NM_000267.1,8112-8130).
ctgttgtgcataatttgtt

SEQ ID NO: 294617 - DNA, 19 bp, Homo sapiens
  siRNA target sequence for NF1 (NM_000267.1,8140-8158).
gatcaacaccctgttatca

SEQ ID NO: 294618 - DNA, 19 bp, Homo sapiens
  siRNA target sequence for NF1 (NM_000267.1,8157-8175).
cattgtgccaagatccaaa

SEQ ID NO: 294619 - DNA, 19 bp, Homo sapiens
  siRNA target sequence for NF1 (NM_000267.1,8164-8182).
ccaagatccaaatttgtta

SEQ ID NO: 294620 - DNA, 19 bp, Homo sapiens
  siRNA target sequence for NF1 (NM_000267.1,8210-8228).
gtggtgtaccatgaagaat

SEQ ID NO: 294621 - DNA, 19 bp, Homo sapiens
  siRNA target sequence for NF1 (NM_000267.1,8287-8305).
gtttgcaggaccgttttca

SEQ ID NO: 294622 - DNA, 19 bp, Homo sapiens
  siRNA target sequence for NF1 (NM_000267.1,8330-8348).
gctgagcttattgttaagt

SEQ ID NO: 294623 - DNA, 19 bp, Homo sapiens
  siRNA target sequence for NF1 (NM_000267.1,8331-8349).
ctgagcttattgttaagtt

SEQ ID NO: 294624 - DNA, 19 bp, Homo sapiens
  siRNA target sequence for NF1 (NM_000267.1,8368-8386).
cacgtacctgcctggaatt

SEQ ID NO: 294625 - DNA, 19 bp, Homo sapiens
  siRNA target sequence for NF1 (NM_000267.1,8370-8388).
cgtacctgcctggaattga

SEQ ID NO: 294626 - DNA, 19 bp, Homo sapiens
  siRNA target sequence for NF1 (NM_000267.1,8371-8389).
gtacctgcctggaattgat

SEQ ID NO: 294627 - DNA, 19 bp, Homo sapiens
  siRNA target sequence for NF1 (NM_000267.1,8374-8392).
cctgcctggaattgatgaa

SEQ ID NO: 294628 - DNA, 19 bp, Homo sapiens
  siRNA target sequence for NF1 (NM_000267.1,8444-8462).
ctgcagagccagcttagta

SEQ ID NO: 294629 - DNA, 19 bp, Homo sapiens
  siRNA target sequence for NF1 (NM_000267.1,8447-8465).
cagagccagcttagtatca

SEQ ID NO: 294630 - DNA, 19 bp, Homo sapiens
  siRNA target sequence for NF1 (NM_000267.1,8460-8478).
gtatcactgccaaccttaa

SEQ ID NO: 294631 - DNA, 19 bp, Homo sapiens
  siRNA target sequence for NF1 (NM_000267.1,8468-8486).
gccaaccttaacctttcta

SEQ ID NO: 294632 - DNA, 19 bp, Homo sapiens
  siRNA target sequence for NF1 (NM_000267.1,8469-8487).
ccaaccttaacctttctaa

SEQ ID NO: 294633 - DNA, 19 bp, Homo sapiens
  siRNA target sequence for NF1 (NM_000267.1,8470-8488).
caaccttaacctttctaat

SEQ ID NO: 294634 - DNA, 19 bp, Homo sapiens
  siRNA target sequence for NF1 (NM_000267.1,8560-8578).
cactggccactgtaacagt

SEQ ID NO: 294635 - DNA, 19 bp, Homo sapiens
  siRNA target sequence for NF1 (NM_000267.1,8622-8640).
gaagcgctggcagtttcaa

SEQ ID NO: 294636 - DNA, 19 bp, Homo sapiens
  siRNA target sequence for NF1 (NM_000267.1,8627-8645).
gctggcagtttcaaacgta

SEQ ID NO: 294637 - DNA, 19 bp, Homo sapiens
  siRNA target sequence for NF1 (NM_000267.1,8630-8648).
ggcagtttcaaacgtaata

SEQ ID NO: 294638 - DNA, 19 bp, Homo sapiens
  siRNA target sequence for NF1 (NM_000267.1,8634-8652).
gtttcaaacgtaatagcat

SEQ ID NO: 294639 - DNA, 19 bp, Homo sapiens
  siRNA target sequence for ALS2 (NM_020919.2,334-352).
ggcagccctcggagtgaaa

SEQ ID NO: 294640 - DNA, 19 bp, Homo sapiens
  siRNA target sequence for ALS2 (NM_020919.2,336-354).
cagccctcggagtgaaaca

SEQ ID NO: 294641 - DNA, 19 bp, Homo sapiens
  siRNA target sequence for ALS2 (NM_020919.2,435-453).
caagtagccccattctaga

SEQ ID NO: 294642 - DNA, 19 bp, Homo sapiens
  siRNA target sequence for ALS2 (NM_020919.2,459-477).
ccctggttgggcaatatgt

SEQ ID NO: 294643 - DNA, 19 bp, Homo sapiens
  siRNA target sequence for ALS2 (NM_020919.2,464-482).
gttgggcaatatgttatta

SEQ ID NO: 294644 - DNA, 19 bp, Homo sapiens
  siRNA target sequence for ALS2 (NM_020919.2,538-556).
catgtggggagagaattct

SEQ ID NO: 294645 - DNA, 19 bp, Homo sapiens
  siRNA target sequence for ALS2 (NM_020919.2,586-604).
gtatgtgccggaaccaaat

SEQ ID NO: 294646 - DNA, 19 bp, Homo sapiens
  siRNA target sequence for ALS2 (NM_020919.2,640-658).
gttagcagtcaggatttta

SEQ ID NO: 294647 - DNA, 19 bp, Homo sapiens
  siRNA target sequence for ALS2 (NM_020919.2,680-698).
cacactctggcattgtcaa

SEQ ID NO: 294648 - DNA, 19 bp, Homo sapiens
  siRNA target sequence for ALS2 (NM_020919.2,682-700).
cactctggcattgtcaata

SEQ ID NO: 294649 - DNA, 19 bp, Homo sapiens
  siRNA target sequence for ALS2 (NM_020919.2,734-752).
cagttgggtctcattacca

SEQ ID NO: 294650 - DNA, 19 bp, Homo sapiens
  siRNA target sequence for ALS2 (NM_020919.2,766-784).
gacaaagccgcaaaaggta

SEQ ID NO: 294651 - DNA, 19 bp, Homo sapiens
  siRNA target sequence for ALS2 (NM_020919.2,772-790).
gccgcaaaaggtagaacat

SEQ ID NO: 294652 - DNA, 19 bp, Homo sapiens
  siRNA target sequence for ALS2 (NM_020919.2,774-792).
cgcaaaaggtagaacatct

SEQ ID NO: 294653 - DNA, 19 bp, Homo sapiens
  siRNA target sequence for ALS2 (NM_020919.2,798-816).
ggcgagtggtgcttcaagt

SEQ ID NO: 294654 - DNA, 19 bp, Homo sapiens
  siRNA target sequence for ALS2 (NM_020919.2,799-817).
gcgagtggtgcttcaagtt

SEQ ID NO: 294655 - DNA, 19 bp, Homo sapiens
  siRNA target sequence for ALS2 (NM_020919.2,906-924).
gccagctcttgattactat

SEQ ID NO: 294656 - DNA, 19 bp, Homo sapiens
  siRNA target sequence for ALS2 (NM_020919.2,908-926).
cagctcttgattactatga

SEQ ID NO: 294657 - DNA, 19 bp, Homo sapiens
  siRNA target sequence for ALS2 (NM_020919.2,910-928).
gctcttgattactatgact

SEQ ID NO: 294658 - DNA, 19 bp, Homo sapiens
  siRNA target sequence for ALS2 (NM_020919.2,916-934).
gattactatgactgacaaa

SEQ ID NO: 294659 - DNA, 19 bp, Homo sapiens
  siRNA target sequence for ALS2 (NM_020919.2,1121-1139).
gtaagtgctcagatcacaa

SEQ ID NO: 294660 - DNA, 19 bp, Homo sapiens
  siRNA target sequence for ALS2 (NM_020919.2,1238-1256).
gaatacctacggaaactgt

SEQ ID NO: 294661 - DNA, 19 bp, Homo sapiens
  siRNA target sequence for ALS2 (NM_020919.2,1255-1273).
gtcagatcattcagtaaga

SEQ ID NO: 294662 - DNA, 19 bp, Homo sapiens
  siRNA target sequence for ALS2 (NM_020919.2,1257-1275).
cagatcattcagtaagaga

SEQ ID NO: 294663 - DNA, 19 bp, Homo sapiens
  siRNA target sequence for ALS2 (NM_020919.2,1303-1321).
gccatctcagcctctttta

SEQ ID NO: 294664 - DNA, 19 bp, Homo sapiens
  siRNA target sequence for ALS2 (NM_020919.2,1414-1432).
gagagtggctgctacttat

SEQ ID NO: 294665 - DNA, 19 bp, Homo sapiens
  siRNA target sequence for ALS2 (NM_020919.2,1460-1478).
gttatgaacttttatagta

SEQ ID NO: 294666 - DNA, 19 bp, Homo sapiens
  siRNA target sequence for ALS2 (NM_020919.2,1526-1544).
cccgaaggtttgaaagata

SEQ ID NO: 294667 - DNA, 19 bp, Homo sapiens
  siRNA target sequence for ALS2 (NM_020919.2,1548-1566).
gggaagaacaggttaaaca

SEQ ID NO: 294668 - DNA, 19 bp, Homo sapiens
  siRNA target sequence for ALS2 (NM_020919.2,1590-1608).
gttcaagtcttgtggatat

SEQ ID NO: 294669 - DNA, 19 bp, Homo sapiens
  siRNA target sequence for ALS2 (NM_020919.2,1670-1688).
gtttcccccaggctcttaa

SEQ ID NO: 294670 - DNA, 19 bp, Homo sapiens
  siRNA target sequence for ALS2 (NM_020919.2,1694-1712).
gctgcacgggtgaaaacga

SEQ ID NO: 294671 - DNA, 19 bp, Homo sapiens
  siRNA target sequence for ALS2 (NM_020919.2,1841-1859).
cttcaaccgttgtgtgtaa

SEQ ID NO: 294672 - DNA, 19 bp, Homo sapiens
  siRNA target sequence for ALS2 (NM_020919.2,1844-1862).
caaccgttgtgtgtaaaat

SEQ ID NO: 294673 - DNA, 19 bp, Homo sapiens
  siRNA target sequence for ALS2 (NM_020919.2,1892-1910).
gaggcaggtggttaccatt

SEQ ID NO: 294674 - DNA, 19 bp, Homo sapiens
  siRNA target sequence for ALS2 (NM_020919.2,1923-1941).
ctgcgaaatcccaggttta

SEQ ID NO: 294675 - DNA, 19 bp, Homo sapiens
  siRNA target sequence for ALS2 (NM_020919.2,1925-1943).
gcgaaatcccaggtttact

SEQ ID NO: 294676 - DNA, 19 bp, Homo sapiens
  siRNA target sequence for ALS2 (NM_020919.2,1973-1991).
gggcattccgattttccaa

SEQ ID NO: 294677 - DNA, 19 bp, Homo sapiens
  siRNA target sequence for ALS2 (NM_020919.2,1981-1999).
cgattttccaacaacagtt

SEQ ID NO: 294678 - DNA, 19 bp, Homo sapiens
  siRNA target sequence for ALS2 (NM_020919.2,1995-2013).
cagttcctcgtcttgcaaa

SEQ ID NO: 294679 - DNA, 19 bp, Homo sapiens
  siRNA target sequence for ALS2 (NM_020919.2,2003-2021).
cgtcttgcaaagataagca

SEQ ID NO: 294680 - DNA, 19 bp, Homo sapiens
  siRNA target sequence for ALS2 (NM_020919.2,2095-2113).
gcctgggttatattacagt

SEQ ID NO: 294681 - DNA, 19 bp, Homo sapiens
  siRNA target sequence for ALS2 (NM_020919.2,2116-2134).
ccgacaggaccctacagaa

SEQ ID NO: 294682 - DNA, 19 bp, Homo sapiens
  siRNA target sequence for ALS2 (NM_020919.2,2166-2184).
ctaagactccagtacttct

SEQ ID NO: 294683 - DNA, 19 bp, Homo sapiens
  siRNA target sequence for ALS2 (NM_020919.2,2187-2205).
cctgtagtaagcttggata

SEQ ID NO: 294684 - DNA, 19 bp, Homo sapiens
  siRNA target sequence for ALS2 (NM_020919.2,2188-2206).
ctgtagtaagcttggatat

SEQ ID NO: 294685 - DNA, 19 bp, Homo sapiens
  siRNA target sequence for ALS2 (NM_020919.2,2220-2238).
cagcaggaaaagatagcta

SEQ ID NO: 294686 - DNA, 19 bp, Homo sapiens
  siRNA target sequence for ALS2 (NM_020919.2,2284-2302).
ccacgagttagctactaca

SEQ ID NO: 294687 - DNA, 19 bp, Homo sapiens
  siRNA target sequence for ALS2 (NM_020919.2,2287-2305).
cgagttagctactacagaa

SEQ ID NO: 294688 - DNA, 19 bp, Homo sapiens
  siRNA target sequence for ALS2 (NM_020919.2,2288-2306).
gagttagctactacagaaa

SEQ ID NO: 294689 - DNA, 19 bp, Homo sapiens
  siRNA target sequence for ALS2 (NM_020919.2,2298-2316).
ctacagaaagacgattcta

SEQ ID NO: 294690 - DNA, 19 bp, Homo sapiens
  siRNA target sequence for ALS2 (NM_020919.2,2303-2321).
gaaagacgattctattcaa

SEQ ID NO: 294691 - DNA, 19 bp, Homo sapiens
  siRNA target sequence for ALS2 (NM_020919.2,2307-2325).
gacgattctattcaaaact

SEQ ID NO: 294692 - DNA, 19 bp, Homo sapiens
  siRNA target sequence for ALS2 (NM_020919.2,2350-2368).
caggcctcttctcagttta

SEQ ID NO: 294693 - DNA, 19 bp, Homo sapiens
  siRNA target sequence for ALS2 (NM_020919.2,2450-2468).
cagcatggagcctcattga

SEQ ID NO: 294694 - DNA, 19 bp, Homo sapiens
  siRNA target sequence for ALS2 (NM_020919.2,2476-2494).
ccttcatggggtaaaggaa

SEQ ID NO: 294695 - DNA, 19 bp, Homo sapiens
  siRNA target sequence for ALS2 (NM_020919.2,2528-2546).
ctcttcttggatagttata

SEQ ID NO: 294696 - DNA, 19 bp, Homo sapiens
  siRNA target sequence for ALS2 (NM_020919.2,2536-2554).
ggatagttatacagagtat

SEQ ID NO: 294697 - DNA, 19 bp, Homo sapiens
  siRNA target sequence for ALS2 (NM_020919.2,2537-2555).
gatagttatacagagtatt

SEQ ID NO: 294698 - DNA, 19 bp, Homo sapiens
  siRNA target sequence for ALS2 (NM_020919.2,2547-2565).
cagagtattgcacatctat

SEQ ID NO: 294699 - DNA, 19 bp, Homo sapiens
  siRNA target sequence for ALS2 (NM_020919.2,2589-2607).
gattccagcttcttgctaa

SEQ ID NO: 294700 - DNA, 19 bp, Homo sapiens
  siRNA target sequence for ALS2 (NM_020919.2,2603-2621).
gctaagcctgccattgatt

SEQ ID NO: 294701 - DNA, 19 bp, Homo sapiens
  siRNA target sequence for ALS2 (NM_020919.2,2604-2622).
ctaagcctgccattgattt

SEQ ID NO: 294702 - DNA, 19 bp, Homo sapiens
  siRNA target sequence for ALS2 (NM_020919.2,2610-2628).
ctgccattgatttcctaaa

SEQ ID NO: 294703 - DNA, 19 bp, Homo sapiens
  siRNA target sequence for ALS2 (NM_020919.2,2639-2657).
gagctgttgcaagatttgt

SEQ ID NO: 294704 - DNA, 19 bp, Homo sapiens
  siRNA target sequence for ALS2 (NM_020919.2,2641-2659).
gctgttgcaagatttgtca

SEQ ID NO: 294705 - DNA, 19 bp, Homo sapiens
  siRNA target sequence for ALS2 (NM_020919.2,2716-2734).
gccaatcagacgacttcat

SEQ ID NO: 294706 - DNA, 19 bp, Homo sapiens
  siRNA target sequence for ALS2 (NM_020919.2,2717-2735).
ccaatcagacgacttcata

SEQ ID NO: 294707 - DNA, 19 bp, Homo sapiens
  siRNA target sequence for ALS2 (NM_020919.2,2718-2736).
caatcagacgacttcataa

SEQ ID NO: 294708 - DNA, 19 bp, Homo sapiens
  siRNA target sequence for ALS2 (NM_020919.2,2742-2760).
caaaagttttgctaaagct

SEQ ID NO: 294709 - DNA, 19 bp, Homo sapiens
  siRNA target sequence for ALS2 (NM_020919.2,2752-2770).
gctaaagcttgctacttgt

SEQ ID NO: 294710 - DNA, 19 bp, Homo sapiens
  siRNA target sequence for ALS2 (NM_020919.2,2753-2771).
ctaaagcttgctacttgtt

SEQ ID NO: 294711 - DNA, 19 bp, Homo sapiens
  siRNA target sequence for ALS2 (NM_020919.2,2801-2819).
ctgcaggattccagttctt

SEQ ID NO: 294712 - DNA, 19 bp, Homo sapiens
  siRNA target sequence for ALS2 (NM_020919.2,2806-2824).
ggattccagttcttgttat

SEQ ID NO: 294713 - DNA, 19 bp, Homo sapiens
  siRNA target sequence for ALS2 (NM_020919.2,2840-2858).
catctcggcaggaaaagga

SEQ ID NO: 294714 - DNA, 19 bp, Homo sapiens
  siRNA target sequence for ALS2 (NM_020919.2,2939-2957).
ctgctgtgtgagagtagta

SEQ ID NO: 294715 - DNA, 19 bp, Homo sapiens
  siRNA target sequence for ALS2 (NM_020919.2,2994-3012).
ccgtgaattggttcattct

SEQ ID NO: 294716 - DNA, 19 bp, Homo sapiens
  siRNA target sequence for ALS2 (NM_020919.2,3107-3125).
ggtgtgaatggcttaaaga

SEQ ID NO: 294717 - DNA, 19 bp, Homo sapiens
  siRNA target sequence for ALS2 (NM_020919.2,3108-3126).
gtgtgaatggcttaaagat

SEQ ID NO: 294718 - DNA, 19 bp, Homo sapiens
  siRNA target sequence for ALS2 (NM_020919.2,3142-3160).
gcagttcactctcatttca

SEQ ID NO: 294719 - DNA, 19 bp, Homo sapiens
  siRNA target sequence for ALS2 (NM_020919.2,3208-3226).
cgtagatcaggctttgaga

SEQ ID NO: 294720 - DNA, 19 bp, Homo sapiens
  siRNA target sequence for ALS2 (NM_020919.2,3236-3254).
gatctccccccttatggaa

SEQ ID NO: 294721 - DNA, 19 bp, Homo sapiens
  siRNA target sequence for ALS2 (NM_020919.2,3293-3311).
cgcagtgccaaatatactt

SEQ ID NO: 294722 - DNA, 19 bp, Homo sapiens
  siRNA target sequence for ALS2 (NM_020919.2,3294-3312).
gcagtgccaaatatacttt

SEQ ID NO: 294723 - DNA, 19 bp, Homo sapiens
  siRNA target sequence for ALS2 (NM_020919.2,3297-3315).
gtgccaaatatactttcta

SEQ ID NO: 294724 - DNA, 19 bp, Homo sapiens
  siRNA target sequence for ALS2 (NM_020919.2,3319-3337).
ggatcctcgcctaaaggat

SEQ ID NO: 294725 - DNA, 19 bp, Homo sapiens
  siRNA target sequence for ALS2 (NM_020919.2,3377-3395).
ggcagaggggttttgaagt

SEQ ID NO: 294726 - DNA, 19 bp, Homo sapiens
  siRNA target sequence for ALS2 (NM_020919.2,3611-3629).
ctacgaagtgggaaattga

SEQ ID NO: 294727 - DNA, 19 bp, Homo sapiens
  siRNA target sequence for ALS2 (NM_020919.2,3636-3654).
cttctcctagtatgttcat

SEQ ID NO: 294728 - DNA, 19 bp, Homo sapiens
  siRNA target sequence for ALS2 (NM_020919.2,3656-3674).
ggccagtgggtaatggata

SEQ ID NO: 294729 - DNA, 19 bp, Homo sapiens
  siRNA target sequence for ALS2 (NM_020919.2,3661-3679).
gtgggtaatggataagaaa

SEQ ID NO: 294730 - DNA, 19 bp, Homo sapiens
  siRNA target sequence for ALS2 (NM_020919.2,3684-3702).
gatatggtgtctttgatga

SEQ ID NO: 294731 - DNA, 19 bp, Homo sapiens
  siRNA target sequence for ALS2 (NM_020919.2,3692-3710).
gtctttgatgatatcacta

SEQ ID NO: 294732 - DNA, 19 bp, Homo sapiens
  siRNA target sequence for ALS2 (NM_020919.2,3708-3726).
ctaggggggaaaagtatat

SEQ ID NO: 294733 - DNA, 19 bp, Homo sapiens
  siRNA target sequence for ALS2 (NM_020919.2,3767-3785).
gtggttacccagtttggat

SEQ ID NO: 294734 - DNA, 19 bp, Homo sapiens
  siRNA target sequence for ALS2 (NM_020919.2,3769-3787).
ggttacccagtttggatta

SEQ ID NO: 294735 - DNA, 19 bp, Homo sapiens
  siRNA target sequence for ALS2 (NM_020919.2,3770-3788).
gttacccagtttggattat

SEQ ID NO: 294736 - DNA, 19 bp, Homo sapiens
  siRNA target sequence for ALS2 (NM_020919.2,3774-3792).
cccagtttggattatacta

SEQ ID NO: 294737 - DNA, 19 bp, Homo sapiens
  siRNA target sequence for ALS2 (NM_020919.2,3843-3861).
ccgaagatgatactatcta

SEQ ID NO: 294738 - DNA, 19 bp, Homo sapiens
  siRNA target sequence for ALS2 (NM_020919.2,3844-3862).
cgaagatgatactatctat

SEQ ID NO: 294739 - DNA, 19 bp, Homo sapiens
  siRNA target sequence for ALS2 (NM_020919.2,3924-3942).
gagactacattgaaggtta

SEQ ID NO: 294740 - DNA, 19 bp, Homo sapiens
  siRNA target sequence for ALS2 (NM_020919.2,3926-3944).
gactacattgaaggttatt

SEQ ID NO: 294741 - DNA, 19 bp, Homo sapiens
  siRNA target sequence for ALS2 (NM_020919.2,3976-3994).
cactggaacctacttcaaa

SEQ ID NO: 294742 - DNA, 19 bp, Homo sapiens
  siRNA target sequence for ALS2 (NM_020919.2,3980-3998).
ggaacctacttcaaaccta

SEQ ID NO: 294743 - DNA, 19 bp, Homo sapiens
  siRNA target sequence for ALS2 (NM_020919.2,3999-4017).
gtctatatgagagtgataa

SEQ ID NO: 294744 - DNA, 19 bp, Homo sapiens
  siRNA target sequence for ALS2 (NM_020919.2,4019-4037).
gacagacctaaagttttca

SEQ ID NO: 294745 - DNA, 19 bp, Homo sapiens
  siRNA target sequence for ALS2 (NM_020919.2,4082-4100).
gcggtgtttgacgaatgtt

SEQ ID NO: 294746 - DNA, 19 bp, Homo sapiens
  siRNA target sequence for ALS2 (NM_020919.2,4230-4248).
ctcagacactagagagttt

SEQ ID NO: 294747 - DNA, 19 bp, Homo sapiens
  siRNA target sequence for ALS2 (NM_020919.2,4234-4252).
gacactagagagtttggaa

SEQ ID NO: 294748 - DNA, 19 bp, Homo sapiens
  siRNA target sequence for ALS2 (NM_020919.2,4238-4256).
ctagagagtttggaattca

SEQ ID NO: 294749 - DNA, 19 bp, Homo sapiens
  siRNA target sequence for ALS2 (NM_020919.2,4374-4392).
cagtgtatagaatgacata

SEQ ID NO: 294750 - DNA, 19 bp, Homo sapiens
  siRNA target sequence for ALS2 (NM_020919.2,4403-4421).
ggagccaaccgcaggttat

SEQ ID NO: 294751 - DNA, 19 bp, Homo sapiens
  siRNA target sequence for ALS2 (NM_020919.2,4404-4422).
gagccaaccgcaggttatt

SEQ ID NO: 294752 - DNA, 19 bp, Homo sapiens
  siRNA target sequence for ALS2 (NM_020919.2,4427-4445).
gaggctgtaaaggagatta

SEQ ID NO: 294753 - DNA, 19 bp, Homo sapiens
  siRNA target sequence for ALS2 (NM_020919.2,4439-4457).
gagattaagtcctatctta

SEQ ID NO: 294754 - DNA, 19 bp, Homo sapiens
  siRNA target sequence for ALS2 (NM_020919.2,4449-4467).
cctatcttaagcgaatttt

SEQ ID NO: 294755 - DNA, 19 bp, Homo sapiens
  siRNA target sequence for ALS2 (NM_020919.2,4468-4486).
ccagctggtgaggttctta

SEQ ID NO: 294756 - DNA, 19 bp, Homo sapiens
  siRNA target sequence for ALS2 (NM_020919.2,4469-4487).
cagctggtgaggttcttat

SEQ ID NO: 294757 - DNA, 19 bp, Homo sapiens
  siRNA target sequence for ALS2 (NM_020919.2,4538-4556).
ccaaccgaaaggaagtctt

SEQ ID NO: 294758 - DNA, 19 bp, Homo sapiens
  siRNA target sequence for ALS2 (NM_020919.2,4539-4557).
caaccgaaaggaagtcttt

SEQ ID NO: 294759 - DNA, 19 bp, Homo sapiens
  siRNA target sequence for ALS2 (NM_020919.2,4593-4611).
cagagccaggttatgtagt

SEQ ID NO: 294760 - DNA, 19 bp, Homo sapiens
  siRNA target sequence for ALS2 (NM_020919.2,4652-4670).
ctctacccaccgctgttta

SEQ ID NO: 294761 - DNA, 19 bp, Homo sapiens
  siRNA target sequence for ALS2 (NM_020919.2,4657-4675).
cccaccgctgtttatgctt

SEQ ID NO: 294762 - DNA, 19 bp, Homo sapiens
  siRNA target sequence for ALS2 (NM_020919.2,4658-4676).
ccaccgctgtttatgcttt

SEQ ID NO: 294763 - DNA, 19 bp, Homo sapiens
  siRNA target sequence for ALS2 (NM_020919.2,4659-4677).
caccgctgtttatgcttta

SEQ ID NO: 294764 - DNA, 19 bp, Homo sapiens
  siRNA target sequence for ALS2 (NM_020919.2,4691-4709).
gatcgcgaggaagacattt

SEQ ID NO: 294765 - DNA, 19 bp, Homo sapiens
  siRNA target sequence for ALS2 (NM_020919.2,4694-4712).
cgcgaggaagacatttact

SEQ ID NO: 294766 - DNA, 19 bp, Homo sapiens
  siRNA target sequence for ALS2 (NM_020919.2,4719-4737).
gtgtccttcgactaaataa

SEQ ID NO: 294767 - DNA, 19 bp, Homo sapiens
  siRNA target sequence for ALS2 (NM_020919.2,4788-4806).
ggccagcaaccttgtcaat

SEQ ID NO: 294768 - DNA, 19 bp, Homo sapiens
  siRNA target sequence for ALS2 (NM_020919.2,4803-4821).
caatccttggagagagtaa

SEQ ID NO: 294769 - DNA, 19 bp, Homo sapiens
  siRNA target sequence for ALS2 (NM_020919.2,4836-4854).
ccacgaaagatgcttgttt

SEQ ID NO: 294770 - DNA, 19 bp, Homo sapiens
  siRNA target sequence for ALS2 (NM_020919.2,4837-4855).
cacgaaagatgcttgtttt

SEQ ID NO: 294771 - DNA, 19 bp, Homo sapiens
  siRNA target sequence for ALS2 (NM_020919.2,4857-4875).
cctcagcagtagaatgtct

SEQ ID NO: 294772 - DNA, 19 bp, Homo sapiens
  siRNA target sequence for ALS2 (NM_020919.2,4877-4895).
cagcagatcagcacaacat

SEQ ID NO: 294773 - DNA, 19 bp, Homo sapiens
  siRNA target sequence for ALS2 (NM_020919.2,4880-4898).
cagatcagcacaacattta

SEQ ID NO: 294774 - DNA, 19 bp, Homo sapiens
  siRNA target sequence for ALS2 (NM_020919.2,4962-4980).
cgtcactccacgaagactt

SEQ ID NO: 294775 - DNA, 19 bp, Homo sapiens
  siRNA target sequence for ALS2 (NM_020919.2,4965-4983).
cactccacgaagacttctt

SEQ ID NO: 294776 - DNA, 19 bp, Homo sapiens
  siRNA target sequence for ALS2 (NM_020919.2,4967-4985).
ctccacgaagacttcttgt

SEQ ID NO: 294777 - DNA, 19 bp, Homo sapiens
  siRNA target sequence for ALS2 (NM_020919.2,5024-5042).
gtgctacgggccaggatta

SEQ ID NO: 294778 - DNA, 19 bp, Homo sapiens
  siRNA target sequence for ALS2 (NM_020919.2,5027-5045).
ctacgggccaggattagga

SEQ ID NO: 294779 - DNA, 19 bp, Homo sapiens
  siRNA target sequence for ALS2 (NM_020919.2,5103-5121).
gggaacagggtataatgtt

SEQ ID NO: 294780 - DNA, 19 bp, Homo sapiens
  siRNA target sequence for ALS2 (NM_020919.2,5127-5145).
ccttgaaggcatgttacta

SEQ ID NO: 294781 - DNA, 19 bp, Homo sapiens
  siRNA target sequence for ALS2 (NM_020919.2,5136-5154).
catgttactaccagattca

SEQ ID NO: 294782 - DNA, 19 bp, Homo sapiens
  siRNA target sequence for ARHGEF3 (NM_019555.1,217-235).
cgctgaggagcctagtaat

SEQ ID NO: 294783 - DNA, 19 bp, Homo sapiens
  siRNA target sequence for ARHGEF3 (NM_019555.1,218-236).
gctgaggagcctagtaata

SEQ ID NO: 294784 - DNA, 19 bp, Homo sapiens
  siRNA target sequence for ARHGEF3 (NM_019555.1,258-276).
gagtcacgtcgctagcaaa

SEQ ID NO: 294785 - DNA, 19 bp, Homo sapiens
  siRNA target sequence for ARHGEF3 (NM_019555.1,290-308).
gtgaaggccacgccattaa

SEQ ID NO: 294786 - DNA, 19 bp, Homo sapiens
  siRNA target sequence for ARHGEF3 (NM_019555.1,379-397).
ccgaccctggtccagaaat

SEQ ID NO: 294787 - DNA, 19 bp, Homo sapiens
  siRNA target sequence for ARHGEF3 (NM_019555.1,414-432).
cgaaacggagagatagcaa

SEQ ID NO: 294788 - DNA, 19 bp, Homo sapiens
  siRNA target sequence for ARHGEF3 (NM_019555.1,452-470).
gatgtgtgcgtcaatcaga

SEQ ID NO: 294789 - DNA, 19 bp, Homo sapiens
  siRNA target sequence for ARHGEF3 (NM_019555.1,473-491).
cttacatccaaggaaatca

SEQ ID NO: 294790 - DNA, 19 bp, Homo sapiens
  siRNA target sequence for ARHGEF3 (NM_019555.1,495-513).
gtcaggaggcgatctttga

SEQ ID NO: 294791 - DNA, 19 bp, Homo sapiens
  siRNA target sequence for ARHGEF3 (NM_019555.1,575-593).
gaccccatgctgaaactct

SEQ ID NO: 294792 - DNA, 19 bp, Homo sapiens
  siRNA target sequence for ARHGEF3 (NM_019555.1,586-604).
gaaactctccataatgaca

SEQ ID NO: 294793 - DNA, 19 bp, Homo sapiens
  siRNA target sequence for ARHGEF3 (NM_019555.1,613-631).
gttgaatcaaatttttgga

SEQ ID NO: 294794 - DNA, 19 bp, Homo sapiens
  siRNA target sequence for ARHGEF3 (NM_019555.1,630-648).
gaacactggactctctaat

SEQ ID NO: 294795 - DNA, 19 bp, Homo sapiens
  siRNA target sequence for ARHGEF3 (NM_019555.1,642-660).
ctctaattcctctacatga

SEQ ID NO: 294796 - DNA, 19 bp, Homo sapiens
  siRNA target sequence for ARHGEF3 (NM_019555.1,766-784).
ctactgcagcaatcaagta

SEQ ID NO: 294797 - DNA, 19 bp, Homo sapiens
  siRNA target sequence for ARHGEF3 (NM_019555.1,823-841).
ccgagtccaggatttccta

SEQ ID NO: 294798 - DNA, 19 bp, Homo sapiens
  siRNA target sequence for ARHGEF3 (NM_019555.1,859-877).
cccctttagccgcaaacta

SEQ ID NO: 294799 - DNA, 19 bp, Homo sapiens
  siRNA target sequence for ARHGEF3 (NM_019555.1,861-879).
cctttagccgcaaactaga

SEQ ID NO: 294800 - DNA, 19 bp, Homo sapiens
  siRNA target sequence for ARHGEF3 (NM_019555.1,883-901).
ctggaatttcctcgatatt

SEQ ID NO: 294801 - DNA, 19 bp, Homo sapiens
  siRNA target sequence for ARHGEF3 (NM_019555.1,886-904).
gaatttcctcgatattcca

SEQ ID NO: 294802 - DNA, 19 bp, Homo sapiens
  siRNA target sequence for ARHGEF3 (NM_019555.1,903-921).
caagaagccgcctggtaaa

SEQ ID NO: 294803 - DNA, 19 bp, Homo sapiens
  siRNA target sequence for ARHGEF3 (NM_019555.1,929-947).
ctgcttctccgagaaatct

SEQ ID NO: 294804 - DNA, 19 bp, Homo sapiens
  siRNA target sequence for ARHGEF3 (NM_019555.1,932-950).
cttctccgagaaatcttga

SEQ ID NO: 294805 - DNA, 19 bp, Homo sapiens
  siRNA target sequence for ARHGEF3 (NM_019555.1,949-967).
gaggcacacaccaaatgat

SEQ ID NO: 294806 - DNA, 19 bp, Homo sapiens
  siRNA target sequence for ARHGEF3 (NM_019555.1,951-969).
ggcacacaccaaatgataa

SEQ ID NO: 294807 - DNA, 19 bp, Homo sapiens
  siRNA target sequence for ARHGEF3 (NM_019555.1,952-970).
gcacacaccaaatgataat

SEQ ID NO: 294808 - DNA, 19 bp, Homo sapiens
  siRNA target sequence for ARHGEF3 (NM_019555.1,955-973).
cacaccaaatgataatcca

SEQ ID NO: 294809 - DNA, 19 bp, Homo sapiens
  siRNA target sequence for ARHGEF3 (NM_019555.1,1212-1230).
gagccgtcacccacaatga

SEQ ID NO: 294810 - DNA, 19 bp, Homo sapiens
  siRNA target sequence for ARHGEF3 (NM_019555.1,1332-1350).
gggcattcagcaacaatga

SEQ ID NO: 294811 - DNA, 19 bp, Homo sapiens
  siRNA target sequence for ARHGEF3 (NM_019555.1,1334-1352).
gcattcagcaacaatgaga

SEQ ID NO: 294812 - DNA, 19 bp, Homo sapiens
  siRNA target sequence for ARHGEF3 (NM_019555.1,1341-1359).
gcaacaatgagagaattaa

SEQ ID NO: 294813 - DNA, 19 bp, Homo sapiens
  siRNA target sequence for ARHGEF3 (NM_019555.1,1415-1433).
caagccaatgacactttca

SEQ ID NO: 294814 - DNA, 19 bp, Homo sapiens
  siRNA target sequence for ARHGEF3 (NM_019555.1,1420-1438).
caatgacactttcaacaaa

SEQ ID NO: 294815 - DNA, 19 bp, Homo sapiens
  siRNA target sequence for ARHGEF3 (NM_019555.1,1515-1533).
ccgagggatcgttcctaaa

SEQ ID NO: 294816 - DNA, 19 bp, Homo sapiens
  siRNA target sequence for ARHGEF3 (NM_019555.1,1516-1534).
cgagggatcgttcctaaat

SEQ ID NO: 294817 - DNA, 19 bp, Homo sapiens
  siRNA target sequence for ARHGEF3 (NM_019555.1,1681-1699).
cagcaggcacggtgaaagt

SEQ ID NO: 294818 - DNA, 19 bp, Homo sapiens
  siRNA target sequence for ARHGEF3 (NM_019555.1,1683-1701).
gcaggcacggtgaaagtaa

SEQ ID NO: 294819 - DNA, 19 bp, Homo sapiens
  siRNA target sequence for ARHGEF4 (NM_015320.2,1857-1875).
gggacttcaaggatgttga

SEQ ID NO: 294820 - DNA, 19 bp, Homo sapiens
  siRNA target sequence for ARHGEF4 (NM_015320.2,1858-1876).
ggacttcaaggatgttgaa

SEQ ID NO: 294821 - DNA, 19 bp, Homo sapiens
  siRNA target sequence for ARHGEF4 (NM_015320.2,2007-2025).
ggagctcagaactcatcta

SEQ ID NO: 294822 - DNA, 19 bp, Homo sapiens
  siRNA target sequence for ARHGEF4 (NM_015320.2,2032-2050).
ggagctgactcgagttaca

SEQ ID NO: 294823 - DNA, 19 bp, Homo sapiens
  siRNA target sequence for ARHGEF4 (NM_015320.2,2072-2090).
cagcgaatgttctttctct

SEQ ID NO: 294824 - DNA, 19 bp, Homo sapiens
  siRNA target sequence for ARHGEF4 (NM_015320.2,2096-2114).
caccagctcatctactgta

SEQ ID NO: 294825 - DNA, 19 bp, Homo sapiens
  siRNA target sequence for ARHGEF4 (NM_015320.2,2132-2150).
cgcgacgtgttgtactaca

SEQ ID NO: 294826 - DNA, 19 bp, Homo sapiens
  siRNA target sequence for ARHGEF4 (NM_015320.2,2133-2151).
gcgacgtgttgtactacaa

SEQ ID NO: 294827 - DNA, 19 bp, Homo sapiens
  siRNA target sequence for ARHGEF6 (NM_004840.1,49-67).
cgtgacatggcttatatct

SEQ ID NO: 294828 - DNA, 19 bp, Homo sapiens
  siRNA target sequence for ARHGEF6 (NM_004840.1,107-125).
ccggaggagtttttaaagt

SEQ ID NO: 294829 - DNA, 19 bp, Homo sapiens
  siRNA target sequence for ARHGEF6 (NM_004840.1,198-216).
gtctggatccccaaactga

SEQ ID NO: 294830 - DNA, 19 bp, Homo sapiens
  siRNA target sequence for ARHGEF6 (NM_004840.1,261-279).
caaccctccaagtggaaat

SEQ ID NO: 294831 - DNA, 19 bp, Homo sapiens
  siRNA target sequence for ARHGEF6 (NM_004840.1,284-302).
gatcctgatgacctttatt

SEQ ID NO: 294832 - DNA, 19 bp, Homo sapiens
  siRNA target sequence for ARHGEF6 (NM_004840.1,319-337).
caaggtactgagtactctt

SEQ ID NO: 294833 - DNA, 19 bp, Homo sapiens
  siRNA target sequence for ARHGEF6 (NM_004840.1,333-351).
ctcttttagctgtcaacaa

SEQ ID NO: 294834 - DNA, 19 bp, Homo sapiens
  siRNA target sequence for ARHGEF6 (NM_004840.1,386-404).
ggacgttcctcttctctta

SEQ ID NO: 294835 - DNA, 19 bp, Homo sapiens
  siRNA target sequence for ARHGEF6 (NM_004840.1,411-429).
ctaatacttctcagacaaa

SEQ ID NO: 294836 - DNA, 19 bp, Homo sapiens
  siRNA target sequence for ARHGEF6 (NM_004840.1,493-511).
gacggaaaatggaagtcat

SEQ ID NO: 294837 - DNA, 19 bp, Homo sapiens
  siRNA target sequence for ARHGEF6 (NM_004840.1,504-522).
gaagtcatcagttgatagt

SEQ ID NO: 294838 - DNA, 19 bp, Homo sapiens
  siRNA target sequence for ARHGEF6 (NM_004840.1,507-525).
gtcatcagttgatagtaaa

SEQ ID NO: 294839 - DNA, 19 bp, Homo sapiens
  siRNA target sequence for ARHGEF6 (NM_004840.1,592-610).
cgtcacacgagttgaagaa

SEQ ID NO: 294840 - DNA, 19 bp, Homo sapiens
  siRNA target sequence for ARHGEF6 (NM_004840.1,616-634).
ctggtgggaaggcacatta

SEQ ID NO: 294841 - DNA, 19 bp, Homo sapiens
  siRNA target sequence for ARHGEF6 (NM_004840.1,668-686).
gtccgtgaaattaaatcca

SEQ ID NO: 294842 - DNA, 19 bp, Homo sapiens
  siRNA target sequence for ARHGEF6 (NM_004840.1,704-722).
ccaaaagccgtcaaaggat

SEQ ID NO: 294843 - DNA, 19 bp, Homo sapiens
  siRNA target sequence for ARHGEF6 (NM_004840.1,737-755).
cttaccaagaattattata

SEQ ID NO: 294844 - DNA, 19 bp, Homo sapiens
  siRNA target sequence for ARHGEF6 (NM_004840.1,741-759).
ccaagaattattatactgt

SEQ ID NO: 294845 - DNA, 19 bp, Homo sapiens
  siRNA target sequence for ARHGEF6 (NM_004840.1,756-774).
ctgtggtgttacagaacat

SEQ ID NO: 294846 - DNA, 19 bp, Homo sapiens
  siRNA target sequence for ARHGEF6 (NM_004840.1,842-860).
cagtccaataacaatctga

SEQ ID NO: 294847 - DNA, 19 bp, Homo sapiens
  siRNA target sequence for ARHGEF6 (NM_004840.1,864-882).
ctgtggaggttacatcttt

SEQ ID NO: 294848 - DNA, 19 bp, Homo sapiens
  siRNA target sequence for ARHGEF6 (NM_004840.1,895-913).
cgaggaagtatgcacattt

SEQ ID NO: 294849 - DNA, 19 bp, Homo sapiens
  siRNA target sequence for ARHGEF6 (NM_004840.1,932-950).
gccttggaagaatgttcaa

SEQ ID NO: 294850 - DNA, 19 bp, Homo sapiens
  siRNA target sequence for ARHGEF6 (NM_004840.1,970-988).
caaagtaggaggttgtcta

SEQ ID NO: 294851 - DNA, 19 bp, Homo sapiens
  siRNA target sequence for ARHGEF6 (NM_004840.1,993-1011).
gtctcatgcctcattttaa

SEQ ID NO: 294852 - DNA, 19 bp, Homo sapiens
  siRNA target sequence for ARHGEF6 (NM_004840.1,997-1015).
catgcctcattttaaatct

SEQ ID NO: 294853 - DNA, 19 bp, Homo sapiens
  siRNA target sequence for ARHGEF6 (NM_004840.1,1024-1042).
ggcttactgtgcaaaccat

SEQ ID NO: 294854 - DNA, 19 bp, Homo sapiens
  siRNA target sequence for ARHGEF6 (NM_004840.1,1159-1177).
catgcgactggagaaatat

SEQ ID NO: 294855 - DNA, 19 bp, Homo sapiens
  siRNA target sequence for ARHGEF6 (NM_004840.1,1162-1180).
gcgactggagaaatatgtt

SEQ ID NO: 294856 - DNA, 19 bp, Homo sapiens
  siRNA target sequence for ARHGEF6 (NM_004840.1,1182-1200).
ctctcttgcaagagttaga

SEQ ID NO: 294857 - DNA, 19 bp, Homo sapiens
  siRNA target sequence for ARHGEF6 (NM_004840.1,1213-1231).
ggatactcatccagatcat

SEQ ID NO: 294858 - DNA, 19 bp, Homo sapiens
  siRNA target sequence for ARHGEF6 (NM_004840.1,1247-1265).
gcaatcgtagcattcaaaa

SEQ ID NO: 294859 - DNA, 19 bp, Homo sapiens
  siRNA target sequence for ARHGEF6 (NM_004840.1,1266-1284).
ctctcatggggcaatgtca

SEQ ID NO: 294860 - DNA, 19 bp, Homo sapiens
  siRNA target sequence for ARHGEF6 (NM_004840.1,1318-1336).
gatactgtccgaacctatt

SEQ ID NO: 294861 - DNA, 19 bp, Homo sapiens
  siRNA target sequence for ARHGEF6 (NM_004840.1,1427-1445).
gaggagcggtaccttatgt

SEQ ID NO: 294862 - DNA, 19 bp, Homo sapiens
  siRNA target sequence for ARHGEF6 (NM_004840.1,1429-1447).
ggagcggtaccttatgtta

SEQ ID NO: 294863 - DNA, 19 bp, Homo sapiens
  siRNA target sequence for ARHGEF6 (NM_004840.1,1430-1448).
gagcggtaccttatgttat

SEQ ID NO: 294864 - DNA, 19 bp, Homo sapiens
  siRNA target sequence for ARHGEF6 (NM_004840.1,1501-1519).
ctatcagggaaaaatacca

SEQ ID NO: 294865 - DNA, 19 bp, Homo sapiens
  siRNA target sequence for ARHGEF6 (NM_004840.1,1530-1548).
cggtggtgactagattaga

SEQ ID NO: 294866 - DNA, 19 bp, Homo sapiens
  siRNA target sequence for ARHGEF6 (NM_004840.1,1531-1549).
ggtggtgactagattagat

SEQ ID NO: 294867 - DNA, 19 bp, Homo sapiens
  siRNA target sequence for ARHGEF6 (NM_004840.1,1534-1552).
ggtgactagattagatgaa

SEQ ID NO: 294868 - DNA, 19 bp, Homo sapiens
  siRNA target sequence for ARHGEF6 (NM_004840.1,1535-1553).
gtgactagattagatgaaa

SEQ ID NO: 294869 - DNA, 19 bp, Homo sapiens
  siRNA target sequence for ARHGEF6 (NM_004840.1,1560-1578).
ggaatgactgcacatttga

SEQ ID NO: 294870 - DNA, 19 bp, Homo sapiens
  siRNA target sequence for ARHGEF6 (NM_004840.1,1607-1625).
gtggtccattgtaacaaca

SEQ ID NO: 294871 - DNA, 19 bp, Homo sapiens
  siRNA target sequence for ARHGEF6 (NM_004840.1,1676-1694).
cctgcctcttgcagttcat

SEQ ID NO: 294872 - DNA, 19 bp, Homo sapiens
  siRNA target sequence for ARHGEF6 (NM_004840.1,1683-1701).
cttgcagttcattatccaa

SEQ ID NO: 294873 - DNA, 19 bp, Homo sapiens
  siRNA target sequence for ARHGEF6 (NM_004840.1,1768-1786).
ggagcctcctcaaattata

SEQ ID NO: 294874 - DNA, 19 bp, Homo sapiens
  siRNA target sequence for ARHGEF6 (NM_004840.1,1769-1787).
gagcctcctcaaattataa

SEQ ID NO: 294875 - DNA, 19 bp, Homo sapiens
  siRNA target sequence for ARHGEF6 (NM_004840.1,1771-1789).
gcctcctcaaattataaaa

SEQ ID NO: 294876 - DNA, 19 bp, Homo sapiens
  siRNA target sequence for ARHGEF6 (NM_004840.1,1833-1851).
catcagcagcactaggtta

SEQ ID NO: 294877 - DNA, 19 bp, Homo sapiens
  siRNA target sequence for ARHGEF6 (NM_004840.1,1836-1854).
cagcagcactaggttataa

SEQ ID NO: 294878 - DNA, 19 bp, Homo sapiens
  siRNA target sequence for ARHGEF6 (NM_004840.1,1839-1857).
cagcactaggttataaaga

SEQ ID NO: 294879 - DNA, 19 bp, Homo sapiens
  siRNA target sequence for ARHGEF6 (NM_004840.1,1856-1874).
gagaggatgtcttatatct

SEQ ID NO: 294880 - DNA, 19 bp, Homo sapiens
  siRNA target sequence for ARHGEF6 (NM_004840.1,1858-1876).
gaggatgtcttatatctta

SEQ ID NO: 294881 - DNA, 19 bp, Homo sapiens
  siRNA target sequence for ARHGEF6 (NM_004840.1,1887-1905).
gtaaaagccctaaaacgat

SEQ ID NO: 294882 - DNA, 19 bp, Homo sapiens
  siRNA target sequence for ARHGEF6 (NM_004840.1,1893-1911).
gccctaaaacgatgaagaa

SEQ ID NO: 294883 - DNA, 19 bp, Homo sapiens
  siRNA target sequence for ARHGEF6 (NM_004840.1,1944-1962).
catcggaggaggaatatgt

SEQ ID NO: 294884 - DNA, 19 bp, Homo sapiens
  siRNA target sequence for ARHGEF6 (NM_004840.1,1954-1972).
ggaatatgtgattaggaaa

SEQ ID NO: 294885 - DNA, 19 bp, Homo sapiens
  siRNA target sequence for ARHGEF6 (NM_004840.1,1991-2009).
gaggatgctcaaatcctta

SEQ ID NO: 294886 - DNA, 19 bp, Homo sapiens
  siRNA target sequence for ARHGEF6 (NM_004840.1,2048-2066).
caaggccatggctcaagta

SEQ ID NO: 294887 - DNA, 19 bp, Homo sapiens
  siRNA target sequence for ARHGEF6 (NM_004840.1,2064-2082).
gtactcgaaaagattccat

SEQ ID NO: 294888 - DNA, 19 bp, Homo sapiens
  siRNA target sequence for ARHGEF6 (NM_004840.1,2164-2182).
gagccttgttgatactgtt

SEQ ID NO: 294889 - DNA, 19 bp, Homo sapiens
  siRNA target sequence for ARHGEF6 (NM_004840.1,2282-2300).
ctggtgcggaggcttttga

SEQ ID NO: 294890 - DNA, 19 bp, Homo sapiens
  siRNA target sequence for ARHGEF6 (NM_004840.1,2293-2311).
gcttttgaagcaaacagat

SEQ ID NO: 294891 - DNA, 19 bp, Homo sapiens
  siRNA target sequence for ARHGEF6 (NM_004840.1,2302-2320).
gcaaacagatgagtgtatt

SEQ ID NO: 294892 - DNA, 19 bp, Homo sapiens
  siRNA target sequence for FARP1 (NM_005766.1,197-215).
cccaggaggcatttgaagt

SEQ ID NO: 294893 - DNA, 19 bp, Homo sapiens
  siRNA target sequence for FARP1 (NM_005766.1,270-288).
cctcgtggaaggtgactat

SEQ ID NO: 294894 - DNA, 19 bp, Homo sapiens
  siRNA target sequence for FARP1 (NM_005766.1,327-345).
gtggctggatctcctaaaa

SEQ ID NO: 294895 - DNA, 19 bp, Homo sapiens
  siRNA target sequence for FARP1 (NM_005766.1,368-386).
ggccaaagcacgttgttgt

SEQ ID NO: 294896 - DNA, 19 bp, Homo sapiens
  siRNA target sequence for FARP1 (NM_005766.1,369-387).
gccaaagcacgttgttgtt

SEQ ID NO: 294897 - DNA, 19 bp, Homo sapiens
  siRNA target sequence for FARP1 (NM_005766.1,375-393).
gcacgttgttgttaagttt

SEQ ID NO: 294898 - DNA, 19 bp, Homo sapiens
  siRNA target sequence for FARP1 (NM_005766.1,488-506).
gcaggttgacgtgtaatga

SEQ ID NO: 294899 - DNA, 19 bp, Homo sapiens
  siRNA target sequence for FARP1 (NM_005766.1,510-528).
cagcgcagctctcttgatt

SEQ ID NO: 294900 - DNA, 19 bp, Homo sapiens
  siRNA target sequence for FARP1 (NM_005766.1,513-531).
cgcagctctcttgatttca

SEQ ID NO: 294901 - DNA, 19 bp, Homo sapiens
  siRNA target sequence for FARP1 (NM_005766.1,578-596).
gagagcacttagcaaaaaa

SEQ ID NO: 294902 - DNA, 19 bp, Homo sapiens
  siRNA target sequence for FARP1 (NM_005766.1,620-638).
cactagaggacaaaatcgt

SEQ ID NO: 294903 - DNA, 19 bp, Homo sapiens
  siRNA target sequence for FARP1 (NM_005766.1,627-645).
ggacaaaatcgtggaattt

SEQ ID NO: 294904 - DNA, 19 bp, Homo sapiens
  siRNA target sequence for FARP1 (NM_005766.1,704-722).
cccgtcggctagagatgta

SEQ ID NO: 294905 - DNA, 19 bp, Homo sapiens
  siRNA target sequence for FARP1 (NM_005766.1,705-723).
ccgtcggctagagatgtat

SEQ ID NO: 294906 - DNA, 19 bp, Homo sapiens
  siRNA target sequence for FARP1 (NM_005766.1,753-771).
ggaaggcacgaagatcaat

SEQ ID NO: 294907 - DNA, 19 bp, Homo sapiens
  siRNA target sequence for FARP1 (NM_005766.1,786-804).
cacgggaattctagtgttt

SEQ ID NO: 294908 - DNA, 19 bp, Homo sapiens
  siRNA target sequence for FARP1 (NM_005766.1,788-806).
cgggaattctagtgtttca

SEQ ID NO: 294909 - DNA, 19 bp, Homo sapiens
  siRNA target sequence for FARP1 (NM_005766.1,799-817).
gtgtttcagggtttcacta

SEQ ID NO: 294910 - DNA, 19 bp, Homo sapiens
  siRNA target sequence for FARP1 (NM_005766.1,888-906).
ccggccagatgccaatagt

SEQ ID NO: 294911 - DNA, 19 bp, Homo sapiens
  siRNA target sequence for FARP1 (NM_005766.1,905-923).
gtgcgtaccaggatacctt

SEQ ID NO: 294912 - DNA, 19 bp, Homo sapiens
  siRNA target sequence for FARP1 (NM_005766.1,957-975).
gtccttctggaaaatctgt

SEQ ID NO: 294913 - DNA, 19 bp, Homo sapiens
  siRNA target sequence for FARP1 (NM_005766.1,1083-1101).
gcaggttctcgactatgtt

SEQ ID NO: 294914 - DNA, 19 bp, Homo sapiens
  siRNA target sequence for FARP1 (NM_005766.1,1084-1102).
caggttctcgactatgtta

SEQ ID NO: 294915 - DNA, 19 bp, Homo sapiens
  siRNA target sequence for FARP1 (NM_005766.1,1086-1104).
ggttctcgactatgttaaa

SEQ ID NO: 294916 - DNA, 19 bp, Homo sapiens
  siRNA target sequence for FARP1 (NM_005766.1,1401-1419).
ggaggaggtcgttaaggat

SEQ ID NO: 294917 - DNA, 19 bp, Homo sapiens
  siRNA target sequence for FARP1 (NM_005766.1,1402-1420).
gaggaggtcgttaaggata

SEQ ID NO: 294918 - DNA, 19 bp, Homo sapiens
  siRNA target sequence for FARP1 (NM_005766.1,1422-1440).
gacccagcagagtaaacct

SEQ ID NO: 294919 - DNA, 19 bp, Homo sapiens
  siRNA target sequence for FARP1 (NM_005766.1,1647-1665).
gaagagattcccaactgat

SEQ ID NO: 294920 - DNA, 19 bp, Homo sapiens
  siRNA target sequence for FARP1 (NM_005766.1,1650-1668).
gagattcccaactgataaa

SEQ ID NO: 294921 - DNA, 19 bp, Homo sapiens
  siRNA target sequence for FARP1 (NM_005766.1,1661-1679).
ctgataaagcgtacttcat

SEQ ID NO: 294922 - DNA, 19 bp, Homo sapiens
  siRNA target sequence for FARP1 (NM_005766.1,1671-1689).
gtacttcatagctaaggaa

SEQ ID NO: 294923 - DNA, 19 bp, Homo sapiens
  siRNA target sequence for FARP1 (NM_005766.1,1694-1712).
ctaccaccgagcgaacata

SEQ ID NO: 294924 - DNA, 19 bp, Homo sapiens
  siRNA target sequence for FARP1 (NM_005766.1,1697-1715).
ccaccgagcgaacatatct

SEQ ID NO: 294925 - DNA, 19 bp, Homo sapiens
  siRNA target sequence for FARP1 (NM_005766.1,1700-1718).
ccgagcgaacatatctgaa

SEQ ID NO: 294926 - DNA, 19 bp, Homo sapiens
  siRNA target sequence for FARP1 (NM_005766.1,1719-1737).
ggatctcgaagttatcact

SEQ ID NO: 294927 - DNA, 19 bp, Homo sapiens
  siRNA target sequence for FARP1 (NM_005766.1,1720-1738).
gatctcgaagttatcactt

SEQ ID NO: 294928 - DNA, 19 bp, Homo sapiens
  siRNA target sequence for FARP1 (NM_005766.1,1776-1794).
gccggaagcactgaaaagt

SEQ ID NO: 294929 - DNA, 19 bp, Homo sapiens
  siRNA target sequence for FARP1 (NM_005766.1,1783-1801).
gcactgaaaagtctcatat

SEQ ID NO: 294930 - DNA, 19 bp, Homo sapiens
  siRNA target sequence for FARP1 (NM_005766.1,1793-1811).
gtctcatattcccgaattt

SEQ ID NO: 294931 - DNA, 19 bp, Homo sapiens
  siRNA target sequence for FARP1 (NM_005766.1,1816-1834).
cctttgcacaaatttcata

SEQ ID NO: 294932 - DNA, 19 bp, Homo sapiens
  siRNA target sequence for FARP1 (NM_005766.1,1821-1839).
gcacaaatttcatactaat

SEQ ID NO: 294933 - DNA, 19 bp, Homo sapiens
  siRNA target sequence for FARP1 (NM_005766.1,1872-1890).
gtgggaaggccgctcaaat

SEQ ID NO: 294934 - DNA, 19 bp, Homo sapiens
  siRNA target sequence for FARP1 (NM_005766.1,1882-1900).
cgctcaaatgcccaaatca

SEQ ID NO: 294935 - DNA, 19 bp, Homo sapiens
  siRNA target sequence for FARP1 (NM_005766.1,2058-2076).
gcagaaggtgtgttaccta

SEQ ID NO: 294936 - DNA, 19 bp, Homo sapiens
  siRNA target sequence for FARP1 (NM_005766.1,2227-2245).
ctccacggtacgatgatca

SEQ ID NO: 294937 - DNA, 19 bp, Homo sapiens
  siRNA target sequence for FARP1 (NM_005766.1,2230-2248).
cacggtacgatgatcaaga

SEQ ID NO: 294938 - DNA, 19 bp, Homo sapiens
  siRNA target sequence for FARP1 (NM_005766.1,2268-2286).
gcacgaactcaagaaagat

SEQ ID NO: 294939 - DNA, 19 bp, Homo sapiens
  siRNA target sequence for FARP1 (NM_005766.1,2269-2287).
cacgaactcaagaaagatt

SEQ ID NO: 294940 - DNA, 19 bp, Homo sapiens
  siRNA target sequence for FARP1 (NM_005766.1,2425-2443).
ctgacggcctccaatcagt

SEQ ID NO: 294941 - DNA, 19 bp, Homo sapiens
  siRNA target sequence for FARP1 (NM_005766.1,2831-2849).
gcatcgcagtggagaatca

SEQ ID NO: 294942 - DNA, 19 bp, Homo sapiens
  siRNA target sequence for FARP1 (NM_005766.1,2906-2924).
gggtggtgttcacaaactt

SEQ ID NO: 294943 - DNA, 19 bp, Homo sapiens
  siRNA target sequence for FARP1 (NM_005766.1,2908-2926).
gtggtgttcacaaacttct

SEQ ID NO: 294944 - DNA, 19 bp, Homo sapiens
  siRNA target sequence for FARP1 (NM_005766.1,2928-2946).
cctgttcttctacaaatca

SEQ ID NO: 294945 - DNA, 19 bp, Homo sapiens
  siRNA target sequence for FBXO8 (NM_012180.1,369-387).
gcgagcaacatttctaaca

SEQ ID NO: 294946 - DNA, 19 bp, Homo sapiens
  siRNA target sequence for FBXO8 (NM_012180.1,382-400).
ctaacaccaatcatcgtaa

SEQ ID NO: 294947 - DNA, 19 bp, Homo sapiens
  siRNA target sequence for FBXO8 (NM_012180.1,386-404).
caccaatcatcgtaaacaa

SEQ ID NO: 294948 - DNA, 19 bp, Homo sapiens
  siRNA target sequence for FBXO8 (NM_012180.1,388-406).
ccaatcatcgtaaacaagt

SEQ ID NO: 294949 - DNA, 19 bp, Homo sapiens
  siRNA target sequence for FBXO8 (NM_012180.1,407-425).
ccaaggaggcattgacata

SEQ ID NO: 294950 - DNA, 19 bp, Homo sapiens
  siRNA target sequence for FBXO8 (NM_012180.1,408-426).
caaggaggcattgacatat

SEQ ID NO: 294951 - DNA, 19 bp, Homo sapiens
  siRNA target sequence for FBXO8 (NM_012180.1,412-430).
gaggcattgacatatatca

SEQ ID NO: 294952 - DNA, 19 bp, Homo sapiens
  siRNA target sequence for FBXO8 (NM_012180.1,420-438).
gacatatatcatcttttga

SEQ ID NO: 294953 - DNA, 19 bp, Homo sapiens
  siRNA target sequence for FBXO8 (NM_012180.1,442-460).
caaggaaatcgaaagaaca

SEQ ID NO: 294954 - DNA, 19 bp, Homo sapiens
  siRNA target sequence for FBXO8 (NM_012180.1,488-506).
gcctcctgagctaagcttt

SEQ ID NO: 294955 - DNA, 19 bp, Homo sapiens
  siRNA target sequence for FBXO8 (NM_012180.1,489-507).
cctcctgagctaagcttta

SEQ ID NO: 294956 - DNA, 19 bp, Homo sapiens
  siRNA target sequence for FBXO8 (NM_012180.1,563-581).
ggaccttgcgaatgatgaa

SEQ ID NO: 294957 - DNA, 19 bp, Homo sapiens
  siRNA target sequence for FBXO8 (NM_012180.1,566-584).
ccttgcgaatgatgaactt

SEQ ID NO: 294958 - DNA, 19 bp, Homo sapiens
  siRNA target sequence for FBXO8 (NM_012180.1,641-659).
cccacctttaggattttct

SEQ ID NO: 294959 - DNA, 19 bp, Homo sapiens
  siRNA target sequence for FBXO8 (NM_012180.1,715-733).
cagatgagggagtgaacta

SEQ ID NO: 294960 - DNA, 19 bp, Homo sapiens
  siRNA target sequence for FBXO8 (NM_012180.1,717-735).
gatgagggagtgaactact

SEQ ID NO: 294961 - DNA, 19 bp, Homo sapiens
  siRNA target sequence for FBXO8 (NM_012180.1,858-876).
gaccttgtaacattgcata

SEQ ID NO: 294962 - DNA, 19 bp, Homo sapiens
  siRNA target sequence for FBXO8 (NM_012180.1,860-878).
ccttgtaacattgcataat

SEQ ID NO: 294963 - DNA, 19 bp, Homo sapiens
  siRNA target sequence for FBXO8 (NM_012180.1,897-915).
ccaaatgcactgagagaat

SEQ ID NO: 294964 - DNA, 19 bp, Homo sapiens
  siRNA target sequence for FBXO8 (NM_012180.1,898-916).
caaatgcactgagagaatt

SEQ ID NO: 294965 - DNA, 19 bp, Homo sapiens
  siRNA target sequence for FBXO8 (NM_012180.1,910-928).
gagaattttttcgtcatat

SEQ ID NO: 294966 - DNA, 19 bp, Homo sapiens
  siRNA target sequence for FBXO8 (NM_012180.1,951-969).
gagtatcttgaaactctta

SEQ ID NO: 294967 - DNA, 19 bp, Homo sapiens
  siRNA target sequence for FBXO8 (NM_012180.1,996-1014).
gcttgcaaccctgatttaa

SEQ ID NO: 294968 - DNA, 19 bp, Homo sapiens
  siRNA target sequence for FBXO8 (NM_012180.1,997-1015).
cttgcaaccctgatttaat

SEQ ID NO: 294969 - DNA, 19 bp, Homo sapiens
  siRNA target sequence for FBXO8 (NM_012180.1,1055-1073).
gtgctactctttgattcta

SEQ ID NO: 294970 - DNA, 19 bp, Homo sapiens
  siRNA target sequence for FBXO8 (NM_012180.1,1057-1075).
gctactctttgattctact

SEQ ID NO: 294971 - DNA, 19 bp, Homo sapiens
  siRNA target sequence for FBXO8 (NM_012180.1,1090-1108).
ctagccctcatgtgaagaa

SEQ ID NO: 294972 - DNA, 19 bp, Homo sapiens
  siRNA target sequence for FBXO8 (NM_012180.1,1141-1159).
cccgtcgcgctgctcaaaa

SEQ ID NO: 294973 - DNA, 19 bp, Homo sapiens
  siRNA target sequence for FBXO8 (NM_012180.1,1142-1160).
ccgtcgcgctgctcaaaat

SEQ ID NO: 294974 - DNA, 19 bp, Homo sapiens
  siRNA target sequence for FBXO8 (NM_012180.1,1143-1161).
cgtcgcgctgctcaaaata

SEQ ID NO: 294975 - DNA, 19 bp, Homo sapiens
  siRNA target sequence for FBXO8 (NM_012180.1,1144-1162).
gtcgcgctgctcaaaatat

SEQ ID NO: 294976 - DNA, 19 bp, Homo sapiens
  siRNA target sequence for FBXO8 (NM_012180.1,1146-1164).
cgcgctgctcaaaatatta

SEQ ID NO: 294977 - DNA, 19 bp, Homo sapiens
  siRNA target sequence for FBXO8 (NM_012180.1,1148-1166).
cgctgctcaaaatattagt

SEQ ID NO: 294978 - DNA, 19 bp, Homo sapiens
  siRNA target sequence for FBXO8 (NM_012180.1,1176-1194).
gtagggcatctttatgaca

SEQ ID NO: 294979 - DNA, 19 bp, Homo sapiens
  siRNA target sequence for GBF1 (NM_004193.1,289-307).
gttggggccatcaaacgaa

SEQ ID NO: 294980 - DNA, 19 bp, Homo sapiens
  siRNA target sequence for GBF1 (NM_004193.1,349-367).
gatcctctgctgcatagtt

SEQ ID NO: 294981 - DNA, 19 bp, Homo sapiens
  siRNA target sequence for GBF1 (NM_004193.1,360-378).
gcatagtttcggtcatcta

SEQ ID NO: 294982 - DNA, 19 bp, Homo sapiens
  siRNA target sequence for GBF1 (NM_004193.1,382-400).
gaggttttaaacagtataa

SEQ ID NO: 294983 - DNA, 19 bp, Homo sapiens
  siRNA target sequence for GBF1 (NM_004193.1,412-430).
gaaattgagcccaatgtat

SEQ ID NO: 294984 - DNA, 19 bp, Homo sapiens
  siRNA target sequence for GBF1 (NM_004193.1,437-455).
gaccttttctggaagtgat

SEQ ID NO: 294985 - DNA, 19 bp, Homo sapiens
  siRNA target sequence for GBF1 (NM_004193.1,496-514).
ctcacctctgtcaacaagt

SEQ ID NO: 294986 - DNA, 19 bp, Homo sapiens
  siRNA target sequence for GBF1 (NM_004193.1,684-702).
gggtgcccacctaaccaat

SEQ ID NO: 294987 - DNA, 19 bp, Homo sapiens
  siRNA target sequence for GBF1 (NM_004193.1,688-706).
gcccacctaaccaatgaat

SEQ ID NO: 294988 - DNA, 19 bp, Homo sapiens
  siRNA target sequence for GBF1 (NM_004193.1,690-708).
ccacctaaccaatgaatct

SEQ ID NO: 294989 - DNA, 19 bp, Homo sapiens
  siRNA target sequence for GBF1 (NM_004193.1,732-750).
cttccggatctgctttgaa

SEQ ID NO: 294990 - DNA, 19 bp, Homo sapiens
  siRNA target sequence for GBF1 (NM_004193.1,757-775).
ctcagtgagttattgagaa

SEQ ID NO: 294991 - DNA, 19 bp, Homo sapiens
  siRNA target sequence for GBF1 (NM_004193.1,759-777).
cagtgagttattgagaaaa

SEQ ID NO: 294992 - DNA, 19 bp, Homo sapiens
  siRNA target sequence for GBF1 (NM_004193.1,810-828).
gctgctcttcacaaggtta

SEQ ID NO: 294993 - DNA, 19 bp, Homo sapiens
  siRNA target sequence for GBF1 (NM_004193.1,821-839).
caaggttacctcagtttaa

SEQ ID NO: 294994 - DNA, 19 bp, Homo sapiens
  siRNA target sequence for GBF1 (NM_004193.1,824-842).
ggttacctcagtttaaaga

SEQ ID NO: 294995 - DNA, 19 bp, Homo sapiens
  siRNA target sequence for GBF1 (NM_004193.1,825-843).
gttacctcagtttaaagaa

SEQ ID NO: 294996 - DNA, 19 bp, Homo sapiens
  siRNA target sequence for GBF1 (NM_004193.1,894-912).
cggaggcatgagtgattca

SEQ ID NO: 294997 - DNA, 19 bp, Homo sapiens
  siRNA target sequence for GBF1 (NM_004193.1,895-913).
ggaggcatgagtgattcat

SEQ ID NO: 294998 - DNA, 19 bp, Homo sapiens
  siRNA target sequence for GBF1 (NM_004193.1,900-918).
catgagtgattcatccaaa

SEQ ID NO: 294999 - DNA, 19 bp, Homo sapiens
  siRNA target sequence for GBF1 (NM_004193.1,952-970).
cgccatatgaccaaagtca

SEQ ID NO: 295000 - DNA, 19 bp, Homo sapiens
  siRNA target sequence for GBF1 (NM_004193.1,994-1012).
cccaatggaaccaccttat

SEQ ID NO: 295001 - DNA, 19 bp, Homo sapiens
  siRNA target sequence for GBF1 (NM_004193.1,996-1014).
caatggaaccaccttatca

SEQ ID NO: 295002 - DNA, 19 bp, Homo sapiens
  siRNA target sequence for GBF1 (NM_004193.1,1001-1019).
gaaccaccttatcatctaa

SEQ ID NO: 295003 - DNA, 19 bp, Homo sapiens
  siRNA target sequence for GBF1 (NM_004193.1,1109-1127).
cagacagtggcctggaatt

SEQ ID NO: 295004 - DNA, 19 bp, Homo sapiens
  siRNA target sequence for GBF1 (NM_004193.1,1293-1311).
gtccatccctgaagtgtta

SEQ ID NO: 295005 - DNA, 19 bp, Homo sapiens
  siRNA target sequence for GBF1 (NM_004193.1,1352-1370).
ctgtccatgacatggatta

SEQ ID NO: 295006 - DNA, 19 bp, Homo sapiens
  siRNA target sequence for GBF1 (NM_004193.1,1489-1507).
ccacacgaccgccataact

SEQ ID NO: 295007 - DNA, 19 bp, Homo sapiens
  siRNA target sequence for GBF1 (NM_004193.1,1501-1519).
cataactcagaggttatga

SEQ ID NO: 295008 - DNA, 19 bp, Homo sapiens
  siRNA target sequence for GBF1 (NM_004193.1,1606-1624).
gagatgtgccgtcacttat

SEQ ID NO: 295009 - DNA, 19 bp, Homo sapiens
  siRNA target sequence for GBF1 (NM_004193.1,1637-1655).
gcatagagcgactaaacct

SEQ ID NO: 295010 - DNA, 19 bp, Homo sapiens
  siRNA target sequence for GBF1 (NM_004193.1,1638-1656).
catagagcgactaaacctt

SEQ ID NO: 295011 - DNA, 19 bp, Homo sapiens
  siRNA target sequence for GBF1 (NM_004193.1,1644-1662).
gcgactaaacctttatgct

SEQ ID NO: 295012 - DNA, 19 bp, Homo sapiens
  siRNA target sequence for GBF1 (NM_004193.1,1664-1682).
cttccctgcgagtatgctt

SEQ ID NO: 295013 - DNA, 19 bp, Homo sapiens
  siRNA target sequence for GBF1 (NM_004193.1,1673-1691).
gagtatgcttcctactgtt

SEQ ID NO: 295014 - DNA, 19 bp, Homo sapiens
  siRNA target sequence for GBF1 (NM_004193.1,1720-1738).
caaatggagatgtacatca

SEQ ID NO: 295015 - DNA, 19 bp, Homo sapiens
  siRNA target sequence for GBF1 (NM_004193.1,1847-1865).
cagagctctacatcaacta

SEQ ID NO: 295016 - DNA, 19 bp, Homo sapiens
  siRNA target sequence for GBF1 (NM_004193.1,1851-1869).
gctctacatcaactatgat

SEQ ID NO: 295017 - DNA, 19 bp, Homo sapiens
  siRNA target sequence for GBF1 (NM_004193.1,1852-1870).
ctctacatcaactatgatt

SEQ ID NO: 295018 - DNA, 19 bp, Homo sapiens
  siRNA target sequence for GBF1 (NM_004193.1,1854-1872).
ctacatcaactatgattgt

SEQ ID NO: 295019 - DNA, 19 bp, Homo sapiens
  siRNA target sequence for GBF1 (NM_004193.1,1936-1954).
gtgtctggtcaactctata

SEQ ID NO: 295020 - DNA, 19 bp, Homo sapiens
  siRNA target sequence for GBF1 (NM_004193.1,1938-1956).
gtctggtcaactctataca

SEQ ID NO: 295021 - DNA, 19 bp, Homo sapiens
  siRNA target sequence for GBF1 (NM_004193.1,1955-1973).
caacacacctactatctct

SEQ ID NO: 295022 - DNA, 19 bp, Homo sapiens
  siRNA target sequence for GBF1 (NM_004193.1,1979-1997).
ccctattgacagtgattga

SEQ ID NO: 295023 - DNA, 19 bp, Homo sapiens
  siRNA target sequence for GBF1 (NM_004193.1,1981-1999).
ctattgacagtgattgaca

SEQ ID NO: 295024 - DNA, 19 bp, Homo sapiens
  siRNA target sequence for GBF1 (NM_004193.1,2072-2090).
caagctgtgagatagtaga

SEQ ID NO: 295025 - DNA, 19 bp, Homo sapiens
  siRNA target sequence for GBF1 (NM_004193.1,2094-2112).
cacccgagaagctagcaat

SEQ ID NO: 295026 - DNA, 19 bp, Homo sapiens
  siRNA target sequence for GBF1 (NM_004193.1,2097-2115).
ccgagaagctagcaatact

SEQ ID NO: 295027 - DNA, 19 bp, Homo sapiens
  siRNA target sequence for GBF1 (NM_004193.1,2099-2117).
gagaagctagcaatactga

SEQ ID NO: 295028 - DNA, 19 bp, Homo sapiens
  siRNA target sequence for GBF1 (NM_004193.1,2245-2263).
gactctggggctgacaaaa

SEQ ID NO: 295029 - DNA, 19 bp, Homo sapiens
  siRNA target sequence for GBF1 (NM_004193.1,2272-2290).
cggaagccaccccgatttt

SEQ ID NO: 295030 - DNA, 19 bp, Homo sapiens
  siRNA target sequence for GBF1 (NM_004193.1,2302-2320).
ccagatccacgggaactaa

SEQ ID NO: 295031 - DNA, 19 bp, Homo sapiens
  siRNA target sequence for GBF1 (NM_004193.1,2303-2321).
cagatccacgggaactaat

SEQ ID NO: 295032 - DNA, 19 bp, Homo sapiens
  siRNA target sequence for GBF1 (NM_004193.1,2308-2326).
ccacgggaactaattgaaa

SEQ ID NO: 295033 - DNA, 19 bp, Homo sapiens
  siRNA target sequence for GBF1 (NM_004193.1,2311-2329).
cgggaactaattgaaatta

SEQ ID NO: 295034 - DNA, 19 bp, Homo sapiens
  siRNA target sequence for GBF1 (NM_004193.1,2312-2330).
gggaactaattgaaattaa

SEQ ID NO: 295035 - DNA, 19 bp, Homo sapiens
  siRNA target sequence for GBF1 (NM_004193.1,2505-2523).
gagtgaccgcaaaaacatt

SEQ ID NO: 295036 - DNA, 19 bp, Homo sapiens
  siRNA target sequence for GBF1 (NM_004193.1,2507-2525).
gtgaccgcaaaaacattga

SEQ ID NO: 295037 - DNA, 19 bp, Homo sapiens
  siRNA target sequence for GBF1 (NM_004193.1,2655-2673).
cacagagcgttggatgaat

SEQ ID NO: 295038 - DNA, 19 bp, Homo sapiens
  siRNA target sequence for GBF1 (NM_004193.1,2659-2677).
gagcgttggatgaattgta

SEQ ID NO: 295039 - DNA, 19 bp, Homo sapiens
  siRNA target sequence for GBF1 (NM_004193.1,2661-2679).
gcgttggatgaattgtaat

SEQ ID NO: 295040 - DNA, 19 bp, Homo sapiens
  siRNA target sequence for GBF1 (NM_004193.1,2758-2776).
cacaatgttcgtaaacaga

SEQ ID NO: 295041 - DNA, 19 bp, Homo sapiens
  siRNA target sequence for GBF1 (NM_004193.1,2760-2778).
caatgttcgtaaacagaat

SEQ ID NO: 295042 - DNA, 19 bp, Homo sapiens
  siRNA target sequence for GBF1 (NM_004193.1,2797-2815).
gagtttcgcaaaaatctga

SEQ ID NO: 295043 - DNA, 19 bp, Homo sapiens
  siRNA target sequence for GBF1 (NM_004193.1,2915-2933).
gcttggttcgggagaacta

SEQ ID NO: 295044 - DNA, 19 bp, Homo sapiens
  siRNA target sequence for GBF1 (NM_004193.1,2916-2934).
cttggttcgggagaactat

SEQ ID NO: 295045 - DNA, 19 bp, Homo sapiens
  siRNA target sequence for GBF1 (NM_004193.1,2920-2938).
gttcgggagaactatgtgt

SEQ ID NO: 295046 - DNA, 19 bp, Homo sapiens
  siRNA target sequence for GBF1 (NM_004193.1,2963-2981).
ccacccctgagggcatatt

SEQ ID NO: 295047 - DNA, 19 bp, Homo sapiens
  siRNA target sequence for GBF1 (NM_004193.1,2966-2984).
cccctgagggcatattcct

SEQ ID NO: 295048 - DNA, 19 bp, Homo sapiens
  siRNA target sequence for GBF1 (NM_004193.1,2996-3014).
ctgccagctatgatcttga

SEQ ID NO: 295049 - DNA, 19 bp, Homo sapiens
  siRNA target sequence for GBF1 (NM_004193.1,3046-3064).
gctgctctctcttatgtct

SEQ ID NO: 295050 - DNA, 19 bp, Homo sapiens
  siRNA target sequence for GBF1 (NM_004193.1,3050-3068).
ctctctcttatgtctttga

SEQ ID NO: 295051 - DNA, 19 bp, Homo sapiens
  siRNA target sequence for GBF1 (NM_004193.1,3052-3070).
ctctcttatgtctttgaca

SEQ ID NO: 295052 - DNA, 19 bp, Homo sapiens
  siRNA target sequence for GBF1 (NM_004193.1,3146-3164).
gcctcagcgatgtgtttga

SEQ ID NO: 295053 - DNA, 19 bp, Homo sapiens
  siRNA target sequence for GBF1 (NM_004193.1,3263-3281).
cagccaagacagtattcca

SEQ ID NO: 295054 - DNA, 19 bp, Homo sapiens
  siRNA target sequence for GBF1 (NM_004193.1,3265-3283).
gccaagacagtattccatt

SEQ ID NO: 295055 - DNA, 19 bp, Homo sapiens
  siRNA target sequence for GBF1 (NM_004193.1,3403-3421).
gatcccaatggcaagatct

SEQ ID NO: 295056 - DNA, 19 bp, Homo sapiens
  siRNA target sequence for GBF1 (NM_004193.1,3554-3572).
gagtggccttagagtgtat

SEQ ID NO: 295057 - DNA, 19 bp, Homo sapiens
  siRNA target sequence for GBF1 (NM_004193.1,3561-3579).
cttagagtgtataaagcaa

SEQ ID NO: 295058 - DNA, 19 bp, Homo sapiens
  siRNA target sequence for GBF1 (NM_004193.1,3583-3601).
gacccagaaaaaatgatca

SEQ ID NO: 295059 - DNA, 19 bp, Homo sapiens
  siRNA target sequence for GBF1 (NM_004193.1,3770-3788).
ctgttcgagaccatctata

SEQ ID NO: 295060 - DNA, 19 bp, Homo sapiens
  siRNA target sequence for GBF1 (NM_004193.1,4146-4164).
cccatcctaccatcagaat

SEQ ID NO: 295061 - DNA, 19 bp, Homo sapiens
  siRNA target sequence for GBF1 (NM_004193.1,4263-4281).
ggtcaacagtggttggtta

SEQ ID NO: 295062 - DNA, 19 bp, Homo sapiens
  siRNA target sequence for GBF1 (NM_004193.1,4289-4307).
ggaaggatgacgttgataa

SEQ ID NO: 295063 - DNA, 19 bp, Homo sapiens
  siRNA target sequence for GBF1 (NM_004193.1,4342-4360).
cccctgatcaatcaataca

SEQ ID NO: 295064 - DNA, 19 bp, Homo sapiens
  siRNA target sequence for GBF1 (NM_004193.1,4384-4402).
gggccacacgacactaagt

SEQ ID NO: 295065 - DNA, 19 bp, Homo sapiens
  siRNA target sequence for GBF1 (NM_004193.1,4386-4404).
gccacacgacactaagtct

SEQ ID NO: 295066 - DNA, 19 bp, Homo sapiens
  siRNA target sequence for GBF1 (NM_004193.1,4599-4617).
caaagagggatcaatgctt

SEQ ID NO: 295067 - DNA, 19 bp, Homo sapiens
  siRNA target sequence for GBF1 (NM_004193.1,4687-4705).
gtgcctgccagctaccata

SEQ ID NO: 295068 - DNA, 19 bp, Homo sapiens
  siRNA target sequence for GBF1 (NM_004193.1,4697-4715).
gctaccatacggtgtcttt

SEQ ID NO: 295069 - DNA, 19 bp, Homo sapiens
  siRNA target sequence for GBF1 (NM_004193.1,4698-4716).
ctaccatacggtgtcttta

SEQ ID NO: 295070 - DNA, 19 bp, Homo sapiens
  siRNA target sequence for GBF1 (NM_004193.1,4944-4962).
gcagcgagcactacttgta

SEQ ID NO: 295071 - DNA, 19 bp, Homo sapiens
  siRNA target sequence for GBF1 (NM_004193.1,4947-4965).
gcgagcactacttgtacat

SEQ ID NO: 295072 - DNA, 19 bp, Homo sapiens
  siRNA target sequence for GBF1 (NM_004193.1,4989-5007).
ggaatgggagtcctgtttt

SEQ ID NO: 295073 - DNA, 19 bp, Homo sapiens
  siRNA target sequence for GBF1 (NM_004193.1,4990-5008).
gaatgggagtcctgtttta

SEQ ID NO: 295074 - DNA, 19 bp, Homo sapiens
  siRNA target sequence for GBF1 (NM_004193.1,5345-5363).
gggaacgcattgactgttt

SEQ ID NO: 295075 - DNA, 19 bp, Homo sapiens
  siRNA target sequence for PSCD1 (NM_004762.1,110-128).
cagaggagcgtcaagaact

SEQ ID NO: 295076 - DNA, 19 bp, Homo sapiens
  siRNA target sequence for PSCD1 (NM_004762.1,189-207).
gatagcagaagtagctaat

SEQ ID NO: 295077 - DNA, 19 bp, Homo sapiens
  siRNA target sequence for PSCD1 (NM_004762.1,331-349).
gacctcctgaagaacactt

SEQ ID NO: 295078 - DNA, 19 bp, Homo sapiens
  siRNA target sequence for PSCD1 (NM_004762.1,355-373).
gacattgcccagttcttat

SEQ ID NO: 295079 - DNA, 19 bp, Homo sapiens
  siRNA target sequence for PSCD1 (NM_004762.1,425-443).
gagatgagtttaatatcca

SEQ ID NO: 295080 - DNA, 19 bp, Homo sapiens
  siRNA target sequence for PSCD1 (NM_004762.1,568-586).
gcgtttgcccagcgatatt

SEQ ID NO: 295081 - DNA, 19 bp, Homo sapiens
  siRNA target sequence for PSCD1 (NM_004762.1,570-588).
gtttgcccagcgatattgt

SEQ ID NO: 295082 - DNA, 19 bp, Homo sapiens
  siRNA target sequence for PSCD1 (NM_004762.1,580-598).
cgatattgtcagtgcaata

SEQ ID NO: 295083 - DNA, 19 bp, Homo sapiens
  siRNA target sequence for PSCD1 (NM_004762.1,609-627).
ccagtccacggatacttgt

SEQ ID NO: 295084 - DNA, 19 bp, Homo sapiens
  siRNA target sequence for PSCD1 (NM_004762.1,610-628).
cagtccacggatacttgtt

SEQ ID NO: 295085 - DNA, 19 bp, Homo sapiens
  siRNA target sequence for PSCD1 (NM_004762.1,720-738).
gaaccgaggcatcaatgat

SEQ ID NO: 295086 - DNA, 19 bp, Homo sapiens
  siRNA target sequence for PSCD1 (NM_004762.1,759-777).
gctcctccggaatctctat

SEQ ID NO: 295087 - DNA, 19 bp, Homo sapiens
  siRNA target sequence for PSCD1 (NM_004762.1,763-781).
ctccggaatctctatgaga

SEQ ID NO: 295088 - DNA, 19 bp, Homo sapiens
  siRNA target sequence for PSCD1 (NM_004762.1,856-874).
cgagaaggctggctattga

SEQ ID NO: 295089 - DNA, 19 bp, Homo sapiens
  siRNA target sequence for PSCD1 (NM_004762.1,903-921).
gaagagacgctggttcatt

SEQ ID NO: 295090 - DNA, 19 bp, Homo sapiens
  siRNA target sequence for PSCD1 (NM_004762.1,986-1004).
ctttagagaatctgagtat

SEQ ID NO: 295091 - DNA, 19 bp, Homo sapiens
  siRNA target sequence for PSCD1 (NM_004762.1,1045-1063).
ctttatatccccgacaata

SEQ ID NO: 295092 - DNA, 19 bp, Homo sapiens
  siRNA target sequence for PSCD1 (NM_004762.1,1202-1220).
gggaccctttctacgaaat

SEQ ID NO: 295093 - DNA, 19 bp, Homo sapiens
  siRNA target sequence for PSCD1 (NM_004762.1,1222-1240).
ctcgcagcacggaaaaaga

SEQ ID NO: 295094 - DNA, 19 bp, Homo sapiens
  siRNA target sequence for PSCD1 (NM_017456.1,877-895).
ctcggtggcagggtaaaga

SEQ ID NO: 295095 - DNA, 19 bp, Homo sapiens
  siRNA target sequence for PSCD2 (NM_004228.3,312-330).
gccaatgagggcagtaaga

SEQ ID NO: 295096 - DNA, 19 bp, Homo sapiens
  siRNA target sequence for PSCD2 (NM_004228.3,1109-1127).
gaaaccgaactgctttgaa

SEQ ID NO: 295097 - DNA, 19 bp, Homo sapiens
  siRNA target sequence for PSCD2 (NM_004228.3,1157-1175).
catcaaagcctgcaaaact

SEQ ID NO: 295098 - DNA, 19 bp, Homo sapiens
  siRNA target sequence for PSCD2 (NM_004228.3,1282-1300).
gtgtggaccccttctatga

SEQ ID NO: 295099 - DNA, 19 bp, Homo sapiens
  siRNA target sequence for PSCD4 (NM_013385.2,225-243).
gcggggagacggaagagtt

SEQ ID NO: 295100 - DNA, 19 bp, Homo sapiens
  siRNA target sequence for PSCD4 (NM_013385.2,226-244).
cggggagacggaagagtta

SEQ ID NO: 295101 - DNA, 19 bp, Homo sapiens
  siRNA target sequence for PSCD4 (NM_013385.2,228-246).
gggagacggaagagttaca

SEQ ID NO: 295102 - DNA, 19 bp, Homo sapiens
  siRNA target sequence for PSCD4 (NM_013385.2,230-248).
gagacggaagagttacaga

SEQ ID NO: 295103 - DNA, 19 bp, Homo sapiens
  siRNA target sequence for PSCD4 (NM_013385.2,390-408).
ggcgcaagaagttcaacat

SEQ ID NO: 295104 - DNA, 19 bp, Homo sapiens
  siRNA target sequence for PSCD4 (NM_013385.2,416-434).
gccaagggtatccagtatt

SEQ ID NO: 295105 - DNA, 19 bp, Homo sapiens
  siRNA target sequence for PSCD4 (NM_013385.2,421-439).
gggtatccagtatttcatt

SEQ ID NO: 295106 - DNA, 19 bp, Homo sapiens
  siRNA target sequence for PSCD4 (NM_013385.2,423-441).
gtatccagtatttcattga

SEQ ID NO: 295107 - DNA, 19 bp, Homo sapiens
  siRNA target sequence for PSCD4 (NM_013385.2,1078-1096).
ggagccacggggaattata

SEQ ID NO: 295108 - DNA, 19 bp, Homo sapiens
  siRNA target sequence for PSCD4 (NM_013385.2,1081-1099).
gccacggggaattatacct

SEQ ID NO: 295109 - DNA, 19 bp, Homo sapiens
  siRNA target sequence for PSCD4 (NM_013385.2,1089-1107).
gaattatacctcttgagaa

SEQ ID NO: 295110 - DNA, 19 bp, Homo sapiens
  siRNA target sequence for PSCD4 (NM_013385.2,1173-1191).
gccgaggccagaaaatcaa

SEQ ID NO: 295111 - DNA, 19 bp, Homo sapiens
  siRNA target sequence for PSCD4 (NM_013385.2,1334-1352).
gtctctactcggaagaaga

SEQ ID NO: 295112 - DNA, 19 bp, Homo sapiens
  siRNA target sequence for PSCD4 (NM_013385.2,1338-1356).
ctactcggaagaagaagat

SEQ ID NO: 295113 - DNA, 19 bp, Homo sapiens
  siRNA target sequence for RAB2L (NM_004761.2,317-335).
gaggatggtgccgtgttta

SEQ ID NO: 295114 - DNA, 19 bp, Homo sapiens
  siRNA target sequence for RAB2L (NM_004761.2,337-355).
cgtcacaagccgccaatat

SEQ ID NO: 295115 - DNA, 19 bp, Homo sapiens
  siRNA target sequence for RAB2L (NM_004761.2,340-358).
cacaagccgccaatatcga

SEQ ID NO: 295116 - DNA, 19 bp, Homo sapiens
  siRNA target sequence for RAB2L (NM_004761.2,349-367).
ccaatatcgacctcttgat

SEQ ID NO: 295117 - DNA, 19 bp, Homo sapiens
  siRNA target sequence for RAB2L (NM_004761.2,682-700).
ccggcttgagagcttctta

SEQ ID NO: 295118 - DNA, 19 bp, Homo sapiens
  siRNA target sequence for RAB2L (NM_004761.2,685-703).
gcttgagagcttcttactt

SEQ ID NO: 295119 - DNA, 19 bp, Homo sapiens
  siRNA target sequence for RAB2L (NM_004761.2,890-908).
ctgctagatgcggaacttt

SEQ ID NO: 295120 - DNA, 19 bp, Homo sapiens
  siRNA target sequence for RAB2L (NM_004761.2,892-910).
gctagatgcggaacttttt

SEQ ID NO: 295121 - DNA, 19 bp, Homo sapiens
  siRNA target sequence for RAB2L (NM_004761.2,896-914).
gatgcggaactttttctca

SEQ ID NO: 295122 - DNA, 19 bp, Homo sapiens
  siRNA target sequence for RAB2L (NM_004761.2,899-917).
gcggaactttttctcaatt

SEQ ID NO: 295123 - DNA, 19 bp, Homo sapiens
  siRNA target sequence for RAB2L (NM_004761.2,998-1016).
gctactgtcacacagttta

SEQ ID NO: 295124 - DNA, 19 bp, Homo sapiens
  siRNA target sequence for RAB2L (NM_004761.2,1002-1020).
ctgtcacacagtttaacaa

SEQ ID NO: 295125 - DNA, 19 bp, Homo sapiens
  siRNA target sequence for RAB2L (NM_004761.2,1163-1181).
ctgctccgaaacttctctt

SEQ ID NO: 295126 - DNA, 19 bp, Homo sapiens
  siRNA target sequence for RAB2L (NM_004761.2,1297-1315).
ctccgaggaggataattat

SEQ ID NO: 295127 - DNA, 19 bp, Homo sapiens
  siRNA target sequence for RAB2L (NM_004761.2,1411-1429).
gggtgtggtcccatacctt

SEQ ID NO: 295128 - DNA, 19 bp, Homo sapiens
  siRNA target sequence for RAB2L (NM_004761.2,1544-1562).
cgacggctccagaatgaat

SEQ ID NO: 295129 - DNA, 19 bp, Homo sapiens
  siRNA target sequence for RAB2L (NM_004761.2,1698-1716).
gggtgcttcggccaacatt

SEQ ID NO: 295130 - DNA, 19 bp, Homo sapiens
  siRNA target sequence for RAB2L (NM_004761.2,2070-2088).
cctctgattgccgtatcat

SEQ ID NO: 295131 - DNA, 19 bp, Homo sapiens
  siRNA target sequence for RAB2L (NM_004761.2,2173-2191).
cagtcgtgtccttaagaaa

SEQ ID NO: 295132 - DNA, 19 bp, Homo sapiens
  siRNA target sequence for RAB2L (NM_004761.2,2266-2284).
cccagcctcggctaatgta

SEQ ID NO: 295133 - DNA, 19 bp, Homo sapiens
  siRNA target sequence for RAB2L (NM_004761.2,2270-2288).
gcctcggctaatgtattct

SEQ ID NO: 295134 - DNA, 19 bp, Homo sapiens
  siRNA target sequence for RAB2L (NM_004761.2,2271-2289).
cctcggctaatgtattcta

SEQ ID NO: 295135 - DNA, 19 bp, Homo sapiens
  siRNA target sequence for RASGRF1 (NM_002891.3,94-112).
cggagttcggacaacacaa

SEQ ID NO: 295136 - DNA, 19 bp, Homo sapiens
  siRNA target sequence for RASGRF1 (NM_002891.3,263-281).
cgctggagaaacagcatta

SEQ ID NO: 295137 - DNA, 19 bp, Homo sapiens
  siRNA target sequence for RASGRF1 (NM_002891.3,401-419).
cagagcatgaggcattaat

SEQ ID NO: 295138 - DNA, 19 bp, Homo sapiens
  siRNA target sequence for RASGRF1 (NM_002891.3,602-620).
gcgacatcaagaaaattaa

SEQ ID NO: 295139 - DNA, 19 bp, Homo sapiens
  siRNA target sequence for RASGRF1 (NM_002891.3,777-795).
gcacatccttgtcaacaat

SEQ ID NO: 295140 - DNA, 19 bp, Homo sapiens
  siRNA target sequence for RASGRF1 (NM_002891.3,878-896).
gcgaaaccatcatgttttt

SEQ ID NO: 295141 - DNA, 19 bp, Homo sapiens
  siRNA target sequence for RASGRF1 (NM_002891.3,879-897).
cgaaaccatcatgttttta

SEQ ID NO: 295142 - DNA, 19 bp, Homo sapiens
  siRNA target sequence for RASGRF1 (NM_002891.3,884-902).
ccatcatgtttttacatca

SEQ ID NO: 295143 - DNA, 19 bp, Homo sapiens
  siRNA target sequence for RASGRF1 (NM_002891.3,1289-1307).
cggagaacatccggaaaaa

SEQ ID NO: 295144 - DNA, 19 bp, Homo sapiens
  siRNA target sequence for RASGRF1 (NM_002891.3,1312-1330).
gccatcgagcgcatgatca

SEQ ID NO: 295145 - DNA, 19 bp, Homo sapiens
  siRNA target sequence for RASGRF1 (NM_002891.3,1376-1394).
gacaaggttccctcattca

SEQ ID NO: 295146 - DNA, 19 bp, Homo sapiens
  siRNA target sequence for RASGRF1 (NM_002891.3,1438-1456).
gggtctctctccctaaaga

SEQ ID NO: 295147 - DNA, 19 bp, Homo sapiens
  siRNA target sequence for RASGRF1 (NM_002891.3,1468-1486).
cgacagtgcttcctgtttt

SEQ ID NO: 295148 - DNA, 19 bp, Homo sapiens
  siRNA target sequence for RASGRF1 (NM_002891.3,1471-1489).
cagtgcttcctgttttcta

SEQ ID NO: 295149 - DNA, 19 bp, Homo sapiens
  siRNA target sequence for RASGRF1 (NM_002891.3,1613-1631).
gatccggccaagacataga

SEQ ID NO: 295150 - DNA, 19 bp, Homo sapiens
  siRNA target sequence for RASGRF1 (NM_002891.3,1616-1634).
ccggccaagacatagatca

SEQ ID NO: 295151 - DNA, 19 bp, Homo sapiens
  siRNA target sequence for RASGRF1 (NM_002891.3,1619-1637).
gccaagacatagatcactt

SEQ ID NO: 295152 - DNA, 19 bp, Homo sapiens
  siRNA target sequence for RASGRF1 (NM_002891.3,1760-1778).
gatgcaatgggctcatgat

SEQ ID NO: 295153 - DNA, 19 bp, Homo sapiens
  siRNA target sequence for RASGRF1 (NM_002891.3,1773-1791).
catgatgaacgcatttgaa

SEQ ID NO: 295154 - DNA, 19 bp, Homo sapiens
  siRNA target sequence for RASGRF1 (NM_002891.3,1776-1794).
gatgaacgcatttgaagaa

SEQ ID NO: 295155 - DNA, 19 bp, Homo sapiens
  siRNA target sequence for RASGRF1 (NM_002891.3,1808-1826).
ctgtgccgcagatgatcaa

SEQ ID NO: 295156 - DNA, 19 bp, Homo sapiens
  siRNA target sequence for RASGRF1 (NM_002891.3,1865-1883).
ggtccgacgcctccttata

SEQ ID NO: 295157 - DNA, 19 bp, Homo sapiens
  siRNA target sequence for RASGRF1 (NM_002891.3,1866-1884).
gtccgacgcctccttatat

SEQ ID NO: 295158 - DNA, 19 bp, Homo sapiens
  siRNA target sequence for RASGRF1 (NM_002891.3,1869-1887).
cgacgcctccttatattgt

SEQ ID NO: 295159 - DNA, 19 bp, Homo sapiens
  siRNA target sequence for RASGRF1 (NM_002891.3,1872-1890).
cgcctccttatattgtgat

SEQ ID NO: 295160 - DNA, 19 bp, Homo sapiens
  siRNA target sequence for RASGRF1 (NM_002891.3,2062-2080).
ctggacaagctcattacca

SEQ ID NO: 295161 - DNA, 19 bp, Homo sapiens
  siRNA target sequence for RASGRF1 (NM_002891.3,2071-2089).
ctcattaccatctacaaga

SEQ ID NO: 295162 - DNA, 19 bp, Homo sapiens
  siRNA target sequence for RASGRF1 (NM_002891.3,2143-2161).
gccagtggccagaacaata

SEQ ID NO: 295163 - DNA, 19 bp, Homo sapiens
  siRNA target sequence for RASGRF1 (NM_002891.3,2147-2165).
gtggccagaacaataagct

SEQ ID NO: 295164 - DNA, 19 bp, Homo sapiens
  siRNA target sequence for RASGRF1 (NM_002891.3,2264-2282).
ggaagctctccctgaacat

SEQ ID NO: 295165 - DNA, 19 bp, Homo sapiens
  siRNA target sequence for RASGRF1 (NM_002891.3,2525-2543).
cagatattgatcaaaacca

SEQ ID NO: 295166 - DNA, 19 bp, Homo sapiens
  siRNA target sequence for RASGRF1 (NM_002891.3,2585-2603).
caacaacacccaaatcagt

SEQ ID NO: 295167 - DNA, 19 bp, Homo sapiens
  siRNA target sequence for RASGRF1 (NM_002891.3,2669-2687).
gtcgtgaactggacaataa

SEQ ID NO: 295168 - DNA, 19 bp, Homo sapiens
  siRNA target sequence for RASGRF1 (NM_002891.3,2849-2867).
ccaccaatcgtgtcttgaa

SEQ ID NO: 295169 - DNA, 19 bp, Homo sapiens
  siRNA target sequence for RASGRF1 (NM_002891.3,3189-3207).
cggacaaggatggatgaaa

SEQ ID NO: 295170 - DNA, 19 bp, Homo sapiens
  siRNA target sequence for RASGRF1 (NM_002891.3,3191-3209).
gacaaggatggatgaaact

SEQ ID NO: 295171 - DNA, 19 bp, Homo sapiens
  siRNA target sequence for RASGRF1 (NM_002891.3,3225-3243).
gaccccttatatcatgaaa

SEQ ID NO: 295172 - DNA, 19 bp, Homo sapiens
  siRNA target sequence for RASGRF1 (NM_002891.3,3339-3357).
ggtggccgtagctgacata

SEQ ID NO: 295173 - DNA, 19 bp, Homo sapiens
  siRNA target sequence for RASGRF1 (NM_002891.3,3418-3436).
gcaatcttccggctcaaaa

SEQ ID NO: 295174 - DNA, 19 bp, Homo sapiens
  siRNA target sequence for RASGRF1 (NM_002891.3,3419-3437).
caatcttccggctcaaaaa

SEQ ID NO: 295175 - DNA, 19 bp, Homo sapiens
  siRNA target sequence for RASGRF1 (NM_002891.3,3462-3480).
gactaaagctttgattgat

SEQ ID NO: 295176 - DNA, 19 bp, Homo sapiens
  siRNA target sequence for RASGRF1 (NM_002891.3,3604-3622).
gaggggacgcccaattaca

SEQ ID NO: 295177 - DNA, 19 bp, Homo sapiens
  siRNA target sequence for RASGRF1 (NM_002891.3,3654-3672).
gaggatgatatcccatatt

SEQ ID NO: 295178 - DNA, 19 bp, Homo sapiens
  siRNA target sequence for RASGRF1 (NM_002891.3,3656-3674).
ggatgatatcccatattat

SEQ ID NO: 295179 - DNA, 19 bp, Homo sapiens
  siRNA target sequence for RASGRF1 (NM_002891.3,3666-3684).
ccatattatccgagagatt

SEQ ID NO: 295180 - DNA, 19 bp, Homo sapiens
  siRNA target sequence for RASGRF1 (NM_002891.3,3681-3699).
gattcgccagtttcaacaa

SEQ ID NO: 295181 - DNA, 19 bp, Homo sapiens
  siRNA target sequence for RASGRF1 (NM_002891.3,3715-3733).
gagcaccaagcaaaggtaa

SEQ ID NO: 295182 - DNA, 19 bp, Homo sapiens
  siRNA target sequence for RASGRF1 (NM_002891.3,3724-3742).
gcaaaggtaacgcaatatt

SEQ ID NO: 295183 - DNA, 19 bp, Homo sapiens
  siRNA target sequence for RASGRF1 (NM_002891.3,3745-3763).
ctggaccaatcttttgtaa

SEQ ID NO: 295184 - DNA, 19 bp, Homo sapiens
  siRNA target sequence for RASGRF1 (NM_002891.3,3791-3809).
ctctccgaatagaaccaaa

SEQ ID NO: 295185 - DNA, 19 bp, Homo sapiens
  siRNA target sequence for DELGEF (NM_012139.2,191-209).
gttgccccagcaactgaat

SEQ ID NO: 295186 - DNA, 19 bp, Homo sapiens
  siRNA target sequence for DELGEF (NM_012139.2,195-213).
ccccagcaactgaatgact

SEQ ID NO: 295187 - DNA, 19 bp, Homo sapiens
  siRNA target sequence for DELGEF (NM_012139.2,406-424).
gctgggattttacgattat

SEQ ID NO: 295188 - DNA, 19 bp, Homo sapiens
  siRNA target sequence for DELGEF (NM_012139.2,418-436).
cgattatgctcacagaaaa

SEQ ID NO: 295189 - DNA, 19 bp, Homo sapiens
  siRNA target sequence for DELGEF (NM_012139.2,518-536).
ggccattgagctccataaa

SEQ ID NO: 295190 - DNA, 19 bp, Homo sapiens
  siRNA target sequence for DELGEF (NM_012139.2,539-557).
gaaggttgtttgtattgct

SEQ ID NO: 295191 - DNA, 19 bp, Homo sapiens
  siRNA target sequence for DELGEF (NM_012139.2,614-632).
gactggtttggcatcatgt

SEQ ID NO: 295192 - DNA, 19 bp, Homo sapiens
  siRNA target sequence for DELGEF (NM_012139.2,696-714).
gtgacaggtctagagaatt

SEQ ID NO: 295193 - DNA, 19 bp, Homo sapiens
  siRNA target sequence for DELGEF (NM_012139.2,710-728).
gaattctaaagcaatgtgt

SEQ ID NO: 295194 - DNA, 19 bp, Homo sapiens
  siRNA target sequence for DELGEF (NM_012139.2,744-762).
gaccactcagcttcattaa

SEQ ID NO: 295195 - DNA, 19 bp, Homo sapiens
  siRNA target sequence for DELGEF (NM_012139.2,1057-1075).
cttcgtctccgcattgctt

SEQ ID NO: 295196 - DNA, 19 bp, Homo sapiens
  siRNA target sequence for DELGEF (NM_012139.2,1099-1117).
gtggctcagagcataattt

SEQ ID NO: 295197 - DNA, 19 bp, Homo sapiens
  siRNA target sequence for DELGEF (NM_012139.2,1341-1359).
gccatcgaggacactgaat

SEQ ID NO: 295198 - DNA, 19 bp, Homo sapiens
  siRNA target sequence for DELGEF (NM_012139.2,1343-1361).
catcgaggacactgaatct

SEQ ID NO: 295199 - DNA, 19 bp, Homo sapiens
  siRNA target sequence for WBSCR16 (NM_030798.2,277-295).
gctgggcgtgccttccttt

SEQ ID NO: 295200 - DNA, 19 bp, Homo sapiens
  siRNA target sequence for WBSCR16 (NM_030798.2,399-417).
ctgcttgcggctatggatt

SEQ ID NO: 295201 - DNA, 19 bp, Homo sapiens
  siRNA target sequence for WBSCR16 (NM_030798.2,440-458).
gcggatgttacgaaagtct

SEQ ID NO: 295202 - DNA, 19 bp, Homo sapiens
  siRNA target sequence for WBSCR16 (NM_030798.2,459-477).
gggggatgggactcaacaa

SEQ ID NO: 295203 - DNA, 19 bp, Homo sapiens
  siRNA target sequence for WBSCR16 (NM_030798.2,460-478).
ggggatgggactcaacaaa

SEQ ID NO: 295204 - DNA, 19 bp, Homo sapiens
  siRNA target sequence for WBSCR16 (NM_030798.2,463-481).
gatgggactcaacaaagat

SEQ ID NO: 295205 - DNA, 19 bp, Homo sapiens
  siRNA target sequence for WBSCR16 (NM_030798.2,497-515).
cacaggagccggaaagata

SEQ ID NO: 295206 - DNA, 19 bp, Homo sapiens
  siRNA target sequence for WBSCR16 (NM_030798.2,519-537).
cgaggggctacgagtatgt

SEQ ID NO: 295207 - DNA, 19 bp, Homo sapiens
  siRNA target sequence for RIN2 (NM_018993.2,70-88).
gacaagcgaggaagtttct

SEQ ID NO: 295208 - DNA, 19 bp, Homo sapiens
  siRNA target sequence for RIN2 (NM_018993.2,72-90).
caagcgaggaagtttcttt

SEQ ID NO: 295209 - DNA, 19 bp, Homo sapiens
  siRNA target sequence for RIN2 (NM_018993.2,77-95).
gaggaagtttctttaagct

SEQ ID NO: 295210 - DNA, 19 bp, Homo sapiens
  siRNA target sequence for RIN2 (NM_018993.2,83-101).
gtttctttaagctcattga

SEQ ID NO: 295211 - DNA, 19 bp, Homo sapiens
  siRNA target sequence for RIN2 (NM_018993.2,113-131).
cggagatcggagaactgaa

SEQ ID NO: 295212 - DNA, 19 bp, Homo sapiens
  siRNA target sequence for RIN2 (NM_018993.2,184-202).
gaaacccacagcatggtaa

SEQ ID NO: 295213 - DNA, 19 bp, Homo sapiens
  siRNA target sequence for RIN2 (NM_018993.2,569-587).
gcagggatgttctaccatt

SEQ ID NO: 295214 - DNA, 19 bp, Homo sapiens
  siRNA target sequence for RIN2 (NM_018993.2,570-588).
cagggatgttctaccattt

SEQ ID NO: 295215 - DNA, 19 bp, Homo sapiens
  siRNA target sequence for RIN2 (NM_018993.2,580-598).
ctaccatttaccttgaagt

SEQ ID NO: 295216 - DNA, 19 bp, Homo sapiens
  siRNA target sequence for RIN2 (NM_018993.2,597-615).
gttgccttatgccatttca

SEQ ID NO: 295217 - DNA, 19 bp, Homo sapiens
  siRNA target sequence for RIN2 (NM_018993.2,600-618).
gccttatgccatttcaaca

SEQ ID NO: 295218 - DNA, 19 bp, Homo sapiens
  siRNA target sequence for RIN2 (NM_018993.2,626-644).
cggaggctcagcttgaaga

SEQ ID NO: 295219 - DNA, 19 bp, Homo sapiens
  siRNA target sequence for RIN2 (NM_018993.2,648-666).
ggcccagatgggactaaat

SEQ ID NO: 295220 - DNA, 19 bp, Homo sapiens
  siRNA target sequence for RIN2 (NM_018993.2,649-667).
gcccagatgggactaaatt

SEQ ID NO: 295221 - DNA, 19 bp, Homo sapiens
  siRNA target sequence for RIN2 (NM_018993.2,650-668).
cccagatgggactaaattt

SEQ ID NO: 295222 - DNA, 19 bp, Homo sapiens
  siRNA target sequence for RIN2 (NM_018993.2,756-774).
gcgtcagctctgccttata

SEQ ID NO: 295223 - DNA, 19 bp, Homo sapiens
  siRNA target sequence for RIN2 (NM_018993.2,778-796).
ggagtgcattctatcaaaa

SEQ ID NO: 295224 - DNA, 19 bp, Homo sapiens
  siRNA target sequence for RIN2 (NM_018993.2,972-990).
gccacccgctattaatagt

SEQ ID NO: 295225 - DNA, 19 bp, Homo sapiens
  siRNA target sequence for RIN2 (NM_018993.2,974-992).
cacccgctattaatagtct

SEQ ID NO: 295226 - DNA, 19 bp, Homo sapiens
  siRNA target sequence for RIN2 (NM_018993.2,1031-1049).
cgagcatgccagaaacagt

SEQ ID NO: 295227 - DNA, 19 bp, Homo sapiens
  siRNA target sequence for RIN2 (NM_018993.2,1039-1057).
ccagaaacagtcaaccata

SEQ ID NO: 295228 - DNA, 19 bp, Homo sapiens
  siRNA target sequence for RIN2 (NM_018993.2,1040-1058).
cagaaacagtcaaccataa

SEQ ID NO: 295229 - DNA, 19 bp, Homo sapiens
  siRNA target sequence for RIN2 (NM_018993.2,1042-1060).
gaaacagtcaaccataaca

SEQ ID NO: 295230 - DNA, 19 bp, Homo sapiens
  siRNA target sequence for RIN2 (NM_018993.2,1046-1064).
cagtcaaccataacaaaca

SEQ ID NO: 295231 - DNA, 19 bp, Homo sapiens
  siRNA target sequence for RIN2 (NM_018993.2,1371-1389).
ccggagcatgcctctgttt

SEQ ID NO: 295232 - DNA, 19 bp, Homo sapiens
  siRNA target sequence for RIN2 (NM_018993.2,1719-1737).
gacccaggtcaagaactat

SEQ ID NO: 295233 - DNA, 19 bp, Homo sapiens
  siRNA target sequence for RIN2 (NM_018993.2,1721-1739).
cccaggtcaagaactattt

SEQ ID NO: 295234 - DNA, 19 bp, Homo sapiens
  siRNA target sequence for RIN2 (NM_018993.2,2063-2081).
gggtctgcaagctcattta

SEQ ID NO: 295235 - DNA, 19 bp, Homo sapiens
  siRNA target sequence for RIN2 (NM_018993.2,2097-2115).
caactcagggaggatgtat

SEQ ID NO: 295236 - DNA, 19 bp, Homo sapiens
  siRNA target sequence for RIN2 (NM_018993.2,2134-2152).
ccagtcctgacctatgtca

SEQ ID NO: 295237 - DNA, 19 bp, Homo sapiens
  siRNA target sequence for RIN2 (NM_018993.2,2135-2153).
cagtcctgacctatgtcat

SEQ ID NO: 295238 - DNA, 19 bp, Homo sapiens
  siRNA target sequence for RIN2 (NM_018993.2,2162-2180).
gtgacatgcttgaattgga

SEQ ID NO: 295239 - DNA, 19 bp, Homo sapiens
  siRNA target sequence for RIN2 (NM_018993.2,2236-2254).
ggaggctattacttgacaa

SEQ ID NO: 295240 - DNA, 19 bp, Homo sapiens
  siRNA target sequence for RIN2 (NM_018993.2,2247-2265).
cttgacaagcgcatatgga

SEQ ID NO: 295241 - DNA, 19 bp, Homo sapiens
  siRNA target sequence for RIN2 (NM_018993.2,2256-2274).
cgcatatggagcactttct

SEQ ID NO: 295242 - DNA, 19 bp, Homo sapiens
  siRNA target sequence for RIN2 (NM_018993.2,2263-2281).
ggagcactttctctgataa

SEQ ID NO: 295243 - DNA, 19 bp, Homo sapiens
  siRNA target sequence for RIN2 (NM_018993.2,2308-2326).
cgactgctcagctcagaaa

SEQ ID NO: 295244 - DNA, 19 bp, Homo sapiens
  siRNA target sequence for RIN2 (NM_018993.2,2386-2404).
gtggacgacttccagaatt

SEQ ID NO: 295245 - DNA, 19 bp, Homo sapiens
  siRNA target sequence for RIN2 (NM_018993.2,2458-2476).
cttgtgagaccttacatca

SEQ ID NO: 295246 - DNA, 19 bp, Homo sapiens
  siRNA target sequence for RIN2 (NM_018993.2,2583-2601).
ggacacttaccctcaaaaa

SEQ ID NO: 295247 - DNA, 19 bp, Homo sapiens
  siRNA target sequence for RIN2 (NM_018993.2,2584-2602).
gacacttaccctcaaaaaa

SEQ ID NO: 295248 - DNA, 19 bp, Homo sapiens
  siRNA target sequence for RIN2 (NM_018993.2,2633-2651).
cccacatcttccactttgt

SEQ ID NO: 295249 - DNA, 19 bp, Homo sapiens
  siRNA target sequence for RIN2 (NM_018993.2,2660-2678).
gcatcaagaacgatcctta

SEQ ID NO: 295250 - DNA, 19 bp, Homo sapiens
  siRNA target sequence for RIN2 (NM_018993.2,2661-2679).
catcaagaacgatccttat

SEQ ID NO: 295251 - DNA, 19 bp, Homo sapiens
  siRNA target sequence for RIN2 (NM_018993.2,2670-2688).
cgatccttatggcatcatt

SEQ ID NO: 295252 - DNA, 19 bp, Homo sapiens
  siRNA target sequence for RIN2 (NM_018993.2,2671-2689).
gatccttatggcatcattt

SEQ ID NO: 295253 - DNA, 19 bp, Homo sapiens
  siRNA target sequence for RGL (NM_015149.2,539-557).
ggaagatcatgttcgaata

SEQ ID NO: 295254 - DNA, 19 bp, Homo sapiens
  siRNA target sequence for RGL (NM_015149.2,540-558).
gaagatcatgttcgaatat

SEQ ID NO: 295255 - DNA, 19 bp, Homo sapiens
  siRNA target sequence for RGL (NM_015149.2,549-567).
gttcgaatatgggaagttt

SEQ ID NO: 295256 - DNA, 19 bp, Homo sapiens
  siRNA target sequence for RGL (NM_015149.2,552-570).
cgaatatgggaagttttaa

SEQ ID NO: 295257 - DNA, 19 bp, Homo sapiens
  siRNA target sequence for RGL (NM_015149.2,745-763).
gtaagatcaggaccataaa

SEQ ID NO: 295258 - DNA, 19 bp, Homo sapiens
  siRNA target sequence for RGL (NM_015149.2,749-767).
gatcaggaccataaaagct

SEQ ID NO: 295259 - DNA, 19 bp, Homo sapiens
  siRNA target sequence for RGL (NM_015149.2,811-829).
gggacaatgactttaccta

SEQ ID NO: 295260 - DNA, 19 bp, Homo sapiens
  siRNA target sequence for RGL (NM_015149.2,812-830).
ggacaatgactttacctat

SEQ ID NO: 295261 - DNA, 19 bp, Homo sapiens
  siRNA target sequence for RGL (NM_015149.2,911-929).
cctgacaagcccaaactgt

SEQ ID NO: 295262 - DNA, 19 bp, Homo sapiens
  siRNA target sequence for RGL (NM_015149.2,919-937).
gcccaaactgtgaagaaga

SEQ ID NO: 295263 - DNA, 19 bp, Homo sapiens
  siRNA target sequence for RGL (NM_015149.2,952-970).
catcagagtccaaaatggt

SEQ ID NO: 295264 - DNA, 19 bp, Homo sapiens
  siRNA target sequence for RGL (NM_015149.2,981-999).
gcaatcgcttccatactaa

SEQ ID NO: 295265 - DNA, 19 bp, Homo sapiens
  siRNA target sequence for RGL (NM_015149.2,1240-1258).
cgtgcttctcagaagatct

SEQ ID NO: 295266 - DNA, 19 bp, Homo sapiens
  siRNA target sequence for RGL (NM_015149.2,1336-1354).
ggtctcgaagggataagaa

SEQ ID NO: 295267 - DNA, 19 bp, Homo sapiens
  siRNA target sequence for RGL (NM_015149.2,1386-1404).
gccaccatctctcagttta

SEQ ID NO: 295268 - DNA, 19 bp, Homo sapiens
  siRNA target sequence for RGL (NM_015149.2,1387-1405).
ccaccatctctcagtttaa

SEQ ID NO: 295269 - DNA, 19 bp, Homo sapiens
  siRNA target sequence for RGL (NM_015149.2,1388-1406).
caccatctctcagtttaat

SEQ ID NO: 295270 - DNA, 19 bp, Homo sapiens
  siRNA target sequence for RGL (NM_015149.2,1442-1460).
gggcaaagaactcaaaact

SEQ ID NO: 295271 - DNA, 19 bp, Homo sapiens
  siRNA target sequence for RGL (NM_015149.2,1493-1511).
caacatcgctcatgaatgt

SEQ ID NO: 295272 - DNA, 19 bp, Homo sapiens
  siRNA target sequence for RGL (NM_015149.2,1559-1577).
gcagtctaattccatctat

SEQ ID NO: 295273 - DNA, 19 bp, Homo sapiens
  siRNA target sequence for RGL (NM_015149.2,1570-1588).
ccatctatcggttaaaaaa

SEQ ID NO: 295274 - DNA, 19 bp, Homo sapiens
  siRNA target sequence for RGL (NM_015149.2,1574-1592).
ctatcggttaaaaaagact

SEQ ID NO: 295275 - DNA, 19 bp, Homo sapiens
  siRNA target sequence for RGL (NM_015149.2,1609-1627).
gggaccgaatgctgatgtt

SEQ ID NO: 295276 - DNA, 19 bp, Homo sapiens
  siRNA target sequence for RGL (NM_015149.2,1610-1628).
ggaccgaatgctgatgttt

SEQ ID NO: 295277 - DNA, 19 bp, Homo sapiens
  siRNA target sequence for RGL (NM_015149.2,1613-1631).
ccgaatgctgatgtttgaa

SEQ ID NO: 295278 - DNA, 19 bp, Homo sapiens
  siRNA target sequence for RGL (NM_015149.2,1629-1647).
gaagaactttcagatatct

SEQ ID NO: 295279 - DNA, 19 bp, Homo sapiens
  siRNA target sequence for RGL (NM_015149.2,1698-1716).
ggaacctcaaaatttgcaa

SEQ ID NO: 295280 - DNA, 19 bp, Homo sapiens
  siRNA target sequence for RGL (NM_015149.2,1865-1883).
catcgagggtggactgata

SEQ ID NO: 295281 - DNA, 19 bp, Homo sapiens
  siRNA target sequence for RGL (NM_015149.2,1869-1887).
gagggtggactgataaact

SEQ ID NO: 295282 - DNA, 19 bp, Homo sapiens
  siRNA target sequence for RGL (NM_015149.2,1921-1939).
cccagataaagctcttaca

SEQ ID NO: 295283 - DNA, 19 bp, Homo sapiens
  siRNA target sequence for RGL (NM_015149.2,1966-1984).
ccccagaccaaaagttcat

SEQ ID NO: 295284 - DNA, 19 bp, Homo sapiens
  siRNA target sequence for RGL (NM_015149.2,2032-2050).
ccctgtcatgtgagattga

SEQ ID NO: 295285 - DNA, 19 bp, Homo sapiens
  siRNA target sequence for RGL (NM_015149.2,2188-2206).
ggagctctggtgaaagcat

SEQ ID NO: 295286 - DNA, 19 bp, Homo sapiens
  siRNA target sequence for RGL (NM_015149.2,2250-2268).
gctgaggagggctccatta

SEQ ID NO: 295287 - DNA, 19 bp, Homo sapiens
  siRNA target sequence for RGL (NM_015149.2,2281-2299).
cccctgatgagcctcaaaa

SEQ ID NO: 295288 - DNA, 19 bp, Homo sapiens
  siRNA target sequence for RGL (NM_015149.2,2326-2344).
gttcttctatccattccat

SEQ ID NO: 295289 - DNA, 19 bp, Homo sapiens
  siRNA target sequence for RGL (NM_015149.2,2359-2377).
cagggatgtcttccttaat

SEQ ID NO: 295290 - DNA, 19 bp, Homo sapiens
  siRNA target sequence for RGL (NM_015149.2,2362-2380).
ggatgtcttccttaatcaa

SEQ ID NO: 295291 - DNA, 19 bp, Homo sapiens
  siRNA target sequence for RGL (NM_015149.2,2395-2413).
ctccgtcctgcaacaacaa

SEQ ID NO: 295292 - DNA, 19 bp, Homo sapiens
  siRNA target sequence for RGL (NM_015149.2,2436-2454).
gtctcggtgacgtccatta

SEQ ID NO: 295293 - DNA, 19 bp, Homo sapiens
  siRNA target sequence for RGL (NM_015149.2,2526-2544).
gacaataacggcaacatgt

SEQ ID NO: 295294 - DNA, 19 bp, Homo sapiens
  siRNA target sequence for RGL (NM_015149.2,2558-2576).
gttgacgagccaggataaa

SEQ ID NO: 295295 - DNA, 19 bp, Homo sapiens
  siRNA target sequence for RGL (NM_015149.2,2599-2617).
ccatgctgaagcacaatct

SEQ ID NO: 295296 - DNA, 19 bp, Homo sapiens
  siRNA target sequence for RGL (NM_015149.2,2714-2732).
gaacagccaagtgaacttt

SEQ ID NO: 295297 - DNA, 19 bp, Homo sapiens
  siRNA target sequence for ABR (NM_001092.3,206-224).
gccagcgaagagatctaca

SEQ ID NO: 295298 - DNA, 19 bp, Homo sapiens
  siRNA target sequence for ABR (NM_001092.3,207-225).
ccagcgaagagatctacat

SEQ ID NO: 295299 - DNA, 19 bp, Homo sapiens
  siRNA target sequence for ABR (NM_001092.3,208-226).
cagcgaagagatctacatt

SEQ ID NO: 295300 - DNA, 19 bp, Homo sapiens
  siRNA target sequence for ABR (NM_001092.3,210-228).
gcgaagagatctacattaa

SEQ ID NO: 295301 - DNA, 19 bp, Homo sapiens
  siRNA target sequence for ABR (NM_001092.3,441-459).
gccagctcggtgtgtacaa

SEQ ID NO: 295302 - DNA, 19 bp, Homo sapiens
  siRNA target sequence for ABR (NM_001092.3,442-460).
ccagctcggtgtgtacaaa

SEQ ID NO: 295303 - DNA, 19 bp, Homo sapiens
  siRNA target sequence for ABR (NM_001092.3,461-479).
gcgtttgtcgataactata

SEQ ID NO: 295304 - DNA, 19 bp, Homo sapiens
  siRNA target sequence for ABR (NM_001092.3,462-480).
cgtttgtcgataactataa

SEQ ID NO: 295305 - DNA, 19 bp, Homo sapiens
  siRNA target sequence for ABR (NM_001092.3,463-481).
gtttgtcgataactataaa

SEQ ID NO: 295306 - DNA, 19 bp, Homo sapiens
  siRNA target sequence for ABR (NM_001092.3,962-980).
gccgacctggtgtttccat

SEQ ID NO: 295307 - DNA, 19 bp, Homo sapiens
  siRNA target sequence for ABR (NM_001092.3,1062-1080).
ccctcaagagtgaaatcca

SEQ ID NO: 295308 - DNA, 19 bp, Homo sapiens
  siRNA target sequence for ABR (NM_001092.3,1195-1213).
caatcggaatggaaagagt

SEQ ID NO: 295309 - DNA, 19 bp, Homo sapiens
  siRNA target sequence for ABR (NM_001092.3,1328-1346).
ctcacaggatcctgtttca

SEQ ID NO: 295310 - DNA, 19 bp, Homo sapiens
  siRNA target sequence for ABR (NM_001092.3,1334-1352).
ggatcctgtttcaagctta

SEQ ID NO: 295311 - DNA, 19 bp, Homo sapiens
  siRNA target sequence for ABR (NM_001092.3,1436-1454).
cactctgccaagggattta

SEQ ID NO: 295312 - DNA, 19 bp, Homo sapiens
  siRNA target sequence for ABR (NM_001092.3,1442-1460).
gccaagggatttaagcaat

SEQ ID NO: 295313 - DNA, 19 bp, Homo sapiens
  siRNA target sequence for ABR (NM_001092.3,1730-1748).
cacacggacgtgattgaga

SEQ ID NO: 295314 - DNA, 19 bp, Homo sapiens
  siRNA target sequence for ABR (NM_001092.3,1734-1752).
cggacgtgattgagatgaa

SEQ ID NO: 295315 - DNA, 19 bp, Homo sapiens
  siRNA target sequence for ABR (NM_001092.3,1753-1771).
cgggatcaaagtggaattt

SEQ ID NO: 295316 - DNA, 19 bp, Homo sapiens
  siRNA target sequence for ABR (NM_001092.3,1833-1851).
gcgtcttcggtgtgaagat

SEQ ID NO: 295317 - DNA, 19 bp, Homo sapiens
  siRNA target sequence for ABR (NM_001092.3,1835-1853).
gtcttcggtgtgaagatca

SEQ ID NO: 295318 - DNA, 19 bp, Homo sapiens
  siRNA target sequence for ABR (NM_001092.3,1992-2010).
ccgtcttcgatgccaataa

SEQ ID NO: 295319 - DNA, 19 bp, Homo sapiens
  siRNA target sequence for ABR (NM_001092.3,2263-2281).
gcccatcaacaaaatgtca

SEQ ID NO: 295320 - DNA, 19 bp, Homo sapiens
  siRNA target sequence for ABR (NM_001092.3,2453-2471).
cggaacacactgtacttct

SEQ ID NO: 295321 - DNA, 19 bp, Homo sapiens
  siRNA target sequence for ARFGEF2 (NM_006420.1,109-127).
caggtggcgctcgatgaaa

SEQ ID NO: 295322 - DNA, 19 bp, Homo sapiens
  siRNA target sequence for ARFGEF2 (NM_006420.1,111-129).
ggtggcgctcgatgaaatt

SEQ ID NO: 295323 - DNA, 19 bp, Homo sapiens
  siRNA target sequence for ARFGEF2 (NM_006420.1,114-132).
ggcgctcgatgaaattaaa

SEQ ID NO: 295324 - DNA, 19 bp, Homo sapiens
  siRNA target sequence for ARFGEF2 (NM_006420.1,117-135).
gctcgatgaaattaaagca

SEQ ID NO: 295325 - DNA, 19 bp, Homo sapiens
  siRNA target sequence for ARFGEF2 (NM_006420.1,336-354).
gcggctgatcgacagaatt

SEQ ID NO: 295326 - DNA, 19 bp, Homo sapiens
  siRNA target sequence for ARFGEF2 (NM_006420.1,338-356).
ggctgatcgacagaattgt

SEQ ID NO: 295327 - DNA, 19 bp, Homo sapiens
  siRNA target sequence for ARFGEF2 (NM_006420.1,339-357).
gctgatcgacagaattgtt

SEQ ID NO: 295328 - DNA, 19 bp, Homo sapiens
  siRNA target sequence for ARFGEF2 (NM_006420.1,342-360).
gatcgacagaattgttgaa

SEQ ID NO: 295329 - DNA, 19 bp, Homo sapiens
  siRNA target sequence for ARFGEF2 (NM_006420.1,358-376).
gaaaccatttgcagttgtt

SEQ ID NO: 295330 - DNA, 19 bp, Homo sapiens
  siRNA target sequence for ARFGEF2 (NM_006420.1,392-410).
ctgatgaaggggttcagtt

SEQ ID NO: 295331 - DNA, 19 bp, Homo sapiens
  siRNA target sequence for ARFGEF2 (NM_006420.1,401-419).
gggttcagttacaaataat

SEQ ID NO: 295332 - DNA, 19 bp, Homo sapiens
  siRNA target sequence for ARFGEF2 (NM_006420.1,441-459).
gacttccccacacattgaa

SEQ ID NO: 295333 - DNA, 19 bp, Homo sapiens
  siRNA target sequence for ARFGEF2 (NM_006420.1,446-464).
ccccacacattgaaattca

SEQ ID NO: 295334 - DNA, 19 bp, Homo sapiens
  siRNA target sequence for ARFGEF2 (NM_006420.1,545-563).
ccaaggctacccttactca

SEQ ID NO: 295335 - DNA, 19 bp, Homo sapiens
  siRNA target sequence for ARFGEF2 (NM_006420.1,562-580).
cagatgctgaacgtcattt

SEQ ID NO: 295336 - DNA, 19 bp, Homo sapiens
  siRNA target sequence for ARFGEF2 (NM_006420.1,680-698).
ccccaaagttcgttcgttt

SEQ ID NO: 295337 - DNA, 19 bp, Homo sapiens
  siRNA target sequence for ARFGEF2 (NM_006420.1,683-701).
caaagttcgttcgtttgaa

SEQ ID NO: 295338 - DNA, 19 bp, Homo sapiens
  siRNA target sequence for ARFGEF2 (NM_006420.1,733-751).
cccgaaaaaacagatttaa

SEQ ID NO: 295339 - DNA, 19 bp, Homo sapiens
  siRNA target sequence for ARFGEF2 (NM_006420.1,963-981).
gtgccaggaatgtgctatt

SEQ ID NO: 295340 - DNA, 19 bp, Homo sapiens
  siRNA target sequence for ARFGEF2 (NM_006420.1,1038-1056).
cttgtcgtcagcagataat

SEQ ID NO: 295341 - DNA, 19 bp, Homo sapiens
  siRNA target sequence for ARFGEF2 (NM_006420.1,1143-1161).
gtgcaagctgtccatgaaa

SEQ ID NO: 295342 - DNA, 19 bp, Homo sapiens
  siRNA target sequence for ARFGEF2 (NM_006420.1,1268-1286).
ggactcacgagatgttcat

SEQ ID NO: 295343 - DNA, 19 bp, Homo sapiens
  siRNA target sequence for ARFGEF2 (NM_006420.1,1291-1309).
gcaatcaagcaatatctct

SEQ ID NO: 295344 - DNA, 19 bp, Homo sapiens
  siRNA target sequence for ARFGEF2 (NM_006420.1,1417-1435).
cagatagaggtctttttca

SEQ ID NO: 295345 - DNA, 19 bp, Homo sapiens
  siRNA target sequence for ARFGEF2 (NM_006420.1,1529-1547).
cccagtgtgttgtggatat

SEQ ID NO: 295346 - DNA, 19 bp, Homo sapiens
  siRNA target sequence for ARFGEF2 (NM_006420.1,1552-1570).
gtcaactacgactgtgatt

SEQ ID NO: 295347 - DNA, 19 bp, Homo sapiens
  siRNA target sequence for ARFGEF2 (NM_006420.1,1554-1572).
caactacgactgtgattta

SEQ ID NO: 295348 - DNA, 19 bp, Homo sapiens
  siRNA target sequence for ARFGEF2 (NM_006420.1,1560-1578).
cgactgtgatttaaatgct

SEQ ID NO: 295349 - DNA, 19 bp, Homo sapiens
  siRNA target sequence for ARFGEF2 (NM_006420.1,1591-1609).
gagcgccttgtaaatgatt

SEQ ID NO: 295350 - DNA, 19 bp, Homo sapiens
  siRNA target sequence for ARFGEF2 (NM_006420.1,1593-1611).
gcgccttgtaaatgattta

SEQ ID NO: 295351 - DNA, 19 bp, Homo sapiens
  siRNA target sequence for ARFGEF2 (NM_006420.1,1594-1612).
cgccttgtaaatgatttat

SEQ ID NO: 295352 - DNA, 19 bp, Homo sapiens
  siRNA target sequence for ARFGEF2 (NM_006420.1,1730-1748).
ggagcaaagacctgtatgt

SEQ ID NO: 295353 - DNA, 19 bp, Homo sapiens
  siRNA target sequence for ARFGEF2 (NM_006420.1,1733-1751).
gcaaagacctgtatgtgaa

SEQ ID NO: 295354 - DNA, 19 bp, Homo sapiens
  siRNA target sequence for ARFGEF2 (NM_006420.1,1784-1802).
ggctcacggatcaggaaat

SEQ ID NO: 295355 - DNA, 19 bp, Homo sapiens
  siRNA target sequence for ARFGEF2 (NM_006420.1,1785-1803).
gctcacggatcaggaaata

SEQ ID NO: 295356 - DNA, 19 bp, Homo sapiens
  siRNA target sequence for ARFGEF2 (NM_006420.1,1948-1966).
ggcatcgagctgttcaaca

SEQ ID NO: 295357 - DNA, 19 bp, Homo sapiens
  siRNA target sequence for ARFGEF2 (NM_006420.1,2010-2028).
gctgggaacgtcagttgaa

SEQ ID NO: 295358 - DNA, 19 bp, Homo sapiens
  siRNA target sequence for ARFGEF2 (NM_006420.1,2095-2113).
gatagcgcaaggttcaaca

SEQ ID NO: 295359 - DNA, 19 bp, Homo sapiens
  siRNA target sequence for ARFGEF2 (NM_006420.1,2129-2147).
cctacgtggaccaacttga

SEQ ID NO: 295360 - DNA, 19 bp, Homo sapiens
  siRNA target sequence for ARFGEF2 (NM_006420.1,2207-2225).
ctggagaagcccaaaagat

SEQ ID NO: 295361 - DNA, 19 bp, Homo sapiens
  siRNA target sequence for ARFGEF2 (NM_006420.1,2210-2228).
gagaagcccaaaagattga

SEQ ID NO: 295362 - DNA, 19 bp, Homo sapiens
  siRNA target sequence for ARFGEF2 (NM_006420.1,2244-2262).
gtttgccgcaagatacata

SEQ ID NO: 295363 - DNA, 19 bp, Homo sapiens
  siRNA target sequence for ARFGEF2 (NM_006420.1,2311-2329).
gtcctagcgtattcaatta

SEQ ID NO: 295364 - DNA, 19 bp, Homo sapiens
  siRNA target sequence for ARFGEF2 (NM_006420.1,2313-2331).
cctagcgtattcaattatt

SEQ ID NO: 295365 - DNA, 19 bp, Homo sapiens
  siRNA target sequence for ARFGEF2 (NM_006420.1,2314-2332).
ctagcgtattcaattatta

SEQ ID NO: 295366 - DNA, 19 bp, Homo sapiens
  siRNA target sequence for ARFGEF2 (NM_006420.1,2376-2394).
gacgaaagagcagtatatt

SEQ ID NO: 295367 - DNA, 19 bp, Homo sapiens
  siRNA target sequence for ARFGEF2 (NM_006420.1,2400-2418).
gaatcggggtatcaatgat

SEQ ID NO: 295368 - DNA, 19 bp, Homo sapiens
  siRNA target sequence for ARFGEF2 (NM_006420.1,2404-2422).
cggggtatcaatgatagta

SEQ ID NO: 295369 - DNA, 19 bp, Homo sapiens
  siRNA target sequence for ARFGEF2 (NM_006420.1,2428-2446).
ctgccagaagagtatctct

SEQ ID NO: 295370 - DNA, 19 bp, Homo sapiens
  siRNA target sequence for ARFGEF2 (NM_006420.1,2447-2465).
caagcatctatgaagagat

SEQ ID NO: 295371 - DNA, 19 bp, Homo sapiens
  siRNA target sequence for ARFGEF2 (NM_006420.1,2450-2468).
gcatctatgaagagataga

SEQ ID NO: 295372 - DNA, 19 bp, Homo sapiens
  siRNA target sequence for ARFGEF2 (NM_006420.1,2502-2520).
gctaacgattgcaaccaaa

SEQ ID NO: 295373 - DNA, 19 bp, Homo sapiens
  siRNA target sequence for ARFGEF2 (NM_006420.1,2503-2521).
ctaacgattgcaaccaaat

SEQ ID NO: 295374 - DNA, 19 bp, Homo sapiens
  siRNA target sequence for ARFGEF2 (NM_006420.1,2558-2576).
ggctgctgtacaacttaga

SEQ ID NO: 295375 - DNA, 19 bp, Homo sapiens
  siRNA target sequence for ARFGEF2 (NM_006420.1,2560-2578).
ctgctgtacaacttagaga

SEQ ID NO: 295376 - DNA, 19 bp, Homo sapiens
  siRNA target sequence for ARFGEF2 (NM_006420.1,2629-2647).
gccaaagccccgtttacca

SEQ ID NO: 295377 - DNA, 19 bp, Homo sapiens
  siRNA target sequence for ARFGEF2 (NM_006420.1,2665-2683).
catgtccggccaatgttca

SEQ ID NO: 295378 - DNA, 19 bp, Homo sapiens
  siRNA target sequence for ARFGEF2 (NM_006420.1,2787-2805).
ccgaatcgcctgcatcttt

SEQ ID NO: 295379 - DNA, 19 bp, Homo sapiens
  siRNA target sequence for ARFGEF2 (NM_006420.1,2910-2928).
cattaagacgcttatcaca

SEQ ID NO: 295380 - DNA, 19 bp, Homo sapiens
  siRNA target sequence for ARFGEF2 (NM_006420.1,2963-2981).
cctggcatgagatcttgaa

SEQ ID NO: 295381 - DNA, 19 bp, Homo sapiens
  siRNA target sequence for ARFGEF2 (NM_006420.1,2964-2982).
ctggcatgagatcttgaaa

SEQ ID NO: 295382 - DNA, 19 bp, Homo sapiens
  siRNA target sequence for ARFGEF2 (NM_006420.1,3240-3258).
cagactggatggaaatgca

SEQ ID NO: 295383 - DNA, 19 bp, Homo sapiens
  siRNA target sequence for ARFGEF2 (NM_006420.1,3316-3334).
caccatcctcgcatgttca

SEQ ID NO: 295384 - DNA, 19 bp, Homo sapiens
  siRNA target sequence for ARFGEF2 (NM_006420.1,3342-3360).
gaagattgtggagatatca

SEQ ID NO: 295385 - DNA, 19 bp, Homo sapiens
  siRNA target sequence for ARFGEF2 (NM_006420.1,3395-3413).
ctcgaatatggcatgtgat

SEQ ID NO: 295386 - DNA, 19 bp, Homo sapiens
  siRNA target sequence for ARFGEF2 (NM_006420.1,3437-3455).
gctgcaaccctaatgaaga

SEQ ID NO: 295387 - DNA, 19 bp, Homo sapiens
  siRNA target sequence for ARFGEF2 (NM_006420.1,3438-3456).
ctgcaaccctaatgaagat

SEQ ID NO: 295388 - DNA, 19 bp, Homo sapiens
  siRNA target sequence for ARFGEF2 (NM_006420.1,3485-3503).
ggcaactctccatgaagtt

SEQ ID NO: 295389 - DNA, 19 bp, Homo sapiens
  siRNA target sequence for ARFGEF2 (NM_006420.1,3552-3570).
gaggccctttgagcatatt

SEQ ID NO: 295390 - DNA, 19 bp, Homo sapiens
  siRNA target sequence for ARFGEF2 (NM_006420.1,3554-3572).
ggccctttgagcatattat

SEQ ID NO: 295391 - DNA, 19 bp, Homo sapiens
  siRNA target sequence for ARFGEF2 (NM_006420.1,3556-3574).
ccctttgagcatattatga

SEQ ID NO: 295392 - DNA, 19 bp, Homo sapiens
  siRNA target sequence for ARFGEF2 (NM_006420.1,3557-3575).
cctttgagcatattatgaa

SEQ ID NO: 295393 - DNA, 19 bp, Homo sapiens
  siRNA target sequence for ARFGEF2 (NM_006420.1,3746-3764).
gccacattgtcacaactat

SEQ ID NO: 295394 - DNA, 19 bp, Homo sapiens
  siRNA target sequence for ARFGEF2 (NM_006420.1,3761-3779).
ctattttccagcaccattt

SEQ ID NO: 295395 - DNA, 19 bp, Homo sapiens
  siRNA target sequence for ARFGEF2 (NM_006420.1,3782-3800).
ctgcagccatcgattcctt

SEQ ID NO: 295396 - DNA, 19 bp, Homo sapiens
  siRNA target sequence for ARFGEF2 (NM_006420.1,3914-3932).
ctcgggtgctacaagaata

SEQ ID NO: 295397 - DNA, 19 bp, Homo sapiens
  siRNA target sequence for ARFGEF2 (NM_006420.1,3916-3934).
cgggtgctacaagaataca

SEQ ID NO: 295398 - DNA, 19 bp, Homo sapiens
  siRNA target sequence for ARFGEF2 (NM_006420.1,3918-3936).
ggtgctacaagaatacaca

SEQ ID NO: 295399 - DNA, 19 bp, Homo sapiens
  siRNA target sequence for ARFGEF2 (NM_006420.1,3986-4004).
ggttccccatcttattcga

SEQ ID NO: 295400 - DNA, 19 bp, Homo sapiens
  siRNA target sequence for ARFGEF2 (NM_006420.1,3987-4005).
gttccccatcttattcgaa

SEQ ID NO: 295401 - DNA, 19 bp, Homo sapiens
  siRNA target sequence for ARFGEF2 (NM_006420.1,4049-4067).
ggggactcacagtcatgtt

SEQ ID NO: 295402 - DNA, 19 bp, Homo sapiens
  siRNA target sequence for ARFGEF2 (NM_006420.1,4058-4076).
cagtcatgtttgagatcat

SEQ ID NO: 295403 - DNA, 19 bp, Homo sapiens
  siRNA target sequence for ARFGEF2 (NM_006420.1,4132-4150).
gtgtttcggatttttgaca

SEQ ID NO: 295404 - DNA, 19 bp, Homo sapiens
  siRNA target sequence for ARFGEF2 (NM_006420.1,4210-4228).
cacgcactttatgctattt

SEQ ID NO: 295405 - DNA, 19 bp, Homo sapiens
  siRNA target sequence for ARFGEF2 (NM_006420.1,4212-4230).
cgcactttatgctatttgt

SEQ ID NO: 295406 - DNA, 19 bp, Homo sapiens
  siRNA target sequence for ARFGEF2 (NM_006420.1,4296-4314).
gcagtggtgtgtcaaacaa

SEQ ID NO: 295407 - DNA, 19 bp, Homo sapiens
  siRNA target sequence for ARFGEF2 (NM_006420.1,4299-4317).
gtggtgtgtcaaacaagat

SEQ ID NO: 295408 - DNA, 19 bp, Homo sapiens
  siRNA target sequence for ARFGEF2 (NM_006420.1,4329-4347).
ggcgcgatcaggtacaaat

SEQ ID NO: 295409 - DNA, 19 bp, Homo sapiens
  siRNA target sequence for ARFGEF2 (NM_006420.1,4405-4423).
gaaacctgcaactgtatgt

SEQ ID NO: 295410 - DNA, 19 bp, Homo sapiens
  siRNA target sequence for ARFGEF2 (NM_006420.1,4439-4457).
caaccatcccacatgtttt

SEQ ID NO: 295411 - DNA, 19 bp, Homo sapiens
  siRNA target sequence for ARFGEF2 (NM_006420.1,4474-4492).
gtaggaatggaggaagatt

SEQ ID NO: 295412 - DNA, 19 bp, Homo sapiens
  siRNA target sequence for ARFGEF2 (NM_006420.1,4522-4540).
gaccgccagtctttaagca

SEQ ID NO: 295413 - DNA, 19 bp, Homo sapiens
  siRNA target sequence for ARFGEF2 (NM_006420.1,4532-4550).
ctttaagcagcatagataa

SEQ ID NO: 295414 - DNA, 19 bp, Homo sapiens
  siRNA target sequence for ARFGEF2 (NM_006420.1,4568-4586).
gacagagccagctctctaa

SEQ ID NO: 295415 - DNA, 19 bp, Homo sapiens
  siRNA target sequence for ARFGEF2 (NM_006420.1,4578-4596).
gctctctaacccaacagat

SEQ ID NO: 295416 - DNA, 19 bp, Homo sapiens
  siRNA target sequence for ARFGEF2 (NM_006420.1,4610-4628).
gtagaccatacgcaaatca

SEQ ID NO: 295417 - DNA, 19 bp, Homo sapiens
  siRNA target sequence for ARFGEF2 (NM_006420.1,4639-4657).
gccagcctcctcatcaagt

SEQ ID NO: 295418 - DNA, 19 bp, Homo sapiens
  siRNA target sequence for ARFGEF2 (NM_006420.1,4658-4676).
gtgtggtccagttggaatt

SEQ ID NO: 295419 - DNA, 19 bp, Homo sapiens
  siRNA target sequence for ARFGEF2 (NM_006420.1,4709-4727).
ctgcgacgagcaaaaagga

SEQ ID NO: 295420 - DNA, 19 bp, Homo sapiens
  siRNA target sequence for ARFGEF2 (NM_006420.1,4763-4781).
cgctggatgcagatatcca

SEQ ID NO: 295421 - DNA, 19 bp, Homo sapiens
  siRNA target sequence for ARFGEF2 (NM_006420.1,4791-4809).
ggaggatcagggcatgtat

SEQ ID NO: 295422 - DNA, 19 bp, Homo sapiens
  siRNA target sequence for ARFGEF2 (NM_006420.1,4792-4810).
gaggatcagggcatgtata

SEQ ID NO: 295423 - DNA, 19 bp, Homo sapiens
  siRNA target sequence for ARFGEF2 (NM_006420.1,4795-4813).
gatcagggcatgtataagt

SEQ ID NO: 295424 - DNA, 19 bp, Homo sapiens
  siRNA target sequence for ARFGEF2 (NM_006420.1,4880-4898).
ccttcaactccaattacga

SEQ ID NO: 295425 - DNA, 19 bp, Homo sapiens
  siRNA target sequence for ARFGEF2 (NM_006420.1,4938-4956).
gtctaaacccaatcttcta

SEQ ID NO: 295426 - DNA, 19 bp, Homo sapiens
  siRNA target sequence for ARFGEF2 (NM_006420.1,4940-4958).
ctaaacccaatcttctaaa

SEQ ID NO: 295427 - DNA, 19 bp, Homo sapiens
  siRNA target sequence for ARFGEF2 (NM_006420.1,4946-4964).
ccaatcttctaaaacaaga

SEQ ID NO: 295428 - DNA, 19 bp, Homo sapiens
  siRNA target sequence for ARFGEF2 (NM_006420.1,4970-4988).
gcagcctggcctgttgttt

SEQ ID NO: 295429 - DNA, 19 bp, Homo sapiens
  siRNA target sequence for ARFGEF2 (NM_006420.1,4991-5009).
ggatcctgtttcgaatgta

SEQ ID NO: 295430 - DNA, 19 bp, Homo sapiens
  siRNA target sequence for ARFGEF2 (NM_006420.1,4995-5013).
cctgtttcgaatgtatgtt

SEQ ID NO: 295431 - DNA, 19 bp, Homo sapiens
  siRNA target sequence for ARFGEF2 (NM_006420.1,5074-5092).
gaagctcttgcctatttca

SEQ ID NO: 295432 - DNA, 19 bp, Homo sapiens
  siRNA target sequence for ARFGEF2 (NM_006420.1,5077-5095).
gctcttgcctatttcatca

SEQ ID NO: 295433 - DNA, 19 bp, Homo sapiens
  siRNA target sequence for ARFGEF2 (NM_006420.1,5085-5103).
ctatttcatcactgtgaat

SEQ ID NO: 295434 - DNA, 19 bp, Homo sapiens
  siRNA target sequence for ARFGEF2 (NM_006420.1,5136-5154).
cttgttgttacttctaact

SEQ ID NO: 295435 - DNA, 19 bp, Homo sapiens
  siRNA target sequence for ARFGEF2 (NM_006420.1,5139-5157).
gttgttacttctaactaaa

SEQ ID NO: 295436 - DNA, 19 bp, Homo sapiens
  siRNA target sequence for ARFGEF2 (NM_006420.1,5149-5167).
ctaactaaaaccctcaaaa

SEQ ID NO: 295437 - DNA, 19 bp, Homo sapiens
  siRNA target sequence for ARFGEF2 (NM_006420.1,5208-5226).
cccctacttgtgtgaaatt

SEQ ID NO: 295438 - DNA, 19 bp, Homo sapiens
  siRNA target sequence for ARFGEF2 (NM_006420.1,5210-5228).
cctacttgtgtgaaattat

SEQ ID NO: 295439 - DNA, 19 bp, Homo sapiens
  siRNA target sequence for ARFGEF2 (NM_006420.1,5257-5275).
gcagttctgcggaagttct

SEQ ID NO: 295440 - DNA, 19 bp, Homo sapiens
  siRNA target sequence for ARFGEF2 (NM_006420.1,5290-5308).
gttgtgtataagatatgga

SEQ ID NO: 295441 - DNA, 19 bp, Homo sapiens
  siRNA target sequence for ARHGEF7 (NM_003899.2,540-558).
gacgagctttccttctcaa

SEQ ID NO: 295442 - DNA, 19 bp, Homo sapiens
  siRNA target sequence for ARHGEF7 (NM_003899.2,542-560).
cgagctttccttctcaaaa

SEQ ID NO: 295443 - DNA, 19 bp, Homo sapiens
  siRNA target sequence for ARHGEF7 (NM_003899.2,707-725).
gagccctcccaaaggattt

SEQ ID NO: 295444 - DNA, 19 bp, Homo sapiens
  siRNA target sequence for ARHGEF7 (NM_003899.2,711-729).
cctcccaaaggatttgata

SEQ ID NO: 295445 - DNA, 19 bp, Homo sapiens
  siRNA target sequence for ARHGEF7 (NM_003899.2,735-753).
gccataaacaaaagctatt

SEQ ID NO: 295446 - DNA, 19 bp, Homo sapiens
  siRNA target sequence for ARHGEF7 (NM_003899.2,845-863).
gaccagtgagaagttaagt

SEQ ID NO: 295447 - DNA, 19 bp, Homo sapiens
  siRNA target sequence for ARHGEF7 (NM_003899.2,894-912).
ctagaagaaatatgttctt

SEQ ID NO: 295448 - DNA, 19 bp, Homo sapiens
  siRNA target sequence for ARHGEF7 (NM_003899.2,923-941).
gctcgtacagtctttagaa

SEQ ID NO: 295449 - DNA, 19 bp, Homo sapiens
  siRNA target sequence for ARHGEF7 (NM_003899.2,926-944).
cgtacagtctttagaagaa

SEQ ID NO: 295450 - DNA, 19 bp, Homo sapiens
  siRNA target sequence for ARHGEF7 (NM_003899.2,1016-1034).
cctgtacctcacgtattgt

SEQ ID NO: 295451 - DNA, 19 bp, Homo sapiens
  siRNA target sequence for ARHGEF7 (NM_003899.2,1214-1232).
ggattatcatacagataga

SEQ ID NO: 295452 - DNA, 19 bp, Homo sapiens
  siRNA target sequence for ARHGEF7 (NM_003899.2,1233-1251).
caagatattcaaaaatcca

SEQ ID NO: 295453 - DNA, 19 bp, Homo sapiens
  siRNA target sequence for ARHGEF7 (NM_003899.2,1254-1272).
gctgccttcaaaaaccttt

SEQ ID NO: 295454 - DNA, 19 bp, Homo sapiens
  siRNA target sequence for ARHGEF7 (NM_003899.2,1273-1291).
cagcccaatgtcaagaagt

SEQ ID NO: 295455 - DNA, 19 bp, Homo sapiens
  siRNA target sequence for ARHGEF7 (NM_003899.2,1347-1365).
gagggcgatgacattaaaa

SEQ ID NO: 295456 - DNA, 19 bp, Homo sapiens
  siRNA target sequence for ARHGEF7 (NM_003899.2,1349-1367).
gggcgatgacattaaaact

SEQ ID NO: 295457 - DNA, 19 bp, Homo sapiens
  siRNA target sequence for ARHGEF7 (NM_003899.2,1351-1369).
gcgatgacattaaaactct

SEQ ID NO: 295458 - DNA, 19 bp, Homo sapiens
  siRNA target sequence for ARHGEF7 (NM_003899.2,1371-1389).
ggcaacgtcacttacatgt

SEQ ID NO: 295459 - DNA, 19 bp, Homo sapiens
  siRNA target sequence for ARHGEF7 (NM_003899.2,1448-1466).
cttcccaaatgttttgcta

SEQ ID NO: 295460 - DNA, 19 bp, Homo sapiens
  siRNA target sequence for ARHGEF7 (NM_003899.2,1551-1569).
gacagtgaaaatcatagaa

SEQ ID NO: 295461 - DNA, 19 bp, Homo sapiens
  siRNA target sequence for ARHGEF7 (NM_003899.2,1591-1609).
gcatgattgagcggatatt

SEQ ID NO: 295462 - DNA, 19 bp, Homo sapiens
  siRNA target sequence for ARHGEF7 (NM_003899.2,1592-1610).
catgattgagcggatatta

SEQ ID NO: 295463 - DNA, 19 bp, Homo sapiens
  siRNA target sequence for ARHGEF7 (NM_003899.2,1833-1851).
ccgcacaccaccatcaact

SEQ ID NO: 295464 - DNA, 19 bp, Homo sapiens
  siRNA target sequence for ARHGEF7 (NM_003899.2,1964-1982).
gagccctaagaccatgaaa

SEQ ID NO: 295465 - DNA, 19 bp, Homo sapiens
  siRNA target sequence for ARHGEF7 (NM_003899.2,1966-1984).
gccctaagaccatgaaaaa

SEQ ID NO: 295466 - DNA, 19 bp, Homo sapiens
  siRNA target sequence for ARHGEF7 (NM_003899.2,2064-2082).
gaagatgctcagattctga

SEQ ID NO: 295467 - DNA, 19 bp, Homo sapiens
  siRNA target sequence for ARHGEF7 (NM_003899.2,2099-2117).
ctgcaccagcgccaaaaca

SEQ ID NO: 295468 - DNA, 19 bp, Homo sapiens
  siRNA target sequence for ARHGEF7 (NM_003899.2,2148-2166).
gaatctgctccacaagttt

SEQ ID NO: 295469 - DNA, 19 bp, Homo sapiens
  siRNA target sequence for ARHGEF7 (NM_003899.2,2152-2170).
ctgctccacaagttttgct

SEQ ID NO: 295470 - DNA, 19 bp, Homo sapiens
  siRNA target sequence for ARHGEF7 (NM_003899.2,2244-2262).
gtggataccgtatatgcat

SEQ ID NO: 295471 - DNA, 19 bp, Homo sapiens
  siRNA target sequence for ARHGEF7 (NM_003899.2,2246-2264).
ggataccgtatatgcatta

SEQ ID NO: 295472 - DNA, 19 bp, Homo sapiens
  siRNA target sequence for ARHGEF7 (NM_003899.2,2247-2265).
gataccgtatatgcattaa

SEQ ID NO: 295473 - DNA, 19 bp, Homo sapiens
  siRNA target sequence for ARHGEF7 (NM_003899.2,2251-2269).
ccgtatatgcattaaagga

SEQ ID NO: 295474 - DNA, 19 bp, Homo sapiens
  siRNA target sequence for ARHGEF7 (NM_003899.2,2260-2278).
cattaaaggatgaagttca

SEQ ID NO: 295475 - DNA, 19 bp, Homo sapiens
  siRNA target sequence for ARHGEF7 (NM_003899.2,2287-2305).
gacaggacaacaaaaagat

SEQ ID NO: 295476 - DNA, 19 bp, Homo sapiens
  siRNA target sequence for ARHGEF7 (NM_003899.2,2393-2411).
ctgggatgagaccaatcta

SEQ ID NO: 295477 - DNA, 19 bp, Homo sapiens
  siRNA target sequence for ARHGEF7 (NM_145735.1,243-261).
gggaccatcgagaaagtct

SEQ ID NO: 295478 - DNA, 19 bp, Homo sapiens
  siRNA target sequence for ARHGEF7 (NM_145735.1,244-262).
ggaccatcgagaaagtcta

SEQ ID NO: 295479 - DNA, 19 bp, Homo sapiens
  siRNA target sequence for ARHGEF7 (NM_145735.1,341-359).
ggagacgtttgatgcaaat

SEQ ID NO: 295480 - DNA, 19 bp, Homo sapiens
  siRNA target sequence for ARHGEF7 (NM_145735.1,344-362).
gacgtttgatgcaaatgat

SEQ ID NO: 295481 - DNA, 19 bp, Homo sapiens
  siRNA target sequence for ARHGEF7 (NM_145735.1,407-425).
gactctaaataaagtaaca

SEQ ID NO: 295482 - DNA, 19 bp, Homo sapiens
  siRNA target sequence for ARHGEF7 (NM_145735.1,466-484).
cctcgtctcaccgcataaa

SEQ ID NO: 295483 - DNA, 19 bp, Homo sapiens
  siRNA target sequence for ARHGEF7 (NM_145735.1,477-495).
cgcataaagtcttttgact

SEQ ID NO: 295484 - DNA, 19 bp, Homo sapiens
  siRNA target sequence for ARHGEF7 (NM_145735.1,561-579).
gacatgaccgataatagca

SEQ ID NO: 295485 - DNA, 19 bp, Homo sapiens
  siRNA target sequence for ARHGEF7 (NM_145735.1,2235-2253).
ggcactgacctgatgcata

SEQ ID NO: 295486 - DNA, 19 bp, Homo sapiens
  siRNA target sequence for ARHGEF7 (NM_145735.1,2236-2254).
gcactgacctgatgcataa

SEQ ID NO: 295487 - DNA, 19 bp, Homo sapiens
  siRNA target sequence for ARHGEF7 (NM_145735.1,2339-2357).
ctcggaagactctgactat

SEQ ID NO: 295488 - DNA, 19 bp, Homo sapiens
  siRNA target sequence for ARHGEF7 (NM_145735.1,2348-2366).
ctctgactatgacagtata

SEQ ID NO: 295489 - DNA, 19 bp, Homo sapiens
  siRNA target sequence for ARHGEF7 (NM_145735.1,2369-2387).
gacagcccatagttacaga

SEQ ID NO: 295490 - DNA, 19 bp, Homo sapiens
  siRNA target sequence for ARHGEF7 (NM_145735.1,2371-2389).
cagcccatagttacagaat

SEQ ID NO: 295491 - DNA, 19 bp, Homo sapiens
  siRNA target sequence for ARHGEF7 (NM_145735.1,2384-2402).
cagaatgggttctacatct

SEQ ID NO: 295492 - DNA, 19 bp, Homo sapiens
  siRNA target sequence for BCAR3 (NM_003567.1,173-191).
gcccagatgcctatcaaga

SEQ ID NO: 295493 - DNA, 19 bp, Homo sapiens
  siRNA target sequence for BCAR3 (NM_003567.1,174-192).
cccagatgcctatcaagat

SEQ ID NO: 295494 - DNA, 19 bp, Homo sapiens
  siRNA target sequence for BCAR3 (NM_003567.1,398-416).
caactgtggaatatgtgaa

SEQ ID NO: 295495 - DNA, 19 bp, Homo sapiens
  siRNA target sequence for BCAR3 (NM_003567.1,403-421).
gtggaatatgtgaagttct

SEQ ID NO: 295496 - DNA, 19 bp, Homo sapiens
  siRNA target sequence for BCAR3 (NM_003567.1,643-661).
ctcgctcagcacttcaaaa

SEQ ID NO: 295497 - DNA, 19 bp, Homo sapiens
  siRNA target sequence for BCAR3 (NM_003567.1,839-857).
ggtgcctggaggagcatta

SEQ ID NO: 295498 - DNA, 19 bp, Homo sapiens
  siRNA target sequence for BCAR3 (NM_003567.1,949-967).
caggcccgagagcagaatt

SEQ ID NO: 295499 - DNA, 19 bp, Homo sapiens
  siRNA target sequence for BCAR3 (NM_003567.1,1380-1398).
cggcaggggagcaaagcta

SEQ ID NO: 295500 - DNA, 19 bp, Homo sapiens
  siRNA target sequence for BCAR3 (NM_003567.1,1466-1484).
ggaactctggcgtcaacta

SEQ ID NO: 295501 - DNA, 19 bp, Homo sapiens
  siRNA target sequence for BCAR3 (NM_003567.1,1472-1490).
ctggcgtcaactacttgat

SEQ ID NO: 295502 - DNA, 19 bp, Homo sapiens
  siRNA target sequence for BCAR3 (NM_003567.1,1482-1500).
ctacttgatccttgatgat

SEQ ID NO: 295503 - DNA, 19 bp, Homo sapiens
  siRNA target sequence for BCAR3 (NM_003567.1,1485-1503).
cttgatccttgatgatgat

SEQ ID NO: 295504 - DNA, 19 bp, Homo sapiens
  siRNA target sequence for BCAR3 (NM_003567.1,1610-1628).
ccaacgagtttgagtcaaa

SEQ ID NO: 295505 - DNA, 19 bp, Homo sapiens
  siRNA target sequence for BCAR3 (NM_003567.1,1629-1647).
gttccttccccctgagaat

SEQ ID NO: 295506 - DNA, 19 bp, Homo sapiens
  siRNA target sequence for BCAR3 (NM_003567.1,1652-1670).
ccctggaaacagcaatgtt

SEQ ID NO: 295507 - DNA, 19 bp, Homo sapiens
  siRNA target sequence for BCAR3 (NM_003567.1,1842-1860).
gcgcctggacataattgaa

SEQ ID NO: 295508 - DNA, 19 bp, Homo sapiens
  siRNA target sequence for BCAR3 (NM_003567.1,1928-1946).
gagcggccactctgagtaa

SEQ ID NO: 295509 - DNA, 19 bp, Homo sapiens
  siRNA target sequence for BCAR3 (NM_003567.1,1931-1949).
cggccactctgagtaagat

SEQ ID NO: 295510 - DNA, 19 bp, Homo sapiens
  siRNA target sequence for BCAR3 (NM_003567.1,1934-1952).
ccactctgagtaagatcat

SEQ ID NO: 295511 - DNA, 19 bp, Homo sapiens
  siRNA target sequence for BCAR3 (NM_003567.1,2081-2099).
cccaaactgccattctcta

SEQ ID NO: 295512 - DNA, 19 bp, Homo sapiens
  siRNA target sequence for BCAR3 (NM_003567.1,2082-2100).
ccaaactgccattctctat

SEQ ID NO: 295513 - DNA, 19 bp, Homo sapiens
  siRNA target sequence for BCAR3 (NM_003567.1,2156-2174).
gtgttcccccaaacaatgt

SEQ ID NO: 295514 - DNA, 19 bp, Homo sapiens
  siRNA target sequence for BCAR3 (NM_003567.1,2195-2213).
cgcttgtgacgttaatgga

SEQ ID NO: 295515 - DNA, 19 bp, Homo sapiens
  siRNA target sequence for BCAR3 (NM_003567.1,2214-2232).
gcgccaggctgtgactttt

SEQ ID NO: 295516 - DNA, 19 bp, Homo sapiens
  siRNA target sequence for BCAR3 (NM_003567.1,2216-2234).
gccaggctgtgacttttga

SEQ ID NO: 295517 - DNA, 19 bp, Homo sapiens
  siRNA target sequence for BCAR3 (NM_003567.1,2346-2364).
gaggatcctggcaggtttt

SEQ ID NO: 295518 - DNA, 19 bp, Homo sapiens
  siRNA target sequence for BCAR3 (NM_003567.1,2349-2367).
gatcctggcaggttttcaa

SEQ ID NO: 295519 - DNA, 19 bp, Homo sapiens
  siRNA target sequence for BCAR3 (NM_003567.1,2429-2447).
gcaaaggtgcacaagtcaa

SEQ ID NO: 295520 - DNA, 19 bp, Homo sapiens
  siRNA target sequence for BCAR3 (NM_003567.1,2430-2448).
caaaggtgcacaagtcaat

SEQ ID NO: 295521 - DNA, 19 bp, Homo sapiens
  siRNA target sequence for BCAR3 (NM_003567.1,2486-2504).
ctgccctctcgcgtaaatt

SEQ ID NO: 295522 - DNA, 19 bp, Homo sapiens
  siRNA target sequence for BIG1 (NM_006421.2,182-200).
gggctctggagaagatatt

SEQ ID NO: 295523 - DNA, 19 bp, Homo sapiens
  siRNA target sequence for BIG1 (NM_006421.2,255-273).
ggtggcgttagaggaaata

SEQ ID NO: 295524 - DNA, 19 bp, Homo sapiens
  siRNA target sequence for BIG1 (NM_006421.2,399-417).
ggcatgccagtccaaatgt

SEQ ID NO: 295525 - DNA, 19 bp, Homo sapiens
  siRNA target sequence for BIG1 (NM_006421.2,411-429).
caaatgtcctcgcatagtt

SEQ ID NO: 295526 - DNA, 19 bp, Homo sapiens
  siRNA target sequence for BIG1 (NM_006421.2,418-436).
cctcgcatagttagtacat

SEQ ID NO: 295527 - DNA, 19 bp, Homo sapiens
  siRNA target sequence for BIG1 (NM_006421.2,423-441).
catagttagtacatctcta

SEQ ID NO: 295528 - DNA, 19 bp, Homo sapiens
  siRNA target sequence for BIG1 (NM_006421.2,431-449).
gtacatctctagattgctt

SEQ ID NO: 295529 - DNA, 19 bp, Homo sapiens
  siRNA target sequence for BIG1 (NM_006421.2,481-499).
ggcaatgctccagatagta

SEQ ID NO: 295530 - DNA, 19 bp, Homo sapiens
  siRNA target sequence for BIG1 (NM_006421.2,577-595).
ggagttcagctgcagataa

SEQ ID NO: 295531 - DNA, 19 bp, Homo sapiens
  siRNA target sequence for BIG1 (NM_006421.2,620-638).
catcacaacacatagaaat

SEQ ID NO: 295532 - DNA, 19 bp, Homo sapiens
  siRNA target sequence for BIG1 (NM_006421.2,735-753).
cactcagatgctaaatgtt

SEQ ID NO: 295533 - DNA, 19 bp, Homo sapiens
  siRNA target sequence for BIG1 (NM_006421.2,852-870).
ccatcacgagcctgaatca

SEQ ID NO: 295534 - DNA, 19 bp, Homo sapiens
  siRNA target sequence for BIG1 (NM_006421.2,862-880).
cctgaatcacctcaactta

SEQ ID NO: 295535 - DNA, 19 bp, Homo sapiens
  siRNA target sequence for BIG1 (NM_006421.2,865-883).
gaatcacctcaacttagat

SEQ ID NO: 295536 - DNA, 19 bp, Homo sapiens
  siRNA target sequence for BIG1 (NM_006421.2,869-887).
cacctcaacttagatattt

SEQ ID NO: 295537 - DNA, 19 bp, Homo sapiens
  siRNA target sequence for BIG1 (NM_006421.2,888-906).
gccacctcagactgttgat

SEQ ID NO: 295538 - DNA, 19 bp, Homo sapiens
  siRNA target sequence for BIG1 (NM_006421.2,890-908).
cacctcagactgttgatca

SEQ ID NO: 295539 - DNA, 19 bp, Homo sapiens
  siRNA target sequence for BIG1 (NM_006421.2,892-910).
cctcagactgttgatcata

SEQ ID NO: 295540 - DNA, 19 bp, Homo sapiens
  siRNA target sequence for BIG1 (NM_006421.2,893-911).
ctcagactgttgatcatat

SEQ ID NO: 295541 - DNA, 19 bp, Homo sapiens
  siRNA target sequence for BIG1 (NM_006421.2,931-949).
gaccttgacctccatacaa

SEQ ID NO: 295542 - DNA, 19 bp, Homo sapiens
  siRNA target sequence for BIG1 (NM_006421.2,942-960).
ccatacaaatgatgtagat

SEQ ID NO: 295543 - DNA, 19 bp, Homo sapiens
  siRNA target sequence for BIG1 (NM_006421.2,1041-1059).
ggcaactgcagctgaaaca

SEQ ID NO: 295544 - DNA, 19 bp, Homo sapiens
  siRNA target sequence for BIG1 (NM_006421.2,1115-1133).
cacaagacattgtacagaa

SEQ ID NO: 295545 - DNA, 19 bp, Homo sapiens
  siRNA target sequence for BIG1 (NM_006421.2,1122-1140).
cattgtacagaacattgta

SEQ ID NO: 295546 - DNA, 19 bp, Homo sapiens
  siRNA target sequence for BIG1 (NM_006421.2,1208-1226).
gcaacattggaactataga

SEQ ID NO: 295547 - DNA, 19 bp, Homo sapiens
  siRNA target sequence for BIG1 (NM_006421.2,1276-1294).
ccaatttctgttgcatata

SEQ ID NO: 295548 - DNA, 19 bp, Homo sapiens
  siRNA target sequence for BIG1 (NM_006421.2,1417-1435).
gtattcaggtcattgtgta

SEQ ID NO: 295549 - DNA, 19 bp, Homo sapiens
  siRNA target sequence for BIG1 (NM_006421.2,1492-1510).
cgatccaagattctttcat

SEQ ID NO: 295550 - DNA, 19 bp, Homo sapiens
  siRNA target sequence for BIG1 (NM_006421.2,1493-1511).
gatccaagattctttcatt

SEQ ID NO: 295551 - DNA, 19 bp, Homo sapiens
  siRNA target sequence for BIG1 (NM_006421.2,1691-1709).
cacatctgaagatgcaaat

SEQ ID NO: 295552 - DNA, 19 bp, Homo sapiens
  siRNA target sequence for BIG1 (NM_006421.2,1751-1769).
cttctaccagctcatttga

SEQ ID NO: 295553 - DNA, 19 bp, Homo sapiens
  siRNA target sequence for BIG1 (NM_006421.2,1754-1772).
ctaccagctcatttgatca

SEQ ID NO: 295554 - DNA, 19 bp, Homo sapiens
  siRNA target sequence for BIG1 (NM_006421.2,1768-1786).
gatcacaaatggatggtta

SEQ ID NO: 295555 - DNA, 19 bp, Homo sapiens
  siRNA target sequence for BIG1 (NM_006421.2,1817-1835).
ctcagagtgtagtggatat

SEQ ID NO: 295556 - DNA, 19 bp, Homo sapiens
  siRNA target sequence for BIG1 (NM_006421.2,1864-1882).
gcagccaatatatttgaaa

SEQ ID NO: 295557 - DNA, 19 bp, Homo sapiens
  siRNA target sequence for BIG1 (NM_006421.2,1868-1886).
ccaatatatttgaaagact

SEQ ID NO: 295558 - DNA, 19 bp, Homo sapiens
  siRNA target sequence for BIG1 (NM_006421.2,1885-1903).
ctagtaaatgatctatcaa

SEQ ID NO: 295559 - DNA, 19 bp, Homo sapiens
  siRNA target sequence for BIG1 (NM_006421.2,1916-1934).
gaaggggcagtcaagaact

SEQ ID NO: 295560 - DNA, 19 bp, Homo sapiens
  siRNA target sequence for BIG1 (NM_006421.2,1922-1940).
gcagtcaagaacttggtat

SEQ ID NO: 295561 - DNA, 19 bp, Homo sapiens
  siRNA target sequence for BIG1 (NM_006421.2,1954-1972).
gaattgagcctgaggaaaa

SEQ ID NO: 295562 - DNA, 19 bp, Homo sapiens
  siRNA target sequence for BIG1 (NM_006421.2,1981-1999).
gaatgcttagtgtcgattt

SEQ ID NO: 295563 - DNA, 19 bp, Homo sapiens
  siRNA target sequence for BIG1 (NM_006421.2,2010-2028).
ggttgaatggagtaaggat

SEQ ID NO: 295564 - DNA, 19 bp, Homo sapiens
  siRNA target sequence for BIG1 (NM_006421.2,2021-2039).
gtaaggatcagtatgtgaa

SEQ ID NO: 295565 - DNA, 19 bp, Homo sapiens
  siRNA target sequence for BIG1 (NM_006421.2,2121-2139).
cagatacggaagtttaaat

SEQ ID NO: 295566 - DNA, 19 bp, Homo sapiens
  siRNA target sequence for BIG1 (NM_006421.2,2164-2182).
ggaataggcagctacagta

SEQ ID NO: 295567 - DNA, 19 bp, Homo sapiens
  siRNA target sequence for BIG1 (NM_006421.2,2187-2205).
gatgtctggcactgataat

SEQ ID NO: 295568 - DNA, 19 bp, Homo sapiens
  siRNA target sequence for BIG1 (NM_006421.2,2248-2266).
gaacaagggatagatttat

SEQ ID NO: 295569 - DNA, 19 bp, Homo sapiens
  siRNA target sequence for BIG1 (NM_006421.2,2254-2272).
gggatagatttatttaata

SEQ ID NO: 295570 - DNA, 19 bp, Homo sapiens
  siRNA target sequence for BIG1 (NM_006421.2,2274-2292).
gaaaccaaagagaggaata

SEQ ID NO: 295571 - DNA, 19 bp, Homo sapiens
  siRNA target sequence for BIG1 (NM_006421.2,2387-2405).
gtgagttcctgggagataa

SEQ ID NO: 295572 - DNA, 19 bp, Homo sapiens
  siRNA target sequence for BIG1 (NM_006421.2,2477-2495).
cagcccttcgtatgtttct

SEQ ID NO: 295573 - DNA, 19 bp, Homo sapiens
  siRNA target sequence for BIG1 (NM_006421.2,2480-2498).
cccttcgtatgtttctaga

SEQ ID NO: 295574 - DNA, 19 bp, Homo sapiens
  siRNA target sequence for BIG1 (NM_006421.2,2490-2508).
gtttctagaaggatttcgt

SEQ ID NO: 295575 - DNA, 19 bp, Homo sapiens
  siRNA target sequence for BIG1 (NM_006421.2,2532-2550).
cgatcgattaatggaaaaa

SEQ ID NO: 295576 - DNA, 19 bp, Homo sapiens
  siRNA target sequence for BIG1 (NM_006421.2,2600-2618).
gtgcggatacagcttatgt

SEQ ID NO: 295577 - DNA, 19 bp, Homo sapiens
  siRNA target sequence for BIG1 (NM_006421.2,2602-2620).
gcggatacagcttatgttt

SEQ ID NO: 295578 - DNA, 19 bp, Homo sapiens
  siRNA target sequence for BIG1 (NM_006421.2,2603-2621).
cggatacagcttatgtttt

SEQ ID NO: 295579 - DNA, 19 bp, Homo sapiens
  siRNA target sequence for BIG1 (NM_006421.2,2623-2641).
gcttattcaattatcatgt

SEQ ID NO: 295580 - DNA, 19 bp, Homo sapiens
  siRNA target sequence for BIG1 (NM_006421.2,2624-2642).
cttattcaattatcatgtt

SEQ ID NO: 295581 - DNA, 19 bp, Homo sapiens
  siRNA target sequence for BIG1 (NM_006421.2,2703-2721).
gatgaatagaggtatcaat

SEQ ID NO: 295582 - DNA, 19 bp, Homo sapiens
  siRNA target sequence for BIG1 (NM_006421.2,2734-2752).
cttcctgaagagtatctat

SEQ ID NO: 295583 - DNA, 19 bp, Homo sapiens
  siRNA target sequence for BIG1 (NM_006421.2,2745-2763).
gtatctatcagccatctat

SEQ ID NO: 295584 - DNA, 19 bp, Homo sapiens
  siRNA target sequence for BIG1 (NM_006421.2,2946-2964).
ctttacaagtgcaacacat

SEQ ID NO: 295585 - DNA, 19 bp, Homo sapiens
  siRNA target sequence for BIG1 (NM_006421.2,2971-2989).
catgtgaggcccatgttta

SEQ ID NO: 295586 - DNA, 19 bp, Homo sapiens
  siRNA target sequence for BIG1 (NM_006421.2,2974-2992).
gtgaggcccatgtttaagt

SEQ ID NO: 295587 - DNA, 19 bp, Homo sapiens
  siRNA target sequence for BIG1 (NM_006421.2,3021-3039).
cagtgtgggtctacaagat

SEQ ID NO: 295588 - DNA, 19 bp, Homo sapiens
  siRNA target sequence for BIG1 (NM_006421.2,3027-3045).
gggtctacaagattgtgat

SEQ ID NO: 295589 - DNA, 19 bp, Homo sapiens
  siRNA target sequence for BIG1 (NM_006421.2,3031-3049).
ctacaagattgtgatgata

SEQ ID NO: 295590 - DNA, 19 bp, Homo sapiens
  siRNA target sequence for BIG1 (NM_006421.2,3069-3087).
cctggaaggtataagatgt

SEQ ID NO: 295591 - DNA, 19 bp, Homo sapiens
  siRNA target sequence for BIG1 (NM_006421.2,3145-3163).
gcactagcaagatttacct

SEQ ID NO: 295592 - DNA, 19 bp, Homo sapiens
  siRNA target sequence for BIG1 (NM_006421.2,3146-3164).
cactagcaagatttacctt

SEQ ID NO: 295593 - DNA, 19 bp, Homo sapiens
  siRNA target sequence for BIG1 (NM_006421.2,3151-3169).
gcaagatttaccttactca

SEQ ID NO: 295594 - DNA, 19 bp, Homo sapiens
  siRNA target sequence for BIG1 (NM_006421.2,3176-3194).
gttccggtattactgaaat

SEQ ID NO: 295595 - DNA, 19 bp, Homo sapiens
  siRNA target sequence for BIG1 (NM_006421.2,3179-3197).
ccggtattactgaaatgaa

SEQ ID NO: 295596 - DNA, 19 bp, Homo sapiens
  siRNA target sequence for BIG1 (NM_006421.2,3180-3198).
cggtattactgaaatgaaa

SEQ ID NO: 295597 - DNA, 19 bp, Homo sapiens
  siRNA target sequence for BIG1 (NM_006421.2,3238-3256).
gctcatacagatggaaatt

SEQ ID NO: 295598 - DNA, 19 bp, Homo sapiens
  siRNA target sequence for BIG1 (NM_006421.2,3306-3324).
gctggcacagcttatagga

SEQ ID NO: 295599 - DNA, 19 bp, Homo sapiens
  siRNA target sequence for BIG1 (NM_006421.2,3307-3325).
ctggcacagcttataggaa

SEQ ID NO: 295600 - DNA, 19 bp, Homo sapiens
  siRNA target sequence for BIG1 (NM_006421.2,3329-3347).
gagtgaaacctcgatacat

SEQ ID NO: 295601 - DNA, 19 bp, Homo sapiens
  siRNA target sequence for BIG1 (NM_006421.2,3331-3349).
gtgaaacctcgatacattt

SEQ ID NO: 295602 - DNA, 19 bp, Homo sapiens
  siRNA target sequence for BIG1 (NM_006421.2,3377-3395).
ctcttactggaacaaaaga

SEQ ID NO: 295603 - DNA, 19 bp, Homo sapiens
  siRNA target sequence for BIG1 (NM_006421.2,3489-3507).
cagttctcagagtgttgtt

SEQ ID NO: 295604 - DNA, 19 bp, Homo sapiens
  siRNA target sequence for BIG1 (NM_006421.2,3508-3526).
gttgctgtagatagaatat

SEQ ID NO: 295605 - DNA, 19 bp, Homo sapiens
  siRNA target sequence for BIG1 (NM_006421.2,3614-3632).
cgacacacccaagaatgtt

SEQ ID NO: 295606 - DNA, 19 bp, Homo sapiens
  siRNA target sequence for BIG1 (NM_006421.2,3649-3667).
gtagaaatatcatattaca

SEQ ID NO: 295607 - DNA, 19 bp, Homo sapiens
  siRNA target sequence for BIG1 (NM_006421.2,3673-3691).
ggaagaataagattacagt

SEQ ID NO: 295608 - DNA, 19 bp, Homo sapiens
  siRNA target sequence for BIG1 (NM_006421.2,3695-3713).
ctcgaatttgggaagttat

SEQ ID NO: 295609 - DNA, 19 bp, Homo sapiens
  siRNA target sequence for BIG1 (NM_006421.2,3737-3755).
ggtgtaatcctaatgaaga

SEQ ID NO: 295610 - DNA, 19 bp, Homo sapiens
  siRNA target sequence for BIG1 (NM_006421.2,3814-3832).
ggggagcttgctaacttca

SEQ ID NO: 295611 - DNA, 19 bp, Homo sapiens
  siRNA target sequence for BIG1 (NM_006421.2,3817-3835).
gagcttgctaacttcagat

SEQ ID NO: 295612 - DNA, 19 bp, Homo sapiens
  siRNA target sequence for BIG1 (NM_006421.2,3843-3861).
ggatttcttaagacctttt

SEQ ID NO: 295613 - DNA, 19 bp, Homo sapiens
  siRNA target sequence for BIG1 (NM_006421.2,3849-3867).
cttaagaccttttgaacat

SEQ ID NO: 295614 - DNA, 19 bp, Homo sapiens
  siRNA target sequence for BIG1 (NM_006421.2,3856-3874).
ccttttgaacatataatga

SEQ ID NO: 295615 - DNA, 19 bp, Homo sapiens
  siRNA target sequence for BIG1 (NM_006421.2,3879-3897).
gaacaggtctccaacaatt

SEQ ID NO: 295616 - DNA, 19 bp, Homo sapiens
  siRNA target sequence for BIG1 (NM_006421.2,3882-3900).
caggtctccaacaattcga

SEQ ID NO: 295617 - DNA, 19 bp, Homo sapiens
  siRNA target sequence for BIG1 (NM_006421.2,3887-3905).
ctccaacaattcgagatat

SEQ ID NO: 295618 - DNA, 19 bp, Homo sapiens
  siRNA target sequence for BIG1 (NM_006421.2,3890-3908).
caacaattcgagatatggt

SEQ ID NO: 295619 - DNA, 19 bp, Homo sapiens
  siRNA target sequence for BIG1 (NM_006421.2,3906-3924).
ggttgtacggtgtatagca

SEQ ID NO: 295620 - DNA, 19 bp, Homo sapiens
  siRNA target sequence for BIG1 (NM_006421.2,3917-3935).
gtatagcacagatggttaa

SEQ ID NO: 295621 - DNA, 19 bp, Homo sapiens
  siRNA target sequence for BIG1 (NM_006421.2,3940-3958).
caagctgctaacattcgat

SEQ ID NO: 295622 - DNA, 19 bp, Homo sapiens
  siRNA target sequence for BIG1 (NM_006421.2,3955-3973).
cgatctggatggaagaaca

SEQ ID NO: 295623 - DNA, 19 bp, Homo sapiens
  siRNA target sequence for BIG1 (NM_006421.2,4016-4034).
gcatagtggaacttgcatt

SEQ ID NO: 295624 - DNA, 19 bp, Homo sapiens
  siRNA target sequence for BIG1 (NM_006421.2,4054-4072).
gtcacccttgtatttgaaa

SEQ ID NO: 295625 - DNA, 19 bp, Homo sapiens
  siRNA target sequence for BIG1 (NM_006421.2,4077-4095).
ctttccagcgaccattgat

SEQ ID NO: 295626 - DNA, 19 bp, Homo sapiens
  siRNA target sequence for BIG1 (NM_006421.2,4081-4099).
ccagcgaccattgattctt

SEQ ID NO: 295627 - DNA, 19 bp, Homo sapiens
  siRNA target sequence for BIG1 (NM_006421.2,4082-4100).
cagcgaccattgattcttt

SEQ ID NO: 295628 - DNA, 19 bp, Homo sapiens
  siRNA target sequence for BIG1 (NM_006421.2,4149-4167).
cccagacacaagtatggaa

SEQ ID NO: 295629 - DNA, 19 bp, Homo sapiens
  siRNA target sequence for BIG1 (NM_006421.2,4164-4182).
ggaagcaattcgacttatt

SEQ ID NO: 295630 - DNA, 19 bp, Homo sapiens
  siRNA target sequence for BIG1 (NM_006421.2,4213-4231).
cctcaggctttcaaggaat

SEQ ID NO: 295631 - DNA, 19 bp, Homo sapiens
  siRNA target sequence for BIG1 (NM_006421.2,4282-4300).
ggatggttcccaattctct

SEQ ID NO: 295632 - DNA, 19 bp, Homo sapiens
  siRNA target sequence for BIG1 (NM_006421.2,4283-4301).
gatggttcccaattctctt

SEQ ID NO: 295633 - DNA, 19 bp, Homo sapiens
  siRNA target sequence for BIG1 (NM_006421.2,4290-4308).
cccaattctctttgagtta

SEQ ID NO: 295634 - DNA, 19 bp, Homo sapiens
  siRNA target sequence for BIG1 (NM_006421.2,4303-4321).
gagttatcctgtatcatca

SEQ ID NO: 295635 - DNA, 19 bp, Homo sapiens
  siRNA target sequence for BIG1 (NM_006421.2,4343-4361).
gaaccaggggtttaacagt

SEQ ID NO: 295636 - DNA, 19 bp, Homo sapiens
  siRNA target sequence for BIG1 (NM_006421.2,4388-4406).
gccacacttatgagaaaca

SEQ ID NO: 295637 - DNA, 19 bp, Homo sapiens
  siRNA target sequence for BIG1 (NM_006421.2,4405-4423).
cactggtggcaggatttat

SEQ ID NO: 295638 - DNA, 19 bp, Homo sapiens
  siRNA target sequence for BIG1 (NM_006421.2,4412-4430).
ggcaggatttatttagaat

SEQ ID NO: 295639 - DNA, 19 bp, Homo sapiens
  siRNA target sequence for BIG1 (NM_006421.2,4522-4540).
gcaatctgtgatgtattca

SEQ ID NO: 295640 - DNA, 19 bp, Homo sapiens
  siRNA target sequence for BIG1 (NM_006421.2,4632-4650).
gcgatctggtacaaactgt

SEQ ID NO: 295641 - DNA, 19 bp, Homo sapiens
  siRNA target sequence for BIG1 (NM_006421.2,4633-4651).
cgatctggtacaaactgtt

SEQ ID NO: 295642 - DNA, 19 bp, Homo sapiens
  siRNA target sequence for BIG1 (NM_006421.2,4634-4652).
gatctggtacaaactgttt

SEQ ID NO: 295643 - DNA, 19 bp, Homo sapiens
  siRNA target sequence for BIG1 (NM_006421.2,4639-4657).
ggtacaaactgtttagaga

SEQ ID NO: 295644 - DNA, 19 bp, Homo sapiens
  siRNA target sequence for BIG1 (NM_006421.2,4640-4658).
gtacaaactgtttagagaa

SEQ ID NO: 295645 - DNA, 19 bp, Homo sapiens
  siRNA target sequence for BIG1 (NM_006421.2,4643-4661).
caaactgtttagagaatgt

SEQ ID NO: 295646 - DNA, 19 bp, Homo sapiens
  siRNA target sequence for BIG1 (NM_006421.2,4718-4736).
gcacactggatatcttcaa

SEQ ID NO: 295647 - DNA, 19 bp, Homo sapiens
  siRNA target sequence for BIG1 (NM_006421.2,4719-4737).
cacactggatatcttcaaa

SEQ ID NO: 295648 - DNA, 19 bp, Homo sapiens
  siRNA target sequence for BIG1 (NM_006421.2,4761-4779).
gacctggcgacccaattct

SEQ ID NO: 295649 - DNA, 19 bp, Homo sapiens
  siRNA target sequence for BIG1 (NM_006421.2,4821-4839).
gccattggatacaatatca

SEQ ID NO: 295650 - DNA, 19 bp, Homo sapiens
  siRNA target sequence for BIG1 (NM_006421.2,4838-4856).
cacagaagtctgtagatat

SEQ ID NO: 295651 - DNA, 19 bp, Homo sapiens
  siRNA target sequence for BIG1 (NM_006421.2,4842-4860).
gaagtctgtagatattcat

SEQ ID NO: 295652 - DNA, 19 bp, Homo sapiens
  siRNA target sequence for BIG1 (NM_006421.2,5052-5070).
cccagccacaagtaagaaa

SEQ ID NO: 295653 - DNA, 19 bp, Homo sapiens
  siRNA target sequence for BIG1 (NM_006421.2,5102-5120).
gagatgcggtggactttga

SEQ ID NO: 295654 - DNA, 19 bp, Homo sapiens
  siRNA target sequence for BIG1 (NM_006421.2,5146-5164).
ggaatgtaccgctttttaa

SEQ ID NO: 295655 - DNA, 19 bp, Homo sapiens
  siRNA target sequence for BIG1 (NM_006421.2,5151-5169).
gtaccgctttttaacatca

SEQ ID NO: 295656 - DNA, 19 bp, Homo sapiens
  siRNA target sequence for BIG1 (NM_006421.2,5184-5202).
gctactggactgcttatta

SEQ ID NO: 295657 - DNA, 19 bp, Homo sapiens
  siRNA target sequence for BIG1 (NM_006421.2,5327-5345).
gtgggctgcgcattctctt

SEQ ID NO: 295658 - DNA, 19 bp, Homo sapiens
  siRNA target sequence for BIG1 (NM_006421.2,5395-5413).
cagaggcttttgaatgtct

SEQ ID NO: 295659 - DNA, 19 bp, Homo sapiens
  siRNA target sequence for BIG1 (NM_006421.2,5412-5430).
ctgcagtgaagcactaagt

SEQ ID NO: 295660 - DNA, 19 bp, Homo sapiens
  siRNA target sequence for BIG1 (NM_006421.2,5414-5432).
gcagtgaagcactaagtta

SEQ ID NO: 295661 - DNA, 19 bp, Homo sapiens
  siRNA target sequence for BIG1 (NM_006421.2,5503-5521).
gttctaaagataagtgata

SEQ ID NO: 295662 - DNA, 19 bp, Homo sapiens
  siRNA target sequence for BIG1 (NM_006421.2,5534-5552).
ctcatgcatcattctacta

SEQ ID NO: 295663 - DNA, 19 bp, Homo sapiens
  siRNA target sequence for BIG1 (NM_006421.2,5553-5571).
ccctctcttatgtgaaatt

SEQ ID NO: 295664 - DNA, 19 bp, Homo sapiens
  siRNA target sequence for BIG1 (NM_006421.2,5593-5611).
gaacttcgtgctgttctta

SEQ ID NO: 295665 - DNA, 19 bp, Homo sapiens
  siRNA target sequence for BIG1 (NM_006421.2,5596-5614).
cttcgtgctgttcttagaa

SEQ ID NO: 295666 - DNA, 19 bp, Homo sapiens
  siRNA target sequence for BIG1 (NM_006421.2,5602-5620).
gctgttcttagaagatttt

SEQ ID NO: 295667 - DNA, 19 bp, Homo sapiens
  siRNA target sequence for BIG1 (NM_006421.2,5623-5641).
ctgcgaatcggagtagttt

SEQ ID NO: 295668 - DNA, 19 bp, Homo sapiens
  siRNA target sequence for BIG1 (NM_006421.2,5625-5643).
gcgaatcggagtagttttt

SEQ ID NO: 295669 - DNA, 19 bp, Homo sapiens
  siRNA target sequence for BIG1 (NM_006421.2,5627-5645).
gaatcggagtagtttttca

SEQ ID NO: 295670 - DNA, 19 bp, Homo sapiens
  siRNA target sequence for ECT2 (NM_018098.4,80-98).
gactcttccatttttgatt

SEQ ID NO: 295671 - DNA, 19 bp, Homo sapiens
  siRNA target sequence for ECT2 (NM_018098.4,87-105).
ccatttttgattctaaagt

SEQ ID NO: 295672 - DNA, 19 bp, Homo sapiens
  siRNA target sequence for ECT2 (NM_018098.4,127-145).
cttacttattggatctact

SEQ ID NO: 295673 - DNA, 19 bp, Homo sapiens
  siRNA target sequence for ECT2 (NM_018098.4,138-156).
gatctacttcatatgtaga

SEQ ID NO: 295674 - DNA, 19 bp, Homo sapiens
  siRNA target sequence for ECT2 (NM_018098.4,141-159).
ctacttcatatgtagaaga

SEQ ID NO: 295675 - DNA, 19 bp, Homo sapiens
  siRNA target sequence for ECT2 (NM_018098.4,161-179).
gagatgcctcagattgaaa

SEQ ID NO: 295676 - DNA, 19 bp, Homo sapiens
  siRNA target sequence for ECT2 (NM_018098.4,163-181).
gatgcctcagattgaaaca

SEQ ID NO: 295677 - DNA, 19 bp, Homo sapiens
  siRNA target sequence for ECT2 (NM_018098.4,166-184).
gcctcagattgaaacaaga

SEQ ID NO: 295678 - DNA, 19 bp, Homo sapiens
  siRNA target sequence for ECT2 (NM_018098.4,172-190).
gattgaaacaagagtgata

SEQ ID NO: 295679 - DNA, 19 bp, Homo sapiens
  siRNA target sequence for ECT2 (NM_018098.4,183-201).
gagtgatattggttcaaga

SEQ ID NO: 295680 - DNA, 19 bp, Homo sapiens
  siRNA target sequence for ECT2 (NM_018098.4,297-315).
ctccggaatttgaaaatgt

SEQ ID NO: 295681 - DNA, 19 bp, Homo sapiens
  siRNA target sequence for ECT2 (NM_018098.4,358-376).
ctacaaggctgattgtaga

SEQ ID NO: 295682 - DNA, 19 bp, Homo sapiens
  siRNA target sequence for ECT2 (NM_018098.4,361-379).
caaggctgattgtagagtt

SEQ ID NO: 295683 - DNA, 19 bp, Homo sapiens
  siRNA target sequence for ECT2 (NM_018098.4,364-382).
ggctgattgtagagttatt

SEQ ID NO: 295684 - DNA, 19 bp, Homo sapiens
  siRNA target sequence for ECT2 (NM_018098.4,383-401).
ggaccaccagttgtattaa

SEQ ID NO: 295685 - DNA, 19 bp, Homo sapiens
  siRNA target sequence for ECT2 (NM_018098.4,416-434).
ggagagcctttgccatttt

SEQ ID NO: 295686 - DNA, 19 bp, Homo sapiens
  siRNA target sequence for ECT2 (NM_018098.4,440-458).
cgcccgttgtattgtacaa

SEQ ID NO: 295687 - DNA, 19 bp, Homo sapiens
  siRNA target sequence for ECT2 (NM_018098.4,459-477).
gtatgatgaatctagtact

SEQ ID NO: 295688 - DNA, 19 bp, Homo sapiens
  siRNA target sequence for ECT2 (NM_018098.4,466-484).
gaatctagtactatgcttt

SEQ ID NO: 295689 - DNA, 19 bp, Homo sapiens
  siRNA target sequence for ECT2 (NM_018098.4,476-494).
ctatgctttactggattta

SEQ ID NO: 295690 - DNA, 19 bp, Homo sapiens
  siRNA target sequence for ECT2 (NM_018098.4,538-556).
catgggtggagttattcga

SEQ ID NO: 295691 - DNA, 19 bp, Homo sapiens
  siRNA target sequence for ECT2 (NM_018098.4,543-561).
gtggagttattcgaaaaga

SEQ ID NO: 295692 - DNA, 19 bp, Homo sapiens
  siRNA target sequence for ECT2 (NM_018098.4,545-563).
ggagttattcgaaaagact

SEQ ID NO: 295693 - DNA, 19 bp, Homo sapiens
  siRNA target sequence for ECT2 (NM_018098.4,546-564).
gagttattcgaaaagactt

SEQ ID NO: 295694 - DNA, 19 bp, Homo sapiens
  siRNA target sequence for ECT2 (NM_018098.4,628-646).
gagtctaggtactccaatt

SEQ ID NO: 295695 - DNA, 19 bp, Homo sapiens
  siRNA target sequence for ECT2 (NM_018098.4,630-648).
gtctaggtactccaattat

SEQ ID NO: 295696 - DNA, 19 bp, Homo sapiens
  siRNA target sequence for ECT2 (NM_018098.4,632-650).
ctaggtactccaattatga

SEQ ID NO: 295697 - DNA, 19 bp, Homo sapiens
  siRNA target sequence for ECT2 (NM_018098.4,652-670).
gccagaatggatttataaa

SEQ ID NO: 295698 - DNA, 19 bp, Homo sapiens
  siRNA target sequence for ECT2 (NM_018098.4,681-699).
ggcggaatgaacaggattt

SEQ ID NO: 295699 - DNA, 19 bp, Homo sapiens
  siRNA target sequence for ECT2 (NM_018098.4,683-701).
cggaatgaacaggatttct

SEQ ID NO: 295700 - DNA, 19 bp, Homo sapiens
  siRNA target sequence for ECT2 (NM_018098.4,704-722).
gcagcagttgatgacttta

SEQ ID NO: 295701 - DNA, 19 bp, Homo sapiens
  siRNA target sequence for ECT2 (NM_018098.4,737-755).
gttcctccatttcaagatt

SEQ ID NO: 295702 - DNA, 19 bp, Homo sapiens
  siRNA target sequence for ECT2 (NM_018098.4,765-783).
gtttcctgggattttcaga

SEQ ID NO: 295703 - DNA, 19 bp, Homo sapiens
  siRNA target sequence for ECT2 (NM_018098.4,855-873).
gatgcactcaccttgtagt

SEQ ID NO: 295704 - DNA, 19 bp, Homo sapiens
  siRNA target sequence for ECT2 (NM_018098.4,859-877).
cactcaccttgtagttgaa

SEQ ID NO: 295705 - DNA, 19 bp, Homo sapiens
  siRNA target sequence for ECT2 (NM_018098.4,861-879).
ctcaccttgtagttgaaga

SEQ ID NO: 295706 - DNA, 19 bp, Homo sapiens
  siRNA target sequence for ECT2 (NM_018098.4,865-883).
ccttgtagttgaagagaat

SEQ ID NO: 295707 - DNA, 19 bp, Homo sapiens
  siRNA target sequence for ECT2 (NM_018098.4,866-884).
cttgtagttgaagagaata

SEQ ID NO: 295708 - DNA, 19 bp, Homo sapiens
  siRNA target sequence for ECT2 (NM_018098.4,940-958).
gtggttctggggaagcatt

SEQ ID NO: 295709 - DNA, 19 bp, Homo sapiens
  siRNA target sequence for ECT2 (NM_018098.4,948-966).
ggggaagcattcaaatgga

SEQ ID NO: 295710 - DNA, 19 bp, Homo sapiens
  siRNA target sequence for ECT2 (NM_018098.4,969-987).
cccgagctggagaaactat

SEQ ID NO: 295711 - DNA, 19 bp, Homo sapiens
  siRNA target sequence for ECT2 (NM_018098.4,1033-1051).
gtcaatgctttctctaaat

SEQ ID NO: 295712 - DNA, 19 bp, Homo sapiens
  siRNA target sequence for ECT2 (NM_018098.4,1067-1085).
cgcaaacgacgtcgtttaa

SEQ ID NO: 295713 - DNA, 19 bp, Homo sapiens
  siRNA target sequence for ECT2 (NM_018098.4,1068-1086).
gcaaacgacgtcgtttaaa

SEQ ID NO: 295714 - DNA, 19 bp, Homo sapiens
  siRNA target sequence for ECT2 (NM_018098.4,1069-1087).
caaacgacgtcgtttaaaa

SEQ ID NO: 295715 - DNA, 19 bp, Homo sapiens
  siRNA target sequence for ECT2 (NM_018098.4,1114-1132).
gacagacgtgtcaccattt

SEQ ID NO: 295716 - DNA, 19 bp, Homo sapiens
  siRNA target sequence for ECT2 (NM_018098.4,1155-1173).
ctgagcattccctttccat

SEQ ID NO: 295717 - DNA, 19 bp, Homo sapiens
  siRNA target sequence for ECT2 (NM_018098.4,1175-1193).
gggtcactcctagatatct

SEQ ID NO: 295718 - DNA, 19 bp, Homo sapiens
  siRNA target sequence for ECT2 (NM_018098.4,1198-1216).
cacaccagagtctagcatt

SEQ ID NO: 295719 - DNA, 19 bp, Homo sapiens
  siRNA target sequence for ECT2 (NM_018098.4,1200-1218).
caccagagtctagcattaa

SEQ ID NO: 295720 - DNA, 19 bp, Homo sapiens
  siRNA target sequence for ECT2 (NM_018098.4,1202-1220).
ccagagtctagcattaact

SEQ ID NO: 295721 - DNA, 19 bp, Homo sapiens
  siRNA target sequence for ECT2 (NM_018098.4,1203-1221).
cagagtctagcattaacta

SEQ ID NO: 295722 - DNA, 19 bp, Homo sapiens
  siRNA target sequence for ECT2 (NM_018098.4,1226-1244).
gacaccccaaagtcttgta

SEQ ID NO: 295723 - DNA, 19 bp, Homo sapiens
  siRNA target sequence for ECT2 (NM_018098.4,1228-1246).
caccccaaagtcttgtact

SEQ ID NO: 295724 - DNA, 19 bp, Homo sapiens
  siRNA target sequence for ECT2 (NM_018098.4,1230-1248).
ccccaaagtcttgtactaa

SEQ ID NO: 295725 - DNA, 19 bp, Homo sapiens
  siRNA target sequence for ECT2 (NM_018098.4,1290-1308).
caaggtggcaagttgcaaa

SEQ ID NO: 295726 - DNA, 19 bp, Homo sapiens
  siRNA target sequence for ECT2 (NM_018098.4,1313-1331).
ctttatcaaactgaaagta

SEQ ID NO: 295727 - DNA, 19 bp, Homo sapiens
  siRNA target sequence for ECT2 (NM_018098.4,1348-1366).
ggcaacaattattcagtta

SEQ ID NO: 295728 - DNA, 19 bp, Homo sapiens
  siRNA target sequence for ECT2 (NM_018098.4,1349-1367).
gcaacaattattcagttat

SEQ ID NO: 295729 - DNA, 19 bp, Homo sapiens
  siRNA target sequence for ECT2 (NM_018098.4,1412-1430).
cttgcaccagaggagatta

SEQ ID NO: 295730 - DNA, 19 bp, Homo sapiens
  siRNA target sequence for ECT2 (NM_018098.4,1442-1460).
ggtagcatcccagatatct

SEQ ID NO: 295731 - DNA, 19 bp, Homo sapiens
  siRNA target sequence for ECT2 (NM_018098.4,1443-1461).
gtagcatcccagatatctt

SEQ ID NO: 295732 - DNA, 19 bp, Homo sapiens
  siRNA target sequence for ECT2 (NM_018098.4,1463-1481).
gatgtacacactaagataa

SEQ ID NO: 295733 - DNA, 19 bp, Homo sapiens
  siRNA target sequence for ECT2 (NM_018098.4,1490-1508).
cttgaagaccttatagtta

SEQ ID NO: 295734 - DNA, 19 bp, Homo sapiens
  siRNA target sequence for ECT2 (NM_018098.4,1577-1595).
cctccctttgtaaacttct

SEQ ID NO: 295735 - DNA, 19 bp, Homo sapiens
  siRNA target sequence for ECT2 (NM_018098.4,1689-1707).
gacggcagagccttgttga

SEQ ID NO: 295736 - DNA, 19 bp, Homo sapiens
  siRNA target sequence for ECT2 (NM_018098.4,1692-1710).
ggcagagccttgttgaact

SEQ ID NO: 295737 - DNA, 19 bp, Homo sapiens
  siRNA target sequence for ECT2 (NM_018098.4,1693-1711).
gcagagccttgttgaactt

SEQ ID NO: 295738 - DNA, 19 bp, Homo sapiens
  siRNA target sequence for ECT2 (NM_018098.4,1731-1749).
ggttacccagtgttgcatt

SEQ ID NO: 295739 - DNA, 19 bp, Homo sapiens
  siRNA target sequence for ECT2 (NM_018098.4,1732-1750).
gttacccagtgttgcatta

SEQ ID NO: 295740 - DNA, 19 bp, Homo sapiens
  siRNA target sequence for ECT2 (NM_018098.4,1737-1755).
ccagtgttgcattactttt

SEQ ID NO: 295741 - DNA, 19 bp, Homo sapiens
  siRNA target sequence for ECT2 (NM_018098.4,1768-1786).
gaagcatacagctgatgaa

SEQ ID NO: 295742 - DNA, 19 bp, Homo sapiens
  siRNA target sequence for ECT2 (NM_018098.4,1800-1818).
gcactttagaaaaagctat

SEQ ID NO: 295743 - DNA, 19 bp, Homo sapiens
  siRNA target sequence for ECT2 (NM_018098.4,1820-1838).
ggatcactgaaggaagtaa

SEQ ID NO: 295744 - DNA, 19 bp, Homo sapiens
  siRNA target sequence for ECT2 (NM_018098.4,1821-1839).
gatcactgaaggaagtaat

SEQ ID NO: 295745 - DNA, 19 bp, Homo sapiens
  siRNA target sequence for ECT2 (NM_018098.4,1831-1849).
ggaagtaatgacgcatatt

SEQ ID NO: 295746 - DNA, 19 bp, Homo sapiens
  siRNA target sequence for ECT2 (NM_018098.4,1832-1850).
gaagtaatgacgcatatta

SEQ ID NO: 295747 - DNA, 19 bp, Homo sapiens
  siRNA target sequence for ECT2 (NM_018098.4,1842-1860).
cgcatattaatgaggataa

SEQ ID NO: 295748 - DNA, 19 bp, Homo sapiens
  siRNA target sequence for ECT2 (NM_018098.4,1938-1956).
ctcaccgaagcttagtaca

SEQ ID NO: 295749 - DNA, 19 bp, Homo sapiens
  siRNA target sequence for ECT2 (NM_018098.4,1952-1970).
gtacagcgggttgaaacaa

SEQ ID NO: 295750 - DNA, 19 bp, Homo sapiens
  siRNA target sequence for ECT2 (NM_018098.4,1955-1973).
cagcgggttgaaacaattt

SEQ ID NO: 295751 - DNA, 19 bp, Homo sapiens
  siRNA target sequence for ECT2 (NM_018098.4,1957-1975).
gcgggttgaaacaatttct

SEQ ID NO: 295752 - DNA, 19 bp, Homo sapiens
  siRNA target sequence for ECT2 (NM_018098.4,1960-1978).
ggttgaaacaatttctcta

SEQ ID NO: 295753 - DNA, 19 bp, Homo sapiens
  siRNA target sequence for ECT2 (NM_018098.4,2034-2052).
gcctagagatagcaagaaa

SEQ ID NO: 295754 - DNA, 19 bp, Homo sapiens
  siRNA target sequence for ECT2 (NM_018098.4,2049-2067).
gaaaacggcacaaggttat

SEQ ID NO: 295755 - DNA, 19 bp, Homo sapiens
  siRNA target sequence for ECT2 (NM_018098.4,2099-2117).
cgacccccagcttctctta

SEQ ID NO: 295756 - DNA, 19 bp, Homo sapiens
  siRNA target sequence for ECT2 (NM_018098.4,2105-2123).
ccagcttctcttaagcata

SEQ ID NO: 295757 - DNA, 19 bp, Homo sapiens
  siRNA target sequence for ECT2 (NM_018098.4,2142-2160).
ctcagattaagaaggtatt

SEQ ID NO: 295758 - DNA, 19 bp, Homo sapiens
  siRNA target sequence for ECT2 (NM_018098.4,2173-2191).
gacagaagattgccataat

SEQ ID NO: 295759 - DNA, 19 bp, Homo sapiens
  siRNA target sequence for ECT2 (NM_018098.4,2256-2274).
catcagatgaacttccaaa

SEQ ID NO: 295760 - DNA, 19 bp, Homo sapiens
  siRNA target sequence for ECT2 (NM_018098.4,2290-2308).
gatgctgtgtcgacatgta

SEQ ID NO: 295761 - DNA, 19 bp, Homo sapiens
  siRNA target sequence for ECT2 (NM_018098.4,2306-2324).
gtagctaacaccatttgta

SEQ ID NO: 295762 - DNA, 19 bp, Homo sapiens
  siRNA target sequence for ECT2 (NM_018098.4,2484-2502).
ctcttcgaagggctcttat

SEQ ID NO: 295763 - DNA, 19 bp, Homo sapiens
  siRNA target sequence for ECT2 (NM_018098.4,2486-2504).
cttcgaagggctcttatga

SEQ ID NO: 295764 - DNA, 19 bp, Homo sapiens
  siRNA target sequence for ECT2 (NM_018098.4,2532-2550).
gtccttccagcaatgataa

SEQ ID NO: 295765 - DNA, 19 bp, Homo sapiens
  siRNA target sequence for ECT2 (NM_018098.4,2555-2573).
gtaatgagtcgtctttcta

SEQ ID NO: 295766 - DNA, 19 bp, Homo sapiens
  siRNA target sequence for ECT2 (NM_018098.4,2638-2656).
gagaagtcatacgttaagt

SEQ ID NO: 295767 - DNA, 19 bp, Homo sapiens
  siRNA target sequence for ECT2 (NM_018098.4,2645-2663).
catacgttaagtagatcta

SEQ ID NO: 295768 - DNA, 19 bp, Homo sapiens
  siRNA target sequence for ECT2 (NM_018098.4,2650-2668).
gttaagtagatctacaact

SEQ ID NO: 295769 - DNA, 19 bp, Homo sapiens
  siRNA target sequence for ECT2 (NM_018098.4,2655-2673).
gtagatctacaactcattt

SEQ ID NO: 295770 - DNA, 19 bp, Homo sapiens
  siRNA target sequence for ECT2 (NM_018098.4,2658-2676).
gatctacaactcatttgat

SEQ ID NO: 295771 - DNA, 19 bp, Homo sapiens
  siRNA target sequence for FLJ10244 (NM_018037.1,381-399).
ctgtggtattcgatgttct

SEQ ID NO: 295772 - DNA, 19 bp, Homo sapiens
  siRNA target sequence for FLJ10244 (NM_018037.1,416-434).
gaatatgcgggtcagataa

SEQ ID NO: 295773 - DNA, 19 bp, Homo sapiens
  siRNA target sequence for FLJ10244 (NM_018037.1,422-440).
gcgggtcagataacattaa

SEQ ID NO: 295774 - DNA, 19 bp, Homo sapiens
  siRNA target sequence for FLJ10244 (NM_018037.1,423-441).
cgggtcagataacattaat

SEQ ID NO: 295775 - DNA, 19 bp, Homo sapiens
  siRNA target sequence for FLJ10244 (NM_018037.1,467-485).
caaccagatgagctttcaa

SEQ ID NO: 295776 - DNA, 19 bp, Homo sapiens
  siRNA target sequence for FLJ10244 (NM_018037.1,470-488).
ccagatgagctttcaagtt

SEQ ID NO: 295777 - DNA, 19 bp, Homo sapiens
  siRNA target sequence for FLJ10244 (NM_018037.1,530-548).
gcagttgccttcacaagaa

SEQ ID NO: 295778 - DNA, 19 bp, Homo sapiens
  siRNA target sequence for FLJ10244 (NM_018037.1,533-551).
gttgccttcacaagaagat

SEQ ID NO: 295779 - DNA, 19 bp, Homo sapiens
  siRNA target sequence for FLJ10244 (NM_018037.1,549-567).
gattcaatcatgtaagctt

SEQ ID NO: 295780 - DNA, 19 bp, Homo sapiens
  siRNA target sequence for FLJ10244 (NM_018037.1,564-582).
gcttttgggttgttagaga

SEQ ID NO: 295781 - DNA, 19 bp, Homo sapiens
  siRNA target sequence for FLJ10244 (NM_018037.1,570-588).
gggttgttagagagattct

SEQ ID NO: 295782 - DNA, 19 bp, Homo sapiens
  siRNA target sequence for FLJ10244 (NM_018037.1,571-589).
ggttgttagagagattctt

SEQ ID NO: 295783 - DNA, 19 bp, Homo sapiens
  siRNA target sequence for FLJ10244 (NM_018037.1,620-638).
gttttgagccactatatta

SEQ ID NO: 295784 - DNA, 19 bp, Homo sapiens
  siRNA target sequence for FLJ10244 (NM_018037.1,625-643).
gagccactatattaaaact

SEQ ID NO: 295785 - DNA, 19 bp, Homo sapiens
  siRNA target sequence for FLJ10244 (NM_018037.1,655-673).
gtatgagctgaataacctt

SEQ ID NO: 295786 - DNA, 19 bp, Homo sapiens
  siRNA target sequence for FLJ10244 (NM_018037.1,701-719).
ctacagagtgccccaattt

SEQ ID NO: 295787 - DNA, 19 bp, Homo sapiens
  siRNA target sequence for FLJ10244 (NM_018037.1,714-732).
caattttcaggttgactaa

SEQ ID NO: 295788 - DNA, 19 bp, Homo sapiens
  siRNA target sequence for FLJ10244 (NM_018037.1,739-757).
ggcgttattaagtcgaaaa

SEQ ID NO: 295789 - DNA, 19 bp, Homo sapiens
  siRNA target sequence for FLJ10244 (NM_018037.1,741-759).
cgttattaagtcgaaaaga

SEQ ID NO: 295790 - DNA, 19 bp, Homo sapiens
  siRNA target sequence for FLJ10244 (NM_018037.1,818-836).
ctcagagactatataagta

SEQ ID NO: 295791 - DNA, 19 bp, Homo sapiens
  siRNA target sequence for FLJ10244 (NM_018037.1,824-842).
gactatataagtagcttaa

SEQ ID NO: 295792 - DNA, 19 bp, Homo sapiens
  siRNA target sequence for FLJ10244 (NM_018037.1,855-873).
gcattccctatttaggtat

SEQ ID NO: 295793 - DNA, 19 bp, Homo sapiens
  siRNA target sequence for FLJ10244 (NM_018037.1,860-878).
ccctatttaggtatctatt

SEQ ID NO: 295794 - DNA, 19 bp, Homo sapiens
  siRNA target sequence for FLJ10244 (NM_018037.1,874-892).
ctatttgtcagatttaaca

SEQ ID NO: 295795 - DNA, 19 bp, Homo sapiens
  siRNA target sequence for FLJ10244 (NM_018037.1,884-902).
gatttaacatacatcgatt

SEQ ID NO: 295796 - DNA, 19 bp, Homo sapiens
  siRNA target sequence for FLJ10244 (NM_018037.1,1018-1036).
gttgcctcatgtccaaaaa

SEQ ID NO: 295797 - DNA, 19 bp, Homo sapiens
  siRNA target sequence for FLJ10244 (NM_018037.1,1023-1041).
ctcatgtccaaaaatatct

SEQ ID NO: 295798 - DNA, 19 bp, Homo sapiens
  siRNA target sequence for FLJ10244 (NM_018037.1,1042-1060).
caactctgttcagtatata

SEQ ID NO: 295799 - DNA, 19 bp, Homo sapiens
  siRNA target sequence for FLJ10244 (NM_152663.2,1164-1182).
gacgataattacaagcttt

SEQ ID NO: 295800 - DNA, 19 bp, Homo sapiens
  siRNA target sequence for FLJ10244 (NM_152663.2,1266-1284).
ccacagagtggacgaaaaa

SEQ ID NO: 295801 - DNA, 19 bp, Homo sapiens
  siRNA target sequence for FLJ10244 (NM_152663.2,1323-1341).
ccatcccctcggaatctga

SEQ ID NO: 295802 - DNA, 19 bp, Homo sapiens
  siRNA target sequence for FLJ10244 (NM_152663.2,1324-1342).
catcccctcggaatctgat

SEQ ID NO: 295803 - DNA, 19 bp, Homo sapiens
  siRNA target sequence for FLJ10244 (NM_152663.2,1353-1371).
cataggaagtgccatagtt

SEQ ID NO: 295804 - DNA, 19 bp, Homo sapiens
  siRNA target sequence for FLJ10244 (NM_152663.2,1363-1381).
gccatagtttgggttataa

SEQ ID NO: 295805 - DNA, 19 bp, Homo sapiens
  siRNA target sequence for FLJ10244 (NM_152663.2,1364-1382).
ccatagtttgggttataat

SEQ ID NO: 295806 - DNA, 19 bp, Homo sapiens
  siRNA target sequence for FLJ10244 (NM_152663.2,1365-1383).
catagtttgggttataatt

SEQ ID NO: 295807 - DNA, 19 bp, Homo sapiens
  siRNA target sequence for FLJ10244 (NM_152663.2,1415-1433).
gagtgcaacgtttccaaat

SEQ ID NO: 295808 - DNA, 19 bp, Homo sapiens
  siRNA target sequence for FLJ10244 (NM_152663.2,1435-1453).
caggaccaagacatctgtt

SEQ ID NO: 295809 - DNA, 19 bp, Homo sapiens
  siRNA target sequence for FLJ10244 (NM_152663.2,1438-1456).
gaccaagacatctgttaga

SEQ ID NO: 295810 - DNA, 19 bp, Homo sapiens
  siRNA target sequence for FLJ10244 (NM_152663.2,1441-1459).
caagacatctgttagatga

SEQ ID NO: 295811 - DNA, 19 bp, Homo sapiens
  siRNA target sequence for FLJ10244 (NM_152663.2,1488-1506).
cgaggccaagctgaaagtt

SEQ ID NO: 295812 - DNA, 19 bp, Homo sapiens
  siRNA target sequence for FLJ10244 (NM_152663.2,1491-1509).
ggccaagctgaaagttcta

SEQ ID NO: 295813 - DNA, 19 bp, Homo sapiens
  siRNA target sequence for FLJ10244 (NM_152663.2,1512-1530).
ctttctagtggaatatcaa

SEQ ID NO: 295814 - DNA, 19 bp, Homo sapiens
  siRNA target sequence for FLJ10244 (NM_152663.2,1538-1556).
cagcgatggttctgaacta

SEQ ID NO: 295815 - DNA, 19 bp, Homo sapiens
  siRNA target sequence for FLJ10244 (NM_152663.2,1541-1559).
cgatggttctgaactaagt

SEQ ID NO: 295816 - DNA, 19 bp, Homo sapiens
  siRNA target sequence for FLJ10244 (NM_152663.2,1619-1637).
gacaagagtggcacgaaat

SEQ ID NO: 295817 - DNA, 19 bp, Homo sapiens
  siRNA target sequence for FLJ10244 (NM_152663.2,1629-1647).
gcacgaaatggctatcgaa

SEQ ID NO: 295818 - DNA, 19 bp, Homo sapiens
  siRNA target sequence for FLJ10244 (NM_152663.2,1773-1791).
gtagcatcttggacaaaat

SEQ ID NO: 295819 - DNA, 19 bp, Homo sapiens
  siRNA target sequence for FLJ10244 (NM_152663.2,1826-1844).
ctatgctgccaaatctcta

SEQ ID NO: 295820 - DNA, 19 bp, Homo sapiens
  siRNA target sequence for FLJ10244 (NM_152663.2,1842-1860).
ctaaaggctaccgaaagaa

SEQ ID NO: 295821 - DNA, 19 bp, Homo sapiens
  siRNA target sequence for FLJ10244 (NM_152663.2,1847-1865).
ggctaccgaaagaaaacat

SEQ ID NO: 295822 - DNA, 19 bp, Homo sapiens
  siRNA target sequence for FLJ10244 (NM_152663.2,1848-1866).
gctaccgaaagaaaacatt

SEQ ID NO: 295823 - DNA, 19 bp, Homo sapiens
  siRNA target sequence for FLJ10244 (NM_152663.2,1879-1897).
ccaataagaacgtatctgt

SEQ ID NO: 295824 - DNA, 19 bp, Homo sapiens
  siRNA target sequence for FLJ10244 (NM_152663.2,1972-1990).
gaaattcgtacaagtttca

SEQ ID NO: 295825 - DNA, 19 bp, Homo sapiens
  siRNA target sequence for FLJ10244 (NM_152663.2,1995-2013).
ggcaatagaatgaatgcaa

SEQ ID NO: 295826 - DNA, 19 bp, Homo sapiens
  siRNA target sequence for FLJ10244 (NM_152663.2,2011-2029).
caatgttatggtttaagca

SEQ ID NO: 295827 - DNA, 19 bp, Homo sapiens
  siRNA target sequence for GPIG4 (NM_152545.1,182-200).
gcagtggttacaatcgaaa

SEQ ID NO: 295828 - DNA, 19 bp, Homo sapiens
  siRNA target sequence for GPIG4 (NM_152545.1,222-240).
cagctgtggagggttgtat

SEQ ID NO: 295829 - DNA, 19 bp, Homo sapiens
  siRNA target sequence for GPIG4 (NM_152545.1,224-242).
gctgtggagggttgtatta

SEQ ID NO: 295830 - DNA, 19 bp, Homo sapiens
  siRNA target sequence for GPIG4 (NM_152545.1,227-245).
gtggagggttgtattacca

SEQ ID NO: 295831 - DNA, 19 bp, Homo sapiens
  siRNA target sequence for GPIG4 (NM_152545.1,278-296).
cactcatccagcacttagt

SEQ ID NO: 295832 - DNA, 19 bp, Homo sapiens
  siRNA target sequence for GPIG4 (NM_152545.1,295-313).
gtacctaatgtggattact

SEQ ID NO: 295833 - DNA, 19 bp, Homo sapiens
  siRNA target sequence for GPIG4 (NM_152545.1,316-334).
ccagatagaacatacatat

SEQ ID NO: 295834 - DNA, 19 bp, Homo sapiens
  siRNA target sequence for GPIG4 (NM_152545.1,317-335).
cagatagaacatacatatt

SEQ ID NO: 295835 - DNA, 19 bp, Homo sapiens
  siRNA target sequence for GPIG4 (NM_152545.1,346-364).
ctcagttctcggttattta

SEQ ID NO: 295836 - DNA, 19 bp, Homo sapiens
  siRNA target sequence for GPIG4 (NM_152545.1,376-394).
gagctaatggccaaagttt

SEQ ID NO: 295837 - DNA, 19 bp, Homo sapiens
  siRNA target sequence for GPIG4 (NM_152545.1,385-403).
gccaaagtttgccacttat

SEQ ID NO: 295838 - DNA, 19 bp, Homo sapiens
  siRNA target sequence for GPIG4 (NM_152545.1,387-405).
caaagtttgccacttatgt

SEQ ID NO: 295839 - DNA, 19 bp, Homo sapiens
  siRNA target sequence for GPIG4 (NM_152545.1,411-429).
gcaccagagactaagtgat

SEQ ID NO: 295840 - DNA, 19 bp, Homo sapiens
  siRNA target sequence for GPIG4 (NM_152545.1,425-443).
gtgatcctgatagtgataa

SEQ ID NO: 295841 - DNA, 19 bp, Homo sapiens
  siRNA target sequence for GPIG4 (NM_152545.1,427-445).
gatcctgatagtgataaga

SEQ ID NO: 295842 - DNA, 19 bp, Homo sapiens
  siRNA target sequence for GPIG4 (NM_152545.1,514-532).
gattttcgggatgaaagaa

SEQ ID NO: 295843 - DNA, 19 bp, Homo sapiens
  siRNA target sequence for GPIG4 (NM_152545.1,576-594).
cgaagagcagacatacaga

SEQ ID NO: 295844 - DNA, 19 bp, Homo sapiens
  siRNA target sequence for GPIG4 (NM_152545.1,714-732).
caagccacagtctatacaa

SEQ ID NO: 295845 - DNA, 19 bp, Homo sapiens
  siRNA target sequence for GPIG4 (NM_152545.1,849-867).
gaaggaccctttggataat

SEQ ID NO: 295846 - DNA, 19 bp, Homo sapiens
  siRNA target sequence for GPIG4 (NM_152545.1,853-871).
gaccctttggataatgaca

SEQ ID NO: 295847 - DNA, 19 bp, Homo sapiens
  siRNA target sequence for GPIG4 (NM_152545.1,879-897).
ctacagtgaacggaagaaa

SEQ ID NO: 295848 - DNA, 19 bp, Homo sapiens
  siRNA target sequence for GPIG4 (NM_152545.1,899-917).
cacgaaacttagaagctta

SEQ ID NO: 295849 - DNA, 19 bp, Homo sapiens
  siRNA target sequence for GPIG4 (NM_152545.1,913-931).
gcttacgtggaatggttta

SEQ ID NO: 295850 - DNA, 19 bp, Homo sapiens
  siRNA target sequence for GPIG4 (NM_152545.1,914-932).
cttacgtggaatggtttaa

SEQ ID NO: 295851 - DNA, 19 bp, Homo sapiens
  siRNA target sequence for GPIG4 (NM_152545.1,948-966).
ggttgctacagaaatctgt

SEQ ID NO: 295852 - DNA, 19 bp, Homo sapiens
  siRNA target sequence for GPIG4 (NM_152545.1,965-983).
gtatgcctgttaagaaaaa

SEQ ID NO: 295853 - DNA, 19 bp, Homo sapiens
  siRNA target sequence for GPIG4 (NM_152545.1,988-1006).
cgagcaagaatgattgagt

SEQ ID NO: 295854 - DNA, 19 bp, Homo sapiens
  siRNA target sequence for GPIG4 (NM_152545.1,1017-1035).
cgtagctcgggagtgtttt

SEQ ID NO: 295855 - DNA, 19 bp, Homo sapiens
  siRNA target sequence for GPIG4 (NM_152545.1,1018-1036).
gtagctcgggagtgtttta

SEQ ID NO: 295856 - DNA, 19 bp, Homo sapiens
  siRNA target sequence for GPIG4 (NM_152545.1,1021-1039).
gctcgggagtgttttaaca

SEQ ID NO: 295857 - DNA, 19 bp, Homo sapiens
  siRNA target sequence for GPIG4 (NM_152545.1,1056-1074).
cttgatggcgataatctct

SEQ ID NO: 295858 - DNA, 19 bp, Homo sapiens
  siRNA target sequence for GPIG4 (NM_152545.1,1088-1106).
gcccagtctctcgactaaa

SEQ ID NO: 295859 - DNA, 19 bp, Homo sapiens
  siRNA target sequence for GPIG4 (NM_152545.1,1128-1146).
gactgcaaaatttgacatt

SEQ ID NO: 295860 - DNA, 19 bp, Homo sapiens
  siRNA target sequence for GPIG4 (NM_152545.1,1130-1148).
ctgcaaaatttgacattct

SEQ ID NO: 295861 - DNA, 19 bp, Homo sapiens
  siRNA target sequence for GPIG4 (NM_152545.1,1133-1151).
caaaatttgacattcttga

SEQ ID NO: 295862 - DNA, 19 bp, Homo sapiens
  siRNA target sequence for GPIG4 (NM_152545.1,1158-1176).
gatggacccttcaagcaat

SEQ ID NO: 295863 - DNA, 19 bp, Homo sapiens
  siRNA target sequence for GPIG4 (NM_152545.1,1165-1183).
ccttcaagcaatttctata

SEQ ID NO: 295864 - DNA, 19 bp, Homo sapiens
  siRNA target sequence for GPIG4 (NM_152545.1,1173-1191).
caatttctataattatcga

SEQ ID NO: 295865 - DNA, 19 bp, Homo sapiens
  siRNA target sequence for GPIG4 (NM_152545.1,1228-1246).
gctcatagtagtagagaaa

SEQ ID NO: 295866 - DNA, 19 bp, Homo sapiens
  siRNA target sequence for GPIG4 (NM_152545.1,1238-1256).
gtagagaaaagattgtgat

SEQ ID NO: 295867 - DNA, 19 bp, Homo sapiens
  siRNA target sequence for GPIG4 (NM_152545.1,1243-1261).
gaaaagattgtgataccat

SEQ ID NO: 295868 - DNA, 19 bp, Homo sapiens
  siRNA target sequence for GPIG4 (NM_152545.1,1268-1286).
gtctcttaatcaaagatat

SEQ ID NO: 295869 - DNA, 19 bp, Homo sapiens
  siRNA target sequence for GPIG4 (NM_152545.1,1327-1345).
ggccatgtcaattttgaga

SEQ ID NO: 295870 - DNA, 19 bp, Homo sapiens
  siRNA target sequence for GPIG4 (NM_152545.1,1328-1346).
gccatgtcaattttgagaa

SEQ ID NO: 295871 - DNA, 19 bp, Homo sapiens
  siRNA target sequence for GPIG4 (NM_152545.1,1329-1347).
ccatgtcaattttgagaaa

SEQ ID NO: 295872 - DNA, 19 bp, Homo sapiens
  siRNA target sequence for GPIG4 (NM_152545.1,1396-1414).
gtggagtgtccatttgaga

SEQ ID NO: 295873 - DNA, 19 bp, Homo sapiens
  siRNA target sequence for GPIG4 (NM_152545.1,1460-1478).
gtgaagatgctctctactt

SEQ ID NO: 295874 - DNA, 19 bp, Homo sapiens
  siRNA target sequence for GPIG4 (NM_152545.1,1469-1487).
ctctctacttggcttctta

SEQ ID NO: 295875 - DNA, 19 bp, Homo sapiens
  siRNA target sequence for HAPIP (NM_003947.1,157-175).
gctggatcgagggtctttt

SEQ ID NO: 295876 - DNA, 19 bp, Homo sapiens
  siRNA target sequence for HAPIP (NM_003947.1,200-218).
gatgtccttcctatcctaa

SEQ ID NO: 295877 - DNA, 19 bp, Homo sapiens
  siRNA target sequence for HAPIP (NM_003947.1,323-341).
cggaaactcgtgacgtatt

SEQ ID NO: 295878 - DNA, 19 bp, Homo sapiens
  siRNA target sequence for HAPIP (NM_003947.1,324-342).
ggaaactcgtgacgtattt

SEQ ID NO: 295879 - DNA, 19 bp, Homo sapiens
  siRNA target sequence for HAPIP (NM_003947.1,1234-1252).
ctctgaggccggtcattat

SEQ ID NO: 295880 - DNA, 19 bp, Homo sapiens
  siRNA target sequence for HAPIP (NM_003947.1,1524-1542).
gcaaagcactacttgatgt

SEQ ID NO: 295881 - DNA, 19 bp, Homo sapiens
  siRNA target sequence for HAPIP (NM_003947.1,1630-1648).
ggtgcatgaggtgttacat

SEQ ID NO: 295882 - DNA, 19 bp, Homo sapiens
  siRNA target sequence for HAPIP (NM_003947.1,1741-1759).
ggtgttggactggattgaa

SEQ ID NO: 295883 - DNA, 19 bp, Homo sapiens
  siRNA target sequence for HAPIP (NM_003947.1,1747-1765).
ggactggattgaaaaccat

SEQ ID NO: 295884 - DNA, 19 bp, Homo sapiens
  siRNA target sequence for HAPIP (NM_003947.1,2158-2176).
gcagaccgccactctagat

SEQ ID NO: 295885 - DNA, 19 bp, Homo sapiens
  siRNA target sequence for HAPIP (NM_003947.1,2174-2192).
gatgccacactcaatgtca

SEQ ID NO: 295886 - DNA, 19 bp, Homo sapiens
  siRNA target sequence for HAPIP (NM_003947.1,2178-2196).
ccacactcaatgtcatcaa

SEQ ID NO: 295887 - DNA, 19 bp, Homo sapiens
  siRNA target sequence for HAPIP (NM_003947.1,2473-2491).
cttgcttcggcagatgaat

SEQ ID NO: 295888 - DNA, 19 bp, Homo sapiens
  siRNA target sequence for HAPIP (NM_003947.1,2477-2495).
cttcggcagatgaatgact

SEQ ID NO: 295889 - DNA, 19 bp, Homo sapiens
  siRNA target sequence for HAPIP (NM_003947.1,2623-2641).
ggtccaggcatcaggaatt

SEQ ID NO: 295890 - DNA, 19 bp, Homo sapiens
  siRNA target sequence for HAPIP (NM_003947.1,2627-2645).
caggcatcaggaattgagt

SEQ ID NO: 295891 - DNA, 19 bp, Homo sapiens
  siRNA target sequence for HAPIP (NM_003947.1,2631-2649).
catcaggaattgagttgat

SEQ ID NO: 295892 - DNA, 19 bp, Homo sapiens
  siRNA target sequence for HAPIP (NM_003947.1,2681-2699).
gtgcaagagttattggaat

SEQ ID NO: 295893 - DNA, 19 bp, Homo sapiens
  siRNA target sequence for HAPIP (NM_003947.1,2916-2934).
ccatcgagtccctctttca

SEQ ID NO: 295894 - DNA, 19 bp, Homo sapiens
  siRNA target sequence for HAPIP (NM_003947.1,3082-3100).
gatggaagaccggctaaaa

SEQ ID NO: 295895 - DNA, 19 bp, Homo sapiens
  siRNA target sequence for HAPIP (NM_003947.1,3195-3213).
ggtgtggtggacgagataa

SEQ ID NO: 295896 - DNA, 19 bp, Homo sapiens
  siRNA target sequence for HAPIP (NM_003947.1,3198-3216).
gtggtggacgagataagct

SEQ ID NO: 295897 - DNA, 19 bp, Homo sapiens
  siRNA target sequence for HAPIP (NM_003947.1,3384-3402).
ggggacccgagcaacaagt

SEQ ID NO: 295898 - DNA, 19 bp, Homo sapiens
  siRNA target sequence for HAPIP (NM_003947.1,3387-3405).
gacccgagcaacaagtgaa

SEQ ID NO: 295899 - DNA, 19 bp, Homo sapiens
  siRNA target sequence for HAPIP (NM_003947.1,3635-3653).
gtgcctgccaagcaaacaa

SEQ ID NO: 295900 - DNA, 19 bp, Homo sapiens
  siRNA target sequence for HAPIP (NM_003947.1,3684-3702).
ccgatagctttgtggaaaa

SEQ ID NO: 295901 - DNA, 19 bp, Homo sapiens
  siRNA target sequence for HAPIP (NM_003947.1,3685-3703).
cgatagctttgtggaaaaa

SEQ ID NO: 295902 - DNA, 19 bp, Homo sapiens
  siRNA target sequence for HAPIP (NM_003947.1,3713-3731).
catgccacggagataagga

SEQ ID NO: 295903 - DNA, 19 bp, Homo sapiens
  siRNA target sequence for HAPIP (NM_003947.1,3716-3734).
gccacggagataaggaaat

SEQ ID NO: 295904 - DNA, 19 bp, Homo sapiens
  siRNA target sequence for HAPIP (NM_003947.1,3781-3799).
gggaaagtaccgatactca

SEQ ID NO: 295905 - DNA, 19 bp, Homo sapiens
  siRNA target sequence for HAPIP (NM_003947.1,3818-3836).
gtcaacacagaggataata

SEQ ID NO: 295906 - DNA, 19 bp, Homo sapiens
  siRNA target sequence for HAPIP (NM_003947.1,3898-3916).
cgccaaccacgaagtcaat

SEQ ID NO: 295907 - DNA, 19 bp, Homo sapiens
  siRNA target sequence for HAPIP (NM_003947.1,3900-3918).
ccaaccacgaagtcaatga

SEQ ID NO: 295908 - DNA, 19 bp, Homo sapiens
  siRNA target sequence for HAPIP (NM_003947.1,3984-4002).
cttatgtaagggatttgca

SEQ ID NO: 295909 - DNA, 19 bp, Homo sapiens
  siRNA target sequence for HAPIP (NM_003947.1,4055-4073).
ccccctgggatcctcaata

SEQ ID NO: 295910 - DNA, 19 bp, Homo sapiens
  siRNA target sequence for HAPIP (NM_003947.1,4056-4074).
cccctgggatcctcaataa

SEQ ID NO: 295911 - DNA, 19 bp, Homo sapiens
  siRNA target sequence for HAPIP (NM_003947.1,4264-4282).
gcatgcgggcaccttcttt

SEQ ID NO: 295912 - DNA, 19 bp, Homo sapiens
  siRNA target sequence for HAPIP (NM_003947.1,4273-4291).
caccttctttgatgagata

SEQ ID NO: 295913 - DNA, 19 bp, Homo sapiens
  siRNA target sequence for HAPIP (NM_003947.1,4275-4293).
ccttctttgatgagataca

SEQ ID NO: 295914 - DNA, 19 bp, Homo sapiens
  siRNA target sequence for HAPIP (NM_003947.1,4438-4456).
gctcagtgtcccaaagaaa

SEQ ID NO: 295915 - DNA, 19 bp, Homo sapiens
  siRNA target sequence for HAPIP (NM_003947.1,4641-4659).
cttcaggacacacgaaata

SEQ ID NO: 295916 - DNA, 19 bp, Homo sapiens
  siRNA target sequence for HAPIP (NM_003947.1,4644-4662).
caggacacacgaaatatgt

SEQ ID NO: 295917 - DNA, 19 bp, Homo sapiens
  siRNA target sequence for HAPIP (NM_003947.1,4647-4665).
gacacacgaaatatgttta

SEQ ID NO: 295918 - DNA, 19 bp, Homo sapiens
  siRNA target sequence for HAPIP (NM_003947.1,4649-4667).
cacacgaaatatgtttaca

SEQ ID NO: 295919 - DNA, 19 bp, Homo sapiens
  siRNA target sequence for HAPIP (NM_003947.1,4712-4730).
gagggcgatccctgcaaat

SEQ ID NO: 295920 - DNA, 19 bp, Homo sapiens
  siRNA target sequence for HAPIP (NM_003947.1,4777-4795).
gctgaaagcctccaacatt

SEQ ID NO: 295921 - DNA, 19 bp, Homo sapiens
  siRNA target sequence for HAPIP (NM_003947.1,4819-4837).
gaacattcgagaagtgatt

SEQ ID NO: 295922 - DNA, 19 bp, Homo sapiens
  siRNA target sequence for HAPIP (NM_003947.1,4834-4852).
gattcaagaaaggatcatt

SEQ ID NO: 295923 - DNA, 19 bp, Homo sapiens
  siRNA target sequence for HAPIP (NM_003947.1,4901-4919).
gccaaacagaggaacaata

SEQ ID NO: 295924 - DNA, 19 bp, Homo sapiens
  siRNA target sequence for HAPIP (NM_003947.1,4903-4921).
caaacagaggaacaatagt

SEQ ID NO: 295925 - DNA, 19 bp, Homo sapiens
  siRNA target sequence for KIAA1010 (NM_015221.1,14-32).
cagtggttcgagccatttt

SEQ ID NO: 295926 - DNA, 19 bp, Homo sapiens
  siRNA target sequence for KIAA1010 (NM_015221.1,19-37).
gttcgagccatttttgact

SEQ ID NO: 295927 - DNA, 19 bp, Homo sapiens
  siRNA target sequence for KIAA1010 (NM_015221.1,44-62).
ctagcgtatcagaagaact

SEQ ID NO: 295928 - DNA, 19 bp, Homo sapiens
  siRNA target sequence for KIAA1010 (NM_015221.1,65-83).
cgctctttgtgggagatat

SEQ ID NO: 295929 - DNA, 19 bp, Homo sapiens
  siRNA target sequence for KIAA1010 (NM_015221.1,67-85).
ctctttgtgggagatatta

SEQ ID NO: 295930 - DNA, 19 bp, Homo sapiens
  siRNA target sequence for KIAA1010 (NM_015221.1,175-193).
gtgaccattcccagtctaa

SEQ ID NO: 295931 - DNA, 19 bp, Homo sapiens
  siRNA target sequence for KIAA1010 (NM_015221.1,179-197).
ccattcccagtctaaaaga

SEQ ID NO: 295932 - DNA, 19 bp, Homo sapiens
  siRNA target sequence for KIAA1010 (NM_015221.1,233-251).
catcccaagagttggataa

SEQ ID NO: 295933 - DNA, 19 bp, Homo sapiens
  siRNA target sequence for KIAA1010 (NM_015221.1,236-254).
cccaagagttggataatct

SEQ ID NO: 295934 - DNA, 19 bp, Homo sapiens
  siRNA target sequence for KIAA1010 (NM_015221.1,339-357).
gggcttcttcccatcttca

SEQ ID NO: 295935 - DNA, 19 bp, Homo sapiens
  siRNA target sequence for KIAA1010 (NM_015221.1,404-422).
cccagagcgccctgtttca

SEQ ID NO: 295936 - DNA, 19 bp, Homo sapiens
  siRNA target sequence for KIAA1010 (NM_015221.1,406-424).
cagagcgccctgtttcaga

SEQ ID NO: 295937 - DNA, 19 bp, Homo sapiens
  siRNA target sequence for KIAA1010 (NM_015221.1,408-426).
gagcgccctgtttcagatt

SEQ ID NO: 295938 - DNA, 19 bp, Homo sapiens
  siRNA target sequence for KIAA1010 (NM_015221.1,417-435).
gtttcagattccggaatat

SEQ ID NO: 295939 - DNA, 19 bp, Homo sapiens
  siRNA target sequence for KIAA1010 (NM_015221.1,545-563).
ggtttgaaggggagttaga

SEQ ID NO: 295940 - DNA, 19 bp, Homo sapiens
  siRNA target sequence for KIAA1010 (NM_015221.1,622-640).
gtggatgagtcagtaagtt

SEQ ID NO: 295941 - DNA, 19 bp, Homo sapiens
  siRNA target sequence for KIAA1010 (NM_015221.1,624-642).
ggatgagtcagtaagttct

SEQ ID NO: 295942 - DNA, 19 bp, Homo sapiens
  siRNA target sequence for KIAA1010 (NM_015221.1,630-648).
gtcagtaagttctggaaat

SEQ ID NO: 295943 - DNA, 19 bp, Homo sapiens
  siRNA target sequence for KIAA1010 (NM_015221.1,660-678).
cattgttaatggtgaagta

SEQ ID NO: 295944 - DNA, 19 bp, Homo sapiens
  siRNA target sequence for KIAA1010 (NM_015221.1,742-760).
ggggtcgccctgtacagat

SEQ ID NO: 295945 - DNA, 19 bp, Homo sapiens
  siRNA target sequence for KIAA1010 (NM_015221.1,743-761).
gggtcgccctgtacagatt

SEQ ID NO: 295946 - DNA, 19 bp, Homo sapiens
  siRNA target sequence for KIAA1010 (NM_015221.1,747-765).
cgccctgtacagattccaa

SEQ ID NO: 295947 - DNA, 19 bp, Homo sapiens
  siRNA target sequence for KIAA1010 (NM_015221.1,776-794).
caaatgagctggatttcga

SEQ ID NO: 295948 - DNA, 19 bp, Homo sapiens
  siRNA target sequence for KIAA1010 (NM_015221.1,863-881).
ggacaggcatctttcctta

SEQ ID NO: 295949 - DNA, 19 bp, Homo sapiens
  siRNA target sequence for KIAA1010 (NM_015221.1,877-895).
ccttaccggtttgtgaaat

SEQ ID NO: 295950 - DNA, 19 bp, Homo sapiens
  siRNA target sequence for KIAA1010 (NM_015221.1,878-896).
cttaccggtttgtgaaatt

SEQ ID NO: 295951 - DNA, 19 bp, Homo sapiens
  siRNA target sequence for KIAA1010 (NM_015221.1,908-926).
cacgggtggaggaaaccat

SEQ ID NO: 295952 - DNA, 19 bp, Homo sapiens
  siRNA target sequence for KIAA1010 (NM_015221.1,952-970).
gccaggatcccggaaactt

SEQ ID NO: 295953 - DNA, 19 bp, Homo sapiens
  siRNA target sequence for KIAA1010 (NM_015221.1,954-972).
caggatcccggaaacttct

SEQ ID NO: 295954 - DNA, 19 bp, Homo sapiens
  siRNA target sequence for KIAA1010 (NM_015221.1,956-974).
ggatcccggaaacttcttt

SEQ ID NO: 295955 - DNA, 19 bp, Homo sapiens
  siRNA target sequence for KIAA1010 (NM_015221.1,1041-1059).
ggagcctgactgcattatt

SEQ ID NO: 295956 - DNA, 19 bp, Homo sapiens
  siRNA target sequence for KIAA1010 (NM_015221.1,1044-1062).
gcctgactgcattatttct

SEQ ID NO: 295957 - DNA, 19 bp, Homo sapiens
  siRNA target sequence for KIAA1010 (NM_015221.1,1109-1127).
cagacagaaactcttatca

SEQ ID NO: 295958 - DNA, 19 bp, Homo sapiens
  siRNA target sequence for KIAA1010 (NM_015221.1,1208-1226).
ctgaccctacagaagtagt

SEQ ID NO: 295959 - DNA, 19 bp, Homo sapiens
  siRNA target sequence for KIAA1010 (NM_015221.1,1212-1230).
ccctacagaagtagtcaat

SEQ ID NO: 295960 - DNA, 19 bp, Homo sapiens
  siRNA target sequence for KIAA1010 (NM_015221.1,1217-1235).
cagaagtagtcaatggtat

SEQ ID NO: 295961 - DNA, 19 bp, Homo sapiens
  siRNA target sequence for KIAA1010 (NM_015221.1,1222-1240).
gtagtcaatggtatttcct

SEQ ID NO: 295962 - DNA, 19 bp, Homo sapiens
  siRNA target sequence for KIAA1010 (NM_015221.1,1371-1389).
cagcctacctcccaaaaga

SEQ ID NO: 295963 - DNA, 19 bp, Homo sapiens
  siRNA target sequence for KIAA1010 (NM_015221.1,1388-1406).
gaatgtattcccagctaaa

SEQ ID NO: 295964 - DNA, 19 bp, Homo sapiens
  siRNA target sequence for KIAA1010 (NM_015221.1,1392-1410).
gtattcccagctaaaaact

SEQ ID NO: 295965 - DNA, 19 bp, Homo sapiens
  siRNA target sequence for KIAA1010 (NM_015221.1,1454-1472).
cagcttcaagggtagtcaa

SEQ ID NO: 295966 - DNA, 19 bp, Homo sapiens
  siRNA target sequence for KIAA1010 (NM_015221.1,1465-1483).
gtagtcaaacccagacaat

SEQ ID NO: 295967 - DNA, 19 bp, Homo sapiens
  siRNA target sequence for KIAA1010 (NM_015221.1,1468-1486).
gtcaaacccagacaatcaa

SEQ ID NO: 295968 - DNA, 19 bp, Homo sapiens
  siRNA target sequence for KIAA1010 (NM_015221.1,1497-1515).
ccacaacctagcaagttat

SEQ ID NO: 295969 - DNA, 19 bp, Homo sapiens
  siRNA target sequence for KIAA1010 (NM_015221.1,1498-1516).
cacaacctagcaagttata

SEQ ID NO: 295970 - DNA, 19 bp, Homo sapiens
  siRNA target sequence for KIAA1010 (NM_015221.1,1500-1518).
caacctagcaagttatact

SEQ ID NO: 295971 - DNA, 19 bp, Homo sapiens
  siRNA target sequence for KIAA1010 (NM_015221.1,1503-1521).
cctagcaagttatactaaa

SEQ ID NO: 295972 - DNA, 19 bp, Homo sapiens
  siRNA target sequence for KIAA1010 (NM_015221.1,1525-1543).
caccacacgtccagtgttt

SEQ ID NO: 295973 - DNA, 19 bp, Homo sapiens
  siRNA target sequence for KIAA1010 (NM_015221.1,1528-1546).
cacacgtccagtgtttact

SEQ ID NO: 295974 - DNA, 19 bp, Homo sapiens
  siRNA target sequence for KIAA1010 (NM_015221.1,1586-1604).
cccaagggcttgttatgga

SEQ ID NO: 295975 - DNA, 19 bp, Homo sapiens
  siRNA target sequence for KIAA1010 (NM_015221.1,1587-1605).
ccaagggcttgttatggaa

SEQ ID NO: 295976 - DNA, 19 bp, Homo sapiens
  siRNA target sequence for KIAA1010 (NM_015221.1,1698-1716).
cggcacagagccagataaa

SEQ ID NO: 295977 - DNA, 19 bp, Homo sapiens
  siRNA target sequence for KIAA1010 (NM_015221.1,1700-1718).
gcacagagccagataaaat

SEQ ID NO: 295978 - DNA, 19 bp, Homo sapiens
  siRNA target sequence for KIAA1010 (NM_015221.1,1701-1719).
cacagagccagataaaatt

SEQ ID NO: 295979 - DNA, 19 bp, Homo sapiens
  siRNA target sequence for KIAA1010 (NM_015221.1,1765-1783).
gtccgaggttcctcaaagt

SEQ ID NO: 295980 - DNA, 19 bp, Homo sapiens
  siRNA target sequence for KIAA1010 (NM_015221.1,1767-1785).
ccgaggttcctcaaagtta

SEQ ID NO: 295981 - DNA, 19 bp, Homo sapiens
  siRNA target sequence for KIAA1010 (NM_015221.1,1768-1786).
cgaggttcctcaaagttaa

SEQ ID NO: 295982 - DNA, 19 bp, Homo sapiens
  siRNA target sequence for KIAA1010 (NM_015221.1,1771-1789).
ggttcctcaaagttaatca

SEQ ID NO: 295983 - DNA, 19 bp, Homo sapiens
  siRNA target sequence for KIAA1010 (NM_015221.1,1876-1894).
ctggttgaccagaacctaa

SEQ ID NO: 295984 - DNA, 19 bp, Homo sapiens
  siRNA target sequence for KIAA1010 (NM_015221.1,2009-2027).
gtgagaccttagaaaagga

SEQ ID NO: 295985 - DNA, 19 bp, Homo sapiens
  siRNA target sequence for KIAA1010 (NM_015221.1,2104-2122).
gagcgggacttggatatgt

SEQ ID NO: 295986 - DNA, 19 bp, Homo sapiens
  siRNA target sequence for KIAA1010 (NM_015221.1,2107-2125).
cgggacttggatatgtaca

SEQ ID NO: 295987 - DNA, 19 bp, Homo sapiens
  siRNA target sequence for KIAA1010 (NM_015221.1,2132-2150).
ctcaagaagagctaaacct

SEQ ID NO: 295988 - DNA, 19 bp, Homo sapiens
  siRNA target sequence for KIAA1010 (NM_015221.1,2163-2181).
gaagcaggatgaatcatca

SEQ ID NO: 295989 - DNA, 19 bp, Homo sapiens
  siRNA target sequence for KIAA1010 (NM_015221.1,2166-2184).
gcaggatgaatcatcaaga

SEQ ID NO: 295990 - DNA, 19 bp, Homo sapiens
  siRNA target sequence for KIAA1010 (NM_015221.1,2203-2221).
ctcaagttctgtgaaagta

SEQ ID NO: 295991 - DNA, 19 bp, Homo sapiens
  siRNA target sequence for KIAA1010 (NM_015221.1,2401-2419).
cgggatctggaaatgtgta

SEQ ID NO: 295992 - DNA, 19 bp, Homo sapiens
  siRNA target sequence for KIAA1010 (NM_015221.1,2402-2420).
gggatctggaaatgtgtat

SEQ ID NO: 295993 - DNA, 19 bp, Homo sapiens
  siRNA target sequence for KIAA1010 (NM_015221.1,2403-2421).
ggatctggaaatgtgtatt

SEQ ID NO: 295994 - DNA, 19 bp, Homo sapiens
  siRNA target sequence for KIAA1010 (NM_015221.1,2448-2466).
ggcacaggtaccaaacatt

SEQ ID NO: 295995 - DNA, 19 bp, Homo sapiens
  siRNA target sequence for KIAA1010 (NM_015221.1,2450-2468).
cacaggtaccaaacattga

SEQ ID NO: 295996 - DNA, 19 bp, Homo sapiens
  siRNA target sequence for KIAA1010 (NM_015221.1,2581-2599).
gagcttgagggaacataca

SEQ ID NO: 295997 - DNA, 19 bp, Homo sapiens
  siRNA target sequence for KIAA1010 (NM_015221.1,2584-2602).
cttgagggaacatacaaga

SEQ ID NO: 295998 - DNA, 19 bp, Homo sapiens
  siRNA target sequence for KIAA1010 (NM_015221.1,2626-2644).
gccattgcgctgcttgaaa

SEQ ID NO: 295999 - DNA, 19 bp, Homo sapiens
  siRNA target sequence for KIAA1010 (NM_015221.1,2627-2645).
ccattgcgctgcttgaaat

SEQ ID NO: 296000 - DNA, 19 bp, Homo sapiens
  siRNA target sequence for KIAA1010 (NM_015221.1,2695-2713).
gatctgaagagcctataca

SEQ ID NO: 296001 - DNA, 19 bp, Homo sapiens
  siRNA target sequence for KIAA1010 (NM_015221.1,2745-2763).
gggctccttcctcatcaaa

SEQ ID NO: 296002 - DNA, 19 bp, Homo sapiens
  siRNA target sequence for KIAA1010 (NM_015221.1,2782-2800).
cgttacccgctgttgctaa

SEQ ID NO: 296003 - DNA, 19 bp, Homo sapiens
  siRNA target sequence for KIAA1010 (NM_015221.1,2783-2801).
gttacccgctgttgctaat

SEQ ID NO: 296004 - DNA, 19 bp, Homo sapiens
  siRNA target sequence for KIAA1010 (NM_015221.1,2833-2851).
ccagataaagtgcctttaa

SEQ ID NO: 296005 - DNA, 19 bp, Homo sapiens
  siRNA target sequence for KIAA1010 (NM_015221.1,2860-2878).
gtccttgcggtcaaggaaa

SEQ ID NO: 296006 - DNA, 19 bp, Homo sapiens
  siRNA target sequence for KIAA1010 (NM_015221.1,2874-2892).
ggaaatcaacgttaacatt

SEQ ID NO: 296007 - DNA, 19 bp, Homo sapiens
  siRNA target sequence for KIAA1010 (NM_015221.1,2875-2893).
gaaatcaacgttaacatta

SEQ ID NO: 296008 - DNA, 19 bp, Homo sapiens
  siRNA target sequence for KIAA1010 (NM_015221.1,2928-2946).
gtaccgtaagggtgatgaa

SEQ ID NO: 296009 - DNA, 19 bp, Homo sapiens
  siRNA target sequence for KIAA1010 (NM_015221.1,2932-2950).
cgtaagggtgatgaagata

SEQ ID NO: 296010 - DNA, 19 bp, Homo sapiens
  siRNA target sequence for KIAA1010 (NM_015221.1,2982-3000).
ccactccatcatcaagaaa

SEQ ID NO: 296011 - DNA, 19 bp, Homo sapiens
  siRNA target sequence for KIAA1010 (NM_015221.1,3037-3055).
ggctttgctcctcagataa

SEQ ID NO: 296012 - DNA, 19 bp, Homo sapiens
  siRNA target sequence for KIAA1010 (NM_015221.1,3044-3062).
ctcctcagataaaagatga

SEQ ID NO: 296013 - DNA, 19 bp, Homo sapiens
  siRNA target sequence for KIAA1010 (NM_015221.1,3091-3109).
cgaatgcaagaaagattga

SEQ ID NO: 296014 - DNA, 19 bp, Homo sapiens
  siRNA target sequence for KIAA1010 (NM_015221.1,3263-3281).
gtgaccagctcttcacaaa

SEQ ID NO: 296015 - DNA, 19 bp, Homo sapiens
  siRNA target sequence for KIAA1010 (NM_015221.1,3268-3286).
cagctcttcacaaacttta

SEQ ID NO: 296016 - DNA, 19 bp, Homo sapiens
  siRNA target sequence for KIAA1010 (NM_015221.1,3312-3330).
ctcccccttaaatcagtta

SEQ ID NO: 296017 - DNA, 19 bp, Homo sapiens
  siRNA target sequence for KIAA1010 (NM_015221.1,3314-3332).
cccccttaaatcagttact

SEQ ID NO: 296018 - DNA, 19 bp, Homo sapiens
  siRNA target sequence for KIAA1010 (NM_015221.1,3350-3368).
cccataagctggtacagaa

SEQ ID NO: 296019 - DNA, 19 bp, Homo sapiens
  siRNA target sequence for KIAA1010 (NM_015221.1,3351-3369).
ccataagctggtacagaaa

SEQ ID NO: 296020 - DNA, 19 bp, Homo sapiens
  siRNA target sequence for KIAA1010 (NM_015221.1,3361-3379).
gtacagaaacgctttgaca

SEQ ID NO: 296021 - DNA, 19 bp, Homo sapiens
  siRNA target sequence for KIAA1010 (NM_015221.1,3382-3400).
ctcctggacttctataact

SEQ ID NO: 296022 - DNA, 19 bp, Homo sapiens
  siRNA target sequence for KIAA1010 (NM_015221.1,3385-3403).
ctggacttctataactgta

SEQ ID NO: 296023 - DNA, 19 bp, Homo sapiens
  siRNA target sequence for KIAA1010 (NM_015221.1,3406-3424).
gaacgggcagaaaagctaa

SEQ ID NO: 296024 - DNA, 19 bp, Homo sapiens
  siRNA target sequence for KIAA1010 (NM_015221.1,3586-3604).
caggctctggagcaattaa

SEQ ID NO: 296025 - DNA, 19 bp, Homo sapiens
  siRNA target sequence for KIAA1010 (NM_015221.1,3608-3626).
cactgctttcgttactcaa

SEQ ID NO: 296026 - DNA, 19 bp, Homo sapiens
  siRNA target sequence for KIAA1010 (NM_015221.1,3635-3653).
gcagagagggaaaccttat

SEQ ID NO: 296027 - DNA, 19 bp, Homo sapiens
  siRNA target sequence for KIAA1010 (NM_015221.1,3790-3808).
ctgggcctgccaagttaca

SEQ ID NO: 296028 - DNA, 19 bp, Homo sapiens
  siRNA target sequence for KIAA1010 (NM_015221.1,3871-3889).
caggcagaacggaacttca

SEQ ID NO: 296029 - DNA, 19 bp, Homo sapiens
  siRNA target sequence for KIAA1010 (NM_015221.1,3873-3891).
ggcagaacggaacttcaat

SEQ ID NO: 296030 - DNA, 19 bp, Homo sapiens
  siRNA target sequence for KIAA1010 (NM_015221.1,3901-3919).
gacttggatgtctcacttt

SEQ ID NO: 296031 - DNA, 19 bp, Homo sapiens
  siRNA target sequence for KIAA1010 (NM_015221.1,3975-3993).
ccgctggctgattgacaat

SEQ ID NO: 296032 - DNA, 19 bp, Homo sapiens
  siRNA target sequence for KIAA1010 (NM_015221.1,4163-4181).
gcagcatggctgtatcctt

SEQ ID NO: 296033 - DNA, 19 bp, Homo sapiens
  siRNA target sequence for KIAA1010 (NM_015221.1,4164-4182).
cagcatggctgtatccttt

SEQ ID NO: 296034 - DNA, 19 bp, Homo sapiens
  siRNA target sequence for KIAA1010 (NM_015221.1,4263-4281).
cctaaatccgagtaattca

SEQ ID NO: 296035 - DNA, 19 bp, Homo sapiens
  siRNA target sequence for KIAA1010 (NM_015221.1,4431-4449).
ctccgtaccaggacgaaat

SEQ ID NO: 296036 - DNA, 19 bp, Homo sapiens
  siRNA target sequence for KIAA1010 (NM_015221.1,4459-4477).
caagacctcgtcaaaggat

SEQ ID NO: 296037 - DNA, 19 bp, Homo sapiens
  siRNA target sequence for KIAA1010 (NM_015221.1,4495-4513).
gctccggaagacagaagta

SEQ ID NO: 296038 - DNA, 19 bp, Homo sapiens
  siRNA target sequence for KIAA1010 (NM_015221.1,4537-4555).
gaaggcaaccaggtctatt

SEQ ID NO: 296039 - DNA, 19 bp, Homo sapiens
  siRNA target sequence for KIAA1010 (NM_015221.1,4542-4560).
caaccaggtctattttgct

SEQ ID NO: 296040 - DNA, 19 bp, Homo sapiens
  siRNA target sequence for KIAA1010 (NM_015221.1,4620-4638).
caagatcctcgagtttaaa

SEQ ID NO: 296041 - DNA, 19 bp, Homo sapiens
  siRNA target sequence for KIAA1010 (NM_015221.1,4623-4641).
gatcctcgagtttaaagat

SEQ ID NO: 296042 - DNA, 19 bp, Homo sapiens
  siRNA target sequence for KIAA1010 (NM_015221.1,4627-4645).
ctcgagtttaaagatgtta

SEQ ID NO: 296043 - DNA, 19 bp, Homo sapiens
  siRNA target sequence for KIAA1010 (NM_015221.1,4690-4708).
ggctacgttccctccaatt

SEQ ID NO: 296044 - DNA, 19 bp, Homo sapiens
  siRNA target sequence for Link-GEFII (NM_016339.1,243-261).
ggatctatacctgctaatt

SEQ ID NO: 296045 - DNA, 19 bp, Homo sapiens
  siRNA target sequence for Link-GEFII (NM_016339.1,244-262).
gatctatacctgctaatta

SEQ ID NO: 296046 - DNA, 19 bp, Homo sapiens
  siRNA target sequence for Link-GEFII (NM_016339.1,247-265).
ctatacctgctaattatga

SEQ ID NO: 296047 - DNA, 19 bp, Homo sapiens
  siRNA target sequence for Link-GEFII (NM_016339.1,327-345).
gacggtggaactaaagatt

SEQ ID NO: 296048 - DNA, 19 bp, Homo sapiens
  siRNA target sequence for Link-GEFII (NM_016339.1,536-554).
gctctgtgacggagaaact

SEQ ID NO: 296049 - DNA, 19 bp, Homo sapiens
  siRNA target sequence for Link-GEFII (NM_016339.1,537-555).
ctctgtgacggagaaactt

SEQ ID NO: 296050 - DNA, 19 bp, Homo sapiens
  siRNA target sequence for Link-GEFII (NM_016339.1,541-559).
gtgacggagaaacttcaat

SEQ ID NO: 296051 - DNA, 19 bp, Homo sapiens
  siRNA target sequence for Link-GEFII (NM_016339.1,1120-1138).
ccagggaaattcaagaact

SEQ ID NO: 296052 - DNA, 19 bp, Homo sapiens
  siRNA target sequence for Link-GEFII (NM_016339.1,1123-1141).
gggaaattcaagaacttgt

SEQ ID NO: 296053 - DNA, 19 bp, Homo sapiens
  siRNA target sequence for Link-GEFII (NM_016339.1,1134-1152).
gaacttgtttcgcaaattt

SEQ ID NO: 296054 - DNA, 19 bp, Homo sapiens
  siRNA target sequence for Link-GEFII (NM_016339.1,1193-1211).
gagaagtgatctccaaaat

SEQ ID NO: 296055 - DNA, 19 bp, Homo sapiens
  siRNA target sequence for Link-GEFII (NM_016339.1,1274-1292).
ggagtaagacccttgtaga

SEQ ID NO: 296056 - DNA, 19 bp, Homo sapiens
  siRNA target sequence for Link-GEFII (NM_016339.1,1415-1433).
cctatgtgcgccagtttca

SEQ ID NO: 296057 - DNA, 19 bp, Homo sapiens
  siRNA target sequence for LOC221002 (NM_145313.1,253-271).
gttcccacggtggactatt

SEQ ID NO: 296058 - DNA, 19 bp, Homo sapiens
  siRNA target sequence for LOC221002 (NM_145313.1,274-292).
cccgataggacgtacatct

SEQ ID NO: 296059 - DNA, 19 bp, Homo sapiens
  siRNA target sequence for LOC221002 (NM_145313.1,275-293).
ccgataggacgtacatctt

SEQ ID NO: 296060 - DNA, 19 bp, Homo sapiens
  siRNA target sequence for LOC221002 (NM_145313.1,277-295).
gataggacgtacatcttca

SEQ ID NO: 296061 - DNA, 19 bp, Homo sapiens
  siRNA target sequence for LOC221002 (NM_145313.1,304-322).
ctgagctcccgggtcttta

SEQ ID NO: 296062 - DNA, 19 bp, Homo sapiens
  siRNA target sequence for LOC221002 (NM_145313.1,641-659).
ggccaccggctgtagacaa

SEQ ID NO: 296063 - DNA, 19 bp, Homo sapiens
  siRNA target sequence for LOC221002 (NM_145313.1,927-945).
ccgggtggtgaagaagaaa

SEQ ID NO: 296064 - DNA, 19 bp, Homo sapiens
  siRNA target sequence for LOC221002 (NM_145313.1,955-973).
cgcatgttggagttcttca

SEQ ID NO: 296065 - DNA, 19 bp, Homo sapiens
  siRNA target sequence for LOC221002 (NM_145313.1,956-974).
gcatgttggagttcttcat

SEQ ID NO: 296066 - DNA, 19 bp, Homo sapiens
  siRNA target sequence for LOC221002 (NM_145313.1,1054-1072).
gtggcaaggctgaagaaaa

SEQ ID NO: 296067 - DNA, 19 bp, Homo sapiens
  siRNA target sequence for LOC221002 (NM_145313.1,1190-1208).
ccaacagcagccgtgaaaa

SEQ ID NO: 296068 - DNA, 19 bp, Homo sapiens
  siRNA target sequence for LOC221002 (NM_145313.1,1283-1301).
ccaacgggcacattaactt

SEQ ID NO: 296069 - DNA, 19 bp, Homo sapiens
  siRNA target sequence for LOC221002 (NM_145313.1,1284-1302).
caacgggcacattaacttt

SEQ ID NO: 296070 - DNA, 19 bp, Homo sapiens
  siRNA target sequence for LOC221002 (NM_145313.1,1322-1340).
ccagacagatccatgagtt

SEQ ID NO: 296071 - DNA, 19 bp, Homo sapiens
  siRNA target sequence for LOC221002 (NM_145313.1,1434-1452).
cttcgtcgcctcctttgaa

SEQ ID NO: 296072 - DNA, 19 bp, Homo sapiens
  siRNA target sequence for LOC221002 (NM_145313.1,1437-1455).
cgtcgcctcctttgaaagt

SEQ ID NO: 296073 - DNA, 19 bp, Homo sapiens
  siRNA target sequence for MCF2 (NM_005369.2,246-264).
gcacttggttttggtttta

SEQ ID NO: 296074 - DNA, 19 bp, Homo sapiens
  siRNA target sequence for MCF2 (NM_005369.2,291-309).
gttcacagacattggattt

SEQ ID NO: 296075 - DNA, 19 bp, Homo sapiens
  siRNA target sequence for MCF2 (NM_005369.2,349-367).
gttatgctgagctcagtta

SEQ ID NO: 296076 - DNA, 19 bp, Homo sapiens
  siRNA target sequence for MCF2 (NM_005369.2,359-377).
gctcagttagtgatttgct

SEQ ID NO: 296077 - DNA, 19 bp, Homo sapiens
  siRNA target sequence for MCF2 (NM_005369.2,368-386).
gtgatttgctgacatacat

SEQ ID NO: 296078 - DNA, 19 bp, Homo sapiens
  siRNA target sequence for MCF2 (NM_005369.2,384-402).
cattgatgacaagcaatta

SEQ ID NO: 296079 - DNA, 19 bp, Homo sapiens
  siRNA target sequence for MCF2 (NM_005369.2,396-414).
gcaattaacccctgagtta

SEQ ID NO: 296080 - DNA, 19 bp, Homo sapiens
  siRNA target sequence for MCF2 (NM_005369.2,436-454).
cacagtgaatggatcatct

SEQ ID NO: 296081 - DNA, 19 bp, Homo sapiens
  siRNA target sequence for MCF2 (NM_005369.2,447-465).
gatcatcttcagaaatgct

SEQ ID NO: 296082 - DNA, 19 bp, Homo sapiens
  siRNA target sequence for MCF2 (NM_005369.2,450-468).
catcttcagaaatgctata

SEQ ID NO: 296083 - DNA, 19 bp, Homo sapiens
  siRNA target sequence for MCF2 (NM_005369.2,478-496).
gccctcacagtgaaagaaa

SEQ ID NO: 296084 - DNA, 19 bp, Homo sapiens
  siRNA target sequence for MCF2 (NM_005369.2,581-599).
caattcgtgctgaaaggta

SEQ ID NO: 296085 - DNA, 19 bp, Homo sapiens
  siRNA target sequence for MCF2 (NM_005369.2,587-605).
gtgctgaaaggtatcatct

SEQ ID NO: 296086 - DNA, 19 bp, Homo sapiens
  siRNA target sequence for MCF2 (NM_005369.2,590-608).
ctgaaaggtatcatctgtt

SEQ ID NO: 296087 - DNA, 19 bp, Homo sapiens
  siRNA target sequence for MCF2 (NM_005369.2,703-721).
gaatgtcatcggcaaataa

SEQ ID NO: 296088 - DNA, 19 bp, Homo sapiens
  siRNA target sequence for MCF2 (NM_005369.2,724-742).
ggtgactggcaaactatta

SEQ ID NO: 296089 - DNA, 19 bp, Homo sapiens
  siRNA target sequence for MCF2 (NM_005369.2,725-743).
gtgactggcaaactattaa

SEQ ID NO: 296090 - DNA, 19 bp, Homo sapiens
  siRNA target sequence for MCF2 (NM_005369.2,727-745).
gactggcaaactattaata

SEQ ID NO: 296091 - DNA, 19 bp, Homo sapiens
  siRNA target sequence for MCF2 (NM_005369.2,747-765).
gttgctgactcaagtacat

SEQ ID NO: 296092 - DNA, 19 bp, Homo sapiens
  siRNA target sequence for MCF2 (NM_005369.2,750-768).
gctgactcaagtacatgat

SEQ ID NO: 296093 - DNA, 19 bp, Homo sapiens
  siRNA target sequence for MCF2 (NM_005369.2,817-835).
gagcagtatctgcaactat

SEQ ID NO: 296094 - DNA, 19 bp, Homo sapiens
  siRNA target sequence for MCF2 (NM_005369.2,840-858).
gtttgagcaggattttcaa

SEQ ID NO: 296095 - DNA, 19 bp, Homo sapiens
  siRNA target sequence for MCF2 (NM_005369.2,862-880).
cttgtgactgaagttgaat

SEQ ID NO: 296096 - DNA, 19 bp, Homo sapiens
  siRNA target sequence for MCF2 (NM_005369.2,871-889).
gaagttgaatttctattaa

SEQ ID NO: 296097 - DNA, 19 bp, Homo sapiens
  siRNA target sequence for MCF2 (NM_005369.2,919-937).
gggactatagctcaagtaa

SEQ ID NO: 296098 - DNA, 19 bp, Homo sapiens
  siRNA target sequence for MCF2 (NM_005369.2,923-941).
ctatagctcaagtaaaaca

SEQ ID NO: 296099 - DNA, 19 bp, Homo sapiens
  siRNA target sequence for MCF2 (NM_005369.2,999-1017).
ccagtttgtgatattacat

SEQ ID NO: 296100 - DNA, 19 bp, Homo sapiens
  siRNA target sequence for MCF2 (NM_005369.2,1039-1057).
caccattatgcacttgatt

SEQ ID NO: 296101 - DNA, 19 bp, Homo sapiens
  siRNA target sequence for MCF2 (NM_005369.2,1041-1059).
ccattatgcacttgattta

SEQ ID NO: 296102 - DNA, 19 bp, Homo sapiens
  siRNA target sequence for MCF2 (NM_005369.2,1070-1088).
ggtgcaatgagctacgtta

SEQ ID NO: 296103 - DNA, 19 bp, Homo sapiens
  siRNA target sequence for MCF2 (NM_005369.2,1080-1098).
gctacgttacctttctgat

SEQ ID NO: 296104 - DNA, 19 bp, Homo sapiens
  siRNA target sequence for MCF2 (NM_005369.2,1081-1099).
ctacgttacctttctgata

SEQ ID NO: 296105 - DNA, 19 bp, Homo sapiens
  siRNA target sequence for MCF2 (NM_005369.2,1084-1102).
cgttacctttctgatattt

SEQ ID NO: 296106 - DNA, 19 bp, Homo sapiens
  siRNA target sequence for MCF2 (NM_005369.2,1096-1114).
gatattttggttaatgaga

SEQ ID NO: 296107 - DNA, 19 bp, Homo sapiens
  siRNA target sequence for MCF2 (NM_005369.2,1196-1214).
gggaatgtcttctagctaa

SEQ ID NO: 296108 - DNA, 19 bp, Homo sapiens
  siRNA target sequence for MCF2 (NM_005369.2,1365-1383).
ggttcaaatgaagactata

SEQ ID NO: 296109 - DNA, 19 bp, Homo sapiens
  siRNA target sequence for MCF2 (NM_005369.2,1456-1474).
catgtgaggccaatccaat

SEQ ID NO: 296110 - DNA, 19 bp, Homo sapiens
  siRNA target sequence for MCF2 (NM_005369.2,1503-1521).
cacatctgggacaccattt

SEQ ID NO: 296111 - DNA, 19 bp, Homo sapiens
  siRNA target sequence for MCF2 (NM_005369.2,1641-1659).
caatagcttggatgtttta

SEQ ID NO: 296112 - DNA, 19 bp, Homo sapiens
  siRNA target sequence for MCF2 (NM_005369.2,1662-1680).
gaaccacgtactaaatgaa

SEQ ID NO: 296113 - DNA, 19 bp, Homo sapiens
  siRNA target sequence for MCF2 (NM_005369.2,1668-1686).
cgtactaaatgaactgata

SEQ ID NO: 296114 - DNA, 19 bp, Homo sapiens
  siRNA target sequence for MCF2 (NM_005369.2,1689-1707).
gactgagagagtttatgtt

SEQ ID NO: 296115 - DNA, 19 bp, Homo sapiens
  siRNA target sequence for MCF2 (NM_005369.2,1711-1729).
gaactgtatactgttttgt

SEQ ID NO: 296116 - DNA, 19 bp, Homo sapiens
  siRNA target sequence for MCF2 (NM_005369.2,1749-1767).
ggataatccagagatgttt

SEQ ID NO: 296117 - DNA, 19 bp, Homo sapiens
  siRNA target sequence for MCF2 (NM_005369.2,1818-1836).
catggcagaaatatatgaa

SEQ ID NO: 296118 - DNA, 19 bp, Homo sapiens
  siRNA target sequence for MCF2 (NM_005369.2,1834-1852).
gaattccataacgacattt

SEQ ID NO: 296119 - DNA, 19 bp, Homo sapiens
  siRNA target sequence for MCF2 (NM_005369.2,1857-1875).
gagcagcctggaaaattgt

SEQ ID NO: 296120 - DNA, 19 bp, Homo sapiens
  siRNA target sequence for MCF2 (NM_005369.2,1959-1977).
gcccagatcagaaacaatt

SEQ ID NO: 296121 - DNA, 19 bp, Homo sapiens
  siRNA target sequence for MCF2 (NM_005369.2,1991-2009).
cagaatgcgcatttttcca

SEQ ID NO: 296122 - DNA, 19 bp, Homo sapiens
  siRNA target sequence for MCF2 (NM_005369.2,2042-2060).
gactggattcctatttact

SEQ ID NO: 296123 - DNA, 19 bp, Homo sapiens
  siRNA target sequence for MCF2 (NM_005369.2,2046-2064).
ggattcctatttactcaaa

SEQ ID NO: 296124 - DNA, 19 bp, Homo sapiens
  siRNA target sequence for MCF2 (NM_005369.2,2065-2083).
ccagtgcaacgaatcacta

SEQ ID NO: 296125 - DNA, 19 bp, Homo sapiens
  siRNA target sequence for MCF2 (NM_005369.2,2066-2084).
cagtgcaacgaatcactaa

SEQ ID NO: 296126 - DNA, 19 bp, Homo sapiens
  siRNA target sequence for MCF2 (NM_005369.2,2068-2086).
gtgcaacgaatcactaaat

SEQ ID NO: 296127 - DNA, 19 bp, Homo sapiens
  siRNA target sequence for MCF2 (NM_005369.2,2074-2092).
cgaatcactaaatatcagt

SEQ ID NO: 296128 - DNA, 19 bp, Homo sapiens
  siRNA target sequence for MCF2 (NM_005369.2,2104-2122).
gagctattaaaatatagca

SEQ ID NO: 296129 - DNA, 19 bp, Homo sapiens
  siRNA target sequence for MCF2 (NM_005369.2,2160-2178).
cgatgcaatgctggattta

SEQ ID NO: 296130 - DNA, 19 bp, Homo sapiens
  siRNA target sequence for MCF2 (NM_005369.2,2164-2182).
gcaatgctggatttactga

SEQ ID NO: 296131 - DNA, 19 bp, Homo sapiens
  siRNA target sequence for MCF2 (NM_005369.2,2173-2191).
gatttactgaagtcagtta

SEQ ID NO: 296132 - DNA, 19 bp, Homo sapiens
  siRNA target sequence for MCF2 (NM_005369.2,2179-2197).
ctgaagtcagttaatgatt

SEQ ID NO: 296133 - DNA, 19 bp, Homo sapiens
  siRNA target sequence for MCF2 (NM_005369.2,2198-2216).
ctatgcatcagattgcaat

SEQ ID NO: 296134 - DNA, 19 bp, Homo sapiens
  siRNA target sequence for MCF2 (NM_005369.2,2242-2260).
gaactgggcaagatgataa

SEQ ID NO: 296135 - DNA, 19 bp, Homo sapiens
  siRNA target sequence for MCF2 (NM_005369.2,2267-2285).
gtggattcagcgtttggat

SEQ ID NO: 296136 - DNA, 19 bp, Homo sapiens
  siRNA target sequence for MCF2 (NM_005369.2,2341-2359).
cagcgacaccttttcttgt

SEQ ID NO: 296137 - DNA, 19 bp, Homo sapiens
  siRNA target sequence for MCF2 (NM_005369.2,2343-2361).
gcgacaccttttcttgtat

SEQ ID NO: 296138 - DNA, 19 bp, Homo sapiens
  siRNA target sequence for MCF2 (NM_005369.2,2382-2400).
caaaaggcgtgttgaaagt

SEQ ID NO: 296139 - DNA, 19 bp, Homo sapiens
  siRNA target sequence for MCF2 (NM_005369.2,2413-2431).
gacagatacccgtcataca

SEQ ID NO: 296140 - DNA, 19 bp, Homo sapiens
  siRNA target sequence for MCF2 (NM_005369.2,2415-2433).
cagatacccgtcatacagt

SEQ ID NO: 296141 - DNA, 19 bp, Homo sapiens
  siRNA target sequence for MCF2 (NM_005369.2,2417-2435).
gatacccgtcatacagttt

SEQ ID NO: 296142 - DNA, 19 bp, Homo sapiens
  siRNA target sequence for MCF2 (NM_005369.2,2421-2439).
cccgtcatacagttttaaa

SEQ ID NO: 296143 - DNA, 19 bp, Homo sapiens
  siRNA target sequence for MCF2 (NM_005369.2,2423-2441).
cgtcatacagttttaaaca

SEQ ID NO: 296144 - DNA, 19 bp, Homo sapiens
  siRNA target sequence for MCF2 (NM_005369.2,2486-2504).
gtgataaccgcaagtttga

SEQ ID NO: 296145 - DNA, 19 bp, Homo sapiens
  siRNA target sequence for MCF2 (NM_005369.2,2562-2580).
gaagatgacgtggctaaaa

SEQ ID NO: 296146 - DNA, 19 bp, Homo sapiens
  siRNA target sequence for MCF2 (NM_005369.2,2565-2583).
gatgacgtggctaaaagaa

SEQ ID NO: 296147 - DNA, 19 bp, Homo sapiens
  siRNA target sequence for MCF2 (NM_005369.2,2608-2626).
caggaacttttgacagtta

SEQ ID NO: 296148 - DNA, 19 bp, Homo sapiens
  siRNA target sequence for MCF2 (NM_005369.2,2654-2672).
cagaacgggataagtttca

SEQ ID NO: 296149 - DNA, 19 bp, Homo sapiens
  siRNA target sequence for MCF2 (NM_005369.2,2659-2677).
cgggataagtttcagattt

SEQ ID NO: 296150 - DNA, 19 bp, Homo sapiens
  siRNA target sequence for MCF2 (NM_005369.2,2700-2718).
gcaacagggagcttttata

SEQ ID NO: 296151 - DNA, 19 bp, Homo sapiens
  siRNA target sequence for MCF2 (NM_005369.2,2704-2722).
cagggagcttttataagta

SEQ ID NO: 296152 - DNA, 19 bp, Homo sapiens
  siRNA target sequence for MCF2 (NM_005369.2,2811-2829).
gactgaggcatcacaatct

SEQ ID NO: 296153 - DNA, 19 bp, Homo sapiens
  siRNA target sequence for MCF2 (NM_005369.2,2854-2872).
gaatggtcaagcaactatt

SEQ ID NO: 296154 - DNA, 19 bp, Homo sapiens
  siRNA target sequence for MCF2 (NM_005369.2,2858-2876).
ggtcaagcaactatttcta

SEQ ID NO: 296155 - DNA, 19 bp, Homo sapiens
  siRNA target sequence for MCF2 (NM_005369.2,2874-2892).
ctaccctacttatgatgaa

SEQ ID NO: 296156 - DNA, 19 bp, Homo sapiens
  siRNA target sequence for MCF2 (NM_005369.2,2877-2895).
ccctacttatgatgaaaat

SEQ ID NO: 296157 - DNA, 19 bp, Homo sapiens
  siRNA target sequence for MCF2L (NM_024979.2,329-347).
gacggaagcccggttatca

SEQ ID NO: 296158 - DNA, 19 bp, Homo sapiens
  siRNA target sequence for MCF2L (NM_024979.2,450-468).
gattcatcctggtgataga

SEQ ID NO: 296159 - DNA, 19 bp, Homo sapiens
  siRNA target sequence for MCF2L (NM_024979.2,467-485).
gaccggcgacgggacaaat

SEQ ID NO: 296160 - DNA, 19 bp, Homo sapiens
  siRNA target sequence for MCF2L (NM_024979.2,470-488).
cggcgacgggacaaatgga

SEQ ID NO: 296161 - DNA, 19 bp, Homo sapiens
  siRNA target sequence for MCF2L (NM_024979.2,557-575).
cttcgcccgacgggttttt

SEQ ID NO: 296162 - DNA, 19 bp, Homo sapiens
  siRNA target sequence for MCF2L (NM_024979.2,561-579).
gcccgacgggttttttcca

SEQ ID NO: 296163 - DNA, 19 bp, Homo sapiens
  siRNA target sequence for MCF2L (NM_024979.2,562-580).
cccgacgggttttttccaa

SEQ ID NO: 296164 - DNA, 19 bp, Homo sapiens
  siRNA target sequence for MCF2L (NM_024979.2,563-581).
ccgacgggttttttccaaa

SEQ ID NO: 296165 - DNA, 19 bp, Homo sapiens
  siRNA target sequence for MCF2L (NM_024979.2,591-609).
ccgacatcgctttcaaatt

SEQ ID NO: 296166 - DNA, 19 bp, Homo sapiens
  siRNA target sequence for MCF2L (NM_024979.2,593-611).
gacatcgctttcaaattca

SEQ ID NO: 296167 - DNA, 19 bp, Homo sapiens
  siRNA target sequence for MCF2L (NM_024979.2,595-613).
catcgctttcaaattcaat

SEQ ID NO: 296168 - DNA, 19 bp, Homo sapiens
  siRNA target sequence for MCF2L (NM_024979.2,598-616).
cgctttcaaattcaataga

SEQ ID NO: 296169 - DNA, 19 bp, Homo sapiens
  siRNA target sequence for MCF2L (NM_024979.2,652-670).
gagctccgtaccagactta

SEQ ID NO: 296170 - DNA, 19 bp, Homo sapiens
  siRNA target sequence for MCF2L (NM_024979.2,663-681).
cagacttacacggttacat

SEQ ID NO: 296171 - DNA, 19 bp, Homo sapiens
  siRNA target sequence for MCF2L (NM_024979.2,671-689).
cacggttacatcgataagt

SEQ ID NO: 296172 - DNA, 19 bp, Homo sapiens
  siRNA target sequence for MCF2L (NM_024979.2,752-770).
cgcacggccatcgaaagtt

SEQ ID NO: 296173 - DNA, 19 bp, Homo sapiens
  siRNA target sequence for MCF2L (NM_024979.2,753-771).
gcacggccatcgaaagttt

SEQ ID NO: 296174 - DNA, 19 bp, Homo sapiens
  siRNA target sequence for MCF2L (NM_024979.2,1169-1187).
gcgtcccagaagatagcaa

SEQ ID NO: 296175 - DNA, 19 bp, Homo sapiens
  siRNA target sequence for MCF2L (NM_024979.2,1244-1262).
gccagcttcgaggagaaat

SEQ ID NO: 296176 - DNA, 19 bp, Homo sapiens
  siRNA target sequence for MCF2L (NM_024979.2,1246-1264).
cagcttcgaggagaaatca

SEQ ID NO: 296177 - DNA, 19 bp, Homo sapiens
  siRNA target sequence for MCF2L (NM_024979.2,1470-1488).
ggtgtgatgaagggattta

SEQ ID NO: 296178 - DNA, 19 bp, Homo sapiens
  siRNA target sequence for MCF2L (NM_024979.2,1542-1560).
ctgccctccaggaaatcga

SEQ ID NO: 296179 - DNA, 19 bp, Homo sapiens
  siRNA target sequence for MCF2L (NM_024979.2,1549-1567).
ccaggaaatcgagaagttt

SEQ ID NO: 296180 - DNA, 19 bp, Homo sapiens
  siRNA target sequence for MCF2L (NM_024979.2,1570-1588).
ggagaccggtgcggaaaat

SEQ ID NO: 296181 - DNA, 19 bp, Homo sapiens
  siRNA target sequence for MCF2L (NM_024979.2,1571-1589).
gagaccggtgcggaaaata

SEQ ID NO: 296182 - DNA, 19 bp, Homo sapiens
  siRNA target sequence for MCF2L (NM_024979.2,1598-1616).
gagctcaacgcgatttaca

SEQ ID NO: 296183 - DNA, 19 bp, Homo sapiens
  siRNA target sequence for MCF2L (NM_024979.2,1608-1626).
cgatttacaaggaatacga

SEQ ID NO: 296184 - DNA, 19 bp, Homo sapiens
  siRNA target sequence for MCF2L (NM_024979.2,1609-1627).
gatttacaaggaatacgaa

SEQ ID NO: 296185 - DNA, 19 bp, Homo sapiens
  siRNA target sequence for MCF2L (NM_024979.2,2076-2094).
caggccttcacaacaagaa

SEQ ID NO: 296186 - DNA, 19 bp, Homo sapiens
  siRNA target sequence for MCF2L (NM_024979.2,2219-2237).
gatttccagatctatgaga

SEQ ID NO: 296187 - DNA, 19 bp, Homo sapiens
  siRNA target sequence for MCF2L (NM_024979.2,2286-2304).
ccgactgcccgtttttcca

SEQ ID NO: 296188 - DNA, 19 bp, Homo sapiens
  siRNA target sequence for MCF2L (NM_024979.2,2840-2858).
gcgccaactcctgagatta

SEQ ID NO: 296189 - DNA, 19 bp, Homo sapiens
  siRNA target sequence for MCF2L (NM_024979.2,2841-2859).
cgccaactcctgagattaa

SEQ ID NO: 296190 - DNA, 19 bp, Homo sapiens
  siRNA target sequence for MCF2L (NM_024979.2,2842-2860).
gccaactcctgagattaaa

SEQ ID NO: 296191 - DNA, 19 bp, Homo sapiens
  siRNA target sequence for MCF2L (NM_024979.2,2862-2880).
ccgcgtgggtgaatgaaat

SEQ ID NO: 296192 - DNA, 19 bp, Homo sapiens
  siRNA target sequence for MCF2L (NM_024979.2,2863-2881).
cgcgtgggtgaatgaaatt

SEQ ID NO: 296193 - DNA, 19 bp, Homo sapiens
  siRNA target sequence for MCF2L (NM_024979.2,2996-3014).
ggaaactcaaggaacatca

SEQ ID NO: 296194 - DNA, 19 bp, Homo sapiens
  siRNA target sequence for MCF2L (NM_024979.2,3066-3084).
gctcagcgccactgacaaa

SEQ ID NO: 296195 - DNA, 19 bp, Homo sapiens
  siRNA target sequence for NET1 (NM_005863.2,168-186).
ggaggtctcctacctatta

SEQ ID NO: 296196 - DNA, 19 bp, Homo sapiens
  siRNA target sequence for NET1 (NM_005863.2,169-187).
gaggtctcctacctattaa

SEQ ID NO: 296197 - DNA, 19 bp, Homo sapiens
  siRNA target sequence for NET1 (NM_005863.2,193-211).
ccatacgagtcctagatgt

SEQ ID NO: 296198 - DNA, 19 bp, Homo sapiens
  siRNA target sequence for NET1 (NM_005863.2,198-216).
cgagtcctagatgtcaata

SEQ ID NO: 296199 - DNA, 19 bp, Homo sapiens
  siRNA target sequence for NET1 (NM_005863.2,199-217).
gagtcctagatgtcaataa

SEQ ID NO: 296200 - DNA, 19 bp, Homo sapiens
  siRNA target sequence for NET1 (NM_005863.2,218-236).
ccagtccttcagagaacaa

SEQ ID NO: 296201 - DNA, 19 bp, Homo sapiens
  siRNA target sequence for NET1 (NM_005863.2,278-296).
cacgtccttggcaaattta

SEQ ID NO: 296202 - DNA, 19 bp, Homo sapiens
  siRNA target sequence for NET1 (NM_005863.2,280-298).
cgtccttggcaaatttaat

SEQ ID NO: 296203 - DNA, 19 bp, Homo sapiens
  siRNA target sequence for NET1 (NM_005863.2,323-341).
cagacgttttggtcaaaca

SEQ ID NO: 296204 - DNA, 19 bp, Homo sapiens
  siRNA target sequence for NET1 (NM_005863.2,325-343).
gacgttttggtcaaacaat

SEQ ID NO: 296205 - DNA, 19 bp, Homo sapiens
  siRNA target sequence for NET1 (NM_005863.2,505-523).
gacggcaggaggcaatata

SEQ ID NO: 296206 - DNA, 19 bp, Homo sapiens
  siRNA target sequence for NET1 (NM_005863.2,508-526).
ggcaggaggcaatatatga

SEQ ID NO: 296207 - DNA, 19 bp, Homo sapiens
  siRNA target sequence for NET1 (NM_005863.2,533-551).
ccgaggtgaacaggattta

SEQ ID NO: 296208 - DNA, 19 bp, Homo sapiens
  siRNA target sequence for NET1 (NM_005863.2,643-661).
gtgatctggactcttacat

SEQ ID NO: 296209 - DNA, 19 bp, Homo sapiens
  siRNA target sequence for NET1 (NM_005863.2,659-677).
catacctctgcatgaagat

SEQ ID NO: 296210 - DNA, 19 bp, Homo sapiens
  siRNA target sequence for NET1 (NM_005863.2,722-740).
ggagcagattggtcacatt

SEQ ID NO: 296211 - DNA, 19 bp, Homo sapiens
  siRNA target sequence for NET1 (NM_005863.2,749-767).
ctggttaccgcgcttgaat

SEQ ID NO: 296212 - DNA, 19 bp, Homo sapiens
  siRNA target sequence for NET1 (NM_005863.2,803-821).
caaagctcttcttgatcaa

SEQ ID NO: 296213 - DNA, 19 bp, Homo sapiens
  siRNA target sequence for NET1 (NM_005863.2,869-887).
gtctcccttcagtcgaaaa

SEQ ID NO: 296214 - DNA, 19 bp, Homo sapiens
  siRNA target sequence for NET1 (NM_005863.2,871-889).
ctcccttcagtcgaaaact

SEQ ID NO: 296215 - DNA, 19 bp, Homo sapiens
  siRNA target sequence for NET1 (NM_005863.2,916-934).
ctcgaagtcgcctagtcaa

SEQ ID NO: 296216 - DNA, 19 bp, Homo sapiens
  siRNA target sequence for NET1 (NM_005863.2,918-936).
cgaagtcgcctagtcaaat

SEQ ID NO: 296217 - DNA, 19 bp, Homo sapiens
  siRNA target sequence for NET1 (NM_005863.2,919-937).
gaagtcgcctagtcaaata

SEQ ID NO: 296218 - DNA, 19 bp, Homo sapiens
  siRNA target sequence for NET1 (NM_005863.2,930-948).
gtcaaataccctttactgt

SEQ ID NO: 296219 - DNA, 19 bp, Homo sapiens
  siRNA target sequence for NET1 (NM_005863.2,1001-1019).
ggaggatgctatattgata

SEQ ID NO: 296220 - DNA, 19 bp, Homo sapiens
  siRNA target sequence for NET1 (NM_005863.2,1004-1022).
ggatgctatattgataata

SEQ ID NO: 296221 - DNA, 19 bp, Homo sapiens
  siRNA target sequence for NET1 (NM_005863.2,1023-1041).
cagggagtcctctctgata

SEQ ID NO: 296222 - DNA, 19 bp, Homo sapiens
  siRNA target sequence for NET1 (NM_005863.2,1026-1044).
ggagtcctctctgatatca

SEQ ID NO: 296223 - DNA, 19 bp, Homo sapiens
  siRNA target sequence for NET1 (NM_005863.2,1027-1045).
gagtcctctctgatatcaa

SEQ ID NO: 296224 - DNA, 19 bp, Homo sapiens
  siRNA target sequence for NET1 (NM_005863.2,1029-1047).
gtcctctctgatatcaact

SEQ ID NO: 296225 - DNA, 19 bp, Homo sapiens
  siRNA target sequence for NET1 (NM_005863.2,1032-1050).
ctctctgatatcaacttga

SEQ ID NO: 296226 - DNA, 19 bp, Homo sapiens
  siRNA target sequence for NET1 (NM_005863.2,1059-1077).
gaatccgagtgccagtatt

SEQ ID NO: 296227 - DNA, 19 bp, Homo sapiens
  siRNA target sequence for NET1 (NM_005863.2,1063-1081).
ccgagtgccagtattacat

SEQ ID NO: 296228 - DNA, 19 bp, Homo sapiens
  siRNA target sequence for NET1 (NM_005863.2,1112-1130).
gagggaccccagaatcgaa

SEQ ID NO: 296229 - DNA, 19 bp, Homo sapiens
  siRNA target sequence for NET1 (NM_005863.2,1341-1359).
cgaggagctttcagtaact

SEQ ID NO: 296230 - DNA, 19 bp, Homo sapiens
  siRNA target sequence for NET1 (NM_005863.2,1354-1372).
gtaactcagagaaagctaa

SEQ ID NO: 296231 - DNA, 19 bp, Homo sapiens
  siRNA target sequence for NET1 (NM_005863.2,1601-1619).
cacagtttccagtgttact

SEQ ID NO: 296232 - DNA, 19 bp, Homo sapiens
  siRNA target sequence for NET1 (NM_005863.2,1632-1650).
gatgaaaacgcttacagat

SEQ ID NO: 296233 - DNA, 19 bp, Homo sapiens
  siRNA target sequence for PDZGEF1 (NM_014247.1,127-145).
ctgcagatttcacaaaact

SEQ ID NO: 296234 - DNA, 19 bp, Homo sapiens
  siRNA target sequence for PDZGEF1 (NM_014247.1,173-191).
ggtgacccacgtttcttct

SEQ ID NO: 296235 - DNA, 19 bp, Homo sapiens
  siRNA target sequence for PDZGEF1 (NM_014247.1,174-192).
gtgacccacgtttcttcta

SEQ ID NO: 296236 - DNA, 19 bp, Homo sapiens
  siRNA target sequence for PDZGEF1 (NM_014247.1,193-211).
gccattcaggatgtagtat

SEQ ID NO: 296237 - DNA, 19 bp, Homo sapiens
  siRNA target sequence for PDZGEF1 (NM_014247.1,195-213).
cattcaggatgtagtatca

SEQ ID NO: 296238 - DNA, 19 bp, Homo sapiens
  siRNA target sequence for PDZGEF1 (NM_014247.1,287-305).
gagtgggttgccagaaaca

SEQ ID NO: 296239 - DNA, 19 bp, Homo sapiens
  siRNA target sequence for PDZGEF1 (NM_014247.1,432-450).
gaacaactcttggaattta

SEQ ID NO: 296240 - DNA, 19 bp, Homo sapiens
  siRNA target sequence for PDZGEF1 (NM_014247.1,466-484).
cttttgccaatatgacaat

SEQ ID NO: 296241 - DNA, 19 bp, Homo sapiens
  siRNA target sequence for PDZGEF1 (NM_014247.1,535-553).
gagcagggaccatagtgtt

SEQ ID NO: 296242 - DNA, 19 bp, Homo sapiens
  siRNA target sequence for PDZGEF1 (NM_014247.1,537-555).
gcagggaccatagtgttaa

SEQ ID NO: 296243 - DNA, 19 bp, Homo sapiens
  siRNA target sequence for PDZGEF1 (NM_014247.1,541-559).
ggaccatagtgttaaatga

SEQ ID NO: 296244 - DNA, 19 bp, Homo sapiens
  siRNA target sequence for PDZGEF1 (NM_014247.1,572-590).
ggactcctggtcagtgatt

SEQ ID NO: 296245 - DNA, 19 bp, Homo sapiens
  siRNA target sequence for PDZGEF1 (NM_014247.1,639-657).
ctgtgcatgggaaatagtt

SEQ ID NO: 296246 - DNA, 19 bp, Homo sapiens
  siRNA target sequence for PDZGEF1 (NM_014247.1,755-773).
ctgccgtattctcaatcaa

SEQ ID NO: 296247 - DNA, 19 bp, Homo sapiens
  siRNA target sequence for PDZGEF1 (NM_014247.1,757-775).
gccgtattctcaatcaagt

SEQ ID NO: 296248 - DNA, 19 bp, Homo sapiens
  siRNA target sequence for PDZGEF1 (NM_014247.1,758-776).
ccgtattctcaatcaagta

SEQ ID NO: 296249 - DNA, 19 bp, Homo sapiens
  siRNA target sequence for PDZGEF1 (NM_014247.1,782-800).
gaacatgcaaaaagttgaa

SEQ ID NO: 296250 - DNA, 19 bp, Homo sapiens
  siRNA target sequence for PDZGEF1 (NM_014247.1,824-842).
gaaagaacaccgagaactt

SEQ ID NO: 296251 - DNA, 19 bp, Homo sapiens
  siRNA target sequence for PDZGEF1 (NM_014247.1,859-877).
gaaagggacacattgtcat

SEQ ID NO: 296252 - DNA, 19 bp, Homo sapiens
  siRNA target sequence for PDZGEF1 (NM_014247.1,886-904).
cctcagaaaggttaacaat

SEQ ID NO: 296253 - DNA, 19 bp, Homo sapiens
  siRNA target sequence for PDZGEF1 (NM_014247.1,937-955).
caacattcatagaagactt

SEQ ID NO: 296254 - DNA, 19 bp, Homo sapiens
  siRNA target sequence for PDZGEF1 (NM_014247.1,959-977).
gttgacctataggactttt

SEQ ID NO: 296255 - DNA, 19 bp, Homo sapiens
  siRNA target sequence for PDZGEF1 (NM_014247.1,962-980).
gacctataggacttttctt

SEQ ID NO: 296256 - DNA, 19 bp, Homo sapiens
  siRNA target sequence for PDZGEF1 (NM_014247.1,993-1011).
gaagtgggcaaaaagttat

SEQ ID NO: 296257 - DNA, 19 bp, Homo sapiens
  siRNA target sequence for PDZGEF1 (NM_014247.1,1046-1064).
ggttacacgggtagtatta

SEQ ID NO: 296258 - DNA, 19 bp, Homo sapiens
  siRNA target sequence for PDZGEF1 (NM_014247.1,1047-1065).
gttacacgggtagtattat

SEQ ID NO: 296259 - DNA, 19 bp, Homo sapiens
  siRNA target sequence for PDZGEF1 (NM_014247.1,1187-1205).
cgcgtgtgctgctaaagca

SEQ ID NO: 296260 - DNA, 19 bp, Homo sapiens
  siRNA target sequence for PDZGEF1 (NM_014247.1,1188-1206).
gcgtgtgctgctaaagcaa

SEQ ID NO: 296261 - DNA, 19 bp, Homo sapiens
  siRNA target sequence for PDZGEF1 (NM_014247.1,1190-1208).
gtgtgctgctaaagcaaaa

SEQ ID NO: 296262 - DNA, 19 bp, Homo sapiens
  siRNA target sequence for PDZGEF1 (NM_014247.1,1217-1235).
gatgacgttaacaaaacca

SEQ ID NO: 296263 - DNA, 19 bp, Homo sapiens
  siRNA target sequence for PDZGEF1 (NM_014247.1,1249-1267).
ctttgccttttatcttact

SEQ ID NO: 296264 - DNA, 19 bp, Homo sapiens
  siRNA target sequence for PDZGEF1 (NM_014247.1,1352-1370).
ggatcagatattagaagta

SEQ ID NO: 296265 - DNA, 19 bp, Homo sapiens
  siRNA target sequence for PDZGEF1 (NM_014247.1,1353-1371).
gatcagatattagaagtaa

SEQ ID NO: 296266 - DNA, 19 bp, Homo sapiens
  siRNA target sequence for PDZGEF1 (NM_014247.1,1374-1392).
ggccaaaactttgaaaaca

SEQ ID NO: 296267 - DNA, 19 bp, Homo sapiens
  siRNA target sequence for PDZGEF1 (NM_014247.1,1375-1393).
gccaaaactttgaaaacat

SEQ ID NO: 296268 - DNA, 19 bp, Homo sapiens
  siRNA target sequence for PDZGEF1 (NM_014247.1,1391-1409).
cattcagctgtcaaaagct

SEQ ID NO: 296269 - DNA, 19 bp, Homo sapiens
  siRNA target sequence for PDZGEF1 (NM_014247.1,1397-1415).
gctgtcaaaagctatggaa

SEQ ID NO: 296270 - DNA, 19 bp, Homo sapiens
  siRNA target sequence for PDZGEF1 (NM_014247.1,1407-1425).
gctatggaaattcttagaa

SEQ ID NO: 296271 - DNA, 19 bp, Homo sapiens
  siRNA target sequence for PDZGEF1 (NM_014247.1,1476-1494).
gaacttctaacaagattgt

SEQ ID NO: 296272 - DNA, 19 bp, Homo sapiens
  siRNA target sequence for PDZGEF1 (NM_014247.1,1520-1538).
ccaccttcctaaaattggt

SEQ ID NO: 296273 - DNA, 19 bp, Homo sapiens
  siRNA target sequence for PDZGEF1 (NM_014247.1,1559-1577).
ctactccattccagatctt

SEQ ID NO: 296274 - DNA, 19 bp, Homo sapiens
  siRNA target sequence for PDZGEF1 (NM_014247.1,1570-1588).
cagatcttgctgtagatgt

SEQ ID NO: 296275 - DNA, 19 bp, Homo sapiens
  siRNA target sequence for PDZGEF1 (NM_014247.1,1593-1611).
caggtgataggacttgaaa

SEQ ID NO: 296276 - DNA, 19 bp, Homo sapiens
  siRNA target sequence for PDZGEF1 (NM_014247.1,1674-1692).
gacaagactcggatcagta

SEQ ID NO: 296277 - DNA, 19 bp, Homo sapiens
  siRNA target sequence for PDZGEF1 (NM_014247.1,1699-1717).
cacagaaaccatacaatga

SEQ ID NO: 296278 - DNA, 19 bp, Homo sapiens
  siRNA target sequence for PDZGEF1 (NM_014247.1,1724-1742).
gattggtcagtctcaagat

SEQ ID NO: 296279 - DNA, 19 bp, Homo sapiens
  siRNA target sequence for PDZGEF1 (NM_014247.1,1790-1808).
gcctgtcagtggaacctta

SEQ ID NO: 296280 - DNA, 19 bp, Homo sapiens
  siRNA target sequence for PDZGEF1 (NM_014247.1,1794-1812).
gtcagtggaaccttatcat

SEQ ID NO: 296281 - DNA, 19 bp, Homo sapiens
  siRNA target sequence for PDZGEF1 (NM_014247.1,1816-1834).
gtaatcctgatttattgca

SEQ ID NO: 296282 - DNA, 19 bp, Homo sapiens
  siRNA target sequence for PDZGEF1 (NM_014247.1,1835-1853).
gtcacatcatcgcatttta

SEQ ID NO: 296283 - DNA, 19 bp, Homo sapiens
  siRNA target sequence for PDZGEF1 (NM_014247.1,1870-1888).
ctgacttgccagatcaagt

SEQ ID NO: 296284 - DNA, 19 bp, Homo sapiens
  siRNA target sequence for PDZGEF1 (NM_014247.1,1920-1938).
cgctacatcatgatcagta

SEQ ID NO: 296285 - DNA, 19 bp, Homo sapiens
  siRNA target sequence for PDZGEF1 (NM_014247.1,1976-1994).
cagggagtttgctgttact

SEQ ID NO: 296286 - DNA, 19 bp, Homo sapiens
  siRNA target sequence for PDZGEF1 (NM_014247.1,1993-2011).
ctgccaccccggatcaata

SEQ ID NO: 296287 - DNA, 19 bp, Homo sapiens
  siRNA target sequence for PDZGEF1 (NM_014247.1,1995-2013).
gccaccccggatcaatatt

SEQ ID NO: 296288 - DNA, 19 bp, Homo sapiens
  siRNA target sequence for PDZGEF1 (NM_014247.1,1997-2015).
caccccggatcaatattca

SEQ ID NO: 296289 - DNA, 19 bp, Homo sapiens
  siRNA target sequence for PDZGEF1 (NM_014247.1,1999-2017).
ccccggatcaatattcact

SEQ ID NO: 296290 - DNA, 19 bp, Homo sapiens
  siRNA target sequence for PDZGEF1 (NM_014247.1,2000-2018).
cccggatcaatattcacta

SEQ ID NO: 296291 - DNA, 19 bp, Homo sapiens
  siRNA target sequence for PDZGEF1 (NM_014247.1,2035-2053).
cacctgagggagtaatcaa

SEQ ID NO: 296292 - DNA, 19 bp, Homo sapiens
  siRNA target sequence for PDZGEF1 (NM_014247.1,2109-2127).
ggaaggtattatctgaaaa

SEQ ID NO: 296293 - DNA, 19 bp, Homo sapiens
  siRNA target sequence for PDZGEF1 (NM_014247.1,2232-2250).
cagctctctatgcgaaatt

SEQ ID NO: 296294 - DNA, 19 bp, Homo sapiens
  siRNA target sequence for PDZGEF1 (NM_014247.1,2234-2252).
gctctctatgcgaaatttt

SEQ ID NO: 296295 - DNA, 19 bp, Homo sapiens
  siRNA target sequence for PDZGEF1 (NM_014247.1,2239-2257).
ctatgcgaaattttgaact

SEQ ID NO: 296296 - DNA, 19 bp, Homo sapiens
  siRNA target sequence for PDZGEF1 (NM_014247.1,2267-2285).
cattgaacctactgaatat

SEQ ID NO: 296297 - DNA, 19 bp, Homo sapiens
  siRNA target sequence for PDZGEF1 (NM_014247.1,2289-2307).
gatgatttatttaaactca

SEQ ID NO: 296298 - DNA, 19 bp, Homo sapiens
  siRNA target sequence for PDZGEF1 (NM_014247.1,2530-2548).
gaacgacctgggagaaact

SEQ ID NO: 296299 - DNA, 19 bp, Homo sapiens
  siRNA target sequence for PDZGEF1 (NM_014247.1,2539-2557).
gggagaaacttcccaataa

SEQ ID NO: 296300 - DNA, 19 bp, Homo sapiens
  siRNA target sequence for PDZGEF1 (NM_014247.1,2540-2558).
ggagaaacttcccaataaa

SEQ ID NO: 296301 - DNA, 19 bp, Homo sapiens
  siRNA target sequence for PDZGEF1 (NM_014247.1,2561-2579).
cgaaaaactatttcaagat

SEQ ID NO: 296302 - DNA, 19 bp, Homo sapiens
  siRNA target sequence for PDZGEF1 (NM_014247.1,2609-2627).
catggcaaaatatcgtaat

SEQ ID NO: 296303 - DNA, 19 bp, Homo sapiens
  siRNA target sequence for PDZGEF1 (NM_014247.1,2633-2651).
caatagtcaaaatctacaa

SEQ ID NO: 296304 - DNA, 19 bp, Homo sapiens
  siRNA target sequence for PDZGEF1 (NM_014247.1,2736-2754).
gtcaattttgagaagctaa

SEQ ID NO: 296305 - DNA, 19 bp, Homo sapiens
  siRNA target sequence for PDZGEF1 (NM_014247.1,2756-2774).
gatgattgcaaaagaaatt

SEQ ID NO: 296306 - DNA, 19 bp, Homo sapiens
  siRNA target sequence for PDZGEF1 (NM_014247.1,2759-2777).
gattgcaaaagaaattcgt

SEQ ID NO: 296307 - DNA, 19 bp, Homo sapiens
  siRNA target sequence for PDZGEF1 (NM_014247.1,2862-2880).
ctcagccagggtagtacaa

SEQ ID NO: 296308 - DNA, 19 bp, Homo sapiens
  siRNA target sequence for PDZGEF1 (NM_014247.1,2902-2920).
ctcagacaggtggtcataa

SEQ ID NO: 296309 - DNA, 19 bp, Homo sapiens
  siRNA target sequence for PDZGEF1 (NM_014247.1,2927-2945).
ggtacgtcgtagttccttt

SEQ ID NO: 296310 - DNA, 19 bp, Homo sapiens
  siRNA target sequence for PDZGEF1 (NM_014247.1,2931-2949).
cgtcgtagttcctttctca

SEQ ID NO: 296311 - DNA, 19 bp, Homo sapiens
  siRNA target sequence for PDZGEF1 (NM_014247.1,2932-2950).
gtcgtagttcctttctcaa

SEQ ID NO: 296312 - DNA, 19 bp, Homo sapiens
  siRNA target sequence for PDZGEF1 (NM_014247.1,2976-2994).
caaatggctcgaaaagtga

SEQ ID NO: 296313 - DNA, 19 bp, Homo sapiens
  siRNA target sequence for PDZGEF1 (NM_014247.1,3073-3091).
ccaacacattgcctaagaa

SEQ ID NO: 296314 - DNA, 19 bp, Homo sapiens
  siRNA target sequence for PDZGEF1 (NM_014247.1,3074-3092).
caacacattgcctaagaat

SEQ ID NO: 296315 - DNA, 19 bp, Homo sapiens
  siRNA target sequence for PDZGEF1 (NM_014247.1,3196-3214).
caccagcacataaaatcaa

SEQ ID NO: 296316 - DNA, 19 bp, Homo sapiens
  siRNA target sequence for PDZGEF1 (NM_014247.1,3234-3252).
gccgtgtccctttatcctt

SEQ ID NO: 296317 - DNA, 19 bp, Homo sapiens
  siRNA target sequence for PDZGEF1 (NM_014247.1,3260-3278).
gaaagtgcccgtaaaggat

SEQ ID NO: 296318 - DNA, 19 bp, Homo sapiens
  siRNA target sequence for PDZGEF1 (NM_014247.1,3282-3300).
ccaccttttggcataaact

SEQ ID NO: 296319 - DNA, 19 bp, Homo sapiens
  siRNA target sequence for PDZGEF1 (NM_014247.1,3368-3386).
ggctgaagatacaatatca

SEQ ID NO: 296320 - DNA, 19 bp, Homo sapiens
  siRNA target sequence for PDZGEF1 (NM_014247.1,3463-3481).
gtggtactgtggataattt

SEQ ID NO: 296321 - DNA, 19 bp, Homo sapiens
  siRNA target sequence for PDZGEF1 (NM_014247.1,3508-3526).
cttcacgatccagtattgt

SEQ ID NO: 296322 - DNA, 19 bp, Homo sapiens
  siRNA target sequence for PDZGEF1 (NM_014247.1,3514-3532).
gatccagtattgttagcaa

SEQ ID NO: 296323 - DNA, 19 bp, Homo sapiens
  siRNA target sequence for PDZGEF1 (NM_014247.1,3591-3609).
gtcagcatcgtggaaacaa

SEQ ID NO: 296324 - DNA, 19 bp, Homo sapiens
  siRNA target sequence for PDZGEF1 (NM_014247.1,3632-3650).
gaggcggaccatgattgaa

SEQ ID NO: 296325 - DNA, 19 bp, Homo sapiens
  siRNA target sequence for PDZGEF1 (NM_014247.1,3688-3706).
ccgagggccgaggcttata

SEQ ID NO: 296326 - DNA, 19 bp, Homo sapiens
  siRNA target sequence for PDZGEF1 (NM_014247.1,3689-3707).
cgagggccgaggcttatat

SEQ ID NO: 296327 - DNA, 19 bp, Homo sapiens
  siRNA target sequence for PDZGEF1 (NM_014247.1,3692-3710).
gggccgaggcttatatgct

SEQ ID NO: 296328 - DNA, 19 bp, Homo sapiens
  siRNA target sequence for PDZGEF1 (NM_014247.1,3693-3711).
ggccgaggcttatatgcta

SEQ ID NO: 296329 - DNA, 19 bp, Homo sapiens
  siRNA target sequence for PDZGEF1 (NM_014247.1,3764-3782).
ggatcgcgcgtcacttgat

SEQ ID NO: 296330 - DNA, 19 bp, Homo sapiens
  siRNA target sequence for PDZGEF1 (NM_014247.1,3820-3838).
caagtggctcccatgataa

SEQ ID NO: 296331 - DNA, 19 bp, Homo sapiens
  siRNA target sequence for PDZGEF1 (NM_014247.1,3823-3841).
gtggctcccatgataatat

SEQ ID NO: 296332 - DNA, 19 bp, Homo sapiens
  siRNA target sequence for PDZGEF1 (NM_014247.1,3884-3902).
cgggcatactcactttgat

SEQ ID NO: 296333 - DNA, 19 bp, Homo sapiens
  siRNA target sequence for PDZGEF1 (NM_014247.1,3885-3903).
gggcatactcactttgatt

SEQ ID NO: 296334 - DNA, 19 bp, Homo sapiens
  siRNA target sequence for PDZGEF1 (NM_014247.1,3886-3904).
ggcatactcactttgatta

SEQ ID NO: 296335 - DNA, 19 bp, Homo sapiens
  siRNA target sequence for PDZGEF1 (NM_014247.1,3887-3905).
gcatactcactttgattat

SEQ ID NO: 296336 - DNA, 19 bp, Homo sapiens
  siRNA target sequence for PDZGEF1 (NM_014247.1,3888-3906).
catactcactttgattatt

SEQ ID NO: 296337 - DNA, 19 bp, Homo sapiens
  siRNA target sequence for PDZGEF1 (NM_014247.1,3937-3955).
gcagccatatggaccaaat

SEQ ID NO: 296338 - DNA, 19 bp, Homo sapiens
  siRNA target sequence for PDZGEF1 (NM_014247.1,3964-3982).
ctgatcatagcacaaagta

SEQ ID NO: 296339 - DNA, 19 bp, Homo sapiens
  siRNA target sequence for PDZGEF1 (NM_014247.1,3966-3984).
gatcatagcacaaagtata

SEQ ID NO: 296340 - DNA, 19 bp, Homo sapiens
  siRNA target sequence for PDZGEF1 (NM_014247.1,4000-4018).
gtagagagagccttgaaca

SEQ ID NO: 296341 - DNA, 19 bp, Homo sapiens
  siRNA target sequence for PDZGEF1 (NM_014247.1,4077-4095).
ggtgacacaggcacaataa

SEQ ID NO: 296342 - DNA, 19 bp, Homo sapiens
  siRNA target sequence for PDZGEF1 (NM_014247.1,4193-4211).
catagctgtggcatcaagt

SEQ ID NO: 296343 - DNA, 19 bp, Homo sapiens
  siRNA target sequence for PDZGEF1 (NM_014247.1,4197-4215).
gctgtggcatcaagtacta

SEQ ID NO: 296344 - DNA, 19 bp, Homo sapiens
  siRNA target sequence for PDZGEF1 (NM_014247.1,4269-4287).
cctcccggctacattggaa

SEQ ID NO: 296345 - DNA, 19 bp, Homo sapiens
  siRNA target sequence for PDZGEF1 (NM_014247.1,4270-4288).
ctcccggctacattggaat

SEQ ID NO: 296346 - DNA, 19 bp, Homo sapiens
  siRNA target sequence for PDZGEF1 (NM_014247.1,4280-4298).
cattggaattcccattact

SEQ ID NO: 296347 - DNA, 19 bp, Homo sapiens
  siRNA target sequence for PDZGEF2 (NM_016340.1,145-163).
ccagattgcgggttcagtt

SEQ ID NO: 296348 - DNA, 19 bp, Homo sapiens
  siRNA target sequence for PDZGEF2 (NM_016340.1,156-174).
gttcagttggcctttacca

SEQ ID NO: 296349 - DNA, 19 bp, Homo sapiens
  siRNA target sequence for PDZGEF2 (NM_016340.1,164-182).
ggcctttaccagagtttga

SEQ ID NO: 296350 - DNA, 19 bp, Homo sapiens
  siRNA target sequence for PDZGEF2 (NM_016340.1,165-183).
gcctttaccagagtttgat

SEQ ID NO: 296351 - DNA, 19 bp, Homo sapiens
  siRNA target sequence for PDZGEF2 (NM_016340.1,188-206).
gccagattcgactgattgt

SEQ ID NO: 296352 - DNA, 19 bp, Homo sapiens
  siRNA target sequence for PDZGEF2 (NM_016340.1,189-207).
ccagattcgactgattgta

SEQ ID NO: 296353 - DNA, 19 bp, Homo sapiens
  siRNA target sequence for PDZGEF2 (NM_016340.1,190-208).
cagattcgactgattgtat

SEQ ID NO: 296354 - DNA, 19 bp, Homo sapiens
  siRNA target sequence for PDZGEF2 (NM_016340.1,192-210).
gattcgactgattgtatat

SEQ ID NO: 296355 - DNA, 19 bp, Homo sapiens
  siRNA target sequence for PDZGEF2 (NM_016340.1,224-242).
gacgagggagaaatgtttt

SEQ ID NO: 296356 - DNA, 19 bp, Homo sapiens
  siRNA target sequence for PDZGEF2 (NM_016340.1,283-301).
gtatcggacttaaatacta

SEQ ID NO: 296357 - DNA, 19 bp, Homo sapiens
  siRNA target sequence for PDZGEF2 (NM_016340.1,287-305).
cggacttaaatactattta

SEQ ID NO: 296358 - DNA, 19 bp, Homo sapiens
  siRNA target sequence for PDZGEF2 (NM_016340.1,335-353).
caaatctcagggaacatca

SEQ ID NO: 296359 - DNA, 19 bp, Homo sapiens
  siRNA target sequence for PDZGEF2 (NM_016340.1,344-362).
gggaacatcagcttagatt

SEQ ID NO: 296360 - DNA, 19 bp, Homo sapiens
  siRNA target sequence for PDZGEF2 (NM_016340.1,349-367).
catcagcttagattaatgt

SEQ ID NO: 296361 - DNA, 19 bp, Homo sapiens
  siRNA target sequence for PDZGEF2 (NM_016340.1,370-388).
gcaagagcacgctatgaga

SEQ ID NO: 296362 - DNA, 19 bp, Homo sapiens
  siRNA target sequence for PDZGEF2 (NM_016340.1,374-392).
gagcacgctatgagagata

SEQ ID NO: 296363 - DNA, 19 bp, Homo sapiens
  siRNA target sequence for PDZGEF2 (NM_016340.1,395-413).
gtggcaatcaggttctctt

SEQ ID NO: 296364 - DNA, 19 bp, Homo sapiens
  siRNA target sequence for PDZGEF2 (NM_016340.1,432-450).
cagatgttggtatatccta

SEQ ID NO: 296365 - DNA, 19 bp, Homo sapiens
  siRNA target sequence for PDZGEF2 (NM_016340.1,490-508).
cctccttgcagttttggta

SEQ ID NO: 296366 - DNA, 19 bp, Homo sapiens
  siRNA target sequence for PDZGEF2 (NM_016340.1,529-547).
ggatgtgattgtcttgtat

SEQ ID NO: 296367 - DNA, 19 bp, Homo sapiens
  siRNA target sequence for PDZGEF2 (NM_016340.1,592-610).
gaagatagtattctacaaa

SEQ ID NO: 296368 - DNA, 19 bp, Homo sapiens
  siRNA target sequence for PDZGEF2 (NM_016340.1,624-642).
cagacaatcccgaagaaga

SEQ ID NO: 296369 - DNA, 19 bp, Homo sapiens
  siRNA target sequence for PDZGEF2 (NM_016340.1,664-682).
ggagagcgccaaaccatta

SEQ ID NO: 296370 - DNA, 19 bp, Homo sapiens
  siRNA target sequence for PDZGEF2 (NM_016340.1,669-687).
gcgccaaaccattactgat

SEQ ID NO: 296371 - DNA, 19 bp, Homo sapiens
  siRNA target sequence for PDZGEF2 (NM_016340.1,696-714).
ggttaacagctatctttct

SEQ ID NO: 296372 - DNA, 19 bp, Homo sapiens
  siRNA target sequence for PDZGEF2 (NM_016340.1,768-786).
gactcatgtgtcttctagt

SEQ ID NO: 296373 - DNA, 19 bp, Homo sapiens
  siRNA target sequence for PDZGEF2 (NM_016340.1,825-843).
cagtttatctgatatctat

SEQ ID NO: 296374 - DNA, 19 bp, Homo sapiens
  siRNA target sequence for PDZGEF2 (NM_016340.1,857-875).
gtgaggtaggagatgtaga

SEQ ID NO: 296375 - DNA, 19 bp, Homo sapiens
  siRNA target sequence for PDZGEF2 (NM_016340.1,862-880).
gtaggagatgtagatttga

SEQ ID NO: 296376 - DNA, 19 bp, Homo sapiens
  siRNA target sequence for PDZGEF2 (NM_016340.1,957-975).
gcaggggcgagatcttgtt

SEQ ID NO: 296377 - DNA, 19 bp, Homo sapiens
  siRNA target sequence for PDZGEF2 (NM_016340.1,1044-1062).
gcaccagctccctgcattt

SEQ ID NO: 296378 - DNA, 19 bp, Homo sapiens
  siRNA target sequence for PDZGEF2 (NM_016340.1,1162-1180).
cttgactcatggtatgtta

SEQ ID NO: 296379 - DNA, 19 bp, Homo sapiens
  siRNA target sequence for PDZGEF2 (NM_016340.1,1165-1183).
gactcatggtatgttattt

SEQ ID NO: 296380 - DNA, 19 bp, Homo sapiens
  siRNA target sequence for PDZGEF2 (NM_016340.1,1296-1314).
caggactaaagtagatgat

SEQ ID NO: 296381 - DNA, 19 bp, Homo sapiens
  siRNA target sequence for PDZGEF2 (NM_016340.1,1299-1317).
gactaaagtagatgattgt

SEQ ID NO: 296382 - DNA, 19 bp, Homo sapiens
  siRNA target sequence for PDZGEF2 (NM_016340.1,1333-1351).
gcccagcaagattattgga

SEQ ID NO: 296383 - DNA, 19 bp, Homo sapiens
  siRNA target sequence for PDZGEF2 (NM_016340.1,1338-1356).
gcaagattattggagaatt

SEQ ID NO: 296384 - DNA, 19 bp, Homo sapiens
  siRNA target sequence for PDZGEF2 (NM_016340.1,1339-1357).
caagattattggagaattt

SEQ ID NO: 296385 - DNA, 19 bp, Homo sapiens
  siRNA target sequence for PDZGEF2 (NM_016340.1,1342-1360).
gattattggagaattttaa

SEQ ID NO: 296386 - DNA, 19 bp, Homo sapiens
  siRNA target sequence for PDZGEF2 (NM_016340.1,1398-1416).
gggagaaattgttatggta

SEQ ID NO: 296387 - DNA, 19 bp, Homo sapiens
  siRNA target sequence for PDZGEF2 (NM_016340.1,1481-1499).
ctgagcgtctcataatgca

SEQ ID NO: 296388 - DNA, 19 bp, Homo sapiens
  siRNA target sequence for PDZGEF2 (NM_016340.1,1485-1503).
gcgtctcataatgcattta

SEQ ID NO: 296389 - DNA, 19 bp, Homo sapiens
  siRNA target sequence for PDZGEF2 (NM_016340.1,1486-1504).
cgtctcataatgcatttaa

SEQ ID NO: 296390 - DNA, 19 bp, Homo sapiens
  siRNA target sequence for PDZGEF2 (NM_016340.1,1487-1505).
gtctcataatgcatttaat

SEQ ID NO: 296391 - DNA, 19 bp, Homo sapiens
  siRNA target sequence for PDZGEF2 (NM_016340.1,1518-1536).
catcgtggatccaacttat

SEQ ID NO: 296392 - DNA, 19 bp, Homo sapiens
  siRNA target sequence for PDZGEF2 (NM_016340.1,1521-1539).
cgtggatccaacttatata

SEQ ID NO: 296393 - DNA, 19 bp, Homo sapiens
  siRNA target sequence for PDZGEF2 (NM_016340.1,1528-1546).
ccaacttatatagaagatt

SEQ ID NO: 296394 - DNA, 19 bp, Homo sapiens
  siRNA target sequence for PDZGEF2 (NM_016340.1,1529-1547).
caacttatatagaagattt

SEQ ID NO: 296395 - DNA, 19 bp, Homo sapiens
  siRNA target sequence for PDZGEF2 (NM_016340.1,1556-1574).
cttacaggacatttcttga

SEQ ID NO: 296396 - DNA, 19 bp, Homo sapiens
  siRNA target sequence for PDZGEF2 (NM_016340.1,1584-1602).
ggatgttgggatcaaacta

SEQ ID NO: 296397 - DNA, 19 bp, Homo sapiens
  siRNA target sequence for PDZGEF2 (NM_016340.1,1585-1603).
gatgttgggatcaaactat

SEQ ID NO: 296398 - DNA, 19 bp, Homo sapiens
  siRNA target sequence for PDZGEF2 (NM_016340.1,1591-1609).
gggatcaaactattggaat

SEQ ID NO: 296399 - DNA, 19 bp, Homo sapiens
  siRNA target sequence for PDZGEF2 (NM_016340.1,1617-1635).
gatcgacagcttaagagat

SEQ ID NO: 296400 - DNA, 19 bp, Homo sapiens
  siRNA target sequence for PDZGEF2 (NM_016340.1,1638-1656).
ggtgacacggattgtatta

SEQ ID NO: 296401 - DNA, 19 bp, Homo sapiens
  siRNA target sequence for PDZGEF2 (NM_016340.1,1641-1659).
gacacggattgtattatta

SEQ ID NO: 296402 - DNA, 19 bp, Homo sapiens
  siRNA target sequence for PDZGEF2 (NM_016340.1,1756-1774).
ggtcatctccggttattga

SEQ ID NO: 296403 - DNA, 19 bp, Homo sapiens
  siRNA target sequence for PDZGEF2 (NM_016340.1,1757-1775).
gtcatctccggttattgaa

SEQ ID NO: 296404 - DNA, 19 bp, Homo sapiens
  siRNA target sequence for PDZGEF2 (NM_016340.1,1759-1777).
catctccggttattgaata

SEQ ID NO: 296405 - DNA, 19 bp, Homo sapiens
  siRNA target sequence for PDZGEF2 (NM_016340.1,1830-1848).
ccgcgagtcccctctacaa

SEQ ID NO: 296406 - DNA, 19 bp, Homo sapiens
  siRNA target sequence for PDZGEF2 (NM_016340.1,1966-1984).
ggacaaaactttgagaata

SEQ ID NO: 296407 - DNA, 19 bp, Homo sapiens
  siRNA target sequence for PDZGEF2 (NM_016340.1,2002-2020).
gttgaaattttgaggaata

SEQ ID NO: 296408 - DNA, 19 bp, Homo sapiens
  siRNA target sequence for PDZGEF2 (NM_016340.1,2013-2031).
gaggaataatactcatctt

SEQ ID NO: 296409 - DNA, 19 bp, Homo sapiens
  siRNA target sequence for PDZGEF2 (NM_016340.1,2157-2175).
gcatgtgccaggagatatt

SEQ ID NO: 296410 - DNA, 19 bp, Homo sapiens
  siRNA target sequence for PDZGEF2 (NM_016340.1,2250-2268).
gaagattttggataaaaca

SEQ ID NO: 296411 - DNA, 19 bp, Homo sapiens
  siRNA target sequence for PDZGEF2 (NM_016340.1,2280-2298).
cttgcctccaaagctattt

SEQ ID NO: 296412 - DNA, 19 bp, Homo sapiens
  siRNA target sequence for PDZGEF2 (NM_016340.1,2285-2303).
ctccaaagctatttagtga

SEQ ID NO: 296413 - DNA, 19 bp, Homo sapiens
  siRNA target sequence for PDZGEF2 (NM_016340.1,2348-2366).
ggcactgtaggcatagtct

SEQ ID NO: 296414 - DNA, 19 bp, Homo sapiens
  siRNA target sequence for PDZGEF2 (NM_016340.1,2357-2375).
ggcatagtctggctataat

SEQ ID NO: 296415 - DNA, 19 bp, Homo sapiens
  siRNA target sequence for PDZGEF2 (NM_016340.1,2427-2445).
caccagtatgttggatttt

SEQ ID NO: 296416 - DNA, 19 bp, Homo sapiens
  siRNA target sequence for PDZGEF2 (NM_016340.1,2458-2476).
gatatccctgatcaagtta

SEQ ID NO: 296417 - DNA, 19 bp, Homo sapiens
  siRNA target sequence for PDZGEF2 (NM_016340.1,2463-2481).
ccctgatcaagttataaga

SEQ ID NO: 296418 - DNA, 19 bp, Homo sapiens
  siRNA target sequence for PDZGEF2 (NM_016340.1,2465-2483).
ctgatcaagttataagagt

SEQ ID NO: 296419 - DNA, 19 bp, Homo sapiens
  siRNA target sequence for PDZGEF2 (NM_016340.1,2497-2515).
cagcaaagttgctacatta

SEQ ID NO: 296420 - DNA, 19 bp, Homo sapiens
  siRNA target sequence for PDZGEF2 (NM_016340.1,2579-2597).
ccggtgcatccgacacata

SEQ ID NO: 296421 - DNA, 19 bp, Homo sapiens
  siRNA target sequence for PDZGEF2 (NM_016340.1,2580-2598).
cggtgcatccgacacatat

SEQ ID NO: 296422 - DNA, 19 bp, Homo sapiens
  siRNA target sequence for PDZGEF2 (NM_016340.1,2624-2642).
ctgagggtgtcataaaaca

SEQ ID NO: 296423 - DNA, 19 bp, Homo sapiens
  siRNA target sequence for PDZGEF2 (NM_016340.1,2654-2672).
cagatcagttctccaaatt

SEQ ID NO: 296424 - DNA, 19 bp, Homo sapiens
  siRNA target sequence for PDZGEF2 (NM_016340.1,2664-2682).
ctccaaattagctgataga

SEQ ID NO: 296425 - DNA, 19 bp, Homo sapiens
  siRNA target sequence for PDZGEF2 (NM_016340.1,2689-2707).
ctcaatggaaggtattact

SEQ ID NO: 296426 - DNA, 19 bp, Homo sapiens
  siRNA target sequence for PDZGEF2 (NM_016340.1,2691-2709).
caatggaaggtattactta

SEQ ID NO: 296427 - DNA, 19 bp, Homo sapiens
  siRNA target sequence for PDZGEF2 (NM_016340.1,2749-2767).
gatgctcaagaactagtta

SEQ ID NO: 296428 - DNA, 19 bp, Homo sapiens
  siRNA target sequence for PDZGEF2 (NM_016340.1,2823-2841).
gtcaatgagggactttgat

SEQ ID NO: 296429 - DNA, 19 bp, Homo sapiens
  siRNA target sequence for PDZGEF2 (NM_016340.1,2825-2843).
caatgagggactttgattt

SEQ ID NO: 296430 - DNA, 19 bp, Homo sapiens
  siRNA target sequence for PDZGEF2 (NM_016340.1,2833-2851).
gactttgatttgtttcgta

SEQ ID NO: 296431 - DNA, 19 bp, Homo sapiens
  siRNA target sequence for PDZGEF2 (NM_016340.1,2835-2853).
ctttgatttgtttcgtaat

SEQ ID NO: 296432 - DNA, 19 bp, Homo sapiens
  siRNA target sequence for PDZGEF2 (NM_016340.1,2991-3009).
gctcaaacgaatgaagatt

SEQ ID NO: 296433 - DNA, 19 bp, Homo sapiens
  siRNA target sequence for PDZGEF2 (NM_016340.1,2992-3010).
ctcaaacgaatgaagatta

SEQ ID NO: 296434 - DNA, 19 bp, Homo sapiens
  siRNA target sequence for PDZGEF2 (NM_016340.1,3046-3064).
gaatgtaagaacttcaatt

SEQ ID NO: 296435 - DNA, 19 bp, Homo sapiens
  siRNA target sequence for PDZGEF2 (NM_016340.1,3050-3068).
gtaagaacttcaattccat

SEQ ID NO: 296436 - DNA, 19 bp, Homo sapiens
  siRNA target sequence for PDZGEF2 (NM_016340.1,3126-3144).
ggaaaagttaccaagcaaa

SEQ ID NO: 296437 - DNA, 19 bp, Homo sapiens
  siRNA target sequence for PDZGEF2 (NM_016340.1,3137-3155).
caagcaaatacgagaaaca

SEQ ID NO: 296438 - DNA, 19 bp, Homo sapiens
  siRNA target sequence for PDZGEF2 (NM_016340.1,3140-3158).
gcaaatacgagaaacatct

SEQ ID NO: 296439 - DNA, 19 bp, Homo sapiens
  siRNA target sequence for PDZGEF2 (NM_016340.1,3141-3159).
caaatacgagaaacatctt

SEQ ID NO: 296440 - DNA, 19 bp, Homo sapiens
  siRNA target sequence for PDZGEF2 (NM_016340.1,3174-3192).
catttttgatccatctaga

SEQ ID NO: 296441 - DNA, 19 bp, Homo sapiens
  siRNA target sequence for PDZGEF2 (NM_016340.1,3262-3280).
gttgtcaagaaagatatga

SEQ ID NO: 296442 - DNA, 19 bp, Homo sapiens
  siRNA target sequence for PDZGEF2 (NM_016340.1,3303-3321).
ctccaaagtagatggttta

SEQ ID NO: 296443 - DNA, 19 bp, Homo sapiens
  siRNA target sequence for PDZGEF2 (NM_016340.1,3363-3381).
ccaagttgttcgaatgact

SEQ ID NO: 296444 - DNA, 19 bp, Homo sapiens
  siRNA target sequence for PDZGEF2 (NM_016340.1,3364-3382).
caagttgttcgaatgactt

SEQ ID NO: 296445 - DNA, 19 bp, Homo sapiens
  siRNA target sequence for PDZGEF2 (NM_016340.1,3374-3392).
gaatgacttctgctaacat

SEQ ID NO: 296446 - DNA, 19 bp, Homo sapiens
  siRNA target sequence for PDZGEF2 (NM_016340.1,3446-3464).
caaacatgctggatgttca

SEQ ID NO: 296447 - DNA, 19 bp, Homo sapiens
  siRNA target sequence for PDZGEF2 (NM_016340.1,3491-3509).
gccgcagctctctgcttaa

SEQ ID NO: 296448 - DNA, 19 bp, Homo sapiens
  siRNA target sequence for PDZGEF2 (NM_016340.1,3505-3523).
cttaatgccaagaagctat

SEQ ID NO: 296449 - DNA, 19 bp, Homo sapiens
  siRNA target sequence for PDZGEF2 (NM_016340.1,3546-3564).
gaaggtgaagcagtatctt

SEQ ID NO: 296450 - DNA, 19 bp, Homo sapiens
  siRNA target sequence for PDZGEF2 (NM_016340.1,3635-3653).
gtaccttgaccaagaattt

SEQ ID NO: 296451 - DNA, 19 bp, Homo sapiens
  siRNA target sequence for PL6 (NM_007024.4,1042-1060).
ctccagttgggtatatctt

SEQ ID NO: 296452 - DNA, 19 bp, Homo sapiens
  siRNA target sequence for PL6 (NM_007024.4,1452-1470).
ccccagaatccagtctaat

SEQ ID NO: 296453 - DNA, 19 bp, Homo sapiens
  siRNA target sequence for PL6 (NM_007024.4,1454-1472).
ccagaatccagtctaatca

SEQ ID NO: 296454 - DNA, 19 bp, Homo sapiens
  siRNA target sequence for RALGDS (NM_006266.1,294-312).
cgctggctcgggtatgaga

SEQ ID NO: 296455 - DNA, 19 bp, Homo sapiens
  siRNA target sequence for RALGDS (NM_006266.1,295-313).
gctggctcgggtatgagaa

SEQ ID NO: 296456 - DNA, 19 bp, Homo sapiens
  siRNA target sequence for RALGDS (NM_006266.1,300-318).
ctcgggtatgagaatgagt

SEQ ID NO: 296457 - DNA, 19 bp, Homo sapiens
  siRNA target sequence for RALGDS (NM_006266.1,315-333).
gagtcggccctgaaccttt

SEQ ID NO: 296458 - DNA, 19 bp, Homo sapiens
  siRNA target sequence for RALGDS (NM_006266.1,317-335).
gtcggccctgaacctttat

SEQ ID NO: 296459 - DNA, 19 bp, Homo sapiens
  siRNA target sequence for RALGDS (NM_006266.1,319-337).
cggccctgaacctttatga

SEQ ID NO: 296460 - DNA, 19 bp, Homo sapiens
  siRNA target sequence for RALGDS (NM_006266.1,494-512).
caaaaggtacggtagatgt

SEQ ID NO: 296461 - DNA, 19 bp, Homo sapiens
  siRNA target sequence for RALGDS (NM_006266.1,519-537).
ctcacggcctcctctagat

SEQ ID NO: 296462 - DNA, 19 bp, Homo sapiens
  siRNA target sequence for RALGDS (NM_006266.1,574-592).
gaccccaggaccaacttaa

SEQ ID NO: 296463 - DNA, 19 bp, Homo sapiens
  siRNA target sequence for RALGDS (NM_006266.1,632-650).
gtactcggaggatttctgt

SEQ ID NO: 296464 - DNA, 19 bp, Homo sapiens
  siRNA target sequence for RALGDS (NM_006266.1,688-706).
cctacgtgcagctcaacat

SEQ ID NO: 296465 - DNA, 19 bp, Homo sapiens
  siRNA target sequence for RALGDS (NM_006266.1,801-819).
gtgccagctctaaaaccaa

SEQ ID NO: 296466 - DNA, 19 bp, Homo sapiens
  siRNA target sequence for RALGDS (NM_006266.1,913-931).
caggttcagagctagaagt

SEQ ID NO: 296467 - DNA, 19 bp, Homo sapiens
  siRNA target sequence for RALGDS (NM_006266.1,1035-1053).
gatccagctccctcacaaa

SEQ ID NO: 296468 - DNA, 19 bp, Homo sapiens
  siRNA target sequence for RALGDS (NM_006266.1,1255-1273).
ggtcccagcgggacaagaa

SEQ ID NO: 296469 - DNA, 19 bp, Homo sapiens
  siRNA target sequence for RALGDS (NM_006266.1,1429-1447).
gccggatcctcaagaactt

SEQ ID NO: 296470 - DNA, 19 bp, Homo sapiens
  siRNA target sequence for RALGDS (NM_006266.1,1442-1460).
gaacttctcgtcactgtat

SEQ ID NO: 296471 - DNA, 19 bp, Homo sapiens
  siRNA target sequence for RALGDS (NM_006266.1,1534-1552).
gtttccggatctttcagaa

SEQ ID NO: 296472 - DNA, 19 bp, Homo sapiens
  siRNA target sequence for RALGDS (NM_006266.1,1572-1590).
gatgagaacaactactcat

SEQ ID NO: 296473 - DNA, 19 bp, Homo sapiens
  siRNA target sequence for RALGDS (NM_006266.1,1575-1593).
gagaacaactactcattga

SEQ ID NO: 296474 - DNA, 19 bp, Homo sapiens
  siRNA target sequence for RALGDS (NM_006266.1,1749-1767).
gccatgaaggactatctgt

SEQ ID NO: 296475 - DNA, 19 bp, Homo sapiens
  siRNA target sequence for RALGDS (NM_006266.1,1750-1768).
ccatgaaggactatctgta

SEQ ID NO: 296476 - DNA, 19 bp, Homo sapiens
  siRNA target sequence for RALGDS (NM_006266.1,2161-2179).
ccgacgtggaggagatcaa

SEQ ID NO: 296477 - DNA, 19 bp, Homo sapiens
  siRNA target sequence for RALGDS (NM_006266.1,2397-2415).
gtgggcgactgctgtatca

SEQ ID NO: 296478 - DNA, 19 bp, Homo sapiens
  siRNA target sequence for RALGDS (NM_006266.1,2433-2451).
gtggacaatggcaacatgt

SEQ ID NO: 296479 - DNA, 19 bp, Homo sapiens
  siRNA target sequence for RALGPS1A (NM_014636.1,878-896).
gaatctatcttctggattt

SEQ ID NO: 296480 - DNA, 19 bp, Homo sapiens
  siRNA target sequence for RALGPS1A (NM_014636.1,892-910).
gatttaatctacattgatt

SEQ ID NO: 296481 - DNA, 19 bp, Homo sapiens
  siRNA target sequence for RALGPS1A (NM_014636.1,903-921).
cattgattctgcatatcct

SEQ ID NO: 296482 - DNA, 19 bp, Homo sapiens
  siRNA target sequence for RALGPS1A (NM_014636.1,929-947).
gcagtatcatggaaaatga

SEQ ID NO: 296483 - DNA, 19 bp, Homo sapiens
  siRNA target sequence for RALGPS1A (NM_014636.1,1053-1071).
gaagtccgtacgctacatt

SEQ ID NO: 296484 - DNA, 19 bp, Homo sapiens
  siRNA target sequence for RALGPS1A (NM_014636.1,1056-1074).
gtccgtacgctacattgaa

SEQ ID NO: 296485 - DNA, 19 bp, Homo sapiens
  siRNA target sequence for RALGPS1A (NM_014636.1,1058-1076).
ccgtacgctacattgaaga

SEQ ID NO: 296486 - DNA, 19 bp, Homo sapiens
  siRNA target sequence for RALGPS1A (NM_014636.1,1096-1114).
gacgacaactacaaactgt

SEQ ID NO: 296487 - DNA, 19 bp, Homo sapiens
  siRNA target sequence for RALGPS1A (NM_014636.1,1722-1740).
cacacctggcaaaaaggtt

SEQ ID NO: 296488 - DNA, 19 bp, Homo sapiens
  siRNA target sequence for RALGPS1A (NM_014636.1,1727-1745).
ctggcaaaaaggtttccat

SEQ ID NO: 296489 - DNA, 19 bp, Homo sapiens
  siRNA target sequence for RALGPS1A (NM_014636.1,1777-1795).
cccgagcacccagatatct

SEQ ID NO: 296490 - DNA, 19 bp, Homo sapiens
  siRNA target sequence for RALGPS1A (NM_014636.1,1778-1796).
ccgagcacccagatatctt

SEQ ID NO: 296491 - DNA, 19 bp, Homo sapiens
  siRNA target sequence for RALGPS1A (NM_014636.1,1800-1818).
gctgaacaaccctgacaaa

SEQ ID NO: 296492 - DNA, 19 bp, Homo sapiens
  siRNA target sequence for RALGPS1A (NM_014636.1,1811-1829).
ctgacaaaggcaatgttta

SEQ ID NO: 296493 - DNA, 19 bp, Homo sapiens
  siRNA target sequence for RALGPS1A (NM_014636.1,1839-1857).
gactggttcccgatttcat

SEQ ID NO: 296494 - DNA, 19 bp, Homo sapiens
  siRNA target sequence for RALGPS1A (NM_014636.1,1844-1862).
gttcccgatttcatgcaat

SEQ ID NO: 296495 - DNA, 19 bp, Homo sapiens
  siRNA target sequence for RALGPS1A (NM_014636.1,1847-1865).
cccgatttcatgcaatact

SEQ ID NO: 296496 - DNA, 19 bp, Homo sapiens
  siRNA target sequence for RALGPS1A (NM_014636.1,1849-1867).
cgatttcatgcaatactgt

SEQ ID NO: 296497 - DNA, 19 bp, Homo sapiens
  siRNA target sequence for RALGPS1A (NM_014636.1,1866-1884).
gtggcacaagcatttggat

SEQ ID NO: 296498 - DNA, 19 bp, Homo sapiens
  siRNA target sequence for RALGPS1A (NM_014636.1,1909-1927).
caggtacctgcaaacctta

SEQ ID NO: 296499 - DNA, 19 bp, Homo sapiens
  siRNA target sequence for RALGPS1A (NM_014636.1,1912-1930).
gtacctgcaaaccttatgt

SEQ ID NO: 296500 - DNA, 19 bp, Homo sapiens
  siRNA target sequence for RALGPS1A (NM_014636.1,1915-1933).
cctgcaaaccttatgtcat

SEQ ID NO: 296501 - DNA, 19 bp, Homo sapiens
  siRNA target sequence for RALGPS1A (NM_014636.1,1919-1937).
caaaccttatgtcatttga

SEQ ID NO: 296502 - DNA, 19 bp, Homo sapiens
  siRNA target sequence for RASGRF2 (NM_006909.1,274-292).
gcgctggacaagcagtatt

SEQ ID NO: 296503 - DNA, 19 bp, Homo sapiens
  siRNA target sequence for RASGRF2 (NM_006909.1,282-300).
caagcagtattactttact

SEQ ID NO: 296504 - DNA, 19 bp, Homo sapiens
  siRNA target sequence for RASGRF2 (NM_006909.1,432-450).
gcagaagtacattcatcta

SEQ ID NO: 296505 - DNA, 19 bp, Homo sapiens
  siRNA target sequence for RASGRF2 (NM_006909.1,456-474).
gatcgtagagacagaaaaa

SEQ ID NO: 296506 - DNA, 19 bp, Homo sapiens
  siRNA target sequence for RASGRF2 (NM_006909.1,459-477).
cgtagagacagaaaaaatt

SEQ ID NO: 296507 - DNA, 19 bp, Homo sapiens
  siRNA target sequence for RASGRF2 (NM_006909.1,486-504).
ccaactccgacatcaactt

SEQ ID NO: 296508 - DNA, 19 bp, Homo sapiens
  siRNA target sequence for RASGRF2 (NM_006909.1,520-538).
gaaatcgaaaggcttaaat

SEQ ID NO: 296509 - DNA, 19 bp, Homo sapiens
  siRNA target sequence for RASGRF2 (NM_006909.1,530-548).
ggcttaaatcagagattat

SEQ ID NO: 296510 - DNA, 19 bp, Homo sapiens
  siRNA target sequence for RASGRF2 (NM_006909.1,531-549).
gcttaaatcagagattatt

SEQ ID NO: 296511 - DNA, 19 bp, Homo sapiens
  siRNA target sequence for RASGRF2 (NM_006909.1,539-557).
cagagattattgctcttaa

SEQ ID NO: 296512 - DNA, 19 bp, Homo sapiens
  siRNA target sequence for RASGRF2 (NM_006909.1,541-559).
gagattattgctcttaata

SEQ ID NO: 296513 - DNA, 19 bp, Homo sapiens
  siRNA target sequence for RASGRF2 (NM_006909.1,571-589).
cgaatgcgaccttaccaaa

SEQ ID NO: 296514 - DNA, 19 bp, Homo sapiens
  siRNA target sequence for RASGRF2 (NM_006909.1,681-699).
catcgtgcaggattacatt

SEQ ID NO: 296515 - DNA, 19 bp, Homo sapiens
  siRNA target sequence for RASGRF2 (NM_006909.1,704-722).
ctcctcatgctgaaagtat

SEQ ID NO: 296516 - DNA, 19 bp, Homo sapiens
  siRNA target sequence for RASGRF2 (NM_006909.1,861-879).
cgacgtcagcagtattttt

SEQ ID NO: 296517 - DNA, 19 bp, Homo sapiens
  siRNA target sequence for RASGRF2 (NM_006909.1,928-946).
ctaaaggcaaggatagcaa

SEQ ID NO: 296518 - DNA, 19 bp, Homo sapiens
  siRNA target sequence for RASGRF2 (NM_006909.1,943-961).
gcaaactggcccactttaa

SEQ ID NO: 296519 - DNA, 19 bp, Homo sapiens
  siRNA target sequence for RASGRF2 (NM_006909.1,944-962).
caaactggcccactttaat

SEQ ID NO: 296520 - DNA, 19 bp, Homo sapiens
  siRNA target sequence for RASGRF2 (NM_006909.1,951-969).
gcccactttaattttagct

SEQ ID NO: 296521 - DNA, 19 bp, Homo sapiens
  siRNA target sequence for RASGRF2 (NM_006909.1,987-1005).
gctccccatgctgaacatt

SEQ ID NO: 296522 - DNA, 19 bp, Homo sapiens
  siRNA target sequence for RASGRF2 (NM_006909.1,1041-1059).
gcaagttctcgccaattgt

SEQ ID NO: 296523 - DNA, 19 bp, Homo sapiens
  siRNA target sequence for RASGRF2 (NM_006909.1,1048-1066).
ctcgccaattgtaagcaaa

SEQ ID NO: 296524 - DNA, 19 bp, Homo sapiens
  siRNA target sequence for RASGRF2 (NM_006909.1,1058-1076).
gtaagcaaaacagagattt

SEQ ID NO: 296525 - DNA, 19 bp, Homo sapiens
  siRNA target sequence for RASGRF2 (NM_006909.1,1078-1096).
gacaaactcttaaaacagt

SEQ ID NO: 296526 - DNA, 19 bp, Homo sapiens
  siRNA target sequence for RASGRF2 (NM_006909.1,1080-1098).
caaactcttaaaacagtat

SEQ ID NO: 296527 - DNA, 19 bp, Homo sapiens
  siRNA target sequence for RASGRF2 (NM_006909.1,1124-1142).
ggatgctggagacattctt

SEQ ID NO: 296528 - DNA, 19 bp, Homo sapiens
  siRNA target sequence for RASGRF2 (NM_006909.1,1155-1173).
gtttcagatccccagatat

SEQ ID NO: 296529 - DNA, 19 bp, Homo sapiens
  siRNA target sequence for RASGRF2 (NM_006909.1,1159-1177).
cagatccccagatatatca

SEQ ID NO: 296530 - DNA, 19 bp, Homo sapiens
  siRNA target sequence for RASGRF2 (NM_006909.1,1239-1257).
gtttgccaaatcaaagcta

SEQ ID NO: 296531 - DNA, 19 bp, Homo sapiens
  siRNA target sequence for RASGRF2 (NM_006909.1,1258-1276).
gaggaactatccagagtaa

SEQ ID NO: 296532 - DNA, 19 bp, Homo sapiens
  siRNA target sequence for RASGRF2 (NM_006909.1,1290-1308).
cagcgacactgaaaacata

SEQ ID NO: 296533 - DNA, 19 bp, Homo sapiens
  siRNA target sequence for RASGRF2 (NM_006909.1,1318-1336).
cttgccatcgaaagaatga

SEQ ID NO: 296534 - DNA, 19 bp, Homo sapiens
  siRNA target sequence for RASGRF2 (NM_006909.1,1385-1403).
gccaaggttctcttattca

SEQ ID NO: 296535 - DNA, 19 bp, Homo sapiens
  siRNA target sequence for RASGRF2 (NM_006909.1,1413-1431).
cgttgagagggggaaactt

SEQ ID NO: 296536 - DNA, 19 bp, Homo sapiens
  siRNA target sequence for RASGRF2 (NM_006909.1,1414-1432).
gttgagagggggaaactta

SEQ ID NO: 296537 - DNA, 19 bp, Homo sapiens
  siRNA target sequence for RASGRF2 (NM_006909.1,1417-1435).
gagagggggaaacttagta

SEQ ID NO: 296538 - DNA, 19 bp, Homo sapiens
  siRNA target sequence for RASGRF2 (NM_006909.1,1419-1437).
gagggggaaacttagtaaa

SEQ ID NO: 296539 - DNA, 19 bp, Homo sapiens
  siRNA target sequence for RASGRF2 (NM_006909.1,1422-1440).
ggggaaacttagtaaagtt

SEQ ID NO: 296540 - DNA, 19 bp, Homo sapiens
  siRNA target sequence for RASGRF2 (NM_006909.1,1441-1459).
cgcctgggttcgttgtctt

SEQ ID NO: 296541 - DNA, 19 bp, Homo sapiens
  siRNA target sequence for RASGRF2 (NM_006909.1,1442-1460).
gcctgggttcgttgtcttt

SEQ ID NO: 296542 - DNA, 19 bp, Homo sapiens
  siRNA target sequence for RASGRF2 (NM_006909.1,1444-1462).
ctgggttcgttgtctttga

SEQ ID NO: 296543 - DNA, 19 bp, Homo sapiens
  siRNA target sequence for RASGRF2 (NM_006909.1,1474-1492).
gagagacaatgcttcttat

SEQ ID NO: 296544 - DNA, 19 bp, Homo sapiens
  siRNA target sequence for RASGRF2 (NM_006909.1,1480-1498).
caatgcttcttatttacaa

SEQ ID NO: 296545 - DNA, 19 bp, Homo sapiens
  siRNA target sequence for RASGRF2 (NM_006909.1,1555-1573).
ggtggggttctgtctctaa

SEQ ID NO: 296546 - DNA, 19 bp, Homo sapiens
  siRNA target sequence for RASGRF2 (NM_006909.1,1561-1579).
gttctgtctctaatagact

SEQ ID NO: 296547 - DNA, 19 bp, Homo sapiens
  siRNA target sequence for RASGRF2 (NM_006909.1,1570-1588).
ctaatagactgcacattga

SEQ ID NO: 296548 - DNA, 19 bp, Homo sapiens
  siRNA target sequence for RASGRF2 (NM_006909.1,1604-1622).
caagcgatgatgactctaa

SEQ ID NO: 296549 - DNA, 19 bp, Homo sapiens
  siRNA target sequence for RASGRF2 (NM_006909.1,1608-1626).
cgatgatgactctaaaggt

SEQ ID NO: 296550 - DNA, 19 bp, Homo sapiens
  siRNA target sequence for RASGRF2 (NM_006909.1,1609-1627).
gatgatgactctaaaggtt

SEQ ID NO: 296551 - DNA, 19 bp, Homo sapiens
  siRNA target sequence for RASGRF2 (NM_006909.1,1638-1656).
gtttgggcacctggatttt

SEQ ID NO: 296552 - DNA, 19 bp, Homo sapiens
  siRNA target sequence for RASGRF2 (NM_006909.1,1642-1660).
gggcacctggattttaaaa

SEQ ID NO: 296553 - DNA, 19 bp, Homo sapiens
  siRNA target sequence for RASGRF2 (NM_006909.1,1685-1703).
ccgccttcactgttgtctt

SEQ ID NO: 296554 - DNA, 19 bp, Homo sapiens
  siRNA target sequence for RASGRF2 (NM_006909.1,1751-1769).
gtcagtgtgtggacaatat

SEQ ID NO: 296555 - DNA, 19 bp, Homo sapiens
  siRNA target sequence for RASGRF2 (NM_006909.1,1755-1773).
gtgtgtggacaatatacga

SEQ ID NO: 296556 - DNA, 19 bp, Homo sapiens
  siRNA target sequence for RASGRF2 (NM_006909.1,1761-1779).
ggacaatatacgatgtaat

SEQ ID NO: 296557 - DNA, 19 bp, Homo sapiens
  siRNA target sequence for RASGRF2 (NM_006909.1,1764-1782).
caatatacgatgtaatggt

SEQ ID NO: 296558 - DNA, 19 bp, Homo sapiens
  siRNA target sequence for RASGRF2 (NM_006909.1,1771-1789).
cgatgtaatggtttaatga

SEQ ID NO: 296559 - DNA, 19 bp, Homo sapiens
  siRNA target sequence for RASGRF2 (NM_006909.1,1775-1793).
gtaatggtttaatgactat

SEQ ID NO: 296560 - DNA, 19 bp, Homo sapiens
  siRNA target sequence for RASGRF2 (NM_006909.1,1818-1836).
cactgtgccacatatgatt

SEQ ID NO: 296561 - DNA, 19 bp, Homo sapiens
  siRNA target sequence for RASGRF2 (NM_006909.1,1820-1838).
ctgtgccacatatgattaa

SEQ ID NO: 296562 - DNA, 19 bp, Homo sapiens
  siRNA target sequence for RASGRF2 (NM_006909.1,1822-1840).
gtgccacatatgattaagt

SEQ ID NO: 296563 - DNA, 19 bp, Homo sapiens
  siRNA target sequence for RASGRF2 (NM_006909.1,1824-1842).
gccacatatgattaagtct

SEQ ID NO: 296564 - DNA, 19 bp, Homo sapiens
  siRNA target sequence for RASGRF2 (NM_006909.1,1839-1857).
gtctgatgcccgtcttcat

SEQ ID NO: 296565 - DNA, 19 bp, Homo sapiens
  siRNA target sequence for RASGRF2 (NM_006909.1,1841-1859).
ctgatgcccgtcttcataa

SEQ ID NO: 296566 - DNA, 19 bp, Homo sapiens
  siRNA target sequence for RASGRF2 (NM_006909.1,1861-1879).
gacgacactgacatttgct

SEQ ID NO: 296567 - DNA, 19 bp, Homo sapiens
  siRNA target sequence for RASGRF2 (NM_006909.1,1962-1980).
gcggtttcttagtattgat

SEQ ID NO: 296568 - DNA, 19 bp, Homo sapiens
  siRNA target sequence for RASGRF2 (NM_006909.1,1963-1981).
cggtttcttagtattgatt

SEQ ID NO: 296569 - DNA, 19 bp, Homo sapiens
  siRNA target sequence for RASGRF2 (NM_006909.1,1996-2014).
ctgcacacctatcgtattt

SEQ ID NO: 296570 - DNA, 19 bp, Homo sapiens
  siRNA target sequence for RASGRF2 (NM_006909.1,1999-2017).
cacacctatcgtattttca

SEQ ID NO: 296571 - DNA, 19 bp, Homo sapiens
  siRNA target sequence for RASGRF2 (NM_006909.1,2001-2019).
cacctatcgtattttcact

SEQ ID NO: 296572 - DNA, 19 bp, Homo sapiens
  siRNA target sequence for RASGRF2 (NM_006909.1,2038-2056).
gggaaactctccgacatat

SEQ ID NO: 296573 - DNA, 19 bp, Homo sapiens
  siRNA target sequence for RASGRF2 (NM_006909.1,2039-2057).
ggaaactctccgacatata

SEQ ID NO: 296574 - DNA, 19 bp, Homo sapiens
  siRNA target sequence for RASGRF2 (NM_006909.1,2079-2097).
ccctgtcaggtcattggaa

SEQ ID NO: 296575 - DNA, 19 bp, Homo sapiens
  siRNA target sequence for RASGRF2 (NM_006909.1,2080-2098).
cctgtcaggtcattggaat

SEQ ID NO: 296576 - DNA, 19 bp, Homo sapiens
  siRNA target sequence for RASGRF2 (NM_006909.1,2083-2101).
gtcaggtcattggaattgt

SEQ ID NO: 296577 - DNA, 19 bp, Homo sapiens
  siRNA target sequence for RASGRF2 (NM_006909.1,2087-2105).
ggtcattggaattgttttt

SEQ ID NO: 296578 - DNA, 19 bp, Homo sapiens
  siRNA target sequence for RASGRF2 (NM_006909.1,2156-2174).
cacgtctgtgtcgcaaatt

SEQ ID NO: 296579 - DNA, 19 bp, Homo sapiens
  siRNA target sequence for RASGRF2 (NM_006909.1,2158-2176).
cgtctgtgtcgcaaattct

SEQ ID NO: 296580 - DNA, 19 bp, Homo sapiens
  siRNA target sequence for RASGRF2 (NM_006909.1,2193-2211).
ggctgtgtccagaacatct

SEQ ID NO: 296581 - DNA, 19 bp, Homo sapiens
  siRNA target sequence for RASGRF2 (NM_006909.1,2222-2240).
gggccagaaagctgtcttt

SEQ ID NO: 296582 - DNA, 19 bp, Homo sapiens
  siRNA target sequence for RASGRF2 (NM_006909.1,2396-2414).
cgggaacggtagaagagaa

SEQ ID NO: 296583 - DNA, 19 bp, Homo sapiens
  siRNA target sequence for RASGRF2 (NM_006909.1,2426-2444).
cacgcgtggatctgtgtaa

SEQ ID NO: 296584 - DNA, 19 bp, Homo sapiens
  siRNA target sequence for RASGRF2 (NM_006909.1,2428-2446).
cgcgtggatctgtgtaaca

SEQ ID NO: 296585 - DNA, 19 bp, Homo sapiens
  siRNA target sequence for RASGRF2 (NM_006909.1,2439-2457).
gtgtaacaagctaaaacga

SEQ ID NO: 296586 - DNA, 19 bp, Homo sapiens
  siRNA target sequence for RASGRF2 (NM_006909.1,2634-2652).
ggcttctgcttttgcaata

SEQ ID NO: 296587 - DNA, 19 bp, Homo sapiens
  siRNA target sequence for RASGRF2 (NM_006909.1,2675-2693).
ggagtccaccaggctttaa

SEQ ID NO: 296588 - DNA, 19 bp, Homo sapiens
  siRNA target sequence for RASGRF2 (NM_006909.1,2697-2715).
caccgagagaacatgtgat

SEQ ID NO: 296589 - DNA, 19 bp, Homo sapiens
  siRNA target sequence for RASGRF2 (NM_006909.1,2699-2717).
ccgagagaacatgtgataa

SEQ ID NO: 296590 - DNA, 19 bp, Homo sapiens
  siRNA target sequence for RASGRF2 (NM_006909.1,2741-2759).
ctaccaatcgagttctgaa

SEQ ID NO: 296591 - DNA, 19 bp, Homo sapiens
  siRNA target sequence for RASGRF2 (NM_006909.1,2780-2798).
caaagcacgcacaggattt

SEQ ID NO: 296592 - DNA, 19 bp, Homo sapiens
  siRNA target sequence for RASGRF2 (NM_006909.1,2784-2802).
gcacgcacaggatttcgaa

SEQ ID NO: 296593 - DNA, 19 bp, Homo sapiens
  siRNA target sequence for RASGRF2 (NM_006909.1,2793-2811).
ggatttcgaactcaacaat

SEQ ID NO: 296594 - DNA, 19 bp, Homo sapiens
  siRNA target sequence for RASGRF2 (NM_006909.1,2823-2841).
gaatgtcctaaatttgcta

SEQ ID NO: 296595 - DNA, 19 bp, Homo sapiens
  siRNA target sequence for RASGRF2 (NM_006909.1,2904-2922).
cagggccctttcacaagat

SEQ ID NO: 296596 - DNA, 19 bp, Homo sapiens
  siRNA target sequence for RASGRF2 (NM_006909.1,2929-2947).
gatgacatccacctaaaat

SEQ ID NO: 296597 - DNA, 19 bp, Homo sapiens
  siRNA target sequence for RASGRF2 (NM_006909.1,2975-2993).
gcatgaaggccgaatgctt

SEQ ID NO: 296598 - DNA, 19 bp, Homo sapiens
  siRNA target sequence for RASGRF2 (NM_006909.1,3111-3129).
cgaaagaactccttacatt

SEQ ID NO: 296599 - DNA, 19 bp, Homo sapiens
  siRNA target sequence for RASGRF2 (NM_006909.1,3112-3130).
gaaagaactccttacatta

SEQ ID NO: 296600 - DNA, 19 bp, Homo sapiens
  siRNA target sequence for RASGRF2 (NM_006909.1,3174-3192).
ctcccagataatgaactat

SEQ ID NO: 296601 - DNA, 19 bp, Homo sapiens
  siRNA target sequence for RASGRF2 (NM_006909.1,3364-3382).
ctaatggacaaacttcaaa

SEQ ID NO: 296602 - DNA, 19 bp, Homo sapiens
  siRNA target sequence for RASGRF2 (NM_006909.1,3455-3473).
cttatcttgggatgtactt

SEQ ID NO: 296603 - DNA, 19 bp, Homo sapiens
  siRNA target sequence for RASGRF2 (NM_006909.1,3520-3538).
gaaggccttgtcaatttct

SEQ ID NO: 296604 - DNA, 19 bp, Homo sapiens
  siRNA target sequence for RASGRF2 (NM_006909.1,3548-3566).
gaatgatatcacacatcat

SEQ ID NO: 296605 - DNA, 19 bp, Homo sapiens
  siRNA target sequence for RASGRF2 (NM_006909.1,3588-3606).
gcagacttcctacagaata

SEQ ID NO: 296606 - DNA, 19 bp, Homo sapiens
  siRNA target sequence for RASGRF2 (NM_006909.1,3591-3609).
gacttcctacagaatagat

SEQ ID NO: 296607 - DNA, 19 bp, Homo sapiens
  siRNA target sequence for RASGRF2 (NM_006909.1,3593-3611).
cttcctacagaatagatca

SEQ ID NO: 296608 - DNA, 19 bp, Homo sapiens
  siRNA target sequence for RASGRF2 (NM_006909.1,3617-3635).
caaaggtcgcacagtactt

SEQ ID NO: 296609 - DNA, 19 bp, Homo sapiens
  siRNA target sequence for RASGRF2 (NM_006909.1,3648-3666).
ccttatcatagatgaagat

SEQ ID NO: 296610 - DNA, 19 bp, Homo sapiens
  siRNA target sequence for RASGRP4 (NM_052949.2,250-268).
ggaatgcaccggaaaaata

SEQ ID NO: 296611 - DNA, 19 bp, Homo sapiens
  siRNA target sequence for RASGRP4 (NM_170602.1,734-752).
ggcaaaaagcgcaaagtgt

SEQ ID NO: 296612 - DNA, 19 bp, Homo sapiens
  siRNA target sequence for RASGRP4 (NM_170602.1,743-761).
cgcaaagtgtccttgcttt

SEQ ID NO: 296613 - DNA, 19 bp, Homo sapiens
  siRNA target sequence for RASGRP4 (NM_170602.1,1648-1666).
gcgactctcgggcaatttt

SEQ ID NO: 296614 - DNA, 19 bp, Homo sapiens
  siRNA target sequence for RASGRP4 (NM_170602.1,2020-2038).
ctgtggctccgaggaaaat

SEQ ID NO: 296615 - DNA, 19 bp, Homo sapiens
  siRNA target sequence for RASGRP4 (NM_170602.1,2022-2040).
gtggctccgaggaaaatca

SEQ ID NO: 296616 - DNA, 19 bp, Homo sapiens
  siRNA target sequence for RASGRP4 (NM_170602.1,2117-2135).
ccttcctgggaaacagata

SEQ ID NO: 296617 - DNA, 19 bp, Homo sapiens
  siRNA target sequence for Rgr (NM_153615.1,1175-1193).
ggaagctgctcacaaatct

SEQ ID NO: 296618 - DNA, 19 bp, Homo sapiens
  siRNA target sequence for Rgr (NM_153615.1,1382-1400).
ccgaaaacacttcagttta

SEQ ID NO: 296619 - DNA, 19 bp, Homo sapiens
  siRNA target sequence for Rgr (NM_153615.1,1418-1436).
ggtcatctttccggataaa

SEQ ID NO: 296620 - DNA, 19 bp, Homo sapiens
  siRNA target sequence for Rgr (NM_153615.1,1561-1579).
gggcaacacgcattaacaa

SEQ ID NO: 296621 - DNA, 19 bp, Homo sapiens
  siRNA target sequence for Rgr (NM_153615.1,1562-1580).
ggcaacacgcattaacaat

SEQ ID NO: 296622 - DNA, 19 bp, Homo sapiens
  siRNA target sequence for Rgr (NM_153615.1,1656-1674).
gggtccaccaggatatcta

SEQ ID NO: 296623 - DNA, 19 bp, Homo sapiens
  siRNA target sequence for Rgr (NM_153615.1,1765-1783).
ccctgtcgtgggtctgtaa

SEQ ID NO: 296624 - DNA, 19 bp, Homo sapiens
  siRNA target sequence for Rgr (NM_153615.1,1766-1784).
cctgtcgtgggtctgtaaa

SEQ ID NO: 296625 - DNA, 19 bp, Homo sapiens
  siRNA target sequence for Rgr (NM_153615.1,1769-1787).
gtcgtgggtctgtaaagaa

SEQ ID NO: 296626 - DNA, 19 bp, Homo sapiens
  siRNA target sequence for Rgr (NM_153615.1,2089-2107).
ctaagcctcaacaacttct

SEQ ID NO: 296627 - DNA, 19 bp, Homo sapiens
  siRNA target sequence for Rgr (NM_153615.1,2136-2154).
gtgcagcaacccaataggt

SEQ ID NO: 296628 - DNA, 19 bp, Homo sapiens
  siRNA target sequence for Rgr (NM_153615.1,2494-2512).
cctcttgagaaatttgtca

SEQ ID NO: 296629 - DNA, 19 bp, Homo sapiens
  siRNA target sequence for SOS2 (NM_006939.1,14-32).
cgcagccttacgagttctt

SEQ ID NO: 296630 - DNA, 19 bp, Homo sapiens
  siRNA target sequence for SOS2 (NM_006939.1,16-34).
cagccttacgagttcttca

SEQ ID NO: 296631 - DNA, 19 bp, Homo sapiens
  siRNA target sequence for SOS2 (NM_006939.1,124-142).
gaagagtctctctattata

SEQ ID NO: 296632 - DNA, 19 bp, Homo sapiens
  siRNA target sequence for SOS2 (NM_006939.1,186-204).
ccagccaaggactgttcaa

SEQ ID NO: 296633 - DNA, 19 bp, Homo sapiens
  siRNA target sequence for SOS2 (NM_006939.1,189-207).
gccaaggactgttcaagat

SEQ ID NO: 296634 - DNA, 19 bp, Homo sapiens
  siRNA target sequence for SOS2 (NM_006939.1,191-209).
caaggactgttcaagatgt

SEQ ID NO: 296635 - DNA, 19 bp, Homo sapiens
  siRNA target sequence for SOS2 (NM_006939.1,258-276).
cattgctgatgcacaatct

SEQ ID NO: 296636 - DNA, 19 bp, Homo sapiens
  siRNA target sequence for SOS2 (NM_006939.1,275-293).
ctgctatagaaaaacgaaa

SEQ ID NO: 296637 - DNA, 19 bp, Homo sapiens
  siRNA target sequence for SOS2 (NM_006939.1,334-352).
ccttcgttgaaggaagtat

SEQ ID NO: 296638 - DNA, 19 bp, Homo sapiens
  siRNA target sequence for SOS2 (NM_006939.1,345-363).
ggaagtattagggtacaaa

SEQ ID NO: 296639 - DNA, 19 bp, Homo sapiens
  siRNA target sequence for SOS2 (NM_006939.1,391-409).
gtggctgtactagagtata

SEQ ID NO: 296640 - DNA, 19 bp, Homo sapiens
  siRNA target sequence for SOS2 (NM_006939.1,394-412).
gctgtactagagtatatct

SEQ ID NO: 296641 - DNA, 19 bp, Homo sapiens
  siRNA target sequence for SOS2 (NM_006939.1,475-493).
cagcaggacattaaagtgt

SEQ ID NO: 296642 - DNA, 19 bp, Homo sapiens
  siRNA target sequence for SOS2 (NM_006939.1,529-547).
gatcaggatgacataggtt

SEQ ID NO: 296643 - DNA, 19 bp, Homo sapiens
  siRNA target sequence for SOS2 (NM_006939.1,534-552).
ggatgacataggtttggtt

SEQ ID NO: 296644 - DNA, 19 bp, Homo sapiens
  siRNA target sequence for SOS2 (NM_006939.1,535-553).
gatgacataggtttggttt

SEQ ID NO: 296645 - DNA, 19 bp, Homo sapiens
  siRNA target sequence for SOS2 (NM_006939.1,636-654).
gtatctacgggaattaaat

SEQ ID NO: 296646 - DNA, 19 bp, Homo sapiens
  siRNA target sequence for SOS2 (NM_006939.1,640-658).
ctacgggaattaaatatga

SEQ ID NO: 296647 - DNA, 19 bp, Homo sapiens
  siRNA target sequence for SOS2 (NM_006939.1,679-697).
gcctttctttctgatagaa

SEQ ID NO: 296648 - DNA, 19 bp, Homo sapiens
  siRNA target sequence for SOS2 (NM_006939.1,699-717).
gctgtttaaaccttctgta

SEQ ID NO: 296649 - DNA, 19 bp, Homo sapiens
  siRNA target sequence for SOS2 (NM_006939.1,754-772).
gaattgactgtgaaacttt

SEQ ID NO: 296650 - DNA, 19 bp, Homo sapiens
  siRNA target sequence for SOS2 (NM_006939.1,825-843).
cttagctggcagctgtttt

SEQ ID NO: 296651 - DNA, 19 bp, Homo sapiens
  siRNA target sequence for SOS2 (NM_006939.1,861-879).
gcaagcatttgatccttat

SEQ ID NO: 296652 - DNA, 19 bp, Homo sapiens
  siRNA target sequence for SOS2 (NM_006939.1,884-902).
cattatcacaggacattct

SEQ ID NO: 296653 - DNA, 19 bp, Homo sapiens
  siRNA target sequence for SOS2 (NM_006939.1,905-923).
caccagagtttcatgaaca

SEQ ID NO: 296654 - DNA, 19 bp, Homo sapiens
  siRNA target sequence for SOS2 (NM_006939.1,916-934).
catgaacatttcaataaat

SEQ ID NO: 296655 - DNA, 19 bp, Homo sapiens
  siRNA target sequence for SOS2 (NM_006939.1,969-987).
gtccattgctgatggtttt

SEQ ID NO: 296656 - DNA, 19 bp, Homo sapiens
  siRNA target sequence for SOS2 (NM_006939.1,1047-1065).
gcactactttgagttacta

SEQ ID NO: 296657 - DNA, 19 bp, Homo sapiens
  siRNA target sequence for SOS2 (NM_006939.1,1048-1066).
cactactttgagttactaa

SEQ ID NO: 296658 - DNA, 19 bp, Homo sapiens
  siRNA target sequence for SOS2 (NM_006939.1,1063-1081).
ctaaagcaattgaaagcat

SEQ ID NO: 296659 - DNA, 19 bp, Homo sapiens
  siRNA target sequence for SOS2 (NM_006939.1,1068-1086).
gcaattgaaagcatgtagt

SEQ ID NO: 296660 - DNA, 19 bp, Homo sapiens
  siRNA target sequence for SOS2 (NM_006939.1,1147-1165).
ggtagcatggaccgaattt

SEQ ID NO: 296661 - DNA, 19 bp, Homo sapiens
  siRNA target sequence for SOS2 (NM_006939.1,1235-1253).
gcaaacacctggctatcaa

SEQ ID NO: 296662 - DNA, 19 bp, Homo sapiens
  siRNA target sequence for SOS2 (NM_006939.1,1236-1254).
caaacacctggctatcaaa

SEQ ID NO: 296663 - DNA, 19 bp, Homo sapiens
  siRNA target sequence for SOS2 (NM_006939.1,1245-1263).
ggctatcaaaaaaatgaat

SEQ ID NO: 296664 - DNA, 19 bp, Homo sapiens
  siRNA target sequence for SOS2 (NM_006939.1,1349-1367).
gaatcggtgccaaacatga

SEQ ID NO: 296665 - DNA, 19 bp, Homo sapiens
  siRNA target sequence for SOS2 (NM_006939.1,1359-1377).
caaacatgaacggcatatt

SEQ ID NO: 296666 - DNA, 19 bp, Homo sapiens
  siRNA target sequence for SOS2 (NM_006939.1,1366-1384).
gaacggcatatttttctgt

SEQ ID NO: 296667 - DNA, 19 bp, Homo sapiens
  siRNA target sequence for SOS2 (NM_006939.1,1387-1405).
gatggcttaatgatcagtt

SEQ ID NO: 296668 - DNA, 19 bp, Homo sapiens
  siRNA target sequence for SOS2 (NM_006939.1,1390-1408).
ggcttaatgatcagttgta

SEQ ID NO: 296669 - DNA, 19 bp, Homo sapiens
  siRNA target sequence for SOS2 (NM_006939.1,1391-1409).
gcttaatgatcagttgtaa

SEQ ID NO: 296670 - DNA, 19 bp, Homo sapiens
  siRNA target sequence for SOS2 (NM_006939.1,1392-1410).
cttaatgatcagttgtaaa

SEQ ID NO: 296671 - DNA, 19 bp, Homo sapiens
  siRNA target sequence for SOS2 (NM_006939.1,1398-1416).
gatcagttgtaaacctaat

SEQ ID NO: 296672 - DNA, 19 bp, Homo sapiens
  siRNA target sequence for SOS2 (NM_006939.1,1448-1466).
gtgcagaatacaggttaaa

SEQ ID NO: 296673 - DNA, 19 bp, Homo sapiens
  siRNA target sequence for SOS2 (NM_006939.1,1451-1469).
cagaatacaggttaaaaga

SEQ ID NO: 296674 - DNA, 19 bp, Homo sapiens
  siRNA target sequence for SOS2 (NM_006939.1,1605-1623).
gatggcagcccttatttct

SEQ ID NO: 296675 - DNA, 19 bp, Homo sapiens
  siRNA target sequence for SOS2 (NM_006939.1,1634-1652).
gtagtactctagatcgaat

SEQ ID NO: 296676 - DNA, 19 bp, Homo sapiens
  siRNA target sequence for SOS2 (NM_006939.1,1640-1658).
ctctagatcgaatgttaga

SEQ ID NO: 296677 - DNA, 19 bp, Homo sapiens
  siRNA target sequence for SOS2 (NM_006939.1,1642-1660).
ctagatcgaatgttagatt

SEQ ID NO: 296678 - DNA, 19 bp, Homo sapiens
  siRNA target sequence for SOS2 (NM_006939.1,1648-1666).
cgaatgttagattcagtat

SEQ ID NO: 296679 - DNA, 19 bp, Homo sapiens
  siRNA target sequence for SOS2 (NM_006939.1,1686-1704).
gcaaccactgagattacca

SEQ ID NO: 296680 - DNA, 19 bp, Homo sapiens
  siRNA target sequence for SOS2 (NM_006939.1,1687-1705).
caaccactgagattaccaa

SEQ ID NO: 296681 - DNA, 19 bp, Homo sapiens
  siRNA target sequence for SOS2 (NM_006939.1,1706-1724).
gtcctgaagtatatcgttt

SEQ ID NO: 296682 - DNA, 19 bp, Homo sapiens
  siRNA target sequence for SOS2 (NM_006939.1,1714-1732).
gtatatcgttttgtagtaa

SEQ ID NO: 296683 - DNA, 19 bp, Homo sapiens
  siRNA target sequence for SOS2 (NM_006939.1,1802-1820).
gaggaactgtagtgaaatt

SEQ ID NO: 296684 - DNA, 19 bp, Homo sapiens
  siRNA target sequence for SOS2 (NM_006939.1,1881-1899).
cacatatcgttcattttgt

SEQ ID NO: 296685 - DNA, 19 bp, Homo sapiens
  siRNA target sequence for SOS2 (NM_006939.1,1926-1944).
gattgaacggtttgaaatt

SEQ ID NO: 296686 - DNA, 19 bp, Homo sapiens
  siRNA target sequence for SOS2 (NM_006939.1,1969-1987).
gacaaattggcaatagaga

SEQ ID NO: 296687 - DNA, 19 bp, Homo sapiens
  siRNA target sequence for SOS2 (NM_006939.1,2021-2039).
gatttcgcaaggaatatgt

SEQ ID NO: 296688 - DNA, 19 bp, Homo sapiens
  siRNA target sequence for SOS2 (NM_006939.1,2038-2056).
gtccaaccagtacaactta

SEQ ID NO: 296689 - DNA, 19 bp, Homo sapiens
  siRNA target sequence for SOS2 (NM_006939.1,2134-2152).
ctagaatccttcatttcaa

SEQ ID NO: 296690 - DNA, 19 bp, Homo sapiens
  siRNA target sequence for SOS2 (NM_006939.1,2153-2171).
gtgtaagagggaaagctat

SEQ ID NO: 296691 - DNA, 19 bp, Homo sapiens
  siRNA target sequence for SOS2 (NM_006939.1,2233-2251).
ggagtaagccataatatta

SEQ ID NO: 296692 - DNA, 19 bp, Homo sapiens
  siRNA target sequence for SOS2 (NM_006939.1,2261-2279).
gtccacctccaccaattga

SEQ ID NO: 296693 - DNA, 19 bp, Homo sapiens
  siRNA target sequence for SOS2 (NM_006939.1,2272-2290).
ccaattgaatggcatatca

SEQ ID NO: 296694 - DNA, 19 bp, Homo sapiens
  siRNA target sequence for SOS2 (NM_006939.1,2289-2307).
cagcaaaccaggacagttt

SEQ ID NO: 296695 - DNA, 19 bp, Homo sapiens
  siRNA target sequence for SOS2 (NM_006939.1,2347-2365).
gcacgtcagctgacacttt

SEQ ID NO: 296696 - DNA, 19 bp, Homo sapiens
  siRNA target sequence for SOS2 (NM_006939.1,2348-2366).
cacgtcagctgacactttt

SEQ ID NO: 296697 - DNA, 19 bp, Homo sapiens
  siRNA target sequence for SOS2 (NM_006939.1,2466-2484).
gattcgccataccacaaat

SEQ ID NO: 296698 - DNA, 19 bp, Homo sapiens
  siRNA target sequence for SOS2 (NM_006939.1,2470-2488).
cgccataccacaaatctca

SEQ ID NO: 296699 - DNA, 19 bp, Homo sapiens
  siRNA target sequence for SOS2 (NM_006939.1,2485-2503).
ctcaccctctggtttgaaa

SEQ ID NO: 296700 - DNA, 19 bp, Homo sapiens
  siRNA target sequence for SOS2 (NM_006939.1,2533-2551).
gaacgggtggcagtactaa

SEQ ID NO: 296701 - DNA, 19 bp, Homo sapiens
  siRNA target sequence for SOS2 (NM_006939.1,2536-2554).
cgggtggcagtactaagta

SEQ ID NO: 296702 - DNA, 19 bp, Homo sapiens
  siRNA target sequence for SOS2 (NM_006939.1,2542-2560).
gcagtactaagtagaatta

SEQ ID NO: 296703 - DNA, 19 bp, Homo sapiens
  siRNA target sequence for SOS2 (NM_006939.1,2697-2715).
ggacgaagctgtggaatta

SEQ ID NO: 296704 - DNA, 19 bp, Homo sapiens
  siRNA target sequence for SOS2 (NM_006939.1,2698-2716).
gacgaagctgtggaattaa

SEQ ID NO: 296705 - DNA, 19 bp, Homo sapiens
  siRNA target sequence for SOS2 (NM_006939.1,2743-2761).
gtaaaacttaagtcaatca

SEQ ID NO: 296706 - DNA, 19 bp, Homo sapiens
  siRNA target sequence for SOS2 (NM_006939.1,2900-2918).
gagaaattcagcagtatca

SEQ ID NO: 296707 - DNA, 19 bp, Homo sapiens
  siRNA target sequence for SOS2 (NM_006939.1,2902-2920).
gaaattcagcagtatcaga

SEQ ID NO: 296708 - DNA, 19 bp, Homo sapiens
  siRNA target sequence for SOS2 (NM_006939.1,2938-2956).
cggatagaaccagatatga

SEQ ID NO: 296709 - DNA, 19 bp, Homo sapiens
  siRNA target sequence for SOS2 (NM_006939.1,2947-2965).
ccagatatgaggagattct

SEQ ID NO: 296710 - DNA, 19 bp, Homo sapiens
  siRNA target sequence for SOS2 (NM_006939.1,2948-2966).
cagatatgaggagattctt

SEQ ID NO: 296711 - DNA, 19 bp, Homo sapiens
  siRNA target sequence for SOS2 (NM_006939.1,2990-3008).
gtgcatctgaaaaagagtt

SEQ ID NO: 296712 - DNA, 19 bp, Homo sapiens
  siRNA target sequence for SOS2 (NM_006939.1,3027-3045).
caagtcactagaaattgaa

SEQ ID NO: 296713 - DNA, 19 bp, Homo sapiens
  siRNA target sequence for SOS2 (NM_006939.1,3061-3079).
cagccacctcgatttccta

SEQ ID NO: 296714 - DNA, 19 bp, Homo sapiens
  siRNA target sequence for SOS2 (NM_006939.1,3067-3085).
cctcgatttcctaggaaat

SEQ ID NO: 296715 - DNA, 19 bp, Homo sapiens
  siRNA target sequence for SOS2 (NM_006939.1,3070-3088).
cgatttcctaggaaatcaa

SEQ ID NO: 296716 - DNA, 19 bp, Homo sapiens
  siRNA target sequence for SOS2 (NM_006939.1,3184-3202).
gaaccatgtaaaataagct

SEQ ID NO: 296717 - DNA, 19 bp, Homo sapiens
  siRNA target sequence for SOS2 (NM_006939.1,3290-3308).
cttcagaccttagtgtatt

SEQ ID NO: 296718 - DNA, 19 bp, Homo sapiens
  siRNA target sequence for SOS2 (NM_006939.1,3297-3315).
ccttagtgtatttttagat

SEQ ID NO: 296719 - DNA, 19 bp, Homo sapiens
  siRNA target sequence for SOS2 (NM_006939.1,3392-3410).
gttcatgtggtagtttaca

SEQ ID NO: 296720 - DNA, 19 bp, Homo sapiens
  siRNA target sequence for SOS2 (NM_006939.1,3395-3413).
catgtggtagtttacataa

SEQ ID NO: 296721 - DNA, 19 bp, Homo sapiens
  siRNA target sequence for SOS2 (NM_006939.1,3398-3416).
gtggtagtttacataaact

SEQ ID NO: 296722 - DNA, 19 bp, Homo sapiens
  siRNA target sequence for SOS2 (NM_006939.1,3400-3418).
ggtagtttacataaactaa

SEQ ID NO: 296723 - DNA, 19 bp, Homo sapiens
  siRNA target sequence for SOS2 (NM_006939.1,3404-3422).
gtttacataaactaagtga

SEQ ID NO: 296724 - DNA, 19 bp, Homo sapiens
  siRNA target sequence for SOS2 (NM_006939.1,3452-3470).
ctcgaaaaaagtttgatca

SEQ ID NO: 296725 - DNA, 19 bp, Homo sapiens
  siRNA target sequence for SOS2 (NM_006939.1,3469-3487).
catgatgcttcaaattcca

SEQ ID NO: 296726 - DNA, 19 bp, Homo sapiens
  siRNA target sequence for SOS2 (NM_006939.1,3753-3771).
cattagtacgtgtccaaat

SEQ ID NO: 296727 - DNA, 19 bp, Homo sapiens
  siRNA target sequence for SOS2 (NM_006939.1,3807-3825).
ggtaccgcgtcgatgctat

SEQ ID NO: 296728 - DNA, 19 bp, Homo sapiens
  siRNA target sequence for SOS2 (NM_006939.1,3822-3840).
ctatgtgctcagttctagt

SEQ ID NO: 296729 - DNA, 19 bp, Homo sapiens
  siRNA target sequence for SOS2 (NM_006939.1,3874-3892).
gttccaccaaggcagaatt

SEQ ID NO: 296730 - DNA, 19 bp, Homo sapiens
  siRNA target sequence for CDC42EP2 (NM_006779.2,458-476).
ccaaggtgcccatctatct

SEQ ID NO: 296731 - DNA, 19 bp, Homo sapiens
  siRNA target sequence for CDC42EP2 (NM_006779.2,561-579).
ccgccacaccattcatatt

SEQ ID NO: 296732 - DNA, 19 bp, Homo sapiens
  siRNA target sequence for GRAF (NM_015071.2,173-191).
cataagcgcgctcaagaat

SEQ ID NO: 296733 - DNA, 19 bp, Homo sapiens
  siRNA target sequence for GRAF (NM_015071.2,179-197).
cgcgctcaagaatttgtct

SEQ ID NO: 296734 - DNA, 19 bp, Homo sapiens
  siRNA target sequence for GRAF (NM_015071.2,180-198).
gcgctcaagaatttgtctt

SEQ ID NO: 296735 - DNA, 19 bp, Homo sapiens
  siRNA target sequence for GRAF (NM_015071.2,209-227).
gaagtttgcagattcctta

SEQ ID NO: 296736 - DNA, 19 bp, Homo sapiens
  siRNA target sequence for GRAF (NM_015071.2,217-235).
cagattccttaaatgaatt

SEQ ID NO: 296737 - DNA, 19 bp, Homo sapiens
  siRNA target sequence for GRAF (NM_015071.2,314-332).
cctcaggaatcttgaagat

SEQ ID NO: 296738 - DNA, 19 bp, Homo sapiens
  siRNA target sequence for GRAF (NM_015071.2,336-354).
cggatacggatgattgaga

SEQ ID NO: 296739 - DNA, 19 bp, Homo sapiens
  siRNA target sequence for GRAF (NM_015071.2,337-355).
ggatacggatgattgagaa

SEQ ID NO: 296740 - DNA, 19 bp, Homo sapiens
  siRNA target sequence for GRAF (NM_015071.2,378-396).
cccttggagaagtttcgaa

SEQ ID NO: 296741 - DNA, 19 bp, Homo sapiens
  siRNA target sequence for GRAF (NM_015071.2,379-397).
ccttggagaagtttcgaaa

SEQ ID NO: 296742 - DNA, 19 bp, Homo sapiens
  siRNA target sequence for GRAF (NM_015071.2,455-473).
gtattgtggcatcttagaa

SEQ ID NO: 296743 - DNA, 19 bp, Homo sapiens
  siRNA target sequence for GRAF (NM_015071.2,462-480).
ggcatcttagaaaaacact

SEQ ID NO: 296744 - DNA, 19 bp, Homo sapiens
  siRNA target sequence for GRAF (NM_015071.2,542-560).
ggtccggcagcatttctat

SEQ ID NO: 296745 - DNA, 19 bp, Homo sapiens
  siRNA target sequence for GRAF (NM_015071.2,564-582).
gtatccctggaatatgtct

SEQ ID NO: 296746 - DNA, 19 bp, Homo sapiens
  siRNA target sequence for GRAF (NM_015071.2,661-679).
ctttctatcaccatggtta

SEQ ID NO: 296747 - DNA, 19 bp, Homo sapiens
  siRNA target sequence for GRAF (NM_015071.2,665-683).
ctatcaccatggttacgaa

SEQ ID NO: 296748 - DNA, 19 bp, Homo sapiens
  siRNA target sequence for GRAF (NM_015071.2,693-711).
gatttcggggacttcaaga

SEQ ID NO: 296749 - DNA, 19 bp, Homo sapiens
  siRNA target sequence for GRAF (NM_015071.2,701-719).
ggacttcaagacacagtta

SEQ ID NO: 296750 - DNA, 19 bp, Homo sapiens
  siRNA target sequence for GRAF (NM_015071.2,737-755).
cacaagaaatcgctttgaa

SEQ ID NO: 296751 - DNA, 19 bp, Homo sapiens
  siRNA target sequence for GRAF (NM_015071.2,747-765).
cgctttgaaggcactagat

SEQ ID NO: 296752 - DNA, 19 bp, Homo sapiens
  siRNA target sequence for GRAF (NM_015071.2,749-767).
ctttgaaggcactagatca

SEQ ID NO: 296753 - DNA, 19 bp, Homo sapiens
  siRNA target sequence for GRAF (NM_015071.2,763-781).
gatcagaagtggaatcact

SEQ ID NO: 296754 - DNA, 19 bp, Homo sapiens
  siRNA target sequence for GRAF (NM_015071.2,861-879).
gagaaacgtcactttggaa

SEQ ID NO: 296755 - DNA, 19 bp, Homo sapiens
  siRNA target sequence for GRAF (NM_015071.2,867-885).
cgtcactttggaacttctt

SEQ ID NO: 296756 - DNA, 19 bp, Homo sapiens
  siRNA target sequence for GRAF (NM_015071.2,904-922).
catatcaacgggattccaa

SEQ ID NO: 296757 - DNA, 19 bp, Homo sapiens
  siRNA target sequence for GRAF (NM_015071.2,909-927).
caacgggattccaaacaaa

SEQ ID NO: 296758 - DNA, 19 bp, Homo sapiens
  siRNA target sequence for GRAF (NM_015071.2,912-930).
cgggattccaaacaaatca

SEQ ID NO: 296759 - DNA, 19 bp, Homo sapiens
  siRNA target sequence for GRAF (NM_015071.2,1195-1213).
gcattggcttcagcataat

SEQ ID NO: 296760 - DNA, 19 bp, Homo sapiens
  siRNA target sequence for GRAF (NM_015071.2,1368-1386).
gagataaagaccatcacta

SEQ ID NO: 296761 - DNA, 19 bp, Homo sapiens
  siRNA target sequence for GRAF (NM_015071.2,1397-1415).
gacctacctaagaatgctt

SEQ ID NO: 296762 - DNA, 19 bp, Homo sapiens
  siRNA target sequence for GRAF (NM_015071.2,1427-1445).
catgatgtaccagtttcaa

SEQ ID NO: 296763 - DNA, 19 bp, Homo sapiens
  siRNA target sequence for GRAF (NM_015071.2,1482-1500).
gagtctcgggtctctgaaa

SEQ ID NO: 296764 - DNA, 19 bp, Homo sapiens
  siRNA target sequence for GRAF (NM_015071.2,1669-1687).
cagccatcatggacatcaa

SEQ ID NO: 296765 - DNA, 19 bp, Homo sapiens
  siRNA target sequence for GRAF (NM_015071.2,1892-1910).
catcaactccagtttggaa

SEQ ID NO: 296766 - DNA, 19 bp, Homo sapiens
  siRNA target sequence for GRAF (NM_015071.2,1954-1972).
gcttacagcccaacatgaa

SEQ ID NO: 296767 - DNA, 19 bp, Homo sapiens
  siRNA target sequence for GRAF (NM_015071.2,2058-2076).
ccatcttggcccatgttct

SEQ ID NO: 296768 - DNA, 19 bp, Homo sapiens
  siRNA target sequence for GRAF (NM_015071.2,2135-2153).
gtctgttgcagggtttgtt

SEQ ID NO: 296769 - DNA, 19 bp, Homo sapiens
  siRNA target sequence for GRAF (NM_015071.2,2186-2204).
ggctcggtcctctcttcat

SEQ ID NO: 296770 - DNA, 19 bp, Homo sapiens
  siRNA target sequence for GRAF (NM_015071.2,2370-2388).
gcaggcacggtcttcgata

SEQ ID NO: 296771 - DNA, 19 bp, Homo sapiens
  siRNA target sequence for GRAF (NM_015071.2,2371-2389).
caggcacggtcttcgataa

SEQ ID NO: 296772 - DNA, 19 bp, Homo sapiens
  siRNA target sequence for MIG-6 (NM_018948.2,242-260).
gatcagagtcccattaaaa

SEQ ID NO: 296773 - DNA, 19 bp, Homo sapiens
  siRNA target sequence for MIG-6 (NM_018948.2,245-263).
cagagtcccattaaaaact

SEQ ID NO: 296774 - DNA, 19 bp, Homo sapiens
  siRNA target sequence for MIG-6 (NM_018948.2,280-298).
gccgagccatggggaatat

SEQ ID NO: 296775 - DNA, 19 bp, Homo sapiens
  siRNA target sequence for MIG-6 (NM_018948.2,314-332).
gagcagtcgcagtgagttt

SEQ ID NO: 296776 - DNA, 19 bp, Homo sapiens
  siRNA target sequence for MIG-6 (NM_018948.2,316-334).
gcagtcgcagtgagtttaa

SEQ ID NO: 296777 - DNA, 19 bp, Homo sapiens
  siRNA target sequence for MIG-6 (NM_018948.2,317-335).
cagtcgcagtgagtttaaa

SEQ ID NO: 296778 - DNA, 19 bp, Homo sapiens
  siRNA target sequence for MIG-6 (NM_018948.2,319-337).
gtcgcagtgagtttaaaaa

SEQ ID NO: 296779 - DNA, 19 bp, Homo sapiens
  siRNA target sequence for MIG-6 (NM_018948.2,321-339).
cgcagtgagtttaaaaaca

SEQ ID NO: 296780 - DNA, 19 bp, Homo sapiens
  siRNA target sequence for MIG-6 (NM_018948.2,325-343).
gtgagtttaaaaacaactt

SEQ ID NO: 296781 - DNA, 19 bp, Homo sapiens
  siRNA target sequence for MIG-6 (NM_018948.2,369-387).
gcctacagtctgaactctt

SEQ ID NO: 296782 - DNA, 19 bp, Homo sapiens
  siRNA target sequence for MIG-6 (NM_018948.2,425-443).
caaatctgctccgatgaat

SEQ ID NO: 296783 - DNA, 19 bp, Homo sapiens
  siRNA target sequence for MIG-6 (NM_018948.2,543-561).
gttgtatgtggttttaaga

SEQ ID NO: 296784 - DNA, 19 bp, Homo sapiens
  siRNA target sequence for MIG-6 (NM_018948.2,731-749).
cctaactagctcagataca

SEQ ID NO: 296785 - DNA, 19 bp, Homo sapiens
  siRNA target sequence for MIG-6 (NM_018948.2,816-834).
cgtgggtgtggacaaatca

SEQ ID NO: 296786 - DNA, 19 bp, Homo sapiens
  siRNA target sequence for MIG-6 (NM_018948.2,817-835).
gtgggtgtggacaaatcaa

SEQ ID NO: 296787 - DNA, 19 bp, Homo sapiens
  siRNA target sequence for MIG-6 (NM_018948.2,821-839).
gtgtggacaaatcaactat

SEQ ID NO: 296788 - DNA, 19 bp, Homo sapiens
  siRNA target sequence for MIG-6 (NM_018948.2,828-846).
caaatcaactatgcatatt

SEQ ID NO: 296789 - DNA, 19 bp, Homo sapiens
  siRNA target sequence for MIG-6 (NM_018948.2,833-851).
caactatgcatattttgat

SEQ ID NO: 296790 - DNA, 19 bp, Homo sapiens
  siRNA target sequence for MIG-6 (NM_018948.2,870-888).
gcagatctcagctatgtgt

SEQ ID NO: 296791 - DNA, 19 bp, Homo sapiens
  siRNA target sequence for MIG-6 (NM_018948.2,880-898).
gctatgtgtctgaccaaaa

SEQ ID NO: 296792 - DNA, 19 bp, Homo sapiens
  siRNA target sequence for MIG-6 (NM_018948.2,881-899).
ctatgtgtctgaccaaaat

SEQ ID NO: 296793 - DNA, 19 bp, Homo sapiens
  siRNA target sequence for MIG-6 (NM_018948.2,931-949).
ctcagacccaccgaagatt

SEQ ID NO: 296794 - DNA, 19 bp, Homo sapiens
  siRNA target sequence for MIG-6 (NM_018948.2,933-951).
cagacccaccgaagattaa

SEQ ID NO: 296795 - DNA, 19 bp, Homo sapiens
  siRNA target sequence for MIG-6 (NM_018948.2,935-953).
gacccaccgaagattaaga

SEQ ID NO: 296796 - DNA, 19 bp, Homo sapiens
  siRNA target sequence for MIG-6 (NM_018948.2,969-987).
ccagctggctcctttaaca

SEQ ID NO: 296797 - DNA, 19 bp, Homo sapiens
  siRNA target sequence for MIG-6 (NM_018948.2,970-988).
cagctggctcctttaacaa

SEQ ID NO: 296798 - DNA, 19 bp, Homo sapiens
  siRNA target sequence for MIG-6 (NM_018948.2,990-1008).
ccagccataaggatatcca

SEQ ID NO: 296799 - DNA, 19 bp, Homo sapiens
  siRNA target sequence for MIG-6 (NM_018948.2,991-1009).
cagccataaggatatccaa

SEQ ID NO: 296800 - DNA, 19 bp, Homo sapiens
  siRNA target sequence for MIG-6 (NM_018948.2,1001-1019).
gatatccaactgttgtata

SEQ ID NO: 296801 - DNA, 19 bp, Homo sapiens
  siRNA target sequence for MIG-6 (NM_018948.2,1030-1048).
ctcctaactccgatgaaga

SEQ ID NO: 296802 - DNA, 19 bp, Homo sapiens
  siRNA target sequence for MIG-6 (NM_018948.2,1033-1051).
ctaactccgatgaagacaa

SEQ ID NO: 296803 - DNA, 19 bp, Homo sapiens
  siRNA target sequence for MIG-6 (NM_018948.2,1087-1105).
gaccagtaaagccagatta

SEQ ID NO: 296804 - DNA, 19 bp, Homo sapiens
  siRNA target sequence for MIG-6 (NM_018948.2,1089-1107).
ccagtaaagccagattata

SEQ ID NO: 296805 - DNA, 19 bp, Homo sapiens
  siRNA target sequence for MIG-6 (NM_018948.2,1129-1147).
cttcgagcacctatagtga

SEQ ID NO: 296806 - DNA, 19 bp, Homo sapiens
  siRNA target sequence for MIG-6 (NM_018948.2,1133-1151).
gagcacctatagtgatgaa

SEQ ID NO: 296807 - DNA, 19 bp, Homo sapiens
  siRNA target sequence for MIG-6 (NM_018948.2,1135-1153).
gcacctatagtgatgaaga

SEQ ID NO: 296808 - DNA, 19 bp, Homo sapiens
  siRNA target sequence for MIG-6 (NM_018948.2,1172-1190).
gccaagagaacctttgtca

SEQ ID NO: 296809 - DNA, 19 bp, Homo sapiens
  siRNA target sequence for MIG-6 (NM_018948.2,1182-1200).
cctttgtcaccgagtaact

SEQ ID NO: 296810 - DNA, 19 bp, Homo sapiens
  siRNA target sequence for MIG-6 (NM_018948.2,1331-1349).
cagtaaggttccttgcatt

SEQ ID NO: 296811 - DNA, 19 bp, Homo sapiens
  siRNA target sequence for MIG-6 (NM_018948.2,1342-1360).
cttgcattctgcccattat

SEQ ID NO: 296812 - DNA, 19 bp, Homo sapiens
  siRNA target sequence for MIG-6 (NM_018948.2,1345-1363).
gcattctgcccattattga

SEQ ID NO: 296813 - DNA, 19 bp, Homo sapiens
  siRNA target sequence for MIG-6 (NM_018948.2,1373-1391).
gaaggttagttcaacacat

SEQ ID NO: 296814 - DNA, 19 bp, Homo sapiens
  siRNA target sequence for MIG-6 (NM_018948.2,1376-1394).
ggttagttcaacacattat

SEQ ID NO: 296815 - DNA, 19 bp, Homo sapiens
  siRNA target sequence for MIG-6 (NM_018948.2,1381-1399).
gttcaacacattattacct

SEQ ID NO: 296816 - DNA, 19 bp, Homo sapiens
  siRNA target sequence for MIG-6 (NM_018948.2,1417-1435).
catacctggacaaatatga

SEQ ID NO: 296817 - DNA, 19 bp, Homo sapiens
  siRNA target sequence for MIG-6 (NM_018948.2,1421-1439).
cctggacaaatatgaaaaa

SEQ ID NO: 296818 - DNA, 19 bp, Homo sapiens
  siRNA target sequence for MIG-6 (NM_018948.2,1491-1509).
cctgctgactgcggtatat

SEQ ID NO: 296819 - DNA, 19 bp, Homo sapiens
  siRNA target sequence for MIG-6 (NM_018948.2,1562-1580).
cgtgaagcgtaaacattta

SEQ ID NO: 296820 - DNA, 19 bp, Homo sapiens
  siRNA target sequence for MIG-6 (NM_018948.2,1568-1586).
gcgtaaacatttatcctat

SEQ ID NO: 296821 - DNA, 19 bp, Homo sapiens
  siRNA target sequence for OPHN1 (NM_002547.1,743-761).
catcaaagacgtaatcaaa

SEQ ID NO: 296822 - DNA, 19 bp, Homo sapiens
  siRNA target sequence for OPHN1 (NM_002547.1,762-780).
gacggcaacgcgcttatca

SEQ ID NO: 296823 - DNA, 19 bp, Homo sapiens
  siRNA target sequence for OPHN1 (NM_002547.1,779-797).
cagcgctatgagaaattat

SEQ ID NO: 296824 - DNA, 19 bp, Homo sapiens
  siRNA target sequence for OPHN1 (NM_002547.1,782-800).
cgctatgagaaattattct

SEQ ID NO: 296825 - DNA, 19 bp, Homo sapiens
  siRNA target sequence for OPHN1 (NM_002547.1,821-839).
ccagacgctgcagtcattt

SEQ ID NO: 296826 - DNA, 19 bp, Homo sapiens
  siRNA target sequence for OPHN1 (NM_002547.1,826-844).
cgctgcagtcatttcagtt

SEQ ID NO: 296827 - DNA, 19 bp, Homo sapiens
  siRNA target sequence for OPHN1 (NM_002547.1,830-848).
gcagtcatttcagtttgat

SEQ ID NO: 296828 - DNA, 19 bp, Homo sapiens
  siRNA target sequence for OPHN1 (NM_002547.1,831-849).
cagtcatttcagtttgatt

SEQ ID NO: 296829 - DNA, 19 bp, Homo sapiens
  siRNA target sequence for OPHN1 (NM_002547.1,888-906).
gctgaatccttcaaggaat

SEQ ID NO: 296830 - DNA, 19 bp, Homo sapiens
  siRNA target sequence for OPHN1 (NM_002547.1,917-935).
gctcaacgaggtagaaaat

SEQ ID NO: 296831 - DNA, 19 bp, Homo sapiens
  siRNA target sequence for OPHN1 (NM_002547.1,950-968).
ggtacacaatgctagtgat

SEQ ID NO: 296832 - DNA, 19 bp, Homo sapiens
  siRNA target sequence for OPHN1 (NM_002547.1,960-978).
gctagtgatttgctgatta

SEQ ID NO: 296833 - DNA, 19 bp, Homo sapiens
  siRNA target sequence for OPHN1 (NM_002547.1,1168-1186).
cctctcttgattatgttta

SEQ ID NO: 296834 - DNA, 19 bp, Homo sapiens
  siRNA target sequence for OPHN1 (NM_002547.1,1171-1189).
ctcttgattatgtttatca

SEQ ID NO: 296835 - DNA, 19 bp, Homo sapiens
  siRNA target sequence for OPHN1 (NM_002547.1,1208-1226).
gtccaagaagttcaatatt

SEQ ID NO: 296836 - DNA, 19 bp, Homo sapiens
  siRNA target sequence for OPHN1 (NM_002547.1,1438-1456).
ctattgaaggctatctcta

SEQ ID NO: 296837 - DNA, 19 bp, Homo sapiens
  siRNA target sequence for OPHN1 (NM_002547.1,1479-1497).
ggaatatcctgggtgaaat

SEQ ID NO: 296838 - DNA, 19 bp, Homo sapiens
  siRNA target sequence for OPHN1 (NM_002547.1,1480-1498).
gaatatcctgggtgaaata

SEQ ID NO: 296839 - DNA, 19 bp, Homo sapiens
  siRNA target sequence for OPHN1 (NM_002547.1,1606-1624).
gaaggaagacggagtctat

SEQ ID NO: 296840 - DNA, 19 bp, Homo sapiens
  siRNA target sequence for OPHN1 (NM_002547.1,1625-1643).
cgacaagaggttctgtttt

SEQ ID NO: 296841 - DNA, 19 bp, Homo sapiens
  siRNA target sequence for OPHN1 (NM_002547.1,1631-1649).
gaggttctgttttgacata

SEQ ID NO: 296842 - DNA, 19 bp, Homo sapiens
  siRNA target sequence for OPHN1 (NM_002547.1,1639-1657).
gttttgacatagaaactaa

SEQ ID NO: 296843 - DNA, 19 bp, Homo sapiens
  siRNA target sequence for OPHN1 (NM_002547.1,1745-1763).
ctaccacagccctataaca

SEQ ID NO: 296844 - DNA, 19 bp, Homo sapiens
  siRNA target sequence for OPHN1 (NM_002547.1,1811-1829).
gaagtgcatcaatattatt

SEQ ID NO: 296845 - DNA, 19 bp, Homo sapiens
  siRNA target sequence for OPHN1 (NM_002547.1,1863-1881).
cgcactgtgggcagcaata

SEQ ID NO: 296846 - DNA, 19 bp, Homo sapiens
  siRNA target sequence for OPHN1 (NM_002547.1,1953-1971).
gactgggacattaagacaa

SEQ ID NO: 296847 - DNA, 19 bp, Homo sapiens
  siRNA target sequence for OPHN1 (NM_002547.1,2014-2032).
ctgtcatgacctatagact

SEQ ID NO: 296848 - DNA, 19 bp, Homo sapiens
  siRNA target sequence for OPHN1 (NM_002547.1,2021-2039).
gacctatagacttcacaaa

SEQ ID NO: 296849 - DNA, 19 bp, Homo sapiens
  siRNA target sequence for OPHN1 (NM_002547.1,2079-2097).
cgcctaggagctattcact

SEQ ID NO: 296850 - DNA, 19 bp, Homo sapiens
  siRNA target sequence for OPHN1 (NM_002547.1,2089-2107).
ctattcactccctggtata

SEQ ID NO: 296851 - DNA, 19 bp, Homo sapiens
  siRNA target sequence for OPHN1 (NM_002547.1,2096-2114).
ctccctggtatataagcta

SEQ ID NO: 296852 - DNA, 19 bp, Homo sapiens
  siRNA target sequence for OPHN1 (NM_002547.1,2200-2218).
cctccaacatgggagtaat

SEQ ID NO: 296853 - DNA, 19 bp, Homo sapiens
  siRNA target sequence for OPHN1 (NM_002547.1,2288-2306).
catagtggtggaaatacta

SEQ ID NO: 296854 - DNA, 19 bp, Homo sapiens
  siRNA target sequence for OPHN1 (NM_002547.1,2394-2412).
cacaaaccaatcacgattt

SEQ ID NO: 296855 - DNA, 19 bp, Homo sapiens
  siRNA target sequence for OPHN1 (NM_002547.1,2396-2414).
caaaccaatcacgatttca

SEQ ID NO: 296856 - DNA, 19 bp, Homo sapiens
  siRNA target sequence for OPHN1 (NM_002547.1,2435-2453).
gacggttttctatacttct

SEQ ID NO: 296857 - DNA, 19 bp, Homo sapiens
  siRNA target sequence for OPHN1 (NM_002547.1,2484-2502).
catcaaacaccgaatggta

SEQ ID NO: 296858 - DNA, 19 bp, Homo sapiens
  siRNA target sequence for OPHN1 (NM_002547.1,2744-2762).
ctctttccacataaagaga

SEQ ID NO: 296859 - DNA, 19 bp, Homo sapiens
  siRNA target sequence for OPHN1 (NM_002547.1,2796-2814).
ggggatgctgacagtttca

SEQ ID NO: 296860 - DNA, 19 bp, Homo sapiens
  siRNA target sequence for OPHN1 (NM_002547.1,2967-2985).
gcttccaggaccaggtttt

SEQ ID NO: 296861 - DNA, 19 bp, Homo sapiens
  siRNA target sequence for OPHN1 (NM_002547.1,2968-2986).
cttccaggaccaggttttt

SEQ ID NO: 296862 - DNA, 19 bp, Homo sapiens
  siRNA target sequence for OPHN1 (NM_002547.1,3023-3041).
cagacttcctggagatgaa

SEQ ID NO: 296863 - DNA, 19 bp, Homo sapiens
  siRNA target sequence for PARG1 (NM_004815.2,318-336).
gatattacaacttctgaaa

SEQ ID NO: 296864 - DNA, 19 bp, Homo sapiens
  siRNA target sequence for PARG1 (NM_004815.2,338-356).
ggggctcaagtccttaagt

SEQ ID NO: 296865 - DNA, 19 bp, Homo sapiens
  siRNA target sequence for PARG1 (NM_004815.2,339-357).
gggctcaagtccttaagtt

SEQ ID NO: 296866 - DNA, 19 bp, Homo sapiens
  siRNA target sequence for PARG1 (NM_004815.2,349-367).
ccttaagttccaactctat

SEQ ID NO: 296867 - DNA, 19 bp, Homo sapiens
  siRNA target sequence for PARG1 (NM_004815.2,390-408).
gagttggtgaatgatatca

SEQ ID NO: 296868 - DNA, 19 bp, Homo sapiens
  siRNA target sequence for PARG1 (NM_004815.2,410-428).
gaagttctcccacatgtta

SEQ ID NO: 296869 - DNA, 19 bp, Homo sapiens
  siRNA target sequence for PARG1 (NM_004815.2,416-434).
ctcccacatgttactatat

SEQ ID NO: 296870 - DNA, 19 bp, Homo sapiens
  siRNA target sequence for PARG1 (NM_004815.2,425-443).
gttactatatttgaaagaa

SEQ ID NO: 296871 - DNA, 19 bp, Homo sapiens
  siRNA target sequence for PARG1 (NM_004815.2,491-509).
ggaactgctccgtgtttta

SEQ ID NO: 296872 - DNA, 19 bp, Homo sapiens
  siRNA target sequence for PARG1 (NM_004815.2,492-510).
gaactgctccgtgttttaa

SEQ ID NO: 296873 - DNA, 19 bp, Homo sapiens
  siRNA target sequence for PARG1 (NM_004815.2,497-515).
gctccgtgttttaaagtct

SEQ ID NO: 296874 - DNA, 19 bp, Homo sapiens
  siRNA target sequence for PARG1 (NM_004815.2,498-516).
ctccgtgttttaaagtcta

SEQ ID NO: 296875 - DNA, 19 bp, Homo sapiens
  siRNA target sequence for PARG1 (NM_004815.2,500-518).
ccgtgttttaaagtctata

SEQ ID NO: 296876 - DNA, 19 bp, Homo sapiens
  siRNA target sequence for PARG1 (NM_004815.2,533-551).
gaacctcaattctgttgat

SEQ ID NO: 296877 - DNA, 19 bp, Homo sapiens
  siRNA target sequence for PARG1 (NM_004815.2,594-612).
gtgaacttcacagaagtta

SEQ ID NO: 296878 - DNA, 19 bp, Homo sapiens
  siRNA target sequence for PARG1 (NM_004815.2,660-678).
gaaactttggcatttacct

SEQ ID NO: 296879 - DNA, 19 bp, Homo sapiens
  siRNA target sequence for PARG1 (NM_004815.2,668-686).
ggcatttacctttggaaat

SEQ ID NO: 296880 - DNA, 19 bp, Homo sapiens
  siRNA target sequence for PARG1 (NM_004815.2,669-687).
gcatttacctttggaaata

SEQ ID NO: 296881 - DNA, 19 bp, Homo sapiens
  siRNA target sequence for PARG1 (NM_004815.2,707-725).
gggagatgtaggcaatgat

SEQ ID NO: 296882 - DNA, 19 bp, Homo sapiens
  siRNA target sequence for PARG1 (NM_004815.2,708-726).
ggagatgtaggcaatgatt

SEQ ID NO: 296883 - DNA, 19 bp, Homo sapiens
  siRNA target sequence for PARG1 (NM_004815.2,740-758).
gcctgtttctcgagaaact

SEQ ID NO: 296884 - DNA, 19 bp, Homo sapiens
  siRNA target sequence for PARG1 (NM_004815.2,741-759).
cctgtttctcgagaaacta

SEQ ID NO: 296885 - DNA, 19 bp, Homo sapiens
  siRNA target sequence for PARG1 (NM_004815.2,757-775).
ctaagtcgtttgaaaatgt

SEQ ID NO: 296886 - DNA, 19 bp, Homo sapiens
  siRNA target sequence for PARG1 (NM_004815.2,811-829).
gaaatttttcccctttaga

SEQ ID NO: 296887 - DNA, 19 bp, Homo sapiens
  siRNA target sequence for PARG1 (NM_004815.2,831-849).
ctagacaacgtgctgttaa

SEQ ID NO: 296888 - DNA, 19 bp, Homo sapiens
  siRNA target sequence for PARG1 (NM_004815.2,870-888).
ctggctttgtcatatgcta

SEQ ID NO: 296889 - DNA, 19 bp, Homo sapiens
  siRNA target sequence for PARG1 (NM_004815.2,872-890).
ggctttgtcatatgctaaa

SEQ ID NO: 296890 - DNA, 19 bp, Homo sapiens
  siRNA target sequence for PARG1 (NM_004815.2,873-891).
gctttgtcatatgctaaaa

SEQ ID NO: 296891 - DNA, 19 bp, Homo sapiens
  siRNA target sequence for PARG1 (NM_004815.2,885-903).
gctaaaacttggtcaaaat

SEQ ID NO: 296892 - DNA, 19 bp, Homo sapiens
  siRNA target sequence for PARG1 (NM_004815.2,948-966).
gaattggagtccactagaa

SEQ ID NO: 296893 - DNA, 19 bp, Homo sapiens
  siRNA target sequence for PARG1 (NM_004815.2,981-999).
gcagaggcaactagaacta

SEQ ID NO: 296894 - DNA, 19 bp, Homo sapiens
  siRNA target sequence for PARG1 (NM_004815.2,982-1000).
cagaggcaactagaactaa

SEQ ID NO: 296895 - DNA, 19 bp, Homo sapiens
  siRNA target sequence for PARG1 (NM_004815.2,984-1002).
gaggcaactagaactaaca

SEQ ID NO: 296896 - DNA, 19 bp, Homo sapiens
  siRNA target sequence for PARG1 (NM_004815.2,991-1009).
ctagaactaacattggaat

SEQ ID NO: 296897 - DNA, 19 bp, Homo sapiens
  siRNA target sequence for PARG1 (NM_004815.2,1031-1049).
gtctctgtttactaatgct

SEQ ID NO: 296898 - DNA, 19 bp, Homo sapiens
  siRNA target sequence for PARG1 (NM_004815.2,1048-1066).
ctcttcttaatgatataga

SEQ ID NO: 296899 - DNA, 19 bp, Homo sapiens
  siRNA target sequence for PARG1 (NM_004815.2,1050-1068).
cttcttaatgatatagaaa

SEQ ID NO: 296900 - DNA, 19 bp, Homo sapiens
  siRNA target sequence for PARG1 (NM_004815.2,1070-1088).
cagtcaccttttacaacaa

SEQ ID NO: 296901 - DNA, 19 bp, Homo sapiens
  siRNA target sequence for PARG1 (NM_004815.2,1096-1114).
cagctctccaggctaacaa

SEQ ID NO: 296902 - DNA, 19 bp, Homo sapiens
  siRNA target sequence for PARG1 (NM_004815.2,1098-1116).
gctctccaggctaacaaat

SEQ ID NO: 296903 - DNA, 19 bp, Homo sapiens
  siRNA target sequence for PARG1 (NM_004815.2,1099-1117).
ctctccaggctaacaaatt

SEQ ID NO: 296904 - DNA, 19 bp, Homo sapiens
  siRNA target sequence for PARG1 (NM_004815.2,1246-1264).
gcatgcaacgtcaagatga

SEQ ID NO: 296905 - DNA, 19 bp, Homo sapiens
  siRNA target sequence for PARG1 (NM_004815.2,1247-1265).
catgcaacgtcaagatgaa

SEQ ID NO: 296906 - DNA, 19 bp, Homo sapiens
  siRNA target sequence for PARG1 (NM_004815.2,1318-1336).
caagtggcggattagcaaa

SEQ ID NO: 296907 - DNA, 19 bp, Homo sapiens
  siRNA target sequence for PARG1 (NM_004815.2,1321-1339).
gtggcggattagcaaaaaa

SEQ ID NO: 296908 - DNA, 19 bp, Homo sapiens
  siRNA target sequence for PARG1 (NM_004815.2,1379-1397).
ggaggctctccaaaaagta

SEQ ID NO: 296909 - DNA, 19 bp, Homo sapiens
  siRNA target sequence for PARG1 (NM_004815.2,1405-1423).
caaatgaactttacaaagt

SEQ ID NO: 296910 - DNA, 19 bp, Homo sapiens
  siRNA target sequence for PARG1 (NM_004815.2,1488-1506).
caactccggacacttgttt

SEQ ID NO: 296911 - DNA, 19 bp, Homo sapiens
  siRNA target sequence for PARG1 (NM_004815.2,1511-1529).
gtgtgatcttacccttaaa

SEQ ID NO: 296912 - DNA, 19 bp, Homo sapiens
  siRNA target sequence for PARG1 (NM_004815.2,1523-1541).
ccttaaagctgtaacagtt

SEQ ID NO: 296913 - DNA, 19 bp, Homo sapiens
  siRNA target sequence for PARG1 (NM_004815.2,1576-1594).
cccttgcagacagtttaca

SEQ ID NO: 296914 - DNA, 19 bp, Homo sapiens
  siRNA target sequence for PARG1 (NM_004815.2,1630-1648).
gccaagagtacagtgaatt

SEQ ID NO: 296915 - DNA, 19 bp, Homo sapiens
  siRNA target sequence for PARG1 (NM_004815.2,1652-1670).
caaggccacaaattcaact

SEQ ID NO: 296916 - DNA, 19 bp, Homo sapiens
  siRNA target sequence for PARG1 (NM_004815.2,1735-1753).
gacctgccaactctttaga

SEQ ID NO: 296917 - DNA, 19 bp, Homo sapiens
  siRNA target sequence for PARG1 (NM_004815.2,1767-1785).
cttcctgacagttctaata

SEQ ID NO: 296918 - DNA, 19 bp, Homo sapiens
  siRNA target sequence for PARG1 (NM_004815.2,1771-1789).
ctgacagttctaataaaat

SEQ ID NO: 296919 - DNA, 19 bp, Homo sapiens
  siRNA target sequence for PARG1 (NM_004815.2,1796-1814).
ggacagatgctctaacagt

SEQ ID NO: 296920 - DNA, 19 bp, Homo sapiens
  siRNA target sequence for PARG1 (NM_004815.2,1827-1845).
ggtccttcctttataagat

SEQ ID NO: 296921 - DNA, 19 bp, Homo sapiens
  siRNA target sequence for PARG1 (NM_004815.2,1830-1848).
ccttcctttataagatcat

SEQ ID NO: 296922 - DNA, 19 bp, Homo sapiens
  siRNA target sequence for PARG1 (NM_004815.2,1852-1870).
catttgggatgtttagtga

SEQ ID NO: 296923 - DNA, 19 bp, Homo sapiens
  siRNA target sequence for PARG1 (NM_004815.2,1858-1876).
ggatgtttagtgattctga

SEQ ID NO: 296924 - DNA, 19 bp, Homo sapiens
  siRNA target sequence for PARG1 (NM_004815.2,1884-1902).
ggagggagcagcgaatcta

SEQ ID NO: 296925 - DNA, 19 bp, Homo sapiens
  siRNA target sequence for PARG1 (NM_004815.2,1887-1905).
gggagcagcgaatctagat

SEQ ID NO: 296926 - DNA, 19 bp, Homo sapiens
  siRNA target sequence for PARG1 (NM_004815.2,1889-1907).
gagcagcgaatctagatct

SEQ ID NO: 296927 - DNA, 19 bp, Homo sapiens
  siRNA target sequence for PARG1 (NM_004815.2,1933-1951).
gagactttcatcgaaaact

SEQ ID NO: 296928 - DNA, 19 bp, Homo sapiens
  siRNA target sequence for PARG1 (NM_004815.2,1960-1978).
caccatccagtggaactat

SEQ ID NO: 296929 - DNA, 19 bp, Homo sapiens
  siRNA target sequence for PARG1 (NM_004815.2,1979-1997).
gtcctctgcagatgatcta

SEQ ID NO: 296930 - DNA, 19 bp, Homo sapiens
  siRNA target sequence for PARG1 (NM_004815.2,1981-1999).
cctctgcagatgatctaga

SEQ ID NO: 296931 - DNA, 19 bp, Homo sapiens
  siRNA target sequence for PARG1 (NM_004815.2,2086-2104).
cacacaagtttcgcaaatt

SEQ ID NO: 296932 - DNA, 19 bp, Homo sapiens
  siRNA target sequence for PARG1 (NM_004815.2,2088-2106).
cacaagtttcgcaaattga

SEQ ID NO: 296933 - DNA, 19 bp, Homo sapiens
  siRNA target sequence for PARG1 (NM_004815.2,2090-2108).
caagtttcgcaaattgaga

SEQ ID NO: 296934 - DNA, 19 bp, Homo sapiens
  siRNA target sequence for PARG1 (NM_004815.2,2105-2123).
gagatcccccacgaaatgt

SEQ ID NO: 296935 - DNA, 19 bp, Homo sapiens
  siRNA target sequence for PARG1 (NM_004815.2,2126-2144).
ggattgtgaaggcattgta

SEQ ID NO: 296936 - DNA, 19 bp, Homo sapiens
  siRNA target sequence for PARG1 (NM_004815.2,2145-2163).
gtgttccaaggtgttgaat

SEQ ID NO: 296937 - DNA, 19 bp, Homo sapiens
  siRNA target sequence for PARG1 (NM_004815.2,2150-2168).
ccaaggtgttgaatgtgaa

SEQ ID NO: 296938 - DNA, 19 bp, Homo sapiens
  siRNA target sequence for PARG1 (NM_004815.2,2351-2369).
gtgtctacagggaatttat

SEQ ID NO: 296939 - DNA, 19 bp, Homo sapiens
  siRNA target sequence for PARG1 (NM_004815.2,2424-2442).
ggaatgcacttggtagata

SEQ ID NO: 296940 - DNA, 19 bp, Homo sapiens
  siRNA target sequence for PARG1 (NM_004815.2,2429-2447).
gcacttggtagatatttca

SEQ ID NO: 296941 - DNA, 19 bp, Homo sapiens
  siRNA target sequence for PARG1 (NM_004815.2,2435-2453).
ggtagatatttcagaattt

SEQ ID NO: 296942 - DNA, 19 bp, Homo sapiens
  siRNA target sequence for PARG1 (NM_004815.2,2468-2486).
ctgtgacgtcttgaaatta

SEQ ID NO: 296943 - DNA, 19 bp, Homo sapiens
  siRNA target sequence for PARG1 (NM_004815.2,2474-2492).
cgtcttgaaattatacctt

SEQ ID NO: 296944 - DNA, 19 bp, Homo sapiens
  siRNA target sequence for PARG1 (NM_004815.2,2523-2541).
cgattgtacaaggaattta

SEQ ID NO: 296945 - DNA, 19 bp, Homo sapiens
  siRNA target sequence for PARG1 (NM_004815.2,2524-2542).
gattgtacaaggaatttat

SEQ ID NO: 296946 - DNA, 19 bp, Homo sapiens
  siRNA target sequence for PARG1 (NM_004815.2,2585-2603).
gacaaaaaagaatagtctt

SEQ ID NO: 296947 - DNA, 19 bp, Homo sapiens
  siRNA target sequence for PARG1 (NM_004815.2,2617-2635).
ggccaaatatgtgtataga

SEQ ID NO: 296948 - DNA, 19 bp, Homo sapiens
  siRNA target sequence for PARG1 (NM_004815.2,2676-2694).
caattgccagcatcaaatt

SEQ ID NO: 296949 - DNA, 19 bp, Homo sapiens
  siRNA target sequence for PARG1 (NM_004815.2,2840-2858).
ctcccttgcagagtattca

SEQ ID NO: 296950 - DNA, 19 bp, Homo sapiens
  siRNA target sequence for PARG1 (NM_004815.2,2842-2860).
cccttgcagagtattcaaa

SEQ ID NO: 296951 - DNA, 19 bp, Homo sapiens
  siRNA target sequence for PARG1 (NM_004815.2,2843-2861).
ccttgcagagtattcaaat

SEQ ID NO: 296952 - DNA, 19 bp, Homo sapiens
  siRNA target sequence for PARG1 (NM_004815.2,2868-2886).
cgcttggtagagtttctca

SEQ ID NO: 296953 - DNA, 19 bp, Homo sapiens
  siRNA target sequence for PARG1 (NM_004815.2,2873-2891).
ggtagagtttctcattact

SEQ ID NO: 296954 - DNA, 19 bp, Homo sapiens
  siRNA target sequence for PARG1 (NM_004815.2,2874-2892).
gtagagtttctcattactt

SEQ ID NO: 296955 - DNA, 19 bp, Homo sapiens
  siRNA target sequence for PARG1 (NM_004815.2,2877-2895).
gagtttctcattacttact

SEQ ID NO: 296956 - DNA, 19 bp, Homo sapiens
  siRNA target sequence for PARG1 (NM_004815.2,2917-2935).
ccctacaaccacaagatgt

SEQ ID NO: 296957 - DNA, 19 bp, Homo sapiens
  siRNA target sequence for PARG1 (NM_004815.2,2922-2940).
caaccacaagatgttatgt

SEQ ID NO: 296958 - DNA, 19 bp, Homo sapiens
  siRNA target sequence for PARG1 (NM_004815.2,2941-2959).
gtagcataggtgttgttga

SEQ ID NO: 296959 - DNA, 19 bp, Homo sapiens
  siRNA target sequence for PARG1 (NM_004815.2,2945-2963).
cataggtgttgttgatcaa

SEQ ID NO: 296960 - DNA, 19 bp, Homo sapiens
  siRNA target sequence for PARG1 (NM_004815.2,2958-2976).
gatcaaggctgttttccaa

SEQ ID NO: 296961 - DNA, 19 bp, Homo sapiens
  siRNA target sequence for PARG1 (NM_004815.2,3067-3085).
gtgaaagcaaaatttttga

SEQ ID NO: 296962 - DNA, 19 bp, Homo sapiens
  siRNA target sequence for PARG1 (NM_004815.2,3119-3137).
gcaaaatgcgttaggaaaa

SEQ ID NO: 296963 - DNA, 19 bp, Homo sapiens
  siRNA target sequence for PARG1 (NM_004815.2,3120-3138).
caaaatgcgttaggaaaat

SEQ ID NO: 296964 - DNA, 19 bp, Homo sapiens
  siRNA target sequence for PARG1 (NM_004815.2,3230-3248).
gccactttctctgaaatct

SEQ ID NO: 296965 - DNA, 19 bp, Homo sapiens
  siRNA target sequence for PARG1 (NM_004815.2,3311-3329).
gcctgtagatagactactt

SEQ ID NO: 296966 - DNA, 19 bp, Homo sapiens
  siRNA target sequence for PARG1 (NM_004815.2,3313-3331).
ctgtagatagactacttct

SEQ ID NO: 296967 - DNA, 19 bp, Homo sapiens
  siRNA target sequence for PARG1 (NM_004815.2,3333-3351).
gcaagtcctcctaatgaga

SEQ ID NO: 296968 - DNA, 19 bp, Homo sapiens
  siRNA target sequence for PARG1 (NM_004815.2,3361-3379).
gaaatatgggaaatgtaaa

SEQ ID NO: 296969 - DNA, 19 bp, Homo sapiens
  siRNA target sequence for PARG1 (NM_004815.2,3431-3449).
cgctgctactactgtttgt

SEQ ID NO: 296970 - DNA, 19 bp, Homo sapiens
  siRNA target sequence for PARG1 (NM_004815.2,3463-3481).
gctttgaccagcaaactct

SEQ ID NO: 296971 - DNA, 19 bp, Homo sapiens
  siRNA target sequence for PARG1 (NM_004815.2,3519-3537).
ctaactgccaagactacaa

SEQ ID NO: 296972 - DNA, 19 bp, Homo sapiens
  siRNA target sequence for PARG1 (NM_004815.2,3548-3566).
cagtgcactccaggaaaaa

SEQ ID NO: 296973 - DNA, 19 bp, Homo sapiens
  siRNA target sequence for PARG1 (NM_004815.2,3592-3610).
gtggggaccattctatcaa

SEQ ID NO: 296974 - DNA, 19 bp, Homo sapiens
  siRNA target sequence for PARG1 (NM_004815.2,3740-3758).
gacaacattttataaacca

SEQ ID NO: 296975 - DNA, 19 bp, Homo sapiens
  siRNA target sequence for PARG1 (NM_004815.2,3850-3868).
gtctcgtggtgaagtcaat

SEQ ID NO: 296976 - DNA, 19 bp, Homo sapiens
  siRNA target sequence for IQGAP3 (NM_178229.3,354-372).
ccaggcaactggcttacat

SEQ ID NO: 296977 - DNA, 19 bp, Homo sapiens
  siRNA target sequence for IQGAP3 (NM_178229.3,376-394).
cgtcacacagacaacatca

SEQ ID NO: 296978 - DNA, 19 bp, Homo sapiens
  siRNA target sequence for IQGAP3 (NM_178229.3,396-414).
cttttggctatctgcaata

SEQ ID NO: 296979 - DNA, 19 bp, Homo sapiens
  siRNA target sequence for IQGAP3 (NM_178229.3,452-470).
ccacggacatctatgacaa

SEQ ID NO: 296980 - DNA, 19 bp, Homo sapiens
  siRNA target sequence for IQGAP3 (NM_178229.3,453-471).
cacggacatctatgacaaa

SEQ ID NO: 296981 - DNA, 19 bp, Homo sapiens
  siRNA target sequence for IQGAP3 (NM_178229.3,457-475).
gacatctatgacaaaaaga

SEQ ID NO: 296982 - DNA, 19 bp, Homo sapiens
  siRNA target sequence for IQGAP3 (NM_178229.3,531-549).
gggattggcccctcagata

SEQ ID NO: 296983 - DNA, 19 bp, Homo sapiens
  siRNA target sequence for IQGAP3 (NM_178229.3,537-555).
ggcccctcagatacatgat

SEQ ID NO: 296984 - DNA, 19 bp, Homo sapiens
  siRNA target sequence for IQGAP3 (NM_178229.3,541-559).
cctcagatacatgatctat

SEQ ID NO: 296985 - DNA, 19 bp, Homo sapiens
  siRNA target sequence for IQGAP3 (NM_178229.3,542-560).
ctcagatacatgatctata

SEQ ID NO: 296986 - DNA, 19 bp, Homo sapiens
  siRNA target sequence for IQGAP3 (NM_178229.3,553-571).
gatctatacgggaaagtga

SEQ ID NO: 296987 - DNA, 19 bp, Homo sapiens
  siRNA target sequence for IQGAP3 (NM_178229.3,556-574).
ctatacgggaaagtgaaat

SEQ ID NO: 296988 - DNA, 19 bp, Homo sapiens
  siRNA target sequence for IQGAP3 (NM_178229.3,561-579).
cgggaaagtgaaattcaca

SEQ ID NO: 296989 - DNA, 19 bp, Homo sapiens
  siRNA target sequence for IQGAP3 (NM_178229.3,603-621).
gtccgaactggccaaatat

SEQ ID NO: 296990 - DNA, 19 bp, Homo sapiens
  siRNA target sequence for IQGAP3 (NM_178229.3,932-950).
gcaatatcaaccatgtcaa

SEQ ID NO: 296991 - DNA, 19 bp, Homo sapiens
  siRNA target sequence for IQGAP3 (NM_178229.3,951-969).
cgtccatggggctctagaa

SEQ ID NO: 296992 - DNA, 19 bp, Homo sapiens
  siRNA target sequence for IQGAP3 (NM_178229.3,954-972).
ccatggggctctagaagtt

SEQ ID NO: 296993 - DNA, 19 bp, Homo sapiens
  siRNA target sequence for IQGAP3 (NM_178229.3,1213-1231).
gctgtgcagcggatcaaca

SEQ ID NO: 296994 - DNA, 19 bp, Homo sapiens
  siRNA target sequence for IQGAP3 (NM_178229.3,1309-1327).
cctgttgcatcgtctatgt

SEQ ID NO: 296995 - DNA, 19 bp, Homo sapiens
  siRNA target sequence for IQGAP3 (NM_178229.3,1310-1328).
ctgttgcatcgtctatgta

SEQ ID NO: 296996 - DNA, 19 bp, Homo sapiens
  siRNA target sequence for IQGAP3 (NM_178229.3,1655-1673).
cagtcagcctcatcaatga

SEQ ID NO: 296997 - DNA, 19 bp, Homo sapiens
  siRNA target sequence for IQGAP3 (NM_178229.3,1727-1745).
cagctggcctagatgatgt

SEQ ID NO: 296998 - DNA, 19 bp, Homo sapiens
  siRNA target sequence for IQGAP3 (NM_178229.3,1868-1886).
gagccaaccaggacactaa

SEQ ID NO: 296999 - DNA, 19 bp, Homo sapiens
  siRNA target sequence for IQGAP3 (NM_178229.3,1883-1901).
ctaatacagctcagagaat

SEQ ID NO: 297000 - DNA, 19 bp, Homo sapiens
  siRNA target sequence for IQGAP3 (NM_178229.3,2078-2096).
ctttctgggttcaacatga

SEQ ID NO: 297001 - DNA, 19 bp, Homo sapiens
  siRNA target sequence for IQGAP3 (NM_178229.3,2260-2278).
gccaacgtcggctttgtta

SEQ ID NO: 297002 - DNA, 19 bp, Homo sapiens
  siRNA target sequence for IQGAP3 (NM_178229.3,2261-2279).
ccaacgtcggctttgttat

SEQ ID NO: 297003 - DNA, 19 bp, Homo sapiens
  siRNA target sequence for IQGAP3 (NM_178229.3,2307-2325).
cctagttcggcagaagttt

SEQ ID NO: 297004 - DNA, 19 bp, Homo sapiens
  siRNA target sequence for IQGAP3 (NM_178229.3,2329-2347).
gagcattcccactttctga

SEQ ID NO: 297005 - DNA, 19 bp, Homo sapiens
  siRNA target sequence for IQGAP3 (NM_178229.3,2354-2372).
ggctcccagcagtcatcaa

SEQ ID NO: 297006 - DNA, 19 bp, Homo sapiens
  siRNA target sequence for IQGAP3 (NM_178229.3,2399-2417).
ggcagcggaagatttacct

SEQ ID NO: 297007 - DNA, 19 bp, Homo sapiens
  siRNA target sequence for IQGAP3 (NM_178229.3,2584-2602).
caagatgactacaggatat

SEQ ID NO: 297008 - DNA, 19 bp, Homo sapiens
  siRNA target sequence for IQGAP3 (NM_178229.3,2884-2902).
gacaagcagaagggtttaa

SEQ ID NO: 297009 - DNA, 19 bp, Homo sapiens
  siRNA target sequence for IQGAP3 (NM_178229.3,2904-2922).
gtcgctgagcaaagagaaa

SEQ ID NO: 297010 - DNA, 19 bp, Homo sapiens
  siRNA target sequence for IQGAP3 (NM_178229.3,2919-2937).
gaaacggcagaaactagaa

SEQ ID NO: 297011 - DNA, 19 bp, Homo sapiens
  siRNA target sequence for IQGAP3 (NM_178229.3,2928-2946).
gaaactagaagcataccaa

SEQ ID NO: 297012 - DNA, 19 bp, Homo sapiens
  siRNA target sequence for IQGAP3 (NM_178229.3,2939-2957).
cataccaacacctcttcta

SEQ ID NO: 297013 - DNA, 19 bp, Homo sapiens
  siRNA target sequence for IQGAP3 (NM_178229.3,3258-3276).
ggatgtgctagaagacaaa

SEQ ID NO: 297014 - DNA, 19 bp, Homo sapiens
  siRNA target sequence for IQGAP3 (NM_178229.3,3298-3316).
cctgtccacctctataaga

SEQ ID NO: 297015 - DNA, 19 bp, Homo sapiens
  siRNA target sequence for IQGAP3 (NM_178229.3,3299-3317).
ctgtccacctctataagaa

SEQ ID NO: 297016 - DNA, 19 bp, Homo sapiens
  siRNA target sequence for IQGAP3 (NM_178229.3,3301-3319).
gtccacctctataagaact

SEQ ID NO: 297017 - DNA, 19 bp, Homo sapiens
  siRNA target sequence for IQGAP3 (NM_178229.3,3354-3372).
cagccatctcccatatgat

SEQ ID NO: 297018 - DNA, 19 bp, Homo sapiens
  siRNA target sequence for IQGAP3 (NM_178229.3,3356-3374).
gccatctcccatatgatgt

SEQ ID NO: 297019 - DNA, 19 bp, Homo sapiens
  siRNA target sequence for IQGAP3 (NM_178229.3,3439-3457).
ctcctcgccatgactgata

SEQ ID NO: 297020 - DNA, 19 bp, Homo sapiens
  siRNA target sequence for IQGAP3 (NM_178229.3,3442-3460).
ctcgccatgactgataagt

SEQ ID NO: 297021 - DNA, 19 bp, Homo sapiens
  siRNA target sequence for IQGAP3 (NM_178229.3,3450-3468).
gactgataagttcctttta

SEQ ID NO: 297022 - DNA, 19 bp, Homo sapiens
  siRNA target sequence for IQGAP3 (NM_178229.3,3497-3515).
cgtatgggatgcgatatgt

SEQ ID NO: 297023 - DNA, 19 bp, Homo sapiens
  siRNA target sequence for IQGAP3 (NM_178229.3,3533-3551).
caactctggcagagaaatt

SEQ ID NO: 297024 - DNA, 19 bp, Homo sapiens
  siRNA target sequence for IQGAP3 (NM_178229.3,3563-3581).
cagacagcgaggtctataa

SEQ ID NO: 297025 - DNA, 19 bp, Homo sapiens
  siRNA target sequence for IQGAP3 (NM_178229.3,3769-3787).
ctacgggtcctgaatgact

SEQ ID NO: 297026 - DNA, 19 bp, Homo sapiens
  siRNA target sequence for IQGAP3 (NM_178229.3,4035-4053).
catccctgaccttattggt

SEQ ID NO: 297027 - DNA, 19 bp, Homo sapiens
  siRNA target sequence for IQGAP3 (NM_178229.3,4107-4125).
gacgctgaccaacaagttt

SEQ ID NO: 297028 - DNA, 19 bp, Homo sapiens
  siRNA target sequence for IQGAP3 (NM_178229.3,4110-4128).
gctgaccaacaagtttgaa

SEQ ID NO: 297029 - DNA, 19 bp, Homo sapiens
  siRNA target sequence for IQGAP3 (NM_178229.3,4188-4206).
gctgttggccgatatcata

SEQ ID NO: 297030 - DNA, 19 bp, Homo sapiens
  siRNA target sequence for IQGAP3 (NM_178229.3,4401-4419).
gaacctacgccgacttgaa

SEQ ID NO: 297031 - DNA, 19 bp, Homo sapiens
  siRNA target sequence for IQGAP3 (NM_178229.3,4428-4446).
gttggtcagcgccagaaat

SEQ ID NO: 297032 - DNA, 19 bp, Homo sapiens
  siRNA target sequence for IQGAP3 (NM_178229.3,4530-4548).
gaagctgcaggccacatta

SEQ ID NO: 297033 - DNA, 19 bp, Homo sapiens
  siRNA target sequence for IQGAP3 (NM_178229.3,4560-4578).
cactaagaccaccttctat

SEQ ID NO: 297034 - DNA, 19 bp, Homo sapiens
  siRNA target sequence for IQGAP3 (NM_178229.3,4562-4580).
ctaagaccaccttctatga

SEQ ID NO: 297035 - DNA, 19 bp, Homo sapiens
  siRNA target sequence for IQGAP3 (NM_178229.3,4582-4600).
gagcagggtgactactaca

SEQ ID NO: 297036 - DNA, 19 bp, Homo sapiens
  siRNA target sequence for IQGAP3 (NM_178229.3,4710-4728).
gggtgtcttggtggaaatt

SEQ ID NO: 297037 - DNA, 19 bp, Homo sapiens
  siRNA target sequence for IQGAP3 (NM_178229.3,4881-4899).
gggtgtggctgtcatgaaa

SEQ ID NO: 297038 - DNA, 19 bp, Homo sapiens
  siRNA target sequence for RASA1 (NM_002890.1,591-609).
ctctggatggaccagaata

SEQ ID NO: 297039 - DNA, 19 bp, Homo sapiens
  siRNA target sequence for RASA1 (NM_002890.1,679-697).
cagaacgatagcagaagaa

SEQ ID NO: 297040 - DNA, 19 bp, Homo sapiens
  siRNA target sequence for RASA1 (NM_002890.1,794-812).
gttgtcaaccattttagga

SEQ ID NO: 297041 - DNA, 19 bp, Homo sapiens
  siRNA target sequence for RASA1 (NM_002890.1,797-815).
gtcaaccattttaggatta

SEQ ID NO: 297042 - DNA, 19 bp, Homo sapiens
  siRNA target sequence for RASA1 (NM_002890.1,819-837).
ctatgtgtggagattacta

SEQ ID NO: 297043 - DNA, 19 bp, Homo sapiens
  siRNA target sequence for RASA1 (NM_002890.1,842-860).
ggtggaagacgtttttctt

SEQ ID NO: 297044 - DNA, 19 bp, Homo sapiens
  siRNA target sequence for RASA1 (NM_002890.1,858-876).
cttcactgtcagacctaat

SEQ ID NO: 297045 - DNA, 19 bp, Homo sapiens
  siRNA target sequence for RASA1 (NM_002890.1,863-881).
ctgtcagacctaataggtt

SEQ ID NO: 297046 - DNA, 19 bp, Homo sapiens
  siRNA target sequence for RASA1 (NM_002890.1,871-889).
cctaataggttattacagt

SEQ ID NO: 297047 - DNA, 19 bp, Homo sapiens
  siRNA target sequence for RASA1 (NM_002890.1,878-896).
ggttattacagtcatgttt

SEQ ID NO: 297048 - DNA, 19 bp, Homo sapiens
  siRNA target sequence for RASA1 (NM_002890.1,963-981).
ggcgtgtacgagctattct

SEQ ID NO: 297049 - DNA, 19 bp, Homo sapiens
  siRNA target sequence for RASA1 (NM_002890.1,964-982).
gcgtgtacgagctattcta

SEQ ID NO: 297050 - DNA, 19 bp, Homo sapiens
  siRNA target sequence for RASA1 (NM_002890.1,974-992).
gctattctaccttacacaa

SEQ ID NO: 297051 - DNA, 19 bp, Homo sapiens
  siRNA target sequence for RASA1 (NM_002890.1,975-993).
ctattctaccttacacaaa

SEQ ID NO: 297052 - DNA, 19 bp, Homo sapiens
  siRNA target sequence for RASA1 (NM_002890.1,1075-1093).
ggttacaaatttaagaaca

SEQ ID NO: 297053 - DNA, 19 bp, Homo sapiens
  siRNA target sequence for RASA1 (NM_002890.1,1195-1213).
ggaagcttataatttacta

SEQ ID NO: 297054 - DNA, 19 bp, Homo sapiens
  siRNA target sequence for RASA1 (NM_002890.1,1241-1259).
cttgtgaggccctcagata

SEQ ID NO: 297055 - DNA, 19 bp, Homo sapiens
  siRNA target sequence for RASA1 (NM_002890.1,1244-1262).
gtgaggccctcagataata

SEQ ID NO: 297056 - DNA, 19 bp, Homo sapiens
  siRNA target sequence for RASA1 (NM_002890.1,1263-1281).
ctcctggcgattattcact

SEQ ID NO: 297057 - DNA, 19 bp, Homo sapiens
  siRNA target sequence for RASA1 (NM_002890.1,1265-1283).
cctggcgattattcacttt

SEQ ID NO: 297058 - DNA, 19 bp, Homo sapiens
  siRNA target sequence for RASA1 (NM_002890.1,1266-1284).
ctggcgattattcacttta

SEQ ID NO: 297059 - DNA, 19 bp, Homo sapiens
  siRNA target sequence for RASA1 (NM_002890.1,1268-1286).
ggcgattattcactttatt

SEQ ID NO: 297060 - DNA, 19 bp, Homo sapiens
  siRNA target sequence for RASA1 (NM_002890.1,1323-1341).
gtccaacgccaaacaatca

SEQ ID NO: 297061 - DNA, 19 bp, Homo sapiens
  siRNA target sequence for RASA1 (NM_002890.1,1325-1343).
ccaacgccaaacaatcagt

SEQ ID NO: 297062 - DNA, 19 bp, Homo sapiens
  siRNA target sequence for RASA1 (NM_002890.1,1329-1347).
cgccaaacaatcagtttat

SEQ ID NO: 297063 - DNA, 19 bp, Homo sapiens
  siRNA target sequence for RASA1 (NM_002890.1,1348-1366).
gatgggaggccggtattat

SEQ ID NO: 297064 - DNA, 19 bp, Homo sapiens
  siRNA target sequence for RASA1 (NM_002890.1,1377-1395).
gggacatcatagatcacta

SEQ ID NO: 297065 - DNA, 19 bp, Homo sapiens
  siRNA target sequence for RASA1 (NM_002890.1,1384-1402).
catagatcactatcgaaaa

SEQ ID NO: 297066 - DNA, 19 bp, Homo sapiens
  siRNA target sequence for RASA1 (NM_002890.1,1447-1465).
gcaggatcaagaacaagta

SEQ ID NO: 297067 - DNA, 19 bp, Homo sapiens
  siRNA target sequence for RASA1 (NM_002890.1,1478-1496).
gtggatggcaaggaaatct

SEQ ID NO: 297068 - DNA, 19 bp, Homo sapiens
  siRNA target sequence for RASA1 (NM_002890.1,1484-1502).
ggcaaggaaatctataata

SEQ ID NO: 297069 - DNA, 19 bp, Homo sapiens
  siRNA target sequence for RASA1 (NM_002890.1,1503-1521).
ccatccgtcgtaaaacaaa

SEQ ID NO: 297070 - DNA, 19 bp, Homo sapiens
  siRNA target sequence for RASA1 (NM_002890.1,1507-1525).
ccgtcgtaaaacaaaggat

SEQ ID NO: 297071 - DNA, 19 bp, Homo sapiens
  siRNA target sequence for RASA1 (NM_002890.1,1613-1631).
ggtagtgatgcccaactta

SEQ ID NO: 297072 - DNA, 19 bp, Homo sapiens
  siRNA target sequence for RASA1 (NM_002890.1,1614-1632).
gtagtgatgcccaacttat

SEQ ID NO: 297073 - DNA, 19 bp, Homo sapiens
  siRNA target sequence for RASA1 (NM_002890.1,1619-1637).
gatgcccaacttatttatt

SEQ ID NO: 297074 - DNA, 19 bp, Homo sapiens
  siRNA target sequence for RASA1 (NM_002890.1,1623-1641).
cccaacttatttattttga

SEQ ID NO: 297075 - DNA, 19 bp, Homo sapiens
  siRNA target sequence for RASA1 (NM_002890.1,1645-1663).
cgaaaaacgagctaccaaa

SEQ ID NO: 297076 - DNA, 19 bp, Homo sapiens
  siRNA target sequence for RASA1 (NM_002890.1,1684-1702).
cagtgtatgttctgtctat

SEQ ID NO: 297077 - DNA, 19 bp, Homo sapiens
  siRNA target sequence for RASA1 (NM_002890.1,1699-1717).
ctatgtcgttcatgatagt

SEQ ID NO: 297078 - DNA, 19 bp, Homo sapiens
  siRNA target sequence for RASA1 (NM_002890.1,1720-1738).
ctttggcaggccaaactgt

SEQ ID NO: 297079 - DNA, 19 bp, Homo sapiens
  siRNA target sequence for RASA1 (NM_002890.1,1731-1749).
caaactgttttcagatagt

SEQ ID NO: 297080 - DNA, 19 bp, Homo sapiens
  siRNA target sequence for RASA1 (NM_002890.1,1846-1864).
caatttacggaaaagtagt

SEQ ID NO: 297081 - DNA, 19 bp, Homo sapiens
  siRNA target sequence for RASA1 (NM_002890.1,1926-1944).
cccataaactcccagtaaa

SEQ ID NO: 297082 - DNA, 19 bp, Homo sapiens
  siRNA target sequence for RASA1 (NM_002890.1,1927-1945).
ccataaactcccagtaaaa

SEQ ID NO: 297083 - DNA, 19 bp, Homo sapiens
  siRNA target sequence for RASA1 (NM_002890.1,1934-1952).
ctcccagtaaaacatttta

SEQ ID NO: 297084 - DNA, 19 bp, Homo sapiens
  siRNA target sequence for RASA1 (NM_002890.1,2081-2099).
gaaataactcttagtaata

SEQ ID NO: 297085 - DNA, 19 bp, Homo sapiens
  siRNA target sequence for RASA1 (NM_002890.1,2117-2135).
gatcctgatatcttattta

SEQ ID NO: 297086 - DNA, 19 bp, Homo sapiens
  siRNA target sequence for RASA1 (NM_002890.1,2142-2160).
gccagttgagccgattaca

SEQ ID NO: 297087 - DNA, 19 bp, Homo sapiens
  siRNA target sequence for RASA1 (NM_002890.1,2144-2162).
cagttgagccgattacaga

SEQ ID NO: 297088 - DNA, 19 bp, Homo sapiens
  siRNA target sequence for RASA1 (NM_002890.1,2165-2183).
gggcatgccacagatgaat

SEQ ID NO: 297089 - DNA, 19 bp, Homo sapiens
  siRNA target sequence for RASA1 (NM_002890.1,2192-2210).
ctcagctcccatataccat

SEQ ID NO: 297090 - DNA, 19 bp, Homo sapiens
  siRNA target sequence for RASA1 (NM_002890.1,2194-2212).
cagctcccatataccatta

SEQ ID NO: 297091 - DNA, 19 bp, Homo sapiens
  siRNA target sequence for RASA1 (NM_002890.1,2197-2215).
ctcccatataccattaaaa

SEQ ID NO: 297092 - DNA, 19 bp, Homo sapiens
  siRNA target sequence for RASA1 (NM_002890.1,2200-2218).
ccatataccattaaaaggt

SEQ ID NO: 297093 - DNA, 19 bp, Homo sapiens
  siRNA target sequence for RASA1 (NM_002890.1,2240-2258).
gttcgagcacgatactcta

SEQ ID NO: 297094 - DNA, 19 bp, Homo sapiens
  siRNA target sequence for RASA1 (NM_002890.1,2247-2265).
cacgatactctatggaaaa

SEQ ID NO: 297095 - DNA, 19 bp, Homo sapiens
  siRNA target sequence for RASA1 (NM_002890.1,2317-2335).
ggaacttcatgtagtctat

SEQ ID NO: 297096 - DNA, 19 bp, Homo sapiens
  siRNA target sequence for RASA1 (NM_002890.1,2321-2339).
cttcatgtagtctatgctt

SEQ ID NO: 297097 - DNA, 19 bp, Homo sapiens
  siRNA target sequence for RASA1 (NM_002890.1,2324-2342).
catgtagtctatgctttat

SEQ ID NO: 297098 - DNA, 19 bp, Homo sapiens
  siRNA target sequence for RASA1 (NM_002890.1,2332-2350).
ctatgctttatcacatgta

SEQ ID NO: 297099 - DNA, 19 bp, Homo sapiens
  siRNA target sequence for RASA1 (NM_002890.1,2379-2397).
gcatcctactgaggatttt

SEQ ID NO: 297100 - DNA, 19 bp, Homo sapiens
  siRNA target sequence for RASA1 (NM_002890.1,2380-2398).
catcctactgaggattttt

SEQ ID NO: 297101 - DNA, 19 bp, Homo sapiens
  siRNA target sequence for RASA1 (NM_002890.1,2410-2428).
gcttgaatcgttgttgtta

SEQ ID NO: 297102 - DNA, 19 bp, Homo sapiens
  siRNA target sequence for RASA1 (NM_002890.1,2411-2429).
cttgaatcgttgttgttat

SEQ ID NO: 297103 - DNA, 19 bp, Homo sapiens
  siRNA target sequence for RASA1 (NM_002890.1,2414-2432).
gaatcgttgttgttatgca

SEQ ID NO: 297104 - DNA, 19 bp, Homo sapiens
  siRNA target sequence for RASA1 (NM_002890.1,2505-2523).
ccttgatggagcagtatat

SEQ ID NO: 297105 - DNA, 19 bp, Homo sapiens
  siRNA target sequence for RASA1 (NM_002890.1,2532-2550).
ctgctacacagtttgttca

SEQ ID NO: 297106 - DNA, 19 bp, Homo sapiens
  siRNA target sequence for RASA1 (NM_002890.1,2601-2619).
gtgagttaagtccatcaaa

SEQ ID NO: 297107 - DNA, 19 bp, Homo sapiens
  siRNA target sequence for RASA1 (NM_002890.1,2603-2621).
gagttaagtccatcaaagt

SEQ ID NO: 297108 - DNA, 19 bp, Homo sapiens
  siRNA target sequence for RASA1 (NM_002890.1,2633-2651).
gaagatgtgaacactaatt

SEQ ID NO: 297109 - DNA, 19 bp, Homo sapiens
  siRNA target sequence for RASA1 (NM_002890.1,2636-2654).
gatgtgaacactaatttaa

SEQ ID NO: 297110 - DNA, 19 bp, Homo sapiens
  siRNA target sequence for RASA1 (NM_002890.1,2655-2673).
cacacctattgaacatact

SEQ ID NO: 297111 - DNA, 19 bp, Homo sapiens
  siRNA target sequence for RASA1 (NM_002890.1,2714-2732).
cttccaccgacattgagat

SEQ ID NO: 297112 - DNA, 19 bp, Homo sapiens
  siRNA target sequence for RASA1 (NM_002890.1,2717-2735).
ccaccgacattgagatata

SEQ ID NO: 297113 - DNA, 19 bp, Homo sapiens
  siRNA target sequence for RASA1 (NM_002890.1,2718-2736).
caccgacattgagatatat

SEQ ID NO: 297114 - DNA, 19 bp, Homo sapiens
  siRNA target sequence for RASA1 (NM_002890.1,2764-2782).
gcataagtggcctacaaat

SEQ ID NO: 297115 - DNA, 19 bp, Homo sapiens
  siRNA target sequence for RASA1 (NM_002890.1,2785-2803).
caccatgagaacaagagtt

SEQ ID NO: 297116 - DNA, 19 bp, Homo sapiens
  siRNA target sequence for RASA1 (NM_002890.1,2799-2817).
gagttgttagtggttttgt

SEQ ID NO: 297117 - DNA, 19 bp, Homo sapiens
  siRNA target sequence for RASA1 (NM_002890.1,2846-2864).
ctgaatccacggatgttca

SEQ ID NO: 297118 - DNA, 19 bp, Homo sapiens
  siRNA target sequence for RASA1 (NM_002890.1,2852-2870).
ccacggatgttcaatatca

SEQ ID NO: 297119 - DNA, 19 bp, Homo sapiens
  siRNA target sequence for RASA1 (NM_002890.1,2855-2873).
cggatgttcaatatcatct

SEQ ID NO: 297120 - DNA, 19 bp, Homo sapiens
  siRNA target sequence for RASA1 (NM_002890.1,2894-2912).
gctgcaagaacactgatat

SEQ ID NO: 297121 - DNA, 19 bp, Homo sapiens
  siRNA target sequence for RASA1 (NM_002890.1,2895-2913).
ctgcaagaacactgatatt

SEQ ID NO: 297122 - DNA, 19 bp, Homo sapiens
  siRNA target sequence for RASA1 (NM_002890.1,2906-2924).
ctgatattagtggctaaat

SEQ ID NO: 297123 - DNA, 19 bp, Homo sapiens
  siRNA target sequence for RASA1 (NM_002890.1,2908-2926).
gatattagtggctaaatct

SEQ ID NO: 297124 - DNA, 19 bp, Homo sapiens
  siRNA target sequence for RASA1 (NM_002890.1,2981-2999).
ggtgtcaatccattcatca

SEQ ID NO: 297125 - DNA, 19 bp, Homo sapiens
  siRNA target sequence for RASA1 (NM_002890.1,2984-3002).
gtcaatccattcatcaaaa

SEQ ID NO: 297126 - DNA, 19 bp, Homo sapiens
  siRNA target sequence for RASA1 (NM_002890.1,3003-3021).
gcaacaaacatcgtatgat

SEQ ID NO: 297127 - DNA, 19 bp, Homo sapiens
  siRNA target sequence for RASA1 (NM_002890.1,3011-3029).
catcgtatgatcatgtttt

SEQ ID NO: 297128 - DNA, 19 bp, Homo sapiens
  siRNA target sequence for RASA1 (NM_002890.1,3015-3033).
gtatgatcatgtttttaga

SEQ ID NO: 297129 - DNA, 19 bp, Homo sapiens
  siRNA target sequence for RASA1 (NM_002890.1,3022-3040).
catgtttttagatgaactt

SEQ ID NO: 297130 - DNA, 19 bp, Homo sapiens
  siRNA target sequence for RASA1 (NM_002890.1,3085-3103).
ggacctgtcccgtgattta

SEQ ID NO: 297131 - DNA, 19 bp, Homo sapiens
  siRNA target sequence for RASA1 (NM_002890.1,3118-3136).
gatttgcgtggctcattca

SEQ ID NO: 297132 - DNA, 19 bp, Homo sapiens
  siRNA target sequence for RASA1 (NM_002890.1,3124-3142).
cgtggctcattcagatgaa

SEQ ID NO: 297133 - DNA, 19 bp, Homo sapiens
  siRNA target sequence for RASA1 (NM_002890.1,3127-3145).
ggctcattcagatgaactt

SEQ ID NO: 297134 - DNA, 19 bp, Homo sapiens
  siRNA target sequence for RASA1 (NM_002890.1,3168-3186).
gtgcacagcagcacgtatt

SEQ ID NO: 297135 - DNA, 19 bp, Homo sapiens
  siRNA target sequence for RASA1 (NM_002890.1,3170-3188).
gcacagcagcacgtattga

SEQ ID NO: 297136 - DNA, 19 bp, Homo sapiens
  siRNA target sequence for RASA1 (NM_002890.1,3171-3189).
cacagcagcacgtattgaa

SEQ ID NO: 297137 - DNA, 19 bp, Homo sapiens
  siRNA target sequence for RASA2 (NM_006506.2,166-184).
ccccacaaaatgagagatt

SEQ ID NO: 297138 - DNA, 19 bp, Homo sapiens
  siRNA target sequence for RASA2 (NM_006506.2,341-359).
gagatctccgtataggaaa

SEQ ID NO: 297139 - DNA, 19 bp, Homo sapiens
  siRNA target sequence for RASA2 (NM_006506.2,423-441).
gcctgttgactccaattca

SEQ ID NO: 297140 - DNA, 19 bp, Homo sapiens
  siRNA target sequence for RASA2 (NM_006506.2,460-478).
caccttgaattaaaactga

SEQ ID NO: 297141 - DNA, 19 bp, Homo sapiens
  siRNA target sequence for RASA2 (NM_006506.2,509-527).
gccagcagcttgttgtaca

SEQ ID NO: 297142 - DNA, 19 bp, Homo sapiens
  siRNA target sequence for RASA2 (NM_006506.2,540-558).
ccatgggttgcctctcata

SEQ ID NO: 297143 - DNA, 19 bp, Homo sapiens
  siRNA target sequence for RASA2 (NM_006506.2,541-559).
catgggttgcctctcataa

SEQ ID NO: 297144 - DNA, 19 bp, Homo sapiens
  siRNA target sequence for RASA2 (NM_006506.2,574-592).
gacccttatgcaacagttt

SEQ ID NO: 297145 - DNA, 19 bp, Homo sapiens
  siRNA target sequence for RASA2 (NM_006506.2,576-594).
cccttatgcaacagtttct

SEQ ID NO: 297146 - DNA, 19 bp, Homo sapiens
  siRNA target sequence for RASA2 (NM_006506.2,647-665).
caagcaatccgcagtttaa

SEQ ID NO: 297147 - DNA, 19 bp, Homo sapiens
  siRNA target sequence for RASA2 (NM_006506.2,651-669).
caatccgcagtttaatgaa

SEQ ID NO: 297148 - DNA, 19 bp, Homo sapiens
  siRNA target sequence for RASA2 (NM_006506.2,656-674).
cgcagtttaatgaaatctt

SEQ ID NO: 297149 - DNA, 19 bp, Homo sapiens
  siRNA target sequence for RASA2 (NM_006506.2,762-780).
gatcgacttgtggaacaat

SEQ ID NO: 297150 - DNA, 19 bp, Homo sapiens
  siRNA target sequence for RASA2 (NM_006506.2,799-817).
gttttcctaggtgagatta

SEQ ID NO: 297151 - DNA, 19 bp, Homo sapiens
  siRNA target sequence for RASA2 (NM_006506.2,804-822).
cctaggtgagattaaggtt

SEQ ID NO: 297152 - DNA, 19 bp, Homo sapiens
  siRNA target sequence for RASA2 (NM_006506.2,819-837).
ggttcctgtgaacgtatta

SEQ ID NO: 297153 - DNA, 19 bp, Homo sapiens
  siRNA target sequence for RASA2 (NM_006506.2,820-838).
gttcctgtgaacgtattaa

SEQ ID NO: 297154 - DNA, 19 bp, Homo sapiens
  siRNA target sequence for RASA2 (NM_006506.2,823-841).
cctgtgaacgtattaagaa

SEQ ID NO: 297155 - DNA, 19 bp, Homo sapiens
  siRNA target sequence for RASA2 (NM_006506.2,828-846).
gaacgtattaagaactgat

SEQ ID NO: 297156 - DNA, 19 bp, Homo sapiens
  siRNA target sequence for RASA2 (NM_006506.2,870-888).
gctacagccaagagacaat

SEQ ID NO: 297157 - DNA, 19 bp, Homo sapiens
  siRNA target sequence for RASA2 (NM_006506.2,889-907).
ggaaacaagtcatccaaaa

SEQ ID NO: 297158 - DNA, 19 bp, Homo sapiens
  siRNA target sequence for RASA2 (NM_006506.2,918-936).
ggggtctcttcgattaaat

SEQ ID NO: 297159 - DNA, 19 bp, Homo sapiens
  siRNA target sequence for RASA2 (NM_006506.2,919-937).
gggtctcttcgattaaata

SEQ ID NO: 297160 - DNA, 19 bp, Homo sapiens
  siRNA target sequence for RASA2 (NM_006506.2,920-938).
ggtctcttcgattaaatat

SEQ ID NO: 297161 - DNA, 19 bp, Homo sapiens
  siRNA target sequence for RASA2 (NM_006506.2,925-943).
cttcgattaaatatatgtt

SEQ ID NO: 297162 - DNA, 19 bp, Homo sapiens
  siRNA target sequence for RASA2 (NM_006506.2,928-946).
cgattaaatatatgttata

SEQ ID NO: 297163 - DNA, 19 bp, Homo sapiens
  siRNA target sequence for RASA2 (NM_006506.2,960-978).
gcttccttcagagtactat

SEQ ID NO: 297164 - DNA, 19 bp, Homo sapiens
  siRNA target sequence for RASA2 (NM_006506.2,975-993).
ctatggtcctttgaaaact

SEQ ID NO: 297165 - DNA, 19 bp, Homo sapiens
  siRNA target sequence for RASA2 (NM_006506.2,1052-1070).
gtgaaatatgtcgagataa

SEQ ID NO: 297166 - DNA, 19 bp, Homo sapiens
  siRNA target sequence for RASA2 (NM_006506.2,1101-1119).
gctgctgcaccatgataaa

SEQ ID NO: 297167 - DNA, 19 bp, Homo sapiens
  siRNA target sequence for RASA2 (NM_006506.2,1104-1122).
gctgcaccatgataaactt

SEQ ID NO: 297168 - DNA, 19 bp, Homo sapiens
  siRNA target sequence for RASA2 (NM_006506.2,1107-1125).
gcaccatgataaacttgtt

SEQ ID NO: 297169 - DNA, 19 bp, Homo sapiens
  siRNA target sequence for RASA2 (NM_006506.2,1136-1154).
ctgctgtggctgaattaga

SEQ ID NO: 297170 - DNA, 19 bp, Homo sapiens
  siRNA target sequence for RASA2 (NM_006506.2,1138-1156).
gctgtggctgaattagact

SEQ ID NO: 297171 - DNA, 19 bp, Homo sapiens
  siRNA target sequence for RASA2 (NM_006506.2,1241-1259).
gagggcactacctgaaagt

SEQ ID NO: 297172 - DNA, 19 bp, Homo sapiens
  siRNA target sequence for RASA2 (NM_006506.2,1245-1263).
gcactacctgaaagtaaca

SEQ ID NO: 297173 - DNA, 19 bp, Homo sapiens
  siRNA target sequence for RASA2 (NM_006506.2,1284-1302).
gatatgtgactcctcaaaa

SEQ ID NO: 297174 - DNA, 19 bp, Homo sapiens
  siRNA target sequence for RASA2 (NM_006506.2,1305-1323).
ctgtgaaatcgatcctatt

SEQ ID NO: 297175 - DNA, 19 bp, Homo sapiens
  siRNA target sequence for RASA2 (NM_006506.2,1307-1325).
gtgaaatcgatcctattaa

SEQ ID NO: 297176 - DNA, 19 bp, Homo sapiens
  siRNA target sequence for RASA2 (NM_006506.2,1309-1327).
gaaatcgatcctattaaat

SEQ ID NO: 297177 - DNA, 19 bp, Homo sapiens
  siRNA target sequence for RASA2 (NM_006506.2,1359-1377).
ggagaatctgcgctactat

SEQ ID NO: 297178 - DNA, 19 bp, Homo sapiens
  siRNA target sequence for RASA2 (NM_006506.2,1362-1380).
gaatctgcgctactatgta

SEQ ID NO: 297179 - DNA, 19 bp, Homo sapiens
  siRNA target sequence for RASA2 (NM_006506.2,1370-1388).
gctactatgtagacaagtt

SEQ ID NO: 297180 - DNA, 19 bp, Homo sapiens
  siRNA target sequence for RASA2 (NM_006506.2,1371-1389).
ctactatgtagacaagtta

SEQ ID NO: 297181 - DNA, 19 bp, Homo sapiens
  siRNA target sequence for RASA2 (NM_006506.2,1424-1442).
ccactgtaatgtgtgatat

SEQ ID NO: 297182 - DNA, 19 bp, Homo sapiens
  siRNA target sequence for RASA2 (NM_006506.2,1461-1479).
gatggctactcagagattt

SEQ ID NO: 297183 - DNA, 19 bp, Homo sapiens
  siRNA target sequence for RASA2 (NM_006506.2,1481-1499).
ctaatgaccctcatgttca

SEQ ID NO: 297184 - DNA, 19 bp, Homo sapiens
  siRNA target sequence for RASA2 (NM_006506.2,1486-1504).
gaccctcatgttcagtatt

SEQ ID NO: 297185 - DNA, 19 bp, Homo sapiens
  siRNA target sequence for RASA2 (NM_006506.2,1488-1506).
ccctcatgttcagtattct

SEQ ID NO: 297186 - DNA, 19 bp, Homo sapiens
  siRNA target sequence for RASA2 (NM_006506.2,1507-1525).
gcagtgagcagctttgtat

SEQ ID NO: 297187 - DNA, 19 bp, Homo sapiens
  siRNA target sequence for RASA2 (NM_006506.2,1508-1526).
cagtgagcagctttgtatt

SEQ ID NO: 297188 - DNA, 19 bp, Homo sapiens
  siRNA target sequence for RASA2 (NM_006506.2,1517-1535).
gctttgtatttcttcgttt

SEQ ID NO: 297189 - DNA, 19 bp, Homo sapiens
  siRNA target sequence for RASA2 (NM_006506.2,1548-1566).
cgtagtatcacctcatact

SEQ ID NO: 297190 - DNA, 19 bp, Homo sapiens
  siRNA target sequence for RASA2 (NM_006506.2,1549-1567).
gtagtatcacctcatactt

SEQ ID NO: 297191 - DNA, 19 bp, Homo sapiens
  siRNA target sequence for RASA2 (NM_006506.2,1588-1606).
ccagatgcacagacaatta

SEQ ID NO: 297192 - DNA, 19 bp, Homo sapiens
  siRNA target sequence for RASA2 (NM_006506.2,1591-1609).
gatgcacagacaattagaa

SEQ ID NO: 297193 - DNA, 19 bp, Homo sapiens
  siRNA target sequence for RASA2 (NM_006506.2,1594-1612).
gcacagacaattagaacat

SEQ ID NO: 297194 - DNA, 19 bp, Homo sapiens
  siRNA target sequence for RASA2 (NM_006506.2,1599-1617).
gacaattagaacattaact

SEQ ID NO: 297195 - DNA, 19 bp, Homo sapiens
  siRNA target sequence for RASA2 (NM_006506.2,1616-1634).
ctctcatctcaaaaactat

SEQ ID NO: 297196 - DNA, 19 bp, Homo sapiens
  siRNA target sequence for RASA2 (NM_006506.2,1623-1641).
ctcaaaaactatacaaact

SEQ ID NO: 297197 - DNA, 19 bp, Homo sapiens
  siRNA target sequence for RASA2 (NM_006506.2,1625-1643).
caaaaactatacaaacttt

SEQ ID NO: 297198 - DNA, 19 bp, Homo sapiens
  siRNA target sequence for RASA2 (NM_006506.2,1654-1672).
gggagtctgtccaaaagca

SEQ ID NO: 297199 - DNA, 19 bp, Homo sapiens
  siRNA target sequence for RASA2 (NM_006506.2,1655-1673).
ggagtctgtccaaaagcaa

SEQ ID NO: 297200 - DNA, 19 bp, Homo sapiens
  siRNA target sequence for RASA2 (NM_006506.2,1679-1697).
gtttcaaagagacattcat

SEQ ID NO: 297201 - DNA, 19 bp, Homo sapiens
  siRNA target sequence for RASA2 (NM_006506.2,1853-1871).
gaactcggattggaaaaaa

SEQ ID NO: 297202 - DNA, 19 bp, Homo sapiens
  siRNA target sequence for RASA2 (NM_006506.2,1885-1903).
cgatggttctgcttaacaa

SEQ ID NO: 297203 - DNA, 19 bp, Homo sapiens
  siRNA target sequence for RASA2 (NM_006506.2,1933-1951).
ggcaaagatgcaatctaca

SEQ ID NO: 297204 - DNA, 19 bp, Homo sapiens
  siRNA target sequence for RASA2 (NM_006506.2,2036-2054).
cggagaaaccactctatgt

SEQ ID NO: 297205 - DNA, 19 bp, Homo sapiens
  siRNA target sequence for RASA2 (NM_006506.2,2106-2124).
ggtgagccgatgcaatcaa

SEQ ID NO: 297206 - DNA, 19 bp, Homo sapiens
  siRNA target sequence for RASA2 (NM_006506.2,2107-2125).
gtgagccgatgcaatcaaa

SEQ ID NO: 297207 - DNA, 19 bp, Homo sapiens
  siRNA target sequence for RASA2 (NM_006506.2,2205-2223).
cggctgcaagccatgtact

SEQ ID NO: 297208 - DNA, 19 bp, Homo sapiens
  siRNA target sequence for RASA2 (NM_006506.2,2241-2259).
catccaaatagatattgat

SEQ ID NO: 297209 - DNA, 19 bp, Homo sapiens
  siRNA target sequence for RASA2 (NM_006506.2,2244-2262).
ccaaatagatattgatgaa

SEQ ID NO: 297210 - DNA, 19 bp, Homo sapiens
  siRNA target sequence for RASA2 (NM_006506.2,2371-2389).
gagcctgatgattattcta

SEQ ID NO: 297211 - DNA, 19 bp, Homo sapiens
  siRNA target sequence for RASA2 (NM_006506.2,2395-2413).
gtaatcgaggattctgtaa

SEQ ID NO: 297212 - DNA, 19 bp, Homo sapiens
  siRNA target sequence for RASA2 (NM_006506.2,2403-2421).
ggattctgtaacaaccttt

SEQ ID NO: 297213 - DNA, 19 bp, Homo sapiens
  siRNA target sequence for RASA2 (NM_006506.2,2404-2422).
gattctgtaacaaccttta

SEQ ID NO: 297214 - DNA, 19 bp, Homo sapiens
  siRNA target sequence for RASA2 (NM_006506.2,2458-2476).
ctggatgaacctcatgaaa

SEQ ID NO: 297215 - DNA, 19 bp, Homo sapiens
  siRNA target sequence for RASA2 (NM_006506.2,2517-2535).
caaggaaaatccaattgtt

SEQ ID NO: 297216 - DNA, 19 bp, Homo sapiens
  siRNA target sequence for RASA2 (NM_006506.2,2527-2545).
ccaattgttgggaaagcat

SEQ ID NO: 297217 - DNA, 19 bp, Homo sapiens
  siRNA target sequence for RASAL2 (NM_004841.2,159-177).
cctcgtagacggagtatct

SEQ ID NO: 297218 - DNA, 19 bp, Homo sapiens
  siRNA target sequence for RASAL2 (NM_004841.2,176-194).
ctcagggaccagtacatca

SEQ ID NO: 297219 - DNA, 19 bp, Homo sapiens
  siRNA target sequence for RASAL2 (NM_004841.2,358-376).
ctcgtgggctgcctaaact

SEQ ID NO: 297220 - DNA, 19 bp, Homo sapiens
  siRNA target sequence for RASAL2 (NM_004841.2,381-399).
gagtcacgttcccatgaat

SEQ ID NO: 297221 - DNA, 19 bp, Homo sapiens
  siRNA target sequence for RASAL2 (NM_004841.2,385-403).
cacgttcccatgaatcctt

SEQ ID NO: 297222 - DNA, 19 bp, Homo sapiens
  siRNA target sequence for RASAL2 (NM_004841.2,481-499).
gcatccttggacaagactt

SEQ ID NO: 297223 - DNA, 19 bp, Homo sapiens
  siRNA target sequence for RASAL2 (NM_004841.2,503-521).
ctttgaggttacctactta

SEQ ID NO: 297224 - DNA, 19 bp, Homo sapiens
  siRNA target sequence for RASAL2 (NM_004841.2,514-532).
cctacttaagtggaagtaa

SEQ ID NO: 297225 - DNA, 19 bp, Homo sapiens
  siRNA target sequence for RASAL2 (NM_004841.2,581-599).
ccttcgcaggacagttcaa

SEQ ID NO: 297226 - DNA, 19 bp, Homo sapiens
  siRNA target sequence for RASAL2 (NM_004841.2,587-605).
caggacagttcaacctaat

SEQ ID NO: 297227 - DNA, 19 bp, Homo sapiens
  siRNA target sequence for RASAL2 (NM_004841.2,589-607).
ggacagttcaacctaataa

SEQ ID NO: 297228 - DNA, 19 bp, Homo sapiens
  siRNA target sequence for RASAL2 (NM_004841.2,597-615).
caacctaataaggacaatt

SEQ ID NO: 297229 - DNA, 19 bp, Homo sapiens
  siRNA target sequence for RASAL2 (NM_004841.2,616-634).
gcaggcgagctgaaaatgt

SEQ ID NO: 297230 - DNA, 19 bp, Homo sapiens
  siRNA target sequence for RASAL2 (NM_004841.2,617-635).
caggcgagctgaaaatgtt

SEQ ID NO: 297231 - DNA, 19 bp, Homo sapiens
  siRNA target sequence for RASAL2 (NM_004841.2,619-637).
ggcgagctgaaaatgttct

SEQ ID NO: 297232 - DNA, 19 bp, Homo sapiens
  siRNA target sequence for RASAL2 (NM_004841.2,620-638).
gcgagctgaaaatgttctt

SEQ ID NO: 297233 - DNA, 19 bp, Homo sapiens
  siRNA target sequence for RASAL2 (NM_004841.2,625-643).
ctgaaaatgttcttcgttt

SEQ ID NO: 297234 - DNA, 19 bp, Homo sapiens
  siRNA target sequence for RASAL2 (NM_004841.2,691-709).
gcgaactgtgccttgatga

SEQ ID NO: 297235 - DNA, 19 bp, Homo sapiens
  siRNA target sequence for RASAL2 (NM_004841.2,692-710).
cgaactgtgccttgatgat

SEQ ID NO: 297236 - DNA, 19 bp, Homo sapiens
  siRNA target sequence for RASAL2 (NM_004841.2,737-755).
gaccaaagcagacaatatt

SEQ ID NO: 297237 - DNA, 19 bp, Homo sapiens
  siRNA target sequence for RASAL2 (NM_004841.2,762-780).
ggcgaacattttgaattct

SEQ ID NO: 297238 - DNA, 19 bp, Homo sapiens
  siRNA target sequence for RASAL2 (NM_004841.2,802-820).
gtatcacagttcacattta

SEQ ID NO: 297239 - DNA, 19 bp, Homo sapiens
  siRNA target sequence for RASAL2 (NM_004841.2,848-866).
ggacaagaataattatgta

SEQ ID NO: 297240 - DNA, 19 bp, Homo sapiens
  siRNA target sequence for RASAL2 (NM_004841.2,896-914).
gactggtcgccaatttgta

SEQ ID NO: 297241 - DNA, 19 bp, Homo sapiens
  siRNA target sequence for RASAL2 (NM_004841.2,898-916).
ctggtcgccaatttgtaga

SEQ ID NO: 297242 - DNA, 19 bp, Homo sapiens
  siRNA target sequence for RASAL2 (NM_004841.2,900-918).
ggtcgccaatttgtagaaa

SEQ ID NO: 297243 - DNA, 19 bp, Homo sapiens
  siRNA target sequence for RASAL2 (NM_004841.2,939-957).
cctacacccaacaaaggaa

SEQ ID NO: 297244 - DNA, 19 bp, Homo sapiens
  siRNA target sequence for RASAL2 (NM_004841.2,959-977).
gacaggaggaccttctatt

SEQ ID NO: 297245 - DNA, 19 bp, Homo sapiens
  siRNA target sequence for RASAL2 (NM_004841.2,967-985).
gaccttctattcggattaa

SEQ ID NO: 297246 - DNA, 19 bp, Homo sapiens
  siRNA target sequence for RASAL2 (NM_004841.2,980-998).
gattaaatcacgtttccaa

SEQ ID NO: 297247 - DNA, 19 bp, Homo sapiens
  siRNA target sequence for RASAL2 (NM_004841.2,1013-1031).
gcctatggagcaatacaaa

SEQ ID NO: 297248 - DNA, 19 bp, Homo sapiens
  siRNA target sequence for RASAL2 (NM_004841.2,1077-1095).
gtccttgagccagtaatta

SEQ ID NO: 297249 - DNA, 19 bp, Homo sapiens
  siRNA target sequence for RASAL2 (NM_004841.2,1087-1105).
cagtaattagtgtgagaaa

SEQ ID NO: 297250 - DNA, 19 bp, Homo sapiens
  siRNA target sequence for RASAL2 (NM_004841.2,1123-1141).
gtgccttagtgcacattct

SEQ ID NO: 297251 - DNA, 19 bp, Homo sapiens
  siRNA target sequence for RASAL2 (NM_004841.2,1126-1144).
ccttagtgcacattcttca

SEQ ID NO: 297252 - DNA, 19 bp, Homo sapiens
  siRNA target sequence for RASAL2 (NM_004841.2,1150-1168).
ctggcagagccaaggattt

SEQ ID NO: 297253 - DNA, 19 bp, Homo sapiens
  siRNA target sequence for RASAL2 (NM_004841.2,1274-1292).
gttggtgggacaacagtat

SEQ ID NO: 297254 - DNA, 19 bp, Homo sapiens
  siRNA target sequence for RASAL2 (NM_004841.2,1280-1298).
gggacaacagtatcttcat

SEQ ID NO: 297255 - DNA, 19 bp, Homo sapiens
  siRNA target sequence for RASAL2 (NM_004841.2,1299-1317).
gacgcactgggggagttta

SEQ ID NO: 297256 - DNA, 19 bp, Homo sapiens
  siRNA target sequence for RASAL2 (NM_004841.2,1309-1327).
gggagtttatcaaagcttt

SEQ ID NO: 297257 - DNA, 19 bp, Homo sapiens
  siRNA target sequence for RASAL2 (NM_004841.2,1356-1374).
gatcccagcaaatgttcat

SEQ ID NO: 297258 - DNA, 19 bp, Homo sapiens
  siRNA target sequence for RASAL2 (NM_004841.2,1372-1390).
catctagtgaactgataga

SEQ ID NO: 297259 - DNA, 19 bp, Homo sapiens
  siRNA target sequence for RASAL2 (NM_004841.2,1460-1478).
ccctcgtgagttgaaagaa

SEQ ID NO: 297260 - DNA, 19 bp, Homo sapiens
  siRNA target sequence for RASAL2 (NM_004841.2,1462-1480).
ctcgtgagttgaaagaagt

SEQ ID NO: 297261 - DNA, 19 bp, Homo sapiens
  siRNA target sequence for RASAL2 (NM_004841.2,1591-1609).
ccagtcttttcaaccttat

SEQ ID NO: 297262 - DNA, 19 bp, Homo sapiens
  siRNA target sequence for RASAL2 (NM_004841.2,1629-1647).
cgcacatctcggactctaa

SEQ ID NO: 297263 - DNA, 19 bp, Homo sapiens
  siRNA target sequence for RASAL2 (NM_004841.2,1631-1649).
cacatctcggactctaact

SEQ ID NO: 297264 - DNA, 19 bp, Homo sapiens
  siRNA target sequence for RASAL2 (NM_004841.2,1633-1651).
catctcggactctaactct

SEQ ID NO: 297265 - DNA, 19 bp, Homo sapiens
  siRNA target sequence for RASAL2 (NM_004841.2,1636-1654).
ctcggactctaactcttat

SEQ ID NO: 297266 - DNA, 19 bp, Homo sapiens
  siRNA target sequence for RASAL2 (NM_004841.2,1752-1770).
ggaatgaagcgctttcttt

SEQ ID NO: 297267 - DNA, 19 bp, Homo sapiens
  siRNA target sequence for RASAL2 (NM_004841.2,1753-1771).
gaatgaagcgctttctttt

SEQ ID NO: 297268 - DNA, 19 bp, Homo sapiens
  siRNA target sequence for RASAL2 (NM_004841.2,1848-1866).
gttttgcattccttactgt

SEQ ID NO: 297269 - DNA, 19 bp, Homo sapiens
  siRNA target sequence for RASAL2 (NM_004841.2,1858-1876).
ccttactgtgggaagtagt

SEQ ID NO: 297270 - DNA, 19 bp, Homo sapiens
  siRNA target sequence for RASAL2 (NM_004841.2,1872-1890).
gtagtttcccaacttgata

SEQ ID NO: 297271 - DNA, 19 bp, Homo sapiens
  siRNA target sequence for RASAL2 (NM_004841.2,1884-1902).
cttgataagggtgaaaatt

SEQ ID NO: 297272 - DNA, 19 bp, Homo sapiens
  siRNA target sequence for RASAL2 (NM_004841.2,1942-1960).
ctcgtgttcttgctgatat

SEQ ID NO: 297273 - DNA, 19 bp, Homo sapiens
  siRNA target sequence for RASAL2 (NM_004841.2,1944-1962).
cgtgttcttgctgatatta

SEQ ID NO: 297274 - DNA, 19 bp, Homo sapiens
  siRNA target sequence for RASAL2 (NM_004841.2,1953-1971).
gctgatattaccaagtcat

SEQ ID NO: 297275 - DNA, 19 bp, Homo sapiens
  siRNA target sequence for RASAL2 (NM_004841.2,1956-1974).
gatattaccaagtcattga

SEQ ID NO: 297276 - DNA, 19 bp, Homo sapiens
  siRNA target sequence for RASAL2 (NM_004841.2,1975-1993).
ctaatcctacgccaataca

SEQ ID NO: 297277 - DNA, 19 bp, Homo sapiens
  siRNA target sequence for RASAL2 (NM_004841.2,2003-2021).
gagacgcttcactgaacat

SEQ ID NO: 297278 - DNA, 19 bp, Homo sapiens
  siRNA target sequence for RASAL2 (NM_004841.2,2005-2023).
gacgcttcactgaacataa

SEQ ID NO: 297279 - DNA, 19 bp, Homo sapiens
  siRNA target sequence for RASAL2 (NM_004841.2,2007-2025).
cgcttcactgaacataact

SEQ ID NO: 297280 - DNA, 19 bp, Homo sapiens
  siRNA target sequence for RASAL2 (NM_004841.2,2090-2108).
cagtgatttgcataaacta

SEQ ID NO: 297281 - DNA, 19 bp, Homo sapiens
  siRNA target sequence for RASAL2 (NM_004841.2,2146-2164).
gagggaaaacattattgct

SEQ ID NO: 297282 - DNA, 19 bp, Homo sapiens
  siRNA target sequence for RASAL2 (NM_004841.2,2180-2198).
ctctcagagcatgacttat

SEQ ID NO: 297283 - DNA, 19 bp, Homo sapiens
  siRNA target sequence for RASAL2 (NM_004841.2,2215-2233).
gggaaagtagccttcctaa

SEQ ID NO: 297284 - DNA, 19 bp, Homo sapiens
  siRNA target sequence for RASAL2 (NM_004841.2,2216-2234).
ggaaagtagccttcctaat

SEQ ID NO: 297285 - DNA, 19 bp, Homo sapiens
  siRNA target sequence for RASAL2 (NM_004841.2,2465-2483).
gttccagaaccctgtctat

SEQ ID NO: 297286 - DNA, 19 bp, Homo sapiens
  siRNA target sequence for RASAL2 (NM_004841.2,2475-2493).
cctgtctatcacctcaata

SEQ ID NO: 297287 - DNA, 19 bp, Homo sapiens
  siRNA target sequence for RASAL2 (NM_004841.2,2510-2528).
gccaaaggcctctatagat

SEQ ID NO: 297288 - DNA, 19 bp, Homo sapiens
  siRNA target sequence for RASAL2 (NM_004841.2,2511-2529).
ccaaaggcctctatagatt

SEQ ID NO: 297289 - DNA, 19 bp, Homo sapiens
  siRNA target sequence for RASAL2 (NM_004841.2,2697-2715).
gctttgccacgacaaaata

SEQ ID NO: 297290 - DNA, 19 bp, Homo sapiens
  siRNA target sequence for RASAL2 (NM_004841.2,2793-2811).
cacagtgcttctttacgta

SEQ ID NO: 297291 - DNA, 19 bp, Homo sapiens
  siRNA target sequence for RASAL2 (NM_004841.2,2906-2924).
gagccctgttcccaaagtt

SEQ ID NO: 297292 - DNA, 19 bp, Homo sapiens
  siRNA target sequence for RASAL2 (NM_004841.2,2909-2927).
ccctgttcccaaagttaga

SEQ ID NO: 297293 - DNA, 19 bp, Homo sapiens
  siRNA target sequence for RASAL2 (NM_004841.2,3017-3035).
gaacaatgggcagtatgaa

SEQ ID NO: 297294 - DNA, 19 bp, Homo sapiens
  siRNA target sequence for RASAL2 (NM_004841.2,3073-3091).
ccaagcatgctgagaagta

SEQ ID NO: 297295 - DNA, 19 bp, Homo sapiens
  siRNA target sequence for RASAL2 (NM_004841.2,3335-3353).
gatgcaagcagttattgat

SEQ ID NO: 297296 - DNA, 19 bp, Homo sapiens
  siRNA target sequence for RASAL2 (NM_004841.2,3427-3445).
gcgcgctgacccaagtgaa

SEQ ID NO: 297297 - DNA, 19 bp, Homo sapiens
  siRNA target sequence for RASAL2 (NM_170692.1,403-421).
cccttccgagggtcagttt

SEQ ID NO: 297298 - DNA, 19 bp, Homo sapiens
  siRNA target sequence for ARHGDIB (NM_001175.1,206-224).
ggacagcaagctcaattat

SEQ ID NO: 297299 - DNA, 19 bp, Homo sapiens
  siRNA target sequence for ARHGDIB (NM_001175.1,207-225).
gacagcaagctcaattata

SEQ ID NO: 297300 - DNA, 19 bp, Homo sapiens
  siRNA target sequence for ARHGDIB (NM_001175.1,276-294).
gatgagagtctaattaagt

SEQ ID NO: 297301 - DNA, 19 bp, Homo sapiens
  siRNA target sequence for ARHGDIB (NM_001175.1,491-509).
caaagtgaacagggatatt

SEQ ID NO: 297302 - DNA, 19 bp, Homo sapiens
  siRNA target sequence for ARHGDIB (NM_001175.1,495-513).
gtgaacagggatattgtgt

SEQ ID NO: 297303 - DNA, 19 bp, Homo sapiens
  siRNA target sequence for ARHGDIB (NM_001175.1,512-530).
gtcaggcctgaaatacgtt

SEQ ID NO: 297304 - DNA, 19 bp, Homo sapiens
  siRNA target sequence for ARHGDIB (NM_001175.1,558-576).
gtggataaagcaacattta

SEQ ID NO: 297305 - DNA, 19 bp, Homo sapiens
  siRNA target sequence for ARHGDIB (NM_001175.1,660-678).
ggcacgtaccacaacaagt

SEQ ID NO: 297306 - DNA, 19 bp, Homo sapiens
  siRNA target sequence for ARHGDIB (NM_001175.1,669-687).
cacaacaagtccttcttca

SEQ ID NO: 297307 - DNA, 19 bp, Homo sapiens
  siRNA target sequence for ARHGDIB (NM_001175.1,720-738).
gagtggaacctgtcgatta

SEQ ID NO: 297308 - DNA, 19 bp, Homo sapiens
  siRNA target sequence for ARHGDIB (NM_001175.1,724-742).
ggaacctgtcgattaagaa

SEQ ID NO: 297309 - DNA, 19 bp, Homo sapiens
  siRNA target sequence for ARHGDIG (NM_001176.1,432-450).
ggaaggtgttgattacaga

SEQ ID NO: 297310 - DNA, 19 bp, Homo sapiens
  siRNA target sequence for ARHGDIG (NM_001176.1,469-487).
gtccacagggagattgtca

SEQ ID NO: 297311 - DNA, 19 bp, Homo sapiens
  siRNA target sequence for GDI2 (NM_001494.2,202-220).
gtatcctgtcaggtataat

SEQ ID NO: 297312 - DNA, 19 bp, Homo sapiens
  siRNA target sequence for GDI2 (NM_001494.2,206-224).
cctgtcaggtataatgtca

SEQ ID NO: 297313 - DNA, 19 bp, Homo sapiens
  siRNA target sequence for GDI2 (NM_001494.2,299-317).
ggaagatttatacaaaaga

SEQ ID NO: 297314 - DNA, 19 bp, Homo sapiens
  siRNA target sequence for GDI2 (NM_001494.2,331-349).
gatcaccacccgagtcaat

SEQ ID NO: 297315 - DNA, 19 bp, Homo sapiens
  siRNA target sequence for GDI2 (NM_001494.2,414-432).
gttaagatgctgctttata

SEQ ID NO: 297316 - DNA, 19 bp, Homo sapiens
  siRNA target sequence for GDI2 (NM_001494.2,541-559).
gcctaatgggattgtttga

SEQ ID NO: 297317 - DNA, 19 bp, Homo sapiens
  siRNA target sequence for GDI2 (NM_001494.2,548-566).
gggattgtttgaaaaacgt

SEQ ID NO: 297318 - DNA, 19 bp, Homo sapiens
  siRNA target sequence for GDI2 (NM_001494.2,565-583).
gtcgcttcaggaaattcct

SEQ ID NO: 297319 - DNA, 19 bp, Homo sapiens
  siRNA target sequence for GDI2 (NM_001494.2,572-590).
caggaaattcctagtgtat

SEQ ID NO: 297320 - DNA, 19 bp, Homo sapiens
  siRNA target sequence for GDI2 (NM_001494.2,630-648).
ggcattgatcctaagaaga

SEQ ID NO: 297321 - DNA, 19 bp, Homo sapiens
  siRNA target sequence for GDI2 (NM_001494.2,683-701).
gggtcaagacgttatagat

SEQ ID NO: 297322 - DNA, 19 bp, Homo sapiens
  siRNA target sequence for GDI2 (NM_001494.2,684-702).
ggtcaagacgttatagatt

SEQ ID NO: 297323 - DNA, 19 bp, Homo sapiens
  siRNA target sequence for GDI2 (NM_001494.2,685-703).
gtcaagacgttatagattt

SEQ ID NO: 297324 - DNA, 19 bp, Homo sapiens
  siRNA target sequence for GDI2 (NM_001494.2,714-732).
gctcttgcactttacagaa

SEQ ID NO: 297325 - DNA, 19 bp, Homo sapiens
  siRNA target sequence for GDI2 (NM_001494.2,728-746).
cagaactgatgattactta

SEQ ID NO: 297326 - DNA, 19 bp, Homo sapiens
  siRNA target sequence for GDI2 (NM_001494.2,730-748).
gaactgatgattacttaga

SEQ ID NO: 297327 - DNA, 19 bp, Homo sapiens
  siRNA target sequence for GDI2 (NM_001494.2,743-761).
cttagatcaaccgtgttat

SEQ ID NO: 297328 - DNA, 19 bp, Homo sapiens
  siRNA target sequence for GDI2 (NM_001494.2,747-765).
gatcaaccgtgttatgaaa

SEQ ID NO: 297329 - DNA, 19 bp, Homo sapiens
  siRNA target sequence for GDI2 (NM_001494.2,790-808).
gtgaatctttggcaagata

SEQ ID NO: 297330 - DNA, 19 bp, Homo sapiens
  siRNA target sequence for GDI2 (NM_001494.2,810-828).
ggcaaaagcccataccttt

SEQ ID NO: 297331 - DNA, 19 bp, Homo sapiens
  siRNA target sequence for GDI2 (NM_001494.2,811-829).
gcaaaagcccataccttta

SEQ ID NO: 297332 - DNA, 19 bp, Homo sapiens
  siRNA target sequence for GDI2 (NM_001494.2,872-890).
gctaagtgctatttatgga

SEQ ID NO: 297333 - DNA, 19 bp, Homo sapiens
  siRNA target sequence for GDI2 (NM_001494.2,891-909).
ggtacctatatgctgaata

SEQ ID NO: 297334 - DNA, 19 bp, Homo sapiens
  siRNA target sequence for GDI2 (NM_001494.2,892-910).
gtacctatatgctgaataa

SEQ ID NO: 297335 - DNA, 19 bp, Homo sapiens
  siRNA target sequence for GDI2 (NM_001494.2,997-1015).
gtgaccccagctacgtaaa

SEQ ID NO: 297336 - DNA, 19 bp, Homo sapiens
  siRNA target sequence for GDI2 (NM_001494.2,1001-1019).
ccccagctacgtaaaagat

SEQ ID NO: 297337 - DNA, 19 bp, Homo sapiens
  siRNA target sequence for GDI2 (NM_001494.2,1011-1029).
gtaaaagatcgggtagaaa

SEQ ID NO: 297338 - DNA, 19 bp, Homo sapiens
  siRNA target sequence for GDI2 (NM_001494.2,1036-1054).
gccaggtgatcagagttat

SEQ ID NO: 297339 - DNA, 19 bp, Homo sapiens
  siRNA target sequence for GDI2 (NM_001494.2,1037-1055).
ccaggtgatcagagttatt

SEQ ID NO: 297340 - DNA, 19 bp, Homo sapiens
  siRNA target sequence for GDI2 (NM_001494.2,1100-1118).
ctgccagatcattattcca

SEQ ID NO: 297341 - DNA, 19 bp, Homo sapiens
  siRNA target sequence for GDI2 (NM_001494.2,1128-1146).
gtcaatcgaaagtcagata

SEQ ID NO: 297342 - DNA, 19 bp, Homo sapiens
  siRNA target sequence for GDI2 (NM_001494.2,1188-1206).
caagggaagtacattgcta

SEQ ID NO: 297343 - DNA, 19 bp, Homo sapiens
  siRNA target sequence for GDI2 (NM_001494.2,1193-1211).
gaagtacattgctatagtt

SEQ ID NO: 297344 - DNA, 19 bp, Homo sapiens
  siRNA target sequence for GDI2 (NM_001494.2,1196-1214).
gtacattgctatagttagt

SEQ ID NO: 297345 - DNA, 19 bp, Homo sapiens
  siRNA target sequence for GDI2 (NM_001494.2,1265-1283).
gctcttggaaccaattgaa

SEQ ID NO: 297346 - DNA, 19 bp, Homo sapiens
  siRNA target sequence for GDI2 (NM_001494.2,1346-1364).
ctttatttcccgcacatat

SEQ ID NO: 297347 - DNA, 19 bp, Homo sapiens
  siRNA target sequence for GDI2 (NM_001494.2,1385-1403).
gacaacgtgtgatgacatt

SEQ ID NO: 297348 - DNA, 19 bp, Homo sapiens
  siRNA target sequence for GDI2 (NM_001494.2,1387-1405).
caacgtgtgatgacattaa

SEQ ID NO: 297349 - DNA, 19 bp, Homo sapiens
  siRNA target sequence for GDI2 (NM_001494.2,1426-1444).
caggatcagagtttgactt

SEQ ID NO: 297350 - DNA, 19 bp, Homo sapiens
  siRNA target sequence for GDI1 (NM_001493.1,115-133).
ccggtctcaccgaatgcat

SEQ ID NO: 297351 - DNA, 19 bp, Homo sapiens
  siRNA target sequence for GDI1 (NM_001493.1,234-252).
ctgtataagcgttttcagt

SEQ ID NO: 297352 - DNA, 19 bp, Homo sapiens
  siRNA target sequence for GDI1 (NM_001493.1,457-475).
ccttggcttccaatctgat

SEQ ID NO: 297353 - DNA, 19 bp, Homo sapiens
  siRNA target sequence for GDI1 (NM_001493.1,467-485).
caatctgatgggcatgttt

SEQ ID NO: 297354 - DNA, 19 bp, Homo sapiens
  siRNA target sequence for GDI1 (NM_001493.1,473-491).
gatgggcatgtttgagaaa

SEQ ID NO: 297355 - DNA, 19 bp, Homo sapiens
  siRNA target sequence for GDI1 (NM_001493.1,590-608).
cgtctaccggaagtttgat

SEQ ID NO: 297356 - DNA, 19 bp, Homo sapiens
  siRNA target sequence for GDI1 (NM_001493.1,612-630).
ggccaggatgtcatcgatt

SEQ ID NO: 297357 - DNA, 19 bp, Homo sapiens
  siRNA target sequence for GDI1 (NM_001493.1,613-631).
gccaggatgtcatcgattt

SEQ ID NO: 297358 - DNA, 19 bp, Homo sapiens
  siRNA target sequence for GDI1 (NM_001493.1,615-633).
caggatgtcatcgatttca

SEQ ID NO: 297359 - DNA, 19 bp, Homo sapiens
  siRNA target sequence for GDI1 (NM_001493.1,694-712).
ccgtcaaccgcatcaagtt

SEQ ID NO: 297360 - DNA, 19 bp, Homo sapiens
  siRNA target sequence for GDI1 (NM_001493.1,696-714).
gtcaaccgcatcaagttgt

SEQ ID NO: 297361 - DNA, 19 bp, Homo sapiens
  siRNA target sequence for GDI1 (NM_001493.1,739-757).
gcaagagcccatatttata

SEQ ID NO: 297362 - DNA, 19 bp, Homo sapiens
  siRNA target sequence for GDI1 (NM_001493.1,784-802).
cccagggttttgcaagatt

SEQ ID NO: 297363 - DNA, 19 bp, Homo sapiens
  siRNA target sequence for GDI1 (NM_001493.1,788-806).
gggttttgcaagattgagt

SEQ ID NO: 297364 - DNA, 19 bp, Homo sapiens
  siRNA target sequence for GDI1 (NM_001493.1,809-827).
catctatggggggacatat

SEQ ID NO: 297365 - DNA, 19 bp, Homo sapiens
  siRNA target sequence for GDI1 (NM_001493.1,966-984).
caggttatccgcatcatct

SEQ ID NO: 297366 - DNA, 19 bp, Homo sapiens
  siRNA target sequence for GDI1 (NM_001493.1,1019-1037).
cgccaactcctgccaaata

SEQ ID NO: 297367 - DNA, 19 bp, Homo sapiens
  siRNA target sequence for GDI1 (NM_001493.1,1118-1136).
gggcaagtacatagctatt

SEQ ID NO: 297368 - DNA, 19 bp, Homo sapiens
  siRNA target sequence for GDI1 (NM_001493.1,1156-1174).
ccacggaccctgaaaagga

SEQ ID NO: 297369 - DNA, 19 bp, Homo sapiens
  siRNA target sequence for GDI1 (NM_001493.1,1202-1220).
gcccattgaccagaagttt

SEQ ID NO: 297370 - DNA, 19 bp, Homo sapiens
  siRNA target sequence for GDI1 (NM_001493.1,1214-1232).
gaagtttgtggctatcagt

SEQ ID NO: 297371 - DNA, 19 bp, Homo sapiens
  siRNA target sequence for GDI1 (NM_001493.1,1223-1241).
ggctatcagtgacttgtat

SEQ ID NO: 297372 - DNA, 19 bp, Homo sapiens
  siRNA target sequence for GDI1 (NM_001493.1,1225-1243).
ctatcagtgacttgtatga

SEQ ID NO: 297373 - DNA, 19 bp, Homo sapiens
  siRNA target sequence for GDI1 (NM_001493.1,1235-1253).
cttgtatgagcccattgat

SEQ ID NO: 297374 - DNA, 19 bp, Homo sapiens
  siRNA target sequence for GDI1 (NM_001493.1,1238-1256).
gtatgagcccattgatgat

SEQ ID NO: 297375 - DNA, 19 bp, Homo sapiens
  siRNA target sequence for GDI1 (NM_001493.1,1292-1310).
cgatgccaccacacacttt

SEQ ID NO: 297376 - DNA, 19 bp, Homo sapiens
  siRNA target sequence for GDI1 (NM_001493.1,1353-1371).
gctggcacggcctttgact

SEQ ID NO: 297377 - DNA, 19 bp, Homo sapiens
  siRNA target sequence for MAPKAP1 (NM_024117.2,314-332).
ggacaatccaactatcatt

SEQ ID NO: 297378 - DNA, 19 bp, Homo sapiens
  siRNA target sequence for MAPKAP1 (NM_024117.2,317-335).
caatccaactatcattcta

SEQ ID NO: 297379 - DNA, 19 bp, Homo sapiens
  siRNA target sequence for MAPKAP1 (NM_024117.2,329-347).
cattctagctcatattcga

SEQ ID NO: 297380 - DNA, 19 bp, Homo sapiens
  siRNA target sequence for MAPKAP1 (NM_024117.2,380-398).
gtgtgagatggttctcatt

SEQ ID NO: 297381 - DNA, 19 bp, Homo sapiens
  siRNA target sequence for MAPKAP1 (NM_024117.2,382-400).
gtgagatggttctcattga

SEQ ID NO: 297382 - DNA, 19 bp, Homo sapiens
  siRNA target sequence for MAPKAP1 (NM_024117.2,386-404).
gatggttctcattgatcat

SEQ ID NO: 297383 - DNA, 19 bp, Homo sapiens
  siRNA target sequence for MAPKAP1 (NM_024117.2,482-500).
gactcagggctatgtatat

SEQ ID NO: 297384 - DNA, 19 bp, Homo sapiens
  siRNA target sequence for MAPKAP1 (NM_024117.2,501-519).
gcccagtcagtcgatatta

SEQ ID NO: 297385 - DNA, 19 bp, Homo sapiens
  siRNA target sequence for MAPKAP1 (NM_024117.2,504-522).
cagtcagtcgatattacct

SEQ ID NO: 297386 - DNA, 19 bp, Homo sapiens
  siRNA target sequence for MAPKAP1 (NM_024117.2,510-528).
gtcgatattacctcaagtt

SEQ ID NO: 297387 - DNA, 19 bp, Homo sapiens
  siRNA target sequence for MAPKAP1 (NM_024117.2,530-548).
ggactttggtattagaaga

SEQ ID NO: 297388 - DNA, 19 bp, Homo sapiens
  siRNA target sequence for MAPKAP1 (NM_024117.2,551-569).
ctcaaacacagctcaaaga

SEQ ID NO: 297389 - DNA, 19 bp, Homo sapiens
  siRNA target sequence for MAPKAP1 (NM_024117.2,557-575).
cacagctcaaagattagaa

SEQ ID NO: 297390 - DNA, 19 bp, Homo sapiens
  siRNA target sequence for MAPKAP1 (NM_024117.2,645-663).
caatcagcccaggagttaa

SEQ ID NO: 297391 - DNA, 19 bp, Homo sapiens
  siRNA target sequence for MAPKAP1 (NM_024117.2,689-707).
caaagagaagcctccaatt

SEQ ID NO: 297392 - DNA, 19 bp, Homo sapiens
  siRNA target sequence for MAPKAP1 (NM_024117.2,709-727).
ctgggaagcagtcgatatt

SEQ ID NO: 297393 - DNA, 19 bp, Homo sapiens
  siRNA target sequence for MAPKAP1 (NM_024117.2,711-729).
gggaagcagtcgatattat

SEQ ID NO: 297394 - DNA, 19 bp, Homo sapiens
  siRNA target sequence for MAPKAP1 (NM_024117.2,716-734).
gcagtcgatattatctgta

SEQ ID NO: 297395 - DNA, 19 bp, Homo sapiens
  siRNA target sequence for MAPKAP1 (NM_024117.2,756-774).
cagctgaataaccctttta

SEQ ID NO: 297396 - DNA, 19 bp, Homo sapiens
  siRNA target sequence for MAPKAP1 (NM_024117.2,769-787).
cttttaacgagtattccaa

SEQ ID NO: 297397 - DNA, 19 bp, Homo sapiens
  siRNA target sequence for MAPKAP1 (NM_024117.2,776-794).
cgagtattccaaatttgat

SEQ ID NO: 297398 - DNA, 19 bp, Homo sapiens
  siRNA target sequence for MAPKAP1 (NM_024117.2,800-818).
gggtcatgtaggtacaaca

SEQ ID NO: 297399 - DNA, 19 bp, Homo sapiens
  siRNA target sequence for MAPKAP1 (NM_024117.2,929-947).
catctgctggcagtataca

SEQ ID NO: 297400 - DNA, 19 bp, Homo sapiens
  siRNA target sequence for MAPKAP1 (NM_024117.2,985-1003).
gtgcctactgcctgcatat

SEQ ID NO: 297401 - DNA, 19 bp, Homo sapiens
  siRNA target sequence for MAPKAP1 (NM_024117.2,1092-1110).
ctggttgaaaagtactcat

SEQ ID NO: 297402 - DNA, 19 bp, Homo sapiens
  siRNA target sequence for MAPKAP1 (NM_024117.2,1116-1134).
ggtctgacatccaaagagt

SEQ ID NO: 297403 - DNA, 19 bp, Homo sapiens
  siRNA target sequence for MAPKAP1 (NM_024117.2,1133-1151).
gtcactctttgttcgaata

SEQ ID NO: 297404 - DNA, 19 bp, Homo sapiens
  siRNA target sequence for MAPKAP1 (NM_024117.2,1181-1199).
ggtggacaacacaaaggtt

SEQ ID NO: 297405 - DNA, 19 bp, Homo sapiens
  siRNA target sequence for MAPKAP1 (NM_024117.2,1182-1200).
gtggacaacacaaaggtta

SEQ ID NO: 297406 - DNA, 19 bp, Homo sapiens
  siRNA target sequence for MAPKAP1 (NM_024117.2,1223-1241).
ggcagtgaagcgaagaaaa

SEQ ID NO: 297407 - DNA, 19 bp, Homo sapiens
  siRNA target sequence for MAPKAP1 (NM_024117.2,1227-1245).
gtgaagcgaagaaaaggat

SEQ ID NO: 297408 - DNA, 19 bp, Homo sapiens
  siRNA target sequence for MAPKAP1 (NM_024117.2,1287-1305).
gaggattcgcaaattgaca

SEQ ID NO: 297409 - DNA, 19 bp, Homo sapiens
  siRNA target sequence for MAPKAP1 (NM_024117.2,1289-1307).
ggattcgcaaattgacata

SEQ ID NO: 297410 - DNA, 19 bp, Homo sapiens
  siRNA target sequence for MAPKAP1 (NM_024117.2,1326-1344).
cttagcagccaccattaca

SEQ ID NO: 297411 - DNA, 19 bp, Homo sapiens
  siRNA target sequence for MAPKAP1 (NM_024117.2,1337-1355).
ccattacaagtcattcaaa

SEQ ID NO: 297412 - DNA, 19 bp, Homo sapiens
  siRNA target sequence for MAPKAP1 (NM_024117.2,1387-1405).
ccgacgtacagctaggtat

SEQ ID NO: 297413 - DNA, 19 bp, Homo sapiens
  siRNA target sequence for MAPKAP1 (NM_024117.2,1391-1409).
cgtacagctaggtatctct

SEQ ID NO: 297414 - DNA, 19 bp, Homo sapiens
  siRNA target sequence for MAPKAP1 (NM_024117.2,1424-1442).
gatagaccctgttacgaat

SEQ ID NO: 297415 - DNA, 19 bp, Homo sapiens
  siRNA target sequence for MAPKAP1 (NM_024117.2,1428-1446).
gaccctgttacgaatcaga

SEQ ID NO: 297416 - DNA, 19 bp, Homo sapiens
  siRNA target sequence for MAPKAP1 (NM_024117.2,1430-1448).
ccctgttacgaatcagaaa

SEQ ID NO: 297417 - DNA, 19 bp, Homo sapiens
  siRNA target sequence for MAPKAP1 (NM_024117.2,1445-1463).
gaaagccagcactaagttt

SEQ ID NO: 297418 - DNA, 19 bp, Homo sapiens
  siRNA target sequence for MAPKAP1 (NM_024117.2,1449-1467).
gccagcactaagttttgga

SEQ ID NO: 297419 - DNA, 19 bp, Homo sapiens
  siRNA target sequence for MAPKAP1 (NM_024117.2,1451-1469).
cagcactaagttttggatt

SEQ ID NO: 297420 - DNA, 19 bp, Homo sapiens
  siRNA target sequence for MAPKAP1 (NM_024117.2,1456-1474).
ctaagttttggattaagca

SEQ ID NO: 297421 - DNA, 19 bp, Homo sapiens
  siRNA target sequence for MAPKAP1 (NM_024117.2,1475-1493).
gaaacccatctcaatcgat

SEQ ID NO: 297422 - DNA, 19 bp, Homo sapiens
  siRNA target sequence for MAPKAP1 (NM_024117.2,1535-1553).
ccccagtcacgcaatattt

SEQ ID NO: 297423 - DNA, 19 bp, Homo sapiens
  siRNA target sequence for MAPKAP1 (NM_024117.2,1536-1554).
cccagtcacgcaatattta

SEQ ID NO: 297424 - DNA, 19 bp, Homo sapiens
  siRNA target sequence for MAPKAP1 (NM_024117.2,1566-1584).
ctaagcaatcacgactata

SEQ ID NO: 297425 - DNA, 19 bp, Homo sapiens
  siRNA target sequence for MAPKAP1 (NM_024117.2,1607-1625).
cgctgctaccgtcaatgaa

SEQ ID NO: 297426 - DNA, 19 bp, Homo sapiens
  siRNA target sequence for MAPKAP1 (NM_024117.2,1608-1626).
gctgctaccgtcaatgaaa

SEQ ID NO: 297427 - DNA, 19 bp, Homo sapiens
  siRNA target sequence for MAPKAP1 (NM_024117.2,1629-1647).
gtgctcaaggttaactaca

SEQ ID NO: 297428 - DNA, 19 bp, Homo sapiens
  siRNA target sequence for MAPKAP1 (NM_024117.2,1682-1700).
ctactttgctcaaaaacaa

SEQ ID NO: 297429 - DNA, 19 bp, Homo sapiens
  siRNA target sequence for RIN3 (NM_024832.3,194-212).
gggtccggttccagttgtt

SEQ ID NO: 297430 - DNA, 19 bp, Homo sapiens
  siRNA target sequence for RIN3 (NM_024832.3,261-279).
ccagccaacccgaaaaact

SEQ ID NO: 297431 - DNA, 19 bp, Homo sapiens
  siRNA target sequence for RIN3 (NM_024832.3,486-504).
gtgctcgaatacaccatta

SEQ ID NO: 297432 - DNA, 19 bp, Homo sapiens
  siRNA target sequence for RIN3 (NM_024832.3,552-570).
gaggacatcttcagattga

SEQ ID NO: 297433 - DNA, 19 bp, Homo sapiens
  siRNA target sequence for RIN3 (NM_024832.3,581-599).
ctgtgtcagtagagactta

SEQ ID NO: 297434 - DNA, 19 bp, Homo sapiens
  siRNA target sequence for RIN3 (NM_024832.3,1982-2000).
ggacaagggctcgtacttt

SEQ ID NO: 297435 - DNA, 19 bp, Homo sapiens
  siRNA target sequence for RIN3 (NM_024832.3,2079-2097).
gagattcgcaccatgatga

SEQ ID NO: 297436 - DNA, 19 bp, Homo sapiens
  siRNA target sequence for RIN3 (NM_024832.3,2168-2186).
ggaggagctcgaagcaatt

SEQ ID NO: 297437 - DNA, 19 bp, Homo sapiens
  siRNA target sequence for RIN3 (NM_024832.3,2171-2189).
ggagctcgaagcaattgta

SEQ ID NO: 297438 - DNA, 19 bp, Homo sapiens
  siRNA target sequence for RIN3 (NM_024832.3,2407-2425).
cctactcacctgagaagaa

SEQ ID NO: 297439 - DNA, 19 bp, Homo sapiens
  siRNA target sequence for RIN3 (NM_024832.3,2439-2457).
ctcaagacctgcaaactca

SEQ ID NO: 297440 - DNA, 19 bp, Homo sapiens
  siRNA target sequence for RIN3 (NM_024832.3,2552-2570).
cacggagatgcttctcaat

SEQ ID NO: 297441 - DNA, 19 bp, Homo sapiens
  siRNA target sequence for RIN3 (NM_024832.3,2612-2630).
gggggagggttcctactat

SEQ ID NO: 297442 - DNA, 19 bp, Homo sapiens
  siRNA target sequence for RIN3 (NM_024832.3,2614-2632).
gggagggttcctactatct

SEQ ID NO: 297443 - DNA, 19 bp, Homo sapiens
  siRNA target sequence for RIN3 (NM_024832.3,2616-2634).
gagggttcctactatctga

SEQ ID NO: 297444 - DNA, 19 bp, Homo sapiens
  siRNA target sequence for RIN3 (NM_024832.3,2773-2791).
cctccgtacaggacttcat

SEQ ID NO: 297445 - DNA, 19 bp, Homo sapiens
  siRNA target sequence for RIN3 (NM_024832.3,2872-2890).
cgcagtgcgcggagaagtt

SEQ ID NO: 297446 - DNA, 19 bp, Homo sapiens
  siRNA target sequence for RANGAP1 (NM_002883.2,345-363).
gcaagagcctcaaactcaa

SEQ ID NO: 297447 - DNA, 19 bp, Homo sapiens
  siRNA target sequence for RANGAP1 (NM_002883.2,756-774).
cagctctgaccgaatgtca

SEQ ID NO: 297448 - DNA, 19 bp, Homo sapiens
  siRNA target sequence for RANGAP1 (NM_002883.2,767-785).
gaatgtcaccggaaatcca

SEQ ID NO: 297449 - DNA, 19 bp, Homo sapiens
  siRNA target sequence for RANGAP1 (NM_002883.2,831-849).
gaaaccgtctggagaatga

SEQ ID NO: 297450 - DNA, 19 bp, Homo sapiens
  siRNA target sequence for RANGAP1 (NM_002883.2,901-919).
ggtccacatgccacagaat

SEQ ID NO: 297451 - DNA, 19 bp, Homo sapiens
  siRNA target sequence for RANGAP1 (NM_002883.2,981-999).
gggtcatcaacctgaatga

SEQ ID NO: 297452 - DNA, 19 bp, Homo sapiens
  siRNA target sequence for RANGAP1 (NM_002883.2,1058-1076).
caggtggaggtgattaatt

SEQ ID NO: 297453 - DNA, 19 bp, Homo sapiens
  siRNA target sequence for RANGAP1 (NM_002883.2,1156-1174).
gctgaacttgtcattctgt

SEQ ID NO: 297454 - DNA, 19 bp, Homo sapiens
  siRNA target sequence for RANGAP1 (NM_002883.2,1489-1507).
cacgccctcacggaagatt

SEQ ID NO: 297455 - DNA, 19 bp, Homo sapiens
  siRNA target sequence for RANGAP1 (NM_002883.2,1491-1509).
cgccctcacggaagattct

SEQ ID NO: 297456 - DNA, 19 bp, Homo sapiens
  siRNA target sequence for RANGAP1 (NM_002883.2,1504-1522).
gattctggaccctaacact

SEQ ID NO: 297457 - DNA, 19 bp, Homo sapiens
  siRNA target sequence for SIPA1 (NM_006747.2,480-498).
gcttgagcctcgatggttt

SEQ ID NO: 297458 - DNA, 19 bp, Homo sapiens
  siRNA target sequence for SIPA1 (NM_006747.2,491-509).
gatggtttgcccactatga

SEQ ID NO: 297459 - DNA, 19 bp, Homo sapiens
  siRNA target sequence for SIPA1 (NM_006747.2,513-531).
gcaaagcctgctctttgat

SEQ ID NO: 297460 - DNA, 19 bp, Homo sapiens
  siRNA target sequence for SIPA1 (NM_006747.2,797-815).
ctggctactaccgcaaata

SEQ ID NO: 297461 - DNA, 19 bp, Homo sapiens
  siRNA target sequence for SIPA1 (NM_006747.2,799-817).
ggctactaccgcaaatact

SEQ ID NO: 297462 - DNA, 19 bp, Homo sapiens
  siRNA target sequence for SIPA1 (NM_006747.2,1291-1309).
gcccagctagacaccaaaa

SEQ ID NO: 297463 - DNA, 19 bp, Homo sapiens
  siRNA target sequence for SIPA1 (NM_006747.2,1384-1402).
ctgccttacacccctaata

SEQ ID NO: 297464 - DNA, 19 bp, Homo sapiens
  siRNA target sequence for SIPA1 (NM_006747.2,1388-1406).
cttacacccctaataacca

SEQ ID NO: 297465 - DNA, 19 bp, Homo sapiens
  siRNA target sequence for SIPA1 (NM_006747.2,2278-2296).
cacgtggagcgcttcacat

SEQ ID NO: 297466 - DNA, 19 bp, Homo sapiens
  siRNA target sequence for BART1 (NM_012106.2,385-403).
gcagccttcaccacaacat

SEQ ID NO: 297467 - DNA, 19 bp, Homo sapiens
  siRNA target sequence for BART1 (NM_012106.2,401-419).
cattacagcaccataagga

SEQ ID NO: 297468 - DNA, 19 bp, Homo sapiens
  siRNA target sequence for BART1 (NM_012106.2,421-439).
gaagtggctggtgacatat

SEQ ID NO: 297469 - DNA, 19 bp, Homo sapiens
  siRNA target sequence for CCM1 (NM_004912.3,1150-1168).
cagaggaaaacgagttgta

SEQ ID NO: 297470 - DNA, 19 bp, Homo sapiens
  siRNA target sequence for CCM1 (NM_004912.3,1152-1170).
gaggaaaacgagttgtact

SEQ ID NO: 297471 - DNA, 19 bp, Homo sapiens
  siRNA target sequence for CCM1 (NM_004912.3,1154-1172).
ggaaaacgagttgtactaa

SEQ ID NO: 297472 - DNA, 19 bp, Homo sapiens
  siRNA target sequence for CCM1 (NM_004912.3,1204-1222).
gggcagagaagcatcatta

SEQ ID NO: 297473 - DNA, 19 bp, Homo sapiens
  siRNA target sequence for CCM1 (NM_004912.3,1205-1223).
ggcagagaagcatcattat

SEQ ID NO: 297474 - DNA, 19 bp, Homo sapiens
  siRNA target sequence for CCM1 (NM_004912.3,1206-1224).
gcagagaagcatcattatt

SEQ ID NO: 297475 - DNA, 19 bp, Homo sapiens
  siRNA target sequence for CCM1 (NM_004912.3,1274-1292).
ggatgcccaattttttact

SEQ ID NO: 297476 - DNA, 19 bp, Homo sapiens
  siRNA target sequence for CCM1 (NM_004912.3,1369-1387).
cttggataagtggttagat

SEQ ID NO: 297477 - DNA, 19 bp, Homo sapiens
  siRNA target sequence for CCM1 (NM_004912.3,1434-1452).
ctcctcttgagcggataaa

SEQ ID NO: 297478 - DNA, 19 bp, Homo sapiens
  siRNA target sequence for CCM1 (NM_004912.3,1436-1454).
cctcttgagcggataaaaa

SEQ ID NO: 297479 - DNA, 19 bp, Homo sapiens
  siRNA target sequence for CCM1 (NM_004912.3,1439-1457).
cttgagcggataaaaacta

SEQ ID NO: 297480 - DNA, 19 bp, Homo sapiens
  siRNA target sequence for CCM1 (NM_004912.3,1495-1513).
gacagaaaactcactacat

SEQ ID NO: 297481 - DNA, 19 bp, Homo sapiens
  siRNA target sequence for CCM1 (NM_004912.3,1518-1536).
gctatagtgcactagaaat

SEQ ID NO: 297482 - DNA, 19 bp, Homo sapiens
  siRNA target sequence for CCM1 (NM_004912.3,1519-1537).
ctatagtgcactagaaata

SEQ ID NO: 297483 - DNA, 19 bp, Homo sapiens
  siRNA target sequence for CCM1 (NM_004912.3,1526-1544).
gcactagaaataaagagta

SEQ ID NO: 297484 - DNA, 19 bp, Homo sapiens
  siRNA target sequence for CCM1 (NM_004912.3,1595-1613).
ggatcagatcttcagtata

SEQ ID NO: 297485 - DNA, 19 bp, Homo sapiens
  siRNA target sequence for CCM1 (NM_004912.3,1614-1632).
caaatcgggtagataaagt

SEQ ID NO: 297486 - DNA, 19 bp, Homo sapiens
  siRNA target sequence for CCM1 (NM_004912.3,1620-1638).
gggtagataaagtggtaat

SEQ ID NO: 297487 - DNA, 19 bp, Homo sapiens
  siRNA target sequence for CCM1 (NM_004912.3,1621-1639).
ggtagataaagtggtaata

SEQ ID NO: 297488 - DNA, 19 bp, Homo sapiens
  siRNA target sequence for CCM1 (NM_004912.3,1658-1676).
ggagctccagactactcaa

SEQ ID NO: 297489 - DNA, 19 bp, Homo sapiens
  siRNA target sequence for CCM1 (NM_004912.3,1659-1677).
gagctccagactactcaaa

SEQ ID NO: 297490 - DNA, 19 bp, Homo sapiens
  siRNA target sequence for CCM1 (NM_004912.3,1661-1679).
gctccagactactcaaaaa

SEQ ID NO: 297491 - DNA, 19 bp, Homo sapiens
  siRNA target sequence for CCM1 (NM_004912.3,1665-1683).
cagactactcaaaaatcca

SEQ ID NO: 297492 - DNA, 19 bp, Homo sapiens
  siRNA target sequence for CCM1 (NM_004912.3,1667-1685).
gactactcaaaaatccaaa

SEQ ID NO: 297493 - DNA, 19 bp, Homo sapiens
  siRNA target sequence for CCM1 (NM_004912.3,1742-1760).
cgacagtgggtagatgatt

SEQ ID NO: 297494 - DNA, 19 bp, Homo sapiens
  siRNA target sequence for CCM1 (NM_004912.3,1777-1795).
cgcctgtgaaggagattca

SEQ ID NO: 297495 - DNA, 19 bp, Homo sapiens
  siRNA target sequence for CCM1 (NM_004912.3,1787-1805).
ggagattcagaattactaa

SEQ ID NO: 297496 - DNA, 19 bp, Homo sapiens
  siRNA target sequence for CCM1 (NM_004912.3,1807-1825).
ccgtcttctcagtgaaaga

SEQ ID NO: 297497 - DNA, 19 bp, Homo sapiens
  siRNA target sequence for CCM1 (NM_004912.3,1808-1826).
cgtcttctcagtgaaagat

SEQ ID NO: 297498 - DNA, 19 bp, Homo sapiens
  siRNA target sequence for CCM1 (NM_004912.3,1855-1873).
ctgggcacccattcattat

SEQ ID NO: 297499 - DNA, 19 bp, Homo sapiens
  siRNA target sequence for CCM1 (NM_004912.3,1859-1877).
gcacccattcattatgcat

SEQ ID NO: 297500 - DNA, 19 bp, Homo sapiens
  siRNA target sequence for CCM1 (NM_004912.3,1895-1913).
gaggccactcgcatattgt

SEQ ID NO: 297501 - DNA, 19 bp, Homo sapiens
  siRNA target sequence for CCM1 (NM_004912.3,1986-2004).
gaggacatgctgaaatagt

SEQ ID NO: 297502 - DNA, 19 bp, Homo sapiens
  siRNA target sequence for CCM1 (NM_004912.3,2023-2041).
cccagaaacggatagacat

SEQ ID NO: 297503 - DNA, 19 bp, Homo sapiens
  siRNA target sequence for CCM1 (NM_004912.3,2024-2042).
ccagaaacggatagacata

SEQ ID NO: 297504 - DNA, 19 bp, Homo sapiens
  siRNA target sequence for CCM1 (NM_004912.3,2031-2049).
cggatagacatataacaga

SEQ ID NO: 297505 - DNA, 19 bp, Homo sapiens
  siRNA target sequence for CCM1 (NM_004912.3,2129-2147).
gaagcaattaacaaaccat

SEQ ID NO: 297506 - DNA, 19 bp, Homo sapiens
  siRNA target sequence for CCM1 (NM_004912.3,2145-2163).
catatgaaaaagttcgaat

SEQ ID NO: 297507 - DNA, 19 bp, Homo sapiens
  siRNA target sequence for CCM1 (NM_004912.3,2179-2197).
gtcatatcgttctgttgaa

SEQ ID NO: 297508 - DNA, 19 bp, Homo sapiens
  siRNA target sequence for CCM1 (NM_004912.3,2245-2263).
gcgtctctctcaagaaact

SEQ ID NO: 297509 - DNA, 19 bp, Homo sapiens
  siRNA target sequence for CCM1 (NM_004912.3,2304-2322).
gccttcaactcaaaccata

SEQ ID NO: 297510 - DNA, 19 bp, Homo sapiens
  siRNA target sequence for CCM1 (NM_004912.3,2309-2327).
caactcaaaccatatcata

SEQ ID NO: 297511 - DNA, 19 bp, Homo sapiens
  siRNA target sequence for CCM1 (NM_004912.3,2346-2364).
gtgactggccagaaatact

SEQ ID NO: 297512 - DNA, 19 bp, Homo sapiens
  siRNA target sequence for CCM1 (NM_004912.3,2462-2480).
gacccactagctattctta

SEQ ID NO: 297513 - DNA, 19 bp, Homo sapiens
  siRNA target sequence for CCM1 (NM_004912.3,2464-2482).
cccactagctattcttatt

SEQ ID NO: 297514 - DNA, 19 bp, Homo sapiens
  siRNA target sequence for CCM1 (NM_004912.3,2468-2486).
ctagctattcttattctct

SEQ ID NO: 297515 - DNA, 19 bp, Homo sapiens
  siRNA target sequence for CCM1 (NM_004912.3,2531-2549).
cctgatgctaagctgataa

SEQ ID NO: 297516 - DNA, 19 bp, Homo sapiens
  siRNA target sequence for CCM1 (NM_004912.3,2550-2568).
cattggcaagtctgctttt

SEQ ID NO: 297517 - DNA, 19 bp, Homo sapiens
  siRNA target sequence for CCM1 (NM_004912.3,2555-2573).
gcaagtctgcttttgcaaa

SEQ ID NO: 297518 - DNA, 19 bp, Homo sapiens
  siRNA target sequence for CCM1 (NM_004912.3,2556-2574).
caagtctgcttttgcaaat

SEQ ID NO: 297519 - DNA, 19 bp, Homo sapiens
  siRNA target sequence for CCM1 (NM_004912.3,2563-2581).
gcttttgcaaatagtctat

SEQ ID NO: 297520 - DNA, 19 bp, Homo sapiens
  siRNA target sequence for CCM1 (NM_004912.3,2640-2658).
ccatcgtacctgttaccaa

SEQ ID NO: 297521 - DNA, 19 bp, Homo sapiens
  siRNA target sequence for CCM1 (NM_004912.3,2651-2669).
gttaccaaactgaaaagta

SEQ ID NO: 297522 - DNA, 19 bp, Homo sapiens
  siRNA target sequence for CCM1 (NM_004912.3,2680-2698).
ctggacaaatcgcatactt

SEQ ID NO: 297523 - DNA, 19 bp, Homo sapiens
  siRNA target sequence for CCM1 (NM_004912.3,2683-2701).
gacaaatcgcatacttcat

SEQ ID NO: 297524 - DNA, 19 bp, Homo sapiens
  siRNA target sequence for CCM1 (NM_004912.3,2685-2703).
caaatcgcatacttcatga

SEQ ID NO: 297525 - DNA, 19 bp, Homo sapiens
  siRNA target sequence for CCM1 (NM_004912.3,2690-2708).
cgcatacttcatgaataca

SEQ ID NO: 297526 - DNA, 19 bp, Homo sapiens
  siRNA target sequence for CCM1 (NM_004912.3,2710-2728).
gaatctcagtacaagtgaa

SEQ ID NO: 297527 - DNA, 19 bp, Homo sapiens
  siRNA target sequence for CCM1 (NM_004912.3,2752-2770).
ccttcagcgcatgttctta

SEQ ID NO: 297528 - DNA, 19 bp, Homo sapiens
  siRNA target sequence for CCM1 (NM_004912.3,2758-2776).
gcgcatgttcttacagaat

SEQ ID NO: 297529 - DNA, 19 bp, Homo sapiens
  siRNA target sequence for CCM1 (NM_004912.3,2833-2851).
ggcaagccccagcaatcat

SEQ ID NO: 297530 - DNA, 19 bp, Homo sapiens
  siRNA target sequence for CCM1 (NM_004912.3,2835-2853).
caagccccagcaatcataa

SEQ ID NO: 297531 - DNA, 19 bp, Homo sapiens
  siRNA target sequence for CCM1 (NM_004912.3,2838-2856).
gccccagcaatcataaagt

SEQ ID NO: 297532 - DNA, 19 bp, Homo sapiens
  siRNA target sequence for CCM1 (NM_004912.3,2909-2927).
gaaactaaggctttactca

SEQ ID NO: 297533 - DNA, 19 bp, Homo sapiens
  siRNA target sequence for CCM1 (NM_004912.3,2931-2949).
gtcttaagtatggttgttt

SEQ ID NO: 297534 - DNA, 19 bp, Homo sapiens
  siRNA target sequence for CCM1 (NM_004912.3,2962-2980).
gggagatactgatacttgt

SEQ ID NO: 297535 - DNA, 19 bp, Homo sapiens
  siRNA target sequence for CCM1 (NM_004912.3,3034-3052).
ggctggtctcgtggtaaaa

SEQ ID NO: 297536 - DNA, 19 bp, Homo sapiens
  siRNA target sequence for CCM1 (NM_004912.3,3039-3057).
gtctcgtggtaaaactgtt

SEQ ID NO: 297537 - DNA, 19 bp, Homo sapiens
  siRNA target sequence for CCM1 (NM_004912.3,3041-3059).
ctcgtggtaaaactgttaa

SEQ ID NO: 297538 - DNA, 19 bp, Homo sapiens
  siRNA target sequence for CCM1 (NM_004912.3,3061-3079).
gaagctaaatggacagtta

SEQ ID NO: 297539 - DNA, 19 bp, Homo sapiens
  siRNA target sequence for CCM1 (NM_004912.3,3082-3100).
gcccactgaaagaaattca

SEQ ID NO: 297540 - DNA, 19 bp, Homo sapiens
  siRNA target sequence for DKFZp761J1523 (NM_032293.3,294-312).
cacaccagatggtatttca

SEQ ID NO: 297541 - DNA, 19 bp, Homo sapiens
  siRNA target sequence for DKFZp761J1523 (NM_032293.3,296-314).
caccagatggtatttcaaa

SEQ ID NO: 297542 - DNA, 19 bp, Homo sapiens
  siRNA target sequence for DKFZp761J1523 (NM_032293.3,298-316).
ccagatggtatttcaaata

SEQ ID NO: 297543 - DNA, 19 bp, Homo sapiens
  siRNA target sequence for DKFZp761J1523 (NM_032293.3,416-434).
ccctcaataccgtgcaatt

SEQ ID NO: 297544 - DNA, 19 bp, Homo sapiens
  siRNA target sequence for DKFZp761J1523 (NM_032293.3,418-436).
ctcaataccgtgcaattct

SEQ ID NO: 297545 - DNA, 19 bp, Homo sapiens
  siRNA target sequence for DKFZp761J1523 (NM_032293.3,420-438).
caataccgtgcaattcttt

SEQ ID NO: 297546 - DNA, 19 bp, Homo sapiens
  siRNA target sequence for DKFZp761J1523 (NM_032293.3,476-494).
cagtcccacaaaaactctt

SEQ ID NO: 297547 - DNA, 19 bp, Homo sapiens
  siRNA target sequence for DKFZp761J1523 (NM_032293.3,608-626).
ctctgtgaatttcaagttt

SEQ ID NO: 297548 - DNA, 19 bp, Homo sapiens
  siRNA target sequence for DKFZp761J1523 (NM_032293.3,649-667).
ggcagctcactgatgatga

SEQ ID NO: 297549 - DNA, 19 bp, Homo sapiens
  siRNA target sequence for DKFZp761J1523 (NM_032293.3,668-686).
gatgttcagcaatgaaatt

SEQ ID NO: 297550 - DNA, 19 bp, Homo sapiens
  siRNA target sequence for DKFZp761J1523 (NM_032293.3,723-741).
ggtgacacaatcactctaa

SEQ ID NO: 297551 - DNA, 19 bp, Homo sapiens
  siRNA target sequence for DKFZp761J1523 (NM_032293.3,724-742).
gtgacacaatcactctaaa

SEQ ID NO: 297552 - DNA, 19 bp, Homo sapiens
  siRNA target sequence for DKFZp761J1523 (NM_032293.3,760-778).
gtggcggtctggataccaa

SEQ ID NO: 297553 - DNA, 19 bp, Homo sapiens
  siRNA target sequence for DKFZp761J1523 (NM_032293.3,766-784).
gtctggataccaaaaatga

SEQ ID NO: 297554 - DNA, 19 bp, Homo sapiens
  siRNA target sequence for DKFZp761J1523 (NM_032293.3,790-808).
cagggatacattcagttta

SEQ ID NO: 297555 - DNA, 19 bp, Homo sapiens
  siRNA target sequence for DKFZp761J1523 (NM_032293.3,974-992).
gatccgctcccactttaca

SEQ ID NO: 297556 - DNA, 19 bp, Homo sapiens
  siRNA target sequence for DKFZp761J1523 (NM_032293.3,978-996).
cgctcccactttacacata

SEQ ID NO: 297557 - DNA, 19 bp, Homo sapiens
  siRNA target sequence for DKFZp761J1523 (NM_032293.3,979-997).
gctcccactttacacatat

SEQ ID NO: 297558 - DNA, 19 bp, Homo sapiens
  siRNA target sequence for DKFZp761J1523 (NM_032293.3,1003-1021).
ccttagtgagatacaatca

SEQ ID NO: 297559 - DNA, 19 bp, Homo sapiens
  siRNA target sequence for DKFZp761J1523 (NM_032293.3,1008-1026).
gtgagatacaatcaacaaa

SEQ ID NO: 297560 - DNA, 19 bp, Homo sapiens
  siRNA target sequence for DKFZp761J1523 (NM_032293.3,1031-1049).
caattacaggctgaaaata

SEQ ID NO: 297561 - DNA, 19 bp, Homo sapiens
  siRNA target sequence for DKFZp761J1523 (NM_032293.3,1039-1057).
ggctgaaaatattttcaga

SEQ ID NO: 297562 - DNA, 19 bp, Homo sapiens
  siRNA target sequence for DKFZp761J1523 (NM_032293.3,1088-1106).
gccaactccaccagtgttt

SEQ ID NO: 297563 - DNA, 19 bp, Homo sapiens
  siRNA target sequence for DKFZp761J1523 (NM_032293.3,1093-1111).
ctccaccagtgtttacaga

SEQ ID NO: 297564 - DNA, 19 bp, Homo sapiens
  siRNA target sequence for DKFZp761J1523 (NM_032293.3,1126-1144).
gggactttttgctagtgaa

SEQ ID NO: 297565 - DNA, 19 bp, Homo sapiens
  siRNA target sequence for DKFZp761J1523 (NM_032293.3,1198-1216).
gtcggcgtaccctggatat

SEQ ID NO: 297566 - DNA, 19 bp, Homo sapiens
  siRNA target sequence for DKFZp761J1523 (NM_032293.3,1200-1218).
cggcgtaccctggatatgt

SEQ ID NO: 297567 - DNA, 19 bp, Homo sapiens
  siRNA target sequence for DKFZp761J1523 (NM_032293.3,1201-1219).
ggcgtaccctggatatgtt

SEQ ID NO: 297568 - DNA, 19 bp, Homo sapiens
  siRNA target sequence for DKFZp761J1523 (NM_032293.3,1203-1221).
cgtaccctggatatgttga

SEQ ID NO: 297569 - DNA, 19 bp, Homo sapiens
  siRNA target sequence for DKFZp761J1523 (NM_032293.3,1211-1229).
ggatatgttgattagatct

SEQ ID NO: 297570 - DNA, 19 bp, Homo sapiens
  siRNA target sequence for DKFZp761J1523 (NM_032293.3,1212-1230).
gatatgttgattagatctt

SEQ ID NO: 297571 - DNA, 19 bp, Homo sapiens
  siRNA target sequence for DKFZp761J1523 (NM_032293.3,1256-1274).
gcataagaacatgcttaat

SEQ ID NO: 297572 - DNA, 19 bp, Homo sapiens
  siRNA target sequence for DKFZp761J1523 (NM_032293.3,1268-1286).
gcttaatagacgatctttt

SEQ ID NO: 297573 - DNA, 19 bp, Homo sapiens
  siRNA target sequence for DKFZp761J1523 (NM_032293.3,1269-1287).
cttaatagacgatctttta

SEQ ID NO: 297574 - DNA, 19 bp, Homo sapiens
  siRNA target sequence for DKFZp761J1523 (NM_032293.3,1340-1358).
ccaggcggagtttgttaga

SEQ ID NO: 297575 - DNA, 19 bp, Homo sapiens
  siRNA target sequence for DKFZp761J1523 (NM_032293.3,1341-1359).
caggcggagtttgttagaa

SEQ ID NO: 297576 - DNA, 19 bp, Homo sapiens
  siRNA target sequence for DKFZp761J1523 (NM_032293.3,1343-1361).
ggcggagtttgttagaata

SEQ ID NO: 297577 - DNA, 19 bp, Homo sapiens
  siRNA target sequence for DKFZp761J1523 (NM_032293.3,1362-1380).
gggcaggcactaaaactga

SEQ ID NO: 297578 - DNA, 19 bp, Homo sapiens
  siRNA target sequence for DKFZp761J1523 (NM_032293.3,1363-1381).
ggcaggcactaaaactgaa

SEQ ID NO: 297579 - DNA, 19 bp, Homo sapiens
  siRNA target sequence for DKFZp761J1523 (NM_032293.3,1444-1462).
cgtgggagccccagtgttt

SEQ ID NO: 297580 - DNA, 19 bp, Homo sapiens
  siRNA target sequence for DKFZp761J1523 (NM_032293.3,1564-1582).
catcagtgcccgtgtttga

SEQ ID NO: 297581 - DNA, 19 bp, Homo sapiens
  siRNA target sequence for DKFZp761J1523 (NM_032293.3,1592-1610).
gccagtgaagcaaatgcat

SEQ ID NO: 297582 - DNA, 19 bp, Homo sapiens
  siRNA target sequence for DKFZp761J1523 (NM_032293.3,1659-1677).
gatgctcgcctctttgtct

SEQ ID NO: 297583 - DNA, 19 bp, Homo sapiens
  siRNA target sequence for DKFZp761J1523 (NM_032293.3,1681-1699).
ggctaagtgctctgcaaaa

SEQ ID NO: 297584 - DNA, 19 bp, Homo sapiens
  siRNA target sequence for DKFZp761J1523 (NM_032293.3,1770-1788).
ggctgccacctgtatgcta

SEQ ID NO: 297585 - DNA, 19 bp, Homo sapiens
  siRNA target sequence for DKFZp761J1523 (NM_032293.3,1776-1794).
cacctgtatgctattaaca

SEQ ID NO: 297586 - DNA, 19 bp, Homo sapiens
  siRNA target sequence for DKFZp761J1523 (NM_032293.3,1778-1796).
cctgtatgctattaacact

SEQ ID NO: 297587 - DNA, 19 bp, Homo sapiens
  siRNA target sequence for DKFZp761J1523 (NM_032293.3,1814-1832).
gaggattgtggttgcaatt

SEQ ID NO: 297588 - DNA, 19 bp, Homo sapiens
  siRNA target sequence for DKFZp761J1523 (NM_032293.3,1834-1852).
ggaataaactgcttctgat

SEQ ID NO: 297589 - DNA, 19 bp, Homo sapiens
  siRNA target sequence for DKFZp761J1523 (NM_032293.3,1844-1862).
gcttctgatcacaagaaaa

SEQ ID NO: 297590 - DNA, 19 bp, Homo sapiens
  siRNA target sequence for DKFZp761J1523 (NM_032293.3,1848-1866).
ctgatcacaagaaaacaca

SEQ ID NO: 297591 - DNA, 19 bp, Homo sapiens
  siRNA target sequence for DKFZp761J1523 (NM_032293.3,1883-1901).
caccagcacctcattgtta

SEQ ID NO: 297592 - DNA, 19 bp, Homo sapiens
  siRNA target sequence for DKFZp761J1523 (NM_032293.3,1910-1928).
gtctgagtcacctgttgaa

SEQ ID NO: 297593 - DNA, 19 bp, Homo sapiens
  siRNA target sequence for DKFZp761J1523 (NM_032293.3,1926-1944).
gaagaattccagtacatca

SEQ ID NO: 297594 - DNA, 19 bp, Homo sapiens
  siRNA target sequence for DKFZp761J1523 (NM_032293.3,2018-2036).
catctgtgtggcttatcga

SEQ ID NO: 297595 - DNA, 19 bp, Homo sapiens
  siRNA target sequence for DKFZp761J1523 (NM_032293.3,2027-2045).
ggcttatcgacaccaattt

SEQ ID NO: 297596 - DNA, 19 bp, Homo sapiens
  siRNA target sequence for DKFZp761J1523 (NM_032293.3,2029-2047).
cttatcgacaccaatttga

SEQ ID NO: 297597 - DNA, 19 bp, Homo sapiens
  siRNA target sequence for DKFZp761J1523 (NM_032293.3,2093-2111).
ggaggccaacagggttaat

SEQ ID NO: 297598 - DNA, 19 bp, Homo sapiens
  siRNA target sequence for DKFZp761J1523 (NM_032293.3,2094-2112).
gaggccaacagggttaatt

SEQ ID NO: 297599 - DNA, 19 bp, Homo sapiens
  siRNA target sequence for DKFZp761J1523 (NM_032293.3,2230-2248).
cttctgcgtcagatttcca

SEQ ID NO: 297600 - DNA, 19 bp, Homo sapiens
  siRNA target sequence for DKFZp761J1523 (NM_032293.3,2261-2279).
ccaggctccctatgcaatt

SEQ ID NO: 297601 - DNA, 19 bp, Homo sapiens
  siRNA target sequence for DKFZp761J1523 (NM_032293.3,2265-2283).
gctccctatgcaattgtct

SEQ ID NO: 297602 - DNA, 19 bp, Homo sapiens
  siRNA target sequence for DKFZp761J1523 (NM_032293.3,2390-2408).
ggcctccaggtcggatata

SEQ ID NO: 297603 - DNA, 19 bp, Homo sapiens
  siRNA target sequence for DKFZp761J1523 (NM_032293.3,2392-2410).
cctccaggtcggatatata

SEQ ID NO: 297604 - DNA, 19 bp, Homo sapiens
  siRNA target sequence for DKFZp761J1523 (NM_032293.3,2395-2413).
ccaggtcggatatatactt

SEQ ID NO: 297605 - DNA, 19 bp, Homo sapiens
  siRNA target sequence for DKFZp761J1523 (NM_032293.3,2465-2483).
ggccagtgcccgaaattct

SEQ ID NO: 297606 - DNA, 19 bp, Homo sapiens
  siRNA target sequence for DKFZp761J1523 (NM_032293.3,2501-2519).
ccgagatactccagtattt

SEQ ID NO: 297607 - DNA, 19 bp, Homo sapiens
  siRNA target sequence for DKFZp761J1523 (NM_032293.3,2505-2523).
gatactccagtatttcctt

SEQ ID NO: 297608 - DNA, 19 bp, Homo sapiens
  siRNA target sequence for DKFZp761J1523 (NM_032293.3,2702-2720).
gtctcgcatggagatcaaa

SEQ ID NO: 297609 - DNA, 19 bp, Homo sapiens
  siRNA target sequence for DKFZp761J1523 (NM_032293.3,2706-2724).
cgcatggagatcaaagaaa

SEQ ID NO: 297610 - DNA, 19 bp, Homo sapiens
  siRNA target sequence for DKFZp761J1523 (NM_032293.3,2707-2725).
gcatggagatcaaagaaat

SEQ ID NO: 297611 - DNA, 19 bp, Homo sapiens
  siRNA target sequence for DKFZp761J1523 (NM_032293.3,2734-2752).
ggacccgcagggaactact

SEQ ID NO: 297612 - DNA, 19 bp, Homo sapiens
  siRNA target sequence for DKFZp761J1523 (NM_032293.3,2790-2808).
gcgccaaaggccaaatcaa

SEQ ID NO: 297613 - DNA, 19 bp, Homo sapiens
  siRNA target sequence for DKFZp761J1523 (NM_032293.3,2812-2830).
cccggaagcggttagaaga

SEQ ID NO: 297614 - DNA, 19 bp, Homo sapiens
  siRNA target sequence for DKFZp761J1523 (NM_032293.3,2813-2831).
ccggaagcggttagaagaa

SEQ ID NO: 297615 - DNA, 19 bp, Homo sapiens
  siRNA target sequence for DKFZp761J1523 (NM_032293.3,2814-2832).
cggaagcggttagaagaaa

SEQ ID NO: 297616 - DNA, 19 bp, Homo sapiens
  siRNA target sequence for DKFZp761J1523 (NM_032293.3,2853-2871).
ggggcagtgaggtcatcta

SEQ ID NO: 297617 - DNA, 19 bp, Homo sapiens
  siRNA target sequence for DKFZp761J1523 (NM_032293.3,2897-2915).
cttggaaagtgcttctact

SEQ ID NO: 297618 - DNA, 19 bp, Homo sapiens
  siRNA target sequence for DKFZp761J1523 (NM_032293.3,3016-3034).
cggctttctccgatgaaga

SEQ ID NO: 297619 - DNA, 19 bp, Homo sapiens
  siRNA target sequence for DKFZp761J1523 (NM_032293.3,3019-3037).
ctttctccgatgaagacat

SEQ ID NO: 297620 - DNA, 19 bp, Homo sapiens
  siRNA target sequence for DKFZp761J1523 (NM_032293.3,3033-3051).
gacattatagacttgaagt

SEQ ID NO: 297621 - DNA, 19 bp, Homo sapiens
  siRNA target sequence for MINK (NM_015716.2,740-758).
gtgggcagacggaacactt

SEQ ID NO: 297622 - DNA, 19 bp, Homo sapiens
  siRNA target sequence for MINK (NM_015716.2,967-985).
gtggtctaagaagttcatt

SEQ ID NO: 297623 - DNA, 19 bp, Homo sapiens
  siRNA target sequence for MINK (NM_015716.2,1287-1305).
gcaactcagaggctttaaa

SEQ ID NO: 297624 - DNA, 19 bp, Homo sapiens
  siRNA target sequence for MINK (NM_015716.2,1342-1360).
ccccgaggcacacatcaaa

SEQ ID NO: 297625 - DNA, 19 bp, Homo sapiens
  siRNA target sequence for MINK (NM_015716.2,1344-1362).
ccgaggcacacatcaaaca

SEQ ID NO: 297626 - DNA, 19 bp, Homo sapiens
  siRNA target sequence for MINK (NM_015716.2,1530-1548).
cggagcgcgagcaggaata

SEQ ID NO: 297627 - DNA, 19 bp, Homo sapiens
  siRNA target sequence for MINK (NM_015716.2,1532-1550).
gagcgcgagcaggaataca

SEQ ID NO: 297628 - DNA, 19 bp, Homo sapiens
  siRNA target sequence for MINK (NM_015716.2,1702-1720).
gcccctgtaccattatggt

SEQ ID NO: 297629 - DNA, 19 bp, Homo sapiens
  siRNA target sequence for MINK (NM_015716.2,1726-1744).
catgaatcccgctgacaaa

SEQ ID NO: 297630 - DNA, 19 bp, Homo sapiens
  siRNA target sequence for MINK (NM_015716.2,2166-2184).
gggtccgcccagataacga

SEQ ID NO: 297631 - DNA, 19 bp, Homo sapiens
  siRNA target sequence for MINK (NM_015716.2,2425-2443).
gctctcccctgggaataaa

SEQ ID NO: 297632 - DNA, 19 bp, Homo sapiens
  siRNA target sequence for MINK (NM_015716.2,2789-2807).
gacagcaatgggtacacaa

SEQ ID NO: 297633 - DNA, 19 bp, Homo sapiens
  siRNA target sequence for MINK (NM_015716.2,2929-2947).
gagctcgttcacgatgttt

SEQ ID NO: 297634 - DNA, 19 bp, Homo sapiens
  siRNA target sequence for MINK (NM_015716.2,2931-2949).
gctcgttcacgatgtttgt

SEQ ID NO: 297635 - DNA, 19 bp, Homo sapiens
  siRNA target sequence for MINK (NM_015716.2,3435-3453).
ggcactaccgtgttgtgaa

SEQ ID NO: 297636 - DNA, 19 bp, Homo sapiens
  siRNA target sequence for MINK (NM_015716.2,3436-3454).
gcactaccgtgttgtgaaa

SEQ ID NO: 297637 - DNA, 19 bp, Homo sapiens
  siRNA target sequence for MINK (NM_015716.2,3610-3628).
gcggctcaaggtcatctat

SEQ ID NO: 297638 - DNA, 19 bp, Homo sapiens
  siRNA target sequence for MINK (NM_015716.2,3980-3998).
ctgtgtgagcggaatgaca

SEQ ID NO: 297639 - DNA, 19 bp, Homo sapiens
  siRNA target sequence for MINK (NM_015716.2,4061-4079).
cgtaactgcatcatgaact

SEQ ID NO: 297640 - DNA, 19 bp, Homo sapiens
  siRNA target sequence for MINK (NM_153827.2,2296-2314).
ctccgcctggcaaatctat

SEQ ID NO: 297641 - DNA, 19 bp, Homo sapiens
  siRNA target sequence for MINK (NM_170663.2,2488-2506).
ctataagcgagcaattggt

SEQ ID NO: 297642 - DNA, 19 bp, Homo sapiens
  siRNA target sequence for MINK (NM_170663.2,2499-2517).
caattggtgaggactttgt

SEQ ID NO: 297643 - DNA, 19 bp, Homo sapiens
  siRNA target sequence for RPIP8 (NM_006695.3,646-664).
cgcatgtcagaatacatca

SEQ ID NO: 297644 - DNA, 19 bp, Homo sapiens
  siRNA target sequence for RPIP8 (NM_006695.3,687-705).
gaccaccagacggttctat

SEQ ID NO: 297645 - DNA, 19 bp, Homo sapiens
  siRNA target sequence for RPIP8 (NM_006695.3,821-839).
cccccgtggtcatcgatta

SEQ ID NO: 297646 - DNA, 19 bp, Homo sapiens
  siRNA target sequence for RPIP8 (NM_006695.3,823-841).
cccgtggtcatcgattaca

SEQ ID NO: 297647 - DNA, 19 bp, Homo sapiens
  siRNA target sequence for RPIP8 (NM_006695.3,1272-1290).
ctcactgggaacgcttaat

SEQ ID NO: 297648 - DNA, 19 bp, Homo sapiens
  siRNA target sequence for WAS (NM_000377.1,124-142).
cgagaaccagcgactcttt

SEQ ID NO: 297649 - DNA, 19 bp, Homo sapiens
  siRNA target sequence for WAS (NM_000377.1,169-187).
gctggccactgcagttgtt

SEQ ID NO: 297650 - DNA, 19 bp, Homo sapiens
  siRNA target sequence for WAS (NM_000377.1,690-708).
gacctagcccagctgataa

SEQ ID NO: 297651 - DNA, 19 bp, Homo sapiens
  siRNA target sequence for WAS (NM_000377.1,730-748).
gatcagcaaagctgatatt

SEQ ID NO: 297652 - DNA, 19 bp, Homo sapiens
  siRNA target sequence for WAS (NM_000377.1,880-898).
cgacgccgagacctctaaa

SEQ ID NO: 297653 - DNA, 19 bp, Homo sapiens
  siRNA target sequence for WAS (NM_000377.1,887-905).
gagacctctaaacttatct

SEQ ID NO: 297654 - DNA, 19 bp, Homo sapiens
  siRNA target sequence for WAS (NM_000377.1,1023-1041).
ctattgtggggggtaacaa

SEQ ID NO: 297655 - DNA, 19 bp, Homo sapiens
  siRNA target sequence for WAS (NM_000377.1,1328-1346).
ggagcgcttttggatcaaa

SEQ ID NO: 297656 - DNA, 19 bp, Homo sapiens
  siRNA target sequence for WAS (NM_000377.1,1329-1347).
gagcgcttttggatcaaat

SEQ ID NO: 297657 - DNA, 19 bp, Homo sapiens
  siRNA target sequence for ARHGAP8 (NM_015366.2,458-476).
gatccttcgggacaagatt

SEQ ID NO: 297658 - DNA, 19 bp, Homo sapiens
  siRNA target sequence for ARHGAP8 (NM_015366.2,467-485).
ggacaagattcgcttctat

SEQ ID NO: 297659 - DNA, 19 bp, Homo sapiens
  siRNA target sequence for ARHGAP8 (NM_015366.2,918-936).
cgctccaagagctacaaca

SEQ ID NO: 297660 - DNA, 19 bp, Homo sapiens
  siRNA target sequence for ARHGAP8 (NM_015366.2,1248-1266).
gaagggattttcattgact

SEQ ID NO: 297661 - DNA, 19 bp, Homo sapiens
  siRNA target sequence for ARHGAP8 (NM_181333.1,234-252).
cgcaggttgaagttcatga

SEQ ID NO: 297662 - DNA, 19 bp, Homo sapiens
  siRNA target sequence for ARHGAP8 (NM_181334.1,441-459).
cacactggaccaatacgtt

SEQ ID NO: 297663 - DNA, 19 bp, Homo sapiens
  siRNA target sequence for ARHGAP8 (NM_181334.1,451-469).
caatacgttgagaacgatt

SEQ ID NO: 297664 - DNA, 19 bp, Homo sapiens
  siRNA target sequence for ARHGAP8 (NM_181334.1,457-475).
gttgagaacgattatacca

SEQ ID NO: 297665 - DNA, 19 bp, Homo sapiens
  siRNA target sequence for ARHGAP8 (NM_181334.1,466-484).
gattataccatcgtctatt

SEQ ID NO: 297666 - DNA, 19 bp, Homo sapiens
  siRNA target sequence for ARHGAP8 (NM_181334.1,527-545).
ggctccagagcgcatacaa

SEQ ID NO: 297667 - DNA, 19 bp, Homo sapiens
  siRNA target sequence for ARHGAP8 (NM_181334.1,538-556).
gcatacaaggagttcgata

SEQ ID NO: 297668 - DNA, 19 bp, Homo sapiens
  siRNA target sequence for ARHGAP8 (NM_181334.1,547-565).
gagttcgataggaagtaca

SEQ ID NO: 297669 - DNA, 19 bp, Homo sapiens
  siRNA target sequence for ARHGAP8 (NM_181334.1,638-656).
ccctcatcagtcacaagtt

SEQ ID NO: 297670 - DNA, 19 bp, Homo sapiens
  siRNA target sequence for ARHGAP8 (NM_181334.1,693-711).
gctccacgaacaccttaaa

SEQ ID NO: 297671 - DNA, 19 bp, Homo sapiens
  siRNA target sequence for ARHGAP8 (NM_181334.1,694-712).
ctccacgaacaccttaaat

SEQ ID NO: 297672 - DNA, 19 bp, Homo sapiens
  siRNA target sequence for ARHGAP8 (NM_181334.1,724-742).
gtcatccctcccgaagttt

SEQ ID NO: 297673 - DNA, 19 bp, Homo sapiens
  siRNA target sequence for ARHGAP8 (NM_181334.1,842-860).
gcgtcagtctgcaatacct

SEQ ID NO: 297674 - DNA, 19 bp, Homo sapiens
  siRNA target sequence for ARHGAP8 (NM_181334.1,852-870).
gcaatacctcaaagacaaa

SEQ ID NO: 297675 - DNA, 19 bp, Homo sapiens
  siRNA target sequence for ARHGAP8 (NM_181334.1,1163-1181).
ctggctgccgccagatctt

SEQ ID NO: 297676 - DNA, 19 bp, Homo sapiens
  siRNA target sequence for ARHGAP8 (NM_181334.1,1187-1205).
gcctcccagagcacaacta

SEQ ID NO: 297677 - DNA, 19 bp, Homo sapiens
  siRNA target sequence for ARHGAP8 (NM_181334.1,1348-1366).
cttgtgcccctgaacatgt

SEQ ID NO: 297678 - DNA, 19 bp, Homo sapiens
  siRNA target sequence for ARHGAP8 (NM_181334.1,1377-1395).
gctgatcgagtactatgaa

SEQ ID NO: 297679 - DNA, 19 bp, Homo sapiens
  siRNA target sequence for BNIP2 (NM_004330.1,214-232).
ggaaggtgtggaacttaaa

SEQ ID NO: 297680 - DNA, 19 bp, Homo sapiens
  siRNA target sequence for BNIP2 (NM_004330.1,219-237).
gtgtggaacttaaagaaga

SEQ ID NO: 297681 - DNA, 19 bp, Homo sapiens
  siRNA target sequence for BNIP2 (NM_004330.1,325-343).
gcctggctcactagaagtt

SEQ ID NO: 297682 - DNA, 19 bp, Homo sapiens
  siRNA target sequence for BNIP2 (NM_004330.1,331-349).
ctcactagaagttaatgga

SEQ ID NO: 297683 - DNA, 19 bp, Homo sapiens
  siRNA target sequence for BNIP2 (NM_004330.1,391-409).
gacactggatcctagtgat

SEQ ID NO: 297684 - DNA, 19 bp, Homo sapiens
  siRNA target sequence for BNIP2 (NM_004330.1,402-420).
ctagtgatggctctgtatt

SEQ ID NO: 297685 - DNA, 19 bp, Homo sapiens
  siRNA target sequence for BNIP2 (NM_004330.1,548-566).
ggctcaattactgaataca

SEQ ID NO: 297686 - DNA, 19 bp, Homo sapiens
  siRNA target sequence for BNIP2 (NM_004330.1,550-568).
ctcaattactgaatacaca

SEQ ID NO: 297687 - DNA, 19 bp, Homo sapiens
  siRNA target sequence for BNIP2 (NM_004330.1,591-609).
gacgacgctggcgtatgtt

SEQ ID NO: 297688 - DNA, 19 bp, Homo sapiens
  siRNA target sequence for BNIP2 (NM_004330.1,593-611).
cgacgctggcgtatgttca

SEQ ID NO: 297689 - DNA, 19 bp, Homo sapiens
  siRNA target sequence for BNIP2 (NM_004330.1,653-671).
gaaccctataaaaaagtta

SEQ ID NO: 297690 - DNA, 19 bp, Homo sapiens
  siRNA target sequence for BNIP2 (NM_004330.1,656-674).
ccctataaaaaagttatca

SEQ ID NO: 297691 - DNA, 19 bp, Homo sapiens
  siRNA target sequence for BNIP2 (NM_004330.1,762-780).
gatacctgatggacaatct

SEQ ID NO: 297692 - DNA, 19 bp, Homo sapiens
  siRNA target sequence for BNIP2 (NM_004330.1,766-784).
cctgatggacaatcttttt

SEQ ID NO: 297693 - DNA, 19 bp, Homo sapiens
  siRNA target sequence for BNIP2 (NM_004330.1,772-790).
ggacaatctttttaaatat

SEQ ID NO: 297694 - DNA, 19 bp, Homo sapiens
  siRNA target sequence for BNIP2 (NM_004330.1,809-827).
ctattagtagcagaaaact

SEQ ID NO: 297695 - DNA, 19 bp, Homo sapiens
  siRNA target sequence for BNIP2 (NM_004330.1,851-869).
gcaacaactcgaagaaaaa

SEQ ID NO: 297696 - DNA, 19 bp, Homo sapiens
  siRNA target sequence for BNIP2 (NM_004330.1,904-922).
gcaaattgatagaaggtta

SEQ ID NO: 297697 - DNA, 19 bp, Homo sapiens
  siRNA target sequence for BNIP2 (NM_004330.1,918-936).
ggttacggaaaaatctaaa

SEQ ID NO: 297698 - DNA, 19 bp, Homo sapiens
  siRNA target sequence for BNIP2 (NM_004330.1,919-937).
gttacggaaaaatctaaaa

SEQ ID NO: 297699 - DNA, 19 bp, Homo sapiens
  siRNA target sequence for BNIP2 (NM_004330.1,983-1001).
gctgttacaagaccattta

SEQ ID NO: 297700 - DNA, 19 bp, Homo sapiens
  siRNA target sequence for BNIP2 (NM_004330.1,1084-1102).
cataccagaatgcataaaa

SEQ ID NO: 297701 - DNA, 19 bp, Homo sapiens
  siRNA target sequence for BNIP2 (NM_004330.1,1089-1107).
cagaatgcataaaacaagt

SEQ ID NO: 297702 - DNA, 19 bp, Homo sapiens
  siRNA target sequence for C5orf5 (NM_016603.1,467-485).
cctccccttccttgagtaa

SEQ ID NO: 297703 - DNA, 19 bp, Homo sapiens
  siRNA target sequence for C5orf5 (NM_016603.1,488-506).
gcaactccgttcttgctaa

SEQ ID NO: 297704 - DNA, 19 bp, Homo sapiens
  siRNA target sequence for C5orf5 (NM_016603.1,492-510).
ctccgttcttgctaacaaa

SEQ ID NO: 297705 - DNA, 19 bp, Homo sapiens
  siRNA target sequence for C5orf5 (NM_016603.1,494-512).
ccgttcttgctaacaaaat

SEQ ID NO: 297706 - DNA, 19 bp, Homo sapiens
  siRNA target sequence for C5orf5 (NM_016603.1,495-513).
cgttcttgctaacaaaata

SEQ ID NO: 297707 - DNA, 19 bp, Homo sapiens
  siRNA target sequence for C5orf5 (NM_016603.1,580-598).
cgccacgttgtggactata

SEQ ID NO: 297708 - DNA, 19 bp, Homo sapiens
  siRNA target sequence for C5orf5 (NM_016603.1,581-599).
gccacgttgtggactatat

SEQ ID NO: 297709 - DNA, 19 bp, Homo sapiens
  siRNA target sequence for C5orf5 (NM_016603.1,582-600).
ccacgttgtggactatatt

SEQ ID NO: 297710 - DNA, 19 bp, Homo sapiens
  siRNA target sequence for C5orf5 (NM_016603.1,708-726).
ggttaaggaagcagatgtt

SEQ ID NO: 297711 - DNA, 19 bp, Homo sapiens
  siRNA target sequence for C5orf5 (NM_016603.1,733-751).
gctattagccttcttagat

SEQ ID NO: 297712 - DNA, 19 bp, Homo sapiens
  siRNA target sequence for C5orf5 (NM_016603.1,740-758).
gccttcttagattttttct

SEQ ID NO: 297713 - DNA, 19 bp, Homo sapiens
  siRNA target sequence for C5orf5 (NM_016603.1,787-805).
ggcagtttacatattcact

SEQ ID NO: 297714 - DNA, 19 bp, Homo sapiens
  siRNA target sequence for C5orf5 (NM_016603.1,807-825).
gatgcagctttctcaagat

SEQ ID NO: 297715 - DNA, 19 bp, Homo sapiens
  siRNA target sequence for C5orf5 (NM_016603.1,814-832).
ctttctcaagattataata

SEQ ID NO: 297716 - DNA, 19 bp, Homo sapiens
  siRNA target sequence for C5orf5 (NM_016603.1,876-894).
gcttccacctgttaattat

SEQ ID NO: 297717 - DNA, 19 bp, Homo sapiens
  siRNA target sequence for C5orf5 (NM_016603.1,927-945).
caatgtagcatcacatcat

SEQ ID NO: 297718 - DNA, 19 bp, Homo sapiens
  siRNA target sequence for C5orf5 (NM_016603.1,1077-1095).
ctatgagttttttgagaat

SEQ ID NO: 297719 - DNA, 19 bp, Homo sapiens
  siRNA target sequence for C5orf5 (NM_016603.1,1182-1200).
gctggaacatattgaagaa

SEQ ID NO: 297720 - DNA, 19 bp, Homo sapiens
  siRNA target sequence for C5orf5 (NM_016603.1,1236-1254).
gccagaggtggtacaatta

SEQ ID NO: 297721 - DNA, 19 bp, Homo sapiens
  siRNA target sequence for C5orf5 (NM_016603.1,1240-1258).
gaggtggtacaattaagga

SEQ ID NO: 297722 - DNA, 19 bp, Homo sapiens
  siRNA target sequence for C5orf5 (NM_016603.1,1249-1267).
caattaaggatgactgaaa

SEQ ID NO: 297723 - DNA, 19 bp, Homo sapiens
  siRNA target sequence for C5orf5 (NM_016603.1,1272-1290).
cctggaatcaaatagtgtt

SEQ ID NO: 297724 - DNA, 19 bp, Homo sapiens
  siRNA target sequence for C5orf5 (NM_016603.1,1273-1291).
ctggaatcaaatagtgtta

SEQ ID NO: 297725 - DNA, 19 bp, Homo sapiens
  siRNA target sequence for C5orf5 (NM_016603.1,1293-1311).
ggcaacaagcacccatata

SEQ ID NO: 297726 - DNA, 19 bp, Homo sapiens
  siRNA target sequence for C5orf5 (NM_016603.1,1294-1312).
gcaacaagcacccatatat

SEQ ID NO: 297727 - DNA, 19 bp, Homo sapiens
  siRNA target sequence for C5orf5 (NM_016603.1,1334-1352).
cctctacagatattttaga

SEQ ID NO: 297728 - DNA, 19 bp, Homo sapiens
  siRNA target sequence for C5orf5 (NM_016603.1,1398-1416).
gagcagcatagatcatgat

SEQ ID NO: 297729 - DNA, 19 bp, Homo sapiens
  siRNA target sequence for C5orf5 (NM_016603.1,1400-1418).
gcagcatagatcatgatct

SEQ ID NO: 297730 - DNA, 19 bp, Homo sapiens
  siRNA target sequence for C5orf5 (NM_016603.1,1408-1426).
gatcatgatcttaagaatt

SEQ ID NO: 297731 - DNA, 19 bp, Homo sapiens
  siRNA target sequence for C5orf5 (NM_016603.1,1481-1499).
gggaaggatctaataacca

SEQ ID NO: 297732 - DNA, 19 bp, Homo sapiens
  siRNA target sequence for C5orf5 (NM_016603.1,1487-1505).
gatctaataaccagattga

SEQ ID NO: 297733 - DNA, 19 bp, Homo sapiens
  siRNA target sequence for C5orf5 (NM_016603.1,1490-1508).
ctaataaccagattgatat

SEQ ID NO: 297734 - DNA, 19 bp, Homo sapiens
  siRNA target sequence for C5orf5 (NM_016603.1,1500-1518).
gattgatattgctgatgat

SEQ ID NO: 297735 - DNA, 19 bp, Homo sapiens
  siRNA target sequence for C5orf5 (NM_016603.1,1542-1560).
cagagactgttcaaaacct

SEQ ID NO: 297736 - DNA, 19 bp, Homo sapiens
  siRNA target sequence for C5orf5 (NM_016603.1,1564-1582).
gctagcactaatttagaca

SEQ ID NO: 297737 - DNA, 19 bp, Homo sapiens
  siRNA target sequence for C5orf5 (NM_016603.1,1565-1583).
ctagcactaatttagacaa

SEQ ID NO: 297738 - DNA, 19 bp, Homo sapiens
  siRNA target sequence for C5orf5 (NM_016603.1,1568-1586).
gcactaatttagacaatga

SEQ ID NO: 297739 - DNA, 19 bp, Homo sapiens
  siRNA target sequence for C5orf5 (NM_016603.1,1569-1587).
cactaatttagacaatgaa

SEQ ID NO: 297740 - DNA, 19 bp, Homo sapiens
  siRNA target sequence for C5orf5 (NM_016603.1,1632-1650).
gtctgtaggtatattgtta

SEQ ID NO: 297741 - DNA, 19 bp, Homo sapiens
  siRNA target sequence for C5orf5 (NM_016603.1,1697-1715).
gggaagaatatttgttatt

SEQ ID NO: 297742 - DNA, 19 bp, Homo sapiens
  siRNA target sequence for C5orf5 (NM_016603.1,1735-1753).
cacttgattctggattcta

SEQ ID NO: 297743 - DNA, 19 bp, Homo sapiens
  siRNA target sequence for C5orf5 (NM_016603.1,1746-1764).
ggattctagtagcaagata

SEQ ID NO: 297744 - DNA, 19 bp, Homo sapiens
  siRNA target sequence for C5orf5 (NM_016603.1,1747-1765).
gattctagtagcaagatat

SEQ ID NO: 297745 - DNA, 19 bp, Homo sapiens
  siRNA target sequence for C5orf5 (NM_016603.1,1751-1769).
ctagtagcaagatatgtga

SEQ ID NO: 297746 - DNA, 19 bp, Homo sapiens
  siRNA target sequence for C5orf5 (NM_016603.1,1754-1772).
gtagcaagatatgtgattt

SEQ ID NO: 297747 - DNA, 19 bp, Homo sapiens
  siRNA target sequence for C5orf5 (NM_016603.1,1773-1791).
gaatgccaacactgaatca

SEQ ID NO: 297748 - DNA, 19 bp, Homo sapiens
  siRNA target sequence for C5orf5 (NM_016603.1,1842-1860).
cagtattccacatttagat

SEQ ID NO: 297749 - DNA, 19 bp, Homo sapiens
  siRNA target sequence for C5orf5 (NM_016603.1,1870-1888).
gtttctgatggtgataaat

SEQ ID NO: 297750 - DNA, 19 bp, Homo sapiens
  siRNA target sequence for C5orf5 (NM_016603.1,1894-1912).
gagccatttcctgctttta

SEQ ID NO: 297751 - DNA, 19 bp, Homo sapiens
  siRNA target sequence for C5orf5 (NM_016603.1,1955-1973).
ctccacaagctggaagaat

SEQ ID NO: 297752 - DNA, 19 bp, Homo sapiens
  siRNA target sequence for C5orf5 (NM_016603.1,1995-2013).
ggactgtcctccagtatta

SEQ ID NO: 297753 - DNA, 19 bp, Homo sapiens
  siRNA target sequence for C5orf5 (NM_016603.1,1996-2014).
gactgtcctccagtattat

SEQ ID NO: 297754 - DNA, 19 bp, Homo sapiens
  siRNA target sequence for C5orf5 (NM_016603.1,1998-2016).
ctgtcctccagtattatca

SEQ ID NO: 297755 - DNA, 19 bp, Homo sapiens
  siRNA target sequence for C5orf5 (NM_016603.1,2019-2037).
ccgcagtttagattttggt

SEQ ID NO: 297756 - DNA, 19 bp, Homo sapiens
  siRNA target sequence for C5orf5 (NM_016603.1,2094-2112).
gtcttttactagaattcga

SEQ ID NO: 297757 - DNA, 19 bp, Homo sapiens
  siRNA target sequence for C5orf5 (NM_016603.1,2110-2128).
cgaagatcatcctttagtt

SEQ ID NO: 297758 - DNA, 19 bp, Homo sapiens
  siRNA target sequence for C5orf5 (NM_016603.1,2117-2135).
catcctttagttcaaaaga

SEQ ID NO: 297759 - DNA, 19 bp, Homo sapiens
  siRNA target sequence for C5orf5 (NM_016603.1,2159-2177).
cttatcagctggtcaagaa

SEQ ID NO: 297760 - DNA, 19 bp, Homo sapiens
  siRNA target sequence for C5orf5 (NM_016603.1,2254-2272).
gctgccaatccaaaggtat

SEQ ID NO: 297761 - DNA, 19 bp, Homo sapiens
  siRNA target sequence for C5orf5 (NM_016603.1,2257-2275).
gccaatccaaaggtattaa

SEQ ID NO: 297762 - DNA, 19 bp, Homo sapiens
  siRNA target sequence for C5orf5 (NM_016603.1,2258-2276).
ccaatccaaaggtattaaa

SEQ ID NO: 297763 - DNA, 19 bp, Homo sapiens
  siRNA target sequence for C5orf5 (NM_016603.1,2264-2282).
caaaggtattaaaatggat

SEQ ID NO: 297764 - DNA, 19 bp, Homo sapiens
  siRNA target sequence for C5orf5 (NM_016603.1,2279-2297).
ggatgacagagcttacaaa

SEQ ID NO: 297765 - DNA, 19 bp, Homo sapiens
  siRNA target sequence for C5orf5 (NM_016603.1,2399-2417).
cttctctagaccatgaaga

SEQ ID NO: 297766 - DNA, 19 bp, Homo sapiens
  siRNA target sequence for C5orf5 (NM_016603.1,2473-2491).
gaagcaacccttgaactta

SEQ ID NO: 297767 - DNA, 19 bp, Homo sapiens
  siRNA target sequence for C5orf5 (NM_016603.1,2652-2670).
cattgttaaacctctctat

SEQ ID NO: 297768 - DNA, 19 bp, Homo sapiens
  siRNA target sequence for C5orf5 (NM_016603.1,2671-2689).
gatagatacaggcttgtaa

SEQ ID NO: 297769 - DNA, 19 bp, Homo sapiens
  siRNA target sequence for C5orf5 (NM_016603.1,2745-2763).
gcgaaggggtcagatgtta

SEQ ID NO: 297770 - DNA, 19 bp, Homo sapiens
  siRNA target sequence for C5orf5 (NM_016603.1,2747-2765).
gaaggggtcagatgttaca

SEQ ID NO: 297771 - DNA, 19 bp, Homo sapiens
  siRNA target sequence for C5orf5 (NM_016603.1,2760-2778).
gttacagccaatcatagaa

SEQ ID NO: 297772 - DNA, 19 bp, Homo sapiens
  siRNA target sequence for C5orf5 (NM_016603.1,2845-2863).
gagttaggtgatatgttga

SEQ ID NO: 297773 - DNA, 19 bp, Homo sapiens
  siRNA target sequence for C5orf5 (NM_016603.1,2847-2865).
gttaggtgatatgttgaaa

SEQ ID NO: 297774 - DNA, 19 bp, Homo sapiens
  siRNA target sequence for C5orf5 (NM_016603.1,2938-2956).
ctggatctccgattgtcaa

SEQ ID NO: 297775 - DNA, 19 bp, Homo sapiens
  siRNA target sequence for C5orf5 (NM_016603.1,2957-2975).
gttctcgagcagcttctat

SEQ ID NO: 297776 - DNA, 19 bp, Homo sapiens
  siRNA target sequence for C5orf5 (NM_016603.1,2968-2986).
gcttctatgcctgaattat

SEQ ID NO: 297777 - DNA, 19 bp, Homo sapiens
  siRNA target sequence for C5orf5 (NM_016603.1,2969-2987).
cttctatgcctgaattatt

SEQ ID NO: 297778 - DNA, 19 bp, Homo sapiens
  siRNA target sequence for C5orf5 (NM_016603.1,3035-3053).
cgttgcgggaatttgaaga

SEQ ID NO: 297779 - DNA, 19 bp, Homo sapiens
  siRNA target sequence for C5orf5 (NM_016603.1,3036-3054).
gttgcgggaatttgaagaa

SEQ ID NO: 297780 - DNA, 19 bp, Homo sapiens
  siRNA target sequence for C5orf5 (NM_016603.1,3074-3092).
gaaggaatgcccagaaaga

SEQ ID NO: 297781 - DNA, 19 bp, Homo sapiens
  siRNA target sequence for C5orf5 (NM_016603.1,3117-3135).
gtacagagagtacaagaaa

SEQ ID NO: 297782 - DNA, 19 bp, Homo sapiens
  siRNA target sequence for C5orf5 (NM_016603.1,3143-3161).
ccaagcttaggcttcttga

SEQ ID NO: 297783 - DNA, 19 bp, Homo sapiens
  siRNA target sequence for C5orf5 (NM_016603.1,3147-3165).
gcttaggcttcttgaagtt

SEQ ID NO: 297784 - DNA, 19 bp, Homo sapiens
  siRNA target sequence for C5orf5 (NM_016603.1,3152-3170).
ggcttcttgaagttcttat

SEQ ID NO: 297785 - DNA, 19 bp, Homo sapiens
  siRNA target sequence for DOCK1 (NM_001380.1,43-61).
ccaagcgcgaggagaagta

SEQ ID NO: 297786 - DNA, 19 bp, Homo sapiens
  siRNA target sequence for DOCK1 (NM_001380.1,59-77).
gtacggcgtggctttttat

SEQ ID NO: 297787 - DNA, 19 bp, Homo sapiens
  siRNA target sequence for DOCK1 (NM_001380.1,63-81).
ggcgtggctttttataact

SEQ ID NO: 297788 - DNA, 19 bp, Homo sapiens
  siRNA target sequence for DOCK1 (NM_001380.1,88-106).
ccagaggagcggatgaact

SEQ ID NO: 297789 - DNA, 19 bp, Homo sapiens
  siRNA target sequence for DOCK1 (NM_001380.1,93-111).
ggagcggatgaactttctt

SEQ ID NO: 297790 - DNA, 19 bp, Homo sapiens
  siRNA target sequence for DOCK1 (NM_001380.1,94-112).
gagcggatgaactttcttt

SEQ ID NO: 297791 - DNA, 19 bp, Homo sapiens
  siRNA target sequence for DOCK1 (NM_001380.1,162-180).
cgaggttacacgttacgaa

SEQ ID NO: 297792 - DNA, 19 bp, Homo sapiens
  siRNA target sequence for DOCK1 (NM_001380.1,163-181).
gaggttacacgttacgaaa

SEQ ID NO: 297793 - DNA, 19 bp, Homo sapiens
  siRNA target sequence for DOCK1 (NM_001380.1,165-183).
ggttacacgttacgaaaaa

SEQ ID NO: 297794 - DNA, 19 bp, Homo sapiens
  siRNA target sequence for DOCK1 (NM_001380.1,170-188).
cacgttacgaaaaaagtct

SEQ ID NO: 297795 - DNA, 19 bp, Homo sapiens
  siRNA target sequence for DOCK1 (NM_001380.1,172-190).
cgttacgaaaaaagtctaa

SEQ ID NO: 297796 - DNA, 19 bp, Homo sapiens
  siRNA target sequence for DOCK1 (NM_001380.1,185-203).
gtctaagaagggtatattt

SEQ ID NO: 297797 - DNA, 19 bp, Homo sapiens
  siRNA target sequence for DOCK1 (NM_001380.1,207-225).
gcttcatatattcatctta

SEQ ID NO: 297798 - DNA, 19 bp, Homo sapiens
  siRNA target sequence for DOCK1 (NM_001380.1,336-354).
cagctctacgtgcaagata

SEQ ID NO: 297799 - DNA, 19 bp, Homo sapiens
  siRNA target sequence for DOCK1 (NM_001380.1,383-401).
catgatctatgaccttatt

SEQ ID NO: 297800 - DNA, 19 bp, Homo sapiens
  siRNA target sequence for DOCK1 (NM_001380.1,386-404).
gatctatgaccttattgaa

SEQ ID NO: 297801 - DNA, 19 bp, Homo sapiens
  siRNA target sequence for DOCK1 (NM_001380.1,509-527).
ggacctggtggttagagat

SEQ ID NO: 297802 - DNA, 19 bp, Homo sapiens
  siRNA target sequence for DOCK1 (NM_001380.1,573-591).
ctcttcagagctcatgaaa

SEQ ID NO: 297803 - DNA, 19 bp, Homo sapiens
  siRNA target sequence for DOCK1 (NM_001380.1,685-703).
cttctctggccttgtttgt

SEQ ID NO: 297804 - DNA, 19 bp, Homo sapiens
  siRNA target sequence for DOCK1 (NM_001380.1,744-762).
gaagtcctcatgtctctat

SEQ ID NO: 297805 - DNA, 19 bp, Homo sapiens
  siRNA target sequence for DOCK1 (NM_001380.1,769-787).
ctgtggagtccaaattcat

SEQ ID NO: 297806 - DNA, 19 bp, Homo sapiens
  siRNA target sequence for DOCK1 (NM_001380.1,809-827).
ctggtccagttcaggatta

SEQ ID NO: 297807 - DNA, 19 bp, Homo sapiens
  siRNA target sequence for DOCK1 (NM_001380.1,812-830).
gtccagttcaggattacct

SEQ ID NO: 297808 - DNA, 19 bp, Homo sapiens
  siRNA target sequence for DOCK1 (NM_001380.1,814-832).
ccagttcaggattacctaa

SEQ ID NO: 297809 - DNA, 19 bp, Homo sapiens
  siRNA target sequence for DOCK1 (NM_001380.1,908-926).
cagttttgtctgtcagatt

SEQ ID NO: 297810 - DNA, 19 bp, Homo sapiens
  siRNA target sequence for DOCK1 (NM_001380.1,980-998).
ggggttgcggcgacctttt

SEQ ID NO: 297811 - DNA, 19 bp, Homo sapiens
  siRNA target sequence for DOCK1 (NM_001380.1,1002-1020).
gtggctgtgatggatgtaa

SEQ ID NO: 297812 - DNA, 19 bp, Homo sapiens
  siRNA target sequence for DOCK1 (NM_001380.1,1014-1032).
gatgtaacagatataataa

SEQ ID NO: 297813 - DNA, 19 bp, Homo sapiens
  siRNA target sequence for DOCK1 (NM_001380.1,1083-1101).
gtggcaggggagaatgact

SEQ ID NO: 297814 - DNA, 19 bp, Homo sapiens
  siRNA target sequence for DOCK1 (NM_001380.1,1261-1279).
cagggtttccggagataat

SEQ ID NO: 297815 - DNA, 19 bp, Homo sapiens
  siRNA target sequence for DOCK1 (NM_001380.1,1263-1281).
gggtttccggagataatca

SEQ ID NO: 297816 - DNA, 19 bp, Homo sapiens
  siRNA target sequence for DOCK1 (NM_001380.1,1264-1282).
ggtttccggagataatcat

SEQ ID NO: 297817 - DNA, 19 bp, Homo sapiens
  siRNA target sequence for DOCK1 (NM_001380.1,1283-1301).
gcctggtgatgttcgaaat

SEQ ID NO: 297818 - DNA, 19 bp, Homo sapiens
  siRNA target sequence for DOCK1 (NM_001380.1,1288-1306).
gtgatgttcgaaatgatat

SEQ ID NO: 297819 - DNA, 19 bp, Homo sapiens
  siRNA target sequence for DOCK1 (NM_001380.1,1290-1308).
gatgttcgaaatgatatct

SEQ ID NO: 297820 - DNA, 19 bp, Homo sapiens
  siRNA target sequence for DOCK1 (NM_001380.1,1307-1325).
ctatgtaacattagttcaa

SEQ ID NO: 297821 - DNA, 19 bp, Homo sapiens
  siRNA target sequence for DOCK1 (NM_001380.1,1326-1344).
ggagattttgataaaggaa

SEQ ID NO: 297822 - DNA, 19 bp, Homo sapiens
  siRNA target sequence for DOCK1 (NM_001380.1,1404-1422).
cgattagagcatgtgattt

SEQ ID NO: 297823 - DNA, 19 bp, Homo sapiens
  siRNA target sequence for DOCK1 (NM_001380.1,1405-1423).
gattagagcatgtgatttt

SEQ ID NO: 297824 - DNA, 19 bp, Homo sapiens
  siRNA target sequence for DOCK1 (NM_001380.1,1443-1461).
gcgatttcagagtacaaat

SEQ ID NO: 297825 - DNA, 19 bp, Homo sapiens
  siRNA target sequence for DOCK1 (NM_001380.1,1452-1470).
gagtacaaatctgtgattt

SEQ ID NO: 297826 - DNA, 19 bp, Homo sapiens
  siRNA target sequence for DOCK1 (NM_001380.1,1464-1482).
gtgatttactaccaagtaa

SEQ ID NO: 297827 - DNA, 19 bp, Homo sapiens
  siRNA target sequence for DOCK1 (NM_001380.1,1543-1561).
gtcaccttcggtttacctt

SEQ ID NO: 297828 - DNA, 19 bp, Homo sapiens
  siRNA target sequence for DOCK1 (NM_001380.1,1570-1588).
ggtcatcacaggactctaa

SEQ ID NO: 297829 - DNA, 19 bp, Homo sapiens
  siRNA target sequence for DOCK1 (NM_001380.1,1578-1596).
caggactctaaggataaat

SEQ ID NO: 297830 - DNA, 19 bp, Homo sapiens
  siRNA target sequence for DOCK1 (NM_001380.1,1580-1598).
ggactctaaggataaatct

SEQ ID NO: 297831 - DNA, 19 bp, Homo sapiens
  siRNA target sequence for DOCK1 (NM_001380.1,1625-1643).
caagctgatgagatacgat

SEQ ID NO: 297832 - DNA, 19 bp, Homo sapiens
  siRNA target sequence for DOCK1 (NM_001380.1,1659-1677).
gacggagagcacgatctta

SEQ ID NO: 297833 - DNA, 19 bp, Homo sapiens
  siRNA target sequence for DOCK1 (NM_001380.1,1663-1681).
gagagcacgatcttatcgt

SEQ ID NO: 297834 - DNA, 19 bp, Homo sapiens
  siRNA target sequence for DOCK1 (NM_001380.1,1668-1686).
cacgatcttatcgtctata

SEQ ID NO: 297835 - DNA, 19 bp, Homo sapiens
  siRNA target sequence for DOCK1 (NM_001380.1,1801-1819).
ggagctgcaccattagcaa

SEQ ID NO: 297836 - DNA, 19 bp, Homo sapiens
  siRNA target sequence for DOCK1 (NM_001380.1,1878-1896).
cttctggggctcttgaaat

SEQ ID NO: 297837 - DNA, 19 bp, Homo sapiens
  siRNA target sequence for DOCK1 (NM_001380.1,1954-1972).
gtggtgaagtagtgaagtt

SEQ ID NO: 297838 - DNA, 19 bp, Homo sapiens
  siRNA target sequence for DOCK1 (NM_001380.1,2032-2050).
cttttgacacgttagtctt

SEQ ID NO: 297839 - DNA, 19 bp, Homo sapiens
  siRNA target sequence for DOCK1 (NM_001380.1,2052-2070).
gatgctctggtatttatca

SEQ ID NO: 297840 - DNA, 19 bp, Homo sapiens
  siRNA target sequence for DOCK1 (NM_001380.1,2074-2092).
gactgattgctgatagaaa

SEQ ID NO: 297841 - DNA, 19 bp, Homo sapiens
  siRNA target sequence for DOCK1 (NM_001380.1,2078-2096).
gattgctgatagaaaattt

SEQ ID NO: 297842 - DNA, 19 bp, Homo sapiens
  siRNA target sequence for DOCK1 (NM_001380.1,2154-2172).
gcctacacgaagttgacaa

SEQ ID NO: 297843 - DNA, 19 bp, Homo sapiens
  siRNA target sequence for DOCK1 (NM_001380.1,2155-2173).
cctacacgaagttgacaaa

SEQ ID NO: 297844 - DNA, 19 bp, Homo sapiens
  siRNA target sequence for DOCK1 (NM_001380.1,2156-2174).
ctacacgaagttgacaaaa

SEQ ID NO: 297845 - DNA, 19 bp, Homo sapiens
  siRNA target sequence for DOCK1 (NM_001380.1,2200-2218).
ctgagaagccgggagtaaa

SEQ ID NO: 297846 - DNA, 19 bp, Homo sapiens
  siRNA target sequence for DOCK1 (NM_001380.1,2244-2262).
gcgctagaatccatcttca

SEQ ID NO: 297847 - DNA, 19 bp, Homo sapiens
  siRNA target sequence for DOCK1 (NM_001380.1,2245-2263).
cgctagaatccatcttcaa

SEQ ID NO: 297848 - DNA, 19 bp, Homo sapiens
  siRNA target sequence for DOCK1 (NM_001380.1,2276-2294).
ctccaggatcctgttcaat

SEQ ID NO: 297849 - DNA, 19 bp, Homo sapiens
  siRNA target sequence for DOCK1 (NM_001380.1,2279-2297).
caggatcctgttcaatcaa

SEQ ID NO: 297850 - DNA, 19 bp, Homo sapiens
  siRNA target sequence for DOCK1 (NM_001380.1,2281-2299).
ggatcctgttcaatcaact

SEQ ID NO: 297851 - DNA, 19 bp, Homo sapiens
  siRNA target sequence for DOCK1 (NM_001380.1,2285-2303).
cctgttcaatcaactgtat

SEQ ID NO: 297852 - DNA, 19 bp, Homo sapiens
  siRNA target sequence for DOCK1 (NM_001380.1,2288-2306).
gttcaatcaactgtatgaa

SEQ ID NO: 297853 - DNA, 19 bp, Homo sapiens
  siRNA target sequence for DOCK1 (NM_001380.1,2319-2337).
gctgacttcgtggaatctt

SEQ ID NO: 297854 - DNA, 19 bp, Homo sapiens
  siRNA target sequence for DOCK1 (NM_001380.1,2345-2363).
gctcttcaggtccatcaat

SEQ ID NO: 297855 - DNA, 19 bp, Homo sapiens
  siRNA target sequence for DOCK1 (NM_001380.1,2406-2424).
ggggcagcactgaaatact

SEQ ID NO: 297856 - DNA, 19 bp, Homo sapiens
  siRNA target sequence for DOCK1 (NM_001380.1,2407-2425).
gggcagcactgaaatactt

SEQ ID NO: 297857 - DNA, 19 bp, Homo sapiens
  siRNA target sequence for DOCK1 (NM_001380.1,2408-2426).
ggcagcactgaaatactta

SEQ ID NO: 297858 - DNA, 19 bp, Homo sapiens
  siRNA target sequence for DOCK1 (NM_001380.1,2431-2449).
cgatcgtcaacgatgtgaa

SEQ ID NO: 297859 - DNA, 19 bp, Homo sapiens
  siRNA target sequence for DOCK1 (NM_001380.1,2432-2450).
gatcgtcaacgatgtgaaa

SEQ ID NO: 297860 - DNA, 19 bp, Homo sapiens
  siRNA target sequence for DOCK1 (NM_001380.1,2721-2739).
cagaggcacgtccagatta

SEQ ID NO: 297861 - DNA, 19 bp, Homo sapiens
  siRNA target sequence for DOCK1 (NM_001380.1,2725-2743).
ggcacgtccagattatcat

SEQ ID NO: 297862 - DNA, 19 bp, Homo sapiens
  siRNA target sequence for DOCK1 (NM_001380.1,2763-2781).
gtgaaccgaaccgtcattt

SEQ ID NO: 297863 - DNA, 19 bp, Homo sapiens
  siRNA target sequence for DOCK1 (NM_001380.1,2788-2806).
gacgagattctgaactcat

SEQ ID NO: 297864 - DNA, 19 bp, Homo sapiens
  siRNA target sequence for DOCK1 (NM_001380.1,2819-2837).
ggcttgcatgacagctatt

SEQ ID NO: 297865 - DNA, 19 bp, Homo sapiens
  siRNA target sequence for DOCK1 (NM_001380.1,2820-2838).
gcttgcatgacagctattt

SEQ ID NO: 297866 - DNA, 19 bp, Homo sapiens
  siRNA target sequence for DOCK1 (NM_001380.1,2833-2851).
ctattttacgacaaatgga

SEQ ID NO: 297867 - DNA, 19 bp, Homo sapiens
  siRNA target sequence for DOCK1 (NM_001380.1,2859-2877).
cattatgcccacttgatca

SEQ ID NO: 297868 - DNA, 19 bp, Homo sapiens
  siRNA target sequence for DOCK1 (NM_001380.1,2968-2986).
ccttcgactgggtgatcat

SEQ ID NO: 297869 - DNA, 19 bp, Homo sapiens
  siRNA target sequence for DOCK1 (NM_001380.1,3006-3024).
gtcttcctgcgagcaatta

SEQ ID NO: 297870 - DNA, 19 bp, Homo sapiens
  siRNA target sequence for DOCK1 (NM_001380.1,3008-3026).
cttcctgcgagcaattaat

SEQ ID NO: 297871 - DNA, 19 bp, Homo sapiens
  siRNA target sequence for DOCK1 (NM_001380.1,3160-3178).
ccaagagagccaaaatcct

SEQ ID NO: 297872 - DNA, 19 bp, Homo sapiens
  siRNA target sequence for DOCK1 (NM_001380.1,3168-3186).
gccaaaatccttaacaagt

SEQ ID NO: 297873 - DNA, 19 bp, Homo sapiens
  siRNA target sequence for DOCK1 (NM_001380.1,3243-3261).
ggtcaacacaagataaagt

SEQ ID NO: 297874 - DNA, 19 bp, Homo sapiens
  siRNA target sequence for DOCK1 (NM_001380.1,3244-3262).
gtcaacacaagataaagtt

SEQ ID NO: 297875 - DNA, 19 bp, Homo sapiens
  siRNA target sequence for DOCK1 (NM_001380.1,3270-3288).
gaaatggtgggcccaatat

SEQ ID NO: 297876 - DNA, 19 bp, Homo sapiens
  siRNA target sequence for DOCK1 (NM_001380.1,3275-3293).
ggtgggcccaatattagaa

SEQ ID NO: 297877 - DNA, 19 bp, Homo sapiens
  siRNA target sequence for DOCK1 (NM_001380.1,3276-3294).
gtgggcccaatattagaaa

SEQ ID NO: 297878 - DNA, 19 bp, Homo sapiens
  siRNA target sequence for DOCK1 (NM_001380.1,3279-3297).
ggcccaatattagaaatga

SEQ ID NO: 297879 - DNA, 19 bp, Homo sapiens
  siRNA target sequence for DOCK1 (NM_001380.1,3412-3430).
ccaagctggatcatgaagt

SEQ ID NO: 297880 - DNA, 19 bp, Homo sapiens
  siRNA target sequence for DOCK1 (NM_001380.1,3447-3465).
gacgaacagtacaaagtgt

SEQ ID NO: 297881 - DNA, 19 bp, Homo sapiens
  siRNA target sequence for DOCK1 (NM_001380.1,3503-3521).
caaatacctcgccaaaaca

SEQ ID NO: 297882 - DNA, 19 bp, Homo sapiens
  siRNA target sequence for DOCK1 (NM_001380.1,3513-3531).
gccaaaacaggagaaactt

SEQ ID NO: 297883 - DNA, 19 bp, Homo sapiens
  siRNA target sequence for DOCK1 (NM_001380.1,3584-3602).
catgcacgacgagaacaaa

SEQ ID NO: 297884 - DNA, 19 bp, Homo sapiens
  siRNA target sequence for DOCK1 (NM_001380.1,3622-3640).
ccgtcaatgtgctgaattt

SEQ ID NO: 297885 - DNA, 19 bp, Homo sapiens
  siRNA target sequence for DOCK1 (NM_001380.1,3930-3948).
cagtatgagaacgaaatgt

SEQ ID NO: 297886 - DNA, 19 bp, Homo sapiens
  siRNA target sequence for DOCK1 (NM_001380.1,3932-3950).
gtatgagaacgaaatgttt

SEQ ID NO: 297887 - DNA, 19 bp, Homo sapiens
  siRNA target sequence for DOCK1 (NM_001380.1,3936-3954).
gagaacgaaatgtttgatt

SEQ ID NO: 297888 - DNA, 19 bp, Homo sapiens
  siRNA target sequence for DOCK1 (NM_001380.1,3963-3981).
ctcagcgaattgctgaaaa

SEQ ID NO: 297889 - DNA, 19 bp, Homo sapiens
  siRNA target sequence for DOCK1 (NM_001380.1,3967-3985).
gcgaattgctgaaaaaaca

SEQ ID NO: 297890 - DNA, 19 bp, Homo sapiens
  siRNA target sequence for DOCK1 (NM_001380.1,3977-3995).
gaaaaaacaggctcagttt

SEQ ID NO: 297891 - DNA, 19 bp, Homo sapiens
  siRNA target sequence for DOCK1 (NM_001380.1,3984-4002).
caggctcagttttatgaaa

SEQ ID NO: 297892 - DNA, 19 bp, Homo sapiens
  siRNA target sequence for DOCK1 (NM_001380.1,4021-4039).
ggcccaagcctgactattt

SEQ ID NO: 297893 - DNA, 19 bp, Homo sapiens
  siRNA target sequence for DOCK1 (NM_001380.1,4080-4098).
cggggaaaagttttcattt

SEQ ID NO: 297894 - DNA, 19 bp, Homo sapiens
  siRNA target sequence for DOCK1 (NM_001380.1,4158-4176).
ccaaacgccgagaaaatga

SEQ ID NO: 297895 - DNA, 19 bp, Homo sapiens
  siRNA target sequence for DOCK1 (NM_001380.1,4159-4177).
caaacgccgagaaaatgaa

SEQ ID NO: 297896 - DNA, 19 bp, Homo sapiens
  siRNA target sequence for DOCK1 (NM_001380.1,4186-4204).
ctccaccaggcgacgatat

SEQ ID NO: 297897 - DNA, 19 bp, Homo sapiens
  siRNA target sequence for DOCK1 (NM_001380.1,4188-4206).
ccaccaggcgacgatatta

SEQ ID NO: 297898 - DNA, 19 bp, Homo sapiens
  siRNA target sequence for DOCK1 (NM_001380.1,4189-4207).
caccaggcgacgatattaa

SEQ ID NO: 297899 - DNA, 19 bp, Homo sapiens
  siRNA target sequence for DOCK1 (NM_001380.1,4191-4209).
ccaggcgacgatattaaaa

SEQ ID NO: 297900 - DNA, 19 bp, Homo sapiens
  siRNA target sequence for DOCK1 (NM_001380.1,4192-4210).
caggcgacgatattaaaaa

SEQ ID NO: 297901 - DNA, 19 bp, Homo sapiens
  siRNA target sequence for DOCK1 (NM_001380.1,4196-4214).
cgacgatattaaaaactct

SEQ ID NO: 297902 - DNA, 19 bp, Homo sapiens
  siRNA target sequence for DOCK1 (NM_001380.1,4213-4231).
ctcctggccagtatattca

SEQ ID NO: 297903 - DNA, 19 bp, Homo sapiens
  siRNA target sequence for DOCK1 (NM_001380.1,4256-4274).
cgatctgcctcctaagttt

SEQ ID NO: 297904 - DNA, 19 bp, Homo sapiens
  siRNA target sequence for DOCK1 (NM_001380.1,4288-4306).
cagagcagattgtaagttt

SEQ ID NO: 297905 - DNA, 19 bp, Homo sapiens
  siRNA target sequence for DOCK1 (NM_001380.1,4319-4337).
cgaggtccagcgatttgaa

SEQ ID NO: 297906 - DNA, 19 bp, Homo sapiens
  siRNA target sequence for DOCK1 (NM_001380.1,4320-4338).
gaggtccagcgatttgaat

SEQ ID NO: 297907 - DNA, 19 bp, Homo sapiens
  siRNA target sequence for DOCK1 (NM_001380.1,4322-4340).
ggtccagcgatttgaatat

SEQ ID NO: 297908 - DNA, 19 bp, Homo sapiens
  siRNA target sequence for DOCK1 (NM_001380.1,4325-4343).
ccagcgatttgaatattct

SEQ ID NO: 297909 - DNA, 19 bp, Homo sapiens
  siRNA target sequence for DOCK1 (NM_001380.1,4394-4412).
gtggatcgagagaaccata

SEQ ID NO: 297910 - DNA, 19 bp, Homo sapiens
  siRNA target sequence for DOCK1 (NM_001380.1,4396-4414).
ggatcgagagaaccatata

SEQ ID NO: 297911 - DNA, 19 bp, Homo sapiens
  siRNA target sequence for DOCK1 (NM_001380.1,4397-4415).
gatcgagagaaccatatat

SEQ ID NO: 297912 - DNA, 19 bp, Homo sapiens
  siRNA target sequence for DOCK1 (NM_001380.1,4400-4418).
cgagagaaccatatataca

SEQ ID NO: 297913 - DNA, 19 bp, Homo sapiens
  siRNA target sequence for DOCK1 (NM_001380.1,4518-4536).
ctgacgaacgacaagatca

SEQ ID NO: 297914 - DNA, 19 bp, Homo sapiens
  siRNA target sequence for DOCK1 (NM_001380.1,4632-4650).
ggcttcgcaaactacgaaa

SEQ ID NO: 297915 - DNA, 19 bp, Homo sapiens
  siRNA target sequence for DOCK1 (NM_001380.1,4633-4651).
gcttcgcaaactacgaaaa

SEQ ID NO: 297916 - DNA, 19 bp, Homo sapiens
  siRNA target sequence for DOCK1 (NM_001380.1,4643-4661).
ctacgaaaaggccttcttt

SEQ ID NO: 297917 - DNA, 19 bp, Homo sapiens
  siRNA target sequence for DOCK1 (NM_001380.1,4646-4664).
cgaaaaggccttctttaca

SEQ ID NO: 297918 - DNA, 19 bp, Homo sapiens
  siRNA target sequence for DOCK1 (NM_001380.1,4746-4764).
ctggccgaagggatcagaa

SEQ ID NO: 297919 - DNA, 19 bp, Homo sapiens
  siRNA target sequence for DOCK1 (NM_001380.1,4751-4769).
cgaagggatcagaatccat

SEQ ID NO: 297920 - DNA, 19 bp, Homo sapiens
  siRNA target sequence for DOCK1 (NM_001380.1,4875-4893).
ccctcaagtctggatgata

SEQ ID NO: 297921 - DNA, 19 bp, Homo sapiens
  siRNA target sequence for DOCK1 (NM_001380.1,5204-5222).
gatcctttcggaaacgata

SEQ ID NO: 297922 - DNA, 19 bp, Homo sapiens
  siRNA target sequence for DOCK1 (NM_001380.1,5207-5225).
cctttcggaaacgataagt

SEQ ID NO: 297923 - DNA, 19 bp, Homo sapiens
  siRNA target sequence for DOCK1 (NM_001380.1,5256-5274).
gtgatgaacgtcattggaa

SEQ ID NO: 297924 - DNA, 19 bp, Homo sapiens
  siRNA target sequence for DOCK1 (NM_001380.1,5448-5466).
gcagattacgggaatttga

SEQ ID NO: 297925 - DNA, 19 bp, Homo sapiens
  siRNA target sequence for LGN (NM_013296.3,359-377).
ggaaggggaacgtctatgt

SEQ ID NO: 297926 - DNA, 19 bp, Homo sapiens
  siRNA target sequence for LGN (NM_013296.3,360-378).
gaaggggaacgtctatgta

SEQ ID NO: 297927 - DNA, 19 bp, Homo sapiens
  siRNA target sequence for LGN (NM_013296.3,363-381).
ggggaacgtctatgtaaat

SEQ ID NO: 297928 - DNA, 19 bp, Homo sapiens
  siRNA target sequence for LGN (NM_013296.3,365-383).
ggaacgtctatgtaaatca

SEQ ID NO: 297929 - DNA, 19 bp, Homo sapiens
  siRNA target sequence for LGN (NM_013296.3,394-412).
gcgctggcgtgtcattctt

SEQ ID NO: 297930 - DNA, 19 bp, Homo sapiens
  siRNA target sequence for LGN (NM_013296.3,395-413).
cgctggcgtgtcattcttt

SEQ ID NO: 297931 - DNA, 19 bp, Homo sapiens
  siRNA target sequence for LGN (NM_013296.3,397-415).
ctggcgtgtcattctttga

SEQ ID NO: 297932 - DNA, 19 bp, Homo sapiens
  siRNA target sequence for LGN (NM_013296.3,436-454).
ctgaagacctaaaaacact

SEQ ID NO: 297933 - DNA, 19 bp, Homo sapiens
  siRNA target sequence for LGN (NM_013296.3,470-488).
ccagttgggcaatgcttat

SEQ ID NO: 297934 - DNA, 19 bp, Homo sapiens
  siRNA target sequence for LGN (NM_013296.3,471-489).
cagttgggcaatgcttatt

SEQ ID NO: 297935 - DNA, 19 bp, Homo sapiens
  siRNA target sequence for LGN (NM_013296.3,476-494).
gggcaatgcttatttctat

SEQ ID NO: 297936 - DNA, 19 bp, Homo sapiens
  siRNA target sequence for LGN (NM_013296.3,477-495).
ggcaatgcttatttctatt

SEQ ID NO: 297937 - DNA, 19 bp, Homo sapiens
  siRNA target sequence for LGN (NM_013296.3,478-496).
gcaatgcttatttctattt

SEQ ID NO: 297938 - DNA, 19 bp, Homo sapiens
  siRNA target sequence for LGN (NM_013296.3,542-560).
ccttgcaaggactattgga

SEQ ID NO: 297939 - DNA, 19 bp, Homo sapiens
  siRNA target sequence for LGN (NM_013296.3,577-595).
cgaaagctagtggtaatct

SEQ ID NO: 297940 - DNA, 19 bp, Homo sapiens
  siRNA target sequence for LGN (NM_013296.3,598-616).
gaaacaccttaaaagttct

SEQ ID NO: 297941 - DNA, 19 bp, Homo sapiens
  siRNA target sequence for LGN (NM_013296.3,627-645).
gacgaagccatagtttgtt

SEQ ID NO: 297942 - DNA, 19 bp, Homo sapiens
  siRNA target sequence for LGN (NM_013296.3,629-647).
cgaagccatagtttgttgt

SEQ ID NO: 297943 - DNA, 19 bp, Homo sapiens
  siRNA target sequence for LGN (NM_013296.3,646-664).
gtcagcgacacctagatat

SEQ ID NO: 297944 - DNA, 19 bp, Homo sapiens
  siRNA target sequence for LGN (NM_013296.3,648-666).
cagcgacacctagatattt

SEQ ID NO: 297945 - DNA, 19 bp, Homo sapiens
  siRNA target sequence for LGN (NM_013296.3,651-669).
cgacacctagatatttcca

SEQ ID NO: 297946 - DNA, 19 bp, Homo sapiens
  siRNA target sequence for LGN (NM_013296.3,729-747).
catgccaaagggaaaagtt

SEQ ID NO: 297947 - DNA, 19 bp, Homo sapiens
  siRNA target sequence for LGN (NM_013296.3,763-781).
cccaggatgtaggagaatt

SEQ ID NO: 297948 - DNA, 19 bp, Homo sapiens
  siRNA target sequence for LGN (NM_013296.3,764-782).
ccaggatgtaggagaattt

SEQ ID NO: 297949 - DNA, 19 bp, Homo sapiens
  siRNA target sequence for LGN (NM_013296.3,806-824).
gcaggcagccgtggatttt

SEQ ID NO: 297950 - DNA, 19 bp, Homo sapiens
  siRNA target sequence for LGN (NM_013296.3,831-849).
gaaaacctatcattagtga

SEQ ID NO: 297951 - DNA, 19 bp, Homo sapiens
  siRNA target sequence for LGN (NM_013296.3,923-941).
cttcagggatgcagttata

SEQ ID NO: 297952 - DNA, 19 bp, Homo sapiens
  siRNA target sequence for LGN (NM_013296.3,926-944).
cagggatgcagttatagct

SEQ ID NO: 297953 - DNA, 19 bp, Homo sapiens
  siRNA target sequence for LGN (NM_013296.3,1051-1069).
ctgcctcggaatactacaa

SEQ ID NO: 297954 - DNA, 19 bp, Homo sapiens
  siRNA target sequence for LGN (NM_013296.3,1053-1071).
gcctcggaatactacaaga

SEQ ID NO: 297955 - DNA, 19 bp, Homo sapiens
  siRNA target sequence for LGN (NM_013296.3,1054-1072).
cctcggaatactacaagaa

SEQ ID NO: 297956 - DNA, 19 bp, Homo sapiens
  siRNA target sequence for LGN (NM_013296.3,1082-1100).
gttggcccgacagcttaaa

SEQ ID NO: 297957 - DNA, 19 bp, Homo sapiens
  siRNA target sequence for LGN (NM_013296.3,1110-1128).
gtagaagcacagtcttgtt

SEQ ID NO: 297958 - DNA, 19 bp, Homo sapiens
  siRNA target sequence for LGN (NM_013296.3,1113-1131).
gaagcacagtcttgttaca

SEQ ID NO: 297959 - DNA, 19 bp, Homo sapiens
  siRNA target sequence for LGN (NM_013296.3,1123-1141).
cttgttacagtcttggaaa

SEQ ID NO: 297960 - DNA, 19 bp, Homo sapiens
  siRNA target sequence for LGN (NM_013296.3,1144-1162).
catatactttacttcaaga

SEQ ID NO: 297961 - DNA, 19 bp, Homo sapiens
  siRNA target sequence for LGN (NM_013296.3,1174-1192).
ccattgattatcatctgaa

SEQ ID NO: 297962 - DNA, 19 bp, Homo sapiens
  siRNA target sequence for LGN (NM_013296.3,1206-1224).
gctcaagagctgaatgata

SEQ ID NO: 297963 - DNA, 19 bp, Homo sapiens
  siRNA target sequence for LGN (NM_013296.3,1279-1297).
gaaatcatgatcaagcaat

SEQ ID NO: 297964 - DNA, 19 bp, Homo sapiens
  siRNA target sequence for LGN (NM_013296.3,1294-1312).
caatgcattttgctgaaaa

SEQ ID NO: 297965 - DNA, 19 bp, Homo sapiens
  siRNA target sequence for LGN (NM_013296.3,1341-1359).
gataaaagtggtgaactaa

SEQ ID NO: 297966 - DNA, 19 bp, Homo sapiens
  siRNA target sequence for LGN (NM_013296.3,1488-1506).
cggcatagtatggaaaata

SEQ ID NO: 297967 - DNA, 19 bp, Homo sapiens
  siRNA target sequence for LGN (NM_013296.3,1489-1507).
ggcatagtatggaaaatat

SEQ ID NO: 297968 - DNA, 19 bp, Homo sapiens
  siRNA target sequence for LGN (NM_013296.3,1575-1593).
cctcttattgccaaacctt

SEQ ID NO: 297969 - DNA, 19 bp, Homo sapiens
  siRNA target sequence for LGN (NM_013296.3,1642-1660).
cgaattcctccactaaagt

SEQ ID NO: 297970 - DNA, 19 bp, Homo sapiens
  siRNA target sequence for LGN (NM_013296.3,1643-1661).
gaattcctccactaaagtt

SEQ ID NO: 297971 - DNA, 19 bp, Homo sapiens
  siRNA target sequence for LGN (NM_013296.3,1664-1682).
ccaagatgccagtaattct

SEQ ID NO: 297972 - DNA, 19 bp, Homo sapiens
  siRNA target sequence for LGN (NM_013296.3,1686-1704).
gaccaccgaattccaaatt

SEQ ID NO: 297973 - DNA, 19 bp, Homo sapiens
  siRNA target sequence for LGN (NM_013296.3,1688-1706).
ccaccgaattccaaattct

SEQ ID NO: 297974 - DNA, 19 bp, Homo sapiens
  siRNA target sequence for LGN (NM_013296.3,1743-1761).
gggttctttgacttattaa

SEQ ID NO: 297975 - DNA, 19 bp, Homo sapiens
  siRNA target sequence for LGN (NM_013296.3,1774-1792).
gcaataggatggatgatca

SEQ ID NO: 297976 - DNA, 19 bp, Homo sapiens
  siRNA target sequence for LGN (NM_013296.3,1843-1861).
cttccactccccctaaaat

SEQ ID NO: 297977 - DNA, 19 bp, Homo sapiens
  siRNA target sequence for LGN (NM_013296.3,1846-1864).
ccactccccctaaaatgat

SEQ ID NO: 297978 - DNA, 19 bp, Homo sapiens
  siRNA target sequence for LGN (NM_013296.3,1851-1869).
ccccctaaaatgatgctaa

SEQ ID NO: 297979 - DNA, 19 bp, Homo sapiens
  siRNA target sequence for LGN (NM_013296.3,1901-1919).
cacggatgagtttttagat

SEQ ID NO: 297980 - DNA, 19 bp, Homo sapiens
  siRNA target sequence for LGN (NM_013296.3,1953-1971).
gaccagagggctagtttca

SEQ ID NO: 297981 - DNA, 19 bp, Homo sapiens
  siRNA target sequence for LGN (NM_013296.3,1958-1976).
gagggctagtttcagtaat

SEQ ID NO: 297982 - DNA, 19 bp, Homo sapiens
  siRNA target sequence for LGN (NM_013296.3,1960-1978).
gggctagtttcagtaattt

SEQ ID NO: 297983 - DNA, 19 bp, Homo sapiens
  siRNA target sequence for LGN (NM_013296.3,1981-1999).
cagggcttcgtctaacaca

SEQ ID NO: 297984 - DNA, 19 bp, Homo sapiens
  siRNA target sequence for LGN (NM_013296.3,1983-2001).
gggcttcgtctaacacaaa

SEQ ID NO: 297985 - DNA, 19 bp, Homo sapiens
  siRNA target sequence for LGN (NM_013296.3,1984-2002).
ggcttcgtctaacacaaaa

SEQ ID NO: 297986 - DNA, 19 bp, Homo sapiens
  siRNA target sequence for LGN (NM_013296.3,1986-2004).
cttcgtctaacacaaaaca

SEQ ID NO: 297987 - DNA, 19 bp, Homo sapiens
  siRNA target sequence for LGN (NM_013296.3,2016-2034).
cttagccacctgatgacta

SEQ ID NO: 297988 - DNA, 19 bp, Homo sapiens
  siRNA target sequence for LGN (NM_013296.3,2245-2263).
ctgactttgggctaaagga

SEQ ID NO: 297989 - DNA, 19 bp, Homo sapiens
  siRNA target sequence for RAB3-GAP150 (NM_012414.2,175-193).
gcggagggaccccagtaaa

SEQ ID NO: 297990 - DNA, 19 bp, Homo sapiens
  siRNA target sequence for RAB3-GAP150 (NM_012414.2,176-194).
cggagggaccccagtaaat

SEQ ID NO: 297991 - DNA, 19 bp, Homo sapiens
  siRNA target sequence for RAB3-GAP150 (NM_012414.2,291-309).
cctggctccaagattgtgt

SEQ ID NO: 297992 - DNA, 19 bp, Homo sapiens
  siRNA target sequence for RAB3-GAP150 (NM_012414.2,292-310).
ctggctccaagattgtgtt

SEQ ID NO: 297993 - DNA, 19 bp, Homo sapiens
  siRNA target sequence for RAB3-GAP150 (NM_012414.2,294-312).
ggctccaagattgtgtttt

SEQ ID NO: 297994 - DNA, 19 bp, Homo sapiens
  siRNA target sequence for RAB3-GAP150 (NM_012414.2,324-342).
caaccaatgatcttatggt

SEQ ID NO: 297995 - DNA, 19 bp, Homo sapiens
  siRNA target sequence for RAB3-GAP150 (NM_012414.2,351-369).
gagagcaaaaagctgtatt

SEQ ID NO: 297996 - DNA, 19 bp, Homo sapiens
  siRNA target sequence for RAB3-GAP150 (NM_012414.2,428-446).
ggctggagtggttccttaa

SEQ ID NO: 297997 - DNA, 19 bp, Homo sapiens
  siRNA target sequence for RAB3-GAP150 (NM_012414.2,429-447).
gctggagtggttccttaaa

SEQ ID NO: 297998 - DNA, 19 bp, Homo sapiens
  siRNA target sequence for RAB3-GAP150 (NM_012414.2,430-448).
ctggagtggttccttaaat

SEQ ID NO: 297999 - DNA, 19 bp, Homo sapiens
  siRNA target sequence for RAB3-GAP150 (NM_012414.2,432-450).
ggagtggttccttaaatgt

SEQ ID NO: 298000 - DNA, 19 bp, Homo sapiens
  siRNA target sequence for RAB3-GAP150 (NM_012414.2,452-470).
gaagaaggggaatgtgtaa

SEQ ID NO: 298001 - DNA, 19 bp, Homo sapiens
  siRNA target sequence for RAB3-GAP150 (NM_012414.2,467-485).
gtaaccagtgctctatgta

SEQ ID NO: 298002 - DNA, 19 bp, Homo sapiens
  siRNA target sequence for RAB3-GAP150 (NM_012414.2,613-631).
gaatgaggacccagtactt

SEQ ID NO: 298003 - DNA, 19 bp, Homo sapiens
  siRNA target sequence for RAB3-GAP150 (NM_012414.2,620-638).
gacccagtacttcaactta

SEQ ID NO: 298004 - DNA, 19 bp, Homo sapiens
  siRNA target sequence for RAB3-GAP150 (NM_012414.2,623-641).
ccagtacttcaacttaaat

SEQ ID NO: 298005 - DNA, 19 bp, Homo sapiens
  siRNA target sequence for RAB3-GAP150 (NM_012414.2,626-644).
gtacttcaacttaaatgca

SEQ ID NO: 298006 - DNA, 19 bp, Homo sapiens
  siRNA target sequence for RAB3-GAP150 (NM_012414.2,673-691).
cgtgactgagcagaatgaa

SEQ ID NO: 298007 - DNA, 19 bp, Homo sapiens
  siRNA target sequence for RAB3-GAP150 (NM_012414.2,683-701).
cagaatgaagagttgagta

SEQ ID NO: 298008 - DNA, 19 bp, Homo sapiens
  siRNA target sequence for RAB3-GAP150 (NM_012414.2,714-732).
ctgccattgtgactattga

SEQ ID NO: 298009 - DNA, 19 bp, Homo sapiens
  siRNA target sequence for RAB3-GAP150 (NM_012414.2,734-752).
ggatttagcctttttcaat

SEQ ID NO: 298010 - DNA, 19 bp, Homo sapiens
  siRNA target sequence for RAB3-GAP150 (NM_012414.2,765-783).
gtcgaaatcaggtagcaaa

SEQ ID NO: 298011 - DNA, 19 bp, Homo sapiens
  siRNA target sequence for RAB3-GAP150 (NM_012414.2,792-810).
catcaggcaatgagaacat

SEQ ID NO: 298012 - DNA, 19 bp, Homo sapiens
  siRNA target sequence for RAB3-GAP150 (NM_012414.2,808-826).
catacaaccaccaccatta

SEQ ID NO: 298013 - DNA, 19 bp, Homo sapiens
  siRNA target sequence for RAB3-GAP150 (NM_012414.2,812-830).
caaccaccaccattagctt

SEQ ID NO: 298014 - DNA, 19 bp, Homo sapiens
  siRNA target sequence for RAB3-GAP150 (NM_012414.2,818-836).
ccaccattagcttataaga

SEQ ID NO: 298015 - DNA, 19 bp, Homo sapiens
  siRNA target sequence for RAB3-GAP150 (NM_012414.2,835-853).
gaaatggggtctacaagat

SEQ ID NO: 298016 - DNA, 19 bp, Homo sapiens
  siRNA target sequence for RAB3-GAP150 (NM_012414.2,840-858).
ggggtctacaagatattga

SEQ ID NO: 298017 - DNA, 19 bp, Homo sapiens
  siRNA target sequence for RAB3-GAP150 (NM_012414.2,848-866).
caagatattgacactatta

SEQ ID NO: 298018 - DNA, 19 bp, Homo sapiens
  siRNA target sequence for RAB3-GAP150 (NM_012414.2,875-893).
gctagtgttggtattatga

SEQ ID NO: 298019 - DNA, 19 bp, Homo sapiens
  siRNA target sequence for RAB3-GAP150 (NM_012414.2,916-934).
gaagactgcctccaatata

SEQ ID NO: 298020 - DNA, 19 bp, Homo sapiens
  siRNA target sequence for RAB3-GAP150 (NM_012414.2,925-943).
ctccaatataggtggattt

SEQ ID NO: 298021 - DNA, 19 bp, Homo sapiens
  siRNA target sequence for RAB3-GAP150 (NM_012414.2,927-945).
ccaatataggtggatttaa

SEQ ID NO: 298022 - DNA, 19 bp, Homo sapiens
  siRNA target sequence for RAB3-GAP150 (NM_012414.2,968-986).
cctgccatgtctcagtata

SEQ ID NO: 298023 - DNA, 19 bp, Homo sapiens
  siRNA target sequence for RAB3-GAP150 (NM_012414.2,969-987).
ctgccatgtctcagtatat

SEQ ID NO: 298024 - DNA, 19 bp, Homo sapiens
  siRNA target sequence for RAB3-GAP150 (NM_012414.2,971-989).
gccatgtctcagtatatca

SEQ ID NO: 298025 - DNA, 19 bp, Homo sapiens
  siRNA target sequence for RAB3-GAP150 (NM_012414.2,992-1010).
gtagggtccaatccattta

SEQ ID NO: 298026 - DNA, 19 bp, Homo sapiens
  siRNA target sequence for RAB3-GAP150 (NM_012414.2,1034-1052).
ggaagcacacaaccattat

SEQ ID NO: 298027 - DNA, 19 bp, Homo sapiens
  siRNA target sequence for RAB3-GAP150 (NM_012414.2,1065-1083).
cactagcagttgcaagtaa

SEQ ID NO: 298028 - DNA, 19 bp, Homo sapiens
  siRNA target sequence for RAB3-GAP150 (NM_012414.2,1180-1198).
gccagctaccccattagct

SEQ ID NO: 298029 - DNA, 19 bp, Homo sapiens
  siRNA target sequence for RAB3-GAP150 (NM_012414.2,1188-1206).
ccccattagctgtaagatt

SEQ ID NO: 298030 - DNA, 19 bp, Homo sapiens
  siRNA target sequence for RAB3-GAP150 (NM_012414.2,1189-1207).
cccattagctgtaagattt

SEQ ID NO: 298031 - DNA, 19 bp, Homo sapiens
  siRNA target sequence for RAB3-GAP150 (NM_012414.2,1226-1244).
cgccatggtgaaagcatat

SEQ ID NO: 298032 - DNA, 19 bp, Homo sapiens
  siRNA target sequence for RAB3-GAP150 (NM_012414.2,1269-1287).
cagcagtaacagatgattt

SEQ ID NO: 298033 - DNA, 19 bp, Homo sapiens
  siRNA target sequence for RAB3-GAP150 (NM_012414.2,1280-1298).
gatgatttcggcagagtta

SEQ ID NO: 298034 - DNA, 19 bp, Homo sapiens
  siRNA target sequence for RAB3-GAP150 (NM_012414.2,1283-1301).
gatttcggcagagttattt

SEQ ID NO: 298035 - DNA, 19 bp, Homo sapiens
  siRNA target sequence for RAB3-GAP150 (NM_012414.2,1290-1308).
gcagagttattttattgga

SEQ ID NO: 298036 - DNA, 19 bp, Homo sapiens
  siRNA target sequence for RAB3-GAP150 (NM_012414.2,1306-1324).
ggatgtagctagaggaatt

SEQ ID NO: 298037 - DNA, 19 bp, Homo sapiens
  siRNA target sequence for RAB3-GAP150 (NM_012414.2,1344-1362).
ggtaccgcgacgcacaaat

SEQ ID NO: 298038 - DNA, 19 bp, Homo sapiens
  siRNA target sequence for RAB3-GAP150 (NM_012414.2,1345-1363).
gtaccgcgacgcacaaatt

SEQ ID NO: 298039 - DNA, 19 bp, Homo sapiens
  siRNA target sequence for RAB3-GAP150 (NM_012414.2,1348-1366).
ccgcgacgcacaaattgga

SEQ ID NO: 298040 - DNA, 19 bp, Homo sapiens
  siRNA target sequence for RAB3-GAP150 (NM_012414.2,1354-1372).
cgcacaaattggatggatt

SEQ ID NO: 298041 - DNA, 19 bp, Homo sapiens
  siRNA target sequence for RAB3-GAP150 (NM_012414.2,1358-1376).
caaattggatggattcaaa

SEQ ID NO: 298042 - DNA, 19 bp, Homo sapiens
  siRNA target sequence for RAB3-GAP150 (NM_012414.2,1379-1397).
gtagaggacctccatgaaa

SEQ ID NO: 298043 - DNA, 19 bp, Homo sapiens
  siRNA target sequence for RAB3-GAP150 (NM_012414.2,1446-1464).
caagtcgagtagctcaatt

SEQ ID NO: 298044 - DNA, 19 bp, Homo sapiens
  siRNA target sequence for RAB3-GAP150 (NM_012414.2,1449-1467).
gtcgagtagctcaattcct

SEQ ID NO: 298045 - DNA, 19 bp, Homo sapiens
  siRNA target sequence for RAB3-GAP150 (NM_012414.2,1458-1476).
ctcaattccttgtgatcta

SEQ ID NO: 298046 - DNA, 19 bp, Homo sapiens
  siRNA target sequence for RAB3-GAP150 (NM_012414.2,1480-1498).
gccaagaaggggaatttta

SEQ ID NO: 298047 - DNA, 19 bp, Homo sapiens
  siRNA target sequence for RAB3-GAP150 (NM_012414.2,1527-1545).
gagtaggagctttcaatgt

SEQ ID NO: 298048 - DNA, 19 bp, Homo sapiens
  siRNA target sequence for RAB3-GAP150 (NM_012414.2,1617-1635).
ggcagccacagacttatca

SEQ ID NO: 298049 - DNA, 19 bp, Homo sapiens
  siRNA target sequence for RAB3-GAP150 (NM_012414.2,1676-1694).
gtgaacgttcccttccatt

SEQ ID NO: 298050 - DNA, 19 bp, Homo sapiens
  siRNA target sequence for RAB3-GAP150 (NM_012414.2,1678-1696).
gaacgttcccttccattta

SEQ ID NO: 298051 - DNA, 19 bp, Homo sapiens
  siRNA target sequence for RAB3-GAP150 (NM_012414.2,1735-1753).
gcacctagtgaagaaacta

SEQ ID NO: 298052 - DNA, 19 bp, Homo sapiens
  siRNA target sequence for RAB3-GAP150 (NM_012414.2,1751-1769).
ctagcagccttactgaaaa

SEQ ID NO: 298053 - DNA, 19 bp, Homo sapiens
  siRNA target sequence for RAB3-GAP150 (NM_012414.2,1870-1888).
ggcaagtgaacgtttacca

SEQ ID NO: 298054 - DNA, 19 bp, Homo sapiens
  siRNA target sequence for RAB3-GAP150 (NM_012414.2,2012-2030).
gagtctgtcagtcaattaa

SEQ ID NO: 298055 - DNA, 19 bp, Homo sapiens
  siRNA target sequence for RAB3-GAP150 (NM_012414.2,2058-2076).
cattctctgataatgactt

SEQ ID NO: 298056 - DNA, 19 bp, Homo sapiens
  siRNA target sequence for RAB3-GAP150 (NM_012414.2,2154-2172).
ccaggacaaatgttcgatt

SEQ ID NO: 298057 - DNA, 19 bp, Homo sapiens
  siRNA target sequence for RAB3-GAP150 (NM_012414.2,2155-2173).
caggacaaatgttcgattt

SEQ ID NO: 298058 - DNA, 19 bp, Homo sapiens
  siRNA target sequence for RAB3-GAP150 (NM_012414.2,2160-2178).
caaatgttcgattttctga

SEQ ID NO: 298059 - DNA, 19 bp, Homo sapiens
  siRNA target sequence for RAB3-GAP150 (NM_012414.2,2189-2207).
ggtgtgttgcctgtaaaaa

SEQ ID NO: 298060 - DNA, 19 bp, Homo sapiens
  siRNA target sequence for RAB3-GAP150 (NM_012414.2,2237-2255).
gatgtgctcaacataaaga

SEQ ID NO: 298061 - DNA, 19 bp, Homo sapiens
  siRNA target sequence for RAB3-GAP150 (NM_012414.2,2429-2447).
gataaaccacagtcaatct

SEQ ID NO: 298062 - DNA, 19 bp, Homo sapiens
  siRNA target sequence for RAB3-GAP150 (NM_012414.2,2469-2487).
ccctcctgagcaagatgaa

SEQ ID NO: 298063 - DNA, 19 bp, Homo sapiens
  siRNA target sequence for RAB3-GAP150 (NM_012414.2,2542-2560).
gatgcgcacagcctgtatt

SEQ ID NO: 298064 - DNA, 19 bp, Homo sapiens
  siRNA target sequence for RAB3-GAP150 (NM_012414.2,2546-2564).
cgcacagcctgtattcagt

SEQ ID NO: 298065 - DNA, 19 bp, Homo sapiens
  siRNA target sequence for RAB3-GAP150 (NM_012414.2,2595-2613).
cgcatgttgggcattctgt

SEQ ID NO: 298066 - DNA, 19 bp, Homo sapiens
  siRNA target sequence for RAB3-GAP150 (NM_012414.2,2612-2630).
gttgctgcacagatatcaa

SEQ ID NO: 298067 - DNA, 19 bp, Homo sapiens
  siRNA target sequence for RAB3-GAP150 (NM_012414.2,2752-2770).
ggaggattgtctcatactt

SEQ ID NO: 298068 - DNA, 19 bp, Homo sapiens
  siRNA target sequence for RAB3-GAP150 (NM_012414.2,2921-2939).
gacttcagccctgaagtat

SEQ ID NO: 298069 - DNA, 19 bp, Homo sapiens
  siRNA target sequence for RAB3-GAP150 (NM_012414.2,2923-2941).
cttcagccctgaagtatta

SEQ ID NO: 298070 - DNA, 19 bp, Homo sapiens
  siRNA target sequence for RAB3-GAP150 (NM_012414.2,3042-3060).
gagccataccagacttact

SEQ ID NO: 298071 - DNA, 19 bp, Homo sapiens
  siRNA target sequence for RAB3-GAP150 (NM_012414.2,3068-3086).
gcctatgagcagtttcctt

SEQ ID NO: 298072 - DNA, 19 bp, Homo sapiens
  siRNA target sequence for RAB3-GAP150 (NM_012414.2,3090-3108).
gccttgagctcgatgtctt

SEQ ID NO: 298073 - DNA, 19 bp, Homo sapiens
  siRNA target sequence for RAB3-GAP150 (NM_012414.2,3123-3141).
gctgggagtacgttgttca

SEQ ID NO: 298074 - DNA, 19 bp, Homo sapiens
  siRNA target sequence for RAB3-GAP150 (NM_012414.2,3180-3198).
ggtcaatagaacacttgaa

SEQ ID NO: 298075 - DNA, 19 bp, Homo sapiens
  siRNA target sequence for RAB3-GAP150 (NM_012414.2,3241-3259).
gatgtggaatacgttctta

SEQ ID NO: 298076 - DNA, 19 bp, Homo sapiens
  siRNA target sequence for RAB3-GAP150 (NM_012414.2,3246-3264).
ggaatacgttcttagttaa

SEQ ID NO: 298077 - DNA, 19 bp, Homo sapiens
  siRNA target sequence for RAB3-GAP150 (NM_012414.2,3247-3265).
gaatacgttcttagttaaa

SEQ ID NO: 298078 - DNA, 19 bp, Homo sapiens
  siRNA target sequence for RAB3-GAP150 (NM_012414.2,3252-3270).
cgttcttagttaaaagatt

SEQ ID NO: 298079 - DNA, 19 bp, Homo sapiens
  siRNA target sequence for RAB3-GAP150 (NM_012414.2,3253-3271).
gttcttagttaaaagattt

SEQ ID NO: 298080 - DNA, 19 bp, Homo sapiens
  siRNA target sequence for RAB3-GAP150 (NM_012414.2,3267-3285).
gattttctgctgctacata

SEQ ID NO: 298081 - DNA, 19 bp, Homo sapiens
  siRNA target sequence for RAB3-GAP150 (NM_012414.2,3273-3291).
ctgctgctacatacttaat

SEQ ID NO: 298082 - DNA, 19 bp, Homo sapiens
  siRNA target sequence for RAB3-GAP150 (NM_012414.2,3276-3294).
ctgctacatacttaatgga

SEQ ID NO: 298083 - DNA, 19 bp, Homo sapiens
  siRNA target sequence for RAB3-GAP150 (NM_012414.2,3278-3296).
gctacatacttaatggata

SEQ ID NO: 298084 - DNA, 19 bp, Homo sapiens
  siRNA target sequence for RAB3-GAP150 (NM_012414.2,3279-3297).
ctacatacttaatggataa

SEQ ID NO: 298085 - DNA, 19 bp, Homo sapiens
  siRNA target sequence for RAB3-GAP150 (NM_012414.2,3346-3364).
gagtgacacagcaatgaca

SEQ ID NO: 298086 - DNA, 19 bp, Homo sapiens
  siRNA target sequence for RAB3-GAP150 (NM_012414.2,3386-3404).
gatcttcttcagatcttaa

SEQ ID NO: 298087 - DNA, 19 bp, Homo sapiens
  siRNA target sequence for RAB3-GAP150 (NM_012414.2,3599-3617).
gtgaagccactttcacttt

SEQ ID NO: 298088 - DNA, 19 bp, Homo sapiens
  siRNA target sequence for RAB3-GAP150 (NM_012414.2,3650-3668).
gacctaacttcaattcagt

SEQ ID NO: 298089 - DNA, 19 bp, Homo sapiens
  siRNA target sequence for RAB3-GAP150 (NM_012414.2,3705-3723).
ctgtacgacaacagttctt

SEQ ID NO: 298090 - DNA, 19 bp, Homo sapiens
  siRNA target sequence for RAB3-GAP150 (NM_012414.2,3743-3761).
gctgtccaggcccaacatt

SEQ ID NO: 298091 - DNA, 19 bp, Homo sapiens
  siRNA target sequence for RAB3-GAP150 (NM_012414.2,3831-3849).
cagctctagctgtggattt

SEQ ID NO: 298092 - DNA, 19 bp, Homo sapiens
  siRNA target sequence for RAB3-GAP150 (NM_012414.2,3853-3871).
ccatcaccttcaagttagt

SEQ ID NO: 298093 - DNA, 19 bp, Homo sapiens
  siRNA target sequence for RAB3-GAP150 (NM_012414.2,3890-3908).
cattatgtgggggaactat

SEQ ID NO: 298094 - DNA, 19 bp, Homo sapiens
  siRNA target sequence for RAB3-GAP150 (NM_012414.2,3896-3914).
gtgggggaactatacaact

SEQ ID NO: 298095 - DNA, 19 bp, Homo sapiens
  siRNA target sequence for RAB3-GAP150 (NM_012414.2,3898-3916).
gggggaactatacaactat

SEQ ID NO: 298096 - DNA, 19 bp, Homo sapiens
  siRNA target sequence for RAB3-GAP150 (NM_012414.2,4120-4138).
cactgaagtgccaattgca

SEQ ID NO: 298097 - DNA, 19 bp, Homo sapiens
  siRNA target sequence for RALBP1 (NM_006788.2,239-257).
ccatgagcctcctgatgta

SEQ ID NO: 298098 - DNA, 19 bp, Homo sapiens
  siRNA target sequence for RALBP1 (NM_006788.2,333-351).
gcagcctttcaggaagata

SEQ ID NO: 298099 - DNA, 19 bp, Homo sapiens
  siRNA target sequence for RALBP1 (NM_006788.2,399-417).
ggaatccatgttttcaaga

SEQ ID NO: 298100 - DNA, 19 bp, Homo sapiens
  siRNA target sequence for RALBP1 (NM_006788.2,669-687).
gtagagaggaccatgatgt

SEQ ID NO: 298101 - DNA, 19 bp, Homo sapiens
  siRNA target sequence for RALBP1 (NM_006788.2,708-726).
gccgttttccgtgaatgta

SEQ ID NO: 298102 - DNA, 19 bp, Homo sapiens
  siRNA target sequence for RALBP1 (NM_006788.2,709-727).
ccgttttccgtgaatgtat

SEQ ID NO: 298103 - DNA, 19 bp, Homo sapiens
  siRNA target sequence for RALBP1 (NM_006788.2,710-728).
cgttttccgtgaatgtata

SEQ ID NO: 298104 - DNA, 19 bp, Homo sapiens
  siRNA target sequence for RALBP1 (NM_006788.2,718-736).
gtgaatgtatagattacgt

SEQ ID NO: 298105 - DNA, 19 bp, Homo sapiens
  siRNA target sequence for RALBP1 (NM_006788.2,724-742).
gtatagattacgtagagaa

SEQ ID NO: 298106 - DNA, 19 bp, Homo sapiens
  siRNA target sequence for RALBP1 (NM_006788.2,770-788).
cagagtatcaggaattaaa

SEQ ID NO: 298107 - DNA, 19 bp, Homo sapiens
  siRNA target sequence for RALBP1 (NM_006788.2,774-792).
gtatcaggaattaaatcaa

SEQ ID NO: 298108 - DNA, 19 bp, Homo sapiens
  siRNA target sequence for RALBP1 (NM_006788.2,790-808).
caaaggtggatgagctaaa

SEQ ID NO: 298109 - DNA, 19 bp, Homo sapiens
  siRNA target sequence for RALBP1 (NM_006788.2,819-837).
gaccgggaggagtctacaa

SEQ ID NO: 298110 - DNA, 19 bp, Homo sapiens
  siRNA target sequence for RALBP1 (NM_006788.2,822-840).
cgggaggagtctacaaact

SEQ ID NO: 298111 - DNA, 19 bp, Homo sapiens
  siRNA target sequence for RALBP1 (NM_006788.2,835-853).
caaacttggaagactatga

SEQ ID NO: 298112 - DNA, 19 bp, Homo sapiens
  siRNA target sequence for RALBP1 (NM_006788.2,891-909).
cgagaccttccagagaatt

SEQ ID NO: 298113 - DNA, 19 bp, Homo sapiens
  siRNA target sequence for RALBP1 (NM_006788.2,958-976).
ccacggagactgagaaagt

SEQ ID NO: 298114 - DNA, 19 bp, Homo sapiens
  siRNA target sequence for RALBP1 (NM_006788.2,981-999).
gaattccagcgtttactca

SEQ ID NO: 298115 - DNA, 19 bp, Homo sapiens
  siRNA target sequence for RALBP1 (NM_006788.2,1009-1027).
cagaatgtaactatcttct

SEQ ID NO: 298116 - DNA, 19 bp, Homo sapiens
  siRNA target sequence for RALBP1 (NM_006788.2,1145-1163).
cctgtatgtgtttttcaca

SEQ ID NO: 298117 - DNA, 19 bp, Homo sapiens
  siRNA target sequence for RALBP1 (NM_006788.2,1162-1180).
cacatgtgcaagaactctt

SEQ ID NO: 298118 - DNA, 19 bp, Homo sapiens
  siRNA target sequence for RALBP1 (NM_006788.2,1212-1230).
cctctgcgatggtctaaca

SEQ ID NO: 298119 - DNA, 19 bp, Homo sapiens
  siRNA target sequence for RALBP1 (NM_006788.2,1325-1343).
gcagggtgggataaaggat

SEQ ID NO: 298120 - DNA, 19 bp, Homo sapiens
  siRNA target sequence for RALBP1 (NM_006788.2,1326-1344).
cagggtgggataaaggatt

SEQ ID NO: 298121 - DNA, 19 bp, Homo sapiens
  siRNA target sequence for RALBP1 (NM_006788.2,1340-1358).
ggatttgtctaaagaagaa

SEQ ID NO: 298122 - DNA, 19 bp, Homo sapiens
  siRNA target sequence for RALBP1 (NM_006788.2,1435-1453).
ccaagattgcacaagagat

SEQ ID NO: 298123 - DNA, 19 bp, Homo sapiens
  siRNA target sequence for RALBP1 (NM_006788.2,1436-1454).
caagattgcacaagagata

SEQ ID NO: 298124 - DNA, 19 bp, Homo sapiens
  siRNA target sequence for RALBP1 (NM_006788.2,1446-1464).
caagagatagccagtcttt

SEQ ID NO: 298125 - DNA, 19 bp, Homo sapiens
  siRNA target sequence for RALBP1 (NM_006788.2,1449-1467).
gagatagccagtctttcaa

SEQ ID NO: 298126 - DNA, 19 bp, Homo sapiens
  siRNA target sequence for RALBP1 (NM_006788.2,1524-1542).
cttgctcaggagaatgaga

SEQ ID NO: 298127 - DNA, 19 bp, Homo sapiens
  siRNA target sequence for RALBP1 (NM_006788.2,1590-1608).
cggcagattgcctcagaaa

SEQ ID NO: 298128 - DNA, 19 bp, Homo sapiens
  siRNA target sequence for RALBP1 (NM_006788.2,1592-1610).
gcagattgcctcagaaaaa

SEQ ID NO: 298129 - DNA, 19 bp, Homo sapiens
  siRNA target sequence for RALBP1 (NM_006788.2,1736-1754).
gatcattctggaagactta

SEQ ID NO: 298130 - DNA, 19 bp, Homo sapiens
  siRNA target sequence for RALBP1 (NM_006788.2,1949-1967).
cgtccttgagccaaaagca

SEQ ID NO: 298131 - DNA, 19 bp, Homo sapiens
  siRNA target sequence for RAP1GA1 (NM_002885.1,271-289).
gaggaggactacattccat

SEQ ID NO: 298132 - DNA, 19 bp, Homo sapiens
  siRNA target sequence for RAP1GA1 (NM_002885.1,373-391).
ggcaccaaccacgaaatca

SEQ ID NO: 298133 - DNA, 19 bp, Homo sapiens
  siRNA target sequence for RAP1GA1 (NM_002885.1,486-504).
cggcaaggagcatttcaat

SEQ ID NO: 298134 - DNA, 19 bp, Homo sapiens
  siRNA target sequence for RAP1GA1 (NM_002885.1,487-505).
ggcaaggagcatttcaatt

SEQ ID NO: 298135 - DNA, 19 bp, Homo sapiens
  siRNA target sequence for RAP1GA1 (NM_002885.1,493-511).
gagcatttcaattactact

SEQ ID NO: 298136 - DNA, 19 bp, Homo sapiens
  siRNA target sequence for RAP1GA1 (NM_002885.1,545-563).
cactcaagtacgatgtcat

SEQ ID NO: 298137 - DNA, 19 bp, Homo sapiens
  siRNA target sequence for RAP1GA1 (NM_002885.1,600-618).
caagtgccggacataccat

SEQ ID NO: 298138 - DNA, 19 bp, Homo sapiens
  siRNA target sequence for RAP1GA1 (NM_002885.1,605-623).
gccggacataccatgatgt

SEQ ID NO: 298139 - DNA, 19 bp, Homo sapiens
  siRNA target sequence for RAP1GA1 (NM_002885.1,608-626).
ggacataccatgatgtcat

SEQ ID NO: 298140 - DNA, 19 bp, Homo sapiens
  siRNA target sequence for RAP1GA1 (NM_002885.1,642-660).
caccgagttccctaatgtt

SEQ ID NO: 298141 - DNA, 19 bp, Homo sapiens
  siRNA target sequence for RAP1GA1 (NM_002885.1,693-711).
caatgtggatcggttctat

SEQ ID NO: 298142 - DNA, 19 bp, Homo sapiens
  siRNA target sequence for RAP1GA1 (NM_002885.1,768-786).
cagcaataacttcaagttt

SEQ ID NO: 298143 - DNA, 19 bp, Homo sapiens
  siRNA target sequence for RAP1GA1 (NM_002885.1,815-833).
cctccgaggaagaactctt

SEQ ID NO: 298144 - DNA, 19 bp, Homo sapiens
  siRNA target sequence for RAP1GA1 (NM_002885.1,1109-1127).
ctttcgtgcccgacatgat

SEQ ID NO: 298145 - DNA, 19 bp, Homo sapiens
  siRNA target sequence for RAP1GA1 (NM_002885.1,1274-1292).
ggcctgagttccaggaatt

SEQ ID NO: 298146 - DNA, 19 bp, Homo sapiens
  siRNA target sequence for RAP1GA1 (NM_002885.1,1388-1406).
cgctctatgaggaactaca

SEQ ID NO: 298147 - DNA, 19 bp, Homo sapiens
  siRNA target sequence for RAP1GA1 (NM_002885.1,1612-1630).
gccaaggcggctggaatat

SEQ ID NO: 298148 - DNA, 19 bp, Homo sapiens
  siRNA target sequence for RAP1GA1 (NM_002885.1,1614-1632).
caaggcggctggaatatca

SEQ ID NO: 298149 - DNA, 19 bp, Homo sapiens
  siRNA target sequence for RAP1GA1 (NM_002885.1,1620-1638).
ggctggaatatcactgatt

SEQ ID NO: 298150 - DNA, 19 bp, Homo sapiens
  siRNA target sequence for RAP1GA1 (NM_002885.1,1701-1719).
cattggcatcgagaacata

SEQ ID NO: 298151 - DNA, 19 bp, Homo sapiens
  siRNA target sequence for RAP1GA1 (NM_002885.1,2011-2029).
cgggactccttcatctata

SEQ ID NO: 298152 - DNA, 19 bp, Homo sapiens
  siRNA target sequence for RAP1GA1 (NM_002885.1,2014-2032).
gactccttcatctatagca

SEQ ID NO: 298153 - DNA, 19 bp, Homo sapiens
  siRNA target sequence for RAP1GA1 (NM_002885.1,2126-2144).
ctgcgtgtcccgagatcaa

SEQ ID NO: 298154 - DNA, 19 bp, Homo sapiens
  siRNA target sequence for RAP1GA1 (NM_002885.1,2128-2146).
gcgtgtcccgagatcaaga

SEQ ID NO: 298155 - DNA, 19 bp, Homo sapiens
  siRNA target sequence for RAP1GA1 (NM_002885.1,2129-2147).
cgtgtcccgagatcaagat

SEQ ID NO: 298156 - DNA, 19 bp, Homo sapiens
  siRNA target sequence for RAP1GDS1 (NM_021159.3,101-119).
gcagataatctcagtgata

SEQ ID NO: 298157 - DNA, 19 bp, Homo sapiens
  siRNA target sequence for RAP1GDS1 (NM_021159.3,149-167).
gacaagactgaggatagtt

SEQ ID NO: 298158 - DNA, 19 bp, Homo sapiens
  siRNA target sequence for RAP1GDS1 (NM_021159.3,206-224).
caaaataatacggaaacaa

SEQ ID NO: 298159 - DNA, 19 bp, Homo sapiens
  siRNA target sequence for RAP1GDS1 (NM_021159.3,291-309).
gcaaagccaaagtagctaa

SEQ ID NO: 298160 - DNA, 19 bp, Homo sapiens
  siRNA target sequence for RAP1GDS1 (NM_021159.3,335-353).
gagtttatgcgaattccat

SEQ ID NO: 298161 - DNA, 19 bp, Homo sapiens
  siRNA target sequence for RAP1GDS1 (NM_021159.3,383-401).
gtgcagctgctaaatagca

SEQ ID NO: 298162 - DNA, 19 bp, Homo sapiens
  siRNA target sequence for RAP1GDS1 (NM_021159.3,433-451).
ggctctaggaaacatatgt

SEQ ID NO: 298163 - DNA, 19 bp, Homo sapiens
  siRNA target sequence for RAP1GDS1 (NM_021159.3,435-453).
ctctaggaaacatatgtta

SEQ ID NO: 298164 - DNA, 19 bp, Homo sapiens
  siRNA target sequence for RAP1GDS1 (NM_021159.3,440-458).
ggaaacatatgttacgata

SEQ ID NO: 298165 - DNA, 19 bp, Homo sapiens
  siRNA target sequence for RAP1GDS1 (NM_021159.3,491-509).
ggtggtgcacagattgtaa

SEQ ID NO: 298166 - DNA, 19 bp, Homo sapiens
  siRNA target sequence for RAP1GDS1 (NM_021159.3,492-510).
gtggtgcacagattgtaat

SEQ ID NO: 298167 - DNA, 19 bp, Homo sapiens
  siRNA target sequence for RAP1GDS1 (NM_021159.3,502-520).
gattgtaattgaccattta

SEQ ID NO: 298168 - DNA, 19 bp, Homo sapiens
  siRNA target sequence for RAP1GDS1 (NM_021159.3,506-524).
gtaattgaccatttaaggt

SEQ ID NO: 298169 - DNA, 19 bp, Homo sapiens
  siRNA target sequence for RAP1GDS1 (NM_021159.3,523-541).
gtcactgtgcagtataaca

SEQ ID NO: 298170 - DNA, 19 bp, Homo sapiens
  siRNA target sequence for RAP1GDS1 (NM_021159.3,540-558).
cagatcccgccaatgagaa

SEQ ID NO: 298171 - DNA, 19 bp, Homo sapiens
  siRNA target sequence for RAP1GDS1 (NM_021159.3,576-594).
gtggcatgctgatgaacta

SEQ ID NO: 298172 - DNA, 19 bp, Homo sapiens
  siRNA target sequence for RAP1GDS1 (NM_021159.3,578-596).
ggcatgctgatgaactata

SEQ ID NO: 298173 - DNA, 19 bp, Homo sapiens
  siRNA target sequence for RAP1GDS1 (NM_021159.3,583-601).
gctgatgaactatagcaat

SEQ ID NO: 298174 - DNA, 19 bp, Homo sapiens
  siRNA target sequence for RAP1GDS1 (NM_021159.3,617-635).
caagctcagcttatcaata

SEQ ID NO: 298175 - DNA, 19 bp, Homo sapiens
  siRNA target sequence for RAP1GDS1 (NM_021159.3,631-649).
caatatgggtgttattcct

SEQ ID NO: 298176 - DNA, 19 bp, Homo sapiens
  siRNA target sequence for RAP1GDS1 (NM_021159.3,637-655).
gggtgttattcctacctta

SEQ ID NO: 298177 - DNA, 19 bp, Homo sapiens
  siRNA target sequence for RAP1GDS1 (NM_021159.3,648-666).
ctaccttagtgaaattact

SEQ ID NO: 298178 - DNA, 19 bp, Homo sapiens
  siRNA target sequence for RAP1GDS1 (NM_021159.3,728-746).
gcagaacttgagtcaagta

SEQ ID NO: 298179 - DNA, 19 bp, Homo sapiens
  siRNA target sequence for RAP1GDS1 (NM_021159.3,752-770).
cagtttgccagtacaaaca

SEQ ID NO: 298180 - DNA, 19 bp, Homo sapiens
  siRNA target sequence for RAP1GDS1 (NM_021159.3,774-792).
ctgaagagctagtaaaact

SEQ ID NO: 298181 - DNA, 19 bp, Homo sapiens
  siRNA target sequence for RAP1GDS1 (NM_021159.3,782-800).
ctagtaaaactcttcaaga

SEQ ID NO: 298182 - DNA, 19 bp, Homo sapiens
  siRNA target sequence for RAP1GDS1 (NM_021159.3,812-830).
catgataagagagaaatga

SEQ ID NO: 298183 - DNA, 19 bp, Homo sapiens
  siRNA target sequence for RAP1GDS1 (NM_021159.3,904-922).
gtgtctactagagattgtt

SEQ ID NO: 298184 - DNA, 19 bp, Homo sapiens
  siRNA target sequence for RAP1GDS1 (NM_021159.3,953-971).
gatattactgagctcaaaa

SEQ ID NO: 298185 - DNA, 19 bp, Homo sapiens
  siRNA target sequence for RAP1GDS1 (NM_021159.3,964-982).
gctcaaaactggttcagat

SEQ ID NO: 298186 - DNA, 19 bp, Homo sapiens
  siRNA target sequence for RAP1GDS1 (NM_021159.3,1109-1127).
gcattggcaattgcaaatt

SEQ ID NO: 298187 - DNA, 19 bp, Homo sapiens
  siRNA target sequence for RAP1GDS1 (NM_021159.3,1110-1128).
cattggcaattgcaaattt

SEQ ID NO: 298188 - DNA, 19 bp, Homo sapiens
  siRNA target sequence for RAP1GDS1 (NM_021159.3,1169-1187).
gggattgtagaaaaactta

SEQ ID NO: 298189 - DNA, 19 bp, Homo sapiens
  siRNA target sequence for RAP1GDS1 (NM_021159.3,1261-1279).
cctggccattccagttata

SEQ ID NO: 298190 - DNA, 19 bp, Homo sapiens
  siRNA target sequence for RAP1GDS1 (NM_021159.3,1305-1323).
gggtcacagaggcagtttt

SEQ ID NO: 298191 - DNA, 19 bp, Homo sapiens
  siRNA target sequence for RAP1GDS1 (NM_021159.3,1345-1363).
gcctcctgttcagttcaaa

SEQ ID NO: 298192 - DNA, 19 bp, Homo sapiens
  siRNA target sequence for RAP1GDS1 (NM_021159.3,1456-1474).
gtgtgaagccaaagatcat

SEQ ID NO: 298193 - DNA, 19 bp, Homo sapiens
  siRNA target sequence for RAP1GDS1 (NM_021159.3,1481-1499).
gtgatgggggagtcaaaca

SEQ ID NO: 298194 - DNA, 19 bp, Homo sapiens
  siRNA target sequence for RAP1GDS1 (NM_021159.3,1504-1522).
gctgtctgcccttatacga

SEQ ID NO: 298195 - DNA, 19 bp, Homo sapiens
  siRNA target sequence for RAP1GDS1 (NM_021159.3,1512-1530).
cccttatacgacacagtaa

SEQ ID NO: 298196 - DNA, 19 bp, Homo sapiens
  siRNA target sequence for RAP1GDS1 (NM_021159.3,1513-1531).
ccttatacgacacagtaaa

SEQ ID NO: 298197 - DNA, 19 bp, Homo sapiens
  siRNA target sequence for RAP1GDS1 (NM_021159.3,1514-1532).
cttatacgacacagtaaat

SEQ ID NO: 298198 - DNA, 19 bp, Homo sapiens
  siRNA target sequence for RAP1GDS1 (NM_021159.3,1566-1584).
gtggcatcaagcatctagt

SEQ ID NO: 298199 - DNA, 19 bp, Homo sapiens
  siRNA target sequence for RAP1GDS1 (NM_021159.3,1568-1586).
ggcatcaagcatctagtta

SEQ ID NO: 298200 - DNA, 19 bp, Homo sapiens
  siRNA target sequence for RAP1GDS1 (NM_021159.3,1588-1606).
catggcaactagtgaacat

SEQ ID NO: 298201 - DNA, 19 bp, Homo sapiens
  siRNA target sequence for RAP1GDS1 (NM_021159.3,1593-1611).
caactagtgaacatgtaat

SEQ ID NO: 298202 - DNA, 19 bp, Homo sapiens
  siRNA target sequence for RAP1GDS1 (NM_021159.3,1628-1646).
cttgttgctttggcattaa

SEQ ID NO: 298203 - DNA, 19 bp, Homo sapiens
  siRNA target sequence for RAP1GDS1 (NM_021159.3,1668-1686).
ctgctgagaaagatctaga

SEQ ID NO: 298204 - DNA, 19 bp, Homo sapiens
  siRNA target sequence for RAP1GDS1 (NM_021159.3,1689-1707).
gtgctaaacttgtacagat

SEQ ID NO: 298205 - DNA, 19 bp, Homo sapiens
  siRNA target sequence for RAP1GDS1 (NM_021159.3,1737-1755).
gtgctcctgaaatcaaata

SEQ ID NO: 298206 - DNA, 19 bp, Homo sapiens
  siRNA target sequence for RAP1GDS1 (NM_021159.3,1788-1806).
gatctgaatgtctacacaa

SEQ ID NO: 298207 - DNA, 19 bp, Homo sapiens
  siRNA target sequence for RAP1GDS1 (NM_021159.3,1816-1834).
ggatttggcttttctagat

SEQ ID NO: 298208 - DNA, 19 bp, Homo sapiens
  siRNA target sequence for RASA3 (NM_007368.2,185-203).
cggtgaagccaaaaacctt

SEQ ID NO: 298209 - DNA, 19 bp, Homo sapiens
  siRNA target sequence for RASA3 (NM_007368.2,314-332).
cggagaagacttttactgt

SEQ ID NO: 298210 - DNA, 19 bp, Homo sapiens
  siRNA target sequence for RASA3 (NM_007368.2,351-369).
cgtcacctgtccttctaca

SEQ ID NO: 298211 - DNA, 19 bp, Homo sapiens
  siRNA target sequence for RASA3 (NM_007368.2,389-407).
ccggagggattccatcata

SEQ ID NO: 298212 - DNA, 19 bp, Homo sapiens
  siRNA target sequence for RASA3 (NM_007368.2,669-687).
gcaaagaagacgaaagtga

SEQ ID NO: 298213 - DNA, 19 bp, Homo sapiens
  siRNA target sequence for RASA3 (NM_007368.2,706-724).
cccagttcgatgaagtgtt

SEQ ID NO: 298214 - DNA, 19 bp, Homo sapiens
  siRNA target sequence for RASA3 (NM_007368.2,707-725).
ccagttcgatgaagtgttt

SEQ ID NO: 298215 - DNA, 19 bp, Homo sapiens
  siRNA target sequence for RASA3 (NM_007368.2,981-999).
cggctgaacgtggtataca

SEQ ID NO: 298216 - DNA, 19 bp, Homo sapiens
  siRNA target sequence for RASA3 (NM_007368.2,1002-1020).
gaagaccacgtgttttctt

SEQ ID NO: 298217 - DNA, 19 bp, Homo sapiens
  siRNA target sequence for RASA3 (NM_007368.2,1148-1166).
gcggctcttcctacactat

SEQ ID NO: 298218 - DNA, 19 bp, Homo sapiens
  siRNA target sequence for RASA3 (NM_007368.2,1348-1366).
gccacaaaccctgtgaaat

SEQ ID NO: 298219 - DNA, 19 bp, Homo sapiens
  siRNA target sequence for RASA3 (NM_007368.2,1480-1498).
ccgtcatgtgtgacatctt

SEQ ID NO: 298220 - DNA, 19 bp, Homo sapiens
  siRNA target sequence for RASA3 (NM_007368.2,1654-1672).
cgtccaggacgctgacatt

SEQ ID NO: 298221 - DNA, 19 bp, Homo sapiens
  siRNA target sequence for RASA3 (NM_007368.2,1712-1730).
gtccaaatctgcgagtttt

SEQ ID NO: 298222 - DNA, 19 bp, Homo sapiens
  siRNA target sequence for RASA3 (NM_007368.2,1738-1756).
cctacatggctacatttta

SEQ ID NO: 298223 - DNA, 19 bp, Homo sapiens
  siRNA target sequence for RASA3 (NM_007368.2,1739-1757).
ctacatggctacattttat

SEQ ID NO: 298224 - DNA, 19 bp, Homo sapiens
  siRNA target sequence for RASA3 (NM_007368.2,1782-1800).
gctgatgcggtgaagaact

SEQ ID NO: 298225 - DNA, 19 bp, Homo sapiens
  siRNA target sequence for RASA3 (NM_007368.2,1783-1801).
ctgatgcggtgaagaactt

SEQ ID NO: 298226 - DNA, 19 bp, Homo sapiens
  siRNA target sequence for RASA3 (NM_007368.2,1853-1871).
gcccatcgtgcttaaagaa

SEQ ID NO: 298227 - DNA, 19 bp, Homo sapiens
  siRNA target sequence for RASA3 (NM_007368.2,1905-1923).
cgctttgggatgaagaatt

SEQ ID NO: 298228 - DNA, 19 bp, Homo sapiens
  siRNA target sequence for RASA3 (NM_007368.2,1941-1959).
cgcttgaccaaccatgaat

SEQ ID NO: 298229 - DNA, 19 bp, Homo sapiens
  siRNA target sequence for RASA3 (NM_007368.2,1942-1960).
gcttgaccaaccatgaatt

SEQ ID NO: 298230 - DNA, 19 bp, Homo sapiens
  siRNA target sequence for RASA3 (NM_007368.2,1999-2017).
gcattcccatcgagaacat

SEQ ID NO: 298231 - DNA, 19 bp, Homo sapiens
  siRNA target sequence for RASA3 (NM_007368.2,2040-2058).
gaggagtctttcaaaatga

SEQ ID NO: 298232 - DNA, 19 bp, Homo sapiens
  siRNA target sequence for RASA3 (NM_007368.2,2083-2101).
cagagcgtgcgctgtacat

SEQ ID NO: 298233 - DNA, 19 bp, Homo sapiens
  siRNA target sequence for RASA3 (NM_007368.2,2130-2148).
gactggatcgacattctca

SEQ ID NO: 298234 - DNA, 19 bp, Homo sapiens
  siRNA target sequence for RASA3 (NM_007368.2,2314-2332).
gtgagacggagcgtatcta

SEQ ID NO: 298235 - DNA, 19 bp, Homo sapiens
  siRNA target sequence for RASA3 (NM_007368.2,2316-2334).
gagacggagcgtatctact

SEQ ID NO: 298236 - DNA, 19 bp, Homo sapiens
  siRNA target sequence for RASA3 (NM_007368.2,2335-2353).
ccctcttcaacttgtacat

SEQ ID NO: 298237 - DNA, 19 bp, Homo sapiens
  siRNA target sequence for RASA3 (NM_007368.2,2378-2396).
ggcctgtgggagcaaatct

SEQ ID NO: 298238 - DNA, 19 bp, Homo sapiens
  siRNA target sequence for RASA3 (NM_007368.2,2409-2427).
ccggagcaggaggagtatt

SEQ ID NO: 298239 - DNA, 19 bp, Homo sapiens
  siRNA target sequence for RASA3 (NM_007368.2,2458-2476).
cctacaagacgctaaagca

SEQ ID NO: 298240 - DNA, 19 bp, Homo sapiens
  siRNA target sequence for RASA3 (NM_007368.2,2459-2477).
ctacaagacgctaaagcaa

SEQ ID NO: 298241 - DNA, 19 bp, Homo sapiens
  siRNA target sequence for RASA3 (NM_007368.2,2505-2523).
caggagcacgcccagtata

SEQ ID NO: 298242 - DNA, 19 bp, Homo sapiens
  siRNA target sequence for RASA3 (NM_007368.2,2508-2526).
gagcacgcccagtataaga

SEQ ID NO: 298243 - DNA, 19 bp, Homo sapiens
  siRNA target sequence for RASA3 (NM_007368.2,2534-2552).
gttcaagaagacgaaatat

SEQ ID NO: 298244 - DNA, 19 bp, Homo sapiens
  siRNA target sequence for RASA3 (NM_007368.2,2615-2633).
gacctccactcattccatt

SEQ ID NO: 298245 - DNA, 19 bp, Homo sapiens
  siRNA target sequence for SH3BP1 (NM_018957.2,381-399).
cagtcaggcaaccaagaat

SEQ ID NO: 298246 - DNA, 19 bp, Homo sapiens
  siRNA target sequence for SH3BP1 (NM_018957.2,538-556).
gacctgtaccactttgtta

SEQ ID NO: 298247 - DNA, 19 bp, Homo sapiens
  siRNA target sequence for SH3BP1 (NM_018957.2,565-583).
gactcctatgccaactact

SEQ ID NO: 298248 - DNA, 19 bp, Homo sapiens
  siRNA target sequence for SRGAP2 (NM_014850.1,448-466).
ctcaatgacatcttcatga

SEQ ID NO: 298249 - DNA, 19 bp, Homo sapiens
  siRNA target sequence for SRGAP2 (NM_014850.1,847-865).
gccaccaacgcagctataa

SEQ ID NO: 298250 - DNA, 19 bp, Homo sapiens
  siRNA target sequence for SRGAP2 (NM_014850.1,851-869).
ccaacgcagctataagcaa

SEQ ID NO: 298251 - DNA, 19 bp, Homo sapiens
  siRNA target sequence for SRGAP2 (NM_014850.1,852-870).
caacgcagctataagcaaa

SEQ ID NO: 298252 - DNA, 19 bp, Homo sapiens
  siRNA target sequence for SRGAP2 (NM_014850.1,856-874).
gcagctataagcaaatact

SEQ ID NO: 298253 - DNA, 19 bp, Homo sapiens
  siRNA target sequence for SRGAP2 (NM_014850.1,857-875).
cagctataagcaaatacta

SEQ ID NO: 298254 - DNA, 19 bp, Homo sapiens
  siRNA target sequence for SRGAP2 (NM_014850.1,886-904).
gtctctgatctgatcgatt

SEQ ID NO: 298255 - DNA, 19 bp, Homo sapiens
  siRNA target sequence for SRGAP2 (NM_014850.1,990-1008).
cgaagggctggatgtcatt

SEQ ID NO: 298256 - DNA, 19 bp, Homo sapiens
  siRNA target sequence for SRGAP2 (NM_014850.1,1056-1074).
catggacatgtgcaatcaa

SEQ ID NO: 298257 - DNA, 19 bp, Homo sapiens
  siRNA target sequence for SRGAP2 (NM_014850.1,1196-1214).
gactggccaccctcaagat

SEQ ID NO: 298258 - DNA, 19 bp, Homo sapiens
  siRNA target sequence for SRGAP2 (NM_014850.1,1201-1219).
gccaccctcaagatagaga

SEQ ID NO: 298259 - DNA, 19 bp, Homo sapiens
  siRNA target sequence for SRGAP2 (NM_014850.1,1202-1220).
ccaccctcaagatagagaa

SEQ ID NO: 298260 - DNA, 19 bp, Homo sapiens
  siRNA target sequence for SRGAP2 (NM_014850.1,1355-1373).
cctacatgagcaagatcaa

SEQ ID NO: 298261 - DNA, 19 bp, Homo sapiens
  siRNA target sequence for SRGAP2 (NM_014850.1,1424-1442).
caaaatttaaagagtatgt

SEQ ID NO: 298262 - DNA, 19 bp, Homo sapiens
  siRNA target sequence for SRGAP2 (NM_014850.1,1470-1488).
gcaggccaagcacgattta

SEQ ID NO: 298263 - DNA, 19 bp, Homo sapiens
  siRNA target sequence for SRGAP2 (NM_014850.1,1592-1610).
cagtgtatagccataaact

SEQ ID NO: 298264 - DNA, 19 bp, Homo sapiens
  siRNA target sequence for SRGAP2 (NM_014850.1,1594-1612).
gtgtatagccataaactct

SEQ ID NO: 298265 - DNA, 19 bp, Homo sapiens
  siRNA target sequence for SRGAP2 (NM_014850.1,1641-1659).
ggattcaggacaagctata

SEQ ID NO: 298266 - DNA, 19 bp, Homo sapiens
  siRNA target sequence for SRGAP2 (NM_014850.1,1679-1697).
gcatccgttacatcaattt

SEQ ID NO: 298267 - DNA, 19 bp, Homo sapiens
  siRNA target sequence for SRGAP2 (NM_014850.1,1680-1698).
catccgttacatcaattta

SEQ ID NO: 298268 - DNA, 19 bp, Homo sapiens
  siRNA target sequence for SRGAP2 (NM_014850.1,1683-1701).
ccgttacatcaatttatat

SEQ ID NO: 298269 - DNA, 19 bp, Homo sapiens
  siRNA target sequence for SRGAP2 (NM_014850.1,1789-1807).
ccccttgtggacgatcaaa

SEQ ID NO: 298270 - DNA, 19 bp, Homo sapiens
  siRNA target sequence for SRGAP2 (NM_014850.1,1790-1808).
cccttgtggacgatcaaaa

SEQ ID NO: 298271 - DNA, 19 bp, Homo sapiens
  siRNA target sequence for SRGAP2 (NM_014850.1,1791-1809).
ccttgtggacgatcaaaat

SEQ ID NO: 298272 - DNA, 19 bp, Homo sapiens
  siRNA target sequence for SRGAP2 (NM_014850.1,2199-2217).
gctagagggacctgtgtat

SEQ ID NO: 298273 - DNA, 19 bp, Homo sapiens
  siRNA target sequence for SRGAP2 (NM_014850.1,2206-2224).
ggacctgtgtatgaaaaat

SEQ ID NO: 298274 - DNA, 19 bp, Homo sapiens
  siRNA target sequence for SRGAP2 (NM_014850.1,2312-2330).
ctcataccagcgatgaaga

SEQ ID NO: 298275 - DNA, 19 bp, Homo sapiens
  siRNA target sequence for SRGAP2 (NM_014850.1,2383-2401).
cgtgagctatccttcaaga

SEQ ID NO: 298276 - DNA, 19 bp, Homo sapiens
  siRNA target sequence for SRGAP2 (NM_014850.1,2567-2585).
ggccattgctggatgacaa

SEQ ID NO: 298277 - DNA, 19 bp, Homo sapiens
  siRNA target sequence for SRGAP2 (NM_014850.1,2656-2674).
ggccgagtgcggttacgat

SEQ ID NO: 298278 - DNA, 19 bp, Homo sapiens
  siRNA target sequence for SRGAP2 (NM_014850.1,2858-2876).
gcgctggcagcatcaacta

SEQ ID NO: 298279 - DNA, 19 bp, Homo sapiens
  siRNA target sequence for STARD13 (NM_052851.1,415-433).
ctccgatgaggaagatctt

SEQ ID NO: 298280 - DNA, 19 bp, Homo sapiens
  siRNA target sequence for STARD13 (NM_052851.1,747-765).
ccttccaccccaagaatga

SEQ ID NO: 298281 - DNA, 19 bp, Homo sapiens
  siRNA target sequence for STARD13 (NM_052851.1,775-793).
gagggctagggccaaatca

SEQ ID NO: 298282 - DNA, 19 bp, Homo sapiens
  siRNA target sequence for STARD13 (NM_052851.1,778-796).
ggctagggccaaatcattt

SEQ ID NO: 298283 - DNA, 19 bp, Homo sapiens
  siRNA target sequence for STARD13 (NM_052851.1,780-798).
ctagggccaaatcattttt

SEQ ID NO: 298284 - DNA, 19 bp, Homo sapiens
  siRNA target sequence for STARD13 (NM_052851.1,917-935).
gctatgcagtgcatccaaa

SEQ ID NO: 298285 - DNA, 19 bp, Homo sapiens
  siRNA target sequence for STARD13 (NM_052851.1,1156-1174).
ggaccaaagccgtatgcat

SEQ ID NO: 298286 - DNA, 19 bp, Homo sapiens
  siRNA target sequence for STARD13 (NM_052851.1,1239-1257).
ccaaggcactttctattga

SEQ ID NO: 298287 - DNA, 19 bp, Homo sapiens
  siRNA target sequence for STARD13 (NM_052851.1,1240-1258).
caaggcactttctattgaa

SEQ ID NO: 298288 - DNA, 19 bp, Homo sapiens
  siRNA target sequence for STARD13 (NM_052851.1,1376-1394).
gccagccgagtcagtatct

SEQ ID NO: 298289 - DNA, 19 bp, Homo sapiens
  siRNA target sequence for STARD13 (NM_052851.1,1378-1396).
cagccgagtcagtatctat

SEQ ID NO: 298290 - DNA, 19 bp, Homo sapiens
  siRNA target sequence for STARD13 (NM_052851.1,1380-1398).
gccgagtcagtatctatga

SEQ ID NO: 298291 - DNA, 19 bp, Homo sapiens
  siRNA target sequence for STARD13 (NM_052851.1,1405-1423).
ccctggctcccatctgtat

SEQ ID NO: 298292 - DNA, 19 bp, Homo sapiens
  siRNA target sequence for STARD13 (NM_052851.1,1424-1442).
gccagcacaggagatcttt

SEQ ID NO: 298293 - DNA, 19 bp, Homo sapiens
  siRNA target sequence for STARD13 (NM_052851.1,1425-1443).
ccagcacaggagatctttt

SEQ ID NO: 298294 - DNA, 19 bp, Homo sapiens
  siRNA target sequence for STARD13 (NM_052851.1,1470-1488).
ctcacttggatgacattct

SEQ ID NO: 298295 - DNA, 19 bp, Homo sapiens
  siRNA target sequence for STARD13 (NM_052851.1,1547-1565).
gaactgcaaactcatgata

SEQ ID NO: 298296 - DNA, 19 bp, Homo sapiens
  siRNA target sequence for STARD13 (NM_052851.1,1574-1592).
ggggaacctggcttatcca

SEQ ID NO: 298297 - DNA, 19 bp, Homo sapiens
  siRNA target sequence for STARD13 (NM_052851.1,1591-1609).
cacctttccatctcctaat

SEQ ID NO: 298298 - DNA, 19 bp, Homo sapiens
  siRNA target sequence for STARD13 (NM_052851.1,1593-1611).
cctttccatctcctaatca

SEQ ID NO: 298299 - DNA, 19 bp, Homo sapiens
  siRNA target sequence for STARD13 (NM_052851.1,1612-1630).
gatcaccttagattttgaa

SEQ ID NO: 298300 - DNA, 19 bp, Homo sapiens
  siRNA target sequence for STARD13 (NM_052851.1,1769-1787).
cgactccgatggaacagtt

SEQ ID NO: 298301 - DNA, 19 bp, Homo sapiens
  siRNA target sequence for STARD13 (NM_052851.1,1770-1788).
gactccgatggaacagttt

SEQ ID NO: 298302 - DNA, 19 bp, Homo sapiens
  siRNA target sequence for STARD13 (NM_052851.1,1938-1956).
catggtcagttccaaagtt

SEQ ID NO: 298303 - DNA, 19 bp, Homo sapiens
  siRNA target sequence for STARD13 (NM_052851.1,1941-1959).
ggtcagttccaaagttcat

SEQ ID NO: 298304 - DNA, 19 bp, Homo sapiens
  siRNA target sequence for STARD13 (NM_052851.1,1969-1987).
gaaagttcccgactacaaa

SEQ ID NO: 298305 - DNA, 19 bp, Homo sapiens
  siRNA target sequence for STARD13 (NM_052851.1,2095-2113).
cgatcaggtgggtcttttt

SEQ ID NO: 298306 - DNA, 19 bp, Homo sapiens
  siRNA target sequence for STARD13 (NM_052851.1,2104-2122).
gggtctttttcgcaaatca

SEQ ID NO: 298307 - DNA, 19 bp, Homo sapiens
  siRNA target sequence for STARD13 (NM_052851.1,2141-2159).
catgcccttcgccaaatga

SEQ ID NO: 298308 - DNA, 19 bp, Homo sapiens
  siRNA target sequence for STARD13 (NM_052851.1,2145-2163).
cccttcgccaaatgaatga

SEQ ID NO: 298309 - DNA, 19 bp, Homo sapiens
  siRNA target sequence for STARD13 (NM_052851.1,2150-2168).
cgccaaatgaatgaaaact

SEQ ID NO: 298310 - DNA, 19 bp, Homo sapiens
  siRNA target sequence for STARD13 (NM_052851.1,2170-2188).
ccctgagaacgtcaactat

SEQ ID NO: 298311 - DNA, 19 bp, Homo sapiens
  siRNA target sequence for STARD13 (NM_052851.1,2213-2231).
gcggatatggtgaaacagt

SEQ ID NO: 298312 - DNA, 19 bp, Homo sapiens
  siRNA target sequence for STARD13 (NM_052851.1,2274-2292).
gtgagacctttctccatat

SEQ ID NO: 298313 - DNA, 19 bp, Homo sapiens
  siRNA target sequence for STARD13 (NM_052851.1,2276-2294).
gagacctttctccatatct

SEQ ID NO: 298314 - DNA, 19 bp, Homo sapiens
  siRNA target sequence for STARD13 (NM_052851.1,2278-2296).
gacctttctccatatctat

SEQ ID NO: 298315 - DNA, 19 bp, Homo sapiens
  siRNA target sequence for STARD13 (NM_052851.1,2410-2428).
caacttggtggaagagaat

SEQ ID NO: 298316 - DNA, 19 bp, Homo sapiens
  siRNA target sequence for STARD13 (NM_052851.1,2510-2528).
cgagtcatacagaagaaat

SEQ ID NO: 298317 - DNA, 19 bp, Homo sapiens
  siRNA target sequence for STARD13 (NM_052851.1,2533-2551).
cactgggaagccagatcaa

SEQ ID NO: 298318 - DNA, 19 bp, Homo sapiens
  siRNA target sequence for STARD13 (NM_052851.1,2585-2603).
gggctagcgcacatgatca

SEQ ID NO: 298319 - DNA, 19 bp, Homo sapiens
  siRNA target sequence for STARD13 (NM_052851.1,2586-2604).
ggctagcgcacatgatcat

SEQ ID NO: 298320 - DNA, 19 bp, Homo sapiens
  siRNA target sequence for STARD13 (NM_052851.1,2591-2609).
gcgcacatgatcatggaat

SEQ ID NO: 298321 - DNA, 19 bp, Homo sapiens
  siRNA target sequence for STARD13 (NM_052851.1,2742-2760).
cttacctgaaccatctcat

SEQ ID NO: 298322 - DNA, 19 bp, Homo sapiens
  siRNA target sequence for STARD13 (NM_052851.1,2814-2832).
ccagcacggacaatacaga

SEQ ID NO: 298323 - DNA, 19 bp, Homo sapiens
  siRNA target sequence for STARD13 (NM_052851.1,3059-3077).
gttctcaggacctggaaaa

SEQ ID NO: 298324 - DNA, 19 bp, Homo sapiens
  siRNA target sequence for STARD13 (NM_052851.1,3169-3187).
ggactcgcagtacttgata

SEQ ID NO: 298325 - DNA, 19 bp, Homo sapiens
  siRNA target sequence for STARD13 (NM_052851.1,3246-3264).
gtcactccccagaatggta

SEQ ID NO: 298326 - DNA, 19 bp, Homo sapiens
  siRNA target sequence for STARD8 (NM_014725.2,742-760).
ccaagaagcgccatcgtaa

SEQ ID NO: 298327 - DNA, 19 bp, Homo sapiens
  siRNA target sequence for STARD8 (NM_014725.2,770-788).
cctcaagcaccttgaatct

SEQ ID NO: 298328 - DNA, 19 bp, Homo sapiens
  siRNA target sequence for STARD8 (NM_014725.2,819-837).
caagcagagcccaagcata

SEQ ID NO: 298329 - DNA, 19 bp, Homo sapiens
  siRNA target sequence for STARD8 (NM_014725.2,897-915).
ctctcagctggattttaca

SEQ ID NO: 298330 - DNA, 19 bp, Homo sapiens
  siRNA target sequence for STARD8 (NM_014725.2,1077-1095).
cgctccctgtccattgaga

SEQ ID NO: 298331 - DNA, 19 bp, Homo sapiens
  siRNA target sequence for STARD8 (NM_014725.2,1194-1212).
catgccagcacgtatgaca

SEQ ID NO: 298332 - DNA, 19 bp, Homo sapiens
  siRNA target sequence for STARD8 (NM_014725.2,1198-1216).
ccagcacgtatgacaactt

SEQ ID NO: 298333 - DNA, 19 bp, Homo sapiens
  siRNA target sequence for STARD8 (NM_014725.2,1410-1428).
gccacttcatcagtagaaa

SEQ ID NO: 298334 - DNA, 19 bp, Homo sapiens
  siRNA target sequence for STARD8 (NM_014725.2,1720-1738).
cctcctccagcgaacttga

SEQ ID NO: 298335 - DNA, 19 bp, Homo sapiens
  siRNA target sequence for STARD8 (NM_014725.2,1744-1762).
gtgggaactccatgaatga

SEQ ID NO: 298336 - DNA, 19 bp, Homo sapiens
  siRNA target sequence for STARD8 (NM_014725.2,1786-1804).
ctggactccaggcatcaat

SEQ ID NO: 298337 - DNA, 19 bp, Homo sapiens
  siRNA target sequence for STARD8 (NM_014725.2,1827-1845).
ggtgttggggcctcactta

SEQ ID NO: 298338 - DNA, 19 bp, Homo sapiens
  siRNA target sequence for STARD8 (NM_014725.2,2032-2050).
ggtcaatgcccaagttcat

SEQ ID NO: 298339 - DNA, 19 bp, Homo sapiens
  siRNA target sequence for STARD8 (NM_014725.2,2075-2093).
ccggggacagcacgtattt

SEQ ID NO: 298340 - DNA, 19 bp, Homo sapiens
  siRNA target sequence for STARD8 (NM_014725.2,2238-2256).
ctgcgtcaaatgaatgaga

SEQ ID NO: 298341 - DNA, 19 bp, Homo sapiens
  siRNA target sequence for STARD8 (NM_014725.2,2474-2492).
cctgctctacttcttaagt

SEQ ID NO: 298342 - DNA, 19 bp, Homo sapiens
  siRNA target sequence for STARD8 (NM_014725.2,3096-3114).
gagctgtaccactatgtca

SEQ ID NO: 298343 - DNA, 19 bp, Homo sapiens
  siRNA target sequence for STARD8 (NM_014725.2,3346-3364).
ctcctgactggtacaacaa

SEQ ID NO: 298344 - DNA, 19 bp, Homo sapiens
  siRNA target sequence for STARD8 (NM_014725.2,3349-3367).
ctgactggtacaacaaagt

SEQ ID NO: 298345 - DNA, 19 bp, Homo sapiens
  siRNA target sequence for STARD8 (NM_014725.2,3353-3371).
ctggtacaacaaagtcttt

SEQ ID NO: 298346 - DNA, 19 bp, Homo sapiens
  siRNA target sequence for TBC1D2 (NM_018421.1,1905-1923).
gccccatcagtaagtatga

SEQ ID NO: 298347 - DNA, 19 bp, Homo sapiens
  siRNA target sequence for TBC1D2 (NM_018421.1,1906-1924).
ccccatcagtaagtatgat

SEQ ID NO: 298348 - DNA, 19 bp, Homo sapiens
  siRNA target sequence for TBC1D2 (NM_018421.1,2466-2484).
ccatcatgcccgctgatta

SEQ ID NO: 298349 - DNA, 19 bp, Homo sapiens
  siRNA target sequence for TBC1D2 (NM_018421.1,2634-2652).
cggacagtctcattagcaa

SEQ ID NO: 298350 - DNA, 19 bp, Homo sapiens
  siRNA target sequence for TBC1D2 (NM_018421.1,2746-2764).
gatcttgaggctacagaat

SEQ ID NO: 298351 - DNA, 19 bp, Homo sapiens
  siRNA target sequence for TBC1D2 (NM_018421.1,2780-2798).
cagtacctgcgcttcttca

SEQ ID NO: 298352 - DNA, 19 bp, Homo sapiens
  siRNA target sequence for TSC2 (NM_000548.2,116-134).
gtaaacagacggagtttat

SEQ ID NO: 298353 - DNA, 19 bp, Homo sapiens
  siRNA target sequence for TSC2 (NM_000548.2,183-201).
caatcgcatccggatgata

SEQ ID NO: 298354 - DNA, 19 bp, Homo sapiens
  siRNA target sequence for TSC2 (NM_000548.2,193-211).
cggatgatagggcagattt

SEQ ID NO: 298355 - DNA, 19 bp, Homo sapiens
  siRNA target sequence for TSC2 (NM_000548.2,198-216).
gatagggcagatttgtgaa

SEQ ID NO: 298356 - DNA, 19 bp, Homo sapiens
  siRNA target sequence for TSC2 (NM_000548.2,217-235).
gtcgcaaaaaccaagaaat

SEQ ID NO: 298357 - DNA, 19 bp, Homo sapiens
  siRNA target sequence for TSC2 (NM_000548.2,530-548).
gcttgtcctcggaattcct

SEQ ID NO: 298358 - DNA, 19 bp, Homo sapiens
  siRNA target sequence for TSC2 (NM_000548.2,559-577).
gtgaacttggtcaaattca

SEQ ID NO: 298359 - DNA, 19 bp, Homo sapiens
  siRNA target sequence for TSC2 (NM_000548.2,561-579).
gaacttggtcaaattcaat

SEQ ID NO: 298360 - DNA, 19 bp, Homo sapiens
  siRNA target sequence for TSC2 (NM_000548.2,584-602).
gttacctcgacgagtacat

SEQ ID NO: 298361 - DNA, 19 bp, Homo sapiens
  siRNA target sequence for TSC2 (NM_000548.2,647-665).
cgtcctctgtggacataga

SEQ ID NO: 298362 - DNA, 19 bp, Homo sapiens
  siRNA target sequence for TSC2 (NM_000548.2,688-706).
gccgtggtctgctacaact

SEQ ID NO: 298363 - DNA, 19 bp, Homo sapiens
  siRNA target sequence for TSC2 (NM_000548.2,724-742).
ctcccgctgttcatcgtta

SEQ ID NO: 298364 - DNA, 19 bp, Homo sapiens
  siRNA target sequence for TSC2 (NM_000548.2,896-914).
gaggagccgtgttttttgt

SEQ ID NO: 298365 - DNA, 19 bp, Homo sapiens
  siRNA target sequence for TSC2 (NM_000548.2,1288-1306).
ctgaacctgatctcctata

SEQ ID NO: 298366 - DNA, 19 bp, Homo sapiens
  siRNA target sequence for TSC2 (NM_000548.2,1358-1376).
cgctgatggagagattctt

SEQ ID NO: 298367 - DNA, 19 bp, Homo sapiens
  siRNA target sequence for TSC2 (NM_000548.2,1440-1458).
catcaacaggcagttctat

SEQ ID NO: 298368 - DNA, 19 bp, Homo sapiens
  siRNA target sequence for TSC2 (NM_000548.2,1761-1779).
ccacgccacgcgtgtgtat

SEQ ID NO: 298369 - DNA, 19 bp, Homo sapiens
  siRNA target sequence for TSC2 (NM_000548.2,2325-2343).
gctgacagcattaatctct

SEQ ID NO: 298370 - DNA, 19 bp, Homo sapiens
  siRNA target sequence for TSC2 (NM_000548.2,2326-2344).
ctgacagcattaatctctt

SEQ ID NO: 298371 - DNA, 19 bp, Homo sapiens
  siRNA target sequence for TSC2 (NM_000548.2,2458-2476).
gagatgcctgacatcatca

SEQ ID NO: 298372 - DNA, 19 bp, Homo sapiens
  siRNA target sequence for TSC2 (NM_000548.2,2580-2598).
gcacctctacaggaacttt

SEQ ID NO: 298373 - DNA, 19 bp, Homo sapiens
  siRNA target sequence for TSC2 (NM_000548.2,2646-2664).
caacccctccaagtttaat

SEQ ID NO: 298374 - DNA, 19 bp, Homo sapiens
  siRNA target sequence for TSC2 (NM_000548.2,2650-2668).
ccctccaagtttaatcagt

SEQ ID NO: 298375 - DNA, 19 bp, Homo sapiens
  siRNA target sequence for TSC2 (NM_000548.2,2654-2672).
ccaagtttaatcagtacat

SEQ ID NO: 298376 - DNA, 19 bp, Homo sapiens
  siRNA target sequence for TSC2 (NM_000548.2,2722-2740).
ctgcccttccggaaggatt

SEQ ID NO: 298377 - DNA, 19 bp, Homo sapiens
  siRNA target sequence for TSC2 (NM_000548.2,2724-2742).
gcccttccggaaggatttt

SEQ ID NO: 298378 - DNA, 19 bp, Homo sapiens
  siRNA target sequence for TSC2 (NM_000548.2,2771-2789).
ccaatgtcctcttgtcttt

SEQ ID NO: 298379 - DNA, 19 bp, Homo sapiens
  siRNA target sequence for TSC2 (NM_000548.2,2897-2915).
ctccacccgtgaaagaatt

SEQ ID NO: 298380 - DNA, 19 bp, Homo sapiens
  siRNA target sequence for TSC2 (NM_000548.2,2899-2917).
ccacccgtgaaagaattca

SEQ ID NO: 298381 - DNA, 19 bp, Homo sapiens
  siRNA target sequence for TSC2 (NM_000548.2,2900-2918).
cacccgtgaaagaattcaa

SEQ ID NO: 298382 - DNA, 19 bp, Homo sapiens
  siRNA target sequence for TSC2 (NM_000548.2,2955-2973).
catcagtgtgtctgaacat

SEQ ID NO: 298383 - DNA, 19 bp, Homo sapiens
  siRNA target sequence for TSC2 (NM_000548.2,3049-3067).
gctgacgatagcctgaaaa

SEQ ID NO: 298384 - DNA, 19 bp, Homo sapiens
  siRNA target sequence for TSC2 (NM_000548.2,3050-3068).
ctgacgatagcctgaaaaa

SEQ ID NO: 298385 - DNA, 19 bp, Homo sapiens
  siRNA target sequence for TSC2 (NM_000548.2,3175-3193).
gcgggtggcaggaccaaaa

SEQ ID NO: 298386 - DNA, 19 bp, Homo sapiens
  siRNA target sequence for TSC2 (NM_000548.2,3178-3196).
ggtggcaggaccaaaacct

SEQ ID NO: 298387 - DNA, 19 bp, Homo sapiens
  siRNA target sequence for TSC2 (NM_000548.2,3243-3261).
cgggacccggtcgttacta

SEQ ID NO: 298388 - DNA, 19 bp, Homo sapiens
  siRNA target sequence for TSC2 (NM_000548.2,4244-4262).
ggctgagccctgaggttaa

SEQ ID NO: 298389 - DNA, 19 bp, Homo sapiens
  siRNA target sequence for TSC2 (NM_000548.2,4444-4462).
gagagggacgccttaaaga

SEQ ID NO: 298390 - DNA, 19 bp, Homo sapiens
  siRNA target sequence for TSC2 (NM_000548.2,4475-4493).
cctccaatgcagagaaagt

SEQ ID NO: 298391 - DNA, 19 bp, Homo sapiens
  siRNA target sequence for TSC2 (NM_000548.2,4634-4652).
catacgacacccacaagat

SEQ ID NO: 298392 - DNA, 19 bp, Homo sapiens
  siRNA target sequence for TSC2 (NM_000548.2,4650-4668).
gatcgccgtcctgtatgtt

SEQ ID NO: 298393 - DNA, 19 bp, Homo sapiens
  siRNA target sequence for TSC2 (NM_000548.2,5207-5225).
ccaaccccaccgatatcta

SEQ ID NO: 298394 - DNA, 19 bp, Homo sapiens
  siRNA target sequence for TSC2 (NM_000548.2,5325-5343).
ccctccgtcccatagcaaa

SEQ ID NO: 298395 - DNA, 19 bp, Homo sapiens
  siRNA target sequence for BCL2L13 (NM_015367.1,155-173).
gagccagccagtgacatat

SEQ ID NO: 298396 - DNA, 19 bp, Homo sapiens
  siRNA target sequence for BCL2L13 (NM_015367.1,174-192).
caggcatttcgggaatgta

SEQ ID NO: 298397 - DNA, 19 bp, Homo sapiens
  siRNA target sequence for BCL2L13 (NM_015367.1,217-235).
gcggctggaataagatttt

SEQ ID NO: 298398 - DNA, 19 bp, Homo sapiens
  siRNA target sequence for BCL2L13 (NM_015367.1,236-254).
ggtgcctctggttttgcta

SEQ ID NO: 298399 - DNA, 19 bp, Homo sapiens
  siRNA target sequence for BCL2L13 (NM_015367.1,255-273).
cgacaaatgcttttggaat

SEQ ID NO: 298400 - DNA, 19 bp, Homo sapiens
  siRNA target sequence for BCL2L13 (NM_015367.1,343-361).
cggcagagtacatcattca

SEQ ID NO: 298401 - DNA, 19 bp, Homo sapiens
  siRNA target sequence for BCL2L13 (NM_015367.1,369-387).
ggctggggcactgtgttta

SEQ ID NO: 298402 - DNA, 19 bp, Homo sapiens
  siRNA target sequence for BCL2L13 (NM_015367.1,373-391).
ggggcactgtgtttagtct

SEQ ID NO: 298403 - DNA, 19 bp, Homo sapiens
  siRNA target sequence for BCL2L13 (NM_015367.1,407-425).
ggaataccctggaatcact

SEQ ID NO: 298404 - DNA, 19 bp, Homo sapiens
  siRNA target sequence for BCL2L13 (NM_015367.1,426-444).
gcagaagatagcaatgaca

SEQ ID NO: 298405 - DNA, 19 bp, Homo sapiens
  siRNA target sequence for BCL2L13 (NM_015367.1,602-620).
gcagcagattgcaatggat

SEQ ID NO: 298406 - DNA, 19 bp, Homo sapiens
  siRNA target sequence for BCL2L13 (NM_015367.1,627-645).
gaagtgaaaagcttagaca

SEQ ID NO: 298407 - DNA, 19 bp, Homo sapiens
  siRNA target sequence for BCL2L13 (NM_015367.1,671-689).
gaacaactcctctaattct

SEQ ID NO: 298408 - DNA, 19 bp, Homo sapiens
  siRNA target sequence for BCL2L13 (NM_015367.1,802-820).
ctcccttgcttccacatat

SEQ ID NO: 298409 - DNA, 19 bp, Homo sapiens
  siRNA target sequence for BCL2L13 (NM_015367.1,892-910).
ctacatctctgtttgtaga

SEQ ID NO: 298410 - DNA, 19 bp, Homo sapiens
  siRNA target sequence for BCL2L13 (NM_015367.1,898-916).
ctctgtttgtagaacttga

SEQ ID NO: 298411 - DNA, 19 bp, Homo sapiens
  siRNA target sequence for PSME1 (NM_006263.2,239-257).
ctcaatgaagccaacttga

SEQ ID NO: 298412 - DNA, 19 bp, Homo sapiens
  siRNA target sequence for PSME1 (NM_006263.2,248-266).
gccaacttgagcaatctga

SEQ ID NO: 298413 - DNA, 19 bp, Homo sapiens
  siRNA target sequence for PSME1 (NM_006263.2,249-267).
ccaacttgagcaatctgaa

SEQ ID NO: 298414 - DNA, 19 bp, Homo sapiens
  siRNA target sequence for PSME1 (NM_006263.2,401-419).
ccagtgaactgcaatgaaa

SEQ ID NO: 298415 - DNA, 19 bp, Homo sapiens
  siRNA target sequence for PSME1 (NM_006263.2,513-531).
ctcggattgaggatggtaa

SEQ ID NO: 298416 - DNA, 19 bp, Homo sapiens
  siRNA target sequence for PSME1 (NM_006263.2,516-534).
ggattgaggatggtaacaa

SEQ ID NO: 298417 - DNA, 19 bp, Homo sapiens
  siRNA target sequence for PSME1 (NM_006263.2,517-535).
gattgaggatggtaacaat

SEQ ID NO: 298418 - DNA, 19 bp, Homo sapiens
  siRNA target sequence for PSME1 (NM_006263.2,596-614).
gaaggcttccacactcaaa

SEQ ID NO: 298419 - DNA, 19 bp, Homo sapiens
  siRNA target sequence for PSME1 (NM_006263.2,607-625).
cactcaaatctctaagtat

SEQ ID NO: 298420 - DNA, 19 bp, Homo sapiens
  siRNA target sequence for PSME1 (NM_006263.2,609-627).
ctcaaatctctaagtattt

SEQ ID NO: 298421 - DNA, 19 bp, Homo sapiens
  siRNA target sequence for PSME1 (NM_006263.2,636-654).
gtggtgatgcagtgactaa

SEQ ID NO: 298422 - DNA, 19 bp, Homo sapiens
  siRNA target sequence for PSME1 (NM_006263.2,667-685).
gccccatgtgggtgattat

SEQ ID NO: 298423 - DNA, 19 bp, Homo sapiens
  siRNA target sequence for PSME1 (NM_006263.2,748-766).
gatccgcaatgcttatgct

SEQ ID NO: 298424 - DNA, 19 bp, Homo sapiens
  siRNA target sequence for PSME3 (NM_005789.2,305-323).
gaagacttggtggcaaatt

SEQ ID NO: 298425 - DNA, 19 bp, Homo sapiens
  siRNA target sequence for PSME3 (NM_005789.2,328-346).
cccaaagaagttattagaa

SEQ ID NO: 298426 - DNA, 19 bp, Homo sapiens
  siRNA target sequence for PSME3 (NM_005789.2,330-348).
caaagaagttattagaact

SEQ ID NO: 298427 - DNA, 19 bp, Homo sapiens
  siRNA target sequence for PSME3 (NM_005789.2,334-352).
gaagttattagaacttgat

SEQ ID NO: 298428 - DNA, 19 bp, Homo sapiens
  siRNA target sequence for PSME3 (NM_005789.2,337-355).
gttattagaacttgatagt

SEQ ID NO: 298429 - DNA, 19 bp, Homo sapiens
  siRNA target sequence for PSME3 (NM_005789.2,464-482).
gatggtcccacttataaga

SEQ ID NO: 298430 - DNA, 19 bp, Homo sapiens
  siRNA target sequence for PSME3 (NM_005789.2,569-587).
ctggtggacattattgaga

SEQ ID NO: 298431 - DNA, 19 bp, Homo sapiens
  siRNA target sequence for PSME3 (NM_005789.2,597-615).
ctgagatccggctgttgat

SEQ ID NO: 298432 - DNA, 19 bp, Homo sapiens
  siRNA target sequence for PSME3 (NM_005789.2,655-673).
gattcccaggatagaagat

SEQ ID NO: 298433 - DNA, 19 bp, Homo sapiens
  siRNA target sequence for PSME3 (NM_005789.2,735-753).
gtgaagctgcatcttatct

SEQ ID NO: 298434 - DNA, 19 bp, Homo sapiens
  siRNA target sequence for PSME3 (NM_005789.2,752-770).
ctggaccagatttctagat

SEQ ID NO: 298435 - DNA, 19 bp, Homo sapiens
  siRNA target sequence for PSME3 (NM_005789.2,837-855).
gcaccgtgacagagattga

SEQ ID NO: 298436 - DNA, 19 bp, Homo sapiens
  siRNA target sequence for PSME3 (NM_005789.2,838-856).
caccgtgacagagattgat

SEQ ID NO: 298437 - DNA, 19 bp, Homo sapiens
  siRNA target sequence for PSME3 (NM_005789.2,871-889).
cagccttcggctcatcata

SEQ ID NO: 298438 - DNA, 19 bp, Homo sapiens
  siRNA target sequence for PSME3 (NM_005789.2,874-892).
ccttcggctcatcatatca

SEQ ID NO: 298439 - DNA, 19 bp, Homo sapiens
  siRNA target sequence for PSME3 (NM_176863.1,636-654).
caggcaaaggtcctcatat

SEQ ID NO: 298440 - DNA, 19 bp, Homo sapiens
  siRNA target sequence for PSME3 (NM_176863.1,638-656).
ggcaaaggtcctcatatat

SEQ ID NO: 298441 - DNA, 19 bp, Homo sapiens
  siRNA target sequence for PSME3 (NM_176863.1,640-658).
caaaggtcctcatatatgt

SEQ ID NO: 298442 - DNA, 19 bp, Homo sapiens
  siRNA target sequence for PPP2R4 (NM_021131.3,254-272).
cactcagaacttcatcatt

SEQ ID NO: 298443 - DNA, 19 bp, Homo sapiens
  siRNA target sequence for PPP2R4 (NM_021131.3,297-315).
ccagacatgggcaaatgga

SEQ ID NO: 298444 - DNA, 19 bp, Homo sapiens
  siRNA target sequence for PPP2R4 (NM_021131.3,334-352).
ctgactacatcggattcat

SEQ ID NO: 298445 - DNA, 19 bp, Homo sapiens
  siRNA target sequence for PPP2R4 (NM_021131.3,405-423).
gtctccgaggccattgaga

SEQ ID NO: 298446 - DNA, 19 bp, Homo sapiens
  siRNA target sequence for PPP2R4 (NM_021131.3,517-535).
cctggtatgccaaacttga

SEQ ID NO: 298447 - DNA, 19 bp, Homo sapiens
  siRNA target sequence for PPP2R4 (NM_021131.3,518-536).
ctggtatgccaaacttgat

SEQ ID NO: 298448 - DNA, 19 bp, Homo sapiens
  siRNA target sequence for PPP2R4 (NM_021131.3,520-538).
ggtatgccaaacttgatga

SEQ ID NO: 298449 - DNA, 19 bp, Homo sapiens
  siRNA target sequence for PPP2R4 (NM_021131.3,595-613).
ctgaggtggctgtttacct

SEQ ID NO: 298450 - DNA, 19 bp, Homo sapiens
  siRNA target sequence for PPP2R4 (NM_021131.3,597-615).
gaggtggctgtttacctaa

SEQ ID NO: 298451 - DNA, 19 bp, Homo sapiens
  siRNA target sequence for PPP2R4 (NM_021131.3,686-704).
ctgctgtctctgcaagatt

SEQ ID NO: 298452 - DNA, 19 bp, Homo sapiens
  siRNA target sequence for PPP2R4 (NM_021131.3,713-731).
ccgggtggatgaccaaata

SEQ ID NO: 298453 - DNA, 19 bp, Homo sapiens
  siRNA target sequence for PPP2R4 (NM_021131.3,717-735).
gtggatgaccaaatagcta

SEQ ID NO: 298454 - DNA, 19 bp, Homo sapiens
  siRNA target sequence for PPP2R4 (NM_021131.3,719-737).
ggatgaccaaatagctatt

SEQ ID NO: 298455 - DNA, 19 bp, Homo sapiens
  siRNA target sequence for PPP2R4 (NM_021131.3,773-791).
gcggaaactccagaaaaca

SEQ ID NO: 298456 - DNA, 19 bp, Homo sapiens
  siRNA target sequence for PPP2R4 (NM_021131.3,774-792).
cggaaactccagaaaacat

SEQ ID NO: 298457 - DNA, 19 bp, Homo sapiens
  siRNA target sequence for PPP2R4 (NM_021131.3,865-883).
gcagttcgcagctgataga

SEQ ID NO: 298458 - DNA, 19 bp, Homo sapiens
  siRNA target sequence for PPP2R4 (NM_021131.3,957-975).
ctggagtgtatcctgttta

SEQ ID NO: 298459 - DNA, 19 bp, Homo sapiens
  siRNA target sequence for PPP2R4 (NM_021131.3,986-1004).
gaagactggcccatttgca

SEQ ID NO: 298460 - DNA, 19 bp, Homo sapiens
  siRNA target sequence for PPP2R4 (NM_021131.3,1041-1059).
ccttcctggtccaaagtga

SEQ ID NO: 298461 - DNA, 19 bp, Homo sapiens
  siRNA target sequence for PPP2R4 (NM_178001.1,539-557).
gcgatgaatgcataccatt

SEQ ID NO: 298462 - DNA, 19 bp, Homo sapiens
  siRNA target sequence for PPP2R4 (NM_178001.1,540-558).
cgatgaatgcataccatta

SEQ ID NO: 298463 - DNA, 19 bp, Homo sapiens
  siRNA target sequence for PPP2R4 (NM_178001.1,580-598).
ccttcggaggccattgaga

SEQ ID NO: 298464 - DNA, 19 bp, Homo sapiens
  siRNA target sequence for PLAA (NM_004253.2,131-149).
cacaatatatgcattttct

SEQ ID NO: 298465 - DNA, 19 bp, Homo sapiens
  siRNA target sequence for PLAA (NM_004253.2,159-177).
gtccaatgccactttatat

SEQ ID NO: 298466 - DNA, 19 bp, Homo sapiens
  siRNA target sequence for PLAA (NM_004253.2,162-180).
caatgccactttatattct

SEQ ID NO: 298467 - DNA, 19 bp, Homo sapiens
  siRNA target sequence for PLAA (NM_004253.2,188-206).
cacaaaaatactgtttgta

SEQ ID NO: 298468 - DNA, 19 bp, Homo sapiens
  siRNA target sequence for PLAA (NM_004253.2,219-237).
gaaaatttgggacattact

SEQ ID NO: 298469 - DNA, 19 bp, Homo sapiens
  siRNA target sequence for PLAA (NM_004253.2,261-279).
ctaaagtctggctgaatga

SEQ ID NO: 298470 - DNA, 19 bp, Homo sapiens
  siRNA target sequence for PLAA (NM_004253.2,314-332).
gcagtgtgggcggtaaaga

SEQ ID NO: 298471 - DNA, 19 bp, Homo sapiens
  siRNA target sequence for PLAA (NM_004253.2,315-333).
cagtgtgggcggtaaagat

SEQ ID NO: 298472 - DNA, 19 bp, Homo sapiens
  siRNA target sequence for PLAA (NM_004253.2,317-335).
gtgtgggcggtaaagatct

SEQ ID NO: 298473 - DNA, 19 bp, Homo sapiens
  siRNA target sequence for PLAA (NM_004253.2,338-356).
cctgaacagggcttaatgt

SEQ ID NO: 298474 - DNA, 19 bp, Homo sapiens
  siRNA target sequence for PLAA (NM_004253.2,339-357).
ctgaacagggcttaatgtt

SEQ ID NO: 298475 - DNA, 19 bp, Homo sapiens
  siRNA target sequence for PLAA (NM_004253.2,341-359).
gaacagggcttaatgttga

SEQ ID NO: 298476 - DNA, 19 bp, Homo sapiens
  siRNA target sequence for PLAA (NM_004253.2,482-500).
gcaaatgatgctagtatta

SEQ ID NO: 298477 - DNA, 19 bp, Homo sapiens
  siRNA target sequence for PLAA (NM_004253.2,514-532).
cactggcgagtgtcttgaa

SEQ ID NO: 298478 - DNA, 19 bp, Homo sapiens
  siRNA target sequence for PLAA (NM_004253.2,518-536).
ggcgagtgtcttgaagtat

SEQ ID NO: 298479 - DNA, 19 bp, Homo sapiens
  siRNA target sequence for PLAA (NM_004253.2,520-538).
cgagtgtcttgaagtatat

SEQ ID NO: 298480 - DNA, 19 bp, Homo sapiens
  siRNA target sequence for PLAA (NM_004253.2,521-539).
gagtgtcttgaagtatatt

SEQ ID NO: 298481 - DNA, 19 bp, Homo sapiens
  siRNA target sequence for PLAA (NM_004253.2,571-589).
cgtttttccaaattgtaga

SEQ ID NO: 298482 - DNA, 19 bp, Homo sapiens
  siRNA target sequence for PLAA (NM_004253.2,638-656).
ggggaatgtgctcaaacta

SEQ ID NO: 298483 - DNA, 19 bp, Homo sapiens
  siRNA target sequence for PLAA (NM_004253.2,660-678).
gacttccagctcagtctat

SEQ ID NO: 298484 - DNA, 19 bp, Homo sapiens
  siRNA target sequence for PLAA (NM_004253.2,694-712).
gctcgacaatggtgacatt

SEQ ID NO: 298485 - DNA, 19 bp, Homo sapiens
  siRNA target sequence for PLAA (NM_004253.2,720-738).
gtgcgagtgatggcattat

SEQ ID NO: 298486 - DNA, 19 bp, Homo sapiens
  siRNA target sequence for PLAA (NM_004253.2,722-740).
gcgagtgatggcattatta

SEQ ID NO: 298487 - DNA, 19 bp, Homo sapiens
  siRNA target sequence for PLAA (NM_004253.2,724-742).
gagtgatggcattattaga

SEQ ID NO: 298488 - DNA, 19 bp, Homo sapiens
  siRNA target sequence for PLAA (NM_004253.2,741-759).
gagtgtttacagaatcaga

SEQ ID NO: 298489 - DNA, 19 bp, Homo sapiens
  siRNA target sequence for PLAA (NM_004253.2,808-826).
gtctcacgcaaccattgat

SEQ ID NO: 298490 - DNA, 19 bp, Homo sapiens
  siRNA target sequence for PLAA (NM_004253.2,812-830).
cacgcaaccattgattcta

SEQ ID NO: 298491 - DNA, 19 bp, Homo sapiens
  siRNA target sequence for PLAA (NM_004253.2,814-832).
cgcaaccattgattctaaa

SEQ ID NO: 298492 - DNA, 19 bp, Homo sapiens
  siRNA target sequence for PLAA (NM_004253.2,815-833).
gcaaccattgattctaaaa

SEQ ID NO: 298493 - DNA, 19 bp, Homo sapiens
  siRNA target sequence for PLAA (NM_004253.2,838-856).
cgatttaggggacatcaat

SEQ ID NO: 298494 - DNA, 19 bp, Homo sapiens
  siRNA target sequence for PLAA (NM_004253.2,908-926).
ggacagactcgtctaatca

SEQ ID NO: 298495 - DNA, 19 bp, Homo sapiens
  siRNA target sequence for PLAA (NM_004253.2,947-965).
gcctatcagtggagtgtta

SEQ ID NO: 298496 - DNA, 19 bp, Homo sapiens
  siRNA target sequence for PLAA (NM_004253.2,1002-1020).
gctcatctggtgctaatca

SEQ ID NO: 298497 - DNA, 19 bp, Homo sapiens
  siRNA target sequence for PLAA (NM_004253.2,1072-1090).
ctcaattgatgtcaatgaa

SEQ ID NO: 298498 - DNA, 19 bp, Homo sapiens
  siRNA target sequence for PLAA (NM_004253.2,1091-1109).
ggtggaccatcatataaat

SEQ ID NO: 298499 - DNA, 19 bp, Homo sapiens
  siRNA target sequence for PLAA (NM_004253.2,1092-1110).
gtggaccatcatataaatt

SEQ ID NO: 298500 - DNA, 19 bp, Homo sapiens
  siRNA target sequence for PLAA (NM_004253.2,1101-1119).
catataaattgccatataa

SEQ ID NO: 298501 - DNA, 19 bp, Homo sapiens
  siRNA target sequence for PLAA (NM_004253.2,1123-1141).
cagtgatgacccttggtta

SEQ ID NO: 298502 - DNA, 19 bp, Homo sapiens
  siRNA target sequence for PLAA (NM_004253.2,1134-1152).
cttggttaactgcatacaa

SEQ ID NO: 298503 - DNA, 19 bp, Homo sapiens
  siRNA target sequence for PLAA (NM_004253.2,1137-1155).
ggttaactgcatacaactt

SEQ ID NO: 298504 - DNA, 19 bp, Homo sapiens
  siRNA target sequence for PLAA (NM_004253.2,1179-1197).
ctatgtttctggatcaagt

SEQ ID NO: 298505 - DNA, 19 bp, Homo sapiens
  siRNA target sequence for PLAA (NM_004253.2,1187-1205).
ctggatcaagtagctaaat

SEQ ID NO: 298506 - DNA, 19 bp, Homo sapiens
  siRNA target sequence for PLAA (NM_004253.2,1241-1259).
cttgggaatcccagctttt

SEQ ID NO: 298507 - DNA, 19 bp, Homo sapiens
  siRNA target sequence for PLAA (NM_004253.2,1295-1313).
ggctcttcgggatcttcta

SEQ ID NO: 298508 - DNA, 19 bp, Homo sapiens
  siRNA target sequence for PLAA (NM_004253.2,1296-1314).
gctcttcgggatcttctaa

SEQ ID NO: 298509 - DNA, 19 bp, Homo sapiens
  siRNA target sequence for PLAA (NM_004253.2,1322-1340).
cccacagcagatcctttta

SEQ ID NO: 298510 - DNA, 19 bp, Homo sapiens
  siRNA target sequence for PLAA (NM_004253.2,1390-1408).
ggccggagttgatccattt

SEQ ID NO: 298511 - DNA, 19 bp, Homo sapiens
  siRNA target sequence for PLAA (NM_004253.2,1393-1411).
cggagttgatccatttaca

SEQ ID NO: 298512 - DNA, 19 bp, Homo sapiens
  siRNA target sequence for PLAA (NM_004253.2,1498-1516).
ccctacacaaatattaggt

SEQ ID NO: 298513 - DNA, 19 bp, Homo sapiens
  siRNA target sequence for PLAA (NM_004253.2,1500-1518).
ctacacaaatattaggtaa

SEQ ID NO: 298514 - DNA, 19 bp, Homo sapiens
  siRNA target sequence for PLAA (NM_004253.2,1514-1532).
ggtaaactgaaggaactta

SEQ ID NO: 298515 - DNA, 19 bp, Homo sapiens
  siRNA target sequence for PLAA (NM_004253.2,1515-1533).
gtaaactgaaggaacttaa

SEQ ID NO: 298516 - DNA, 19 bp, Homo sapiens
  siRNA target sequence for PLAA (NM_004253.2,1580-1598).
cttcttgagaagatactgt

SEQ ID NO: 298517 - DNA, 19 bp, Homo sapiens
  siRNA target sequence for PLAA (NM_004253.2,1597-1615).
gtctctaatatgtaatagt

SEQ ID NO: 298518 - DNA, 19 bp, Homo sapiens
  siRNA target sequence for PLAA (NM_004253.2,1671-1689).
gtcctgaagatattgtctt

SEQ ID NO: 298519 - DNA, 19 bp, Homo sapiens
  siRNA target sequence for PLAA (NM_004253.2,1700-1718).
gacattcttcggttgtcaa

SEQ ID NO: 298520 - DNA, 19 bp, Homo sapiens
  siRNA target sequence for PLAA (NM_004253.2,1702-1720).
cattcttcggttgtcaatt

SEQ ID NO: 298521 - DNA, 19 bp, Homo sapiens
  siRNA target sequence for PLAA (NM_004253.2,1779-1797).
gtcatcttatcaatcttct

SEQ ID NO: 298522 - DNA, 19 bp, Homo sapiens
  siRNA target sequence for PLAA (NM_004253.2,1828-1846).
gcttgctctcaggactttt

SEQ ID NO: 298523 - DNA, 19 bp, Homo sapiens
  siRNA target sequence for PLAA (NM_004253.2,1832-1850).
gctctcaggactttttgca

SEQ ID NO: 298524 - DNA, 19 bp, Homo sapiens
  siRNA target sequence for PLAA (NM_004253.2,1902-1920).
cactgatgtcccatgcaat

SEQ ID NO: 298525 - DNA, 19 bp, Homo sapiens
  siRNA target sequence for PLAA (NM_004253.2,1912-1930).
ccatgcaatagaactgaaa

SEQ ID NO: 298526 - DNA, 19 bp, Homo sapiens
  siRNA target sequence for PLAA (NM_004253.2,1925-1943).
ctgaaatcagggagcaata

SEQ ID NO: 298527 - DNA, 19 bp, Homo sapiens
  siRNA target sequence for PLAA (NM_004253.2,1935-1953).
ggagcaataagaacattca

SEQ ID NO: 298528 - DNA, 19 bp, Homo sapiens
  siRNA target sequence for PLAA (NM_004253.2,1965-1983).
ctacattggccctgaacta

SEQ ID NO: 298529 - DNA, 19 bp, Homo sapiens
  siRNA target sequence for PLAA (NM_004253.2,1992-2010).
gttttcataaagaccataa

SEQ ID NO: 298530 - DNA, 19 bp, Homo sapiens
  siRNA target sequence for PLAA (NM_004253.2,2024-2042).
gcccaatgtttgtcactaa

SEQ ID NO: 298531 - DNA, 19 bp, Homo sapiens
  siRNA target sequence for PLAA (NM_004253.2,2025-2043).
cccaatgtttgtcactaat

SEQ ID NO: 298532 - DNA, 19 bp, Homo sapiens
  siRNA target sequence for PLAA (NM_004253.2,2026-2044).
ccaatgtttgtcactaatt

SEQ ID NO: 298533 - DNA, 19 bp, Homo sapiens
  siRNA target sequence for PLAA (NM_004253.2,2027-2045).
caatgtttgtcactaatta

SEQ ID NO: 298534 - DNA, 19 bp, Homo sapiens
  siRNA target sequence for PLAA (NM_004253.2,2037-2055).
cactaattagcacaatctt

SEQ ID NO: 298535 - DNA, 19 bp, Homo sapiens
  siRNA target sequence for PLAA (NM_004253.2,2069-2087).
gacctagaagccactttta

SEQ ID NO: 298536 - DNA, 19 bp, Homo sapiens
  siRNA target sequence for PLAA (NM_004253.2,2079-2097).
ccacttttagacttcttgt

SEQ ID NO: 298537 - DNA, 19 bp, Homo sapiens
  siRNA target sequence for PLAA (NM_004253.2,2096-2114).
gtggctcttggaacactta

SEQ ID NO: 298538 - DNA, 19 bp, Homo sapiens
  siRNA target sequence for PLAA (NM_004253.2,2111-2129).
cttatcagtgatgattcaa

SEQ ID NO: 298539 - DNA, 19 bp, Homo sapiens
  siRNA target sequence for PLAA (NM_004253.2,2135-2153).
gtacaattagccaagtctt

SEQ ID NO: 298540 - DNA, 19 bp, Homo sapiens
  siRNA target sequence for PLAA (NM_004253.2,2149-2167).
gtctttaggtgttgattct

SEQ ID NO: 298541 - DNA, 19 bp, Homo sapiens
  siRNA target sequence for PLAA (NM_004253.2,2151-2169).
ctttaggtgttgattctca

SEQ ID NO: 298542 - DNA, 19 bp, Homo sapiens
  siRNA target sequence for PLAA (NM_004253.2,2179-2197).
gtattcctcagtatcagaa

SEQ ID NO: 298543 - DNA, 19 bp, Homo sapiens
  siRNA target sequence for PLAA (NM_004253.2,2218-2236).
ctgtagatttatcctaaat

SEQ ID NO: 298544 - DNA, 19 bp, Homo sapiens
  siRNA target sequence for PLAA (NM_004253.2,2220-2238).
gtagatttatcctaaattt

SEQ ID NO: 298545 - DNA, 19 bp, Homo sapiens
  siRNA target sequence for GM2A (NM_000405.3,195-213).
gcgcaagcccacctgaaaa

SEQ ID NO: 298546 - DNA, 19 bp, Homo sapiens
  siRNA target sequence for GM2A (NM_000405.3,233-251).
cttttcctgggataactgt

SEQ ID NO: 298547 - DNA, 19 bp, Homo sapiens
  siRNA target sequence for GM2A (NM_000405.3,239-257).
ctgggataactgtgatgaa

SEQ ID NO: 298548 - DNA, 19 bp, Homo sapiens
  siRNA target sequence for GM2A (NM_000405.3,264-282).
gaccctgcggtgatcagaa

SEQ ID NO: 298549 - DNA, 19 bp, Homo sapiens
  siRNA target sequence for GM2A (NM_000405.3,406-424).
ctggcctctggatcaagat

SEQ ID NO: 298550 - DNA, 19 bp, Homo sapiens
  siRNA target sequence for GM2A (NM_000405.3,425-443).
cccatgcacagactacatt

SEQ ID NO: 298551 - DNA, 19 bp, Homo sapiens
  siRNA target sequence for GM2A (NM_000405.3,440-458).
cattggcagctgtaccttt

SEQ ID NO: 298552 - DNA, 19 bp, Homo sapiens
  siRNA target sequence for GM2A (NM_000405.3,575-593).
gcccaagagcgaattcgtt

SEQ ID NO: 298553 - DNA, 19 bp, Homo sapiens
  siRNA target sequence for GM2A (NM_000405.3,630-648).
gggaactaccgcatagaga

SEQ ID NO: 298554 - DNA, 19 bp, Homo sapiens
  siRNA target sequence for CLPS (NM_001832.2,149-167).
gcccagtgtaagagcaatt

SEQ ID NO: 298555 - DNA, 19 bp, Homo sapiens
  siRNA target sequence for CLPS (NM_001832.2,246-264).
cgctctatgggatttacta

SEQ ID NO: 298556 - DNA, 19 bp, Homo sapiens
  siRNA target sequence for CLPS (NM_001832.2,248-266).
ctctatgggatttactaca

SEQ ID NO: 298557 - DNA, 19 bp, Homo sapiens
  siRNA target sequence for PPP1R12B (NM_002481.2,312-330).
cgaggacggtgctgtcttt

SEQ ID NO: 298558 - DNA, 19 bp, Homo sapiens
  siRNA target sequence for PPP1R12B (NM_002481.2,357-375).
cgacgaggtgagaaagctt

SEQ ID NO: 298559 - DNA, 19 bp, Homo sapiens
  siRNA target sequence for PPP1R12B (NM_002481.2,1295-1313).
cagaagcctttgtcaatca

SEQ ID NO: 298560 - DNA, 19 bp, Homo sapiens
  siRNA target sequence for PPP1R12B (NM_002481.2,1322-1340).
ctgaaagcaagagtagtat

SEQ ID NO: 298561 - DNA, 19 bp, Homo sapiens
  siRNA target sequence for PPP1R12B (NM_002481.2,1357-1375).
gcaccagctcaaaatacct

SEQ ID NO: 298562 - DNA, 19 bp, Homo sapiens
  siRNA target sequence for PPP1R12B (NM_002481.2,1403-1421).
cttctggcctttttaacaa

SEQ ID NO: 298563 - DNA, 19 bp, Homo sapiens
  siRNA target sequence for PPP1R12B (NM_002481.2,1426-1444).
gaagagcccaaagatgaat

SEQ ID NO: 298564 - DNA, 19 bp, Homo sapiens
  siRNA target sequence for PPP1R12B (NM_002481.2,1438-1456).
gatgaatctccttcttcat

SEQ ID NO: 298565 - DNA, 19 bp, Homo sapiens
  siRNA target sequence for PPP1R12B (NM_002481.2,1509-1527).
caattccagggaacctata

SEQ ID NO: 298566 - DNA, 19 bp, Homo sapiens
  siRNA target sequence for PPP1R12B (NM_002481.2,1533-1551).
ccgaggctcttccatctat

SEQ ID NO: 298567 - DNA, 19 bp, Homo sapiens
  siRNA target sequence for PPP1R12B (NM_002481.2,1647-1665).
gctcaacagcacaagtgat

SEQ ID NO: 298568 - DNA, 19 bp, Homo sapiens
  siRNA target sequence for PPP1R12B (NM_002481.2,1650-1668).
caacagcacaagtgatatt

SEQ ID NO: 298569 - DNA, 19 bp, Homo sapiens
  siRNA target sequence for PPP1R12B (NM_002481.2,1705-1723).
gtgaggagtggctcctata

SEQ ID NO: 298570 - DNA, 19 bp, Homo sapiens
  siRNA target sequence for PPP1R12B (NM_002481.2,1782-1800).
ctccacctatgtatcaact

SEQ ID NO: 298571 - DNA, 19 bp, Homo sapiens
  siRNA target sequence for PPP1R12B (NM_002481.2,1784-1802).
ccacctatgtatcaactta

SEQ ID NO: 298572 - DNA, 19 bp, Homo sapiens
  siRNA target sequence for PPP1R12B (NM_002481.2,2067-2085).
gacacgaaggtctactcaa

SEQ ID NO: 298573 - DNA, 19 bp, Homo sapiens
  siRNA target sequence for PPP1R12B (NM_002481.2,2388-2406).
cctgctatggacaaataga

SEQ ID NO: 298574 - DNA, 19 bp, Homo sapiens
  siRNA target sequence for PPP1R12B (NM_002481.2,2389-2407).
ctgctatggacaaatagat

SEQ ID NO: 298575 - DNA, 19 bp, Homo sapiens
  siRNA target sequence for PPP1R12B (NM_002481.2,2391-2409).
gctatggacaaatagattt

SEQ ID NO: 298576 - DNA, 19 bp, Homo sapiens
  siRNA target sequence for PPP1R12B (NM_002481.2,2392-2410).
ctatggacaaatagatttt

SEQ ID NO: 298577 - DNA, 19 bp, Homo sapiens
  siRNA target sequence for PPP1R12B (NM_002481.2,2396-2414).
ggacaaatagattttcagt

SEQ ID NO: 298578 - DNA, 19 bp, Homo sapiens
  siRNA target sequence for PPP1R12B (NM_002481.2,2434-2452).
gagactaccacaaacacta

SEQ ID NO: 298579 - DNA, 19 bp, Homo sapiens
  siRNA target sequence for PPP1R12B (NM_002481.2,2500-2518).
gatgagcagtcctctaaga

SEQ ID NO: 298580 - DNA, 19 bp, Homo sapiens
  siRNA target sequence for PPP1R12B (NM_002481.2,2631-2649).
gtggcatgaaagactttct

SEQ ID NO: 298581 - DNA, 19 bp, Homo sapiens
  siRNA target sequence for PPP1R12B (NM_002481.2,2674-2692).
cctacaaccagtgattctt

SEQ ID NO: 298582 - DNA, 19 bp, Homo sapiens
  siRNA target sequence for PPP1R12B (NM_002481.2,2675-2693).
ctacaaccagtgattctta

SEQ ID NO: 298583 - DNA, 19 bp, Homo sapiens
  siRNA target sequence for PPP1R12B (NM_002481.2,2754-2772).
gaccagccgtgtagaagaa

SEQ ID NO: 298584 - DNA, 19 bp, Homo sapiens
  siRNA target sequence for PPP1R12B (NM_002481.2,2756-2774).
ccagccgtgtagaagaaga

SEQ ID NO: 298585 - DNA, 19 bp, Homo sapiens
  siRNA target sequence for PPP1R12B (NM_002481.2,2860-2878).
gagctagcagatataaagt

SEQ ID NO: 298586 - DNA, 19 bp, Homo sapiens
  siRNA target sequence for PPP1R12B (NM_002481.2,2916-2934).
gacctctgaccgatcatca

SEQ ID NO: 298587 - DNA, 19 bp, Homo sapiens
  siRNA target sequence for PPP1R12B (NM_002481.2,2963-2981).
gagccttggagcgcaaaat

SEQ ID NO: 298588 - DNA, 19 bp, Homo sapiens
  siRNA target sequence for PPP1R12B (NM_002481.2,2965-2983).
gccttggagcgcaaaatgt

SEQ ID NO: 298589 - DNA, 19 bp, Homo sapiens
  siRNA target sequence for PPP1R12B (NM_002481.2,2967-2985).
cttggagcgcaaaatgtca

SEQ ID NO: 298590 - DNA, 19 bp, Homo sapiens
  siRNA target sequence for PPP1R12B (NM_002481.2,3007-3025).
gtgttaacagaactgaaat

SEQ ID NO: 298591 - DNA, 19 bp, Homo sapiens
  siRNA target sequence for CABYR (NM_012189.2,290-308).
gtatagagggaatactact

SEQ ID NO: 298592 - DNA, 19 bp, Homo sapiens
  siRNA target sequence for CABYR (NM_012189.2,297-315).
gggaatactactatggata

SEQ ID NO: 298593 - DNA, 19 bp, Homo sapiens
  siRNA target sequence for CABYR (NM_012189.2,299-317).
gaatactactatggatata

SEQ ID NO: 298594 - DNA, 19 bp, Homo sapiens
  siRNA target sequence for CABYR (NM_012189.2,304-322).
ctactatggatataaaaga

SEQ ID NO: 298595 - DNA, 19 bp, Homo sapiens
  siRNA target sequence for CABYR (NM_012189.2,307-325).
ctatggatataaaagatct

SEQ ID NO: 298596 - DNA, 19 bp, Homo sapiens
  siRNA target sequence for CABYR (NM_012189.2,418-436).
catctgtagaatctaaagt

SEQ ID NO: 298597 - DNA, 19 bp, Homo sapiens
  siRNA target sequence for CABYR (NM_012189.2,511-529).
cccagtttccatcagttta

SEQ ID NO: 298598 - DNA, 19 bp, Homo sapiens
  siRNA target sequence for CABYR (NM_012189.2,585-603).
gccacccctaagactacta

SEQ ID NO: 298599 - DNA, 19 bp, Homo sapiens
  siRNA target sequence for CABYR (NM_012189.2,674-692).
gcttgctgctcagatgtta

SEQ ID NO: 298600 - DNA, 19 bp, Homo sapiens
  siRNA target sequence for CABYR (NM_012189.2,684-702).
cagatgttaggtaaagttt

SEQ ID NO: 298601 - DNA, 19 bp, Homo sapiens
  siRNA target sequence for CABYR (NM_012189.2,686-704).
gatgttaggtaaagtttca

SEQ ID NO: 298602 - DNA, 19 bp, Homo sapiens
  siRNA target sequence for CABYR (NM_012189.2,689-707).
gttaggtaaagtttcatct

SEQ ID NO: 298603 - DNA, 19 bp, Homo sapiens
  siRNA target sequence for CABYR (NM_012189.2,694-712).
gtaaagtttcatctattca

SEQ ID NO: 298604 - DNA, 19 bp, Homo sapiens
  siRNA target sequence for CABYR (NM_012189.2,754-772).
gtatgcctgttgttatcaa

SEQ ID NO: 298605 - DNA, 19 bp, Homo sapiens
  siRNA target sequence for CABYR (NM_012189.2,849-867).
gtgcaggttgtgaaccaaa

SEQ ID NO: 298606 - DNA, 19 bp, Homo sapiens
  siRNA target sequence for CABYR (NM_012189.2,852-870).
caggttgtgaaccaaacat

SEQ ID NO: 298607 - DNA, 19 bp, Homo sapiens
  siRNA target sequence for CABYR (NM_012189.2,887-905).
gggttctcaacctaaagaa

SEQ ID NO: 298608 - DNA, 19 bp, Homo sapiens
  siRNA target sequence for CABYR (NM_012189.2,999-1017).
gctgatattgaggttatgt

SEQ ID NO: 298609 - DNA, 19 bp, Homo sapiens
  siRNA target sequence for CABYR (NM_012189.2,1016-1034).
gtcaactgttcatatatca

SEQ ID NO: 298610 - DNA, 19 bp, Homo sapiens
  siRNA target sequence for CABYR (NM_012189.2,1026-1044).
catatatcatctgtctata

SEQ ID NO: 298611 - DNA, 19 bp, Homo sapiens
  siRNA target sequence for CABYR (NM_012189.2,1079-1097).
cgagcaactgccagaacaa

SEQ ID NO: 298612 - DNA, 19 bp, Homo sapiens
  siRNA target sequence for CABYR (NM_012189.2,1106-1124).
cccttttactgatcaagtt

SEQ ID NO: 298613 - DNA, 19 bp, Homo sapiens
  siRNA target sequence for CABYR (NM_012189.2,1116-1134).
gatcaagttgcttgtctta

SEQ ID NO: 298614 - DNA, 19 bp, Homo sapiens
  siRNA target sequence for CABYR (NM_012189.2,1163-1181).
gcagtcaccacgagttagt

SEQ ID NO: 298615 - DNA, 19 bp, Homo sapiens
  siRNA target sequence for CABYR (NM_012189.2,1180-1198).
gtcccaaatctgtagtaga

SEQ ID NO: 298616 - DNA, 19 bp, Homo sapiens
  siRNA target sequence for CABYR (NM_012189.2,1204-1222).
ccacctctggcatgtctaa

SEQ ID NO: 298617 - DNA, 19 bp, Homo sapiens
  siRNA target sequence for CABYR (NM_012189.2,1205-1223).
cacctctggcatgtctaaa

SEQ ID NO: 298618 - DNA, 19 bp, Homo sapiens
  siRNA target sequence for CABYR (NM_012189.2,1308-1326).
ctgctctctgacacatctt

SEQ ID NO: 298619 - DNA, 19 bp, Homo sapiens
  siRNA target sequence for CABYR (NM_012189.2,1311-1329).
ctctctgacacatctttga

SEQ ID NO: 298620 - DNA, 19 bp, Homo sapiens
  siRNA target sequence for CABYR (NM_012189.2,1410-1428).
gaagtggagatcacttcaa

SEQ ID NO: 298621 - DNA, 19 bp, Homo sapiens
  siRNA target sequence for CABYR (NM_012189.2,1416-1434).
gagatcacttcaatagtct

SEQ ID NO: 298622 - DNA, 19 bp, Homo sapiens
  siRNA target sequence for CABYR (NM_138643.1,497-515).
ccaccaccatgttctaaca

SEQ ID NO: 298623 - DNA, 19 bp, Homo sapiens
  siRNA target sequence for CABYR (NM_138643.1,498-516).
caccaccatgttctaacat

SEQ ID NO: 298624 - DNA, 19 bp, Homo sapiens
  siRNA target sequence for CABYR (NM_138643.1,500-518).
ccaccatgttctaacatgt

SEQ ID NO: 298625 - DNA, 19 bp, Homo sapiens
  siRNA target sequence for CABYR (NM_138643.1,522-540).
ccctttattgtctaactga

SEQ ID NO: 298626 - DNA, 19 bp, Homo sapiens
  siRNA target sequence for CABYR (NM_138643.1,524-542).
ctttattgtctaactgata

SEQ ID NO: 298627 - DNA, 19 bp, Homo sapiens
  siRNA target sequence for CABYR (NM_138643.1,531-549).
gtctaactgataagaatca

SEQ ID NO: 298628 - DNA, 19 bp, Homo sapiens
  siRNA target sequence for CABYR (NM_138643.1,590-608).
ccccaagcaaccctctatt

SEQ ID NO: 298629 - DNA, 19 bp, Homo sapiens
  siRNA target sequence for CABYR (NM_138643.1,591-609).
cccaagcaaccctctattt

SEQ ID NO: 298630 - DNA, 19 bp, Homo sapiens
  siRNA target sequence for CABYR (NM_138643.1,592-610).
ccaagcaaccctctattta

SEQ ID NO: 298631 - DNA, 19 bp, Homo sapiens
  siRNA target sequence for CABYR (NM_138643.1,596-614).
gcaaccctctatttaccta

SEQ ID NO: 298632 - DNA, 19 bp, Homo sapiens
  siRNA target sequence for CABYR (NM_138643.1,601-619).
cctctatttacctaatcct

SEQ ID NO: 298633 - DNA, 19 bp, Homo sapiens
  siRNA target sequence for CABYR (NM_138643.1,602-620).
ctctatttacctaatccta

SEQ ID NO: 298634 - DNA, 19 bp, Homo sapiens
  siRNA target sequence for CABYR (NM_138643.1,696-714).
gtgccccaccttttatctt

SEQ ID NO: 298635 - DNA, 19 bp, Homo sapiens
  siRNA target sequence for CABYR (NM_138643.1,712-730).
cttagtaggctcaaatgtt

SEQ ID NO: 298636 - DNA, 19 bp, Homo sapiens
  siRNA target sequence for CABYR (NM_138643.1,762-780).
gacatgctgtcgtttcaca

SEQ ID NO: 298637 - DNA, 19 bp, Homo sapiens
  siRNA target sequence for CABYR (NM_138643.1,779-797).
cagtcagatgtcttgagat

SEQ ID NO: 298638 - DNA, 19 bp, Homo sapiens
  siRNA target sequence for CABYR (NM_138643.1,781-799).
gtcagatgtcttgagatat

SEQ ID NO: 298639 - DNA, 19 bp, Homo sapiens
  siRNA target sequence for CABYR (NM_138643.1,828-846).
ctgcagatgagaaatacca

SEQ ID NO: 298640 - DNA, 19 bp, Homo sapiens
  siRNA target sequence for CABYR (NM_138643.1,857-875).
ctaagtccccagaatgcta

SEQ ID NO: 298641 - DNA, 19 bp, Homo sapiens
  siRNA target sequence for CABYR (NM_138643.1,893-911).
gatgtccccaggccaaaaa

SEQ ID NO: 298642 - DNA, 19 bp, Homo sapiens
  siRNA target sequence for CABYR (NM_138643.1,939-957).
cagtagaagatgtagctaa

SEQ ID NO: 298643 - DNA, 19 bp, Homo sapiens
  siRNA target sequence for CABYR (NM_138643.1,984-1002).
gtgctccctttggaagtta

SEQ ID NO: 298644 - DNA, 19 bp, Homo sapiens
  siRNA target sequence for CABYR (NM_138643.1,1024-1042).
cgtgactactgctcacaaa

SEQ ID NO: 298645 - DNA, 19 bp, Homo sapiens
  siRNA target sequence for SPA17 (NM_017425.2,156-174).
cacccactaccgaattcca

SEQ ID NO: 298646 - DNA, 19 bp, Homo sapiens
  siRNA target sequence for SPA17 (NM_017425.2,200-218).
ggctgacacgcgagattct

SEQ ID NO: 298647 - DNA, 19 bp, Homo sapiens
  siRNA target sequence for SPA17 (NM_017425.2,202-220).
ctgacacgcgagattctga

SEQ ID NO: 298648 - DNA, 19 bp, Homo sapiens
  siRNA target sequence for SPA17 (NM_017425.2,221-239).
gagagcaaccggacaatat

SEQ ID NO: 298649 - DNA, 19 bp, Homo sapiens
  siRNA target sequence for SPA17 (NM_017425.2,225-243).
gcaaccggacaatatacca

SEQ ID NO: 298650 - DNA, 19 bp, Homo sapiens
  siRNA target sequence for SPA17 (NM_017425.2,234-252).
caatataccagcttttgca

SEQ ID NO: 298651 - DNA, 19 bp, Homo sapiens
  siRNA target sequence for SPA17 (NM_017425.2,328-346).
gaagaccgcttctataaca

SEQ ID NO: 298652 - DNA, 19 bp, Homo sapiens
  siRNA target sequence for SPA17 (NM_017425.2,431-449).
catcagtcaccatcttaga

SEQ ID NO: 298653 - DNA, 19 bp, Homo sapiens
  siRNA target sequence for IGBP1 (NM_001551.1,13-31).
ctgctgaggacgagttaca

SEQ ID NO: 298654 - DNA, 19 bp, Homo sapiens
  siRNA target sequence for IGBP1 (NM_001551.1,42-60).
ctccccgagctgttcgaaa

SEQ ID NO: 298655 - DNA, 19 bp, Homo sapiens
  siRNA target sequence for IGBP1 (NM_001551.1,56-74).
cgaaactggtagacagtta

SEQ ID NO: 298656 - DNA, 19 bp, Homo sapiens
  siRNA target sequence for IGBP1 (NM_001551.1,71-89).
gttactggacgaagtagaa

SEQ ID NO: 298657 - DNA, 19 bp, Homo sapiens
  siRNA target sequence for IGBP1 (NM_001551.1,142-160).
gcttggacctccttgagaa

SEQ ID NO: 298658 - DNA, 19 bp, Homo sapiens
  siRNA target sequence for IGBP1 (NM_001551.1,156-174).
gagaaggctgccgaaatgt

SEQ ID NO: 298659 - DNA, 19 bp, Homo sapiens
  siRNA target sequence for IGBP1 (NM_001551.1,158-176).
gaaggctgccgaaatgtta

SEQ ID NO: 298660 - DNA, 19 bp, Homo sapiens
  siRNA target sequence for IGBP1 (NM_001551.1,188-206).
cttgttcagccgaaatgaa

SEQ ID NO: 298661 - DNA, 19 bp, Homo sapiens
  siRNA target sequence for IGBP1 (NM_001551.1,191-209).
gttcagccgaaatgaagat

SEQ ID NO: 298662 - DNA, 19 bp, Homo sapiens
  siRNA target sequence for IGBP1 (NM_001551.1,196-214).
gccgaaatgaagatttgga

SEQ ID NO: 298663 - DNA, 19 bp, Homo sapiens
  siRNA target sequence for IGBP1 (NM_001551.1,290-308).
ccccagcaagcgtctagat

SEQ ID NO: 298664 - DNA, 19 bp, Homo sapiens
  siRNA target sequence for IGBP1 (NM_001551.1,292-310).
ccagcaagcgtctagatca

SEQ ID NO: 298665 - DNA, 19 bp, Homo sapiens
  siRNA target sequence for IGBP1 (NM_001551.1,293-311).
cagcaagcgtctagatcat

SEQ ID NO: 298666 - DNA, 19 bp, Homo sapiens
  siRNA target sequence for IGBP1 (NM_001551.1,295-313).
gcaagcgtctagatcattt

SEQ ID NO: 298667 - DNA, 19 bp, Homo sapiens
  siRNA target sequence for IGBP1 (NM_001551.1,317-335).
gcgggctcgagaacacttt

SEQ ID NO: 298668 - DNA, 19 bp, Homo sapiens
  siRNA target sequence for IGBP1 (NM_001551.1,327-345).
gaacactttataaactact

SEQ ID NO: 298669 - DNA, 19 bp, Homo sapiens
  siRNA target sequence for IGBP1 (NM_001551.1,330-348).
cactttataaactacttaa

SEQ ID NO: 298670 - DNA, 19 bp, Homo sapiens
  siRNA target sequence for IGBP1 (NM_001551.1,453-471).
gttgctatggcatctcaaa

SEQ ID NO: 298671 - DNA, 19 bp, Homo sapiens
  siRNA target sequence for IGBP1 (NM_001551.1,567-585).
gagcgtgttcgtgaatatt

SEQ ID NO: 298672 - DNA, 19 bp, Homo sapiens
  siRNA target sequence for IGBP1 (NM_001551.1,569-587).
gcgtgttcgtgaatattat

SEQ ID NO: 298673 - DNA, 19 bp, Homo sapiens
  siRNA target sequence for IGBP1 (NM_001551.1,571-589).
gtgttcgtgaatattatct

SEQ ID NO: 298674 - DNA, 19 bp, Homo sapiens
  siRNA target sequence for IGBP1 (NM_001551.1,596-614).
ccttcagaggtggattgat

SEQ ID NO: 298675 - DNA, 19 bp, Homo sapiens
  siRNA target sequence for IGBP1 (NM_001551.1,597-615).
cttcagaggtggattgata

SEQ ID NO: 298676 - DNA, 19 bp, Homo sapiens
  siRNA target sequence for IGBP1 (NM_001551.1,600-618).
cagaggtggattgatatca

SEQ ID NO: 298677 - DNA, 19 bp, Homo sapiens
  siRNA target sequence for IGBP1 (NM_001551.1,608-626).
gattgatatcagcttagaa

SEQ ID NO: 298678 - DNA, 19 bp, Homo sapiens
  siRNA target sequence for IGBP1 (NM_001551.1,682-700).
gagaggcatcaacttctaa

SEQ ID NO: 298679 - DNA, 19 bp, Homo sapiens
  siRNA target sequence for IGBP1 (NM_001551.1,684-702).
gaggcatcaacttctaact

SEQ ID NO: 298680 - DNA, 19 bp, Homo sapiens
  siRNA target sequence for IGBP1 (NM_001551.1,824-842).
gcaacatcggaaatatgga

SEQ ID NO: 298681 - DNA, 19 bp, Homo sapiens
  siRNA target sequence for PPP2R2B (NM_004576.2,541-559).
gatacccgcaaaatcaaca

SEQ ID NO: 298682 - DNA, 19 bp, Homo sapiens
  siRNA target sequence for PPP2R2B (NM_004576.2,624-642).
ccacacgggagaattacta

SEQ ID NO: 298683 - DNA, 19 bp, Homo sapiens
  siRNA target sequence for PPP2R2B (NM_004576.2,657-675).
ggggggtcgggttgtaata

SEQ ID NO: 298684 - DNA, 19 bp, Homo sapiens
  siRNA target sequence for PPP2R2B (NM_004576.2,658-676).
gggggtcgggttgtaatat

SEQ ID NO: 298685 - DNA, 19 bp, Homo sapiens
  siRNA target sequence for PPP2R2B (NM_004576.2,659-677).
ggggtcgggttgtaatatt

SEQ ID NO: 298686 - DNA, 19 bp, Homo sapiens
  siRNA target sequence for PPP2R2B (NM_004576.2,660-678).
gggtcgggttgtaatattt

SEQ ID NO: 298687 - DNA, 19 bp, Homo sapiens
  siRNA target sequence for PPP2R2B (NM_004576.2,662-680).
gtcgggttgtaatatttca

SEQ ID NO: 298688 - DNA, 19 bp, Homo sapiens
  siRNA target sequence for PPP2R2B (NM_004576.2,709-727).
catcgtaggggtgaataca

SEQ ID NO: 298689 - DNA, 19 bp, Homo sapiens
  siRNA target sequence for PPP2R2B (NM_004576.2,713-731).
gtaggggtgaatacaatgt

SEQ ID NO: 298690 - DNA, 19 bp, Homo sapiens
  siRNA target sequence for PPP2R2B (NM_004576.2,751-769).
catgaacccgagttcgatt

SEQ ID NO: 298691 - DNA, 19 bp, Homo sapiens
  siRNA target sequence for PPP2R2B (NM_004576.2,840-858).
ctttcttctgtctactaat

SEQ ID NO: 298692 - DNA, 19 bp, Homo sapiens
  siRNA target sequence for PPP2R2B (NM_004576.2,883-901).
gtcagcgagcgtgataaga

SEQ ID NO: 298693 - DNA, 19 bp, Homo sapiens
  siRNA target sequence for PPP2R2B (NM_004576.2,902-920).
ggccagaaggctacaatct

SEQ ID NO: 298694 - DNA, 19 bp, Homo sapiens
  siRNA target sequence for PPP2R2B (NM_004576.2,904-922).
ccagaaggctacaatctga

SEQ ID NO: 298695 - DNA, 19 bp, Homo sapiens
  siRNA target sequence for PPP2R2B (NM_004576.2,1009-1027).
gccaccccacgaagagtat

SEQ ID NO: 298696 - DNA, 19 bp, Homo sapiens
  siRNA target sequence for PPP2R2B (NM_004576.2,1010-1028).
ccaccccacgaagagtatt

SEQ ID NO: 298697 - DNA, 19 bp, Homo sapiens
  siRNA target sequence for PPP2R2B (NM_004576.2,1011-1029).
caccccacgaagagtattt

SEQ ID NO: 298698 - DNA, 19 bp, Homo sapiens
  siRNA target sequence for PPP2R2B (NM_004576.2,1064-1082).
ctgtcaacagcgactatga

SEQ ID NO: 298699 - DNA, 19 bp, Homo sapiens
  siRNA target sequence for PPP2R2B (NM_004576.2,1102-1120).
gacctgaggattaacctat

SEQ ID NO: 298700 - DNA, 19 bp, Homo sapiens
  siRNA target sequence for PPP2R2B (NM_004576.2,1136-1154).
ccaatcaaagttttaatat

SEQ ID NO: 298701 - DNA, 19 bp, Homo sapiens
  siRNA target sequence for PPP2R2B (NM_004576.2,1305-1323).
gcacaccaaattttttgaa

SEQ ID NO: 298702 - DNA, 19 bp, Homo sapiens
  siRNA target sequence for PPP2R2B (NM_004576.2,1333-1351).
gatccaagcaacagatcat

SEQ ID NO: 298703 - DNA, 19 bp, Homo sapiens
  siRNA target sequence for PPP2R2B (NM_004576.2,1341-1359).
caacagatcatttttctct

SEQ ID NO: 298704 - DNA, 19 bp, Homo sapiens
  siRNA target sequence for PPP2R2B (NM_004576.2,1360-1378).
gaaattatctcttcgattt

SEQ ID NO: 298705 - DNA, 19 bp, Homo sapiens
  siRNA target sequence for PPP2R2B (NM_004576.2,1370-1388).
cttcgatttcggatgtgaa

SEQ ID NO: 298706 - DNA, 19 bp, Homo sapiens
  siRNA target sequence for PPP2R2B (NM_004576.2,1373-1391).
cgatttcggatgtgaagtt

SEQ ID NO: 298707 - DNA, 19 bp, Homo sapiens
  siRNA target sequence for PPP2R2B (NM_004576.2,1394-1412).
gccacagtgggaggtatat

SEQ ID NO: 298708 - DNA, 19 bp, Homo sapiens
  siRNA target sequence for PPP2R2B (NM_004576.2,1396-1414).
cacagtgggaggtatatca

SEQ ID NO: 298709 - DNA, 19 bp, Homo sapiens
  siRNA target sequence for PPP2R2B (NM_004576.2,1509-1527).
gctgtgttccctctatgaa

SEQ ID NO: 298710 - DNA, 19 bp, Homo sapiens
  siRNA target sequence for PPP2R2B (NM_004576.2,1568-1586).
ggtcagacagtgtcatcat

SEQ ID NO: 298711 - DNA, 19 bp, Homo sapiens
  siRNA target sequence for PPP2R2B (NM_004576.2,1785-1803).
gcatccttcagaaaatatt

SEQ ID NO: 298712 - DNA, 19 bp, Homo sapiens
  siRNA target sequence for PPP2R2B (NM_004576.2,1812-1830).
ggcggctacaaataaccta

SEQ ID NO: 298713 - DNA, 19 bp, Homo sapiens
  siRNA target sequence for PPP2R2B (NM_004576.2,1813-1831).
gcggctacaaataacctat

SEQ ID NO: 298714 - DNA, 19 bp, Homo sapiens
  siRNA target sequence for PPP2R2B (NM_004576.2,1814-1832).
cggctacaaataacctata

SEQ ID NO: 298715 - DNA, 19 bp, Homo sapiens
  siRNA target sequence for PPP2R2B (NM_004576.2,1815-1833).
ggctacaaataacctatat

SEQ ID NO: 298716 - DNA, 19 bp, Homo sapiens
  siRNA target sequence for PPP2R2B (NM_181676.1,186-204).
ctcgttacctgccttacat

SEQ ID NO: 298717 - DNA, 19 bp, Homo sapiens
  siRNA target sequence for PPP2R2B (NM_181676.1,212-230).
cctccgaacaccatccttt

SEQ ID NO: 298718 - DNA, 19 bp, Homo sapiens
  siRNA target sequence for PPP2R2B (NM_181676.1,215-233).
ccgaacaccatcctttctt

SEQ ID NO: 298719 - DNA, 19 bp, Homo sapiens
  siRNA target sequence for PPP2R2B (NM_181676.1,242-260).
cacacagaagctgacatta

SEQ ID NO: 298720 - DNA, 19 bp, Homo sapiens
  siRNA target sequence for PPP2R2B (NM_181677.1,276-294).
gaactctgacattatctct

SEQ ID NO: 298721 - DNA, 19 bp, Homo sapiens
  siRNA target sequence for PPP2R2C (NM_020416.2,68-86).
cggacacgcggaaaattaa

SEQ ID NO: 298722 - DNA, 19 bp, Homo sapiens
  siRNA target sequence for PPP2R2C (NM_020416.2,210-228).
gcgggaaccagagagtaaa

SEQ ID NO: 298723 - DNA, 19 bp, Homo sapiens
  siRNA target sequence for PPP2R2C (NM_020416.2,211-229).
cgggaaccagagagtaaaa

SEQ ID NO: 298724 - DNA, 19 bp, Homo sapiens
  siRNA target sequence for PPP2R2C (NM_020416.2,278-296).
gccacgagccggagtttga

SEQ ID NO: 298725 - DNA, 19 bp, Homo sapiens
  siRNA target sequence for PPP2R2C (NM_020416.2,373-391).
ctcctgtccaccaacgata

SEQ ID NO: 298726 - DNA, 19 bp, Homo sapiens
  siRNA target sequence for PPP2R2C (NM_020416.2,375-393).
cctgtccaccaacgataaa

SEQ ID NO: 298727 - DNA, 19 bp, Homo sapiens
  siRNA target sequence for PPP2R2C (NM_020416.2,376-394).
ctgtccaccaacgataaaa

SEQ ID NO: 298728 - DNA, 19 bp, Homo sapiens
  siRNA target sequence for PPP2R2C (NM_020416.2,378-396).
gtccaccaacgataaaact

SEQ ID NO: 298729 - DNA, 19 bp, Homo sapiens
  siRNA target sequence for PPP2R2C (NM_020416.2,380-398).
ccaccaacgataaaactat

SEQ ID NO: 298730 - DNA, 19 bp, Homo sapiens
  siRNA target sequence for PPP2R2C (NM_020416.2,411-429).
gattaccgaacgagataaa

SEQ ID NO: 298731 - DNA, 19 bp, Homo sapiens
  siRNA target sequence for PPP2R2C (NM_020416.2,540-558).
gagccctcggaggatcttt

SEQ ID NO: 298732 - DNA, 19 bp, Homo sapiens
  siRNA target sequence for PPP2R2C (NM_020416.2,604-622).
gactgcgagacctacatgt

SEQ ID NO: 298733 - DNA, 19 bp, Homo sapiens
  siRNA target sequence for PPP2R2C (NM_020416.2,665-683).
ccgacaggagcttcaacat

SEQ ID NO: 298734 - DNA, 19 bp, Homo sapiens
  siRNA target sequence for PPP2R2C (NM_020416.2,866-884).
ccagtaaccgctcattctt

SEQ ID NO: 298735 - DNA, 19 bp, Homo sapiens
  siRNA target sequence for PPP2R2C (NM_020416.2,878-896).
cattcttctcggaaatcat

SEQ ID NO: 298736 - DNA, 19 bp, Homo sapiens
  siRNA target sequence for PPP2R2C (NM_020416.2,902-920).
ccgtgtccgacgtgaagtt

SEQ ID NO: 298737 - DNA, 19 bp, Homo sapiens
  siRNA target sequence for PPP2R2C (NM_020416.2,904-922).
gtgtccgacgtgaagttca

SEQ ID NO: 298738 - DNA, 19 bp, Homo sapiens
  siRNA target sequence for PPP2R2C (NM_020416.2,943-961).
ctcacccgggactacctta

SEQ ID NO: 298739 - DNA, 19 bp, Homo sapiens
  siRNA target sequence for PPP2R2C (NM_020416.2,947-965).
cccgggactaccttacagt

SEQ ID NO: 298740 - DNA, 19 bp, Homo sapiens
  siRNA target sequence for PPP2R2C (NM_020416.2,988-1006).
gaggcaagacccatagaga

SEQ ID NO: 298741 - DNA, 19 bp, Homo sapiens
  siRNA target sequence for PPP2R2C (NM_020416.2,1065-1083).
cattttcgacaagtttgaa

SEQ ID NO: 298742 - DNA, 19 bp, Homo sapiens
  siRNA target sequence for PPP2R2C (NM_020416.2,1315-1333).
cacccggctgagaacatca

SEQ ID NO: 298743 - DNA, 19 bp, Homo sapiens
  siRNA target sequence for PPP2R2C (NM_020416.2,1368-1386).
ccaggacaaggtaaactct

SEQ ID NO: 298744 - DNA, 19 bp, Homo sapiens
  siRNA target sequence for PPP2R5A (NM_006243.2,867-885).
gagcaacactgaatgaact

SEQ ID NO: 298745 - DNA, 19 bp, Homo sapiens
  siRNA target sequence for PPP2R5A (NM_006243.2,881-899).
gaactggttgagtatgttt

SEQ ID NO: 298746 - DNA, 19 bp, Homo sapiens
  siRNA target sequence for PPP2R5A (NM_006243.2,887-905).
gttgagtatgtttcaacta

SEQ ID NO: 298747 - DNA, 19 bp, Homo sapiens
  siRNA target sequence for PPP2R5A (NM_006243.2,892-910).
gtatgtttcaactaatcgt

SEQ ID NO: 298748 - DNA, 19 bp, Homo sapiens
  siRNA target sequence for PPP2R5A (NM_006243.2,903-921).
ctaatcgtggtgtaattgt

SEQ ID NO: 298749 - DNA, 19 bp, Homo sapiens
  siRNA target sequence for PPP2R5A (NM_006243.2,927-945).
cagcgtattctgatatagt

SEQ ID NO: 298750 - DNA, 19 bp, Homo sapiens
  siRNA target sequence for PPP2R5A (NM_006243.2,1033-1051).
ggcctcttggcctcacata

SEQ ID NO: 298751 - DNA, 19 bp, Homo sapiens
  siRNA target sequence for PPP2R5A (NM_006243.2,1044-1062).
ctcacatacagttggtata

SEQ ID NO: 298752 - DNA, 19 bp, Homo sapiens
  siRNA target sequence for PPP2R5A (NM_006243.2,1103-1121).
cctagcattgcaaaacgat

SEQ ID NO: 298753 - DNA, 19 bp, Homo sapiens
  siRNA target sequence for PPP2R5A (NM_006243.2,1113-1131).
caaaacgatacattgatca

SEQ ID NO: 298754 - DNA, 19 bp, Homo sapiens
  siRNA target sequence for PPP2R5A (NM_006243.2,1118-1136).
cgatacattgatcagaaat

SEQ ID NO: 298755 - DNA, 19 bp, Homo sapiens
  siRNA target sequence for PPP2R5A (NM_006243.2,1200-1218).
ctgttctgcaccgaattta

SEQ ID NO: 298756 - DNA, 19 bp, Homo sapiens
  siRNA target sequence for PPP2R5A (NM_006243.2,1210-1228).
ccgaatttatgggaaattt

SEQ ID NO: 298757 - DNA, 19 bp, Homo sapiens
  siRNA target sequence for PPP2R5A (NM_006243.2,1396-1414).
ggttcttattcctatgcat

SEQ ID NO: 298758 - DNA, 19 bp, Homo sapiens
  siRNA target sequence for PPP2R5A (NM_006243.2,1416-1434).
ctgcaaaaggattagcttt

SEQ ID NO: 298759 - DNA, 19 bp, Homo sapiens
  siRNA target sequence for PPP2R5A (NM_006243.2,1447-1465).
gctagcatattgtgttgta

SEQ ID NO: 298760 - DNA, 19 bp, Homo sapiens
  siRNA target sequence for PPP2R5A (NM_006243.2,1595-1613).
gaaccaacacagttcaaaa

SEQ ID NO: 298761 - DNA, 19 bp, Homo sapiens
  siRNA target sequence for PPP2R5A (NM_006243.2,1637-1655).
cagatatccaagtgtgtat

SEQ ID NO: 298762 - DNA, 19 bp, Homo sapiens
  siRNA target sequence for PPP2R5A (NM_006243.2,1676-1694).
gcagaaagggcattgtact

SEQ ID NO: 298763 - DNA, 19 bp, Homo sapiens
  siRNA target sequence for PPP2R5A (NM_006243.2,1686-1704).
cattgtacttctggaataa

SEQ ID NO: 298764 - DNA, 19 bp, Homo sapiens
  siRNA target sequence for PPP2R5A (NM_006243.2,1690-1708).
gtacttctggaataacgaa

SEQ ID NO: 298765 - DNA, 19 bp, Homo sapiens
  siRNA target sequence for PPP2R5A (NM_006243.2,1693-1711).
cttctggaataacgaatat

SEQ ID NO: 298766 - DNA, 19 bp, Homo sapiens
  siRNA target sequence for PPP2R5A (NM_006243.2,1723-1741).
gattgaggagaacattgat

SEQ ID NO: 298767 - DNA, 19 bp, Homo sapiens
  siRNA target sequence for PPP2R5A (NM_006243.2,1729-1747).
ggagaacattgataaaatt

SEQ ID NO: 298768 - DNA, 19 bp, Homo sapiens
  siRNA target sequence for PPP2R5A (NM_006243.2,1792-1810).
ctggaatccgaccattgta

SEQ ID NO: 298769 - DNA, 19 bp, Homo sapiens
  siRNA target sequence for PPP2R5A (NM_006243.2,1803-1821).
ccattgtagcactggtata

SEQ ID NO: 298770 - DNA, 19 bp, Homo sapiens
  siRNA target sequence for PPP2R5A (NM_006243.2,1817-1835).
gtatacaatgtgctgaaaa

SEQ ID NO: 298771 - DNA, 19 bp, Homo sapiens
  siRNA target sequence for PPP2R5A (NM_006243.2,1849-1867).
gaatggcaagcttttcgat

SEQ ID NO: 298772 - DNA, 19 bp, Homo sapiens
  siRNA target sequence for PPP2R5A (NM_006243.2,1859-1877).
cttttcgatgaccttacta

SEQ ID NO: 298773 - DNA, 19 bp, Homo sapiens
  siRNA target sequence for PPP2R5A (NM_006243.2,1992-2010).
cttacaacatgcacagtat

SEQ ID NO: 298774 - DNA, 19 bp, Homo sapiens
  siRNA target sequence for PPP2R5B (NM_006244.2,839-857).
gggtgatgtttgacttctt

SEQ ID NO: 298775 - DNA, 19 bp, Homo sapiens
  siRNA target sequence for PPP2R5B (NM_006244.2,1073-1091).
cacacctgcagctggtata

SEQ ID NO: 298776 - DNA, 19 bp, Homo sapiens
  siRNA target sequence for PPP2R5B (NM_006244.2,1078-1096).
ctgcagctggtatatgagt

SEQ ID NO: 298777 - DNA, 19 bp, Homo sapiens
  siRNA target sequence for PPP2R5B (NM_006244.2,1132-1150).
ccctccgtggccaagagat

SEQ ID NO: 298778 - DNA, 19 bp, Homo sapiens
  siRNA target sequence for PPP2R5B (NM_006244.2,1133-1151).
cctccgtggccaagagata

SEQ ID NO: 298779 - DNA, 19 bp, Homo sapiens
  siRNA target sequence for PPP2R5B (NM_006244.2,1134-1152).
ctccgtggccaagagatat

SEQ ID NO: 298780 - DNA, 19 bp, Homo sapiens
  siRNA target sequence for PPP2R5B (NM_006244.2,1299-1317).
cttcctccggttcatctat

SEQ ID NO: 298781 - DNA, 19 bp, Homo sapiens
  siRNA target sequence for PPP2R5B (NM_006244.2,1302-1320).
cctccggttcatctatgaa

SEQ ID NO: 298782 - DNA, 19 bp, Homo sapiens
  siRNA target sequence for PPP2R5B (NM_006244.2,1303-1321).
ctccggttcatctatgaat

SEQ ID NO: 298783 - DNA, 19 bp, Homo sapiens
  siRNA target sequence for PPP2R5B (NM_006244.2,1307-1325).
ggttcatctatgaattcga

SEQ ID NO: 298784 - DNA, 19 bp, Homo sapiens
  siRNA target sequence for PPP2R5B (NM_006244.2,1624-1642).
gagccctcccagtttgtga

SEQ ID NO: 298785 - DNA, 19 bp, Homo sapiens
  siRNA target sequence for PPP2R5B (NM_006244.2,1666-1684).
caggtggctcgctgtgttt

SEQ ID NO: 298786 - DNA, 19 bp, Homo sapiens
  siRNA target sequence for PPP2R5B (NM_006244.2,1836-1854).
cgtatcactgatctacaat

SEQ ID NO: 298787 - DNA, 19 bp, Homo sapiens
  siRNA target sequence for PPP2R5B (NM_006244.2,1948-1966).
caggagcgtcaggagttat

SEQ ID NO: 298788 - DNA, 19 bp, Homo sapiens
  siRNA target sequence for PPP2R5C (NM_002719.2,180-198).
cgtggtccttctccatatt

SEQ ID NO: 298789 - DNA, 19 bp, Homo sapiens
  siRNA target sequence for PPP2R5C (NM_002719.2,1226-1244).
ccttgtaccgcaactcaaa

SEQ ID NO: 298790 - DNA, 19 bp, Homo sapiens
  siRNA target sequence for PPP2R5C (NM_002719.2,1262-1280).
caatacatggcttgatata

SEQ ID NO: 298791 - DNA, 19 bp, Homo sapiens
  siRNA target sequence for PPP2R5C (NM_002719.2,1329-1347).
ctgtacacaacagttcaaa

SEQ ID NO: 298792 - DNA, 19 bp, Homo sapiens
  siRNA target sequence for PPP2R5C (NM_002719.2,1341-1359).
gttcaaagcagagaaacta

SEQ ID NO: 298793 - DNA, 19 bp, Homo sapiens
  siRNA target sequence for PPP2R5C (NM_002719.2,1429-1447).
ccccagtacacagtgtata

SEQ ID NO: 298794 - DNA, 19 bp, Homo sapiens
  siRNA target sequence for PPP2R5C (NM_002719.2,1483-1501).
gagacagatgggcctttat

SEQ ID NO: 298795 - DNA, 19 bp, Homo sapiens
  siRNA target sequence for PPP2R5C (NM_002719.2,1485-1503).
gacagatgggcctttattt

SEQ ID NO: 298796 - DNA, 19 bp, Homo sapiens
  siRNA target sequence for PPP2R5C (NM_002719.2,1487-1505).
cagatgggcctttatttga

SEQ ID NO: 298797 - DNA, 19 bp, Homo sapiens
  siRNA target sequence for PPP2R5C (NM_002719.2,1542-1560).
ggctcatcaggcacagaaa

SEQ ID NO: 298798 - DNA, 19 bp, Homo sapiens
  siRNA target sequence for PPP2R5C (NM_002719.2,1544-1562).
ctcatcaggcacagaaaga

SEQ ID NO: 298799 - DNA, 19 bp, Homo sapiens
  siRNA target sequence for PPP2R5C (NM_178587.1,1424-1442).
ccaatccccaggtactaaa

SEQ ID NO: 298800 - DNA, 19 bp, Homo sapiens
  siRNA target sequence for PPP2R5C (NM_178587.1,1429-1447).
ccccaggtactaaaaaaga

SEQ ID NO: 298801 - DNA, 19 bp, Homo sapiens
  siRNA target sequence for PPP2R5D (NM_006245.2,120-138).
cccaaggttgccaaatgca

SEQ ID NO: 298802 - DNA, 19 bp, Homo sapiens
  siRNA target sequence for PPP2R5D (NM_006245.2,492-510).
ctcagtgacctcaaattca

SEQ ID NO: 298803 - DNA, 19 bp, Homo sapiens
  siRNA target sequence for PPP2R5D (NM_006245.2,554-572).
cacccatagccgtgatgtt

SEQ ID NO: 298804 - DNA, 19 bp, Homo sapiens
  siRNA target sequence for PPP2R5D (NM_006245.2,556-574).
cccatagccgtgatgttgt

SEQ ID NO: 298805 - DNA, 19 bp, Homo sapiens
  siRNA target sequence for PPP2R5D (NM_006245.2,632-650).
gctgccaccttcatcgaat

SEQ ID NO: 298806 - DNA, 19 bp, Homo sapiens
  siRNA target sequence for PPP2R5D (NM_006245.2,714-732).
ctccagctcgtgtatgagt

SEQ ID NO: 298807 - DNA, 19 bp, Homo sapiens
  siRNA target sequence for PPP2R5D (NM_006245.2,720-738).
ctcgtgtatgagttcttct

SEQ ID NO: 298808 - DNA, 19 bp, Homo sapiens
  siRNA target sequence for PPP2R5D (NM_006245.2,722-740).
cgtgtatgagttcttctta

SEQ ID NO: 298809 - DNA, 19 bp, Homo sapiens
  siRNA target sequence for PPP2R5D (NM_006245.2,811-829).
ctctcctagacctatttga

SEQ ID NO: 298810 - DNA, 19 bp, Homo sapiens
  siRNA target sequence for PPP2R5D (NM_006245.2,813-831).
ctcctagacctatttgaca

SEQ ID NO: 298811 - DNA, 19 bp, Homo sapiens
  siRNA target sequence for PPP2R5D (NM_006245.2,866-884).
cattttgcatcgcatctat

SEQ ID NO: 298812 - DNA, 19 bp, Homo sapiens
  siRNA target sequence for PPP2R5D (NM_006245.2,876-894).
cgcatctatggcaagtttt

SEQ ID NO: 298813 - DNA, 19 bp, Homo sapiens
  siRNA target sequence for PPP2R5D (NM_006245.2,1016-1034).
ctttgccctgccccttaaa

SEQ ID NO: 298814 - DNA, 19 bp, Homo sapiens
  siRNA target sequence for PPP2R5D (NM_006245.2,1173-1191).
gtgggacttctcaagtttt

SEQ ID NO: 298815 - DNA, 19 bp, Homo sapiens
  siRNA target sequence for PPP2R5D (NM_006245.2,1382-1400).
gagcctgataagtgacaat

SEQ ID NO: 298816 - DNA, 19 bp, Homo sapiens
  siRNA target sequence for PPP2R5D (NM_006245.2,1407-1425).
cgagtcctccccatcatgt

SEQ ID NO: 298817 - DNA, 19 bp, Homo sapiens
  siRNA target sequence for PPP2R5D (NM_006245.2,1468-1486).
caatccatggactgatcta

SEQ ID NO: 298818 - DNA, 19 bp, Homo sapiens
  siRNA target sequence for PPP2R5D (NM_006245.2,1472-1490).
ccatggactgatctataat

SEQ ID NO: 298819 - DNA, 19 bp, Homo sapiens
  siRNA target sequence for PPP2R5D (NM_006245.2,1493-1511).
cctgaagttgtttatggaa

SEQ ID NO: 298820 - DNA, 19 bp, Homo sapiens
  siRNA target sequence for PPP2R5D (NM_006245.2,1572-1590).
cggttccgaatgaaggaaa

SEQ ID NO: 298821 - DNA, 19 bp, Homo sapiens
  siRNA target sequence for PPP2R5D (NM_006245.2,1752-1770).
gttcagatgctaaaagaca

SEQ ID NO: 298822 - DNA, 19 bp, Homo sapiens
  siRNA target sequence for PPP2R5E (NM_006246.2,624-642).
gataaagtagacggatttt

SEQ ID NO: 298823 - DNA, 19 bp, Homo sapiens
  siRNA target sequence for PPP2R5E (NM_006246.2,643-661).
ctcggaagtccgtcagaaa

SEQ ID NO: 298824 - DNA, 19 bp, Homo sapiens
  siRNA target sequence for PPP2R5E (NM_006246.2,669-687).
cagaagaggtcgcaaagtt

SEQ ID NO: 298825 - DNA, 19 bp, Homo sapiens
  siRNA target sequence for PPP2R5E (NM_006246.2,680-698).
gcaaagttcctcacagttt

SEQ ID NO: 298826 - DNA, 19 bp, Homo sapiens
  siRNA target sequence for PPP2R5E (NM_006246.2,703-721).
ctcaaggcaagcctattga

SEQ ID NO: 298827 - DNA, 19 bp, Homo sapiens
  siRNA target sequence for PPP2R5E (NM_006246.2,705-723).
caaggcaagcctattgagt

SEQ ID NO: 298828 - DNA, 19 bp, Homo sapiens
  siRNA target sequence for PPP2R5E (NM_006246.2,708-726).
ggcaagcctattgagttaa

SEQ ID NO: 298829 - DNA, 19 bp, Homo sapiens
  siRNA target sequence for PPP2R5E (NM_006246.2,710-728).
caagcctattgagttaaca

SEQ ID NO: 298830 - DNA, 19 bp, Homo sapiens
  siRNA target sequence for PPP2R5E (NM_006246.2,765-783).
cagcctgaactgttcctaa

SEQ ID NO: 298831 - DNA, 19 bp, Homo sapiens
  siRNA target sequence for PPP2R5E (NM_006246.2,769-787).
ctgaactgttcctaaagaa

SEQ ID NO: 298832 - DNA, 19 bp, Homo sapiens
  siRNA target sequence for PPP2R5E (NM_006246.2,818-836).
catggacacgctatctgat

SEQ ID NO: 298833 - DNA, 19 bp, Homo sapiens
  siRNA target sequence for PPP2R5E (NM_006246.2,821-839).
ggacacgctatctgatctt

SEQ ID NO: 298834 - DNA, 19 bp, Homo sapiens
  siRNA target sequence for PPP2R5E (NM_006246.2,822-840).
gacacgctatctgatctta

SEQ ID NO: 298835 - DNA, 19 bp, Homo sapiens
  siRNA target sequence for PPP2R5E (NM_006246.2,824-842).
cacgctatctgatcttaaa

SEQ ID NO: 298836 - DNA, 19 bp, Homo sapiens
  siRNA target sequence for PPP2R5E (NM_006246.2,857-875).
gcgctccactcttaatgaa

SEQ ID NO: 298837 - DNA, 19 bp, Homo sapiens
  siRNA target sequence for PPP2R5E (NM_006246.2,859-877).
gctccactcttaatgaact

SEQ ID NO: 298838 - DNA, 19 bp, Homo sapiens
  siRNA target sequence for PPP2R5E (NM_006246.2,878-896).
ggtggactacattacaata

SEQ ID NO: 298839 - DNA, 19 bp, Homo sapiens
  siRNA target sequence for PPP2R5E (NM_006246.2,879-897).
gtggactacattacaataa

SEQ ID NO: 298840 - DNA, 19 bp, Homo sapiens
  siRNA target sequence for PPP2R5E (NM_006246.2,907-925).
gtttgacagagcagactta

SEQ ID NO: 298841 - DNA, 19 bp, Homo sapiens
  siRNA target sequence for PPP2R5E (NM_006246.2,933-951).
gtagttagaatggtatctt

SEQ ID NO: 298842 - DNA, 19 bp, Homo sapiens
  siRNA target sequence for PPP2R5E (NM_006246.2,945-963).
gtatcttgcaatatattca

SEQ ID NO: 298843 - DNA, 19 bp, Homo sapiens
  siRNA target sequence for PPP2R5E (NM_006246.2,1025-1043).
ggcatcgtggccacactta

SEQ ID NO: 298844 - DNA, 19 bp, Homo sapiens
  siRNA target sequence for PPP2R5E (NM_006246.2,1027-1045).
catcgtggccacacttaca

SEQ ID NO: 298845 - DNA, 19 bp, Homo sapiens
  siRNA target sequence for PPP2R5E (NM_006246.2,1036-1054).
cacacttacagcttgtata

SEQ ID NO: 298846 - DNA, 19 bp, Homo sapiens
  siRNA target sequence for PPP2R5E (NM_006246.2,1099-1117).
gcattgccaaaaaatatat

SEQ ID NO: 298847 - DNA, 19 bp, Homo sapiens
  siRNA target sequence for PPP2R5E (NM_006246.2,1177-1195).
gggactacttaaaaacagt

SEQ ID NO: 298848 - DNA, 19 bp, Homo sapiens
  siRNA target sequence for PPP2R5E (NM_006246.2,1202-1220).
cagaatttatggcaagttt

SEQ ID NO: 298849 - DNA, 19 bp, Homo sapiens
  siRNA target sequence for PPP2R5E (NM_006246.2,1241-1259).
ccgaaaacagattaacaat

SEQ ID NO: 298850 - DNA, 19 bp, Homo sapiens
  siRNA target sequence for PPP2R5E (NM_006246.2,1242-1260).
cgaaaacagattaacaata

SEQ ID NO: 298851 - DNA, 19 bp, Homo sapiens
  siRNA target sequence for PPP2R5E (NM_006246.2,1266-1284).
ctaaggtttgtttatgaaa

SEQ ID NO: 298852 - DNA, 19 bp, Homo sapiens
  siRNA target sequence for PPP2R5E (NM_006246.2,1389-1407).
gtattgatccctttacaca

SEQ ID NO: 298853 - DNA, 19 bp, Homo sapiens
  siRNA target sequence for PPP2R5E (NM_006246.2,1404-1422).
cacactgtcaggagcttat

SEQ ID NO: 298854 - DNA, 19 bp, Homo sapiens
  siRNA target sequence for PPP2R5E (NM_006246.2,1439-1457).
gctggcatattgtatagta

SEQ ID NO: 298855 - DNA, 19 bp, Homo sapiens
  siRNA target sequence for PPP2R5E (NM_006246.2,1480-1498).
cactcacagaaccagttat

SEQ ID NO: 298856 - DNA, 19 bp, Homo sapiens
  siRNA target sequence for PPP2R5E (NM_006246.2,1522-1540).
ctaaaacatgtagtcaaaa

SEQ ID NO: 298857 - DNA, 19 bp, Homo sapiens
  siRNA target sequence for PPP2R5E (NM_006246.2,1943-1961).
ggatctggagttaaagaga

SEQ ID NO: 298858 - DNA, 19 bp, Homo sapiens
  siRNA target sequence for PPP1R7 (NM_002712.1,75-93).
gcgggtcgagtctgaagaa

SEQ ID NO: 298859 - DNA, 19 bp, Homo sapiens
  siRNA target sequence for PPP1R7 (NM_002712.1,76-94).
cgggtcgagtctgaagaat

SEQ ID NO: 298860 - DNA, 19 bp, Homo sapiens
  siRNA target sequence for PPP1R7 (NM_002712.1,270-288).
ctatcgcatagggaagatt

SEQ ID NO: 298861 - DNA, 19 bp, Homo sapiens
  siRNA target sequence for PPP1R7 (NM_002712.1,326-344).
gcctccgccaaaatttaat

SEQ ID NO: 298862 - DNA, 19 bp, Homo sapiens
  siRNA target sequence for PPP1R7 (NM_002712.1,379-397).
cttcgagagctggatcttt

SEQ ID NO: 298863 - DNA, 19 bp, Homo sapiens
  siRNA target sequence for PPP1R7 (NM_002712.1,383-401).
gagagctggatctttacga

SEQ ID NO: 298864 - DNA, 19 bp, Homo sapiens
  siRNA target sequence for PPP1R7 (NM_002712.1,442-460).
gagctggagattctagata

SEQ ID NO: 298865 - DNA, 19 bp, Homo sapiens
  siRNA target sequence for PPP1R7 (NM_002712.1,487-505).
gaaggggttgacaagttga

SEQ ID NO: 298866 - DNA, 19 bp, Homo sapiens
  siRNA target sequence for PPP1R7 (NM_002712.1,498-516).
caagttgacacgactgaaa

SEQ ID NO: 298867 - DNA, 19 bp, Homo sapiens
  siRNA target sequence for PPP1R7 (NM_002712.1,506-524).
cacgactgaaaaaactctt

SEQ ID NO: 298868 - DNA, 19 bp, Homo sapiens
  siRNA target sequence for PPP1R7 (NM_002712.1,528-546).
ggtcaacaataaaatcagt

SEQ ID NO: 298869 - DNA, 19 bp, Homo sapiens
  siRNA target sequence for PPP1R7 (NM_002712.1,603-621).
ccgcatccgggcaatcgaa

SEQ ID NO: 298870 - DNA, 19 bp, Homo sapiens
  siRNA target sequence for PPP1R7 (NM_002712.1,604-622).
cgcatccgggcaatcgaaa

SEQ ID NO: 298871 - DNA, 19 bp, Homo sapiens
  siRNA target sequence for PPP1R7 (NM_002712.1,605-623).
gcatccgggcaatcgaaaa

SEQ ID NO: 298872 - DNA, 19 bp, Homo sapiens
  siRNA target sequence for PPP1R7 (NM_002712.1,606-624).
catccgggcaatcgaaaat

SEQ ID NO: 298873 - DNA, 19 bp, Homo sapiens
  siRNA target sequence for PPP1R7 (NM_002712.1,611-629).
gggcaatcgaaaatatcga

SEQ ID NO: 298874 - DNA, 19 bp, Homo sapiens
  siRNA target sequence for PPP1R7 (NM_002712.1,619-637).
gaaaatatcgacaccttaa

SEQ ID NO: 298875 - DNA, 19 bp, Homo sapiens
  siRNA target sequence for PPP1R7 (NM_002712.1,821-839).
gcctggagaacaataacaa

SEQ ID NO: 298876 - DNA, 19 bp, Homo sapiens
  siRNA target sequence for PPP1R7 (NM_002712.1,822-840).
cctggagaacaataacaaa

SEQ ID NO: 298877 - DNA, 19 bp, Homo sapiens
  siRNA target sequence for PPP1R7 (NM_002712.1,852-870).
ggacattgcatcaaataga

SEQ ID NO: 298878 - DNA, 19 bp, Homo sapiens
  siRNA target sequence for PPP4R1 (NM_005134.1,205-223).
gctgcaagtgagaacatat

SEQ ID NO: 298879 - DNA, 19 bp, Homo sapiens
  siRNA target sequence for PPP4R1 (NM_005134.1,208-226).
gcaagtgagaacatattta

SEQ ID NO: 298880 - DNA, 19 bp, Homo sapiens
  siRNA target sequence for PPP4R1 (NM_005134.1,245-263).
ggagtttgctcgatacctt

SEQ ID NO: 298881 - DNA, 19 bp, Homo sapiens
  siRNA target sequence for PPP4R1 (NM_005134.1,268-286).
gaagtctgcgatgatgaaa

SEQ ID NO: 298882 - DNA, 19 bp, Homo sapiens
  siRNA target sequence for PPP4R1 (NM_005134.1,318-336).
cagattggccgatgattca

SEQ ID NO: 298883 - DNA, 19 bp, Homo sapiens
  siRNA target sequence for PPP4R1 (NM_005134.1,320-338).
gattggccgatgattcaga

SEQ ID NO: 298884 - DNA, 19 bp, Homo sapiens
  siRNA target sequence for PPP4R1 (NM_005134.1,378-396).
catcgcactgttttgtcaa

SEQ ID NO: 298885 - DNA, 19 bp, Homo sapiens
  siRNA target sequence for PPP4R1 (NM_005134.1,381-399).
cgcactgttttgtcaagaa

SEQ ID NO: 298886 - DNA, 19 bp, Homo sapiens
  siRNA target sequence for PPP4R1 (NM_005134.1,406-424).
ccttcaataccatatgctt

SEQ ID NO: 298887 - DNA, 19 bp, Homo sapiens
  siRNA target sequence for PPP4R1 (NM_005134.1,407-425).
cttcaataccatatgcttt

SEQ ID NO: 298888 - DNA, 19 bp, Homo sapiens
  siRNA target sequence for PPP4R1 (NM_005134.1,525-543).
ggagctcattgaacgattt

SEQ ID NO: 298889 - DNA, 19 bp, Homo sapiens
  siRNA target sequence for PPP4R1 (NM_005134.1,528-546).
gctcattgaacgatttgat

SEQ ID NO: 298890 - DNA, 19 bp, Homo sapiens
  siRNA target sequence for PPP4R1 (NM_005134.1,648-666).
catggttgggaaggatatt

SEQ ID NO: 298891 - DNA, 19 bp, Homo sapiens
  siRNA target sequence for PPP4R1 (NM_005134.1,707-725).
gcgattgcagaatgtttca

SEQ ID NO: 298892 - DNA, 19 bp, Homo sapiens
  siRNA target sequence for PPP4R1 (NM_005134.1,867-885).
cttcatggcggtttcatgt

SEQ ID NO: 298893 - DNA, 19 bp, Homo sapiens
  siRNA target sequence for PPP4R1 (NM_005134.1,876-894).
ggtttcatgtgcaacatgt

SEQ ID NO: 298894 - DNA, 19 bp, Homo sapiens
  siRNA target sequence for PPP4R1 (NM_005134.1,898-916).
gaaatccgacggaccaaat

SEQ ID NO: 298895 - DNA, 19 bp, Homo sapiens
  siRNA target sequence for PPP4R1 (NM_005134.1,911-929).
ccaaattatcagcactttt

SEQ ID NO: 298896 - DNA, 19 bp, Homo sapiens
  siRNA target sequence for PPP4R1 (NM_005134.1,987-1005).
gggacctttcatatctact

SEQ ID NO: 298897 - DNA, 19 bp, Homo sapiens
  siRNA target sequence for PPP4R1 (NM_005134.1,988-1006).
ggacctttcatatctactt

SEQ ID NO: 298898 - DNA, 19 bp, Homo sapiens
  siRNA target sequence for PPP4R1 (NM_005134.1,1022-1040).
gctcaggccagtattttaa

SEQ ID NO: 298899 - DNA, 19 bp, Homo sapiens
  siRNA target sequence for PPP4R1 (NM_005134.1,1023-1041).
ctcaggccagtattttaaa

SEQ ID NO: 298900 - DNA, 19 bp, Homo sapiens
  siRNA target sequence for PPP4R1 (NM_005134.1,1049-1067).
gcaaaagttcagaagagat

SEQ ID NO: 298901 - DNA, 19 bp, Homo sapiens
  siRNA target sequence for PPP4R1 (NM_005134.1,1065-1083).
gatgtcagtagaaaacaaa

SEQ ID NO: 298902 - DNA, 19 bp, Homo sapiens
  siRNA target sequence for PPP4R1 (NM_005134.1,1221-1239).
gcctctaggtgaaattagt

SEQ ID NO: 298903 - DNA, 19 bp, Homo sapiens
  siRNA target sequence for PPP4R1 (NM_005134.1,1291-1309).
gaagcagctagtaatgaga

SEQ ID NO: 298904 - DNA, 19 bp, Homo sapiens
  siRNA target sequence for PPP4R1 (NM_005134.1,1297-1315).
gctagtaatgagaatgata

SEQ ID NO: 298905 - DNA, 19 bp, Homo sapiens
  siRNA target sequence for PPP4R1 (NM_005134.1,1298-1316).
ctagtaatgagaatgataa

SEQ ID NO: 298906 - DNA, 19 bp, Homo sapiens
  siRNA target sequence for PPP4R1 (NM_005134.1,1322-1340).
ctggtaactacaaatctat

SEQ ID NO: 298907 - DNA, 19 bp, Homo sapiens
  siRNA target sequence for PPP4R1 (NM_005134.1,1353-1371).
ggttggcaccacttcacaa

SEQ ID NO: 298908 - DNA, 19 bp, Homo sapiens
  siRNA target sequence for PPP4R1 (NM_005134.1,1357-1375).
ggcaccacttcacaagatt

SEQ ID NO: 298909 - DNA, 19 bp, Homo sapiens
  siRNA target sequence for PPP4R1 (NM_005134.1,1379-1397).
ctctcttagatcaggaatt

SEQ ID NO: 298910 - DNA, 19 bp, Homo sapiens
  siRNA target sequence for PPP4R1 (NM_005134.1,1387-1405).
gatcaggaattgtataact

SEQ ID NO: 298911 - DNA, 19 bp, Homo sapiens
  siRNA target sequence for PPP4R1 (NM_005134.1,1433-1451).
ctgaaatagatctagacat

SEQ ID NO: 298912 - DNA, 19 bp, Homo sapiens
  siRNA target sequence for PPP4R1 (NM_005134.1,1666-1684).
catgaagagaccatcagta

SEQ ID NO: 298913 - DNA, 19 bp, Homo sapiens
  siRNA target sequence for PPP4R1 (NM_005134.1,1694-1712).
gaagtgatttgcaagatga

SEQ ID NO: 298914 - DNA, 19 bp, Homo sapiens
  siRNA target sequence for PPP4R1 (NM_005134.1,1794-1812).
ggactccactcttcactat

SEQ ID NO: 298915 - DNA, 19 bp, Homo sapiens
  siRNA target sequence for PPP4R1 (NM_005134.1,1795-1813).
gactccactcttcactata

SEQ ID NO: 298916 - DNA, 19 bp, Homo sapiens
  siRNA target sequence for PPP4R1 (NM_005134.1,1833-1851).
gagcaacaatagcagtttt

SEQ ID NO: 298917 - DNA, 19 bp, Homo sapiens
  siRNA target sequence for PPP4R1 (NM_005134.1,1863-1881).
ggaaaggagaactaaagta

SEQ ID NO: 298918 - DNA, 19 bp, Homo sapiens
  siRNA target sequence for PPP4R1 (NM_005134.1,1895-1913).
ctcaggcgttgttagatca

SEQ ID NO: 298919 - DNA, 19 bp, Homo sapiens
  siRNA target sequence for PPP4R1 (NM_005134.1,1899-1917).
ggcgttgttagatcagtat

SEQ ID NO: 298920 - DNA, 19 bp, Homo sapiens
  siRNA target sequence for PPP4R1 (NM_005134.1,1900-1918).
gcgttgttagatcagtatt

SEQ ID NO: 298921 - DNA, 19 bp, Homo sapiens
  siRNA target sequence for PPP4R1 (NM_005134.1,1909-1927).
gatcagtatttatctatga

SEQ ID NO: 298922 - DNA, 19 bp, Homo sapiens
  siRNA target sequence for PPP4R1 (NM_005134.1,1945-1963).
cagacggttgacactgaaa

SEQ ID NO: 298923 - DNA, 19 bp, Homo sapiens
  siRNA target sequence for PPP4R1 (NM_005134.1,1947-1965).
gacggttgacactgaaatt

SEQ ID NO: 298924 - DNA, 19 bp, Homo sapiens
  siRNA target sequence for PPP4R1 (NM_005134.1,2004-2022).
gacactcggaagacagaat

SEQ ID NO: 298925 - DNA, 19 bp, Homo sapiens
  siRNA target sequence for PPP4R1 (NM_005134.1,2073-2091).
gaaagttcgacgaactcta

SEQ ID NO: 298926 - DNA, 19 bp, Homo sapiens
  siRNA target sequence for PPP4R1 (NM_005134.1,2103-2121).
ccacgagcttgcagttatt

SEQ ID NO: 298927 - DNA, 19 bp, Homo sapiens
  siRNA target sequence for PPP4R1 (NM_005134.1,2116-2134).
gttattcttggagatcaat

SEQ ID NO: 298928 - DNA, 19 bp, Homo sapiens
  siRNA target sequence for PPP4R1 (NM_005134.1,2151-2169).
ggttccaatttttaatgga

SEQ ID NO: 298929 - DNA, 19 bp, Homo sapiens
  siRNA target sequence for PPP4R1 (NM_005134.1,2193-2211).
caggataggtgttcttaaa

SEQ ID NO: 298930 - DNA, 19 bp, Homo sapiens
  siRNA target sequence for PPP4R1 (NM_005134.1,2195-2213).
ggataggtgttcttaaaca

SEQ ID NO: 298931 - DNA, 19 bp, Homo sapiens
  siRNA target sequence for PPP4R1 (NM_005134.1,2233-2251).
cttcttcatattgacaaaa

SEQ ID NO: 298932 - DNA, 19 bp, Homo sapiens
  siRNA target sequence for PPP4R1 (NM_005134.1,2286-2304).
ggtgacagataatagtaga

SEQ ID NO: 298933 - DNA, 19 bp, Homo sapiens
  siRNA target sequence for PPP4R1 (NM_005134.1,2330-2348).
ctgaacagctgattttact

SEQ ID NO: 298934 - DNA, 19 bp, Homo sapiens
  siRNA target sequence for PPP4R1 (NM_005134.1,2429-2447).
ctgttcgttggatttccta

SEQ ID NO: 298935 - DNA, 19 bp, Homo sapiens
  siRNA target sequence for PPP4R1 (NM_005134.1,2560-2578).
ggtcggcaagcctttgtct

SEQ ID NO: 298936 - DNA, 19 bp, Homo sapiens
  siRNA target sequence for PPP4R1 (NM_005134.1,2561-2579).
gtcggcaagcctttgtctt

SEQ ID NO: 298937 - DNA, 19 bp, Homo sapiens
  siRNA target sequence for PPP4R1 (NM_005134.1,2643-2661).
gccgcatctgctaacctta

SEQ ID NO: 298938 - DNA, 19 bp, Homo sapiens
  siRNA target sequence for PPP4R1 (NM_005134.1,2647-2665).
catctgctaaccttagcaa

SEQ ID NO: 298939 - DNA, 19 bp, Homo sapiens
  siRNA target sequence for PPP4R1 (NM_005134.1,2653-2671).
ctaaccttagcaaatgaca

SEQ ID NO: 298940 - DNA, 19 bp, Homo sapiens
  siRNA target sequence for PPP4R1 (NM_005134.1,2694-2712).
gcttgcaaagacattaaga

SEQ ID NO: 298941 - DNA, 19 bp, Homo sapiens
  siRNA target sequence for PPP4R1 (NM_005134.1,2780-2798).
ccatcatggctcttcagat

SEQ ID NO: 298942 - DNA, 19 bp, Homo sapiens
  siRNA target sequence for PPP4R1 (NM_005134.1,2804-2822).
gtgacagcgatgtcaagta

SEQ ID NO: 298943 - DNA, 19 bp, Homo sapiens
  siRNA target sequence for PPP4R1 (NM_005134.1,2806-2824).
gacagcgatgtcaagtatt

SEQ ID NO: 298944 - DNA, 19 bp, Homo sapiens
  siRNA target sequence for PPP4R1 (NM_005134.1,2808-2826).
cagcgatgtcaagtatttt

SEQ ID NO: 298945 - DNA, 19 bp, Homo sapiens
  siRNA target sequence for PPP4R1 (NM_005134.1,2811-2829).
cgatgtcaagtattttgca

SEQ ID NO: 298946 - DNA, 19 bp, Homo sapiens
  siRNA target sequence for PPP4R1 (NM_005134.1,2835-2853).
ccaccctgccagtaccaaa

SEQ ID NO: 298947 - DNA, 19 bp, Homo sapiens
  siRNA target sequence for PPP4R1 (NM_005134.1,2836-2854).
caccctgccagtaccaaaa

SEQ ID NO: 298948 - DNA, 19 bp, Homo sapiens
  siRNA target sequence for PPP4R1 (NM_005134.1,2839-2857).
cctgccagtaccaaaatct

SEQ ID NO: 298949 - DNA, 19 bp, Homo sapiens
  siRNA target sequence for CAPON (NM_014697.1,391-409).
cctagcaaaaccaagtaca

SEQ ID NO: 298950 - DNA, 19 bp, Homo sapiens
  siRNA target sequence for CAPON (NM_014697.1,555-573).
ccggatacggtatgagttt

SEQ ID NO: 298951 - DNA, 19 bp, Homo sapiens
  siRNA target sequence for CAPON (NM_014697.1,556-574).
cggatacggtatgagttta

SEQ ID NO: 298952 - DNA, 19 bp, Homo sapiens
  siRNA target sequence for CAPON (NM_014697.1,557-575).
ggatacggtatgagtttaa

SEQ ID NO: 298953 - DNA, 19 bp, Homo sapiens
  siRNA target sequence for CAPON (NM_014697.1,617-635).
cagtggatggagtgaaagt

SEQ ID NO: 298954 - DNA, 19 bp, Homo sapiens
  siRNA target sequence for CAPON (NM_014697.1,735-753).
cttctatgtctctcatgat

SEQ ID NO: 298955 - DNA, 19 bp, Homo sapiens
  siRNA target sequence for CAPON (NM_014697.1,788-806).
gagatggtgccagcaatat

SEQ ID NO: 298956 - DNA, 19 bp, Homo sapiens
  siRNA target sequence for CAPON (NM_014697.1,790-808).
gatggtgccagcaatatct

SEQ ID NO: 298957 - DNA, 19 bp, Homo sapiens
  siRNA target sequence for CAPON (NM_014697.1,843-861).
ccaagctatgagaatcgtt

SEQ ID NO: 298958 - DNA, 19 bp, Homo sapiens
  siRNA target sequence for CAPON (NM_014697.1,1056-1074).
cccacttccagggaatgat

SEQ ID NO: 298959 - DNA, 19 bp, Homo sapiens
  siRNA target sequence for CAPON (NM_014697.1,1089-1107).
ccgaggtgtgactgatcta

SEQ ID NO: 298960 - DNA, 19 bp, Homo sapiens
  siRNA target sequence for CAPON (NM_014697.1,1385-1403).
ctcgcgtgcatcagctttt

SEQ ID NO: 298961 - DNA, 19 bp, Homo sapiens
  siRNA target sequence for CAPON (NM_014697.1,1388-1406).
gcgtgcatcagcttttgct

SEQ ID NO: 298962 - DNA, 19 bp, Homo sapiens
  siRNA target sequence for CAPON (NM_014697.1,1736-1754).
gcggtctggagctcatcaa

SEQ ID NO: 298963 - DNA, 19 bp, Homo sapiens
  siRNA target sequence for CAPON (NM_014697.1,1738-1756).
ggtctggagctcatcaagt

SEQ ID NO: 298964 - DNA, 19 bp, Homo sapiens
  siRNA target sequence for CAPON (NM_014697.1,1739-1757).
gtctggagctcatcaagtt

SEQ ID NO: 298965 - DNA, 19 bp, Homo sapiens
  siRNA target sequence for CAPON (NM_014697.1,1877-1895).
gcgacggcctggatgatga

SEQ ID NO: 298966 - DNA, 19 bp, Homo sapiens
  siRNA target sequence for SLN (NM_003063.1,185-203).
gggagctgtttctcaactt

SEQ ID NO: 298967 - DNA, 19 bp, Homo sapiens
  siRNA target sequence for SLN (NM_003063.1,190-208).
ctgtttctcaacttcacta

SEQ ID NO: 298968 - DNA, 19 bp, Homo sapiens
  siRNA target sequence for SLN (NM_003063.1,201-219).
cttcactattgtcttgatt

SEQ ID NO: 298969 - DNA, 19 bp, Homo sapiens
  siRNA target sequence for DCPS (NM_014026.3,335-353).
ggacgcagctcctcaacta

SEQ ID NO: 298970 - DNA, 19 bp, Homo sapiens
  siRNA target sequence for DCPS (NM_014026.3,784-802).
gagagacgggagatgacta

SEQ ID NO: 298971 - DNA, 19 bp, Homo sapiens
  siRNA target sequence for DCPS (NM_014026.3,795-813).
gatgactacaggaatatta

SEQ ID NO: 298972 - DNA, 19 bp, Homo sapiens
  siRNA target sequence for DCPS (NM_014026.3,800-818).
ctacaggaatattacttta

SEQ ID NO: 298973 - DNA, 19 bp, Homo sapiens
  siRNA target sequence for DCPS (NM_014026.3,844-862).
gcatccagtgggtgtataa

SEQ ID NO: 298974 - DNA, 19 bp, Homo sapiens
  siRNA target sequence for DCPS (NM_014026.3,882-900).
gaagcggaccggattgttt

SEQ ID NO: 298975 - DNA, 19 bp, Homo sapiens
  siRNA target sequence for DCPS (NM_014026.3,910-928).
cagatccctctgatggttt

SEQ ID NO: 298976 - DNA, 19 bp, Homo sapiens
  siRNA target sequence for DCPS (NM_014026.3,963-981).
cagctcgatgacttgtact

SEQ ID NO: 298977 - DNA, 19 bp, Homo sapiens
  siRNA target sequence for DCPS (NM_014026.3,966-984).
ctcgatgacttgtacttga

SEQ ID NO: 298978 - DNA, 19 bp, Homo sapiens
  siRNA target sequence for DNAJA1 (NM_001539.1,96-114).
caacttactacgatgtttt

SEQ ID NO: 298979 - DNA, 19 bp, Homo sapiens
  siRNA target sequence for DNAJA1 (NM_001539.1,116-134).
ggggtcaaacccaatgcta

SEQ ID NO: 298980 - DNA, 19 bp, Homo sapiens
  siRNA target sequence for DNAJA1 (NM_001539.1,131-149).
gctactcaggaagaattga

SEQ ID NO: 298981 - DNA, 19 bp, Homo sapiens
  siRNA target sequence for DNAJA1 (NM_001539.1,228-246).
ctcaagcttacgaagttct

SEQ ID NO: 298982 - DNA, 19 bp, Homo sapiens
  siRNA target sequence for DNAJA1 (NM_001539.1,388-406).
gagaggtaaaaatgttgta

SEQ ID NO: 298983 - DNA, 19 bp, Homo sapiens
  siRNA target sequence for DNAJA1 (NM_001539.1,423-441).
ccctagaagacttatataa

SEQ ID NO: 298984 - DNA, 19 bp, Homo sapiens
  siRNA target sequence for DNAJA1 (NM_001539.1,634-652).
ggagcggatcagtcctaaa

SEQ ID NO: 298985 - DNA, 19 bp, Homo sapiens
  siRNA target sequence for DNAJA1 (NM_001539.1,637-655).
gcggatcagtcctaaagat

SEQ ID NO: 298986 - DNA, 19 bp, Homo sapiens
  siRNA target sequence for DNAJA1 (NM_001539.1,638-656).
cggatcagtcctaaagata

SEQ ID NO: 298987 - DNA, 19 bp, Homo sapiens
  siRNA target sequence for DNAJA1 (NM_001539.1,782-800).
ctggagccaggcgatatta

SEQ ID NO: 298988 - DNA, 19 bp, Homo sapiens
  siRNA target sequence for DNAJA1 (NM_001539.1,785-803).
gagccaggcgatattatca

SEQ ID NO: 298989 - DNA, 19 bp, Homo sapiens
  siRNA target sequence for DNAJA1 (NM_001539.1,842-860).
cgaggagaagaccttttca

SEQ ID NO: 298990 - DNA, 19 bp, Homo sapiens
  siRNA target sequence for DNAJA1 (NM_001539.1,843-861).
gaggagaagaccttttcat

SEQ ID NO: 298991 - DNA, 19 bp, Homo sapiens
  siRNA target sequence for DNAJA1 (NM_001539.1,909-927).
caatatctactcttgacaa

SEQ ID NO: 298992 - DNA, 19 bp, Homo sapiens
  siRNA target sequence for DNAJA1 (NM_001539.1,950-968).
catccaggtcagattgtca

SEQ ID NO: 298993 - DNA, 19 bp, Homo sapiens
  siRNA target sequence for DNAJA1 (NM_001539.1,965-983).
gtcaagcatggagatatca

SEQ ID NO: 298994 - DNA, 19 bp, Homo sapiens
  siRNA target sequence for DNAJA1 (NM_001539.1,982-1000).
caagtgtgtactaaatgaa

SEQ ID NO: 298995 - DNA, 19 bp, Homo sapiens
  siRNA target sequence for DNAJA1 (NM_001539.1,1001-1019).
ggcatgccaatttatcgta

SEQ ID NO: 298996 - DNA, 19 bp, Homo sapiens
  siRNA target sequence for DNAJA1 (NM_001539.1,1028-1046).
gaaaagggtcgcctaatca

SEQ ID NO: 298997 - DNA, 19 bp, Homo sapiens
  siRNA target sequence for DNAJA1 (NM_001539.1,1034-1052).
ggtcgcctaatcatcgaat

SEQ ID NO: 298998 - DNA, 19 bp, Homo sapiens
  siRNA target sequence for DNAJA1 (NM_001539.1,1035-1053).
gtcgcctaatcatcgaatt

SEQ ID NO: 298999 - DNA, 19 bp, Homo sapiens
  siRNA target sequence for DNAJA1 (NM_001539.1,1037-1055).
cgcctaatcatcgaattta

SEQ ID NO: 299000 - DNA, 19 bp, Homo sapiens
  siRNA target sequence for DNAJA1 (NM_001539.1,1038-1056).
gcctaatcatcgaatttaa

SEQ ID NO: 299001 - DNA, 19 bp, Homo sapiens
  siRNA target sequence for DNAJA1 (NM_001539.1,1048-1066).
cgaatttaaggtaaacttt

SEQ ID NO: 299002 - DNA, 19 bp, Homo sapiens
  siRNA target sequence for DNAJA1 (NM_001539.1,1057-1075).
ggtaaactttcctgagaat

SEQ ID NO: 299003 - DNA, 19 bp, Homo sapiens
  siRNA target sequence for DNAJA1 (NM_001539.1,1077-1095).
gctttctctctcctgataa

SEQ ID NO: 299004 - DNA, 19 bp, Homo sapiens
  siRNA target sequence for DNAJB1 (NM_006145.1,406-424).
ggaaggcatggacattgat

SEQ ID NO: 299005 - DNA, 19 bp, Homo sapiens
  siRNA target sequence for DNAJB1 (NM_006145.1,572-590).
ggctgtaccaagaagatga

SEQ ID NO: 299006 - DNA, 19 bp, Homo sapiens
  siRNA target sequence for DNAJB1 (NM_006145.1,617-635).
gacggaaagagcattcgaa

SEQ ID NO: 299007 - DNA, 19 bp, Homo sapiens
  siRNA target sequence for DNAJB1 (NM_006145.1,627-645).
gcattcgaaacgaagacaa

SEQ ID NO: 299008 - DNA, 19 bp, Homo sapiens
  siRNA target sequence for DNAJB1 (NM_006145.1,628-646).
cattcgaaacgaagacaaa

SEQ ID NO: 299009 - DNA, 19 bp, Homo sapiens
  siRNA target sequence for DNAJB1 (NM_006145.1,715-733).
ccagacctccaacaacatt

SEQ ID NO: 299010 - DNA, 19 bp, Homo sapiens
  siRNA target sequence for DNAJB1 (NM_006145.1,761-779).
gacaagccccacaatatct

SEQ ID NO: 299011 - DNA, 19 bp, Homo sapiens
  siRNA target sequence for DNAJB1 (NM_006145.1,763-781).
caagccccacaatatcttt

SEQ ID NO: 299012 - DNA, 19 bp, Homo sapiens
  siRNA target sequence for DNAJB1 (NM_006145.1,876-894).
ggacgatacccgtcgtatt

SEQ ID NO: 299013 - DNA, 19 bp, Homo sapiens
  siRNA target sequence for DNAJB1 (NM_006145.1,879-897).
cgatacccgtcgtattcaa

SEQ ID NO: 299014 - DNA, 19 bp, Homo sapiens
  siRNA target sequence for DNAJB1 (NM_006145.1,880-898).
gatacccgtcgtattcaaa

SEQ ID NO: 299015 - DNA, 19 bp, Homo sapiens
  siRNA target sequence for DNAJB1 (NM_006145.1,885-903).
ccgtcgtattcaaagatgt

SEQ ID NO: 299016 - DNA, 19 bp, Homo sapiens
  siRNA target sequence for DNAJB1 (NM_006145.1,886-904).
cgtcgtattcaaagatgtt

SEQ ID NO: 299017 - DNA, 19 bp, Homo sapiens
  siRNA target sequence for DNAJB1 (NM_006145.1,887-905).
gtcgtattcaaagatgtta

SEQ ID NO: 299018 - DNA, 19 bp, Homo sapiens
  siRNA target sequence for DNAJB1 (NM_006145.1,912-930).
ctggcatgcggcgaaaagt

SEQ ID NO: 299019 - DNA, 19 bp, Homo sapiens
  siRNA target sequence for DNAJB1 (NM_006145.1,979-997).
cctcattattgagtttgaa

SEQ ID NO: 299020 - DNA, 19 bp, Homo sapiens
  siRNA target sequence for DNAJB1 (NM_006145.1,1026-1044).
catcaagaaccgtacttga

SEQ ID NO: 299021 - DNA, 19 bp, Homo sapiens
  siRNA target sequence for DNAJB2 (NM_006736.4,278-296).
caaaaacccagataataaa

SEQ ID NO: 299022 - DNA, 19 bp, Homo sapiens
  siRNA target sequence for DNAJB2 (NM_006736.4,480-498).
gaggtcttccgggaattct

SEQ ID NO: 299023 - DNA, 19 bp, Homo sapiens
  siRNA target sequence for DNAJB2 (NM_006736.4,580-598).
caggccccttctttacctt

SEQ ID NO: 299024 - DNA, 19 bp, Homo sapiens
  siRNA target sequence for DNAJB2 (NM_006736.4,666-684).
gcttttcgctctgtttcta

SEQ ID NO: 299025 - DNA, 19 bp, Homo sapiens
  siRNA target sequence for DNAJB2 (NM_006736.4,672-690).
cgctctgtttctacatcta

SEQ ID NO: 299026 - DNA, 19 bp, Homo sapiens
  siRNA target sequence for DNAJB2 (NM_006736.4,779-797).
gaagtcagtcacaatcaat

SEQ ID NO: 299027 - DNA, 19 bp, Homo sapiens
  siRNA target sequence for DNAJB4 (NM_007034.3,300-318).
ggtcgcagaagcttatgaa

SEQ ID NO: 299028 - DNA, 19 bp, Homo sapiens
  siRNA target sequence for DNAJB4 (NM_007034.3,303-321).
cgcagaagcttatgaagta

SEQ ID NO: 299029 - DNA, 19 bp, Homo sapiens
  siRNA target sequence for DNAJB4 (NM_007034.3,319-337).
gtattgagtgatcctaaaa

SEQ ID NO: 299030 - DNA, 19 bp, Homo sapiens
  siRNA target sequence for DNAJB4 (NM_007034.3,414-432).
cttccggtacacctttcat

SEQ ID NO: 299031 - DNA, 19 bp, Homo sapiens
  siRNA target sequence for DNAJB4 (NM_007034.3,434-452).
gcgatcctcatgctacatt

SEQ ID NO: 299032 - DNA, 19 bp, Homo sapiens
  siRNA target sequence for DNAJB4 (NM_007034.3,435-453).
cgatcctcatgctacattt

SEQ ID NO: 299033 - DNA, 19 bp, Homo sapiens
  siRNA target sequence for DNAJB4 (NM_007034.3,469-487).
gggtccaacccctttgaaa

SEQ ID NO: 299034 - DNA, 19 bp, Homo sapiens
  siRNA target sequence for DNAJB4 (NM_007034.3,470-488).
ggtccaacccctttgaaat

SEQ ID NO: 299035 - DNA, 19 bp, Homo sapiens
  siRNA target sequence for DNAJB4 (NM_007034.3,471-489).
gtccaacccctttgaaatt

SEQ ID NO: 299036 - DNA, 19 bp, Homo sapiens
  siRNA target sequence for DNAJB4 (NM_007034.3,507-525).
gggtggtggtagagattct

SEQ ID NO: 299037 - DNA, 19 bp, Homo sapiens
  siRNA target sequence for DNAJB4 (NM_007034.3,565-583).
ggtttcagcatgaatggat

SEQ ID NO: 299038 - DNA, 19 bp, Homo sapiens
  siRNA target sequence for DNAJB4 (NM_007034.3,566-584).
gtttcagcatgaatggata

SEQ ID NO: 299039 - DNA, 19 bp, Homo sapiens
  siRNA target sequence for DNAJB4 (NM_007034.3,570-588).
cagcatgaatggatatcca

SEQ ID NO: 299040 - DNA, 19 bp, Homo sapiens
  siRNA target sequence for DNAJB4 (NM_007034.3,608-626).
ggccatcccgcctcaaaca

SEQ ID NO: 299041 - DNA, 19 bp, Homo sapiens
  siRNA target sequence for DNAJB4 (NM_007034.3,609-627).
gccatcccgcctcaaacaa

SEQ ID NO: 299042 - DNA, 19 bp, Homo sapiens
  siRNA target sequence for DNAJB4 (NM_007034.3,634-652).
ccagttattcatgaactta

SEQ ID NO: 299043 - DNA, 19 bp, Homo sapiens
  siRNA target sequence for DNAJB4 (NM_007034.3,683-701).
gtaccaaacggatgaagat

SEQ ID NO: 299044 - DNA, 19 bp, Homo sapiens
  siRNA target sequence for DNAJB4 (NM_007034.3,693-711).
gatgaagatttctcgaaaa

SEQ ID NO: 299045 - DNA, 19 bp, Homo sapiens
  siRNA target sequence for DNAJB4 (NM_007034.3,721-739).
gctgatggaaggagttaca

SEQ ID NO: 299046 - DNA, 19 bp, Homo sapiens
  siRNA target sequence for DNAJB4 (NM_007034.3,836-854).
gtattccagcagacattgt

SEQ ID NO: 299047 - DNA, 19 bp, Homo sapiens
  siRNA target sequence for DNAJB4 (NM_007034.3,945-963).
gtgtggctgctcaattaat

SEQ ID NO: 299048 - DNA, 19 bp, Homo sapiens
  siRNA target sequence for DNAJB4 (NM_007034.3,1075-1093).
caacgtggtgaccttctaa

SEQ ID NO: 299049 - DNA, 19 bp, Homo sapiens
  siRNA target sequence for DNAJB4 (NM_007034.3,1079-1097).
gtggtgaccttctaataga

SEQ ID NO: 299050 - DNA, 19 bp, Homo sapiens
  siRNA target sequence for DNAJB4 (NM_007034.3,1081-1099).
ggtgaccttctaatagaat

SEQ ID NO: 299051 - DNA, 19 bp, Homo sapiens
  siRNA target sequence for DNAJB4 (NM_007034.3,1107-1125).
gtccttcccagatactata

SEQ ID NO: 299052 - DNA, 19 bp, Homo sapiens
  siRNA target sequence for DNAJB4 (NM_007034.3,1136-1154).
ccaaagaagtacttaggaa

SEQ ID NO: 299053 - DNA, 19 bp, Homo sapiens
  siRNA target sequence for DNAJB5 (NM_012266.2,472-490).
ccagtggctcctttcacta

SEQ ID NO: 299054 - DNA, 19 bp, Homo sapiens
  siRNA target sequence for DNAJB5 (NM_012266.2,482-500).
ctttcactacacctttcat

SEQ ID NO: 299055 - DNA, 19 bp, Homo sapiens
  siRNA target sequence for DNAJB5 (NM_012266.2,537-555).
ggctccaaccccttcgata

SEQ ID NO: 299056 - DNA, 19 bp, Homo sapiens
  siRNA target sequence for DNAJB5 (NM_012266.2,541-559).
ccaaccccttcgatatctt

SEQ ID NO: 299057 - DNA, 19 bp, Homo sapiens
  siRNA target sequence for DNAJB5 (NM_012266.2,650-668).
cggccgttttggcttcaat

SEQ ID NO: 299058 - DNA, 19 bp, Homo sapiens
  siRNA target sequence for DNAJB5 (NM_012266.2,1093-1111).
ctttgccctgcaatgatgt

SEQ ID NO: 299059 - DNA, 19 bp, Homo sapiens
  siRNA target sequence for DNAJB5 (NM_012266.2,1209-1227).
cgcttcccagacagattaa

SEQ ID NO: 299060 - DNA, 19 bp, Homo sapiens
  siRNA target sequence for DNAJB5 (NM_012266.2,1237-1255).
caagacagatccttaagca

SEQ ID NO: 299061 - DNA, 19 bp, Homo sapiens
  siRNA target sequence for DNAJB6 (NM_005494.2,195-213).
gcctcacccgaggatatta

SEQ ID NO: 299062 - DNA, 19 bp, Homo sapiens
  siRNA target sequence for DNAJB6 (NM_005494.2,196-214).
cctcacccgaggatattaa

SEQ ID NO: 299063 - DNA, 19 bp, Homo sapiens
  siRNA target sequence for DNAJB6 (NM_005494.2,197-215).
ctcacccgaggatattaaa

SEQ ID NO: 299064 - DNA, 19 bp, Homo sapiens
  siRNA target sequence for DNAJB6 (NM_005494.2,242-260).
gtggcatccagataaaaat

SEQ ID NO: 299065 - DNA, 19 bp, Homo sapiens
  siRNA target sequence for DNAJB6 (NM_005494.2,320-338).
gctgtcggatgctaagaaa

SEQ ID NO: 299066 - DNA, 19 bp, Homo sapiens
  siRNA target sequence for DNAJB6 (NM_005494.2,710-728).
gggcaacttcaaatcgata

SEQ ID NO: 299067 - DNA, 19 bp, Homo sapiens
  siRNA target sequence for DNAJB6 (NM_005494.2,719-737).
caaatcgatatcaacttca

SEQ ID NO: 299068 - DNA, 19 bp, Homo sapiens
  siRNA target sequence for DNAJB6 (NM_005494.2,780-798).
gtcgagaacggtcaagaaa

SEQ ID NO: 299069 - DNA, 19 bp, Homo sapiens
  siRNA target sequence for DNAJB6 (NM_005494.2,819-837).
ggccagttaaagtccttaa

SEQ ID NO: 299070 - DNA, 19 bp, Homo sapiens
  siRNA target sequence for DNAJB6 (NM_005494.2,861-879).
ctgcgcttggataacaagt

SEQ ID NO: 299071 - DNA, 19 bp, Homo sapiens
  siRNA target sequence for DNAJB6 (NM_058246.3,1041-1059).
cgtccgcagcaggattgaa

SEQ ID NO: 299072 - DNA, 19 bp, Homo sapiens
  siRNA target sequence for DNAJB6 (NM_058246.3,1042-1060).
gtccgcagcaggattgaaa

SEQ ID NO: 299073 - DNA, 19 bp, Homo sapiens
  siRNA target sequence for DNAJB6 (NM_058246.3,1044-1062).
ccgcagcaggattgaaaga

SEQ ID NO: 299074 - DNA, 19 bp, Homo sapiens
  siRNA target sequence for DNAJB6 (NM_058246.3,1045-1063).
cgcagcaggattgaaagaa

SEQ ID NO: 299075 - DNA, 19 bp, Homo sapiens
  siRNA target sequence for FLJ32389 (NM_144617.1,267-285).
cttctcgccggaggaaatt

SEQ ID NO: 299076 - DNA, 19 bp, Homo sapiens
  siRNA target sequence for HSPB3 (NM_006308.1,261-279).
ggctggatcatgctttata

SEQ ID NO: 299077 - DNA, 19 bp, Homo sapiens
  siRNA target sequence for HSPB3 (NM_006308.1,262-280).
gctggatcatgctttatat

SEQ ID NO: 299078 - DNA, 19 bp, Homo sapiens
  siRNA target sequence for HSPB3 (NM_006308.1,422-440).
gaagacatcatcattcaga

SEQ ID NO: 299079 - DNA, 19 bp, Homo sapiens
  siRNA target sequence for HSPB3 (NM_006308.1,488-506).
gatgagcacggttttatct

SEQ ID NO: 299080 - DNA, 19 bp, Homo sapiens
  siRNA target sequence for HSPB3 (NM_006308.1,491-509).
gagcacggttttatctcaa

SEQ ID NO: 299081 - DNA, 19 bp, Homo sapiens
  siRNA target sequence for HSPB3 (NM_006308.1,494-512).
cacggttttatctcaagaa

SEQ ID NO: 299082 - DNA, 19 bp, Homo sapiens
  siRNA target sequence for HSPB3 (NM_006308.1,517-535).
cacccgacagtacaaacta

SEQ ID NO: 299083 - DNA, 19 bp, Homo sapiens
  siRNA target sequence for HSPB3 (NM_006308.1,571-589).
cctctgtcatgatggaatt

SEQ ID NO: 299084 - DNA, 19 bp, Homo sapiens
  siRNA target sequence for HSPB3 (NM_006308.1,608-626).
gatccagttgggactaagt

SEQ ID NO: 299085 - DNA, 19 bp, Homo sapiens
  siRNA target sequence for HspB9 (NM_033194.1,125-143).
cggctcaggaggacaatga

SEQ ID NO: 299086 - DNA, 19 bp, Homo sapiens
  siRNA target sequence for HSPE1 (NM_002157.1,189-207).
ggatcgggttctaaaggaa

SEQ ID NO: 299087 - DNA, 19 bp, Homo sapiens
  siRNA target sequence for HSPE1 (NM_002157.1,190-208).
gatcgggttctaaaggaaa

SEQ ID NO: 299088 - DNA, 19 bp, Homo sapiens
  siRNA target sequence for TBCC (NM_003192.1,129-147).
cggcagctggaagttgaaa

SEQ ID NO: 299089 - DNA, 19 bp, Homo sapiens
  siRNA target sequence for TBCC (NM_003192.1,301-319).
ggctgcagaaactaatcaa

SEQ ID NO: 299090 - DNA, 19 bp, Homo sapiens
  siRNA target sequence for TBCC (NM_003192.1,312-330).
ctaatcaacgactcagttt

SEQ ID NO: 299091 - DNA, 19 bp, Homo sapiens
  siRNA target sequence for TBCC (NM_003192.1,463-481).
cttcgtctaccaaagtaga

SEQ ID NO: 299092 - DNA, 19 bp, Homo sapiens
  siRNA target sequence for TBCC (NM_003192.1,627-645).
caccagcgcgacgttcttt

SEQ ID NO: 299093 - DNA, 19 bp, Homo sapiens
  siRNA target sequence for TBCC (NM_003192.1,630-648).
cagcgcgacgttcttttga

SEQ ID NO: 299094 - DNA, 19 bp, Homo sapiens
  siRNA target sequence for TBCC (NM_003192.1,662-680).
ctgcacggtcagactgtat

SEQ ID NO: 299095 - DNA, 19 bp, Homo sapiens
  siRNA target sequence for TBCC (NM_003192.1,667-685).
cggtcagactgtatggaaa

SEQ ID NO: 299096 - DNA, 19 bp, Homo sapiens
  siRNA target sequence for TBCC (NM_003192.1,798-816).
caacagctccgcatacaca

SEQ ID NO: 299097 - DNA, 19 bp, Homo sapiens
  siRNA target sequence for TBCC (NM_003192.1,806-824).
ccgcatacacagtacgaaa

SEQ ID NO: 299098 - DNA, 19 bp, Homo sapiens
  siRNA target sequence for TBCC (NM_003192.1,929-947).
cttcgagagctctggttta

SEQ ID NO: 299099 - DNA, 19 bp, Homo sapiens
  siRNA target sequence for TBCC (NM_003192.1,932-950).
cgagagctctggtttagat

SEQ ID NO: 299100 - DNA, 19 bp, Homo sapiens
  siRNA target sequence for TBCC (NM_003192.1,933-951).
gagagctctggtttagata

SEQ ID NO: 299101 - DNA, 19 bp, Homo sapiens
  siRNA target sequence for TBCC (NM_003192.1,942-960).
ggtttagataggagcaaaa

SEQ ID NO: 299102 - DNA, 19 bp, Homo sapiens
  siRNA target sequence for TBCC (NM_003192.1,943-961).
gtttagataggagcaaaaa

SEQ ID NO: 299103 - DNA, 19 bp, Homo sapiens
  siRNA target sequence for TBCC (NM_003192.1,972-990).
gatgttgacgattttaact

SEQ ID NO: 299104 - DNA, 19 bp, Homo sapiens
  siRNA target sequence for TBCC (NM_003192.1,1012-1030).
ccccaaactggagtattct

SEQ ID NO: 299105 - DNA, 19 bp, Homo sapiens
  siRNA target sequence for TBCC (NM_003192.1,1032-1050).
cctgaagaggagcgaaata

SEQ ID NO: 299106 - DNA, 19 bp, Homo sapiens
  siRNA target sequence for TBCC (NM_003192.1,1033-1051).
ctgaagaggagcgaaatat

SEQ ID NO: 299107 - DNA, 19 bp, Homo sapiens
  siRNA target sequence for TBCD (NM_005993.2,280-298).
ggagcggttccgcgtaata

SEQ ID NO: 299108 - DNA, 19 bp, Homo sapiens
  siRNA target sequence for TBCD (NM_005993.2,281-299).
gagcggttccgcgtaataa

SEQ ID NO: 299109 - DNA, 19 bp, Homo sapiens
  siRNA target sequence for TBCD (NM_005993.2,285-303).
ggttccgcgtaataatgga

SEQ ID NO: 299110 - DNA, 19 bp, Homo sapiens
  siRNA target sequence for TBCD (NM_005993.2,290-308).
cgcgtaataatggacaaat

SEQ ID NO: 299111 - DNA, 19 bp, Homo sapiens
  siRNA target sequence for TBCD (NM_005993.2,291-309).
gcgtaataatggacaaata

SEQ ID NO: 299112 - DNA, 19 bp, Homo sapiens
  siRNA target sequence for TBCD (NM_005993.2,341-359).
cttgaatggatgatgaact

SEQ ID NO: 299113 - DNA, 19 bp, Homo sapiens
  siRNA target sequence for TBCD (NM_005993.2,438-456).
ccaaggttcgaggctataa

SEQ ID NO: 299114 - DNA, 19 bp, Homo sapiens
  siRNA target sequence for TBCD (NM_005993.2,439-457).
caaggttcgaggctataaa

SEQ ID NO: 299115 - DNA, 19 bp, Homo sapiens
  siRNA target sequence for TBCD (NM_005993.2,442-460).
ggttcgaggctataaaaca

SEQ ID NO: 299116 - DNA, 19 bp, Homo sapiens
  siRNA target sequence for TBCD (NM_005993.2,443-461).
gttcgaggctataaaacat

SEQ ID NO: 299117 - DNA, 19 bp, Homo sapiens
  siRNA target sequence for TBCD (NM_005993.2,489-507).
ccgatgtagagcctgtttt

SEQ ID NO: 299118 - DNA, 19 bp, Homo sapiens
  siRNA target sequence for TBCD (NM_005993.2,490-508).
cgatgtagagcctgtttta

SEQ ID NO: 299119 - DNA, 19 bp, Homo sapiens
  siRNA target sequence for TBCD (NM_005993.2,494-512).
gtagagcctgttttagatt

SEQ ID NO: 299120 - DNA, 19 bp, Homo sapiens
  siRNA target sequence for TBCD (NM_005993.2,509-527).
gatttggtcacaattcaga

SEQ ID NO: 299121 - DNA, 19 bp, Homo sapiens
  siRNA target sequence for TBCD (NM_005993.2,551-569).
gaaacccgctacatgcttt

SEQ ID NO: 299122 - DNA, 19 bp, Homo sapiens
  siRNA target sequence for TBCD (NM_005993.2,555-573).
cccgctacatgcttttgct

SEQ ID NO: 299123 - DNA, 19 bp, Homo sapiens
  siRNA target sequence for TBCD (NM_005993.2,647-665).
caagcacgaatgtccataa

SEQ ID NO: 299124 - DNA, 19 bp, Homo sapiens
  siRNA target sequence for TBCD (NM_005993.2,660-678).
ccataatggaccgtattct

SEQ ID NO: 299125 - DNA, 19 bp, Homo sapiens
  siRNA target sequence for TBCD (NM_005993.2,667-685).
ggaccgtattctccaaata

SEQ ID NO: 299126 - DNA, 19 bp, Homo sapiens
  siRNA target sequence for TBCD (NM_005993.2,734-752).
gtccttgtgtccagattta

SEQ ID NO: 299127 - DNA, 19 bp, Homo sapiens
  siRNA target sequence for TBCD (NM_005993.2,758-776).
cgtcctgatgtcaagcaaa

SEQ ID NO: 299128 - DNA, 19 bp, Homo sapiens
  siRNA target sequence for TBCD (NM_005993.2,762-780).
ctgatgtcaagcaaagcaa

SEQ ID NO: 299129 - DNA, 19 bp, Homo sapiens
  siRNA target sequence for TBCD (NM_005993.2,1075-1093).
ccgatctttggctgcaaat

SEQ ID NO: 299130 - DNA, 19 bp, Homo sapiens
  siRNA target sequence for TBCD (NM_005993.2,1177-1195).
gggggtggagcgtgtgata

SEQ ID NO: 299131 - DNA, 19 bp, Homo sapiens
  siRNA target sequence for TBCD (NM_005993.2,1413-1431).
ctcgactcgtggatgttgt

SEQ ID NO: 299132 - DNA, 19 bp, Homo sapiens
  siRNA target sequence for TBCD (NM_005993.2,1603-1621).
ggtgtttgaccgagacata

SEQ ID NO: 299133 - DNA, 19 bp, Homo sapiens
  siRNA target sequence for TBCD (NM_005993.2,1604-1622).
gtgtttgaccgagacataa

SEQ ID NO: 299134 - DNA, 19 bp, Homo sapiens
  siRNA target sequence for TBCD (NM_005993.2,1677-1695).
ctttccctcatggtattga

SEQ ID NO: 299135 - DNA, 19 bp, Homo sapiens
  siRNA target sequence for TBCD (NM_005993.2,1682-1700).
cctcatggtattgatattt

SEQ ID NO: 299136 - DNA, 19 bp, Homo sapiens
  siRNA target sequence for TBCD (NM_005993.2,1702-1720).
gaccacagctgactatttt

SEQ ID NO: 299137 - DNA, 19 bp, Homo sapiens
  siRNA target sequence for TBCD (NM_005993.2,1783-1801).
gtacacgcagccaatgata

SEQ ID NO: 299138 - DNA, 19 bp, Homo sapiens
  siRNA target sequence for TBCD (NM_005993.2,1805-1823).
cacctggttaccatgaaga

SEQ ID NO: 299139 - DNA, 19 bp, Homo sapiens
  siRNA target sequence for TBCD (NM_005993.2,1936-1954).
gacactgagtccagatctt

SEQ ID NO: 299140 - DNA, 19 bp, Homo sapiens
  siRNA target sequence for TBCD (NM_005993.2,1938-1956).
cactgagtccagatcttca

SEQ ID NO: 299141 - DNA, 19 bp, Homo sapiens
  siRNA target sequence for TBCD (NM_005993.2,1991-2009).
gttgcttacgccttgtaca

SEQ ID NO: 299142 - DNA, 19 bp, Homo sapiens
  siRNA target sequence for TBCD (NM_005993.2,1995-2013).
cttacgccttgtacaaact

SEQ ID NO: 299143 - DNA, 19 bp, Homo sapiens
  siRNA target sequence for TBCD (NM_005993.2,2092-2110).
gctctatgatcgtcagtta

SEQ ID NO: 299144 - DNA, 19 bp, Homo sapiens
  siRNA target sequence for TBCD (NM_005993.2,2093-2111).
ctctatgatcgtcagttat

SEQ ID NO: 299145 - DNA, 19 bp, Homo sapiens
  siRNA target sequence for TBCD (NM_005993.2,2315-2333).
ctatgcagtgaatattaca

SEQ ID NO: 299146 - DNA, 19 bp, Homo sapiens
  siRNA target sequence for TBCD (NM_005993.2,2485-2503).
gcaggttctcacaggttta

SEQ ID NO: 299147 - DNA, 19 bp, Homo sapiens
  siRNA target sequence for TBCD (NM_005993.2,2523-2541).
cccccgaggacgtaagttt

SEQ ID NO: 299148 - DNA, 19 bp, Homo sapiens
  siRNA target sequence for TBCD (NM_005993.2,2627-2645).
gtgtgcggagagaatgttt

SEQ ID NO: 299149 - DNA, 19 bp, Homo sapiens
  siRNA target sequence for TBCD (NM_005993.2,3180-3198).
ggacccttctgcagatctt

SEQ ID NO: 299150 - DNA, 19 bp, Homo sapiens
  siRNA target sequence for TBCD (NM_005993.2,3322-3340).
gcttgcgctctgtaagaaa

SEQ ID NO: 299151 - DNA, 19 bp, Homo sapiens
  siRNA target sequence for TBCD (NM_005993.2,3498-3516).
gccaggtgtacgagacatt

SEQ ID NO: 299152 - DNA, 19 bp, Homo sapiens
  siRNA target sequence for TBCE (NM_003193.2,91-109).
ctttgacagcggatgtcat

SEQ ID NO: 299153 - DNA, 19 bp, Homo sapiens
  siRNA target sequence for TBCE (NM_003193.2,107-125).
cattggtcgaagagttgaa

SEQ ID NO: 299154 - DNA, 19 bp, Homo sapiens
  siRNA target sequence for TBCE (NM_003193.2,111-129).
ggtcgaagagttgaagtta

SEQ ID NO: 299155 - DNA, 19 bp, Homo sapiens
  siRNA target sequence for TBCE (NM_003193.2,112-130).
gtcgaagagttgaagttaa

SEQ ID NO: 299156 - DNA, 19 bp, Homo sapiens
  siRNA target sequence for TBCE (NM_003193.2,183-201).
ccctggttaggagtagaat

SEQ ID NO: 299157 - DNA, 19 bp, Homo sapiens
  siRNA target sequence for TBCE (NM_003193.2,236-254).
ccacgaagggactgtgtat

SEQ ID NO: 299158 - DNA, 19 bp, Homo sapiens
  siRNA target sequence for TBCE (NM_003193.2,237-255).
cacgaagggactgtgtatt

SEQ ID NO: 299159 - DNA, 19 bp, Homo sapiens
  siRNA target sequence for TBCE (NM_003193.2,239-257).
cgaagggactgtgtatttt

SEQ ID NO: 299160 - DNA, 19 bp, Homo sapiens
  siRNA target sequence for TBCE (NM_003193.2,240-258).
gaagggactgtgtatttta

SEQ ID NO: 299161 - DNA, 19 bp, Homo sapiens
  siRNA target sequence for TBCE (NM_003193.2,291-309).
cgtccgaacaaggtaaatt

SEQ ID NO: 299162 - DNA, 19 bp, Homo sapiens
  siRNA target sequence for TBCE (NM_003193.2,292-310).
gtccgaacaaggtaaattt

SEQ ID NO: 299163 - DNA, 19 bp, Homo sapiens
  siRNA target sequence for TBCE (NM_003193.2,341-359).
ccgctatgtgttagaagat

SEQ ID NO: 299164 - DNA, 19 bp, Homo sapiens
  siRNA target sequence for TBCE (NM_003193.2,357-375).
gatggaccagaggaagata

SEQ ID NO: 299165 - DNA, 19 bp, Homo sapiens
  siRNA target sequence for TBCE (NM_003193.2,383-401).
gcaaattgttacaattgga

SEQ ID NO: 299166 - DNA, 19 bp, Homo sapiens
  siRNA target sequence for TBCE (NM_003193.2,414-432).
gagactatcggttttgact

SEQ ID NO: 299167 - DNA, 19 bp, Homo sapiens
  siRNA target sequence for TBCE (NM_003193.2,418-436).
ctatcggttttgactctat

SEQ ID NO: 299168 - DNA, 19 bp, Homo sapiens
  siRNA target sequence for TBCE (NM_003193.2,423-441).
ggttttgactctattatga

SEQ ID NO: 299169 - DNA, 19 bp, Homo sapiens
  siRNA target sequence for TBCE (NM_003193.2,482-500).
gaggaactgtgcagtaagt

SEQ ID NO: 299170 - DNA, 19 bp, Homo sapiens
  siRNA target sequence for TBCE (NM_003193.2,485-503).
gaactgtgcagtaagttgt

SEQ ID NO: 299171 - DNA, 19 bp, Homo sapiens
  siRNA target sequence for TBCE (NM_003193.2,531-549).
gcatgtcctaatatcagaa

SEQ ID NO: 299172 - DNA, 19 bp, Homo sapiens
  siRNA target sequence for TBCE (NM_003193.2,577-595).
catcatgggatgaagtgat

SEQ ID NO: 299173 - DNA, 19 bp, Homo sapiens
  siRNA target sequence for TBCE (NM_003193.2,580-598).
catgggatgaagtgataca

SEQ ID NO: 299174 - DNA, 19 bp, Homo sapiens
  siRNA target sequence for TBCE (NM_003193.2,627-645).
gtccttaatgtcagtgaaa

SEQ ID NO: 299175 - DNA, 19 bp, Homo sapiens
  siRNA target sequence for TBCE (NM_003193.2,660-678).
ccctccggttcagtattaa

SEQ ID NO: 299176 - DNA, 19 bp, Homo sapiens
  siRNA target sequence for TBCE (NM_003193.2,662-680).
ctccggttcagtattaact

SEQ ID NO: 299177 - DNA, 19 bp, Homo sapiens
  siRNA target sequence for TBCE (NM_003193.2,682-700).
gaacgctttctgtactgaa

SEQ ID NO: 299178 - DNA, 19 bp, Homo sapiens
  siRNA target sequence for TBCE (NM_003193.2,691-709).
ctgtactgaaggttttagt

SEQ ID NO: 299179 - DNA, 19 bp, Homo sapiens
  siRNA target sequence for TBCE (NM_003193.2,702-720).
gttttagtcctcaatcaaa

SEQ ID NO: 299180 - DNA, 19 bp, Homo sapiens
  siRNA target sequence for TBCE (NM_003193.2,786-804).
cttgagtctaacaacattt

SEQ ID NO: 299181 - DNA, 19 bp, Homo sapiens
  siRNA target sequence for TBCE (NM_003193.2,812-830).
cgaaaggccaacagatgtt

SEQ ID NO: 299182 - DNA, 19 bp, Homo sapiens
  siRNA target sequence for TBCE (NM_003193.2,833-851).
ccagacagtcaagttatta

SEQ ID NO: 299183 - DNA, 19 bp, Homo sapiens
  siRNA target sequence for TBCE (NM_003193.2,838-856).
cagtcaagttattagatct

SEQ ID NO: 299184 - DNA, 19 bp, Homo sapiens
  siRNA target sequence for TBCE (NM_003193.2,852-870).
gatctttcctctaatcaat

SEQ ID NO: 299185 - DNA, 19 bp, Homo sapiens
  siRNA target sequence for TBCE (NM_003193.2,859-877).
cctctaatcaattaattga

SEQ ID NO: 299186 - DNA, 19 bp, Homo sapiens
  siRNA target sequence for TBCE (NM_003193.2,860-878).
ctctaatcaattaattgat

SEQ ID NO: 299187 - DNA, 19 bp, Homo sapiens
  siRNA target sequence for TBCE (NM_003193.2,862-880).
ctaatcaattaattgatga

SEQ ID NO: 299188 - DNA, 19 bp, Homo sapiens
  siRNA target sequence for TBCE (NM_003193.2,902-920).
ccacctgcccaggttagaa

SEQ ID NO: 299189 - DNA, 19 bp, Homo sapiens
  siRNA target sequence for TBCE (NM_003193.2,908-926).
gcccaggttagaacaatta

SEQ ID NO: 299190 - DNA, 19 bp, Homo sapiens
  siRNA target sequence for TBCE (NM_003193.2,909-927).
cccaggttagaacaattaa

SEQ ID NO: 299191 - DNA, 19 bp, Homo sapiens
  siRNA target sequence for TBCE (NM_003193.2,910-928).
ccaggttagaacaattaat

SEQ ID NO: 299192 - DNA, 19 bp, Homo sapiens
  siRNA target sequence for TBCE (NM_003193.2,913-931).
ggttagaacaattaatcct

SEQ ID NO: 299193 - DNA, 19 bp, Homo sapiens
  siRNA target sequence for TBCE (NM_003193.2,969-987).
gctggaattgggtgcaaaa

SEQ ID NO: 299194 - DNA, 19 bp, Homo sapiens
  siRNA target sequence for TBCE (NM_003193.2,972-990).
ggaattgggtgcaaaacgt

SEQ ID NO: 299195 - DNA, 19 bp, Homo sapiens
  siRNA target sequence for TBCE (NM_003193.2,1017-1035).
gtagtaaacgacaatcaga

SEQ ID NO: 299196 - DNA, 19 bp, Homo sapiens
  siRNA target sequence for TBCE (NM_003193.2,1025-1043).
cgacaatcagatatcacaa

SEQ ID NO: 299197 - DNA, 19 bp, Homo sapiens
  siRNA target sequence for TBCE (NM_003193.2,1026-1044).
gacaatcagatatcacaat

SEQ ID NO: 299198 - DNA, 19 bp, Homo sapiens
  siRNA target sequence for TBCE (NM_003193.2,1055-1073).
caatgagctagagaagtta

SEQ ID NO: 299199 - DNA, 19 bp, Homo sapiens
  siRNA target sequence for TBCE (NM_003193.2,1087-1105).
ctttgtcctgcctaagaaa

SEQ ID NO: 299200 - DNA, 19 bp, Homo sapiens
  siRNA target sequence for TBCE (NM_003193.2,1181-1199).
gctgaacaaatgtgagatt

SEQ ID NO: 299201 - DNA, 19 bp, Homo sapiens
  siRNA target sequence for TBCE (NM_003193.2,1216-1234).
ggagagctgagcttgacta

SEQ ID NO: 299202 - DNA, 19 bp, Homo sapiens
  siRNA target sequence for TBCE (NM_003193.2,1275-1293).
cataaggatccggaaaaaa

SEQ ID NO: 299203 - DNA, 19 bp, Homo sapiens
  siRNA target sequence for TBCE (NM_003193.2,1297-1315).
gactcagcgaagaattcct

SEQ ID NO: 299204 - DNA, 19 bp, Homo sapiens
  siRNA target sequence for TBCE (NM_003193.2,1340-1358).
cctctgcctgaaatatggt

SEQ ID NO: 299205 - DNA, 19 bp, Homo sapiens
  siRNA target sequence for TBCE (NM_003193.2,1384-1402).
cacagcaaccacttatgct

SEQ ID NO: 299206 - DNA, 19 bp, Homo sapiens
  siRNA target sequence for TBCE (NM_003193.2,1401-1419).
ctgaaaaaccagctactaa

SEQ ID NO: 299207 - DNA, 19 bp, Homo sapiens
  siRNA target sequence for TBCE (NM_003193.2,1427-1445).
gataaaataccctcatcaa

SEQ ID NO: 299208 - DNA, 19 bp, Homo sapiens
  siRNA target sequence for TBCE (NM_003193.2,1478-1496).
gggctccatgacaattcaa

SEQ ID NO: 299209 - DNA, 19 bp, Homo sapiens
  siRNA target sequence for TBCE (NM_003193.2,1479-1497).
ggctccatgacaattcaaa

SEQ ID NO: 299210 - DNA, 19 bp, Homo sapiens
  siRNA target sequence for TBCE (NM_003193.2,1480-1498).
gctccatgacaattcaaaa

SEQ ID NO: 299211 - DNA, 19 bp, Homo sapiens
  siRNA target sequence for TBCE (NM_003193.2,1545-1563).
cttctgttgtcctatgaaa

SEQ ID NO: 299212 - DNA, 19 bp, Homo sapiens
  siRNA target sequence for TBCE (NM_003193.2,1631-1649).
ggaaaatggagattgtcta

SEQ ID NO: 299213 - DNA, 19 bp, Homo sapiens
  siRNA target sequence for TBCA (NM_004607.1,60-78).
ctcgcgtgagacagatcaa

SEQ ID NO: 299214 - DNA, 19 bp, Homo sapiens
  siRNA target sequence for C19orf2 (NM_003796.2,186-204).
gaaggtagataatgactat

SEQ ID NO: 299215 - DNA, 19 bp, Homo sapiens
  siRNA target sequence for C19orf2 (NM_003796.2,189-207).
ggtagataatgactataat

SEQ ID NO: 299216 - DNA, 19 bp, Homo sapiens
  siRNA target sequence for C19orf2 (NM_003796.2,225-243).
cagcaccttgcctgataaa

SEQ ID NO: 299217 - DNA, 19 bp, Homo sapiens
  siRNA target sequence for C19orf2 (NM_003796.2,363-381).
gcaggctgtaggtttagtt

SEQ ID NO: 299218 - DNA, 19 bp, Homo sapiens
  siRNA target sequence for C19orf2 (NM_003796.2,387-405).
ccggaaagaacatgtaaga

SEQ ID NO: 299219 - DNA, 19 bp, Homo sapiens
  siRNA target sequence for C19orf2 (NM_003796.2,388-406).
cggaaagaacatgtaagaa

SEQ ID NO: 299220 - DNA, 19 bp, Homo sapiens
  siRNA target sequence for C19orf2 (NM_003796.2,454-472).
gttgaattcacagaagatt

SEQ ID NO: 299221 - DNA, 19 bp, Homo sapiens
  siRNA target sequence for C19orf2 (NM_003796.2,485-503).
gcgatgctgcaggtgatat

SEQ ID NO: 299222 - DNA, 19 bp, Homo sapiens
  siRNA target sequence for C19orf2 (NM_003796.2,510-528).
catacgagaagaaattaaa

SEQ ID NO: 299223 - DNA, 19 bp, Homo sapiens
  siRNA target sequence for C19orf2 (NM_003796.2,534-552).
cttcgaatttaaagcaaaa

SEQ ID NO: 299224 - DNA, 19 bp, Homo sapiens
  siRNA target sequence for C19orf2 (NM_003796.2,563-581).
ctcataaaccgcattccaa

SEQ ID NO: 299225 - DNA, 19 bp, Homo sapiens
  siRNA target sequence for C19orf2 (NM_003796.2,627-645).
gaaatccaaggatttgcta

SEQ ID NO: 299226 - DNA, 19 bp, Homo sapiens
  siRNA target sequence for C19orf2 (NM_003796.2,660-678).
gtgggctcgacttgaagaa

SEQ ID NO: 299227 - DNA, 19 bp, Homo sapiens
  siRNA target sequence for C19orf2 (NM_003796.2,662-680).
gggctcgacttgaagaact

SEQ ID NO: 299228 - DNA, 19 bp, Homo sapiens
  siRNA target sequence for C19orf2 (NM_003796.2,663-681).
ggctcgacttgaagaacta

SEQ ID NO: 299229 - DNA, 19 bp, Homo sapiens
  siRNA target sequence for C19orf2 (NM_003796.2,665-683).
ctcgacttgaagaactaga

SEQ ID NO: 299230 - DNA, 19 bp, Homo sapiens
  siRNA target sequence for C19orf2 (NM_003796.2,800-818).
cgatgcatcaagtaacaga

SEQ ID NO: 299231 - DNA, 19 bp, Homo sapiens
  siRNA target sequence for C19orf2 (NM_003796.2,864-882).
cagtggtcaagtgaatagt

SEQ ID NO: 299232 - DNA, 19 bp, Homo sapiens
  siRNA target sequence for C19orf2 (NM_003796.2,866-884).
gtggtcaagtgaatagtca

SEQ ID NO: 299233 - DNA, 19 bp, Homo sapiens
  siRNA target sequence for C19orf2 (NM_003796.2,885-903).
gttgaactgttcagtgaat

SEQ ID NO: 299234 - DNA, 19 bp, Homo sapiens
  siRNA target sequence for C19orf2 (NM_003796.2,898-916).
gtgaatggttccagttctt

SEQ ID NO: 299235 - DNA, 19 bp, Homo sapiens
  siRNA target sequence for C19orf2 (NM_003796.2,1007-1025).
gggttggagataattctat

SEQ ID NO: 299236 - DNA, 19 bp, Homo sapiens
  siRNA target sequence for C19orf2 (NM_003796.2,1012-1030).
ggagataattctataccaa

SEQ ID NO: 299237 - DNA, 19 bp, Homo sapiens
  siRNA target sequence for C19orf2 (NM_003796.2,1057-1075).
cctaagagggtccgaataa

SEQ ID NO: 299238 - DNA, 19 bp, Homo sapiens
  siRNA target sequence for C19orf2 (NM_003796.2,1058-1076).
ctaagagggtccgaataaa

SEQ ID NO: 299239 - DNA, 19 bp, Homo sapiens
  siRNA target sequence for C19orf2 (NM_003796.2,1062-1080).
gagggtccgaataaatact

SEQ ID NO: 299240 - DNA, 19 bp, Homo sapiens
  siRNA target sequence for C19orf2 (NM_003796.2,1120-1138).
gaagccaaacgtaaacgaa

SEQ ID NO: 299241 - DNA, 19 bp, Homo sapiens
  siRNA target sequence for C19orf2 (NM_003796.2,1124-1142).
ccaaacgtaaacgaaagaa

SEQ ID NO: 299242 - DNA, 19 bp, Homo sapiens
  siRNA target sequence for C19orf2 (NM_003796.2,1187-1205).
ggacgcctgcagacattta

SEQ ID NO: 299243 - DNA, 19 bp, Homo sapiens
  siRNA target sequence for C19orf2 (NM_003796.2,1200-1218).
catttacagagcctttgtt

SEQ ID NO: 299244 - DNA, 19 bp, Homo sapiens
  siRNA target sequence for C19orf2 (NM_003796.2,1257-1275).
cctgaagtctcgaagtaga

SEQ ID NO: 299245 - DNA, 19 bp, Homo sapiens
  siRNA target sequence for C19orf2 (NM_003796.2,1263-1281).
gtctcgaagtagagagaat

SEQ ID NO: 299246 - DNA, 19 bp, Homo sapiens
  siRNA target sequence for C19orf2 (NM_003796.2,1287-1305).
gtgtagcgacactagtgaa

SEQ ID NO: 299247 - DNA, 19 bp, Homo sapiens
  siRNA target sequence for C19orf2 (NM_003796.2,1530-1548).
cgcactacccactattcca

SEQ ID NO: 299248 - DNA, 19 bp, Homo sapiens
  siRNA target sequence for C19orf2 (NM_003796.2,1538-1556).
ccactattccagaacgaaa

SEQ ID NO: 299249 - DNA, 19 bp, Homo sapiens
  siRNA target sequence for CABC1 (NM_020247.3,292-310).
ggtgcagggtcaggataaa

SEQ ID NO: 299250 - DNA, 19 bp, Homo sapiens
  siRNA target sequence for CABC1 (NM_020247.3,295-313).
gcagggtcaggataaacat

SEQ ID NO: 299251 - DNA, 19 bp, Homo sapiens
  siRNA target sequence for CABC1 (NM_020247.3,481-499).
ggccagtggaccctttaga

SEQ ID NO: 299252 - DNA, 19 bp, Homo sapiens
  siRNA target sequence for CABC1 (NM_020247.3,1086-1104).
ccaactggcgggacaagtt

SEQ ID NO: 299253 - DNA, 19 bp, Homo sapiens
  siRNA target sequence for CABC1 (NM_020247.3,1094-1112).
cgggacaagttggaatact

SEQ ID NO: 299254 - DNA, 19 bp, Homo sapiens
  siRNA target sequence for CABC1 (NM_020247.3,1095-1113).
gggacaagttggaatactt

SEQ ID NO: 299255 - DNA, 19 bp, Homo sapiens
  siRNA target sequence for CABC1 (NM_020247.3,1244-1262).
ctcatggccgtgttgaaca

SEQ ID NO: 299256 - DNA, 19 bp, Homo sapiens
  siRNA target sequence for CABC1 (NM_020247.3,1647-1665).
gggcaacgcgggaatatga

SEQ ID NO: 299257 - DNA, 19 bp, Homo sapiens
  siRNA target sequence for CABC1 (NM_020247.3,1649-1667).
gcaacgcgggaatatgaca

SEQ ID NO: 299258 - DNA, 19 bp, Homo sapiens
  siRNA target sequence for CABC1 (NM_020247.3,1671-1689).
ccttcaccgacctctacat

SEQ ID NO: 299259 - DNA, 19 bp, Homo sapiens
  siRNA target sequence for CABC1 (NM_020247.3,1677-1695).
ccgacctctacattcagat

SEQ ID NO: 299260 - DNA, 19 bp, Homo sapiens
  siRNA target sequence for CABC1 (NM_020247.3,1834-1852).
ctctgatgagccttttgat

SEQ ID NO: 299261 - DNA, 19 bp, Homo sapiens
  siRNA target sequence for CABC1 (NM_020247.3,1836-1854).
ctgatgagccttttgattt

SEQ ID NO: 299262 - DNA, 19 bp, Homo sapiens
  siRNA target sequence for CIA30 (NM_016013.1,586-604).
ggagaagcctgatgttagt

SEQ ID NO: 299263 - DNA, 19 bp, Homo sapiens
  siRNA target sequence for CIA30 (NM_016013.1,587-605).
gagaagcctgatgttagtt

SEQ ID NO: 299264 - DNA, 19 bp, Homo sapiens
  siRNA target sequence for CIA30 (NM_016013.1,593-611).
cctgatgttagtttcgata

SEQ ID NO: 299265 - DNA, 19 bp, Homo sapiens
  siRNA target sequence for CIA30 (NM_016013.1,594-612).
ctgatgttagtttcgataa

SEQ ID NO: 299266 - DNA, 19 bp, Homo sapiens
  siRNA target sequence for CIA30 (NM_016013.1,599-617).
gttagtttcgataaagcaa

SEQ ID NO: 299267 - DNA, 19 bp, Homo sapiens
  siRNA target sequence for CIA30 (NM_016013.1,607-625).
cgataaagcaattagagat

SEQ ID NO: 299268 - DNA, 19 bp, Homo sapiens
  siRNA target sequence for CIA30 (NM_016013.1,615-633).
caattagagatgaagcaat

SEQ ID NO: 299269 - DNA, 19 bp, Homo sapiens
  siRNA target sequence for CIA30 (NM_016013.1,626-644).
gaagcaatataccatttta

SEQ ID NO: 299270 - DNA, 19 bp, Homo sapiens
  siRNA target sequence for CIA30 (NM_016013.1,835-853).
ccaaagtgcactgctatat

SEQ ID NO: 299271 - DNA, 19 bp, Homo sapiens
  siRNA target sequence for CIA30 (NM_016013.1,946-964).
gaggaagatgtcttacgat

SEQ ID NO: 299272 - DNA, 19 bp, Homo sapiens
  siRNA target sequence for CIA30 (NM_016013.1,961-979).
cgattggtcccagttcaat

SEQ ID NO: 299273 - DNA, 19 bp, Homo sapiens
  siRNA target sequence for CIA30 (NM_016013.1,962-980).
gattggtcccagttcaata

SEQ ID NO: 299274 - DNA, 19 bp, Homo sapiens
  siRNA target sequence for CIA30 (NM_016013.1,970-988).
ccagttcaatactctgtat

SEQ ID NO: 299275 - DNA, 19 bp, Homo sapiens
  siRNA target sequence for CIA30 (NM_016013.1,1010-1028).
cggccttggatggtgaata

SEQ ID NO: 299276 - DNA, 19 bp, Homo sapiens
  siRNA target sequence for CIA30 (NM_016013.1,1011-1029).
ggccttggatggtgaatat

SEQ ID NO: 299277 - DNA, 19 bp, Homo sapiens
  siRNA target sequence for CIA30 (NM_016013.1,1014-1032).
cttggatggtgaatatcaa

SEQ ID NO: 299278 - DNA, 19 bp, Homo sapiens
  siRNA target sequence for CIA30 (NM_016013.1,1054-1072).
gaggacgaatcagatgtat

SEQ ID NO: 299279 - DNA, 19 bp, Homo sapiens
  siRNA target sequence for CIA30 (NM_016013.1,1109-1127).
caggaggtcaagattcctt

SEQ ID NO: 299280 - DNA, 19 bp, Homo sapiens
  siRNA target sequence for CIA30 (NM_016013.1,1112-1130).
gaggtcaagattccttttt

SEQ ID NO: 299281 - DNA, 19 bp, Homo sapiens
  siRNA target sequence for CIA30 (NM_016013.1,1115-1133).
gtcaagattcctttttcca

SEQ ID NO: 299282 - DNA, 19 bp, Homo sapiens
  siRNA target sequence for CIA30 (NM_016013.1,1155-1173).
gaagaatccgggatgttca

SEQ ID NO: 299283 - DNA, 19 bp, Homo sapiens
  siRNA target sequence for CIA30 (NM_016013.1,1175-1193).
catgagcttccgcttgata

SEQ ID NO: 299284 - DNA, 19 bp, Homo sapiens
  siRNA target sequence for CIA30 (NM_016013.1,1178-1196).
gagcttccgcttgataaga

SEQ ID NO: 299285 - DNA, 19 bp, Homo sapiens
  siRNA target sequence for CIA30 (NM_016013.1,1181-1199).
cttccgcttgataagatct

SEQ ID NO: 299286 - DNA, 19 bp, Homo sapiens
  siRNA target sequence for CIA30 (NM_016013.1,1184-1202).
ccgcttgataagatctctt

SEQ ID NO: 299287 - DNA, 19 bp, Homo sapiens
  siRNA target sequence for CIA30 (NM_016013.1,1209-1227).
gattcaccttggctgataa

SEQ ID NO: 299288 - DNA, 19 bp, Homo sapiens
  siRNA target sequence for CIA30 (NM_016013.1,1281-1299).
cagctcatacagaagaatt

SEQ ID NO: 299289 - DNA, 19 bp, Homo sapiens
  siRNA target sequence for CKAP1 (NM_001281.1,90-108).
cccacggtgaccgttttca

SEQ ID NO: 299290 - DNA, 19 bp, Homo sapiens
  siRNA target sequence for CKAP1 (NM_001281.1,91-109).
ccacggtgaccgttttcat

SEQ ID NO: 299291 - DNA, 19 bp, Homo sapiens
  siRNA target sequence for CKAP1 (NM_001281.1,169-187).
ctgagttcaagtgtaaact

SEQ ID NO: 299292 - DNA, 19 bp, Homo sapiens
  siRNA target sequence for CKAP1 (NM_001281.1,313-331).
gccgcatccacgtcattga

SEQ ID NO: 299293 - DNA, 19 bp, Homo sapiens
  siRNA target sequence for CKAP1 (NM_001281.1,383-401).
gtacacgatctcacaagaa

SEQ ID NO: 299294 - DNA, 19 bp, Homo sapiens
  siRNA target sequence for CKAP1 (NM_001281.1,593-611).
gggcaccgtcatgtatgta

SEQ ID NO: 299295 - DNA, 19 bp, Homo sapiens
  siRNA target sequence for CKAP1 (NM_001281.1,609-627).
gtaggtctcacagatttca

SEQ ID NO: 299296 - DNA, 19 bp, Homo sapiens
  siRNA target sequence for CKAP1 (NM_001281.1,641-659).
gattggtgtccgctatgat

SEQ ID NO: 299297 - DNA, 19 bp, Homo sapiens
  siRNA target sequence for CKAP1 (NM_001281.1,693-711).
gggaaacgctacttcgaat

SEQ ID NO: 299298 - DNA, 19 bp, Homo sapiens
  siRNA target sequence for CLN3 (NM_000086.1,270-288).
ggcctttgcaacaacttct

SEQ ID NO: 299299 - DNA, 19 bp, Homo sapiens
  siRNA target sequence for CLN3 (NM_000086.1,277-295).
gcaacaacttctcttatgt

SEQ ID NO: 299300 - DNA, 19 bp, Homo sapiens
  siRNA target sequence for CLN3 (NM_000086.1,456-474).
cccacactcgtcatcaaat

SEQ ID NO: 299301 - DNA, 19 bp, Homo sapiens
  siRNA target sequence for CLN3 (NM_000086.1,807-825).
ctggccagctatttcttgt

SEQ ID NO: 299302 - DNA, 19 bp, Homo sapiens
  siRNA target sequence for DNAJA2 (NM_005880.2,142-160).
gttagccaaggaatatcat

SEQ ID NO: 299303 - DNA, 19 bp, Homo sapiens
  siRNA target sequence for DNAJA2 (NM_005880.2,210-228).
catatgaagtactatcaaa

SEQ ID NO: 299304 - DNA, 19 bp, Homo sapiens
  siRNA target sequence for DNAJA2 (NM_005880.2,231-249).
ctgagaagcgtgagttata

SEQ ID NO: 299305 - DNA, 19 bp, Homo sapiens
  siRNA target sequence for DNAJA2 (NM_005880.2,296-314).
ggtggcatggatgatattt

SEQ ID NO: 299306 - DNA, 19 bp, Homo sapiens
  siRNA target sequence for DNAJA2 (NM_005880.2,297-315).
gtggcatggatgatatttt

SEQ ID NO: 299307 - DNA, 19 bp, Homo sapiens
  siRNA target sequence for DNAJA2 (NM_005880.2,352-370).
gggcaatcagagtagaagt

SEQ ID NO: 299308 - DNA, 19 bp, Homo sapiens
  siRNA target sequence for DNAJA2 (NM_005880.2,397-415).
catgatgcatccactcaaa

SEQ ID NO: 299309 - DNA, 19 bp, Homo sapiens
  siRNA target sequence for DNAJA2 (NM_005880.2,400-418).
gatgcatccactcaaagta

SEQ ID NO: 299310 - DNA, 19 bp, Homo sapiens
  siRNA target sequence for DNAJA2 (NM_005880.2,404-422).
catccactcaaagtatctt

SEQ ID NO: 299311 - DNA, 19 bp, Homo sapiens
  siRNA target sequence for DNAJA2 (NM_005880.2,412-430).
caaagtatctttagaagat

SEQ ID NO: 299312 - DNA, 19 bp, Homo sapiens
  siRNA target sequence for DNAJA2 (NM_005880.2,445-463).
gacaaccaaactacaactt

SEQ ID NO: 299313 - DNA, 19 bp, Homo sapiens
  siRNA target sequence for DNAJA2 (NM_005880.2,450-468).
ccaaactacaacttagcaa

SEQ ID NO: 299314 - DNA, 19 bp, Homo sapiens
  siRNA target sequence for DNAJA2 (NM_005880.2,548-566).
ggtgtgcgcatcatgatca

SEQ ID NO: 299315 - DNA, 19 bp, Homo sapiens
  siRNA target sequence for DNAJA2 (NM_005880.2,576-594).
ctccagggatggtacaaca

SEQ ID NO: 299316 - DNA, 19 bp, Homo sapiens
  siRNA target sequence for DNAJA2 (NM_005880.2,579-597).
cagggatggtacaacagat

SEQ ID NO: 299317 - DNA, 19 bp, Homo sapiens
  siRNA target sequence for DNAJA2 (NM_005880.2,644-662).
gaaaaagaccgctgtaaaa

SEQ ID NO: 299318 - DNA, 19 bp, Homo sapiens
  siRNA target sequence for DNAJA2 (NM_005880.2,731-749).
catggacagagaattacat

SEQ ID NO: 299319 - DNA, 19 bp, Homo sapiens
  siRNA target sequence for DNAJA2 (NM_005880.2,781-799).
ggaacccggagacattgtt

SEQ ID NO: 299320 - DNA, 19 bp, Homo sapiens
  siRNA target sequence for DNAJA2 (NM_005880.2,785-803).
cccggagacattgttcttt

SEQ ID NO: 299321 - DNA, 19 bp, Homo sapiens
  siRNA target sequence for DNAJA2 (NM_005880.2,786-804).
ccggagacattgttctttt

SEQ ID NO: 299322 - DNA, 19 bp, Homo sapiens
  siRNA target sequence for DNAJA2 (NM_005880.2,885-903).
ctctatgtggatttcagtt

SEQ ID NO: 299323 - DNA, 19 bp, Homo sapiens
  siRNA target sequence for DNAJA2 (NM_005880.2,893-911).
ggatttcagttcacattta

SEQ ID NO: 299324 - DNA, 19 bp, Homo sapiens
  siRNA target sequence for DNAJA2 (NM_005880.2,916-934).
ccttgatggacgtcagatt

SEQ ID NO: 299325 - DNA, 19 bp, Homo sapiens
  siRNA target sequence for DNAJA2 (NM_005880.2,926-944).
cgtcagattgtggtgaaat

SEQ ID NO: 299326 - DNA, 19 bp, Homo sapiens
  siRNA target sequence for DNAJA2 (NM_005880.2,946-964).
cccccctggcaaagtaatt

SEQ ID NO: 299327 - DNA, 19 bp, Homo sapiens
  siRNA target sequence for DNAJA2 (NM_005880.2,998-1016).
gggatgccgcagtatcgta

SEQ ID NO: 299328 - DNA, 19 bp, Homo sapiens
  siRNA target sequence for DNAJA2 (NM_005880.2,999-1017).
ggatgccgcagtatcgtaa

SEQ ID NO: 299329 - DNA, 19 bp, Homo sapiens
  siRNA target sequence for DNAJA2 (NM_005880.2,1000-1018).
gatgccgcagtatcgtaat

SEQ ID NO: 299330 - DNA, 19 bp, Homo sapiens
  siRNA target sequence for DNAJA2 (NM_005880.2,1009-1027).
gtatcgtaatccctttgaa

SEQ ID NO: 299331 - DNA, 19 bp, Homo sapiens
  siRNA target sequence for DNAJA2 (NM_005880.2,1032-1050).
gtgatctttacataaagtt

SEQ ID NO: 299332 - DNA, 19 bp, Homo sapiens
  siRNA target sequence for DNAJA2 (NM_005880.2,1122-1140).
ctagaccggaagttcctaa

SEQ ID NO: 299333 - DNA, 19 bp, Homo sapiens
  siRNA target sequence for DNAJA2 (NM_005880.2,1125-1143).
gaccggaagttcctaacat

SEQ ID NO: 299334 - DNA, 19 bp, Homo sapiens
  siRNA target sequence for DNAJA2 (NM_005880.2,1128-1146).
cggaagttcctaacataat

SEQ ID NO: 299335 - DNA, 19 bp, Homo sapiens
  siRNA target sequence for DNAJA2 (NM_005880.2,1129-1147).
ggaagttcctaacataatt

SEQ ID NO: 299336 - DNA, 19 bp, Homo sapiens
  siRNA target sequence for DNAJA2 (NM_005880.2,1212-1230).
ggcgtgaagcctataatga

SEQ ID NO: 299337 - DNA, 19 bp, Homo sapiens
  siRNA target sequence for DNAJA2 (NM_005880.2,1213-1231).
gcgtgaagcctataatgat

SEQ ID NO: 299338 - DNA, 19 bp, Homo sapiens
  siRNA target sequence for DNAJA2 (NM_005880.2,1214-1232).
cgtgaagcctataatgata

SEQ ID NO: 299339 - DNA, 19 bp, Homo sapiens
  siRNA target sequence for DNAJA3 (NM_005147.3,171-189).
cccgagcgctgctgacatt

SEQ ID NO: 299340 - DNA, 19 bp, Homo sapiens
  siRNA target sequence for DNAJA3 (NM_005147.3,173-191).
cgagcgctgctgacattga

SEQ ID NO: 299341 - DNA, 19 bp, Homo sapiens
  siRNA target sequence for DNAJA3 (NM_005147.3,261-279).
cccctttggccaaagaaga

SEQ ID NO: 299342 - DNA, 19 bp, Homo sapiens
  siRNA target sequence for DNAJA3 (NM_005147.3,264-282).
ctttggccaaagaagatta

SEQ ID NO: 299343 - DNA, 19 bp, Homo sapiens
  siRNA target sequence for DNAJA3 (NM_005147.3,501-519).
gcggctcccagcatagcta

SEQ ID NO: 299344 - DNA, 19 bp, Homo sapiens
  siRNA target sequence for DNAJA3 (NM_005147.3,585-603).
cctcttcatttggagattt

SEQ ID NO: 299345 - DNA, 19 bp, Homo sapiens
  siRNA target sequence for DNAJA3 (NM_005147.3,637-655).
catggagttgacattcaat

SEQ ID NO: 299346 - DNA, 19 bp, Homo sapiens
  siRNA target sequence for DNAJA3 (NM_005147.3,640-658).
ggagttgacattcaatcaa

SEQ ID NO: 299347 - DNA, 19 bp, Homo sapiens
  siRNA target sequence for DNAJA3 (NM_005147.3,774-792).
gctccggcatggaaaccat

SEQ ID NO: 299348 - DNA, 19 bp, Homo sapiens
  siRNA target sequence for DNAJA3 (NM_005147.3,887-905).
ggacaagccaagcagaaaa

SEQ ID NO: 299349 - DNA, 19 bp, Homo sapiens
  siRNA target sequence for DNAJA3 (NM_005147.3,888-906).
gacaagccaagcagaaaaa

SEQ ID NO: 299350 - DNA, 19 bp, Homo sapiens
  siRNA target sequence for DNAJA3 (NM_005147.3,975-993).
gggaaattttcattacgtt

SEQ ID NO: 299351 - DNA, 19 bp, Homo sapiens
  siRNA target sequence for DNAJA3 (NM_005147.3,1200-1218).
gctacggagaccactacat

SEQ ID NO: 299352 - DNA, 19 bp, Homo sapiens
  siRNA target sequence for DNAJA3 (NM_005147.3,1396-1414).
ggacgaggagggattcctt

SEQ ID NO: 299353 - DNA, 19 bp, Homo sapiens
  siRNA target sequence for DNAJA4 (NM_018602.2,363-381).
cggatgagggcgagaagtt

SEQ ID NO: 299354 - DNA, 19 bp, Homo sapiens
  siRNA target sequence for DNAJA4 (NM_018602.2,364-382).
ggatgagggcgagaagttt

SEQ ID NO: 299355 - DNA, 19 bp, Homo sapiens
  siRNA target sequence for DNAJA4 (NM_018602.2,365-383).
gatgagggcgagaagttta

SEQ ID NO: 299356 - DNA, 19 bp, Homo sapiens
  siRNA target sequence for DNAJA4 (NM_018602.2,372-390).
gcgagaagtttaaactcat

SEQ ID NO: 299357 - DNA, 19 bp, Homo sapiens
  siRNA target sequence for DNAJA4 (NM_018602.2,373-391).
cgagaagtttaaactcata

SEQ ID NO: 299358 - DNA, 19 bp, Homo sapiens
  siRNA target sequence for DNAJA4 (NM_018602.2,572-590).
gtacaccagttatctgtaa

SEQ ID NO: 299359 - DNA, 19 bp, Homo sapiens
  siRNA target sequence for DNAJA4 (NM_018602.2,577-595).
ccagttatctgtaactctt

SEQ ID NO: 299360 - DNA, 19 bp, Homo sapiens
  siRNA target sequence for DNAJA4 (NM_018602.2,628-646).
ggccctccagaaaaatgta

SEQ ID NO: 299361 - DNA, 19 bp, Homo sapiens
  siRNA target sequence for DNAJA4 (NM_018602.2,629-647).
gccctccagaaaaatgtaa

SEQ ID NO: 299362 - DNA, 19 bp, Homo sapiens
  siRNA target sequence for DNAJA4 (NM_018602.2,632-650).
ctccagaaaaatgtaattt

SEQ ID NO: 299363 - DNA, 19 bp, Homo sapiens
  siRNA target sequence for DNAJA4 (NM_018602.2,851-869).
gtgatccgtgagaagaaga

SEQ ID NO: 299364 - DNA, 19 bp, Homo sapiens
  siRNA target sequence for DNAJA4 (NM_018602.2,858-876).
gtgagaagaagattatcga

SEQ ID NO: 299365 - DNA, 19 bp, Homo sapiens
  siRNA target sequence for DNAJA4 (NM_018602.2,868-886).
gattatcgaggtacatgtt

SEQ ID NO: 299366 - DNA, 19 bp, Homo sapiens
  siRNA target sequence for DNAJA4 (NM_018602.2,906-924).
ggcaaaagatactatttca

SEQ ID NO: 299367 - DNA, 19 bp, Homo sapiens
  siRNA target sequence for DNAJA4 (NM_018602.2,1013-1031).
ggccatgacttgatcatga

SEQ ID NO: 299368 - DNA, 19 bp, Homo sapiens
  siRNA target sequence for DNAJA4 (NM_018602.2,1014-1032).
gccatgacttgatcatgaa

SEQ ID NO: 299369 - DNA, 19 bp, Homo sapiens
  siRNA target sequence for DNAJA4 (NM_018602.2,1086-1104).
cattggacaatcgaattct

SEQ ID NO: 299370 - DNA, 19 bp, Homo sapiens
  siRNA target sequence for DNAJA4 (NM_018602.2,1090-1108).
ggacaatcgaattcttgtt

SEQ ID NO: 299371 - DNA, 19 bp, Homo sapiens
  siRNA target sequence for DNAJA4 (NM_018602.2,1091-1109).
gacaatcgaattcttgtta

SEQ ID NO: 299372 - DNA, 19 bp, Homo sapiens
  siRNA target sequence for DNAJA4 (NM_018602.2,1093-1111).
caatcgaattcttgttatt

SEQ ID NO: 299373 - DNA, 19 bp, Homo sapiens
  siRNA target sequence for DNAJA4 (NM_018602.2,1166-1184).
gaaggaatgcccatctaca

SEQ ID NO: 299374 - DNA, 19 bp, Homo sapiens
  siRNA target sequence for DNAJA4 (NM_018602.2,1295-1313).
cgacagaaagtgaggatta

SEQ ID NO: 299375 - DNA, 19 bp, Homo sapiens
  siRNA target sequence for DNAJB11 (NM_016306.3,224-242).
ccggacgagatttctataa

SEQ ID NO: 299376 - DNA, 19 bp, Homo sapiens
  siRNA target sequence for DNAJB11 (NM_016306.3,226-244).
ggacgagatttctataaga

SEQ ID NO: 299377 - DNA, 19 bp, Homo sapiens
  siRNA target sequence for DNAJB11 (NM_016306.3,227-245).
gacgagatttctataagat

SEQ ID NO: 299378 - DNA, 19 bp, Homo sapiens
  siRNA target sequence for DNAJB11 (NM_016306.3,257-275).
ctcgaagtgcctctataaa

SEQ ID NO: 299379 - DNA, 19 bp, Homo sapiens
  siRNA target sequence for DNAJB11 (NM_016306.3,265-283).
gcctctataaaggatatta

SEQ ID NO: 299380 - DNA, 19 bp, Homo sapiens
  siRNA target sequence for DNAJB11 (NM_016306.3,266-284).
cctctataaaggatattaa

SEQ ID NO: 299381 - DNA, 19 bp, Homo sapiens
  siRNA target sequence for DNAJB11 (NM_016306.3,321-339).
cgaccggaaccctgatgat

SEQ ID NO: 299382 - DNA, 19 bp, Homo sapiens
  siRNA target sequence for DNAJB11 (NM_016306.3,406-424).
cggaaacagtacgatactt

SEQ ID NO: 299383 - DNA, 19 bp, Homo sapiens
  siRNA target sequence for DNAJB11 (NM_016306.3,407-425).
ggaaacagtacgatactta

SEQ ID NO: 299384 - DNA, 19 bp, Homo sapiens
  siRNA target sequence for DNAJB11 (NM_016306.3,408-426).
gaaacagtacgatacttat

SEQ ID NO: 299385 - DNA, 19 bp, Homo sapiens
  siRNA target sequence for DNAJB11 (NM_016306.3,417-435).
cgatacttatggtgaagaa

SEQ ID NO: 299386 - DNA, 19 bp, Homo sapiens
  siRNA target sequence for DNAJB11 (NM_016306.3,456-474).
gagctcccatggagacatt

SEQ ID NO: 299387 - DNA, 19 bp, Homo sapiens
  siRNA target sequence for DNAJB11 (NM_016306.3,554-572).
gtgatattattgtagatct

SEQ ID NO: 299388 - DNA, 19 bp, Homo sapiens
  siRNA target sequence for DNAJB11 (NM_016306.3,652-670).
ggcaaacggaagtgcaatt

SEQ ID NO: 299389 - DNA, 19 bp, Homo sapiens
  siRNA target sequence for DNAJB11 (NM_016306.3,654-672).
caaacggaagtgcaattgt

SEQ ID NO: 299390 - DNA, 19 bp, Homo sapiens
  siRNA target sequence for DNAJB11 (NM_016306.3,665-683).
gcaattgtcggcaagagat

SEQ ID NO: 299391 - DNA, 19 bp, Homo sapiens
  siRNA target sequence for DNAJB11 (NM_016306.3,701-719).
gccctgggcgcttccaaat

SEQ ID NO: 299392 - DNA, 19 bp, Homo sapiens
  siRNA target sequence for DNAJB11 (NM_016306.3,703-721).
cctgggcgcttccaaatga

SEQ ID NO: 299393 - DNA, 19 bp, Homo sapiens
  siRNA target sequence for DNAJB11 (NM_016306.3,737-755).
gcgacgaatgccctaatgt

SEQ ID NO: 299394 - DNA, 19 bp, Homo sapiens
  siRNA target sequence for DNAJB11 (NM_016306.3,741-759).
cgaatgccctaatgtcaaa

SEQ ID NO: 299395 - DNA, 19 bp, Homo sapiens
  siRNA target sequence for DNAJB11 (NM_016306.3,746-764).
gccctaatgtcaaactagt

SEQ ID NO: 299396 - DNA, 19 bp, Homo sapiens
  siRNA target sequence for DNAJB11 (NM_016306.3,749-767).
ctaatgtcaaactagtgaa

SEQ ID NO: 299397 - DNA, 19 bp, Homo sapiens
  siRNA target sequence for DNAJB11 (NM_016306.3,819-837).
ggagtacccctttattgga

SEQ ID NO: 299398 - DNA, 19 bp, Homo sapiens
  siRNA target sequence for DNAJB11 (NM_016306.3,878-896).
ggttccgaatcaaagttgt

SEQ ID NO: 299399 - DNA, 19 bp, Homo sapiens
  siRNA target sequence for DNAJB11 (NM_016306.3,892-910).
gttgtcaagcacccaatat

SEQ ID NO: 299400 - DNA, 19 bp, Homo sapiens
  siRNA target sequence for DNAJB11 (NM_016306.3,917-935).
ggagaggagatgatttgta

SEQ ID NO: 299401 - DNA, 19 bp, Homo sapiens
  siRNA target sequence for DNAJB11 (NM_016306.3,970-988).
gttggctttgagatggata

SEQ ID NO: 299402 - DNA, 19 bp, Homo sapiens
  siRNA target sequence for DNAJB11 (NM_016306.3,1000-1018).
gatggtcacaaggtacata

SEQ ID NO: 299403 - DNA, 19 bp, Homo sapiens
  siRNA target sequence for DNAJB11 (NM_016306.3,1015-1033).
catatttcccgggataaga

SEQ ID NO: 299404 - DNA, 19 bp, Homo sapiens
  siRNA target sequence for DNAJB11 (NM_016306.3,1043-1061).
caggagcgaagctatggaa

SEQ ID NO: 299405 - DNA, 19 bp, Homo sapiens
  siRNA target sequence for DNAJB11 (NM_016306.3,1104-1122).
gggctctttgataatcact

SEQ ID NO: 299406 - DNA, 19 bp, Homo sapiens
  siRNA target sequence for DNAJB11 (NM_016306.3,1163-1181).
cgagagaaggtatcaaaca

SEQ ID NO: 299407 - DNA, 19 bp, Homo sapiens
  siRNA target sequence for DNAJB11 (NM_016306.3,1196-1214).
ggtcagtgcagaaggtata

SEQ ID NO: 299408 - DNA, 19 bp, Homo sapiens
  siRNA target sequence for DNAJB11 (NM_016306.3,1215-1233).
caatggactgcaaggatat

SEQ ID NO: 299409 - DNA, 19 bp, Homo sapiens
  siRNA target sequence for DNAJB12 (NM_017626.1,332-350).
gtgaaaagggtcaagcaat

SEQ ID NO: 299410 - DNA, 19 bp, Homo sapiens
  siRNA target sequence for DNAJB12 (NM_017626.1,339-357).
gggtcaagcaatgtaaaga

SEQ ID NO: 299411 - DNA, 19 bp, Homo sapiens
  siRNA target sequence for DNAJB12 (NM_017626.1,340-358).
ggtcaagcaatgtaaagat

SEQ ID NO: 299412 - DNA, 19 bp, Homo sapiens
  siRNA target sequence for DNAJB12 (NM_017626.1,898-916).
cctgggtgtcgtctactat

SEQ ID NO: 299413 - DNA, 19 bp, Homo sapiens
  siRNA target sequence for DNAJB8 (NM_153330.1,340-358).
gttggcaccccgacaagaa

SEQ ID NO: 299414 - DNA, 19 bp, Homo sapiens
  siRNA target sequence for DNAJB8 (NM_153330.1,535-553).
gtaaccctgaggacatctt

SEQ ID NO: 299415 - DNA, 19 bp, Homo sapiens
  siRNA target sequence for DNAJB8 (NM_153330.1,658-676).
cggcaggctttggagaatt

SEQ ID NO: 299416 - DNA, 19 bp, Homo sapiens
  siRNA target sequence for DNAJB8 (NM_153330.1,777-795).
ggcagctcggggttcaagt

SEQ ID NO: 299417 - DNA, 19 bp, Homo sapiens
  siRNA target sequence for DNAJB8 (NM_153330.1,805-823).
cgtccaccgagatgatcaa

SEQ ID NO: 299418 - DNA, 19 bp, Homo sapiens
  siRNA target sequence for DNAJB9 (NM_012328.1,205-223).
ggctactccccagtcaatt

SEQ ID NO: 299419 - DNA, 19 bp, Homo sapiens
  siRNA target sequence for DNAJB9 (NM_012328.1,210-228).
ctccccagtcaattttcat

SEQ ID NO: 299420 - DNA, 19 bp, Homo sapiens
  siRNA target sequence for DNAJB9 (NM_012328.1,271-289).
ctcaaaaagctactatgat

SEQ ID NO: 299421 - DNA, 19 bp, Homo sapiens
  siRNA target sequence for DNAJB9 (NM_012328.1,382-400).
cccggatgctgaagcaaaa

SEQ ID NO: 299422 - DNA, 19 bp, Homo sapiens
  siRNA target sequence for DNAJB9 (NM_012328.1,383-401).
ccggatgctgaagcaaaat

SEQ ID NO: 299423 - DNA, 19 bp, Homo sapiens
  siRNA target sequence for DNAJB9 (NM_012328.1,440-458).
gctaatagacgaaaagagt

SEQ ID NO: 299424 - DNA, 19 bp, Homo sapiens
  siRNA target sequence for DNAJB9 (NM_012328.1,441-459).
ctaatagacgaaaagagta

SEQ ID NO: 299425 - DNA, 19 bp, Homo sapiens
  siRNA target sequence for DNAJB9 (NM_012328.1,450-468).
gaaaagagtatgatacact

SEQ ID NO: 299426 - DNA, 19 bp, Homo sapiens
  siRNA target sequence for DNAJB9 (NM_012328.1,507-525).
gtagtggaagttcttttga

SEQ ID NO: 299427 - DNA, 19 bp, Homo sapiens
  siRNA target sequence for DNAJB9 (NM_012328.1,519-537).
cttttgagcagtcatttaa

SEQ ID NO: 299428 - DNA, 19 bp, Homo sapiens
  siRNA target sequence for DNAJB9 (NM_012328.1,597-615).
gatccaagaagcgttttga

SEQ ID NO: 299429 - DNA, 19 bp, Homo sapiens
  siRNA target sequence for DNAJB9 (NM_012328.1,753-771).
ctaccaatcagcatacagt

SEQ ID NO: 299430 - DNA, 19 bp, Homo sapiens
  siRNA target sequence for DNAJB9 (NM_012328.1,775-793).
gactgaaaatagatttcat

SEQ ID NO: 299431 - DNA, 19 bp, Homo sapiens
  siRNA target sequence for DNAJB9 (NM_012328.1,822-840).
ctcaacgaagaggaaatat

SEQ ID NO: 299432 - DNA, 19 bp, Homo sapiens
  siRNA target sequence for DNAJB9 (NM_012328.1,834-852).
gaaatatggttactacata

SEQ ID NO: 299433 - DNA, 19 bp, Homo sapiens
  siRNA target sequence for DNAJC4 (NM_005528.1,1137-1155).
gcatgggcctgcactacat

SEQ ID NO: 299434 - DNA, 19 bp, Homo sapiens
  siRNA target sequence for DNAJC8 (NM_014280.1,144-162).
cggttctaacttcgaaaaa

SEQ ID NO: 299435 - DNA, 19 bp, Homo sapiens
  siRNA target sequence for DNAJC8 (NM_014280.1,153-171).
cttcgaaaaatcagattga

SEQ ID NO: 299436 - DNA, 19 bp, Homo sapiens
  siRNA target sequence for DNAJC8 (NM_014280.1,267-285).
ggtttcggcagttatccat

SEQ ID NO: 299437 - DNA, 19 bp, Homo sapiens
  siRNA target sequence for DNAJC8 (NM_014280.1,286-304).
cttggtgcatcctgacaaa

SEQ ID NO: 299438 - DNA, 19 bp, Homo sapiens
  siRNA target sequence for DNAJC8 (NM_014280.1,391-409).
gagggccctggatgtaatt

SEQ ID NO: 299439 - DNA, 19 bp, Homo sapiens
  siRNA target sequence for DNAJC8 (NM_014280.1,427-445).
cgtggaacacactgtgaaa

SEQ ID NO: 299440 - DNA, 19 bp, Homo sapiens
  siRNA target sequence for DNAJC8 (NM_014280.1,474-492).
gaaaacctacaattgtaga

SEQ ID NO: 299441 - DNA, 19 bp, Homo sapiens
  siRNA target sequence for DNAJC8 (NM_014280.1,518-536).
caagctgtatataaacaga

SEQ ID NO: 299442 - DNA, 19 bp, Homo sapiens
  siRNA target sequence for DNAJC8 (NM_014280.1,764-782).
ctgagaccaccgaaagtaa

SEQ ID NO: 299443 - DNA, 19 bp, Homo sapiens
  siRNA target sequence for GRPEL1 (NM_025196.2,122-140).
gtgcacagccacgaaacaa

SEQ ID NO: 299444 - DNA, 19 bp, Homo sapiens
  siRNA target sequence for GRPEL1 (NM_025196.2,306-324).
cggcagaggagccagaaat

SEQ ID NO: 299445 - DNA, 19 bp, Homo sapiens
  siRNA target sequence for GRPEL1 (NM_025196.2,327-345).
gtggaggaggcaaaattat

SEQ ID NO: 299446 - DNA, 19 bp, Homo sapiens
  siRNA target sequence for HKE2 (NM_014260.2,169-187).
gctacagaaggacttaagt

SEQ ID NO: 299447 - DNA, 19 bp, Homo sapiens
  siRNA target sequence for HKE2 (NM_014260.2,198-216).
cggggaggcagaaacttga

SEQ ID NO: 299448 - DNA, 19 bp, Homo sapiens
  siRNA target sequence for HKE2 (NM_014260.2,208-226).
gaaacttgaagcacaacta

SEQ ID NO: 299449 - DNA, 19 bp, Homo sapiens
  siRNA target sequence for HKE2 (NM_014260.2,270-288).
ggtccaacgtggtctttaa

SEQ ID NO: 299450 - DNA, 19 bp, Homo sapiens
  siRNA target sequence for HKE2 (NM_014260.2,271-289).
gtccaacgtggtctttaaa

SEQ ID NO: 299451 - DNA, 19 bp, Homo sapiens
  siRNA target sequence for HKE2 (NM_014260.2,274-292).
caacgtggtctttaaactt

SEQ ID NO: 299452 - DNA, 19 bp, Homo sapiens
  siRNA target sequence for HKE2 (NM_014260.2,295-313).
gggtccggtgctagtcaaa

SEQ ID NO: 299453 - DNA, 19 bp, Homo sapiens
  siRNA target sequence for HKE2 (NM_014260.2,297-315).
gtccggtgctagtcaaaca

SEQ ID NO: 299454 - DNA, 19 bp, Homo sapiens
  siRNA target sequence for HKE2 (NM_014260.2,344-362).
gggaagaggctggactata

SEQ ID NO: 299455 - DNA, 19 bp, Homo sapiens
  siRNA target sequence for HKE2 (NM_014260.2,345-363).
ggaagaggctggactatat

SEQ ID NO: 299456 - DNA, 19 bp, Homo sapiens
  siRNA target sequence for HKE2 (NM_014260.2,371-389).
gaaattaagcgatacgaat

SEQ ID NO: 299457 - DNA, 19 bp, Homo sapiens
  siRNA target sequence for JDP1 (NM_021800.1,188-206).
ctgaagattactacacatt

SEQ ID NO: 299458 - DNA, 19 bp, Homo sapiens
  siRNA target sequence for JDP1 (NM_021800.1,223-241).
ctatcttcggttgaacaaa

SEQ ID NO: 299459 - DNA, 19 bp, Homo sapiens
  siRNA target sequence for JDP1 (NM_021800.1,481-499).
gacctgatgctggaagaat

SEQ ID NO: 299460 - DNA, 19 bp, Homo sapiens
  siRNA target sequence for JDP1 (NM_021800.1,496-514).
gaatctgacaagactcata

SEQ ID NO: 299461 - DNA, 19 bp, Homo sapiens
  siRNA target sequence for JDP1 (NM_021800.1,624-642).
gtcagtctccccgcaaaat

SEQ ID NO: 299462 - DNA, 19 bp, Homo sapiens
  siRNA target sequence for JDP1 (NM_021800.1,633-651).
cccgcaaaattcagattct

SEQ ID NO: 299463 - DNA, 19 bp, Homo sapiens
  siRNA target sequence for JDP1 (NM_021800.1,715-733).
gaactcctgaggaagttca

SEQ ID NO: 299464 - DNA, 19 bp, Homo sapiens
  siRNA target sequence for MGC26226 (NM_033105.3,316-334).
cagcggactctgtcaacaa

SEQ ID NO: 299465 - DNA, 19 bp, Homo sapiens
  siRNA target sequence for MGC26226 (NM_033105.3,335-353).
caggagaagctctatacga

SEQ ID NO: 299466 - DNA, 19 bp, Homo sapiens
  siRNA target sequence for MGC26226 (NM_033105.3,337-355).
ggagaagctctatacgaaa

SEQ ID NO: 299467 - DNA, 19 bp, Homo sapiens
  siRNA target sequence for MGC26226 (NM_033105.3,338-356).
gagaagctctatacgaaat

SEQ ID NO: 299468 - DNA, 19 bp, Homo sapiens
  siRNA target sequence for MGC26226 (NM_033105.3,366-384).
gcataagggagcatcaaat

SEQ ID NO: 299469 - DNA, 19 bp, Homo sapiens
  siRNA target sequence for MGC26226 (NM_033105.3,483-501).
caacgcccacgcaatactt

SEQ ID NO: 299470 - DNA, 19 bp, Homo sapiens
  siRNA target sequence for MGC26226 (NM_033105.3,493-511).
gcaatacttaccgacattt

SEQ ID NO: 299471 - DNA, 19 bp, Homo sapiens
  siRNA target sequence for MGC26226 (NM_033105.3,512-530).
caaagagaagcatatacga

SEQ ID NO: 299472 - DNA, 19 bp, Homo sapiens
  siRNA target sequence for MGC26226 (NM_033105.3,518-536).
gaagcatatacgacaagta

SEQ ID NO: 299473 - DNA, 19 bp, Homo sapiens
  siRNA target sequence for MGC26226 (NM_033105.3,645-663).
cttgacgggctgctacttt

SEQ ID NO: 299474 - DNA, 19 bp, Homo sapiens
  siRNA target sequence for PFDN2 (NM_012394.2,190-208).
cacagcctagtgatcgata

SEQ ID NO: 299475 - DNA, 19 bp, Homo sapiens
  siRNA target sequence for PFDN2 (NM_012394.2,194-212).
gcctagtgatcgatacact

SEQ ID NO: 299476 - DNA, 19 bp, Homo sapiens
  siRNA target sequence for PFDN2 (NM_012394.2,264-282).
ggtggagcgaactgtcaaa

SEQ ID NO: 299477 - DNA, 19 bp, Homo sapiens
  siRNA target sequence for PFDN2 (NM_012394.2,384-402).
ccgggaaaagcacaacatt

SEQ ID NO: 299478 - DNA, 19 bp, Homo sapiens
  siRNA target sequence for SCAP (NM_012235.1,760-778).
ggctgcgtgttgtctactt

SEQ ID NO: 299479 - DNA, 19 bp, Homo sapiens
  siRNA target sequence for SCAP (NM_012235.1,1116-1134).
gaggaactttggaggaaat

SEQ ID NO: 299480 - DNA, 19 bp, Homo sapiens
  siRNA target sequence for SCAP (NM_012235.1,1152-1170).
ccgacgctcttcagctatt

SEQ ID NO: 299481 - DNA, 19 bp, Homo sapiens
  siRNA target sequence for SCAP (NM_012235.1,1153-1171).
cgacgctcttcagctatta

SEQ ID NO: 299482 - DNA, 19 bp, Homo sapiens
  siRNA target sequence for SCAP (NM_012235.1,1363-1381).
gagacgtcacgctgtacaa

SEQ ID NO: 299483 - DNA, 19 bp, Homo sapiens
  siRNA target sequence for SCAP (NM_012235.1,1745-1763).
gagctgggaacgactttca

SEQ ID NO: 299484 - DNA, 19 bp, Homo sapiens
  siRNA target sequence for SCAP (NM_012235.1,1860-1878).
cctgacctcacctgcttaa

SEQ ID NO: 299485 - DNA, 19 bp, Homo sapiens
  siRNA target sequence for SCAP (NM_012235.1,1861-1879).
ctgacctcacctgcttaat

SEQ ID NO: 299486 - DNA, 19 bp, Homo sapiens
  siRNA target sequence for SCAP (NM_012235.1,2219-2237).
ggtgtgggacgccattgaa

SEQ ID NO: 299487 - DNA, 19 bp, Homo sapiens
  siRNA target sequence for SCAP (NM_012235.1,2611-2629).
ccatcacgaccgtgtacat

SEQ ID NO: 299488 - DNA, 19 bp, Homo sapiens
  siRNA target sequence for SCAP (NM_012235.1,2612-2630).
catcacgaccgtgtacatt

SEQ ID NO: 299489 - DNA, 19 bp, Homo sapiens
  siRNA target sequence for SCAP (NM_012235.1,2701-2719).
gccgggtcagccatgtgtt

SEQ ID NO: 299490 - DNA, 19 bp, Homo sapiens
  siRNA target sequence for SCAP (NM_012235.1,2917-2935).
ccttttgggacctaaacta

SEQ ID NO: 299491 - DNA, 19 bp, Homo sapiens
  siRNA target sequence for SCO1 (NM_004589.1,83-101).
cctcgcggactcgagtttt

SEQ ID NO: 299492 - DNA, 19 bp, Homo sapiens
  siRNA target sequence for SCO1 (NM_004589.1,321-339).
ctattggaggagctttact

SEQ ID NO: 299493 - DNA, 19 bp, Homo sapiens
  siRNA target sequence for SCO1 (NM_004589.1,345-363).
gaatgaagcacgtcaagaa

SEQ ID NO: 299494 - DNA, 19 bp, Homo sapiens
  siRNA target sequence for SCO1 (NM_004589.1,349-367).
gaagcacgtcaagaaagaa

SEQ ID NO: 299495 - DNA, 19 bp, Homo sapiens
  siRNA target sequence for SCO1 (NM_004589.1,430-448).
gttttccctcacaactcat

SEQ ID NO: 299496 - DNA, 19 bp, Homo sapiens
  siRNA target sequence for SCO1 (NM_004589.1,446-464).
catactggggagcgtaaaa

SEQ ID NO: 299497 - DNA, 19 bp, Homo sapiens
  siRNA target sequence for SCO1 (NM_004589.1,450-468).
ctggggagcgtaaaactga

SEQ ID NO: 299498 - DNA, 19 bp, Homo sapiens
  siRNA target sequence for SCO1 (NM_004589.1,529-547).
ctgtccagaagaactagaa

SEQ ID NO: 299499 - DNA, 19 bp, Homo sapiens
  siRNA target sequence for SCO1 (NM_004589.1,560-578).
gtcgtggatgaaatagata

SEQ ID NO: 299500 - DNA, 19 bp, Homo sapiens
  siRNA target sequence for SCO1 (NM_004589.1,569-587).
gaaatagatagcattacaa

SEQ ID NO: 299501 - DNA, 19 bp, Homo sapiens
  siRNA target sequence for SCO1 (NM_004589.1,647-665).
gccatcgcaaattatgtga

SEQ ID NO: 299502 - DNA, 19 bp, Homo sapiens
  siRNA target sequence for SCO1 (NM_004589.1,729-747).
gagcatacagagtgtatta

SEQ ID NO: 299503 - DNA, 19 bp, Homo sapiens
  siRNA target sequence for SCO1 (NM_004589.1,731-749).
gcatacagagtgtattaca

SEQ ID NO: 299504 - DNA, 19 bp, Homo sapiens
  siRNA target sequence for SCO1 (NM_004589.1,781-799).
catagtggatcacacaata

SEQ ID NO: 299505 - DNA, 19 bp, Homo sapiens
  siRNA target sequence for SCO1 (NM_004589.1,819-837).
cagatggtgagtttctaga

SEQ ID NO: 299506 - DNA, 19 bp, Homo sapiens
  siRNA target sequence for SCO1 (NM_004589.1,890-908).
cacatgaggccatacagaa

SEQ ID NO: 299507 - DNA, 19 bp, Homo sapiens
  siRNA target sequence for SIL1 (NM_022464.3,356-374).
gaggacaagttccgaaata

SEQ ID NO: 299508 - DNA, 19 bp, Homo sapiens
  siRNA target sequence for SIL1 (NM_022464.3,358-376).
ggacaagttccgaaataat

SEQ ID NO: 299509 - DNA, 19 bp, Homo sapiens
  siRNA target sequence for SIL1 (NM_022464.3,383-401).
ggcaaaaggctggatatca

SEQ ID NO: 299510 - DNA, 19 bp, Homo sapiens
  siRNA target sequence for SIL1 (NM_022464.3,384-402).
gcaaaaggctggatatcaa

SEQ ID NO: 299511 - DNA, 19 bp, Homo sapiens
  siRNA target sequence for SIL1 (NM_022464.3,492-510).
caaggcaggctgaggtaaa

SEQ ID NO: 299512 - DNA, 19 bp, Homo sapiens
  siRNA target sequence for SIL1 (NM_022464.3,547-565).
ctttgatgagctgaatgtt

SEQ ID NO: 299513 - DNA, 19 bp, Homo sapiens
  siRNA target sequence for SIL1 (NM_022464.3,593-611).
gtacggctgatcaacaagt

SEQ ID NO: 299514 - DNA, 19 bp, Homo sapiens
  siRNA target sequence for SIL1 (NM_022464.3,596-614).
cggctgatcaacaagttca

SEQ ID NO: 299515 - DNA, 19 bp, Homo sapiens
  siRNA target sequence for SIL1 (NM_022464.3,597-615).
ggctgatcaacaagttcaa

SEQ ID NO: 299516 - DNA, 19 bp, Homo sapiens
  siRNA target sequence for SIL1 (NM_022464.3,599-617).
ctgatcaacaagttcaata

SEQ ID NO: 299517 - DNA, 19 bp, Homo sapiens
  siRNA target sequence for SIL1 (NM_022464.3,601-619).
gatcaacaagttcaatagt

SEQ ID NO: 299518 - DNA, 19 bp, Homo sapiens
  siRNA target sequence for SIL1 (NM_022464.3,643-661).
gattgctgcgctctttgat

SEQ ID NO: 299519 - DNA, 19 bp, Homo sapiens
  siRNA target sequence for SIL1 (NM_022464.3,650-668).
gcgctctttgatcttgaat

SEQ ID NO: 299520 - DNA, 19 bp, Homo sapiens
  siRNA target sequence for SIL1 (NM_022464.3,651-669).
cgctctttgatcttgaata

SEQ ID NO: 299521 - DNA, 19 bp, Homo sapiens
  siRNA target sequence for SIL1 (NM_022464.3,717-735).
gtcttcaagtggtgatcaa

SEQ ID NO: 299522 - DNA, 19 bp, Homo sapiens
  siRNA target sequence for SIL1 (NM_022464.3,881-899).
ccgctcactgcaaagaaga

SEQ ID NO: 299523 - DNA, 19 bp, Homo sapiens
  siRNA target sequence for WBSCR18 (NM_032317.2,88-106).
ccgtggctttccacaaaat

SEQ ID NO: 299524 - DNA, 19 bp, Homo sapiens
  siRNA target sequence for WBSCR18 (NM_032317.2,89-107).
cgtggctttccacaaaatt

SEQ ID NO: 299525 - DNA, 19 bp, Homo sapiens
  siRNA target sequence for WBSCR18 (NM_032317.2,124-142).
cctaggagcgaggacttat

SEQ ID NO: 299526 - DNA, 19 bp, Homo sapiens
  siRNA target sequence for WBSCR18 (NM_032317.2,125-143).
ctaggagcgaggacttatt

SEQ ID NO: 299527 - DNA, 19 bp, Homo sapiens
  siRNA target sequence for WBSCR18 (NM_032317.2,146-164).
cagggcgactgctcgtatt

SEQ ID NO: 299528 - DNA, 19 bp, Homo sapiens
  siRNA target sequence for WBSCR18 (NM_032317.2,166-184).
gcgcacggcgctgtatgat

SEQ ID NO: 299529 - DNA, 19 bp, Homo sapiens
  siRNA target sequence for WBSCR18 (NM_032317.2,168-186).
gcacggcgctgtatgatct

SEQ ID NO: 299530 - DNA, 19 bp, Homo sapiens
  siRNA target sequence for WBSCR18 (NM_032317.2,206-224).
gccacgcaggcccaaatca

SEQ ID NO: 299531 - DNA, 19 bp, Homo sapiens
  siRNA target sequence for WBSCR18 (NM_032317.2,207-225).
ccacgcaggcccaaatcaa

SEQ ID NO: 299532 - DNA, 19 bp, Homo sapiens
  siRNA target sequence for WBSCR18 (NM_032317.2,340-358).
caccctccgtcgcaagtat

SEQ ID NO: 299533 - DNA, 19 bp, Homo sapiens
  siRNA target sequence for WBSCR18 (NM_032317.2,342-360).
ccctccgtcgcaagtatga

SEQ ID NO: 299534 - DNA, 19 bp, Homo sapiens
  siRNA target sequence for WBSCR18 (NM_032317.2,343-361).
cctccgtcgcaagtatgat

SEQ ID NO: 299535 - DNA, 19 bp, Homo sapiens
  siRNA target sequence for WBSCR18 (NM_032317.2,497-515).
gccaaccgcacgatgttca

SEQ ID NO: 299536 - DNA, 19 bp, Homo sapiens
  siRNA target sequence for WBSCR18 (NM_032317.2,504-522).
gcacgatgttcaactttga

SEQ ID NO: 299537 - DNA, 19 bp, Homo sapiens
  siRNA target sequence for WBSCR18 (NM_032317.2,607-625).
ggagtatcggtccatgaaa

SEQ ID NO: 299538 - DNA, 19 bp, Homo sapiens
  siRNA target sequence for WBSCR18 (NM_032317.2,668-686).
ctcatcttttcaatcttca

SEQ ID NO: 299539 - DNA, 19 bp, Homo sapiens
  siRNA target sequence for APPBP2 (NM_006380.2,312-330).
gatcccagagactctctat

SEQ ID NO: 299540 - DNA, 19 bp, Homo sapiens
  siRNA target sequence for APPBP2 (NM_006380.2,316-334).
ccagagactctctataaca

SEQ ID NO: 299541 - DNA, 19 bp, Homo sapiens
  siRNA target sequence for APPBP2 (NM_006380.2,344-362).
ccgctgtcgtggacaacta

SEQ ID NO: 299542 - DNA, 19 bp, Homo sapiens
  siRNA target sequence for APPBP2 (NM_006380.2,346-364).
gctgtcgtggacaactaca

SEQ ID NO: 299543 - DNA, 19 bp, Homo sapiens
  siRNA target sequence for APPBP2 (NM_006380.2,399-417).
gaacatccagtttgatgtt

SEQ ID NO: 299544 - DNA, 19 bp, Homo sapiens
  siRNA target sequence for APPBP2 (NM_006380.2,412-430).
gatgtttactacaagcttt

SEQ ID NO: 299545 - DNA, 19 bp, Homo sapiens
  siRNA target sequence for APPBP2 (NM_006380.2,432-450).
ccaacagggacgcttatgt

SEQ ID NO: 299546 - DNA, 19 bp, Homo sapiens
  siRNA target sequence for APPBP2 (NM_006380.2,493-511).
gtactgagagctttggata

SEQ ID NO: 299547 - DNA, 19 bp, Homo sapiens
  siRNA target sequence for APPBP2 (NM_006380.2,572-590).
cagtcttggcctactcatt

SEQ ID NO: 299548 - DNA, 19 bp, Homo sapiens
  siRNA target sequence for APPBP2 (NM_006380.2,591-609).
cagtaggcggtgctcttat

SEQ ID NO: 299549 - DNA, 19 bp, Homo sapiens
  siRNA target sequence for APPBP2 (NM_006380.2,593-611).
gtaggcggtgctcttatat

SEQ ID NO: 299550 - DNA, 19 bp, Homo sapiens
  siRNA target sequence for APPBP2 (NM_006380.2,597-615).
gcggtgctcttatatagca

SEQ ID NO: 299551 - DNA, 19 bp, Homo sapiens
  siRNA target sequence for APPBP2 (NM_006380.2,726-744).
ccttcagttgtgtactcta

SEQ ID NO: 299552 - DNA, 19 bp, Homo sapiens
  siRNA target sequence for APPBP2 (NM_006380.2,745-763).
cacgatgagatgcttcatt

SEQ ID NO: 299553 - DNA, 19 bp, Homo sapiens
  siRNA target sequence for APPBP2 (NM_006380.2,765-783).
gtttcgtgcagtagaatgt

SEQ ID NO: 299554 - DNA, 19 bp, Homo sapiens
  siRNA target sequence for APPBP2 (NM_006380.2,826-844).
catttgggtgaagaaacat

SEQ ID NO: 299555 - DNA, 19 bp, Homo sapiens
  siRNA target sequence for APPBP2 (NM_006380.2,926-944).
gtgcactcctatttgcaaa

SEQ ID NO: 299556 - DNA, 19 bp, Homo sapiens
  siRNA target sequence for APPBP2 (NM_006380.2,955-973).
gatgaggcatacaaatggt

SEQ ID NO: 299557 - DNA, 19 bp, Homo sapiens
  siRNA target sequence for APPBP2 (NM_006380.2,971-989).
ggtgcatcgaggcaatgaa

SEQ ID NO: 299558 - DNA, 19 bp, Homo sapiens
  siRNA target sequence for APPBP2 (NM_006380.2,972-990).
gtgcatcgaggcaatgaaa

SEQ ID NO: 299559 - DNA, 19 bp, Homo sapiens
  siRNA target sequence for APPBP2 (NM_006380.2,974-992).
gcatcgaggcaatgaaaga

SEQ ID NO: 299560 - DNA, 19 bp, Homo sapiens
  siRNA target sequence for APPBP2 (NM_006380.2,1055-1073).
gtgtagtaaaacgtgaatt

SEQ ID NO: 299561 - DNA, 19 bp, Homo sapiens
  siRNA target sequence for APPBP2 (NM_006380.2,1057-1075).
gtagtaaaacgtgaattta

SEQ ID NO: 299562 - DNA, 19 bp, Homo sapiens
  siRNA target sequence for APPBP2 (NM_006380.2,1060-1078).
gtaaaacgtgaatttaaga

SEQ ID NO: 299563 - DNA, 19 bp, Homo sapiens
  siRNA target sequence for APPBP2 (NM_006380.2,1113-1131).
ggcacgggatcattttgga

SEQ ID NO: 299564 - DNA, 19 bp, Homo sapiens
  siRNA target sequence for APPBP2 (NM_006380.2,1119-1137).
ggatcattttggatccaaa

SEQ ID NO: 299565 - DNA, 19 bp, Homo sapiens
  siRNA target sequence for APPBP2 (NM_006380.2,1151-1169).
ctgatacactgctagatta

SEQ ID NO: 299566 - DNA, 19 bp, Homo sapiens
  siRNA target sequence for APPBP2 (NM_006380.2,1202-1220).
gtcagtctgttgcaattta

SEQ ID NO: 299567 - DNA, 19 bp, Homo sapiens
  siRNA target sequence for APPBP2 (NM_006380.2,1222-1240).
caggcagcccttgacatta

SEQ ID NO: 299568 - DNA, 19 bp, Homo sapiens
  siRNA target sequence for APPBP2 (NM_006380.2,1236-1254).
cattagacagtcagtgttt

SEQ ID NO: 299569 - DNA, 19 bp, Homo sapiens
  siRNA target sequence for APPBP2 (NM_006380.2,1272-1290).
cgtagcaacagctcatgaa

SEQ ID NO: 299570 - DNA, 19 bp, Homo sapiens
  siRNA target sequence for APPBP2 (NM_006380.2,1288-1306).
gaagatttggcctactctt

SEQ ID NO: 299571 - DNA, 19 bp, Homo sapiens
  siRNA target sequence for APPBP2 (NM_006380.2,1291-1309).
gatttggcctactcttctt

SEQ ID NO: 299572 - DNA, 19 bp, Homo sapiens
  siRNA target sequence for APPBP2 (NM_006380.2,1386-1404).
catcctacctgaagatcat

SEQ ID NO: 299573 - DNA, 19 bp, Homo sapiens
  siRNA target sequence for APPBP2 (NM_006380.2,1425-1443).
gagggtgaaagcacttatt

SEQ ID NO: 299574 - DNA, 19 bp, Homo sapiens
  siRNA target sequence for APPBP2 (NM_006380.2,1427-1445).
gggtgaaagcacttatttt

SEQ ID NO: 299575 - DNA, 19 bp, Homo sapiens
  siRNA target sequence for APPBP2 (NM_006380.2,1449-1467).
ggagattgcaattgattgt

SEQ ID NO: 299576 - DNA, 19 bp, Homo sapiens
  siRNA target sequence for APPBP2 (NM_006380.2,1452-1470).
gattgcaattgattgtcat

SEQ ID NO: 299577 - DNA, 19 bp, Homo sapiens
  siRNA target sequence for APPBP2 (NM_006380.2,1523-1541).
cttcactccaactagctaa

SEQ ID NO: 299578 - DNA, 19 bp, Homo sapiens
  siRNA target sequence for APPBP2 (NM_006380.2,1526-1544).
cactccaactagctaaaaa

SEQ ID NO: 299579 - DNA, 19 bp, Homo sapiens
  siRNA target sequence for APPBP2 (NM_006380.2,1530-1548).
ccaactagctaaaaaagct

SEQ ID NO: 299580 - DNA, 19 bp, Homo sapiens
  siRNA target sequence for APPBP2 (NM_006380.2,1710-1728).
gggacatctggcttcttta

SEQ ID NO: 299581 - DNA, 19 bp, Homo sapiens
  siRNA target sequence for APPBP2 (NM_006380.2,1714-1732).
catctggcttctttatata

SEQ ID NO: 299582 - DNA, 19 bp, Homo sapiens
  siRNA target sequence for APPBP2 (NM_006380.2,1834-1852).
gattatcgaggtctcatta

SEQ ID NO: 299583 - DNA, 19 bp, Homo sapiens
  siRNA target sequence for APPBP2 (NM_006380.2,1840-1858).
cgaggtctcattaaacttt

SEQ ID NO: 299584 - DNA, 19 bp, Homo sapiens
  siRNA target sequence for APPBP2 (NM_006380.2,1841-1859).
gaggtctcattaaacttta

SEQ ID NO: 299585 - DNA, 19 bp, Homo sapiens
  siRNA target sequence for APPBP2 (NM_006380.2,1843-1861).
ggtctcattaaactttaca

SEQ ID NO: 299586 - DNA, 19 bp, Homo sapiens
  siRNA target sequence for APPBP2 (NM_006380.2,1878-1896).
cgagaaagtgtttgaatat

SEQ ID NO: 299587 - DNA, 19 bp, Homo sapiens
  siRNA target sequence for APPBP2 (NM_006380.2,1923-1941).
gttgcgagatcggcaatat

SEQ ID NO: 299588 - DNA, 19 bp, Homo sapiens
  siRNA target sequence for APPBP2 (NM_006380.2,1926-1944).
gcgagatcggcaatattca

SEQ ID NO: 299589 - DNA, 19 bp, Homo sapiens
  siRNA target sequence for APPBP2 (NM_006380.2,1928-1946).
gagatcggcaatattcagt

SEQ ID NO: 299590 - DNA, 19 bp, Homo sapiens
  siRNA target sequence for Dlc2 (NM_080677.1,274-292).
ggaaggcagtgatcaagaa

SEQ ID NO: 299591 - DNA, 19 bp, Homo sapiens
  siRNA target sequence for Dlc2 (NM_080677.1,345-363).
gccatggagaagtacaata

SEQ ID NO: 299592 - DNA, 19 bp, Homo sapiens
  siRNA target sequence for Dlc2 (NM_080677.1,430-448).
gtatcgtgggccgaaattt

SEQ ID NO: 299593 - DNA, 19 bp, Homo sapiens
  siRNA target sequence for DNAL4 (NM_005740.1,339-357).
gtcacagcctgtgagaaat

SEQ ID NO: 299594 - DNA, 19 bp, Homo sapiens
  siRNA target sequence for DNCI2 (NM_001378.1,191-209).
ctgagttggaacgtaagaa

SEQ ID NO: 299595 - DNA, 19 bp, Homo sapiens
  siRNA target sequence for DNCI2 (NM_001378.1,211-229).
cagcgactggcccaaatca

SEQ ID NO: 299596 - DNA, 19 bp, Homo sapiens
  siRNA target sequence for DNCI2 (NM_001378.1,213-231).
gcgactggcccaaatcaga

SEQ ID NO: 299597 - DNA, 19 bp, Homo sapiens
  siRNA target sequence for DNCI2 (NM_001378.1,377-395).
cagaatcccccattgtttt

SEQ ID NO: 299598 - DNA, 19 bp, Homo sapiens
  siRNA target sequence for DNCI2 (NM_001378.1,379-397).
gaatcccccattgtttttt

SEQ ID NO: 299599 - DNA, 19 bp, Homo sapiens
  siRNA target sequence for DNCI2 (NM_001378.1,960-978).
gtcattaaatcgacaattt

SEQ ID NO: 299600 - DNA, 19 bp, Homo sapiens
  siRNA target sequence for DNCI2 (NM_001378.1,984-1002).
cgaacgttggtcaaagcat

SEQ ID NO: 299601 - DNA, 19 bp, Homo sapiens
  siRNA target sequence for DNCI2 (NM_001378.1,1000-1018).
catcgggtggttagttgtt

SEQ ID NO: 299602 - DNA, 19 bp, Homo sapiens
  siRNA target sequence for DNCI2 (NM_001378.1,1005-1023).
ggtggttagttgtttggat

SEQ ID NO: 299603 - DNA, 19 bp, Homo sapiens
  siRNA target sequence for DNCI2 (NM_001378.1,1006-1024).
gtggttagttgtttggatt

SEQ ID NO: 299604 - DNA, 19 bp, Homo sapiens
  siRNA target sequence for DNCI2 (NM_001378.1,1031-1049).
ctcagtatccggagttact

SEQ ID NO: 299605 - DNA, 19 bp, Homo sapiens
  siRNA target sequence for DNCI2 (NM_001378.1,1044-1062).
gttactcgtggcttcctat

SEQ ID NO: 299606 - DNA, 19 bp, Homo sapiens
  siRNA target sequence for DNCI2 (NM_001378.1,1048-1066).
ctcgtggcttcctataaca

SEQ ID NO: 299607 - DNA, 19 bp, Homo sapiens
  siRNA target sequence for DNCI2 (NM_001378.1,1093-1111).
gatggtgtggcccttgtat

SEQ ID NO: 299608 - DNA, 19 bp, Homo sapiens
  siRNA target sequence for DNCI2 (NM_001378.1,1097-1115).
gtgtggcccttgtatggaa

SEQ ID NO: 299609 - DNA, 19 bp, Homo sapiens
  siRNA target sequence for DNCI2 (NM_001378.1,1099-1117).
gtggcccttgtatggaata

SEQ ID NO: 299610 - DNA, 19 bp, Homo sapiens
  siRNA target sequence for DNCI2 (NM_001378.1,1102-1120).
gcccttgtatggaatatga

SEQ ID NO: 299611 - DNA, 19 bp, Homo sapiens
  siRNA target sequence for DNCI2 (NM_001378.1,1133-1151).
ctaccccagagtatgtgtt

SEQ ID NO: 299612 - DNA, 19 bp, Homo sapiens
  siRNA target sequence for DNCI2 (NM_001378.1,1220-1238).
catattcaggccaaattgt

SEQ ID NO: 299613 - DNA, 19 bp, Homo sapiens
  siRNA target sequence for DNCI2 (NM_001378.1,1251-1269).
ccgtagcaataaaagaact

SEQ ID NO: 299614 - DNA, 19 bp, Homo sapiens
  siRNA target sequence for DNCI2 (NM_001378.1,1305-1323).
cacacaccctgtatattgt

SEQ ID NO: 299615 - DNA, 19 bp, Homo sapiens
  siRNA target sequence for DNCI2 (NM_001378.1,1307-1325).
cacaccctgtatattgtgt

SEQ ID NO: 299616 - DNA, 19 bp, Homo sapiens
  siRNA target sequence for DNCI2 (NM_001378.1,1309-1327).
caccctgtatattgtgtaa

SEQ ID NO: 299617 - DNA, 19 bp, Homo sapiens
  siRNA target sequence for DNCI2 (NM_001378.1,1340-1358).
cacaaaatgctcacaatct

SEQ ID NO: 299618 - DNA, 19 bp, Homo sapiens
  siRNA target sequence for DNCI2 (NM_001378.1,1348-1366).
gctcacaatctgattagca

SEQ ID NO: 299619 - DNA, 19 bp, Homo sapiens
  siRNA target sequence for DNCI2 (NM_001378.1,1359-1377).
gattagcatctctactgat

SEQ ID NO: 299620 - DNA, 19 bp, Homo sapiens
  siRNA target sequence for DNCI2 (NM_001378.1,1412-1430).
cccatccacaggatagcat

SEQ ID NO: 299621 - DNA, 19 bp, Homo sapiens
  siRNA target sequence for DNCI2 (NM_001378.1,1432-1450).
gagttggttcataaacagt

SEQ ID NO: 299622 - DNA, 19 bp, Homo sapiens
  siRNA target sequence for DNCI2 (NM_001378.1,1486-1504).
gttggagatgtcaacaact

SEQ ID NO: 299623 - DNA, 19 bp, Homo sapiens
  siRNA target sequence for DNCI2 (NM_001378.1,1625-1643).
ctgttggagcagtagactt

SEQ ID NO: 299624 - DNA, 19 bp, Homo sapiens
  siRNA target sequence for DNCI2 (NM_001378.1,1667-1685).
cgtttgactggacagtaaa

SEQ ID NO: 299625 - DNA, 19 bp, Homo sapiens
  siRNA target sequence for DNCI2 (NM_001378.1,1701-1719).
gaataacaagcctttgtat

SEQ ID NO: 299626 - DNA, 19 bp, Homo sapiens
  siRNA target sequence for DNCI2 (NM_001378.1,1847-1865).
caactgccagcatttctgt

SEQ ID NO: 299627 - DNA, 19 bp, Homo sapiens
  siRNA target sequence for DNCI2 (NM_001378.1,1869-1887).
gggtaatcctgctcttaat

SEQ ID NO: 299628 - DNA, 19 bp, Homo sapiens
  siRNA target sequence for DNCI2 (NM_001378.1,1917-1935).
gattgctgtgggtgattct

SEQ ID NO: 299629 - DNA, 19 bp, Homo sapiens
  siRNA target sequence for FLJ32752 (NM_144666.1,331-349).
ctgggcctgaacatggaaa

SEQ ID NO: 299630 - DNA, 19 bp, Homo sapiens
  siRNA target sequence for FLJ32752 (NM_144666.1,333-351).
gggcctgaacatggaaata

SEQ ID NO: 299631 - DNA, 19 bp, Homo sapiens
  siRNA target sequence for FLJ32752 (NM_144666.1,409-427).
cgctggcaggacctaaaga

SEQ ID NO: 299632 - DNA, 19 bp, Homo sapiens
  siRNA target sequence for FLJ32752 (NM_144666.1,410-428).
gctggcaggacctaaagat

SEQ ID NO: 299633 - DNA, 19 bp, Homo sapiens
  siRNA target sequence for FLJ32752 (NM_144666.1,522-540).
caagtttctgcggaacata

SEQ ID NO: 299634 - DNA, 19 bp, Homo sapiens
  siRNA target sequence for FLJ32752 (NM_144666.1,543-561).
gagggcccaaggaaagcta

SEQ ID NO: 299635 - DNA, 19 bp, Homo sapiens
  siRNA target sequence for FLJ32752 (NM_144666.1,564-582).
ccagctgcgtgctcattgt

SEQ ID NO: 299636 - DNA, 19 bp, Homo sapiens
  siRNA target sequence for FLJ32752 (NM_144666.1,567-585).
gctgcgtgctcattgtgaa

SEQ ID NO: 299637 - DNA, 19 bp, Homo sapiens
  siRNA target sequence for FLJ32752 (NM_144666.1,588-606).
gttagaagggcagaaacta

SEQ ID NO: 299638 - DNA, 19 bp, Homo sapiens
  siRNA target sequence for FLJ32752 (NM_144666.1,604-622).
ctacaggagatggtattgt

SEQ ID NO: 299639 - DNA, 19 bp, Homo sapiens
  siRNA target sequence for FLJ32752 (NM_144666.1,756-774).
catgaagccacgtgagatt

SEQ ID NO: 299640 - DNA, 19 bp, Homo sapiens
  siRNA target sequence for FLJ32752 (NM_144666.1,759-777).
gaagccacgtgagattaat

SEQ ID NO: 299641 - DNA, 19 bp, Homo sapiens
  siRNA target sequence for FLJ32752 (NM_144666.1,1308-1326).
caccatgccctttaaacat

SEQ ID NO: 299642 - DNA, 19 bp, Homo sapiens
  siRNA target sequence for FLJ32752 (NM_144666.1,1311-1329).
catgccctttaaacatagt

SEQ ID NO: 299643 - DNA, 19 bp, Homo sapiens
  siRNA target sequence for FLJ32752 (NM_144666.1,1337-1355).
ctcagcccatgctgatctt

SEQ ID NO: 299644 - DNA, 19 bp, Homo sapiens
  siRNA target sequence for FLJ32752 (NM_144666.1,1492-1510).
gttgtggtcagcactctat

SEQ ID NO: 299645 - DNA, 19 bp, Homo sapiens
  siRNA target sequence for FLJ32752 (NM_144666.1,1679-1697).
gcactgttcacagagattt

SEQ ID NO: 299646 - DNA, 19 bp, Homo sapiens
  siRNA target sequence for FLJ32752 (NM_144666.1,1794-1812).
gctgggccatgttttgatt

SEQ ID NO: 299647 - DNA, 19 bp, Homo sapiens
  siRNA target sequence for FLJ32752 (NM_144666.1,1958-1976).
ctctaacccaggttcttca

SEQ ID NO: 299648 - DNA, 19 bp, Homo sapiens
  siRNA target sequence for FLJ32752 (NM_144666.1,2077-2095).
gacagggaggccctgatta

SEQ ID NO: 299649 - DNA, 19 bp, Homo sapiens
  siRNA target sequence for FLJ32752 (NM_144666.1,2522-2540).
ctctggagggcgtcttaga

SEQ ID NO: 299650 - DNA, 19 bp, Homo sapiens
  siRNA target sequence for FLJ32752 (NM_144666.1,2524-2542).
ctggagggcgtcttagaga

SEQ ID NO: 299651 - DNA, 19 bp, Homo sapiens
  siRNA target sequence for FLJ32752 (NM_144666.1,2578-2596).
ctacaacgcgaccttgatt

SEQ ID NO: 299652 - DNA, 19 bp, Homo sapiens
  siRNA target sequence for FLJ32752 (NM_144666.1,2759-2777).
ggcaactgttggttcgtta

SEQ ID NO: 299653 - DNA, 19 bp, Homo sapiens
  siRNA target sequence for FLJ32752 (NM_144666.1,2793-2811).
ggacgcgagcagtgatgta

SEQ ID NO: 299654 - DNA, 19 bp, Homo sapiens
  siRNA target sequence for FLJ32752 (NM_144666.1,2939-2957).
ccagtcagctccagtataa

SEQ ID NO: 299655 - DNA, 19 bp, Homo sapiens
  siRNA target sequence for FLJ32752 (NM_144666.1,2994-3012).
ggtggagaatggtccaaat

SEQ ID NO: 299656 - DNA, 19 bp, Homo sapiens
  siRNA target sequence for FLJ32752 (NM_144666.1,3066-3084).
ggagtgggacccaatagct

SEQ ID NO: 299657 - DNA, 19 bp, Homo sapiens
  siRNA target sequence for FLJ40427 (NM_178504.3,254-272).
gaggagttcttgttgagta

SEQ ID NO: 299658 - DNA, 19 bp, Homo sapiens
  siRNA target sequence for FLJ40427 (NM_178504.3,256-274).
ggagttcttgttgagtaaa

SEQ ID NO: 299659 - DNA, 19 bp, Homo sapiens
  siRNA target sequence for FLJ40427 (NM_178504.3,257-275).
gagttcttgttgagtaaaa

SEQ ID NO: 299660 - DNA, 19 bp, Homo sapiens
  siRNA target sequence for FLJ40427 (NM_178504.3,344-362).
gataacggagtgatcgtta

SEQ ID NO: 299661 - DNA, 19 bp, Homo sapiens
  siRNA target sequence for FLJ40427 (NM_178504.3,350-368).
ggagtgatcgttaacaact

SEQ ID NO: 299662 - DNA, 19 bp, Homo sapiens
  siRNA target sequence for FLJ40427 (NM_178504.3,353-371).
gtgatcgttaacaactgta

SEQ ID NO: 299663 - DNA, 19 bp, Homo sapiens
  siRNA target sequence for FLJ40427 (NM_178504.3,369-387).
gtaggcgttggcctttaat

SEQ ID NO: 299664 - DNA, 19 bp, Homo sapiens
  siRNA target sequence for FLJ40427 (NM_178504.3,372-390).
ggcgttggcctttaatgat

SEQ ID NO: 299665 - DNA, 19 bp, Homo sapiens
  siRNA target sequence for FLJ40427 (NM_178504.3,373-391).
gcgttggcctttaatgatt

SEQ ID NO: 299666 - DNA, 19 bp, Homo sapiens
  siRNA target sequence for FLJ40427 (NM_178504.3,445-463).
gcttagtgttattaagcta

SEQ ID NO: 299667 - DNA, 19 bp, Homo sapiens
  siRNA target sequence for FLJ40427 (NM_178504.3,452-470).
gttattaagctatcagatt

SEQ ID NO: 299668 - DNA, 19 bp, Homo sapiens
  siRNA target sequence for FLJ40427 (NM_178504.3,460-478).
gctatcagattcagactat

SEQ ID NO: 299669 - DNA, 19 bp, Homo sapiens
  siRNA target sequence for FLJ40427 (NM_178504.3,467-485).
gattcagactatatgagaa

SEQ ID NO: 299670 - DNA, 19 bp, Homo sapiens
  siRNA target sequence for FLJ40427 (NM_178504.3,481-499).
gagaacattggaaaactgt

SEQ ID NO: 299671 - DNA, 19 bp, Homo sapiens
  siRNA target sequence for FLJ40427 (NM_178504.3,483-501).
gaacattggaaaactgtat

SEQ ID NO: 299672 - DNA, 19 bp, Homo sapiens
  siRNA target sequence for FLJ40427 (NM_178504.3,510-528).
gaactccacttctattaga

SEQ ID NO: 299673 - DNA, 19 bp, Homo sapiens
  siRNA target sequence for FLJ40427 (NM_178504.3,569-587).
ctactcagacaaactttta

SEQ ID NO: 299674 - DNA, 19 bp, Homo sapiens
  siRNA target sequence for FLJ40427 (NM_178504.3,612-630).
gacttggtgaggtcattat

SEQ ID NO: 299675 - DNA, 19 bp, Homo sapiens
  siRNA target sequence for FLJ40427 (NM_178504.3,618-636).
gtgaggtcattattgagta

SEQ ID NO: 299676 - DNA, 19 bp, Homo sapiens
  siRNA target sequence for FLJ40427 (NM_178504.3,620-638).
gaggtcattattgagtatt

SEQ ID NO: 299677 - DNA, 19 bp, Homo sapiens
  siRNA target sequence for FLJ40427 (NM_178504.3,632-650).
gagtattcctttgatttca

SEQ ID NO: 299678 - DNA, 19 bp, Homo sapiens
  siRNA target sequence for FLJ40427 (NM_178504.3,671-689).
ctgagaaacccgcactata

SEQ ID NO: 299679 - DNA, 19 bp, Homo sapiens
  siRNA target sequence for FLJ40427 (NM_178504.3,718-736).
gctcaatttcatgataact

SEQ ID NO: 299680 - DNA, 19 bp, Homo sapiens
  siRNA target sequence for FLJ40427 (NM_178504.3,744-762).
gacttgaagatcaattact

SEQ ID NO: 299681 - DNA, 19 bp, Homo sapiens
  siRNA target sequence for FLJ40427 (NM_178504.3,824-842).
cagtctgcagctaacaaga

SEQ ID NO: 299682 - DNA, 19 bp, Homo sapiens
  siRNA target sequence for FLJ40427 (NM_178504.3,918-936).
gtgcaattaaagtcttaga

SEQ ID NO: 299683 - DNA, 19 bp, Homo sapiens
  siRNA target sequence for FLJ40427 (NM_178504.3,920-938).
gcaattaaagtcttagact

SEQ ID NO: 299684 - DNA, 19 bp, Homo sapiens
  siRNA target sequence for FLJ40427 (NM_178504.3,935-953).
gactctgccaaaatgatgt

SEQ ID NO: 299685 - DNA, 19 bp, Homo sapiens
  siRNA target sequence for FLJ40427 (NM_178504.3,1012-1030).
gtctcgagaaggctataga

SEQ ID NO: 299686 - DNA, 19 bp, Homo sapiens
  siRNA target sequence for FLJ40427 (NM_178504.3,1039-1057).
caaacactcgtcagtgtta

SEQ ID NO: 299687 - DNA, 19 bp, Homo sapiens
  siRNA target sequence for FLJ40427 (NM_178504.3,1043-1061).
cactcgtcagtgttattct

SEQ ID NO: 299688 - DNA, 19 bp, Homo sapiens
  siRNA target sequence for FLJ40427 (NM_178504.3,1045-1063).
ctcgtcagtgttattcttt

SEQ ID NO: 299689 - DNA, 19 bp, Homo sapiens
  siRNA target sequence for FLJ40427 (NM_178504.3,1113-1131).
cgtggtttgtgaaccttta

SEQ ID NO: 299690 - DNA, 19 bp, Homo sapiens
  siRNA target sequence for FLJ40427 (NM_178504.3,1114-1132).
gtggtttgtgaacctttat

SEQ ID NO: 299691 - DNA, 19 bp, Homo sapiens
  siRNA target sequence for FLJ40427 (NM_178504.3,1116-1134).
ggtttgtgaacctttatat

SEQ ID NO: 299692 - DNA, 19 bp, Homo sapiens
  siRNA target sequence for FLJ40427 (NM_178504.3,1145-1163).
catgacagtaacaaatcca

SEQ ID NO: 299693 - DNA, 19 bp, Homo sapiens
  siRNA target sequence for FLJ40427 (NM_178504.3,1171-1189).
ggaaaagcgcctacgatat

SEQ ID NO: 299694 - DNA, 19 bp, Homo sapiens
  siRNA target sequence for FLJ40427 (NM_178504.3,1172-1190).
gaaaagcgcctacgatatt

SEQ ID NO: 299695 - DNA, 19 bp, Homo sapiens
  siRNA target sequence for FLJ40427 (NM_178504.3,1177-1195).
gcgcctacgatatttaaat

SEQ ID NO: 299696 - DNA, 19 bp, Homo sapiens
  siRNA target sequence for FLJ40427 (NM_178504.3,1179-1197).
gcctacgatatttaaatga

SEQ ID NO: 299697 - DNA, 19 bp, Homo sapiens
  siRNA target sequence for FLJ40427 (NM_178504.3,1230-1248).
gccgatcactatttgagaa

SEQ ID NO: 299698 - DNA, 19 bp, Homo sapiens
  siRNA target sequence for FLJ40427 (NM_178504.3,1299-1317).
ggaaagagattgaatacca

SEQ ID NO: 299699 - DNA, 19 bp, Homo sapiens
  siRNA target sequence for FLJ40427 (NM_178504.3,1414-1432).
ctgtcgggcaagtgaattt

SEQ ID NO: 299700 - DNA, 19 bp, Homo sapiens
  siRNA target sequence for FLJ40427 (NM_178504.3,1498-1516).
cagtaaagagccacataat

SEQ ID NO: 299701 - DNA, 19 bp, Homo sapiens
  siRNA target sequence for FLJ40427 (NM_178504.3,1532-1550).
ccaatggataagaacctaa

SEQ ID NO: 299702 - DNA, 19 bp, Homo sapiens
  siRNA target sequence for FLJ40427 (NM_178504.3,1578-1596).
ggtgtttaagacctgataa

SEQ ID NO: 299703 - DNA, 19 bp, Homo sapiens
  siRNA target sequence for FLJ40427 (NM_178504.3,1618-1636).
ctatgtaactgacaaacta

SEQ ID NO: 299704 - DNA, 19 bp, Homo sapiens
  siRNA target sequence for FLJ40427 (NM_178504.3,1652-1670).
gagcctccaccatttgatt

SEQ ID NO: 299705 - DNA, 19 bp, Homo sapiens
  siRNA target sequence for FLJ40427 (NM_178504.3,1658-1676).
ccaccatttgatttgacaa

SEQ ID NO: 299706 - DNA, 19 bp, Homo sapiens
  siRNA target sequence for FLJ40427 (NM_178504.3,1678-1696).
gagttacttggattcaaat

SEQ ID NO: 299707 - DNA, 19 bp, Homo sapiens
  siRNA target sequence for FLJ40427 (NM_178504.3,1701-1719).
ccattcccttaatttttgt

SEQ ID NO: 299708 - DNA, 19 bp, Homo sapiens
  siRNA target sequence for FLJ40427 (NM_178504.3,1753-1771).
gctgaaatttgcaaatgat

SEQ ID NO: 299709 - DNA, 19 bp, Homo sapiens
  siRNA target sequence for FLJ40427 (NM_178504.3,1826-1844).
ccgattgcagcaaaaatga

SEQ ID NO: 299710 - DNA, 19 bp, Homo sapiens
  siRNA target sequence for FLJ40427 (NM_178504.3,1827-1845).
cgattgcagcaaaaatgat

SEQ ID NO: 299711 - DNA, 19 bp, Homo sapiens
  siRNA target sequence for FLJ40427 (NM_178504.3,1972-1990).
gctttggctgacaagctat

SEQ ID NO: 299712 - DNA, 19 bp, Homo sapiens
  siRNA target sequence for FLJ40427 (NM_178504.3,1981-1999).
gacaagctatccatcttca

SEQ ID NO: 299713 - DNA, 19 bp, Homo sapiens
  siRNA target sequence for FLJ40427 (NM_178504.3,1986-2004).
gctatccatcttcaaaatt

SEQ ID NO: 299714 - DNA, 19 bp, Homo sapiens
  siRNA target sequence for FLJ40427 (NM_178504.3,2007-2025).
cagtaacaattctacagaa

SEQ ID NO: 299715 - DNA, 19 bp, Homo sapiens
  siRNA target sequence for FLJ40427 (NM_178504.3,2055-2073).
cgggtcttcggctgaatct

SEQ ID NO: 299716 - DNA, 19 bp, Homo sapiens
  siRNA target sequence for FLJ40427 (NM_178504.3,2063-2081).
cggctgaatctccttcaat

SEQ ID NO: 299717 - DNA, 19 bp, Homo sapiens
  siRNA target sequence for FLJ40427 (NM_178504.3,2189-2207).
gtgcaagagagaaagaaat

SEQ ID NO: 299718 - DNA, 19 bp, Homo sapiens
  siRNA target sequence for FLJ40427 (NM_178504.3,2271-2289).
gacaactgcagttatttat

SEQ ID NO: 299719 - DNA, 19 bp, Homo sapiens
  siRNA target sequence for FLJ40427 (NM_178504.3,2279-2297).
cagttatttatcaatgaat

SEQ ID NO: 299720 - DNA, 19 bp, Homo sapiens
  siRNA target sequence for FLJ40427 (NM_178504.3,2281-2299).
gttatttatcaatgaatat

SEQ ID NO: 299721 - DNA, 19 bp, Homo sapiens
  siRNA target sequence for FLJ40427 (NM_178504.3,2310-2328).
catttgaagctatatctta

SEQ ID NO: 299722 - DNA, 19 bp, Homo sapiens
  siRNA target sequence for FLJ40427 (NM_178504.3,2332-2350).
gactggggagtgtaattat

SEQ ID NO: 299723 - DNA, 19 bp, Homo sapiens
  siRNA target sequence for FLJ40427 (NM_178504.3,2373-2391).
gggacagacgtcttctatt

SEQ ID NO: 299724 - DNA, 19 bp, Homo sapiens
  siRNA target sequence for FLJ40427 (NM_178504.3,2374-2392).
ggacagacgtcttctatta

SEQ ID NO: 299725 - DNA, 19 bp, Homo sapiens
  siRNA target sequence for FLJ40427 (NM_178504.3,2379-2397).
gacgtcttctattaaccat

SEQ ID NO: 299726 - DNA, 19 bp, Homo sapiens
  siRNA target sequence for FLJ40427 (NM_178504.3,2398-2416).
gctggctgacttttataat

SEQ ID NO: 299727 - DNA, 19 bp, Homo sapiens
  siRNA target sequence for FLJ40427 (NM_178504.3,2402-2420).
gctgacttttataatctgt

SEQ ID NO: 299728 - DNA, 19 bp, Homo sapiens
  siRNA target sequence for FLJ40427 (NM_178504.3,2426-2444).
gttgaaaaccctcattata

SEQ ID NO: 299729 - DNA, 19 bp, Homo sapiens
  siRNA target sequence for FLJ40427 (NM_178504.3,2429-2447).
gaaaaccctcattataagt

SEQ ID NO: 299730 - DNA, 19 bp, Homo sapiens
  siRNA target sequence for FLJ40427 (NM_178504.3,2485-2503).
cacttatgaggactacatt

SEQ ID NO: 299731 - DNA, 19 bp, Homo sapiens
  siRNA target sequence for FLJ40427 (NM_178504.3,2487-2505).
cttatgaggactacattga

SEQ ID NO: 299732 - DNA, 19 bp, Homo sapiens
  siRNA target sequence for FLJ40427 (NM_178504.3,2655-2673).
gaagtactgatcagattct

SEQ ID NO: 299733 - DNA, 19 bp, Homo sapiens
  siRNA target sequence for FLJ40427 (NM_178504.3,2658-2676).
gtactgatcagattctgtt

SEQ ID NO: 299734 - DNA, 19 bp, Homo sapiens
  siRNA target sequence for FLJ40427 (NM_178504.3,2663-2681).
gatcagattctgttagaaa

SEQ ID NO: 299735 - DNA, 19 bp, Homo sapiens
  siRNA target sequence for FLJ40427 (NM_178504.3,2674-2692).
gttagaaattaccaaagat

SEQ ID NO: 299736 - DNA, 19 bp, Homo sapiens
  siRNA target sequence for FLJ40427 (NM_178504.3,2712-2730).
gtgatttcgacattgaaat

SEQ ID NO: 299737 - DNA, 19 bp, Homo sapiens
  siRNA target sequence for FLJ40427 (NM_178504.3,2739-2757).
ggaagtatcctgtgagata

SEQ ID NO: 299738 - DNA, 19 bp, Homo sapiens
  siRNA target sequence for FLJ40427 (NM_178504.3,2740-2758).
gaagtatcctgtgagatat

SEQ ID NO: 299739 - DNA, 19 bp, Homo sapiens
  siRNA target sequence for FLJ40427 (NM_178504.3,2767-2785).
catgaatactgtgttagta

SEQ ID NO: 299740 - DNA, 19 bp, Homo sapiens
  siRNA target sequence for FLJ40427 (NM_178504.3,2832-2850).
ctctacgggaccttgaaaa

SEQ ID NO: 299741 - DNA, 19 bp, Homo sapiens
  siRNA target sequence for FLJ40427 (NM_178504.3,2837-2855).
cgggaccttgaaaaagcta

SEQ ID NO: 299742 - DNA, 19 bp, Homo sapiens
  siRNA target sequence for FLJ40427 (NM_178504.3,2838-2856).
gggaccttgaaaaagctat

SEQ ID NO: 299743 - DNA, 19 bp, Homo sapiens
  siRNA target sequence for FLJ40427 (NM_178504.3,2890-2908).
ggcactctccggtagctta

SEQ ID NO: 299744 - DNA, 19 bp, Homo sapiens
  siRNA target sequence for FLJ40427 (NM_178504.3,2896-2914).
ctccggtagcttacttgtt

SEQ ID NO: 299745 - DNA, 19 bp, Homo sapiens
  siRNA target sequence for FLJ40427 (NM_178504.3,2963-2981).
cccctgggaagttacatca

SEQ ID NO: 299746 - DNA, 19 bp, Homo sapiens
  siRNA target sequence for FLJ40427 (NM_178504.3,2969-2987).
ggaagttacatcacagatt

SEQ ID NO: 299747 - DNA, 19 bp, Homo sapiens
  siRNA target sequence for FLJ40427 (NM_178504.3,2970-2988).
gaagttacatcacagattt

SEQ ID NO: 299748 - DNA, 19 bp, Homo sapiens
  siRNA target sequence for FLJ40427 (NM_178504.3,2973-2991).
gttacatcacagatttcct

SEQ ID NO: 299749 - DNA, 19 bp, Homo sapiens
  siRNA target sequence for FLJ40427 (NM_178504.3,2989-3007).
cctagcccggttgaacttt

SEQ ID NO: 299750 - DNA, 19 bp, Homo sapiens
  siRNA target sequence for FLJ40427 (NM_178504.3,2990-3008).
ctagcccggttgaactttt

SEQ ID NO: 299751 - DNA, 19 bp, Homo sapiens
  siRNA target sequence for FLJ40427 (NM_178504.3,3118-3136).
cacccctattgatttgcta

SEQ ID NO: 299752 - DNA, 19 bp, Homo sapiens
  siRNA target sequence for FLJ40427 (NM_178504.3,3123-3141).
ctattgatttgctaggata

SEQ ID NO: 299753 - DNA, 19 bp, Homo sapiens
  siRNA target sequence for FLJ40427 (NM_178504.3,3128-3146).
gatttgctaggatatgaat

SEQ ID NO: 299754 - DNA, 19 bp, Homo sapiens
  siRNA target sequence for FLJ40427 (NM_178504.3,3151-3169).
ggttatcccatctgataca

SEQ ID NO: 299755 - DNA, 19 bp, Homo sapiens
  siRNA target sequence for FLJ40427 (NM_178504.3,3152-3170).
gttatcccatctgatacat

SEQ ID NO: 299756 - DNA, 19 bp, Homo sapiens
  siRNA target sequence for FLJ40427 (NM_178504.3,3180-3198).
caccagaagatggtgttta

SEQ ID NO: 299757 - DNA, 19 bp, Homo sapiens
  siRNA target sequence for FLJ40427 (NM_178504.3,3235-3253).
ccgagaaagtggattgctt

SEQ ID NO: 299758 - DNA, 19 bp, Homo sapiens
  siRNA target sequence for FLJ40427 (NM_178504.3,3246-3264).
gattgcttgctgaacaata

SEQ ID NO: 299759 - DNA, 19 bp, Homo sapiens
  siRNA target sequence for FLJ40427 (NM_178504.3,3281-3299).
gacctgatgcccatcatat

SEQ ID NO: 299760 - DNA, 19 bp, Homo sapiens
  siRNA target sequence for FLJ40427 (NM_178504.3,3284-3302).
ctgatgcccatcatatgga

SEQ ID NO: 299761 - DNA, 19 bp, Homo sapiens
  siRNA target sequence for FLJ40427 (NM_178504.3,3289-3307).
gcccatcatatggataaaa

SEQ ID NO: 299762 - DNA, 19 bp, Homo sapiens
  siRNA target sequence for FLJ40427 (NM_178504.3,3300-3318).
ggataaaaccaactcaaaa

SEQ ID NO: 299763 - DNA, 19 bp, Homo sapiens
  siRNA target sequence for FLJ40427 (NM_178504.3,3347-3365).
gtctgtcccctctacaaga

SEQ ID NO: 299764 - DNA, 19 bp, Homo sapiens
  siRNA target sequence for FLJ40427 (NM_178504.3,3391-3409).
cactacgggacattctact

SEQ ID NO: 299765 - DNA, 19 bp, Homo sapiens
  siRNA target sequence for FLJ40427 (NM_178504.3,3393-3411).
ctacgggacattctactaa

SEQ ID NO: 299766 - DNA, 19 bp, Homo sapiens
  siRNA target sequence for FLJ40427 (NM_178504.3,3396-3414).
cgggacattctactaactt

SEQ ID NO: 299767 - DNA, 19 bp, Homo sapiens
  siRNA target sequence for FLJ40427 (NM_178504.3,3397-3415).
gggacattctactaacttt

SEQ ID NO: 299768 - DNA, 19 bp, Homo sapiens
  siRNA target sequence for FLJ40427 (NM_178504.3,3399-3417).
gacattctactaactttgt

SEQ ID NO: 299769 - DNA, 19 bp, Homo sapiens
  siRNA target sequence for FLJ40427 (NM_178504.3,3401-3419).
cattctactaactttgtca

SEQ ID NO: 299770 - DNA, 19 bp, Homo sapiens
  siRNA target sequence for KLC2 (NM_022822.1,393-411).
cacctgggggctgtagaat

SEQ ID NO: 299771 - DNA, 19 bp, Homo sapiens
  siRNA target sequence for KLC2 (NM_022822.1,1395-1413).
cgggaggaaagcaaggata

SEQ ID NO: 299772 - DNA, 19 bp, Homo sapiens
  siRNA target sequence for KLC2 (NM_022822.1,1763-1781).
gaggcgcagcggttccttt

SEQ ID NO: 299773 - DNA, 19 bp, Homo sapiens
  siRNA target sequence for KLC2 (NM_022822.1,1813-1831).
gtgagatgctggtaaagaa

SEQ ID NO: 299774 - DNA, 19 bp, Homo sapiens
  siRNA target sequence for KLC2L (NM_145275.1,629-647).
gggtgctgggcccttcata

SEQ ID NO: 299775 - DNA, 19 bp, Homo sapiens
  siRNA target sequence for KLC2L (NM_177417.1,759-777).
gccttcggaccctgcataa

SEQ ID NO: 299776 - DNA, 19 bp, Homo sapiens
  siRNA target sequence for KLC2L (NM_177417.1,1323-1341).
cggaagagctgtacaaaga

SEQ ID NO: 299777 - DNA, 19 bp, Homo sapiens
  siRNA target sequence for KLC2L (NM_177417.1,1509-1527).
caggagcagccggaatgaa

SEQ ID NO: 299778 - DNA, 19 bp, Homo sapiens
  siRNA target sequence for KNS2 (NM_005552.3,286-304).
ccacaatggtgtacataaa

SEQ ID NO: 299779 - DNA, 19 bp, Homo sapiens
  siRNA target sequence for KNS2 (NM_005552.3,465-483).
gaggagaaatcaaacatga

SEQ ID NO: 299780 - DNA, 19 bp, Homo sapiens
  siRNA target sequence for KNS2 (NM_005552.3,520-538).
gtgaggcacaggttatgat

SEQ ID NO: 299781 - DNA, 19 bp, Homo sapiens
  siRNA target sequence for KNS2 (NM_005552.3,643-661).
ccaacacgcagcagaaact

SEQ ID NO: 299782 - DNA, 19 bp, Homo sapiens
  siRNA target sequence for KNS2 (NM_005552.3,756-774).
ccatccgaggacaaagaca

SEQ ID NO: 299783 - DNA, 19 bp, Homo sapiens
  siRNA target sequence for KNS2 (NM_005552.3,1058-1076).
ggtgtacagggatcagaat

SEQ ID NO: 299784 - DNA, 19 bp, Homo sapiens
  siRNA target sequence for KNS2 (NM_005552.3,1082-1100).
caaagatgcagctaaccta

SEQ ID NO: 299785 - DNA, 19 bp, Homo sapiens
  siRNA target sequence for KNS2 (NM_005552.3,1112-1130).
cttggctattcgtgagaaa

SEQ ID NO: 299786 - DNA, 19 bp, Homo sapiens
  siRNA target sequence for KNS2 (NM_005552.3,1115-1133).
ggctattcgtgagaaaact

SEQ ID NO: 299787 - DNA, 19 bp, Homo sapiens
  siRNA target sequence for KNS2 (NM_005552.3,1117-1135).
ctattcgtgagaaaacttt

SEQ ID NO: 299788 - DNA, 19 bp, Homo sapiens
  siRNA target sequence for KNS2 (NM_005552.3,1160-1178).
ggcgactttgaataacctt

SEQ ID NO: 299789 - DNA, 19 bp, Homo sapiens
  siRNA target sequence for KNS2 (NM_005552.3,1215-1233).
gcagagccgttgtgtaaaa

SEQ ID NO: 299790 - DNA, 19 bp, Homo sapiens
  siRNA target sequence for KNS2 (NM_005552.3,1237-1255).
ctctggaaatccgagaaaa

SEQ ID NO: 299791 - DNA, 19 bp, Homo sapiens
  siRNA target sequence for KNS2 (NM_005552.3,1241-1259).
ggaaatccgagaaaaggtt

SEQ ID NO: 299792 - DNA, 19 bp, Homo sapiens
  siRNA target sequence for KNS2 (NM_005552.3,1242-1260).
gaaatccgagaaaaggttt

SEQ ID NO: 299793 - DNA, 19 bp, Homo sapiens
  siRNA target sequence for KNS2 (NM_005552.3,1331-1349).
gtatgaagaagtagaatat

SEQ ID NO: 299794 - DNA, 19 bp, Homo sapiens
  siRNA target sequence for KNS2 (NM_005552.3,1430-1448).
ggcatcctgctatttgaaa

SEQ ID NO: 299795 - DNA, 19 bp, Homo sapiens
  siRNA target sequence for KNS2 (NM_005552.3,1432-1450).
catcctgctatttgaaaca

SEQ ID NO: 299796 - DNA, 19 bp, Homo sapiens
  siRNA target sequence for KNS2 (NM_005552.3,1587-1605).
caaaaggatgggacatctt

SEQ ID NO: 299797 - DNA, 19 bp, Homo sapiens
  siRNA target sequence for KNS2 (NM_005552.3,1598-1616).
gacatcttttggagagtat

SEQ ID NO: 299798 - DNA, 19 bp, Homo sapiens
  siRNA target sequence for KNS2 (NM_005552.3,1628-1646).
caaagcctgcaaagttgat

SEQ ID NO: 299799 - DNA, 19 bp, Homo sapiens
  siRNA target sequence for KNS2 (NM_005552.3,1641-1659).
gttgatagtccaactgtta

SEQ ID NO: 299800 - DNA, 19 bp, Homo sapiens
  siRNA target sequence for KNS2 (NM_005552.3,1660-1678).
caaccactctaaaaaacct

SEQ ID NO: 299801 - DNA, 19 bp, Homo sapiens
  siRNA target sequence for KNS2 (NM_005552.3,1691-1709).
cagacgtcaaggcaaattt

SEQ ID NO: 299802 - DNA, 19 bp, Homo sapiens
  siRNA target sequence for KNS2 (NM_005552.3,1693-1711).
gacgtcaaggcaaatttga

SEQ ID NO: 299803 - DNA, 19 bp, Homo sapiens
  siRNA target sequence for KNS2 (NM_005552.3,1714-1732).
ctgcagaaacgttagaaga

SEQ ID NO: 299804 - DNA, 19 bp, Homo sapiens
  siRNA target sequence for KNS2 (NM_005552.3,1738-1756).
ctatgaggtctcgtaaaca

SEQ ID NO: 299805 - DNA, 19 bp, Homo sapiens
  siRNA target sequence for KNSL8 (NM_138343.1,197-215).
ctgtcccagaccattgagt

SEQ ID NO: 299806 - DNA, 19 bp, Homo sapiens
  siRNA target sequence for KNSL8 (NM_138343.1,272-290).
cgccgttctatggaaaaca

SEQ ID NO: 299807 - DNA, 19 bp, Homo sapiens
  siRNA target sequence for KNSL8 (NM_138343.1,273-291).
gccgttctatggaaaacat

SEQ ID NO: 299808 - DNA, 19 bp, Homo sapiens
  siRNA target sequence for KNSL8 (NM_138343.1,560-578).
ggcgatgccaccaaggatt

SEQ ID NO: 299809 - DNA, 19 bp, Homo sapiens
  siRNA target sequence for KNSL8 (NM_138343.1,842-860).
gtgtatcgtgaccagaata

SEQ ID NO: 299810 - DNA, 19 bp, Homo sapiens
  siRNA target sequence for KNSL8 (NM_138343.1,848-866).
cgtgaccagaataagtata

SEQ ID NO: 299811 - DNA, 19 bp, Homo sapiens
  siRNA target sequence for KNSL8 (NM_138343.1,928-946).
ccatcctgctgtcagtatt

SEQ ID NO: 299812 - DNA, 19 bp, Homo sapiens
  siRNA target sequence for TCTEL1 (NM_006519.1,281-299).
ctgtgcgatgggagaataa

SEQ ID NO: 299813 - DNA, 19 bp, Homo sapiens
  siRNA target sequence for DCTN1 (NM_004082.2,894-912).
cgtgtagaggtgattggaa

SEQ ID NO: 299814 - DNA, 19 bp, Homo sapiens
  siRNA target sequence for DCTN1 (NM_004082.2,1017-1035).
gttcaaggcaggaagtact

SEQ ID NO: 299815 - DNA, 19 bp, Homo sapiens
  siRNA target sequence for DCTN1 (NM_004082.2,1116-1134).
ccagagacacctgattctt

SEQ ID NO: 299816 - DNA, 19 bp, Homo sapiens
  siRNA target sequence for DCTN1 (NM_004082.2,1799-1817).
cgagctcactactgactta

SEQ ID NO: 299817 - DNA, 19 bp, Homo sapiens
  siRNA target sequence for DCTN1 (NM_004082.2,1925-1943).
gaggatgcgggatctttct

SEQ ID NO: 299818 - DNA, 19 bp, Homo sapiens
  siRNA target sequence for DCTN1 (NM_004082.2,2374-2392).
cccatctacaggatgtgaa

SEQ ID NO: 299819 - DNA, 19 bp, Homo sapiens
  siRNA target sequence for DCTN1 (NM_004082.2,2445-2463).
cctccagagacctttgact

SEQ ID NO: 299820 - DNA, 19 bp, Homo sapiens
  siRNA target sequence for DCTN1 (NM_004082.2,2502-2520).
gcaattgagatggaattga

SEQ ID NO: 299821 - DNA, 19 bp, Homo sapiens
  siRNA target sequence for DCTN1 (NM_004082.2,2630-2648).
gctcatgcctcgtctcatt

SEQ ID NO: 299822 - DNA, 19 bp, Homo sapiens
  siRNA target sequence for DCTN1 (NM_004082.2,2631-2649).
ctcatgcctcgtctcattt

SEQ ID NO: 299823 - DNA, 19 bp, Homo sapiens
  siRNA target sequence for DCTN1 (NM_004082.2,2691-2709).
gaactaagtgagaactgtt

SEQ ID NO: 299824 - DNA, 19 bp, Homo sapiens
  siRNA target sequence for DCTN1 (NM_004082.2,2883-2901).
catgagcgctccttggatt

SEQ ID NO: 299825 - DNA, 19 bp, Homo sapiens
  siRNA target sequence for DCTN1 (NM_004082.2,2930-2948).
gctggatgagactgtcaat

SEQ ID NO: 299826 - DNA, 19 bp, Homo sapiens
  siRNA target sequence for DCTN1 (NM_004082.2,3012-3030).
cagcctgaggactgtacta

SEQ ID NO: 299827 - DNA, 19 bp, Homo sapiens
  siRNA target sequence for DCTN1 (NM_004082.2,3120-3138).
gggcaggaggctacagata

SEQ ID NO: 299828 - DNA, 19 bp, Homo sapiens
  siRNA target sequence for DCTN1 (NM_004082.2,3152-3170).
ccgggatctggaaacttca

SEQ ID NO: 299829 - DNA, 19 bp, Homo sapiens
  siRNA target sequence for DCTN1 (NM_004082.2,3153-3171).
cgggatctggaaacttcat

SEQ ID NO: 299830 - DNA, 19 bp, Homo sapiens
  siRNA target sequence for DCTN1 (NM_004082.2,3183-3201).
cgccagttctgcaagaaga

SEQ ID NO: 299831 - DNA, 19 bp, Homo sapiens
  siRNA target sequence for DCTN1 (NM_004082.2,3358-3376).
ccccactggcagagaatga

SEQ ID NO: 299832 - DNA, 19 bp, Homo sapiens
  siRNA target sequence for DCTN1 (NM_004082.2,3636-3654).
gaagatcgagagacagtta

SEQ ID NO: 299833 - DNA, 19 bp, Homo sapiens
  siRNA target sequence for DCTN1 (NM_004082.2,3639-3657).
gatcgagagacagttatta

SEQ ID NO: 299834 - DNA, 19 bp, Homo sapiens
  siRNA target sequence for DCTN1 (NM_004082.2,3649-3667).
cagttattaaggagttgaa

SEQ ID NO: 299835 - DNA, 19 bp, Homo sapiens
  siRNA target sequence for DCTN1 (NM_004082.2,3954-3972).
cctccttcaggcattgcta

SEQ ID NO: 299836 - DNA, 19 bp, Homo sapiens
  siRNA target sequence for DCTN1 (NM_004082.2,4233-4251).
gctggagcgctgtatcgta

SEQ ID NO: 299837 - DNA, 19 bp, Homo sapiens
  siRNA target sequence for DCTN1 (NM_004082.2,4234-4252).
ctggagcgctgtatcgtaa

SEQ ID NO: 299838 - DNA, 19 bp, Homo sapiens
  siRNA target sequence for DCTN1 (NM_004082.2,4269-4287).
gagacattgaatcaattga

SEQ ID NO: 299839 - DNA, 19 bp, Homo sapiens
  siRNA target sequence for DCTN1 (NM_004082.2,4291-4309).
cacacacgcacgtagtaga

SEQ ID NO: 299840 - DNA, 19 bp, Homo sapiens
  siRNA target sequence for DCTN1 (NM_004082.2,4418-4436).
cctcaaggagacagtatct

SEQ ID NO: 299841 - DNA, 19 bp, Homo sapiens
  siRNA target sequence for DCTN1 (NM_004082.2,4550-4568).
ctcatgtgcggctggtttt

SEQ ID NO: 299842 - DNA, 19 bp, Homo sapiens
  siRNA target sequence for DCTN2 (NM_006400.3,173-191).
ggaatgagccagatgttta

SEQ ID NO: 299843 - DNA, 19 bp, Homo sapiens
  siRNA target sequence for DCTN2 (NM_006400.3,174-192).
gaatgagccagatgtttat

SEQ ID NO: 299844 - DNA, 19 bp, Homo sapiens
  siRNA target sequence for DCTN2 (NM_006400.3,266-284).
gcacaagtgtggaacacat

SEQ ID NO: 299845 - DNA, 19 bp, Homo sapiens
  siRNA target sequence for DCTN2 (NM_006400.3,269-287).
caagtgtggaacacatcat

SEQ ID NO: 299846 - DNA, 19 bp, Homo sapiens
  siRNA target sequence for DCTN2 (NM_006400.3,285-303).
cattgtcaatcctaatgct

SEQ ID NO: 299847 - DNA, 19 bp, Homo sapiens
  siRNA target sequence for DCTN2 (NM_006400.3,354-372).
ctcagatcgtattggaaaa

SEQ ID NO: 299848 - DNA, 19 bp, Homo sapiens
  siRNA target sequence for DCTN2 (NM_006400.3,386-404).
gatatgaatctggagaata

SEQ ID NO: 299849 - DNA, 19 bp, Homo sapiens
  siRNA target sequence for DCTN2 (NM_006400.3,436-454).
gagacaccccagcaaaagt

SEQ ID NO: 299850 - DNA, 19 bp, Homo sapiens
  siRNA target sequence for DCTN2 (NM_006400.3,628-646).
gatgctgcaatcaacctta

SEQ ID NO: 299851 - DNA, 19 bp, Homo sapiens
  siRNA target sequence for DCTN2 (NM_006400.3,752-770).
gcagccttgtcacttatga

SEQ ID NO: 299852 - DNA, 19 bp, Homo sapiens
  siRNA target sequence for DCTN2 (NM_006400.3,760-778).
gtcacttatgaactacatt

SEQ ID NO: 299853 - DNA, 19 bp, Homo sapiens
  siRNA target sequence for DCTN2 (NM_006400.3,812-830).
ccaaagtcgcagaacttga

SEQ ID NO: 299854 - DNA, 19 bp, Homo sapiens
  siRNA target sequence for DCTN2 (NM_006400.3,852-870).
gacagctgtacgttgtgat

SEQ ID NO: 299855 - DNA, 19 bp, Homo sapiens
  siRNA target sequence for DCTN2 (NM_006400.3,1274-1292).
caaccatgcgtgaaaacct

SEQ ID NO: 299856 - DNA, 19 bp, Homo sapiens
  siRNA target sequence for DCTN2 (NM_006400.3,1311-1329).
ctttgccagcattgatgaa

SEQ ID NO: 299857 - DNA, 19 bp, Homo sapiens
  siRNA target sequence for DNAI1 (NM_012144.2,210-228).
cgaaggctccccataaaca

SEQ ID NO: 299858 - DNA, 19 bp, Homo sapiens
  siRNA target sequence for DNAI1 (NM_012144.2,219-237).
cccataaacagcctcataa

SEQ ID NO: 299859 - DNA, 19 bp, Homo sapiens
  siRNA target sequence for DNAI1 (NM_012144.2,388-406).
gttcactcggattttgaca

SEQ ID NO: 299860 - DNA, 19 bp, Homo sapiens
  siRNA target sequence for DNAI1 (NM_012144.2,422-440).
gcaccccagaacattgtca

SEQ ID NO: 299861 - DNA, 19 bp, Homo sapiens
  siRNA target sequence for DNAI1 (NM_012144.2,554-572).
cagcattaccgcgatgaat

SEQ ID NO: 299862 - DNA, 19 bp, Homo sapiens
  siRNA target sequence for DNAI1 (NM_012144.2,556-574).
gcattaccgcgatgaatta

SEQ ID NO: 299863 - DNA, 19 bp, Homo sapiens
  siRNA target sequence for DNAI1 (NM_012144.2,590-608).
gagtctgtcaaggtgattt

SEQ ID NO: 299864 - DNA, 19 bp, Homo sapiens
  siRNA target sequence for DNAI1 (NM_012144.2,755-773).
ctcactaaccagttcaact

SEQ ID NO: 299865 - DNA, 19 bp, Homo sapiens
  siRNA target sequence for DNAI1 (NM_012144.2,867-885).
ccaatcagtgggagatcta

SEQ ID NO: 299866 - DNA, 19 bp, Homo sapiens
  siRNA target sequence for DNAI1 (NM_012144.2,868-886).
caatcagtgggagatctat

SEQ ID NO: 299867 - DNA, 19 bp, Homo sapiens
  siRNA target sequence for DNAI1 (NM_012144.2,880-898).
gatctatgatgcctatgta

SEQ ID NO: 299868 - DNA, 19 bp, Homo sapiens
  siRNA target sequence for DNAI1 (NM_012144.2,1410-1428).
gcaacgtggccatttacaa

SEQ ID NO: 299869 - DNA, 19 bp, Homo sapiens
  siRNA target sequence for DNAI1 (NM_012144.2,1529-1547).
gaccaaaaccttaacttct

SEQ ID NO: 299870 - DNA, 19 bp, Homo sapiens
  siRNA target sequence for DNAI1 (NM_012144.2,1773-1791).
cctactccagccaattcct

SEQ ID NO: 299871 - DNA, 19 bp, Homo sapiens
  siRNA target sequence for DNAI1 (NM_012144.2,1797-1815).
cctatgacgcccacaacat

SEQ ID NO: 299872 - DNA, 19 bp, Homo sapiens
  siRNA target sequence for DNAI1 (NM_012144.2,1912-1930).
gaccccgatgttcatctat

SEQ ID NO: 299873 - DNA, 19 bp, Homo sapiens
  siRNA target sequence for DNAI1 (NM_012144.2,1914-1932).
ccccgatgttcatctatga

SEQ ID NO: 299874 - DNA, 19 bp, Homo sapiens
  siRNA target sequence for DNAI1 (NM_012144.2,2003-2021).
gatgggaaggcccacatat

SEQ ID NO: 299875 - DNA, 19 bp, Homo sapiens
  siRNA target sequence for DNAI1 (NM_012144.2,2011-2029).
ggcccacatatttgactta

SEQ ID NO: 299876 - DNA, 19 bp, Homo sapiens
  siRNA target sequence for DNAI1 (NM_012144.2,2026-2044).
cttagccatcaacaagtat

SEQ ID NO: 299877 - DNA, 19 bp, Homo sapiens
  siRNA target sequence for DNAI1 (NM_012144.2,2089-2107).
cacccacgtgcagttcaat

SEQ ID NO: 299878 - DNA, 19 bp, Homo sapiens
  siRNA target sequence for DNAI1 (NM_012144.2,2093-2111).
cacgtgcagttcaatctca

SEQ ID NO: 299879 - DNA, 19 bp, Homo sapiens
  siRNA target sequence for DNAI2 (NM_023036.1,585-603).
catccgtttccggaagaaa

SEQ ID NO: 299880 - DNA, 19 bp, Homo sapiens
  siRNA target sequence for DNAI2 (NM_023036.1,688-706).
gacatctatgaagagtatt

SEQ ID NO: 299881 - DNA, 19 bp, Homo sapiens
  siRNA target sequence for DNAI2 (NM_023036.1,751-769).
gctaaaaccatcaatgtgt

SEQ ID NO: 299882 - DNA, 19 bp, Homo sapiens
  siRNA target sequence for DNAI2 (NM_023036.1,752-770).
ctaaaaccatcaatgtgtt

SEQ ID NO: 299883 - DNA, 19 bp, Homo sapiens
  siRNA target sequence for DNAI2 (NM_023036.1,848-866).
catactcctgcttggattt

SEQ ID NO: 299884 - DNA, 19 bp, Homo sapiens
  siRNA target sequence for DNAI2 (NM_023036.1,883-901).
ggcatgagcagcgattcat

SEQ ID NO: 299885 - DNA, 19 bp, Homo sapiens
  siRNA target sequence for DNAI2 (NM_023036.1,884-902).
gcatgagcagcgattcata

SEQ ID NO: 299886 - DNA, 19 bp, Homo sapiens
  siRNA target sequence for DNAI2 (NM_023036.1,921-939).
ccccaacaagcctgaactt

SEQ ID NO: 299887 - DNA, 19 bp, Homo sapiens
  siRNA target sequence for DNAI2 (NM_023036.1,972-990).
ggagttcaaccccaaagat

SEQ ID NO: 299888 - DNA, 19 bp, Homo sapiens
  siRNA target sequence for DNAI2 (NM_023036.1,973-991).
gagttcaaccccaaagatt

SEQ ID NO: 299889 - DNA, 19 bp, Homo sapiens
  siRNA target sequence for DNAI2 (NM_023036.1,1011-1029).
ctgctacaatggacagata

SEQ ID NO: 299890 - DNA, 19 bp, Homo sapiens
  siRNA target sequence for DNAI2 (NM_023036.1,1066-1084).
gagctatccaccattgagt

SEQ ID NO: 299891 - DNA, 19 bp, Homo sapiens
  siRNA target sequence for DNAI2 (NM_023036.1,1205-1223).
ccactgaagttgtgatctt

SEQ ID NO: 299892 - DNA, 19 bp, Homo sapiens
  siRNA target sequence for DNAI2 (NM_023036.1,1352-1370).
ccaagacgtcagctgaaaa

SEQ ID NO: 299893 - DNA, 19 bp, Homo sapiens
  siRNA target sequence for DNAI2 (NM_023036.1,1356-1374).
gacgtcagctgaaaagatt

SEQ ID NO: 299894 - DNA, 19 bp, Homo sapiens
  siRNA target sequence for DNAI2 (NM_023036.1,1358-1376).
cgtcagctgaaaagattgt

SEQ ID NO: 299895 - DNA, 19 bp, Homo sapiens
  siRNA target sequence for DNAI2 (NM_023036.1,1426-1444).
cccttctacccgaagaact

SEQ ID NO: 299896 - DNA, 19 bp, Homo sapiens
  siRNA target sequence for DNAI2 (NM_023036.1,1427-1445).
ccttctacccgaagaactt

SEQ ID NO: 299897 - DNA, 19 bp, Homo sapiens
  siRNA target sequence for DNAI2 (NM_023036.1,1492-1510).
cgggaatcgtccatcatgt

SEQ ID NO: 299898 - DNA, 19 bp, Homo sapiens
  siRNA target sequence for DNAI2 (NM_023036.1,1558-1576).
gtgaggccgaccgttttct

SEQ ID NO: 299899 - DNA, 19 bp, Homo sapiens
  siRNA target sequence for DNAI2 (NM_023036.1,1560-1578).
gaggccgaccgttttcttt

SEQ ID NO: 299900 - DNA, 19 bp, Homo sapiens
  siRNA target sequence for DNAI2 (NM_023036.1,1564-1582).
ccgaccgttttctttacca

SEQ ID NO: 299901 - DNA, 19 bp, Homo sapiens
  siRNA target sequence for DNAI2 (NM_023036.1,1591-1609).
gacggaaccctggatatct

SEQ ID NO: 299902 - DNA, 19 bp, Homo sapiens
  siRNA target sequence for DNAI2 (NM_023036.1,1788-1806).
cgtagcctcttccatgttt

SEQ ID NO: 299903 - DNA, 19 bp, Homo sapiens
  siRNA target sequence for DNALI1 (NM_003462.3,158-176).
gctcggctactgaaagtca

SEQ ID NO: 299904 - DNA, 19 bp, Homo sapiens
  siRNA target sequence for DNALI1 (NM_003462.3,246-264).
gtgtcccagatcctacaaa

SEQ ID NO: 299905 - DNA, 19 bp, Homo sapiens
  siRNA target sequence for DNALI1 (NM_003462.3,382-400).
ccaggagcagttagactta

SEQ ID NO: 299906 - DNA, 19 bp, Homo sapiens
  siRNA target sequence for DNALI1 (NM_003462.3,383-401).
caggagcagttagacttaa

SEQ ID NO: 299907 - DNA, 19 bp, Homo sapiens
  siRNA target sequence for DNALI1 (NM_003462.3,441-459).
ctgtccgcagggaactcta

SEQ ID NO: 299908 - DNA, 19 bp, Homo sapiens
  siRNA target sequence for DNALI1 (NM_003462.3,462-480).
cacagtgttttgatgagtt

SEQ ID NO: 299909 - DNA, 19 bp, Homo sapiens
  siRNA target sequence for DNALI1 (NM_003462.3,787-805).
gttcctgaagcgaacaaat

SEQ ID NO: 299910 - DNA, 19 bp, Homo sapiens
  siRNA target sequence for DNCI1 (NM_004411.1,213-231).
ctgagctagagcgcaaaaa

SEQ ID NO: 299911 - DNA, 19 bp, Homo sapiens
  siRNA target sequence for DNCI1 (NM_004411.1,232-250).
gcagcgcttagcacagata

SEQ ID NO: 299912 - DNA, 19 bp, Homo sapiens
  siRNA target sequence for DNCI1 (NM_004411.1,376-394).
gcaaagcattggtatctca

SEQ ID NO: 299913 - DNA, 19 bp, Homo sapiens
  siRNA target sequence for DNCI1 (NM_004411.1,410-428).
gtgcagccgctgcattttt

SEQ ID NO: 299914 - DNA, 19 bp, Homo sapiens
  siRNA target sequence for DNCI1 (NM_004411.1,475-493).
gtctccctcctcgaaatca

SEQ ID NO: 299915 - DNA, 19 bp, Homo sapiens
  siRNA target sequence for DNCI1 (NM_004411.1,477-495).
ctccctcctcgaaatcagt

SEQ ID NO: 299916 - DNA, 19 bp, Homo sapiens
  siRNA target sequence for DNCI1 (NM_004411.1,530-548).
ggcgatctggggccattaa

SEQ ID NO: 299917 - DNA, 19 bp, Homo sapiens
  siRNA target sequence for DNCI1 (NM_004411.1,532-550).
cgatctggggccattaaca

SEQ ID NO: 299918 - DNA, 19 bp, Homo sapiens
  siRNA target sequence for DNCI1 (NM_004411.1,533-551).
gatctggggccattaacaa

SEQ ID NO: 299919 - DNA, 19 bp, Homo sapiens
  siRNA target sequence for DNCI1 (NM_004411.1,612-630).
gaagaagactgcataaact

SEQ ID NO: 299920 - DNA, 19 bp, Homo sapiens
  siRNA target sequence for DNCI1 (NM_004411.1,671-689).
gaagtagtgtcctactcaa

SEQ ID NO: 299921 - DNA, 19 bp, Homo sapiens
  siRNA target sequence for DNCI1 (NM_004411.1,859-877).
ccttcattcagaggaattt

SEQ ID NO: 299922 - DNA, 19 bp, Homo sapiens
  siRNA target sequence for DNCI1 (NM_004411.1,883-901).
cttttttgaccggacaata

SEQ ID NO: 299923 - DNA, 19 bp, Homo sapiens
  siRNA target sequence for DNCI1 (NM_004411.1,892-910).
ccggacaatacgggtaatt

SEQ ID NO: 299924 - DNA, 19 bp, Homo sapiens
  siRNA target sequence for DNCI1 (NM_004411.1,894-912).
ggacaatacgggtaattga

SEQ ID NO: 299925 - DNA, 19 bp, Homo sapiens
  siRNA target sequence for DNCI1 (NM_004411.1,924-942).
ctgaagattccgacatctt

SEQ ID NO: 299926 - DNA, 19 bp, Homo sapiens
  siRNA target sequence for DNCI1 (NM_004411.1,933-951).
ccgacatcttttttgacta

SEQ ID NO: 299927 - DNA, 19 bp, Homo sapiens
  siRNA target sequence for DNCI1 (NM_004411.1,1017-1035).
gtcagttctatgatgaaca

SEQ ID NO: 299928 - DNA, 19 bp, Homo sapiens
  siRNA target sequence for DNCI1 (NM_004411.1,1019-1037).
cagttctatgatgaacatt

SEQ ID NO: 299929 - DNA, 19 bp, Homo sapiens
  siRNA target sequence for DNCI1 (NM_004411.1,1233-1251).
cccgtttccatcctaactt

SEQ ID NO: 299930 - DNA, 19 bp, Homo sapiens
  siRNA target sequence for DNCI1 (NM_004411.1,1266-1284).
cttactcgggccagattgt

SEQ ID NO: 299931 - DNA, 19 bp, Homo sapiens
  siRNA target sequence for DNCI1 (NM_004411.1,1355-1373).
catcccgtgtactgtgtaa

SEQ ID NO: 299932 - DNA, 19 bp, Homo sapiens
  siRNA target sequence for DNCI1 (NM_004411.1,1383-1401).
ggacccagaatgctcataa

SEQ ID NO: 299933 - DNA, 19 bp, Homo sapiens
  siRNA target sequence for DNCI1 (NM_004411.1,1417-1435).
cactgatggcaaaatgtgt

SEQ ID NO: 299934 - DNA, 19 bp, Homo sapiens
  siRNA target sequence for DNCI1 (NM_004411.1,1474-1492).
catggagctggtgtacaat

SEQ ID NO: 299935 - DNA, 19 bp, Homo sapiens
  siRNA target sequence for DNCI1 (NM_004411.1,1533-1551).
cgggagacgtcaataactt

SEQ ID NO: 299936 - DNA, 19 bp, Homo sapiens
  siRNA target sequence for DNCI1 (NM_004411.1,1756-1774).
gccgctctactcctttgaa

SEQ ID NO: 299937 - DNA, 19 bp, Homo sapiens
  siRNA target sequence for DNCI1 (NM_004411.1,1976-1994).
gactcggaaggccgtattt

SEQ ID NO: 299938 - DNA, 19 bp, Homo sapiens
  siRNA target sequence for DNCI1 (NM_004411.1,1986-2004).
gccgtatttgggtctatga

SEQ ID NO: 299939 - DNA, 19 bp, Homo sapiens
  siRNA target sequence for DNCI1 (NM_004411.1,2065-2083).
ggaaattcgtgctaacaga

SEQ ID NO: 299940 - DNA, 19 bp, Homo sapiens
  siRNA target sequence for CIAO1 (NM_004804.2,414-432).
ccccctgcggtaattacct

SEQ ID NO: 299941 - DNA, 19 bp, Homo sapiens
  siRNA target sequence for CIAO1 (NM_004804.2,449-467).
gatgctaccacttgcattt

SEQ ID NO: 299942 - DNA, 19 bp, Homo sapiens
  siRNA target sequence for CIAO1 (NM_004804.2,452-470).
gctaccacttgcatttgga

SEQ ID NO: 299943 - DNA, 19 bp, Homo sapiens
  siRNA target sequence for CIAO1 (NM_004804.2,453-471).
ctaccacttgcatttggaa

SEQ ID NO: 299944 - DNA, 19 bp, Homo sapiens
  siRNA target sequence for CIAO1 (NM_004804.2,567-585).
ccacttgcagccgagataa

SEQ ID NO: 299945 - DNA, 19 bp, Homo sapiens
  siRNA target sequence for CIAO1 (NM_004804.2,824-842).
cagcgcctggcgtcttgta

SEQ ID NO: 299946 - DNA, 19 bp, Homo sapiens
  siRNA target sequence for CIAO1 (NM_004804.2,829-847).
cctggcgtcttgtagtgat

SEQ ID NO: 299947 - DNA, 19 bp, Homo sapiens
  siRNA target sequence for CIAO1 (NM_004804.2,913-931).
ctctgaccccagttggaaa

SEQ ID NO: 299948 - DNA, 19 bp, Homo sapiens
  siRNA target sequence for CIAO1 (NM_004804.2,955-973).
ccactcaaggaccatttat

SEQ ID NO: 299949 - DNA, 19 bp, Homo sapiens
  siRNA target sequence for CIAO1 (NM_004804.2,960-978).
caaggaccatttatgacat

SEQ ID NO: 299950 - DNA, 19 bp, Homo sapiens
  siRNA target sequence for ID1 (NM_002165.2,301-319).
gacatgaacggctgttact

SEQ ID NO: 299951 - DNA, 19 bp, Homo sapiens
  siRNA target sequence for RBBP8 (NM_002894.1,329-347).
cctaactctgcagatacat

SEQ ID NO: 299952 - DNA, 19 bp, Homo sapiens
  siRNA target sequence for RBBP8 (NM_002894.1,345-363).
catctagtgactttaagga

SEQ ID NO: 299953 - DNA, 19 bp, Homo sapiens
  siRNA target sequence for RBBP8 (NM_002894.1,361-379).
ggacctttggacaaaacta

SEQ ID NO: 299954 - DNA, 19 bp, Homo sapiens
  siRNA target sequence for RBBP8 (NM_002894.1,387-405).
gtcatgatagagaagtaca

SEQ ID NO: 299955 - DNA, 19 bp, Homo sapiens
  siRNA target sequence for RBBP8 (NM_002894.1,401-419).
gtacaaggtttacaagtaa

SEQ ID NO: 299956 - DNA, 19 bp, Homo sapiens
  siRNA target sequence for RBBP8 (NM_002894.1,416-434).
gtaaaagtaaccaagctaa

SEQ ID NO: 299957 - DNA, 19 bp, Homo sapiens
  siRNA target sequence for RBBP8 (NM_002894.1,448-466).
cttagatgcacaaagacta

SEQ ID NO: 299958 - DNA, 19 bp, Homo sapiens
  siRNA target sequence for RBBP8 (NM_002894.1,547-565).
gttaagagcaggcttatgt

SEQ ID NO: 299959 - DNA, 19 bp, Homo sapiens
  siRNA target sequence for RBBP8 (NM_002894.1,644-662).
cttattacagaacttatga

SEQ ID NO: 299960 - DNA, 19 bp, Homo sapiens
  siRNA target sequence for RBBP8 (NM_002894.1,789-807).
cgataacagccttctcatt

SEQ ID NO: 299961 - DNA, 19 bp, Homo sapiens
  siRNA target sequence for RBBP8 (NM_002894.1,841-859).
cccccatgtccgatacata

SEQ ID NO: 299962 - DNA, 19 bp, Homo sapiens
  siRNA target sequence for RBBP8 (NM_002894.1,843-861).
cccatgtccgatacataga

SEQ ID NO: 299963 - DNA, 19 bp, Homo sapiens
  siRNA target sequence for RBBP8 (NM_002894.1,844-862).
ccatgtccgatacatagaa

SEQ ID NO: 299964 - DNA, 19 bp, Homo sapiens
  siRNA target sequence for RBBP8 (NM_002894.1,852-870).
gatacatagaacaaacaca

SEQ ID NO: 299965 - DNA, 19 bp, Homo sapiens
  siRNA target sequence for RBBP8 (NM_002894.1,890-908).
gtgtgtgcaaatgaaatga

SEQ ID NO: 299966 - DNA, 19 bp, Homo sapiens
  siRNA target sequence for RBBP8 (NM_002894.1,932-950).
catccacaacataatccta

SEQ ID NO: 299967 - DNA, 19 bp, Homo sapiens
  siRNA target sequence for RBBP8 (NM_002894.1,936-954).
cacaacataatcctaatga

SEQ ID NO: 299968 - DNA, 19 bp, Homo sapiens
  siRNA target sequence for RBBP8 (NM_002894.1,1027-1045).
ctatacccctgataagtca

SEQ ID NO: 299969 - DNA, 19 bp, Homo sapiens
  siRNA target sequence for RBBP8 (NM_002894.1,1062-1080).
cagttgttgctgaaacact

SEQ ID NO: 299970 - DNA, 19 bp, Homo sapiens
  siRNA target sequence for RBBP8 (NM_002894.1,1147-1165).
ccactgtctggaaggaaat

SEQ ID NO: 299971 - DNA, 19 bp, Homo sapiens
  siRNA target sequence for RBBP8 (NM_002894.1,1175-1193).
cagccttttgaggaatcta

SEQ ID NO: 299972 - DNA, 19 bp, Homo sapiens
  siRNA target sequence for RBBP8 (NM_002894.1,1177-1195).
gccttttgaggaatctaca

SEQ ID NO: 299973 - DNA, 19 bp, Homo sapiens
  siRNA target sequence for RBBP8 (NM_002894.1,1197-1215).
gaaatactgaagatagttt

SEQ ID NO: 299974 - DNA, 19 bp, Homo sapiens
  siRNA target sequence for RBBP8 (NM_002894.1,1289-1307).
ggagctacctctagtatca

SEQ ID NO: 299975 - DNA, 19 bp, Homo sapiens
  siRNA target sequence for RBBP8 (NM_002894.1,1290-1308).
gagctacctctagtatcaa

SEQ ID NO: 299976 - DNA, 19 bp, Homo sapiens
  siRNA target sequence for RBBP8 (NM_002894.1,1292-1310).
gctacctctagtatcaaaa

SEQ ID NO: 299977 - DNA, 19 bp, Homo sapiens
  siRNA target sequence for RBBP8 (NM_002894.1,1382-1400).
ctcccttttagcaacactt

SEQ ID NO: 299978 - DNA, 19 bp, Homo sapiens
  siRNA target sequence for RBBP8 (NM_002894.1,1393-1411).
caacacttgtatatctaga

SEQ ID NO: 299979 - DNA, 19 bp, Homo sapiens
  siRNA target sequence for RBBP8 (NM_002894.1,1398-1416).
cttgtatatctagattaga

SEQ ID NO: 299980 - DNA, 19 bp, Homo sapiens
  siRNA target sequence for RBBP8 (NM_002894.1,1475-1493).
gaagtgaacaagatcatta

SEQ ID NO: 299981 - DNA, 19 bp, Homo sapiens
  siRNA target sequence for RBBP8 (NM_002894.1,1489-1507).
cattatccagtcatctaat

SEQ ID NO: 299982 - DNA, 19 bp, Homo sapiens
  siRNA target sequence for RBBP8 (NM_002894.1,1544-1562).
ctaggtgaacagaatagga

SEQ ID NO: 299983 - DNA, 19 bp, Homo sapiens
  siRNA target sequence for RBBP8 (NM_002894.1,1560-1578).
ggactgagtacggtaaaga

SEQ ID NO: 299984 - DNA, 19 bp, Homo sapiens
  siRNA target sequence for RBBP8 (NM_002894.1,1561-1579).
gactgagtacggtaaagat

SEQ ID NO: 299985 - DNA, 19 bp, Homo sapiens
  siRNA target sequence for RBBP8 (NM_002894.1,1570-1588).
cggtaaagattctaacact

SEQ ID NO: 299986 - DNA, 19 bp, Homo sapiens
  siRNA target sequence for RBBP8 (NM_002894.1,1622-1640).
ggccgaacatccaaaagga

SEQ ID NO: 299987 - DNA, 19 bp, Homo sapiens
  siRNA target sequence for RBBP8 (NM_002894.1,1623-1641).
gccgaacatccaaaaggaa

SEQ ID NO: 299988 - DNA, 19 bp, Homo sapiens
  siRNA target sequence for RBBP8 (NM_002894.1,1677-1695).
gcccccaagcttcttttga

SEQ ID NO: 299989 - DNA, 19 bp, Homo sapiens
  siRNA target sequence for RBBP8 (NM_002894.1,1679-1697).
ccccaagcttcttttgata

SEQ ID NO: 299990 - DNA, 19 bp, Homo sapiens
  siRNA target sequence for RBBP8 (NM_002894.1,1680-1698).
cccaagcttcttttgataa

SEQ ID NO: 299991 - DNA, 19 bp, Homo sapiens
  siRNA target sequence for RBBP8 (NM_002894.1,1771-1789).
ggatctgtctgatcgattt

SEQ ID NO: 299992 - DNA, 19 bp, Homo sapiens
  siRNA target sequence for RBBP8 (NM_002894.1,1772-1790).
gatctgtctgatcgatttt

SEQ ID NO: 299993 - DNA, 19 bp, Homo sapiens
  siRNA target sequence for RBBP8 (NM_002894.1,1826-1844).
gagacttctaaaaacaaat

SEQ ID NO: 299994 - DNA, 19 bp, Homo sapiens
  siRNA target sequence for RBBP8 (NM_002894.1,1869-1887).
ctttgaagaccattccaaa

SEQ ID NO: 299995 - DNA, 19 bp, Homo sapiens
  siRNA target sequence for RBBP8 (NM_002894.1,1924-1942).
ctgcacgttgcccaaagat

SEQ ID NO: 299996 - DNA, 19 bp, Homo sapiens
  siRNA target sequence for RBBP8 (NM_002894.1,1978-1996).
ccttcagcccttgaataaa

SEQ ID NO: 299997 - DNA, 19 bp, Homo sapiens
  siRNA target sequence for RBBP8 (NM_002894.1,1979-1997).
cttcagcccttgaataaat

SEQ ID NO: 299998 - DNA, 19 bp, Homo sapiens
  siRNA target sequence for RBBP8 (NM_002894.1,1982-2000).
cagcccttgaataaatgct

SEQ ID NO: 299999 - DNA, 19 bp, Homo sapiens
  siRNA target sequence for RBBP8 (NM_002894.1,2060-2078).
ctacgtccacgtgaaagtt

SEQ ID NO: 300000 - DNA, 19 bp, Homo sapiens
  siRNA target sequence for RBBP8 (NM_002894.1,2085-2103).
ctgagaatgttttagatga

SEQ ID NO: 300001 - DNA, 19 bp, Homo sapiens
  siRNA target sequence for RBBP8 (NM_002894.1,2089-2107).
gaatgttttagatgacata

SEQ ID NO: 300002 - DNA, 19 bp, Homo sapiens
  siRNA target sequence for RBBP8 (NM_002894.1,2195-2213).
ccatgtagaactggtaaaa

SEQ ID NO: 300003 - DNA, 19 bp, Homo sapiens
  siRNA target sequence for RBBP8 (NM_002894.1,2279-2297).
gcagacctttctcagtata

SEQ ID NO: 300004 - DNA, 19 bp, Homo sapiens
  siRNA target sequence for RBBP8 (NM_002894.1,2302-2320).
ggatgttactgtaatagat

SEQ ID NO: 300005 - DNA, 19 bp, Homo sapiens
  siRNA target sequence for RBBP8 (NM_002894.1,2326-2344).
ggatggcagtcagtcaaaa

SEQ ID NO: 300006 - DNA, 19 bp, Homo sapiens
  siRNA target sequence for RBBP8 (NM_002894.1,2327-2345).
gatggcagtcagtcaaaat

SEQ ID NO: 300007 - DNA, 19 bp, Homo sapiens
  siRNA target sequence for RBBP8 (NM_002894.1,2332-2350).
cagtcagtcaaaattagga

SEQ ID NO: 300008 - DNA, 19 bp, Homo sapiens
  siRNA target sequence for RBBP8 (NM_002894.1,2365-2383).
catggactgtacattggtt

SEQ ID NO: 300009 - DNA, 19 bp, Homo sapiens
  siRNA target sequence for RBBP8 (NM_002894.1,2371-2389).
ctgtacattggttagtgaa

SEQ ID NO: 300010 - DNA, 19 bp, Homo sapiens
  siRNA target sequence for RBBP8 (NM_002894.1,2385-2403).
gtgaaaccgttctcttaaa

SEQ ID NO: 300011 - DNA, 19 bp, Homo sapiens
  siRNA target sequence for RBBP8 (NM_002894.1,2391-2409).
ccgttctcttaaaaatgaa

SEQ ID NO: 300012 - DNA, 19 bp, Homo sapiens
  siRNA target sequence for RBBP8 (NM_002894.1,2584-2602).
cactcatggtgataaacaa

SEQ ID NO: 300013 - DNA, 19 bp, Homo sapiens
  siRNA target sequence for RBBP8 (NM_002894.1,2586-2604).
ctcatggtgataaacaaga

SEQ ID NO: 300014 - DNA, 19 bp, Homo sapiens
  siRNA target sequence for RBBP8 (NM_002894.1,2622-2640).
cgtttgtggagccgtattt

SEQ ID NO: 300015 - DNA, 19 bp, Homo sapiens
  siRNA target sequence for RBBP8 (NM_002894.1,2623-2641).
gtttgtggagccgtatttt

SEQ ID NO: 300016 - DNA, 19 bp, Homo sapiens
  siRNA target sequence for RBBP8 (NM_002894.1,2659-2677).
gactagcttgcaaaatttt

SEQ ID NO: 300017 - DNA, 19 bp, Homo sapiens
  siRNA target sequence for RBBP8 (NM_002894.1,2867-2885).
ccttccactcagacttgta

SEQ ID NO: 300018 - DNA, 19 bp, Homo sapiens
  siRNA target sequence for RBBP8 (NM_002894.1,2942-2960).
cagccttacaacgcaatat

SEQ ID NO: 300019 - DNA, 19 bp, Homo sapiens
  siRNA target sequence for RBBP8 (NM_002894.1,2944-2962).
gccttacaacgcaatattt

SEQ ID NO: 300020 - DNA, 19 bp, Homo sapiens
  siRNA target sequence for SMARCB1 (NM_003073.2,245-263).
gaaactacctccgtatgtt

SEQ ID NO: 300021 - DNA, 19 bp, Homo sapiens
  siRNA target sequence for SMARCB1 (NM_003073.2,265-283).
cgaggttctctgtacaaga

SEQ ID NO: 300022 - DNA, 19 bp, Homo sapiens
  siRNA target sequence for SMARCB1 (NM_003073.2,269-287).
gttctctgtacaagagata

SEQ ID NO: 300023 - DNA, 19 bp, Homo sapiens
  siRNA target sequence for SMARCB1 (NM_003073.2,340-358).
gcatcgtcacatggtaaaa

SEQ ID NO: 300024 - DNA, 19 bp, Homo sapiens
  siRNA target sequence for SMARCB1 (NM_003073.2,341-359).
catcgtcacatggtaaaaa

SEQ ID NO: 300025 - DNA, 19 bp, Homo sapiens
  siRNA target sequence for SMARCB1 (NM_003073.2,451-469).
ggcaacgatgagaagtaca

SEQ ID NO: 300026 - DNA, 19 bp, Homo sapiens
  siRNA target sequence for SMARCB1 (NM_003073.2,452-470).
gcaacgatgagaagtacaa

SEQ ID NO: 300027 - DNA, 19 bp, Homo sapiens
  siRNA target sequence for SMARCB1 (NM_003073.2,611-629).
gcatgggccgagacaagaa

SEQ ID NO: 300028 - DNA, 19 bp, Homo sapiens
  siRNA target sequence for SMARCB1 (NM_003073.2,786-804).
gacgcctgagatgttttca

SEQ ID NO: 300029 - DNA, 19 bp, Homo sapiens
  siRNA target sequence for SMARCB1 (NM_003073.2,815-833).
gtgacgatctggatttgaa

SEQ ID NO: 300030 - DNA, 19 bp, Homo sapiens
  siRNA target sequence for THRSP (NM_003251.1,62-80).
cagccgaggtgcacaacat

SEQ ID NO: 300031 - DNA, 19 bp, Homo sapiens
  siRNA target sequence for THRSP (NM_003251.1,152-170).
ctgaggcccctgatctcta

SEQ ID NO: 300032 - DNA, 19 bp, Homo sapiens
  siRNA target sequence for THRSP (NM_003251.1,417-435).
ggaaatgacgggacaagtt

SEQ ID NO: 300033 - DNA, 19 bp, Homo sapiens
  siRNA target sequence for RPC32 (NM_006467.1,184-202).
ggacgtgctgcttatacct

SEQ ID NO: 300034 - DNA, 19 bp, Homo sapiens
  siRNA target sequence for RPC32 (NM_006467.1,185-203).
gacgtgctgcttatacctt

SEQ ID NO: 300035 - DNA, 19 bp, Homo sapiens
  siRNA target sequence for RPC32 (NM_006467.1,187-205).
cgtgctgcttataccttta

SEQ ID NO: 300036 - DNA, 19 bp, Homo sapiens
  siRNA target sequence for RPC32 (NM_006467.1,188-206).
gtgctgcttatacctttaa

SEQ ID NO: 300037 - DNA, 19 bp, Homo sapiens
  siRNA target sequence for RPC32 (NM_006467.1,190-208).
gctgcttatacctttaata

SEQ ID NO: 300038 - DNA, 19 bp, Homo sapiens
  siRNA target sequence for RPC32 (NM_006467.1,191-209).
ctgcttatacctttaatat

SEQ ID NO: 300039 - DNA, 19 bp, Homo sapiens
  siRNA target sequence for RPC32 (NM_006467.1,258-276).
gaaaccacccccactattt

SEQ ID NO: 300040 - DNA, 19 bp, Homo sapiens
  siRNA target sequence for RPC32 (NM_006467.1,267-285).
cccactatttcctgataca

SEQ ID NO: 300041 - DNA, 19 bp, Homo sapiens
  siRNA target sequence for RPC32 (NM_006467.1,406-424).
caagatattgaaaggtata

SEQ ID NO: 300042 - DNA, 19 bp, Homo sapiens
  siRNA target sequence for RPC32 (NM_006467.1,556-574).
ggcacaccactcactaata

SEQ ID NO: 300043 - DNA, 19 bp, Homo sapiens
  siRNA target sequence for RPC32 (NM_006467.1,560-578).
caccactcactaatactga

SEQ ID NO: 300044 - DNA, 19 bp, Homo sapiens
  siRNA target sequence for RPC62 (NM_006468.4,175-193).
ctcaagcagaaattaagct

SEQ ID NO: 300045 - DNA, 19 bp, Homo sapiens
  siRNA target sequence for RPC62 (NM_006468.4,183-201).
gaaattaagctctgttctt

SEQ ID NO: 300046 - DNA, 19 bp, Homo sapiens
  siRNA target sequence for RPC62 (NM_006468.4,203-221).
gttgctgcaagagcatttt

SEQ ID NO: 300047 - DNA, 19 bp, Homo sapiens
  siRNA target sequence for RPC62 (NM_006468.4,263-281).
cggcagccagccactaaga

SEQ ID NO: 300048 - DNA, 19 bp, Homo sapiens
  siRNA target sequence for RPC62 (NM_006468.4,265-283).
gcagccagccactaagagt

SEQ ID NO: 300049 - DNA, 19 bp, Homo sapiens
  siRNA target sequence for RPC62 (NM_006468.4,268-286).
gccagccactaagagtaat

SEQ ID NO: 300050 - DNA, 19 bp, Homo sapiens
  siRNA target sequence for RPC62 (NM_006468.4,269-287).
ccagccactaagagtaatt

SEQ ID NO: 300051 - DNA, 19 bp, Homo sapiens
  siRNA target sequence for RPC62 (NM_006468.4,334-352).
gtgtcctcgtccaacataa

SEQ ID NO: 300052 - DNA, 19 bp, Homo sapiens
  siRNA target sequence for RPC62 (NM_006468.4,410-428).
ccgggtattgcgaatgctt

SEQ ID NO: 300053 - DNA, 19 bp, Homo sapiens
  siRNA target sequence for RPC62 (NM_006468.4,411-429).
cgggtattgcgaatgctta

SEQ ID NO: 300054 - DNA, 19 bp, Homo sapiens
  siRNA target sequence for RPC62 (NM_006468.4,414-432).
gtattgcgaatgcttagat

SEQ ID NO: 300055 - DNA, 19 bp, Homo sapiens
  siRNA target sequence for RPC62 (NM_006468.4,435-453).
ccccggtacatctatacta

SEQ ID NO: 300056 - DNA, 19 bp, Homo sapiens
  siRNA target sequence for RPC62 (NM_006468.4,440-458).
gtacatctatactaccaaa

SEQ ID NO: 300057 - DNA, 19 bp, Homo sapiens
  siRNA target sequence for RPC62 (NM_006468.4,443-461).
catctatactaccaaaact

SEQ ID NO: 300058 - DNA, 19 bp, Homo sapiens
  siRNA target sequence for RPC62 (NM_006468.4,509-527).
cggcaaactgacaatgtca

SEQ ID NO: 300059 - DNA, 19 bp, Homo sapiens
  siRNA target sequence for RPC62 (NM_006468.4,584-602).
catggactatgctgaagta

SEQ ID NO: 300060 - DNA, 19 bp, Homo sapiens
  siRNA target sequence for RPC62 (NM_006468.4,588-606).
gactatgctgaagtatcaa

SEQ ID NO: 300061 - DNA, 19 bp, Homo sapiens
  siRNA target sequence for RPC62 (NM_006468.4,623-641).
ggcagacacacactttgta

SEQ ID NO: 300062 - DNA, 19 bp, Homo sapiens
  siRNA target sequence for RPC62 (NM_006468.4,699-717).
gcccccacacttgtcatta

SEQ ID NO: 300063 - DNA, 19 bp, Homo sapiens
  siRNA target sequence for RPC62 (NM_006468.4,700-718).
cccccacacttgtcattaa

SEQ ID NO: 300064 - DNA, 19 bp, Homo sapiens
  siRNA target sequence for RPC62 (NM_006468.4,701-719).
ccccacacttgtcattaat

SEQ ID NO: 300065 - DNA, 19 bp, Homo sapiens
  siRNA target sequence for RPC62 (NM_006468.4,728-746).
catgtacctggttcctaaa

SEQ ID NO: 300066 - DNA, 19 bp, Homo sapiens
  siRNA target sequence for RPC62 (NM_006468.4,751-769).
gcttgatagggaaaggtaa

SEQ ID NO: 300067 - DNA, 19 bp, Homo sapiens
  siRNA target sequence for RPC62 (NM_006468.4,765-783).
ggtaaaaggaggagatcat

SEQ ID NO: 300068 - DNA, 19 bp, Homo sapiens
  siRNA target sequence for RPC62 (NM_006468.4,815-833).
caagagaccaaaatatact

SEQ ID NO: 300069 - DNA, 19 bp, Homo sapiens
  siRNA target sequence for RPC62 (NM_006468.4,845-863).
ggagcccattccagatgat

SEQ ID NO: 300070 - DNA, 19 bp, Homo sapiens
  siRNA target sequence for RPC62 (NM_006468.4,909-927).
cgtgaccaagccattgtga

SEQ ID NO: 300071 - DNA, 19 bp, Homo sapiens
  siRNA target sequence for RPC62 (NM_006468.4,984-1002).
cgaatgagtgagattacca

SEQ ID NO: 300072 - DNA, 19 bp, Homo sapiens
  siRNA target sequence for RPC62 (NM_006468.4,1057-1075).
ccctacctgttggctataa

SEQ ID NO: 300073 - DNA, 19 bp, Homo sapiens
  siRNA target sequence for RPC62 (NM_006468.4,1076-1094).
catctctaagcaagttctt

SEQ ID NO: 300074 - DNA, 19 bp, Homo sapiens
  siRNA target sequence for RPC62 (NM_006468.4,1079-1097).
ctctaagcaagttcttgat

SEQ ID NO: 300075 - DNA, 19 bp, Homo sapiens
  siRNA target sequence for RPC62 (NM_006468.4,1081-1099).
ctaagcaagttcttgatca

SEQ ID NO: 300076 - DNA, 19 bp, Homo sapiens
  siRNA target sequence for RPC62 (NM_006468.4,1117-1135).
cagatgatccactagagtt

SEQ ID NO: 300077 - DNA, 19 bp, Homo sapiens
  siRNA target sequence for RPC62 (NM_006468.4,1126-1144).
cactagagtttgttggaaa

SEQ ID NO: 300078 - DNA, 19 bp, Homo sapiens
  siRNA target sequence for RPC62 (NM_006468.4,1156-1174).
gtggtggaggaatgtatgt

SEQ ID NO: 300079 - DNA, 19 bp, Homo sapiens
  siRNA target sequence for RPC62 (NM_006468.4,1181-1199).
cctccataaggcattagca

SEQ ID NO: 300080 - DNA, 19 bp, Homo sapiens
  siRNA target sequence for RPC62 (NM_006468.4,1182-1200).
ctccataaggcattagcat

SEQ ID NO: 300081 - DNA, 19 bp, Homo sapiens
  siRNA target sequence for RPC62 (NM_006468.4,1225-1243).
ccgtcgtacaggagagatt

SEQ ID NO: 300082 - DNA, 19 bp, Homo sapiens
  siRNA target sequence for RPC62 (NM_006468.4,1226-1244).
cgtcgtacaggagagattt

SEQ ID NO: 300083 - DNA, 19 bp, Homo sapiens
  siRNA target sequence for RPC62 (NM_006468.4,1246-1264).
ggtctcgctgtgctagaat

SEQ ID NO: 300084 - DNA, 19 bp, Homo sapiens
  siRNA target sequence for RPC62 (NM_006468.4,1247-1265).
gtctcgctgtgctagaata

SEQ ID NO: 300085 - DNA, 19 bp, Homo sapiens
  siRNA target sequence for RPC62 (NM_006468.4,1249-1267).
ctcgctgtgctagaatatt

SEQ ID NO: 300086 - DNA, 19 bp, Homo sapiens
  siRNA target sequence for RPC62 (NM_006468.4,1261-1279).
gaatattccgtctagtttt

SEQ ID NO: 300087 - DNA, 19 bp, Homo sapiens
  siRNA target sequence for RPC62 (NM_006468.4,1305-1323).
caagtggaagactttgcaa

SEQ ID NO: 300088 - DNA, 19 bp, Homo sapiens
  siRNA target sequence for RPC62 (NM_006468.4,1419-1437).
ccatccaggaccttctatt

SEQ ID NO: 300089 - DNA, 19 bp, Homo sapiens
  siRNA target sequence for RPC62 (NM_006468.4,1420-1438).
catccaggaccttctattt

SEQ ID NO: 300090 - DNA, 19 bp, Homo sapiens
  siRNA target sequence for RPC62 (NM_006468.4,1459-1477).
cagctgcccgaatgttgtt

SEQ ID NO: 300091 - DNA, 19 bp, Homo sapiens
  siRNA target sequence for RPC62 (NM_006468.4,1495-1513).
gcatagccaacttgataga

SEQ ID NO: 300092 - DNA, 19 bp, Homo sapiens
  siRNA target sequence for RPC62 (NM_006468.4,1496-1514).
catagccaacttgatagaa

SEQ ID NO: 300093 - DNA, 19 bp, Homo sapiens
  siRNA target sequence for RPC62 (NM_006468.4,1516-1534).
ggaggcaatttgaaaccaa

SEQ ID NO: 300094 - DNA, 19 bp, Homo sapiens
  siRNA target sequence for RPC62 (NM_006468.4,1544-1562).
gcgtctactagaaaaatct

SEQ ID NO: 300095 - DNA, 19 bp, Homo sapiens
  siRNA target sequence for RPC62 (NM_006468.4,1610-1628).
ggaagcacagttacaagaa

SEQ ID NO: 300096 - DNA, 19 bp, Homo sapiens
  siRNA target sequence for RPC62 (NM_006468.4,1665-1683).
ctagagaccctgaaacgta

SEQ ID NO: 300097 - DNA, 19 bp, Homo sapiens
  siRNA target sequence for AES (NM_001130.5,213-231).
ctaccccagcaactcaaat

SEQ ID NO: 300098 - DNA, 19 bp, Homo sapiens
  siRNA target sequence for AES (NM_001130.5,216-234).
ccccagcaactcaaattca

SEQ ID NO: 300099 - DNA, 19 bp, Homo sapiens
  siRNA target sequence for AES (NM_001130.5,519-537).
gctcccgagctgaactcta

SEQ ID NO: 300100 - DNA, 19 bp, Homo sapiens
  siRNA target sequence for AES (NM_001130.5,520-538).
ctcccgagctgaactctat

SEQ ID NO: 300101 - DNA, 19 bp, Homo sapiens
  siRNA target sequence for AES (NM_001130.5,522-540).
cccgagctgaactctatca

SEQ ID NO: 300102 - DNA, 19 bp, Homo sapiens
  siRNA target sequence for AES (NM_001130.5,523-541).
ccgagctgaactctatcat

SEQ ID NO: 300103 - DNA, 19 bp, Homo sapiens
  siRNA target sequence for AES (NM_198969.1,215-233).
ccgggtcccttttctttga

SEQ ID NO: 300104 - DNA, 19 bp, Homo sapiens
  siRNA target sequence for ASXL1 (NM_015338.3,471-489).
cgcctggtattagaaaact

SEQ ID NO: 300105 - DNA, 19 bp, Homo sapiens
  siRNA target sequence for ASXL1 (NM_015338.3,576-594).
ctcgcatgcctcaatgcta

SEQ ID NO: 300106 - DNA, 19 bp, Homo sapiens
  siRNA target sequence for ASXL1 (NM_015338.3,618-636).
ggagaggggttgttttata

SEQ ID NO: 300107 - DNA, 19 bp, Homo sapiens
  siRNA target sequence for ASXL1 (NM_015338.3,619-637).
gagaggggttgttttataa

SEQ ID NO: 300108 - DNA, 19 bp, Homo sapiens
  siRNA target sequence for ASXL1 (NM_015338.3,645-663).
ggccgaatcagccttttca

SEQ ID NO: 300109 - DNA, 19 bp, Homo sapiens
  siRNA target sequence for ASXL1 (NM_015338.3,746-764).
gagctgtgggtctaatgaa

SEQ ID NO: 300110 - DNA, 19 bp, Homo sapiens
  siRNA target sequence for ASXL1 (NM_015338.3,772-790).
ctgtgagtggtgaaaacga

SEQ ID NO: 300111 - DNA, 19 bp, Homo sapiens
  siRNA target sequence for ASXL1 (NM_015338.3,781-799).
gtgaaaacgatgtatctct

SEQ ID NO: 300112 - DNA, 19 bp, Homo sapiens
  siRNA target sequence for ASXL1 (NM_015338.3,788-806).
cgatgtatctcttgatgaa

SEQ ID NO: 300113 - DNA, 19 bp, Homo sapiens
  siRNA target sequence for ASXL1 (NM_015338.3,818-836).
cgcatcctgttctacagaa

SEQ ID NO: 300114 - DNA, 19 bp, Homo sapiens
  siRNA target sequence for ASXL1 (NM_015338.3,842-860).
gagtcgacctctttccaat

SEQ ID NO: 300115 - DNA, 19 bp, Homo sapiens
  siRNA target sequence for ASXL1 (NM_015338.3,1055-1073).
gggcagcgctgctattcgt

SEQ ID NO: 300116 - DNA, 19 bp, Homo sapiens
  siRNA target sequence for ASXL1 (NM_015338.3,1129-1147).
cagccacaggtcaaatgaa

SEQ ID NO: 300117 - DNA, 19 bp, Homo sapiens
  siRNA target sequence for ASXL1 (NM_015338.3,1209-1227).
ctccgtgccctgatcaact

SEQ ID NO: 300118 - DNA, 19 bp, Homo sapiens
  siRNA target sequence for ASXL1 (NM_015338.3,1330-1348).
gcagcagtgcactaaataa

SEQ ID NO: 300119 - DNA, 19 bp, Homo sapiens
  siRNA target sequence for ASXL1 (NM_015338.3,1333-1351).
gcagtgcactaaataacga

SEQ ID NO: 300120 - DNA, 19 bp, Homo sapiens
  siRNA target sequence for ASXL1 (NM_015338.3,1338-1356).
gcactaaataacgagtttt

SEQ ID NO: 300121 - DNA, 19 bp, Homo sapiens
  siRNA target sequence for ASXL1 (NM_015338.3,1387-1405).
gcctggctgatggtgaatt

SEQ ID NO: 300122 - DNA, 19 bp, Homo sapiens
  siRNA target sequence for ASXL1 (NM_015338.3,1391-1409).
ggctgatggtgaatttact

SEQ ID NO: 300123 - DNA, 19 bp, Homo sapiens
  siRNA target sequence for ASXL1 (NM_015338.3,1399-1417).
gtgaatttactcatgagat

SEQ ID NO: 300124 - DNA, 19 bp, Homo sapiens
  siRNA target sequence for ASXL1 (NM_015338.3,1505-1523).
gctgggtttgaccaaagaa

SEQ ID NO: 300125 - DNA, 19 bp, Homo sapiens
  siRNA target sequence for ASXL1 (NM_015338.3,1588-1606).
gagaatcagtgcgtataca

SEQ ID NO: 300126 - DNA, 19 bp, Homo sapiens
  siRNA target sequence for ASXL1 (NM_015338.3,1629-1647).
cgagatgggcattttaaga

SEQ ID NO: 300127 - DNA, 19 bp, Homo sapiens
  siRNA target sequence for ASXL1 (NM_015338.3,1722-1740).
gttgctaaggatgcaaaat

SEQ ID NO: 300128 - DNA, 19 bp, Homo sapiens
  siRNA target sequence for ASXL1 (NM_015338.3,1921-1939).
ctgcatctccagacagaat

SEQ ID NO: 300129 - DNA, 19 bp, Homo sapiens
  siRNA target sequence for ASXL1 (NM_015338.3,2017-2035).
catcctttcccgaaaagaa

SEQ ID NO: 300130 - DNA, 19 bp, Homo sapiens
  siRNA target sequence for ASXL1 (NM_015338.3,2049-2067).
gatcgtcagtcctttcgta

SEQ ID NO: 300131 - DNA, 19 bp, Homo sapiens
  siRNA target sequence for ASXL1 (NM_015338.3,2055-2073).
cagtcctttcgtaacacaa

SEQ ID NO: 300132 - DNA, 19 bp, Homo sapiens
  siRNA target sequence for ASXL1 (NM_015338.3,2059-2077).
cctttcgtaacacaattga

SEQ ID NO: 300133 - DNA, 19 bp, Homo sapiens
  siRNA target sequence for ASXL1 (NM_015338.3,2060-2078).
ctttcgtaacacaattgaa

SEQ ID NO: 300134 - DNA, 19 bp, Homo sapiens
  siRNA target sequence for ASXL1 (NM_015338.3,2129-2147).
gcccatccggattcaactt

SEQ ID NO: 300135 - DNA, 19 bp, Homo sapiens
  siRNA target sequence for ASXL1 (NM_015338.3,2132-2150).
catccggattcaactttca

SEQ ID NO: 300136 - DNA, 19 bp, Homo sapiens
  siRNA target sequence for ASXL1 (NM_015338.3,2181-2199).
cagcccacttaccagatat

SEQ ID NO: 300137 - DNA, 19 bp, Homo sapiens
  siRNA target sequence for ASXL1 (NM_015338.3,2510-2528).
gccgccttatcctctaaat

SEQ ID NO: 300138 - DNA, 19 bp, Homo sapiens
  siRNA target sequence for ASXL1 (NM_015338.3,2726-2744).
ctcagtagctgagagatta

SEQ ID NO: 300139 - DNA, 19 bp, Homo sapiens
  siRNA target sequence for ASXL1 (NM_015338.3,2728-2746).
cagtagctgagagattagt

SEQ ID NO: 300140 - DNA, 19 bp, Homo sapiens
  siRNA target sequence for ASXL1 (NM_015338.3,2757-2775).
cagttgcatccggatgtta

SEQ ID NO: 300141 - DNA, 19 bp, Homo sapiens
  siRNA target sequence for ASXL1 (NM_015338.3,2759-2777).
gttgcatccggatgttaga

SEQ ID NO: 300142 - DNA, 19 bp, Homo sapiens
  siRNA target sequence for ASXL1 (NM_015338.3,2762-2780).
gcatccggatgttagaact

SEQ ID NO: 300143 - DNA, 19 bp, Homo sapiens
  siRNA target sequence for ASXL1 (NM_015338.3,2868-2886).
ctagtgggagatgatacat

SEQ ID NO: 300144 - DNA, 19 bp, Homo sapiens
  siRNA target sequence for ASXL1 (NM_015338.3,2874-2892).
ggagatgatacattagaga

SEQ ID NO: 300145 - DNA, 19 bp, Homo sapiens
  siRNA target sequence for ASXL1 (NM_015338.3,2875-2893).
gagatgatacattagagaa

SEQ ID NO: 300146 - DNA, 19 bp, Homo sapiens
  siRNA target sequence for ASXL1 (NM_015338.3,2913-2931).
gacagtcatcccactatga

SEQ ID NO: 300147 - DNA, 19 bp, Homo sapiens
  siRNA target sequence for ASXL1 (NM_015338.3,2967-2985).
gaatcctcaccgactgatt

SEQ ID NO: 300148 - DNA, 19 bp, Homo sapiens
  siRNA target sequence for ASXL1 (NM_015338.3,2998-3016).
gagcatttgatgacgaatt

SEQ ID NO: 300149 - DNA, 19 bp, Homo sapiens
  siRNA target sequence for ASXL1 (NM_015338.3,3037-3055).
ctcctatgagggaaagtga

SEQ ID NO: 300150 - DNA, 19 bp, Homo sapiens
  siRNA target sequence for ASXL1 (NM_015338.3,3039-3057).
cctatgagggaaagtgata

SEQ ID NO: 300151 - DNA, 19 bp, Homo sapiens
  siRNA target sequence for ASXL1 (NM_015338.3,3079-3097).
ccaaggctctcgtttctaa

SEQ ID NO: 300152 - DNA, 19 bp, Homo sapiens
  siRNA target sequence for ASXL1 (NM_015338.3,3083-3101).
ggctctcgtttctaacagt

SEQ ID NO: 300153 - DNA, 19 bp, Homo sapiens
  siRNA target sequence for ASXL1 (NM_015338.3,3084-3102).
gctctcgtttctaacagtt

SEQ ID NO: 300154 - DNA, 19 bp, Homo sapiens
  siRNA target sequence for ASXL1 (NM_015338.3,3098-3116).
cagttctttgcattggata

SEQ ID NO: 300155 - DNA, 19 bp, Homo sapiens
  siRNA target sequence for ASXL1 (NM_015338.3,3113-3131).
gatacccatcccatcgaat

SEQ ID NO: 300156 - DNA, 19 bp, Homo sapiens
  siRNA target sequence for ASXL1 (NM_015338.3,3118-3136).
ccatcccatcgaatgatga

SEQ ID NO: 300157 - DNA, 19 bp, Homo sapiens
  siRNA target sequence for ASXL1 (NM_015338.3,3127-3145).
cgaatgatgaggtagtgaa

SEQ ID NO: 300158 - DNA, 19 bp, Homo sapiens
  siRNA target sequence for ASXL1 (NM_015338.3,3128-3146).
gaatgatgaggtagtgaaa

SEQ ID NO: 300159 - DNA, 19 bp, Homo sapiens
  siRNA target sequence for ASXL1 (NM_015338.3,3513-3531).
gatgagaaacccaattgga

SEQ ID NO: 300160 - DNA, 19 bp, Homo sapiens
  siRNA target sequence for ASXL1 (NM_015338.3,3564-3582).
gacatgcgtctggttacaa

SEQ ID NO: 300161 - DNA, 19 bp, Homo sapiens
  siRNA target sequence for ASXL1 (NM_015338.3,3628-3646).
gtgcggtccgccaaaagat

SEQ ID NO: 300162 - DNA, 19 bp, Homo sapiens
  siRNA target sequence for ASXL1 (NM_015338.3,3760-3778).
gtagcttgcccctagagaa

SEQ ID NO: 300163 - DNA, 19 bp, Homo sapiens
  siRNA target sequence for ASXL1 (NM_015338.3,3856-3874).
cgctacgcatgggatcttt

SEQ ID NO: 300164 - DNA, 19 bp, Homo sapiens
  siRNA target sequence for ASXL1 (NM_015338.3,3857-3875).
gctacgcatgggatcttta

SEQ ID NO: 300165 - DNA, 19 bp, Homo sapiens
  siRNA target sequence for ASXL1 (NM_015338.3,4014-4032).
gcaccccaaaagaattgca

SEQ ID NO: 300166 - DNA, 19 bp, Homo sapiens
  siRNA target sequence for ASXL1 (NM_015338.3,4030-4048).
gcaaggcagtcccaagttt

SEQ ID NO: 300167 - DNA, 19 bp, Homo sapiens
  siRNA target sequence for ASXL1 (NM_015338.3,4035-4053).
gcagtcccaagttttgact

SEQ ID NO: 300168 - DNA, 19 bp, Homo sapiens
  siRNA target sequence for ASXL1 (NM_015338.3,4076-4094).
cattacatcctctaggaaa

SEQ ID NO: 300169 - DNA, 19 bp, Homo sapiens
  siRNA target sequence for ASXL1 (NM_015338.3,4129-4147).
cctttagttgtgaagatca

SEQ ID NO: 300170 - DNA, 19 bp, Homo sapiens
  siRNA target sequence for ASXL1 (NM_015338.3,4151-4169).
ggaagtccgtgctatgtca

SEQ ID NO: 300171 - DNA, 19 bp, Homo sapiens
  siRNA target sequence for ASXL1 (NM_015338.3,4226-4244).
gagaacacctcgtttctca

SEQ ID NO: 300172 - DNA, 19 bp, Homo sapiens
  siRNA target sequence for ASXL1 (NM_015338.3,4315-4333).
gccaagggaagaagctttt

SEQ ID NO: 300173 - DNA, 19 bp, Homo sapiens
  siRNA target sequence for ASXL1 (NM_015338.3,4399-4417).
ctgagatccctccagtttt

SEQ ID NO: 300174 - DNA, 19 bp, Homo sapiens
  siRNA target sequence for ASXL1 (NM_015338.3,4518-4536).
gtcaagaatgagaagactt

SEQ ID NO: 300175 - DNA, 19 bp, Homo sapiens
  siRNA target sequence for ASXL1 (NM_015338.3,4563-4581).
gccgagaacaggaaagcta

SEQ ID NO: 300176 - DNA, 19 bp, Homo sapiens
  siRNA target sequence for ASXL1 (NM_015338.3,4723-4741).
gcatcaagcaggcatttta

SEQ ID NO: 300177 - DNA, 19 bp, Homo sapiens
  siRNA target sequence for ASXL1 (NM_015338.3,4766-4784).
gagttccaccagctttaat

SEQ ID NO: 300178 - DNA, 19 bp, Homo sapiens
  siRNA target sequence for ASXL1 (NM_015338.3,4841-4859).
gagccacaaagcaaacttt

SEQ ID NO: 300179 - DNA, 19 bp, Homo sapiens
  siRNA target sequence for ASXL1 (NM_015338.3,4985-5003).
ctgtcacgatgactgtatt

SEQ ID NO: 300180 - DNA, 19 bp, Homo sapiens
  siRNA target sequence for ASXL1 (NM_015338.3,5007-5025).
ccctcaaagctctgtgtat

SEQ ID NO: 300181 - DNA, 19 bp, Homo sapiens
  siRNA target sequence for BCL3 (NM_005178.2,274-292).
gagccttactgcctttgta

SEQ ID NO: 300182 - DNA, 19 bp, Homo sapiens
  siRNA target sequence for BCL3 (NM_005178.2,342-360).
cccctataccccatgatgt

SEQ ID NO: 300183 - DNA, 19 bp, Homo sapiens
  siRNA target sequence for BCL3 (NM_005178.2,425-443).
cacgcctctccatattgct

SEQ ID NO: 300184 - DNA, 19 bp, Homo sapiens
  siRNA target sequence for BCL3 (NM_005178.2,504-522).
cgggagctcgacatctaca

SEQ ID NO: 300185 - DNA, 19 bp, Homo sapiens
  siRNA target sequence for BCL3 (NM_005178.2,507-525).
gagctcgacatctacaaca

SEQ ID NO: 300186 - DNA, 19 bp, Homo sapiens
  siRNA target sequence for BCL3 (NM_005178.2,551-569).
ggctgtgatcaccacatta

SEQ ID NO: 300187 - DNA, 19 bp, Homo sapiens
  siRNA target sequence for BCL3 (NM_005178.2,921-939).
gtgaacgcgcaaatgtact

SEQ ID NO: 300188 - DNA, 19 bp, Homo sapiens
  siRNA target sequence for BMI1 (NM_005180.5,509-527).
catcgaacaacgagaatca

SEQ ID NO: 300189 - DNA, 19 bp, Homo sapiens
  siRNA target sequence for BMI1 (NM_005180.5,512-530).
cgaacaacgagaatcaaga

SEQ ID NO: 300190 - DNA, 19 bp, Homo sapiens
  siRNA target sequence for BMI1 (NM_005180.5,587-605).
gccacaaccataatagaat

SEQ ID NO: 300191 - DNA, 19 bp, Homo sapiens
  siRNA target sequence for BMI1 (NM_005180.5,595-613).
cataatagaatgtctacat

SEQ ID NO: 300192 - DNA, 19 bp, Homo sapiens
  siRNA target sequence for BMI1 (NM_005180.5,606-624).
gtctacattccttctgtaa

SEQ ID NO: 300193 - DNA, 19 bp, Homo sapiens
  siRNA target sequence for BMI1 (NM_005180.5,691-709).
gaccagaccactactgaat

SEQ ID NO: 300194 - DNA, 19 bp, Homo sapiens
  siRNA target sequence for BMI1 (NM_005180.5,693-711).
ccagaccactactgaatat

SEQ ID NO: 300195 - DNA, 19 bp, Homo sapiens
  siRNA target sequence for BMI1 (NM_005180.5,694-712).
cagaccactactgaatata

SEQ ID NO: 300196 - DNA, 19 bp, Homo sapiens
  siRNA target sequence for BMI1 (NM_005180.5,698-716).
ccactactgaatataaggt

SEQ ID NO: 300197 - DNA, 19 bp, Homo sapiens
  siRNA target sequence for BMI1 (NM_005180.5,719-737).
gataaaactctccaagata

SEQ ID NO: 300198 - DNA, 19 bp, Homo sapiens
  siRNA target sequence for BMI1 (NM_005180.5,726-744).
ctctccaagatattgtata

SEQ ID NO: 300199 - DNA, 19 bp, Homo sapiens
  siRNA target sequence for BMI1 (NM_005180.5,728-746).
ctccaagatattgtataca

SEQ ID NO: 300200 - DNA, 19 bp, Homo sapiens
  siRNA target sequence for BMI1 (NM_005180.5,822-840).
ctgccaatggctctaatga

SEQ ID NO: 300201 - DNA, 19 bp, Homo sapiens
  siRNA target sequence for BMI1 (NM_005180.5,887-905).
gatgagataataagcttat

SEQ ID NO: 300202 - DNA, 19 bp, Homo sapiens
  siRNA target sequence for BMI1 (NM_005180.5,901-919).
cttatccattgaattcttt

SEQ ID NO: 300203 - DNA, 19 bp, Homo sapiens
  siRNA target sequence for BMI1 (NM_005180.5,974-992).
gaggtgaatgataaaagat

SEQ ID NO: 300204 - DNA, 19 bp, Homo sapiens
  siRNA target sequence for BMI1 (NM_005180.5,1015-1033).
gactgtgatgcacttaaga

SEQ ID NO: 300205 - DNA, 19 bp, Homo sapiens
  siRNA target sequence for BMI1 (NM_005180.5,1017-1035).
ctgtgatgcacttaagaaa

SEQ ID NO: 300206 - DNA, 19 bp, Homo sapiens
  siRNA target sequence for BMI1 (NM_005180.5,1021-1039).
gatgcacttaagaaagttt

SEQ ID NO: 300207 - DNA, 19 bp, Homo sapiens
  siRNA target sequence for BMI1 (NM_005180.5,1047-1065).
gtaaaatggacatacctaa

SEQ ID NO: 300208 - DNA, 19 bp, Homo sapiens
  siRNA target sequence for BMI1 (NM_005180.5,1160-1178).
ggtccacttccattgaaat

SEQ ID NO: 300209 - DNA, 19 bp, Homo sapiens
  siRNA target sequence for BMI1 (NM_005180.5,1180-1198).
cagagttcgacctacttgt

SEQ ID NO: 300210 - DNA, 19 bp, Homo sapiens
  siRNA target sequence for BMI1 (NM_005180.5,1184-1202).
gttcgacctacttgtaaaa

SEQ ID NO: 300211 - DNA, 19 bp, Homo sapiens
  siRNA target sequence for BMI1 (NM_005180.5,1187-1205).
cgacctacttgtaaaagaa

SEQ ID NO: 300212 - DNA, 19 bp, Homo sapiens
  siRNA target sequence for BMI1 (NM_005180.5,1345-1363).
gtctcctcatccacagttt

SEQ ID NO: 300213 - DNA, 19 bp, Homo sapiens
  siRNA target sequence for BMI1 (NM_005180.5,1430-1448).
gccaatagacctcgaaaat

SEQ ID NO: 300214 - DNA, 19 bp, Homo sapiens
  siRNA target sequence for BMI1 (NM_005180.5,1432-1450).
caatagacctcgaaaatca

SEQ ID NO: 300215 - DNA, 19 bp, Homo sapiens
  siRNA target sequence for BMI1 (NM_005180.5,1439-1457).
cctcgaaaatcatcagtaa

SEQ ID NO: 300216 - DNA, 19 bp, Homo sapiens
  siRNA target sequence for BMI1 (NM_005180.5,1440-1458).
ctcgaaaatcatcagtaaa

SEQ ID NO: 300217 - DNA, 19 bp, Homo sapiens
  siRNA target sequence for CCNC (NM_005190.2,154-172).
gaaggagcgccaaaaggat

SEQ ID NO: 300218 - DNA, 19 bp, Homo sapiens
  siRNA target sequence for CCNC (NM_005190.2,232-250).
ccaagcattaggtgaacat

SEQ ID NO: 300219 - DNA, 19 bp, Homo sapiens
  siRNA target sequence for CCNC (NM_005190.2,279-297).
ctgctacggtatatttcaa

SEQ ID NO: 300220 - DNA, 19 bp, Homo sapiens
  siRNA target sequence for CCNC (NM_005190.2,281-299).
gctacggtatatttcaaga

SEQ ID NO: 300221 - DNA, 19 bp, Homo sapiens
  siRNA target sequence for CCNC (NM_005190.2,310-328).
caggtattctctgaaaagt

SEQ ID NO: 300222 - DNA, 19 bp, Homo sapiens
  siRNA target sequence for CCNC (NM_005190.2,369-387).
catccaaagtagaggaatt

SEQ ID NO: 300223 - DNA, 19 bp, Homo sapiens
  siRNA target sequence for CCNC (NM_005190.2,380-398).
gaggaatttggagtagttt

SEQ ID NO: 300224 - DNA, 19 bp, Homo sapiens
  siRNA target sequence for CCNC (NM_005190.2,497-515).
gaatgtgaattctatctgt

SEQ ID NO: 300225 - DNA, 19 bp, Homo sapiens
  siRNA target sequence for CCNC (NM_005190.2,501-519).
gtgaattctatctgttaga

SEQ ID NO: 300226 - DNA, 19 bp, Homo sapiens
  siRNA target sequence for CCNC (NM_005190.2,531-549).
gttgcttgatagtgtatca

SEQ ID NO: 300227 - DNA, 19 bp, Homo sapiens
  siRNA target sequence for CCNC (NM_005190.2,538-556).
gatagtgtatcatccttat

SEQ ID NO: 300228 - DNA, 19 bp, Homo sapiens
  siRNA target sequence for CCNC (NM_005190.2,611-629).
cttgcatggaggatagtga

SEQ ID NO: 300229 - DNA, 19 bp, Homo sapiens
  siRNA target sequence for CCNC (NM_005190.2,621-639).
ggatagtgaatgataccta

SEQ ID NO: 300230 - DNA, 19 bp, Homo sapiens
  siRNA target sequence for CCNC (NM_005190.2,645-663).
cggatctttgcctactgta

SEQ ID NO: 300231 - DNA, 19 bp, Homo sapiens
  siRNA target sequence for CCNC (NM_005190.2,646-664).
ggatctttgcctactgtat

SEQ ID NO: 300232 - DNA, 19 bp, Homo sapiens
  siRNA target sequence for CCNC (NM_005190.2,659-677).
ctgtatcctcctttcatga

SEQ ID NO: 300233 - DNA, 19 bp, Homo sapiens
  siRNA target sequence for CCNC (NM_005190.2,661-679).
gtatcctcctttcatgata

SEQ ID NO: 300234 - DNA, 19 bp, Homo sapiens
  siRNA target sequence for CCNC (NM_005190.2,666-684).
ctcctttcatgatagcttt

SEQ ID NO: 300235 - DNA, 19 bp, Homo sapiens
  siRNA target sequence for CCNC (NM_005190.2,741-759).
ctgagctttctgtggatat

SEQ ID NO: 300236 - DNA, 19 bp, Homo sapiens
  siRNA target sequence for CCNC (NM_005190.2,805-823).
gcagtggaagaatttcgat

SEQ ID NO: 300237 - DNA, 19 bp, Homo sapiens
  siRNA target sequence for CCNC (NM_005190.2,814-832).
gaatttcgatgagagaaaa

SEQ ID NO: 300238 - DNA, 19 bp, Homo sapiens
  siRNA target sequence for CCNC (NM_005190.2,835-853).
gatggcaaccattcttagt

SEQ ID NO: 300239 - DNA, 19 bp, Homo sapiens
  siRNA target sequence for CCNC (NM_005190.2,839-857).
gcaaccattcttagtaaga

SEQ ID NO: 300240 - DNA, 19 bp, Homo sapiens
  siRNA target sequence for CCNH (NM_001239.2,303-321).
ctgacgccaaccgcaaatt

SEQ ID NO: 300241 - DNA, 19 bp, Homo sapiens
  siRNA target sequence for CCNH (NM_001239.2,313-331).
ccgcaaattcagatgcaaa

SEQ ID NO: 300242 - DNA, 19 bp, Homo sapiens
  siRNA target sequence for CCNH (NM_001239.2,470-488).
gtgggtacggcttgtatgt

SEQ ID NO: 300243 - DNA, 19 bp, Homo sapiens
  siRNA target sequence for CCNH (NM_001239.2,472-490).
gggtacggcttgtatgtat

SEQ ID NO: 300244 - DNA, 19 bp, Homo sapiens
  siRNA target sequence for CCNH (NM_001239.2,473-491).
ggtacggcttgtatgtatt

SEQ ID NO: 300245 - DNA, 19 bp, Homo sapiens
  siRNA target sequence for CCNH (NM_001239.2,477-495).
cggcttgtatgtatttcaa

SEQ ID NO: 300246 - DNA, 19 bp, Homo sapiens
  siRNA target sequence for CCNH (NM_001239.2,524-542).
gaatatcaccccaggataa

SEQ ID NO: 300247 - DNA, 19 bp, Homo sapiens
  siRNA target sequence for CCNH (NM_001239.2,566-584).
gcctgcaaagtagatgaat

SEQ ID NO: 300248 - DNA, 19 bp, Homo sapiens
  siRNA target sequence for CCNH (NM_001239.2,658-676).
gatactggaatatgaacta

SEQ ID NO: 300249 - DNA, 19 bp, Homo sapiens
  siRNA target sequence for CCNH (NM_001239.2,715-733).
caatccttacagaccattt

SEQ ID NO: 300250 - DNA, 19 bp, Homo sapiens
  siRNA target sequence for CCNH (NM_001239.2,759-777).
cccgctatcccatattgga

SEQ ID NO: 300251 - DNA, 19 bp, Homo sapiens
  siRNA target sequence for CCNH (NM_001239.2,832-850).
gacggatgcttacctttta

SEQ ID NO: 300252 - DNA, 19 bp, Homo sapiens
  siRNA target sequence for CCNH (NM_001239.2,834-852).
cggatgcttaccttttata

SEQ ID NO: 300253 - DNA, 19 bp, Homo sapiens
  siRNA target sequence for CCNH (NM_001239.2,836-854).
gatgcttaccttttataca

SEQ ID NO: 300254 - DNA, 19 bp, Homo sapiens
  siRNA target sequence for CCNH (NM_001239.2,874-892).
gactgccattttatctagt

SEQ ID NO: 300255 - DNA, 19 bp, Homo sapiens
  siRNA target sequence for CCNH (NM_001239.2,906-924).
gaattactatggaaagtta

SEQ ID NO: 300256 - DNA, 19 bp, Homo sapiens
  siRNA target sequence for CCNH (NM_001239.2,963-981).
gcctgtcacagttactaga

SEQ ID NO: 300257 - DNA, 19 bp, Homo sapiens
  siRNA target sequence for CCNH (NM_001239.2,964-982).
cctgtcacagttactagat

SEQ ID NO: 300258 - DNA, 19 bp, Homo sapiens
  siRNA target sequence for CCNH (NM_001239.2,965-983).
ctgtcacagttactagata

SEQ ID NO: 300259 - DNA, 19 bp, Homo sapiens
  siRNA target sequence for CCNH (NM_001239.2,967-985).
gtcacagttactagatata

SEQ ID NO: 300260 - DNA, 19 bp, Homo sapiens
  siRNA target sequence for CCNH (NM_001239.2,969-987).
cacagttactagatataat

SEQ ID NO: 300261 - DNA, 19 bp, Homo sapiens
  siRNA target sequence for CCNH (NM_001239.2,1040-1058).
gttgctgttctgaaacaga

SEQ ID NO: 300262 - DNA, 19 bp, Homo sapiens
  siRNA target sequence for CCNH (NM_001239.2,1060-1078).
gttggagcgatgtcattct

SEQ ID NO: 300263 - DNA, 19 bp, Homo sapiens
  siRNA target sequence for CCNH (NM_001239.2,1080-1098).
ctgagcttgcacttaacgt

SEQ ID NO: 300264 - DNA, 19 bp, Homo sapiens
  siRNA target sequence for CCNH (NM_001239.2,1082-1100).
gagcttgcacttaacgtaa

SEQ ID NO: 300265 - DNA, 19 bp, Homo sapiens
  siRNA target sequence for CCNH (NM_001239.2,1085-1103).
cttgcacttaacgtaatca

SEQ ID NO: 300266 - DNA, 19 bp, Homo sapiens
  siRNA target sequence for CCNH (NM_001239.2,1111-1129).
gaggaaaggctatgaagat

SEQ ID NO: 300267 - DNA, 19 bp, Homo sapiens
  siRNA target sequence for CCNH (NM_001239.2,1130-1148).
gatgattacgtctcaaaga

SEQ ID NO: 300268 - DNA, 19 bp, Homo sapiens
  siRNA target sequence for CCNT1 (NM_001240.2,350-368).
caaacggtggtatttcact

SEQ ID NO: 300269 - DNA, 19 bp, Homo sapiens
  siRNA target sequence for CCNT1 (NM_001240.2,474-492).
cgtcttaacgtctcacaat

SEQ ID NO: 300270 - DNA, 19 bp, Homo sapiens
  siRNA target sequence for CCNT1 (NM_001240.2,475-493).
gtcttaacgtctcacaatt

SEQ ID NO: 300271 - DNA, 19 bp, Homo sapiens
  siRNA target sequence for CCNT1 (NM_001240.2,477-495).
cttaacgtctcacaattga

SEQ ID NO: 300272 - DNA, 19 bp, Homo sapiens
  siRNA target sequence for CCNT1 (NM_001240.2,496-514).
ctatcaacactgctatagt

SEQ ID NO: 300273 - DNA, 19 bp, Homo sapiens
  siRNA target sequence for CCNT1 (NM_001240.2,525-543).
cgattctacatgattcagt

SEQ ID NO: 300274 - DNA, 19 bp, Homo sapiens
  siRNA target sequence for CCNT1 (NM_001240.2,674-692).
ccttcctgatactagaagt

SEQ ID NO: 300275 - DNA, 19 bp, Homo sapiens
  siRNA target sequence for CCNT1 (NM_001240.2,685-703).
ctagaagtgaggcttattt

SEQ ID NO: 300276 - DNA, 19 bp, Homo sapiens
  siRNA target sequence for CCNT1 (NM_001240.2,695-713).
ggcttatttgcaacaagtt

SEQ ID NO: 300277 - DNA, 19 bp, Homo sapiens
  siRNA target sequence for CCNT1 (NM_001240.2,746-764).
gcagactttaggctttgaa

SEQ ID NO: 300278 - DNA, 19 bp, Homo sapiens
  siRNA target sequence for CCNT1 (NM_001240.2,749-767).
gactttaggctttgaacta

SEQ ID NO: 300279 - DNA, 19 bp, Homo sapiens
  siRNA target sequence for CCNT1 (NM_001240.2,758-776).
ctttgaactaacaattgat

SEQ ID NO: 300280 - DNA, 19 bp, Homo sapiens
  siRNA target sequence for CCNT1 (NM_001240.2,779-797).
cccacatactcatgtagta

SEQ ID NO: 300281 - DNA, 19 bp, Homo sapiens
  siRNA target sequence for CCNT1 (NM_001240.2,835-853).
cacagacttcttacttcat

SEQ ID NO: 300282 - DNA, 19 bp, Homo sapiens
  siRNA target sequence for CCNT1 (NM_001240.2,866-884).
cctgcatttgaccacattt

SEQ ID NO: 300283 - DNA, 19 bp, Homo sapiens
  siRNA target sequence for CCNT1 (NM_001240.2,980-998).
gcactggtgggagtatgtt

SEQ ID NO: 300284 - DNA, 19 bp, Homo sapiens
  siRNA target sequence for CCNT1 (NM_001240.2,1075-1093).
ggctcaaacgcatttggaa

SEQ ID NO: 300285 - DNA, 19 bp, Homo sapiens
  siRNA target sequence for CCNT1 (NM_001240.2,1076-1094).
gctcaaacgcatttggaat

SEQ ID NO: 300286 - DNA, 19 bp, Homo sapiens
  siRNA target sequence for CCNT1 (NM_001240.2,1077-1095).
ctcaaacgcatttggaatt

SEQ ID NO: 300287 - DNA, 19 bp, Homo sapiens
  siRNA target sequence for CCNT1 (NM_001240.2,1161-1179).
gagcagacaatcctcaata

SEQ ID NO: 300288 - DNA, 19 bp, Homo sapiens
  siRNA target sequence for CCNT1 (NM_001240.2,1368-1386).
catcggactagtgagaatt

SEQ ID NO: 300289 - DNA, 19 bp, Homo sapiens
  siRNA target sequence for CCNT1 (NM_001240.2,1390-1408).
cacttacaggagttgatca

SEQ ID NO: 300290 - DNA, 19 bp, Homo sapiens
  siRNA target sequence for CCNT1 (NM_001240.2,1392-1410).
cttacaggagttgatcatt

SEQ ID NO: 300291 - DNA, 19 bp, Homo sapiens
  siRNA target sequence for CCNT1 (NM_001240.2,1465-1483).
gtgtgccatcagctaaagt

SEQ ID NO: 300292 - DNA, 19 bp, Homo sapiens
  siRNA target sequence for CCNT1 (NM_001240.2,1467-1485).
gtgccatcagctaaagtgt

SEQ ID NO: 300293 - DNA, 19 bp, Homo sapiens
  siRNA target sequence for CCNT1 (NM_001240.2,1558-1576).
ccaatgtgaagtcacaata

SEQ ID NO: 300294 - DNA, 19 bp, Homo sapiens
  siRNA target sequence for CCNT1 (NM_001240.2,1559-1577).
caatgtgaagtcacaatat

SEQ ID NO: 300295 - DNA, 19 bp, Homo sapiens
  siRNA target sequence for CCNT1 (NM_001240.2,1563-1581).
gtgaagtcacaatatgcat

SEQ ID NO: 300296 - DNA, 19 bp, Homo sapiens
  siRNA target sequence for CCNT1 (NM_001240.2,1568-1586).
gtcacaatatgcatatgct

SEQ ID NO: 300297 - DNA, 19 bp, Homo sapiens
  siRNA target sequence for CCNT1 (NM_001240.2,1592-1610).
gaatctcctttctcatcat

SEQ ID NO: 300298 - DNA, 19 bp, Homo sapiens
  siRNA target sequence for CCNT1 (NM_001240.2,1640-1658).
gcccatagagggttcagaa

SEQ ID NO: 300299 - DNA, 19 bp, Homo sapiens
  siRNA target sequence for CCNT1 (NM_001240.2,1760-1778).
gataaaaatgcgcataaaa

SEQ ID NO: 300300 - DNA, 19 bp, Homo sapiens
  siRNA target sequence for CCNT1 (NM_001240.2,1809-1827).
gtagaggacagtgttacaa

SEQ ID NO: 300301 - DNA, 19 bp, Homo sapiens
  siRNA target sequence for CCNT1 (NM_001240.2,1853-1871).
caagactcacccatctaat

SEQ ID NO: 300302 - DNA, 19 bp, Homo sapiens
  siRNA target sequence for CCNT1 (NM_001240.2,1856-1874).
gactcacccatctaatcat

SEQ ID NO: 300303 - DNA, 19 bp, Homo sapiens
  siRNA target sequence for CCNT1 (NM_001240.2,1858-1876).
ctcacccatctaatcatca

SEQ ID NO: 300304 - DNA, 19 bp, Homo sapiens
  siRNA target sequence for CCNT1 (NM_001240.2,1947-1965).
cctggtgatccaaaacata

SEQ ID NO: 300305 - DNA, 19 bp, Homo sapiens
  siRNA target sequence for CCNT1 (NM_001240.2,1975-1993).
caagcaacttagcacataa

SEQ ID NO: 300306 - DNA, 19 bp, Homo sapiens
  siRNA target sequence for CCNT1 (NM_001240.2,1982-2000).
cttagcacataaaacctat

SEQ ID NO: 300307 - DNA, 19 bp, Homo sapiens
  siRNA target sequence for CCNT1 (NM_001240.2,1986-2004).
gcacataaaacctatagct

SEQ ID NO: 300308 - DNA, 19 bp, Homo sapiens
  siRNA target sequence for CCNT1 (NM_001240.2,1997-2015).
ctatagcttgtctagttct

SEQ ID NO: 300309 - DNA, 19 bp, Homo sapiens
  siRNA target sequence for CCNT1 (NM_001240.2,2097-2115).
gccaagagtactaaatcct

SEQ ID NO: 300310 - DNA, 19 bp, Homo sapiens
  siRNA target sequence for CCNT1 (NM_001240.2,2185-2203).
gtggcctttccttttcaca

SEQ ID NO: 300311 - DNA, 19 bp, Homo sapiens
  siRNA target sequence for CCNT1 (NM_001240.2,2218-2236).
ctcgtgtccctcattcgaa

SEQ ID NO: 300312 - DNA, 19 bp, Homo sapiens
  siRNA target sequence for CCNT1 (NM_001240.2,2227-2245).
ctcattcgaaactggataa

SEQ ID NO: 300313 - DNA, 19 bp, Homo sapiens
  siRNA target sequence for CCNT1 (NM_001240.2,2270-2288).
caacacgacccagacaata

SEQ ID NO: 300314 - DNA, 19 bp, Homo sapiens
  siRNA target sequence for CCNT1 (NM_001240.2,2275-2293).
cgacccagacaatagacta

SEQ ID NO: 300315 - DNA, 19 bp, Homo sapiens
  siRNA target sequence for CCNT1 (NM_001240.2,2276-2294).
gacccagacaatagactat

SEQ ID NO: 300316 - DNA, 19 bp, Homo sapiens
  siRNA target sequence for CCNT1 (NM_001240.2,2278-2296).
cccagacaatagactatca

SEQ ID NO: 300317 - DNA, 19 bp, Homo sapiens
  siRNA target sequence for CCNT1 (NM_001240.2,2279-2297).
ccagacaatagactatcaa

SEQ ID NO: 300318 - DNA, 19 bp, Homo sapiens
  siRNA target sequence for CCNT1 (NM_001240.2,2377-2395).
gtccttatagtgactatct

SEQ ID NO: 300319 - DNA, 19 bp, Homo sapiens
  siRNA target sequence for CCNT1 (NM_001240.2,2379-2397).
ccttatagtgactatctga

SEQ ID NO: 300320 - DNA, 19 bp, Homo sapiens
  siRNA target sequence for CCNT2 (NM_001241.2,110-128).
cggagtggaggcggataaa

SEQ ID NO: 300321 - DNA, 19 bp, Homo sapiens
  siRNA target sequence for CCNT2 (NM_001241.2,112-130).
gagtggaggcggataaaga

SEQ ID NO: 300322 - DNA, 19 bp, Homo sapiens
  siRNA target sequence for CCNT2 (NM_001241.2,170-188).
gatgggacagcgtctcaat

SEQ ID NO: 300323 - DNA, 19 bp, Homo sapiens
  siRNA target sequence for CCNT2 (NM_001241.2,174-192).
ggacagcgtctcaatgtct

SEQ ID NO: 300324 - DNA, 19 bp, Homo sapiens
  siRNA target sequence for CCNT2 (NM_001241.2,189-207).
gtctctcagcttacaataa

SEQ ID NO: 300325 - DNA, 19 bp, Homo sapiens
  siRNA target sequence for CCNT2 (NM_001241.2,211-229).
ctgcgattgtttatatgca

SEQ ID NO: 300326 - DNA, 19 bp, Homo sapiens
  siRNA target sequence for CCNT2 (NM_001241.2,320-338).
ggctcgaaaacttgaacat

SEQ ID NO: 300327 - DNA, 19 bp, Homo sapiens
  siRNA target sequence for CCNT2 (NM_001241.2,322-340).
ctcgaaaacttgaacatgt

SEQ ID NO: 300328 - DNA, 19 bp, Homo sapiens
  siRNA target sequence for CCNT2 (NM_001241.2,397-415).
gtgatgcttaccttcaaca

SEQ ID NO: 300329 - DNA, 19 bp, Homo sapiens
  siRNA target sequence for CCNT2 (NM_001241.2,416-434).
gactcaagaactggttata

SEQ ID NO: 300330 - DNA, 19 bp, Homo sapiens
  siRNA target sequence for CCNT2 (NM_001241.2,418-436).
ctcaagaactggttatact

SEQ ID NO: 300331 - DNA, 19 bp, Homo sapiens
  siRNA target sequence for CCNT2 (NM_001241.2,428-446).
ggttatacttgaaaccata

SEQ ID NO: 300332 - DNA, 19 bp, Homo sapiens
  siRNA target sequence for CCNT2 (NM_001241.2,429-447).
gttatacttgaaaccataa

SEQ ID NO: 300333 - DNA, 19 bp, Homo sapiens
  siRNA target sequence for CCNT2 (NM_001241.2,442-460).
ccataatgctacaaactct

SEQ ID NO: 300334 - DNA, 19 bp, Homo sapiens
  siRNA target sequence for CCNT2 (NM_001241.2,443-461).
cataatgctacaaactcta

SEQ ID NO: 300335 - DNA, 19 bp, Homo sapiens
  siRNA target sequence for CCNT2 (NM_001241.2,449-467).
gctacaaactctaggtttt

SEQ ID NO: 300336 - DNA, 19 bp, Homo sapiens
  siRNA target sequence for CCNT2 (NM_001241.2,489-507).
cacacagatgtggtgaaat

SEQ ID NO: 300337 - DNA, 19 bp, Homo sapiens
  siRNA target sequence for CCNT2 (NM_001241.2,503-521).
gaaatgtacccagttagta

SEQ ID NO: 300338 - DNA, 19 bp, Homo sapiens
  siRNA target sequence for CCNT2 (NM_001241.2,540-558).
gcacagacatcctatttca

SEQ ID NO: 300339 - DNA, 19 bp, Homo sapiens
  siRNA target sequence for CCNT2 (NM_001241.2,566-584).
caacagtctgcatcttaca

SEQ ID NO: 300340 - DNA, 19 bp, Homo sapiens
  siRNA target sequence for CCNT2 (NM_001241.2,614-632).
gatagcatgtgtatgcatt

SEQ ID NO: 300341 - DNA, 19 bp, Homo sapiens
  siRNA target sequence for CCNT2 (NM_001241.2,708-726).
cctacagttactctagaat

SEQ ID NO: 300342 - DNA, 19 bp, Homo sapiens
  siRNA target sequence for CCNT2 (NM_001241.2,709-727).
ctacagttactctagaatt

SEQ ID NO: 300343 - DNA, 19 bp, Homo sapiens
  siRNA target sequence for CCNT2 (NM_001241.2,765-783).
gagaaaacgcctaataggt

SEQ ID NO: 300344 - DNA, 19 bp, Homo sapiens
  siRNA target sequence for CCNT2 (NM_001241.2,772-790).
cgcctaataggttgaagaa

SEQ ID NO: 300345 - DNA, 19 bp, Homo sapiens
  siRNA target sequence for CCNT2 (NM_001241.2,774-792).
cctaataggttgaagaaga

SEQ ID NO: 300346 - DNA, 19 bp, Homo sapiens
  siRNA target sequence for CCNT2 (NM_001241.2,775-793).
ctaataggttgaagaagat

SEQ ID NO: 300347 - DNA, 19 bp, Homo sapiens
  siRNA target sequence for CCNT2 (NM_001241.2,781-799).
ggttgaagaagattcgaaa

SEQ ID NO: 300348 - DNA, 19 bp, Homo sapiens
  siRNA target sequence for CCNT2 (NM_001241.2,796-814).
gaaactggagggctaatca

SEQ ID NO: 300349 - DNA, 19 bp, Homo sapiens
  siRNA target sequence for CCNT2 (NM_001241.2,884-902).
gaattccattttagtagat

SEQ ID NO: 300350 - DNA, 19 bp, Homo sapiens
  siRNA target sequence for CCNT2 (NM_001241.2,889-907).
ccattttagtagatagtgt

SEQ ID NO: 300351 - DNA, 19 bp, Homo sapiens
  siRNA target sequence for CCNT2 (NM_001241.2,963-981).
gcgccagtacctctaaatt

SEQ ID NO: 300352 - DNA, 19 bp, Homo sapiens
  siRNA target sequence for CCNT2 (NM_001241.2,965-983).
gccagtacctctaaattca

SEQ ID NO: 300353 - DNA, 19 bp, Homo sapiens
  siRNA target sequence for CCNT2 (NM_001241.2,1002-1020).
gacagccatacatctgata

SEQ ID NO: 300354 - DNA, 19 bp, Homo sapiens
  siRNA target sequence for CCNT2 (NM_001241.2,1008-1026).
catacatctgataatttgt

SEQ ID NO: 300355 - DNA, 19 bp, Homo sapiens
  siRNA target sequence for CCNT2 (NM_001241.2,1105-1123).
caaggacagaacagctata

SEQ ID NO: 300356 - DNA, 19 bp, Homo sapiens
  siRNA target sequence for CCNT2 (NM_001241.2,1109-1127).
gacagaacagctatattca

SEQ ID NO: 300357 - DNA, 19 bp, Homo sapiens
  siRNA target sequence for CCNT2 (NM_001241.2,1152-1170).
ggtagccagtacaacatca

SEQ ID NO: 300358 - DNA, 19 bp, Homo sapiens
  siRNA target sequence for CCNT2 (NM_001241.2,1153-1171).
gtagccagtacaacatcaa

SEQ ID NO: 300359 - DNA, 19 bp, Homo sapiens
  siRNA target sequence for CCNT2 (NM_001241.2,1175-1193).
ccagcagggaccttctata

SEQ ID NO: 300360 - DNA, 19 bp, Homo sapiens
  siRNA target sequence for CCNT2 (NM_001241.2,1176-1194).
cagcagggaccttctatat

SEQ ID NO: 300361 - DNA, 19 bp, Homo sapiens
  siRNA target sequence for CCNT2 (NM_001241.2,1195-1213).
cactgcattcaggattaca

SEQ ID NO: 300362 - DNA, 19 bp, Homo sapiens
  siRNA target sequence for CCNT2 (NM_001241.2,1351-1369).
gagaaaagcgtaaactaga

SEQ ID NO: 300363 - DNA, 19 bp, Homo sapiens
  siRNA target sequence for CCNT2 (NM_001241.2,1353-1371).
gaaaagcgtaaactagaaa

SEQ ID NO: 300364 - DNA, 19 bp, Homo sapiens
  siRNA target sequence for CCNT2 (NM_001241.2,1358-1376).
gcgtaaactagaaactctt

SEQ ID NO: 300365 - DNA, 19 bp, Homo sapiens
  siRNA target sequence for CCNT2 (NM_001241.2,1380-1398).
ctcgatgtaagggatcatt

SEQ ID NO: 300366 - DNA, 19 bp, Homo sapiens
  siRNA target sequence for CCNT2 (NM_001241.2,1382-1400).
cgatgtaagggatcattat

SEQ ID NO: 300367 - DNA, 19 bp, Homo sapiens
  siRNA target sequence for CCNT2 (NM_001241.2,1491-1509).
cctatcgcaaatactgaaa

SEQ ID NO: 300368 - DNA, 19 bp, Homo sapiens
  siRNA target sequence for CCNT2 (NM_001241.2,1492-1510).
ctatcgcaaatactgaaaa

SEQ ID NO: 300369 - DNA, 19 bp, Homo sapiens
  siRNA target sequence for CCNT2 (NM_001241.2,1535-1553).
gagtgggtcactgaaatta

SEQ ID NO: 300370 - DNA, 19 bp, Homo sapiens
  siRNA target sequence for CCNT2 (NM_001241.2,1561-1579).
caataccacccactgataa

SEQ ID NO: 300371 - DNA, 19 bp, Homo sapiens
  siRNA target sequence for CCNT2 (NM_001241.2,1671-1689).
cattcaagcccacatatta

SEQ ID NO: 300372 - DNA, 19 bp, Homo sapiens
  siRNA target sequence for CCNT2 (NM_001241.2,1799-1817).
cagtgccgacggaatacca

SEQ ID NO: 300373 - DNA, 19 bp, Homo sapiens
  siRNA target sequence for CCNT2 (NM_001241.2,1889-1907).
gaggctgcatgtcaatgat

SEQ ID NO: 300374 - DNA, 19 bp, Homo sapiens
  siRNA target sequence for CCNT2 (NM_001241.2,1934-1952).
gagcaaaagttccaaaagt

SEQ ID NO: 300375 - DNA, 19 bp, Homo sapiens
  siRNA target sequence for CCNT2 (NM_058241.1,2127-2145).
gccaatcacgagtacagta

SEQ ID NO: 300376 - DNA, 19 bp, Homo sapiens
  siRNA target sequence for CCNT2 (NM_058241.1,2143-2161).
gtacaagcagccagcatat

SEQ ID NO: 300377 - DNA, 19 bp, Homo sapiens
  siRNA target sequence for CCNT2 (NM_058241.1,2152-2170).
gccagcatatggactacaa

SEQ ID NO: 300378 - DNA, 19 bp, Homo sapiens
  siRNA target sequence for CCNT2 (NM_058241.1,2186-2204).
gctggactcactgttaagt

SEQ ID NO: 300379 - DNA, 19 bp, Homo sapiens
  siRNA target sequence for DAT1 (NM_018640.2,501-519).
caaggaccggtatcttcta

SEQ ID NO: 300380 - DNA, 19 bp, Homo sapiens
  siRNA target sequence for DAT1 (NM_018640.2,599-617).
ccctgtacactaaagctaa

SEQ ID NO: 300381 - DNA, 19 bp, Homo sapiens
  siRNA target sequence for DAT1 (NM_018640.2,624-642).
cctttgtcgcagagactat

SEQ ID NO: 300382 - DNA, 19 bp, Homo sapiens
  siRNA target sequence for DAT1 (NM_018640.2,714-732).
gcgtgccaaggacaatgtt

SEQ ID NO: 300383 - DNA, 19 bp, Homo sapiens
  siRNA target sequence for DAT1 (NM_018640.2,715-733).
cgtgccaaggacaatgttt

SEQ ID NO: 300384 - DNA, 19 bp, Homo sapiens
  siRNA target sequence for DAT1 (NM_018640.2,827-845).
cggactacgaggaaggttt

SEQ ID NO: 300385 - DNA, 19 bp, Homo sapiens
  siRNA target sequence for DAT1 (NM_018640.2,828-846).
ggactacgaggaaggttta

SEQ ID NO: 300386 - DNA, 19 bp, Homo sapiens
  siRNA target sequence for DAT1 (NM_018640.2,829-847).
gactacgaggaaggtttaa

SEQ ID NO: 300387 - DNA, 19 bp, Homo sapiens
  siRNA target sequence for DAXX (NM_001350.2,251-269).
gccagaggaagcagtagtt

SEQ ID NO: 300388 - DNA, 19 bp, Homo sapiens
  siRNA target sequence for DAXX (NM_001350.2,313-331).
cgaagagttccttgaactt

SEQ ID NO: 300389 - DNA, 19 bp, Homo sapiens
  siRNA target sequence for DAXX (NM_001350.2,471-489).
cagccaagctctatgtcta

SEQ ID NO: 300390 - DNA, 19 bp, Homo sapiens
  siRNA target sequence for DAXX (NM_001350.2,814-832).
cctctttgggcgactatgt

SEQ ID NO: 300391 - DNA, 19 bp, Homo sapiens
  siRNA target sequence for DAXX (NM_001350.2,897-915).
cccgctacccagaggttaa

SEQ ID NO: 300392 - DNA, 19 bp, Homo sapiens
  siRNA target sequence for DAXX (NM_001350.2,899-917).
cgctacccagaggttaaca

SEQ ID NO: 300393 - DNA, 19 bp, Homo sapiens
  siRNA target sequence for DAXX (NM_001350.2,1092-1110).
gacgtcacctcgatctcat

SEQ ID NO: 300394 - DNA, 19 bp, Homo sapiens
  siRNA target sequence for DAXX (NM_001350.2,1095-1113).
gtcacctcgatctcatcta

SEQ ID NO: 300395 - DNA, 19 bp, Homo sapiens
  siRNA target sequence for DAXX (NM_001350.2,1097-1115).
cacctcgatctcatctaca

SEQ ID NO: 300396 - DNA, 19 bp, Homo sapiens
  siRNA target sequence for DAXX (NM_001350.2,1100-1118).
ctcgatctcatctacaact

SEQ ID NO: 300397 - DNA, 19 bp, Homo sapiens
  siRNA target sequence for DAXX (NM_001350.2,1337-1355).
cccgaagcctccttggatt

SEQ ID NO: 300398 - DNA, 19 bp, Homo sapiens
  siRNA target sequence for DAXX (NM_001350.2,1480-1498).
ggaggccacagattctgaa

SEQ ID NO: 300399 - DNA, 19 bp, Homo sapiens
  siRNA target sequence for DAXX (NM_001350.2,1610-1628).
ctacagatctccaatgaaa

SEQ ID NO: 300400 - DNA, 19 bp, Homo sapiens
  siRNA target sequence for DAXX (NM_001350.2,1690-1708).
catagtgtcaccatcgtta

SEQ ID NO: 300401 - DNA, 19 bp, Homo sapiens
  siRNA target sequence for DAXX (NM_001350.2,1694-1712).
gtgtcaccatcgttactgt

SEQ ID NO: 300402 - DNA, 19 bp, Homo sapiens
  siRNA target sequence for DAXX (NM_001350.2,1856-1874).
gtggagacggacatttcct

SEQ ID NO: 300403 - DNA, 19 bp, Homo sapiens
  siRNA target sequence for DAXX (NM_001350.2,1897-1915).
gcccttcaccactgtctta

SEQ ID NO: 300404 - DNA, 19 bp, Homo sapiens
  siRNA target sequence for DAXX (NM_001350.2,1899-1917).
ccttcaccactgtcttaga

SEQ ID NO: 300405 - DNA, 19 bp, Homo sapiens
  siRNA target sequence for DAXX (NM_001350.2,2232-2250).
cccaaaccccccattcaca

SEQ ID NO: 300406 - DNA, 19 bp, Homo sapiens
  siRNA target sequence for DAXX (NM_001350.2,2261-2279).
cctggtacttgcaagacaa

SEQ ID NO: 300407 - DNA, 19 bp, Homo sapiens
  siRNA target sequence for DAXX (NM_001350.2,2295-2313).
gcgatccagaagagatcat

SEQ ID NO: 300408 - DNA, 19 bp, Homo sapiens
  siRNA target sequence for DAXX (NM_001350.2,2315-2333).
gtgctctcagactctgatt

SEQ ID NO: 300409 - DNA, 19 bp, Homo sapiens
  siRNA target sequence for FLJ10201 (NM_018023.3,207-225).
caagcgaaccatcaaagaa

SEQ ID NO: 300410 - DNA, 19 bp, Homo sapiens
  siRNA target sequence for FLJ10201 (NM_018023.3,232-250).
cctgattacgaggatgtat

SEQ ID NO: 300411 - DNA, 19 bp, Homo sapiens
  siRNA target sequence for FLJ10201 (NM_018023.3,251-269).
ctgtggcccttccaaataa

SEQ ID NO: 300412 - DNA, 19 bp, Homo sapiens
  siRNA target sequence for FLJ10201 (NM_018023.3,271-289).
cggcataaagcaattgaga

SEQ ID NO: 300413 - DNA, 19 bp, Homo sapiens
  siRNA target sequence for FLJ10201 (NM_018023.3,318-336).
gattgagactattatcaaa

SEQ ID NO: 300414 - DNA, 19 bp, Homo sapiens
  siRNA target sequence for FLJ10201 (NM_018023.3,384-402).
cattgaccagcgactgatt

SEQ ID NO: 300415 - DNA, 19 bp, Homo sapiens
  siRNA target sequence for FLJ10201 (NM_018023.3,410-428).
gaaggatgatggataaact

SEQ ID NO: 300416 - DNA, 19 bp, Homo sapiens
  siRNA target sequence for FLJ10201 (NM_018023.3,434-452).
cctgcattgtagcaaacta

SEQ ID NO: 300417 - DNA, 19 bp, Homo sapiens
  siRNA target sequence for FLJ10201 (NM_018023.3,437-455).
gcattgtagcaaactacta

SEQ ID NO: 300418 - DNA, 19 bp, Homo sapiens
  siRNA target sequence for FLJ10201 (NM_018023.3,438-456).
cattgtagcaaactactat

SEQ ID NO: 300419 - DNA, 19 bp, Homo sapiens
  siRNA target sequence for FLJ10201 (NM_018023.3,467-485).
gtcttctaaaagtttctga

SEQ ID NO: 300420 - DNA, 19 bp, Homo sapiens
  siRNA target sequence for FLJ10201 (NM_018023.3,487-505).
ggatcaaagacatgtgata

SEQ ID NO: 300421 - DNA, 19 bp, Homo sapiens
  siRNA target sequence for FLJ10201 (NM_018023.3,491-509).
caaagacatgtgatacaat

SEQ ID NO: 300422 - DNA, 19 bp, Homo sapiens
  siRNA target sequence for FLJ10201 (NM_018023.3,523-541).
cctgctatcaagaaatttt

SEQ ID NO: 300423 - DNA, 19 bp, Homo sapiens
  siRNA target sequence for FLJ10201 (NM_018023.3,620-638).
ctttatctcagcacaatga

SEQ ID NO: 300424 - DNA, 19 bp, Homo sapiens
  siRNA target sequence for FLJ10201 (NM_018023.3,639-657).
cttcttatctgacaaagat

SEQ ID NO: 300425 - DNA, 19 bp, Homo sapiens
  siRNA target sequence for FLJ10201 (NM_018023.3,642-660).
cttatctgacaaagataat

SEQ ID NO: 300426 - DNA, 19 bp, Homo sapiens
  siRNA target sequence for FLJ10201 (NM_018023.3,708-726).
gagaccaagccgaaatact

SEQ ID NO: 300427 - DNA, 19 bp, Homo sapiens
  siRNA target sequence for FLJ10201 (NM_018023.3,797-815).
cttcacgactttttgtaaa

SEQ ID NO: 300428 - DNA, 19 bp, Homo sapiens
  siRNA target sequence for FLJ10201 (NM_018023.3,832-850).
ggcaatgtgtccaagtata

SEQ ID NO: 300429 - DNA, 19 bp, Homo sapiens
  siRNA target sequence for FLJ10201 (NM_018023.3,833-851).
gcaatgtgtccaagtatat

SEQ ID NO: 300430 - DNA, 19 bp, Homo sapiens
  siRNA target sequence for FLJ10201 (NM_018023.3,887-905).
ctcataagtggatggtata

SEQ ID NO: 300431 - DNA, 19 bp, Homo sapiens
  siRNA target sequence for FLJ10201 (NM_018023.3,919-937).
cgtagagaacccagcatta

SEQ ID NO: 300432 - DNA, 19 bp, Homo sapiens
  siRNA target sequence for FLJ10201 (NM_018023.3,920-938).
gtagagaacccagcattaa

SEQ ID NO: 300433 - DNA, 19 bp, Homo sapiens
  siRNA target sequence for FLJ10201 (NM_018023.3,923-941).
gagaacccagcattaatca

SEQ ID NO: 300434 - DNA, 19 bp, Homo sapiens
  siRNA target sequence for FLJ10201 (NM_018023.3,925-943).
gaacccagcattaatcatt

SEQ ID NO: 300435 - DNA, 19 bp, Homo sapiens
  siRNA target sequence for FLJ10201 (NM_018023.3,1053-1071).
cgtcagagttcaagttcat

SEQ ID NO: 300436 - DNA, 19 bp, Homo sapiens
  siRNA target sequence for FLJ10201 (NM_018023.3,1083-1101).
ccagaacaagcggatagat

SEQ ID NO: 300437 - DNA, 19 bp, Homo sapiens
  siRNA target sequence for FLJ10201 (NM_018023.3,1084-1102).
cagaacaagcggatagata

SEQ ID NO: 300438 - DNA, 19 bp, Homo sapiens
  siRNA target sequence for FLJ10201 (NM_018023.3,1089-1107).
caagcggatagatatcata

SEQ ID NO: 300439 - DNA, 19 bp, Homo sapiens
  siRNA target sequence for FLJ10201 (NM_018023.3,1093-1111).
cggatagatatcatacata

SEQ ID NO: 300440 - DNA, 19 bp, Homo sapiens
  siRNA target sequence for FLJ10201 (NM_018023.3,1095-1113).
gatagatatcatacataat

SEQ ID NO: 300441 - DNA, 19 bp, Homo sapiens
  siRNA target sequence for FLJ10201 (NM_018023.3,1119-1137).
gctggatagaacttatact

SEQ ID NO: 300442 - DNA, 19 bp, Homo sapiens
  siRNA target sequence for FLJ10201 (NM_018023.3,1163-1181).
cggtagtggatgttgaact

SEQ ID NO: 300443 - DNA, 19 bp, Homo sapiens
  siRNA target sequence for FLJ10201 (NM_018023.3,1195-1213).
ctcggagaagactgtatct

SEQ ID NO: 300444 - DNA, 19 bp, Homo sapiens
  siRNA target sequence for FLJ10201 (NM_018023.3,1241-1259).
ctgatgcccctccatcttt

SEQ ID NO: 300445 - DNA, 19 bp, Homo sapiens
  siRNA target sequence for FLJ10201 (NM_018023.3,1284-1302).
gaaagcttcttcaccaata

SEQ ID NO: 300446 - DNA, 19 bp, Homo sapiens
  siRNA target sequence for FLJ10201 (NM_018023.3,1289-1307).
cttcttcaccaataaagca

SEQ ID NO: 300447 - DNA, 19 bp, Homo sapiens
  siRNA target sequence for FLJ10201 (NM_018023.3,1375-1393).
cacactccgttttatgctt

SEQ ID NO: 300448 - DNA, 19 bp, Homo sapiens
  siRNA target sequence for FLJ10201 (NM_018023.3,1579-1597).
gtgtcaggttccccaatat

SEQ ID NO: 300449 - DNA, 19 bp, Homo sapiens
  siRNA target sequence for FLJ10201 (NM_018023.3,1581-1599).
gtcaggttccccaatatca

SEQ ID NO: 300450 - DNA, 19 bp, Homo sapiens
  siRNA target sequence for FLJ10201 (NM_018023.3,1660-1678).
ggcactgccggctctgtta

SEQ ID NO: 300451 - DNA, 19 bp, Homo sapiens
  siRNA target sequence for FLJ10201 (NM_018023.3,1666-1684).
gccggctctgttattaata

SEQ ID NO: 300452 - DNA, 19 bp, Homo sapiens
  siRNA target sequence for FLJ10201 (NM_018023.3,1667-1685).
ccggctctgttattaataa

SEQ ID NO: 300453 - DNA, 19 bp, Homo sapiens
  siRNA target sequence for FLJ10201 (NM_018023.3,1668-1686).
cggctctgttattaataat

SEQ ID NO: 300454 - DNA, 19 bp, Homo sapiens
  siRNA target sequence for FLJ10201 (NM_018023.3,1742-1760).
gtacaggaagtcctacaaa

SEQ ID NO: 300455 - DNA, 19 bp, Homo sapiens
  siRNA target sequence for FLJ10201 (NM_018023.3,1819-1837).
catggaagtagttttgtaa

SEQ ID NO: 300456 - DNA, 19 bp, Homo sapiens
  siRNA target sequence for FLJ10201 (NM_018023.3,1822-1840).
ggaagtagttttgtaacat

SEQ ID NO: 300457 - DNA, 19 bp, Homo sapiens
  siRNA target sequence for FLJ10201 (NM_018023.3,1846-1864).
gtcaagcaggaggattctt

SEQ ID NO: 300458 - DNA, 19 bp, Homo sapiens
  siRNA target sequence for FLJ10201 (NM_018023.3,2024-2042).
caccactcccgcagtatgt

SEQ ID NO: 300459 - DNA, 19 bp, Homo sapiens
  siRNA target sequence for FLJ10201 (NM_018023.3,2026-2044).
ccactcccgcagtatgtga

SEQ ID NO: 300460 - DNA, 19 bp, Homo sapiens
  siRNA target sequence for FLJ10201 (NM_018023.3,2049-2067).
gaaagggggtcacatgata

SEQ ID NO: 300461 - DNA, 19 bp, Homo sapiens
  siRNA target sequence for FLJ10201 (NM_018023.3,2163-2181).
gtctgctttaccttcaaca

SEQ ID NO: 300462 - DNA, 19 bp, Homo sapiens
  siRNA target sequence for FLJ10201 (NM_018023.3,2282-2300).
gagttgccaaagcaattgt

SEQ ID NO: 300463 - DNA, 19 bp, Homo sapiens
  siRNA target sequence for FLJ10201 (NM_018023.3,2284-2302).
gttgccaaagcaattgtga

SEQ ID NO: 300464 - DNA, 19 bp, Homo sapiens
  siRNA target sequence for FLJ10201 (NM_018023.3,2332-2350).
ccagtgcagaccttaacca

SEQ ID NO: 300465 - DNA, 19 bp, Homo sapiens
  siRNA target sequence for FLJ10201 (NM_018023.3,2333-2351).
cagtgcagaccttaaccaa

SEQ ID NO: 300466 - DNA, 19 bp, Homo sapiens
  siRNA target sequence for FLJ10201 (NM_018023.3,2415-2433).
gcagctaccagccactaat

SEQ ID NO: 300467 - DNA, 19 bp, Homo sapiens
  siRNA target sequence for FLJ10201 (NM_018023.3,2541-2559).
cctgcgagctacgaacaat

SEQ ID NO: 300468 - DNA, 19 bp, Homo sapiens
  siRNA target sequence for FLJ10201 (NM_018023.3,2545-2563).
cgagctacgaacaatgcta

SEQ ID NO: 300469 - DNA, 19 bp, Homo sapiens
  siRNA target sequence for FLJ10201 (NM_018023.3,2546-2564).
gagctacgaacaatgctaa

SEQ ID NO: 300470 - DNA, 19 bp, Homo sapiens
  siRNA target sequence for FLJ10201 (NM_018023.3,2549-2567).
ctacgaacaatgctaatct

SEQ ID NO: 300471 - DNA, 19 bp, Homo sapiens
  siRNA target sequence for FLJ10201 (NM_018023.3,2711-2729).
gccctggagggatatctca

SEQ ID NO: 300472 - DNA, 19 bp, Homo sapiens
  siRNA target sequence for FLJ10201 (NM_018023.3,2879-2897).
gacaacaaacgctaaaagt

SEQ ID NO: 300473 - DNA, 19 bp, Homo sapiens
  siRNA target sequence for FLJ10201 (NM_018023.3,2906-2924).
gacagaaaaccacattgtt

SEQ ID NO: 300474 - DNA, 19 bp, Homo sapiens
  siRNA target sequence for FLJ10201 (NM_018023.3,3037-3055).
gtagcaggaggggttatca

SEQ ID NO: 300475 - DNA, 19 bp, Homo sapiens
  siRNA target sequence for FLJ10201 (NM_018023.3,3040-3058).
gcaggaggggttatcacaa

SEQ ID NO: 300476 - DNA, 19 bp, Homo sapiens
  siRNA target sequence for FLJ10201 (NM_018023.3,3101-3119).
cacaacagtctgaaggaat

SEQ ID NO: 300477 - DNA, 19 bp, Homo sapiens
  siRNA target sequence for FLJ10201 (NM_018023.3,3120-3138).
ggctcccgtgtcttcatct

SEQ ID NO: 300478 - DNA, 19 bp, Homo sapiens
  siRNA target sequence for FLJ10201 (NM_018023.3,3121-3139).
gctcccgtgtcttcatcta

SEQ ID NO: 300479 - DNA, 19 bp, Homo sapiens
  siRNA target sequence for FLJ10201 (NM_018023.3,3140-3158).
cggtcagttctgtaacgaa

SEQ ID NO: 300480 - DNA, 19 bp, Homo sapiens
  siRNA target sequence for FLJ10201 (NM_018023.3,3141-3159).
ggtcagttctgtaacgaaa

SEQ ID NO: 300481 - DNA, 19 bp, Homo sapiens
  siRNA target sequence for FLJ10201 (NM_018023.3,3282-3300).
cacagtatccggactgtta

SEQ ID NO: 300482 - DNA, 19 bp, Homo sapiens
  siRNA target sequence for FLJ10201 (NM_018023.3,3284-3302).
cagtatccggactgttaaa

SEQ ID NO: 300483 - DNA, 19 bp, Homo sapiens
  siRNA target sequence for FLJ10201 (NM_018023.3,3286-3304).
gtatccggactgttaaaga

SEQ ID NO: 300484 - DNA, 19 bp, Homo sapiens
  siRNA target sequence for FLJ10201 (NM_018023.3,3290-3308).
ccggactgttaaagattca

SEQ ID NO: 300485 - DNA, 19 bp, Homo sapiens
  siRNA target sequence for FLJ10201 (NM_018023.3,3292-3310).
ggactgttaaagattcact

SEQ ID NO: 300486 - DNA, 19 bp, Homo sapiens
  siRNA target sequence for FLJ10201 (NM_018023.3,3567-3585).
gggtcagacagcagtgaaa

SEQ ID NO: 300487 - DNA, 19 bp, Homo sapiens
  siRNA target sequence for FLJ10201 (NM_018023.3,3596-3614).
gttctgagctgggaaacta

SEQ ID NO: 300488 - DNA, 19 bp, Homo sapiens
  siRNA target sequence for FLJ10201 (NM_018023.3,3624-3642).
gatagaccatttagaaact

SEQ ID NO: 300489 - DNA, 19 bp, Homo sapiens
  siRNA target sequence for FLJ10201 (NM_018023.3,3652-3670).
ctcctaactgcagtagtaa

SEQ ID NO: 300490 - DNA, 19 bp, Homo sapiens
  siRNA target sequence for FLJ10201 (NM_018023.3,3655-3673).
ctaactgcagtagtaaaga

SEQ ID NO: 300491 - DNA, 19 bp, Homo sapiens
  siRNA target sequence for FLJ10201 (NM_018023.3,3745-3763).
ggctggaacattggaaaaa

SEQ ID NO: 300492 - DNA, 19 bp, Homo sapiens
  siRNA target sequence for FLJ10201 (NM_018023.3,3792-3810).
gacaatgcgaaaagtctta

SEQ ID NO: 300493 - DNA, 19 bp, Homo sapiens
  siRNA target sequence for FLJ10201 (NM_018023.3,3794-3812).
caatgcgaaaagtcttaca

SEQ ID NO: 300494 - DNA, 19 bp, Homo sapiens
  siRNA target sequence for FLJ10201 (NM_018023.3,3798-3816).
gcgaaaagtcttacaagaa

SEQ ID NO: 300495 - DNA, 19 bp, Homo sapiens
  siRNA target sequence for FLJ10201 (NM_018023.3,3975-3993).
gcccgagtgcccatcatca

SEQ ID NO: 300496 - DNA, 19 bp, Homo sapiens
  siRNA target sequence for FLJ10201 (NM_018023.3,3979-3997).
gagtgcccatcatcattct

SEQ ID NO: 300497 - DNA, 19 bp, Homo sapiens
  siRNA target sequence for FLJ10201 (NM_018023.3,4353-4371).
caggattcccaaagaaatt

SEQ ID NO: 300498 - DNA, 19 bp, Homo sapiens
  siRNA target sequence for FLJ10201 (NM_018023.3,4414-4432).
ctggacttcctcacaaaca

SEQ ID NO: 300499 - DNA, 19 bp, Homo sapiens
  siRNA target sequence for GTF2H2 (NM_001515.2,375-393).
cctttatgtggtagtagat

SEQ ID NO: 300500 - DNA, 19 bp, Homo sapiens
  siRNA target sequence for GTF2H2 (NM_001515.2,415-433).
caagatttaaagcctaata

SEQ ID NO: 300501 - DNA, 19 bp, Homo sapiens
  siRNA target sequence for GTF2H2 (NM_001515.2,434-452).
gactgacgtgtactttaaa

SEQ ID NO: 300502 - DNA, 19 bp, Homo sapiens
  siRNA target sequence for GTF2H2 (NM_001515.2,453-471).
gttgttggaatactttgta

SEQ ID NO: 300503 - DNA, 19 bp, Homo sapiens
  siRNA target sequence for JAZF1 (NM_175061.2,129-147).
gaggacaaccacatcgata

SEQ ID NO: 300504 - DNA, 19 bp, Homo sapiens
  siRNA target sequence for JAZF1 (NM_175061.2,190-208).
cctatgttgccctgagtta

SEQ ID NO: 300505 - DNA, 19 bp, Homo sapiens
  siRNA target sequence for JAZF1 (NM_175061.2,561-579).
cctggatgtaaaaagagat

SEQ ID NO: 300506 - DNA, 19 bp, Homo sapiens
  siRNA target sequence for JAZF1 (NM_175061.2,637-655).
gtgtccgcaaaccattcaa

SEQ ID NO: 300507 - DNA, 19 bp, Homo sapiens
  siRNA target sequence for JAZF1 (NM_175061.2,639-657).
gtccgcaaaccattcaagt

SEQ ID NO: 300508 - DNA, 19 bp, Homo sapiens
  siRNA target sequence for JAZF1 (NM_175061.2,658-676).
gtcgctgtgggaagagtta

SEQ ID NO: 300509 - DNA, 19 bp, Homo sapiens
  siRNA target sequence for JAZF1 (NM_175061.2,691-709).
gcctgcggcaccacacaat

SEQ ID NO: 300510 - DNA, 19 bp, Homo sapiens
  siRNA target sequence for JAZF1 (NM_175061.2,693-711).
ctgcggcaccacacaatca

SEQ ID NO: 300511 - DNA, 19 bp, Homo sapiens
  siRNA target sequence for JAZF1 (NM_175061.2,695-713).
gcggcaccacacaatcaat

SEQ ID NO: 300512 - DNA, 19 bp, Homo sapiens
  siRNA target sequence for JAZF1 (NM_175061.2,701-719).
ccacacaatcaatttccat

SEQ ID NO: 300513 - DNA, 19 bp, Homo sapiens
  siRNA target sequence for JAZF1 (NM_175061.2,723-741).
ccggtgtcggctgagatta

SEQ ID NO: 300514 - DNA, 19 bp, Homo sapiens
  siRNA target sequence for JAZF1 (NM_175061.2,724-742).
cggtgtcggctgagattat

SEQ ID NO: 300515 - DNA, 19 bp, Homo sapiens
  siRNA target sequence for JJAZ1 (NM_015355.1,394-412).
cggtgttaccggtgaagaa

SEQ ID NO: 300516 - DNA, 19 bp, Homo sapiens
  siRNA target sequence for JJAZ1 (NM_015355.1,436-454).
ctgaccacgagcttttcct

SEQ ID NO: 300517 - DNA, 19 bp, Homo sapiens
  siRNA target sequence for JJAZ1 (NM_015355.1,1109-1127).
caggcgcttacagctttta

SEQ ID NO: 300518 - DNA, 19 bp, Homo sapiens
  siRNA target sequence for JJAZ1 (NM_015355.1,1111-1129).
ggcgcttacagcttttaga

SEQ ID NO: 300519 - DNA, 19 bp, Homo sapiens
  siRNA target sequence for JJAZ1 (NM_015355.1,1112-1130).
gcgcttacagcttttagat

SEQ ID NO: 300520 - DNA, 19 bp, Homo sapiens
  siRNA target sequence for JJAZ1 (NM_015355.1,1121-1139).
gcttttagatggggaatat

SEQ ID NO: 300521 - DNA, 19 bp, Homo sapiens
  siRNA target sequence for JJAZ1 (NM_015355.1,1189-1207).
caacatgggagactattct

SEQ ID NO: 300522 - DNA, 19 bp, Homo sapiens
  siRNA target sequence for JJAZ1 (NM_015355.1,1192-1210).
catgggagactattcttga

SEQ ID NO: 300523 - DNA, 19 bp, Homo sapiens
  siRNA target sequence for JJAZ1 (NM_015355.1,1223-1241).
gcctccattcgaaacattt

SEQ ID NO: 300524 - DNA, 19 bp, Homo sapiens
  siRNA target sequence for JJAZ1 (NM_015355.1,1224-1242).
cctccattcgaaacatttt

SEQ ID NO: 300525 - DNA, 19 bp, Homo sapiens
  siRNA target sequence for JJAZ1 (NM_015355.1,1365-1383).
cctggttcagttaaaccta

SEQ ID NO: 300526 - DNA, 19 bp, Homo sapiens
  siRNA target sequence for JJAZ1 (NM_015355.1,1398-1416).
gttaaagaatcattgacta

SEQ ID NO: 300527 - DNA, 19 bp, Homo sapiens
  siRNA target sequence for JJAZ1 (NM_015355.1,1412-1430).
gactacagatctacaaaca

SEQ ID NO: 300528 - DNA, 19 bp, Homo sapiens
  siRNA target sequence for JJAZ1 (NM_015355.1,1502-1520).
caatacaaggcaacaaact

SEQ ID NO: 300529 - DNA, 19 bp, Homo sapiens
  siRNA target sequence for JJAZ1 (NM_015355.1,1559-1577).
gaactgccgcaaactttat

SEQ ID NO: 300530 - DNA, 19 bp, Homo sapiens
  siRNA target sequence for JJAZ1 (NM_015355.1,1562-1580).
ctgccgcaaactttatagt

SEQ ID NO: 300531 - DNA, 19 bp, Homo sapiens
  siRNA target sequence for JJAZ1 (NM_015355.1,1603-1621).
gccatagcagatttatctt

SEQ ID NO: 300532 - DNA, 19 bp, Homo sapiens
  siRNA target sequence for JJAZ1 (NM_015355.1,1605-1623).
catagcagatttatcttca

SEQ ID NO: 300533 - DNA, 19 bp, Homo sapiens
  siRNA target sequence for JJAZ1 (NM_015355.1,1612-1630).
gatttatcttcaactatgt

SEQ ID NO: 300534 - DNA, 19 bp, Homo sapiens
  siRNA target sequence for JJAZ1 (NM_015355.1,1619-1637).
cttcaactatgtttatcat

SEQ ID NO: 300535 - DNA, 19 bp, Homo sapiens
  siRNA target sequence for JJAZ1 (NM_015355.1,1625-1643).
ctatgtttatcatccaaaa

SEQ ID NO: 300536 - DNA, 19 bp, Homo sapiens
  siRNA target sequence for JJAZ1 (NM_015355.1,1647-1665).
gctaggatagatgtttcta

SEQ ID NO: 300537 - DNA, 19 bp, Homo sapiens
  siRNA target sequence for JJAZ1 (NM_015355.1,1648-1666).
ctaggatagatgtttctat

SEQ ID NO: 300538 - DNA, 19 bp, Homo sapiens
  siRNA target sequence for JJAZ1 (NM_015355.1,1651-1669).
ggatagatgtttctatcaa

SEQ ID NO: 300539 - DNA, 19 bp, Homo sapiens
  siRNA target sequence for JJAZ1 (NM_015355.1,1652-1670).
gatagatgtttctatcaat

SEQ ID NO: 300540 - DNA, 19 bp, Homo sapiens
  siRNA target sequence for JJAZ1 (NM_015355.1,1716-1734).
cgccaacctggatttgctt

SEQ ID NO: 300541 - DNA, 19 bp, Homo sapiens
  siRNA target sequence for JJAZ1 (NM_015355.1,1738-1756).
gtcgcaacggaccagttaa

SEQ ID NO: 300542 - DNA, 19 bp, Homo sapiens
  siRNA target sequence for JJAZ1 (NM_015355.1,1740-1758).
cgcaacggaccagttaaga

SEQ ID NO: 300543 - DNA, 19 bp, Homo sapiens
  siRNA target sequence for JJAZ1 (NM_015355.1,1742-1760).
caacggaccagttaagaga

SEQ ID NO: 300544 - DNA, 19 bp, Homo sapiens
  siRNA target sequence for JJAZ1 (NM_015355.1,1782-1800).
gtgtgcaggccaaaacgaa

SEQ ID NO: 300545 - DNA, 19 bp, Homo sapiens
  siRNA target sequence for JJAZ1 (NM_015355.1,1807-1825).
caagcatgtctgaatttct

SEQ ID NO: 300546 - DNA, 19 bp, Homo sapiens
  siRNA target sequence for JJAZ1 (NM_015355.1,1810-1828).
gcatgtctgaatttcttga

SEQ ID NO: 300547 - DNA, 19 bp, Homo sapiens
  siRNA target sequence for JJAZ1 (NM_015355.1,1811-1829).
catgtctgaatttcttgaa

SEQ ID NO: 300548 - DNA, 19 bp, Homo sapiens
  siRNA target sequence for JJAZ1 (NM_015355.1,1848-1866).
gaacagcaaagaacatata

SEQ ID NO: 300549 - DNA, 19 bp, Homo sapiens
  siRNA target sequence for JJAZ1 (NM_015355.1,1872-1890).
ggccacaatcgtctgtatt

SEQ ID NO: 300550 - DNA, 19 bp, Homo sapiens
  siRNA target sequence for JJAZ1 (NM_015355.1,1873-1891).
gccacaatcgtctgtattt

SEQ ID NO: 300551 - DNA, 19 bp, Homo sapiens
  siRNA target sequence for JJAZ1 (NM_015355.1,1877-1895).
caatcgtctgtatttccat

SEQ ID NO: 300552 - DNA, 19 bp, Homo sapiens
  siRNA target sequence for JJAZ1 (NM_015355.1,1884-1902).
ctgtatttccatagtgata

SEQ ID NO: 300553 - DNA, 19 bp, Homo sapiens
  siRNA target sequence for JJAZ1 (NM_015355.1,1912-1930).
ctctccgtccacaagaaat

SEQ ID NO: 300554 - DNA, 19 bp, Homo sapiens
  siRNA target sequence for JJAZ1 (NM_015355.1,1959-1977).
cctgaatggctaagagaaa

SEQ ID NO: 300555 - DNA, 19 bp, Homo sapiens
  siRNA target sequence for JJAZ1 (NM_015355.1,1966-1984).
ggctaagagaaaaaaccat

SEQ ID NO: 300556 - DNA, 19 bp, Homo sapiens
  siRNA target sequence for JJAZ1 (NM_015355.1,2044-2062).
ggaatctccatgtcatgaa

SEQ ID NO: 300557 - DNA, 19 bp, Homo sapiens
  siRNA target sequence for JJAZ1 (NM_015355.1,2060-2078).
gaagcatgggtttattgct

SEQ ID NO: 300558 - DNA, 19 bp, Homo sapiens
  siRNA target sequence for JJAZ1 (NM_015355.1,2098-2116).
cctgtatgctgtttgtaga

SEQ ID NO: 300559 - DNA, 19 bp, Homo sapiens
  siRNA target sequence for JJAZ1 (NM_015355.1,2184-2202).
catgactttaatcttatta

SEQ ID NO: 300560 - DNA, 19 bp, Homo sapiens
  siRNA target sequence for MADH9 (NM_005905.2,848-866).
gtgctcggtcgcctactat

SEQ ID NO: 300561 - DNA, 19 bp, Homo sapiens
  siRNA target sequence for MADH9 (NM_005905.2,850-868).
gctcggtcgcctactatga

SEQ ID NO: 300562 - DNA, 19 bp, Homo sapiens
  siRNA target sequence for MADH9 (NM_005905.2,851-869).
ctcggtcgcctactatgaa

SEQ ID NO: 300563 - DNA, 19 bp, Homo sapiens
  siRNA target sequence for MADH9 (NM_005905.2,853-871).
cggtcgcctactatgaact

SEQ ID NO: 300564 - DNA, 19 bp, Homo sapiens
  siRNA target sequence for MADH9 (NM_005905.2,859-877).
cctactatgaactgaacaa

SEQ ID NO: 300565 - DNA, 19 bp, Homo sapiens
  siRNA target sequence for MADH9 (NM_005905.2,907-925).
cccgaagtgtgctcataga

SEQ ID NO: 300566 - DNA, 19 bp, Homo sapiens
  siRNA target sequence for MADH9 (NM_005905.2,908-926).
ccgaagtgtgctcatagat

SEQ ID NO: 300567 - DNA, 19 bp, Homo sapiens
  siRNA target sequence for MADH9 (NM_005905.2,928-946).
ggttcaccgacccttcaaa

SEQ ID NO: 300568 - DNA, 19 bp, Homo sapiens
  siRNA target sequence for MADH9 (NM_005905.2,929-947).
gttcaccgacccttcaaat

SEQ ID NO: 300569 - DNA, 19 bp, Homo sapiens
  siRNA target sequence for MADH9 (NM_005905.2,970-988).
gacttctttctaatgtaaa

SEQ ID NO: 300570 - DNA, 19 bp, Homo sapiens
  siRNA target sequence for MADH9 (NM_005905.2,991-1009).
gaaactcaacgatagaaaa

SEQ ID NO: 300571 - DNA, 19 bp, Homo sapiens
  siRNA target sequence for MADH9 (NM_005905.2,1103-1121).
gagccggaactgcaactat

SEQ ID NO: 300572 - DNA, 19 bp, Homo sapiens
  siRNA target sequence for MADH9 (NM_005905.2,1106-1124).
ccggaactgcaactatcaa

SEQ ID NO: 300573 - DNA, 19 bp, Homo sapiens
  siRNA target sequence for MADH9 (NM_005905.2,1231-1249).
gctttgaagtcgtgtatga

SEQ ID NO: 300574 - DNA, 19 bp, Homo sapiens
  siRNA target sequence for MADH9 (NM_005905.2,1232-1250).
ctttgaagtcgtgtatgaa

SEQ ID NO: 300575 - DNA, 19 bp, Homo sapiens
  siRNA target sequence for MADH9 (NM_005905.2,1251-1269).
ctgaccaagatgtgtacta

SEQ ID NO: 300576 - DNA, 19 bp, Homo sapiens
  siRNA target sequence for MADH9 (NM_005905.2,1291-1309).
gttggggtgctgagtatca

SEQ ID NO: 300577 - DNA, 19 bp, Homo sapiens
  siRNA target sequence for MJD (NM_004993.2,70-88).
cttccacgagaaacaagaa

SEQ ID NO: 300578 - DNA, 19 bp, Homo sapiens
  siRNA target sequence for MJD (NM_004993.2,101-119).
gctcaacattgcctgaata

SEQ ID NO: 300579 - DNA, 19 bp, Homo sapiens
  siRNA target sequence for MJD (NM_004993.2,107-125).
cattgcctgaataacttat

SEQ ID NO: 300580 - DNA, 19 bp, Homo sapiens
  siRNA target sequence for MJD (NM_004993.2,111-129).
gcctgaataacttattgca

SEQ ID NO: 300581 - DNA, 19 bp, Homo sapiens
  siRNA target sequence for MJD (NM_004993.2,213-231).
gagttactagtgaagatta

SEQ ID NO: 300582 - DNA, 19 bp, Homo sapiens
  siRNA target sequence for MJD (NM_004993.2,224-242).
gaagattatcgcacgtttt

SEQ ID NO: 300583 - DNA, 19 bp, Homo sapiens
  siRNA target sequence for MJD (NM_004993.2,250-268).
gccttctggaaatatggat

SEQ ID NO: 300584 - DNA, 19 bp, Homo sapiens
  siRNA target sequence for MJD (NM_004993.2,269-287).
gacagtggttttttctcta

SEQ ID NO: 300585 - DNA, 19 bp, Homo sapiens
  siRNA target sequence for MJD (NM_004993.2,318-336).
ggggtttagaactaatcct

SEQ ID NO: 300586 - DNA, 19 bp, Homo sapiens
  siRNA target sequence for MJD (NM_004993.2,326-344).
gaactaatcctgttcaaca

SEQ ID NO: 300587 - DNA, 19 bp, Homo sapiens
  siRNA target sequence for MJD (NM_004993.2,337-355).
gttcaacagtccagagtat

SEQ ID NO: 300588 - DNA, 19 bp, Homo sapiens
  siRNA target sequence for MJD (NM_004993.2,360-378).
ggctcaggatcgatcctat

SEQ ID NO: 300589 - DNA, 19 bp, Homo sapiens
  siRNA target sequence for MJD (NM_004993.2,361-379).
gctcaggatcgatcctata

SEQ ID NO: 300590 - DNA, 19 bp, Homo sapiens
  siRNA target sequence for MJD (NM_004993.2,362-380).
ctcaggatcgatcctataa

SEQ ID NO: 300591 - DNA, 19 bp, Homo sapiens
  siRNA target sequence for MJD (NM_004993.2,364-382).
caggatcgatcctataaat

SEQ ID NO: 300592 - DNA, 19 bp, Homo sapiens
  siRNA target sequence for MJD (NM_004993.2,410-428).
gaacactggtttacagtta

SEQ ID NO: 300593 - DNA, 19 bp, Homo sapiens
  siRNA target sequence for MJD (NM_004993.2,527-545).
caggaaggttattctatat

SEQ ID NO: 300594 - DNA, 19 bp, Homo sapiens
  siRNA target sequence for MJD (NM_004993.2,616-634).
gcatcgaccaaaacttatt

SEQ ID NO: 300595 - DNA, 19 bp, Homo sapiens
  siRNA target sequence for MJD (NM_004993.2,682-700).
cctggaacgagtgttagaa

SEQ ID NO: 300596 - DNA, 19 bp, Homo sapiens
  siRNA target sequence for MJD (NM_004993.2,748-766).
gagggctctggcactaagt

SEQ ID NO: 300597 - DNA, 19 bp, Homo sapiens
  siRNA target sequence for MJD (NM_004993.2,759-777).
cactaagtcgccaagaaat

SEQ ID NO: 300598 - DNA, 19 bp, Homo sapiens
  siRNA target sequence for MJD (NM_004993.2,765-783).
gtcgccaagaaattgacat

SEQ ID NO: 300599 - DNA, 19 bp, Homo sapiens
  siRNA target sequence for MJD (NM_004993.2,810-828).
gggctattcagctaagtat

SEQ ID NO: 300600 - DNA, 19 bp, Homo sapiens
  siRNA target sequence for MJD (NM_004993.2,868-886).
gacatcaggtacaaatctt

SEQ ID NO: 300601 - DNA, 19 bp, Homo sapiens
  siRNA target sequence for MJD (NM_004993.2,907-925).
gagacgagaagcctacttt

SEQ ID NO: 300602 - DNA, 19 bp, Homo sapiens
  siRNA target sequence for MJD (NM_004993.2,909-927).
gacgagaagcctactttga

SEQ ID NO: 300603 - DNA, 19 bp, Homo sapiens
  siRNA target sequence for MJD (NM_004993.2,911-929).
cgagaagcctactttgaaa

SEQ ID NO: 300604 - DNA, 19 bp, Homo sapiens
  siRNA target sequence for MJD (NM_004993.2,1041-1059).
gtgatctaggtgatgctat

SEQ ID NO: 300605 - DNA, 19 bp, Homo sapiens
  siRNA target sequence for MJD (NM_030660.1,79-97).
gaaacagccttctggaaat

SEQ ID NO: 300606 - DNA, 19 bp, Homo sapiens
  siRNA target sequence for MLLT3 (NM_004529.1,305-323).
gcggtccggagcacagtaa

SEQ ID NO: 300607 - DNA, 19 bp, Homo sapiens
  siRNA target sequence for MLLT3 (NM_004529.1,307-325).
ggtccggagcacagtaaca

SEQ ID NO: 300608 - DNA, 19 bp, Homo sapiens
  siRNA target sequence for MLLT3 (NM_004529.1,308-326).
gtccggagcacagtaacat

SEQ ID NO: 300609 - DNA, 19 bp, Homo sapiens
  siRNA target sequence for MLLT3 (NM_004529.1,311-329).
cggagcacagtaacataca

SEQ ID NO: 300610 - DNA, 19 bp, Homo sapiens
  siRNA target sequence for MLLT3 (NM_004529.1,369-387).
ctttcctaggccaaaaaga

SEQ ID NO: 300611 - DNA, 19 bp, Homo sapiens
  siRNA target sequence for MLLT3 (NM_004529.1,392-410).
gcaaagatccaccttacaa

SEQ ID NO: 300612 - DNA, 19 bp, Homo sapiens
  siRNA target sequence for MLLT3 (NM_004529.1,393-411).
caaagatccaccttacaaa

SEQ ID NO: 300613 - DNA, 19 bp, Homo sapiens
  siRNA target sequence for MLLT3 (NM_004529.1,401-419).
caccttacaaagtagaaga

SEQ ID NO: 300614 - DNA, 19 bp, Homo sapiens
  siRNA target sequence for MLLT3 (NM_004529.1,438-456).
cattttgccaattgaagtt

SEQ ID NO: 300615 - DNA, 19 bp, Homo sapiens
  siRNA target sequence for MLLT3 (NM_004529.1,444-462).
gccaattgaagtttatttt

SEQ ID NO: 300616 - DNA, 19 bp, Homo sapiens
  siRNA target sequence for MLLT3 (NM_004529.1,482-500).
ggaaagtccgctttgatta

SEQ ID NO: 300617 - DNA, 19 bp, Homo sapiens
  siRNA target sequence for MLLT3 (NM_004529.1,487-505).
gtccgctttgattatgact

SEQ ID NO: 300618 - DNA, 19 bp, Homo sapiens
  siRNA target sequence for MLLT3 (NM_004529.1,489-507).
ccgctttgattatgactta

SEQ ID NO: 300619 - DNA, 19 bp, Homo sapiens
  siRNA target sequence for MLLT3 (NM_004529.1,543-561).
cctccgctgtgaaaagcta

SEQ ID NO: 300620 - DNA, 19 bp, Homo sapiens
  siRNA target sequence for MLLT3 (NM_004529.1,544-562).
ctccgctgtgaaaagctaa

SEQ ID NO: 300621 - DNA, 19 bp, Homo sapiens
  siRNA target sequence for MLLT3 (NM_004529.1,548-566).
gctgtgaaaagctaacttt

SEQ ID NO: 300622 - DNA, 19 bp, Homo sapiens
  siRNA target sequence for MLLT3 (NM_004529.1,574-592).
cccacagaggactttagga

SEQ ID NO: 300623 - DNA, 19 bp, Homo sapiens
  siRNA target sequence for MLLT3 (NM_004529.1,580-598).
gaggactttaggagaaagt

SEQ ID NO: 300624 - DNA, 19 bp, Homo sapiens
  siRNA target sequence for MLLT3 (NM_004529.1,607-625).
gcaggaggggaccctaata

SEQ ID NO: 300625 - DNA, 19 bp, Homo sapiens
  siRNA target sequence for MLLT3 (NM_004529.1,615-633).
ggaccctaataggagtatt

SEQ ID NO: 300626 - DNA, 19 bp, Homo sapiens
  siRNA target sequence for MLLT3 (NM_004529.1,619-637).
cctaataggagtattcata

SEQ ID NO: 300627 - DNA, 19 bp, Homo sapiens
  siRNA target sequence for MLLT3 (NM_004529.1,799-817).
gagcacaaggaaaaacctt

SEQ ID NO: 300628 - DNA, 19 bp, Homo sapiens
  siRNA target sequence for MLLT3 (NM_004529.1,861-879).
cagggatcacaacaaatct

SEQ ID NO: 300629 - DNA, 19 bp, Homo sapiens
  siRNA target sequence for MLLT3 (NM_004529.1,948-966).
ggccttcaaggaacctaaa

SEQ ID NO: 300630 - DNA, 19 bp, Homo sapiens
  siRNA target sequence for MLLT3 (NM_004529.1,958-976).
gaacctaaacccatgtcaa

SEQ ID NO: 300631 - DNA, 19 bp, Homo sapiens
  siRNA target sequence for MLLT3 (NM_004529.1,962-980).
ctaaacccatgtcaaaaga

SEQ ID NO: 300632 - DNA, 19 bp, Homo sapiens
  siRNA target sequence for MLLT3 (NM_004529.1,982-1000).
ccaaaaccagatagtaact

SEQ ID NO: 300633 - DNA, 19 bp, Homo sapiens
  siRNA target sequence for MLLT3 (NM_004529.1,983-1001).
caaaaccagatagtaactt

SEQ ID NO: 300634 - DNA, 19 bp, Homo sapiens
  siRNA target sequence for MLLT3 (NM_004529.1,988-1006).
ccagatagtaacttactca

SEQ ID NO: 300635 - DNA, 19 bp, Homo sapiens
  siRNA target sequence for MLLT3 (NM_004529.1,1008-1026).
catcaccagtggacaagat

SEQ ID NO: 300636 - DNA, 19 bp, Homo sapiens
  siRNA target sequence for MLLT3 (NM_004529.1,1130-1148).
gcgcaccaccactgatact

SEQ ID NO: 300637 - DNA, 19 bp, Homo sapiens
  siRNA target sequence for MLLT3 (NM_004529.1,1132-1150).
gcaccaccactgatactca

SEQ ID NO: 300638 - DNA, 19 bp, Homo sapiens
  siRNA target sequence for MLLT3 (NM_004529.1,1149-1167).
cacttgttctgctgacaaa

SEQ ID NO: 300639 - DNA, 19 bp, Homo sapiens
  siRNA target sequence for MLLT3 (NM_004529.1,1244-1262).
caacgttaccgccatttga

SEQ ID NO: 300640 - DNA, 19 bp, Homo sapiens
  siRNA target sequence for MLLT3 (NM_004529.1,1247-1265).
cgttaccgccatttgatga

SEQ ID NO: 300641 - DNA, 19 bp, Homo sapiens
  siRNA target sequence for MLLT3 (NM_004529.1,1248-1266).
gttaccgccatttgatgat

SEQ ID NO: 300642 - DNA, 19 bp, Homo sapiens
  siRNA target sequence for MLLT3 (NM_004529.1,1253-1271).
cgccatttgatgatattgt

SEQ ID NO: 300643 - DNA, 19 bp, Homo sapiens
  siRNA target sequence for MLLT3 (NM_004529.1,1299-1317).
gaatatatcctctaaatct

SEQ ID NO: 300644 - DNA, 19 bp, Homo sapiens
  siRNA target sequence for MLLT3 (NM_004529.1,1396-1414).
ggtcctttgaggtctataa

SEQ ID NO: 300645 - DNA, 19 bp, Homo sapiens
  siRNA target sequence for MLLT3 (NM_004529.1,1399-1417).
cctttgaggtctataatga

SEQ ID NO: 300646 - DNA, 19 bp, Homo sapiens
  siRNA target sequence for MLLT3 (NM_004529.1,1404-1422).
gaggtctataatgaaagat

SEQ ID NO: 300647 - DNA, 19 bp, Homo sapiens
  siRNA target sequence for MLLT3 (NM_004529.1,1462-1480).
gaggataacgacaatgact

SEQ ID NO: 300648 - DNA, 19 bp, Homo sapiens
  siRNA target sequence for MLLT3 (NM_004529.1,1488-1506).
ggagaggcctgtaaataga

SEQ ID NO: 300649 - DNA, 19 bp, Homo sapiens
  siRNA target sequence for MLLT3 (NM_004529.1,1523-1541).
gcagagttagcttaagtga

SEQ ID NO: 300650 - DNA, 19 bp, Homo sapiens
  siRNA target sequence for MLLT3 (NM_004529.1,1524-1542).
cagagttagcttaagtgat

SEQ ID NO: 300651 - DNA, 19 bp, Homo sapiens
  siRNA target sequence for MLLT3 (NM_004529.1,1538-1556).
gtgatggcagcgatagtga

SEQ ID NO: 300652 - DNA, 19 bp, Homo sapiens
  siRNA target sequence for MLLT3 (NM_004529.1,1695-1713).
caaggcatacctagatgaa

SEQ ID NO: 300653 - DNA, 19 bp, Homo sapiens
  siRNA target sequence for MLLT3 (NM_004529.1,1723-1741).
cttcacagaaggttaatga

SEQ ID NO: 300654 - DNA, 19 bp, Homo sapiens
  siRNA target sequence for MLLT3 (NM_004529.1,1765-1783).
cagcagatcgtgaacctta

SEQ ID NO: 300655 - DNA, 19 bp, Homo sapiens
  siRNA target sequence for MLLT3 (NM_004529.1,1767-1785).
gcagatcgtgaaccttata

SEQ ID NO: 300656 - DNA, 19 bp, Homo sapiens
  siRNA target sequence for MLLT3 (NM_004529.1,1796-1814).
gacactttcatatcacaaa

SEQ ID NO: 300657 - DNA, 19 bp, Homo sapiens
  siRNA target sequence for MLLT3 (NM_004529.1,1798-1816).
cactttcatatcacaaaca

SEQ ID NO: 300658 - DNA, 19 bp, Homo sapiens
  siRNA target sequence for MLLT3 (NM_004529.1,1809-1827).
cacaaacacaacatttgat

SEQ ID NO: 300659 - DNA, 19 bp, Homo sapiens
  siRNA target sequence for MLLT3 (NM_004529.1,1811-1829).
caaacacaacatttgattt

SEQ ID NO: 300660 - DNA, 19 bp, Homo sapiens
  siRNA target sequence for MLLT3 (NM_004529.1,1815-1833).
cacaacatttgattttgat

SEQ ID NO: 300661 - DNA, 19 bp, Homo sapiens
  siRNA target sequence for MLLT3 (NM_004529.1,1853-1871).
ccacagtccgtaaactaca

SEQ ID NO: 300662 - DNA, 19 bp, Homo sapiens
  siRNA target sequence for NCOA5 (NM_020967.1,129-147).
gaatacggctccatcaaga

SEQ ID NO: 300663 - DNA, 19 bp, Homo sapiens
  siRNA target sequence for NCOA5 (NM_020967.1,156-174).
cacacgaagggatccatat

SEQ ID NO: 300664 - DNA, 19 bp, Homo sapiens
  siRNA target sequence for NCOA5 (NM_020967.1,306-324).
gcgggaccacagacatagt

SEQ ID NO: 300665 - DNA, 19 bp, Homo sapiens
  siRNA target sequence for NCOA5 (NM_020967.1,307-325).
cgggaccacagacatagta

SEQ ID NO: 300666 - DNA, 19 bp, Homo sapiens
  siRNA target sequence for NCOA5 (NM_020967.1,309-327).
ggaccacagacatagtaga

SEQ ID NO: 300667 - DNA, 19 bp, Homo sapiens
  siRNA target sequence for NCOA5 (NM_020967.1,370-388).
cgggacgtgagggatctta

SEQ ID NO: 300668 - DNA, 19 bp, Homo sapiens
  siRNA target sequence for NCOA5 (NM_020967.1,372-390).
ggacgtgagggatcttaga

SEQ ID NO: 300669 - DNA, 19 bp, Homo sapiens
  siRNA target sequence for NCOA5 (NM_020967.1,378-396).
gagggatcttagagacttt

SEQ ID NO: 300670 - DNA, 19 bp, Homo sapiens
  siRNA target sequence for NCOA5 (NM_020967.1,439-457).
cccatgtacgacagataca

SEQ ID NO: 300671 - DNA, 19 bp, Homo sapiens
  siRNA target sequence for NCOA5 (NM_020967.1,467-485).
gagactcccgagatcctat

SEQ ID NO: 300672 - DNA, 19 bp, Homo sapiens
  siRNA target sequence for NCOA5 (NM_020967.1,501-519).
ctcttatgaccgataccta

SEQ ID NO: 300673 - DNA, 19 bp, Homo sapiens
  siRNA target sequence for NCOA5 (NM_020967.1,510-528).
ccgatacctacgaatggat

SEQ ID NO: 300674 - DNA, 19 bp, Homo sapiens
  siRNA target sequence for NCOA5 (NM_020967.1,516-534).
cctacgaatggatgactat

SEQ ID NO: 300675 - DNA, 19 bp, Homo sapiens
  siRNA target sequence for NCOA5 (NM_020967.1,517-535).
ctacgaatggatgactatt

SEQ ID NO: 300676 - DNA, 19 bp, Homo sapiens
  siRNA target sequence for NCOA5 (NM_020967.1,520-538).
cgaatggatgactattgca

SEQ ID NO: 300677 - DNA, 19 bp, Homo sapiens
  siRNA target sequence for NCOA5 (NM_020967.1,539-557).
ggagaaaggatgactctta

SEQ ID NO: 300678 - DNA, 19 bp, Homo sapiens
  siRNA target sequence for NCOA5 (NM_020967.1,540-558).
gagaaaggatgactcttat

SEQ ID NO: 300679 - DNA, 19 bp, Homo sapiens
  siRNA target sequence for NCOA5 (NM_020967.1,650-668).
ggcgtagagaagagcttta

SEQ ID NO: 300680 - DNA, 19 bp, Homo sapiens
  siRNA target sequence for NCOA5 (NM_020967.1,651-669).
gcgtagagaagagctttat

SEQ ID NO: 300681 - DNA, 19 bp, Homo sapiens
  siRNA target sequence for NCOA5 (NM_020967.1,661-679).
gagctttatcgtcaatatt

SEQ ID NO: 300682 - DNA, 19 bp, Homo sapiens
  siRNA target sequence for NCOA5 (NM_020967.1,671-689).
gtcaatattttgaggaaat

SEQ ID NO: 300683 - DNA, 19 bp, Homo sapiens
  siRNA target sequence for NCOA5 (NM_020967.1,706-724).
gccgaaaggcccgttgatt

SEQ ID NO: 300684 - DNA, 19 bp, Homo sapiens
  siRNA target sequence for NCOA5 (NM_020967.1,708-726).
cgaaaggcccgttgattgt

SEQ ID NO: 300685 - DNA, 19 bp, Homo sapiens
  siRNA target sequence for NCOA5 (NM_020967.1,797-815).
gcatggtagtggacttgat

SEQ ID NO: 300686 - DNA, 19 bp, Homo sapiens
  siRNA target sequence for NCOA5 (NM_020967.1,844-862).
caagccttggaggatgtta

SEQ ID NO: 300687 - DNA, 19 bp, Homo sapiens
  siRNA target sequence for NCOA5 (NM_020967.1,868-886).
ggaggttctccttttgcta

SEQ ID NO: 300688 - DNA, 19 bp, Homo sapiens
  siRNA target sequence for NCOA5 (NM_020967.1,869-887).
gaggttctccttttgctat

SEQ ID NO: 300689 - DNA, 19 bp, Homo sapiens
  siRNA target sequence for NCOA5 (NM_020967.1,917-935).
gctcctgcacagtcaacat

SEQ ID NO: 300690 - DNA, 19 bp, Homo sapiens
  siRNA target sequence for NCOA5 (NM_020967.1,990-1008).
gctggtggccagaaattat

SEQ ID NO: 300691 - DNA, 19 bp, Homo sapiens
  siRNA target sequence for NCOA5 (NM_020967.1,1196-1214).
ctgaagagactgacaagat

SEQ ID NO: 300692 - DNA, 19 bp, Homo sapiens
  siRNA target sequence for NCOA5 (NM_020967.1,1675-1693).
gcacctgctagcaacatga

SEQ ID NO: 300693 - DNA, 19 bp, Homo sapiens
  siRNA target sequence for NCOA5 (NM_020967.1,1678-1696).
cctgctagcaacatgacta

SEQ ID NO: 300694 - DNA, 19 bp, Homo sapiens
  siRNA target sequence for PCQAP (NM_015889.2,167-185).
gatatggagagccatgttt

SEQ ID NO: 300695 - DNA, 19 bp, Homo sapiens
  siRNA target sequence for PCQAP (NM_015889.2,195-213).
ccaagacccgggacgaata

SEQ ID NO: 300696 - DNA, 19 bp, Homo sapiens
  siRNA target sequence for PCQAP (NM_015889.2,227-245).
gccaggctcattatccatt

SEQ ID NO: 300697 - DNA, 19 bp, Homo sapiens
  siRNA target sequence for PCQAP (NM_015889.2,228-246).
ccaggctcattatccattt

SEQ ID NO: 300698 - DNA, 19 bp, Homo sapiens
  siRNA target sequence for PCQAP (NM_015889.2,229-247).
caggctcattatccatttt

SEQ ID NO: 300699 - DNA, 19 bp, Homo sapiens
  siRNA target sequence for PCQAP (NM_015889.2,232-250).
gctcattatccattttcga

SEQ ID NO: 300700 - DNA, 19 bp, Homo sapiens
  siRNA target sequence for PCQAP (NM_015889.2,242-260).
cattttcgagacattcata

SEQ ID NO: 300701 - DNA, 19 bp, Homo sapiens
  siRNA target sequence for PCQAP (NM_015889.2,248-266).
cgagacattcataacaaga

SEQ ID NO: 300702 - DNA, 19 bp, Homo sapiens
  siRNA target sequence for PCQAP (NM_015889.2,249-267).
gagacattcataacaagaa

SEQ ID NO: 300703 - DNA, 19 bp, Homo sapiens
  siRNA target sequence for PCQAP (NM_015889.2,276-294).
cttccgtcagtgatcctat

SEQ ID NO: 300704 - DNA, 19 bp, Homo sapiens
  siRNA target sequence for PCQAP (NM_015889.2,279-297).
ccgtcagtgatcctatgaa

SEQ ID NO: 300705 - DNA, 19 bp, Homo sapiens
  siRNA target sequence for PCQAP (NM_015889.2,280-298).
cgtcagtgatcctatgaat

SEQ ID NO: 300706 - DNA, 19 bp, Homo sapiens
  siRNA target sequence for PCQAP (NM_015889.2,403-421).
catgggacagccaatgtct

SEQ ID NO: 300707 - DNA, 19 bp, Homo sapiens
  siRNA target sequence for PCQAP (NM_015889.2,698-716).
cagcagcatctaattaaat

SEQ ID NO: 300708 - DNA, 19 bp, Homo sapiens
  siRNA target sequence for PCQAP (NM_015889.2,703-721).
gcatctaattaaattgcat

SEQ ID NO: 300709 - DNA, 19 bp, Homo sapiens
  siRNA target sequence for PCQAP (NM_015889.2,1049-1067).
ctccctggacaaatgttgt

SEQ ID NO: 300710 - DNA, 19 bp, Homo sapiens
  siRNA target sequence for PCQAP (NM_015889.2,1440-1458).
cctcacctggacctttaaa

SEQ ID NO: 300711 - DNA, 19 bp, Homo sapiens
  siRNA target sequence for PCQAP (NM_015889.2,1675-1693).
gaagaccttgcaaaagtgt

SEQ ID NO: 300712 - DNA, 19 bp, Homo sapiens
  siRNA target sequence for PCQAP (NM_015889.2,1840-1858).
cctgtaccgcacattcgtt

SEQ ID NO: 300713 - DNA, 19 bp, Homo sapiens
  siRNA target sequence for PCQAP (NM_015889.2,2098-2116).
cagtgtgcccgctgactat

SEQ ID NO: 300714 - DNA, 19 bp, Homo sapiens
  siRNA target sequence for RBL1 (NM_002895.2,248-266).
cactggttggcatgttcat

SEQ ID NO: 300715 - DNA, 19 bp, Homo sapiens
  siRNA target sequence for RBL1 (NM_002895.2,252-270).
ggttggcatgttcattata

SEQ ID NO: 300716 - DNA, 19 bp, Homo sapiens
  siRNA target sequence for RBL1 (NM_002895.2,256-274).
ggcatgttcattatatgtt

SEQ ID NO: 300717 - DNA, 19 bp, Homo sapiens
  siRNA target sequence for RBL1 (NM_002895.2,275-293).
gcatgccgcaaaagcatta

SEQ ID NO: 300718 - DNA, 19 bp, Homo sapiens
  siRNA target sequence for RBL1 (NM_002895.2,276-294).
catgccgcaaaagcattat

SEQ ID NO: 300719 - DNA, 19 bp, Homo sapiens
  siRNA target sequence for RBL1 (NM_002895.2,300-318).
cggttggaaagggtatcat

SEQ ID NO: 300720 - DNA, 19 bp, Homo sapiens
  siRNA target sequence for RBL1 (NM_002895.2,350-368).
ctacgttcagctaaattaa

SEQ ID NO: 300721 - DNA, 19 bp, Homo sapiens
  siRNA target sequence for RBL1 (NM_002895.2,353-371).
cgttcagctaaattaagtt

SEQ ID NO: 300722 - DNA, 19 bp, Homo sapiens
  siRNA target sequence for RBL1 (NM_002895.2,360-378).
ctaaattaagtttaataca

SEQ ID NO: 300723 - DNA, 19 bp, Homo sapiens
  siRNA target sequence for RBL1 (NM_002895.2,414-432).
caaatctaccacaagaatt

SEQ ID NO: 300724 - DNA, 19 bp, Homo sapiens
  siRNA target sequence for RBL1 (NM_002895.2,573-591).
ggattccttgcagtgttaa

SEQ ID NO: 300725 - DNA, 19 bp, Homo sapiens
  siRNA target sequence for RBL1 (NM_002895.2,582-600).
gcagtgttaaggatctgtt

SEQ ID NO: 300726 - DNA, 19 bp, Homo sapiens
  siRNA target sequence for RBL1 (NM_002895.2,634-652).
gggtaattttcggatgatt

SEQ ID NO: 300727 - DNA, 19 bp, Homo sapiens
  siRNA target sequence for RBL1 (NM_002895.2,646-664).
gatgattggggatgactta

SEQ ID NO: 300728 - DNA, 19 bp, Homo sapiens
  siRNA target sequence for RBL1 (NM_002895.2,649-667).
gattggggatgacttagta

SEQ ID NO: 300729 - DNA, 19 bp, Homo sapiens
  siRNA target sequence for RBL1 (NM_002895.2,655-673).
ggatgacttagtaaactct

SEQ ID NO: 300730 - DNA, 19 bp, Homo sapiens
  siRNA target sequence for RBL1 (NM_002895.2,656-674).
gatgacttagtaaactctt

SEQ ID NO: 300731 - DNA, 19 bp, Homo sapiens
  siRNA target sequence for RBL1 (NM_002895.2,716-734).
gcgattatgtgcccaaata

SEQ ID NO: 300732 - DNA, 19 bp, Homo sapiens
  siRNA target sequence for RBL1 (NM_002895.2,718-736).
gattatgtgcccaaataga

SEQ ID NO: 300733 - DNA, 19 bp, Homo sapiens
  siRNA target sequence for RBL1 (NM_002895.2,726-744).
gcccaaatagacaagactt

SEQ ID NO: 300734 - DNA, 19 bp, Homo sapiens
  siRNA target sequence for RBL1 (NM_002895.2,737-755).
caagacttgctaaatccat

SEQ ID NO: 300735 - DNA, 19 bp, Homo sapiens
  siRNA target sequence for RBL1 (NM_002895.2,857-875).
ctcgtagaagcaaaaggaa

SEQ ID NO: 300736 - DNA, 19 bp, Homo sapiens
  siRNA target sequence for RBL1 (NM_002895.2,911-929).
ctctttgacaggaagatat

SEQ ID NO: 300737 - DNA, 19 bp, Homo sapiens
  siRNA target sequence for RBL1 (NM_002895.2,913-931).
ctttgacaggaagatatta

SEQ ID NO: 300738 - DNA, 19 bp, Homo sapiens
  siRNA target sequence for RBL1 (NM_002895.2,943-961).
cctcctggacctttcaagt

SEQ ID NO: 300739 - DNA, 19 bp, Homo sapiens
  siRNA target sequence for RBL1 (NM_002895.2,944-962).
ctcctggacctttcaagtt

SEQ ID NO: 300740 - DNA, 19 bp, Homo sapiens
  siRNA target sequence for RBL1 (NM_002895.2,947-965).
ctggacctttcaagtttta

SEQ ID NO: 300741 - DNA, 19 bp, Homo sapiens
  siRNA target sequence for RBL1 (NM_002895.2,960-978).
gttttactgataatagcaa

SEQ ID NO: 300742 - DNA, 19 bp, Homo sapiens
  siRNA target sequence for RBL1 (NM_002895.2,994-1012).
gtatgaagagtatgttcta

SEQ ID NO: 300743 - DNA, 19 bp, Homo sapiens
  siRNA target sequence for RBL1 (NM_002895.2,1121-1139).
caggctaatgtggagtata

SEQ ID NO: 300744 - DNA, 19 bp, Homo sapiens
  siRNA target sequence for RBL1 (NM_002895.2,1125-1143).
ctaatgtggagtataacct

SEQ ID NO: 300745 - DNA, 19 bp, Homo sapiens
  siRNA target sequence for RBL1 (NM_002895.2,1190-1208).
ctgaccggacggagatatt

SEQ ID NO: 300746 - DNA, 19 bp, Homo sapiens
  siRNA target sequence for RBL1 (NM_002895.2,1192-1210).
gaccggacggagatattta

SEQ ID NO: 300747 - DNA, 19 bp, Homo sapiens
  siRNA target sequence for RBL1 (NM_002895.2,1261-1279).
gagccggttacagagtatt

SEQ ID NO: 300748 - DNA, 19 bp, Homo sapiens
  siRNA target sequence for RBL1 (NM_002895.2,1263-1281).
gccggttacagagtattgt

SEQ ID NO: 300749 - DNA, 19 bp, Homo sapiens
  siRNA target sequence for RBL1 (NM_002895.2,1298-1316).
gcaccaagtgaccaactta

SEQ ID NO: 300750 - DNA, 19 bp, Homo sapiens
  siRNA target sequence for RBL1 (NM_002895.2,1299-1317).
caccaagtgaccaacttat

SEQ ID NO: 300751 - DNA, 19 bp, Homo sapiens
  siRNA target sequence for RBL1 (NM_002895.2,1340-1358).
cgtaatcctgtggaaaaca

SEQ ID NO: 300752 - DNA, 19 bp, Homo sapiens
  siRNA target sequence for RBL1 (NM_002895.2,1387-1405).
gactttctgtcaacactat

SEQ ID NO: 300753 - DNA, 19 bp, Homo sapiens
  siRNA target sequence for RBL1 (NM_002895.2,1393-1411).
ctgtcaacactatactcaa

SEQ ID NO: 300754 - DNA, 19 bp, Homo sapiens
  siRNA target sequence for RBL1 (NM_002895.2,1427-1445).
ccaggatctcacatagact

SEQ ID NO: 300755 - DNA, 19 bp, Homo sapiens
  siRNA target sequence for RBL1 (NM_002895.2,1428-1446).
caggatctcacatagactt

SEQ ID NO: 300756 - DNA, 19 bp, Homo sapiens
  siRNA target sequence for RBL1 (NM_002895.2,1518-1536).
cacgaagacttcatggaat

SEQ ID NO: 300757 - DNA, 19 bp, Homo sapiens
  siRNA target sequence for RBL1 (NM_002895.2,1537-1555).
ggacatgtcagttctttta

SEQ ID NO: 300758 - DNA, 19 bp, Homo sapiens
  siRNA target sequence for RBL1 (NM_002895.2,1604-1622).
gtgctctttgcctatagct

SEQ ID NO: 300759 - DNA, 19 bp, Homo sapiens
  siRNA target sequence for RBL1 (NM_002895.2,1629-1647).
gtacttttccttggattat

SEQ ID NO: 300760 - DNA, 19 bp, Homo sapiens
  siRNA target sequence for RBL1 (NM_002895.2,1638-1656).
cttggattattgaagttct

SEQ ID NO: 300761 - DNA, 19 bp, Homo sapiens
  siRNA target sequence for RBL1 (NM_002895.2,1641-1659).
ggattattgaagttctcaa

SEQ ID NO: 300762 - DNA, 19 bp, Homo sapiens
  siRNA target sequence for RBL1 (NM_002895.2,1655-1673).
ctcaacttgcaaccatttt

SEQ ID NO: 300763 - DNA, 19 bp, Homo sapiens
  siRNA target sequence for RBL1 (NM_002895.2,1663-1681).
gcaaccattttacttttat

SEQ ID NO: 300764 - DNA, 19 bp, Homo sapiens
  siRNA target sequence for RBL1 (NM_002895.2,1762-1780).
gattttggagagtttagca

SEQ ID NO: 300765 - DNA, 19 bp, Homo sapiens
  siRNA target sequence for RBL1 (NM_002895.2,1816-1834).
ggtttctgcaaacaaagtt

SEQ ID NO: 300766 - DNA, 19 bp, Homo sapiens
  siRNA target sequence for RBL1 (NM_002895.2,1967-1985).
gggagtcttcgaagagata

SEQ ID NO: 300767 - DNA, 19 bp, Homo sapiens
  siRNA target sequence for RBL1 (NM_002895.2,1971-1989).
gtcttcgaagagatatgca

SEQ ID NO: 300768 - DNA, 19 bp, Homo sapiens
  siRNA target sequence for RBL1 (NM_002895.2,1987-2005).
gcaaccattgtctccaatt

SEQ ID NO: 300769 - DNA, 19 bp, Homo sapiens
  siRNA target sequence for RBL1 (NM_002895.2,1988-2006).
caaccattgtctccaattt

SEQ ID NO: 300770 - DNA, 19 bp, Homo sapiens
  siRNA target sequence for RBL1 (NM_002895.2,2009-2027).
gtccatgaacgctacagtt

SEQ ID NO: 300771 - DNA, 19 bp, Homo sapiens
  siRNA target sequence for RBL1 (NM_002895.2,2122-2140).
gaaaatcgctccttcttca

SEQ ID NO: 300772 - DNA, 19 bp, Homo sapiens
  siRNA target sequence for RBL1 (NM_002895.2,2128-2146).
cgctccttcttcaagcatt

SEQ ID NO: 300773 - DNA, 19 bp, Homo sapiens
  siRNA target sequence for RBL1 (NM_002895.2,2129-2147).
gctccttcttcaagcatta

SEQ ID NO: 300774 - DNA, 19 bp, Homo sapiens
  siRNA target sequence for RBL1 (NM_002895.2,2139-2157).
caagcattactgctgaaaa

SEQ ID NO: 300775 - DNA, 19 bp, Homo sapiens
  siRNA target sequence for RBL1 (NM_002895.2,2174-2192).
ggtcaaactcttctaacaa

SEQ ID NO: 300776 - DNA, 19 bp, Homo sapiens
  siRNA target sequence for RBL1 (NM_002895.2,2175-2193).
gtcaaactcttctaacaat

SEQ ID NO: 300777 - DNA, 19 bp, Homo sapiens
  siRNA target sequence for RBL1 (NM_002895.2,2225-2243).
cataaagttacaattccat

SEQ ID NO: 300778 - DNA, 19 bp, Homo sapiens
  siRNA target sequence for RBL1 (NM_002895.2,2277-2295).
cactgatacctctttccat

SEQ ID NO: 300779 - DNA, 19 bp, Homo sapiens
  siRNA target sequence for RBL1 (NM_002895.2,2320-2338).
caagagtcctgtatcactt

SEQ ID NO: 300780 - DNA, 19 bp, Homo sapiens
  siRNA target sequence for RBL1 (NM_002895.2,2323-2341).
gagtcctgtatcacttact

SEQ ID NO: 300781 - DNA, 19 bp, Homo sapiens
  siRNA target sequence for RBL1 (NM_002895.2,2374-2392).
gaccaatctgactaaagca

SEQ ID NO: 300782 - DNA, 19 bp, Homo sapiens
  siRNA target sequence for RBL1 (NM_002895.2,2398-2416).
ggtacattcaactggaata

SEQ ID NO: 300783 - DNA, 19 bp, Homo sapiens
  siRNA target sequence for RBL1 (NM_002895.2,2399-2417).
gtacattcaactggaataa

SEQ ID NO: 300784 - DNA, 19 bp, Homo sapiens
  siRNA target sequence for RBL1 (NM_002895.2,2464-2482).
ctatcatttggcaagtgta

SEQ ID NO: 300785 - DNA, 19 bp, Homo sapiens
  siRNA target sequence for RBL1 (NM_002895.2,2480-2498).
gtacgcttacgtgatctat

SEQ ID NO: 300786 - DNA, 19 bp, Homo sapiens
  siRNA target sequence for RBL1 (NM_002895.2,2484-2502).
gcttacgtgatctatgtct

SEQ ID NO: 300787 - DNA, 19 bp, Homo sapiens
  siRNA target sequence for RBL1 (NM_002895.2,2485-2503).
cttacgtgatctatgtcta

SEQ ID NO: 300788 - DNA, 19 bp, Homo sapiens
  siRNA target sequence for RBL1 (NM_002895.2,2513-2531).
gtttcaaatgagttacgaa

SEQ ID NO: 300789 - DNA, 19 bp, Homo sapiens
  siRNA target sequence for RBL1 (NM_002895.2,2536-2554).
gatatggacgtgttttgaa

SEQ ID NO: 300790 - DNA, 19 bp, Homo sapiens
  siRNA target sequence for RBL1 (NM_002895.2,2542-2560).
gacgtgttttgaattcact

SEQ ID NO: 300791 - DNA, 19 bp, Homo sapiens
  siRNA target sequence for RBL1 (NM_002895.2,2544-2562).
cgtgttttgaattcacttt

SEQ ID NO: 300792 - DNA, 19 bp, Homo sapiens
  siRNA target sequence for RBL1 (NM_002895.2,2573-2591).
cctgatctaatgaaagaca

SEQ ID NO: 300793 - DNA, 19 bp, Homo sapiens
  siRNA target sequence for RBL1 (NM_002895.2,2655-2673).
gaacttttcaagaaattat

SEQ ID NO: 300794 - DNA, 19 bp, Homo sapiens
  siRNA target sequence for RBL1 (NM_002895.2,2747-2765).
gaagttgtggcatataata

SEQ ID NO: 300795 - DNA, 19 bp, Homo sapiens
  siRNA target sequence for RBL1 (NM_002895.2,2791-2809).
gatagattgtgacttagaa

SEQ ID NO: 300796 - DNA, 19 bp, Homo sapiens
  siRNA target sequence for RBL1 (NM_002895.2,2894-2912).
gtaggaagagtgaagtcat

SEQ ID NO: 300797 - DNA, 19 bp, Homo sapiens
  siRNA target sequence for RBL1 (NM_002895.2,2933-2951).
gcgaatcaggaccatatga

SEQ ID NO: 300798 - DNA, 19 bp, Homo sapiens
  siRNA target sequence for RBL1 (NM_002895.2,3018-3036).
cccagcagcactccattta

SEQ ID NO: 300799 - DNA, 19 bp, Homo sapiens
  siRNA target sequence for RBL1 (NM_002895.2,3020-3038).
cagcagcactccatttata

SEQ ID NO: 300800 - DNA, 19 bp, Homo sapiens
  siRNA target sequence for RBL1 (NM_002895.2,3022-3040).
gcagcactccatttatatt

SEQ ID NO: 300801 - DNA, 19 bp, Homo sapiens
  siRNA target sequence for RBL1 (NM_002895.2,3023-3041).
cagcactccatttatattt

SEQ ID NO: 300802 - DNA, 19 bp, Homo sapiens
  siRNA target sequence for RBL1 (NM_002895.2,3078-3096).
gcgctctgctgtacaagtt

SEQ ID NO: 300803 - DNA, 19 bp, Homo sapiens
  siRNA target sequence for RBL1 (NM_002895.2,3101-3119).
ggcagcccttctaagagtt

SEQ ID NO: 300804 - DNA, 19 bp, Homo sapiens
  siRNA target sequence for RBL1 (NM_002895.2,3102-3120).
gcagcccttctaagagttt

SEQ ID NO: 300805 - DNA, 19 bp, Homo sapiens
  siRNA target sequence for RBL1 (NM_002895.2,3208-3226).
caaacgcgtctgtcaagaa

SEQ ID NO: 300806 - DNA, 19 bp, Homo sapiens
  siRNA target sequence for RBL1 (NM_183404.1,3101-3119).
ggcagcccttctaaggtaa

SEQ ID NO: 300807 - DNA, 19 bp, Homo sapiens
  siRNA target sequence for SEI1 (NM_013376.1,423-441).
gtgtggctgacaacttact

SEQ ID NO: 300808 - DNA, 19 bp, Homo sapiens
  siRNA target sequence for SEI1 (NM_013376.1,636-654).
ggcttgagggcctgtttga

SEQ ID NO: 300809 - DNA, 19 bp, Homo sapiens
  siRNA target sequence for SEI1 (NM_013376.1,645-663).
gcctgtttgaggatattga

SEQ ID NO: 300810 - DNA, 19 bp, Homo sapiens
  siRNA target sequence for SEI1 (NM_013376.1,667-685).
ctctatgtatgacaatgaa

SEQ ID NO: 300811 - DNA, 19 bp, Homo sapiens
  siRNA target sequence for SIN3A (NM_015477.1,487-505).
cgctatagcagcagttcat

SEQ ID NO: 300812 - DNA, 19 bp, Homo sapiens
  siRNA target sequence for SIN3A (NM_015477.1,488-506).
gctatagcagcagttcata

SEQ ID NO: 300813 - DNA, 19 bp, Homo sapiens
  siRNA target sequence for SIN3A (NM_015477.1,626-644).
gtggaggatgcgctatctt

SEQ ID NO: 300814 - DNA, 19 bp, Homo sapiens
  siRNA target sequence for SIN3A (NM_015477.1,628-646).
ggaggatgcgctatcttat

SEQ ID NO: 300815 - DNA, 19 bp, Homo sapiens
  siRNA target sequence for SIN3A (NM_015477.1,631-649).
ggatgcgctatcttatctt

SEQ ID NO: 300816 - DNA, 19 bp, Homo sapiens
  siRNA target sequence for SIN3A (NM_015477.1,656-674).
gtgaagctgcagtttggta

SEQ ID NO: 300817 - DNA, 19 bp, Homo sapiens
  siRNA target sequence for SIN3A (NM_015477.1,675-693).
gtcagcctcaggtctacaa

SEQ ID NO: 300818 - DNA, 19 bp, Homo sapiens
  siRNA target sequence for SIN3A (NM_015477.1,736-754).
cgacaccccaggagtgatt

SEQ ID NO: 300819 - DNA, 19 bp, Homo sapiens
  siRNA target sequence for SIN3A (NM_015477.1,737-755).
gacaccccaggagtgatta

SEQ ID NO: 300820 - DNA, 19 bp, Homo sapiens
  siRNA target sequence for SIN3A (NM_015477.1,739-757).
caccccaggagtgattagt

SEQ ID NO: 300821 - DNA, 19 bp, Homo sapiens
  siRNA target sequence for SIN3A (NM_015477.1,759-777).
gtgtgtcccagctattcaa

SEQ ID NO: 300822 - DNA, 19 bp, Homo sapiens
  siRNA target sequence for SIN3A (NM_015477.1,780-798).
gccaccccgatctgataat

SEQ ID NO: 300823 - DNA, 19 bp, Homo sapiens
  siRNA target sequence for SIN3A (NM_015477.1,791-809).
ctgataatgggattcaaca

SEQ ID NO: 300824 - DNA, 19 bp, Homo sapiens
  siRNA target sequence for SIN3A (NM_015477.1,817-835).
gccccctggctacaaaatt

SEQ ID NO: 300825 - DNA, 19 bp, Homo sapiens
  siRNA target sequence for SIN3A (NM_015477.1,836-854).
gaggtgcaaaccaatgaca

SEQ ID NO: 300826 - DNA, 19 bp, Homo sapiens
  siRNA target sequence for SIN3A (NM_015477.1,873-891).
ctggccaggttcatcagat

SEQ ID NO: 300827 - DNA, 19 bp, Homo sapiens
  siRNA target sequence for SIN3A (NM_015477.1,1104-1122).
ctcacacaccagtgacaat

SEQ ID NO: 300828 - DNA, 19 bp, Homo sapiens
  siRNA target sequence for SIN3A (NM_015477.1,1138-1156).
cccatccttgcagaacaat

SEQ ID NO: 300829 - DNA, 19 bp, Homo sapiens
  siRNA target sequence for SIN3A (NM_015477.1,1175-1193).
catgccatcaactatgtta

SEQ ID NO: 300830 - DNA, 19 bp, Homo sapiens
  siRNA target sequence for SIN3A (NM_015477.1,1190-1208).
gttaataagatcaagaaca

SEQ ID NO: 300831 - DNA, 19 bp, Homo sapiens
  siRNA target sequence for SIN3A (NM_015477.1,1224-1242).
cagacatctacaaagcatt

SEQ ID NO: 300832 - DNA, 19 bp, Homo sapiens
  siRNA target sequence for SIN3A (NM_015477.1,1339-1357).
ccaggttgctcgtctcttt

SEQ ID NO: 300833 - DNA, 19 bp, Homo sapiens
  siRNA target sequence for SIN3A (NM_015477.1,1342-1360).
ggttgctcgtctctttaaa

SEQ ID NO: 300834 - DNA, 19 bp, Homo sapiens
  siRNA target sequence for SIN3A (NM_015477.1,1408-1426).
caacagctccgtgctttta

SEQ ID NO: 300835 - DNA, 19 bp, Homo sapiens
  siRNA target sequence for SIN3A (NM_015477.1,1413-1431).
gctccgtgcttttaagcaa

SEQ ID NO: 300836 - DNA, 19 bp, Homo sapiens
  siRNA target sequence for SIN3A (NM_015477.1,1414-1432).
ctccgtgcttttaagcaaa

SEQ ID NO: 300837 - DNA, 19 bp, Homo sapiens
  siRNA target sequence for SIN3A (NM_015477.1,1447-1465).
ggttgattctgtgagaaat

SEQ ID NO: 300838 - DNA, 19 bp, Homo sapiens
  siRNA target sequence for SIN3A (NM_015477.1,1560-1578).
ccacccctccagttaagaa

SEQ ID NO: 300839 - DNA, 19 bp, Homo sapiens
  siRNA target sequence for SIN3A (NM_015477.1,1589-1607).
ctgctcaatctgaaggatt

SEQ ID NO: 300840 - DNA, 19 bp, Homo sapiens
  siRNA target sequence for SIN3A (NM_015477.1,1592-1610).
ctcaatctgaaggattctt

SEQ ID NO: 300841 - DNA, 19 bp, Homo sapiens
  siRNA target sequence for SIN3A (NM_015477.1,1635-1653).
gtggtggaacagaatcgtt

SEQ ID NO: 300842 - DNA, 19 bp, Homo sapiens
  siRNA target sequence for SIN3A (NM_015477.1,1637-1655).
ggtggaacagaatcgttat

SEQ ID NO: 300843 - DNA, 19 bp, Homo sapiens
  siRNA target sequence for SIN3A (NM_015477.1,1638-1656).
gtggaacagaatcgttatt

SEQ ID NO: 300844 - DNA, 19 bp, Homo sapiens
  siRNA target sequence for SIN3A (NM_015477.1,1646-1664).
gaatcgttattttttgata

SEQ ID NO: 300845 - DNA, 19 bp, Homo sapiens
  siRNA target sequence for SIN3A (NM_015477.1,1686-1704).
gtgcagaagcctacgaaaa

SEQ ID NO: 300846 - DNA, 19 bp, Homo sapiens
  siRNA target sequence for SIN3A (NM_015477.1,1709-1727).
ctacgctgtcttgttattt

SEQ ID NO: 300847 - DNA, 19 bp, Homo sapiens
  siRNA target sequence for SIN3A (NM_015477.1,1752-1770).
ctgagcttgtgcaactagt

SEQ ID NO: 300848 - DNA, 19 bp, Homo sapiens
  siRNA target sequence for SIN3A (NM_015477.1,1785-1803).
ggaaattccctgagttgtt

SEQ ID NO: 300849 - DNA, 19 bp, Homo sapiens
  siRNA target sequence for SIN3A (NM_015477.1,1793-1811).
cctgagttgtttaattggt

SEQ ID NO: 300850 - DNA, 19 bp, Homo sapiens
  siRNA target sequence for SIN3A (NM_015477.1,1882-1900).
cattgctatggagatagat

SEQ ID NO: 300851 - DNA, 19 bp, Homo sapiens
  siRNA target sequence for SIN3A (NM_015477.1,1934-1952).
cgagccttaccaaagagtt

SEQ ID NO: 300852 - DNA, 19 bp, Homo sapiens
  siRNA target sequence for SIN3A (NM_015477.1,1935-1953).
gagccttaccaaagagtta

SEQ ID NO: 300853 - DNA, 19 bp, Homo sapiens
  siRNA target sequence for SIN3A (NM_015477.1,1974-1992).
gacggactcctctctgtaa

SEQ ID NO: 300854 - DNA, 19 bp, Homo sapiens
  siRNA target sequence for SIN3A (NM_015477.1,1987-2005).
ctgtaaagaggttttaaat

SEQ ID NO: 300855 - DNA, 19 bp, Homo sapiens
  siRNA target sequence for SIN3A (NM_015477.1,2107-2125).
ctttgagcttgatgtagtt

SEQ ID NO: 300856 - DNA, 19 bp, Homo sapiens
  siRNA target sequence for SIN3A (NM_015477.1,2114-2132).
cttgatgtagttttagaga

SEQ ID NO: 300857 - DNA, 19 bp, Homo sapiens
  siRNA target sequence for SIN3A (NM_015477.1,2227-2245).
ccttgggggcacatcagaa

SEQ ID NO: 300858 - DNA, 19 bp, Homo sapiens
  siRNA target sequence for SIN3A (NM_015477.1,2269-2287).
gaggatatatgctgataaa

SEQ ID NO: 300859 - DNA, 19 bp, Homo sapiens
  siRNA target sequence for SIN3A (NM_015477.1,2272-2290).
gatatatgctgataaagca

SEQ ID NO: 300860 - DNA, 19 bp, Homo sapiens
  siRNA target sequence for SIN3A (NM_015477.1,2322-2340).
cctccattgctgttccaat

SEQ ID NO: 300861 - DNA, 19 bp, Homo sapiens
  siRNA target sequence for SIN3A (NM_015477.1,2333-2351).
gttccaattgtccttaaaa

SEQ ID NO: 300862 - DNA, 19 bp, Homo sapiens
  siRNA target sequence for SIN3A (NM_015477.1,2389-2407).
gagaggctttaacaaagta

SEQ ID NO: 300863 - DNA, 19 bp, Homo sapiens
  siRNA target sequence for SIN3A (NM_015477.1,2401-2419).
caaagtatggcgagaacaa

SEQ ID NO: 300864 - DNA, 19 bp, Homo sapiens
  siRNA target sequence for SIN3A (NM_015477.1,2447-2465).
gaccaccaggggatcaact

SEQ ID NO: 300865 - DNA, 19 bp, Homo sapiens
  siRNA target sequence for SIN3A (NM_015477.1,2449-2467).
ccaccaggggatcaacttt

SEQ ID NO: 300866 - DNA, 19 bp, Homo sapiens
  siRNA target sequence for SIN3A (NM_015477.1,2452-2470).
ccaggggatcaactttaaa

SEQ ID NO: 300867 - DNA, 19 bp, Homo sapiens
  siRNA target sequence for SIN3A (NM_015477.1,2493-2511).
ggtctaagagcttactcaa

SEQ ID NO: 300868 - DNA, 19 bp, Homo sapiens
  siRNA target sequence for SIN3A (NM_015477.1,2494-2512).
gtctaagagcttactcaat

SEQ ID NO: 300869 - DNA, 19 bp, Homo sapiens
  siRNA target sequence for SIN3A (NM_015477.1,2496-2514).
ctaagagcttactcaatga

SEQ ID NO: 300870 - DNA, 19 bp, Homo sapiens
  siRNA target sequence for SIN3A (NM_015477.1,2677-2695).
ggaggacaaatataagata

SEQ ID NO: 300871 - DNA, 19 bp, Homo sapiens
  siRNA target sequence for SIN3A (NM_015477.1,2891-2909).
ggaatggatgaagtataca

SEQ ID NO: 300872 - DNA, 19 bp, Homo sapiens
  siRNA target sequence for SIN3A (NM_015477.1,2971-2989).
gaggctgctacggatttgt

SEQ ID NO: 300873 - DNA, 19 bp, Homo sapiens
  siRNA target sequence for SIN3A (NM_015477.1,2992-3010).
ccaagccgaacggcaaatt

SEQ ID NO: 300874 - DNA, 19 bp, Homo sapiens
  siRNA target sequence for SIN3A (NM_015477.1,2997-3015).
ccgaacggcaaattgaaga

SEQ ID NO: 300875 - DNA, 19 bp, Homo sapiens
  siRNA target sequence for SIN3A (NM_015477.1,2998-3016).
cgaacggcaaattgaagaa

SEQ ID NO: 300876 - DNA, 19 bp, Homo sapiens
  siRNA target sequence for SIN3A (NM_015477.1,3085-3103).
cattcagctacgtctcaaa

SEQ ID NO: 300877 - DNA, 19 bp, Homo sapiens
  siRNA target sequence for SIN3A (NM_015477.1,3108-3126).
ctatggatgttgatgtaga

SEQ ID NO: 300878 - DNA, 19 bp, Homo sapiens
  siRNA target sequence for SIN3A (NM_015477.1,3178-3196).
catagactcatcacagtat

SEQ ID NO: 300879 - DNA, 19 bp, Homo sapiens
  siRNA target sequence for SIN3A (NM_015477.1,3189-3207).
cacagtatgaagattcact

SEQ ID NO: 300880 - DNA, 19 bp, Homo sapiens
  siRNA target sequence for SIN3A (NM_015477.1,3220-3238).
caccattcatgcctacatt

SEQ ID NO: 300881 - DNA, 19 bp, Homo sapiens
  siRNA target sequence for SIN3A (NM_015477.1,3230-3248).
gcctacattgcctttacca

SEQ ID NO: 300882 - DNA, 19 bp, Homo sapiens
  siRNA target sequence for SIN3A (NM_015477.1,3231-3249).
cctacattgcctttaccat

SEQ ID NO: 300883 - DNA, 19 bp, Homo sapiens
  siRNA target sequence for SIN3A (NM_015477.1,3257-3275).
ctgatccagagcattgtca

SEQ ID NO: 300884 - DNA, 19 bp, Homo sapiens
  siRNA target sequence for SIN3A (NM_015477.1,3440-3458).
gagaattgctttaagctta

SEQ ID NO: 300885 - DNA, 19 bp, Homo sapiens
  siRNA target sequence for SIN3A (NM_015477.1,3478-3496).
ccaggtccagctgactatt

SEQ ID NO: 300886 - DNA, 19 bp, Homo sapiens
  siRNA target sequence for SIN3A (NM_015477.1,3562-3580).
cgtggagcgatacatgaat

SEQ ID NO: 300887 - DNA, 19 bp, Homo sapiens
  siRNA target sequence for SIN3A (NM_015477.1,3563-3581).
gtggagcgatacatgaatt

SEQ ID NO: 300888 - DNA, 19 bp, Homo sapiens
  siRNA target sequence for SIN3A (NM_015477.1,3565-3583).
ggagcgatacatgaattca

SEQ ID NO: 300889 - DNA, 19 bp, Homo sapiens
  siRNA target sequence for SIN3A (NM_015477.1,3568-3586).
gcgatacatgaattcagat

SEQ ID NO: 300890 - DNA, 19 bp, Homo sapiens
  siRNA target sequence for SIN3A (NM_015477.1,3569-3587).
cgatacatgaattcagata

SEQ ID NO: 300891 - DNA, 19 bp, Homo sapiens
  siRNA target sequence for SIN3A (NM_015477.1,3595-3613).
gcctgagcttcgtgaacat

SEQ ID NO: 300892 - DNA, 19 bp, Homo sapiens
  siRNA target sequence for SIN3A (NM_015477.1,3597-3615).
ctgagcttcgtgaacatct

SEQ ID NO: 300893 - DNA, 19 bp, Homo sapiens
  siRNA target sequence for SIN3A (NM_015477.1,3746-3764).
gataagctggagtgtagat

SEQ ID NO: 300894 - DNA, 19 bp, Homo sapiens
  siRNA target sequence for SIN3A (NM_015477.1,3852-3870).
cccatgagcgtgtaagcaa

SEQ ID NO: 300895 - DNA, 19 bp, Homo sapiens
  siRNA target sequence for SIN3A (NM_015477.1,3893-3911).
gcctgggtagataaatgga

SEQ ID NO: 300896 - DNA, 19 bp, Homo sapiens
  siRNA target sequence for SIN3A (NM_015477.1,4011-4029).
cagagaccctgcattttgt

SEQ ID NO: 300897 - DNA, 19 bp, Homo sapiens
  siRNA target sequence for SNAPC1 (NM_003082.2,195-213).
ggcttggcgatatttttta

SEQ ID NO: 300898 - DNA, 19 bp, Homo sapiens
  siRNA target sequence for SNAPC1 (NM_003082.2,255-273).
gctatatggattatataat

SEQ ID NO: 300899 - DNA, 19 bp, Homo sapiens
  siRNA target sequence for SNAPC1 (NM_003082.2,256-274).
ctatatggattatataata

SEQ ID NO: 300900 - DNA, 19 bp, Homo sapiens
  siRNA target sequence for SNAPC1 (NM_003082.2,315-333).
gaaggattgggatgaagtt

SEQ ID NO: 300901 - DNA, 19 bp, Homo sapiens
  siRNA target sequence for SNAPC1 (NM_003082.2,318-336).
ggattgggatgaagtttta

SEQ ID NO: 300902 - DNA, 19 bp, Homo sapiens
  siRNA target sequence for SNAPC1 (NM_003082.2,401-419).
gactagacagagcatttca

SEQ ID NO: 300903 - DNA, 19 bp, Homo sapiens
  siRNA target sequence for SNAPC1 (NM_003082.2,432-450).
gcccaaattgctgtcatat

SEQ ID NO: 300904 - DNA, 19 bp, Homo sapiens
  siRNA target sequence for SNAPC1 (NM_003082.2,471-489).
ccgagctgaagttacagaa

SEQ ID NO: 300905 - DNA, 19 bp, Homo sapiens
  siRNA target sequence for SNAPC1 (NM_003082.2,503-521).
caagtgatcgtgtgatgaa

SEQ ID NO: 300906 - DNA, 19 bp, Homo sapiens
  siRNA target sequence for SNAPC1 (NM_003082.2,508-526).
gatcgtgtgatgaaactta

SEQ ID NO: 300907 - DNA, 19 bp, Homo sapiens
  siRNA target sequence for SNAPC1 (NM_003082.2,523-541).
cttatcacttctgatgtat

SEQ ID NO: 300908 - DNA, 19 bp, Homo sapiens
  siRNA target sequence for SNAPC1 (NM_003082.2,576-594).
gaacatgaaacatgtaatt

SEQ ID NO: 300909 - DNA, 19 bp, Homo sapiens
  siRNA target sequence for SNAPC1 (NM_003082.2,705-723).
gaatccatccttaaagtca

SEQ ID NO: 300910 - DNA, 19 bp, Homo sapiens
  siRNA target sequence for SNAPC1 (NM_003082.2,790-808).
gaatcattagcgaaaataa

SEQ ID NO: 300911 - DNA, 19 bp, Homo sapiens
  siRNA target sequence for SNAPC1 (NM_003082.2,829-847).
gtcatacaggcatccaaat

SEQ ID NO: 300912 - DNA, 19 bp, Homo sapiens
  siRNA target sequence for SNAPC1 (NM_003082.2,854-872).
ggcatcgtcaagtcaaact

SEQ ID NO: 300913 - DNA, 19 bp, Homo sapiens
  siRNA target sequence for SNAPC1 (NM_003082.2,1011-1029).
ggaagataaacctttaagt

SEQ ID NO: 300914 - DNA, 19 bp, Homo sapiens
  siRNA target sequence for SNAPC1 (NM_003082.2,1028-1046).
gtctgagtatgcctgtaat

SEQ ID NO: 300915 - DNA, 19 bp, Homo sapiens
  siRNA target sequence for SNAPC1 (NM_003082.2,1030-1048).
ctgagtatgcctgtaatta

SEQ ID NO: 300916 - DNA, 19 bp, Homo sapiens
  siRNA target sequence for TLE1 (NM_005077.3,1050-1068).
ggtcccagacagtctaaga

SEQ ID NO: 300917 - DNA, 19 bp, Homo sapiens
  siRNA target sequence for TLE1 (NM_005077.3,1167-1185).
caaaagcgatgacaactta

SEQ ID NO: 300918 - DNA, 19 bp, Homo sapiens
  siRNA target sequence for TLE1 (NM_005077.3,1172-1190).
gcgatgacaacttagttgt

SEQ ID NO: 300919 - DNA, 19 bp, Homo sapiens
  siRNA target sequence for TLE1 (NM_005077.3,1319-1337).
cggcaagttccacttcttt

SEQ ID NO: 300920 - DNA, 19 bp, Homo sapiens
  siRNA target sequence for TLE1 (NM_005077.3,1328-1346).
ccacttctttgaaatccaa

SEQ ID NO: 300921 - DNA, 19 bp, Homo sapiens
  siRNA target sequence for TLE1 (NM_005077.3,1370-1388).
ccagcacgcctgttctgaa

SEQ ID NO: 300922 - DNA, 19 bp, Homo sapiens
  siRNA target sequence for TLE1 (NM_005077.3,1478-1496).
ccatagaccccctcgttaa

SEQ ID NO: 300923 - DNA, 19 bp, Homo sapiens
  siRNA target sequence for TLE1 (NM_005077.3,1605-1623).
cgctgcctacgccagttta

SEQ ID NO: 300924 - DNA, 19 bp, Homo sapiens
  siRNA target sequence for TLE1 (NM_005077.3,1609-1627).
gcctacgccagtttacaca

SEQ ID NO: 300925 - DNA, 19 bp, Homo sapiens
  siRNA target sequence for TLE1 (NM_005077.3,1610-1628).
cctacgccagtttacacaa

SEQ ID NO: 300926 - DNA, 19 bp, Homo sapiens
  siRNA target sequence for TLE1 (NM_005077.3,1615-1633).
gccagtttacacaacatgt

SEQ ID NO: 300927 - DNA, 19 bp, Homo sapiens
  siRNA target sequence for TLE1 (NM_005077.3,1689-1707).
ccccatggtggggtttgat

SEQ ID NO: 300928 - DNA, 19 bp, Homo sapiens
  siRNA target sequence for TLE1 (NM_005077.3,1719-1737).
catgagagtacctaccatt

SEQ ID NO: 300929 - DNA, 19 bp, Homo sapiens
  siRNA target sequence for TLE1 (NM_005077.3,2061-2079).
cgatggctgcactctcata

SEQ ID NO: 300930 - DNA, 19 bp, Homo sapiens
  siRNA target sequence for TLE1 (NM_005077.3,2261-2279).
cactagtgaggcaattcca

SEQ ID NO: 300931 - DNA, 19 bp, Homo sapiens
  siRNA target sequence for TLE1 (NM_005077.3,2550-2568).
cctgaaatttgcttactgt

SEQ ID NO: 300932 - DNA, 19 bp, Homo sapiens
  siRNA target sequence for TLE1 (NM_005077.3,2596-2614).
gataacctcctcaatgctt

SEQ ID NO: 300933 - DNA, 19 bp, Homo sapiens
  siRNA target sequence for TLE1 (NM_005077.3,2684-2702).
ctgtggatgataagtacat

SEQ ID NO: 300934 - DNA, 19 bp, Homo sapiens
  siRNA target sequence for TLE2 (NM_003260.3,318-336).
gtcgtacgggctcaacatt

SEQ ID NO: 300935 - DNA, 19 bp, Homo sapiens
  siRNA target sequence for TLE2 (NM_003260.3,320-338).
cgtacgggctcaacattga

SEQ ID NO: 300936 - DNA, 19 bp, Homo sapiens
  siRNA target sequence for TLE2 (NM_003260.3,321-339).
gtacgggctcaacattgaa

SEQ ID NO: 300937 - DNA, 19 bp, Homo sapiens
  siRNA target sequence for TLE2 (NM_003260.3,375-393).
cggtatctgcgctcagatt

SEQ ID NO: 300938 - DNA, 19 bp, Homo sapiens
  siRNA target sequence for TLE2 (NM_003260.3,376-394).
ggtatctgcgctcagatta

SEQ ID NO: 300939 - DNA, 19 bp, Homo sapiens
  siRNA target sequence for TLE2 (NM_003260.3,377-395).
gtatctgcgctcagattat

SEQ ID NO: 300940 - DNA, 19 bp, Homo sapiens
  siRNA target sequence for TLE2 (NM_003260.3,780-798).
ggagccatcaggaccttat

SEQ ID NO: 300941 - DNA, 19 bp, Homo sapiens
  siRNA target sequence for TLE2 (NM_003260.3,876-894).
caccccctgcggaaaggta

SEQ ID NO: 300942 - DNA, 19 bp, Homo sapiens
  siRNA target sequence for TLE2 (NM_003260.3,1618-1636).
ctgaaccgagacaactaca

SEQ ID NO: 300943 - DNA, 19 bp, Homo sapiens
  siRNA target sequence for TLE2 (NM_003260.3,1620-1638).
gaaccgagacaactacatt

SEQ ID NO: 300944 - DNA, 19 bp, Homo sapiens
  siRNA target sequence for TLE2 (NM_003260.3,1790-1808).
ccgacgccaaggtttgctt

SEQ ID NO: 300945 - DNA, 19 bp, Homo sapiens
  siRNA target sequence for TLE2 (NM_003260.3,1893-1911).
cgccagctgcattgatatt

SEQ ID NO: 300946 - DNA, 19 bp, Homo sapiens
  siRNA target sequence for TLE2 (NM_003260.3,2095-2113).
gtccgcaagccggagaaat

SEQ ID NO: 300947 - DNA, 19 bp, Homo sapiens
  siRNA target sequence for TLE2 (NM_003260.3,2275-2293).
gacatctccagaaataaca

SEQ ID NO: 300948 - DNA, 19 bp, Homo sapiens
  siRNA target sequence for TLE3 (NM_005078.1,93-111).
gtcttgtgacaggatcaaa

SEQ ID NO: 300949 - DNA, 19 bp, Homo sapiens
  siRNA target sequence for TLE3 (NM_005078.1,95-113).
cttgtgacaggatcaaaga

SEQ ID NO: 300950 - DNA, 19 bp, Homo sapiens
  siRNA target sequence for TLE3 (NM_005078.1,281-299).
caattttagcacagatcat

SEQ ID NO: 300951 - DNA, 19 bp, Homo sapiens
  siRNA target sequence for TLE3 (NM_005078.1,602-620).
gagaatccagtgcgaataa

SEQ ID NO: 300952 - DNA, 19 bp, Homo sapiens
  siRNA target sequence for TLE3 (NM_005078.1,760-778).
gatctggtggtggatgttt

SEQ ID NO: 300953 - DNA, 19 bp, Homo sapiens
  siRNA target sequence for TLE3 (NM_005078.1,846-864).
ggcccgtagcctgaaaaaa

SEQ ID NO: 300954 - DNA, 19 bp, Homo sapiens
  siRNA target sequence for TLE3 (NM_005078.1,931-949).
cttggtcataacgacaaat

SEQ ID NO: 300955 - DNA, 19 bp, Homo sapiens
  siRNA target sequence for TLE3 (NM_005078.1,934-952).
ggtcataacgacaaatcct

SEQ ID NO: 300956 - DNA, 19 bp, Homo sapiens
  siRNA target sequence for TLE3 (NM_005078.1,1035-1053).
gtcgatgccgggtaaacct

SEQ ID NO: 300957 - DNA, 19 bp, Homo sapiens
  siRNA target sequence for TLE3 (NM_005078.1,1057-1075).
ggcatggacccgataggta

SEQ ID NO: 300958 - DNA, 19 bp, Homo sapiens
  siRNA target sequence for TLE3 (NM_005078.1,1058-1076).
gcatggacccgataggtat

SEQ ID NO: 300959 - DNA, 19 bp, Homo sapiens
  siRNA target sequence for TLE3 (NM_005078.1,1059-1077).
catggacccgataggtata

SEQ ID NO: 300960 - DNA, 19 bp, Homo sapiens
  siRNA target sequence for TLE3 (NM_005078.1,1338-1356).
ctccattcctggaggaaaa

SEQ ID NO: 300961 - DNA, 19 bp, Homo sapiens
  siRNA target sequence for TLE3 (NM_005078.1,2166-2184).
cgtgagcactgggaaagat

SEQ ID NO: 300962 - DNA, 19 bp, Homo sapiens
  siRNA target sequence for TLE3 (NM_005078.1,2199-2217).
ctggaggacgccttatgga

SEQ ID NO: 300963 - DNA, 19 bp, Homo sapiens
  siRNA target sequence for TLE3 (NM_005078.1,2265-2283).
catttcagcggatgacaaa

SEQ ID NO: 300964 - DNA, 19 bp, Homo sapiens
  siRNA target sequence for TRIP-Br2 (NM_014755.1,344-362).
ggctggaaggcaaaatcgt

SEQ ID NO: 300965 - DNA, 19 bp, Homo sapiens
  siRNA target sequence for TRIP-Br2 (NM_014755.1,379-397).
ccatccaaggtgtcttaca

SEQ ID NO: 300966 - DNA, 19 bp, Homo sapiens
  siRNA target sequence for TRIP-Br2 (NM_014755.1,398-416).
ccttacagcgccagactat

SEQ ID NO: 300967 - DNA, 19 bp, Homo sapiens
  siRNA target sequence for TRIP-Br2 (NM_014755.1,403-421).
cagcgccagactatcttca

SEQ ID NO: 300968 - DNA, 19 bp, Homo sapiens
  siRNA target sequence for TRIP-Br2 (NM_014755.1,428-446).
cccttatgaaactctataa

SEQ ID NO: 300969 - DNA, 19 bp, Homo sapiens
  siRNA target sequence for TRIP-Br2 (NM_014755.1,461-479).
cagagcccagcttgcaaaa

SEQ ID NO: 300970 - DNA, 19 bp, Homo sapiens
  siRNA target sequence for TRIP-Br2 (NM_014755.1,482-500).
ccgttttaattaacaacat

SEQ ID NO: 300971 - DNA, 19 bp, Homo sapiens
  siRNA target sequence for TRIP-Br2 (NM_014755.1,829-847).
gagctctgtcccacatcta

SEQ ID NO: 300972 - DNA, 19 bp, Homo sapiens
  siRNA target sequence for TRIP-Br2 (NM_014755.1,941-959).
gcgcagatgactcaaaact

SEQ ID NO: 300973 - DNA, 19 bp, Homo sapiens
  siRNA target sequence for TRIP-Br2 (NM_014755.1,1047-1065).
cattgatacgtccatgtat

SEQ ID NO: 300974 - DNA, 19 bp, Homo sapiens
  siRNA target sequence for TRIP-Br2 (NM_014755.1,1055-1073).
cgtccatgtatgattttga

SEQ ID NO: 300975 - DNA, 19 bp, Homo sapiens
  siRNA target sequence for TRIP-Br2 (NM_014755.1,1123-1141).
gccgacgacctcctcaaaa

SEQ ID NO: 300976 - DNA, 19 bp, Homo sapiens
  siRNA target sequence for TRIP-Br2 (NM_014755.1,1125-1143).
cgacgacctcctcaaaact

SEQ ID NO: 300977 - DNA, 19 bp, Homo sapiens
  siRNA target sequence for TRIP-Br2 (NM_014755.1,1174-1192).
ccaagtcagcctttcaaaa

SEQ ID NO: 300978 - DNA, 19 bp, Homo sapiens
  siRNA target sequence for TRIP8 (NM_004241.1,642-660).
gaatgatcaggtactagaa

SEQ ID NO: 300979 - DNA, 19 bp, Homo sapiens
  siRNA target sequence for TRIP8 (NM_004241.1,693-711).
gacctttctagatgatgtt

SEQ ID NO: 300980 - DNA, 19 bp, Homo sapiens
  siRNA target sequence for TRIP8 (NM_004241.1,709-727).
gttgttcactctttgttaa

SEQ ID NO: 300981 - DNA, 19 bp, Homo sapiens
  siRNA target sequence for TRIP8 (NM_004241.1,733-751).
gaaaatattggcattacat

SEQ ID NO: 300982 - DNA, 19 bp, Homo sapiens
  siRNA target sequence for TRIP8 (NM_004241.1,759-777).
caggtctcgtgccaatcaa

SEQ ID NO: 300983 - DNA, 19 bp, Homo sapiens
  siRNA target sequence for TRIP8 (NM_004241.1,761-779).
ggtctcgtgccaatcaaaa

SEQ ID NO: 300984 - DNA, 19 bp, Homo sapiens
  siRNA target sequence for TRIP8 (NM_004241.1,764-782).
ctcgtgccaatcaaaacgt

SEQ ID NO: 300985 - DNA, 19 bp, Homo sapiens
  siRNA target sequence for TRIP8 (NM_004241.1,850-868).
gctgctgtaccaaaacaga

SEQ ID NO: 300986 - DNA, 19 bp, Homo sapiens
  siRNA target sequence for TRIP8 (NM_004241.1,893-911).
gaagtatccgtccaaataa

SEQ ID NO: 300987 - DNA, 19 bp, Homo sapiens
  siRNA target sequence for TRIP8 (NM_004241.1,921-939).
ctcagatagcagtatacca

SEQ ID NO: 300988 - DNA, 19 bp, Homo sapiens
  siRNA target sequence for TRIP8 (NM_004241.1,1070-1088).
gacttcgaactgacaatgt

SEQ ID NO: 300989 - DNA, 19 bp, Homo sapiens
  siRNA target sequence for TRIP8 (NM_004241.1,1161-1179).
gccagagaatgaattgaaa

SEQ ID NO: 300990 - DNA, 19 bp, Homo sapiens
  siRNA target sequence for TRIP8 (NM_004241.1,1377-1395).
cacagtttctgatcataat

SEQ ID NO: 300991 - DNA, 19 bp, Homo sapiens
  siRNA target sequence for TRIP8 (NM_004241.1,1385-1403).
ctgatcataattctaatga

SEQ ID NO: 300992 - DNA, 19 bp, Homo sapiens
  siRNA target sequence for TRIP8 (NM_004241.1,1412-1430).
ctcaggaatgcaatatgga

SEQ ID NO: 300993 - DNA, 19 bp, Homo sapiens
  siRNA target sequence for TRIP8 (NM_004241.1,1414-1432).
caggaatgcaatatggata

SEQ ID NO: 300994 - DNA, 19 bp, Homo sapiens
  siRNA target sequence for TRIP8 (NM_004241.1,1416-1434).
ggaatgcaatatggataaa

SEQ ID NO: 300995 - DNA, 19 bp, Homo sapiens
  siRNA target sequence for TRIP8 (NM_004241.1,1442-1460).
ccatggaattgctaccaaa

SEQ ID NO: 300996 - DNA, 19 bp, Homo sapiens
  siRNA target sequence for TRIP8 (NM_004241.1,1481-1499).
cacccacaccaaaatgtgt

SEQ ID NO: 300997 - DNA, 19 bp, Homo sapiens
  siRNA target sequence for TRIP8 (NM_004241.1,1496-1514).
gtgttattgatattacaaa

SEQ ID NO: 300998 - DNA, 19 bp, Homo sapiens
  siRNA target sequence for TRIP8 (NM_004241.1,1533-1551).
ggtggctcaggaaaactca

SEQ ID NO: 300999 - DNA, 19 bp, Homo sapiens
  siRNA target sequence for TRIP8 (NM_004241.1,1534-1552).
gtggctcaggaaaactcaa

SEQ ID NO: 301000 - DNA, 19 bp, Homo sapiens
  siRNA target sequence for TRIP8 (NM_004241.1,1542-1560).
ggaaaactcaagtaccttt

SEQ ID NO: 301001 - DNA, 19 bp, Homo sapiens
  siRNA target sequence for TRIP8 (NM_004241.1,1584-1602).
ggatcctaatgttagtgat

SEQ ID NO: 301002 - DNA, 19 bp, Homo sapiens
  siRNA target sequence for TRIP8 (NM_004241.1,1585-1603).
gatcctaatgttagtgatt

SEQ ID NO: 301003 - DNA, 19 bp, Homo sapiens
  siRNA target sequence for TRIP8 (NM_004241.1,1589-1607).
ctaatgttagtgattcaaa

SEQ ID NO: 301004 - DNA, 19 bp, Homo sapiens
  siRNA target sequence for TRIP8 (NM_004241.1,1662-1680).
gagctgggtcagtgatgta

SEQ ID NO: 301005 - DNA, 19 bp, Homo sapiens
  siRNA target sequence for TRIP8 (NM_004241.1,1664-1682).
gctgggtcagtgatgtagt

SEQ ID NO: 301006 - DNA, 19 bp, Homo sapiens
  siRNA target sequence for TRIP8 (NM_004241.1,1665-1683).
ctgggtcagtgatgtagtt

SEQ ID NO: 301007 - DNA, 19 bp, Homo sapiens
  siRNA target sequence for TRIP8 (NM_004241.1,1667-1685).
gggtcagtgatgtagttaa

SEQ ID NO: 301008 - DNA, 19 bp, Homo sapiens
  siRNA target sequence for TRIP8 (NM_004241.1,1668-1686).
ggtcagtgatgtagttaaa

SEQ ID NO: 301009 - DNA, 19 bp, Homo sapiens
  siRNA target sequence for TRIP8 (NM_004241.1,1689-1707).
ggatctaacccaatcaagt

SEQ ID NO: 301010 - DNA, 19 bp, Homo sapiens
  siRNA target sequence for TRIP8 (NM_004241.1,1693-1711).
ctaacccaatcaagtgtta

SEQ ID NO: 301011 - DNA, 19 bp, Homo sapiens
  siRNA target sequence for TRIP8 (NM_004241.1,1726-1744).
ggaaatgatcacttgaaca

SEQ ID NO: 301012 - DNA, 19 bp, Homo sapiens
  siRNA target sequence for TRIP8 (NM_004241.1,1826-1844).
cacctccagagactataaa

SEQ ID NO: 301013 - DNA, 19 bp, Homo sapiens
  siRNA target sequence for TRIP8 (NM_004241.1,1890-1908).
cccatcacctgaagttgtt

SEQ ID NO: 301014 - DNA, 19 bp, Homo sapiens
  siRNA target sequence for TRIP8 (NM_004241.1,1946-1964).
ctaaggccacttatgtgaa

SEQ ID NO: 301015 - DNA, 19 bp, Homo sapiens
  siRNA target sequence for TRIP8 (NM_004241.1,2045-2063).
ctcgaagcagtacattaga

SEQ ID NO: 301016 - DNA, 19 bp, Homo sapiens
  siRNA target sequence for TRIP8 (NM_004241.1,2047-2065).
cgaagcagtacattagaaa

SEQ ID NO: 301017 - DNA, 19 bp, Homo sapiens
  siRNA target sequence for TRIP8 (NM_004241.1,2075-2093).
gtcctcttatcattgataa

SEQ ID NO: 301018 - DNA, 19 bp, Homo sapiens
  siRNA target sequence for TRIP8 (NM_004241.1,2191-2209).
cttcactcctcatctcata

SEQ ID NO: 301019 - DNA, 19 bp, Homo sapiens
  siRNA target sequence for TRIP8 (NM_004241.1,2269-2287).
gccggatcatctagtcaaa

SEQ ID NO: 301020 - DNA, 19 bp, Homo sapiens
  siRNA target sequence for TRIP8 (NM_004241.1,2271-2289).
cggatcatctagtcaaact

SEQ ID NO: 301021 - DNA, 19 bp, Homo sapiens
  siRNA target sequence for TRIP8 (NM_004241.1,2330-2348).
cacaccatgctgttcatca

SEQ ID NO: 301022 - DNA, 19 bp, Homo sapiens
  siRNA target sequence for TRIP8 (NM_004241.1,2382-2400).
gcctactgcctccttactt

SEQ ID NO: 301023 - DNA, 19 bp, Homo sapiens
  siRNA target sequence for TRIP8 (NM_004241.1,2539-2557).
cagcttggactttatccaa

SEQ ID NO: 301024 - DNA, 19 bp, Homo sapiens
  siRNA target sequence for TRIP8 (NM_004241.1,2541-2559).
gcttggactttatccaatt

SEQ ID NO: 301025 - DNA, 19 bp, Homo sapiens
  siRNA target sequence for TRIP8 (NM_004241.1,2542-2560).
cttggactttatccaatta

SEQ ID NO: 301026 - DNA, 19 bp, Homo sapiens
  siRNA target sequence for TRIP8 (NM_004241.1,2568-2586).
gtatccaaatggaacacat

SEQ ID NO: 301027 - DNA, 19 bp, Homo sapiens
  siRNA target sequence for TRIP8 (NM_004241.1,2573-2591).
caaatggaacacatgcata

SEQ ID NO: 301028 - DNA, 19 bp, Homo sapiens
  siRNA target sequence for TRIP8 (NM_004241.1,2619-2637).
gtgggttcacccagaaaat

SEQ ID NO: 301029 - DNA, 19 bp, Homo sapiens
  siRNA target sequence for TRIP8 (NM_004241.1,2706-2724).
gacctcagcagatggtatt

SEQ ID NO: 301030 - DNA, 19 bp, Homo sapiens
  siRNA target sequence for TRIP8 (NM_004241.1,2711-2729).
cagcagatggtattggatt

SEQ ID NO: 301031 - DNA, 19 bp, Homo sapiens
  siRNA target sequence for TRIP8 (NM_004241.1,2716-2734).
gatggtattggattactta

SEQ ID NO: 301032 - DNA, 19 bp, Homo sapiens
  siRNA target sequence for TRIP8 (NM_004241.1,2766-2784).
gcctcatcggcctcttaaa

SEQ ID NO: 301033 - DNA, 19 bp, Homo sapiens
  siRNA target sequence for TRIP8 (NM_004241.1,2770-2788).
catcggcctcttaaaatta

SEQ ID NO: 301034 - DNA, 19 bp, Homo sapiens
  siRNA target sequence for TRIP8 (NM_004241.1,2804-2822).
caccattgacaaaaacttt

SEQ ID NO: 301035 - DNA, 19 bp, Homo sapiens
  siRNA target sequence for TRIP8 (NM_004241.1,2811-2829).
gacaaaaactttagtagat

SEQ ID NO: 301036 - DNA, 19 bp, Homo sapiens
  siRNA target sequence for TRIP8 (NM_004241.1,2905-2923).
gacctggatctaaataggt

SEQ ID NO: 301037 - DNA, 19 bp, Homo sapiens
  siRNA target sequence for TRIP8 (NM_004241.1,2933-2951).
gaaaagattgtcacttaca

SEQ ID NO: 301038 - DNA, 19 bp, Homo sapiens
  siRNA target sequence for TRIP8 (NM_004241.1,2965-2983).
gatccagtattaaatcagt

SEQ ID NO: 301039 - DNA, 19 bp, Homo sapiens
  siRNA target sequence for TRIP8 (NM_004241.1,3033-3051).
ggaacaccgtcgaattctt

SEQ ID NO: 301040 - DNA, 19 bp, Homo sapiens
  siRNA target sequence for TRIP8 (NM_004241.1,3039-3057).
ccgtcgaattcttcaagaa

SEQ ID NO: 301041 - DNA, 19 bp, Homo sapiens
  siRNA target sequence for TRIP8 (NM_004241.1,3040-3058).
cgtcgaattcttcaagaaa

SEQ ID NO: 301042 - DNA, 19 bp, Homo sapiens
  siRNA target sequence for TRIP8 (NM_004241.1,3070-3088).
gctccctttacaactaaaa

SEQ ID NO: 301043 - DNA, 19 bp, Homo sapiens
  siRNA target sequence for TRIP8 (NM_004241.1,3071-3089).
ctccctttacaactaaaat

SEQ ID NO: 301044 - DNA, 19 bp, Homo sapiens
  siRNA target sequence for TRIP8 (NM_004241.1,3074-3092).
cctttacaactaaaatcaa

SEQ ID NO: 301045 - DNA, 19 bp, Homo sapiens
  siRNA target sequence for TRIP8 (NM_004241.1,3178-3196).
gatgtagaacgctcagtat

SEQ ID NO: 301046 - DNA, 19 bp, Homo sapiens
  siRNA target sequence for TRIP8 (NM_004241.1,3187-3205).
cgctcagtatcagatcttt

SEQ ID NO: 301047 - DNA, 19 bp, Homo sapiens
  siRNA target sequence for TRIP8 (NM_004241.1,3255-3273).
cactacattgtctaatagt

SEQ ID NO: 301048 - DNA, 19 bp, Homo sapiens
  siRNA target sequence for TRIP8 (NM_004241.1,3266-3284).
ctaatagtgtggtcaatga

SEQ ID NO: 301049 - DNA, 19 bp, Homo sapiens
  siRNA target sequence for TRIP8 (NM_004241.1,3279-3297).
caatgaaccaccaagatca

SEQ ID NO: 301050 - DNA, 19 bp, Homo sapiens
  siRNA target sequence for TRIP8 (NM_004241.1,3300-3318).
cccatccaaagaagtttca

SEQ ID NO: 301051 - DNA, 19 bp, Homo sapiens
  siRNA target sequence for TRIP8 (NM_004241.1,3327-3345).
cggtgataaacagagtaat

SEQ ID NO: 301052 - DNA, 19 bp, Homo sapiens
  siRNA target sequence for TRIP8 (NM_004241.1,3408-3426).
gcctccacctttgattaaa

SEQ ID NO: 301053 - DNA, 19 bp, Homo sapiens
  siRNA target sequence for TRIP8 (NM_004241.1,3410-3428).
ctccacctttgattaaaca

SEQ ID NO: 301054 - DNA, 19 bp, Homo sapiens
  siRNA target sequence for TRIP8 (NM_004241.1,3455-3473).
gcaagataccagaacatct

SEQ ID NO: 301055 - DNA, 19 bp, Homo sapiens
  siRNA target sequence for TRIP8 (NM_004241.1,3564-3582).
ccgcagtatgcctgcatta

SEQ ID NO: 301056 - DNA, 19 bp, Homo sapiens
  siRNA target sequence for TRIP8 (NM_004241.1,3637-3655).
ggcagctatagtagtcttt

SEQ ID NO: 301057 - DNA, 19 bp, Homo sapiens
  siRNA target sequence for TRIP8 (NM_004241.1,3671-3689).
ctccggtgatgccagtaaa

SEQ ID NO: 301058 - DNA, 19 bp, Homo sapiens
  siRNA target sequence for TRIP8 (NM_004241.1,3694-3712).
ggtggtaaagttcaagaat

SEQ ID NO: 301059 - DNA, 19 bp, Homo sapiens
  siRNA target sequence for TRIP8 (NM_004241.1,3698-3716).
gtaaagttcaagaatcaca

SEQ ID NO: 301060 - DNA, 19 bp, Homo sapiens
  siRNA target sequence for TRIP8 (NM_004241.1,3715-3733).
cagaagcctccaactctaa

SEQ ID NO: 301061 - DNA, 19 bp, Homo sapiens
  siRNA target sequence for TRIP8 (NM_004241.1,3753-3771).
ccaggcaaattttaagagt

SEQ ID NO: 301062 - DNA, 19 bp, Homo sapiens
  siRNA target sequence for TRIP8 (NM_004241.1,3795-3813).
gatgtggagacctaataat

SEQ ID NO: 301063 - DNA, 19 bp, Homo sapiens
  siRNA target sequence for TRIP8 (NM_004241.1,3800-3818).
ggagacctaataataacct

SEQ ID NO: 301064 - DNA, 19 bp, Homo sapiens
  siRNA target sequence for TRIP8 (NM_004241.1,3892-3910).
gtgcgtccatcttctagta

SEQ ID NO: 301065 - DNA, 19 bp, Homo sapiens
  siRNA target sequence for TRIP8 (NM_004241.1,3895-3913).
cgtccatcttctagtacaa

SEQ ID NO: 301066 - DNA, 19 bp, Homo sapiens
  siRNA target sequence for TRIP8 (NM_004241.1,3896-3914).
gtccatcttctagtacaaa

SEQ ID NO: 301067 - DNA, 19 bp, Homo sapiens
  siRNA target sequence for TRIP8 (NM_004241.1,3908-3926).
gtacaaaaactgatagtat

SEQ ID NO: 301068 - DNA, 19 bp, Homo sapiens
  siRNA target sequence for TRIP8 (NM_004241.1,3928-3946).
ccagcaatgcagttagctt

SEQ ID NO: 301069 - DNA, 19 bp, Homo sapiens
  siRNA target sequence for TRIP8 (NM_004241.1,3971-3989).
cttcagctggggcacataa

SEQ ID NO: 301070 - DNA, 19 bp, Homo sapiens
  siRNA target sequence for TRIP8 (NM_004241.1,3977-3995).
ctggggcacataaaacaga

SEQ ID NO: 301071 - DNA, 19 bp, Homo sapiens
  siRNA target sequence for TRIP8 (NM_004241.1,4135-4153).
gtaaatacgatgtgtaata

SEQ ID NO: 301072 - DNA, 19 bp, Homo sapiens
  siRNA target sequence for TRIP8 (NM_004241.1,4155-4173).
caaaacggatgtaatcaca

SEQ ID NO: 301073 - DNA, 19 bp, Homo sapiens
  siRNA target sequence for TRIP8 (NM_004241.1,4180-4198).
gccgatactaccagtgttt

SEQ ID NO: 301074 - DNA, 19 bp, Homo sapiens
  siRNA target sequence for TRIP8 (NM_004241.1,4205-4223).
ggggtggttcagaagtaat

SEQ ID NO: 301075 - DNA, 19 bp, Homo sapiens
  siRNA target sequence for TRIP8 (NM_004241.1,4216-4234).
gaagtaatttcctctttat

SEQ ID NO: 301076 - DNA, 19 bp, Homo sapiens
  siRNA target sequence for TRIP8 (NM_004241.1,4226-4244).
cctctttatcaaataccat

SEQ ID NO: 301077 - DNA, 19 bp, Homo sapiens
  siRNA target sequence for TRIP8 (NM_004241.1,4227-4245).
ctctttatcaaataccatt

SEQ ID NO: 301078 - DNA, 19 bp, Homo sapiens
  siRNA target sequence for TRIP8 (NM_004241.1,4242-4260).
cattttggcctctacatca

SEQ ID NO: 301079 - DNA, 19 bp, Homo sapiens
  siRNA target sequence for TRIP8 (NM_004241.1,4289-4307).
gtcagccagtggctcaaaa

SEQ ID NO: 301080 - DNA, 19 bp, Homo sapiens
  siRNA target sequence for TRIP8 (NM_004241.1,4328-4346).
ccacagcaccagttacatt

SEQ ID NO: 301081 - DNA, 19 bp, Homo sapiens
  siRNA target sequence for TRIP8 (NM_004241.1,4339-4357).
gttacattagccagtagta

SEQ ID NO: 301082 - DNA, 19 bp, Homo sapiens
  siRNA target sequence for TRIP8 (NM_004241.1,4389-4407).
gttctcaggcacaactgat

SEQ ID NO: 301083 - DNA, 19 bp, Homo sapiens
  siRNA target sequence for TRIP8 (NM_004241.1,4440-4458).
ggctgcagctcagtataaa

SEQ ID NO: 301084 - DNA, 19 bp, Homo sapiens
  siRNA target sequence for TRIP8 (NM_004241.1,4444-4462).
gcagctcagtataaaagta

SEQ ID NO: 301085 - DNA, 19 bp, Homo sapiens
  siRNA target sequence for TRIP8 (NM_004241.1,4447-4465).
gctcagtataaaagtagta

SEQ ID NO: 301086 - DNA, 19 bp, Homo sapiens
  siRNA target sequence for TRIP8 (NM_004241.1,4476-4494).
gactgaacctaatgctata

SEQ ID NO: 301087 - DNA, 19 bp, Homo sapiens
  siRNA target sequence for TRIP8 (NM_004241.1,4478-4496).
ctgaacctaatgctataaa

SEQ ID NO: 301088 - DNA, 19 bp, Homo sapiens
  siRNA target sequence for TRIP8 (NM_004241.1,4480-4498).
gaacctaatgctataaaaa

SEQ ID NO: 301089 - DNA, 19 bp, Homo sapiens
  siRNA target sequence for TRIP8 (NM_004241.1,4525-4543).
ctggatagcactgtaatct

SEQ ID NO: 301090 - DNA, 19 bp, Homo sapiens
  siRNA target sequence for TRIP8 (NM_004241.1,4527-4545).
ggatagcactgtaatctgt

SEQ ID NO: 301091 - DNA, 19 bp, Homo sapiens
  siRNA target sequence for TRIP8 (NM_004241.1,4533-4551).
cactgtaatctgtagtaca

SEQ ID NO: 301092 - DNA, 19 bp, Homo sapiens
  siRNA target sequence for TRIP8 (NM_004241.1,4604-4622).
caaactaccatactaaact

SEQ ID NO: 301093 - DNA, 19 bp, Homo sapiens
  siRNA target sequence for TRIP8 (NM_004241.1,4713-4731).
gccatgttctgtcaactta

SEQ ID NO: 301094 - DNA, 19 bp, Homo sapiens
  siRNA target sequence for TRIP8 (NM_004241.1,4714-4732).
ccatgttctgtcaacttaa

SEQ ID NO: 301095 - DNA, 19 bp, Homo sapiens
  siRNA target sequence for TRIP8 (NM_004241.1,4715-4733).
catgttctgtcaacttaat

SEQ ID NO: 301096 - DNA, 19 bp, Homo sapiens
  siRNA target sequence for TRIP8 (NM_004241.1,4728-4746).
cttaatagcctctacatct

SEQ ID NO: 301097 - DNA, 19 bp, Homo sapiens
  siRNA target sequence for TRIP8 (NM_004241.1,4735-4753).
gcctctacatctagtgata

SEQ ID NO: 301098 - DNA, 19 bp, Homo sapiens
  siRNA target sequence for TRIP8 (NM_004241.1,4736-4754).
cctctacatctagtgatat

SEQ ID NO: 301099 - DNA, 19 bp, Homo sapiens
  siRNA target sequence for TRIP8 (NM_004241.1,4737-4755).
ctctacatctagtgatata

SEQ ID NO: 301100 - DNA, 19 bp, Homo sapiens
  siRNA target sequence for TRIP8 (NM_004241.1,4739-4757).
ctacatctagtgatataca

SEQ ID NO: 301101 - DNA, 19 bp, Homo sapiens
  siRNA target sequence for TRIP8 (NM_004241.1,4742-4760).
catctagtgatatacaaaa

SEQ ID NO: 301102 - DNA, 19 bp, Homo sapiens
  siRNA target sequence for TRIP8 (NM_004241.1,4756-4774).
caaaatagtgtagatagta

SEQ ID NO: 301103 - DNA, 19 bp, Homo sapiens
  siRNA target sequence for TRIP8 (NM_004241.1,4884-4902).
gtcagagcaaaggactaaa

SEQ ID NO: 301104 - DNA, 19 bp, Homo sapiens
  siRNA target sequence for TRIP8 (NM_004241.1,4895-4913).
ggactaaaagacaacctaa

SEQ ID NO: 301105 - DNA, 19 bp, Homo sapiens
  siRNA target sequence for TRIP8 (NM_004241.1,4909-4927).
cctaagccaacttacaaaa

SEQ ID NO: 301106 - DNA, 19 bp, Homo sapiens
  siRNA target sequence for TRIP8 (NM_004241.1,4910-4928).
ctaagccaacttacaaaaa

SEQ ID NO: 301107 - DNA, 19 bp, Homo sapiens
  siRNA target sequence for TRIP8 (NM_004241.1,4998-5016).
caggagtgccaaagaaaga

SEQ ID NO: 301108 - DNA, 19 bp, Homo sapiens
  siRNA target sequence for TRIP8 (NM_004241.1,5031-5049).
gcaaagcaacagtaatagt

SEQ ID NO: 301109 - DNA, 19 bp, Homo sapiens
  siRNA target sequence for TRIP8 (NM_004241.1,5064-5082).
cggagtagttagaatagat

SEQ ID NO: 301110 - DNA, 19 bp, Homo sapiens
  siRNA target sequence for TRIP8 (NM_004241.1,5197-5215).
ggtgataagttctgtcaat

SEQ ID NO: 301111 - DNA, 19 bp, Homo sapiens
  siRNA target sequence for TRIP8 (NM_004241.1,5198-5216).
gtgataagttctgtcaatt

SEQ ID NO: 301112 - DNA, 19 bp, Homo sapiens
  siRNA target sequence for TRIP8 (NM_004241.1,5208-5226).
ctgtcaattagtaacatct

SEQ ID NO: 301113 - DNA, 19 bp, Homo sapiens
  siRNA target sequence for TRIP8 (NM_004241.1,5317-5335).
gaagcaacattgtttaaca

SEQ ID NO: 301114 - DNA, 19 bp, Homo sapiens
  siRNA target sequence for TRIP8 (NM_004241.1,5338-5356).
cactgggtctgccaaaaat

SEQ ID NO: 301115 - DNA, 19 bp, Homo sapiens
  siRNA target sequence for TRIP8 (NM_004241.1,5365-5383).
gtggtctgcttagattgtt

SEQ ID NO: 301116 - DNA, 19 bp, Homo sapiens
  siRNA target sequence for TRIP8 (NM_004241.1,5368-5386).
gtctgcttagattgttaca

SEQ ID NO: 301117 - DNA, 19 bp, Homo sapiens
  siRNA target sequence for TRIP8 (NM_004241.1,5399-5417).
ggaagagttctagagataa

SEQ ID NO: 301118 - DNA, 19 bp, Homo sapiens
  siRNA target sequence for TRIP8 (NM_004241.1,5405-5423).
gttctagagataaagaact

SEQ ID NO: 301119 - DNA, 19 bp, Homo sapiens
  siRNA target sequence for TRIP8 (NM_004241.1,5413-5431).
gataaagaactatatgctt

SEQ ID NO: 301120 - DNA, 19 bp, Homo sapiens
  siRNA target sequence for TRIP8 (NM_004241.1,5422-5440).
ctatatgcttggatgaagt

SEQ ID NO: 301121 - DNA, 19 bp, Homo sapiens
  siRNA target sequence for TRIP8 (NM_004241.1,5532-5550).
cactcttagggaaaaatat

SEQ ID NO: 301122 - DNA, 19 bp, Homo sapiens
  siRNA target sequence for TRIP8 (NM_004241.1,5540-5558).
gggaaaaatatggtattaa

SEQ ID NO: 301123 - DNA, 19 bp, Homo sapiens
  siRNA target sequence for TRIP8 (NM_004241.1,5552-5570).
gtattaaatcccattgtca

SEQ ID NO: 301124 - DNA, 19 bp, Homo sapiens
  siRNA target sequence for TRIP8 (NM_004241.1,5561-5579).
cccattgtcattgtactaa

SEQ ID NO: 301125 - DNA, 19 bp, Homo sapiens
  siRNA target sequence for TRIP8 (NM_004241.1,5567-5585).
gtcattgtactaacaaaca

SEQ ID NO: 301126 - DNA, 19 bp, Homo sapiens
  siRNA target sequence for TRIP8 (NM_004241.1,5573-5591).
gtactaacaaacagaattt

SEQ ID NO: 301127 - DNA, 19 bp, Homo sapiens
  siRNA target sequence for TRIP8 (NM_004241.1,5599-5617).
ggaaattttcctacaatga

SEQ ID NO: 301128 - DNA, 19 bp, Homo sapiens
  siRNA target sequence for TRIP8 (NM_004241.1,5616-5634).
gaatggtgtatctcaatct

SEQ ID NO: 301129 - DNA, 19 bp, Homo sapiens
  siRNA target sequence for TRIP8 (NM_004241.1,5655-5673).
gaagtctgagaaaaatggt

SEQ ID NO: 301130 - DNA, 19 bp, Homo sapiens
  siRNA target sequence for TRIP8 (NM_004241.1,5690-5708).
gtgatgtaggcacagataa

SEQ ID NO: 301131 - DNA, 19 bp, Homo sapiens
  siRNA target sequence for TRIP8 (NM_004241.1,5695-5713).
gtaggcacagataacaagt

SEQ ID NO: 301132 - DNA, 19 bp, Homo sapiens
  siRNA target sequence for TRIP8 (NM_004241.1,5698-5716).
ggcacagataacaagttaa

SEQ ID NO: 301133 - DNA, 19 bp, Homo sapiens
  siRNA target sequence for TRIP8 (NM_004241.1,5742-5760).
gcactggttagcagatctt

SEQ ID NO: 301134 - DNA, 19 bp, Homo sapiens
  siRNA target sequence for TRIP8 (NM_004241.1,5753-5771).
cagatcttgcagagcaaaa

SEQ ID NO: 301135 - DNA, 19 bp, Homo sapiens
  siRNA target sequence for TRIP8 (NM_004241.1,5875-5893).
cctcttgtgtcccagaata

SEQ ID NO: 301136 - DNA, 19 bp, Homo sapiens
  siRNA target sequence for TRIP8 (NM_004241.1,5906-5924).
caaccttacgggatttgct

SEQ ID NO: 301137 - DNA, 19 bp, Homo sapiens
  siRNA target sequence for TRIP8 (NM_004241.1,5914-5932).
cgggatttgctgactacaa

SEQ ID NO: 301138 - DNA, 19 bp, Homo sapiens
  siRNA target sequence for TRIP8 (NM_004241.1,5974-5992).
gcctttgccccagtatatt

SEQ ID NO: 301139 - DNA, 19 bp, Homo sapiens
  siRNA target sequence for TRIP8 (NM_004241.1,5997-6015).
gggagccccaagtagcaaa

SEQ ID NO: 301140 - DNA, 19 bp, Homo sapiens
  siRNA target sequence for TRIP8 (NM_004241.1,6020-6038).
gacggactatgcctaacat

SEQ ID NO: 301141 - DNA, 19 bp, Homo sapiens
  siRNA target sequence for TRIP8 (NM_004241.1,6023-6041).
ggactatgcctaacattct

SEQ ID NO: 301142 - DNA, 19 bp, Homo sapiens
  siRNA target sequence for TRIP8 (NM_004241.1,6026-6044).
ctatgcctaacattcttga

SEQ ID NO: 301143 - DNA, 19 bp, Homo sapiens
  siRNA target sequence for TRIP8 (NM_004241.1,6032-6050).
ctaacattcttgatgacat

SEQ ID NO: 301144 - DNA, 19 bp, Homo sapiens
  siRNA target sequence for TRIP8 (NM_004241.1,6048-6066).
cataattgcttcagttgtt

SEQ ID NO: 301145 - DNA, 19 bp, Homo sapiens
  siRNA target sequence for TRIP8 (NM_004241.1,6072-6090).
caaaattccaccaagtaaa

SEQ ID NO: 301146 - DNA, 19 bp, Homo sapiens
  siRNA target sequence for TRIP8 (NM_004241.1,6197-6215).
ggatctgtgagaagcatat

SEQ ID NO: 301147 - DNA, 19 bp, Homo sapiens
  siRNA target sequence for TRIP8 (NM_004241.1,6201-6219).
ctgtgagaagcatatttta

SEQ ID NO: 301148 - DNA, 19 bp, Homo sapiens
  siRNA target sequence for TRIP8 (NM_004241.1,6221-6239).
ggcttaaggattataagaa

SEQ ID NO: 301149 - DNA, 19 bp, Homo sapiens
  siRNA target sequence for TRIP8 (NM_004241.1,6223-6241).
cttaaggattataagaata

SEQ ID NO: 301150 - DNA, 19 bp, Homo sapiens
  siRNA target sequence for TRIP8 (NM_004241.1,6295-6313).
gtttctggtgtgcataaga

SEQ ID NO: 301151 - DNA, 19 bp, Homo sapiens
  siRNA target sequence for TRIP8 (NM_004241.1,6328-6346).
ctatggaaggcggaatcaa

SEQ ID NO: 301152 - DNA, 19 bp, Homo sapiens
  siRNA target sequence for TRIP8 (NM_004241.1,6333-6351).
gaaggcggaatcaattagt

SEQ ID NO: 301153 - DNA, 19 bp, Homo sapiens
  siRNA target sequence for TRIP8 (NM_004241.1,6336-6354).
ggcggaatcaattagtctt

SEQ ID NO: 301154 - DNA, 19 bp, Homo sapiens
  siRNA target sequence for TRIP8 (NM_004241.1,6339-6357).
ggaatcaattagtcttgat

SEQ ID NO: 301155 - DNA, 19 bp, Homo sapiens
  siRNA target sequence for TRIP8 (NM_004241.1,6340-6358).
gaatcaattagtcttgatt

SEQ ID NO: 301156 - DNA, 19 bp, Homo sapiens
  siRNA target sequence for TRIP8 (NM_004241.1,6412-6430).
gccaatgttaaggaattct

SEQ ID NO: 301157 - DNA, 19 bp, Homo sapiens
  siRNA target sequence for TRIP8 (NM_004241.1,6506-6524).
ggccttcaggagaagactt

SEQ ID NO: 301158 - DNA, 19 bp, Homo sapiens
  siRNA target sequence for TRIP8 (NM_004241.1,6534-6552).
gatgccagcaagatacgaa

SEQ ID NO: 301159 - DNA, 19 bp, Homo sapiens
  siRNA target sequence for TRIP8 (NM_004241.1,6539-6557).
cagcaagatacgaagatct

SEQ ID NO: 301160 - DNA, 19 bp, Homo sapiens
  siRNA target sequence for TRIP8 (NM_004241.1,6541-6559).
gcaagatacgaagatcttt

SEQ ID NO: 301161 - DNA, 19 bp, Homo sapiens
  siRNA target sequence for TRIP8 (NM_004241.1,6545-6563).
gatacgaagatcttttaaa

SEQ ID NO: 301162 - DNA, 19 bp, Homo sapiens
  siRNA target sequence for TRIP8 (NM_004241.1,6568-6586).
ctgccattgccagaatatt

SEQ ID NO: 301163 - DNA, 19 bp, Homo sapiens
  siRNA target sequence for TRIP8 (NM_004241.1,6570-6588).
gccattgccagaatattgt

SEQ ID NO: 301164 - DNA, 19 bp, Homo sapiens
  siRNA target sequence for TRIP8 (NM_004241.1,6572-6590).
cattgccagaatattgtaa

SEQ ID NO: 301165 - DNA, 19 bp, Homo sapiens
  siRNA target sequence for TRIP8 (NM_004241.1,6615-6633).
ctctcatttgccaggattt

SEQ ID NO: 301166 - DNA, 19 bp, Homo sapiens
  siRNA target sequence for TRIP8 (NM_004241.1,6686-6704).
ctgctaaagatcatgatat

SEQ ID NO: 301167 - DNA, 19 bp, Homo sapiens
  siRNA target sequence for TRIP8 (NM_004241.1,6697-6715).
catgatataggaacaacaa

SEQ ID NO: 301168 - DNA, 19 bp, Homo sapiens
  siRNA target sequence for TRIP8 (NM_004241.1,6713-6731).
caaatctccatattgaagt

SEQ ID NO: 301169 - DNA, 19 bp, Homo sapiens
  siRNA target sequence for TRIP8 (NM_004241.1,6734-6752).
ctgatgttgtaaatatact

SEQ ID NO: 301170 - DNA, 19 bp, Homo sapiens
  siRNA target sequence for TRIP8 (NM_004241.1,6855-6873).
gaaggactcaagtgaaata

SEQ ID NO: 301171 - DNA, 19 bp, Homo sapiens
  siRNA target sequence for TRIP8 (NM_004241.1,6858-6876).
ggactcaagtgaaatacct

SEQ ID NO: 301172 - DNA, 19 bp, Homo sapiens
  siRNA target sequence for TRIP8 (NM_004241.1,7022-7040).
gtcaaaggctgcttgaaga

SEQ ID NO: 301173 - DNA, 19 bp, Homo sapiens
  siRNA target sequence for TRIP8 (NM_004241.1,7024-7042).
caaaggctgcttgaagaat

SEQ ID NO: 301174 - DNA, 19 bp, Homo sapiens
  siRNA target sequence for TRIP8 (NM_004241.1,7055-7073).
cctgtactcttattcagtt

SEQ ID NO: 301175 - DNA, 19 bp, Homo sapiens
  siRNA target sequence for TRIP8 (NM_004241.1,7075-7093).
cttggtgatgctattgttt

SEQ ID NO: 301176 - DNA, 19 bp, Homo sapiens
  siRNA target sequence for TRIP8 (NM_004241.1,7134-7152).
ctgtattcaggtaactgaa

SEQ ID NO: 301177 - DNA, 19 bp, Homo sapiens
  siRNA target sequence for TRIP8 (NM_004241.1,7174-7192).
cttgtagagtcatttcatt

SEQ ID NO: 301178 - DNA, 19 bp, Homo sapiens
  siRNA target sequence for HSF2BP (NM_007031.1,365-383).
ccggcacatgggaactaaa

SEQ ID NO: 301179 - DNA, 19 bp, Homo sapiens
  siRNA target sequence for HSF2BP (NM_007031.1,421-439).
ggctgacaactgaagtgat

SEQ ID NO: 301180 - DNA, 19 bp, Homo sapiens
  siRNA target sequence for HSF2BP (NM_007031.1,440-458).
gcaaatacgggacttctta

SEQ ID NO: 301181 - DNA, 19 bp, Homo sapiens
  siRNA target sequence for HSF2BP (NM_007031.1,490-508).
gcttccagaaattaaagat

SEQ ID NO: 301182 - DNA, 19 bp, Homo sapiens
  siRNA target sequence for HSF2BP (NM_007031.1,494-512).
ccagaaattaaagattgta

SEQ ID NO: 301183 - DNA, 19 bp, Homo sapiens
  siRNA target sequence for HSF2BP (NM_007031.1,594-612).
gtgcaggccgacaacataa

SEQ ID NO: 301184 - DNA, 19 bp, Homo sapiens
  siRNA target sequence for HSF2BP (NM_007031.1,674-692).
gcagcaggcagagtattgt

SEQ ID NO: 301185 - DNA, 19 bp, Homo sapiens
  siRNA target sequence for HSF2BP (NM_007031.1,677-695).
gcaggcagagtattgtaca

SEQ ID NO: 301186 - DNA, 19 bp, Homo sapiens
  siRNA target sequence for HSF2BP (NM_007031.1,774-792).
gataaagctttgaagtttt

SEQ ID NO: 301187 - DNA, 19 bp, Homo sapiens
  siRNA target sequence for HSF2BP (NM_007031.1,794-812).
cagcatcactggtcaaaca

SEQ ID NO: 301188 - DNA, 19 bp, Homo sapiens
  siRNA target sequence for HSF2BP (NM_007031.1,796-814).
gcatcactggtcaaacaat

SEQ ID NO: 301189 - DNA, 19 bp, Homo sapiens
  siRNA target sequence for HSF2BP (NM_007031.1,811-829).
caatggagagttttgtgaa

SEQ ID NO: 301190 - DNA, 19 bp, Homo sapiens
  siRNA target sequence for HSF2BP (NM_007031.1,852-870).
gagctggattcggatgaaa

SEQ ID NO: 301191 - DNA, 19 bp, Homo sapiens
  siRNA target sequence for HSF2BP (NM_007031.1,854-872).
gctggattcggatgaaagt

SEQ ID NO: 301192 - DNA, 19 bp, Homo sapiens
  siRNA target sequence for HSF2BP (NM_007031.1,862-880).
cggatgaaagtcagtttgt

SEQ ID NO: 301193 - DNA, 19 bp, Homo sapiens
  siRNA target sequence for HSF2BP (NM_007031.1,885-903).
gctctggctggaattgtca

SEQ ID NO: 301194 - DNA, 19 bp, Homo sapiens
  siRNA target sequence for HSF2BP (NM_007031.1,902-920).
cacgaatgttgctgctata

SEQ ID NO: 301195 - DNA, 19 bp, Homo sapiens
  siRNA target sequence for HSF2BP (NM_007031.1,905-923).
gaatgttgctgctatagca

SEQ ID NO: 301196 - DNA, 19 bp, Homo sapiens
  siRNA target sequence for HSF2BP (NM_007031.1,921-939).
gcatgtggtcgtgaattct

SEQ ID NO: 301197 - DNA, 19 bp, Homo sapiens
  siRNA target sequence for HSF2BP (NM_007031.1,922-940).
catgtggtcgtgaattctt

SEQ ID NO: 301198 - DNA, 19 bp, Homo sapiens
  siRNA target sequence for HSF2BP (NM_007031.1,927-945).
ggtcgtgaattcttggtta

SEQ ID NO: 301199 - DNA, 19 bp, Homo sapiens
  siRNA target sequence for HSF2BP (NM_007031.1,928-946).
gtcgtgaattcttggttaa

SEQ ID NO: 301200 - DNA, 19 bp, Homo sapiens
  siRNA target sequence for HSF2BP (NM_007031.1,930-948).
cgtgaattcttggttaatt

SEQ ID NO: 301201 - DNA, 19 bp, Homo sapiens
  siRNA target sequence for HSF2BP (NM_007031.1,957-975).
gtgctcttggacaccatat

SEQ ID NO: 301202 - DNA, 19 bp, Homo sapiens
  siRNA target sequence for HSF2BP (NM_007031.1,1002-1020).
ggacagtgtaccaaactca

SEQ ID NO: 301203 - DNA, 19 bp, Homo sapiens
  siRNA target sequence for HSF2BP (NM_007031.1,1012-1030).
ccaaactcaaagtgctaat

SEQ ID NO: 301204 - DNA, 19 bp, Homo sapiens
  siRNA target sequence for HSF2BP (NM_007031.1,1031-1049).
gctgatgtccctatacaat

SEQ ID NO: 301205 - DNA, 19 bp, Homo sapiens
  siRNA target sequence for HSF2BP (NM_007031.1,1034-1052).
gatgtccctatacaatgta

SEQ ID NO: 301206 - DNA, 19 bp, Homo sapiens
  siRNA target sequence for HSF2BP (NM_007031.1,1058-1076).
caatttgaaaggcttgaaa

SEQ ID NO: 301207 - DNA, 19 bp, Homo sapiens
  siRNA target sequence for HSF2BP (NM_007031.1,1084-1102).
gcgagagtccaggattcat

SEQ ID NO: 301208 - DNA, 19 bp, Homo sapiens
  siRNA target sequence for HSF2BP (NM_007031.1,1313-1331).
ccgcactctggagcataat

SEQ ID NO: 301209 - DNA, 19 bp, Homo sapiens
  siRNA target sequence for FLJ25348 (NM_144569.2,700-718).
ggaacctggacttgtttct

SEQ ID NO: 301210 - DNA, 19 bp, Homo sapiens
  siRNA target sequence for FLJ25348 (NM_144569.2,948-966).
gtgggaccgcagatgttca

SEQ ID NO: 301211 - DNA, 19 bp, Homo sapiens
  siRNA target sequence for FLJ25348 (NM_144569.2,1019-1037).
gcatgaccaccacttctta

SEQ ID NO: 301212 - DNA, 19 bp, Homo sapiens
  siRNA target sequence for FLJ25348 (NM_144569.2,1111-1129).
gctgcggggacaatatctt

SEQ ID NO: 301213 - DNA, 19 bp, Homo sapiens
  siRNA target sequence for FLJ25348 (NM_144569.2,1507-1525).
gccgcctgctctactcata

SEQ ID NO: 301214 - DNA, 19 bp, Homo sapiens
  siRNA target sequence for FLJ25348 (NM_144569.2,1766-1784).
ggtggagaagagatactat

SEQ ID NO: 301215 - DNA, 19 bp, Homo sapiens
  siRNA target sequence for FLJ25348 (NM_144569.2,1856-1874).
ccagggcaggggcagtata

SEQ ID NO: 301216 - DNA, 19 bp, Homo sapiens
  siRNA target sequence for FLJ25348 (NM_144569.2,1997-2015).
gtcccagcatccctattca

SEQ ID NO: 301217 - DNA, 19 bp, Homo sapiens
  siRNA target sequence for FLJ25348 (NM_144569.2,2000-2018).
ccagcatccctattcagta

SEQ ID NO: 301218 - DNA, 19 bp, Homo sapiens
  siRNA target sequence for FLJ25348 (NM_144569.2,2172-2190).
cctctgcagcgtttgtcta

SEQ ID NO: 301219 - DNA, 19 bp, Homo sapiens
  siRNA target sequence for PWP1 (NM_007062.1,156-174).
caaggtagagctgagtaaa

SEQ ID NO: 301220 - DNA, 19 bp, Homo sapiens
  siRNA target sequence for PWP1 (NM_007062.1,159-177).
ggtagagctgagtaaagaa

SEQ ID NO: 301221 - DNA, 19 bp, Homo sapiens
  siRNA target sequence for PWP1 (NM_007062.1,249-267).
gacaggcagtccttcagaa

SEQ ID NO: 301222 - DNA, 19 bp, Homo sapiens
  siRNA target sequence for PWP1 (NM_007062.1,339-357).
caggacgcttgatgatgat

SEQ ID NO: 301223 - DNA, 19 bp, Homo sapiens
  siRNA target sequence for PWP1 (NM_007062.1,341-359).
ggacgcttgatgatgatga

SEQ ID NO: 301224 - DNA, 19 bp, Homo sapiens
  siRNA target sequence for PWP1 (NM_007062.1,364-382).
gctgagtacgacttagata

SEQ ID NO: 301225 - DNA, 19 bp, Homo sapiens
  siRNA target sequence for PWP1 (NM_007062.1,365-383).
ctgagtacgacttagataa

SEQ ID NO: 301226 - DNA, 19 bp, Homo sapiens
  siRNA target sequence for PWP1 (NM_007062.1,367-385).
gagtacgacttagataaat

SEQ ID NO: 301227 - DNA, 19 bp, Homo sapiens
  siRNA target sequence for PWP1 (NM_007062.1,369-387).
gtacgacttagataaatat

SEQ ID NO: 301228 - DNA, 19 bp, Homo sapiens
  siRNA target sequence for PWP1 (NM_007062.1,443-461).
cggtctacgggagtaatga

SEQ ID NO: 301229 - DNA, 19 bp, Homo sapiens
  siRNA target sequence for PWP1 (NM_007062.1,447-465).
ctacgggagtaatgatcaa

SEQ ID NO: 301230 - DNA, 19 bp, Homo sapiens
  siRNA target sequence for PWP1 (NM_007062.1,450-468).
cgggagtaatgatcaagat

SEQ ID NO: 301231 - DNA, 19 bp, Homo sapiens
  siRNA target sequence for PWP1 (NM_007062.1,460-478).
gatcaagatccttacgtta

SEQ ID NO: 301232 - DNA, 19 bp, Homo sapiens
  siRNA target sequence for PWP1 (NM_007062.1,470-488).
cttacgttactctgaaaga

SEQ ID NO: 301233 - DNA, 19 bp, Homo sapiens
  siRNA target sequence for PWP1 (NM_007062.1,505-523).
cgtgaagatttcttgatta

SEQ ID NO: 301234 - DNA, 19 bp, Homo sapiens
  siRNA target sequence for PWP1 (NM_007062.1,525-543).
gcccagtgataatcttata

SEQ ID NO: 301235 - DNA, 19 bp, Homo sapiens
  siRNA target sequence for PWP1 (NM_007062.1,528-546).
cagtgataatcttatagtt

SEQ ID NO: 301236 - DNA, 19 bp, Homo sapiens
  siRNA target sequence for PWP1 (NM_007062.1,619-637).
gtacaccatgatatactct

SEQ ID NO: 301237 - DNA, 19 bp, Homo sapiens
  siRNA target sequence for PWP1 (NM_007062.1,719-737).
gaaacatgacccctgttat

SEQ ID NO: 301238 - DNA, 19 bp, Homo sapiens
  siRNA target sequence for PWP1 (NM_007062.1,739-757).
gaagtgtgggaccttgata

SEQ ID NO: 301239 - DNA, 19 bp, Homo sapiens
  siRNA target sequence for PWP1 (NM_007062.1,780-798).
cttcacactcggaagtaaa

SEQ ID NO: 301240 - DNA, 19 bp, Homo sapiens
  siRNA target sequence for PWP1 (NM_007062.1,783-801).
cacactcggaagtaaactt

SEQ ID NO: 301241 - DNA, 19 bp, Homo sapiens
  siRNA target sequence for PWP1 (NM_007062.1,787-805).
ctcggaagtaaactttcaa

SEQ ID NO: 301242 - DNA, 19 bp, Homo sapiens
  siRNA target sequence for PWP1 (NM_007062.1,1172-1190).
cagatgacggctttgtata

SEQ ID NO: 301243 - DNA, 19 bp, Homo sapiens
  siRNA target sequence for PWP1 (NM_007062.1,1174-1192).
gatgacggctttgtatata

SEQ ID NO: 301244 - DNA, 19 bp, Homo sapiens
  siRNA target sequence for PWP1 (NM_007062.1,1177-1195).
gacggctttgtatataatt

SEQ ID NO: 301245 - DNA, 19 bp, Homo sapiens
  siRNA target sequence for PWP1 (NM_007062.1,1215-1233).
gccaatttttacacttaat

SEQ ID NO: 301246 - DNA, 19 bp, Homo sapiens
  siRNA target sequence for PWP1 (NM_007062.1,1304-1322).
ctgacaaatacgtgaagat

SEQ ID NO: 301247 - DNA, 19 bp, Homo sapiens
  siRNA target sequence for PWP1 (NM_007062.1,1317-1335).
gaagatctgggacatctta

SEQ ID NO: 301248 - DNA, 19 bp, Homo sapiens
  siRNA target sequence for PWP1 (NM_007062.1,1344-1362).
gccaagtctagttcattct

SEQ ID NO: 301249 - DNA, 19 bp, Homo sapiens
  siRNA target sequence for PWP1 (NM_007062.1,1453-1471).
cgggtctgggatataagca

SEQ ID NO: 301250 - DNA, 19 bp, Homo sapiens
  siRNA target sequence for PWP1 (NM_007062.1,1502-1520).
gacgagagaggcttgttct

SEQ ID NO: 301251 - DNA, 19 bp, Homo sapiens
  siRNA target sequence for PWP1 (NM_007062.1,1522-1540).
gggagtgcaagaaattcat

SEQ ID NO: 301252 - DNA, 19 bp, Homo sapiens
  siRNA target sequence for NASP (NM_002482.2,145-163).
ctggtttctgccgacaaaa

SEQ ID NO: 301253 - DNA, 19 bp, Homo sapiens
  siRNA target sequence for NASP (NM_002482.2,172-190).
gttcctgctccttctacat

SEQ ID NO: 301254 - DNA, 19 bp, Homo sapiens
  siRNA target sequence for NASP (NM_002482.2,234-252).
gaaactattgggtttagga

SEQ ID NO: 301255 - DNA, 19 bp, Homo sapiens
  siRNA target sequence for NASP (NM_002482.2,243-261).
gggtttaggacagaaacat

SEQ ID NO: 301256 - DNA, 19 bp, Homo sapiens
  siRNA target sequence for NASP (NM_002482.2,280-298).
ccagcagctgtcaatgcat

SEQ ID NO: 301257 - DNA, 19 bp, Homo sapiens
  siRNA target sequence for NASP (NM_002482.2,281-299).
cagcagctgtcaatgcatt

SEQ ID NO: 301258 - DNA, 19 bp, Homo sapiens
  siRNA target sequence for NASP (NM_002482.2,301-319).
caggaagcagctagtcttt

SEQ ID NO: 301259 - DNA, 19 bp, Homo sapiens
  siRNA target sequence for NASP (NM_002482.2,307-325).
gcagctagtcttttaggta

SEQ ID NO: 301260 - DNA, 19 bp, Homo sapiens
  siRNA target sequence for NASP (NM_002482.2,308-326).
cagctagtcttttaggtaa

SEQ ID NO: 301261 - DNA, 19 bp, Homo sapiens
  siRNA target sequence for NASP (NM_002482.2,597-615).
ggcaaagcctgaaactgat

SEQ ID NO: 301262 - DNA, 19 bp, Homo sapiens
  siRNA target sequence for NASP (NM_002482.2,697-715).
gttgacttgactctagatt

SEQ ID NO: 301263 - DNA, 19 bp, Homo sapiens
  siRNA target sequence for NASP (NM_002482.2,705-723).
gactctagattggttaact

SEQ ID NO: 301264 - DNA, 19 bp, Homo sapiens
  siRNA target sequence for NASP (NM_002482.2,707-725).
ctctagattggttaactga

SEQ ID NO: 301265 - DNA, 19 bp, Homo sapiens
  siRNA target sequence for NASP (NM_002482.2,709-727).
ctagattggttaactgaaa

SEQ ID NO: 301266 - DNA, 19 bp, Homo sapiens
  siRNA target sequence for NASP (NM_002482.2,885-903).
gaagcagggagaggtaatt

SEQ ID NO: 301267 - DNA, 19 bp, Homo sapiens
  siRNA target sequence for NASP (NM_002482.2,1079-1097).
gaaaggcggttcttgaaca

SEQ ID NO: 301268 - DNA, 19 bp, Homo sapiens
  siRNA target sequence for NASP (NM_002482.2,1242-1260).
caatggaccgtcagttgta

SEQ ID NO: 301269 - DNA, 19 bp, Homo sapiens
  siRNA target sequence for NASP (NM_002482.2,1262-1280).
gagatcagactcctattga

SEQ ID NO: 301270 - DNA, 19 bp, Homo sapiens
  siRNA target sequence for NASP (NM_002482.2,1409-1427).
gagatggggttgataccaa

SEQ ID NO: 301271 - DNA, 19 bp, Homo sapiens
  siRNA target sequence for NASP (NM_002482.2,1434-1452).
ccagggagctactgagaaa

SEQ ID NO: 301272 - DNA, 19 bp, Homo sapiens
  siRNA target sequence for NASP (NM_002482.2,1435-1453).
cagggagctactgagaaat

SEQ ID NO: 301273 - DNA, 19 bp, Homo sapiens
  siRNA target sequence for NASP (NM_002482.2,1571-1589).
ccgaagaaatgccaaatga

SEQ ID NO: 301274 - DNA, 19 bp, Homo sapiens
  siRNA target sequence for NASP (NM_002482.2,1723-1741).
gctgcccaggcacatctta

SEQ ID NO: 301275 - DNA, 19 bp, Homo sapiens
  siRNA target sequence for NASP (NM_002482.2,1886-1904).
ggtacaactctcagtatga

SEQ ID NO: 301276 - DNA, 19 bp, Homo sapiens
  siRNA target sequence for NASP (NM_002482.2,1952-1970).
gaatggctgtactaaacga

SEQ ID NO: 301277 - DNA, 19 bp, Homo sapiens
  siRNA target sequence for NASP (NM_002482.2,1991-2009).
gatcgtctgctgaatacaa

SEQ ID NO: 301278 - DNA, 19 bp, Homo sapiens
  siRNA target sequence for NASP (NM_002482.2,1994-2012).
cgtctgctgaatacaagaa

SEQ ID NO: 301279 - DNA, 19 bp, Homo sapiens
  siRNA target sequence for NASP (NM_002482.2,1995-2013).
gtctgctgaatacaagaaa

SEQ ID NO: 301280 - DNA, 19 bp, Homo sapiens
  siRNA target sequence for NASP (NM_002482.2,2031-2049).
ggaactgctacccgaaatt

SEQ ID NO: 301281 - DNA, 19 bp, Homo sapiens
  siRNA target sequence for NASP (NM_002482.2,2032-2050).
gaactgctacccgaaatta

SEQ ID NO: 301282 - DNA, 19 bp, Homo sapiens
  siRNA target sequence for NASP (NM_002482.2,2042-2060).
ccgaaattagagagaagat

SEQ ID NO: 301283 - DNA, 19 bp, Homo sapiens
  siRNA target sequence for NASP (NM_002482.2,2043-2061).
cgaaattagagagaagata

SEQ ID NO: 301284 - DNA, 19 bp, Homo sapiens
  siRNA target sequence for NASP (NM_002482.2,2122-2140).
ctggtggagagttctactt

SEQ ID NO: 301285 - DNA, 19 bp, Homo sapiens
  siRNA target sequence for NASP (NM_002482.2,2203-2221).
gacggtgcttcctcatcaa

SEQ ID NO: 301286 - DNA, 19 bp, Homo sapiens
  siRNA target sequence for NASP (NM_002482.2,2349-2367).
ccccagtggaaatgaagtt

SEQ ID NO: 301287 - DNA, 19 bp, Homo sapiens
  siRNA target sequence for NASP (NM_002482.2,2437-2455).
gctggagctacagttgaaa

SEQ ID NO: 301288 - DNA, 19 bp, Homo sapiens
  siRNA target sequence for NASP (NM_172164.1,204-222).
ggagagcaaccattaatct

SEQ ID NO: 301289 - DNA, 19 bp, Homo sapiens
  siRNA target sequence for NASP (NM_172164.1,242-260).
gggttgcattttgtagaat

SEQ ID NO: 301290 - DNA, 19 bp, Homo sapiens
  siRNA target sequence for NASP (NM_172164.1,243-261).
ggttgcattttgtagaata

SEQ ID NO: 301291 - DNA, 19 bp, Homo sapiens
  siRNA target sequence for XRCC4 (NM_003401.2,165-183).
gaacccagtataactcatt

SEQ ID NO: 301292 - DNA, 19 bp, Homo sapiens
  siRNA target sequence for XRCC4 (NM_003401.2,454-472).
gttccttcaacctagagaa

SEQ ID NO: 301293 - DNA, 19 bp, Homo sapiens
  siRNA target sequence for XRCC4 (NM_003401.2,584-602).
gagagattggaatgatgtt

SEQ ID NO: 301294 - DNA, 19 bp, Homo sapiens
  siRNA target sequence for XRCC4 (NM_003401.2,600-618).
gttcaaggacgatttgaaa

SEQ ID NO: 301295 - DNA, 19 bp, Homo sapiens
  siRNA target sequence for XRCC4 (NM_003401.2,607-625).
gacgatttgaaaaatgtgt

SEQ ID NO: 301296 - DNA, 19 bp, Homo sapiens
  siRNA target sequence for XRCC4 (NM_003401.2,639-657).
gctttggagactgatcttt

SEQ ID NO: 301297 - DNA, 19 bp, Homo sapiens
  siRNA target sequence for XRCC4 (NM_003401.2,703-721).
gaagtttgcataataaatt

SEQ ID NO: 301298 - DNA, 19 bp, Homo sapiens
  siRNA target sequence for XRCC4 (NM_003401.2,774-792).
gcaatctgttctgaaatga

SEQ ID NO: 301299 - DNA, 19 bp, Homo sapiens
  siRNA target sequence for XRCC4 (NM_003401.2,802-820).
gagatccagtctatgatga

SEQ ID NO: 301300 - DNA, 19 bp, Homo sapiens
  siRNA target sequence for XRCC4 (NM_003401.2,867-885).
gcttcagctgctgtaagta

SEQ ID NO: 301301 - DNA, 19 bp, Homo sapiens
  siRNA target sequence for XRCC4 (NM_003401.2,876-894).
gctgtaagtaaagatgatt

SEQ ID NO: 301302 - DNA, 19 bp, Homo sapiens
  siRNA target sequence for XRCC4 (NM_003401.2,907-925).
gtcttgatgtcactgatat

SEQ ID NO: 301303 - DNA, 19 bp, Homo sapiens
  siRNA target sequence for XRCC4 (NM_003401.2,966-984).
cttgggacagaacctaaaa

SEQ ID NO: 301304 - DNA, 19 bp, Homo sapiens
  siRNA target sequence for XRCC4 (NM_003401.2,1113-1131).
gacctctttgatgagattt

SEQ ID NO: 301305 - DNA, 19 bp, Homo sapiens
  siRNA target sequence for ALKBH (NM_006020.1,341-359).
gtgaaacagtgccttaagt

SEQ ID NO: 301306 - DNA, 19 bp, Homo sapiens
  siRNA target sequence for ALKBH (NM_006020.1,343-361).
gaaacagtgccttaagtta

SEQ ID NO: 301307 - DNA, 19 bp, Homo sapiens
  siRNA target sequence for ALKBH (NM_006020.1,454-472).
gtataaagaagcgactaaa

SEQ ID NO: 301308 - DNA, 19 bp, Homo sapiens
  siRNA target sequence for ALKBH (NM_006020.1,474-492).
ggagaccccgaagtttact

SEQ ID NO: 301309 - DNA, 19 bp, Homo sapiens
  siRNA target sequence for ALKBH (NM_006020.1,511-529).
gaccgtaggctaccattat

SEQ ID NO: 301310 - DNA, 19 bp, Homo sapiens
  siRNA target sequence for ALKBH (NM_006020.1,513-531).
ccgtaggctaccattataa

SEQ ID NO: 301311 - DNA, 19 bp, Homo sapiens
  siRNA target sequence for ALKBH (NM_006020.1,535-553).
ggacagtaagaaatactca

SEQ ID NO: 301312 - DNA, 19 bp, Homo sapiens
  siRNA target sequence for ALKBH (NM_006020.1,609-627).
ccgctgcctgtggatttga

SEQ ID NO: 301313 - DNA, 19 bp, Homo sapiens
  siRNA target sequence for ALKBH (NM_006020.1,645-663).
cagggatcctgaattacta

SEQ ID NO: 301314 - DNA, 19 bp, Homo sapiens
  siRNA target sequence for ALKBH (NM_006020.1,744-762).
gacagtccgccatctttct

SEQ ID NO: 301315 - DNA, 19 bp, Homo sapiens
  siRNA target sequence for ALKBH (NM_006020.1,932-950).
gtcctcccgagagattcaa

SEQ ID NO: 301316 - DNA, 19 bp, Homo sapiens
  siRNA target sequence for ALKBH (NM_006020.1,937-955).
cccgagagattcaatggta

SEQ ID NO: 301317 - DNA, 19 bp, Homo sapiens
  siRNA target sequence for ALKBH (NM_006020.1,1067-1085).
cccatcgaggatgaaaaaa

SEQ ID NO: 301318 - DNA, 19 bp, Homo sapiens
  siRNA target sequence for FANCA (NM_000135.1,230-248).
ccactgtgtaaaaaattgt

SEQ ID NO: 301319 - DNA, 19 bp, Homo sapiens
  siRNA target sequence for FANCA (NM_000135.1,247-265).
gtctctcagcaaagtgatt

SEQ ID NO: 301320 - DNA, 19 bp, Homo sapiens
  siRNA target sequence for FANCA (NM_000135.1,279-297).
ctgaggcctatgctaatca

SEQ ID NO: 301321 - DNA, 19 bp, Homo sapiens
  siRNA target sequence for FANCA (NM_000135.1,283-301).
ggcctatgctaatcattct

SEQ ID NO: 301322 - DNA, 19 bp, Homo sapiens
  siRNA target sequence for FANCA (NM_000135.1,284-302).
gcctatgctaatcattcta

SEQ ID NO: 301323 - DNA, 19 bp, Homo sapiens
  siRNA target sequence for FANCA (NM_000135.1,286-304).
ctatgctaatcattctagt

SEQ ID NO: 301324 - DNA, 19 bp, Homo sapiens
  siRNA target sequence for FANCA (NM_000135.1,290-308).
gctaatcattctagttcat

SEQ ID NO: 301325 - DNA, 19 bp, Homo sapiens
  siRNA target sequence for FANCA (NM_000135.1,291-309).
ctaatcattctagttcatt

SEQ ID NO: 301326 - DNA, 19 bp, Homo sapiens
  siRNA target sequence for FANCA (NM_000135.1,475-493).
gttagagtttgctcagtat

SEQ ID NO: 301327 - DNA, 19 bp, Homo sapiens
  siRNA target sequence for FANCA (NM_000135.1,587-605).
cacgtacaaggcattgtga

SEQ ID NO: 301328 - DNA, 19 bp, Homo sapiens
  siRNA target sequence for FANCA (NM_000135.1,675-693).
gctgcctttgtgaacagat

SEQ ID NO: 301329 - DNA, 19 bp, Homo sapiens
  siRNA target sequence for FANCA (NM_000135.1,719-737).
gtcgccagggccatgcttt

SEQ ID NO: 301330 - DNA, 19 bp, Homo sapiens
  siRNA target sequence for FANCA (NM_000135.1,726-744).
gggccatgctttctgattt

SEQ ID NO: 301331 - DNA, 19 bp, Homo sapiens
  siRNA target sequence for FANCA (NM_000135.1,727-745).
ggccatgctttctgatttt

SEQ ID NO: 301332 - DNA, 19 bp, Homo sapiens
  siRNA target sequence for FANCA (NM_000135.1,730-748).
catgctttctgattttgtt

SEQ ID NO: 301333 - DNA, 19 bp, Homo sapiens
  siRNA target sequence for FANCA (NM_000135.1,758-776).
gttttgaggggatttcaga

SEQ ID NO: 301334 - DNA, 19 bp, Homo sapiens
  siRNA target sequence for FANCA (NM_000135.1,819-837).
cgcaggtcacggttgatgt

SEQ ID NO: 301335 - DNA, 19 bp, Homo sapiens
  siRNA target sequence for FANCA (NM_000135.1,820-838).
gcaggtcacggttgatgta

SEQ ID NO: 301336 - DNA, 19 bp, Homo sapiens
  siRNA target sequence for FANCA (NM_000135.1,839-857).
ctgcagagaatgctgattt

SEQ ID NO: 301337 - DNA, 19 bp, Homo sapiens
  siRNA target sequence for FANCA (NM_000135.1,944-962).
cacacgcttggcagtgtaa

SEQ ID NO: 301338 - DNA, 19 bp, Homo sapiens
  siRNA target sequence for FANCA (NM_000135.1,946-964).
cacgcttggcagtgtaatt

SEQ ID NO: 301339 - DNA, 19 bp, Homo sapiens
  siRNA target sequence for FANCA (NM_000135.1,950-968).
cttggcagtgtaatttcca

SEQ ID NO: 301340 - DNA, 19 bp, Homo sapiens
  siRNA target sequence for FANCA (NM_000135.1,1436-1454).
gccctggtcttcctgttta

SEQ ID NO: 301341 - DNA, 19 bp, Homo sapiens
  siRNA target sequence for FANCA (NM_000135.1,1439-1457).
ctggtcttcctgtttacgt

SEQ ID NO: 301342 - DNA, 19 bp, Homo sapiens
  siRNA target sequence for FANCA (NM_000135.1,1466-1484).
gaactcgtgccttttgagt

SEQ ID NO: 301343 - DNA, 19 bp, Homo sapiens
  siRNA target sequence for FANCA (NM_000135.1,1586-1604).
gccgacctcaaggtttcta

SEQ ID NO: 301344 - DNA, 19 bp, Homo sapiens
  siRNA target sequence for FANCA (NM_000135.1,1587-1605).
ccgacctcaaggtttctat

SEQ ID NO: 301345 - DNA, 19 bp, Homo sapiens
  siRNA target sequence for FANCA (NM_000135.1,1588-1606).
cgacctcaaggtttctata

SEQ ID NO: 301346 - DNA, 19 bp, Homo sapiens
  siRNA target sequence for FANCA (NM_000135.1,1616-1634).
ggactctacgaggatttgt

SEQ ID NO: 301347 - DNA, 19 bp, Homo sapiens
  siRNA target sequence for FANCA (NM_000135.1,1619-1637).
ctctacgaggatttgtcat

SEQ ID NO: 301348 - DNA, 19 bp, Homo sapiens
  siRNA target sequence for FANCA (NM_000135.1,1733-1751).
gtcatggaggccagcatat

SEQ ID NO: 301349 - DNA, 19 bp, Homo sapiens
  siRNA target sequence for FANCA (NM_000135.1,1825-1843).
ctcccgtgtggcgtttata

SEQ ID NO: 301350 - DNA, 19 bp, Homo sapiens
  siRNA target sequence for FANCA (NM_000135.1,1827-1845).
cccgtgtggcgtttataga

SEQ ID NO: 301351 - DNA, 19 bp, Homo sapiens
  siRNA target sequence for FANCA (NM_000135.1,1829-1847).
cgtgtggcgtttatagagt

SEQ ID NO: 301352 - DNA, 19 bp, Homo sapiens
  siRNA target sequence for FANCA (NM_000135.1,2029-2047).
ccccagccagcgtgatgtt

SEQ ID NO: 301353 - DNA, 19 bp, Homo sapiens
  siRNA target sequence for FANCA (NM_000135.1,2113-2131).
cagcagcgttgagatatca

SEQ ID NO: 301354 - DNA, 19 bp, Homo sapiens
  siRNA target sequence for FANCA (NM_000135.1,2115-2133).
gcagcgttgagatatcaaa

SEQ ID NO: 301355 - DNA, 19 bp, Homo sapiens
  siRNA target sequence for FANCA (NM_000135.1,2118-2136).
gcgttgagatatcaaagat

SEQ ID NO: 301356 - DNA, 19 bp, Homo sapiens
  siRNA target sequence for FANCA (NM_000135.1,2119-2137).
cgttgagatatcaaagatt

SEQ ID NO: 301357 - DNA, 19 bp, Homo sapiens
  siRNA target sequence for FANCA (NM_000135.1,2192-2210).
ctcctgctgacgtctttct

SEQ ID NO: 301358 - DNA, 19 bp, Homo sapiens
  siRNA target sequence for FANCA (NM_000135.1,2469-2487).
ctgtccctgcgctctttga

SEQ ID NO: 301359 - DNA, 19 bp, Homo sapiens
  siRNA target sequence for FANCA (NM_000135.1,2508-2526).
cgagggattccttgttctt

SEQ ID NO: 301360 - DNA, 19 bp, Homo sapiens
  siRNA target sequence for FANCA (NM_000135.1,2580-2598).
cccagtcacgagatacttt

SEQ ID NO: 301361 - DNA, 19 bp, Homo sapiens
  siRNA target sequence for FANCA (NM_000135.1,2608-2626).
cttatctccaggccttatt

SEQ ID NO: 301362 - DNA, 19 bp, Homo sapiens
  siRNA target sequence for FANCA (NM_000135.1,2615-2633).
ccaggccttattaaaaagt

SEQ ID NO: 301363 - DNA, 19 bp, Homo sapiens
  siRNA target sequence for FANCA (NM_000135.1,2665-2683).
ggcccgacagcctctttct

SEQ ID NO: 301364 - DNA, 19 bp, Homo sapiens
  siRNA target sequence for FANCA (NM_000135.1,2775-2793).
ccttccgagaggtgttgaa

SEQ ID NO: 301365 - DNA, 19 bp, Homo sapiens
  siRNA target sequence for FANCA (NM_000135.1,2904-2922).
cgatccatgagcactttct

SEQ ID NO: 301366 - DNA, 19 bp, Homo sapiens
  siRNA target sequence for FANCA (NM_000135.1,2970-2988).
cgtgtaccattcttgtcaa

SEQ ID NO: 301367 - DNA, 19 bp, Homo sapiens
  siRNA target sequence for FANCA (NM_000135.1,2984-3002).
gtcaacgcactgatggatt

SEQ ID NO: 301368 - DNA, 19 bp, Homo sapiens
  siRNA target sequence for FANCA (NM_000135.1,3021-3039).
gttatgaccactcagaaaa

SEQ ID NO: 301369 - DNA, 19 bp, Homo sapiens
  siRNA target sequence for FANCA (NM_000135.1,3057-3075).
gtggccgcacaggaaatga

SEQ ID NO: 301370 - DNA, 19 bp, Homo sapiens
  siRNA target sequence for FANCA (NM_000135.1,3063-3081).
gcacaggaaatgaggatat

SEQ ID NO: 301371 - DNA, 19 bp, Homo sapiens
  siRNA target sequence for FANCA (NM_000135.1,3243-3261).
gacagagggagctgctaat

SEQ ID NO: 301372 - DNA, 19 bp, Homo sapiens
  siRNA target sequence for FANCA (NM_000135.1,3249-3267).
gggagctgctaatgtacaa

SEQ ID NO: 301373 - DNA, 19 bp, Homo sapiens
  siRNA target sequence for FANCA (NM_000135.1,3477-3495).
ccctgatggtcgacttcat

SEQ ID NO: 301374 - DNA, 19 bp, Homo sapiens
  siRNA target sequence for FANCA (NM_000135.1,3478-3496).
cctgatggtcgacttcata

SEQ ID NO: 301375 - DNA, 19 bp, Homo sapiens
  siRNA target sequence for FANCA (NM_000135.1,3500-3518).
gccaagtgccagacgaaat

SEQ ID NO: 301376 - DNA, 19 bp, Homo sapiens
  siRNA target sequence for FANCA (NM_000135.1,3511-3529).
gacgaaatgccccttaatt

SEQ ID NO: 301377 - DNA, 19 bp, Homo sapiens
  siRNA target sequence for FANCA (NM_000135.1,3513-3531).
cgaaatgccccttaatttt

SEQ ID NO: 301378 - DNA, 19 bp, Homo sapiens
  siRNA target sequence for FANCA (NM_000135.1,3841-3859).
gtcacatctgacctcaaat

SEQ ID NO: 301379 - DNA, 19 bp, Homo sapiens
  siRNA target sequence for FANCA (NM_000135.1,3900-3918).
caatcctcgagtgtttaga

SEQ ID NO: 301380 - DNA, 19 bp, Homo sapiens
  siRNA target sequence for FANCA (NM_000135.1,3933-3951).
cctggctggcactctttca

SEQ ID NO: 301381 - DNA, 19 bp, Homo sapiens
  siRNA target sequence for FANCA (NM_000135.1,4022-4040).
ctgcctttcgctttttaca

SEQ ID NO: 301382 - DNA, 19 bp, Homo sapiens
  siRNA target sequence for FANCA (NM_000135.1,4200-4218).
gcaaccccgtggaactgat

SEQ ID NO: 301383 - DNA, 19 bp, Homo sapiens
  siRNA target sequence for FANCA (NM_000135.1,4201-4219).
caaccccgtggaactgata

SEQ ID NO: 301384 - DNA, 19 bp, Homo sapiens
  siRNA target sequence for FANCA (NM_000135.1,4207-4225).
cgtggaactgataacaaaa

SEQ ID NO: 301385 - DNA, 19 bp, Homo sapiens
  siRNA target sequence for FANCA (NM_000135.1,4253-4271).
cctcggtgcccgaaaaaga

SEQ ID NO: 301386 - DNA, 19 bp, Homo sapiens
  siRNA target sequence for FANCC (NM_000136.1,258-276).
ggctcaagattcagtagat

SEQ ID NO: 301387 - DNA, 19 bp, Homo sapiens
  siRNA target sequence for FANCC (NM_000136.1,262-280).
caagattcagtagatcttt

SEQ ID NO: 301388 - DNA, 19 bp, Homo sapiens
  siRNA target sequence for FANCC (NM_000136.1,271-289).
gtagatctttcttgtgatt

SEQ ID NO: 301389 - DNA, 19 bp, Homo sapiens
  siRNA target sequence for FANCC (NM_000136.1,284-302).
gtgattatcagttttggat

SEQ ID NO: 301390 - DNA, 19 bp, Homo sapiens
  siRNA target sequence for FANCC (NM_000136.1,384-402).
gttcctaaggaagatgtat

SEQ ID NO: 301391 - DNA, 19 bp, Homo sapiens
  siRNA target sequence for FANCC (NM_000136.1,396-414).
gatgtatgaagccttgaaa

SEQ ID NO: 301392 - DNA, 19 bp, Homo sapiens
  siRNA target sequence for FANCC (NM_000136.1,460-478).
caactgttggcaaaagctt

SEQ ID NO: 301393 - DNA, 19 bp, Homo sapiens
  siRNA target sequence for FANCC (NM_000136.1,468-486).
ggcaaaagcttgttggaat

SEQ ID NO: 301394 - DNA, 19 bp, Homo sapiens
  siRNA target sequence for FANCC (NM_000136.1,488-506).
cttttattttagcatatga

SEQ ID NO: 301395 - DNA, 19 bp, Homo sapiens
  siRNA target sequence for FANCC (NM_000136.1,514-532).
caaaaaattctaatatggt

SEQ ID NO: 301396 - DNA, 19 bp, Homo sapiens
  siRNA target sequence for FANCC (NM_000136.1,530-548).
ggtgcttatgttgtctaat

SEQ ID NO: 301397 - DNA, 19 bp, Homo sapiens
  siRNA target sequence for FANCC (NM_000136.1,531-549).
gtgcttatgttgtctaatt

SEQ ID NO: 301398 - DNA, 19 bp, Homo sapiens
  siRNA target sequence for FANCC (NM_000136.1,590-608).
cctggatacagggtgtatt

SEQ ID NO: 301399 - DNA, 19 bp, Homo sapiens
  siRNA target sequence for FANCC (NM_000136.1,600-618).
gggtgtattatctcatata

SEQ ID NO: 301400 - DNA, 19 bp, Homo sapiens
  siRNA target sequence for FANCC (NM_000136.1,670-688).
gggtatgcacctatagatt

SEQ ID NO: 301401 - DNA, 19 bp, Homo sapiens
  siRNA target sequence for FANCC (NM_000136.1,671-689).
ggtatgcacctatagatta

SEQ ID NO: 301402 - DNA, 19 bp, Homo sapiens
  siRNA target sequence for FANCC (NM_000136.1,748-766).
catcttaatggatttaaca

SEQ ID NO: 301403 - DNA, 19 bp, Homo sapiens
  siRNA target sequence for FANCC (NM_000136.1,798-816).
gtccctgtcacgagtttgt

SEQ ID NO: 301404 - DNA, 19 bp, Homo sapiens
  siRNA target sequence for FANCC (NM_000136.1,800-818).
ccctgtcacgagtttgtgt

SEQ ID NO: 301405 - DNA, 19 bp, Homo sapiens
  siRNA target sequence for FANCC (NM_000136.1,809-827).
gagtttgtgtcccacttat

SEQ ID NO: 301406 - DNA, 19 bp, Homo sapiens
  siRNA target sequence for FANCC (NM_000136.1,811-829).
gtttgtgtcccacttatta

SEQ ID NO: 301407 - DNA, 19 bp, Homo sapiens
  siRNA target sequence for FANCC (NM_000136.1,878-896).
gacgtgaacctcaggaaat

SEQ ID NO: 301408 - DNA, 19 bp, Homo sapiens
  siRNA target sequence for FANCC (NM_000136.1,920-938).
ctgtaaacgaggccatttt

SEQ ID NO: 301409 - DNA, 19 bp, Homo sapiens
  siRNA target sequence for FANCC (NM_000136.1,998-1016).
ccagccttgaaaaagcaat

SEQ ID NO: 301410 - DNA, 19 bp, Homo sapiens
  siRNA target sequence for FANCC (NM_000136.1,1041-1059).
ctccagtgagagaaattgt

SEQ ID NO: 301411 - DNA, 19 bp, Homo sapiens
  siRNA target sequence for FANCC (NM_000136.1,1067-1085).
ggatcgaatgctttataaa

SEQ ID NO: 301412 - DNA, 19 bp, Homo sapiens
  siRNA target sequence for FANCC (NM_000136.1,1068-1086).
gatcgaatgctttataaaa

SEQ ID NO: 301413 - DNA, 19 bp, Homo sapiens
  siRNA target sequence for FANCC (NM_000136.1,1121-1139).
ccatattccgggttgttga

SEQ ID NO: 301414 - DNA, 19 bp, Homo sapiens
  siRNA target sequence for FANCC (NM_000136.1,1130-1148).
gggttgttgatgagatgtt

SEQ ID NO: 301415 - DNA, 19 bp, Homo sapiens
  siRNA target sequence for FANCC (NM_000136.1,1182-1200).
ggaaatcatagccactatt

SEQ ID NO: 301416 - DNA, 19 bp, Homo sapiens
  siRNA target sequence for FANCC (NM_000136.1,1192-1210).
gccactattcaggtgttta

SEQ ID NO: 301417 - DNA, 19 bp, Homo sapiens
  siRNA target sequence for FANCC (NM_000136.1,1206-1224).
gtttacgcagtgctttgta

SEQ ID NO: 301418 - DNA, 19 bp, Homo sapiens
  siRNA target sequence for FANCC (NM_000136.1,1269-1287).
gacctactttccttacact

SEQ ID NO: 301419 - DNA, 19 bp, Homo sapiens
  siRNA target sequence for FANCC (NM_000136.1,1433-1451).
gctggttcctgttcattca

SEQ ID NO: 301420 - DNA, 19 bp, Homo sapiens
  siRNA target sequence for FANCC (NM_000136.1,1803-1821).
gataactcacgagatcatt

SEQ ID NO: 301421 - DNA, 19 bp, Homo sapiens
  siRNA target sequence for FANCC (NM_000136.1,1812-1830).
cgagatcattggctttctt

SEQ ID NO: 301422 - DNA, 19 bp, Homo sapiens
  siRNA target sequence for FANCC (NM_000136.1,1828-1846).
cttgaccagaccttgtaca

SEQ ID NO: 301423 - DNA, 19 bp, Homo sapiens
  siRNA target sequence for FANCC (NM_000136.1,1836-1854).
gaccttgtacagatggaat

SEQ ID NO: 301424 - DNA, 19 bp, Homo sapiens
  siRNA target sequence for FANCC (NM_000136.1,1851-1869).
gaatcgtcttggcattgaa

SEQ ID NO: 301425 - DNA, 19 bp, Homo sapiens
  siRNA target sequence for FANCC (NM_000136.1,1892-1910).
cccgagagctccttaaaga

SEQ ID NO: 301426 - DNA, 19 bp, Homo sapiens
  siRNA target sequence for FLJ10858 (NM_018248.1,275-293).
gagcctgtttaatggatat

SEQ ID NO: 301427 - DNA, 19 bp, Homo sapiens
  siRNA target sequence for FLJ10858 (NM_018248.1,277-295).
gcctgtttaatggatatgt

SEQ ID NO: 301428 - DNA, 19 bp, Homo sapiens
  siRNA target sequence for FLJ10858 (NM_018248.1,278-296).
cctgtttaatggatatgtt

SEQ ID NO: 301429 - DNA, 19 bp, Homo sapiens
  siRNA target sequence for FLJ10858 (NM_018248.1,566-584).
cttgagagcagaaagtgaa

SEQ ID NO: 301430 - DNA, 19 bp, Homo sapiens
  siRNA target sequence for FLJ10858 (NM_018248.1,646-664).
gagtagggaacatcatcaa

SEQ ID NO: 301431 - DNA, 19 bp, Homo sapiens
  siRNA target sequence for FLJ10858 (NM_018248.1,648-666).
gtagggaacatcatcaaaa

SEQ ID NO: 301432 - DNA, 19 bp, Homo sapiens
  siRNA target sequence for FLJ10858 (NM_018248.1,695-713).
cccagctgttaaagtttgt

SEQ ID NO: 301433 - DNA, 19 bp, Homo sapiens
  siRNA target sequence for FLJ10858 (NM_018248.1,697-715).
cagctgttaaagtttgtca

SEQ ID NO: 301434 - DNA, 19 bp, Homo sapiens
  siRNA target sequence for FLJ10858 (NM_018248.1,731-749).
gatccatcacctcatgaaa

SEQ ID NO: 301435 - DNA, 19 bp, Homo sapiens
  siRNA target sequence for FLJ10858 (NM_018248.1,756-774).
cgtgatttcagcattctct

SEQ ID NO: 301436 - DNA, 19 bp, Homo sapiens
  siRNA target sequence for FLJ10858 (NM_018248.1,798-816).
cttgctctctctaaacact

SEQ ID NO: 301437 - DNA, 19 bp, Homo sapiens
  siRNA target sequence for FLJ10858 (NM_018248.1,801-819).
gctctctctaaacactata

SEQ ID NO: 301438 - DNA, 19 bp, Homo sapiens
  siRNA target sequence for FLJ10858 (NM_018248.1,802-820).
ctctctctaaacactataa

SEQ ID NO: 301439 - DNA, 19 bp, Homo sapiens
  siRNA target sequence for FLJ10858 (NM_018248.1,822-840).
gtttacaagcgtcctaatt

SEQ ID NO: 301440 - DNA, 19 bp, Homo sapiens
  siRNA target sequence for FLJ10858 (NM_018248.1,850-868).
gccactgcagaataactgt

SEQ ID NO: 301441 - DNA, 19 bp, Homo sapiens
  siRNA target sequence for FLJ10858 (NM_018248.1,871-889).
gccgctttggggacaataa

SEQ ID NO: 301442 - DNA, 19 bp, Homo sapiens
  siRNA target sequence for FLJ10858 (NM_018248.1,873-891).
cgctttggggacaataaca

SEQ ID NO: 301443 - DNA, 19 bp, Homo sapiens
  siRNA target sequence for FLJ10858 (NM_018248.1,875-893).
ctttggggacaataacaga

SEQ ID NO: 301444 - DNA, 19 bp, Homo sapiens
  siRNA target sequence for FLJ10858 (NM_018248.1,881-899).
ggacaataacagaatgaca

SEQ ID NO: 301445 - DNA, 19 bp, Homo sapiens
  siRNA target sequence for FLJ10858 (NM_018248.1,930-948).
cctcaacatgttgacatat

SEQ ID NO: 301446 - DNA, 19 bp, Homo sapiens
  siRNA target sequence for FLJ10858 (NM_018248.1,949-967).
gcaagctaccgactagaaa

SEQ ID NO: 301447 - DNA, 19 bp, Homo sapiens
  siRNA target sequence for FLJ10858 (NM_018248.1,950-968).
caagctaccgactagaaat

SEQ ID NO: 301448 - DNA, 19 bp, Homo sapiens
  siRNA target sequence for FLJ10858 (NM_018248.1,953-971).
gctaccgactagaaatact

SEQ ID NO: 301449 - DNA, 19 bp, Homo sapiens
  siRNA target sequence for FLJ10858 (NM_018248.1,954-972).
ctaccgactagaaatacta

SEQ ID NO: 301450 - DNA, 19 bp, Homo sapiens
  siRNA target sequence for FLJ10858 (NM_018248.1,957-975).
ccgactagaaatactataa

SEQ ID NO: 301451 - DNA, 19 bp, Homo sapiens
  siRNA target sequence for FLJ10858 (NM_018248.1,958-976).
cgactagaaatactataat

SEQ ID NO: 301452 - DNA, 19 bp, Homo sapiens
  siRNA target sequence for FLJ10858 (NM_018248.1,991-1009).
gcagggtggatcatgttat

SEQ ID NO: 301453 - DNA, 19 bp, Homo sapiens
  siRNA target sequence for FLJ10858 (NM_018248.1,1045-1063).
cctgtgtggtgtgtacttt

SEQ ID NO: 301454 - DNA, 19 bp, Homo sapiens
  siRNA target sequence for FLJ10858 (NM_018248.1,1046-1064).
ctgtgtggtgtgtacttta

SEQ ID NO: 301455 - DNA, 19 bp, Homo sapiens
  siRNA target sequence for FLJ10858 (NM_018248.1,1052-1070).
ggtgtgtactttaatcaat

SEQ ID NO: 301456 - DNA, 19 bp, Homo sapiens
  siRNA target sequence for FLJ10858 (NM_018248.1,1076-1094).
ctcttctaaggcatgtgat

SEQ ID NO: 301457 - DNA, 19 bp, Homo sapiens
  siRNA target sequence for FLJ10858 (NM_018248.1,1103-1121).
gacctcaaggcctattgat

SEQ ID NO: 301458 - DNA, 19 bp, Homo sapiens
  siRNA target sequence for FLJ10858 (NM_018248.1,1152-1170).
gtctttagccacttaatga

SEQ ID NO: 301459 - DNA, 19 bp, Homo sapiens
  siRNA target sequence for FLJ10858 (NM_018248.1,1169-1187).
gaagtacccgtgtaatact

SEQ ID NO: 301460 - DNA, 19 bp, Homo sapiens
  siRNA target sequence for FLJ10858 (NM_018248.1,1175-1193).
cccgtgtaatacttttgga

SEQ ID NO: 301461 - DNA, 19 bp, Homo sapiens
  siRNA target sequence for FLJ10858 (NM_018248.1,1176-1194).
ccgtgtaatacttttggaa

SEQ ID NO: 301462 - DNA, 19 bp, Homo sapiens
  siRNA target sequence for FLJ10858 (NM_018248.1,1177-1195).
cgtgtaatacttttggaaa

SEQ ID NO: 301463 - DNA, 19 bp, Homo sapiens
  siRNA target sequence for FLJ10858 (NM_018248.1,1246-1264).
ctcttgtcttgactgattt

SEQ ID NO: 301464 - DNA, 19 bp, Homo sapiens
  siRNA target sequence for FLJ10858 (NM_018248.1,1251-1269).
gtcttgactgattttagca

SEQ ID NO: 301465 - DNA, 19 bp, Homo sapiens
  siRNA target sequence for FLJ10858 (NM_018248.1,1317-1335).
gatgaggagtttcaaaact

SEQ ID NO: 301466 - DNA, 19 bp, Homo sapiens
  siRNA target sequence for FLJ10858 (NM_018248.1,1379-1397).
caagaagacaacaaacgat

SEQ ID NO: 301467 - DNA, 19 bp, Homo sapiens
  siRNA target sequence for FLJ10858 (NM_018248.1,1382-1400).
gaagacaacaaacgatata

SEQ ID NO: 301468 - DNA, 19 bp, Homo sapiens
  siRNA target sequence for FLJ10858 (NM_018248.1,1385-1403).
gacaacaaacgatataact

SEQ ID NO: 301469 - DNA, 19 bp, Homo sapiens
  siRNA target sequence for FLJ10858 (NM_018248.1,1387-1405).
caacaaacgatataactca

SEQ ID NO: 301470 - DNA, 19 bp, Homo sapiens
  siRNA target sequence for FLJ10858 (NM_018248.1,1412-1430).
cagcaaagtaaacatatca

SEQ ID NO: 301471 - DNA, 19 bp, Homo sapiens
  siRNA target sequence for FLJ10858 (NM_018248.1,1431-1449).
cctacaatcagttcagaat

SEQ ID NO: 301472 - DNA, 19 bp, Homo sapiens
  siRNA target sequence for FLJ10858 (NM_018248.1,1435-1453).
caatcagttcagaatctaa

SEQ ID NO: 301473 - DNA, 19 bp, Homo sapiens
  siRNA target sequence for FLJ10858 (NM_018248.1,1540-1558).
gtgaacttcaaattaatat

SEQ ID NO: 301474 - DNA, 19 bp, Homo sapiens
  siRNA target sequence for FLJ10858 (NM_018248.1,1563-1581).
gatggccctcgtaccttaa

SEQ ID NO: 301475 - DNA, 19 bp, Homo sapiens
  siRNA target sequence for FLJ10858 (NM_018248.1,1568-1586).
ccctcgtaccttaaatcct

SEQ ID NO: 301476 - DNA, 19 bp, Homo sapiens
  siRNA target sequence for FLJ10858 (NM_018248.1,1591-1609).
gccctcgctgcagtaaaca

SEQ ID NO: 301477 - DNA, 19 bp, Homo sapiens
  siRNA target sequence for FLJ10858 (NM_018248.1,1593-1611).
cctcgctgcagtaaacaca

SEQ ID NO: 301478 - DNA, 19 bp, Homo sapiens
  siRNA target sequence for FLJ10858 (NM_018248.1,1594-1612).
ctcgctgcagtaaacacaa

SEQ ID NO: 301479 - DNA, 19 bp, Homo sapiens
  siRNA target sequence for FLJ10858 (NM_018248.1,1756-1774).
gttccaccatgaaaacagt

SEQ ID NO: 301480 - DNA, 19 bp, Homo sapiens
  siRNA target sequence for FLJ10858 (NM_018248.1,1778-1796).
gaagattggacctaacaat

SEQ ID NO: 301481 - DNA, 19 bp, Homo sapiens
  siRNA target sequence for FLJ10858 (NM_018248.1,1788-1806).
cctaacaatggaaagaatt

SEQ ID NO: 301482 - DNA, 19 bp, Homo sapiens
  siRNA target sequence for HUS1 (NM_004507.2,172-190).
ccacttcacacgaatcagt

SEQ ID NO: 301483 - DNA, 19 bp, Homo sapiens
  siRNA target sequence for HUS1 (NM_004507.2,173-191).
cacttcacacgaatcagta

SEQ ID NO: 301484 - DNA, 19 bp, Homo sapiens
  siRNA target sequence for HUS1 (NM_004507.2,180-198).
cacgaatcagtaacatgat

SEQ ID NO: 301485 - DNA, 19 bp, Homo sapiens
  siRNA target sequence for HUS1 (NM_004507.2,229-247).
catcagccctgataagctt

SEQ ID NO: 301486 - DNA, 19 bp, Homo sapiens
  siRNA target sequence for HUS1 (NM_004507.2,234-252).
gccctgataagcttaactt

SEQ ID NO: 301487 - DNA, 19 bp, Homo sapiens
  siRNA target sequence for HUS1 (NM_004507.2,236-254).
cctgataagcttaacttca

SEQ ID NO: 301488 - DNA, 19 bp, Homo sapiens
  siRNA target sequence for HUS1 (NM_004507.2,311-329).
gagaacttcttcaacgaat

SEQ ID NO: 301489 - DNA, 19 bp, Homo sapiens
  siRNA target sequence for HUS1 (NM_004507.2,316-334).
cttcttcaacgaatttcaa

SEQ ID NO: 301490 - DNA, 19 bp, Homo sapiens
  siRNA target sequence for HUS1 (NM_004507.2,374-392).
gagctaacatcggaaaact

SEQ ID NO: 301491 - DNA, 19 bp, Homo sapiens
  siRNA target sequence for HUS1 (NM_004507.2,376-394).
gctaacatcggaaaactta

SEQ ID NO: 301492 - DNA, 19 bp, Homo sapiens
  siRNA target sequence for HUS1 (NM_004507.2,479-497).
gtggagctgttatctatgt

SEQ ID NO: 301493 - DNA, 19 bp, Homo sapiens
  siRNA target sequence for HUS1 (NM_004507.2,481-499).
ggagctgttatctatgtca

SEQ ID NO: 301494 - DNA, 19 bp, Homo sapiens
  siRNA target sequence for HUS1 (NM_004507.2,530-548).
cccataaaggtgattccta

SEQ ID NO: 301495 - DNA, 19 bp, Homo sapiens
  siRNA target sequence for HUS1 (NM_004507.2,539-557).
gtgattcctaggaaattgt

SEQ ID NO: 301496 - DNA, 19 bp, Homo sapiens
  siRNA target sequence for HUS1 (NM_004507.2,584-602).
ccagatcctgatgttagta

SEQ ID NO: 301497 - DNA, 19 bp, Homo sapiens
  siRNA target sequence for HUS1 (NM_004507.2,658-676).
cagcaatcaccttgttatt

SEQ ID NO: 301498 - DNA, 19 bp, Homo sapiens
  siRNA target sequence for HUS1 (NM_004507.2,660-678).
gcaatcaccttgttattga

SEQ ID NO: 301499 - DNA, 19 bp, Homo sapiens
  siRNA target sequence for HUS1 (NM_004507.2,661-679).
caatcaccttgttattgaa

SEQ ID NO: 301500 - DNA, 19 bp, Homo sapiens
  siRNA target sequence for HUS1 (NM_004507.2,725-743).
gtatgtgttacaactcatt

SEQ ID NO: 301501 - DNA, 19 bp, Homo sapiens
  siRNA target sequence for HUS1 (NM_004507.2,761-779).
cctccattagcctctgaaa

SEQ ID NO: 301502 - DNA, 19 bp, Homo sapiens
  siRNA target sequence for HUS1 (NM_004507.2,811-829).
ggctgaagtgcacatagat

SEQ ID NO: 301503 - DNA, 19 bp, Homo sapiens
  siRNA target sequence for HUS1 (NM_004507.2,815-833).
gaagtgcacatagatatta

SEQ ID NO: 301504 - DNA, 19 bp, Homo sapiens
  siRNA target sequence for HUS1 (NM_004507.2,835-853).
gaagctcctacagtttctt

SEQ ID NO: 301505 - DNA, 19 bp, Homo sapiens
  siRNA target sequence for HUS1 (NM_004507.2,851-869).
cttgctggacaacaagtaa

SEQ ID NO: 301506 - DNA, 19 bp, Homo sapiens
  siRNA target sequence for HUS1 (NM_004507.2,881-899).
gccttatgcaatattgtga

SEQ ID NO: 301507 - DNA, 19 bp, Homo sapiens
  siRNA target sequence for HUS1 (NM_004507.2,888-906).
gcaatattgtgaataacaa

SEQ ID NO: 301508 - DNA, 19 bp, Homo sapiens
  siRNA target sequence for HUS1 (NM_004507.2,935-953).
gacgtgtcccttcagtatt

SEQ ID NO: 301509 - DNA, 19 bp, Homo sapiens
  siRNA target sequence for NEIL1 (NM_024608.1,666-684).
gcatgtccggctcttttca

SEQ ID NO: 301510 - DNA, 19 bp, Homo sapiens
  siRNA target sequence for NEIL1 (NM_024608.1,1302-1320).
ggcgcaagtcccgcaaaaa

SEQ ID NO: 301511 - DNA, 19 bp, Homo sapiens
  siRNA target sequence for NEIL1 (NM_024608.1,1311-1329).
cccgcaaaaagaaatccaa

SEQ ID NO: 301512 - DNA, 19 bp, Homo sapiens
  siRNA target sequence for NEIL2 (NM_145043.1,600-618).
gggccgttggtgaggaaat

SEQ ID NO: 301513 - DNA, 19 bp, Homo sapiens
  siRNA target sequence for NEIL2 (NM_145043.1,601-619).
ggccgttggtgaggaaatt

SEQ ID NO: 301514 - DNA, 19 bp, Homo sapiens
  siRNA target sequence for NEIL2 (NM_145043.1,602-620).
gccgttggtgaggaaattt

SEQ ID NO: 301515 - DNA, 19 bp, Homo sapiens
  siRNA target sequence for NEIL2 (NM_145043.1,725-743).
ccaggtccatggaaagaaa

SEQ ID NO: 301516 - DNA, 19 bp, Homo sapiens
  siRNA target sequence for NEIL2 (NM_145043.1,981-999).
ctgcgtgtcagctttggtt

SEQ ID NO: 301517 - DNA, 19 bp, Homo sapiens
  siRNA target sequence for NEIL2 (NM_145043.1,985-1003).
gtgtcagctttggtttgtt

SEQ ID NO: 301518 - DNA, 19 bp, Homo sapiens
  siRNA target sequence for NEIL2 (NM_145043.1,1009-1027).
gcgtttgggtgaacgattt

SEQ ID NO: 301519 - DNA, 19 bp, Homo sapiens
  siRNA target sequence for NEIL2 (NM_145043.1,1011-1029).
gtttgggtgaacgatttct

SEQ ID NO: 301520 - DNA, 19 bp, Homo sapiens
  siRNA target sequence for NEIL2 (NM_145043.1,1246-1264).
cactgctggaccagagata

SEQ ID NO: 301521 - DNA, 19 bp, Homo sapiens
  siRNA target sequence for NEIL2 (NM_145043.1,1270-1288).
cagggctagggaacatcat

SEQ ID NO: 301522 - DNA, 19 bp, Homo sapiens
  siRNA target sequence for NEIL2 (NM_145043.1,1272-1290).
gggctagggaacatcatta

SEQ ID NO: 301523 - DNA, 19 bp, Homo sapiens
  siRNA target sequence for NEIL2 (NM_145043.1,1273-1291).
ggctagggaacatcattaa

SEQ ID NO: 301524 - DNA, 19 bp, Homo sapiens
  siRNA target sequence for NEIL2 (NM_145043.1,1377-1395).
cacgtggtggagttcagta

SEQ ID NO: 301525 - DNA, 19 bp, Homo sapiens
  siRNA target sequence for NEIL2 (NM_145043.1,1468-1486).
ctggccaccaggtcatgaa

SEQ ID NO: 301526 - DNA, 19 bp, Homo sapiens
  siRNA target sequence for NEIL2 (NM_145043.1,1500-1518).
cccgaagatgggttacaga

SEQ ID NO: 301527 - DNA, 19 bp, Homo sapiens
  siRNA target sequence for POLK (NM_016218.1,193-211).
gtgtgacagttacaaagat

SEQ ID NO: 301528 - DNA, 19 bp, Homo sapiens
  siRNA target sequence for POLK (NM_016218.1,201-219).
gttacaaagatgatcttct

SEQ ID NO: 301529 - DNA, 19 bp, Homo sapiens
  siRNA target sequence for POLK (NM_016218.1,220-238).
gcttaggatgggacttaat

SEQ ID NO: 301530 - DNA, 19 bp, Homo sapiens
  siRNA target sequence for POLK (NM_016218.1,225-243).
ggatgggacttaatgataa

SEQ ID NO: 301531 - DNA, 19 bp, Homo sapiens
  siRNA target sequence for POLK (NM_016218.1,226-244).
gatgggacttaatgataat

SEQ ID NO: 301532 - DNA, 19 bp, Homo sapiens
  siRNA target sequence for POLK (NM_016218.1,301-319).
cacgaaggggtccagattt

SEQ ID NO: 301533 - DNA, 19 bp, Homo sapiens
  siRNA target sequence for POLK (NM_016218.1,307-325).
ggggtccagattttatgga

SEQ ID NO: 301534 - DNA, 19 bp, Homo sapiens
  siRNA target sequence for POLK (NM_016218.1,308-326).
gggtccagattttatggaa

SEQ ID NO: 301535 - DNA, 19 bp, Homo sapiens
  siRNA target sequence for POLK (NM_016218.1,356-374).
caacgaattgaaaatatga

SEQ ID NO: 301536 - DNA, 19 bp, Homo sapiens
  siRNA target sequence for POLK (NM_016218.1,400-418).
ccaacagctaagaaaagca

SEQ ID NO: 301537 - DNA, 19 bp, Homo sapiens
  siRNA target sequence for POLK (NM_016218.1,425-443).
caggttgacagatttgcaa

SEQ ID NO: 301538 - DNA, 19 bp, Homo sapiens
  siRNA target sequence for POLK (NM_016218.1,452-470).
gaacaaagccgaaatttga

SEQ ID NO: 301539 - DNA, 19 bp, Homo sapiens
  siRNA target sequence for POLK (NM_016218.1,461-479).
cgaaatttgagcaatacca

SEQ ID NO: 301540 - DNA, 19 bp, Homo sapiens
  siRNA target sequence for POLK (NM_016218.1,477-495).
ccatagtgcacattgacat

SEQ ID NO: 301541 - DNA, 19 bp, Homo sapiens
  siRNA target sequence for POLK (NM_016218.1,552-570).
ccattgctgtaggatcaat

SEQ ID NO: 301542 - DNA, 19 bp, Homo sapiens
  siRNA target sequence for POLK (NM_016218.1,580-598).
gtctacttcaaattaccat

SEQ ID NO: 301543 - DNA, 19 bp, Homo sapiens
  siRNA target sequence for POLK (NM_016218.1,625-643).
catgccaggatttattgct

SEQ ID NO: 301544 - DNA, 19 bp, Homo sapiens
  siRNA target sequence for POLK (NM_016218.1,646-664).
gaggctgtgcccacaactt

SEQ ID NO: 301545 - DNA, 19 bp, Homo sapiens
  siRNA target sequence for POLK (NM_016218.1,648-666).
ggctgtgcccacaacttat

SEQ ID NO: 301546 - DNA, 19 bp, Homo sapiens
  siRNA target sequence for POLK (NM_016218.1,649-667).
gctgtgcccacaacttata

SEQ ID NO: 301547 - DNA, 19 bp, Homo sapiens
  siRNA target sequence for POLK (NM_016218.1,650-668).
ctgtgcccacaacttataa

SEQ ID NO: 301548 - DNA, 19 bp, Homo sapiens
  siRNA target sequence for POLK (NM_016218.1,652-670).
gtgcccacaacttataata

SEQ ID NO: 301549 - DNA, 19 bp, Homo sapiens
  siRNA target sequence for POLK (NM_016218.1,654-672).
gcccacaacttataatagt

SEQ ID NO: 301550 - DNA, 19 bp, Homo sapiens
  siRNA target sequence for POLK (NM_016218.1,699-717).
ctgtgagtaaagaggttaa

SEQ ID NO: 301551 - DNA, 19 bp, Homo sapiens
  siRNA target sequence for POLK (NM_016218.1,705-723).
gtaaagaggttaaggaaat

SEQ ID NO: 301552 - DNA, 19 bp, Homo sapiens
  siRNA target sequence for POLK (NM_016218.1,729-747).
ctgattatgatcccaattt

SEQ ID NO: 301553 - DNA, 19 bp, Homo sapiens
  siRNA target sequence for POLK (NM_016218.1,764-782).
gatgaagcctacttgaata

SEQ ID NO: 301554 - DNA, 19 bp, Homo sapiens
  siRNA target sequence for POLK (NM_016218.1,912-930).
ccatctctccactactttt

SEQ ID NO: 301555 - DNA, 19 bp, Homo sapiens
  siRNA target sequence for POLK (NM_016218.1,913-931).
catctctccactacttttt

SEQ ID NO: 301556 - DNA, 19 bp, Homo sapiens
  siRNA target sequence for POLK (NM_016218.1,963-981).
gagatcctttccaagtgaa

SEQ ID NO: 301557 - DNA, 19 bp, Homo sapiens
  siRNA target sequence for POLK (NM_016218.1,1001-1019).
cctcaaatactccaaaact

SEQ ID NO: 301558 - DNA, 19 bp, Homo sapiens
  siRNA target sequence for POLK (NM_016218.1,1049-1067).
gtggtaaaggaaattcgtt

SEQ ID NO: 301559 - DNA, 19 bp, Homo sapiens
  siRNA target sequence for POLK (NM_016218.1,1103-1121).
gcaggcattgccccaaata

SEQ ID NO: 301560 - DNA, 19 bp, Homo sapiens
  siRNA target sequence for POLK (NM_016218.1,1107-1125).
gcattgccccaaatacaat

SEQ ID NO: 301561 - DNA, 19 bp, Homo sapiens
  siRNA target sequence for POLK (NM_016218.1,1116-1134).
caaatacaatgttagcaaa

SEQ ID NO: 301562 - DNA, 19 bp, Homo sapiens
  siRNA target sequence for POLK (NM_016218.1,1131-1149).
caaaagtatgcagtgataa

SEQ ID NO: 301563 - DNA, 19 bp, Homo sapiens
  siRNA target sequence for POLK (NM_016218.1,1143-1161).
gtgataagaataaaccaaa

SEQ ID NO: 301564 - DNA, 19 bp, Homo sapiens
  siRNA target sequence for POLK (NM_016218.1,1273-1291).
ccttggaattattacatgt

SEQ ID NO: 301565 - DNA, 19 bp, Homo sapiens
  siRNA target sequence for POLK (NM_016218.1,1347-1365).
ggcattatttccttcatat

SEQ ID NO: 301566 - DNA, 19 bp, Homo sapiens
  siRNA target sequence for POLK (NM_016218.1,1369-1387).
cttgggtctaggttcaaca

SEQ ID NO: 301567 - DNA, 19 bp, Homo sapiens
  siRNA target sequence for POLK (NM_016218.1,1423-1441).
cgttgagaggacattcagt

SEQ ID NO: 301568 - DNA, 19 bp, Homo sapiens
  siRNA target sequence for POLK (NM_016218.1,1429-1447).
gaggacattcagtgagata

SEQ ID NO: 301569 - DNA, 19 bp, Homo sapiens
  siRNA target sequence for POLK (NM_016218.1,1528-1546).
gggtagaactgttaccatt

SEQ ID NO: 301570 - DNA, 19 bp, Homo sapiens
  siRNA target sequence for POLK (NM_016218.1,1529-1547).
ggtagaactgttaccatta

SEQ ID NO: 301571 - DNA, 19 bp, Homo sapiens
  siRNA target sequence for POLK (NM_016218.1,1530-1548).
gtagaactgttaccattaa

SEQ ID NO: 301572 - DNA, 19 bp, Homo sapiens
  siRNA target sequence for POLK (NM_016218.1,1533-1551).
gaactgttaccattaagtt

SEQ ID NO: 301573 - DNA, 19 bp, Homo sapiens
  siRNA target sequence for POLK (NM_016218.1,1536-1554).
ctgttaccattaagttgaa

SEQ ID NO: 301574 - DNA, 19 bp, Homo sapiens
  siRNA target sequence for POLK (NM_016218.1,1538-1556).
gttaccattaagttgaaga

SEQ ID NO: 301575 - DNA, 19 bp, Homo sapiens
  siRNA target sequence for POLK (NM_016218.1,1580-1598).
cgtgcatctacagtttcat

SEQ ID NO: 301576 - DNA, 19 bp, Homo sapiens
  siRNA target sequence for POLK (NM_016218.1,1630-1648).
cattgctaaggaattgcta

SEQ ID NO: 301577 - DNA, 19 bp, Homo sapiens
  siRNA target sequence for POLK (NM_016218.1,1699-1717).
gggtgttcggatatctagt

SEQ ID NO: 301578 - DNA, 19 bp, Homo sapiens
  siRNA target sequence for POLK (NM_016218.1,1700-1718).
ggtgttcggatatctagtt

SEQ ID NO: 301579 - DNA, 19 bp, Homo sapiens
  siRNA target sequence for POLK (NM_016218.1,1742-1760).
caccaacaaaggagcatta

SEQ ID NO: 301580 - DNA, 19 bp, Homo sapiens
  siRNA target sequence for POLK (NM_016218.1,1744-1762).
ccaacaaaggagcattatt

SEQ ID NO: 301581 - DNA, 19 bp, Homo sapiens
  siRNA target sequence for POLK (NM_016218.1,1752-1770).
ggagcattattggcttttt

SEQ ID NO: 301582 - DNA, 19 bp, Homo sapiens
  siRNA target sequence for POLK (NM_016218.1,1794-1812).
cagccactgagtgtacatt

SEQ ID NO: 301583 - DNA, 19 bp, Homo sapiens
  siRNA target sequence for POLK (NM_016218.1,1797-1815).
ccactgagtgtacattaga

SEQ ID NO: 301584 - DNA, 19 bp, Homo sapiens
  siRNA target sequence for POLK (NM_016218.1,1804-1822).
gtgtacattagagaaaact

SEQ ID NO: 301585 - DNA, 19 bp, Homo sapiens
  siRNA target sequence for POLK (NM_016218.1,1838-1856).
gtaaaacctctagaaatgt

SEQ ID NO: 301586 - DNA, 19 bp, Homo sapiens
  siRNA target sequence for POLK (NM_016218.1,1847-1865).
ctagaaatgtctcataaga

SEQ ID NO: 301587 - DNA, 19 bp, Homo sapiens
  siRNA target sequence for POLK (NM_016218.1,1926-1944).
gtgaagccgtgaataaaca

SEQ ID NO: 301588 - DNA, 19 bp, Homo sapiens
  siRNA target sequence for POLK (NM_016218.1,1931-1949).
gccgtgaataaacaaagtt

SEQ ID NO: 301589 - DNA, 19 bp, Homo sapiens
  siRNA target sequence for POLK (NM_016218.1,1961-1979).
caaccattccaagttttaa

SEQ ID NO: 301590 - DNA, 19 bp, Homo sapiens
  siRNA target sequence for POLK (NM_016218.1,1964-1982).
ccattccaagttttaaaga

SEQ ID NO: 301591 - DNA, 19 bp, Homo sapiens
  siRNA target sequence for POLK (NM_016218.1,2021-2039).
gatgactgtcagatactta

SEQ ID NO: 301592 - DNA, 19 bp, Homo sapiens
  siRNA target sequence for POLK (NM_016218.1,2074-2092).
cagtctggaagccttgaat

SEQ ID NO: 301593 - DNA, 19 bp, Homo sapiens
  siRNA target sequence for POLK (NM_016218.1,2111-2129).
cttgatggaccttcaatca

SEQ ID NO: 301594 - DNA, 19 bp, Homo sapiens
  siRNA target sequence for POLK (NM_016218.1,2120-2138).
ccttcaatcagtgaaaact

SEQ ID NO: 301595 - DNA, 19 bp, Homo sapiens
  siRNA target sequence for POLK (NM_016218.1,2124-2142).
caatcagtgaaaactttaa

SEQ ID NO: 301596 - DNA, 19 bp, Homo sapiens
  siRNA target sequence for POLK (NM_016218.1,2262-2280).
cagtagattgtatagcttt

SEQ ID NO: 301597 - DNA, 19 bp, Homo sapiens
  siRNA target sequence for POLK (NM_016218.1,2282-2300).
gtagatactatagataact

SEQ ID NO: 301598 - DNA, 19 bp, Homo sapiens
  siRNA target sequence for POLK (NM_016218.1,2310-2328).
cagaaagcatagatgcttt

SEQ ID NO: 301599 - DNA, 19 bp, Homo sapiens
  siRNA target sequence for POLK (NM_016218.1,2316-2334).
gcatagatgctttaagtaa

SEQ ID NO: 301600 - DNA, 19 bp, Homo sapiens
  siRNA target sequence for POLK (NM_016218.1,2361-2379).
gtctcccaagcaagtcttt

SEQ ID NO: 301601 - DNA, 19 bp, Homo sapiens
  siRNA target sequence for POLK (NM_016218.1,2365-2383).
cccaagcaagtcttttaat

SEQ ID NO: 301602 - DNA, 19 bp, Homo sapiens
  siRNA target sequence for POLK (NM_016218.1,2367-2385).
caagcaagtcttttaatat

SEQ ID NO: 301603 - DNA, 19 bp, Homo sapiens
  siRNA target sequence for POLK (NM_016218.1,2370-2388).
gcaagtcttttaatattga

SEQ ID NO: 301604 - DNA, 19 bp, Homo sapiens
  siRNA target sequence for POLK (NM_016218.1,2390-2408).
cactgtcatcagaattctt

SEQ ID NO: 301605 - DNA, 19 bp, Homo sapiens
  siRNA target sequence for POLK (NM_016218.1,2461-2479).
ccgccagccttacttatgt

SEQ ID NO: 301606 - DNA, 19 bp, Homo sapiens
  siRNA target sequence for POLK (NM_016218.1,2463-2481).
gccagccttacttatgtga

SEQ ID NO: 301607 - DNA, 19 bp, Homo sapiens
  siRNA target sequence for POLK (NM_016218.1,2511-2529).
ctgtttgtaacgtagaaca

SEQ ID NO: 301608 - DNA, 19 bp, Homo sapiens
  siRNA target sequence for POLK (NM_016218.1,2513-2531).
gtttgtaacgtagaacaaa

SEQ ID NO: 301609 - DNA, 19 bp, Homo sapiens
  siRNA target sequence for POLK (NM_016218.1,2538-2556).
cagatctaaccctgttcaa

SEQ ID NO: 301610 - DNA, 19 bp, Homo sapiens
  siRNA target sequence for POLK (NM_016218.1,2561-2579).
catgtggatgtttgcttaa

SEQ ID NO: 301611 - DNA, 19 bp, Homo sapiens
  siRNA target sequence for POLK (NM_016218.1,2564-2582).
gtggatgtttgcttaaata

SEQ ID NO: 301612 - DNA, 19 bp, Homo sapiens
  siRNA target sequence for POLK (NM_016218.1,2661-2679).
gctcaagtggagtacagaa

SEQ ID NO: 301613 - DNA, 19 bp, Homo sapiens
  siRNA target sequence for POLK (NM_016218.1,2672-2690).
gtacagaaggctgtaacaa

SEQ ID NO: 301614 - DNA, 19 bp, Homo sapiens
  siRNA target sequence for POLK (NM_016218.1,2700-2718).
ggccaggattgatgacaaa

SEQ ID NO: 301615 - DNA, 19 bp, Homo sapiens
  siRNA target sequence for POLK (NM_016218.1,2715-2733).
caaagtactcaacatcaaa

SEQ ID NO: 301616 - DNA, 19 bp, Homo sapiens
  siRNA target sequence for POLK (NM_016218.1,2753-2771).
cccaaacatacccttgata

SEQ ID NO: 301617 - DNA, 19 bp, Homo sapiens
  siRNA target sequence for POLK (NM_016218.1,2754-2772).
ccaaacatacccttgatat

SEQ ID NO: 301618 - DNA, 19 bp, Homo sapiens
  siRNA target sequence for POLK (NM_016218.1,2755-2773).
caaacatacccttgatata

SEQ ID NO: 301619 - DNA, 19 bp, Homo sapiens
  siRNA target sequence for RAD9A (NM_004584.2,308-326).
gctgtaagatcctgatgaa

SEQ ID NO: 301620 - DNA, 19 bp, Homo sapiens
  siRNA target sequence for RAD9A (NM_004584.2,778-796).
gcagagtcagcaaacttga

SEQ ID NO: 301621 - DNA, 19 bp, Homo sapiens
  siRNA target sequence for RAD9A (NM_004584.2,783-801).
gtcagcaaacttgaatctt

SEQ ID NO: 301622 - DNA, 19 bp, Homo sapiens
  siRNA target sequence for RAD9A (NM_004584.2,788-806).
caaacttgaatcttagcat

SEQ ID NO: 301623 - DNA, 19 bp, Homo sapiens
  siRNA target sequence for RAD9A (NM_004584.2,988-1006).
gccaatgacgacattgact

SEQ ID NO: 301624 - DNA, 19 bp, Homo sapiens
  siRNA target sequence for RAD9A (NM_004584.2,994-1012).
gacgacattgactcttaca

SEQ ID NO: 301625 - DNA, 19 bp, Homo sapiens
  siRNA target sequence for RAD9A (NM_004584.2,1017-1035).
cgccatggaaaccactata

SEQ ID NO: 301626 - DNA, 19 bp, Homo sapiens
  siRNA target sequence for RAD9A (NM_004584.2,1051-1069).
cgggtgctgccctccattt

SEQ ID NO: 301627 - DNA, 19 bp, Homo sapiens
  siRNA target sequence for RBBP4 (NM_005610.1,907-925).
gaagtgaactgcctttctt

SEQ ID NO: 301628 - DNA, 19 bp, Homo sapiens
  siRNA target sequence for RBBP4 (NM_005610.1,910-928).
gtgaactgcctttctttca

SEQ ID NO: 301629 - DNA, 19 bp, Homo sapiens
  siRNA target sequence for RBBP4 (NM_005610.1,991-1009).
ctgagaaatctgaaactta

SEQ ID NO: 301630 - DNA, 19 bp, Homo sapiens
  siRNA target sequence for RBBP4 (NM_005610.1,1000-1018).
ctgaaacttaagttgcatt

SEQ ID NO: 301631 - DNA, 19 bp, Homo sapiens
  siRNA target sequence for RBBP4 (NM_005610.1,1020-1038).
ctttgagtcacataaggat

SEQ ID NO: 301632 - DNA, 19 bp, Homo sapiens
  siRNA target sequence for RBBP4 (NM_005610.1,1061-1079).
cacctcacaatgagactat

SEQ ID NO: 301633 - DNA, 19 bp, Homo sapiens
  siRNA target sequence for RBBP4 (NM_005610.1,1068-1086).
caatgagactattttagct

SEQ ID NO: 301634 - DNA, 19 bp, Homo sapiens
  siRNA target sequence for RBBP4 (NM_005610.1,1097-1115).
ctgatcgcagactgaatgt

SEQ ID NO: 301635 - DNA, 19 bp, Homo sapiens
  siRNA target sequence for RBBP4 (NM_005610.1,1099-1117).
gatcgcagactgaatgtct

SEQ ID NO: 301636 - DNA, 19 bp, Homo sapiens
  siRNA target sequence for RBBP4 (NM_005610.1,1168-1186).
gggccaccagagttgttgt

SEQ ID NO: 301637 - DNA, 19 bp, Homo sapiens
  siRNA target sequence for RBBP4 (NM_005610.1,1169-1187).
ggccaccagagttgttgtt

SEQ ID NO: 301638 - DNA, 19 bp, Homo sapiens
  siRNA target sequence for RBBP4 (NM_005610.1,1171-1189).
ccaccagagttgttgttta

SEQ ID NO: 301639 - DNA, 19 bp, Homo sapiens
  siRNA target sequence for CDC45L (NM_003504.3,87-105).
ccgatttccgcaaagagtt

SEQ ID NO: 301640 - DNA, 19 bp, Homo sapiens
  siRNA target sequence for CDC45L (NM_003504.3,234-252).
ctgggtggcaagaacttga

SEQ ID NO: 301641 - DNA, 19 bp, Homo sapiens
  siRNA target sequence for CDC45L (NM_003504.3,309-327).
gagctaatgtagacctatt

SEQ ID NO: 301642 - DNA, 19 bp, Homo sapiens
  siRNA target sequence for CDC45L (NM_003504.3,312-330).
ctaatgtagacctattgga

SEQ ID NO: 301643 - DNA, 19 bp, Homo sapiens
  siRNA target sequence for CDC45L (NM_003504.3,344-362).
gatgaagacactatattct

SEQ ID NO: 301644 - DNA, 19 bp, Homo sapiens
  siRNA target sequence for CDC45L (NM_003504.3,350-368).
gacactatattctttgtgt

SEQ ID NO: 301645 - DNA, 19 bp, Homo sapiens
  siRNA target sequence for CDC45L (NM_003504.3,375-393).
cccataggccagtcaatgt

SEQ ID NO: 301646 - DNA, 19 bp, Homo sapiens
  siRNA target sequence for CDC45L (NM_003504.3,384-402).
cagtcaatgtcgtcaatgt

SEQ ID NO: 301647 - DNA, 19 bp, Homo sapiens
  siRNA target sequence for CDC45L (NM_003504.3,386-404).
gtcaatgtcgtcaatgtat

SEQ ID NO: 301648 - DNA, 19 bp, Homo sapiens
  siRNA target sequence for CDC45L (NM_003504.3,409-427).
cgatacccagatcaaatta

SEQ ID NO: 301649 - DNA, 19 bp, Homo sapiens
  siRNA target sequence for CDC45L (NM_003504.3,416-434).
cagatcaaattactcatta

SEQ ID NO: 301650 - DNA, 19 bp, Homo sapiens
  siRNA target sequence for CDC45L (NM_003504.3,459-477).
ccgcctatgaagacatctt

SEQ ID NO: 301651 - DNA, 19 bp, Homo sapiens
  siRNA target sequence for CDC45L (NM_003504.3,635-653).
gactacgagcagtatgaat

SEQ ID NO: 301652 - DNA, 19 bp, Homo sapiens
  siRNA target sequence for CDC45L (NM_003504.3,637-655).
ctacgagcagtatgaatat

SEQ ID NO: 301653 - DNA, 19 bp, Homo sapiens
  siRNA target sequence for CDC45L (NM_003504.3,640-658).
cgagcagtatgaatatcat

SEQ ID NO: 301654 - DNA, 19 bp, Homo sapiens
  siRNA target sequence for CDC45L (NM_003504.3,666-684).
cgtcagccatggtgatgtt

SEQ ID NO: 301655 - DNA, 19 bp, Homo sapiens
  siRNA target sequence for CDC45L (NM_003504.3,879-897).
cacggatctcctttgagta

SEQ ID NO: 301656 - DNA, 19 bp, Homo sapiens
  siRNA target sequence for CDC45L (NM_003504.3,882-900).
ggatctcctttgagtatga

SEQ ID NO: 301657 - DNA, 19 bp, Homo sapiens
  siRNA target sequence for CDC45L (NM_003504.3,944-962).
ctgtgcaacaccagctata

SEQ ID NO: 301658 - DNA, 19 bp, Homo sapiens
  siRNA target sequence for CDC45L (NM_003504.3,1109-1127).
gaagagtctgcaaataaat

SEQ ID NO: 301659 - DNA, 19 bp, Homo sapiens
  siRNA target sequence for CDC45L (NM_003504.3,1150-1168).
gcagactttcagcattcat

SEQ ID NO: 301660 - DNA, 19 bp, Homo sapiens
  siRNA target sequence for CDC45L (NM_003504.3,1248-1266).
gctcagggacagatcactt

SEQ ID NO: 301661 - DNA, 19 bp, Homo sapiens
  siRNA target sequence for CDC45L (NM_003504.3,1251-1269).
cagggacagatcacttcat

SEQ ID NO: 301662 - DNA, 19 bp, Homo sapiens
  siRNA target sequence for CDC45L (NM_003504.3,1493-1511).
ctgctcaagtcctttgtgt

SEQ ID NO: 301663 - DNA, 19 bp, Homo sapiens
  siRNA target sequence for CDC45L (NM_003504.3,1682-1700).
cggatgctgcacaaccatt

SEQ ID NO: 301664 - DNA, 19 bp, Homo sapiens
  siRNA target sequence for CDC45L (NM_003504.3,1683-1701).
ggatgctgcacaaccattt

SEQ ID NO: 301665 - DNA, 19 bp, Homo sapiens
  siRNA target sequence for CDC45L (NM_003504.3,1684-1702).
gatgctgcacaaccatttt

SEQ ID NO: 301666 - DNA, 19 bp, Homo sapiens
  siRNA target sequence for CDC45L (NM_003504.3,1697-1715).
cattttgacctctcagtaa

SEQ ID NO: 301667 - DNA, 19 bp, Homo sapiens
  siRNA target sequence for CDC45L (NM_003504.3,1744-1762).
gtttctggacgcacttatt

SEQ ID NO: 301668 - DNA, 19 bp, Homo sapiens
  siRNA target sequence for GMNN (NM_015895.2,450-468).
gcaggcttgtccaaaagga

SEQ ID NO: 301669 - DNA, 19 bp, Homo sapiens
  siRNA target sequence for GMNN (NM_015895.2,474-492).
cggaatgaccacttaacat

SEQ ID NO: 301670 - DNA, 19 bp, Homo sapiens
  siRNA target sequence for GMNN (NM_015895.2,482-500).
ccacttaacatctacaact

SEQ ID NO: 301671 - DNA, 19 bp, Homo sapiens
  siRNA target sequence for GMNN (NM_015895.2,512-530).
ggttattgtcccagaatct

SEQ ID NO: 301672 - DNA, 19 bp, Homo sapiens
  siRNA target sequence for GMNN (NM_015895.2,521-539).
cccagaatctagtgaaaat

SEQ ID NO: 301673 - DNA, 19 bp, Homo sapiens
  siRNA target sequence for GMNN (NM_015895.2,559-577).
cccaggagtcatttgatct

SEQ ID NO: 301674 - DNA, 19 bp, Homo sapiens
  siRNA target sequence for GMNN (NM_015895.2,560-578).
ccaggagtcatttgatctt

SEQ ID NO: 301675 - DNA, 19 bp, Homo sapiens
  siRNA target sequence for GMNN (NM_015895.2,561-579).
caggagtcatttgatctta

SEQ ID NO: 301676 - DNA, 19 bp, Homo sapiens
  siRNA target sequence for GMNN (NM_015895.2,564-582).
gagtcatttgatcttatga

SEQ ID NO: 301677 - DNA, 19 bp, Homo sapiens
  siRNA target sequence for GMNN (NM_015895.2,594-612).
ccatcctctcagtattgga

SEQ ID NO: 301678 - DNA, 19 bp, Homo sapiens
  siRNA target sequence for GMNN (NM_015895.2,632-650).
gagaaaggcgctgtatgaa

SEQ ID NO: 301679 - DNA, 19 bp, Homo sapiens
  siRNA target sequence for GMNN (NM_015895.2,640-658).
cgctgtatgaagcacttaa

SEQ ID NO: 301680 - DNA, 19 bp, Homo sapiens
  siRNA target sequence for GMNN (NM_015895.2,773-791).
gctaatagagagactgaat

SEQ ID NO: 301681 - DNA, 19 bp, Homo sapiens
  siRNA target sequence for GMNN (NM_015895.2,792-810).
ggtgaacctctggataatt

SEQ ID NO: 301682 - DNA, 19 bp, Homo sapiens
  siRNA target sequence for GMNN (NM_015895.2,793-811).
gtgaacctctggataattt

SEQ ID NO: 301683 - DNA, 19 bp, Homo sapiens
  siRNA target sequence for GMNN (NM_015895.2,821-839).
ggataatcaggaatttgat

SEQ ID NO: 301684 - DNA, 19 bp, Homo sapiens
  siRNA target sequence for GMNN (NM_015895.2,822-840).
gataatcaggaatttgatt

SEQ ID NO: 301685 - DNA, 19 bp, Homo sapiens
  siRNA target sequence for GMNN (NM_015895.2,922-940).
cggatgcaaagccatgtat

SEQ ID NO: 301686 - DNA, 19 bp, Homo sapiens
  siRNA target sequence for GMNN (NM_015895.2,924-942).
gatgcaaagccatgtatat

SEQ ID NO: 301687 - DNA, 19 bp, Homo sapiens
  siRNA target sequence for SPHAR (NM_006542.1,244-262).
gataaaaatatcagtatgt

SEQ ID NO: 301688 - DNA, 19 bp, Homo sapiens
  siRNA target sequence for SPHAR (NM_006542.1,385-403).
caatgtctcatttatgata

SEQ ID NO: 301689 - DNA, 19 bp, Homo sapiens
  siRNA target sequence for SPHAR (NM_006542.1,389-407).
gtctcatttatgatagatt

SEQ ID NO: 301690 - DNA, 19 bp, Homo sapiens
  siRNA target sequence for SPHAR (NM_006542.1,393-411).
catttatgatagatttgca

SEQ ID NO: 301691 - DNA, 19 bp, Homo sapiens
  siRNA target sequence for REC8L1 (NM_005132.1,653-671).
ggtgtgatccgcgtctatt

SEQ ID NO: 301692 - DNA, 19 bp, Homo sapiens
  siRNA target sequence for REC8L1 (NM_005132.1,658-676).
gatccgcgtctattctcaa

SEQ ID NO: 301693 - DNA, 19 bp, Homo sapiens
  siRNA target sequence for REC8L1 (NM_005132.1,661-679).
ccgcgtctattctcaacaa

SEQ ID NO: 301694 - DNA, 19 bp, Homo sapiens
  siRNA target sequence for REC8L1 (NM_005132.1,662-680).
cgcgtctattctcaacaat

SEQ ID NO: 301695 - DNA, 19 bp, Homo sapiens
  siRNA target sequence for REC8L1 (NM_005132.1,737-755).
ctgcagatccgaatagata

SEQ ID NO: 301696 - DNA, 19 bp, Homo sapiens
  siRNA target sequence for REC8L1 (NM_005132.1,830-848).
cccttttttgggatgatgt

SEQ ID NO: 301697 - DNA, 19 bp, Homo sapiens
  siRNA target sequence for REC8L1 (NM_005132.1,863-881).
cttcctagtcctttcgata

SEQ ID NO: 301698 - DNA, 19 bp, Homo sapiens
  siRNA target sequence for REC8L1 (NM_005132.1,1328-1346).
cgtcgtcgccggttactgt

SEQ ID NO: 301699 - DNA, 19 bp, Homo sapiens
  siRNA target sequence for REC8L1 (NM_005132.1,1329-1347).
gtcgtcgccggttactgtt

SEQ ID NO: 301700 - DNA, 19 bp, Homo sapiens
  siRNA target sequence for REC8L1 (NM_005132.1,1457-1475).
ggccctgcggagttgttca

SEQ ID NO: 301701 - DNA, 19 bp, Homo sapiens
  siRNA target sequence for REC8L1 (NM_005132.1,1495-1513).
ctggctaccccctgaacta

SEQ ID NO: 301702 - DNA, 19 bp, Homo sapiens
  siRNA target sequence for REC8L1 (NM_005132.1,1664-1682).
cttatggtgtctttagaga

SEQ ID NO: 301703 - DNA, 19 bp, Homo sapiens
  siRNA target sequence for REC8L1 (NM_005132.1,1987-2005).
gctctcagcgcaacagatt

SEQ ID NO: 301704 - DNA, 19 bp, Homo sapiens
  siRNA target sequence for REC8L1 (NM_005132.1,1990-2008).
ctcagcgcaacagattctt

SEQ ID NO: 301705 - DNA, 19 bp, Homo sapiens
  siRNA target sequence for REC8L1 (NM_005132.1,1992-2010).
cagcgcaacagattcttca

SEQ ID NO: 301706 - DNA, 19 bp, Homo sapiens
  siRNA target sequence for CIDEA (NM_001279.2,293-311).
ggagacaacacgcatttca

SEQ ID NO: 301707 - DNA, 19 bp, Homo sapiens
  siRNA target sequence for CIDEA (NM_001279.2,294-312).
gagacaacacgcatttcat

SEQ ID NO: 301708 - DNA, 19 bp, Homo sapiens
  siRNA target sequence for CIDEA (NM_001279.2,396-414).
gagtcaccttcgacttgta

SEQ ID NO: 301709 - DNA, 19 bp, Homo sapiens
  siRNA target sequence for CIDEA (NM_001279.2,398-416).
gtcaccttcgacttgtaca

SEQ ID NO: 301710 - DNA, 19 bp, Homo sapiens
  siRNA target sequence for CIDEA (NM_001279.2,459-477).
ccaccatgtatgagatgta

SEQ ID NO: 301711 - DNA, 19 bp, Homo sapiens
  siRNA target sequence for CIDEA (NM_001279.2,560-578).
gtgacgggacagtttctca

SEQ ID NO: 301712 - DNA, 19 bp, Homo sapiens
  siRNA target sequence for CIDEA (NM_001279.2,564-582).
cgggacagtttctcatcta

SEQ ID NO: 301713 - DNA, 19 bp, Homo sapiens
  siRNA target sequence for CIDEA (NM_001279.2,567-585).
gacagtttctcatctatct

SEQ ID NO: 301714 - DNA, 19 bp, Homo sapiens
  siRNA target sequence for CDC40 (NM_015891.2,131-149).
ccctcatgcacttgactaa

SEQ ID NO: 301715 - DNA, 19 bp, Homo sapiens
  siRNA target sequence for CDC40 (NM_015891.2,132-150).
cctcatgcacttgactaaa

SEQ ID NO: 301716 - DNA, 19 bp, Homo sapiens
  siRNA target sequence for CDC40 (NM_015891.2,133-151).
ctcatgcacttgactaaat

SEQ ID NO: 301717 - DNA, 19 bp, Homo sapiens
  siRNA target sequence for CDC40 (NM_015891.2,144-162).
gactaaatcgccttcatca

SEQ ID NO: 301718 - DNA, 19 bp, Homo sapiens
  siRNA target sequence for CDC40 (NM_015891.2,146-164).
ctaaatcgccttcatcaaa

SEQ ID NO: 301719 - DNA, 19 bp, Homo sapiens
  siRNA target sequence for CDC40 (NM_015891.2,243-261).
ccctgccgtcaaagaagtt

SEQ ID NO: 301720 - DNA, 19 bp, Homo sapiens
  siRNA target sequence for CDC40 (NM_015891.2,245-263).
ctgccgtcaaagaagttca

SEQ ID NO: 301721 - DNA, 19 bp, Homo sapiens
  siRNA target sequence for CDC40 (NM_015891.2,248-266).
ccgtcaaagaagttcagta

SEQ ID NO: 301722 - DNA, 19 bp, Homo sapiens
  siRNA target sequence for CDC40 (NM_015891.2,249-267).
cgtcaaagaagttcagtat

SEQ ID NO: 301723 - DNA, 19 bp, Homo sapiens
  siRNA target sequence for CDC40 (NM_015891.2,256-274).
gaagttcagtataatccta

SEQ ID NO: 301724 - DNA, 19 bp, Homo sapiens
  siRNA target sequence for CDC40 (NM_015891.2,285-303).
catgtttgctcctgagttt

SEQ ID NO: 301725 - DNA, 19 bp, Homo sapiens
  siRNA target sequence for CDC40 (NM_015891.2,317-335).
cctttaggacacagcaaat

SEQ ID NO: 301726 - DNA, 19 bp, Homo sapiens
  siRNA target sequence for CDC40 (NM_015891.2,338-356).
ctgcccctagaaatatgct

SEQ ID NO: 301727 - DNA, 19 bp, Homo sapiens
  siRNA target sequence for CDC40 (NM_015891.2,373-391).
ccagctcatatcaatgatt

SEQ ID NO: 301728 - DNA, 19 bp, Homo sapiens
  siRNA target sequence for CDC40 (NM_015891.2,374-392).
cagctcatatcaatgattt

SEQ ID NO: 301729 - DNA, 19 bp, Homo sapiens
  siRNA target sequence for CDC40 (NM_015891.2,376-394).
gctcatatcaatgatttca

SEQ ID NO: 301730 - DNA, 19 bp, Homo sapiens
  siRNA target sequence for CDC40 (NM_015891.2,410-428).
ggagaacttttgcaacata

SEQ ID NO: 301731 - DNA, 19 bp, Homo sapiens
  siRNA target sequence for CDC40 (NM_015891.2,425-443).
catatggttatgcattaga

SEQ ID NO: 301732 - DNA, 19 bp, Homo sapiens
  siRNA target sequence for CDC40 (NM_015891.2,437-455).
cattagacccttcattaga

SEQ ID NO: 301733 - DNA, 19 bp, Homo sapiens
  siRNA target sequence for CDC40 (NM_015891.2,444-462).
cccttcattagataatcat

SEQ ID NO: 301734 - DNA, 19 bp, Homo sapiens
  siRNA target sequence for CDC40 (NM_015891.2,463-481).
caagtgtctgctaaatata

SEQ ID NO: 301735 - DNA, 19 bp, Homo sapiens
  siRNA target sequence for CDC40 (NM_015891.2,468-486).
gtctgctaaatatattggt

SEQ ID NO: 301736 - DNA, 19 bp, Homo sapiens
  siRNA target sequence for CDC40 (NM_015891.2,581-599).
catccaatattgatggttt

SEQ ID NO: 301737 - DNA, 19 bp, Homo sapiens
  siRNA target sequence for CDC40 (NM_015891.2,603-621).
gggaccatgggcaaaatat

SEQ ID NO: 301738 - DNA, 19 bp, Homo sapiens
  siRNA target sequence for CDC40 (NM_015891.2,732-750).
ggagaagacaatcttacat

SEQ ID NO: 301739 - DNA, 19 bp, Homo sapiens
  siRNA target sequence for CDC40 (NM_015891.2,777-795).
caggtcctatcttcacata

SEQ ID NO: 301740 - DNA, 19 bp, Homo sapiens
  siRNA target sequence for CDC40 (NM_015891.2,797-815).
ctcaggatgttggtgttaa

SEQ ID NO: 301741 - DNA, 19 bp, Homo sapiens
  siRNA target sequence for CDC40 (NM_015891.2,801-819).
ggatgttggtgttaatcta

SEQ ID NO: 301742 - DNA, 19 bp, Homo sapiens
  siRNA target sequence for CDC40 (NM_015891.2,811-829).
gttaatctacggtcaacta

SEQ ID NO: 301743 - DNA, 19 bp, Homo sapiens
  siRNA target sequence for CDC40 (NM_015891.2,833-851).
cacctgagaagtgttatct

SEQ ID NO: 301744 - DNA, 19 bp, Homo sapiens
  siRNA target sequence for CDC40 (NM_015891.2,893-911).
gcgtcagtgcagtcagatt

SEQ ID NO: 301745 - DNA, 19 bp, Homo sapiens
  siRNA target sequence for CDC40 (NM_015891.2,897-915).
cagtgcagtcagattgttt

SEQ ID NO: 301746 - DNA, 19 bp, Homo sapiens
  siRNA target sequence for CDC40 (NM_015891.2,947-965).
ccatggactgtaaaattaa

SEQ ID NO: 301747 - DNA, 19 bp, Homo sapiens
  siRNA target sequence for CDC40 (NM_015891.2,951-969).
ggactgtaaaattaagcta

SEQ ID NO: 301748 - DNA, 19 bp, Homo sapiens
  siRNA target sequence for CDC40 (NM_015891.2,952-970).
gactgtaaaattaagctat

SEQ ID NO: 301749 - DNA, 19 bp, Homo sapiens
  siRNA target sequence for CDC40 (NM_015891.2,988-1006).
cggcgctgtctgagaacat

SEQ ID NO: 301750 - DNA, 19 bp, Homo sapiens
  siRNA target sequence for CDC40 (NM_015891.2,989-1007).
ggcgctgtctgagaacatt

SEQ ID NO: 301751 - DNA, 19 bp, Homo sapiens
  siRNA target sequence for CDC40 (NM_015891.2,1004-1022).
catttattggtcacagtaa

SEQ ID NO: 301752 - DNA, 19 bp, Homo sapiens
  siRNA target sequence for CDC40 (NM_015891.2,1032-1050).
ggatatctgcttcaatact

SEQ ID NO: 301753 - DNA, 19 bp, Homo sapiens
  siRNA target sequence for CDC40 (NM_015891.2,1075-1093).
gcctatgacaggtatctta

SEQ ID NO: 301754 - DNA, 19 bp, Homo sapiens
  siRNA target sequence for CDC40 (NM_015891.2,1076-1094).
cctatgacaggtatcttaa

SEQ ID NO: 301755 - DNA, 19 bp, Homo sapiens
  siRNA target sequence for CDC40 (NM_015891.2,1108-1126).
gagacaggacagtgtatat

SEQ ID NO: 301756 - DNA, 19 bp, Homo sapiens
  siRNA target sequence for CDC40 (NM_015891.2,1110-1128).
gacaggacagtgtatatca

SEQ ID NO: 301757 - DNA, 19 bp, Homo sapiens
  siRNA target sequence for CDC40 (NM_015891.2,1115-1133).
gacagtgtatatcaagatt

SEQ ID NO: 301758 - DNA, 19 bp, Homo sapiens
  siRNA target sequence for CDC40 (NM_015891.2,1136-1154).
caaaccgaaaagtacctta

SEQ ID NO: 301759 - DNA, 19 bp, Homo sapiens
  siRNA target sequence for CDC40 (NM_015891.2,1147-1165).
gtaccttattgtgtcaaat

SEQ ID NO: 301760 - DNA, 19 bp, Homo sapiens
  siRNA target sequence for CDC40 (NM_015891.2,1150-1168).
ccttattgtgtcaaattca

SEQ ID NO: 301761 - DNA, 19 bp, Homo sapiens
  siRNA target sequence for CDC40 (NM_015891.2,1201-1219).
gctgggatgtctgataaga

SEQ ID NO: 301762 - DNA, 19 bp, Homo sapiens
  siRNA target sequence for CDC40 (NM_015891.2,1205-1223).
ggatgtctgataagaagat

SEQ ID NO: 301763 - DNA, 19 bp, Homo sapiens
  siRNA target sequence for CDC40 (NM_015891.2,1225-1243).
gtgcaatgggacattcgaa

SEQ ID NO: 301764 - DNA, 19 bp, Homo sapiens
  siRNA target sequence for CDC40 (NM_015891.2,1236-1254).
cattcgaagtggagaaatt

SEQ ID NO: 301765 - DNA, 19 bp, Homo sapiens
  siRNA target sequence for CDC40 (NM_015891.2,1309-1327).
gagaataggagatttgtga

SEQ ID NO: 301766 - DNA, 19 bp, Homo sapiens
  siRNA target sequence for CDC40 (NM_015891.2,1425-1443).
gactttgtctccaaatgga

SEQ ID NO: 301767 - DNA, 19 bp, Homo sapiens
  siRNA target sequence for CDC40 (NM_015891.2,1448-1466).
ggctagcatgccaatcaat

SEQ ID NO: 301768 - DNA, 19 bp, Homo sapiens
  siRNA target sequence for CDC40 (NM_015891.2,1459-1477).
caatcaatggacaaccaaa

SEQ ID NO: 301769 - DNA, 19 bp, Homo sapiens
  siRNA target sequence for CDC40 (NM_015891.2,1463-1481).
caatggacaaccaaatctt

SEQ ID NO: 301770 - DNA, 19 bp, Homo sapiens
  siRNA target sequence for CDC40 (NM_015891.2,1467-1485).
ggacaaccaaatcttaatt

SEQ ID NO: 301771 - DNA, 19 bp, Homo sapiens
  siRNA target sequence for CDC40 (NM_015891.2,1493-1511).
cacagaacagatttagatt

SEQ ID NO: 301772 - DNA, 19 bp, Homo sapiens
  siRNA target sequence for CDC40 (NM_015891.2,1574-1592).
caccagacatgagttatgt

SEQ ID NO: 301773 - DNA, 19 bp, Homo sapiens
  siRNA target sequence for CDC40 (NM_015891.2,1576-1594).
ccagacatgagttatgtga

SEQ ID NO: 301774 - DNA, 19 bp, Homo sapiens
  siRNA target sequence for CDC40 (NM_015891.2,1657-1675).
cgatttaaagctcatgata

SEQ ID NO: 301775 - DNA, 19 bp, Homo sapiens
  siRNA target sequence for CDC40 (NM_015891.2,1667-1685).
ctcatgataaagtgtgtat

SEQ ID NO: 301776 - DNA, 19 bp, Homo sapiens
  siRNA target sequence for CDC40 (NM_015891.2,1736-1754).
gggatggtctcattaaatt

SEQ ID NO: 301777 - DNA, 19 bp, Homo sapiens
  siRNA target sequence for CRNKL1 (NM_016652.3,43-61).
cagtggagaacctaacgtt

SEQ ID NO: 301778 - DNA, 19 bp, Homo sapiens
  siRNA target sequence for CRNKL1 (NM_016652.3,408-426).
ccgagatcctgtttgtttt

SEQ ID NO: 301779 - DNA, 19 bp, Homo sapiens
  siRNA target sequence for CRNKL1 (NM_016652.3,584-602).
ggctgaggtacagataact

SEQ ID NO: 301780 - DNA, 19 bp, Homo sapiens
  siRNA target sequence for CRNKL1 (NM_016652.3,657-675).
ccacctcaacagaagatca

SEQ ID NO: 301781 - DNA, 19 bp, Homo sapiens
  siRNA target sequence for CRNKL1 (NM_016652.3,753-771).
gtgattagtaactggataa

SEQ ID NO: 301782 - DNA, 19 bp, Homo sapiens
  siRNA target sequence for CRNKL1 (NM_016652.3,807-825).
caaagggctcgatccatat

SEQ ID NO: 301783 - DNA, 19 bp, Homo sapiens
  siRNA target sequence for CRNKL1 (NM_016652.3,811-829).
gggctcgatccatatacga

SEQ ID NO: 301784 - DNA, 19 bp, Homo sapiens
  siRNA target sequence for CRNKL1 (NM_016652.3,827-845).
cgagcgtgctttagatgta

SEQ ID NO: 301785 - DNA, 19 bp, Homo sapiens
  siRNA target sequence for CRNKL1 (NM_016652.3,832-850).
gtgctttagatgtagacta

SEQ ID NO: 301786 - DNA, 19 bp, Homo sapiens
  siRNA target sequence for CRNKL1 (NM_016652.3,840-858).
gatgtagactaccgaaata

SEQ ID NO: 301787 - DNA, 19 bp, Homo sapiens
  siRNA target sequence for CRNKL1 (NM_016652.3,843-861).
gtagactaccgaaatatta

SEQ ID NO: 301788 - DNA, 19 bp, Homo sapiens
  siRNA target sequence for CRNKL1 (NM_016652.3,868-886).
ggctgaaatacgcagaaat

SEQ ID NO: 301789 - DNA, 19 bp, Homo sapiens
  siRNA target sequence for CRNKL1 (NM_016652.3,946-964).
cgctgcctcgagttaatca

SEQ ID NO: 301790 - DNA, 19 bp, Homo sapiens
  siRNA target sequence for CRNKL1 (NM_016652.3,948-966).
ctgcctcgagttaatcagt

SEQ ID NO: 301791 - DNA, 19 bp, Homo sapiens
  siRNA target sequence for CRNKL1 (NM_016652.3,963-981).
cagttctggtacaagtaca

SEQ ID NO: 301792 - DNA, 19 bp, Homo sapiens
  siRNA target sequence for CRNKL1 (NM_016652.3,992-1010).
ggaaatgttgggaaacgtt

SEQ ID NO: 301793 - DNA, 19 bp, Homo sapiens
  siRNA target sequence for CRNKL1 (NM_016652.3,1069-1087).
ggcactcctacatcaactt

SEQ ID NO: 301794 - DNA, 19 bp, Homo sapiens
  siRNA target sequence for CRNKL1 (NM_016652.3,1070-1088).
gcactcctacatcaacttt

SEQ ID NO: 301795 - DNA, 19 bp, Homo sapiens
  siRNA target sequence for CRNKL1 (NM_016652.3,1146-1164).
gtgcaccctgatgttaaga

SEQ ID NO: 301796 - DNA, 19 bp, Homo sapiens
  siRNA target sequence for CRNKL1 (NM_016652.3,1149-1167).
caccctgatgttaagaact

SEQ ID NO: 301797 - DNA, 19 bp, Homo sapiens
  siRNA target sequence for CRNKL1 (NM_016652.3,1158-1176).
gttaagaactggatcaagt

SEQ ID NO: 301798 - DNA, 19 bp, Homo sapiens
  siRNA target sequence for CRNKL1 (NM_016652.3,1172-1190).
caagtatgcccgctttgaa

SEQ ID NO: 301799 - DNA, 19 bp, Homo sapiens
  siRNA target sequence for CRNKL1 (NM_016652.3,1209-1227).
gcccatgcacggaaagtgt

SEQ ID NO: 301800 - DNA, 19 bp, Homo sapiens
  siRNA target sequence for CRNKL1 (NM_016652.3,1210-1228).
cccatgcacggaaagtgta

SEQ ID NO: 301801 - DNA, 19 bp, Homo sapiens
  siRNA target sequence for CRNKL1 (NM_016652.3,1211-1229).
ccatgcacggaaagtgtat

SEQ ID NO: 301802 - DNA, 19 bp, Homo sapiens
  siRNA target sequence for CRNKL1 (NM_016652.3,1215-1233).
gcacggaaagtgtatgaga

SEQ ID NO: 301803 - DNA, 19 bp, Homo sapiens
  siRNA target sequence for CRNKL1 (NM_016652.3,1320-1338).
gaaagggtacgagtgattt

SEQ ID NO: 301804 - DNA, 19 bp, Homo sapiens
  siRNA target sequence for CRNKL1 (NM_016652.3,1324-1342).
gggtacgagtgatttacaa

SEQ ID NO: 301805 - DNA, 19 bp, Homo sapiens
  siRNA target sequence for CRNKL1 (NM_016652.3,1343-1361).
gtatgccctggacagaatt

SEQ ID NO: 301806 - DNA, 19 bp, Homo sapiens
  siRNA target sequence for CRNKL1 (NM_016652.3,1348-1366).
ccctggacagaatttcaaa

SEQ ID NO: 301807 - DNA, 19 bp, Homo sapiens
  siRNA target sequence for CRNKL1 (NM_016652.3,1484-1502).
gaaggcgaatccacacaat

SEQ ID NO: 301808 - DNA, 19 bp, Homo sapiens
  siRNA target sequence for CRNKL1 (NM_016652.3,1487-1505).
ggcgaatccacacaattat

SEQ ID NO: 301809 - DNA, 19 bp, Homo sapiens
  siRNA target sequence for CRNKL1 (NM_016652.3,1489-1507).
cgaatccacacaattatga

SEQ ID NO: 301810 - DNA, 19 bp, Homo sapiens
  siRNA target sequence for CRNKL1 (NM_016652.3,1506-1524).
gatgcatggtttgattact

SEQ ID NO: 301811 - DNA, 19 bp, Homo sapiens
  siRNA target sequence for CRNKL1 (NM_016652.3,1523-1541).
cttgcgcttggtagaaagt

SEQ ID NO: 301812 - DNA, 19 bp, Homo sapiens
  siRNA target sequence for CRNKL1 (NM_016652.3,1643-1661).
gatcaactatgcactctat

SEQ ID NO: 301813 - DNA, 19 bp, Homo sapiens
  siRNA target sequence for CRNKL1 (NM_016652.3,1649-1667).
ctatgcactctatgaagaa

SEQ ID NO: 301814 - DNA, 19 bp, Homo sapiens
  siRNA target sequence for CRNKL1 (NM_016652.3,1691-1709).
gacaagacaggtgtatcaa

SEQ ID NO: 301815 - DNA, 19 bp, Homo sapiens
  siRNA target sequence for CRNKL1 (NM_016652.3,1707-1725).
caagcctctttggaactaa

SEQ ID NO: 301816 - DNA, 19 bp, Homo sapiens
  siRNA target sequence for CRNKL1 (NM_016652.3,1719-1737).
gaactaattcctcacaaaa

SEQ ID NO: 301817 - DNA, 19 bp, Homo sapiens
  siRNA target sequence for CRNKL1 (NM_016652.3,1729-1747).
ctcacaaaaagttcacatt

SEQ ID NO: 301818 - DNA, 19 bp, Homo sapiens
  siRNA target sequence for CRNKL1 (NM_016652.3,1751-1769).
caaaatgtggatactgtat

SEQ ID NO: 301819 - DNA, 19 bp, Homo sapiens
  siRNA target sequence for CRNKL1 (NM_016652.3,1834-1852).
gcaaatgtccaaagaacaa

SEQ ID NO: 301820 - DNA, 19 bp, Homo sapiens
  siRNA target sequence for CRNKL1 (NM_016652.3,1880-1898).
gctacagcttcgagaattt

SEQ ID NO: 301821 - DNA, 19 bp, Homo sapiens
  siRNA target sequence for CRNKL1 (NM_016652.3,1884-1902).
cagcttcgagaatttgaca

SEQ ID NO: 301822 - DNA, 19 bp, Homo sapiens
  siRNA target sequence for CRNKL1 (NM_016652.3,1899-1917).
gacagatgccggaagcttt

SEQ ID NO: 301823 - DNA, 19 bp, Homo sapiens
  siRNA target sequence for CRNKL1 (NM_016652.3,1903-1921).
gatgccggaagctttatga

SEQ ID NO: 301824 - DNA, 19 bp, Homo sapiens
  siRNA target sequence for CRNKL1 (NM_016652.3,1906-1924).
gccggaagctttatgaaaa

SEQ ID NO: 301825 - DNA, 19 bp, Homo sapiens
  siRNA target sequence for CRNKL1 (NM_016652.3,1908-1926).
cggaagctttatgaaaagt

SEQ ID NO: 301826 - DNA, 19 bp, Homo sapiens
  siRNA target sequence for CRNKL1 (NM_016652.3,1951-1969).
gtacctcatggattaaatt

SEQ ID NO: 301827 - DNA, 19 bp, Homo sapiens
  siRNA target sequence for CRNKL1 (NM_016652.3,1960-1978).
ggattaaattcgctgaatt

SEQ ID NO: 301828 - DNA, 19 bp, Homo sapiens
  siRNA target sequence for CRNKL1 (NM_016652.3,1961-1979).
gattaaattcgctgaatta

SEQ ID NO: 301829 - DNA, 19 bp, Homo sapiens
  siRNA target sequence for CRNKL1 (NM_016652.3,1982-2000).
gacaatccttggtgatatt

SEQ ID NO: 301830 - DNA, 19 bp, Homo sapiens
  siRNA target sequence for CRNKL1 (NM_016652.3,2003-2021).
cagagcacgggcaatctat

SEQ ID NO: 301831 - DNA, 19 bp, Homo sapiens
  siRNA target sequence for CRNKL1 (NM_016652.3,2005-2023).
gagcacgggcaatctatga

SEQ ID NO: 301832 - DNA, 19 bp, Homo sapiens
  siRNA target sequence for CRNKL1 (NM_016652.3,2007-2025).
gcacgggcaatctatgaat

SEQ ID NO: 301833 - DNA, 19 bp, Homo sapiens
  siRNA target sequence for CRNKL1 (NM_016652.3,2035-2053).
gtcagccacgtttagacat

SEQ ID NO: 301834 - DNA, 19 bp, Homo sapiens
  siRNA target sequence for CRNKL1 (NM_016652.3,2109-2127).
gaaagaacacgaaaccttt

SEQ ID NO: 301835 - DNA, 19 bp, Homo sapiens
  siRNA target sequence for CRNKL1 (NM_016652.3,2216-2234).
gactaaatgcagacaaatt

SEQ ID NO: 301836 - DNA, 19 bp, Homo sapiens
  siRNA target sequence for CRNKL1 (NM_016652.3,2249-2267).
caaaaccatgcgaaactgt

SEQ ID NO: 301837 - DNA, 19 bp, Homo sapiens
  siRNA target sequence for CRNKL1 (NM_016652.3,2255-2273).
catgcgaaactgtgaagaa

SEQ ID NO: 301838 - DNA, 19 bp, Homo sapiens
  siRNA target sequence for CRNKL1 (NM_016652.3,2305-2323).
ggcgaagttttgaagaaga

SEQ ID NO: 301839 - DNA, 19 bp, Homo sapiens
  siRNA target sequence for CRNKL1 (NM_016652.3,2307-2325).
cgaagttttgaagaagaat

SEQ ID NO: 301840 - DNA, 19 bp, Homo sapiens
  siRNA target sequence for CRNKL1 (NM_016652.3,2418-2436).
gcaggctgggaagaatact

SEQ ID NO: 301841 - DNA, 19 bp, Homo sapiens
  siRNA target sequence for CRNKL1 (NM_016652.3,2425-2443).
gggaagaatactttgatta

SEQ ID NO: 301842 - DNA, 19 bp, Homo sapiens
  siRNA target sequence for GEMIN4 (NM_015721.1,44-62).
catctgtgaagaaatgact

SEQ ID NO: 301843 - DNA, 19 bp, Homo sapiens
  siRNA target sequence for GEMIN4 (NM_015721.1,207-225).
ccctttgcctggaagaaga

SEQ ID NO: 301844 - DNA, 19 bp, Homo sapiens
  siRNA target sequence for GEMIN4 (NM_015721.1,357-375).
ctcttcgagctgctcaaat

SEQ ID NO: 301845 - DNA, 19 bp, Homo sapiens
  siRNA target sequence for GEMIN4 (NM_015721.1,571-589).
gtgcaatggcccataagta

SEQ ID NO: 301846 - DNA, 19 bp, Homo sapiens
  siRNA target sequence for GEMIN4 (NM_015721.1,811-829).
ccgtgtatctggacaaact

SEQ ID NO: 301847 - DNA, 19 bp, Homo sapiens
  siRNA target sequence for GEMIN4 (NM_015721.1,945-963).
ctccccagtgagaccattt

SEQ ID NO: 301848 - DNA, 19 bp, Homo sapiens
  siRNA target sequence for GEMIN4 (NM_015721.1,949-967).
ccagtgagaccattttcgt

SEQ ID NO: 301849 - DNA, 19 bp, Homo sapiens
  siRNA target sequence for GEMIN4 (NM_015721.1,1033-1051).
gcagccaggggacaagtta

SEQ ID NO: 301850 - DNA, 19 bp, Homo sapiens
  siRNA target sequence for GEMIN4 (NM_015721.1,1176-1194).
gacttcctgaggaaaacga

SEQ ID NO: 301851 - DNA, 19 bp, Homo sapiens
  siRNA target sequence for GEMIN4 (NM_015721.1,1214-1232).
ggccttggaggatatcaca

SEQ ID NO: 301852 - DNA, 19 bp, Homo sapiens
  siRNA target sequence for GEMIN4 (NM_015721.1,1545-1563).
cgaaagggcctctctgaaa

SEQ ID NO: 301853 - DNA, 19 bp, Homo sapiens
  siRNA target sequence for GEMIN4 (NM_015721.1,1573-1591).
cttatgtggagggttttca

SEQ ID NO: 301854 - DNA, 19 bp, Homo sapiens
  siRNA target sequence for GEMIN4 (NM_015721.1,1593-1611).
gaagacctcaatacaactt

SEQ ID NO: 301855 - DNA, 19 bp, Homo sapiens
  siRNA target sequence for GEMIN4 (NM_015721.1,1694-1712).
ggaagtcacggtgaagaaa

SEQ ID NO: 301856 - DNA, 19 bp, Homo sapiens
  siRNA target sequence for GEMIN4 (NM_015721.1,1698-1716).
gtcacggtgaagaaaatgt

SEQ ID NO: 301857 - DNA, 19 bp, Homo sapiens
  siRNA target sequence for GEMIN4 (NM_015721.1,1832-1850).
ggtgtcatgcctcaaagaa

SEQ ID NO: 301858 - DNA, 19 bp, Homo sapiens
  siRNA target sequence for GEMIN4 (NM_015721.1,1833-1851).
gtgtcatgcctcaaagaaa

SEQ ID NO: 301859 - DNA, 19 bp, Homo sapiens
  siRNA target sequence for GEMIN4 (NM_015721.1,2000-2018).
cttgaggttagatgttgaa

SEQ ID NO: 301860 - DNA, 19 bp, Homo sapiens
  siRNA target sequence for GEMIN4 (NM_015721.1,2177-2195).
gcggtgcctctctttggat

SEQ ID NO: 301861 - DNA, 19 bp, Homo sapiens
  siRNA target sequence for GEMIN4 (NM_015721.1,2178-2196).
cggtgcctctctttggata

SEQ ID NO: 301862 - DNA, 19 bp, Homo sapiens
  siRNA target sequence for GEMIN4 (NM_015721.1,2182-2200).
gcctctctttggataggaa

SEQ ID NO: 301863 - DNA, 19 bp, Homo sapiens
  siRNA target sequence for GEMIN4 (NM_015721.1,2225-2243).
gctcctgtgtgagattgta

SEQ ID NO: 301864 - DNA, 19 bp, Homo sapiens
  siRNA target sequence for GEMIN4 (NM_015721.1,2226-2244).
ctcctgtgtgagattgtat

SEQ ID NO: 301865 - DNA, 19 bp, Homo sapiens
  siRNA target sequence for GEMIN4 (NM_015721.1,2228-2246).
cctgtgtgagattgtatca

SEQ ID NO: 301866 - DNA, 19 bp, Homo sapiens
  siRNA target sequence for GEMIN4 (NM_015721.1,2268-2286).
ccggatgtctggatcaagt

SEQ ID NO: 301867 - DNA, 19 bp, Homo sapiens
  siRNA target sequence for GEMIN4 (NM_015721.1,2294-2312).
ctggctccaccgcaagtta

SEQ ID NO: 301868 - DNA, 19 bp, Homo sapiens
  siRNA target sequence for GEMIN4 (NM_015721.1,2296-2314).
ggctccaccgcaagttaga

SEQ ID NO: 301869 - DNA, 19 bp, Homo sapiens
  siRNA target sequence for GEMIN4 (NM_015721.1,2389-2407).
cactttttgagatctgtaa

SEQ ID NO: 301870 - DNA, 19 bp, Homo sapiens
  siRNA target sequence for GEMIN4 (NM_015721.1,2673-2691).
ctcctccatgtcccttata

SEQ ID NO: 301871 - DNA, 19 bp, Homo sapiens
  siRNA target sequence for GEMIN4 (NM_015721.1,2684-2702).
cccttatagcctggaatat

SEQ ID NO: 301872 - DNA, 19 bp, Homo sapiens
  siRNA target sequence for GEMIN4 (NM_015721.1,2830-2848).
ggaaccacgtggtcaaact

SEQ ID NO: 301873 - DNA, 19 bp, Homo sapiens
  siRNA target sequence for GEMIN4 (NM_015721.1,3016-3034).
gtgagccactctacgtttt

SEQ ID NO: 301874 - DNA, 19 bp, Homo sapiens
  siRNA target sequence for ARL6IP4 (NM_016638.1,610-628).
gcgaggtcctagaggaaat

SEQ ID NO: 301875 - DNA, 19 bp, Homo sapiens
  siRNA target sequence for ARL6IP4 (NM_016638.1,615-633).
gtcctagaggaaatcgtaa

SEQ ID NO: 301876 - DNA, 19 bp, Homo sapiens
  siRNA target sequence for ARL6IP4 (NM_016638.1,623-641).
ggaaatcgtaaccaaagaa

SEQ ID NO: 301877 - DNA, 19 bp, Homo sapiens
  siRNA target sequence for ARL6IP4 (NM_016638.1,642-660).
cgacacagagagatcaaca

SEQ ID NO: 301878 - DNA, 19 bp, Homo sapiens
  siRNA target sequence for LUC7A (NM_016424.2,167-185).
cgcagttgttggatgagtt

SEQ ID NO: 301879 - DNA, 19 bp, Homo sapiens
  siRNA target sequence for LUC7A (NM_016424.2,168-186).
gcagttgttggatgagtta

SEQ ID NO: 301880 - DNA, 19 bp, Homo sapiens
  siRNA target sequence for LUC7A (NM_016424.2,241-259).
gaccacgagagcgtttgta

SEQ ID NO: 301881 - DNA, 19 bp, Homo sapiens
  siRNA target sequence for LUC7A (NM_016424.2,244-262).
cacgagagcgtttgtaaat

SEQ ID NO: 301882 - DNA, 19 bp, Homo sapiens
  siRNA target sequence for LUC7A (NM_016424.2,246-264).
cgagagcgtttgtaaatat

SEQ ID NO: 301883 - DNA, 19 bp, Homo sapiens
  siRNA target sequence for LUC7A (NM_016424.2,247-265).
gagagcgtttgtaaatatt

SEQ ID NO: 301884 - DNA, 19 bp, Homo sapiens
  siRNA target sequence for LUC7A (NM_016424.2,284-302).
ctgcggaattgttcacaaa

SEQ ID NO: 301885 - DNA, 19 bp, Homo sapiens
  siRNA target sequence for LUC7A (NM_016424.2,320-338).
gtccgtgtgaaaaaattca

SEQ ID NO: 301886 - DNA, 19 bp, Homo sapiens
  siRNA target sequence for LUC7A (NM_016424.2,323-341).
cgtgtgaaaaaattcatga

SEQ ID NO: 301887 - DNA, 19 bp, Homo sapiens
  siRNA target sequence for LUC7A (NM_016424.2,349-367).
ctacgaaaacagtatgaga

SEQ ID NO: 301888 - DNA, 19 bp, Homo sapiens
  siRNA target sequence for LUC7A (NM_016424.2,369-387).
gagctctcgtttcatgaaa

SEQ ID NO: 301889 - DNA, 19 bp, Homo sapiens
  siRNA target sequence for LUC7A (NM_016424.2,371-389).
gctctcgtttcatgaaagt

SEQ ID NO: 301890 - DNA, 19 bp, Homo sapiens
  siRNA target sequence for LUC7A (NM_016424.2,372-390).
ctctcgtttcatgaaagtt

SEQ ID NO: 301891 - DNA, 19 bp, Homo sapiens
  siRNA target sequence for LUC7A (NM_016424.2,401-419).
gagattttttgcgatactt

SEQ ID NO: 301892 - DNA, 19 bp, Homo sapiens
  siRNA target sequence for LUC7A (NM_016424.2,423-441).
gagcttacttgcagaagta

SEQ ID NO: 301893 - DNA, 19 bp, Homo sapiens
  siRNA target sequence for LUC7A (NM_016424.2,543-561).
ggttctaacagacaaaatt

SEQ ID NO: 301894 - DNA, 19 bp, Homo sapiens
  siRNA target sequence for LUC7A (NM_016424.2,672-690).
gtccacaacgtcgacaatt

SEQ ID NO: 301895 - DNA, 19 bp, Homo sapiens
  siRNA target sequence for LUC7A (NM_016424.2,680-698).
cgtcgacaattgaaagctt

SEQ ID NO: 301896 - DNA, 19 bp, Homo sapiens
  siRNA target sequence for LUC7A (NM_016424.2,681-699).
gtcgacaattgaaagcttt

SEQ ID NO: 301897 - DNA, 19 bp, Homo sapiens
  siRNA target sequence for LUC7A (NM_016424.2,737-755).
gtggagcctttttaatagt

SEQ ID NO: 301898 - DNA, 19 bp, Homo sapiens
  siRNA target sequence for LUC7A (NM_016424.2,770-788).
cccgggtagatgaccattt

SEQ ID NO: 301899 - DNA, 19 bp, Homo sapiens
  siRNA target sequence for LUC7A (NM_016424.2,772-790).
cgggtagatgaccatttga

SEQ ID NO: 301900 - DNA, 19 bp, Homo sapiens
  siRNA target sequence for LUC7A (NM_016424.2,773-791).
gggtagatgaccatttgat

SEQ ID NO: 301901 - DNA, 19 bp, Homo sapiens
  siRNA target sequence for LUC7A (NM_016424.2,783-801).
ccatttgatgggaaaacaa

SEQ ID NO: 301902 - DNA, 19 bp, Homo sapiens
  siRNA target sequence for LUC7A (NM_016424.2,807-825).
gggctatgccaaaattaaa

SEQ ID NO: 301903 - DNA, 19 bp, Homo sapiens
  siRNA target sequence for LUC7A (NM_016424.2,810-828).
ctatgccaaaattaaagct

SEQ ID NO: 301904 - DNA, 19 bp, Homo sapiens
  siRNA target sequence for LUC7A (NM_016424.2,880-898).
cgtgatgagcgtctaaaaa

SEQ ID NO: 301905 - DNA, 19 bp, Homo sapiens
  siRNA target sequence for LUC7A (NM_016424.2,881-899).
gtgatgagcgtctaaaaaa

SEQ ID NO: 301906 - DNA, 19 bp, Homo sapiens
  siRNA target sequence for LUC7A (NM_016424.2,1101-1119).
gtcacgaagtagagaaaga

SEQ ID NO: 301907 - DNA, 19 bp, Homo sapiens
  siRNA target sequence for LUC7A (NM_016424.2,1158-1176).
ccatgatcgatcagaaaga

SEQ ID NO: 301908 - DNA, 19 bp, Homo sapiens
  siRNA target sequence for LUC7A (NM_016424.2,1195-1213).
cgggatcgaagaagatcaa

SEQ ID NO: 301909 - DNA, 19 bp, Homo sapiens
  siRNA target sequence for LUC7A (NM_016424.2,1211-1229).
caaaaagccgggatcgaaa

SEQ ID NO: 301910 - DNA, 19 bp, Homo sapiens
  siRNA target sequence for LUC7A (NM_016424.2,1217-1235).
gccgggatcgaaagtcata

SEQ ID NO: 301911 - DNA, 19 bp, Homo sapiens
  siRNA target sequence for LUC7A (NM_016424.2,1218-1236).
ccgggatcgaaagtcatat

SEQ ID NO: 301912 - DNA, 19 bp, Homo sapiens
  siRNA target sequence for LUC7A (NM_016424.2,1219-1237).
cgggatcgaaagtcatata

SEQ ID NO: 301913 - DNA, 19 bp, Homo sapiens
  siRNA target sequence for LUC7A (NM_016424.2,1220-1238).
gggatcgaaagtcatataa

SEQ ID NO: 301914 - DNA, 19 bp, Homo sapiens
  siRNA target sequence for LUC7A (NM_016424.2,1296-1314).
gaggggatctgatgataaa

SEQ ID NO: 301915 - DNA, 19 bp, Homo sapiens
  siRNA target sequence for LUC7A (NM_016424.2,1331-1349).
ccggtagtcgagaaaagca

SEQ ID NO: 301916 - DNA, 19 bp, Homo sapiens
  siRNA target sequence for LUC7A (NM_016424.2,1350-1368).
gagtgaagacacaaacact

SEQ ID NO: 301917 - DNA, 19 bp, Homo sapiens
  siRNA target sequence for FLJ21172 (NM_024805.1,201-219).
ccgcgatgctgcgctattt

SEQ ID NO: 301918 - DNA, 19 bp, Homo sapiens
  siRNA target sequence for FLJ21172 (NM_024805.1,204-222).
cgatgctgcgctatttcca

SEQ ID NO: 301919 - DNA, 19 bp, Homo sapiens
  siRNA target sequence for FLJ21172 (NM_024805.1,328-346).
ggttctcactcgacttaca

SEQ ID NO: 301920 - DNA, 19 bp, Homo sapiens
  siRNA target sequence for FLJ21172 (NM_024805.1,329-347).
gttctcactcgacttacaa

SEQ ID NO: 301921 - DNA, 19 bp, Homo sapiens
  siRNA target sequence for FLJ21172 (NM_024805.1,334-352).
cactcgacttacaaaccat

SEQ ID NO: 301922 - DNA, 19 bp, Homo sapiens
  siRNA target sequence for FLJ21172 (NM_024805.1,424-442).
ctgaacggcctcctctata

SEQ ID NO: 301923 - DNA, 19 bp, Homo sapiens
  siRNA target sequence for FLJ21172 (NM_024805.1,620-638).
cgcacatgaggcacctttt

SEQ ID NO: 301924 - DNA, 19 bp, Homo sapiens
  siRNA target sequence for FLJ21172 (NM_024805.1,666-684).
gccaccgatagtgtttgtt

SEQ ID NO: 301925 - DNA, 19 bp, Homo sapiens
  siRNA target sequence for FLJ21172 (NM_024805.1,668-686).
caccgatagtgtttgttca

SEQ ID NO: 301926 - DNA, 19 bp, Homo sapiens
  siRNA target sequence for FLJ21172 (NM_024805.1,704-722).
ctctagctgagcttgatca

SEQ ID NO: 301927 - DNA, 19 bp, Homo sapiens
  siRNA target sequence for FLJ21172 (NM_024805.1,710-728).
ctgagcttgatcagttact

SEQ ID NO: 301928 - DNA, 19 bp, Homo sapiens
  siRNA target sequence for FLJ21172 (NM_024805.1,761-779).
gagacaactttgtacaaaa

SEQ ID NO: 301929 - DNA, 19 bp, Homo sapiens
  siRNA target sequence for FLJ21172 (NM_024805.1,888-906).
gtacaaaaggaggaaagat

SEQ ID NO: 301930 - DNA, 19 bp, Homo sapiens
  siRNA target sequence for RNU3IP2 (NM_004704.2,148-166).
ggggacaggggcaaatcca

SEQ ID NO: 301931 - DNA, 19 bp, Homo sapiens
  siRNA target sequence for RNU3IP2 (NM_004704.2,149-167).
gggacaggggcaaatccaa

SEQ ID NO: 301932 - DNA, 19 bp, Homo sapiens
  siRNA target sequence for RNU3IP2 (NM_004704.2,168-186).
gggtggcggcaagatgaat

SEQ ID NO: 301933 - DNA, 19 bp, Homo sapiens
  siRNA target sequence for RNU3IP2 (NM_004704.2,341-359).
ctgaggcccgtgcatttga

SEQ ID NO: 301934 - DNA, 19 bp, Homo sapiens
  siRNA target sequence for RNU3IP2 (NM_004704.2,478-496).
gggcaccagctctctatca

SEQ ID NO: 301935 - DNA, 19 bp, Homo sapiens
  siRNA target sequence for RNU3IP2 (NM_004704.2,481-499).
caccagctctctatcacat

SEQ ID NO: 301936 - DNA, 19 bp, Homo sapiens
  siRNA target sequence for RNU3IP2 (NM_004704.2,484-502).
cagctctctatcacatgtt

SEQ ID NO: 301937 - DNA, 19 bp, Homo sapiens
  siRNA target sequence for RNU3IP2 (NM_004704.2,543-561).
caaagactgcagcatcatt

SEQ ID NO: 301938 - DNA, 19 bp, Homo sapiens
  siRNA target sequence for RNU3IP2 (NM_004704.2,581-599).
gacggaagctgcatgtgat

SEQ ID NO: 301939 - DNA, 19 bp, Homo sapiens
  siRNA target sequence for RNU3IP2 (NM_004704.2,1034-1052).
gcatccacctaatcaatga

SEQ ID NO: 301940 - DNA, 19 bp, Homo sapiens
  siRNA target sequence for RNU3IP2 (NM_004704.2,1168-1186).
gagcagcccttctggatat

SEQ ID NO: 301941 - DNA, 19 bp, Homo sapiens
  siRNA target sequence for RNU3IP2 (NM_004704.2,1303-1321).
cccctggtgggttttatca

SEQ ID NO: 301942 - DNA, 19 bp, Homo sapiens
  siRNA target sequence for RNU3IP2 (NM_004704.2,1304-1322).
ccctggtgggttttatcaa

SEQ ID NO: 301943 - DNA, 19 bp, Homo sapiens
  siRNA target sequence for RNU3IP2 (NM_004704.2,1306-1324).
ctggtgggttttatcaaca

SEQ ID NO: 301944 - DNA, 19 bp, Homo sapiens
  siRNA target sequence for RNU3IP2 (NM_004704.2,1404-1422).
caaagaggctcggaattct

SEQ ID NO: 301945 - DNA, 19 bp, Homo sapiens
  siRNA target sequence for HCA66 (NM_018428.1,125-143).
cggagattaaggctatcat

SEQ ID NO: 301946 - DNA, 19 bp, Homo sapiens
  siRNA target sequence for HCA66 (NM_018428.1,127-145).
gagattaaggctatcatta

SEQ ID NO: 301947 - DNA, 19 bp, Homo sapiens
  siRNA target sequence for HCA66 (NM_018428.1,152-170).
cttccgatctagagtacaa

SEQ ID NO: 301948 - DNA, 19 bp, Homo sapiens
  siRNA target sequence for HCA66 (NM_018428.1,155-173).
ccgatctagagtacaaaat

SEQ ID NO: 301949 - DNA, 19 bp, Homo sapiens
  siRNA target sequence for HCA66 (NM_018428.1,175-193).
cagagaagaacccttttca

SEQ ID NO: 301950 - DNA, 19 bp, Homo sapiens
  siRNA target sequence for HCA66 (NM_018428.1,201-219).
ctttatcaattatgttcaa

SEQ ID NO: 301951 - DNA, 19 bp, Homo sapiens
  siRNA target sequence for HCA66 (NM_018428.1,254-272).
gaagaacacgcattggata

SEQ ID NO: 301952 - DNA, 19 bp, Homo sapiens
  siRNA target sequence for HCA66 (NM_018428.1,286-304).
gatgagattgagaattcta

SEQ ID NO: 301953 - DNA, 19 bp, Homo sapiens
  siRNA target sequence for HCA66 (NM_018428.1,291-309).
gattgagaattctattgta

SEQ ID NO: 301954 - DNA, 19 bp, Homo sapiens
  siRNA target sequence for HCA66 (NM_018428.1,330-348).
ccagcgtgcctcagcaaaa

SEQ ID NO: 301955 - DNA, 19 bp, Homo sapiens
  siRNA target sequence for HCA66 (NM_018428.1,334-352).
cgtgcctcagcaaaatgga

SEQ ID NO: 301956 - DNA, 19 bp, Homo sapiens
  siRNA target sequence for HCA66 (NM_018428.1,407-425).
ctaaaactcgacttagcaa

SEQ ID NO: 301957 - DNA, 19 bp, Homo sapiens
  siRNA target sequence for HCA66 (NM_018428.1,413-431).
ctcgacttagcaaggtatt

SEQ ID NO: 301958 - DNA, 19 bp, Homo sapiens
  siRNA target sequence for HCA66 (NM_018428.1,415-433).
cgacttagcaaggtattct

SEQ ID NO: 301959 - DNA, 19 bp, Homo sapiens
  siRNA target sequence for HCA66 (NM_018428.1,436-454).
gccatgttggcgattcatt

SEQ ID NO: 301960 - DNA, 19 bp, Homo sapiens
  siRNA target sequence for HCA66 (NM_018428.1,491-509).
gggaaatggaagatcgatt

SEQ ID NO: 301961 - DNA, 19 bp, Homo sapiens
  siRNA target sequence for HCA66 (NM_018428.1,517-535).
gaaagcgcaaggcaactat

SEQ ID NO: 301962 - DNA, 19 bp, Homo sapiens
  siRNA target sequence for HCA66 (NM_018428.1,521-539).
gcgcaaggcaactatttct

SEQ ID NO: 301963 - DNA, 19 bp, Homo sapiens
  siRNA target sequence for HCA66 (NM_018428.1,559-577).
ccagagtgcccaaaacttt

SEQ ID NO: 301964 - DNA, 19 bp, Homo sapiens
  siRNA target sequence for HCA66 (NM_018428.1,562-580).
gagtgcccaaaactttata

SEQ ID NO: 301965 - DNA, 19 bp, Homo sapiens
  siRNA target sequence for HCA66 (NM_018428.1,566-584).
gcccaaaactttataaaga

SEQ ID NO: 301966 - DNA, 19 bp, Homo sapiens
  siRNA target sequence for HCA66 (NM_018428.1,661-679).
gtggagaatcctgattatt

SEQ ID NO: 301967 - DNA, 19 bp, Homo sapiens
  siRNA target sequence for HCA66 (NM_018428.1,663-681).
ggagaatcctgattattct

SEQ ID NO: 301968 - DNA, 19 bp, Homo sapiens
  siRNA target sequence for HCA66 (NM_018428.1,705-723).
ggcatggatcatctacaaa

SEQ ID NO: 301969 - DNA, 19 bp, Homo sapiens
  siRNA target sequence for HCA66 (NM_018428.1,706-724).
gcatggatcatctacaaaa

SEQ ID NO: 301970 - DNA, 19 bp, Homo sapiens
  siRNA target sequence for HCA66 (NM_018428.1,759-777).
cgtgtcactgctttcgatt

SEQ ID NO: 301971 - DNA, 19 bp, Homo sapiens
  siRNA target sequence for HCA66 (NM_018428.1,773-791).
cgattgcacagctatttga

SEQ ID NO: 301972 - DNA, 19 bp, Homo sapiens
  siRNA target sequence for HCA66 (NM_018428.1,792-810).
ctttgccaaagatctacaa

SEQ ID NO: 301973 - DNA, 19 bp, Homo sapiens
  siRNA target sequence for HCA66 (NM_018428.1,875-893).
caaggcgagaattagagat

SEQ ID NO: 301974 - DNA, 19 bp, Homo sapiens
  siRNA target sequence for HCA66 (NM_018428.1,912-930).
gcagcctacaacgaaacaa

SEQ ID NO: 301975 - DNA, 19 bp, Homo sapiens
  siRNA target sequence for HCA66 (NM_018428.1,1049-1067).
gatttactaagaagtcaaa

SEQ ID NO: 301976 - DNA, 19 bp, Homo sapiens
  siRNA target sequence for HCA66 (NM_018428.1,1096-1114).
gaaagaaccatgactgtat

SEQ ID NO: 301977 - DNA, 19 bp, Homo sapiens
  siRNA target sequence for HCA66 (NM_018428.1,1141-1159).
ctgtcagaatgccaataca

SEQ ID NO: 301978 - DNA, 19 bp, Homo sapiens
  siRNA target sequence for HCA66 (NM_018428.1,1171-1189).
gtttcgttgctgtgttata

SEQ ID NO: 301979 - DNA, 19 bp, Homo sapiens
  siRNA target sequence for HCA66 (NM_018428.1,1217-1235).
cagtagctggaactgaatt

SEQ ID NO: 301980 - DNA, 19 bp, Homo sapiens
  siRNA target sequence for HCA66 (NM_018428.1,1219-1237).
gtagctggaactgaattgt

SEQ ID NO: 301981 - DNA, 19 bp, Homo sapiens
  siRNA target sequence for HCA66 (NM_018428.1,1222-1240).
gctggaactgaattgttta

SEQ ID NO: 301982 - DNA, 19 bp, Homo sapiens
  siRNA target sequence for HCA66 (NM_018428.1,1297-1315).
cctgacatagccatgcttt

SEQ ID NO: 301983 - DNA, 19 bp, Homo sapiens
  siRNA target sequence for HCA66 (NM_018428.1,1298-1316).
ctgacatagccatgctttt

SEQ ID NO: 301984 - DNA, 19 bp, Homo sapiens
  siRNA target sequence for HCA66 (NM_018428.1,1498-1516).
cgaagtggtggctacaaaa

SEQ ID NO: 301985 - DNA, 19 bp, Homo sapiens
  siRNA target sequence for HCA66 (NM_018428.1,1545-1563).
ggagagccgaccattttca

SEQ ID NO: 301986 - DNA, 19 bp, Homo sapiens
  siRNA target sequence for HCA66 (NM_018428.1,1548-1566).
gagccgaccattttcagtt

SEQ ID NO: 301987 - DNA, 19 bp, Homo sapiens
  siRNA target sequence for HCA66 (NM_018428.1,1611-1629).
ctgcaatatggcgaacata

SEQ ID NO: 301988 - DNA, 19 bp, Homo sapiens
  siRNA target sequence for HCA66 (NM_018428.1,1614-1632).
caatatggcgaacataaga

SEQ ID NO: 301989 - DNA, 19 bp, Homo sapiens
  siRNA target sequence for HCA66 (NM_018428.1,1620-1638).
ggcgaacataagagaatat

SEQ ID NO: 301990 - DNA, 19 bp, Homo sapiens
  siRNA target sequence for HCA66 (NM_018428.1,1622-1640).
cgaacataagagaatatta

SEQ ID NO: 301991 - DNA, 19 bp, Homo sapiens
  siRNA target sequence for HCA66 (NM_018428.1,1659-1677).
gtttggatccgcagattct

SEQ ID NO: 301992 - DNA, 19 bp, Homo sapiens
  siRNA target sequence for HCA66 (NM_018428.1,1749-1767).
ctactggcgagcgatgaaa

SEQ ID NO: 301993 - DNA, 19 bp, Homo sapiens
  siRNA target sequence for HCA66 (NM_018428.1,1791-1809).
ggcatttgtagctaaacat

SEQ ID NO: 301994 - DNA, 19 bp, Homo sapiens
  siRNA target sequence for PRPF39 (NM_017922.2,921-939).
ctccacccaaatggtttat

SEQ ID NO: 301995 - DNA, 19 bp, Homo sapiens
  siRNA target sequence for PRPF39 (NM_017922.2,954-972).
ggcaatacctcttagtgtt

SEQ ID NO: 301996 - DNA, 19 bp, Homo sapiens
  siRNA target sequence for PRPF39 (NM_017922.2,1043-1061).
caataagaggaacttttga

SEQ ID NO: 301997 - DNA, 19 bp, Homo sapiens
  siRNA target sequence for PRPF39 (NM_017922.2,1103-1121).
gactgtgggaaatgtatat

SEQ ID NO: 301998 - DNA, 19 bp, Homo sapiens
  siRNA target sequence for PRPF39 (NM_017922.2,1116-1134).
gtatataaactgggaaaat

SEQ ID NO: 301999 - DNA, 19 bp, Homo sapiens
  siRNA target sequence for PRPF39 (NM_017922.2,1149-1167).
gagagaagttacagctata

SEQ ID NO: 302000 - DNA, 19 bp, Homo sapiens
  siRNA target sequence for PRPF39 (NM_017922.2,1160-1178).
cagctatatatgatcgtat

SEQ ID NO: 302001 - DNA, 19 bp, Homo sapiens
  siRNA target sequence for PRPF39 (NM_017922.2,1163-1181).
ctatatatgatcgtattct

SEQ ID NO: 302002 - DNA, 19 bp, Homo sapiens
  siRNA target sequence for PRPF39 (NM_017922.2,1190-1208).
caacacagctgtatagtca

SEQ ID NO: 302003 - DNA, 19 bp, Homo sapiens
  siRNA target sequence for PRPF39 (NM_017922.2,1195-1213).
cagctgtatagtcatcatt

SEQ ID NO: 302004 - DNA, 19 bp, Homo sapiens
  siRNA target sequence for PRPF39 (NM_017922.2,1248-1266).
gcctagagatcttttaact

SEQ ID NO: 302005 - DNA, 19 bp, Homo sapiens
  siRNA target sequence for PRPF39 (NM_017922.2,1284-1302).
gttgcgaagggaattagct

SEQ ID NO: 302006 - DNA, 19 bp, Homo sapiens
  siRNA target sequence for PRPF39 (NM_017922.2,1352-1370).
catcgggaattgaagacat

SEQ ID NO: 302007 - DNA, 19 bp, Homo sapiens
  siRNA target sequence for PRPF39 (NM_017922.2,1373-1391).
ccgatcctgcaaagctaat

SEQ ID NO: 302008 - DNA, 19 bp, Homo sapiens
  siRNA target sequence for PRPF39 (NM_017922.2,1374-1392).
cgatcctgcaaagctaatt

SEQ ID NO: 302009 - DNA, 19 bp, Homo sapiens
  siRNA target sequence for PRPF39 (NM_017922.2,1381-1399).
gcaaagctaattacagaaa

SEQ ID NO: 302010 - DNA, 19 bp, Homo sapiens
  siRNA target sequence for PRPF39 (NM_017922.2,1382-1400).
caaagctaattacagaaat

SEQ ID NO: 302011 - DNA, 19 bp, Homo sapiens
  siRNA target sequence for PRPF39 (NM_017922.2,1407-1425).
catgagacatagaatcatt

SEQ ID NO: 302012 - DNA, 19 bp, Homo sapiens
  siRNA target sequence for PRPF39 (NM_017922.2,1412-1430).
gacatagaatcattgagat

SEQ ID NO: 302013 - DNA, 19 bp, Homo sapiens
  siRNA target sequence for PRPF39 (NM_017922.2,1469-1487).
gtaaaaggtggacatttga

SEQ ID NO: 302014 - DNA, 19 bp, Homo sapiens
  siRNA target sequence for PRPF39 (NM_017922.2,1478-1496).
ggacatttgaagaaggtat

SEQ ID NO: 302015 - DNA, 19 bp, Homo sapiens
  siRNA target sequence for PRPF39 (NM_017922.2,1502-1520).
gaccttactttcatgtgaa

SEQ ID NO: 302016 - DNA, 19 bp, Homo sapiens
  siRNA target sequence for PRPF39 (NM_017922.2,1633-1651).
gccctctatgaggagtttt

SEQ ID NO: 302017 - DNA, 19 bp, Homo sapiens
  siRNA target sequence for PRPF39 (NM_017922.2,1636-1654).
ctctatgaggagttttgga

SEQ ID NO: 302018 - DNA, 19 bp, Homo sapiens
  siRNA target sequence for PRPF39 (NM_017922.2,1638-1656).
ctatgaggagttttggatt

SEQ ID NO: 302019 - DNA, 19 bp, Homo sapiens
  siRNA target sequence for PRPF39 (NM_017922.2,1707-1725).
cttcagcagagcttgtact

SEQ ID NO: 302020 - DNA, 19 bp, Homo sapiens
  siRNA target sequence for PRPF39 (NM_017922.2,1715-1733).
gagcttgtactatacatct

SEQ ID NO: 302021 - DNA, 19 bp, Homo sapiens
  siRNA target sequence for PRPF39 (NM_017922.2,1724-1742).
ctatacatctcccaaagaa

SEQ ID NO: 302022 - DNA, 19 bp, Homo sapiens
  siRNA target sequence for PRPF39 (NM_017922.2,1774-1792).
gaggaacagcagggtaata

SEQ ID NO: 302023 - DNA, 19 bp, Homo sapiens
  siRNA target sequence for PRPF39 (NM_017922.2,1776-1794).
ggaacagcagggtaatatt

SEQ ID NO: 302024 - DNA, 19 bp, Homo sapiens
  siRNA target sequence for PRPF39 (NM_017922.2,1777-1795).
gaacagcagggtaatatta

SEQ ID NO: 302025 - DNA, 19 bp, Homo sapiens
  siRNA target sequence for PRPF39 (NM_017922.2,1845-1863).
ggcaatggttcgtttacga

SEQ ID NO: 302026 - DNA, 19 bp, Homo sapiens
  siRNA target sequence for PRPF39 (NM_017922.2,1846-1864).
gcaatggttcgtttacgaa

SEQ ID NO: 302027 - DNA, 19 bp, Homo sapiens
  siRNA target sequence for PRPF39 (NM_017922.2,1851-1869).
ggttcgtttacgaagagta

SEQ ID NO: 302028 - DNA, 19 bp, Homo sapiens
  siRNA target sequence for PRPF39 (NM_017922.2,1852-1870).
gttcgtttacgaagagtaa

SEQ ID NO: 302029 - DNA, 19 bp, Homo sapiens
  siRNA target sequence for PRPF39 (NM_017922.2,1855-1873).
cgtttacgaagagtaagtt

SEQ ID NO: 302030 - DNA, 19 bp, Homo sapiens
  siRNA target sequence for PRPF39 (NM_017922.2,2029-2047).
cttttggaagcaatcgaaa

SEQ ID NO: 302031 - DNA, 19 bp, Homo sapiens
  siRNA target sequence for PRPF39 (NM_017922.2,2130-2148).
cctaaattgttttgacaaa

SEQ ID NO: 302032 - DNA, 19 bp, Homo sapiens
  siRNA target sequence for PRPF39 (NM_017922.2,2152-2170).
gtacatggttcattaccta

SEQ ID NO: 302033 - DNA, 19 bp, Homo sapiens
  siRNA target sequence for PRPF39 (NM_017922.2,2155-2173).
catggttcattacctatta

SEQ ID NO: 302034 - DNA, 19 bp, Homo sapiens
  siRNA target sequence for PRPF39 (NM_017922.2,2158-2176).
ggttcattacctattaaaa

SEQ ID NO: 302035 - DNA, 19 bp, Homo sapiens
  siRNA target sequence for PRPF39 (NM_017922.2,2218-2236).
gattttggttccgatgtta

SEQ ID NO: 302036 - DNA, 19 bp, Homo sapiens
  siRNA target sequence for PRPF39 (NM_017922.2,2225-2243).
gttccgatgttaataagct

SEQ ID NO: 302037 - DNA, 19 bp, Homo sapiens
  siRNA target sequence for PRPF39 (NM_017922.2,2251-2269).
gcttatgatgaacatcaaa

SEQ ID NO: 302038 - DNA, 19 bp, Homo sapiens
  siRNA target sequence for PRPF39 (NM_017922.2,2275-2293).
ctgaaagaacaggattctt

SEQ ID NO: 302039 - DNA, 19 bp, Homo sapiens
  siRNA target sequence for PRPF39 (NM_017922.2,2277-2295).
gaaagaacaggattcttta

SEQ ID NO: 302040 - DNA, 19 bp, Homo sapiens
  siRNA target sequence for PRPF39 (NM_017922.2,2366-2384).
catctacacagatgattga

SEQ ID NO: 302041 - DNA, 19 bp, Homo sapiens
  siRNA target sequence for PRPF39 (NM_017922.2,2397-2415).
ggcaaaccaagctgtatat

SEQ ID NO: 302042 - DNA, 19 bp, Homo sapiens
  siRNA target sequence for PRPF39 (NM_017922.2,2399-2417).
caaaccaagctgtatataa

SEQ ID NO: 302043 - DNA, 19 bp, Homo sapiens
  siRNA target sequence for PRPF39 (NM_017922.2,2423-2441).
gtgcgtggtatcaatacaa

SEQ ID NO: 302044 - DNA, 19 bp, Homo sapiens
  siRNA target sequence for PRPF39 (NM_017922.2,2425-2443).
gcgtggtatcaatacaatt

SEQ ID NO: 302045 - DNA, 19 bp, Homo sapiens
  siRNA target sequence for PRPF39 (NM_017922.2,2426-2444).
cgtggtatcaatacaatta

SEQ ID NO: 302046 - DNA, 19 bp, Homo sapiens
  siRNA target sequence for PRPF39 (NM_017922.2,2427-2445).
gtggtatcaatacaattat

SEQ ID NO: 302047 - DNA, 19 bp, Homo sapiens
  siRNA target sequence for PRPF39 (NM_017922.2,2429-2447).
ggtatcaatacaattatca

SEQ ID NO: 302048 - DNA, 19 bp, Homo sapiens
  siRNA target sequence for PRPF39 (NM_017922.2,2448-2466).
gaatccttggaattatgga

SEQ ID NO: 302049 - DNA, 19 bp, Homo sapiens
  siRNA target sequence for PRPF39 (NM_017922.2,2453-2471).
cttggaattatggacaata

SEQ ID NO: 302050 - DNA, 19 bp, Homo sapiens
  siRNA target sequence for GLE1L (NM_001499.1,182-200).
gcgaggatgttttagaaga

SEQ ID NO: 302051 - DNA, 19 bp, Homo sapiens
  siRNA target sequence for GLE1L (NM_001499.1,311-329).
cagcttcagccctagatca

SEQ ID NO: 302052 - DNA, 19 bp, Homo sapiens
  siRNA target sequence for GLE1L (NM_001499.1,321-339).
cctagatcaaccctcattt

SEQ ID NO: 302053 - DNA, 19 bp, Homo sapiens
  siRNA target sequence for GLE1L (NM_001499.1,381-399).
ctcccctgcaacaccaaat

SEQ ID NO: 302054 - DNA, 19 bp, Homo sapiens
  siRNA target sequence for GLE1L (NM_001499.1,401-419).
gaaccaagggcaaagatga

SEQ ID NO: 302055 - DNA, 19 bp, Homo sapiens
  siRNA target sequence for GLE1L (NM_001499.1,426-444).
gcacacagaatctatggta

SEQ ID NO: 302056 - DNA, 19 bp, Homo sapiens
  siRNA target sequence for GLE1L (NM_001499.1,452-470).
cctcacgggggatcaaagt

SEQ ID NO: 302057 - DNA, 19 bp, Homo sapiens
  siRNA target sequence for GLE1L (NM_001499.1,592-610).
ctgaagcggtttgatgaat

SEQ ID NO: 302058 - DNA, 19 bp, Homo sapiens
  siRNA target sequence for GLE1L (NM_001499.1,640-658).
caggacttgcgggaagtaa

SEQ ID NO: 302059 - DNA, 19 bp, Homo sapiens
  siRNA target sequence for GLE1L (NM_001499.1,680-698).
ccttgggacaccaagagaa

SEQ ID NO: 302060 - DNA, 19 bp, Homo sapiens
  siRNA target sequence for GLE1L (NM_001499.1,714-732).
ccgtcacagagcaaagatt

SEQ ID NO: 302061 - DNA, 19 bp, Homo sapiens
  siRNA target sequence for GLE1L (NM_001499.1,1043-1061).
gggacctcctgatgaactt

SEQ ID NO: 302062 - DNA, 19 bp, Homo sapiens
  siRNA target sequence for GLE1L (NM_001499.1,1227-1245).
gaaggtacaagacattaca

SEQ ID NO: 302063 - DNA, 19 bp, Homo sapiens
  siRNA target sequence for GLE1L (NM_001499.1,1372-1390).
ccagtgagccaaatctcta

SEQ ID NO: 302064 - DNA, 19 bp, Homo sapiens
  siRNA target sequence for GLE1L (NM_001499.1,1391-1409).
ccattgcaggctcaaaact

SEQ ID NO: 302065 - DNA, 19 bp, Homo sapiens
  siRNA target sequence for GLE1L (NM_001499.1,1443-1461).
ctctggaaaacctgttcaa

SEQ ID NO: 302066 - DNA, 19 bp, Homo sapiens
  siRNA target sequence for GLE1L (NM_001499.1,1500-1518).
ggggctggactttgttcaa

SEQ ID NO: 302067 - DNA, 19 bp, Homo sapiens
  siRNA target sequence for GLE1L (NM_001499.1,1501-1519).
gggctggactttgttcaat

SEQ ID NO: 302068 - DNA, 19 bp, Homo sapiens
  siRNA target sequence for GLE1L (NM_001499.1,1504-1522).
ctggactttgttcaataca

SEQ ID NO: 302069 - DNA, 19 bp, Homo sapiens
  siRNA target sequence for GLE1L (NM_001499.1,1506-1524).
ggactttgttcaatacaaa

SEQ ID NO: 302070 - DNA, 19 bp, Homo sapiens
  siRNA target sequence for GLE1L (NM_001499.1,1741-1759).
ggttaccaagtaaaggatt

SEQ ID NO: 302071 - DNA, 19 bp, Homo sapiens
  siRNA target sequence for GLE1L (NM_001499.1,1770-1788).
gcagcaagacaactttcta

SEQ ID NO: 302072 - DNA, 19 bp, Homo sapiens
  siRNA target sequence for GLE1L (NM_001499.1,1773-1791).
gcaagacaactttctaaaa

SEQ ID NO: 302073 - DNA, 19 bp, Homo sapiens
  siRNA target sequence for GLE1L (NM_001499.1,1811-1829).
gtctctacgctgctatcat

SEQ ID NO: 302074 - DNA, 19 bp, Homo sapiens
  siRNA target sequence for GLE1L (NM_001499.1,1833-1851).
gctccggtggccatatgga

SEQ ID NO: 302075 - DNA, 19 bp, Homo sapiens
  siRNA target sequence for GLE1L (NM_001499.1,1834-1852).
ctccggtggccatatggaa

SEQ ID NO: 302076 - DNA, 19 bp, Homo sapiens
  siRNA target sequence for GLE1L (NM_001499.1,1850-1868).
gaaaccgacaggagattca

SEQ ID NO: 302077 - DNA, 19 bp, Homo sapiens
  siRNA target sequence for GLE1L (NM_001499.1,1896-1914).
ctggttggcacagatctta

SEQ ID NO: 302078 - DNA, 19 bp, Homo sapiens
  siRNA target sequence for GLE1L (NM_001499.1,1982-2000).
ccctcatgaagcaatacca

SEQ ID NO: 302079 - DNA, 19 bp, Homo sapiens
  siRNA target sequence for GLE1L (NM_001499.1,2016-2034).
gatgctaattctcatcaaa

SEQ ID NO: 302080 - DNA, 19 bp, Homo sapiens
  siRNA target sequence for PHLDA2 (NM_003311.2,339-357).
gcgctggcgctcatcgatt

SEQ ID NO: 302081 - DNA, 19 bp, Homo sapiens
  siRNA target sequence for CD37 (NM_001774.1,421-439).
cgggacgtcgtagagaaaa

SEQ ID NO: 302082 - DNA, 19 bp, Homo sapiens
  siRNA target sequence for CD37 (NM_001774.1,624-642).
caacgactccacaatccta

SEQ ID NO: 302083 - DNA, 19 bp, Homo sapiens
  siRNA target sequence for CD37 (NM_001774.1,774-792).
gctgcacaacaaccttatt

SEQ ID NO: 302084 - DNA, 19 bp, Homo sapiens
  siRNA target sequence for CD37 (NM_001774.1,826-844).
ctcgagctcgggttcatga

SEQ ID NO: 302085 - DNA, 19 bp, Homo sapiens
  siRNA target sequence for GYPC (NM_002101.3,229-247).
gcctccaccacaatgcata

SEQ ID NO: 302086 - DNA, 19 bp, Homo sapiens
  siRNA target sequence for GYPC (NM_002101.3,311-329).
ccacccccaccataatgga

SEQ ID NO: 302087 - DNA, 19 bp, Homo sapiens
  siRNA target sequence for GYPC (NM_002101.3,391-409).
gtcatgctgcgctacatgt

SEQ ID NO: 302088 - DNA, 19 bp, Homo sapiens
  siRNA target sequence for GYPC (NM_002101.3,521-539).
gcagaaaggagtactttat

SEQ ID NO: 302089 - DNA, 19 bp, Homo sapiens
  siRNA target sequence for GYPC (NM_002101.3,522-540).
cagaaaggagtactttatt

SEQ ID NO: 302090 - DNA, 19 bp, Homo sapiens
  siRNA target sequence for TM4SF2 (NM_004615.2,79-97).
ggagaccaaacctgtgata

SEQ ID NO: 302091 - DNA, 19 bp, Homo sapiens
  siRNA target sequence for TM4SF2 (NM_004615.2,170-188).
ggagtctggggcaaactta

SEQ ID NO: 302092 - DNA, 19 bp, Homo sapiens
  siRNA target sequence for TM4SF2 (NM_004615.2,217-235).
cgagaactccacaaatgct

SEQ ID NO: 302093 - DNA, 19 bp, Homo sapiens
  siRNA target sequence for TM4SF2 (NM_004615.2,255-273).
ctggcaccactattgttgt

SEQ ID NO: 302094 - DNA, 19 bp, Homo sapiens
  siRNA target sequence for TM4SF2 (NM_004615.2,258-276).
gcaccactattgttgtctt

SEQ ID NO: 302095 - DNA, 19 bp, Homo sapiens
  siRNA target sequence for TM4SF2 (NM_004615.2,272-290).
gtctttggcctgtttggat

SEQ ID NO: 302096 - DNA, 19 bp, Homo sapiens
  siRNA target sequence for TM4SF2 (NM_004615.2,281-299).
ctgtttggatgctttgcta

SEQ ID NO: 302097 - DNA, 19 bp, Homo sapiens
  siRNA target sequence for TM4SF2 (NM_004615.2,435-453).
cggacgctatgcagactta

SEQ ID NO: 302098 - DNA, 19 bp, Homo sapiens
  siRNA target sequence for TM4SF2 (NM_004615.2,437-455).
gacgctatgcagacttaca

SEQ ID NO: 302099 - DNA, 19 bp, Homo sapiens
  siRNA target sequence for TM4SF2 (NM_004615.2,439-457).
cgctatgcagacttacaat

SEQ ID NO: 302100 - DNA, 19 bp, Homo sapiens
  siRNA target sequence for TM4SF2 (NM_004615.2,589-607).
gaacgaaactgattgtaat

SEQ ID NO: 302101 - DNA, 19 bp, Homo sapiens
  siRNA target sequence for TM4SF2 (NM_004615.2,603-621).
gtaatccccaggatctaca

SEQ ID NO: 302102 - DNA, 19 bp, Homo sapiens
  siRNA target sequence for TM4SF2 (NM_004615.2,609-627).
cccaggatctacacaatct

SEQ ID NO: 302103 - DNA, 19 bp, Homo sapiens
  siRNA target sequence for TM4SF2 (NM_004615.2,652-670).
ccagaagggttgttatgat

SEQ ID NO: 302104 - DNA, 19 bp, Homo sapiens
  siRNA target sequence for TM4SF2 (NM_004615.2,668-686).
gatctggtaactagtttca

SEQ ID NO: 302105 - DNA, 19 bp, Homo sapiens
  siRNA target sequence for TM4SF2 (NM_004615.2,711-729).
ctggagtggcgtttggaat

SEQ ID NO: 302106 - DNA, 19 bp, Homo sapiens
  siRNA target sequence for TM4SF2 (NM_004615.2,730-748).
cgcattctcccagttaatt

SEQ ID NO: 302107 - DNA, 19 bp, Homo sapiens
  siRNA target sequence for TM4SF4 (NM_004617.2,298-316).
ctggctaacatcctgttat

SEQ ID NO: 302108 - DNA, 19 bp, Homo sapiens
  siRNA target sequence for TM4SF4 (NM_004617.2,369-387).
ctggtttttcggaggaata

SEQ ID NO: 302109 - DNA, 19 bp, Homo sapiens
  siRNA target sequence for TM4SF4 (NM_004617.2,392-410).
gaagcggtgtcttgatgat

SEQ ID NO: 302110 - DNA, 19 bp, Homo sapiens
  siRNA target sequence for TM4SF4 (NM_004617.2,395-413).
gcggtgtcttgatgatctt

SEQ ID NO: 302111 - DNA, 19 bp, Homo sapiens
  siRNA target sequence for TM4SF4 (NM_004617.2,498-516).
gttcacctccacgatattt

SEQ ID NO: 302112 - DNA, 19 bp, Homo sapiens
  siRNA target sequence for TM4SF4 (NM_004617.2,535-553).
ggagctggatactcgttta

SEQ ID NO: 302113 - DNA, 19 bp, Homo sapiens
  siRNA target sequence for TM4SF4 (NM_004617.2,536-554).
gagctggatactcgtttat

SEQ ID NO: 302114 - DNA, 19 bp, Homo sapiens
  siRNA target sequence for TM4SF4 (NM_004617.2,538-556).
gctggatactcgtttatca

SEQ ID NO: 302115 - DNA, 19 bp, Homo sapiens
  siRNA target sequence for TM4SF4 (NM_004617.2,539-557).
ctggatactcgtttatcat

SEQ ID NO: 302116 - DNA, 19 bp, Homo sapiens
  siRNA target sequence for TM4SF4 (NM_004617.2,541-559).
ggatactcgtttatcatct

SEQ ID NO: 302117 - DNA, 19 bp, Homo sapiens
  siRNA target sequence for TM4SF4 (NM_004617.2,591-609).
cctcatggccaatagtaca

SEQ ID NO: 302118 - DNA, 19 bp, Homo sapiens
  siRNA target sequence for TM4SF4 (NM_004617.2,592-610).
ctcatggccaatagtacat

SEQ ID NO: 302119 - DNA, 19 bp, Homo sapiens
  siRNA target sequence for TM4SF4 (NM_004617.2,621-639).
cttccacgacggggattat

SEQ ID NO: 302120 - DNA, 19 bp, Homo sapiens
  siRNA target sequence for TM4SF4 (NM_004617.2,625-643).
cacgacggggattatctca

SEQ ID NO: 302121 - DNA, 19 bp, Homo sapiens
  siRNA target sequence for TM4SF4 (NM_004617.2,627-645).
cgacggggattatctcaat

SEQ ID NO: 302122 - DNA, 19 bp, Homo sapiens
  siRNA target sequence for TM4SF4 (NM_004617.2,630-648).
cggggattatctcaatgat

SEQ ID NO: 302123 - DNA, 19 bp, Homo sapiens
  siRNA target sequence for TM4SF4 (NM_004617.2,632-650).
gggattatctcaatgatga

SEQ ID NO: 302124 - DNA, 19 bp, Homo sapiens
  siRNA target sequence for TM4SF4 (NM_004617.2,649-667).
gaggccttatggaacaagt

SEQ ID NO: 302125 - DNA, 19 bp, Homo sapiens
  siRNA target sequence for TM4SF4 (NM_004617.2,666-684).
gtgccgagagcctctcaat

SEQ ID NO: 302126 - DNA, 19 bp, Homo sapiens
  siRNA target sequence for TM4SF4 (NM_004617.2,668-686).
gccgagagcctctcaatgt

SEQ ID NO: 302127 - DNA, 19 bp, Homo sapiens
  siRNA target sequence for TM4SF5 (NM_003963.2,59-77).
gtggggctctccctcatta

SEQ ID NO: 302128 - DNA, 19 bp, Homo sapiens
  siRNA target sequence for TM4SF5 (NM_003963.2,589-607).
cggcgattgcaggaaaaaa

SEQ ID NO: 302129 - DNA, 19 bp, Homo sapiens
  siRNA target sequence for TM4SF5 (NM_003963.2,591-609).
gcgattgcaggaaaaaaca

SEQ ID NO: 302130 - DNA, 19 bp, Homo sapiens
  siRNA target sequence for DAD1 (NM_001344.1,75-93).
gtcggtagtgtctgtcatt

SEQ ID NO: 302131 - DNA, 19 bp, Homo sapiens
  siRNA target sequence for DAD1 (NM_001344.1,90-108).
catttcgcggttcttagaa

SEQ ID NO: 302132 - DNA, 19 bp, Homo sapiens
  siRNA target sequence for DAD1 (NM_001344.1,98-116).
ggttcttagaagagtactt

SEQ ID NO: 302133 - DNA, 19 bp, Homo sapiens
  siRNA target sequence for DAD1 (NM_001344.1,125-143).
ctccgcagcgtctgaagtt

SEQ ID NO: 302134 - DNA, 19 bp, Homo sapiens
  siRNA target sequence for DAD1 (NM_001344.1,148-166).
gacgcgtacctgctgtata

SEQ ID NO: 302135 - DNA, 19 bp, Homo sapiens
  siRNA target sequence for DAD1 (NM_001344.1,183-201).
gctgcagttcggttactgt

SEQ ID NO: 302136 - DNA, 19 bp, Homo sapiens
  siRNA target sequence for DAD1 (NM_001344.1,235-253).
ctctcgggcttcatctctt

SEQ ID NO: 302137 - DNA, 19 bp, Homo sapiens
  siRNA target sequence for DAD1 (NM_001344.1,275-293).
cggtttgcctgagaataca

SEQ ID NO: 302138 - DNA, 19 bp, Homo sapiens
  siRNA target sequence for DAD1 (NM_001344.1,306-324).
gaacaaagcggatttccaa

SEQ ID NO: 302139 - DNA, 19 bp, Homo sapiens
  siRNA target sequence for DAD1 (NM_001344.1,341-359).
gagcctttgctgattttct

SEQ ID NO: 302140 - DNA, 19 bp, Homo sapiens
  siRNA target sequence for DAD1 (NM_001344.1,379-397).
caccttgttgtcatgaact

SEQ ID NO: 302141 - DNA, 19 bp, Homo sapiens
  siRNA target sequence for SERP1 (NM_014445.2,387-405).
cgccaagacctcgagaaat

SEQ ID NO: 302142 - DNA, 19 bp, Homo sapiens
  siRNA target sequence for SERP1 (NM_014445.2,437-455).
ggttattggctctcttcat

SEQ ID NO: 302143 - DNA, 19 bp, Homo sapiens
  siRNA target sequence for SERP1 (NM_014445.2,438-456).
gttattggctctcttcatt

SEQ ID NO: 302144 - DNA, 19 bp, Homo sapiens
  siRNA target sequence for SERP1 (NM_014445.2,463-481).
gtctgtggttctgcaattt

SEQ ID NO: 302145 - DNA, 19 bp, Homo sapiens
  siRNA target sequence for UBQLN3 (NM_017481.2,257-275).
ccccgatcagcttgttcta

SEQ ID NO: 302146 - DNA, 19 bp, Homo sapiens
  siRNA target sequence for UBQLN3 (NM_017481.2,258-276).
cccgatcagcttgttctaa

SEQ ID NO: 302147 - DNA, 19 bp, Homo sapiens
  siRNA target sequence for UBQLN3 (NM_017481.2,259-277).
ccgatcagcttgttctaat

SEQ ID NO: 302148 - DNA, 19 bp, Homo sapiens
  siRNA target sequence for UBQLN3 (NM_017481.2,261-279).
gatcagcttgttctaatct

SEQ ID NO: 302149 - DNA, 19 bp, Homo sapiens
  siRNA target sequence for UBQLN3 (NM_017481.2,717-735).
cttaacaacccggaaatta

SEQ ID NO: 302150 - DNA, 19 bp, Homo sapiens
  siRNA target sequence for UBQLN3 (NM_017481.2,738-756).
cggcagacactggagtttt

SEQ ID NO: 302151 - DNA, 19 bp, Homo sapiens
  siRNA target sequence for UBQLN3 (NM_017481.2,743-761).
gacactggagtttttacgt

SEQ ID NO: 302152 - DNA, 19 bp, Homo sapiens
  siRNA target sequence for UBQLN3 (NM_017481.2,745-763).
cactggagtttttacgtaa

SEQ ID NO: 302153 - DNA, 19 bp, Homo sapiens
  siRNA target sequence for UBQLN3 (NM_017481.2,798-816).
gaccgggtgctcagtaact

SEQ ID NO: 302154 - DNA, 19 bp, Homo sapiens
  siRNA target sequence for UBQLN3 (NM_017481.2,851-869).
cactatgtacacagatatt

SEQ ID NO: 302155 - DNA, 19 bp, Homo sapiens
  siRNA target sequence for UBQLN3 (NM_017481.2,923-941).
cactgccactactgataat

SEQ ID NO: 302156 - DNA, 19 bp, Homo sapiens
  siRNA target sequence for UBQLN3 (NM_017481.2,1058-1076).
ggatgcacctgacattaga

SEQ ID NO: 302157 - DNA, 19 bp, Homo sapiens
  siRNA target sequence for UBQLN3 (NM_017481.2,1059-1077).
gatgcacctgacattagaa

SEQ ID NO: 302158 - DNA, 19 bp, Homo sapiens
  siRNA target sequence for UBQLN3 (NM_017481.2,1062-1080).
gcacctgacattagaaata

SEQ ID NO: 302159 - DNA, 19 bp, Homo sapiens
  siRNA target sequence for UBQLN3 (NM_017481.2,1066-1084).
ctgacattagaaataggtt

SEQ ID NO: 302160 - DNA, 19 bp, Homo sapiens
  siRNA target sequence for UBQLN3 (NM_017481.2,1099-1117).
gtattataaggctctatga

SEQ ID NO: 302161 - DNA, 19 bp, Homo sapiens
  siRNA target sequence for UBQLN3 (NM_017481.2,1145-1163).
ccagtccctaggaacttat

SEQ ID NO: 302162 - DNA, 19 bp, Homo sapiens
  siRNA target sequence for UBQLN3 (NM_017481.2,1150-1168).
ccctaggaacttatctaca

SEQ ID NO: 302163 - DNA, 19 bp, Homo sapiens
  siRNA target sequence for UBQLN3 (NM_017481.2,1199-1217).
ggaaccaccaccatcagta

SEQ ID NO: 302164 - DNA, 19 bp, Homo sapiens
  siRNA target sequence for UBQLN3 (NM_017481.2,1276-1294).
ccgaggagtcagtagcaat

SEQ ID NO: 302165 - DNA, 19 bp, Homo sapiens
  siRNA target sequence for UBQLN3 (NM_017481.2,1390-1408).
ctggacatagcacaaactt

SEQ ID NO: 302166 - DNA, 19 bp, Homo sapiens
  siRNA target sequence for UBQLN3 (NM_017481.2,1421-1439).
ctcggggctgggagattct

SEQ ID NO: 302167 - DNA, 19 bp, Homo sapiens
  siRNA target sequence for UBQLN3 (NM_017481.2,1574-1592).
gttacaggatgagatacaa

SEQ ID NO: 302168 - DNA, 19 bp, Homo sapiens
  siRNA target sequence for UBQLN3 (NM_017481.2,1872-1890).
ctccatatgctgcaagatt

SEQ ID NO: 302169 - DNA, 19 bp, Homo sapiens
  siRNA target sequence for UBQLN3 (NM_017481.2,1881-1899).
ctgcaagatttagttagta

SEQ ID NO: 302170 - DNA, 19 bp, Homo sapiens
  siRNA target sequence for UBQLN3 (NM_017481.2,1883-1901).
gcaagatttagttagtaca

SEQ ID NO: 302171 - DNA, 19 bp, Homo sapiens
  siRNA target sequence for UBQLN3 (NM_017481.2,1884-1902).
caagatttagttagtacaa

SEQ ID NO: 302172 - DNA, 19 bp, Homo sapiens
  siRNA target sequence for UBQLN3 (NM_017481.2,1956-1974).
cggtccatgggctttctga

SEQ ID NO: 302173 - DNA, 19 bp, Homo sapiens
  siRNA target sequence for UBQLN3 (NM_017481.2,1957-1975).
ggtccatgggctttctgaa

SEQ ID NO: 302174 - DNA, 19 bp, Homo sapiens
  siRNA target sequence for UBQLN3 (NM_017481.2,1958-1976).
gtccatgggctttctgaat

SEQ ID NO: 302175 - DNA, 19 bp, Homo sapiens
  siRNA target sequence for UBQLN3 (NM_017481.2,1973-1991).
gaatcgtgaagccaatctt

SEQ ID NO: 302176 - DNA, 19 bp, Homo sapiens
  siRNA target sequence for APG12L (NM_004707.2,118-136).
ccgggaacaccaagtttca

SEQ ID NO: 302177 - DNA, 19 bp, Homo sapiens
  siRNA target sequence for APG12L (NM_004707.2,277-295).
gcagcttcctacttcaatt

SEQ ID NO: 302178 - DNA, 19 bp, Homo sapiens
  siRNA target sequence for APG12L (NM_004707.2,280-298).
gcttcctacttcaattgct

SEQ ID NO: 302179 - DNA, 19 bp, Homo sapiens
  siRNA target sequence for APG12L (NM_004707.2,319-337).
ggatgtctccccagaaaca

SEQ ID NO: 302180 - DNA, 19 bp, Homo sapiens
  siRNA target sequence for APG12L (NM_004707.2,396-414).
gcgacaccaagaaaaaaat

SEQ ID NO: 302181 - DNA, 19 bp, Homo sapiens
  siRNA target sequence for APG12L (NM_004707.2,397-415).
cgacaccaagaaaaaaatt

SEQ ID NO: 302182 - DNA, 19 bp, Homo sapiens
  siRNA target sequence for APG12L (NM_004707.2,434-452).
gtgggagacactcctatta

SEQ ID NO: 302183 - DNA, 19 bp, Homo sapiens
  siRNA target sequence for APG12L (NM_004707.2,489-507).
ccatccaaggactcattga

SEQ ID NO: 302184 - DNA, 19 bp, Homo sapiens
  siRNA target sequence for APG12L (NM_004707.2,498-516).
gactcattgacttcatcaa

SEQ ID NO: 302185 - DNA, 19 bp, Homo sapiens
  siRNA target sequence for MGC47816 (NM_173642.1,433-451).
cgcccacagagcatcttaa

SEQ ID NO: 302186 - DNA, 19 bp, Homo sapiens
  siRNA target sequence for MGC47816 (NM_173642.1,435-453).
cccacagagcatcttaaat

SEQ ID NO: 302187 - DNA, 19 bp, Homo sapiens
  siRNA target sequence for MGC47816 (NM_173642.1,653-671).
ctgacatctgccatctgat

SEQ ID NO: 302188 - DNA, 19 bp, Homo sapiens
  siRNA target sequence for MGC47816 (NM_173642.1,756-774).
ggtcataggctctatgctt

SEQ ID NO: 302189 - DNA, 19 bp, Homo sapiens
  siRNA target sequence for MGC47816 (NM_173642.1,834-852).
gtgtccgctgacagaacaa

SEQ ID NO: 302190 - DNA, 19 bp, Homo sapiens
  siRNA target sequence for MGC47816 (NM_173642.1,905-923).
gcattgatctccttatcat

SEQ ID NO: 302191 - DNA, 19 bp, Homo sapiens
  siRNA target sequence for MGC47816 (NM_173642.1,943-961).
gtgtgtgaggcaaatgcta

SEQ ID NO: 302192 - DNA, 19 bp, Homo sapiens
  siRNA target sequence for MGC47816 (NM_173642.1,945-963).
gtgtgaggcaaatgctaat

SEQ ID NO: 302193 - DNA, 19 bp, Homo sapiens
  siRNA target sequence for MGC47816 (NM_173642.1,984-1002).
ccaggcatgcaacttagat

SEQ ID NO: 302194 - DNA, 19 bp, Homo sapiens
  siRNA target sequence for MGC47816 (NM_173642.1,1085-1103).
cgagtccaagggagaagaa

SEQ ID NO: 302195 - DNA, 19 bp, Homo sapiens
  siRNA target sequence for MGC47816 (NM_173642.1,1138-1156).
gcagagagcgtctatacca

SEQ ID NO: 302196 - DNA, 19 bp, Homo sapiens
  siRNA target sequence for MGC47816 (NM_173642.1,1139-1157).
cagagagcgtctataccat

SEQ ID NO: 302197 - DNA, 19 bp, Homo sapiens
  siRNA target sequence for MGC47816 (NM_173642.1,1252-1270).
cccgaacctggctacaaca

SEQ ID NO: 302198 - DNA, 19 bp, Homo sapiens
  siRNA target sequence for MGC47816 (NM_173642.1,1253-1271).
ccgaacctggctacaacat

SEQ ID NO: 302199 - DNA, 19 bp, Homo sapiens
  siRNA target sequence for MGC47816 (NM_173642.1,1254-1272).
cgaacctggctacaacatt

SEQ ID NO: 302200 - DNA, 19 bp, Homo sapiens
  siRNA target sequence for MGC47816 (NM_173642.1,1255-1273).
gaacctggctacaacatta

SEQ ID NO: 302201 - DNA, 19 bp, Homo sapiens
  siRNA target sequence for MGC47816 (NM_173642.1,1258-1276).
cctggctacaacattaaca

SEQ ID NO: 302202 - DNA, 19 bp, Homo sapiens
  siRNA target sequence for MGC47816 (NM_173642.1,1280-1298).
ggattgcttctgagttaaa

SEQ ID NO: 302203 - DNA, 19 bp, Homo sapiens
  siRNA target sequence for MGC47816 (NM_173642.1,1285-1303).
gcttctgagttaaaactta

SEQ ID NO: 302204 - DNA, 19 bp, Homo sapiens
  siRNA target sequence for MGC47816 (NM_173642.1,1286-1304).
cttctgagttaaaacttaa

SEQ ID NO: 302205 - DNA, 19 bp, Homo sapiens
  siRNA target sequence for UBD (NM_006398.1,59-77).
ccgaggaatgggatttaat

SEQ ID NO: 302206 - DNA, 19 bp, Homo sapiens
  siRNA target sequence for UBD (NM_006398.1,85-103).
gatgccaacccatatgaca

SEQ ID NO: 302207 - DNA, 19 bp, Homo sapiens
  siRNA target sequence for UBD (NM_006398.1,121-139).
gaacatgtccggtctaaga

SEQ ID NO: 302208 - DNA, 19 bp, Homo sapiens
  siRNA target sequence for UBD (NM_006398.1,151-169).
gtgcaggaccaggttcttt

SEQ ID NO: 302209 - DNA, 19 bp, Homo sapiens
  siRNA target sequence for UBD (NM_006398.1,172-190).
ctgggctccaagatcttaa

SEQ ID NO: 302210 - DNA, 19 bp, Homo sapiens
  siRNA target sequence for UBD (NM_006398.1,367-385).
gcaatgatcgagactaaga

SEQ ID NO: 302211 - DNA, 19 bp, Homo sapiens
  siRNA target sequence for UBD (NM_006398.1,376-394).
gagactaagacgggtataa

SEQ ID NO: 302212 - DNA, 19 bp, Homo sapiens
  siRNA target sequence for UBD (NM_006398.1,397-415).
cctgagacccagattgtga

SEQ ID NO: 302213 - DNA, 19 bp, Homo sapiens
  siRNA target sequence for UBD (NM_006398.1,405-423).
ccagattgtgacttgcaat

SEQ ID NO: 302214 - DNA, 19 bp, Homo sapiens
  siRNA target sequence for UBD (NM_006398.1,454-472).
gcagattacggcatcagaa

SEQ ID NO: 302215 - DNA, 19 bp, Homo sapiens
  siRNA target sequence for UBD (NM_006398.1,492-510).
ggcatcttattgtattgga

SEQ ID NO: 302216 - DNA, 19 bp, Homo sapiens
  siRNA target sequence for CDC20 (NM_001255.1,1238-1256).
caccagtgatcgacacatt

SEQ ID NO: 302217 - DNA, 19 bp, Homo sapiens
  siRNA target sequence for CDC20 (NM_001255.1,1513-1531).
ggctatggcgctgttttga

SEQ ID NO: 302218 - DNA, 19 bp, Homo sapiens
  siRNA target sequence for CDC20 (NM_001255.1,1515-1533).
ctatggcgctgttttgagt

SEQ ID NO: 302219 - DNA, 19 bp, Homo sapiens
  siRNA target sequence for CDC23 (NM_004661.2,68-86).
cgcctgtcctgtccataaa

SEQ ID NO: 302220 - DNA, 19 bp, Homo sapiens
  siRNA target sequence for CDC23 (NM_004661.2,96-114).
ctcagatttgcgggaaatt

SEQ ID NO: 302221 - DNA, 19 bp, Homo sapiens
  siRNA target sequence for CDC23 (NM_004661.2,98-116).
cagatttgcgggaaattaa

SEQ ID NO: 302222 - DNA, 19 bp, Homo sapiens
  siRNA target sequence for CDC23 (NM_004661.2,105-123).
gcgggaaattaaaaagcaa

SEQ ID NO: 302223 - DNA, 19 bp, Homo sapiens
  siRNA target sequence for CDC23 (NM_004661.2,159-177).
cctactacacagtagcaaa

SEQ ID NO: 302224 - DNA, 19 bp, Homo sapiens
  siRNA target sequence for CDC23 (NM_004661.2,160-178).
ctactacacagtagcaaat

SEQ ID NO: 302225 - DNA, 19 bp, Homo sapiens
  siRNA target sequence for CDC23 (NM_004661.2,163-181).
ctacacagtagcaaatggt

SEQ ID NO: 302226 - DNA, 19 bp, Homo sapiens
  siRNA target sequence for CDC23 (NM_004661.2,229-247).
caaccgcctccgcctatta

SEQ ID NO: 302227 - DNA, 19 bp, Homo sapiens
  siRNA target sequence for CDC23 (NM_004661.2,233-251).
cgcctccgcctattacaga

SEQ ID NO: 302228 - DNA, 19 bp, Homo sapiens
  siRNA target sequence for CDC23 (NM_004661.2,291-309).
ggcctactttgacgttaaa

SEQ ID NO: 302229 - DNA, 19 bp, Homo sapiens
  siRNA target sequence for CDC23 (NM_004661.2,293-311).
cctactttgacgttaaaga

SEQ ID NO: 302230 - DNA, 19 bp, Homo sapiens
  siRNA target sequence for CDC23 (NM_004661.2,405-423).
gaaggacgatgaaacagtt

SEQ ID NO: 302231 - DNA, 19 bp, Homo sapiens
  siRNA target sequence for CDC23 (NM_004661.2,409-427).
gacgatgaaacagttgata

SEQ ID NO: 302232 - DNA, 19 bp, Homo sapiens
  siRNA target sequence for CDC23 (NM_004661.2,463-481).
gaggcgcttagagaattga

SEQ ID NO: 302233 - DNA, 19 bp, Homo sapiens
  siRNA target sequence for CDC23 (NM_004661.2,465-483).
ggcgcttagagaattgaga

SEQ ID NO: 302234 - DNA, 19 bp, Homo sapiens
  siRNA target sequence for CDC23 (NM_004661.2,482-500).
gagtggagctcagcaaaaa

SEQ ID NO: 302235 - DNA, 19 bp, Homo sapiens
  siRNA target sequence for CDC23 (NM_004661.2,504-522).
ccaagctcgagaacttgat

SEQ ID NO: 302236 - DNA, 19 bp, Homo sapiens
  siRNA target sequence for CDC23 (NM_004661.2,509-527).
ctcgagaacttgatggatt

SEQ ID NO: 302237 - DNA, 19 bp, Homo sapiens
  siRNA target sequence for CDC23 (NM_004661.2,556-574).
cgaaaactggacttggtta

SEQ ID NO: 302238 - DNA, 19 bp, Homo sapiens
  siRNA target sequence for CDC23 (NM_004661.2,626-644).
ggggagcctggttagaact

SEQ ID NO: 302239 - DNA, 19 bp, Homo sapiens
  siRNA target sequence for CDC23 (NM_004661.2,753-771).
ggaggccctgcaaaagtat

SEQ ID NO: 302240 - DNA, 19 bp, Homo sapiens
  siRNA target sequence for CDC23 (NM_004661.2,757-775).
gccctgcaaaagtatcaga

SEQ ID NO: 302241 - DNA, 19 bp, Homo sapiens
  siRNA target sequence for CDC23 (NM_004661.2,759-777).
cctgcaaaagtatcagaat

SEQ ID NO: 302242 - DNA, 19 bp, Homo sapiens
  siRNA target sequence for CDC23 (NM_004661.2,768-786).
gtatcagaatctcattgat

SEQ ID NO: 302243 - DNA, 19 bp, Homo sapiens
  siRNA target sequence for CDC23 (NM_004661.2,795-813).
ctctaagagctcgtatatt

SEQ ID NO: 302244 - DNA, 19 bp, Homo sapiens
  siRNA target sequence for CDC23 (NM_004661.2,826-844).
gcagttgcctatcacaata

SEQ ID NO: 302245 - DNA, 19 bp, Homo sapiens
  siRNA target sequence for CDC23 (NM_004661.2,827-845).
cagttgcctatcacaatat

SEQ ID NO: 302246 - DNA, 19 bp, Homo sapiens
  siRNA target sequence for CDC23 (NM_004661.2,829-847).
gttgcctatcacaatatca

SEQ ID NO: 302247 - DNA, 19 bp, Homo sapiens
  siRNA target sequence for CDC23 (NM_004661.2,895-913).
gacccttacaggattgaaa

SEQ ID NO: 302248 - DNA, 19 bp, Homo sapiens
  siRNA target sequence for CDC23 (NM_004661.2,898-916).
ccttacaggattgaaaata

SEQ ID NO: 302249 - DNA, 19 bp, Homo sapiens
  siRNA target sequence for CDC23 (NM_004661.2,954-972).
gaaatcggagttgagttat

SEQ ID NO: 302250 - DNA, 19 bp, Homo sapiens
  siRNA target sequence for CDC23 (NM_004661.2,968-986).
gttatctggctcataacct

SEQ ID NO: 302251 - DNA, 19 bp, Homo sapiens
  siRNA target sequence for CDC23 (NM_004661.2,1009-1027).
gtagaaacgtgctgtgtaa

SEQ ID NO: 302252 - DNA, 19 bp, Homo sapiens
  siRNA target sequence for CDC23 (NM_004661.2,1024-1042).
gtaattggcaattattaca

SEQ ID NO: 302253 - DNA, 19 bp, Homo sapiens
  siRNA target sequence for CDC23 (NM_004661.2,1032-1050).
caattattacagtttacgt

SEQ ID NO: 302254 - DNA, 19 bp, Homo sapiens
  siRNA target sequence for CDC23 (NM_004661.2,1060-1078).
gagaaagcagccttatatt

SEQ ID NO: 302255 - DNA, 19 bp, Homo sapiens
  siRNA target sequence for CDC23 (NM_004661.2,1165-1183).
gctgctatccaggcttata

SEQ ID NO: 302256 - DNA, 19 bp, Homo sapiens
  siRNA target sequence for CDC23 (NM_004661.2,1169-1187).
ctatccaggcttatagaca

SEQ ID NO: 302257 - DNA, 19 bp, Homo sapiens
  siRNA target sequence for CDC23 (NM_004661.2,1209-1227).
ggactacagagcttggtat

SEQ ID NO: 302258 - DNA, 19 bp, Homo sapiens
  siRNA target sequence for CDC23 (NM_004661.2,1236-1254).
gcagacctatgaaatcctt

SEQ ID NO: 302259 - DNA, 19 bp, Homo sapiens
  siRNA target sequence for CDC23 (NM_004661.2,1241-1259).
cctatgaaatccttaagat

SEQ ID NO: 302260 - DNA, 19 bp, Homo sapiens
  siRNA target sequence for CDC23 (NM_004661.2,1296-1314).
ccagcttcgacccaatgat

SEQ ID NO: 302261 - DNA, 19 bp, Homo sapiens
  siRNA target sequence for CDC23 (NM_004661.2,1297-1315).
cagcttcgacccaatgatt

SEQ ID NO: 302262 - DNA, 19 bp, Homo sapiens
  siRNA target sequence for CDC23 (NM_004661.2,1299-1317).
gcttcgacccaatgattct

SEQ ID NO: 302263 - DNA, 19 bp, Homo sapiens
  siRNA target sequence for CDC23 (NM_004661.2,1339-1357).
gaatgttacgagaaactca

SEQ ID NO: 302264 - DNA, 19 bp, Homo sapiens
  siRNA target sequence for CDC23 (NM_004661.2,1343-1361).
gttacgagaaactcaatca

SEQ ID NO: 302265 - DNA, 19 bp, Homo sapiens
  siRNA target sequence for CDC23 (NM_004661.2,1347-1365).
cgagaaactcaatcaacta

SEQ ID NO: 302266 - DNA, 19 bp, Homo sapiens
  siRNA target sequence for CDC23 (NM_004661.2,1368-1386).
ggaagccaaaaagtgttat

SEQ ID NO: 302267 - DNA, 19 bp, Homo sapiens
  siRNA target sequence for CDC23 (NM_004661.2,1369-1387).
gaagccaaaaagtgttatt

SEQ ID NO: 302268 - DNA, 19 bp, Homo sapiens
  siRNA target sequence for CDC23 (NM_004661.2,1428-1446).
ggtgaaactggcaaagctt

SEQ ID NO: 302269 - DNA, 19 bp, Homo sapiens
  siRNA target sequence for CDC23 (NM_004661.2,1479-1497).
ccagtgttacatcaaatat

SEQ ID NO: 302270 - DNA, 19 bp, Homo sapiens
  siRNA target sequence for CDC23 (NM_004661.2,1484-1502).
gttacatcaaatatatcca

SEQ ID NO: 302271 - DNA, 19 bp, Homo sapiens
  siRNA target sequence for CDC23 (NM_004661.2,1559-1577).
gctatctggcccagtacta

SEQ ID NO: 302272 - DNA, 19 bp, Homo sapiens
  siRNA target sequence for CDC23 (NM_004661.2,1560-1578).
ctatctggcccagtactat

SEQ ID NO: 302273 - DNA, 19 bp, Homo sapiens
  siRNA target sequence for CDC23 (NM_004661.2,1564-1582).
ctggcccagtactatttta

SEQ ID NO: 302274 - DNA, 19 bp, Homo sapiens
  siRNA target sequence for CDC23 (NM_004661.2,1567-1585).
gcccagtactattttaagt

SEQ ID NO: 302275 - DNA, 19 bp, Homo sapiens
  siRNA target sequence for CDC23 (NM_004661.2,1593-1611).
gtgggatgaagcttcaact

SEQ ID NO: 302276 - DNA, 19 bp, Homo sapiens
  siRNA target sequence for CDC23 (NM_004661.2,1604-1622).
cttcaacttgtgcacaaaa

SEQ ID NO: 302277 - DNA, 19 bp, Homo sapiens
  siRNA target sequence for CDC23 (NM_004661.2,1662-1680).
cttactccggcaaatccta

SEQ ID NO: 302278 - DNA, 19 bp, Homo sapiens
  siRNA target sequence for CDC23 (NM_004661.2,1775-1793).
gagtttctccactcaactt

SEQ ID NO: 302279 - DNA, 19 bp, Homo sapiens
  siRNA target sequence for CDC23 (NM_004661.2,1777-1795).
gtttctccactcaacttgt

SEQ ID NO: 302280 - DNA, 19 bp, Homo sapiens
  siRNA target sequence for PSMD14 (NM_005805.1,277-295).
cacagcagaacaagtctat

SEQ ID NO: 302281 - DNA, 19 bp, Homo sapiens
  siRNA target sequence for PSMD14 (NM_005805.1,281-299).
gcagaacaagtctatatct

SEQ ID NO: 302282 - DNA, 19 bp, Homo sapiens
  siRNA target sequence for PSMD14 (NM_005805.1,284-302).
gaacaagtctatatctctt

SEQ ID NO: 302283 - DNA, 19 bp, Homo sapiens
  siRNA target sequence for PSMD14 (NM_005805.1,341-359).
ggagttccaatggaagtta

SEQ ID NO: 302284 - DNA, 19 bp, Homo sapiens
  siRNA target sequence for PSMD14 (NM_005805.1,370-388).
gcttggagaatttgttgat

SEQ ID NO: 302285 - DNA, 19 bp, Homo sapiens
  siRNA target sequence for PSMD14 (NM_005805.1,375-393).
gagaatttgttgatgatta

SEQ ID NO: 302286 - DNA, 19 bp, Homo sapiens
  siRNA target sequence for PSMD14 (NM_005805.1,404-422).
gtgattgatgtgtttgcta

SEQ ID NO: 302287 - DNA, 19 bp, Homo sapiens
  siRNA target sequence for PSMD14 (NM_005805.1,464-482).
ccagtgttccaagctaaaa

SEQ ID NO: 302288 - DNA, 19 bp, Homo sapiens
  siRNA target sequence for PSMD14 (NM_005805.1,467-485).
gtgttccaagctaaaatgt

SEQ ID NO: 302289 - DNA, 19 bp, Homo sapiens
  siRNA target sequence for PSMD14 (NM_005805.1,473-491).
caagctaaaatgttggata

SEQ ID NO: 302290 - DNA, 19 bp, Homo sapiens
  siRNA target sequence for PSMD14 (NM_005805.1,477-495).
ctaaaatgttggatatgtt

SEQ ID NO: 302291 - DNA, 19 bp, Homo sapiens
  siRNA target sequence for PSMD14 (NM_005805.1,517-535).
gatggttgttggttggtat

SEQ ID NO: 302292 - DNA, 19 bp, Homo sapiens
  siRNA target sequence for PSMD14 (NM_005805.1,521-539).
gttgttggttggtatcaca

SEQ ID NO: 302293 - DNA, 19 bp, Homo sapiens
  siRNA target sequence for PSMD14 (NM_005805.1,629-647).
gttgtggatcccattcaga

SEQ ID NO: 302294 - DNA, 19 bp, Homo sapiens
  siRNA target sequence for PSMD14 (NM_005805.1,635-653).
gatcccattcagagtgtaa

SEQ ID NO: 302295 - DNA, 19 bp, Homo sapiens
  siRNA target sequence for PSMD14 (NM_005805.1,671-689).
gatgccttcagattgatca

SEQ ID NO: 302296 - DNA, 19 bp, Homo sapiens
  siRNA target sequence for PSMD14 (NM_005805.1,758-776).
ccatctatccaggcattaa

SEQ ID NO: 302297 - DNA, 19 bp, Homo sapiens
  siRNA target sequence for PSMD14 (NM_005805.1,759-777).
catctatccaggcattaat

SEQ ID NO: 302298 - DNA, 19 bp, Homo sapiens
  siRNA target sequence for PSMD14 (NM_005805.1,782-800).
ggactaaacagacattatt

SEQ ID NO: 302299 - DNA, 19 bp, Homo sapiens
  siRNA target sequence for PSMD14 (NM_005805.1,844-862).
gatgttgctaaatttgcat

SEQ ID NO: 302300 - DNA, 19 bp, Homo sapiens
  siRNA target sequence for PSMD14 (NM_005805.1,903-921).
gtgaacattgtaaacacaa

SEQ ID NO: 302301 - DNA, 19 bp, Homo sapiens
  siRNA target sequence for PSMD14 (NM_005805.1,912-930).
gtaaacacaatgaatcagt

SEQ ID NO: 302302 - DNA, 19 bp, Homo sapiens
  siRNA target sequence for PSMD14 (NM_005805.1,998-1016).
cctgaacagctggcaataa

SEQ ID NO: 302303 - DNA, 19 bp, Homo sapiens
  siRNA target sequence for PSMD14 (NM_005805.1,1108-1126).
gttggatactgtcgtattt

SEQ ID NO: 302304 - DNA, 19 bp, Homo sapiens
  siRNA target sequence for PSMD14 (NM_005805.1,1111-1129).
ggatactgtcgtatttaaa

SEQ ID NO: 302305 - DNA, 19 bp, Homo sapiens
  siRNA target sequence for PSMD14 (NM_005805.1,1112-1130).
gatactgtcgtatttaaat

SEQ ID NO: 302306 - DNA, 19 bp, Homo sapiens
  siRNA target sequence for PSMD8 (NM_002812.3,319-337).
ggcgagtggaaccgtaaaa

SEQ ID NO: 302307 - DNA, 19 bp, Homo sapiens
  siRNA target sequence for PSMD8 (NM_002812.3,330-348).
ccgtaaaagccccaatctt

SEQ ID NO: 302308 - DNA, 19 bp, Homo sapiens
  siRNA target sequence for PSMD8 (NM_002812.3,331-349).
cgtaaaagccccaatctta

SEQ ID NO: 302309 - DNA, 19 bp, Homo sapiens
  siRNA target sequence for PSMD8 (NM_002812.3,371-389).
gtcgactcaagctagttct

SEQ ID NO: 302310 - DNA, 19 bp, Homo sapiens
  siRNA target sequence for PSMD8 (NM_002812.3,374-392).
gactcaagctagttcttct

SEQ ID NO: 302311 - DNA, 19 bp, Homo sapiens
  siRNA target sequence for PSMD8 (NM_002812.3,429-447).
gaccaaacagcagctaatt

SEQ ID NO: 302312 - DNA, 19 bp, Homo sapiens
  siRNA target sequence for PSMD8 (NM_002812.3,431-449).
ccaaacagcagctaattct

SEQ ID NO: 302313 - DNA, 19 bp, Homo sapiens
  siRNA target sequence for PSMD8 (NM_002812.3,534-552).
caaatgctactactttgat

SEQ ID NO: 302314 - DNA, 19 bp, Homo sapiens
  siRNA target sequence for PSMD8 (NM_002812.3,539-557).
gctactactttgattacaa

SEQ ID NO: 302315 - DNA, 19 bp, Homo sapiens
  siRNA target sequence for PSMD8 (NM_002812.3,736-754).
ggcagctacaacaaagtgt

SEQ ID NO: 302316 - DNA, 19 bp, Homo sapiens
  siRNA target sequence for PSMD8 (NM_002812.3,737-755).
gcagctacaacaaagtgtt

SEQ ID NO: 302317 - DNA, 19 bp, Homo sapiens
  siRNA target sequence for PSMD8 (NM_002812.3,852-870).
ggcctacgagaaaatcctt

SEQ ID NO: 302318 - DNA, 19 bp, Homo sapiens
  siRNA target sequence for PSMD8 (NM_002812.3,853-871).
gcctacgagaaaatccttt

SEQ ID NO: 302319 - DNA, 19 bp, Homo sapiens
  siRNA target sequence for PSMD8 (NM_002812.3,854-872).
cctacgagaaaatcctttt

SEQ ID NO: 302320 - DNA, 19 bp, Homo sapiens
  siRNA target sequence for PSMD8 (NM_002812.3,886-904).
cggatcctcttcttcaaca

SEQ ID NO: 302321 - DNA, 19 bp, Homo sapiens
  siRNA target sequence for UK114 (NM_005836.1,173-191).
gtcgacaggaccatttaca

SEQ ID NO: 302322 - DNA, 19 bp, Homo sapiens
  siRNA target sequence for UK114 (NM_005836.1,175-193).
cgacaggaccatttacatt

SEQ ID NO: 302323 - DNA, 19 bp, Homo sapiens
  siRNA target sequence for UK114 (NM_005836.1,319-337).
cgtggtgaaaacaactgtt

SEQ ID NO: 302324 - DNA, 19 bp, Homo sapiens
  siRNA target sequence for UK114 (NM_005836.1,335-353).
gttcttctggctgacataa

SEQ ID NO: 302325 - DNA, 19 bp, Homo sapiens
  siRNA target sequence for UK114 (NM_005836.1,447-465).
gcagccgaattgaaattga

SEQ ID NO: 302326 - DNA, 19 bp, Homo sapiens
  siRNA target sequence for UK114 (NM_005836.1,488-506).
ctgacaacggcatcactat

SEQ ID NO: 302327 - DNA, 19 bp, Homo sapiens
  siRNA target sequence for EEF1E1 (NM_004280.2,71-89).
gactgagtaaggggaataa

SEQ ID NO: 302328 - DNA, 19 bp, Homo sapiens
  siRNA target sequence for EEF1E1 (NM_004280.2,148-166).
ctaacaggattgactacta

SEQ ID NO: 302329 - DNA, 19 bp, Homo sapiens
  siRNA target sequence for EEF1E1 (NM_004280.2,237-255).
cgttcagcagtggttagaa

SEQ ID NO: 302330 - DNA, 19 bp, Homo sapiens
  siRNA target sequence for EEF1E1 (NM_004280.2,241-259).
cagcagtggttagaataca

SEQ ID NO: 302331 - DNA, 19 bp, Homo sapiens
  siRNA target sequence for EEF1E1 (NM_004280.2,278-296).
ggcactccagtaaaaatga

SEQ ID NO: 302332 - DNA, 19 bp, Homo sapiens
  siRNA target sequence for EEF1E1 (NM_004280.2,305-323).
cactgttgaaggatcttaa

SEQ ID NO: 302333 - DNA, 19 bp, Homo sapiens
  siRNA target sequence for EEF1E1 (NM_004280.2,357-375).
gtataactttacattagca

SEQ ID NO: 302334 - DNA, 19 bp, Homo sapiens
  siRNA target sequence for EEF1E1 (NM_004280.2,368-386).
cattagcagatatactatt

SEQ ID NO: 302335 - DNA, 19 bp, Homo sapiens
  siRNA target sequence for EEF1E1 (NM_004280.2,458-476).
gctggttttgtcacattca

SEQ ID NO: 302336 - DNA, 19 bp, Homo sapiens
  siRNA target sequence for EEF1E1 (NM_004280.2,495-513).
gcaacatctgtctagtgtt

SEQ ID NO: 302337 - DNA, 19 bp, Homo sapiens
  siRNA target sequence for EEF1E1 (NM_004280.2,522-540).
caagaacagactatatact

SEQ ID NO: 302338 - DNA, 19 bp, Homo sapiens
  siRNA target sequence for MRRF (NM_138777.2,488-506).
gacgggaagcttgctttaa

SEQ ID NO: 302339 - DNA, 19 bp, Homo sapiens
  siRNA target sequence for MRRF (NM_138777.2,746-764).
gttcgcaccaactcaatga

SEQ ID NO: 302340 - DNA, 19 bp, Homo sapiens
  siRNA target sequence for PELO (NM_015946.4,1058-1076).
gacatgtggcacacttaca

SEQ ID NO: 302341 - DNA, 19 bp, Homo sapiens
  siRNA target sequence for PELO (NM_015946.4,1415-1433).
gaaggcctcgcccatatct

SEQ ID NO: 302342 - DNA, 19 bp, Homo sapiens
  siRNA target sequence for PELO (NM_015946.4,1525-1543).
ggccttggagcggttctat

SEQ ID NO: 302343 - DNA, 19 bp, Homo sapiens
  siRNA target sequence for PELO (NM_015946.4,1527-1545).
ccttggagcggttctatga

SEQ ID NO: 302344 - DNA, 19 bp, Homo sapiens
  siRNA target sequence for PELO (NM_015946.4,1560-1578).
ctatccagcgccacataca

SEQ ID NO: 302345 - DNA, 19 bp, Homo sapiens
  siRNA target sequence for PELO (NM_015946.4,1564-1582).
ccagcgccacatacacttt

SEQ ID NO: 302346 - DNA, 19 bp, Homo sapiens
  siRNA target sequence for PELO (NM_015946.4,1567-1585).
gcgccacatacactttgat

SEQ ID NO: 302347 - DNA, 19 bp, Homo sapiens
  siRNA target sequence for PELO (NM_015946.4,1569-1587).
gccacatacactttgatgt

SEQ ID NO: 302348 - DNA, 19 bp, Homo sapiens
  siRNA target sequence for PELO (NM_015946.4,1570-1588).
ccacatacactttgatgtt

SEQ ID NO: 302349 - DNA, 19 bp, Homo sapiens
  siRNA target sequence for PELO (NM_015946.4,1573-1591).
catacactttgatgttgta

SEQ ID NO: 302350 - DNA, 19 bp, Homo sapiens
  siRNA target sequence for PELO (NM_015946.4,1607-1625).
gccagcccaggatttgtga

SEQ ID NO: 302351 - DNA, 19 bp, Homo sapiens
  siRNA target sequence for PELO (NM_015946.4,1636-1654).
ctgcgactacctgtttcaa

SEQ ID NO: 302352 - DNA, 19 bp, Homo sapiens
  siRNA target sequence for PELO (NM_015946.4,1685-1703).
ctggaaaaccggtccaaat

SEQ ID NO: 302353 - DNA, 19 bp, Homo sapiens
  siRNA target sequence for PELO (NM_015946.4,1687-1705).
ggaaaaccggtccaaattt

SEQ ID NO: 302354 - DNA, 19 bp, Homo sapiens
  siRNA target sequence for PELO (NM_015946.4,1719-1737).
cctcctccggacacaagta

SEQ ID NO: 302355 - DNA, 19 bp, Homo sapiens
  siRNA target sequence for PELO (NM_015946.4,1776-1794).
gccgcctttcagacactaa

SEQ ID NO: 302356 - DNA, 19 bp, Homo sapiens
  siRNA target sequence for PELO (NM_015946.4,1816-1834).
cttggatgacttctataaa

SEQ ID NO: 302357 - DNA, 19 bp, Homo sapiens
  siRNA target sequence for PELO (NM_015946.4,2003-2021).
gcaggcaccgttaggatat

SEQ ID NO: 302358 - DNA, 19 bp, Homo sapiens
  siRNA target sequence for PELO (NM_015946.4,2004-2022).
caggcaccgttaggatatt

SEQ ID NO: 302359 - DNA, 19 bp, Homo sapiens
  siRNA target sequence for PELO (NM_015946.4,2006-2024).
ggcaccgttaggatattct

SEQ ID NO: 302360 - DNA, 19 bp, Homo sapiens
  siRNA target sequence for PELO (NM_015946.4,2008-2026).
caccgttaggatattctct

SEQ ID NO: 302361 - DNA, 19 bp, Homo sapiens
  siRNA target sequence for PELO (NM_015946.4,2091-2109).
ctgttcccgaactttctga

SEQ ID NO: 302362 - DNA, 19 bp, Homo sapiens
  siRNA target sequence for TPR (NM_003292.1,358-376).
gtccagaacaaacttgaaa

SEQ ID NO: 302363 - DNA, 19 bp, Homo sapiens
  siRNA target sequence for TPR (NM_003292.1,441-459).
ggagagcgaacaacagtat

SEQ ID NO: 302364 - DNA, 19 bp, Homo sapiens
  siRNA target sequence for TPR (NM_003292.1,492-510).
ggagagacttgtgaatgaa

SEQ ID NO: 302365 - DNA, 19 bp, Homo sapiens
  siRNA target sequence for TPR (NM_003292.1,508-526).
gaaacccgagagtgtcaaa

SEQ ID NO: 302366 - DNA, 19 bp, Homo sapiens
  siRNA target sequence for TPR (NM_003292.1,533-551).
ggcttgagctagagaaact

SEQ ID NO: 302367 - DNA, 19 bp, Homo sapiens
  siRNA target sequence for TPR (NM_003292.1,535-553).
cttgagctagagaaactca

SEQ ID NO: 302368 - DNA, 19 bp, Homo sapiens
  siRNA target sequence for TPR (NM_003292.1,695-713).
gactatctcaagaacttga

SEQ ID NO: 302369 - DNA, 19 bp, Homo sapiens
  siRNA target sequence for TPR (NM_003292.1,701-719).
ctcaagaacttgaatactt

SEQ ID NO: 302370 - DNA, 19 bp, Homo sapiens
  siRNA target sequence for TPR (NM_003292.1,726-744).
ggatgttaaacgtctgaat

SEQ ID NO: 302371 - DNA, 19 bp, Homo sapiens
  siRNA target sequence for TPR (NM_003292.1,736-754).
cgtctgaatgaaaaactta

SEQ ID NO: 302372 - DNA, 19 bp, Homo sapiens
  siRNA target sequence for TPR (NM_003292.1,821-839).
ctgttaagtatcgagaaaa

SEQ ID NO: 302373 - DNA, 19 bp, Homo sapiens
  siRNA target sequence for TPR (NM_003292.1,884-902).
ggctgaatacagagttgaa

SEQ ID NO: 302374 - DNA, 19 bp, Homo sapiens
  siRNA target sequence for TPR (NM_003292.1,897-915).
gttgaaaaccaaaactgat

SEQ ID NO: 302375 - DNA, 19 bp, Homo sapiens
  siRNA target sequence for TPR (NM_003292.1,1060-1078).
gaggatctgttgaccaaat

SEQ ID NO: 302376 - DNA, 19 bp, Homo sapiens
  siRNA target sequence for TPR (NM_003292.1,1138-1156).
gcccacataaaactttcta

SEQ ID NO: 302377 - DNA, 19 bp, Homo sapiens
  siRNA target sequence for TPR (NM_003292.1,1211-1229).
gggcagtagaggaactaca

SEQ ID NO: 302378 - DNA, 19 bp, Homo sapiens
  siRNA target sequence for TPR (NM_003292.1,1214-1232).
cagtagaggaactacacaa

SEQ ID NO: 302379 - DNA, 19 bp, Homo sapiens
  siRNA target sequence for TPR (NM_003292.1,1290-1308).
ggagcaatccaaagatcaa

SEQ ID NO: 302380 - DNA, 19 bp, Homo sapiens
  siRNA target sequence for TPR (NM_003292.1,1375-1393).
ctttctgccacaaaacgta

SEQ ID NO: 302381 - DNA, 19 bp, Homo sapiens
  siRNA target sequence for TPR (NM_003292.1,1390-1408).
cgtaaaggagccatattgt

SEQ ID NO: 302382 - DNA, 19 bp, Homo sapiens
  siRNA target sequence for TPR (NM_003292.1,1448-1466).
ctgtagctaagatagtgaa

SEQ ID NO: 302383 - DNA, 19 bp, Homo sapiens
  siRNA target sequence for TPR (NM_003292.1,1591-1609).
gccaaagcaccaattttga

SEQ ID NO: 302384 - DNA, 19 bp, Homo sapiens
  siRNA target sequence for TPR (NM_003292.1,1593-1611).
caaagcaccaattttgaaa

SEQ ID NO: 302385 - DNA, 19 bp, Homo sapiens
  siRNA target sequence for TPR (NM_003292.1,1641-1659).
gaaagctgtagcaagttta

SEQ ID NO: 302386 - DNA, 19 bp, Homo sapiens
  siRNA target sequence for TPR (NM_003292.1,1648-1666).
gtagcaagtttatctgtta

SEQ ID NO: 302387 - DNA, 19 bp, Homo sapiens
  siRNA target sequence for TPR (NM_003292.1,1652-1670).
caagtttatctgttaagct

SEQ ID NO: 302388 - DNA, 19 bp, Homo sapiens
  siRNA target sequence for TPR (NM_003292.1,1725-1743).
caagcaatcatctgtactt

SEQ ID NO: 302389 - DNA, 19 bp, Homo sapiens
  siRNA target sequence for TPR (NM_003292.1,1736-1754).
ctgtacttgagagagataa

SEQ ID NO: 302390 - DNA, 19 bp, Homo sapiens
  siRNA target sequence for TPR (NM_003292.1,1780-1798).
gatctttcacaacagatta

SEQ ID NO: 302391 - DNA, 19 bp, Homo sapiens
  siRNA target sequence for TPR (NM_003292.1,1792-1810).
cagattagagtgcttttga

SEQ ID NO: 302392 - DNA, 19 bp, Homo sapiens
  siRNA target sequence for TPR (NM_003292.1,1803-1821).
gcttttgatggaacttgaa

SEQ ID NO: 302393 - DNA, 19 bp, Homo sapiens
  siRNA target sequence for TPR (NM_003292.1,1826-1844).
caaggggtaaccacgtaat

SEQ ID NO: 302394 - DNA, 19 bp, Homo sapiens
  siRNA target sequence for TPR (NM_003292.1,1830-1848).
gggtaaccacgtaattcgt

SEQ ID NO: 302395 - DNA, 19 bp, Homo sapiens
  siRNA target sequence for TPR (NM_003292.1,1858-1876).
gtaagctctgctgatataa

SEQ ID NO: 302396 - DNA, 19 bp, Homo sapiens
  siRNA target sequence for TPR (NM_003292.1,1863-1881).
ctctgctgatataagtagt

SEQ ID NO: 302397 - DNA, 19 bp, Homo sapiens
  siRNA target sequence for TPR (NM_003292.1,1877-1895).
gtagttcatctgaggtaat

SEQ ID NO: 302398 - DNA, 19 bp, Homo sapiens
  siRNA target sequence for TPR (NM_003292.1,1898-1916).
cacagcatctagtatctta

SEQ ID NO: 302399 - DNA, 19 bp, Homo sapiens
  siRNA target sequence for TPR (NM_003292.1,2051-2069).
gtgcccttactgaactaga

SEQ ID NO: 302400 - DNA, 19 bp, Homo sapiens
  siRNA target sequence for TPR (NM_003292.1,2054-2072).
cccttactgaactagaaca

SEQ ID NO: 302401 - DNA, 19 bp, Homo sapiens
  siRNA target sequence for TPR (NM_003292.1,2103-2121).
gcttgttgattccatagtt

SEQ ID NO: 302402 - DNA, 19 bp, Homo sapiens
  siRNA target sequence for TPR (NM_003292.1,2119-2137).
gttcgtcagcgtgatatgt

SEQ ID NO: 302403 - DNA, 19 bp, Homo sapiens
  siRNA target sequence for TPR (NM_003292.1,2128-2146).
cgtgatatgtaccgtattt

SEQ ID NO: 302404 - DNA, 19 bp, Homo sapiens
  siRNA target sequence for TPR (NM_003292.1,2131-2149).
gatatgtaccgtattttat

SEQ ID NO: 302405 - DNA, 19 bp, Homo sapiens
  siRNA target sequence for TPR (NM_003292.1,2136-2154).
gtaccgtattttattgtca

SEQ ID NO: 302406 - DNA, 19 bp, Homo sapiens
  siRNA target sequence for TPR (NM_003292.1,2165-2183).
gagttgccattccattaca

SEQ ID NO: 302407 - DNA, 19 bp, Homo sapiens
  siRNA target sequence for TPR (NM_003292.1,2186-2204).
cttcaagcttagatgatgt

SEQ ID NO: 302408 - DNA, 19 bp, Homo sapiens
  siRNA target sequence for TPR (NM_003292.1,2261-2279).
ctccagtacctgttattga

SEQ ID NO: 302409 - DNA, 19 bp, Homo sapiens
  siRNA target sequence for TPR (NM_003292.1,2411-2429).
cagatttgcgatcacaaaa

SEQ ID NO: 302410 - DNA, 19 bp, Homo sapiens
  siRNA target sequence for TPR (NM_003292.1,2448-2466).
gctagattttgcttctaaa

SEQ ID NO: 302411 - DNA, 19 bp, Homo sapiens
  siRNA target sequence for TPR (NM_003292.1,2452-2470).
gattttgcttctaaacgtt

SEQ ID NO: 302412 - DNA, 19 bp, Homo sapiens
  siRNA target sequence for TPR (NM_003292.1,2458-2476).
gcttctaaacgttatgaaa

SEQ ID NO: 302413 - DNA, 19 bp, Homo sapiens
  siRNA target sequence for TPR (NM_003292.1,2459-2477).
cttctaaacgttatgaaat

SEQ ID NO: 302414 - DNA, 19 bp, Homo sapiens
  siRNA target sequence for TPR (NM_003292.1,2478-2496).
gctgcaagataatgttgaa

SEQ ID NO: 302415 - DNA, 19 bp, Homo sapiens
  siRNA target sequence for TPR (NM_003292.1,2542-2560).
ctcactgccacaactcaaa

SEQ ID NO: 302416 - DNA, 19 bp, Homo sapiens
  siRNA target sequence for TPR (NM_003292.1,2566-2584).
gaacagattatcaatacga

SEQ ID NO: 302417 - DNA, 19 bp, Homo sapiens
  siRNA target sequence for TPR (NM_003292.1,2577-2595).
caatacgatgactcaagat

SEQ ID NO: 302418 - DNA, 19 bp, Homo sapiens
  siRNA target sequence for TPR (NM_003292.1,2617-2635).
ctagctgtcgcagaagtaa

SEQ ID NO: 302419 - DNA, 19 bp, Homo sapiens
  siRNA target sequence for TPR (NM_003292.1,2661-2679).
ggaaatgcttaaattgtct

SEQ ID NO: 302420 - DNA, 19 bp, Homo sapiens
  siRNA target sequence for TPR (NM_003292.1,2678-2696).
ctgaagttcgtctttctca

SEQ ID NO: 302421 - DNA, 19 bp, Homo sapiens
  siRNA target sequence for TPR (NM_003292.1,2697-2715).
gcaaagagagtctttgtta

SEQ ID NO: 302422 - DNA, 19 bp, Homo sapiens
  siRNA target sequence for TPR (NM_003292.1,2706-2724).
gtctttgttagctgaacaa

SEQ ID NO: 302423 - DNA, 19 bp, Homo sapiens
  siRNA target sequence for TPR (NM_003292.1,2804-2822).
ggcttagtagccagataga

SEQ ID NO: 302424 - DNA, 19 bp, Homo sapiens
  siRNA target sequence for TPR (NM_003292.1,2805-2823).
gcttagtagccagatagaa

SEQ ID NO: 302425 - DNA, 19 bp, Homo sapiens
  siRNA target sequence for TPR (NM_003292.1,2836-2854).
gagatctctcatctaaaga

SEQ ID NO: 302426 - DNA, 19 bp, Homo sapiens
  siRNA target sequence for TPR (NM_003292.1,2843-2861).
ctcatctaaagaagaagtt

SEQ ID NO: 302427 - DNA, 19 bp, Homo sapiens
  siRNA target sequence for TPR (NM_003292.1,2875-2893).
gaacaaaggcatacactta

SEQ ID NO: 302428 - DNA, 19 bp, Homo sapiens
  siRNA target sequence for TPR (NM_003292.1,2878-2896).
caaaggcatacacttacta

SEQ ID NO: 302429 - DNA, 19 bp, Homo sapiens
  siRNA target sequence for TPR (NM_003292.1,2882-2900).
ggcatacacttactagaaa

SEQ ID NO: 302430 - DNA, 19 bp, Homo sapiens
  siRNA target sequence for TPR (NM_003292.1,2883-2901).
gcatacacttactagaaat

SEQ ID NO: 302431 - DNA, 19 bp, Homo sapiens
  siRNA target sequence for TPR (NM_003292.1,2897-2915).
gaaatctagatgttcaact

SEQ ID NO: 302432 - DNA, 19 bp, Homo sapiens
  siRNA target sequence for TPR (NM_003292.1,2937-2955).
ggatacagagacaaatctt

SEQ ID NO: 302433 - DNA, 19 bp, Homo sapiens
  siRNA target sequence for TPR (NM_003292.1,3074-3092).
gtcagcctagcaacaaaga

SEQ ID NO: 302434 - DNA, 19 bp, Homo sapiens
  siRNA target sequence for TPR (NM_003292.1,3080-3098).
ctagcaacaaagaagatgt

SEQ ID NO: 302435 - DNA, 19 bp, Homo sapiens
  siRNA target sequence for TPR (NM_003292.1,3153-3171).
ggagagactcaaaacaagt

SEQ ID NO: 302436 - DNA, 19 bp, Homo sapiens
  siRNA target sequence for TPR (NM_003292.1,3154-3172).
gagagactcaaaacaagta

SEQ ID NO: 302437 - DNA, 19 bp, Homo sapiens
  siRNA target sequence for TPR (NM_003292.1,3187-3205).
caatatcaagcaatggtta

SEQ ID NO: 302438 - DNA, 19 bp, Homo sapiens
  siRNA target sequence for TPR (NM_003292.1,3193-3211).
caagcaatggttactagtt

SEQ ID NO: 302439 - DNA, 19 bp, Homo sapiens
  siRNA target sequence for TPR (NM_003292.1,3197-3215).
caatggttactagtttaga

SEQ ID NO: 302440 - DNA, 19 bp, Homo sapiens
  siRNA target sequence for TPR (NM_003292.1,3201-3219).
ggttactagtttagaagaa

SEQ ID NO: 302441 - DNA, 19 bp, Homo sapiens
  siRNA target sequence for TPR (NM_003292.1,3245-3263).
cagaagaagtgcgtaagaa

SEQ ID NO: 302442 - DNA, 19 bp, Homo sapiens
  siRNA target sequence for TPR (NM_003292.1,3261-3279).
gaatattgaagttcgttta

SEQ ID NO: 302443 - DNA, 19 bp, Homo sapiens
  siRNA target sequence for TPR (NM_003292.1,3283-3301).
gagtcagctgaatttcaga

SEQ ID NO: 302444 - DNA, 19 bp, Homo sapiens
  siRNA target sequence for TPR (NM_003292.1,3343-3361).
caagaacttcaggatgata

SEQ ID NO: 302445 - DNA, 19 bp, Homo sapiens
  siRNA target sequence for TPR (NM_003292.1,3408-3426).
gaaaacactttctagtgtt

SEQ ID NO: 302446 - DNA, 19 bp, Homo sapiens
  siRNA target sequence for TPR (NM_003292.1,3422-3440).
gtgttcagaatgaagtaca

SEQ ID NO: 302447 - DNA, 19 bp, Homo sapiens
  siRNA target sequence for TPR (NM_003292.1,3457-3475).
gcaagcacagctttaagta

SEQ ID NO: 302448 - DNA, 19 bp, Homo sapiens
  siRNA target sequence for TPR (NM_003292.1,3461-3479).
gcacagctttaagtaatga

SEQ ID NO: 302449 - DNA, 19 bp, Homo sapiens
  siRNA target sequence for TPR (NM_003292.1,3498-3516).
ctgtcaggaacaagctaaa

SEQ ID NO: 302450 - DNA, 19 bp, Homo sapiens
  siRNA target sequence for TPR (NM_003292.1,3592-3610).
gcgaaggagcaggtttcaa

SEQ ID NO: 302451 - DNA, 19 bp, Homo sapiens
  siRNA target sequence for TPR (NM_003292.1,3617-3635).
catcagtccgtcagcattt

SEQ ID NO: 302452 - DNA, 19 bp, Homo sapiens
  siRNA target sequence for TPR (NM_003292.1,3620-3638).
cagtccgtcagcatttgga

SEQ ID NO: 302453 - DNA, 19 bp, Homo sapiens
  siRNA target sequence for TPR (NM_003292.1,3662-3680).
cacagttgttggagtgtaa

SEQ ID NO: 302454 - DNA, 19 bp, Homo sapiens
  siRNA target sequence for TPR (NM_003292.1,3767-3785).
gattacttcatgatcagat

SEQ ID NO: 302455 - DNA, 19 bp, Homo sapiens
  siRNA target sequence for TPR (NM_003292.1,3775-3793).
catgatcagatcgaaaaat

SEQ ID NO: 302456 - DNA, 19 bp, Homo sapiens
  siRNA target sequence for TPR (NM_003292.1,3836-3854).
gtccactgaatgtatctct

SEQ ID NO: 302457 - DNA, 19 bp, Homo sapiens
  siRNA target sequence for TPR (NM_003292.1,3899-3917).
gatttatacgacgagaaaa

SEQ ID NO: 302458 - DNA, 19 bp, Homo sapiens
  siRNA target sequence for TPR (NM_003292.1,3970-3988).
cgacaaagggttgaacttt

SEQ ID NO: 302459 - DNA, 19 bp, Homo sapiens
  siRNA target sequence for TPR (NM_003292.1,3971-3989).
gacaaagggttgaactttt

SEQ ID NO: 302460 - DNA, 19 bp, Homo sapiens
  siRNA target sequence for TPR (NM_003292.1,4044-4062).
ccaggtaactgcaaaaaca

SEQ ID NO: 302461 - DNA, 19 bp, Homo sapiens
  siRNA target sequence for TPR (NM_003292.1,4061-4079).
caatggctcagcatgaaga

SEQ ID NO: 302462 - DNA, 19 bp, Homo sapiens
  siRNA target sequence for TPR (NM_003292.1,4287-4305).
ggatgtcaaacgttggaaa

SEQ ID NO: 302463 - DNA, 19 bp, Homo sapiens
  siRNA target sequence for TPR (NM_003292.1,4307-4325).
cacgtaaccagcatctagt

SEQ ID NO: 302464 - DNA, 19 bp, Homo sapiens
  siRNA target sequence for TPR (NM_003292.1,4309-4327).
cgtaaccagcatctagtaa

SEQ ID NO: 302465 - DNA, 19 bp, Homo sapiens
  siRNA target sequence for TPR (NM_003292.1,4314-4332).
ccagcatctagtaagtcaa

SEQ ID NO: 302466 - DNA, 19 bp, Homo sapiens
  siRNA target sequence for TPR (NM_003292.1,4391-4409).
ctaagcgtattcaacaatt

SEQ ID NO: 302467 - DNA, 19 bp, Homo sapiens
  siRNA target sequence for TPR (NM_003292.1,4395-4413).
gcgtattcaacaattgaca

SEQ ID NO: 302468 - DNA, 19 bp, Homo sapiens
  siRNA target sequence for TPR (NM_003292.1,4436-4454).
ctgaaattgcaagatcaaa

SEQ ID NO: 302469 - DNA, 19 bp, Homo sapiens
  siRNA target sequence for TPR (NM_003292.1,4488-4506).
gagtctgaaggaagatcta

SEQ ID NO: 302470 - DNA, 19 bp, Homo sapiens
  siRNA target sequence for TPR (NM_003292.1,4549-4567).
gatgccaaaataattgata

SEQ ID NO: 302471 - DNA, 19 bp, Homo sapiens
  siRNA target sequence for TPR (NM_003292.1,4586-4604).
ctattactcaagttaagaa

SEQ ID NO: 302472 - DNA, 19 bp, Homo sapiens
  siRNA target sequence for TPR (NM_003292.1,4613-4631).
gtaggtacaagactcaata

SEQ ID NO: 302473 - DNA, 19 bp, Homo sapiens
  siRNA target sequence for TPR (NM_003292.1,4645-4663).
gcacaacaggataaggtta

SEQ ID NO: 302474 - DNA, 19 bp, Homo sapiens
  siRNA target sequence for TPR (NM_003292.1,4797-4815).
gcagaagacattatctgaa

SEQ ID NO: 302475 - DNA, 19 bp, Homo sapiens
  siRNA target sequence for TPR (NM_003292.1,4854-4872).
gcaacttcagtctgaactt

SEQ ID NO: 302476 - DNA, 19 bp, Homo sapiens
  siRNA target sequence for TPR (NM_003292.1,4877-4895).
gacttcgtcaggatcttca

SEQ ID NO: 302477 - DNA, 19 bp, Homo sapiens
  siRNA target sequence for TPR (NM_003292.1,4920-4938).
gctccgacaacagataact

SEQ ID NO: 302478 - DNA, 19 bp, Homo sapiens
  siRNA target sequence for TPR (NM_003292.1,4991-5009).
cacacttagctggtgtaaa

SEQ ID NO: 302479 - DNA, 19 bp, Homo sapiens
  siRNA target sequence for TPR (NM_003292.1,4995-5013).
cttagctggtgtaaaagat

SEQ ID NO: 302480 - DNA, 19 bp, Homo sapiens
  siRNA target sequence for TPR (NM_003292.1,5089-5107).
cgcattactgcgctaaagt

SEQ ID NO: 302481 - DNA, 19 bp, Homo sapiens
  siRNA target sequence for TPR (NM_003292.1,5099-5117).
cgctaaagtcccaatatga

SEQ ID NO: 302482 - DNA, 19 bp, Homo sapiens
  siRNA target sequence for TPR (NM_003292.1,5100-5118).
gctaaagtcccaatatgaa

SEQ ID NO: 302483 - DNA, 19 bp, Homo sapiens
  siRNA target sequence for TPR (NM_003292.1,5110-5128).
caatatgaaggtcgaatta

SEQ ID NO: 302484 - DNA, 19 bp, Homo sapiens
  siRNA target sequence for TPR (NM_003292.1,5122-5140).
cgaattagtcgcttggaaa

SEQ ID NO: 302485 - DNA, 19 bp, Homo sapiens
  siRNA target sequence for TPR (NM_003292.1,5178-5196).
gagagatgagcctcaagaa

SEQ ID NO: 302486 - DNA, 19 bp, Homo sapiens
  siRNA target sequence for TPR (NM_003292.1,5413-5431).
gttacaaatcccactacta

SEQ ID NO: 302487 - DNA, 19 bp, Homo sapiens
  siRNA target sequence for TPR (NM_003292.1,5533-5551).
ggatccgttcgttctacta

SEQ ID NO: 302488 - DNA, 19 bp, Homo sapiens
  siRNA target sequence for TPR (NM_003292.1,5543-5561).
gttctactagtcctaatgt

SEQ ID NO: 302489 - DNA, 19 bp, Homo sapiens
  siRNA target sequence for TPR (NM_003292.1,5606-5624).
cacaggctacagcttttgt

SEQ ID NO: 302490 - DNA, 19 bp, Homo sapiens
  siRNA target sequence for TPR (NM_003292.1,5658-5676).
gcctgccaatcaagagtta

SEQ ID NO: 302491 - DNA, 19 bp, Homo sapiens
  siRNA target sequence for TPR (NM_003292.1,5659-5677).
cctgccaatcaagagttat

SEQ ID NO: 302492 - DNA, 19 bp, Homo sapiens
  siRNA target sequence for TPR (NM_003292.1,5662-5680).
gccaatcaagagttatctt

SEQ ID NO: 302493 - DNA, 19 bp, Homo sapiens
  siRNA target sequence for TPR (NM_003292.1,5713-5731).
gttgagcggccttctactt

SEQ ID NO: 302494 - DNA, 19 bp, Homo sapiens
  siRNA target sequence for TPR (NM_003292.1,5757-5775).
ggctacccccagttcttct

SEQ ID NO: 302495 - DNA, 19 bp, Homo sapiens
  siRNA target sequence for TPR (NM_003292.1,5758-5776).
gctacccccagttcttctt

SEQ ID NO: 302496 - DNA, 19 bp, Homo sapiens
  siRNA target sequence for TPR (NM_003292.1,5827-5845).
gaccaagtctctgatgata

SEQ ID NO: 302497 - DNA, 19 bp, Homo sapiens
  siRNA target sequence for TPR (NM_003292.1,5829-5847).
ccaagtctctgatgataca

SEQ ID NO: 302498 - DNA, 19 bp, Homo sapiens
  siRNA target sequence for TPR (NM_003292.1,6039-6057).
gtctctacaaatagatctt

SEQ ID NO: 302499 - DNA, 19 bp, Homo sapiens
  siRNA target sequence for TPR (NM_003292.1,6239-6257).
ccgatggcaatgatggtta

SEQ ID NO: 302500 - DNA, 19 bp, Homo sapiens
  siRNA target sequence for TPR (NM_003292.1,6240-6258).
cgatggcaatgatggttat

SEQ ID NO: 302501 - DNA, 19 bp, Homo sapiens
  siRNA target sequence for TPR (NM_003292.1,6288-6306).
gactgatccaggtacagaa

SEQ ID NO: 302502 - DNA, 19 bp, Homo sapiens
  siRNA target sequence for TPR (NM_003292.1,6597-6615).
gttgactccaggaataggt

SEQ ID NO: 302503 - DNA, 19 bp, Homo sapiens
  siRNA target sequence for TPR (NM_003292.1,6614-6632).
gtggcatgcaacagcattt

SEQ ID NO: 302504 - DNA, 19 bp, Homo sapiens
  siRNA target sequence for TPR (NM_003292.1,6616-6634).
ggcatgcaacagcattttt

SEQ ID NO: 302505 - DNA, 19 bp, Homo sapiens
  siRNA target sequence for TPR (NM_003292.1,6678-6696).
ggtgccacatcgtactgat

SEQ ID NO: 302506 - DNA, 19 bp, Homo sapiens
  siRNA target sequence for TPR (NM_003292.1,6683-6701).
cacatcgtactgatggatt

SEQ ID NO: 302507 - DNA, 19 bp, Homo sapiens
  siRNA target sequence for TPR (NM_003292.1,6766-6784).
gatatgccacaaacaagtt

SEQ ID NO: 302508 - DNA, 19 bp, Homo sapiens
  siRNA target sequence for TPR (NM_003292.1,6771-6789).
gccacaaacaagttctagt

SEQ ID NO: 302509 - DNA, 19 bp, Homo sapiens
  siRNA target sequence for TPR (NM_003292.1,6815-6833).
ctcaaggaggtttaggaat

SEQ ID NO: 302510 - DNA, 19 bp, Homo sapiens
  siRNA target sequence for TPR (NM_003292.1,6821-6839).
gaggtttaggaatgtatga

SEQ ID NO: 302511 - DNA, 19 bp, Homo sapiens
  siRNA target sequence for TPR (NM_003292.1,6849-6867).
gttcctagctcatgaagaa

SEQ ID NO: 302512 - DNA, 19 bp, Homo sapiens
  siRNA target sequence for TPR (NM_003292.1,6890-6908).
ccactactccactacaagt

SEQ ID NO: 302513 - DNA, 19 bp, Homo sapiens
  siRNA target sequence for TPR (NM_003292.1,6891-6909).
cactactccactacaagta

SEQ ID NO: 302514 - DNA, 19 bp, Homo sapiens
  siRNA target sequence for TPR (NM_003292.1,6957-6975).
ggaacatgcctctcaatct

SEQ ID NO: 302515 - DNA, 19 bp, Homo sapiens
  siRNA target sequence for TPR (NM_003292.1,6976-6994).
gttccaatggtgactacat

SEQ ID NO: 302516 - DNA, 19 bp, Homo sapiens
  siRNA target sequence for TPR (NM_003292.1,6996-7014).
cactggcactttatctaca

SEQ ID NO: 302517 - DNA, 19 bp, Homo sapiens
  siRNA target sequence for TPR (NM_003292.1,7000-7018).
ggcactttatctacaacaa

SEQ ID NO: 302518 - DNA, 19 bp, Homo sapiens
  siRNA target sequence for TPR (NM_003292.1,7001-7019).
gcactttatctacaacaaa

SEQ ID NO: 302519 - DNA, 19 bp, Homo sapiens
  siRNA target sequence for TPR (NM_003292.1,7062-7080).
ggcagaatctgaaggtatt

SEQ ID NO: 302520 - DNA, 19 bp, Homo sapiens
  siRNA target sequence for TPR (NM_003292.1,7090-7108).
gcaggcctagaaattgata

SEQ ID NO: 302521 - DNA, 19 bp, Homo sapiens
  siRNA target sequence for TPR (NM_003292.1,7125-7143).
gccggttcaagcatctgat

SEQ ID NO: 302522 - DNA, 19 bp, Homo sapiens
  siRNA target sequence for TPR (NM_003292.1,7199-7217).
ctagtagtagtcaaccaaa

SEQ ID NO: 302523 - DNA, 19 bp, Homo sapiens
  siRNA target sequence for TPR (NM_003292.1,7220-7238).
ctttcagacgagtaagact

SEQ ID NO: 302524 - DNA, 19 bp, Homo sapiens
  siRNA target sequence for TPR (NM_003292.1,7261-7279).
gtccgtggtcgtcagttta

SEQ ID NO: 302525 - DNA, 19 bp, Homo sapiens
  siRNA target sequence for TPR (NM_003292.1,7264-7282).
cgtggtcgtcagtttaaca

SEQ ID NO: 302526 - DNA, 19 bp, Homo sapiens
  siRNA target sequence for TPR (NM_003292.1,7289-7307).
gaggtgtgagccatgcaat

SEQ ID NO: 302527 - DNA, 19 bp, Homo sapiens
  siRNA target sequence for TPR (NM_003292.1,7312-7330).
gggagaggaggaataaaca

SEQ ID NO: 302528 - DNA, 19 bp, Homo sapiens
  siRNA target sequence for TRAM1 (NM_014294.3,176-194).
gcgattcgcaagaaaagca

SEQ ID NO: 302529 - DNA, 19 bp, Homo sapiens
  siRNA target sequence for TRAM1 (NM_014294.3,293-311).
gagataacggcaaaagctt

SEQ ID NO: 302530 - DNA, 19 bp, Homo sapiens
  siRNA target sequence for TRAM1 (NM_014294.3,300-318).
cggcaaaagcttctatcat

SEQ ID NO: 302531 - DNA, 19 bp, Homo sapiens
  siRNA target sequence for TRAM1 (NM_014294.3,301-319).
ggcaaaagcttctatcatt

SEQ ID NO: 302532 - DNA, 19 bp, Homo sapiens
  siRNA target sequence for TRAM1 (NM_014294.3,346-364).
cctcccagcaacagaagaa

SEQ ID NO: 302533 - DNA, 19 bp, Homo sapiens
  siRNA target sequence for TRAM1 (NM_014294.3,374-392).
gaatcagtgtccctttatt

SEQ ID NO: 302534 - DNA, 19 bp, Homo sapiens
  siRNA target sequence for TRAM1 (NM_014294.3,430-448).
catgctagtggcgataatt

SEQ ID NO: 302535 - DNA, 19 bp, Homo sapiens
  siRNA target sequence for TRAM1 (NM_014294.3,433-451).
gctagtggcgataattatt

SEQ ID NO: 302536 - DNA, 19 bp, Homo sapiens
  siRNA target sequence for TRAM1 (NM_014294.3,455-473).
gccgtaattcaagagtata

SEQ ID NO: 302537 - DNA, 19 bp, Homo sapiens
  siRNA target sequence for TRAM1 (NM_014294.3,456-474).
ccgtaattcaagagtatat

SEQ ID NO: 302538 - DNA, 19 bp, Homo sapiens
  siRNA target sequence for TRAM1 (NM_014294.3,545-563).
cttagtgcgttctaccttt

SEQ ID NO: 302539 - DNA, 19 bp, Homo sapiens
  siRNA target sequence for TRAM1 (NM_014294.3,805-823).
ccttttgaacttgaatcat

SEQ ID NO: 302540 - DNA, 19 bp, Homo sapiens
  siRNA target sequence for TRAM1 (NM_014294.3,817-835).
gaatcatctaggacttgtt

SEQ ID NO: 302541 - DNA, 19 bp, Homo sapiens
  siRNA target sequence for TRAM1 (NM_014294.3,874-892).
catttcccgcctgttttat

SEQ ID NO: 302542 - DNA, 19 bp, Homo sapiens
  siRNA target sequence for TRAM1 (NM_014294.3,881-899).
cgcctgttttattttagca

SEQ ID NO: 302543 - DNA, 19 bp, Homo sapiens
  siRNA target sequence for TRAM1 (NM_014294.3,882-900).
gcctgttttattttagcaa

SEQ ID NO: 302544 - DNA, 19 bp, Homo sapiens
  siRNA target sequence for TRAM1 (NM_014294.3,924-942).
ctctgtgggcagttctttt

SEQ ID NO: 302545 - DNA, 19 bp, Homo sapiens
  siRNA target sequence for TRAM1 (NM_014294.3,1030-1048).
cagtactggaaacttcaat

SEQ ID NO: 302546 - DNA, 19 bp, Homo sapiens
  siRNA target sequence for TRAM1 (NM_014294.3,1032-1050).
gtactggaaacttcaatgt

SEQ ID NO: 302547 - DNA, 19 bp, Homo sapiens
  siRNA target sequence for TRAM1 (NM_014294.3,1045-1063).
caatgtgttagctgttaga

SEQ ID NO: 302548 - DNA, 19 bp, Homo sapiens
  siRNA target sequence for TRAM1 (NM_014294.3,1077-1095).
catccatttgcgttactca

SEQ ID NO: 302549 - DNA, 19 bp, Homo sapiens
  siRNA target sequence for TRAM1 (NM_014294.3,1086-1104).
gcgttactcaggcatttat

SEQ ID NO: 302550 - DNA, 19 bp, Homo sapiens
  siRNA target sequence for TRAM1 (NM_014294.3,1105-1123).
gatgtggaagttcattaat

SEQ ID NO: 302551 - DNA, 19 bp, Homo sapiens
  siRNA target sequence for TRAM1 (NM_014294.3,1229-1247).
ggtgtgaatggaacattaa

SEQ ID NO: 302552 - DNA, 19 bp, Homo sapiens
  siRNA target sequence for TRAM1 (NM_014294.3,1232-1250).
gtgaatggaacattaactt

SEQ ID NO: 302553 - DNA, 19 bp, Homo sapiens
  siRNA target sequence for TRAM1 (NM_014294.3,1260-1278).
cagactctccccggaataa

SEQ ID NO: 302554 - DNA, 19 bp, Homo sapiens
  siRNA target sequence for TRAM1 (NM_014294.3,1268-1286).
ccccggaataaaaaagaga

SEQ ID NO: 302555 - DNA, 19 bp, Homo sapiens
  siRNA target sequence for TRAM1 (NM_014294.3,1269-1287).
cccggaataaaaaagagaa

SEQ ID NO: 302556 - DNA, 19 bp, Homo sapiens
  siRNA target sequence for TRAM1 (NM_014294.3,1270-1288).
ccggaataaaaaagagaaa

SEQ ID NO: 302557 - DNA, 19 bp, Homo sapiens
  siRNA target sequence for MGC14421 (NM_032907.2,500-518).
ggctgaccagccacttact

SEQ ID NO: 302558 - DNA, 19 bp, Homo sapiens
  siRNA target sequence for MGC14421 (NM_032907.2,563-581).
ctcgctagggggctatagt

SEQ ID NO: 302559 - DNA, 19 bp, Homo sapiens
  siRNA target sequence for MGC14421 (NM_032907.2,565-583).
cgctagggggctatagtat

SEQ ID NO: 302560 - DNA, 19 bp, Homo sapiens
  siRNA target sequence for MGC14421 (NM_032907.2,566-584).
gctagggggctatagtatt

SEQ ID NO: 302561 - DNA, 19 bp, Homo sapiens
  siRNA target sequence for MGC14421 (NM_032907.2,567-585).
ctagggggctatagtattt

SEQ ID NO: 302562 - DNA, 19 bp, Homo sapiens
  siRNA target sequence for MGC14421 (NM_032907.2,570-588).
gggggctatagtatttcat

SEQ ID NO: 302563 - DNA, 19 bp, Homo sapiens
  siRNA target sequence for MGC14421 (NM_032907.2,571-589).
ggggctatagtatttcatt

SEQ ID NO: 302564 - DNA, 19 bp, Homo sapiens
  siRNA target sequence for MGC14421 (NM_032907.2,572-590).
gggctatagtatttcattt

SEQ ID NO: 302565 - DNA, 19 bp, Homo sapiens
  siRNA target sequence for MGC14421 (NM_032907.2,659-677).
ctgtggtcggaagctaaaa

SEQ ID NO: 302566 - DNA, 19 bp, Homo sapiens
  siRNA target sequence for MGC14421 (NM_032907.2,661-679).
gtggtcggaagctaaaaga

SEQ ID NO: 302567 - DNA, 19 bp, Homo sapiens
  siRNA target sequence for MGC14421 (NM_032907.2,664-682).
gtcggaagctaaaagatga

SEQ ID NO: 302568 - DNA, 19 bp, Homo sapiens
  siRNA target sequence for MGC14421 (NM_032907.2,745-763).
ggcctgaacctgatcagaa

SEQ ID NO: 302569 - DNA, 19 bp, Homo sapiens
  siRNA target sequence for MGC14421 (NM_032907.2,746-764).
gcctgaacctgatcagaaa

SEQ ID NO: 302570 - DNA, 19 bp, Homo sapiens
  siRNA target sequence for MGC14421 (NM_032907.2,971-989).
cgctgatcccaatatgctt

SEQ ID NO: 302571 - DNA, 19 bp, Homo sapiens
  siRNA target sequence for MGC14421 (NM_032907.2,979-997).
ccaatatgcttgatacgtt

SEQ ID NO: 302572 - DNA, 19 bp, Homo sapiens
  siRNA target sequence for MGC14421 (NM_032907.2,1396-1414).
cgcccatcaccaatgatct

SEQ ID NO: 302573 - DNA, 19 bp, Homo sapiens
  siRNA target sequence for MGC14421 (NM_032907.2,1399-1417).
ccatcaccaatgatctctt

SEQ ID NO: 302574 - DNA, 19 bp, Homo sapiens
  siRNA target sequence for TRAM2 (NM_012288.1,84-102).
ccgcaggaggacgaaaagt

SEQ ID NO: 302575 - DNA, 19 bp, Homo sapiens
  siRNA target sequence for TRAM2 (NM_012288.1,85-103).
cgcaggaggacgaaaagtt

SEQ ID NO: 302576 - DNA, 19 bp, Homo sapiens
  siRNA target sequence for TRAM2 (NM_012288.1,202-220).
gccaagactgcctttctat

SEQ ID NO: 302577 - DNA, 19 bp, Homo sapiens
  siRNA target sequence for TRAM2 (NM_012288.1,203-221).
ccaagactgcctttctatt

SEQ ID NO: 302578 - DNA, 19 bp, Homo sapiens
  siRNA target sequence for TRAM2 (NM_012288.1,290-308).
ctaaggacctggtcacaat

SEQ ID NO: 302579 - DNA, 19 bp, Homo sapiens
  siRNA target sequence for TRAM2 (NM_012288.1,298-316).
ctggtcacaatcttgttct

SEQ ID NO: 302580 - DNA, 19 bp, Homo sapiens
  siRNA target sequence for TRAM2 (NM_012288.1,301-319).
gtcacaatcttgttctaca

SEQ ID NO: 302581 - DNA, 19 bp, Homo sapiens
  siRNA target sequence for TRAM2 (NM_012288.1,305-323).
caatcttgttctacatctt

SEQ ID NO: 302582 - DNA, 19 bp, Homo sapiens
  siRNA target sequence for TRAM2 (NM_012288.1,348-366).
ggttcaggagtacatttta

SEQ ID NO: 302583 - DNA, 19 bp, Homo sapiens
  siRNA target sequence for TRAM2 (NM_012288.1,428-446).
gacagctggtcgtctttca

SEQ ID NO: 302584 - DNA, 19 bp, Homo sapiens
  siRNA target sequence for TRAM2 (NM_012288.1,430-448).
cagctggtcgtctttcatt

SEQ ID NO: 302585 - DNA, 19 bp, Homo sapiens
  siRNA target sequence for TRAM2 (NM_012288.1,433-451).
ctggtcgtctttcatttca

SEQ ID NO: 302586 - DNA, 19 bp, Homo sapiens
  siRNA target sequence for TRAM2 (NM_012288.1,480-498).
ggtgacggaaggatactta

SEQ ID NO: 302587 - DNA, 19 bp, Homo sapiens
  siRNA target sequence for TRAM2 (NM_012288.1,481-499).
gtgacggaaggatacttaa

SEQ ID NO: 302588 - DNA, 19 bp, Homo sapiens
  siRNA target sequence for TRAM2 (NM_012288.1,483-501).
gacggaaggatacttaaca

SEQ ID NO: 302589 - DNA, 19 bp, Homo sapiens
  siRNA target sequence for TRAM2 (NM_012288.1,485-503).
cggaaggatacttaacaaa

SEQ ID NO: 302590 - DNA, 19 bp, Homo sapiens
  siRNA target sequence for TRAM2 (NM_012288.1,595-613).
gcacttcctgagctatact

SEQ ID NO: 302591 - DNA, 19 bp, Homo sapiens
  siRNA target sequence for TRAM2 (NM_012288.1,596-614).
cacttcctgagctatactt

SEQ ID NO: 302592 - DNA, 19 bp, Homo sapiens
  siRNA target sequence for TRAM2 (NM_012288.1,643-661).
cgccagctccagtatattt

SEQ ID NO: 302593 - DNA, 19 bp, Homo sapiens
  siRNA target sequence for TRAM2 (NM_012288.1,662-680).
gcctgtacctggtgcatat

SEQ ID NO: 302594 - DNA, 19 bp, Homo sapiens
  siRNA target sequence for TRAM2 (NM_012288.1,663-681).
cctgtacctggtgcatata

SEQ ID NO: 302595 - DNA, 19 bp, Homo sapiens
  siRNA target sequence for TRAM2 (NM_012288.1,666-684).
gtacctggtgcatatagct

SEQ ID NO: 302596 - DNA, 19 bp, Homo sapiens
  siRNA target sequence for TRAM2 (NM_012288.1,707-725).
gccgcctgggcctgatctt

SEQ ID NO: 302597 - DNA, 19 bp, Homo sapiens
  siRNA target sequence for TRAM2 (NM_012288.1,765-783).
ggctagactcttctacttt

SEQ ID NO: 302598 - DNA, 19 bp, Homo sapiens
  siRNA target sequence for TRAM2 (NM_012288.1,833-851).
gggttacccgcctcttcat

SEQ ID NO: 302599 - DNA, 19 bp, Homo sapiens
  siRNA target sequence for TRAM2 (NM_012288.1,883-901).
ggactggctcgcatggaaa

SEQ ID NO: 302600 - DNA, 19 bp, Homo sapiens
  siRNA target sequence for TRAM2 (NM_012288.1,926-944).
ggaacttcaacactttgtt

SEQ ID NO: 302601 - DNA, 19 bp, Homo sapiens
  siRNA target sequence for TRAM2 (NM_012288.1,1021-1039).
cggcactggcgggaatact

SEQ ID NO: 302602 - DNA, 19 bp, Homo sapiens
  siRNA target sequence for TRAM2 (NM_012288.1,1157-1175).
ccccacggactaagaaact

SEQ ID NO: 302603 - DNA, 19 bp, Homo sapiens
  siRNA target sequence for TRAM2 (NM_012288.1,1159-1177).
ccacggactaagaaactca

SEQ ID NO: 302604 - DNA, 19 bp, Homo sapiens
  siRNA target sequence for TRAM2 (NM_012288.1,1160-1178).
cacggactaagaaactcaa

SEQ ID NO: 302605 - DNA, 19 bp, Homo sapiens
  siRNA target sequence for THEG (NM_016585.3,433-451).
gcagagcccaagataaact

SEQ ID NO: 302606 - DNA, 19 bp, Homo sapiens
  siRNA target sequence for THEG (NM_016585.3,497-515).
cctggatctccccatgtaa

SEQ ID NO: 302607 - DNA, 19 bp, Homo sapiens
  siRNA target sequence for THEG (NM_016585.3,628-646).
ctgtctcggcccaagagat

SEQ ID NO: 302608 - DNA, 19 bp, Homo sapiens
  siRNA target sequence for THEG (NM_016585.3,632-650).
ctcggcccaagagattcta

SEQ ID NO: 302609 - DNA, 19 bp, Homo sapiens
  siRNA target sequence for THEG (NM_016585.3,642-660).
gagattctacctggaatat

SEQ ID NO: 302610 - DNA, 19 bp, Homo sapiens
  siRNA target sequence for THEG (NM_016585.3,700-718).
cggtcctccctggaataca

SEQ ID NO: 302611 - DNA, 19 bp, Homo sapiens
  siRNA target sequence for THEG (NM_016585.3,702-720).
gtcctccctggaatacaga

SEQ ID NO: 302612 - DNA, 19 bp, Homo sapiens
  siRNA target sequence for THEG (NM_016585.3,838-856).
cggatcctccagttgtcaa

SEQ ID NO: 302613 - DNA, 19 bp, Homo sapiens
  siRNA target sequence for THEG (NM_016585.3,839-857).
ggatcctccagttgtcaaa

SEQ ID NO: 302614 - DNA, 19 bp, Homo sapiens
  siRNA target sequence for CD81 (NM_004356.2,242-260).
gtgggcgctgtcatgatgt

SEQ ID NO: 302615 - DNA, 19 bp, Homo sapiens
  siRNA target sequence for CD81 (NM_004356.2,366-384).
gcatctggggctttgtcaa

SEQ ID NO: 302616 - DNA, 19 bp, Homo sapiens
  siRNA target sequence for CD81 (NM_004356.2,547-565).
gctcaagaacaatttgtgt

SEQ ID NO: 302617 - DNA, 19 bp, Homo sapiens
  siRNA target sequence for CD81 (NM_004356.2,674-692).
gtcgctgtgatcatgatct

SEQ ID NO: 302618 - DNA, 19 bp, Homo sapiens
  siRNA target sequence for LPXN (NM_004811.1,139-157).
cttcaggacagtgatgaat

SEQ ID NO: 302619 - DNA, 19 bp, Homo sapiens
  siRNA target sequence for LPXN (NM_004811.1,195-213).
cagaaaggagactaacctt

SEQ ID NO: 302620 - DNA, 19 bp, Homo sapiens
  siRNA target sequence for LPXN (NM_004811.1,221-239).
cttcggagatcctttctat

SEQ ID NO: 302621 - DNA, 19 bp, Homo sapiens
  siRNA target sequence for LPXN (NM_004811.1,224-242).
cggagatcctttctattca

SEQ ID NO: 302622 - DNA, 19 bp, Homo sapiens
  siRNA target sequence for LPXN (NM_004811.1,232-250).
ctttctattcaggataaca

SEQ ID NO: 302623 - DNA, 19 bp, Homo sapiens
  siRNA target sequence for LPXN (NM_004811.1,265-283).
gcgcagctcgtgtatacta

SEQ ID NO: 302624 - DNA, 19 bp, Homo sapiens
  siRNA target sequence for LPXN (NM_004811.1,270-288).
gctcgtgtatactaccaat

SEQ ID NO: 302625 - DNA, 19 bp, Homo sapiens
  siRNA target sequence for LPXN (NM_004811.1,271-289).
ctcgtgtatactaccaata

SEQ ID NO: 302626 - DNA, 19 bp, Homo sapiens
  siRNA target sequence for LPXN (NM_004811.1,337-355).
ccaccaccttctaaaacgt

SEQ ID NO: 302627 - DNA, 19 bp, Homo sapiens
  siRNA target sequence for LPXN (NM_004811.1,586-604).
catgctctagggcaatcat

SEQ ID NO: 302628 - DNA, 19 bp, Homo sapiens
  siRNA target sequence for LPXN (NM_004811.1,650-668).
gctccagtcccttctttga

SEQ ID NO: 302629 - DNA, 19 bp, Homo sapiens
  siRNA target sequence for LPXN (NM_004811.1,827-845).
gtgcagaaggctttcatga

SEQ ID NO: 302630 - DNA, 19 bp, Homo sapiens
  siRNA target sequence for LPXN (NM_004811.1,858-876).
gccatattgccgaaaggat

SEQ ID NO: 302631 - DNA, 19 bp, Homo sapiens
  siRNA target sequence for LPXN (NM_004811.1,1026-1044).
ggatggacgtccattctgt

SEQ ID NO: 302632 - DNA, 19 bp, Homo sapiens
  siRNA target sequence for LPXN (NM_004811.1,1097-1115).
ccatcactggccgttgtat

SEQ ID NO: 302633 - DNA, 19 bp, Homo sapiens
  siRNA target sequence for LPXN (NM_004811.1,1101-1119).
cactggccgttgtatcagt

SEQ ID NO: 302634 - DNA, 19 bp, Homo sapiens
  siRNA target sequence for LPXN (NM_004811.1,1203-1221).
gaatgacaagacctattgt

SEQ ID NO: 302635 - DNA, 19 bp, Homo sapiens
  siRNA target sequence for LPXN (NM_004811.1,1220-1238).
gtcaaccttgcttcaataa

SEQ ID NO: 302636 - DNA, 19 bp, Homo sapiens
  siRNA target sequence for OCLN (NM_002538.2,1115-1133).
ctctacgtggatcagtatt

SEQ ID NO: 302637 - DNA, 19 bp, Homo sapiens
  siRNA target sequence for OCLN (NM_002538.2,1120-1138).
cgtggatcagtatttgtat

SEQ ID NO: 302638 - DNA, 19 bp, Homo sapiens
  siRNA target sequence for OCLN (NM_002538.2,1178-1196).
gtactggggttcatgatta

SEQ ID NO: 302639 - DNA, 19 bp, Homo sapiens
  siRNA target sequence for OCLN (NM_002538.2,1254-1272).
ggtatgacaagtccaatat

SEQ ID NO: 302640 - DNA, 19 bp, Homo sapiens
  siRNA target sequence for OCLN (NM_002538.2,1255-1273).
gtatgacaagtccaatatt

SEQ ID NO: 302641 - DNA, 19 bp, Homo sapiens
  siRNA target sequence for OCLN (NM_002538.2,1316-1334).
gtcgaggagtgggttaaaa

SEQ ID NO: 302642 - DNA, 19 bp, Homo sapiens
  siRNA target sequence for OCLN (NM_002538.2,1318-1336).
cgaggagtgggttaaaaat

SEQ ID NO: 302643 - DNA, 19 bp, Homo sapiens
  siRNA target sequence for OCLN (NM_002538.2,1365-1383).
cacccccatctgactatgt

SEQ ID NO: 302644 - DNA, 19 bp, Homo sapiens
  siRNA target sequence for OCLN (NM_002538.2,1402-1420).
catggcatactcttccaat

SEQ ID NO: 302645 - DNA, 19 bp, Homo sapiens
  siRNA target sequence for OCLN (NM_002538.2,1429-1447).
gaatgacaagcggttttat

SEQ ID NO: 302646 - DNA, 19 bp, Homo sapiens
  siRNA target sequence for OCLN (NM_002538.2,1448-1466).
ccagagtcttcctataaat

SEQ ID NO: 302647 - DNA, 19 bp, Homo sapiens
  siRNA target sequence for OCLN (NM_002538.2,1487-1505).
gttcaggagcttccattaa

SEQ ID NO: 302648 - DNA, 19 bp, Homo sapiens
  siRNA target sequence for OCLN (NM_002538.2,1506-1524).
cttcgcctgtggatgactt

SEQ ID NO: 302649 - DNA, 19 bp, Homo sapiens
  siRNA target sequence for OCLN (NM_002538.2,1542-1560).
gcagcggtggtaactttga

SEQ ID NO: 302650 - DNA, 19 bp, Homo sapiens
  siRNA target sequence for OCLN (NM_002538.2,1678-1696).
ggactggatcagggaatat

SEQ ID NO: 302651 - DNA, 19 bp, Homo sapiens
  siRNA target sequence for OCLN (NM_002538.2,1690-1708).
ggaatatccacctatcact

SEQ ID NO: 302652 - DNA, 19 bp, Homo sapiens
  siRNA target sequence for OCLN (NM_002538.2,1691-1709).
gaatatccacctatcactt

SEQ ID NO: 302653 - DNA, 19 bp, Homo sapiens
  siRNA target sequence for OCLN (NM_002538.2,1701-1719).
ctatcacttcagatcaaca

SEQ ID NO: 302654 - DNA, 19 bp, Homo sapiens
  siRNA target sequence for OCLN (NM_002538.2,1749-1767).
ctggcctacaggaatacaa

SEQ ID NO: 302655 - DNA, 19 bp, Homo sapiens
  siRNA target sequence for OCLN (NM_002538.2,1781-1799).
gaacttgatgagatcaata

SEQ ID NO: 302656 - DNA, 19 bp, Homo sapiens
  siRNA target sequence for OCLN (NM_002538.2,1802-1820).
gaactctcccgtttggata

SEQ ID NO: 302657 - DNA, 19 bp, Homo sapiens
  siRNA target sequence for OCLN (NM_002538.2,1809-1827).
cccgtttggataaagaatt

SEQ ID NO: 302658 - DNA, 19 bp, Homo sapiens
  siRNA target sequence for OCLN (NM_002538.2,1920-1938).
gtaagaagaatcattgcaa

SEQ ID NO: 302659 - DNA, 19 bp, Homo sapiens
  siRNA target sequence for OCLN (NM_002538.2,1972-1990).
gatggttggagactatgat

SEQ ID NO: 302660 - DNA, 19 bp, Homo sapiens
  siRNA target sequence for OCLN (NM_002538.2,1982-2000).
gactatgatagacagaaaa

SEQ ID NO: 302661 - DNA, 19 bp, Homo sapiens
  siRNA target sequence for OXA1L (NM_005015.1,3-21).
ggtaacgtggctttacaga

SEQ ID NO: 302662 - DNA, 19 bp, Homo sapiens
  siRNA target sequence for OXA1L (NM_005015.1,4-22).
gtaacgtggctttacagat

SEQ ID NO: 302663 - DNA, 19 bp, Homo sapiens
  siRNA target sequence for OXA1L (NM_005015.1,8-26).
cgtggctttacagattttt

SEQ ID NO: 302664 - DNA, 19 bp, Homo sapiens
  siRNA target sequence for OXA1L (NM_005015.1,45-63).
cgccaagctccgttctctt

SEQ ID NO: 302665 - DNA, 19 bp, Homo sapiens
  siRNA target sequence for OXA1L (NM_005015.1,46-64).
gccaagctccgttctcttt

SEQ ID NO: 302666 - DNA, 19 bp, Homo sapiens
  siRNA target sequence for OXA1L (NM_005015.1,125-143).
cgaggggttgtggttctta

SEQ ID NO: 302667 - DNA, 19 bp, Homo sapiens
  siRNA target sequence for OXA1L (NM_005015.1,544-562).
gtgggactgatccagaatt

SEQ ID NO: 302668 - DNA, 19 bp, Homo sapiens
  siRNA target sequence for OXA1L (NM_005015.1,546-564).
gggactgatccagaattta

SEQ ID NO: 302669 - DNA, 19 bp, Homo sapiens
  siRNA target sequence for OXA1L (NM_005015.1,548-566).
gactgatccagaatttact

SEQ ID NO: 302670 - DNA, 19 bp, Homo sapiens
  siRNA target sequence for OXA1L (NM_005015.1,679-697).
gccaggatccacaatcact

SEQ ID NO: 302671 - DNA, 19 bp, Homo sapiens
  siRNA target sequence for OXA1L (NM_005015.1,714-732).
gttttccagtcgaatcaga

SEQ ID NO: 302672 - DNA, 19 bp, Homo sapiens
  siRNA target sequence for OXA1L (NM_005015.1,745-763).
gcaggagaccatattgagt

SEQ ID NO: 302673 - DNA, 19 bp, Homo sapiens
  siRNA target sequence for OXA1L (NM_005015.1,746-764).
caggagaccatattgagta

SEQ ID NO: 302674 - DNA, 19 bp, Homo sapiens
  siRNA target sequence for OXA1L (NM_005015.1,751-769).
gaccatattgagtattaca

SEQ ID NO: 302675 - DNA, 19 bp, Homo sapiens
  siRNA target sequence for OXA1L (NM_005015.1,776-794).
cctcggagatggcacttta

SEQ ID NO: 302676 - DNA, 19 bp, Homo sapiens
  siRNA target sequence for OXA1L (NM_005015.1,845-863).
ctcaggccccaatcttcat

SEQ ID NO: 302677 - DNA, 19 bp, Homo sapiens
  siRNA target sequence for OXA1L (NM_005015.1,867-885).
cttcttcattgctttgaga

SEQ ID NO: 302678 - DNA, 19 bp, Homo sapiens
  siRNA target sequence for OXA1L (NM_005015.1,956-974).
ccgatcccatctacatatt

SEQ ID NO: 302679 - DNA, 19 bp, Homo sapiens
  siRNA target sequence for OXA1L (NM_005015.1,957-975).
cgatcccatctacatatta

SEQ ID NO: 302680 - DNA, 19 bp, Homo sapiens
  siRNA target sequence for OXA1L (NM_005015.1,1026-1044).
gacaggtgtgcaaagttct

SEQ ID NO: 302681 - DNA, 19 bp, Homo sapiens
  siRNA target sequence for OXA1L (NM_005015.1,1045-1063).
gaccttcagtggatgagaa

SEQ ID NO: 302682 - DNA, 19 bp, Homo sapiens
  siRNA target sequence for OXA1L (NM_005015.1,1114-1132).
cccacggcagtgtttatgt

SEQ ID NO: 302683 - DNA, 19 bp, Homo sapiens
  siRNA target sequence for OXA1L (NM_005015.1,1115-1133).
ccacggcagtgtttatgta

SEQ ID NO: 302684 - DNA, 19 bp, Homo sapiens
  siRNA target sequence for OXA1L (NM_005015.1,1189-1207).
gcagtacgcactgtactta

SEQ ID NO: 302685 - DNA, 19 bp, Homo sapiens
  siRNA target sequence for OXA1L (NM_005015.1,1190-1208).
cagtacgcactgtacttaa

SEQ ID NO: 302686 - DNA, 19 bp, Homo sapiens
  siRNA target sequence for OXA1L (NM_005015.1,1212-1230).
cccccagcgtgttgtacat

SEQ ID NO: 302687 - DNA, 19 bp, Homo sapiens
  siRNA target sequence for OXA1L (NM_005015.1,1214-1232).
cccagcgtgttgtacatga

SEQ ID NO: 302688 - DNA, 19 bp, Homo sapiens
  siRNA target sequence for OXA1L (NM_005015.1,1225-1243).
gtacatgacctggacaaat

SEQ ID NO: 302689 - DNA, 19 bp, Homo sapiens
  siRNA target sequence for OXA1L (NM_005015.1,1327-1345).
caacgcatgcggaatcagt

SEQ ID NO: 302690 - DNA, 19 bp, Homo sapiens
  siRNA target sequence for OXA1L (NM_005015.1,1366-1384).
cctttacgacagaccttta

SEQ ID NO: 302691 - DNA, 19 bp, Homo sapiens
  siRNA target sequence for OXA1L (NM_005015.1,1398-1416).
cctacaacctggaaaggat

SEQ ID NO: 302692 - DNA, 19 bp, Homo sapiens
  siRNA target sequence for OXA1L (NM_005015.1,1399-1417).
ctacaacctggaaaggata

SEQ ID NO: 302693 - DNA, 19 bp, Homo sapiens
  siRNA target sequence for PICALM (NM_007166.1,162-180).
cctgacggaccgaatcact

SEQ ID NO: 302694 - DNA, 19 bp, Homo sapiens
  siRNA target sequence for PICALM (NM_007166.1,267-285).
gcacctggactacttaatt

SEQ ID NO: 302695 - DNA, 19 bp, Homo sapiens
  siRNA target sequence for PICALM (NM_007166.1,288-306).
gtgcacaaatgagatgaat

SEQ ID NO: 302696 - DNA, 19 bp, Homo sapiens
  siRNA target sequence for PICALM (NM_007166.1,317-335).
cacagttggcagacagttt

SEQ ID NO: 302697 - DNA, 19 bp, Homo sapiens
  siRNA target sequence for PICALM (NM_007166.1,324-342).
ggcagacagtttatttgaa

SEQ ID NO: 302698 - DNA, 19 bp, Homo sapiens
  siRNA target sequence for PICALM (NM_007166.1,340-358).
gaaagaactactaatagta

SEQ ID NO: 302699 - DNA, 19 bp, Homo sapiens
  siRNA target sequence for PICALM (NM_007166.1,359-377).
gttgggtggtggtcttcaa

SEQ ID NO: 302700 - DNA, 19 bp, Homo sapiens
  siRNA target sequence for PICALM (NM_007166.1,363-381).
ggtggtggtcttcaaatct

SEQ ID NO: 302701 - DNA, 19 bp, Homo sapiens
  siRNA target sequence for PICALM (NM_007166.1,397-415).
catttgatggtgtatggaa

SEQ ID NO: 302702 - DNA, 19 bp, Homo sapiens
  siRNA target sequence for PICALM (NM_007166.1,446-464).
gaaacacgttgtttaactt

SEQ ID NO: 302703 - DNA, 19 bp, Homo sapiens
  siRNA target sequence for PICALM (NM_007166.1,456-474).
gtttaacttaagcaatttt

SEQ ID NO: 302704 - DNA, 19 bp, Homo sapiens
  siRNA target sequence for PICALM (NM_007166.1,485-503).
gtggattgcaaggatatga

SEQ ID NO: 302705 - DNA, 19 bp, Homo sapiens
  siRNA target sequence for PICALM (NM_007166.1,487-505).
ggattgcaaggatatgaca

SEQ ID NO: 302706 - DNA, 19 bp, Homo sapiens
  siRNA target sequence for PICALM (NM_007166.1,493-511).
caaggatatgacatgtcta

SEQ ID NO: 302707 - DNA, 19 bp, Homo sapiens
  siRNA target sequence for PICALM (NM_007166.1,557-575).
catacagacaagttgcatt

SEQ ID NO: 302708 - DNA, 19 bp, Homo sapiens
  siRNA target sequence for PICALM (NM_007166.1,596-614).
gaggggctgatggagttat

SEQ ID NO: 302709 - DNA, 19 bp, Homo sapiens
  siRNA target sequence for PICALM (NM_007166.1,598-616).
ggggctgatggagttatga

SEQ ID NO: 302710 - DNA, 19 bp, Homo sapiens
  siRNA target sequence for PICALM (NM_007166.1,600-618).
ggctgatggagttatgaga

SEQ ID NO: 302711 - DNA, 19 bp, Homo sapiens
  siRNA target sequence for PICALM (NM_007166.1,738-756).
catgctcctgttcaaagat

SEQ ID NO: 302712 - DNA, 19 bp, Homo sapiens
  siRNA target sequence for PICALM (NM_007166.1,747-765).
gttcaaagatgccattaga

SEQ ID NO: 302713 - DNA, 19 bp, Homo sapiens
  siRNA target sequence for PICALM (NM_007166.1,836-854).
gcaaagaaggtcttgacat

SEQ ID NO: 302714 - DNA, 19 bp, Homo sapiens
  siRNA target sequence for PICALM (NM_007166.1,844-862).
ggtcttgacatctataaga

SEQ ID NO: 302715 - DNA, 19 bp, Homo sapiens
  siRNA target sequence for PICALM (NM_007166.1,845-863).
gtcttgacatctataagaa

SEQ ID NO: 302716 - DNA, 19 bp, Homo sapiens
  siRNA target sequence for PICALM (NM_007166.1,847-865).
cttgacatctataagaagt

SEQ ID NO: 302717 - DNA, 19 bp, Homo sapiens
  siRNA target sequence for PICALM (NM_007166.1,888-906).
ctcagagttcctcaaagtt

SEQ ID NO: 302718 - DNA, 19 bp, Homo sapiens
  siRNA target sequence for PICALM (NM_007166.1,954-972).
ggcccctagcagtcttctt

SEQ ID NO: 302719 - DNA, 19 bp, Homo sapiens
  siRNA target sequence for PICALM (NM_007166.1,962-980).
gcagtcttcttgatgcttt

SEQ ID NO: 302720 - DNA, 19 bp, Homo sapiens
  siRNA target sequence for PICALM (NM_007166.1,1040-1058).
gggcaactacactttccaa

SEQ ID NO: 302721 - DNA, 19 bp, Homo sapiens
  siRNA target sequence for PICALM (NM_007166.1,1074-1092).
ggcaagcactggtctatct

SEQ ID NO: 302722 - DNA, 19 bp, Homo sapiens
  siRNA target sequence for PICALM (NM_007166.1,1076-1094).
caagcactggtctatctct

SEQ ID NO: 302723 - DNA, 19 bp, Homo sapiens
  siRNA target sequence for PICALM (NM_007166.1,1145-1163).
cacgtttgaaagctttaaa

SEQ ID NO: 302724 - DNA, 19 bp, Homo sapiens
  siRNA target sequence for PICALM (NM_007166.1,1195-1213).
cctcatacctctttaacaa

SEQ ID NO: 302725 - DNA, 19 bp, Homo sapiens
  siRNA target sequence for PICALM (NM_007166.1,1259-1277).
caccagccattgacatatt

SEQ ID NO: 302726 - DNA, 19 bp, Homo sapiens
  siRNA target sequence for PICALM (NM_007166.1,1292-1310).
cttctaacagcacatcaaa

SEQ ID NO: 302727 - DNA, 19 bp, Homo sapiens
  siRNA target sequence for PICALM (NM_007166.1,1315-1333).
cccaatgatctgcttgatt

SEQ ID NO: 302728 - DNA, 19 bp, Homo sapiens
  siRNA target sequence for PICALM (NM_007166.1,1438-1456).
gatgccattccaagcttaa

SEQ ID NO: 302729 - DNA, 19 bp, Homo sapiens
  siRNA target sequence for PICALM (NM_007166.1,1443-1461).
cattccaagcttaaatcct

SEQ ID NO: 302730 - DNA, 19 bp, Homo sapiens
  siRNA target sequence for PICALM (NM_007166.1,1481-1499).
gtgatgttcacctttccat

SEQ ID NO: 302731 - DNA, 19 bp, Homo sapiens
  siRNA target sequence for PICALM (NM_007166.1,1510-1528).
gtatctacttttactacta

SEQ ID NO: 302732 - DNA, 19 bp, Homo sapiens
  siRNA target sequence for PICALM (NM_007166.1,1589-1607).
cttcagctggccttaatgt

SEQ ID NO: 302733 - DNA, 19 bp, Homo sapiens
  siRNA target sequence for PICALM (NM_007166.1,1742-1760).
ctagcaagttagtatctga

SEQ ID NO: 302734 - DNA, 19 bp, Homo sapiens
  siRNA target sequence for PICALM (NM_007166.1,1818-1836).
cactaagaatgatgtaaat

SEQ ID NO: 302735 - DNA, 19 bp, Homo sapiens
  siRNA target sequence for PICALM (NM_007166.1,1960-1978).
ccaacaggcatgataggat

SEQ ID NO: 302736 - DNA, 19 bp, Homo sapiens
  siRNA target sequence for PICALM (NM_007166.1,1961-1979).
caacaggcatgataggata

SEQ ID NO: 302737 - DNA, 19 bp, Homo sapiens
  siRNA target sequence for PICALM (NM_007166.1,1966-1984).
ggcatgataggatatggaa

SEQ ID NO: 302738 - DNA, 19 bp, Homo sapiens
  siRNA target sequence for PICALM (NM_007166.1,1967-1985).
gcatgataggatatggaat

SEQ ID NO: 302739 - DNA, 19 bp, Homo sapiens
  siRNA target sequence for PICALM (NM_007166.1,2016-2034).
gacgcaaccaaccttaata

SEQ ID NO: 302740 - DNA, 19 bp, Homo sapiens
  siRNA target sequence for PICALM (NM_007166.1,2018-2036).
cgcaaccaaccttaatata

SEQ ID NO: 302741 - DNA, 19 bp, Homo sapiens
  siRNA target sequence for PICALM (NM_007166.1,2064-2082).
cccctttggccctgtatca

SEQ ID NO: 302742 - DNA, 19 bp, Homo sapiens
  siRNA target sequence for PICALM (NM_007166.1,2083-2101).
ggagcacagatacagttta

SEQ ID NO: 302743 - DNA, 19 bp, Homo sapiens
  siRNA target sequence for SLC9A3R1 (NM_004252.1,597-615).
cagggggctggcaacgaaa

SEQ ID NO: 302744 - DNA, 19 bp, Homo sapiens
  siRNA target sequence for SLC9A3R1 (NM_004252.1,599-617).
gggggctggcaacgaaaat

SEQ ID NO: 302745 - DNA, 19 bp, Homo sapiens
  siRNA target sequence for SLC9A3R1 (NM_004252.1,601-619).
gggctggcaacgaaaatga

SEQ ID NO: 302746 - DNA, 19 bp, Homo sapiens
  siRNA target sequence for SLC9A3R1 (NM_004252.1,1162-1180).
ccgaccccatcctagactt

SEQ ID NO: 302747 - DNA, 19 bp, Homo sapiens
  siRNA target sequence for SLC9A3R1 (NM_004252.1,1258-1276).
gcaagaaaaacgaactctt

SEQ ID NO: 302748 - DNA, 19 bp, Homo sapiens
  siRNA target sequence for TM4SF7 (NM_003271.3,524-542).
cgcctacacggacaagatt

SEQ ID NO: 302749 - DNA, 19 bp, Homo sapiens
  siRNA target sequence for TM4SF7 (NM_003271.3,526-544).
cctacacggacaagattga

SEQ ID NO: 302750 - DNA, 19 bp, Homo sapiens
  siRNA target sequence for TRAF1 (NM_005658.2,232-250).
cagatctgccccaaatgca

SEQ ID NO: 302751 - DNA, 19 bp, Homo sapiens
  siRNA target sequence for TRAF1 (NM_005658.2,256-274).
gaagacctccagtctataa

SEQ ID NO: 302752 - DNA, 19 bp, Homo sapiens
  siRNA target sequence for TRAF1 (NM_005658.2,1046-1064).
cgctcttcatcgtgatcat

SEQ ID NO: 302753 - DNA, 19 bp, Homo sapiens
  siRNA target sequence for TRAF1 (NM_005658.2,1062-1080).
catgagaggggagtatgat

SEQ ID NO: 302754 - DNA, 19 bp, Homo sapiens
  siRNA target sequence for VAMP3 (NM_004781.2,46-64).
gccactggcagtaatcgaa

SEQ ID NO: 302755 - DNA, 19 bp, Homo sapiens
  siRNA target sequence for VAMP3 (NM_004781.2,75-93).
gacacaaaatcaagtagat

SEQ ID NO: 302756 - DNA, 19 bp, Homo sapiens
  siRNA target sequence for VAMP3 (NM_004781.2,77-95).
cacaaaatcaagtagatga

SEQ ID NO: 302757 - DNA, 19 bp, Homo sapiens
  siRNA target sequence for VAMP3 (NM_004781.2,188-206).
caggcgcttctcaatttga

SEQ ID NO: 302758 - DNA, 19 bp, Homo sapiens
  siRNA target sequence for VAMP3 (NM_004781.2,190-208).
ggcgcttctcaatttgaaa

SEQ ID NO: 302759 - DNA, 19 bp, Homo sapiens
  siRNA target sequence for VAMP3 (NM_004781.2,209-227).
cgagcgcagccaagttgaa

SEQ ID NO: 302760 - DNA, 19 bp, Homo sapiens
  siRNA target sequence for VAMP3 (NM_004781.2,217-235).
gccaagttgaagaggaaat

SEQ ID NO: 302761 - DNA, 19 bp, Homo sapiens
  siRNA target sequence for VAMP3 (NM_004781.2,258-276).
gtgggcaatcgggattact

SEQ ID NO: 302762 - DNA, 19 bp, Homo sapiens
  siRNA target sequence for VAMP3 (NM_004781.2,260-278).
gggcaatcgggattactgt

SEQ ID NO: 302763 - DNA, 19 bp, Homo sapiens
  siRNA target sequence for VAMP3 (NM_004781.2,261-279).
ggcaatcgggattactgtt

SEQ ID NO: 302764 - DNA, 19 bp, Homo sapiens
  siRNA target sequence for VAMP3 (NM_004781.2,269-287).
ggattactgttctggttat

SEQ ID NO: 302765 - DNA, 19 bp, Homo sapiens
  siRNA target sequence for VAMP3 (NM_004781.2,277-295).
gttctggttatcttcatca

SEQ ID NO: 302766 - DNA, 19 bp, Homo sapiens
  siRNA target sequence for VAMP4 (NM_003762.1,199-217).
gcgccacctcaatgatgat

SEQ ID NO: 302767 - DNA, 19 bp, Homo sapiens
  siRNA target sequence for VAMP4 (NM_003762.1,300-318).
gaccatctggaccaagatt

SEQ ID NO: 302768 - DNA, 19 bp, Homo sapiens
  siRNA target sequence for VAMP4 (NM_003762.1,436-454).
ggacaaatcagaaagctta

SEQ ID NO: 302769 - DNA, 19 bp, Homo sapiens
  siRNA target sequence for VAMP4 (NM_003762.1,437-455).
gacaaatcagaaagcttat

SEQ ID NO: 302770 - DNA, 19 bp, Homo sapiens
  siRNA target sequence for VAMP4 (NM_003762.1,457-475).
ggataatgcaacagctttt

SEQ ID NO: 302771 - DNA, 19 bp, Homo sapiens
  siRNA target sequence for VAMP4 (NM_003762.1,508-526).
gtggtggcgtggatgcaaa

SEQ ID NO: 302772 - DNA, 19 bp, Homo sapiens
  siRNA target sequence for VAMP4 (NM_003762.1,510-528).
ggtggcgtggatgcaaaat

SEQ ID NO: 302773 - DNA, 19 bp, Homo sapiens
  siRNA target sequence for VAMP4 (NM_003762.1,511-529).
gtggcgtggatgcaaaata

SEQ ID NO: 302774 - DNA, 19 bp, Homo sapiens
  siRNA target sequence for VAMP8 (NM_003761.2,111-129).
gtggagggagttaagaata

SEQ ID NO: 302775 - DNA, 19 bp, Homo sapiens
  siRNA target sequence for VAMP8 (NM_003761.2,211-229).
ccacatctgagcacttcaa

SEQ ID NO: 302776 - DNA, 19 bp, Homo sapiens
  siRNA target sequence for VAMP8 (NM_003761.2,287-305).
ccttatctgcgtgattgtt

SEQ ID NO: 302777 - DNA, 19 bp, Homo sapiens
  siRNA target sequence for DKFZp434O0515 (NM_178123.2,302-320).
ggaggcctcagtaatatta

SEQ ID NO: 302778 - DNA, 19 bp, Homo sapiens
  siRNA target sequence for DKFZp434O0515 (NM_178123.2,312-330).
gtaatattacccattctga

SEQ ID NO: 302779 - DNA, 19 bp, Homo sapiens
  siRNA target sequence for DKFZp434O0515 (NM_178123.2,367-385).
gacggagtggcctcatttt

SEQ ID NO: 302780 - DNA, 19 bp, Homo sapiens
  siRNA target sequence for DKFZp434O0515 (NM_178123.2,369-387).
cggagtggcctcattttga

SEQ ID NO: 302781 - DNA, 19 bp, Homo sapiens
  siRNA target sequence for DKFZp434O0515 (NM_178123.2,373-391).
gtggcctcattttgacaat

SEQ ID NO: 302782 - DNA, 19 bp, Homo sapiens
  siRNA target sequence for DKFZp434O0515 (NM_178123.2,400-418).
gcctcgaacagacaaatat

SEQ ID NO: 302783 - DNA, 19 bp, Homo sapiens
  siRNA target sequence for DKFZp434O0515 (NM_178123.2,481-499).
gaggatttaccgtgattgt

SEQ ID NO: 302784 - DNA, 19 bp, Homo sapiens
  siRNA target sequence for DKFZp434O0515 (NM_178123.2,518-536).
gtggaatgtggtgaaaaca

SEQ ID NO: 302785 - DNA, 19 bp, Homo sapiens
  siRNA target sequence for DKFZp434O0515 (NM_178123.2,542-560).
cgtaatgctacagaatgtt

SEQ ID NO: 302786 - DNA, 19 bp, Homo sapiens
  siRNA target sequence for DKFZp434O0515 (NM_178123.2,588-606).
gtggtaaagccagatgaat

SEQ ID NO: 302787 - DNA, 19 bp, Homo sapiens
  siRNA target sequence for DKFZp434O0515 (NM_178123.2,591-609).
gtaaagccagatgaattct

SEQ ID NO: 302788 - DNA, 19 bp, Homo sapiens
  siRNA target sequence for DKFZp434O0515 (NM_178123.2,625-643).
cgcatttttgtttttggaa

SEQ ID NO: 302789 - DNA, 19 bp, Homo sapiens
  siRNA target sequence for DKFZp434O0515 (NM_178123.2,641-659).
gaaggagaaggatagactt

SEQ ID NO: 302790 - DNA, 19 bp, Homo sapiens
  siRNA target sequence for DKFZp434O0515 (NM_178123.2,661-679).
gctttgaggttattttagt

SEQ ID NO: 302791 - DNA, 19 bp, Homo sapiens
  siRNA target sequence for DKFZp434O0515 (NM_178123.2,686-704).
caacaaattgactcgttat

SEQ ID NO: 302792 - DNA, 19 bp, Homo sapiens
  siRNA target sequence for DKFZp434O0515 (NM_178123.2,689-707).
caaattgactcgttatata

SEQ ID NO: 302793 - DNA, 19 bp, Homo sapiens
  siRNA target sequence for DKFZp434O0515 (NM_178123.2,716-734).
ccaattaacagaagatttt

SEQ ID NO: 302794 - DNA, 19 bp, Homo sapiens
  siRNA target sequence for DKFZp434O0515 (NM_178123.2,742-760).
gtctcacctatgatcacat

SEQ ID NO: 302795 - DNA, 19 bp, Homo sapiens
  siRNA target sequence for DKFZp434O0515 (NM_178123.2,753-771).
gatcacatggactggttaa

SEQ ID NO: 302796 - DNA, 19 bp, Homo sapiens
  siRNA target sequence for DKFZp434O0515 (NM_178123.2,783-801).
gtttttgagaagtttacaa

SEQ ID NO: 302797 - DNA, 19 bp, Homo sapiens
  siRNA target sequence for DKFZp434O0515 (NM_178123.2,811-829).
catcattattagatgaact

SEQ ID NO: 302798 - DNA, 19 bp, Homo sapiens
  siRNA target sequence for DKFZp434O0515 (NM_178123.2,831-849).
gctttgattaacaatggaa

SEQ ID NO: 302799 - DNA, 19 bp, Homo sapiens
  siRNA target sequence for DKFZp434O0515 (NM_178123.2,876-894).
gaaaggtctgtggatttaa

SEQ ID NO: 302800 - DNA, 19 bp, Homo sapiens
  siRNA target sequence for DKFZp434O0515 (NM_178123.2,880-898).
ggtctgtggatttaaactt

SEQ ID NO: 302801 - DNA, 19 bp, Homo sapiens
  siRNA target sequence for DKFZp434O0515 (NM_178123.2,1076-1094).
ccgctaccaggaagtttgt

SEQ ID NO: 302802 - DNA, 19 bp, Homo sapiens
  siRNA target sequence for DKFZp434O0515 (NM_178123.2,1077-1095).
cgctaccaggaagtttgta

SEQ ID NO: 302803 - DNA, 19 bp, Homo sapiens
  siRNA target sequence for DKFZp434O0515 (NM_178123.2,1105-1123).
gcaagcgcacacagttaga

SEQ ID NO: 302804 - DNA, 19 bp, Homo sapiens
  siRNA target sequence for DKFZp434O0515 (NM_178123.2,1114-1132).
cacagttagaagagattca

SEQ ID NO: 302805 - DNA, 19 bp, Homo sapiens
  siRNA target sequence for DKFZp434O0515 (NM_178123.2,1170-1188).
cctggatcagaacaactaa

SEQ ID NO: 302806 - DNA, 19 bp, Homo sapiens
  siRNA target sequence for DKFZp434O0515 (NM_178123.2,1282-1300).
cagtgtatgtggaacttaa

SEQ ID NO: 302807 - DNA, 19 bp, Homo sapiens
  siRNA target sequence for DKFZp434O0515 (NM_178123.2,1292-1310).
ggaacttaatcagcaaatt

SEQ ID NO: 302808 - DNA, 19 bp, Homo sapiens
  siRNA target sequence for DKFZp434O0515 (NM_178123.2,1330-1348).
gcgatgaggaagatcttgt

SEQ ID NO: 302809 - DNA, 19 bp, Homo sapiens
  siRNA target sequence for DKFZp434O0515 (NM_178123.2,1410-1428).
gaatttaggcaaaatctct

SEQ ID NO: 302810 - DNA, 19 bp, Homo sapiens
  siRNA target sequence for DKFZp434O0515 (NM_178123.2,1449-1467).
catggtgttgcccaagatt

SEQ ID NO: 302811 - DNA, 19 bp, Homo sapiens
  siRNA target sequence for DKFZp434O0515 (NM_178123.2,1452-1470).
ggtgttgcccaagatttgt

SEQ ID NO: 302812 - DNA, 19 bp, Homo sapiens
  siRNA target sequence for DKFZp434O0515 (NM_178123.2,1485-1503).
ggcttattagggatgttgt

SEQ ID NO: 302813 - DNA, 19 bp, Homo sapiens
  siRNA target sequence for DKFZp434O0515 (NM_178123.2,1495-1513).
ggatgttgtgcgtagatgt

SEQ ID NO: 302814 - DNA, 19 bp, Homo sapiens
  siRNA target sequence for DKFZp434O0515 (NM_178123.2,1496-1514).
gatgttgtgcgtagatgta

SEQ ID NO: 302815 - DNA, 19 bp, Homo sapiens
  siRNA target sequence for DKFZp434O0515 (NM_178123.2,1530-1548).
gcatcgattcagcaaactt

SEQ ID NO: 302816 - DNA, 19 bp, Homo sapiens
  siRNA target sequence for DKFZp434O0515 (NM_178123.2,1534-1552).
cgattcagcaaactttaaa

SEQ ID NO: 302817 - DNA, 19 bp, Homo sapiens
  siRNA target sequence for DKFZp434O0515 (NM_178123.2,1565-1583).
gaagctgaaaagtgttgat

SEQ ID NO: 302818 - DNA, 19 bp, Homo sapiens
  siRNA target sequence for DKFZp434O0515 (NM_178123.2,1644-1662).
gcatcctgggcctatggaa

SEQ ID NO: 302819 - DNA, 19 bp, Homo sapiens
  siRNA target sequence for DKFZp434O0515 (NM_178123.2,1649-1667).
ctgggcctatggaaaggat

SEQ ID NO: 302820 - DNA, 19 bp, Homo sapiens
  siRNA target sequence for DKFZp434O0515 (NM_178123.2,1754-1772).
ggtagatgtgcgaaggtta

SEQ ID NO: 302821 - DNA, 19 bp, Homo sapiens
  siRNA target sequence for DKFZp434O0515 (NM_178123.2,1755-1773).
gtagatgtgcgaaggttaa

SEQ ID NO: 302822 - DNA, 19 bp, Homo sapiens
  siRNA target sequence for DKFZp434O0515 (NM_178123.2,1758-1776).
gatgtgcgaaggttaaaga

SEQ ID NO: 302823 - DNA, 19 bp, Homo sapiens
  siRNA target sequence for DKFZp434O0515 (NM_178123.2,1825-1843).
cagtagaatggctaagtga

SEQ ID NO: 302824 - DNA, 19 bp, Homo sapiens
  siRNA target sequence for DKFZp434O0515 (NM_178123.2,1881-1899).
ggcgatgatgctcaagaaa

SEQ ID NO: 302825 - DNA, 19 bp, Homo sapiens
  siRNA target sequence for DKFZp434O0515 (NM_178123.2,1977-1995).
caggccacagttgtgttat

SEQ ID NO: 302826 - DNA, 19 bp, Homo sapiens
  siRNA target sequence for DKFZp434O0515 (NM_178123.2,2020-2038).
ggtcatctggggatacact

SEQ ID NO: 302827 - DNA, 19 bp, Homo sapiens
  siRNA target sequence for DKFZp434O0515 (NM_178123.2,2021-2039).
gtcatctggggatacactt

SEQ ID NO: 302828 - DNA, 19 bp, Homo sapiens
  siRNA target sequence for DKFZp434O0515 (NM_178123.2,2040-2058).
cctcgactgaacagagtat

SEQ ID NO: 302829 - DNA, 19 bp, Homo sapiens
  siRNA target sequence for DKFZp434O0515 (NM_178123.2,2082-2100).
gaagagagagtacatagat

SEQ ID NO: 302830 - DNA, 19 bp, Homo sapiens
  siRNA target sequence for DKFZp434O0515 (NM_178123.2,2253-2271).
cctgatggaaccgaacaat

SEQ ID NO: 302831 - DNA, 19 bp, Homo sapiens
  siRNA target sequence for DKFZp434O0515 (NM_178123.2,2295-2313).
gcttctactgcagaaaaca

SEQ ID NO: 302832 - DNA, 19 bp, Homo sapiens
  siRNA target sequence for FKBP8 (NM_012181.2,447-465).
gcagcaggagcccatacat

SEQ ID NO: 302833 - DNA, 19 bp, Homo sapiens
  siRNA target sequence for FKBP8 (NM_012181.2,905-923).
ctggaaccttccaacaaga

SEQ ID NO: 302834 - DNA, 19 bp, Homo sapiens
  siRNA target sequence for FKBP8 (NM_012181.2,984-1002).
ccgccttgtaccggaaaat

SEQ ID NO: 302835 - DNA, 19 bp, Homo sapiens
  siRNA target sequence for KIAA0372 (NM_014639.1,379-397).
cactgtaagacagtgttaa

SEQ ID NO: 302836 - DNA, 19 bp, Homo sapiens
  siRNA target sequence for KIAA0372 (NM_014639.1,438-456).
cgttgctgcagctgaacta

SEQ ID NO: 302837 - DNA, 19 bp, Homo sapiens
  siRNA target sequence for KIAA0372 (NM_014639.1,471-489).
ggcccagagtgcctataaa

SEQ ID NO: 302838 - DNA, 19 bp, Homo sapiens
  siRNA target sequence for KIAA0372 (NM_014639.1,523-541).
gcttggcaggggttagcaa

SEQ ID NO: 302839 - DNA, 19 bp, Homo sapiens
  siRNA target sequence for KIAA0372 (NM_014639.1,524-542).
cttggcaggggttagcaaa

SEQ ID NO: 302840 - DNA, 19 bp, Homo sapiens
  siRNA target sequence for KIAA0372 (NM_014639.1,704-722).
ctcgaacatggcacaagtt

SEQ ID NO: 302841 - DNA, 19 bp, Homo sapiens
  siRNA target sequence for KIAA0372 (NM_014639.1,757-775).
gaagagcttcatcaactat

SEQ ID NO: 302842 - DNA, 19 bp, Homo sapiens
  siRNA target sequence for KIAA0372 (NM_014639.1,769-787).
caactatggagaaaattga

SEQ ID NO: 302843 - DNA, 19 bp, Homo sapiens
  siRNA target sequence for KIAA0372 (NM_014639.1,792-810).
gttcctggctgaaagtaca

SEQ ID NO: 302844 - DNA, 19 bp, Homo sapiens
  siRNA target sequence for KIAA0372 (NM_014639.1,806-824).
gtacagaggaccagaataa

SEQ ID NO: 302845 - DNA, 19 bp, Homo sapiens
  siRNA target sequence for KIAA0372 (NM_014639.1,856-874).
gagaatgcactgggattat

SEQ ID NO: 302846 - DNA, 19 bp, Homo sapiens
  siRNA target sequence for KIAA0372 (NM_014639.1,858-876).
gaatgcactgggattatca

SEQ ID NO: 302847 - DNA, 19 bp, Homo sapiens
  siRNA target sequence for KIAA0372 (NM_014639.1,867-885).
gggattatcagataagatt

SEQ ID NO: 302848 - DNA, 19 bp, Homo sapiens
  siRNA target sequence for KIAA0372 (NM_014639.1,895-913).
gatcaccaagtactttata

SEQ ID NO: 302849 - DNA, 19 bp, Homo sapiens
  siRNA target sequence for KIAA0372 (NM_014639.1,921-939).
cattcagagtttatccaaa

SEQ ID NO: 302850 - DNA, 19 bp, Homo sapiens
  siRNA target sequence for KIAA0372 (NM_014639.1,927-945).
gagtttatccaaatttcct

SEQ ID NO: 302851 - DNA, 19 bp, Homo sapiens
  siRNA target sequence for KIAA0372 (NM_014639.1,944-962).
ctcatgagtctgctagatt

SEQ ID NO: 302852 - DNA, 19 bp, Homo sapiens
  siRNA target sequence for KIAA0372 (NM_014639.1,949-967).
gagtctgctagattgaaga

SEQ ID NO: 302853 - DNA, 19 bp, Homo sapiens
  siRNA target sequence for KIAA0372 (NM_014639.1,993-1011).
ctatcctactgtacagtat

SEQ ID NO: 302854 - DNA, 19 bp, Homo sapiens
  siRNA target sequence for KIAA0372 (NM_014639.1,1001-1019).
ctgtacagtatccattaga

SEQ ID NO: 302855 - DNA, 19 bp, Homo sapiens
  siRNA target sequence for KIAA0372 (NM_014639.1,1012-1030).
ccattagaagtgctttgtt

SEQ ID NO: 302856 - DNA, 19 bp, Homo sapiens
  siRNA target sequence for KIAA0372 (NM_014639.1,1065-1083).
ggggcagcagtattgttgt

SEQ ID NO: 302857 - DNA, 19 bp, Homo sapiens
  siRNA target sequence for KIAA0372 (NM_014639.1,1068-1086).
gcagcagtattgttgtaga

SEQ ID NO: 302858 - DNA, 19 bp, Homo sapiens
  siRNA target sequence for KIAA0372 (NM_014639.1,1122-1140).
cattggcttaggcattaaa

SEQ ID NO: 302859 - DNA, 19 bp, Homo sapiens
  siRNA target sequence for KIAA0372 (NM_014639.1,1126-1144).
ggcttaggcattaaagcat

SEQ ID NO: 302860 - DNA, 19 bp, Homo sapiens
  siRNA target sequence for KIAA0372 (NM_014639.1,1127-1145).
gcttaggcattaaagcatt

SEQ ID NO: 302861 - DNA, 19 bp, Homo sapiens
  siRNA target sequence for KIAA0372 (NM_014639.1,1128-1146).
cttaggcattaaagcatta

SEQ ID NO: 302862 - DNA, 19 bp, Homo sapiens
  siRNA target sequence for KIAA0372 (NM_014639.1,1209-1227).
ctgcacaagtggatggtat

SEQ ID NO: 302863 - DNA, 19 bp, Homo sapiens
  siRNA target sequence for KIAA0372 (NM_014639.1,1212-1230).
cacaagtggatggtatcat

SEQ ID NO: 302864 - DNA, 19 bp, Homo sapiens
  siRNA target sequence for KIAA0372 (NM_014639.1,1240-1258).
gcccaagtcaaaatgcata

SEQ ID NO: 302865 - DNA, 19 bp, Homo sapiens
  siRNA target sequence for KIAA0372 (NM_014639.1,1318-1336).
gcgtctggtaacagtcttt

SEQ ID NO: 302866 - DNA, 19 bp, Homo sapiens
  siRNA target sequence for KIAA0372 (NM_014639.1,1320-1338).
gtctggtaacagtctttat

SEQ ID NO: 302867 - DNA, 19 bp, Homo sapiens
  siRNA target sequence for KIAA0372 (NM_014639.1,1322-1340).
ctggtaacagtctttatca

SEQ ID NO: 302868 - DNA, 19 bp, Homo sapiens
  siRNA target sequence for KIAA0372 (NM_014639.1,1324-1342).
ggtaacagtctttatcaga

SEQ ID NO: 302869 - DNA, 19 bp, Homo sapiens
  siRNA target sequence for KIAA0372 (NM_014639.1,1333-1351).
ctttatcagaggaatcttt

SEQ ID NO: 302870 - DNA, 19 bp, Homo sapiens
  siRNA target sequence for KIAA0372 (NM_014639.1,1412-1430).
caattcgtacgcttgatca

SEQ ID NO: 302871 - DNA, 19 bp, Homo sapiens
  siRNA target sequence for KIAA0372 (NM_014639.1,1417-1435).
cgtacgcttgatcagattt

SEQ ID NO: 302872 - DNA, 19 bp, Homo sapiens
  siRNA target sequence for KIAA0372 (NM_014639.1,1454-1472).
caggacttttggttctcaa

SEQ ID NO: 302873 - DNA, 19 bp, Homo sapiens
  siRNA target sequence for KIAA0372 (NM_014639.1,1476-1494).
cttggcctatcggaacaaa

SEQ ID NO: 302874 - DNA, 19 bp, Homo sapiens
  siRNA target sequence for KIAA0372 (NM_014639.1,1480-1498).
gcctatcggaacaaaggtt

SEQ ID NO: 302875 - DNA, 19 bp, Homo sapiens
  siRNA target sequence for KIAA0372 (NM_014639.1,1488-1506).
gaacaaaggttcatttgat

SEQ ID NO: 302876 - DNA, 19 bp, Homo sapiens
  siRNA target sequence for KIAA0372 (NM_014639.1,1545-1563).
ccctgacctagctgaagtt

SEQ ID NO: 302877 - DNA, 19 bp, Homo sapiens
  siRNA target sequence for KIAA0372 (NM_014639.1,1590-1608).
caccaaaaaggactatcta

SEQ ID NO: 302878 - DNA, 19 bp, Homo sapiens
  siRNA target sequence for KIAA0372 (NM_014639.1,1649-1667).
ccgaagttgcagaatatca

SEQ ID NO: 302879 - DNA, 19 bp, Homo sapiens
  siRNA target sequence for KIAA0372 (NM_014639.1,1650-1668).
cgaagttgcagaatatcat

SEQ ID NO: 302880 - DNA, 19 bp, Homo sapiens
  siRNA target sequence for KIAA0372 (NM_014639.1,1753-1771).
gcaagactggatacatata

SEQ ID NO: 302881 - DNA, 19 bp, Homo sapiens
  siRNA target sequence for KIAA0372 (NM_014639.1,1754-1772).
caagactggatacatatat

SEQ ID NO: 302882 - DNA, 19 bp, Homo sapiens
  siRNA target sequence for KIAA0372 (NM_014639.1,1830-1848).
cagagctcgtggatgttat

SEQ ID NO: 302883 - DNA, 19 bp, Homo sapiens
  siRNA target sequence for KIAA0372 (NM_014639.1,1834-1852).
gctcgtggatgttatagga

SEQ ID NO: 302884 - DNA, 19 bp, Homo sapiens
  siRNA target sequence for KIAA0372 (NM_014639.1,1835-1853).
ctcgtggatgttataggaa

SEQ ID NO: 302885 - DNA, 19 bp, Homo sapiens
  siRNA target sequence for KIAA0372 (NM_014639.1,1895-1913).
cagcagttgacctaagtgt

SEQ ID NO: 302886 - DNA, 19 bp, Homo sapiens
  siRNA target sequence for KIAA0372 (NM_014639.1,1997-2015).
ggcttaggcgaggactata

SEQ ID NO: 302887 - DNA, 19 bp, Homo sapiens
  siRNA target sequence for KIAA0372 (NM_014639.1,1999-2017).
cttaggcgaggactatact

SEQ ID NO: 302888 - DNA, 19 bp, Homo sapiens
  siRNA target sequence for KIAA0372 (NM_014639.1,2003-2021).
ggcgaggactatactattt

SEQ ID NO: 302889 - DNA, 19 bp, Homo sapiens
  siRNA target sequence for KIAA0372 (NM_014639.1,2005-2023).
cgaggactatactatttga

SEQ ID NO: 302890 - DNA, 19 bp, Homo sapiens
  siRNA target sequence for KIAA0372 (NM_014639.1,2006-2024).
gaggactatactatttgaa

SEQ ID NO: 302891 - DNA, 19 bp, Homo sapiens
  siRNA target sequence for KIAA0372 (NM_014639.1,2053-2071).
gatttacaggcagcattaa

SEQ ID NO: 302892 - DNA, 19 bp, Homo sapiens
  siRNA target sequence for KIAA0372 (NM_014639.1,2080-2098).
ccaaaggacttcaattgtt

SEQ ID NO: 302893 - DNA, 19 bp, Homo sapiens
  siRNA target sequence for KIAA0372 (NM_014639.1,2091-2109).
caattgttgggaatcgtta

SEQ ID NO: 302894 - DNA, 19 bp, Homo sapiens
  siRNA target sequence for KIAA0372 (NM_014639.1,2105-2123).
cgttaggagaagcatactt

SEQ ID NO: 302895 - DNA, 19 bp, Homo sapiens
  siRNA target sequence for KIAA0372 (NM_014639.1,2106-2124).
gttaggagaagcatactta

SEQ ID NO: 302896 - DNA, 19 bp, Homo sapiens
  siRNA target sequence for KIAA0372 (NM_014639.1,2147-2165).
ccttgaagtccttcacaaa

SEQ ID NO: 302897 - DNA, 19 bp, Homo sapiens
  siRNA target sequence for KIAA0372 (NM_014639.1,2148-2166).
cttgaagtccttcacaaaa

SEQ ID NO: 302898 - DNA, 19 bp, Homo sapiens
  siRNA target sequence for KIAA0372 (NM_014639.1,2175-2193).
gctgaacccagaatccata

SEQ ID NO: 302899 - DNA, 19 bp, Homo sapiens
  siRNA target sequence for KIAA0372 (NM_014639.1,2176-2194).
ctgaacccagaatccatat

SEQ ID NO: 302900 - DNA, 19 bp, Homo sapiens
  siRNA target sequence for KIAA0372 (NM_014639.1,2181-2199).
cccagaatccatatacagt

SEQ ID NO: 302901 - DNA, 19 bp, Homo sapiens
  siRNA target sequence for KIAA0372 (NM_014639.1,2223-2241).
gcaaatcctaggcaaatat

SEQ ID NO: 302902 - DNA, 19 bp, Homo sapiens
  siRNA target sequence for KIAA0372 (NM_014639.1,2224-2242).
caaatcctaggcaaatata

SEQ ID NO: 302903 - DNA, 19 bp, Homo sapiens
  siRNA target sequence for KIAA0372 (NM_014639.1,2254-2272).
gctcaataccagatgatca

SEQ ID NO: 302904 - DNA, 19 bp, Homo sapiens
  siRNA target sequence for KIAA0372 (NM_014639.1,2314-2332).
ggtgaatgccatcttatga

SEQ ID NO: 302905 - DNA, 19 bp, Homo sapiens
  siRNA target sequence for KIAA0372 (NM_014639.1,2315-2333).
gtgaatgccatcttatgat

SEQ ID NO: 302906 - DNA, 19 bp, Homo sapiens
  siRNA target sequence for KIAA0372 (NM_014639.1,2342-2360).
cagctctagttgattatct

SEQ ID NO: 302907 - DNA, 19 bp, Homo sapiens
  siRNA target sequence for KIAA0372 (NM_014639.1,2371-2389).
gccgtagactacatagaaa

SEQ ID NO: 302908 - DNA, 19 bp, Homo sapiens
  siRNA target sequence for KIAA0372 (NM_014639.1,2372-2390).
ccgtagactacatagaaaa

SEQ ID NO: 302909 - DNA, 19 bp, Homo sapiens
  siRNA target sequence for KIAA0372 (NM_014639.1,2485-2503).
gtcgcaccatctaaagtga

SEQ ID NO: 302910 - DNA, 19 bp, Homo sapiens
  siRNA target sequence for KIAA0372 (NM_014639.1,2613-2631).
gatgtctacatctaataca

SEQ ID NO: 302911 - DNA, 19 bp, Homo sapiens
  siRNA target sequence for KIAA0372 (NM_014639.1,2718-2736).
ggagaaatctttacattgt

SEQ ID NO: 302912 - DNA, 19 bp, Homo sapiens
  siRNA target sequence for KIAA0372 (NM_014639.1,2751-2769).
gagactcgacagtaataat

SEQ ID NO: 302913 - DNA, 19 bp, Homo sapiens
  siRNA target sequence for KIAA0372 (NM_014639.1,2753-2771).
gactcgacagtaataatca

SEQ ID NO: 302914 - DNA, 19 bp, Homo sapiens
  siRNA target sequence for KIAA0372 (NM_014639.1,2839-2857).
cactgtttcatcaaatcaa

SEQ ID NO: 302915 - DNA, 19 bp, Homo sapiens
  siRNA target sequence for KIAA0372 (NM_014639.1,2855-2873).
caatccagtcagaacaaat

SEQ ID NO: 302916 - DNA, 19 bp, Homo sapiens
  siRNA target sequence for KIAA0372 (NM_014639.1,2859-2877).
ccagtcagaacaaattaat

SEQ ID NO: 302917 - DNA, 19 bp, Homo sapiens
  siRNA target sequence for KIAA0372 (NM_014639.1,2862-2880).
gtcagaacaaattaatgct

SEQ ID NO: 302918 - DNA, 19 bp, Homo sapiens
  siRNA target sequence for KIAA0372 (NM_014639.1,2891-2909).
ccaacttgggagtgttata

SEQ ID NO: 302919 - DNA, 19 bp, Homo sapiens
  siRNA target sequence for KIAA0372 (NM_014639.1,2935-2953).
gctcatgaggctttcaaaa

SEQ ID NO: 302920 - DNA, 19 bp, Homo sapiens
  siRNA target sequence for KIAA0372 (NM_014639.1,2936-2954).
ctcatgaggctttcaaaat

SEQ ID NO: 302921 - DNA, 19 bp, Homo sapiens
  siRNA target sequence for KIAA0372 (NM_014639.1,3011-3029).
ctgaggcagttggaagtta

SEQ ID NO: 302922 - DNA, 19 bp, Homo sapiens
  siRNA target sequence for KIAA0372 (NM_014639.1,3016-3034).
gcagttggaagttatgaca

SEQ ID NO: 302923 - DNA, 19 bp, Homo sapiens
  siRNA target sequence for KIAA0372 (NM_014639.1,3048-3066).
caggcacactacagaacta

SEQ ID NO: 302924 - DNA, 19 bp, Homo sapiens
  siRNA target sequence for KIAA0372 (NM_014639.1,3050-3068).
ggcacactacagaactaaa

SEQ ID NO: 302925 - DNA, 19 bp, Homo sapiens
  siRNA target sequence for KIAA0372 (NM_014639.1,3051-3069).
gcacactacagaactaaat

SEQ ID NO: 302926 - DNA, 19 bp, Homo sapiens
  siRNA target sequence for KIAA0372 (NM_014639.1,3143-3161).
cagagctgtaccagtacaa

SEQ ID NO: 302927 - DNA, 19 bp, Homo sapiens
  siRNA target sequence for KIAA0372 (NM_014639.1,3165-3183).
cctccagatgaatgctatt

SEQ ID NO: 302928 - DNA, 19 bp, Homo sapiens
  siRNA target sequence for KIAA0372 (NM_014639.1,3236-3254).
ccccagctttcacaatgtt

SEQ ID NO: 302929 - DNA, 19 bp, Homo sapiens
  siRNA target sequence for KIAA0372 (NM_014639.1,3246-3264).
cacaatgttgggttactta

SEQ ID NO: 302930 - DNA, 19 bp, Homo sapiens
  siRNA target sequence for KIAA0372 (NM_014639.1,3248-3266).
caatgttgggttacttaaa

SEQ ID NO: 302931 - DNA, 19 bp, Homo sapiens
  siRNA target sequence for KIAA0372 (NM_014639.1,3252-3270).
gttgggttacttaaacgaa

SEQ ID NO: 302932 - DNA, 19 bp, Homo sapiens
  siRNA target sequence for KIAA0372 (NM_014639.1,3257-3275).
gttacttaaacgaacatct

SEQ ID NO: 302933 - DNA, 19 bp, Homo sapiens
  siRNA target sequence for KIAA0372 (NM_014639.1,3261-3279).
cttaaacgaacatctacaa

SEQ ID NO: 302934 - DNA, 19 bp, Homo sapiens
  siRNA target sequence for KIAA0372 (NM_014639.1,3267-3285).
cgaacatctacaactgaaa

SEQ ID NO: 302935 - DNA, 19 bp, Homo sapiens
  siRNA target sequence for KIAA0372 (NM_014639.1,3307-3325).
caaagggcaattttgttgt

SEQ ID NO: 302936 - DNA, 19 bp, Homo sapiens
  siRNA target sequence for KIAA0372 (NM_014639.1,3368-3386).
gaaattacggcagattgtt

SEQ ID NO: 302937 - DNA, 19 bp, Homo sapiens
  siRNA target sequence for KIAA0372 (NM_014639.1,3393-3411).
cactggtgaatatgataaa

SEQ ID NO: 302938 - DNA, 19 bp, Homo sapiens
  siRNA target sequence for KIAA0372 (NM_014639.1,3398-3416).
gtgaatatgataaagctat

SEQ ID NO: 302939 - DNA, 19 bp, Homo sapiens
  siRNA target sequence for KIAA0372 (NM_014639.1,3412-3430).
gctatccaggcttttaagt

SEQ ID NO: 302940 - DNA, 19 bp, Homo sapiens
  siRNA target sequence for KIAA0372 (NM_014639.1,3431-3449).
caacaccccttgaagtgtt

SEQ ID NO: 302941 - DNA, 19 bp, Homo sapiens
  siRNA target sequence for KIAA0372 (NM_014639.1,3434-3452).
caccccttgaagtgttaga

SEQ ID NO: 302942 - DNA, 19 bp, Homo sapiens
  siRNA target sequence for KIAA0372 (NM_014639.1,3454-3472).
gacatcataggttttgcat

SEQ ID NO: 302943 - DNA, 19 bp, Homo sapiens
  siRNA target sequence for KIAA0372 (NM_014639.1,3550-3568).
caagacaaagcccatatct

SEQ ID NO: 302944 - DNA, 19 bp, Homo sapiens
  siRNA target sequence for KIAA0372 (NM_014639.1,3553-3571).
gacaaagcccatatcttga

SEQ ID NO: 302945 - DNA, 19 bp, Homo sapiens
  siRNA target sequence for KIAA0372 (NM_014639.1,3572-3590).
cagctctggcaataactga

SEQ ID NO: 302946 - DNA, 19 bp, Homo sapiens
  siRNA target sequence for KIAA0372 (NM_014639.1,3577-3595).
ctggcaataactgaatata

SEQ ID NO: 302947 - DNA, 19 bp, Homo sapiens
  siRNA target sequence for KIAA0372 (NM_014639.1,3608-3626).
cggatgtagccaagacatt

SEQ ID NO: 302948 - DNA, 19 bp, Homo sapiens
  siRNA target sequence for KIAA0372 (NM_014639.1,3777-3795).
gaggtgccttcttacatca

SEQ ID NO: 302949 - DNA, 19 bp, Homo sapiens
  siRNA target sequence for KIAA0372 (NM_014639.1,3908-3926).
cacagtatgctcaacgaaa

SEQ ID NO: 302950 - DNA, 19 bp, Homo sapiens
  siRNA target sequence for KIAA0372 (NM_014639.1,3912-3930).
gtatgctcaacgaaatgca

SEQ ID NO: 302951 - DNA, 19 bp, Homo sapiens
  siRNA target sequence for KIAA0372 (NM_014639.1,4132-4150).
gcctgtcacgctgatgata

SEQ ID NO: 302952 - DNA, 19 bp, Homo sapiens
  siRNA target sequence for KIAA0372 (NM_014639.1,4133-4151).
cctgtcacgctgatgataa

SEQ ID NO: 302953 - DNA, 19 bp, Homo sapiens
  siRNA target sequence for KIAA0372 (NM_014639.1,4136-4154).
gtcacgctgatgataaact

SEQ ID NO: 302954 - DNA, 19 bp, Homo sapiens
  siRNA target sequence for KIAA0372 (NM_014639.1,4147-4165).
gataaactggccttagtga

SEQ ID NO: 302955 - DNA, 19 bp, Homo sapiens
  siRNA target sequence for KIAA0372 (NM_014639.1,4176-4194).
gccaaagaggatagattta

SEQ ID NO: 302956 - DNA, 19 bp, Homo sapiens
  siRNA target sequence for KIAA0372 (NM_014639.1,4177-4195).
ccaaagaggatagatttat

SEQ ID NO: 302957 - DNA, 19 bp, Homo sapiens
  siRNA target sequence for KIAA0372 (NM_014639.1,4213-4231).
gctgtttctgcttcaatta

SEQ ID NO: 302958 - DNA, 19 bp, Homo sapiens
  siRNA target sequence for KIAA0372 (NM_014639.1,4214-4232).
ctgtttctgcttcaattaa

SEQ ID NO: 302959 - DNA, 19 bp, Homo sapiens
  siRNA target sequence for KIAA0372 (NM_014639.1,4292-4310).
ctgtcactggtctaataga

SEQ ID NO: 302960 - DNA, 19 bp, Homo sapiens
  siRNA target sequence for KIAA0372 (NM_014639.1,4294-4312).
gtcactggtctaatagaca

SEQ ID NO: 302961 - DNA, 19 bp, Homo sapiens
  siRNA target sequence for KIAA0372 (NM_014639.1,4369-4387).
gatcagccagccgttatct

SEQ ID NO: 302962 - DNA, 19 bp, Homo sapiens
  siRNA target sequence for KIAA0372 (NM_014639.1,4375-4393).
ccagccgttatcttacttt

SEQ ID NO: 302963 - DNA, 19 bp, Homo sapiens
  siRNA target sequence for KIAA0372 (NM_014639.1,4376-4394).
cagccgttatcttactttt

SEQ ID NO: 302964 - DNA, 19 bp, Homo sapiens
  siRNA target sequence for KIAA0372 (NM_014639.1,4378-4396).
gccgttatcttacttttga

SEQ ID NO: 302965 - DNA, 19 bp, Homo sapiens
  siRNA target sequence for KIAA0372 (NM_014639.1,4415-4433).
cactcctggagtcacaaaa

SEQ ID NO: 302966 - DNA, 19 bp, Homo sapiens
  siRNA target sequence for KIAA0372 (NM_014639.1,4512-4530).
gctggcacatgtgtatcaa

SEQ ID NO: 302967 - DNA, 19 bp, Homo sapiens
  siRNA target sequence for KIAA0372 (NM_014639.1,4513-4531).
ctggcacatgtgtatcaat

SEQ ID NO: 302968 - DNA, 19 bp, Homo sapiens
  siRNA target sequence for KIAA0372 (NM_014639.1,4626-4644).
gttgagactagcactactt

SEQ ID NO: 302969 - DNA, 19 bp, Homo sapiens
  siRNA target sequence for KIAA0372 (NM_014639.1,4631-4649).
gactagcactacttgcatt

SEQ ID NO: 302970 - DNA, 19 bp, Homo sapiens
  siRNA target sequence for KIAA0372 (NM_014639.1,4633-4651).
ctagcactacttgcattaa

SEQ ID NO: 302971 - DNA, 19 bp, Homo sapiens
  siRNA target sequence for KIAA0372 (NM_014639.1,4654-4672).
gtctgtatggctaacattt

SEQ ID NO: 302972 - DNA, 19 bp, Homo sapiens
  siRNA target sequence for KIAA0372 (NM_014639.1,4664-4682).
ctaacatttccaatgatca

SEQ ID NO: 302973 - DNA, 19 bp, Homo sapiens
  siRNA target sequence for KIAA0372 (NM_014639.1,4685-4703).
ggccatctttggttcaaga

SEQ ID NO: 302974 - DNA, 19 bp, Homo sapiens
  siRNA target sequence for KIAA0372 (NM_014639.1,4695-4713).
ggttcaagaggctacaact

SEQ ID NO: 302975 - DNA, 19 bp, Homo sapiens
  siRNA target sequence for KIAA0372 (NM_014639.1,4793-4811).
gagagacacggcgtctttt

SEQ ID NO: 302976 - DNA, 19 bp, Homo sapiens
  siRNA target sequence for KIAA0372 (NM_014639.1,4797-4815).
gacacggcgtcttttggaa

SEQ ID NO: 302977 - DNA, 19 bp, Homo sapiens
  siRNA target sequence for KIAA0372 (NM_014639.1,4869-4887).
gtacctactgagacactta

SEQ ID NO: 302978 - DNA, 19 bp, Homo sapiens
  siRNA target sequence for KIAA0372 (NM_014639.1,4872-4890).
cctactgagacacttatat

SEQ ID NO: 302979 - DNA, 19 bp, Homo sapiens
  siRNA target sequence for KIAA0372 (NM_014639.1,4935-4953).
caaaactcatggagataca

SEQ ID NO: 302980 - DNA, 19 bp, Homo sapiens
  siRNA target sequence for KIAA0372 (NM_014639.1,4963-4981).
gaactgaatcagagattgt

SEQ ID NO: 302981 - DNA, 19 bp, Homo sapiens
  siRNA target sequence for LOC57795 (NM_021165.1,325-343).
gtgtggcactcggtttaga

SEQ ID NO: 302982 - DNA, 19 bp, Homo sapiens
  siRNA target sequence for LOC57795 (NM_021165.1,561-579).
ccaccaggtacaggattta

SEQ ID NO: 302983 - DNA, 19 bp, Homo sapiens
  siRNA target sequence for LOC57795 (NM_021165.1,562-580).
caccaggtacaggatttat

SEQ ID NO: 302984 - DNA, 19 bp, Homo sapiens
  siRNA target sequence for LOC57795 (NM_021165.1,593-611).
cgttggaaggtgaacaact

SEQ ID NO: 302985 - DNA, 19 bp, Homo sapiens
  siRNA target sequence for LOC57795 (NM_021165.1,651-669).
ctcttgccccagagtttat

SEQ ID NO: 302986 - DNA, 19 bp, Homo sapiens
  siRNA target sequence for LOC57795 (NM_021165.1,704-722).
ctgcaacaggttacagaaa

SEQ ID NO: 302987 - DNA, 19 bp, Homo sapiens
  siRNA target sequence for LOC57795 (NM_021165.1,736-754).
gtacggcactcatttctta

SEQ ID NO: 302988 - DNA, 19 bp, Homo sapiens
  siRNA target sequence for LOC57795 (NM_021165.1,739-757).
cggcactcatttcttactt

SEQ ID NO: 302989 - DNA, 19 bp, Homo sapiens
  siRNA target sequence for LOC57795 (NM_021165.1,776-794).
gaagagtccctgaccattt

SEQ ID NO: 302990 - DNA, 19 bp, Homo sapiens
  siRNA target sequence for LOC57795 (NM_021165.1,942-960).
gacggctgcaccatatcca

SEQ ID NO: 302991 - DNA, 19 bp, Homo sapiens
  siRNA target sequence for LOC57795 (NM_021165.1,1062-1080).
gtccagagaacaaagtaca
